(19) United States
(12) Patent Application Publication
(10) Pub. No.: US 2015/0011416 A1
(43) Pub. Date: Jan. 8, 2015

(54) MULTIMODAL PCR TARGET DETECTION

(71) Applicant: Qiagen Mansfield, Inc, Mansfield, MA (US)

(72) Inventors: Jason Lei, Brentwood, TN (US); Lilly l. Kong, Covina, CA (US); Kiran Madanahally Divakar, Shrewsbury, MA (US)

(21) Appl. No.: 14/379,615

(22) PCT Filed: Feb. 22, 2013
(86) PCT No.: PCT/US2013/027383

§ 371 Date: Aug. 19, 2014

Related U.S. Application Data
(60) Provisional application No. 61/602,244, filed on Feb. 23, 2012.
(60) Provisional application No. 61/602,246, filed on Feb. 23, 2012.
(60) Provisional application No. 61/671,314, filed on Jul. 13, 2012.
(60) Provisional application No. 61/671,315, filed on Jul. 13, 2012.

(51) Int. Cl. C12Q 1/68

(52) U.S. Cl. CPC C12Q 1/686
USPC 506/9; 435/6.12; 435/6.11

(57) ABSTRACT

The technology described herein relates to detecting the presence of one or more specific nucleic acids, e.g. determining the genotype of one or more allelic target site loci.

### CROSS-REFERENCE TO RELATED APPLICATIONS

[0001] This application claims benefit under 35 U.S.C. §119(e) of U.S. Provisional Application Nos. 61/602,246 and 61/602,244 filed Feb. 23, 2012 and 61/671,315 and 61/671,314 filed Jul. 13, 2012, the contents of each of which are incorporated herein by reference in their entirety.

### SEQUENCE LISTING

[0002] The instant application contains a Sequence Listing which has been submitted in ASCII format via EFS-Web and is hereby incorporated by reference in its entirety. Said ASCII copy, created on Feb. 22, 2013, is named 046264-072554-PCT_SL.txt and is 14,473,728 bytes in size.

### FIELD OF THE INVENTION

[0003] The claimed invention relates to methods of detecting the presence of one or more specific nucleic acids. In some embodiments, the methods determine the genotype of one or more allelic target site loci. In some embodiments, the methods relate to multiplex PCR.

### BACKGROUND

[0004] Current PCR-based methods for detecting the presence of single nucleotide polymorphisms (SNPs) and/or mutations in a sample suffer from background signal. For example, one common approach for detection of SNPs is Amplification Refractory Mutation System (ARMS). The allele-specific primers utilized in ARMS are designed to comprise only target-specific sequences with variation at the 3′ terminal nucleotide such that only the primer whose 3′ terminal nucleotide is complementary to a given template can be extended, thereby identifying the nucleotide at the SNP site. Such primers can misprime due to non-specific interactions with non-target sequences, i.e. the ARMS approach is “leaky.” Additionally, when ARMS is multiplexed and at least one amplicon accumulates to high levels, primer interaction or “crosstalk” occurs.

[0005] Reactions utilizing nested primers have been attempted. In these approaches, a first set of non-allele specific primers is used to amplify all alleles of a target locus present in a sample, using a first annealing temperature. A second set of allele-specific primers is then used to amplify the target at a second, lower annealing temperature. This approach can suffer from the same issues of leakiness and crosstalk as described for the ARMS approach (Tabone et al. BMC Genomics 2009 10:580).

### SUMMARY OF THE INVENTION

[0006] The methods and compositions of the invention described herein permit the determination of the presence of one or more target polynucleotides in a nucleic acid sample. Various aspects of the invention are based upon the use of at least one dual domain primer (or truncated dual domain primer) in a PCR amplification regimen having at least two phases which are differentiated by having different annealing temperatures. During the first phase of the PCR amplification regimen, a 3′ core region of the dual domain primer (or truncated dual domain primer) specifically anneals to its target and primer extension occurs, creating amplification products comprising the target polynucleotide and/or its complement. These amplification products will contain “tag” sequences at at least one end of the product, the tags comprising the sequence of a 5′ tail region of the at least one dual domain primer (or truncated dual domain primer). In the second phase of the PCR amplification regimen, the annealing temperature is raised, such that sequence complementary to both the 5′ tail region and 3′ core region is required for annealing of the dual domain primer (or truncated dual domain primer) to a target, thus preventing the primer from mispriming to off-target polynucleotides.

[0007] The methods and compositions described herein can be used to reduce amplification of off-target polynucleotides and to improve the signal-to-noise ratio of a PCR amplification regimen where such parameters are of concern. In some embodiments, the methods and compositions described herein can be used to reduce amplification of off-target polynucleotides and to improve the signal-to-noise ratio of a PCR amplification regimen designed to detect alleles of one or more SNPs.

[0008] One aspect of the invention described herein relates to a method for determining the presence of one or more target polynucleotides, the method comprising; performing a PCR amplification regimen comprising cycles of strand separation, primer annealing, and primer extension on a reaction mixture comprising a nucleic acid sample and a set of oligonucleotide primers specific for each target polynucleotide; wherein each set of oligonucleotide primers comprises a first subset of at least one truncated dual domain forward primer and a second subset of at least one reverse primer; wherein each truncated dual domain primer of a set comprises a 5′ tail region that differs from the 5′ tail region on other truncated dual domain primers in the set and a 3′ core region complementary to a sequence on one strand of a double-stranded nucleic acid comprising the target; wherein for each truncated dual domain primer, the 3′ core substantially anneals to its complementary target site sequence at a first annealing temperature, and the sequence comprised by the 5′ tail and 3′ core region substantially anneals to its complement at a second annealing temperature, the second annealing temperature being higher than the first annealing temperature, such that at the second annealing temperature the 3′ core of the truncated dual domain primer cannot substantially anneal to a template molecule that does not also have the complement of the truncated dual domain primer's 5′ tail sequence; wherein for each truncated dual domain primer of a primer set: the 5′ tail sequence does not have any homology to the target sequence; and the 5′ tail sequence has 6 or fewer contiguous homologous bases relative to any other 5′ tail sequence of the truncated dual domain primer set; wherein the PCR amplification regimen comprises first and second phases, the first phase comprising annealing at the first annealing temperature for a first set of cycles, and; the second phase comprising annealing at the second annealing temperature for a second set of cycles; and detecting an amplified product for each target polynucleotide, wherein the detecting indicates the presence of the target polynucleotide.

[0009] In some embodiments, a reverse primer comprises a dual domain primer. In some embodiments, a reverse primer comprises a truncated dual domain primer. In some embodiments, a reverse primer comprises an amplifying primer.

[0010] In some embodiments, the set of primers comprises at least one dual domain forward primer; wherein each dual domain primer of a set comprises a 5′ tail region that differs from the 5′ tail region of other dual domain primers in the set, a 3′ core region complementary to a sequence on one strand of a double-stranded nucleic acid comprising said target, and a terminal nucleotide complementary to one of the variant nucleotides occurring at said target site; wherein for each dual domain primer, the 3′ core substantially anneals to its complementary target site sequence at a first annealing temperature, and the sequence comprised by the 5′ tail and 3′ core region substantially anneals to its complement at a second annealing temperature, the second annealing temperature being higher than the first annealing temperature, such that at said second annealing temperature said 3′ core of said dual domain primer cannot substantially anneal to a template molecule that does not also have the complement of the dual domain primer's 5′ tail sequence; and wherein for each truncated dual domain primer of a primer set: the 5′ tail sequence does not have any homology to the target sequence; and the 5′ tail sequence has 6 or fewer contiguous homologous bases relative to any other 5′ tail sequence of the dual domain or truncated dual domain primer set.

[0011] In some embodiments, the target polynucleotides are selected from the group consisting of: polynucleotides comprising SNPs; polynucleotides comprising alleles of SNPs; protein coding DNA or RNA polynucleotides; non-protein coding DNA or RNA polynucleotides; polynucleotides comprising mutations; polynucleotides comprising deletions; and polynucleotides comprising insertions.

[0012] In some embodiments, a plurality of target polynucleotides are detected in a single reaction. In some embodiments, the target polynucleotides comprise at least two polynucleotides selected from the group consisting of: polynucleotides comprising SNPs; polynucleotides comprising alleles of SNPs; protein coding DNA or RNA polynucleotides; non-protein coding DNA or RNA polynucleotides; polynucleotides comprising mutations; polynucleotides comprising deletions; and polynucleotides comprising insertions.

[0013] In some embodiments, the target polynucleotides comprise at least one polynucleotide selected from the group consisting of: polynucleotides comprising SNPs and polynucleotides comprising alleles of SNPs; and at least one polynucleotide selected from the group consisting of: protein coding DNA or RNA polynucleotides; non-protein coding DNA or RNA polynucleotides; polynucleotides comprising mutations; polynucleotides comprising deletions; and polynucleotides comprising insertions.

[0014] In some embodiments, at least one of the target polynucleotides comprises a SNP and wherein the method genotypes the nucleotide at the SNP. In some embodiments, a dual domain or truncated dual domain primers specific for each of 2 or more alleles of a target SNP are present in the same reaction. In some embodiments, one dual domain or truncated dual domain primer of a set is specific for the predominant allele of the target SNP.

[0015] In some embodiments, the dual domain or truncated dual domain primers specific for each of 2 or more alleles or sequence variants of a target nucleotide are present in the same reaction. In some embodiments, one dual domain or truncated dual domain primer of a set is specific for the predominant allele or variant allele of the target polynucleotide.

[0016] In some embodiments, the amplified products of two or more members of a primer subset can be distinguished. In some embodiments, the amplified products of two or more members of a primer subset are distinguished by being of distinct sizes. In some embodiments, the amplified products of two or more members of a primer subset are distinguished by being labeled with different detectable labels. In some embodiments, the products of two or more members of a primer subset are distinguished by sequencing the products. In some embodiments, the products of two or more members of a primer subset are distinguished by oligonucleotide hybridization. In some embodiments, the products of two or more members of a primer subset are distinguished by melting curve analysis of the amplified products.

[0017] In some embodiments, the core sequence is 10 to 40 nucleotides in length. In some embodiments, the core sequence is 11 to 20 nucleotides in length.

[0018] In some embodiments, the first phase comprises from 1 to 10 cycles. In some embodiments, the first phase comprises from 3 to 5 cycles.

[0019] In some embodiments, each 5′ tail sequence of a set has fewer than 3 contiguous homologous bases relative to the other 5′ tail sequences of the set. In some embodiments, each 5′ tail sequence of a set has fewer than 2 contiguous homologous bases relative to the other 5′ tail sequences of the set. In some embodiments, the 5′ tail sequence is from 1 to 150 nucleotides in length. In some embodiments, the 5′ tail sequence is from 1 to 50 nucleotides in length.

[0020] In some embodiments, the second annealing temperature is at least 4° C. higher than the first annealing temperature. In some embodiments, the dual domain or truncated dual domain primers present in a reaction have Tₘ values for their respective 3′ core regions that vary by no more than 8° C. from each other.

[0021] In one aspect, the invention described herein relates to a composition for determining the presence of one or more target polynucleotides, comprising; at least one set of oligonucleotide primers specific for each target polynucleotide; wherein each set of oligonucleotide primers comprises a first subset of at least one truncated dual domain forward primer and a second subset of at least one reverse primer; wherein each truncated dual domain primer of a set comprises a 5′ tail region that differs from the 5′ tail region on other truncated dual domain primers in the set and a 3′ core region complementary to a sequence on one strand of a double-stranded nucleic acid comprising the target; wherein for each truncated dual domain primer, the 3′ core substantially anneals to its complementary target site sequence at a first annealing temperature, and the sequence comprised by the 5′ tail and 3′core region substantially anneals to its complement at a second annealing temperature, the second annealing temperature being higher than the first annealing temperature, such that at the second annealing temperature the 3′ core of the truncated dual domain primer cannot substantially anneal to a template molecule that does not also have the complement of the primer's 5′ tail sequence; wherein for each member of the truncated dual domain primer set: the 5′ tail sequence does not have any homology to the target sequence; and the 5′ tail sequence has 6 or fewer contiguous homologous bases relative to the other 5′ tail sequences of the truncated dual domain primer set.

[0022] In some embodiments, the composition can further comprise a nucleic acid sample.

[0023] In some embodiments, at least one forward primer of the composition comprises a dual domain primer; wherein each dual domain primer of a set comprises a 5′ tail region that differs from the 5′ tail region on other dual domain primers in the set, a 3′ core region complementary to a sequence on one strand of a double-stranded nucleic acid comprising said target, and a terminal nucleotide complementary to one of the variant nucleotides occurring at said target site; wherein for each dual domain primer, the 3′ core substantially anneals to its complementary target site sequence at a first annealing temperature, and the sequence comprised by the 5′ tail and 3′ core region substantially anneals to its complement at a second annealing temperature, the second annealing temperature being higher than the first annealing temperature, such that at said second annealing temperature said 3′ core of said dual domain primer cannot substantially anneal to a template molecule that does not also have the complement of the primer's 5′ tail sequence; wherein for each member of said dual domain primer set: the 5′ tail sequence does not have any homology to the target sequence; and the 5′ tail sequence has 6 or fewer contiguous homologous bases relative to the other 5′ tail sequences of the dual domain primer set.

[0024] In some embodiments, a reverse primer comprises a dual domain primer. In some embodiments, a reverse primer comprises a truncated dual domain primer. In some embodiments, a reverse primer comprises an amplifying primer.

[0025] In some embodiments, the target polynucleotides are selected from the group consisting of polynucleotides comprising SNPs; polynucleotides comprising alleles of SNPs; protein coding DNA or RNA polynucleotides; non-protein coding DNA or RNA polynucleotides; polynucleotides comprising mutations; polynucleotides comprising deletions; and polynucleotides comprising insertions. In some embodiments, the target polynucleotides comprise at least two polynucleotides selected from the group consisting of: polynucleotides comprising SNPs; polynucleotides comprising alleles of SNPs; protein coding DNA or RNA polynucleotides; non-protein coding DNA or RNA polynucleotides; polynucleotides comprising mutations; polynucleotides comprising deletions; and polynucleotides comprising insertions. In some embodiments, the target polynucleotides comprise at least one polynucleotide selected from the group consisting of: polynucleotides comprising SNPs and polynucleotides comprising alleles of SNPs; and at least one polynucleotide selected from the group consisting of: protein coding DNA or RNA polynucleotides; non-protein coding DNA or RNA polynucleotides; polynucleotides comprising mutations; polynucleotides comprising deletions; and polynucleotides comprising insertions.

[0026] In some embodiments, a subset of dual domain forward primers comprises primers specific for each of 2 or more alleles of a target SNP. In some embodiments, one dual domain forward primer of a set is specific for the predominant allele of the target SNP.

[0027] In some embodiments, the subset of dual domain or truncated dual domain forward primers comprises primers specific for each of 2 or more alleles or sequence variants of a target nucleotide. In some embodiments, one dual domain or truncated dual domain forward primer of a set is specific for the predominant allele or variant allele of the target polynucleotide.

[0028] In some embodiments, the core sequence is 10 to 40 nucleotides in length. In some embodiments, the core sequence is 11 to 20 nucleotides in length.

[0029] In some embodiments, each 5′ tail sequence of a set has fewer than 3 contiguous homologous bases relative to the other 5′ tail sequences of the set. In some embodiments, each 5′ tail sequence of a set has fewer than 2 contiguous homologous bases relative to the other 5′ tail sequences of the set. In some embodiments, the 5′ tail sequence is from 1 to 150 nucleotides in length. In some embodiments, the 5′ tail sequence is from 1 to 50 nucleotides in length.

[0030] In some embodiments, the second annealing temperature is at least 4° C. higher than the first annealing temperature. In some embodiments, the dual domain primers present in a reaction have Tₘ values for their respective 3′ core regions that vary by no more than 8° C. from each other.

[0031] One aspect of the invention described herein relates to a method for determining the presence of one or more target polynucleotides, the method comprising; performing a PCR amplification regimen comprising cycles of strand separation, primer annealing, and primer extension on a reaction mixture comprising a nucleic acid sample and a set of oligonucleotide primers specific for each target polynucleotide; wherein each set of oligonucleotide primers comprises a first subset of at least one truncated dual domain forward primer and a second subset of at least one reverse primer; wherein each truncated dual domain primer of a set comprises a 5′ tail region that differs from the 5′ tail region on other truncated dual domain primers in the set and a 3′ core region complementary to a sequence on one strand of a double-stranded nucleic acid comprising the target; wherein for each truncated dual domain primer, the 3′ core substantially anneals to its complementary target site sequence at a first annealing temperature, and the sequence comprised by the 5′ tail and 3′ core region substantially anneals to its complement at a second annealing temperature, the second annealing temperature being higher than the first annealing temperature, such that at the second annealing temperature the 3′ core of the truncated dual domain primer cannot substantially anneal to a template molecule that does not also have the complement of the truncated dual domain primer's 5′ tail sequence; wherein for each truncated dual domain primer of a primer set: the 5′ tail sequence does not have any homology to the target sequence; and the 5′ tail sequence has 6 or fewer contiguous homologous bases relative to any other 5′ tail sequence of the truncated dual domain primer set; wherein the PCR amplification regimen comprises first and second phases, the first phase comprising annealing at the first annealing temperature for a first set of cycles, and; the second phase comprising annealing at the second annealing temperature for a second set of cycles; and detecting an amplified product for each target polynucleotide, wherein the detecting indicates the presence of the target polynucleotide.

[0032] In some embodiments, a reverse primer comprises a dual domain primer. In some embodiments, a reverse primer comprises a truncated dual domain primer. In some embodiments, a reverse primer comprises an amplifying primer.

[0033] In some embodiments, the set of primers comprises at least one dual domain forward primer; wherein each dual domain primer of a set comprises a 5′ tail region that differs from the 5′ tail region of other dual domain primers in the set, a 3′ core region complementary to a sequence on one strand of a double-stranded nucleic acid comprising said target, and a terminal nucleotide complementary to one of the variant nucleotides occurring at said target site; wherein for each dual domain primer, the 3′ core substantially anneals to its complementary target site sequence at a first annealing temperature, and the sequence comprised by the 5′ tail and 3′ core region substantially anneals to its complement at a second annealing temperature, the second annealing temperature being higher than the first annealing temperature, such that at said second annealing temperature said 3′ core of said dual domain primer cannot substantially anneal to a template molecule that does not also have the complement of the dual domain primer's 5′ tail sequence; and wherein for each truncated dual domain primer of a primer set: the 5′ tail sequence does not have any homology to the target sequence; and the 5′ tail sequence has 6 or fewer contiguous homologous bases relative to any other 5′ tail sequence of the dual domain or truncated dual domain primer set.

[0034] In some embodiments, the target polynucleotides are selected from the group consisting of: polynucleotides comprising SNPs; polynucleotides comprising alleles of SNPs; protein coding DNA or RNA polynucleotides; non-protein coding DNA or RNA polynucleotides; polynucleotides comprising mutations; polynucleotides comprising deletions; and polynucleotides comprising insertions.

[0035] In some embodiments, a plurality of target polynucleotides are detected in a single reaction. In some embodiments, the target polynucleotides comprise at least two polynucleotides selected from the group consisting of: polynucleotides comprising SNPs; polynucleotides comprising alleles of SNPs; protein coding DNA or RNA polynucleotides; non-protein coding DNA or RNA polynucleotides; polynucleotides comprising mutations; polynucleotides comprising deletions; and polynucleotides comprising insertions.

[0036] In some embodiments, the target polynucleotides comprise at least one polynucleotide selected from the group consisting of: polynucleotides comprising SNPs and polynucleotides comprising alleles of SNPs; and at least one polynucleotide selected from the group consisting of: protein coding DNA or RNA polynucleotides; non-protein coding DNA or RNA polynucleotides; polynucleotides comprising mutations; polynucleotides comprising deletions; and polynucleotides comprising insertions.

[0037] In some embodiments, at least one of the target polynucleotides comprises a SNP and wherein the method genotypes the nucleotide at the SNP. In some embodiments, a dual domain or truncated dual domain primers specific for each of 2 or more alleles of a target SNP are present in the same reaction. In some embodiments, one dual domain or truncated dual domain primer of a set is specific for the predominant allele of the target SNP.

[0038] In some embodiments, the dual domain or truncated dual domain primers specific for each of 2 or more alleles or sequence variants of a target nucleotide are present in the same reaction. In some embodiments, one dual domain or truncated dual domain primer of a set is specific for the predominant allele or variant allele of the target polynucleotide.

[0039] In some embodiments, the amplified products of two or more members of a primer subset can be distinguished. In some embodiments, the amplified products of two or more members of a primer subset are distinguished by being of distinct sizes. In some embodiments, the amplified products of two or more members of a primer subset are distinguished by being labeled with different detectable labels. In some embodiments, the products of two or more members of a primer subset are distinguished by sequencing the products. In some embodiments, the products of two or more members of a primer subset are distinguished by oligonucleotide hybridization. In some embodiments, the products of two or more members of a primer subset are distinguished by melting curve analysis of the amplified products.

[0040] In some embodiments, the core sequence is 10 to 40 nucleotides in length. In some embodiments, the core sequence is 11 to 20 nucleotides in length.

[0041] In some embodiments, the first phase comprises from 1 to 10 cycles. In some embodiments, the first phase comprises from 3 to 5 cycles.

[0042] In some embodiments, each 5′ tail sequence of a set has fewer than 3 contiguous homologous bases relative to the other 5′ tail sequences of the set. In some embodiments, each 5′ tail sequence of a set has fewer than 2 contiguous homologous bases relative to the other 5′ tail sequences of the set. In some embodiments, the 5′ tail sequence is from 1 to 150 nucleotides in length. In some embodiments, the 5′ tail sequence is from 1 to 50 nucleotides in length.

[0043] In some embodiments, the second annealing temperature is at least 4° C. higher than the first annealing temperature. In some embodiments, the dual domain or truncated dual domain primers present in a reaction have Tₘ values for their respective 3′ core regions that vary by no more than 8° C. from each other.

[0044] In one aspect, the invention described herein relates to a composition for determining the presence of one or more target polynucleotides, comprising; at least one set of oligonucleotide primers specific for each target polynucleotide; wherein each set of oligonucleotide primers comprises a first subset of at least one truncated dual domain forward primer and a second subset of at least one reverse primer; wherein each truncated dual domain primer of a set comprises a 5′ tail region that differs from the 5′ tail region on other truncated dual domain primers in the set and a 3′ core region complementary to a sequence on one strand of a double-stranded nucleic acid comprising the target; wherein for each truncated dual domain primer, the 3′ core substantially anneals to its complementary target site sequence at a first annealing temperature, and the sequence comprised by the 5′ tail and 3′ core region substantially anneals to its complement at a second annealing temperature, the second annealing temperature being higher than the first annealing temperature, such that at the second annealing temperature the 3′ core of the truncated dual domain primer cannot substantially anneal to a template molecule that does not also have the complement of the primer's 5′ tail sequence; wherein for each member of the truncated dual domain primer set: the 5′ tail sequence does not have any homology to the target sequence; and the 5′ tail sequence has 6 or fewer contiguous homologous bases relative to the other 5′ tail sequences of the truncated dual domain primer set.

[0045] In some embodiments, the composition can further comprise a nucleic acid sample.

[0046] In some embodiments, at least one forward primer of the composition comprises a dual domain primer; wherein each dual domain primer of a set comprises a 5′ tail region that differs from the 5′ tail region on other dual domain primers in the set, a 3′ core region complementary to a sequence on one strand of a double-stranded nucleic acid comprising said target, and a terminal nucleotide complementary to one of the variant nucleotides occurring at said target site; wherein for each dual domain primer, the 3′ core substantially anneals to its complementary target site sequence at a first annealing temperature, and the sequence comprised by the 5′ tail and 3′ core region substantially anneals to its complement at a second annealing temperature, the second annealing temperature being higher than the first annealing temperature, such that at said second annealing temperature said 3′ core of said dual domain primer cannot substantially anneal to a template molecule that does not also have the complement of the primer's 5′ tail sequence; wherein for each member of said dual domain primer set: the 5′ tail sequence does not have any homology to the target sequence; and the 5′ tail sequence has 6 or fewer contiguous homologous bases relative to the other 5′ tail sequences of the dual domain primer set.

[0047] In some embodiments, a reverse primer comprises a dual domain primer. In some embodiments, a reverse primer comprises a truncated dual domain primer. In some embodiments, a reverse primer comprises an amplifying primer.

[0048] In some embodiments, the target polynucleotides are selected from the group consisting of polynucleotides comprising SNPs; polynucleotides comprising alleles of SNPs; protein coding DNA or RNA polynucleotides; non-protein coding DNA or RNA polynucleotides; polynucleotides comprising mutations; polynucleotides comprising deletions; and polynucleotides comprising insertions. In some embodiments, the target polynucleotides comprise at least two polynucleotides selected from the group consisting of: polynucleotides comprising SNPs; polynucleotides comprising alleles of SNPs; protein coding DNA or RNA polynucleotides; non-protein coding DNA or RNA polynucleotides; polynucleotides comprising mutations; polynucleotides comprising deletions; and polynucleotides comprising insertions. In some embodiments, the target polynucleotides comprise at least one polynucleotide selected from the group consisting of: polynucleotides comprising SNPs and polynucleotides comprising alleles of SNPs; and at least one polynucleotide selected from the group consisting of: protein coding DNA or RNA polynucleotides; non-protein coding DNA or RNA polynucleotides; polynucleotides comprising mutations; polynucleotides comprising deletions; and polynucleotides comprising insertions.

[0049] In some embodiments, a subset of dual domain forward primers comprises primers specific for each of 2 or more alleles of a target SNP. In some embodiments, one dual domain forward primer of a set is specific for the predominant allele of the target SNP.

[0050] In some embodiments, the subset of dual domain or truncated dual domain forward primers comprises primers specific for each of 2 or more alleles or sequence variants of a target nucleotide. In some embodiments, one dual domain or truncated dual domain forward primer of a set is specific for the predominant allele or variant allele of the target polynucleotide.

[0051] In some embodiments, the core sequence is 10 to 40 nucleotides in length. In some embodiments, the core sequence is 11 to 20 nucleotides in length.

[0052] In some embodiments, each 5′ tail sequence of a set has fewer than 3 contiguous homologous bases relative to the other 5′ tail sequences of the set. In some embodiments, each 5′ tail sequence of a set has fewer than 2 contiguous homologous bases relative to the other 5′ tail sequences of the set. In some embodiments, the 5′ tail sequence is from 1 to 150 nucleotides in length. In some embodiments, the 5′ tail sequence is from 1 to 50 nucleotides in length.

[0053] In some embodiments, the second annealing temperature is at least 4° C. higher than the first annealing temperature. In some embodiments, the dual domain primers present in a reaction have Tₘ values for their respective 3′ core regions that vary by no more than 8° C. from each other.

### BRIEF DESCRIPTION OF THE DRAWINGS

[0054] FIG. 1 is a schematic depiction of a PCR amplification regimen using traditional PCR primers.

[0055] FIG. 2 is a schematic depiction of a PCR amplification regimen using short primers with identical or highly similar tail sequences.

[0056] FIG. 3 is a schematic depiction of a PCR amplification regimen using short primers with highly heterogeneous tail sequences.

[0057] FIG. 4 depicts the results of a multiplex KRAS/BRAF Mutation Assay with individual mutant (1 ng) and K562 wildtype (50 ng) cell line DNA.

[0058] FIG. 5 depicts the results of a multiplex KRAS/BRAF Mutation Assay with individual mutant cell line DNA (1%) mixed with K562 wildtype cell line DNA.

[0059] FIG. 6 depicts the results of a multiplex IL-10 (−1082)/TNF-α (−308) SNP Assay with synthetic DNA and purified human DNA samples.

[0060] FIG. 7 depicts a schematic of an example of a set of oligonucleotide primers and their relation to two alleles of a target locus. The set of primers comprises two subsets. The first subset comprises a single amplifying primer (dashed black line) capable of annealing to both alleles of the target locus and amplifying the targets in combination with either of the primers of the second subset. The second subset comprises two dual domain primers. The 3′ core is shown as a solid black block and the 5′ tail as a block with vertical lines. The 3′ nucleotide of the first dual domain primer is complementary to allele #1 of the target locus, while the 3′ nucleotide of the second dual domain primer is complementary to allele #2 of the target locus.

[0061] FIG. 8 depicts the results of a KRAS SNP spike-in plasma sample assay.

[0062] FIG. 9 depicts a schematic of exemplary embodiments of primers for use in detecting a SNP in codons 12 and 13 of KRAS. The target sequence (SEQ ID NO: 85) is shown in italics. A 3′ core sequence for use in a dual domain primer is shown in black from 3′ to 5′ (SEQ ID NO: 86) and a plurality of possible reverse primers are shown 5′ to 3′ (SEQ ID NOs: 87-98).

[0063] FIG. 10 depicts a schematic of exemplary embodiments of primers for use in detecting a SNP in codon 61 of KRAS. The target sequence (SEQ ID NO: 99) is shown in italics. A 3′ core sequence for use in a dual domain primer is shown in black from 3′ to 5′ (SEQ ID NO: 100) and a plurality of possible reverse primers are shown 5′ to 3′ (SEQ ID NOs: 101-109).

[0064] FIG. 11 depicts a schematic of exemplary embodiments of primers for use in detecting a SNP in codon 146 of KRAS. The target sequence (SEQ ID NO: 110) is shown in italics. A 3′ core sequence for use in a dual domain primer is shown in black from 3′ to 5′ (SEQ ID NO: 111) and a plurality of possible reverse primers are shown 5′ to 3′ (SEQ ID NOs: 112-119).

[0065] FIG. 12 depicts a schematic of exemplary embodiments of primers for use in detecting BRAF V600. The target sequence (SEQ ID NO: 120) is shown in italics. A 3′ core sequence for use in a dual domain primer is shown in black from 3′ to 5′ (SEQ ID NO: 121) and a plurality of possible reverse primers are shown 5′ to 3′ (SEQ ID NOs: 122-129).

[0066] FIG. 13 depicts a schematic of exemplary embodiments of primers for use in detecting a SNP in codons 12 and 13 of KRAS on the complementary strand of that shown in FIG. 9. The target sequence (SEQ ID NO: 130) is shown in italics. A 3′ core sequence for use in a dual domain primer is shown in black from 5′ to 3′ (SEQ ID NO: 131) and a plurality of possible reverse primers are shown 3′ to 5′(SEQ ID NOs: 132-138).

[0067] FIG. 14 depicts a schematic of exemplary embodiments of primers for use in detecting a SNP in codon 61 of KRAS on the complementary strand of that shown in FIG. 10. The target sequence (SEQ ID NO: 139) is shown in italics. A 3′ core sequence for use in a dual domain primer is shown in black from 5′ to 3′ (SEQ ID NO: 140) and a plurality of possible reverse primers are shown 3′ to 5 (SEQ ID NOs: 141-146).

[0068] FIG. 15 depicts a schematic of exemplary embodiments of primers for use in detecting a SNP in codon 146 of KRAS on the complementary strand of that shown in FIG. 11. The target sequence (SEQ ID NO: 147) is shown in italics. A 3′ core sequence for use in a dual domain primer is shown in black from 5′ to 3′ (SEQ ID NO: 148) and a plurality of possible reverse primers are shown 3′ to 5′ (SEQ ID NOs: 149-154).

[0069] FIG. 16 depicts a schematic of exemplary embodiments of primers for use in detecting BRAF V600 on the complementary strand of that shown in FIG. 12. The target sequence (SEQ ID NO: 155) is shown in italics. A 3′ core sequence for use in a dual domain primer is shown in black from 5′ to 3′ (SEQ ID NO: 156) and a plurality of possible reverse primers are shown 3′ to 5′ (SEQ ID NOs: 157-162).

### DETAILED DESCRIPTION OF THE INVENTION

[0070] Described herein are methods and compositions related to determining the presence of one or more target polynucleotides in a nucleic acid sample. The methods and compositions described herein are based at least in part upon the inventor's discovery of an improved method for performing multiplex, multimodal and/or genotyping PCR amplification regimens via the use of dual domain primers.

### DEFINITIONS

[0071] For convenience, certain terms employed herein, in the specification, examples and appended claims are collected here. Unless stated otherwise, or implicit from context, the following terms and phrases include the meanings provided below. Unless explicitly stated otherwise, or apparent from context, the terms and phrases below do not exclude the meaning that the term or phrase has acquired in the art to which it pertains. The definitions are provided to aid in describing particular embodiments, and are not intended to limit the claimed invention, because the scope of the invention is limited only by the claims. Unless otherwise defined, all technical and scientific terms used herein have the same meaning as commonly understood by one of ordinary skill in the art to which this invention belongs.

[0072] Definitions of common terms in cell biology and molecular biology can be found in The Encyclopedia of Molecular Biology, published by Blackwell Science Ltd., 1994 (ISBN 0-632-02182-9). Definitions of common terms in molecular biology can also be found in Benjamin Lewin, Genes X, published by Jones & Bartlett Publishing, 2009 (ISBN-10: 0763766321); Kendrew et al. (eds.) and Molecular Biology and Biotechnology: a Comprehensive Desk Reference, published by VCH Publishers, Inc., 1995 (ISBN 1-56081-569-8).

[0073] Unless otherwise stated, the present invention was performed using standard procedures, as described, for example in Sambrook et al., Molecular Cloning: A Laboratory Manual (3 ed.), Cold Spring Harbor Laboratory Press, Cold Spring Harbor, N.Y., USA (2001); Davis et al., Basic Methods in Molecular Biology, Elsevier Science Publishing, Inc., New York, USA (1995) which are all incorporated by reference herein in their entireties.

[0074] The term “isolated” or “partially purified” as used herein refers, in the case of a nucleic acid, to a nucleic acid separated from at least one other component (e.g., nucleic acid or polypeptide) that is present with the nucleic acid as found in its natural source and/or that would be present with the nucleic acid when expressed by a cell. A chemically synthesized nucleic acid or one synthesized using in vitro transcription/translation is considered “isolated.”

[0075] As used herein, the term “nucleic acid” or “nucleic acid sequence” refers to a polymeric molecule incorporating units of ribonucleic acid, deoxyribonucleic acid or an analog thereof. The nucleic acid can be either single-stranded or double-stranded. A single-stranded nucleic acid can be one strand of a denatured double-stranded DNA. Alternatively, it can be a single-stranded nucleic acid not derived from any double-stranded DNA. In one aspect, a template nucleic acid is DNA. In another aspect, a template is RNA. Suitable nucleic acid molecules include DNA, including genomic DNA and cDNA. Other suitable nucleic acid molecules include RNA, including mRNA, rRNA and tRNA. The nucleic acid molecule can be naturally occurring, as in genomic DNA, or it may be synthetic, i.e., prepared based upon human action, or may be a combination of the two. The nucleic acid molecule can also have certain modifications such as 2′-deoxy, 2′-deoxy-2′-fluoro, 2′-O-methyl, 2′-O-methoxyethyl (2′-O-MOE), 2′-O-aminopropyl (2′-O-AP), 2′-O-dimethylaminoethyl (2′-O-DMAOE), 2′-O-dimethylaminopropyl (2′-O-DMAP), 2′-O-dimethylaminoethyloxyethyl (2′-O-DMAEOE), or 2′-O—N-methylacetamido (2′-O-NMA), cholesterol addition, and phosphorothioate backbone as described in US Patent Application 20070213292; and certain ribonucleosides that are linked between the 2′-oxygen and the 4′-carbon atoms with a methylene unit as described in U.S. Pat. No. 6,268,490, wherein both patent and patent application are incorporated herein by reference in their entirety.

[0076] The term “gene” means a nucleic acid sequence which is transcribed (DNA) to RNA in vitro or in vivo when operably linked to appropriate regulatory sequences. The gene can include regulatory regions preceding and following the coding region, e.g. 5′ untranslated (5′UTR) or “leader” sequences and 3′ UTR or “trailer” sequences, as well as intervening sequences (introns) between individual coding segments (exons).

[0077] As used herein, the term “complementary” refers to the hierarchy of hydrogen-bonded base pair formation preferences between the nucleotide bases G, A, T, C and U, such that when two given polynucleotides or polynucleotide sequences anneal to each other, A pairs with T and G pairs with C in DNA, and G pairs with C and A pairs with U in RNA. As used herein, “substantially complementary” refers to a primer having at least 90% complementarity over the entire length of a primer with a second nucleotide sequence, e.g. 90% complementary, 95% complementary, 98% complementary, 99% complementary, or 100% complementary.

[0078] As used herein the term “comprising” or “comprises” is used in reference to compositions, methods, and respective component(s) thereof, that are essential to the method or composition, yet open to the inclusion of unspecified elements, whether essential or not.

[0079] As used herein the term “consisting essentially of” refers to those elements required for a given embodiment. The term permits the presence of elements that do not materially affect the basic and novel or functional characteristic(s) of that embodiment.

[0080] The term “consisting of” refers to compositions, methods, and respective components thereof as described herein, which are exclusive of any element not recited in that description of the embodiment.

[0081] As used in this specification and the appended claims, the singular forms “a,” “an,” and “the” include plural references unless the context clearly dictates otherwise. Thus for example, references to “the method” includes one or more methods, and/or steps of the type described herein and/or which will become apparent to those persons skilled in the art upon reading this disclosure and so forth. Similarly, the word “or” is intended to include “and” unless the context clearly indicates otherwise. Although methods and materials similar or equivalent to those described herein can be used in the practice or testing of this disclosure, suitable methods and materials are described below. The abbreviation, “e.g.” is derived from the Latin exempli gratia, and is used herein to indicate a non-limiting example. Thus, the abbreviation “e.g.” is synonymous with the term “for example.”

[0082] Other than in the operating examples, or where otherwise indicated, all numbers expressing quantities of ingredients or reaction conditions used herein should be understood as modified in all instances by the term “about.” The term “about” when used in connection with percentages can mean±1%.

[0083] Other terms are defined herein within the description of the various aspects of the invention.

[0084] In some embodiments, the methods and compositions described herein relate to PCR amplification regimens having reduced background and increased specificity compared to commonly applied methods. One method of increasing the specificity and decreasing background levels in a PCR amplification of a target sequence involves shortening the length of a primer. As a primer decreases in length, the effect of mispairing at any one position upon the melting temperature of the nucleic acid primer-template duplex increases (see Table 1). However, even with short primers, the problem of amplification of non-target sequences (i.e. background noise) is still non-trivial. Coupling a 5′ tail region to the short target-specific primer sequences to generate a dual domain primer according to the rules described herein ensures that during the second phase of the PCR amplification regimen, the primers are not amplifying sequences from the nucleic acid sample, but only from the amplification products generated during the first phase of the PCR amplification regimen. This avoids one ongoing source of background amplification. By keeping the number of cycles in the first phase of the PCR amplification regimen to a minimum, the amount of background amplification is significantly reduced. In preferred embodiments, the amount of background amplification is reduced below detectable levels. In order to avoid cross-talk between primers in the second phase of the PCR amplification regimen, it is preferred that the 5′ tail region of each dual domain primer and/or truncated dual domain primer in a primer set differs from the 5′ tail regions of every other dual domain primer and/or truncated dual domain primer in the set.

[0085] Described herein are methods and compositions for detecting and/or analyzing one or more target polynucleotides in a nucleic acid sample. In some embodiments, the methods described herein relate to the use of at least one dual domain primer (or truncated dual domain primer) in a PCR amplification regimen having at least two phases which are differentiated by having different annealing temperatures. During the first phase of the PCR amplification regimen, a 3′ core region of the dual domain primer (or truncated dual domain primer) specifically anneals to its target and primer extension occurs, creating amplification products comprising the target polynucleotide sequence and/or its complement. The amplification product will contain both the target sequence which is being amplified and a “tag” at at least one end of the product, the tag comprising the sequence of the 5′ tail of the dual domain (or truncated dual domain primer). In the second phase of the PCR amplification regimen, the annealing temperature is raised, such that sequence complementary to both the 5′ tail region and 3′ core region is required for annealing of the dual domain primer (or truncated dual domain primer) to a target, thus preventing the primer from mispriming to off-target polynucleotides.

[0086] Considerations for performing the subject methods are described herein below. In short, it is important to consider aspects of PCR generally, as well as aspects more specifically applicable to the claimed method, for example, dual domain primer design, annealing temperatures, cycling parameters for each phase of amplification, target-specific considerations including considerations for SNP detection, multimodal amplification, options for multiplexing, and various considerations for detection of amplified products.

[0087] PCR

[0088] The methods and compositions described herein relate to performing a polymerase chain reaction (PCR) amplification regimen. As used herein, the term “amplification regimen” refers to a process of specifically amplifying, i.e., increasing the abundance of, a nucleic acid sequence of interest, and more particularly, the exponential amplification occurring when the products of a previous polymerase extension serve as templates for the successive rounds of extension. A PCR amplification regimen according to the invention comprises at least two, and preferably at least 5, 10, 15, 20, 25, 30, 35 or more iterative cycles, where each cycle comprises the steps of: 1) strand separation (e.g., thermal denaturation); 2) oligonucleotide primer annealing to template molecules; and 3) nucleic acid polymerase extension of the annealed primers. Conditions and times necessary for each of these steps can be devised by one of ordinary skill in the art. An amplification regimen according to the methods described herein is preferably performed in a thermal cycler, many of which are commercially available.

[0089] PCR requires the use of a nucleic acid polymerase. As used herein, the phrase “nucleic acid polymerase” refers an enzyme that catalyzes the template-dependent polymerization of nucleoside triphosphates to form primer extension products that are complementary to the template nucleic acid sequence. A nucleic acid polymerase enzyme initiates synthesis at the 3′ end of an annealed primer and proceeds in the direction toward the 5′ end of the template. Numerous nucleic acid polymerases are known in the art and commercially available. One group of preferred nucleic acid polymerases are thermostable, i.e. they retain function after being subjected to temperatures sufficient to denature annealed strands of complementary nucleic acids. e.g. 94° C., or sometimes higher.

[0090] As understood in the art, PCR requires cycles including a strand separation step generally involving heating of the reaction mixture. As used herein, the term “strand separation” or “separating the strands” means treatment of a nucleic acid sample such that complementary double-stranded molecules are separated into two single strands available for annealing to an oligonucleotide primer. More specifically, strand separation according to the methods described herein is achieved by heating the nucleic acid sample above its Tₘ. Generally, for a sample containing nucleic acid molecules in buffer suitable for a nucleic acid polymerase, heating to 94° C. is sufficient to achieve strand separation. An exemplary buffer contains 50 mM KCl, 10 mM Tric-HCl (pH 8.8@25° C.), 0.5 to 3 mM MgCl2, and 0.1% BSA.

[0091] As also understood in the art, PCR requires annealing primers to template nucleic acids. As used herein, “anneal” refers to permitting two complementary or substantially complementary nucleic acids strands to hybridize, and more particularly, when used in the context of PCR, to hybridize such that a primer extension substrate for a template-dependent polymerase enzyme is formed. Conditions for primer-target nucleic acid annealing vary with the length and sequence of the primer and are based upon the calculated Tₘ for the primer. Generally, an annealing step in an amplification regimen involves reducing the temperature following the strand separation step to a temperature based on the calculated Tₘ for the primer sequence, for a time sufficient to permit such annealing.

Tₘ can be readily predicted by one of skill in the art using any of a number of widely available algorithms (e.g. OLIGO™ (Molecular Biology Insights Inc. Colorado) primer design software and VENTRO NTI™ (Invitrogen, Inc. California) primer design software and programs available on the internet, including Primer3 and Oligo Calculator). For the methods described in the Examples provided herein, the Tₘ's were calculated using the NetPrimer software (Premier Biosoft; Palo Alto, Calif.; and freely available on the world wide web at http://www.premierbiosoft.com/netprimer/netprlaunch/Help/xnetprlaunch.html). The Tₘ of a primer can be calculated using following formula, which is used by NetPrimer software and is described in more detail in Frieir et al. PNAS 1986 83:9373-9377 which is incorporated by reference herein in its entirety.

Tₘ=ΔH/(ΔS+R*ln(C/4))+16.6 log([K⁺]/(1+0.7[K*]))−273.15

wherein, ΔH is enthalpy for helix formation; ΔS is entropy for helix formation; R is molar gas constant (1.987 cal/° C.*mol); C is the nucleic acid concentration; and [K*] is salt concentration. For most amplification regimens, the annealing temperature is selected to be about 5° C. below the predicted Tₘ, although temperatures closer to and above the Tₘ (e.g. between 1° C. and 5° C. below the predicted Tₘ or between 1° C. and 5° C. above the predicted Tₘ) can be used, as can, for example, temperatures more than 5° C. below the predicted Tₘ (e.g. 6° C. below, 8° C. below, 10° C. below or lower). Generally, the closer the annealing temperature is to the Tₘ, the more specific is the annealing. The time allowed for primer annealing during a PCR amplification regimen depends largely upon the volume of the reaction, with larger volumes requiring longer times, but also depends upon primer and template concentrations, with higher relative concentrations of primer to template requiring less time than lower relative concentrations. Depending upon volume and relative primer/template concentration, primer annealing steps in an amplification regimen can be on the order of 1 second to 5 minutes, but will generally be between 10 seconds and 2 minutes, preferably on the order of 30 seconds to 2 minutes.

[0092] As used herein, “substantially anneal” refers to a degree of annealing during a PCR amplification regimen which is sufficient to produce a detectable level of a specifically amplified product.

[0093] PCR also relies upon polymerase extension of annealed primers at each cycle. As used herein, the term “polymerase extension” means the template-dependent incorporation of at least one complementary nucleotide, by a nucleic acid polytmerase, onto the 3′ end of an annealed primer. Polymerase extension preferably adds more than one nucleotide, preferably up to and including nucleotides corresponding to the full length of the template. Conditions for polymerase extension vary with the identity of the polymerase. The temperature used for polymerase extension is generally based upon the known activity properties of the enzyme. Although, where annealing temperatures are required to be, for example, below the optimal temperatures for the enzyme, it will often be acceptable to use a lower extension temperature. In general, although the enzymes retain at least partial activity below their optimal extension temperatures, polymerase extension by the most commonly used thermostable polymerases (e.g., Taq polymerase and variants thereof) is performed at 65° C. to 75° C., preferably about 68-72° C.

[0094] Primer extension is performed under conditions that permit the extension of annealed oligonucleotide primers. As used herein, the term “conditions that permit the extension of an annealed oligonucleotide such that extension products are generated” refers to the set of conditions including, for example temperature, salt and co-factor concentrations, pH, and enzyme concentration under which a nucleic acid polymerase catalyzes primer extension. Such conditions will vary with the identity of the nucleic acid polymerase being used, but the conditions for a large number of useful polymerase enzymes are well known to those skilled in the art. One exemplary set of conditions is 50 mM KCl, 10 mM Tric.HCl (pH 8.8@25° C.), 0.5 to 3 mM MgCl2, 200 uM each dNTP, and 0.1% BSA at 72° C. under which Taq polymerase catalyzes primer extension.

[0095] As used herein, “amplified product” refers to polynucleotides resulting from a PCR reaction that are copies of a portion of a particular target polynucleotide sequence and/or its complementary sequence, which correspond in nucleotide sequence to the template polynucleotide sequence and/or its complementary sequence. An amplification product can further comprise sequence specific to the primers and which flanks sequence which is a portion of the target nucleic acid and/or its complement. An amplified product, as described herein will generally be double-stranded DNA, although reference can be made to individual strands thereof.

[0096] In some embodiments, the methods and compositions described herein relate to multiplex PCR. As used herein, “multiplex PCR” refers to a variant of PCR where simultaneous amplification of more than one target polynucleotide and/or more than one polymorphic variant of a target site locus or target nucleic acid in one reaction vessel and subsequent or concurrent detection of the multiple products can be accomplished by using more than one pair of primers in a set (e.g. at least more than one forward and/or more than one reverse primer). Multiplex amplification can be useful not only for detecting the presence of a plurality of targets but also for the analysis, detection, and/or genotyping of deletions, mutations, and polymorphisms, or for quantitative assays. Multiplex can refer to the detection of between 2-1,000 different target sequences and/or polymorphisms of a target site locus or target nucleic acid in a single reaction. As used herein, multiplex refers to the detection of any range between 2-1.000. e.g., between 5-500, 25-1000, or 10-100 different target sequences and/or polymorphisms of a target site locus or target nucleic acid in a single reaction, etc. By way of non-limiting example, a multiplex PCR reaction as part of a method described herein can affirmatively detect the presence of two or more possible alleles of at least two SNPs at at least two different allelic target site loci in a single reaction. The term “multiplex” as applied to PCR implies that there are primers specific for at least two different target sequences in the same PCR reaction. Thus, a reaction in which there are primer sets specific for two different target sequences is considered a multiplex amplification even if only one (or even none) of the at least two target sequences is actually detected in a given sample. Thus, in some embodiments, multiplex PCR can also refer to reaction containing multiple pairs of primers, wherein the reaction can result in one or multiple specific amplified products when one or multiple targets are present in the reaction.

[0097] In some embodiments, the methods and compositions described herein relate to multimodal PCR. As used herein, “multimodal” refers to a variant of multiplex PCR where simultaneous amplification of more than one type or class of target sequence occurs in one reaction vessel. Multimodal amplification can be useful for analysis of deletions, mutations, and polymorphisms in some embodiments. Multimodal can refer to the detection of at least two different types of targets, i.e. 2 different types of targets, 3 different types of targets, 4 different types of targets, or 5 or more different types of targets. By way of non-limiting example, a multimodal PCR reaction can detect the presence of an mRNA and an miRNA in a single reaction, including quantitation of such target, or a multimodal PCR can genotype a SNP and detect an miRNA in the same reaction. By way of further non-limiting example a multimodal PCR amplification can genotype a SNP and detect a deletion at a second target site locus in a single reaction.

[0098] Thus, a multimodal reaction can detect, for example, the presence and/or amount of an expressed RNA and a DNA genotype in the same reaction. In some embodiments, the methods and compositions described herein relate to quantitative detection of a target nucleotide, polymorphisms of target nucleotides or polynucleotides, and/or allelic target site loci. In some embodiments, the methods and compositions described herein relate to quantitative multiplex detection of target nucleotides or polynucleotides, polymorphisms of target polynucleotides, and/or allelic target site loci. In some embodiments, the methods and compositions described herein relate to quantitative multimodal detection of a target nucleotide, polymorphisms of target nucleotides, and/or allelic target site loci. In some embodiments, in order to specifically detect RNA or cDNA in the presence of DNA, one or more primers can be intron-spanning primers. In some embodiments, in order to detect short target polynucleotides (e.g. miRNAs or degraded target polynucleotides) as well as longer target polynucleotides (e.g. mRNA or target site loci in genomic DNA), primers for at least the shorter target polynucleotides can comprise tag sequence that results in an amplified product of larger, discrete size than the target sequence. The tags can be designed such that all amplified products in a reaction will be of distinct sizes.

[0099] Quantitative aspects can be facilitated, for example, by repeated sampling at any time during or after an amplification reaction, followed by separation and detection of the amplification products. Sampling can, for example, comprise removing an aliquot of the reaction. Sampling can occur, for example, at the end of every cycle, or at the end of every several cycles, e.g. every two cycles, every three cycles, every four cycles etc. While a uniform sample interval will most often be desired, there is no requirement that sampling be performed at uniform intervals. As just one example, the sampling routine can involve sampling after every cycle for the first five cycles, and then sampling after every other cycle or vice versa.

[0100] Sampling or dispensing of an aliquot from an amplification reaction can be performed in any of several different general formats. The sampling or removal method can depend on any of a number of factors including, but not limited to, the equipment available, the number of samples to be analyzed, and the timing of detection relative to sample collection (e.g., concurrently vs. sequential). The exact method of removal or extrusion of samples is not necessarily a limitation of the methods described herein. Sampling is preferably performed with an automated device, especially for high throughput applications. Sampling can also be performed using direct electrokinetic or hydrodynamic injection from a PCR reaction into a capillary electrophoretic device. The method of sampling used in the methods is preferably adapted to minimize contamination of the cycling reaction(s), by, for example, using pipetting tips or needles that are either disposed of after a single aliquot is withdrawn, or by using the same tip or needle for dispensing the sample from the same PCR reaction vessel. Methods for simultaneous sampling and detection are known to those skilled in the art (see, e.g., US Patent Application Publication 2004/0166513, incorporated herein by reference).

[0101] The amount of nucleic acid and/or volume of an aliquot dispensed at the sampling step can vary, depending, for example, upon the total volume of the amplification reaction, the sensitivity of product detection, and the type of separation used. Amplification volumes can vary from several microliters to several hundred microliters (e.g., 5 μl, 10 μl, 20 μl, 40 μl, 60 μl, 80 μl, 100 μl, 120 μl, 150 μl, or 200 μl or more), preferably in the range of 10-150 μl, more preferably in the range of 10-100 μl. The exact volume of the amplification reaction is not a limitation of the invention. Aliquot volumes can vary from 0.01% to 30% of the reaction mixture. The amplification regimen can be performed on plural independent nucleic acid amplification mixtures, optionally in a multiwell container. The container(s) in which the amplification reaction(s) are preformed is not necessarily a limitation of the methods described herein.

[0102] In some embodiments, the methods described herein relate to a PCR amplification regimen comprising at least 2 phases. In some embodiments, the methods described herein relate to a PCR amplification regimen consisting of 2 phases. As used herein, a “phase” of a PCR amplification regimen is a first set of cycles that can be differentiated from a second set of cycles by the sets of cycles necessarily having different annealing temperatures and generally having different numbers of cycles. In some embodiments, all other time and temperature parameters are identical. In some embodiments, additional time and temperature parameters can vary. In some embodiments, the annealing temperature of the first phase is lower than the annealing temperature of the second phase. As used herein, a “set of cycles” refers to one or more cycles of a PCR amplification regimen which have identical temperature parameters.

[0103] In some embodiments, the first phase annealing temperature is lower than the second phase annealing temperature. In some embodiments, the first annealing temperature is lower than the second annealing temperature by at least 2° C., i.e. by 2° C., by 3° C., by 4° C., by 5° C., by 6° C., by 8° C., by 10° C., or more. In some embodiments, the first annealing temperature is lower than the second annealing temperature by at least 4° C.

[0104] In some embodiments, each phase of the PCR amplification regimen comprises at least 1 cycle, e.g. 1 cycle, 2 cycles, 3 cycles, 4 cycles, 5 cycle, 10 cycles, 20 cycles or more cycles. In some embodiments, the first phase of the PCR amplification regimen comprises fewer than 10 cycles, e.g. 10 cycles, 9 cycles, 8 cycles, 7 cycles, 6 cycles, 5 cycles, 4 cycles, 3 cycles, 2 cycles or 1 cycle. As noted above, keeping the number of cycles in the first phase to a minimum can avoid or at least mitigate the impact of mispriming to non-target sequences in the initial nucleic acid sample. In some embodiments, the first phase of the PCR amplification regimen comprises from 3 to 5 cycles. In some embodiments, the first phase of the PCR amplification regimen comprises 3 cycles. In some embodiments, the first phase of the PCR amplification regimen comprises 4 cycles. In some embodiments, the first phase of the PCR amplification regimen comprises 5 cycles.

[0105] In some embodiments, the second phase of the PCR amplification regimen comprises at least 5 cycles, e.g. 5 cycles, 10 cycles, 15 cycles, 20 cycles, 25 cycles, 30 cycles or more cycles. In the second phase, the higher annealing temperature substantially prevents priming from non-target sequences in the initial nucleic acid sample, thereby favoring amplification of only target polynucleotides amplified in the first phase of the regimen. Thus, this second phase can include more cycles, substantially without risk of increasing background. This approach, coupled with rules for differences in 5′ tail sequences can substantially decrease background in PCR reactions in general, and in SNP genotyping reactions in particular. In some embodiments, the entire PCR amplification regimen comprises at least 10 total cycles, e.g. 10 cycles, 15 cycles, 20 cycles, 25 cycles, 30 cycles, 35 cycles, 40 cycles or more.

[0106] PCR Targets

[0107] In some embodiments, the methods and compositions described herein relate to detecting the presence of a target nucleic acid and/or polynucleotide. A target nucleic acid can be an RNA or a DNA. A target nucleic acid can be a double-stranded (ds) nucleic acid or a single-stranded (ss) nucleic acid, e.g. a dsRNA, a ssRNA, a dsDNA, or a ssDNA. As noted above, it is specifically contemplated that methods described herein permit the detection and/or quantitation of more than one of these types of target in the same reaction, i.e. multimodal amplification and detection. Non-limiting examples of target nucleic acids include a nucleic acid sequence, a nucleic acid sequence comprising a mutation, a nucleic acid sequence comprising a deletion, a nucleic acid sequence comprising an insertion, a sequence variant, an allele, a polymorphism, a SNP, a microRNA, a protein coding RNA, a non-protein coding RNA, an mRNA, a nucleic acid from a pathogen (e.g. a bacterium, a virus, or a parasite), a nucleic acid associated with a disease or a likelihood of having or developing a disease (e.g. a marker gene, a polymorphism associated with a disease or a likelihood of having or developing a disease, or an RNA, the expression of which is associated with a disease or a likelihood of having or developing a disease).

[0108] In some embodiments, the methods and compositions described herein relate to detecting the presence of one or more polymorphisms of a target nucleic acid and/or polynucleotide. As used herein, the term “polymorphism” refers to a nucleic acid sequence variation. When compared to a predominantly occurring natural sequence, a polymorphism can be present at a frequency of greater than 0.01%, 0.1%, 1% or greater in a population. As used herein, a polymorphism can be a substitution, insertion, deletion, duplication, or rearrangement. A polymorphism, including a single nucleotide polymorphism (SNP), can be phenotypically neutral or can have an associated variant phenotype that distinguishes it from that exhibited by the predominant sequence at that locus. As used herein, “neutral polymorphism” refers to a polymorphism in which the sequence variation does not alter gene function, and “mutation” or “functional polymorphism” refers to a sequence variation which does alter gene function, and which thus has an associated phenotype. Polymorphisms of a locus occurring in a population are referred to as alleles. When referring to the genotype of an individual with regard to a specific locus at which two or more alleles occur within a population, the “predominant allele” is that which occurs most frequently in the population in question (i.e., when there are two alleles, the allele that occurs in greater than 50% of the population is the predominant allele; when there are more than two alleles, the “predominant allele” is that which occurs in the subject population at the highest frequency, e.g., at least 5% higher frequency, relative to the other alleles at that site). The term “variant allele” is used to refer to the allele or alleles occurring less frequently than the predominant allele in that population (e.g., when there are two alleles, the variant allele is that which occurs in less than 50% of the subject population; when there are more than two alleles, the variant alleles are all of those that occur less frequently, e.g., at least 5% less frequently, than the predominant allele).

[0109] As used herein, a “single nucleotide polymorphism” or “SNP” refers to nucleic acid sequence variation at a single nucleotide residue, including a single nucleotide deletion, insertion, or base change or substitution. SNPs can be allelic. Some SNPs have defined phenotypes, e.g. disease phenotypes, while others have no known associated phenotype. SNP detection methods, described herein can be used for the prediction of phenotypic characterisitics, e.g. prediction of responsiveness or sensitivity to drugs. In this regard, SNP genotyping as described herein and known in the art is not necessarily diagnostic of disease or susceptibility to disease.

[0110] In some embodiments, the methods and compositions described herein relate to determining the genotype of a nucleic acid sample at one or more allelic target site loci. As used herein, the term “target site locus” refers to a genetic locus which is to be genotyped. A target site locus generally has a wild-type allele and at least one variant allele. A target site locus can comprise the nucleotide position(s) which vary between alleles of the target site locus. A target site locus is not limited to only the particular nucleotide position(s) that vary between alleles, but can comprise the sequences flanking the variable nucleotide positions. In general, a “target site locus” is a sequence at least big enough to be PCR amplified using a primer set as described herein. Generally, a target site locus can be less than 5 kb in size. Two target site loci can overlap, e.g. as in the case of two SNPs located 10 bp (or fewer) apart. In this instance, each SNP will be flanked by a target site locus, which will have considerable overlap with the target site locus which flanks the other SNP. The methods described herein are particularly well adapted for genotyping SNPs that fall closely together. When used in reference to a SNP, the “target site” is the actual nucleotide that varies.

[0111] In some embodiments, the methods and compositions described herein relate to determining the genotype of a nucleic acid sample at one or more target site loci in the same reaction. In some embodiments, the methods and compositions described herein relate to a set of oligonucleotide primers specific for each target site locus. The set of oligonucleotide primers can comprise primers specific for one or more alleles of the locus, e.g. for the predominant allele, the wild-type allele, the variant allele(s), and/or the mutant allele(s). The set of oligonucleotide primers can comprise 2 or more primers, i.e. 2 primers, 3 primers, 4 primers, 5 primer, 6 primers, 7 primers, or more primers.

[0112] As noted, in some embodiments, a target site locus comprises a SNP. Four alleles of a SNP locus are possible, although SNPs that vary only between two nucleotides at the target site are not uncommon. In some embodiments, the methods and compositions described herein relate to a set of primers that can detect a single allele of a SNP locus. In some embodiments, the methods and compositions described herein relate to a set of primers that can detect two alleles of a SNP locus (i.e. the methods and compositons can relate to an assay that permits the affirmative detection of two SNP alleles, or “biphasic” genotyping of that SNP). In some embodiments, the methods and compositions described herein relate to a set of primers that can detect three alleles of a SNP locus (i.e. the methods and compositons can relate to an assay that permits the affirmative detection of three SNP alleles, or “triphasic” genotyping of that SNP). In some embodiments, the methods and compositions described herein relate to an assay that permits affirmative detection of four alleles of a SNP locus (i.e. the methods and compositons can relate to a multiplex detection of four SNP alleles, or “quaduphasic” genotyping of that SNP). In some embodiments, the predominant and/or wild-type allele of a SNP is detected. In some embodiments, the predominant and/or wild-type allele of a SNP is not detected. By “affirmatively detected” is meant that the assay permits the amplification of that specific allele. An alternative to affirmative detection can be used, for example, when there are only two possibilities known to exist at the SNP site. In this instance, the assay can be designed such that one of the two variants is amplified, and the other is not; the assay can affirmatively detect that amplified variant and passively detect the other, i.e. the lack of a product means the other allele or variant is present.

[0113] Samples for Analysis

[0114] The methods and compositions described herein relate to the detection of the presence of a target nucleic acid in a sample. A sample useful herein will comprise nucleic acids. In some embodiments, a sample can further comprise proteins, cells, fluids, biological fluids, preservatives, and/or other substances. In some embodiments, a sample can be obtained from a subject. In some embodiments, a sample can be a biological sample obtained from the subject. In some embodiments a sample can be a diagnostic sample obtained from a subject. By way of non-limiting example, a sample can be a cheek swab, blood, serum, plasma, sputum, cerebrospinal fluid, urine, tears, alveolar isolates, pleural fluid, pericardial fluid, cyst fluid, tumor tissue, tissue, a biopsy, saliva, an aspirate, or combinations thereof. In some embodiments, a sample can be obtained by resection or biopsy.

[0115] In some embodiments, the sample comprises microorganisms that are a subject of the analysis. In some embodiments, the sample comprises a portion or aliquot of a culture of microorganisms.

[0116] In some embodiments, the sample is a clarified fluid sample, for example, by centrifugation. In some embodiments, the sample is clarified by low-speed centrifugation (e.g. 3,000×g or less) and collection of the supernatant comprising the clarified fluid sample.

[0117] In some embodiments, the sample can be freshly collected. In some embodiments, the sample can be stored prior to being used in the methods and compositions described herein. In some embodiments, the sample is an untreated sample. As used herein, “untreated sample” refers to a biological sample that has not had any prior sample pre-treatment except for dilution and/or suspension in a solution.

[0118] In some embodiments, a sample can be obtained from a subject and preserved or processed prior to being utilized in the methods and compositions described herein. By way of non-limiting example, a sample can be embedded in paraffin wax, refrigerated, or frozen. A frozen sample can be thawed before determining the presence of a nucleic acid according to the methods and compositions described herein. In some embodiments, the sample can be a processed or treated sample. Exemplary methods for treating or processing a sample include, but are not limited to, centrifugation, filtration, sonication, homogenization, heating, freezing and thawing, contacting with a preservative (e.g. anti-coagulant or nuclease inhibitor) and any combination thereof. In some embodiments, the sample can be treated with a chemical and/or biological reagent. Chemical and/or biological reagents can be employed to protect and/or maintain the stability of the sample or nucleic acid comprised by the sample during processing and/or storage. In addition, or alternatively, chemical and/or biological reagents can be employed to release nucleic acids from other components of the sample. By way of non-limiting example, a blood sample can be treated with an anti-coagulant prior to being utilized in the methods and compositions described herein. The skilled artisan is well aware of methods and processes for processing, preservation, or treatment of samples for nucleic acid analysis.

[0119] In some embodiments, the nucleic acid present in a sample is isolated, enriched, or purified prior to being utilized in the methods and compositions described herein. Methods of isolating, enriching, or purifying nucleic acids from a sample are well known to one of ordinary skill in the art. By way of non-limiting example, kits for isolation of genomic DNA from various sample types are commercially available (e.g. Catalog Nos. 51104, 51304, 56504, and 56404; Qiagen; Germantown, Md.).

[0120] The terms “subject” and “individual” are used interchangeably herein, and refer to an organism from which a sample is obtained. A subject can be any organism for which it is desired to determine the presence of a nucleic acid in the organism or one or more cells comprising or contained within that organism. As used herein, a “subject” can mean an organism, e.g. a bacterium, a parasite, a plant, or an animal. In some embodiments, a subject can be a human or animal. Usually the animal is a vertebrate such as a primate, rodent, domestic animal or game animal. Primates include chimpanzees, cynomologous monkeys, spider monkeys, and macaques, e.g., Rhesus. Rodents include mice, rats, woodchucks, ferrets, rabbits and hamsters. Domestic and game animals include cows, horses, pigs, deer, bison, buffalo, feline species, e.g., domestic cat, canine species, e.g., dog, fox, wolf, avian species, e.g., chicken, emu, ostrich, and fish, e.g., trout, catfish and salmon. Individual or subject includes any subset of the foregoing, e.g., all of the above.

[0121] Primers

[0122] In various embodiments, the methods and compositions described herein relate to performing a PCR amplification regimen with at least one set of oligonucleotide primers specific for each target polynucleotide, target polymorphism, and/or allelic target site locus. As used herein, “primer” refers to a DNA or RNA polynucleotide molecule or an analog thereof capable of specifically annealing to a polynucleotide template and providing a 3′ end that serves as a substrate for a template-dependent polymerase to produce an extension product which is complementary to the polynucleotide template. The conditions for initiation and extension usually include the presence of at least one, but more preferably all four different deoxyribonucleoside triphosphates and a polymerization-inducing agent such as DNA polymerase or reverse transcriptase, in a suitable buffer (in this context “buffer” includes solvents (generally aqueous) plus necessary cofactors and reagents which affect pH, ionic strength, etc.) and at a suitable temperature. A primer useful in the methods described herein is generally single-stranded, and a primer and its complement can anneal to form a double-stranded polynucleotide. Primers according to the methods and compositions described herein can be less than or equal to 300 nucleotides in length, e.g., less than or equal to 300, or 250, or 200, or 150, or 100, or 90, or 80, or 70, or 60, or 50, or 40, and preferably 30 or fewer, or 20 or fewer, or 15 or fewer, but at least 10 nucleotides in length.

[0123] As used herein, the term “set” means a group of nucleic acid samples, primers or other entities. A set will comprise a known number of, and at least two of such entities. A set of primers comprises at least one forward primer and at least one reverse primer specific for a target site locus and/or target polynucleotide nucleotide.

[0124] Thus, as used herein, “set of oligonucleotide primers” refers to a group of at least two primers, including a forward primer and a reverse primer, one of which anneals to a first strand of a target nucleic acid and the other of which anneals to a complement of the first strand. In some embodiments, the primers of a first subset (e.g., forward primers) can anneal to a first strand of a target nucleic acid sequence and the primers of the second subset (e.g., reverse primers), can anneal to the complement of that strand. The orientation of the primers when annealed to the target and/or its complement can be such that nucleic acid synthesis proceeding from primer extension of a primer of one subset would produce a nucleic acid sequence that is complementary to at least one region of a primer of the second subset. The “first strand” of a nucleic acid target and/or sequence can be either strand of a double-stranded nucleic acid comprising the sequence of the target nucleotide and/or target site locus, but once chosen, defines its complement as the second strand. Thus, as used herein, a “forward primer” is a primer which anneals to a first strand of a nucleic acid target, while a “reverse primer” of the same set is a primer which anneals to the complement of the first strand of the nucleic acid target.

[0125] As used herein, the term “subset” means a group comprised by a set as defined herein, wherein the subset group is less than every member of the set. A subset as used herein can consist of a single entity from within a set. A “subset of primers” specific for a target nucleic acid and/or a polymorphic target site locus refers to a group of primers specific for the same target nucleic acid and/or polymorphic target site locus which anneal, for example, to a first strand of the target nucleic acid and not to second strand of the target nucleic acid. A subset of primers comprises, for example at least one forward primer specific for a target site locus and/or target nucleotide sequence, e.g. one forward primer, two forward primers, three forward primers, or more forward primers specific for a target site locus and/or target nucleotide sequence. Alternatively, a subset of primers comprises, for example at least one reverse primer specific for a target site locus and/or target nucleotide sequence, e.g. one reverse primer, two reverse primers, three reverse primers, or more reverse primers specific for a target site locus and/or target nucleotide sequence.

[0126] As used herein, “specific” when used in the context of a primer specific for a target nucleic acid refers to a level of complementarity between the primer and the target such that there exists an annealing temperature at which the primer will anneal to and mediate amplification of the target nucleic acid and will not anneal to or mediate amplification of non-target sequences present in a sample.

[0127] Methods of making primers are well known in the art, and numerous commercial sources offer oligonucleotide synthesis services suitable for providing primers according to the methods and compositions described herein, e.g. INVITROGEN™ Custom DNA Oligos; Life Technologies; Grand Island, N.Y. or custom DNA Oligos from IDT; Coralville, Iowa).

[0128] Dual Domain Primers

[0129] In various embodiments, the methods and compositions described herein relate to a set of oligonucleotides comprising at least one dual domain primer. As discussed above, dual domain primers permit the amplification and detection of specific sequences while avoiding at least two sources of error in PCR detection and quantitation. As used herein, a “dual domain primer” refers to a primer having a 5′ tail region, and a 3′ core region complementary to either a first or second strand of a target polynucleotide and one or more 3′ terminal nucleotides complementary to one of the variant nucleotides occurring at a target site locus. A “truncated” dual domain primer does not have a 3′ terminal nucleotide specific for one allele of a SNP. The term “truncated” as used in this context does not imply anything regarding the length of the primer, but is intended to distinguish, for example, primers not designed to specifically detect one SNP allele. In some embodiments, a truncated dual domain primer can be part of a set of primers also comprising at least one dual domain primer in order to detect and amplify at least one allele of a SNP. In some embodiments, one or more truncated dual domain primers can be used in a primer set to detect target polynucleotides other than SNP alleles, e.g. mRNAs. The dual domain and truncated dual domain primers, as well as their roles and uses, are discussed further below. Specific characteristics or rules with respect to the design and function of the 5′ tail and 3′ core region of a dual domain primer and/or truncated dual domain primer are discussed in the following.

[0130] 5′ Tail Region

[0131] The 5′ tail region of a dual domain primer and/or truncated dual domain primer is, necessarily, 5′ of the 3′ core region and, as a rule, does not have any homology to the target sequence. This can be determined by creating an alignment of the sequence of the primer to the nucleic acid target sequence (or a complement thereof depending upon the orientation of the primer) via the 3′ core region of the dual domain primer and/or truncated dual domain primer. At each position of the 5′ tail region, the nucleotide base present at that position should not be the same as the nucleotide base found in the nucleic acid target sequence at the corresponding position, i.e. it should not be homologous. Alignments necessary to confirm lack of homology for a 5′ tail sequence can be done by eye. However, if necessary, Ooe of ordinary skill in the art is aware of software available for creating alignments of nucleic acid sequences, e.g. BLAST or CLUSTALW2. Default parameters are generally sufficient for the alignments necessary to establish lack of target sequence homology.

[0132] In addition to lacking homology to the target sequence, as a rule, the sequence of the 5′ tail region of a dual domain primer differs from the sequence of the 5′ tail region of other dual domain and/or truncated dual domain primers in the same set, i.e. it is not identical to the 5′ tail region of other dual domain primers and/or truncated dual domain primers in the same set. In some embodiments, the sequence of a 5′ tail region of a dual domain primer and/or truncated dual domain primer has 6 or fewer contiguous homologous bases relative to the sequence of the 5′ tail region of other dual domain primers and/or truncated dual domain primers in the same set, i.e. it has no more than 6 contiguous homologous bases, it has no more than 5 contiguous homologous bases, it has no more than 4 contiguous homologous bases, it has no more than 3 contiguous homologous bases, it has no more than 2 contiguous homologous bases, it has only 1 homologous base, or it has no homologous bases. As used herein, “contiguous bases” refers to bases which form an uninterrupted sequence of bases within a nucleic acid. For example, two bases are contiguous if one is immediately 5′ or 3′ of the other in a nucleic acid sequence, i.e. there are no intervening bases between them. Examples of tail sequences suitable for use in the same set or subset of primers are seen in Tables 2 and 6.

[0133] In some embodiments, in the case of 2 dual domain primers and/or truncated dual domain primers, each of which is comprised by a different set of oligonucleotides, (e.g. a set of oligonucleotide primers specific for a different target locus) the 2 primers can have 5′ tail regions that have 1 or more homologous bases, i.e. they have 1 homologous base, 2 homologous bases, 3 homologous bases, 4 homologous bases, 5 homologous bases, 6 homologous bases or more homologous bases. In some embodiments, in the case of 2 dual domain primers and/or truncated dual domain primers, each of which is comprised by a different set of oligonucleotides, the 2 primers can have 5′ tail regions which are identical.

[0134] In some embodiments, the 5′ tail region of a dual domain primer or truncated dual domain primer as described herein can be from 1 to 200 nucleotides or longer in length, e.g. it can be 1 nucleotide, 2 nucleotides, 3 nucleotides, 4 nucleotides, 5 nucleotides, 6 nucleotides, 7 nucleotides, 8 nucleotides, 9 nucleotides, 10 nucleotides, 12 nucleotides, 14 nucleotides, 16 nucleotides, 18 nucleotides, 20 nucleotides, 30 nucleotides, 40 nucleotides, 50 nucleotides, 60 nucleotides, 70 nucleotides, 80 nucleotides, 90 nucleotides, 100 nucleotides in length, or any other length in between these values, or longer. In theory, a 5′ tail could be much longer. However, practically speaking, primers are generally 300 nucleotides or less in length, preferably shorter. It should be kept in mind that the longer the tail, the more difficult it can become to exclude regions of homology to one or more targets in a multiplex reaction and the more likely it is that another primer can hybridize to it. As such, 5′ tail sequences of 200 nucleotides or less are preferred. While the 5′ tail can be as little as 1 nucleotide in length, this would only be acceptable if the 1 nucleotide difference were sufficient to increase the Tₘ as required for a 5′ tail to be functional as described herein. Small differences in tail length and composition will necessarily have the greatest impact on Tₘ when the 3′ core region is relatively short, as the impact of any single nucleotide on Tₘ diminishes the longer the polynucleotide becomes. As noted above, a critical aspect of the 5′ tail region is that it increases the Tm for the dual domain primer, or truncated dual domain primer, relative to a primer that hybridizes to the target region alone, i.e. a primer with 3′ core sequence alone. Thus, the choice of length and composition of the 5′ tail region is driven substantially by this functional requirement. As used herein, the term “increases the Tₘ” means that a change to a primer, e.g. addition of a 5′ tail sequence, is sufficient to raise the Tₘ of the resulting primer, under salt and buffer conditions suitable for a PCR reaction mixture such that the altered primer can substantially anneal to its target sequence at a temperature at which the original primer can no longer substantially anneal to its target sequence.

[0135] In some embodiments, the 5′ tail region of a dual domain primer or truncated dual domain primer as described herein can be from 1 to 200 nucleotides in length. Preferably, the 5′ tail region of the dual domain or truncated dual domain primer can be 150 nucleotides or less in length. In some embodiments, the 5′ tail region of a dual domain primer or truncated dual domain primer as described herein can be from 4 to 150 nucleotides in length. In some embodiments, the 5′ tail region of a dual domain primer or truncated dual domain primer as described herein can be from 1 to 10 nucleotides in length. In some embodiments, the 5′ tail region of a dual domain primer or truncated dual domain primer as described herein can be at least 2 nucleotides in length, e.g. at least 2 nucleotides in length, at least 3 nucleotides in length, at least 4 nucleotides in length, at least 5 nucleotides in length, at least 6 nucleotides in length, at least 7 nucleotides in length, at least 8 nucleotides in length, at least 9 nucleotides in length or longer.

[0136] Exemplary examples of 5′ tail region sequences are provided as SEQ ID NOs: 210-2709. SEQ ID NOs: 210-459 have a GC content of 20%. SEQ ID NOs: 460-709 have a GC content of 30%. SEQ ID NOs: 709-959 have a GC content of 40%. SEQ ID NOs: 960-1209 have a GC content of 50%. SEQ ID NOs: 1210-1459 have a GC content of 60%. SEQ ID NOs: 1460-1709 have a GC content of 25%. SEQ ID NOs: 1710-1959 have a GC content of 35%. SEQ ID NOs: 1960-2209 have a GC content of 45%. SEQ ID NOs: 2210-2459 have a GC content of 55%. SEQ ID NOs: 2460-2709 have a GC content of 65%. Combinations of any of SEQ ID NOs: 210-2709 can be used in a single multi-modal assay as described elsewhere herein and can be selected, e.g. by Tm in order to provide for dual domain primers with similar Tm's depending upon the 3′ core regions which they will be linked to in order to form complete dual domain primers.

[0137] Accordingly, in some embodiments, described herein is a composition for determining the presence of one or more target polynucleotides, comprising; at least one set of oligonucleotide primers specific for each target polynucleotide; wherein each said set of oligonucleotide primers comprises a first subset of at least one truncated dual domain forward primer and a second subset of at least one reverse primer; wherein each truncated dual domain primer of a set comprises a 5′ tail region that differs from the 5′ tail region on other truncated dual domain primers in the set and a 3′ core region complementary to a sequence on one strand of a double-stranded nucleic acid comprising said target; wherein for each truncated dual domain primer, the 3′ core substantially anneals to its complementary target site sequence at a first annealing temperature, and the sequence comprised by the 5′ tail and 3′ core region substantially anneals to its complement at a second annealing temperature, the second annealing temperature being higher than the first annealing temperature, such that at said second annealing temperature said 3′ core of said truncated dual domain primer cannot substantially anneal to a template molecule that does not also have the complement of the primer's 5′ tail sequence; wherein for each member of said truncated dual domain primer set: the 5′ tail sequence does not have any homology to the target sequence; and the 5′ tail sequence has 6 or fewer contiguous homologous bases relative to the other 5′ tail sequences of the truncated dual domain primer set and wherein each 5′ tail sequence is selected from SEQ ID NOs: 210-2709 or sequences having no more than four mutations, insertions, or deletions (e.g. four mutations, insertions, or deletions, three mutations, insertions, or deletions, two mutations, insertions, or deletions, or one mutation, insertion, or deletion) relative to one of SEQ ID NOs: 210-2709. In the context of this paragraph, an insertion refers to the insertion of only one nucleotide, e.g. 2 insertions, even at the same site, refers to the addition of only 2 nucleotides. Similarly, in the context of this paragraph, a deletion refers to the deletion of only one nucleotide, e.g. 2 deletions, even at the same site, refers to the deletion of only 2 nucleotides.

[0138] 3′ Core Region

[0139] As used herein, a “3′ core region” of a dual domain primer refers to a region of a primer located 3′ of the 5′ tail region and which is complementary to either a first or second strand of the target polynucleotide. In some embodiments, the dual domain primer is to be used for genotyping or determining the presence of alleles and/or variants of a target site locus; in those instances, the 3′ core region can be designed to flank the portion of the target site locus which varies between alleles and/or variants. A set of dual domain primers for genotyping a given variable site will generally have one dual domain primer for each nucleotide occurring at that variable site, each of the different primers having a 3′ terminal nucleotide complementary to only one of the nucleotides occurring at that site.

[0140] In some embodiments, the methods and compositions described herein relate to a set of oligonucleotides comprising at least one truncated dual domain primer. As used herein, a “truncated dual domain primer” refers to a primer having a) a 5′ tail region and b) a 3′ core region complementary to either a first or second strand of the target polynucleotide. A truncated dual domain primer lacks the 3′ terminal nucleotides of a dual domain primer which are specific to a particular allele of a polymorphism. As with other dual domain primers, the 5′ tail region of a truncated dual domain primer differs from the 5′ tail region of other dual domain primers and/or truncated dual domain primers in the same set.

[0141] The 3′ core region of a dual domain primer or truncated dual domain primer as described herein can be from 10 to 40 nucleotides in length.

[0142] In some embodiments, a set of oligonucleotide primers comprises a subset of forward primers comprising two or more dual domain or truncated dual domain primers, each of which is designed to specifically anneal to and amplify an allele of the same target locus. The set of primers can further comprise a single reverse primer, that reverse primer comprising a truncated dual domain primer, which will act in concert with each forward primer of the oligonucleotide primer set to produce distinguishable amplification products during a PCR amplification regimen (see for Example, the Kras primer set of Table 2). Alternatively, the subset can comprise two or more dual domain or truncated dual domain reverse primers, each designed to anneal to and amplify an allele of the same target locus, and a single forward primer.

[0143] In some embodiments, the methods and compositions described herein relate to a set of oligonucleotides comprising at least one amplifying primer. As used herein, an “amplifying primer” refers to a primer having a region complementary to either a first strand of the target nucleic acid or the complement of the first strand. As contrasted with a dual domain or truncated dual domain primer, an amplifying primer does not comprise a 5′ tail region, nor does it comprise nucleotides complementary to only one allele or variant of a target nucleic acid.

[0144] In some embodiments, each set of oligonucleotide primers can comprise 2 or more primers, e.g. 2 primers, 3 primers, 4 primers, 5 primers, 6 primers or more primers. In some embodiments, each set of oligonucleotide primers can comprise at least n+1 primers, wherein n is the number of polymorphisms and or alleles of the target polynucleotide which are to be detected.

[0145] In some embodiments, the Tₘ's for the 3′ core region of two or more primers of a set of primers can vary by no more than 8° C., e.g., by 8° C. or less, by 7° C. or less, by 6° C. or less, by 5° C. or less, by 4° C. or less, by 3° C. or less, by 2° C. or less, by 1° C. or less, or they can be the same.

[0146] In some embodiments, the Tₘ's for the 3′ core region of two or more primers present in the same reaction can vary by no more than 8° C. e.g., by 8° C. or less, by 7° C. or less, by 6° C. or less, by 5° C. or less, by 4° C. or less, by 3° C. or less, by 2° C. or less, by 1° C. or less, or they can be the same.

[0147] FIGS. 9-16 depict exemplary 3′ core sequences for detecting SNPs in KRAS and BRAF, as indicated in the descriptions of the drawings (e.g. SEQ ID NOs; 86, 100, 111, 121, 131, 140, 148, and 156). Also provided in FIGS. 9-16 are a plurality of reverse primers each of which can be used with a dual domain primer(s) comprising the indicated 3′ core sequence in a PCR reaction.

[0148] In some embodiments, a dual domain primer as described herein can comprise any of SEQ ID NOs: 86, 100, 111, 121, 131, 140, 148, and 156 as the 3′ core sequence and any of SEQ ID NOs: 210-2709 as the 5′ tail sequence. In some embodiments, a dual domain primer as described herein can comprise a 3′ core having the sequence of any of SEQ ID NOs: 86, 100, 111, 121, 131, 140, 148 and 156 with one or more substitutions, insertions, or deletions (e.g. one substitution, two substitutions, three substitutions, four substitutions, or more) and a 5′ tail having the sequence of any of SEQ ID NOs: 210-2709 with one or more substitutions, insertions, or deletions (e.g. one substitution, two substitutions, three substitutions, four substitutions, or more). In some embodiments, a dual domain primer as described herein can comprise a 3′ core having the sequence of any of SEQ ID NOs: 86, 100, 111, 121, 131, 140, 148 and 156 with no more than three substitutions, insertions, or deletions (e.g. one substitution, two substitutions, three substitutions, four substitutions, or more) and a 5′ tail having the sequence of any of SEQ ID NOs: 210-2709 with one or more substitutions, insertions, or deletions (e.g. one substitution, two substitutions, three substitutions, four substitutions, or more), but at least 90% identity to one of SEQ ID NOs. 210-2709. A 3′ core sequence bearing substitutions, insertions, or deletions relative to one of SEQ ID Nos: 86, 100, 111, 121, 131, 140, 148 and 156 must retain the ability to specifically hybridize to the complement of SEQ ID NOs: 86, 100, 111, 121, 131, 140, 148 and 156 under initial reaction phase annealing conditions as described herein. In some embodiments, a dual domain primer as described herein can comprise a 3′ core having the sequence of any of SEQ ID NOs: 86, 100, 111, 121, 131, 140, 148 with no more than four substitutions, insertions, or deletions (e.g. one substitution, two substitutions, three substitutions, or four substitutions) and a 5′ tail having the sequence of any of SEQ ID NOs: 210-2709 with no more than four substitutions, insertions, or deletions (e.g. one substitution, two substitutions, three substitutions, or four substitutions). In the context of this paragraph, an insertion refers to the insertion of only one nucleotide, e.g. 2 insertions, even at the same site, refers to the addition of only 2 nucleotides. Similarly, in the context of this paragraph, a deletion refers to the deletion of only one nucleotide, e.g. 2 deletions, even at the same site, refers to the deletion of only 2 nucleotides.

[0149] Sequences for use as 3′ core sequences can be generated by selection of any sequence which can specifically anneal to a target (e.g. which is identical to or complementary to either strand of a double-stranded target nucleic acid molecule) by, e.g., selecting a sequence of 10-40 nucleotides in length from the target sequence (e.g. the Kras genes) and can be made into dual domain primers by appending at least a 5′ tail satisfying the requirements set out herein for dual domain primers. In some embodiments, 3′ core sequences can be identified by a method in which a “window” or “mask” of a given size (as a non-limiting example, 40 nucleotides) is literally or figuratively (including, e.g., in silico) placed on the target sequence to identify sequences in the size range that may serve as target sequences. By moving the sequence “window” progressively one nucleotide upstream or downstream of an initial target sequence location, the next potential target sequence can be identified, until the complete set of possible sequences is identified for any given target size selected. This process, coupled with systematic synthesis can identify sequences that can be tested using assay as described herein or as known in the art, thereby establishing those that are optimal for a given gene target. As a non-limiting example, SEQ ID NOs: 2710-93981 are 40-mer sequences obtained from the genomic sequence of K-ras by the use of such a “window” technique, and can be used as 3′ core sequences in the methods and compositions described herein. One of ordinary skill in the art can immediately envision that shorter 3′ core sequences (e.g. 10-39 nucleotides in length) can be obtained from any of SEQ ID NOs: 2710-93981. In some embodiments, a dual domain primer as described herein can comprise a 3′ core sequence having the sequence of any of SEQ ID NOs: 2710-93981 (or a 10-39 nucleotide fragment thereof) and a 5′ tail having the sequence of any of SEQ ID NOs 210-2709.

[0150] It is noted that the approach set out herein is effective for any multiplex PCR requiring high sensitivity, i.e. requiring reliable distinctions to be made between closely related or highly similar target sequences.

[0151] In some embodiments, the technology described herein relates to a composition according to any of the aspects described herein in which the set of primers comprises at least one primer (e.g., one primer, two primers, three primers, four primers, five primers, six primers, or more primers) having the sequence of one of SEQ ID NOs; 29-84 and 163-209. In some embodiments, the technology described herein relates to a composition according to any of the aspects described herein in which the set of primers comprises at least one primer (e.g., one primer, two primers, three primers, four primers, five primers, six primers, or more primers) having the sequence of one of SEQ ID NOs; 29-84 and 163-209 with no more than four substitutions, deletions, and/or insertions within the entirety of the primer. In some embodiments, the technology described herein relates to a composition according to any of the aspects described herein in which the set of primers comprises at least one primer (e.g., one primer, two primers, three primers, four primers, five primers, six primers, or more primers) having the sequence of one of SEQ ID NOs; 29-84 and 163-209 with no more than four substitutions, deletions, and/or insertions within the 5′ tail region of the primer. In some embodiments, the technology described herein relates to a composition according to any of the aspects described herein in which the set of primers comprises primers having the sequence of SEQ ID NOs; 29-44, 45-56, 57-66, 67-84, 163-186, or 187-209. In some embodiments, the technology described herein relates to a composition according to any of the aspects described herein in which the set of primers comprises primers having the sequence of SEQ ID NOs; 29-44, 45-56, 57-66, 67-84, 163-186, or 187-209 with no more than four substitutions, deletions, and/or insertions within the entirety of the primer. In some embodiments, the technology described herein relates to a composition according to any of the aspects described herein in which the set of primers comprises primers having the sequence of SEQ ID NOs; 29-44, 45-56, 57-66, 67-84, 163-186, or 187-209 with no more than four substitutions, deletions, and/or insertions within the 5′ tail region of the primer. In the context of this paragraph, an insertion refers to the insertion of only one nucleotide, e.g. 2 insertions, even at the same site, refers to the addition of only 2 nucleotides. Similarly, in the context of this paragraph, a deletion refers to the deletion of only one nucleotide, e.g. 2 deletions, even at the same site, refers to the deletion of only 2 nucleotides. A primer bearing substitutions, insertions, or deletions relative to one of SEQ ID Nos: 29-44, 45-56, 57-66, 67-84, 163-186, or 187-209 must retain the ability to specifically hybridize to the complement of the 3′ core region of SEQ ID NOs: 29-44, 45-56, 57-66, 67-84, 163-186, or 187-209 under initial reaction phase annealing conditions as described herein.

[0152] Detection

[0153] In various embodiments, the methods and compositions described herein relate to detecting amplified products for each target polynucleotide, target polymorphism, and/or allelic target site locus. In some embodiments, the detecting of the amplified product for each polynucleotide affirmatively indicates the presence of the polynucleotide in a sample. In some embodiments, the detecting of an amplified product of a polymorphic target polynucleotide indicates the presence of a particular allele of that polymorphic target polynucleotide in the sample.

[0154] In some embodiments, the detecting of the amplified product for each allelic target site locus indicates the genotype at the target site locus. By way of non-limiting example, if a sample is provided comprising a single copy of a target site locus which can be of genotype A or genotype B, a PCR amplification regimen according to the methods described herein can be performed with a set of oligonucleotide primers specific to the target site locus that comprises a dual domain primer with a 3′ terminal nucleotide(s) specific for the sequence comprising genotype A, a dual domain primer with a 3′ terminal nucleic acid(s) specific for the sequence comprising genotype B, and a reverse amplifying primer. After the final cycle of a PCR amplification regimen, the amplification products are detected and 2 outcomes are possible. If the product of the dual domain primer specific for genotype A is detected, the sample is indicated to be of genotype A. If the product of the dual domain primer specific for genotype B is detected, the sample is indicated to be of genotype B. One of skill in the art will appreciate that this principle can be applied to scenarios wherein there are multiple possible alleles of a target site locus, or multiple copies of a target site locus present in a sample, (e.g. in the case of a sample from a diploid organism). Also, for instances where there are only two alleles known to exist, it is contemplated that the assay can be performed without one or the other of the dual domain primers or truncated dual domain primers specific for genotype A or genotype B. In this instance, e.g., if only primers specific for genotype A are used, detection of extension/amplification product with the genotype A-specific primer affirmatively indicates genotype A, and lack of product passively indicates genotype B.

[0155] The methods and compositions described herein relate to the amplified products of two or more members of a primer subset which should be distinguishable. In some embodiments, the methods and compositions described herein relate to PCR amplification regimens wherein the amplified products of two or more members of a primer subset can be distinguished by being of distinct sizes. As used herein, a nucleic acid is of a “distinct size” if it is resolvable from nucleic acids of a different size. “Different sizes” refers to nucleic acid molecules that differ by at least one nucleotide in length. Generally, distinctly sized amplification products useful according to the methods described herein differ by a number of nucleotides greater than or equal to the limit of resolution for the separation process used in a given separation or detection method. For example, when the limit of resolution of separation is one base, distinctly sized amplification products differ by at least one base in length, but can differ by 2 bases, 5 bases, 10 bases, 20 bases, 50 bases, 100 bases or more. When the limit of resolution is, for example, 10 bases, distinctly sized amplification products will differ by at least 10 bases, but can differ by 11 bases 15 bases, 20 bases, 30 bases, 50 bases, 100 bases or more.

[0156] The amplified products of two or more members of a primer can be designed to be of distinct sizes if, for example, the primer set included one reverse primer and two forward primers, each of the forward primers being of a different length. In some embodiments, the 3′ core region of the two or more members of a primer subset can be of different lengths. However, it is preferred that the 5′ tail region of the two or more members of a primer subset can be of different lengths. In some embodiments, the overall lengths of two or more members of a primer subset can vary.

[0157] In some embodiments, the amplified products of two or more members of a primer subset can be of distinct sizes if, for example, the primer set includes one reverse primer and two forward primers, each of the forward primers has a 3′ core region that recognizes a different nucleotide sequence of the target polynucleotide.

[0158] In some embodiments, both the lengths of the primers or any portion thereof and the lengths of the segment of the target polynucleotide sequence that they anneal to can vary. Variation in the length of target sequence amplified, e.g. by chosen placement of the forward and reverse primers further or closer apart, is a straightforward approach to ensuring ready distinctions between products from different target loci. Variation in the length of the primer, especially the 5′ tail regions of dual domain primers, is particularly effective, e.g. distinguishing the products of specific alleles of a given target locus in an assay.

[0159] In some embodiments the amplified products are distinguished by being labeled with different detectable labels. In some embodiments, the label is incorporated into a dual domain or truncated dual domain primer. In some embodiments, the label is conjugated to a dual domain or truncated dual domain primer.

[0160] In some embodiments, the label is bound to the primer after the PCR amplification regimen is complete. In some embodiments, the label is conjugated to an oligonucleotide or antibody or portion thereof that specifically binds to primer, or to a moiety attached thereto.

[0161] In some embodiments, the label is bound to the 3′ core region of a dual domain or truncated dual domain primer after the PCR amplification regimen is complete. In some embodiments, the label is conjugated to an oligonucleotide or antibody or portion thereof that specifically binds to the 3′ core region of a dual domain primer or truncated dual domain primer, or to a moiety attached thereto.

[0162] In some embodiments, the label is bound to the 5′ tail region of a dual domain or truncated dual domain primer after the PCR amplification regimen is complete. In some embodiments, the label is conjugated to an oligonucleotide or antibody or portion thereof that specifically binds to the 5′ tail region of a dual domain primer or truncated dual domain primer, or to a moiety attached thereto.

[0163] Two detectable labels are considered different if the signal from one label can be distinguished from the signal from the other. Detectable labels can comprise, for example, a light-absorbing dye, a fluorescent dye, or a radioactive label. Fluorescent dyes are preferred. Generally, a fluorescent signal is distinguishable from another fluorescent signal if the peak emission wavelengths are separated by at least 20 nm. Greater peak separation is preferred, especially where the emission peaks of fluorophores in a given reaction are wide, as opposed to narrow or more abrupt peaks.

[0164] Detectable labels, methods of detecting them, and methods of incorporating them into or coupling and/or binding them to an amplified product are well known in the art. The following is provided by way of non-limiting example.

[0165] In some embodiments, detectable labels can include labels that can be detected by spectroscopic, photochemical, biochemical, immunochemical, electromagnetic, radiochemical, or chemical means, such as fluorescence, chemifluoresence, or chemiluminescence, or any other appropriate means.

[0166] The detectable labels used in the methods described herein can be primary labels (where the label comprises a moiety that is directly detectable or that produces a directly detectable moiety) or secondary labels (where the detectable label binds to another moiety to produce a detectable signal, e.g., as is common in immunological labeling using secondary and tertiary antibodies).

[0167] The detectable label can be linked by covalent or non-covalent means to nucleic acids. Alternatively, a detectable label can be linked such as by directly labeling a molecule that achieves binding to another nucleic acid via a ligand-receptor binding pair arrangement or other such specific recognition molecules. Detectable labels can include, but are not limited to radioisotopes, bioluminescent compounds, chromophores, antibodies, chemiluminescent compounds, fluorescent compounds, metal chelates, and enzymes.

[0168] In some embodiments, a detectable label can be a fluorescent dye molecule, or fluorophore including, but not limited to fluorescein, phycoerytllrin Cy3™, Cy5™, allophycocyanine, Texas Red, peridenin chlorophyll, cyanine, tandem conjugates such as phycoerythrin-Cy5™, green fluorescent protein, rhodamine, fluorescein isothiocyanate (FITC) and Oregon Green™, rhodamine and derivatives (e.g., Texas red and tetrarhodimine isothiocynate (TRITC)), biotin, phycoerythrin, AMCA, CyDyes™, 6-carboxyfhiorescein (commonly known by the abbreviations FAM and F), 6-carboxy-2′,4′,7′,4,7-hexachlorofiuorescein (HEX), 6-carboxy-4′,5′-dichloro-2′,7′-dimethoxyfiuorescein (JOE or J), N,N,N′,N′-tetramethyl-6carboxyrhodamine (TAMRA or T), 6-carboxy-X-rhodamine (ROX or R), 5-carboxyrhodamine-6G (R6G5 or G5), 6-carboxyrhodamine-6G (R6G6 or G6), and rhodamine 110; cyanine dyes. e.g. Cy3, Cy5 and Cy7 dyes; coumarins, e.g. umbelliferone; benzimide dyes, e.g. Hoechst 33258; phenanthridine dyes, e.g. Texas Red; ethidium dyes; acridine dyes carbazole dyes; phenoxazine dyes; porphyrin dyes; polymethine dyes, e.g. cyanine dyes such as Cy3, Cy5, etc; BODIPY dyes and quinoline dyes.

[0169] In some embodiments, a detectable label can be a radiolabel including, but not limited to ³H, ¹²⁵I, ³⁵S, ¹⁴C, ³²P, and ³³P.

[0170] In some embodiments, a detectable label can be an enzyme including, but not limited to horseradish peroxidase and alkaline phosphatase. An enzymatic label can produce, for example, a chemiluminescent signal, a color signal, or a fluorescent signal.

[0171] In some embodiments, a detectable label is a chemiluminescent label, including, but not limited to luminol, luciferin or lucigenin.

[0172] In some embodiments, a detectable label can be a spectral calorimetric label including, but not limited to colloidal gold or colored glass or plastic (e.g., polystyrene, polypropylene, and latex) beads.

[0173] In some embodiments, the methods and compositions described herein relate to PCR amplification regimens wherein the amplified products of two or more members of a primer subset can be distinguished by being sequenced. Methods of sequencing nucleic acids are well known in the art and commercial sequencing services are widely available (e.g. Genscript; Piscataway, N.J.).

[0174] In some embodiments, the methods and compositions described herein relate to PCR amplification regimens wherein the amplified products of two or more members of a primer subset can be distinguished by melting-curve analysis. Methods of melting-curve analyses are well known in the art (e.g. Ririe et al. Analytical Biochemistry 1997 245:154-160; Wittwer et al. Clinical Chemistry 2003 49:853-860; and Liew et al. Clinical Chemistry 2007 50:1156-1164; which are incorporated by reference herein in their entireties).

[0175] Direct detection of size-separated amplification products is preferred. However, in some embodiments, the methods and compositions described herein relate to PCR amplification regimens wherein the amplified products of two or more members of a primer subset can be distinguished by oligonucleotide hybridization. One having ordinary skill in the art, using the sequence information of the target polymorphisms, can design probes which are fully complementary to a single polymorphism and not to other polymorphisms of a given target site locus or target nucleic acid. Hybridization conditions can be routinely optimized to minimize background signal by non-fully complementary hybridization. Hybridization probes can be designed to hybridize to the 5′ tail region, the 3′ core region, the tail-core junction, or part of the amplified product not comprised by the primer, provided that the sequence to which the probe will hybridize distinguishes it from at least one other amplified product present in the reaction.

[0176] In some embodiments, the PCR amplification regimen described herein is a multiplex and/or multimodal regimen. In some embodiments, an amplification product of a dual domain (or truncated dual domain primer) can be distinguished from the amplification products of other dual domain (or truncated dual domain primers) by at least two approaches. By way of non-limiting example, all the products of a set of oligonucleotide primers can be labeled with one common label and each unique amplification product can be distinguished from the other amplification products of the same subset of primers by being of a distinct size.

[0177] The description of embodiments of the disclosure is not intended to be exhaustive or to limit the disclosure to the precise form disclosed. While specific embodiments of, and examples for, the disclosure are described herein for illustrative purposes, various equivalent modifications are possible within the scope of the disclosure, as those skilled in the relevant art will recognize. The teachings of the disclosure provided herein can be applied to other procedures or methods as appropriate. The various embodiments described herein can be combined to provide further embodiments. Aspects of the disclosure can be modified, if necessary, to employ the compositions, functions and concepts described herein to provide yet further embodiments of the method and compositions described herein.

[0178] Specific elements of any of the foregoing embodiments can be combined or substituted for elements in other embodiments. Furthermore, while advantages associated with certain embodiments of the disclosure have been described in the context of these embodiments, other embodiments may also exhibit such advantages, and not all embodiments need necessarily exhibit such advantages to fall within the scope of the disclosure.

[0179] All patents and other publications identified are expressly incorporated herein by reference for the purpose of describing and disclosing, for example, the methodologies described in such publications that might be used in connection with the present invention. These publications are provided solely for their disclosure prior to the filing date of the present application. Nothing in this regard should be construed as an admission that the inventors are not entitled to antedate such disclosure by virtue of prior invention or for any other reason. All statements as to the date or representation as to the contents of these documents is based on the information available to the applicants and does not constitute any admission as to the correctness of the dates or contents of these documents.

[0180] This invention is further illustrated by the following examples which should not be construed as limiting.

[0181] Some embodiments of the technology described herein can be defined according to any of the following numbered paragraphs:
[0182] 1. A method for determining the presence of one or more target polynucleotides, the method comprising;
   [0183] performing a PCR amplification regimen comprising cycles of strand separation, primer annealing, and primer extension on a reaction mixture comprising a nucleic acid sample and a set of oligonucleotide primers specific for each target polynucleotide;
   [0184] wherein each said set of oligonucleotide primers comprises a first subset of at least one truncated dual domain forward primer and a second subset of at least one reverse primer;
   [0185] wherein each truncated dual domain primer of a set comprises a 5′ tail region that differs from the 5′ tail region of other dual domain primers in the set and a 3′ core region complementary to a sequence on one strand of a double-stranded nucleic acid comprising said target;
   [0186] wherein for each truncated dual domain primer, the 3′ core substantially anneals to its complementary target site sequence at a first annealing temperature, and the sequence comprised by the 5′ tail and 3′ core region substantially anneals to its complement at a second annealing temperature, the second annealing temperature being higher than the first annealing temperature, such that at said second annealing temperature said 3′ core of said truncated dual domain primer cannot substantially anneal to a template molecule that does not also have the complement of the truncated dual domain primer's 5′ tail sequence;
   [0187] wherein for each truncated dual domain primer of a primer set:
      [0188] the 5′ tail sequence does not have any homology to the target sequence; and
      [0189] the 5′ tail sequence has 6 or fewer contiguous homologous bases relative to any other 5′ tail sequence of the dual domain or truncated dual domain primer set;
   [0190] wherein said PCR amplification regimen comprises first and second phases,
      [0191] the first phase comprising annealing at said first annealing temperature for a first set of cycles, and;
      [0192] the second phase comprising annealing at said second annealing temperature for a second set of cycles; and detecting an amplified product for each target polynucleotide, wherein said detecting indicates the presence of said target polynucleotide.
[0193] 2. The method of paragraph 1, wherein a reverse primer comprises an amplifying primer.
[0194] 3. The method of paragraph 1, wherein said target polynucleotides are selected from the group consisting of:
   [0195] polynucleotides comprising SNPs; polynucleotides comprising alleles of SNPs; protein coding DNA or RNA polynucleotides; non-protein coding DNA or RNA polynucleotides; polynucleotides comprising mutations; polynucleotides comprising deletions; and polynucleotides comprising insertions.
[0196] 4. The method of paragraph 1, wherein a set of primers comprises at least one dual domain forward primer;
   [0197] wherein each dual domain primer of a set comprises a 5′ tail region that differs from the 5′ tail region of other dual domain primers in the set, a 3′ core region complementary to a sequence on one strand of a double-stranded nucleic acid comprising said target, and a terminal nucleotide complementary to one of the variant nucleotides occurring at said target site;
   [0198] wherein for each dual domain primer, the 3′ core substantially anneals to its complementary target site sequence at a first annealing temperature, and the sequence comprised by the 5′ tail and 3′ core region substantially anneals to its complement at a second annealing temperature, the second annealing temperature being higher than the first annealing temperature, such that at said second annealing temperature said 3′ core of said dual domain primer cannot substantially anneal to a template molecule that does not also have the complement of the dual domain primer's 5′ tail sequence; and
   [0199] wherein for each truncated dual domain primer of a primer set:
      [0200] the 5′ tail sequence does not have any homology to the target sequence; and
      [0201] the 5′ tail sequence has 6 or fewer contiguous homologous bases relative to any other 5′ tail sequence of the dual domain or truncated dual domain primer set.
[0202] 5. The method of any of paragraphs 1-4, wherein a plurality of target polynucleotides are detected in a single reaction.
[0203] 6. The method of paragraph 5, wherein the target polynucleotides comprise at least two polynucleotides selected from the group consisting of:
   [0204] polynucleotides comprising SNPs; polynucleotides comprising alleles of SNPs; protein coding DNA or RNA polynucleotides; non-protein coding DNA or RNA polynucleotides; polynucleotides comprising mutations; polynucleotides comprising deletions; and polynucleotides comprising insertions.
[0205] 7. The method of paragraph 6, wherein the target polynucleotides comprise at least one polynucleotide selected from the group consisting of:
   [0206] polynucleotides comprising SNPs and polynucleotides comprising alleles of SNPs; and at least one polynucleotide selected from the group consisting of:
   [0207] protein coding DNA or RNA polynucleotides; non-protein coding DNA or RNA polynucleotides; polynucleotides comprising mutations; polynucleotides comprising deletions; and polynucleotides comprising insertions.
[0208] 8. The method of any of paragraphs 4-7, wherein at least one of the target polynucleotides comprises a SNP and wherein said method genotypes the nucleotide at said SNP.
[0209] 9. The method of paragraph 8, wherein dual domain or truncated dual domain primers specific for each of 2 or more alleles of a target SNP are present in the same reaction.
[0210] 10. The method of paragraph 9, wherein one dual domain or truncated dual domain primer of a set is specific for the predominant allele of the target SNP.
[0211] 11. The method of any of paragraphs 1-10, wherein the dual domain or truncated dual domain primers specific for each of 2 or more alleles or sequence variants of a target nucleotide are present in the same reaction.
[0212] 12. The method of any of paragraphs 1-11, wherein one dual domain or truncated dual domain primer of a set is specific for the predominant allele or variant allele of the target polynucleotide.
[0213] 13. The method of any of paragraphs 1-12, wherein the amplified products of two or more members of a primer subset can be distinguished.
[0214] 14. The method of paragraph 13, wherein the amplified products of two or more members of a primer subset are distinguished by being of distinct sizes.
[0215] 15. The method of paragraph 13, wherein the amplified products of two or more members of a primer subset are distinguished by being labeled with different detectable labels.
[0216] 16. The method of paragraph 13, wherein the products of two or more members of a primer subset are distinguished by sequencing the products.
[0217] 17. The method of paragraph 13, wherein the products of two or more members of a primer subset are distinguished by oligonucleotide hybridization.
[0218] 18. The method of paragraph 13, wherein the products of two or more members of a primer subset are distinguished by melting-curve analysis of the amplified products.
[0219] 19. The method of any of paragraphs 1-18, wherein the core sequence is 10 to 40 nucleotides in length.
[0220] 20. The method of any of paragraphs 1-19, wherein the core sequence is 11 to 20 nucleotides in length.
[0221] 21. The method of any of paragraphs 1-20, wherein the first phase comprises from 1 to 10 cycles.
[0222] 22. The method of any of paragraphs 1-21, wherein the first phase comprises from 3 to 5 cycles.
[0223] 23. The method of any of paragraphs 1-22, wherein each 5′ tail sequence of a set has fewer than 3 contiguous homologous bases relative to the other 5′ tail sequences of the set.
[0224] 24. The method of any of paragraphs 1-23, wherein each 5′ tail sequence of a set has fewer than 2 contiguous homologous bases relative to the other 5′ tail sequences of the set.
[0225] 25. The method of any of paragraphs 1-24, wherein the 5′ tail sequence is from 1 to 200 nucleotides in length.
[0226] 26. The method of any of paragraphs 1-25, wherein the 5′ tail sequence is from 4 to 150 nucleotides in length.
[0227] 27. The method of any of paragraphs 1-26, wherein the second annealing temperature is at least 4° C. higher than the first annealing temperature.
[0228] 28. The method of any of paragraphs 1-27, wherein the dual domain or truncated dual domain primers present in a reaction have Tₘ values for their respective 3′ core regions that vary by no more than 8° C. from each other.
[0229] 29. The method of any of paragraphs 1-28, wherein the 5′ tail sequence is selected from any of SEQ ID NOs 210-2709.
[0230] 30. The method of any of paragraphs 1-29, wherein each of the 5′ tail sequences is selected from SEQ ID NOs. 210-2709.
[0231] 31. The method of any of paragraphs 1-30, wherein the one or more set of primers comprises two or more sequences selected from the groups consisting of:
   [0232] SEQ ID NOs: 29-44; SEQ ID NOs: 51-56; SEQ ID NOs: 62-66; SEQ ID NOs: 67-84; SEQ ID NOs: 163-186; and SEQ ID NOs: 187-209.
[0233] 32. A composition for determining the presence of one or more target polynucleotides,
[0234] comprising;
[0235] at least one set of oligonucleotide primers specific for each target polynucleotide;
[0236] wherein each said set of oligonucleotide primers comprises a first subset of at least one truncated dual domain forward primer and a second subset of at least one reverse primer;
[0237] wherein each truncated dual domain primer of a set comprises a 5′ tail region that differs from the 5′ tail region on other truncated dual domain primers in the set and a 3′ core region complementary to a sequence on one strand of a double-stranded nucleic acid comprising said target;
[0238] wherein for each truncated dual domain primer, the 3′ core substantially anneals to its complementary target site sequence at a first annealing temperature, and the sequence comprised by the 5′ tail and 3′ core region substantially anneals to its complement at a second annealing temperature, the second annealing temperature being higher than the first annealing temperature, such that at said second annealing temperature said 3′ core of said truncated dual domain primer cannot substantially anneal to a template molecule that does not also have the complement of the primer's 5′ tail sequence;
[0239] wherein for each member of said truncated dual domain primer set:
   [0240] the 5′ tail sequence does not have any homology to the target sequence; and
   [0241] the 5′ tail sequence has 6 or fewer contiguous homologous bases relative to the other 5′ tail sequences of the truncated dual domain primer set.
[0242] 33. The composition of paragraph 32, further comprising a nucleic acid sample.
[0243] 34. The composition of any of paragraphs 32-33, wherein at least one forward primer comprises a dual domain primer;
   [0244] wherein each dual domain primer of a set comprises a 5′ tail region that differs from the 5′ tail region on other dual domain primers in the set, a 3′ core region complementary to a sequence on one strand of a double-stranded nucleic acid comprising said target, and a terminal nucleotide complementary to one of the variant nucleotides occurring at said target site;
   [0245] wherein for each dual domain primer, the 3′ core substantially anneals to its complementary target site sequence at a first annealing temperature, and the sequence comprised by the 5′ tail and 3′ core region substantially anneals to its complement at a second annealing temperature, the second annealing temperature being higher than the first annealing temperature, such that at said second annealing temperature said 3′ core of said dual domain primer cannot substantially anneal to a template molecule that does not also have the complement of the primer's 5′ tail sequence;
   [0246] wherein for each member of said dual domain primer set:
      [0247] the 5′ tail sequence does not have any homology to the target sequence; and
      [0248] the 5′ tail sequence has 6 or fewer contiguous homologous bases relative to the other 5′ tail sequences of the dual domain primer set.
[0249] 35. The composition of any of paragraphs 32-34, wherein a reverse primer comprises a dual domain primer.
[0250] 36. The composition of any of paragraphs 32-34, wherein a reverse primer comprises a truncated dual domain primer.
[0251] 37. The composition of any of paragraphs 32-36, wherein a reverse primer comprises an amplifying primer.
[0252] 38. The composition of any of paragraphs 32-37, wherein said target polynucleotides are selected from the group consisting of:
   [0253] polynucleotides comprising SNPs; polynucleotides comprising alleles of SNPs; protein coding DNA or RNA polynucleotides; non-protein coding DNA or RNA polynucleotides; polynucleotides comprising mutations; polynucleotides comprising deletions; and polynucleotides comprising insertions.
[0254] 39. The composition of any of paragraphs 32-38, wherein the target polynucleotides comprise at least two polynucleotides selected from the group consisting of:
   [0255] polynucleotides comprising SNPs; polynucleotides comprising alleles of SNPs; protein coding DNA or RNA polynucleotides; non-protein coding DNA or RNA polynucleotides; polynucleotides comprising mutations; polynucleotides comprising deletions; and polynucleotides comprising insertions.
[0256] 40. The composition of any of paragraphs 32-39, wherein the target polynucleotides comprise at least one polynucleotide selected from the group consisting of:
   [0257] polynucleotides comprising SNPs and polynucleotides comprising alleles of SNPs; and at least one polynucleotide selected from the group consisting of:
   [0258] protein coding DNA or RNA polynucleotides; non-protein coding DNA or RNA polynucleotides; polynucleotides comprising mutations; polynucleotides comprising deletions; and polynucleotides comprising insertions.
[0259] 41. The composition of any of paragraphs 32-40, wherein a subset of dual domain forward primers comprises primers specific for each of 2 or more alleles of a target SNP.
[0260] 42. The composition of any of paragraphs 32-41, wherein one dual domain forward primer of a set is specific for the predominant allele of the target SNP.
[0261] 43. The composition of any of paragraphs 32-42, wherein the subset of dual domain or truncated dual domain forward primers comprises primers specific for each of 2 or more alleles or sequence variants of a target nucleotide.
[0262] 44. The composition of any of paragraphs 32-43, wherein one dual domain or truncated dual domain forward primer of a set is specific for the predominant allele or variant allele of the target polynucleotide.
[0263] 45. The composition of any of paragraphs 32-44, wherein the core sequence is 10 to 40 nucleotides in length.
[0264] 46. The composition of any of paragraphs 32-45, wherein the core sequence is 11 to 20 nucleotides in length.
[0265] 47. The composition of any of paragraphs 32-46, wherein each 5′ tail sequence of a set has fewer than 3 contiguous homologous bases relative to the other 5′ tail sequences of the set.
[0266] 48. The composition of any of paragraphs 32-47, wherein each 5′ tail sequence of a set has fewer than 2 contiguous homologous bases relative to the other 5′ tail sequences of the set.
[0267] 49. The composition of any of paragraphs 32-48, wherein the 5′ tail sequence is from 1 to 200 nucleotides in length.
[0268] 50. The composition of any of paragraphs 32-49, wherein the 5′ tail sequence is from 4 to 150 nucleotides in length.
[0269] 51. The composition of any of paragraphs 32-50, wherein the second annealing temperature is at least 4° C. higher than the first annealing temperature.
[0270] 52. The composition of any of paragraphs 32-51, wherein the dual domain primers present in a reaction have Tₘ values for their respective 3′ core regions that vary by no more than 8° C. from each other.
[0271] 53. The composition of any of paragraphs 32-52, wherein the 5′ tail sequence is selected from any of SEQ ID NOs 210-2709.
[0272] 54. The compositions of any of paragraphs 32-53, wherein each of the 5′ tail sequences is selected from SEQ ID NOs. 210-2709.
[0273] 55. The composition of any of paragraphs 32-54, wherein the one or more set of primers comprises two or more sequences selected from the groups consisting of:
   [0274] SEQ ID NOs: 29-44; SEQ ID NOs: 51-56; SEQ ID NOs: 62-66; SEQ ID NOs: 67-84; SEQ ID NOs: 163-186; and SEQ ID NOs: 187-209.
[0275] 56. A method for determining the presence of one or more target polynucleotides, the method comprising;
   [0276] performing a PCR amplification regimen comprising cycles of strand separation, primer annealing, and primer extension on a reaction mixture comprising a nucleic acid sample and a set of oligonucleotide primers specific for each target polynucleotide;
   [0277] wherein each said set of oligonucleotide primers comprises a first subset of at least one truncated dual domain forward primer and a second subset of at least one reverse primer;
   [0278] wherein each truncated dual domain primer of a set comprises a 5′ tail region that differs from the 5′ tail region of other dual domain primers in the set and a 3′ core region complementary to a sequence on one strand of a double-stranded nucleic acid comprising said target;
   [0279] wherein for each truncated dual domain primer, the 3′ core substantially anneals to its complementary target site sequence at a first annealing temperature, and the sequence comprised by the 5′ tail and 3′ core region substantially anneals to its complement at a second annealing temperature, the second annealing temperature being higher than the first annealing temperature, such that at said second annealing temperature said 3′ core of said truncated dual domain primer cannot substantially anneal to a template molecule that does not also have the complement of the truncated dual domain primer's 5′ tail sequence;
   [0280] wherein for each truncated dual domain primer of a primer set:
      [0281] the 5′ tail sequence does not have any homology to the target sequence; and
      [0282] the 5′ tail sequence has 6 or fewer contiguous homologous bases relative to any other 5′ tail sequence of the dual domain or truncated dual domain primer set;
   [0283] wherein said PCR amplification regimen comprises first and second phases,
      [0284] the first phase comprising annealing at said first annealing temperature for a first set of cycles, and;
      [0285] the second phase comprising annealing at said second annealing temperature for a second set of cycles;
   [0286] and detecting an amplified product for each target polynucleotide, wherein said detecting indicates the presence of said target polynucleotide.
[0287] 57. The method of paragraph 56, wherein a reverse primer comprises an amplifying primer.
[0288] 58. The method of any of paragraphs 56-57, wherein said target polynucleotides are selected from the group consisting of:
   [0289] polynucleotides comprising SNPs; polynucleotides comprising alleles of SNPs; protein coding DNA or RNA polynucleotides; non-protein coding DNA or RNA polynucleotides; polynucleotides comprising mutations; polynucleotides comprising deletions; and polynucleotides comprising insertions.
[0290] 59. The method of any of paragraphs 56-58, wherein a set of primers comprises at least one dual domain forward primer;
   [0291] wherein each dual domain primer of a set comprises a 5′ tail region that differs from the 5′ tail region of other dual domain primers in the set, a 3′ core region complementary to a sequence on one strand of a double-stranded nucleic acid comprising said target, and a terminal nucleotide complementary to one of the variant nucleotides occurring at said target site;
   [0292] wherein for each dual domain primer, the 3′ core substantially anneals to its complementary target site sequence at a first annealing temperature, and the sequence comprised by the 5′ tail and 3′ core region substantially anneals to its complement at a second annealing temperature, the second annealing temperature being higher than the first annealing temperature, such that at said second annealing temperature said 3′ core of said dual domain primer cannot substantially anneal to a template molecule that does not also have the complement of the dual domain primer's 5′ tail sequence; and
   [0293] wherein for each truncated dual domain primer of a primer set:
      [0294] the 5′ tail sequence does not have any homology to the target sequence; and
      [0295] the 5′ tail sequence has 6 or fewer contiguous homologous bases relative to any other 5′ tail sequence of the dual domain or truncated dual domain primer set.
[0296] 60. The method of any of paragraphs 56-59, wherein a plurality of target polynucleotides are detected in a single reaction.
[0297] 61. The method of paragraph 60, wherein the target polynucleotides comprise at least two polynucleotides selected from the group consisting of:
   [0298] polynucleotides comprising SNPs; polynucleotides comprising alleles of SNPs; protein coding DNA or RNA polynucleotides; non-protein coding DNA or RNA polynucleotides; polynucleotides comprising mutations; polynucleotides comprising deletions; and polynucleotides comprising insertions.
[0299] 62. The method of paragraph 61, wherein the target polynucleotides comprise at least one polynucleotide selected from the group consisting of:
   [0300] polynucleotides comprising SNPs and polynucleotides comprising alleles of SNPs; and at least one polynucleotide selected from the group consisting of:
   [0301] protein coding DNA or RNA polynucleotides; non-protein coding DNA or RNA polynucleotides; polynucleotides comprising mutations; polynucleotides comprising deletions; and polynucleotides comprising insertions.
[0302] 63. The method of any of paragraphs 56-62, wherein at least one of the target polynucleotides comprises a SNP and wherein said method genotypes the nucleotide at said SNP.
[0303] 64. The method of paragraph 63, wherein dual domain or truncated dual domain primers specific for each of 2 or more alleles of a target SNP are present in the same reaction.
[0304] 65. The method of paragraph 64, wherein one dual domain or truncated dual domain primer of a set is specific for the predominant allele of the target SNP.
[0305] 66. The method of any of paragraphs 56-65, wherein the dual domain or truncated dual domain primers specific for each of 2 or more alleles or sequence variants of a target nucleotide are present in the same reaction.
[0306] 67. The method of any of paragraphs 56-66, wherein one dual domain or truncated dual domain primer of a set is specific for the predominant allele or variant allele of the target polynucleotide.
[0307] 68. The method of any of paragraphs 56-67, wherein the amplified products of two or more members of a primer subset can be distinguished.
[0308] 69. The method of paragraph 68, wherein the amplified products of two or more members of a primer subset are distinguished by being of distinct sizes.
[0309] 70. The method of paragraph 68, wherein the amplified products of two or more members of a primer subset are distinguished by being labeled with different detectable labels.
[0310] 71. The method of paragraph 68, wherein the products of two or more members of a primer subset are distinguished by sequencing the products.
[0311] 72. The method of paragraph 68, wherein the products of two or more members of a primer subset are distinguished by oligonucleotide hybridization.
[0312] 73. The method of paragraph 68, wherein the products of two or more members of a primer subset are distinguished by melting-curve analysis of the amplified products.
[0313] 74. The method of any of paragraphs 56-73, wherein the core sequence is 10 to 40 nucleotides in length.
[0314] 75. The method of any of paragraphs 56-74, wherein the core sequence is 11 to 20 nucleotides in length.
[0315] 76. The method of any of paragraphs 56-75, wherein the first phase comprises from 1 to 10 cycles.
[0316] 77. The method of any of paragraphs 56-76, wherein the first phase comprises from 3 to 5 cycles.
[0317] 78. The method of any of paragraphs 56-77, wherein each 5′ tail sequence of a set has fewer than 3 contiguous homologous bases relative to the other 5′ tail sequences of the set.
[0318] 79. The method of any of paragraphs 56-78, wherein each 5′ tail sequence of a set has fewer than 2 contiguous homologous bases relative to the other 5′ tail sequences of the set.
[0319] 80. The method of any of paragraphs 56-79, wherein the 5′ tail sequence is from 1 to 200 nucleotides in length.
[0320] 81. The method of any of paragraphs 56-80, wherein the 5′ tail sequence is from 4 to 150 nucleotides in length.
[0321] 82. The method of any of paragraphs 56-81, wherein the second annealing temperature is at least 4° C. higher than the first annealing temperature.
[0322] 83. The method of any of paragraphs 56-82, wherein the dual domain or truncated dual domain primers present in a reaction have Tₘ values for their respective 3′ core regions that vary by no more than 8° C. from each other.
[0323] 84. The method of any of paragraphs 56-83, wherein the 5′ tail sequence is selected from any of SEQ ID NOs 210-2709.
[0324] 85. The method of any of paragraphs 56-84, wherein each of the 5′ tail sequences is selected from SEQ ID NOs. 210-2709.
[0325] 86. The method of any of paragraphs 56-85, wherein the one or more set of primers comprises two or more sequences selected from the groups consisting of:
   [0326] SEQ ID NOs: 29-44; SEQ ID NOs: 51-56; SEQ ID NOs: 62-66; SEQ ID NOs: 67-84; SEQ ID NOs: 163-186; and SEQ ID NOs: 187-209.
[0327] 87. A composition for determining the presence of one or more target polynucleotides,
   [0328] comprising;
   [0329] at least one set of oligonucleotide primers specific for each target polynucleotide;
   [0330] wherein each said set of oligonucleotide primers comprises a first subset of at least one truncated dual domain forward primer and a second subset of at least one reverse primer;
   [0331] wherein each truncated dual domain primer of a set comprises a 5′ tail region that differs from the 5′ tail region on other truncated dual domain primers in the set and a 3′ core region complementary to a sequence on one strand of a double-stranded nucleic acid comprising said target;
   [0332] wherein for each truncated dual domain primer, the 3′ core substantially anneals to its complementary target site sequence at a first annealing temperature, and the sequence comprised by the 5′ tail and 3′ core region substantially anneals to its complement at a second annealing temperature, the second annealing temperature being higher than the first annealing temperature, such that at said second annealing temperature said 3′ core of said truncated dual domain primer cannot substantially anneal to a template molecule that does not also have the complement of the primer's 5′ tail sequence;
   [0333] wherein for each member of said truncated dual domain primer set:
      [0334] the 5′ tail sequence does not have any homology to the target sequence; and
      [0335] the 5′ tail sequence has 6 or fewer contiguous homologous bases relative to the other 5′ tail sequences of the truncated dual domain primer set.
[0336] 88. The composition of paragraph 87, further comprising a nucleic acid sample.
[0337] 89. The composition of any of paragraphs 87-88, wherein at least one forward primer comprises a dual domain primer;
   [0338] wherein each dual domain primer of a set comprises a 5′ tail region that differs from the 5′ tail region on other dual domain primers in the set, a 3′ core region complementary to a sequence on one strand of a double-stranded nucleic acid comprising said target, and a terminal nucleotide complementary to one of the variant nucleotides occurring at said target site;
   [0339] wherein for each dual domain primer, the 3′ core substantially anneals to its complementary target site sequence at a first annealing temperature, and the sequence comprised by the 5′ tail and 3′ core region substantially anneals to its complement at a second annealing temperature, the second annealing temperature being higher than the first annealing temperature, such that at said second annealing temperature said 3′ core of said dual domain primer cannot substantially anneal to a template molecule that does not also have the complement of the primer's 5′ tail sequence;
   [0340] wherein for each member of said dual domain primer set:
      [0341] the 5′ tail sequence does not have any homology to the target sequence; and
      [0342] the 5′ tail sequence has 6 or fewer contiguous homologous bases relative to the other 5′ tail sequences of the dual domain primer set.
[0343] 90. The composition of any of paragraphs 87-89, wherein a reverse primer comprises a dual domain primer.
[0344] 91. The composition of any of paragraphs 87-90, wherein a reverse primer comprises a truncated dual domain primer.
[0345] 92. The composition of any of paragraphs 87-91, wherein a reverse primer comprises an amplifying primer.
[0346] 93. The composition of any of paragraphs 87-92, wherein said target polynucleotides are selected from the group consisting of:
   [0347] polynucleotides comprising SNPs; polynucleotides comprising alleles of SNPs; protein coding DNA or RNA polynucleotides; non-protein coding DNA or RNA polynucleotides; polynucleotides comprising mutations; polynucleotides comprising deletions; and polynucleotides comprising insertions.
[0348] 94. The composition of any of paragraphs 87-93, wherein the target polynucleotides comprise at least two polynucleotides selected from the group consisting of:
   [0349] polynucleotides comprising SNPs; polynucleotides comprising alleles of SNPs; protein coding DNA or RNA polynucleotides; non-protein coding DNA or RNA polynucleotides; polynucleotides comprising mutations; polynucleotides comprising deletions; and polynucleotides comprising insertions.
[0350] 95. The composition of any of paragraphs 87-94, wherein the target polynucleotides comprise at least one polynucleotide selected from the group consisting of:
   [0351] polynucleotides comprising SNPs and polynucleotides comprising alleles of SNPs; and at least one polynucleotide selected from the group consisting of:
   [0352] protein coding DNA or RNA polynucleotides; non-protein coding DNA or RNA polynucleotides; polynucleotides comprising mutations; polynucleotides comprising deletions; and polynucleotides comprising insertions.
[0353] 96. The composition of any of paragraphs 87-95, wherein a subset of dual domain forward primers comprises primers specific for each of 2 or more alleles of a target SNP.
[0354] 97. The composition of any of paragraphs 87-96, wherein one dual domain forward primer of a set is specific for the predominant allele of the target SNP.
[0355] 98. The composition of any of paragraphs 87-97, wherein the subset of dual domain or truncated dual domain forward primers comprises primers specific for each of 2 or more alleles or sequence variants of a target nucleotide.
[0356] 99. The composition of any of paragraphs 87-98, wherein one dual domain or truncated dual domain forward primer of a set is specific for the predominant allele or variant allele of the target polynucleotide.
[0357] 100. The composition of any of paragraphs 87-99, wherein the core sequence is 10 to 40 nucleotides in length.
[0358] 101. The composition of any of paragraphs 87-100, wherein the core sequence is 11 to 20 nucleotides in length.
[0359] 102. The composition of any of paragraphs 87-101, wherein each 5′ tail sequence of a set has fewer than 3 contiguous homologous bases relative to the other 5′ tail sequences of the set.
[0360] 103. The composition of any of paragraphs 87-102, wherein each 5′ tail sequence of a set has fewer than 2 contiguous homologous bases relative to the other 5′ tail sequences of the set.
[0361] 104. The composition of any of paragraphs 87-103, wherein the 5′ tail sequence is from 1 to 200 nucleotides in length.
[0362] 105. The composition of any of paragraphs 87-104, wherein the 5′ tail sequence is from 4 to 150 nucleotides in length.
[0363] 106. The composition of any of paragraphs 87-105, wherein the second annealing temperature is at least 4° C. higher than the first annealing temperature.
[0364] 107. The composition of any of paragraphs 87-106, wherein the dual domain primers present in a reaction have Tₘ values for their respective 3′ core regions that vary by no more than 8° C. from each other.
[0365] 108. The composition of any of paragraphs 87-107, wherein the 5′ tail sequence is selected from any of SEQ ID NOs 210-2709.
[0366] 109. The composition of any of paragraphs 87-108, wherein each of the 5′ tail sequences is selected from SEQ ID NOs. 210-2709.
[0367] 110. The composition of any of paragraphs 87-109, wherein the one or more set of primers comprises two or more sequences selected from the groups consisting of:
   [0368] SEQ ID NOs: 29-44; SEQ ID NOs: 51-56; SEQ ID NOs: 62-66; SEQ ID NOs: 67-84; SEQ ID NOs: 163-186; and SEQ ID NOs: 187-209.

### EXAMPLES

### Example 1

### KRAS/BRAF Multiplex Assay

[0369] A multiplex assay was performed using dual domain primers specific for V600E/D alleles of the BRAF loci and numerous alleles of KRAS comprising wild-type and mutant sequences in the 12^{th} and 13^{th} codon of KRAS. The primer sequences are shown in Table 2. Conditions for the two phase PCR amplification regimen are shown in Tables 3, 4, and 5. The results are depicted in FIGS. 4 and 5. FIG. 4 demonstrates that sets of primers as described herein do not amplify off-target sequences and specifically amplify target alleles when the targets are present. FIG. 5 demonstrates that when multiple targets are present, a multiplexed PCR reaction performed according to the methods described herein will specifically detect the presence of target alleles without any detectable background. Both FIGS. 4 and 5 also demonstrate that no “cross-talk” amplification occurs to a detectable level when one or more than one amplified target are accumulated to a high level.

### Example 2

### IL-10/TNFα Mulitplex Assay

[0370] A multiplex assay was performed using dual domain primers specific for either the wild-type or −1028A and −1028G alleles of the IL-10 locus and the wild-type and −308G and −308A alleles of the TNFα locus. The primer sequences are shown in Table 6. Conditions for the two phase PCR amplification regimen are shown in Tables 7, 8, and 9. The results are depicted in FIG. 6. FIG. 6 demonstrates that sets of primers used in a multiplex reaction as described herein do not amplify off-target sequences and specifically amplify target alleles when the targets are present without detectable background amplification. FIG. 6 also demonstrates that no “cross-talk” amplification occurs to a detectable level when one or more than one amplified target are accumulated to a high level.

### Example 3

### Multimodal Assay

[0371] A multimodal assay can be performed to detect presence of the −308G and −308A alleles of the TNFα locus and the expression of IL-10 in the same reaction. First, the sample is subjected to a reverse transcriptase PCR(RT-PCR) regimen using an oligo dT primer. Briefly, a sample is mixed with reverse transcriptase, dNTPs, buffer and an oligo-dT primer. The sample is incubated at a temperature appropriate for the particular RT enzyme being used (e.g. 42° C.) and cDNA is synthesized. A commercial kit for RT PCR can be used, for example the SUPERSCRIPT™ cDNA Synthesis Kit (Cat No 11754-050; Invitrogen; Grand Island, N.Y.).

[0372] A PCR amplification regimen can then be performed. The primer sequences are shown in Table 10. The IL-10 primers span exon-intron junctions and will therefore not amplify DNA present in the same sample, permitting the specific detection of IL-10 mRNA. Conditions for the two phase PCR amplification regimen are shown in Tables 11 and 12. Production of amplified products can be detected by capillary electrophoresis separation with sizes of products distinguishable; TNF-α alleles (173 bp product=308G allele; 178 bp product=308A allele) and the presence and amount of IL-10 mRNA evidenced by the 101 bp product. Note that in any of the approaches described above, quantitation can be derived from the amplification curve generated by repeated sampling of the amplification reaction during the PCR cycling.

### Example 4

### Plasma Sample Assay

[0373] Plasma or serum specimens have been explored for diagnostics of various diseases or disorders. Diagnostics based on plasma and/or serum samples are particularly beneficial since such methods are significantly less invasive than those using biopsy tissues, such as tumor samples in cancer tests. A blood serum or plasma assay that identified tumor nucleic acids has the additional benefit of potentially detecting tumors at an earlier stage on the basis of circulating nucleic acids alone. However, plasma presents difficulties because it has a high background level of nucleic acids, and tumor cell nucleic acids will be very rare. Therefore, assays for plasma samples must be sensitive enough to detect tumor markers amongst a background of excess non-related nucleic acids. Demonstrated in this Example is that the methods and compositions described herein can successfully detect a desired target, including identification of a SNP genotype, in a plasma sample.

[0374] Donor plasma samples (1 mL each) were spiked with (a) 10 ng mutant DNA (CCL228 for KRAS G12V or HCT116 for KRAS G13D) (b) 200 ng K562 wild-type DNA and (c) water as a no-spike control. Samples were extracted with QIAAMP CIRCULATING NUCLEIC ACID KIT™ from Qiagen per manufacturer's instruction. No carrier RNA was used in the purification. Nucleic acid was eluted in 35 μL. 10 μL was used for PCR (50 μL/reaction). Appropriate primers are shown in Table 13 and thermocycling conditions are shown in Table 14. The detection of the target SNPs is demonstrated in FIG. 8.

[0375] Tables 15 and 16 contain additional sets of primers suitable for the detection of KRAS and BRAF SNPs in multimodal assays as described above herein, e.g. in Examples 1 and 4.

TABLE 1
Advantage of Using Short Primers
(KRAS mutant-specific primers as examples)

| | | Differentiation | |
|---|---|---|---|
| Kras Sequence around Codon 12 | Tm † | Power (DP) * | SEQ ID NO: |
| GTTGGATCATATTCGTCCACAAAATGATTCTGAATT | 69.6° C. | N/A (Wildtype) | 1 |
| AGCTGTATCGTCAAGGCACTCTTGCCTACGCCACC | | | |
| GTTGGATCATATTCGTCCACAAAATGATTCTGAATT | 69.4° C. | Δ° C. = 0.2 | 2 |
| AGCTGTATCGTCAAGGCACTCTTGCCTACGCCACT | | | |
| GTTGGATCATATTCGTCCACAAAATGATTCTGAATT | 69.3° C. | Δ° C. = 0.3 | 3 |
| AGCTGTATCGTCAAGGCACTCTTGCCTACGCCACG | | | |
| GTTGGATCATATTCGTCCACAAAATGATTCTGAATT | 69.4° C. | Δ° C. = 0.2 | 4 |
| AGCTGTATCGTCAAGGCACTCTTGCCTACGCCACA | | | |
| ATCGTCAAGGCACTCTTGCCTACGCCACC | 66.8° C. | N/A (Wildtype) | 5 |
| ATCGTCAAGGCACTCTTGCCTACGCCACT | 66.0° C. | Δ° C. = 0.8 | 6 |
| ATCGTCAAGGCACTCTTGCCTACGCCACG | 65.6° C. | Δ° C. = 1.2 | 7 |
| ATCGTCAAGGCACTCTTGCCTACGCCACA | 66.0° C. | Δ° C. = 0.8 | 8 |
| GCCTACGCCACC | 48.7° C. | N/A (Wildtype) | 9 |
| GCCTACGCCACT | 44.7° C. | Δ° C. = 4.0 | 10 |
| GCCTACGCCACG | 44.4° C. | Δ° C. = 4.3 | 11 |
| GCCTACGCCACA | 45.1° C. | Δ° C. = 3.6 | 12 |

† Tm determined with the OligoAnalyzer 3.1/TM Mismatch program from the IDT website (www.idtdna.com) using the wildtype sequence with C changed to T, G, or A at the 3′ end
* DP = Tm of Mutant primer − Tm of Wildtype primer; the larger the values, the higher difference between the two Tm's, and thus the higher differentiation power of the mutant primers against the wild-type sequence

TABLE 2
Primer sequences and amplicon sizes for detection of single-nucleotide point
mutations in codons 12 & 13 of the KRAS and codon 600 of the BRAF genes.

| | | SEQ | | SEQ | |
|---|---|---|---|---|---|
| | Forward | ID | | ID | Size |
| Mutation | Primer | NO: | Reverse primer | NO: | (bp) |
| Braf | CCGCATTT | 13 | CCTATCGAATCAGTGGAAAAATAGC | 29 | 120 |
| V600E/D | TGGTCTAG | | | | |
| | CTACAG [symbol] | | | | |
| Wild- | GGTGATTT | 14 | AAAATTTAATCAGTGGAAAAATAGC | 30 | |
| type | TGGTCTAG | | | | |
| sequence | CTACAG [symbol] | | | | |
| (for | | | | | |
| compar- | | | | | |
| ison) | | | | | |
| Kras | CGCCTAGT | 15 | TCGCTGCCTACGCCAC [symbol] | 31 | 130 |
| G12R | GTATTAAC | | | | |
| | CTTATGTG | | | | |
| | TG | | | | |
| Kras | CGCCTAGT | 16 | CATTTGTTTGCCTACGCCAC [symbol] | 32 | 134 |
| G12C | GTATTAAC | | | | |
| | CTTATGTG | | | | |
| | TG | | | | |
| Kras | CGCCTAGT | 17 | CATTATACGAGTTGCCTACGCCAC [symbol] | 33 | 138 |
| G12S | GTATTAAC | | | | |
| | CTTATGTG | | | | |
| | TG | | | | |
| Kras | CGCCTAGT | 18 | CAATATCTAATGTCCTTGCCTACGCCA [symbol] | 34 | 142 |
| G12D | GTATTAAC | | | | |
| | CTTATGTG | | | | |
| | TG | | | | |
| Kras | CGCCTAGT | 19 | ACTATCGACGTCTTGCAACTTGCCTACGCCA [symbol] | 35 | 146 |
| G12A | GTATTAAC | | | | |
| | CTTATGTG | | | | |
| | TG | | | | |
| Kras | CGCCTAGT | 20 | CATATAACGGTCGAGGACTCTACTTGCCTACGCCA [symbol] | 36 | 150 |
| G12V | GTATTAAC | | | | |
| | CTTATGTG | | | | |
| | TG | | | | |
| Kras | CGCCTAGT | 21 | CTTCGACTTCAACGAAGTTGATGTCTCTTGCCTACGC [symbol] | 37 | 154 |
| G13R | GTATTAAC | | | | |
| | CTTATGTG | | | | |
| | TG | | | | |
| Kras | CGCCTAGT | 22 | CAATAATTAATTAACGTATAAATTCCCACTCTTGCCTACGC [symbol] | 38 | 158 |
| G13S | GTATTAAC | | | | |
| | CTTATGTG | | | | |
| | TG | | | | |
| Kras | CGCCTAGT | 23 | CTGTGACAACTTCATTGATCTGTTAAGTATTACTCTTGCCTACGC [symbol] | 39 | 162 |
| G13C | GTATTAAC | | | | |
| | CTTATGTG | | | | |
| | TG | | | | |
| Kras | CGCCTAGT | 24 | CATCTCACTCATCATTACTAACTAGATAAACTTTCACTCTTGCCTACG [symbol] | 40 | 166 |
| G13A | GTATTAAC | | | | |
| | CTTATGTG | | | | |
| | TG | | | | |
| Kras | CGCCTAGT | 25 | CAAATTCTTTCATAAAATTCAATCTAAGTCATCTTTAGCACTCTTGCCTACG [symbol] | 41 | 170 |
| G13D | GTATTAAC | | | | |
| | CTTATGTG | | | | |
| | TG | | | | |
| Kras | CGCCTAGT | 26 | CAATACTTTAGCTTGTCGATACTCAGTACAAATAGTGACTAGCACTCTTGCCTACG [symbol] | 42 | 174 |
| G13V | GTATTAAC | | | | |
| | CTTATGTG | | | | |
| | TG | | | | |
| Kras | CGCCTAGT | 27 | CATATCAATGAGCATGTGAAGCATGACTCCTTTATACCTAGATCATTTAGAATGCCTACG [symbol] A [symbol] | 43 | 178 |
| WT | GTATTAAC | | | | |
| | CTTATGTG | | | | |
| | TG | | | | |
| Wild- | TTGATAGT | 28 | TCATATTCGTCCACAAAATGATTCTGAATTAGCTGTATCGTCAAGGCACTCTTGCCTACGCCACC | 44 | |
| type | GTATTAAC | | | | |
| sequence | CTTATGTG | | | | |
| (for | TG | | | | |
| compar- | | | | | |
| ison) | | | | | |

Note:
Unbold/Underlined: Tail sequence (5′ to 3′);
Bold: Target sequence (5′ to 3′);
Bold/Italicized/Underlined: Mutation site.

TABLE 3
Concentrations of primers used in the
Multiplex KRAS/BRAF Mutation Assay.

| | Final Concen- |
|---|---|
| Primer | tration (μM) |
| Braf V600E | 0.235 |
| Kras G12R | 0.220 |
| Kras G12C | 0.280 |
| Kras G12S | 0.225 |
| Kras G12D | 0.295 |
| Kras G12A | 0.220 |
| Kras G12V | 0.220 |
| Kras G13R | 0.200 |
| Kras G13S | 0.195 |
| Kras G13C | 0.145 |
| Kras G13A | 0.150 |
| Kras G13D | 0.195 |
| Kras G13V | 0.200 |
| Kras G12/13-WT | 0.067 |
| Kras12/13F | 0.350 |
| Braf600R | 0.400 |

TABLE 4
Reagent recipe for Multiplex KRAS/BRAF Mutation Assay.

| Reagent | Final concentration |
|---|---|
| FASTSTART ™ Buffer (Without Mg) | 1X |
| (Hoffmann-La Roche; Basel, Switzerland) | |
| MgCl₂ | 1.7 mM |
| dNTPs | 0.2 mM each |
| Kras/Braf Primer Mix | 0.067 to 0.400 μM |
| PrimeraDx Universal Calibrators | 0.35X |
| FASTSTART ™ Taq (Hoffmann- | 0.9 U |
| La Roche; Basel, Switzerland) | |
| DNA/water | To a final volume of 25 μl |

TABLE 5
Thermocycling profile for Multiplex
KRAS/BRAF Mutation Assay.

| | Temperature | Duration | Number |
|---|---|---|---|
| Step | (° C.) | (sec) | of Cycles |
| Pre-Heating | 96 | 360 | 1 |
| Amplification Phase 1 | 47/68/98 | 10/10/3 | 4 |
| | (anneal/extend/ | | |
| | strand separation) | | |
| Amplification Phase 2 | 53/72/98 | 5/5/3 | 17 |
| | (anneal/extend/ | | |
| | strand separation) | | |
| Amplification with | 53/72/98 | 5/220/3 | 19 |
| Sample Injection (for | (anneal/extend/ | | |
| Capillary Electropho- | strand separation) | | |
| resis Separation) | | | |

TABLE 6
Multiplex primer sequences and amplicon
sizes for detection of single-nucleotide
polymorphisms of the IL-10 and TNF-α genes.

| | | SEQ ID | | SEQ ID | Size |
|---|---|---|---|---|---|
| Mutation | Forward Primer | NO: | Reverse Primer | NO: | (bp) |
| IL-10 (-1082A) | CGAGGCTTCTTTGGGAA | 45 | GGAAGATGGGGTGGA | 51 | 123 |
| | | | AGA | | |
| IL-10 (-1082G) | TAATTATAGGCTTCTTTGG | 46 | GGAAGATGGGGTGGA | 52 | 128 |
| | GA [symbol] | | AGA | | |
| Wild-type | ACTACTAAGGCTTCTTTGG | 47 | AAAAGATGGGGTGGA | 53 | |
| sequence (for | GA( [symbol] / [symbol] ) | | AGA | | |
| comparison) | | | | | |
| TNF-α (-308G) | AGCCAACCCCGTTTTCT | 48 | CGTGAACCCCGTCC [symbol] | 54 | 173 |
| TNF-α (-308A) | AGCCAACCCCGTTTTCT | 49 | ATTTAACTGAACCCC | 55 | 178 |
| | | | GTCC [symbol] | | |
| Wild-type | CTCCAACCCCGTTTTCT | 50 | TGGAGGCTGAACCCC | 56 | |
| sequence (for | | | GTCC( [symbol] / [symbol] ) | | |
| comparison) | | | | | |

TABLE 7
Concentrations of primers used in Multiplex IL-10
(−1082)/TNF-α (−308) SNP Assay.

| | Final Concen- |
|---|---|
| Primer | tration (μM) |
| IL10-G | 0.45 |
| IL10-A | 0.28 |
| IL10-R | 0.35 |
| TNFα-G | 0.20 |
| TNFα-A | 0.35 |
| TNFα-F | 0.35 |

TABLE 8
Reagent recipe for Multiplex IL-10 (−1082)/TNF-
α (−308) SNP Assay.

| Reagent | Final concentration |
|---|---|
| FASTSTART ™ Buffer (Without Mg) | 1X |
| (Hoffmann-La Roche; Basel, Switzerland) | |
| MgCl₂ | 1.7 mM |
| dNTPs | 0.2 mM each |
| Kras/Braf Primer Mix | 0.20 to 0.45 μM |
| PrimeraDx Universal Calibrators | 0.35X |
| FASTSTART ™ Taq (Hoffmann- | 0.9 U |
| La Roche; Basel, Switzerland) | |
| DNA/water | To a final volume of 25 μl |

TABLE 9
Thermocycling profile for Multiplex IL-10 (−1082)/TNF-
α (−308) SNP Assay.

| | Temperature | Duration | Number |
|---|---|---|---|
| Step | (° C.) | (sec) | of Cycles |
| Pre-heating | 96 | 360 | 1 |
| Amplification Phase 1 | 46/68/98 | 10/10/3 | 4 |
| | (anneal/extend/ | | |
| | strand separation) | | |
| Amplification Phase 2 | 54/72/98 | 5/5/3 | 17 |
| | (anneal/extend/ | | |
| | strand separation) | | |
| Amplification with | 54/72/98 | 5/220/3 | 19 |
| Sample Injection (for | (anneal/extend/ | | |
| Capillary Electropho- | strand separation) | | |
| resis Separation) | | | |

Table 10
Multimodal primer sequences and amplicon sizes

| | | SEQ | | SEQ | |
|---|---|---|---|---|---|
| | Forward | ID | Reverse | ID | Size |
| Target | Primer | NO | primer | NO | (bP) |
| IL-10 | TCAAAGC | 57 | ACACCAT | 62 | 88 bp |
| | GGCGCTG | | CTTTCTC | | amplicon |
| | TCATC | | TTGGAGC | | 101 bp |
| | | | TTA | | Product |
| | | | | | including |
| | | | | | tail |
| | | | | | sequences |
| Wild type | AGGCTA | 58 | TAGATGC | 63 | |
| sequence (for | CGGCGC | | CTTTCTC | | |
| comparison) | TGTCAT | | TTGGAGC | | |
| | C | | TTA | | |
| TNF-α (-308G) | AGCCAA | 59 | CGTGAAC | 64 | 173 |
| | CCCCGT | | CCCGTCC | | |
| | TTTCT | | [symbol] | | |
| TNF-α (-308A) | AGCCAA | 60 | ATTTAAC | 65 | 178 |
| | CCCCGT | | TGAACCC | | |
| | TTTCT | | CGTCC [symbol] | | |
| Wild type | CTCCAA | 61 | TGGAGGC | 66 | |
| sequence (for | CCCCGT | | TGAACCC | | |
| comparison) | TTTCT | | CGTCC | | |
| | | | ( [symbol] / [symbol] ) | | |

Note:
Underlined: Tail sequence (5′ to 3′);
Bold: Target sequence or 3′ core sequence (5′ to 3′);
Bold/Italicized/Underlined: Mutation site or 3′ nucleotide.

TABLE 11
Reagent recipe for Multimodal Assay.

| Reagent | Final concentration |
|---|---|
| FASTSTART ™ Buffer (Without Mg) | 1X |
| (Hoffmann-La Roche; Basel, Switzerland) | |
| MgCl₂ | 1.7 mM |
| dNTPs | 0.2 mM each |
| Kras/Braf Primer Mix | 0.20 to 0.45 μM |
| PrimeraDx Universal Calibrators | 0.35X |
| FASTSTART ™ Taq (Hoffmann- | 0.9 U |
| La Roche; Basel, Switzerland) | |
| DNA/water | To a final volume of 25 μl |

TABLE 12
Thermocycling profile for Multimodal Assay.

| | Temperature | Duration | Number |
|---|---|---|---|
| Step | (° C.) | (sec) | of Cycles |
| Pre-heating | 96 | 360 | 1 |
| Amplification Phase 1 | 47/68/98 | 10/10/3 | 4 |
| | (anneal/extend/ | | |
| | strand separation) | | |
| Amplification Phase 2 | 53/72/98 | 5/5/3 | 17 |
| | (anneal/extend/ | | |
| | strand separation) | | |
| Amplification with | 53/72/98 | 5/220/3 | 19 |
| Sample Injection (for | (anneal/extend/ | | |
| Capillary Electropho- | strand separation) | | |
| resis Separation) | | | |

TABLE 13
Primer sequences for detection of single-nucleotide
point mutations in the KRAS and BRAF genes.

| | | SEQ |
|---|---|---|
| | | ID |
| | | NO: |
| BRAF Mutant & PCR Primers | | |
| Braf- | CCTATCGAATCAGTGGAAAAATAGC | 67 |
| 600-R4 | | |
| V600E- | CCGCATTTTGGTCTAGCTACAG [symbol] | 68 |
| AF2 | | |
| KRAS Mutant and PCR Primers | | |
| Kras- | CGCCTAGTGTATTAACCTTATGTGTG | 69 |
| 12-13- | | |
| F3 | | |
| G12R- | TCGCTGCCTACGCCAC [symbol] | 70 |
| CR2 | | |
| G12C- | CATTTGTTTGCCTACGCCAC [symbol] | 71 |
| TR | | |
| G12S- | CATTATACGAGTTGCCTACGCCAC [symbol] | 72 |
| AR | | |
| G12D- | CAATATCTAATGTCCTTGCCTACGCCA [symbol] | 73 |
| AR | | |
| G12A- | ACTATCGACGTCTTGCAACTTGCCTACGCCA [symbol] | 74 |
| CR | | |
| G12V- | CATATAACGGTCGAGGACTCTACTTGCCTACGCCA [symbol] | 75 |
| TR | | |
| G13R- | CTTCGACTTCAACGAAGTTGATGTCTCTTGCCTACGC [symbol] | 76 |
| CR | | |
| G13S- | CAATAATTAATTAACGTATAAATTCCCACTCTTGCCTACGC [symbol] | 77 |
| AR | | |
| G13C- | CTGTGACAACTTCATTGATCTGTTAAGTATTTCTCTTGCCTACGC [symbol] | 78 |
| TR3 | | |
| G13A- | CATCTCACTCATCATTACTAACTAGATAAACTTTAACTCTTGCCTACG [symbol] | 79 |
| CR3 | | |
| G13D- | CAAATTCTTTCATAAAATTCAATCTAAGTCATCTTTAACACTCTTGCCTACG [symbol] | 80 |
| AR5 | | |
| G13V- | CAATACTTTAGCTTGTCGATACTCAGTACAAATAGTGTTTAGCACTCTTGCCTACG [symbol] | 81 |
| TR2 | | |
| Wild-type KRAS Ref Gene Primers | | |
| Kras- | CTACACTTCATTAAGATTGGATCCAC | 82 |
| Ctrl-F1 | | |
| Kras- | CTCATTCCAAGTGTGTACTACTCCCAA | 83 |
| Ctrl-R1- | | |
| 204 | | |
| Kras- | CATTTGTTTCTTCAATCAAATGTTGATACTTACTTGGATGAAGTGTAAATATACTTTCTGA | 84 |
| Ctrl-R1- | AAACTAATAACGATATAATGAGCA | |
| 123 | | |

Note:
Unbold/Underlined: Tail sequence (5′ to 3′);
Bold: Target sequence (5′ to 3′);
Bold/Italicized/Underlined: Mutation site.

TABLE 14
Thermocycling conditions used in Example 4

| | Tempera- | | |
|---|---|---|---|
| # of cycles | ture (° C.) | Time | |
| | 96 | 360 | Sec |
| 4 cycles of: | 98 | 3 | sec |
| | 48 | 10 | sec |
| | 68 | 10 | sec |
| 17 cycles of: | 98 | 3 | sec |
| | 53 | 10 | sec |
| | 72 | 5 | sec |
| 19 cycles of: | 98 | 3 | sec |
| | 53 | 5 | sec |

| | |
|---|---|
| 72 | 224 sec (CE |
| | separation stage) |

TABLE 15

| | | SEQ ID |
|---|---|---|
| Name | Sequence | NO: |
| Kras-FAM- | 5′/56-FAM/ACT ATC GAC GTC TTG CAA CTT GCC TAC GCC AG-3′ | 163 |
| G12A-R | | |
| Kras-FAM- | 5′/56-FAM/CAT TTG TTT GCC TAC GCC ACA-3′ | 164 |
| G12C-R | | |
| Kras-FAM- | 5′/56-FAM/CAA TAT CTA ATG TCC TTG CCT ACG CCA T-3′ | 165 |
| G12D-R | | |
| Kras-FAM- | 5′/56-FAM/TCG TTG CCT ACG CCA CG-3′ | 166 |
| G12R-R | | |
| Kras-FAM- | 5′/56-FAM/CAT TAT ACG AGT TGC CTA CGC CAC T-3′ | 167 |
| G12S-R | | |
| Kras-FAM- | 5′/56-FAM/CAT ATA ACG GTC GAG GAC TCT ACT TGC CTA CGC CAA-3′ | 168 |
| G12V-R | | |
| Kras-FAM- | 5′/56-FAM/CTG TGA CAA CTT CAT TGA TCT GTT AAG TAT TTC TCT TGC CTA | 169 |
| G13C-R | CGC A-3′ | |
| Kras-FAM- | 5′/56-FAM/TTC TTT CAT AAA ATT CAA TCT AAG TCA TCT TTA ACA CTC TTG | 170 |
| G13D-R | CCT ACG T-3′ | |
| Kras-12- | 5′-CGC CTA GTG TAT TAA CCT TAT GTG TG-3′ | 171 |
| 13-F | | |
| Kras-FAM- | 5′/56-FAM/CAC CGA CAC AGC AGG TCA C-3′ | 172 |
| Q61H-C-F | | |
| Kras-FAM- | 5′/56-FAM/CAC CGA CAC AGC AGG TCA T-3′ | 173 |
| Q61H-T-F | | |
| Kras-FAM- | 5′/56-FAM/AGA TAG CAG GCT TGT AGA TCG ACA CAG CAG GTC T-3′ | 174 |
| Q61L-F | | |
| Kras-FAM- | 5′/56-FAM/CAA GAC TAG ATC ACT AGA CAC AGC AGG TCG-3′ | 175 |
| Q61R-F | | |
| Kras-Q61- | 5′-CTT TGA TAT TCA GTA GAC CTC TGT CAG CTT ATT ATA TTC AAT-3′ | 176 |
| R | | |
| Kras- | 5′-CAA AAT CTT GAA ACA ACC CTT TCC CAG AGA ACA AA-3′ | 177 |
| A146T-F | | |
| Kras-FAM- | 5′/56-FAM/CCA GCA TCG CAT TAC CTG TCT TGT CTT TGT-3′ | 178 |
| A146T-R | | |
| V600E- | 5′-CCGCATTTTGGTCTAGCTACAGAG-3′ | 179 |
| T/A-F | | |
| V600E- | 5′-CATACATAGATACATATAAATTTTGGTCTAGCTACAGAA-3′ | 180 |
| TG/AA-F | | |
| V600D- | 5′-GCATATCACATTTTGGTCTAGCTACAGAT-3′ | 181 |
| TG/AT-F | | |
| V600K- | 5′-CATCATGATCAATTGATTTTGGTCTAGCTACAAA-3′ | 182 |
| GT/AA-F | | |
| Braf-Tye- | 5′-/Tye665/ACCTATCGAAAATTTAATCAGTGGAAAAATAGC-3′ | 183 |
| V600-R | | |
| Kras- | 5′-CTC ATT CCA AGT GTG TAC TAC TCC CAA-3′ | 184 |
| Ctrl-R | | |
| Kras-Tye- | 5′-/Tye665/CTA CAC TTC ATT AAG ATT GGA TCC AC-3′ | 185 |
| Ctrl-F | | |
| G13D-1- | 5′/56-FAM/AA ATT CAA TCT AAG TCA TCT TTA ACA CTC TTG CCT ACG T-3′ | 186 |
| 28-2013 | | |

TABLE 16

| | | SEQ |
|---|---|---|
| | | ID |
| Name | Sequence | NO: |
| Kras-12- | 5′-CGC CTA GTG TAT TAA CCT TAT GTG TG-3′ | 187 |
| 13-F | | |
| Kras-A146T- | 5′-CAA AAT CTT GAA ACA ACC CTT TCC CAG AGA ACA AA-3′ | 188 |
| F | | |
| Kras-FAM- | 5′/56-FAM/CCA GCA TCG CAT TAC CTG TCT TGT CTT TGT-3′ | 189 |
| A146T-R | | |
| Kras-FAM- | 5′/56-FAM/ACT ATC GAC GTC TTG CAA CTT GCC TAC GCC AG-3′ | 190 |
| G12A-R | | |
| Kras-FAM- | 5′/56-FAM/CAT TTG TTT GCC TAC GCC ACA-3′ | 191 |
| G12C-R | | |
| Kras-FAM- | 5′/56-FAM/CAA TAT CTA ATG TCC TTG CCT ACG CCA T-3′ | 192 |
| G12D-R | | |
| Kras-FAM- | 5′/56-FAM/TCG TTG CCT ACG CCA CG-3′ | 193 |
| G12R-R | | |
| Kras-FAM- | 5′/56-FAM/CAT TAT ACG AGT TGC CTA CGC CAC T-3′ | 194 |
| G12S-R | | |
| Kras-FAM- | 5′/56-FAM/CAT ATA ACG GTC GAG GAC TCT ACT TGC CTA CGC CAA-3′ | 195 |
| G12V-R | | |
| Kras-FAM- | 5′/56-FAM/CTG TGA CAA CTT CAT TGA TCT GTT AAG TAT TTC TCT TGC CTA | 196 |
| G13C-R | CGC A-3′ | |
| Kras-FAM- | 5′/56-FAM/TTC TTT CAT AAA ATT CAA TCT AAG TCA TCT TTA ACA CTC TTG CCT | 197 |
| G13D-R | ACG T-3′ | |
| Kras-FAM- | 5′/56-FAM/CAC CGA CAC AGC AGG TCA C-3′ | 198 |
| Q61H-C-F | | |
| Kras-FAM- | 5′/56-FAM/CAC CGA CAC AGC AGG TCA T-3′ | 199 |
| Q61H-T-F | | |
| Kras-FAM- | 5′/56-FAM/AGA TAG CAG GCT TGT AGA TCG ACA CAG CAG GTC T-3′ | 200 |
| Q61L-F | | |
| Kras-FAM- | 5′/56-FAM/CAA GAC TAG ATC ACT AGA CAC AGC AGG TCG-3′ | 201 |
| Q61R-F | | |
| Kras-Q61-R | 5′-CTT TGA TAT TCA GTA GAC CTC TGT CAG CTT ATT ATA TTC AAT-3′ | 202 |
| V600E-T/ | 5′-CCGCATTTTGGTCTAGCTACAGAG-3′ | 203 |
| A-F | | |
| V600D- | 5′-GCATATCACATTTTGGTCTAGCTACAGAT-3′ | 204 |
| TG/AT-F | | |
| V600K- | 5′-CATCATGATCAATTGATTTTGGTCTAGCTACAAA-3′ | 205 |
| GT/AA-F | | |
| V600E- | 5′-CATACATAGATACATATAAATTTTGGTCTAGCTACAGAA-3′ | 206 |
| TG/AA-F | | |
| Braf-Q670- | 5′-/Q670/ACCTATCGAAAATTTAATCAGTGGAAAAATAGC-3′ | 207 |
| V600-R | | |
| Kras-Q670- | 5′-/Q670/CTA CAC TTC ATT AAG ATT GGA TCC AC-3' | 208 |
| Ctrl-F | | |
| Kras-Ctrl-R | 5′-CTC ATT CCA AGT GTG TAC TAC TCC CAA-3′ | 209 |

1-110. (canceled)

111. A method for determining the presence of one or more target polynucleotides, the method comprising;
performing a PCR amplification regimen comprising cycles of strand separation, primer annealing, and primer extension on a reaction mixture comprising a nucleic acid sample and a set of oligonucleotide primers specific for each target polynucleotide;
wherein each said set of oligonucleotide primers comprises a first subset of at least one dual domain forward primer and a second subset of at least one reverse primer;
wherein each dual domain primer of a set comprises a 5′ tail region that differs from the 5′ tail region of other dual domain primers in the set and a 3′ core region complementary to a sequence on one strand of a double-stranded nucleic acid comprising said target;
wherein for each dual domain primer, the 3′ core substantially anneals to its complementary target site sequence at a first annealing temperature, and the sequence comprised by the 5′ tail and 3′ core region substantially anneals to its complement at a second annealing temperature, the second annealing temperature being higher than the first annealing temperature, such that at said second annealing temperature said 3′ core of said dual domain primer cannot substantially anneal to a template molecule that does not also have the complement of the dual domain primer's 5′ tail sequence;
wherein for each dual domain primer of a primer set:
the 5′ tail sequence does not have any homology to the target sequence; and
the 5′ tail sequence has 6 or fewer contiguous homologous bases relative to any other 5′ tail sequence of the dual domain primer set;
wherein said PCR amplification regimen comprises first and second phases,
the first phase comprising annealing at said first annealing temperature for a first set of cycles, and;
the second phase comprising annealing at said second annealing temperature for a second set of cycles;
and detecting an amplified product for each target polynucleotide, wherein said detecting indicates the presence of said target polynucleotide.

112. The method of claim 111, wherein each dual domain primer of a set comprises a 5′ tail region that differs from the 5′ tail region of other dual domain primers in the set, a 3′ core region complementary to a sequence on one strand of a double-stranded nucleic acid comprising said target, and a terminal nucleotide complementary to one of the variant nucleotides occurring at said target site.

113. The method of claim 111, wherein at least one set of primers comprises a truncated dual domain forward primer.

114. The method of claim 111, wherein a reverse primer is selected from the group consisting of:
an amplifying primer; a dual domain primer; and a truncated dual domain primer.

115. The method of claim 111, wherein said target polynucleotides are selected from the group consisting of:
polynucleotides comprising SNPs; polynucleotides comprising alleles of SNPs;
protein coding DNA or RNA polynucleotides; non-protein coding DNA or RNA polynucleotides; polynucleotides comprising mutations; polynucleotides comprising deletions; and polynucleotides comprising insertions.

116. The method of claim 111, wherein a plurality of target polynucleotides are detected in a single reaction.

117. The method of claim 116, wherein the target polynucleotides comprise at least one polynucleotide selected from the group consisting of:
polynucleotides comprising SNPs and polynucleotides comprising alleles of SNPs;
and at least one polynucleotide selected from the group consisting of:
protein coding DNA or RNA polynucleotides; non-protein coding DNA or RNA polynucleotides; polynucleotides comprising mutations; polynucleotides comprising deletions; and polynucleotides comprising insertions.

118. The method of claim 111, wherein at least one of the target polynucleotides comprises a SNP and wherein said method genotypes the nucleotide at said SNP.

119. The method of claim 118, wherein dual domain or truncated dual domain primers specific for each of 2 or more alleles of a target SNP are present in the same reaction.

120. The method of claim 118, wherein one dual domain or truncated dual domain primer of a set is specific for the predominant allele of the target SNP.

121. The method of claim 116, wherein the dual domain or truncated dual domain primers specific for each of 2 or more alleles or sequence variants of a target nucleotide are present in the same reaction.

122. The method of claim 121, wherein one dual domain or truncated dual domain primer of a set is specific for the predominant allele or variant allele of the target polynucleotide.

123. The method of claim 111, wherein the amplified products of two or more members of a primer subset can be distinguished.

124. The method of claim 123, wherein the products of two or more members of a primer subset are distinguished by a method selected from the group consisting of:
being of distinct sizes; being labeled with different detectable labels; sequencing the amplified products; oligonucleotide hybridization; and melting-curve analysis of the amplified products.

125. The method of claim 111, wherein the core sequence is 10 to 40 nucleotides in length.

126. The method of claim 111, wherein the first phase comprises from 1 to 10 cycles.

127. The method of claim 111, wherein each 5′ tail sequence of a set has fewer than 3 contiguous homologous bases relative to the other 5′ tail sequences of the set.

128. The method of claim 111, wherein the 5′ tail sequence is from 1 to 200 nucleotides in length.

129. The method of claim 111, wherein the second annealing temperature is at least 4° C. higher than the first annealing temperature.

130. The method of claim 111, wherein the dual domain or truncated dual domain primers present in a reaction have Tₘ values for their respective 3′ core regions that vary by no more than 8° C. from each other.

The application's sequence listing, which the Patent Office published only in electronic form, follows.

SEQUENCE LISTING (93981 sequences)

SEQ ID NO: 1 - DNA, 71 bp, Artificial Sequence
  Description of Artificial Sequence: Synthetic primer
gttggatcatattcgtccacaaaatgattctgaattagctgtatcgtcaaggcactcttgcctacgccacc

SEQ ID NO: 2 - DNA, 71 bp, Artificial Sequence
  Description of Artificial Sequence: Synthetic primer
gttggatcatattcgtccacaaaatgattctgaattagctgtatcgtcaaggcactcttgcctacgccact

SEQ ID NO: 3 - DNA, 71 bp, Artificial Sequence
  Description of Artificial Sequence: Synthetic primer
gttggatcatattcgtccacaaaatgattctgaattagctgtatcgtcaaggcactcttgcctacgccacg

SEQ ID NO: 4 - DNA, 71 bp, Artificial Sequence
  Description of Artificial Sequence: Synthetic primer
gttggatcatattcgtccacaaaatgattctgaattagctgtatcgtcaaggcactcttgcctacgccaca

SEQ ID NO: 5 - DNA, 29 bp, Artificial Sequence
  Description of Artificial Sequence: Synthetic primer
atcgtcaaggcactcttgcctacgccacc

SEQ ID NO: 6 - DNA, 29 bp, Artificial Sequence
  Description of Artificial Sequence: Synthetic primer
atcgtcaaggcactcttgcctacgccact

SEQ ID NO: 7 - DNA, 29 bp, Artificial Sequence
  Description of Artificial Sequence: Synthetic primer
atcgtcaaggcactcttgcctacgccacg

SEQ ID NO: 8 - DNA, 29 bp, Artificial Sequence
  Description of Artificial Sequence: Synthetic primer
atcgtcaaggcactcttgcctacgccaca

SEQ ID NO: 9 - DNA, 12 bp, Artificial Sequence
  Description of Artificial Sequence: Synthetic primer
gcctacgccacc

SEQ ID NO: 10 - DNA, 12 bp, Artificial Sequence
  Description of Artificial Sequence: Synthetic primer
gcctacgccact

SEQ ID NO: 11 - DNA, 12 bp, Artificial Sequence
  Description of Artificial Sequence: Synthetic primer
gcctacgccacg

SEQ ID NO: 12 - DNA, 12 bp, Artificial Sequence
  Description of Artificial Sequence: Synthetic primer
gcctacgccaca

SEQ ID NO: 13 - DNA, 23 bp, Artificial Sequence
  Description of Artificial Sequence: Synthetic primer
ccgcattttggtctagctacaga

SEQ ID NO: 14 - DNA, 23 bp, Artificial Sequence
  Description of Artificial Sequence: Synthetic primer
ggtgattttggtctagctacagt

SEQ ID NO: 15 - DNA, 26 bp, Artificial Sequence
  Description of Artificial Sequence: Synthetic primer
cgcctagtgtattaaccttatgtgtg

SEQ ID NO: 16 - DNA, 26 bp, Artificial Sequence
  Description of Artificial Sequence: Synthetic primer
cgcctagtgtattaaccttatgtgtg

SEQ ID NO: 17 - DNA, 26 bp, Artificial Sequence
  Description of Artificial Sequence: Synthetic primer
cgcctagtgtattaaccttatgtgtg

SEQ ID NO: 18 - DNA, 26 bp, Artificial Sequence
  Description of Artificial Sequence: Synthetic primer
cgcctagtgtattaaccttatgtgtg

SEQ ID NO: 19 - DNA, 26 bp, Artificial Sequence
  Description of Artificial Sequence: Synthetic primer
cgcctagtgtattaaccttatgtgtg

SEQ ID NO: 20 - DNA, 26 bp, Artificial Sequence
  Description of Artificial Sequence: Synthetic primer
cgcctagtgtattaaccttatgtgtg

SEQ ID NO: 21 - DNA, 26 bp, Artificial Sequence
  Description of Artificial Sequence: Synthetic primer
cgcctagtgtattaaccttatgtgtg

SEQ ID NO: 22 - DNA, 26 bp, Artificial Sequence
  Description of Artificial Sequence: Synthetic primer
cgcctagtgtattaaccttatgtgtg

SEQ ID NO: 23 - DNA, 26 bp, Artificial Sequence
  Description of Artificial Sequence: Synthetic primer
cgcctagtgtattaaccttatgtgtg

SEQ ID NO: 24 - DNA, 26 bp, Artificial Sequence
  Description of Artificial Sequence: Synthetic primer
cgcctagtgtattaaccttatgtgtg

SEQ ID NO: 25 - DNA, 26 bp, Artificial Sequence
  Description of Artificial Sequence: Synthetic primer
cgcctagtgtattaaccttatgtgtg

SEQ ID NO: 26 - DNA, 26 bp, Artificial Sequence
  Description of Artificial Sequence: Synthetic primer
cgcctagtgtattaaccttatgtgtg

SEQ ID NO: 27 - DNA, 26 bp, Artificial Sequence
  Description of Artificial Sequence: Synthetic primer
cgcctagtgtattaaccttatgtgtg

SEQ ID NO: 28 - DNA, 26 bp, Artificial Sequence
  Description of Artificial Sequence: Synthetic primer
ttgatagtgtattaaccttatgtgtg

SEQ ID NO: 29 - DNA, 25 bp, Artificial Sequence
  Description of Artificial Sequence: Synthetic primer
cctatcgaatcagtggaaaaatagc

SEQ ID NO: 30 - DNA, 25 bp, Artificial Sequence
  Description of Artificial Sequence: Synthetic primer
aaaatttaatcagtggaaaaatagc

SEQ ID NO: 31 - DNA, 17 bp, Artificial Sequence
  Description of Artificial Sequence: Synthetic primer
tcgctgcctacgccacg

SEQ ID NO: 32 - DNA, 21 bp, Artificial Sequence
  Description of Artificial Sequence: Synthetic primer
catttgtttgcctacgccaca

SEQ ID NO: 33 - DNA, 25 bp, Artificial Sequence
  Description of Artificial Sequence: Synthetic primer
cattatacgagttgcctacgccact

SEQ ID NO: 34 - DNA, 28 bp, Artificial Sequence
  Description of Artificial Sequence: Synthetic primer
caatatctaatgtccttgcctacgccat

SEQ ID NO: 35 - DNA, 32 bp, Artificial Sequence
  Description of Artificial Sequence: Synthetic primer
actatcgacgtcttgcaacttgcctacgccag

SEQ ID NO: 36 - DNA, 36 bp, Artificial Sequence
  Description of Artificial Sequence: Synthetic primer
catataacggtcgaggactctacttgcctacgccaa

SEQ ID NO: 37 - DNA, 38 bp, Artificial Sequence
  Description of Artificial Sequence: Synthetic primer
cttcgacttcaacgaagttgatgtctcttgcctacgcg

SEQ ID NO: 38 - DNA, 42 bp, Artificial Sequence
  Description of Artificial Sequence: Synthetic primer
caataattaattaacgtataaattcccactcttgcctacgct

SEQ ID NO: 39 - DNA, 46 bp, Artificial Sequence
  Description of Artificial Sequence: Synthetic primer
ctgtgacaacttcattgatctgttaagtattactcttgcctacgca

SEQ ID NO: 40 - DNA, 49 bp, Artificial Sequence
  Description of Artificial Sequence: Synthetic primer
catctcactcatcattactaactagataaactttcactcttgcctacgg

SEQ ID NO: 41 - DNA, 53 bp, Artificial Sequence
  Description of Artificial Sequence: Synthetic primer
caaattctttcataaaattcaatctaagtcatctttagcactcttgcctacgt

SEQ ID NO: 42 - DNA, 57 bp, Artificial Sequence
  Description of Artificial Sequence: Synthetic primer
caatactttagcttgtcgatactcagtacaaatagtgactagcactcttgcctacga

SEQ ID NO: 43 - DNA, 65 bp, Artificial Sequence
  Description of Artificial Sequence: Synthetic primer
catatcaatgagcatgtgaagcatgactcctttatacctagatcatttagaatgcctacgccacc

SEQ ID NO: 44 - DNA, 65 bp, Artificial Sequence
  Description of Artificial Sequence: Synthetic primer
tcatattcgtccacaaaatgattctgaattagctgtatcgtcaaggcactcttgcctacgccacc

SEQ ID NO: 45 - DNA, 17 bp, Artificial Sequence
  Description of Artificial Sequence: Synthetic primer
cgaggcttctttgggaa

SEQ ID NO: 46 - DNA, 22 bp, Artificial Sequence
  Description of Artificial Sequence: Synthetic primer
taattataggcttctttgggag

SEQ ID NO: 47 - DNA, 22 bp, Artificial Sequence
  Description of Artificial Sequence: Synthetic primer
actactaaggcttctttgggar

SEQ ID NO: 48 - DNA, 17 bp, Artificial Sequence
  Description of Artificial Sequence: Synthetic primer
agccaaccccgttttct

SEQ ID NO: 49 - DNA, 17 bp, Artificial Sequence
  Description of Artificial Sequence: Synthetic primer
agccaaccccgttttct

SEQ ID NO: 50 - DNA, 17 bp, Artificial Sequence
  Description of Artificial Sequence: Synthetic primer
ctccaaccccgttttct

SEQ ID NO: 51 - DNA, 18 bp, Artificial Sequence
  Description of Artificial Sequence: Synthetic primer
ggaagatggggtggaaga

SEQ ID NO: 52 - DNA, 18 bp, Artificial Sequence
  Description of Artificial Sequence: Synthetic primer
ggaagatggggtggaaga

SEQ ID NO: 53 - DNA, 18 bp, Artificial Sequence
  Description of Artificial Sequence: Synthetic primer
aaaagatggggtggaaga

SEQ ID NO: 54 - DNA, 15 bp, Artificial Sequence
  Description of Artificial Sequence: Synthetic primer
cgtgaaccccgtccc

SEQ ID NO: 55 - DNA, 20 bp, Artificial Sequence
  Description of Artificial Sequence: Synthetic primer
atttaactgaaccccgtcct

SEQ ID NO: 56 - DNA, 20 bp, Artificial Sequence
  Description of Artificial Sequence: Synthetic primer
tggaggctgaaccccgtccy

SEQ ID NO: 57 - DNA, 19 bp, Artificial Sequence
  Description of Artificial Sequence: Synthetic primer
tcaaagcggcgctgtcatc

SEQ ID NO: 58 - DNA, 19 bp, Artificial Sequence
  Description of Artificial Sequence: Synthetic primer
aggctacggcgctgtcatc

SEQ ID NO: 59 - DNA, 17 bp, Artificial Sequence
  Description of Artificial Sequence: Synthetic primer
agccaaccccgttttct

SEQ ID NO: 60 - DNA, 17 bp, Artificial Sequence
  Description of Artificial Sequence: Synthetic primer
agccaaccccgttttct

SEQ ID NO: 61 - DNA, 17 bp, Artificial Sequence
  Description of Artificial Sequence: Synthetic primer
ctccaaccccgttttct

SEQ ID NO: 62 - DNA, 24 bp, Artificial Sequence
  Description of Artificial Sequence: Synthetic primer
acaccatctttctcttggagctta

SEQ ID NO: 63 - DNA, 24 bp, Artificial Sequence
  Description of Artificial Sequence: Synthetic primer
tagatgcctttctcttggagctta

SEQ ID NO: 64 - DNA, 15 bp, Artificial Sequence
  Description of Artificial Sequence: Synthetic primer
cgtgaaccccgtccc

SEQ ID NO: 65 - DNA, 20 bp, Artificial Sequence
  Description of Artificial Sequence: Synthetic primer
atttaactgaaccccgtcct

SEQ ID NO: 66 - DNA, 20 bp, Artificial Sequence
  Description of Artificial Sequence: Synthetic primer
tggaggctgaaccccgtccy

SEQ ID NO: 67 - DNA, 25 bp, Artificial Sequence
  Description of Artificial Sequence: Synthetic primer
cctatcgaatcagtggaaaaatagc

SEQ ID NO: 68 - DNA, 23 bp, Artificial Sequence
  Description of Artificial Sequence: Synthetic primer
ccgcattttggtctagctacaga

SEQ ID NO: 69 - DNA, 26 bp, Artificial Sequence
  Description of Artificial Sequence: Synthetic primer
cgcctagtgtattaaccttatgtgtg

SEQ ID NO: 70 - DNA, 17 bp, Artificial Sequence
  Description of Artificial Sequence: Synthetic primer
tcgctgcctacgccacg

SEQ ID NO: 71 - DNA, 21 bp, Artificial Sequence
  Description of Artificial Sequence: Synthetic primer
catttgtttgcctacgccaca

SEQ ID NO: 72 - DNA, 25 bp, Artificial Sequence
  Description of Artificial Sequence: Synthetic primer
cattatacgagttgcctacgccact

SEQ ID NO: 73 - DNA, 28 bp, Artificial Sequence
  Description of Artificial Sequence: Synthetic primer
caatatctaatgtccttgcctacgccat

SEQ ID NO: 74 - DNA, 32 bp, Artificial Sequence; identical to SEQ ID NO: 35
  Description of Artificial Sequence: Synthetic primer

SEQ ID NO: 75 - DNA, 36 bp, Artificial Sequence; identical to SEQ ID NO: 36
  Description of Artificial Sequence: Synthetic primer

SEQ ID NO: 76 - DNA, 38 bp, Artificial Sequence; identical to SEQ ID NO: 37
  Description of Artificial Sequence: Synthetic primer

SEQ ID NO: 77 - DNA, 42 bp, Artificial Sequence; identical to SEQ ID NO: 38
  Description of Artificial Sequence: Synthetic primer

SEQ ID NO: 78 - DNA, 46 bp, Artificial Sequence
  Description of Artificial Sequence: Synthetic primer
ctgtgacaacttcattgatctgttaagtatttctcttgcctacgca

SEQ ID NO: 79 - DNA, 49 bp, Artificial Sequence
  Description of Artificial Sequence: Synthetic primer
catctcactcatcattactaactagataaactttaactcttgcctacgg

SEQ ID NO: 80 - DNA, 53 bp, Artificial Sequence
  Description of Artificial Sequence: Synthetic primer
caaattctttcataaaattcaatctaagtcatctttaacactcttgcctacgt

SEQ ID NO: 81 - DNA, 57 bp, Artificial Sequence
  Description of Artificial Sequence: Synthetic primer
caatactttagcttgtcgatactcagtacaaatagtgtttagcactcttgcctacga

SEQ ID NO: 82 - DNA, 26 bp, Artificial Sequence
  Description of Artificial Sequence: Synthetic primer
ctacacttcattaagattggatccac

SEQ ID NO: 83 - DNA, 27 bp, Artificial Sequence
  Description of Artificial Sequence: Synthetic primer
ctcattccaagtgtgtactactcccaa

SEQ ID NO: 84 - DNA, 85 bp, Artificial Sequence
  Description of Artificial Sequence: Synthetic primer
catttgtttcttcaatcaaatgttgatacttacttggatgaagtgtaaatatactttctgaaaactaataacgatataatgagca

SEQ ID NO: 85 - DNA, 250 bp, Homo sapiens
gtacagttcattacgatacacgtctgcagtcaactggaattttcatgattgaattttgtaaggtattttgaaataatttttcatataaaggtgagtttgtattaaaaggtactggtggagtatttgatagtgtattaaccttatgtgtgacatgttctaatatagtcacattttcattatttttattataaggcctgctgaaaatgactgaatataaacttgtggtagttggagctggtggcgtaggcaa

SEQ ID NO: 86 - DNA, 13 bp, Artificial Sequence
  Description of Artificial Sequence: Synthetic primer
ttgcctacgccac

SEQ ID NO: 87 - DNA, 20 bp, Artificial Sequence
  Description of Artificial Sequence: Synthetic primer
gtacagttcattacgataca

SEQ ID NO: 88 - DNA, 20 bp, Artificial Sequence
  Description of Artificial Sequence: Synthetic primer
acacgtctgcagtcaactgg

SEQ ID NO: 89 - DNA, 20 bp, Artificial Sequence
  Description of Artificial Sequence: Synthetic primer
tggaattttcatgattgaat

SEQ ID NO: 90 - DNA, 22 bp, Artificial Sequence
  Description of Artificial Sequence: Synthetic primer
aattttgtaaggtattttgaaa

SEQ ID NO: 91 - DNA, 25 bp, Artificial Sequence
  Description of Artificial Sequence: Synthetic primer
aaataatttttcatataaaggtgag

SEQ ID NO: 92 - DNA, 32 bp, Artificial Sequence
  Description of Artificial Sequence: Synthetic primer
gtgagtttgtattaaaaggtactggtggagta

SEQ ID NO: 93 - DNA, 24 bp, Artificial Sequence
  Description of Artificial Sequence: Synthetic primer
agtatttgatagtgtattaacctt

SEQ ID NO: 94 - DNA, 24 bp, Artificial Sequence
  Description of Artificial Sequence: Synthetic primer
ccttatgtgtgacatgttctaata

SEQ ID NO: 95 - DNA, 27 bp, Artificial Sequence
  Description of Artificial Sequence: Synthetic primer
aatatagtcacattttcattattttta

SEQ ID NO: 96 - DNA, 24 bp, Artificial Sequence
  Description of Artificial Sequence: Synthetic primer
ttattataaggcctgctgaaaatg

SEQ ID NO: 97 - DNA, 21 bp, Artificial Sequence
  Description of Artificial Sequence: Synthetic primer
atgactgaatataaacttgtg

SEQ ID NO: 98 - DNA, 19 bp, Artificial Sequence
  Description of Artificial Sequence: Synthetic primer
aacttgtggtagttggagc

SEQ ID NO: 99 - DNA, 207 bp, Homo sapiens
aggaagcaagtagtaattgatggagaaacctgtctcttggatattctcgacacagcaggtcaagaggagtacagtgcaatgagggaccagtacatgaggactggggagggctttctttgtgtatttgccataaataatactaaatcatttgaagatattcaccattataggtgggtttaaattgaatataataagctgacattaagg

SEQ ID NO: 100 - DNA, 18 bp, Artificial Sequence
  Description of Artificial Sequence: Synthetic primer
tgtcagcttattatattc

SEQ ID NO: 101 - DNA, 23 bp, Artificial Sequence
  Description of Artificial Sequence: Synthetic primer
aggaagcaagtagtaattgatgg

SEQ ID NO: 102 - DNA, 25 bp, Artificial Sequence
  Description of Artificial Sequence: Synthetic primer
tggagaaacctgtctcttggatatt

SEQ ID NO: 103 - DNA, 24 bp, Artificial Sequence
  Description of Artificial Sequence: Synthetic primer
attctcgacacagcaggtcaagag

SEQ ID NO: 104 - DNA, 19 bp, Artificial Sequence
  Description of Artificial Sequence: Synthetic primer
gaggagtacagtgcaatga

SEQ ID NO: 105 - DNA, 23 bp, Artificial Sequence
  Description of Artificial Sequence: Synthetic primer
tgagggaccagtacatgaggact

SEQ ID NO: 106 - DNA, 22 bp, Artificial Sequence
  Description of Artificial Sequence: Synthetic primer
actggggagggctttctttgtg

SEQ ID NO: 107 - DNA, 22 bp, Artificial Sequence
  Description of Artificial Sequence: Synthetic primer
gtgtatttgccataaataatac

SEQ ID NO: 108 - DNA, 26 bp, Artificial Sequence
  Description of Artificial Sequence: Synthetic primer
tactaaatcatttgaagatattcacc

SEQ ID NO: 109 - DNA, 21 bp, Artificial Sequence
  Description of Artificial Sequence: Synthetic primer
accattataggtgggtttaaa

SEQ ID NO: 110 - DNA, 199 bp, Homo sapiens
ataacttttttttctttcccagagaacaaattaaaagagttaaggactctgaagatgtacctatggtcctagtaggaaataaatgtgatttgccttctagaacagtagacacaaaacaggctcaggacttagcaagaagttatggaattccttttattgaaacatcagcaaagacaagacaggtaagtaacactgaaat

SEQ ID NO: 111 - DNA, 15 bp, Artificial Sequence
  Description of Artificial Sequence: Synthetic primer
tacctgtcttgtctt

SEQ ID NO: 112 - DNA, 22 bp, Artificial Sequence
  Description of Artificial Sequence: Synthetic primer
ataacttttttttctttcccag

SEQ ID NO: 113 - DNA, 24 bp, Artificial Sequence
  Description of Artificial Sequence: Synthetic primer
cagagaacaaattaaaagagttaa

SEQ ID NO: 114 - DNA, 24 bp, Artificial Sequence
  Description of Artificial Sequence: Synthetic primer
taaggactctgaagatgtacctat

SEQ ID NO: 115 - DNA, 22 bp, Artificial Sequence
  Description of Artificial Sequence: Synthetic primer
tatggtcctagtaggaaataaa

SEQ ID NO: 116 - DNA, 23 bp, Artificial Sequence
  Description of Artificial Sequence: Synthetic primer
aaatgtgatttgccttctagaac

SEQ ID NO: 117 - DNA, 22 bp, Artificial Sequence
  Description of Artificial Sequence: Synthetic primer
aacagtagacacaaaacaggct

SEQ ID NO: 118 - DNA, 23 bp, Artificial Sequence
  Description of Artificial Sequence: Synthetic primer
gctcaggacttagcaagaagtta

SEQ ID NO: 119 - DNA, 27 bp, Artificial Sequence
  Description of Artificial Sequence: Synthetic primer
ttatggaattccttttattgaaacatc

SEQ ID NO: 120 - DNA, 201 bp, Homo sapiens
tttttgtgaatactgggaactatgaaaatactatagttgagaccttcaatgactttctagtaactcagcagcatctcagggccaaaaatttaatcagtggaaaaatagcctcaattcttaccatccacaaaatggatccagacaactgttcaaactgatgggacccactccatcgagatttcactgtagctagaccaaaat

SEQ ID NO: 121 - DNA, 18 bp, Artificial Sequence
  Description of Artificial Sequence: Synthetic primer
attttggtctagctacag

SEQ ID NO: 122 - DNA, 24 bp, Artificial Sequence
  Description of Artificial Sequence: Synthetic primer
tttttgtgaatactgggaactatg

SEQ ID NO: 123 - DNA, 26 bp, Artificial Sequence
  Description of Artificial Sequence: Synthetic primer
atgaaaatactatagttgagaccttc

SEQ ID NO: 124 - DNA, 25 bp, Artificial Sequence
  Description of Artificial Sequence: Synthetic primer
ttcaatgactttctagtaactcagc

SEQ ID NO: 125 - DNA, 29 bp, Artificial Sequence
  Description of Artificial Sequence: Synthetic primer
agcagcatctcagggccaaaaatttaatc

SEQ ID NO: 126 - DNA, 25 bp, Artificial Sequence
  Description of Artificial Sequence: Synthetic primer
atcagtggaaaaatagcctcaattc

SEQ ID NO: 127 - DNA, 26 bp, Artificial Sequence
  Description of Artificial Sequence: Synthetic primer
ttcttaccatccacaaaatggatcca

SEQ ID NO: 128 - DNA, 23 bp, Artificial Sequence
  Description of Artificial Sequence: Synthetic primer
ccagacaactgttcaaactgatg

SEQ ID NO: 129 - DNA, 24 bp, Artificial Sequence
  Description of Artificial Sequence: Synthetic primer
atgggacccactccatcgagattt

SEQ ID NO: 130 - DNA, 200 bp, Homo sapiens
cttgtggtagttggagctggtggcgtaggcaagagtgccttgacgatacagctaattcagaatcattttgtggacgaatatgatccaacaatagaggtaaatcttgttttaatatgcatattactggtgcaggaccattctttgatacagataaaggtttctctgaccattttcatgagtacttattacaagataattat

SEQ ID NO: 131 - DNA, 23 bp, Artificial Sequence
  Description of Artificial Sequence: Synthetic primer
cttgtggtagttggagctggtgg

SEQ ID NO: 132 - DNA, 26 bp, Artificial Sequence
  Description of Artificial Sequence: Synthetic primer
ctgtatcgtcaaggcactcttgccta

SEQ ID NO: 133 - DNA, 30 bp, Artificial Sequence
  Description of Artificial Sequence: Synthetic primer
ttcgtccacaaaatgattctgaattagctg

SEQ ID NO: 134 - DNA, 26 bp, Artificial Sequence
  Description of Artificial Sequence: Synthetic primer
tttacctctattgttggatcatattc

SEQ ID NO: 135 - DNA, 27 bp, Artificial Sequence
  Description of Artificial Sequence: Synthetic primer
agtaatatgcatattaaaacaagattt

SEQ ID NO: 136 - DNA, 29 bp, Artificial Sequence
  Description of Artificial Sequence: Synthetic primer
tctgtatcaaagaatggtcctgcaccagt

SEQ ID NO: 137 - DNA, 27 bp, Artificial Sequence
  Description of Artificial Sequence: Synthetic primer
tgaaaatggtcagagaaacctttatct

SEQ ID NO: 138 - DNA, 27 bp, Artificial Sequence
  Description of Artificial Sequence: Synthetic primer
ataattatcttgtaataagtactctga

SEQ ID NO: 139 - DNA, 199 bp, Homo sapiens
attcaccattataggtgggtttaaattgaatataataagctgacattaaggagtaattatagtttttattttttgagtctttgctaatgccatgcatataatatttaataaaaatttttaaataatgtttatgaggtaggtaatatccctgttttataaatgaagttcttgggggattagagcagtggagtaacttgct

SEQ ID NO: 140 - DNA, 27 bp, Artificial Sequence
  Description of Artificial Sequence: Synthetic primer
attcaccattataggtgggtttaaatt

SEQ ID NO: 141 - DNA, 24 bp, Artificial Sequence
  Description of Artificial Sequence: Synthetic primer
ctccttaatgtcagcttattatat

SEQ ID NO: 142 - DNA, 33 bp, Artificial Sequence
  Description of Artificial Sequence: Synthetic primer
gcaaagactcaaaaaataaaactataattactc

SEQ ID NO: 143 - DNA, 33 bp, Artificial Sequence
  Description of Artificial Sequence: Synthetic primer
tttttattaaatattatatgcatggcattagca

SEQ ID NO: 144 - DNA, 29 bp, Artificial Sequence
  Description of Artificial Sequence: Synthetic primer
cctacctcataaacattatttaaaaattt

SEQ ID NO: 145 - DNA, 33 bp, Artificial Sequence
  Description of Artificial Sequence: Synthetic primer
aagaacttcatttataaaacagggatattacct

SEQ ID NO: 146 - DNA, 33 bp, Artificial Sequence
  Description of Artificial Sequence: Synthetic primer
agcaagttactcccactgctctaatcccccaag

SEQ ID NO: 147 - DNA, 199 bp, Homo sapiens
tatggaattccttttattgaaacatcagcaaagacaagacaggtaagtaacactgaaataaatacagatctgttttctgcaaaatcataactgttatgtcatttaatatatcagtttttctctcaattatgctatactaggaaataaaacaatatttagtaaatgtttttgtctcttgagagggcattgcttcttaatc

SEQ ID NO: 148 - DNA, 24 bp, Artificial Sequence
  Description of Artificial Sequence: Synthetic primer
attccttttattgaaacatcagca

SEQ ID NO: 149 - DNA, 26 bp, Artificial Sequence
  Description of Artificial Sequence: Synthetic primer
tttcagtgttacttacctgtcttgtc

SEQ ID NO: 150 - DNA, 32 bp, Artificial Sequence
  Description of Artificial Sequence: Synthetic primer
gattttgcagaaaaacagatctgtatttattt

SEQ ID NO: 151 - DNA, 31 bp, Artificial Sequence
  Description of Artificial Sequence: Synthetic primer
ctgatatattaaatgacataacagttatgat

SEQ ID NO: 152 - DNA, 28 bp, Artificial Sequence
  Description of Artificial Sequence: Synthetic primer
cctagtatagcataattgagaaaaactg

SEQ ID NO: 153 - DNA, 33 bp, Artificial Sequence
  Description of Artificial Sequence: Synthetic primer
caaaaacatttactaaatattgttttatttcct

SEQ ID NO: 154 - DNA, 31 bp, Artificial Sequence
  Description of Artificial Sequence: Synthetic primer
gattaagaagcaatgccctctcaagtgacaa

SEQ ID NO: 155 - DNA, 200 bp, Homo sapiens
acccactccatcgagatttcactgtagctagaccaaaatcacctatttttactgtgaggtcttcatgaagaaatatatctgaggtgtagtaagtaaaggaaaacagtagatctcattttcctatcagagcaagcattatgaagagtttaggtaagagatctaatttctataattctgtaatataatattctttaaaacat

SEQ ID NO: 156 - DNA, 22 bp, Artificial Sequence
  Description of Artificial Sequence: Synthetic primer
acccactccatcgagatttcac

SEQ ID NO: 157 - DNA, 28 bp, Artificial Sequence
  Description of Artificial Sequence: Synthetic primer
gtaaaaataggtgattttggtctagcta

SEQ ID NO: 158 - DNA, 29 bp, Artificial Sequence
  Description of Artificial Sequence: Synthetic primer
atatatttcttcatgccgacctcacagta

SEQ ID NO: 159 - DNA, 31 bp, Artificial Sequence
  Description of Artificial Sequence: Synthetic primer
ctgttttcctttacttactacacctcagata

SEQ ID NO: 160 - DNA, 30 bp, Artificial Sequence
  Description of Artificial Sequence: Synthetic primer
gcaagctctgataggaaatgagatctactg

SEQ ID NO: 161 - DNA, 32 bp, Artificial Sequence
  Description of Artificial Sequence: Synthetic primer
ttagatctcttacctaaactcttcataatgca

SEQ ID NO: 162 - DNA, 40 bp, Artificial Sequence
  Description of Artificial Sequence: Synthetic primer
atgttttaaagaatattatattacagaattatagaaatta

SEQ ID NO: 163 - DNA, 32 bp, Artificial Sequence; identical to SEQ ID NO: 35
  Description of Artificial Sequence: Synthetic primer
  5' 56-FAM

SEQ ID NO: 164 - DNA, 21 bp, Artificial Sequence
  Description of Artificial Sequence: Synthetic primer
  5' 56-FAM
catttgtttgcctacgccaca

SEQ ID NO: 165 - DNA, 28 bp, Artificial Sequence
  Description of Artificial Sequence: Synthetic primer
  5' 56-FAM
caatatctaatgtccttgcctacgccat

SEQ ID NO: 166 - DNA, 17 bp, Artificial Sequence
  Description of Artificial Sequence: Synthetic primer
  5' 56-FAM
tcgttgcctacgccacg

SEQ ID NO: 167 - DNA, 25 bp, Artificial Sequence
  Description of Artificial Sequence: Synthetic primer
  5' 56-FAM
cattatacgagttgcctacgccact

SEQ ID NO: 168 - DNA, 36 bp, Artificial Sequence; identical to SEQ ID NO: 36
  Description of Artificial Sequence: Synthetic primer
  5' 56-FAM

SEQ ID NO: 169 - DNA, 46 bp, Artificial Sequence; identical to SEQ ID NO: 78
  Description of Artificial Sequence: Synthetic primer
  5' 56-FAM

SEQ ID NO: 170 - DNA, 49 bp, Artificial Sequence
  Description of Artificial Sequence: Synthetic primer
  5' 56-FAM
ttctttcataaaattcaatctaagtcatctttaacactcttgcctacgt

SEQ ID NO: 171 - DNA, 26 bp, Artificial Sequence
  Description of Artificial Sequence: Synthetic primer
cgcctagtgtattaaccttatgtgtg

SEQ ID NO: 172 - DNA, 19 bp, Artificial Sequence
  Description of Artificial Sequence: Synthetic primer
  5' 56-FAM
caccgacacagcaggtcac

SEQ ID NO: 173 - DNA, 19 bp, Artificial Sequence
  Description of Artificial Sequence: Synthetic primer
  5' 56-FAM
caccgacacagcaggtcat

SEQ ID NO: 174 - DNA, 34 bp, Artificial Sequence
  Description of Artificial Sequence: Synthetic primer
  5' 56-FAM
agatagcaggcttgtagatcgacacagcaggtct

SEQ ID NO: 175 - DNA, 30 bp, Artificial Sequence
  Description of Artificial Sequence: Synthetic primer
  5' 56-FAM
caagactagatcactagacacagcaggtcg

SEQ ID NO: 176 - DNA, 42 bp, Artificial Sequence
  Description of Artificial Sequence: Synthetic primer
ctttgatattcagtagacctctgtcagcttattatattcaat

SEQ ID NO: 177 - DNA, 35 bp, Artificial Sequence
  Description of Artificial Sequence: Synthetic primer
caaaatcttgaaacaaccctttcccagagaacaaa

SEQ ID NO: 178 - DNA, 30 bp, Artificial Sequence
  Description of Artificial Sequence: Synthetic primer
  5' 56-FAM
ccagcatcgcattacctgtcttgtctttgt

SEQ ID NO: 179 - DNA, 24 bp, Artificial Sequence
  Description of Artificial Sequence: Synthetic primer
ccgcattttggtctagctacagag

SEQ ID NO: 180 - DNA, 39 bp, Artificial Sequence
  Description of Artificial Sequence: Synthetic primer
catacatagatacatataaattttggtctagctacagaa

SEQ ID NO: 181 - DNA, 29 bp, Artificial Sequence
  Description of Artificial Sequence: Synthetic primer
gcatatcacattttggtctagctacagat

SEQ ID NO: 182 - DNA, 34 bp, Artificial Sequence
  Description of Artificial Sequence: Synthetic primer
catcatgatcaattgattttggtctagctacaaa

SEQ ID NO: 183 - DNA, 33 bp, Artificial Sequence
  Description of Artificial Sequence: Synthetic primer
  5' Tye665
acctatcgaaaatttaatcagtggaaaaatagc

SEQ ID NO: 184 - DNA, 27 bp, Artificial Sequence
  Description of Artificial Sequence: Synthetic primer
ctcattccaagtgtgtactactcccaa

SEQ ID NO: 185 - DNA, 26 bp, Artificial Sequence
  Description of Artificial Sequence: Synthetic primer
  5' Tye665
ctacacttcattaagattggatccac

SEQ ID NO: 186 - DNA, 39 bp, Artificial Sequence
  Description of Artificial Sequence: Synthetic primer
  5' 56-FAM
aaattcaatctaagtcatctttaacactcttgcctacgt

SEQ ID NO: 187 - DNA, 26 bp, Artificial Sequence
  Description of Artificial Sequence: Synthetic primer
cgcctagtgtattaaccttatgtgtg

SEQ ID NO: 188 - DNA, 35 bp, Artificial Sequence; identical to SEQ ID NO: 177
  Description of Artificial Sequence: Synthetic primer

SEQ ID NO: 189 - DNA, 30 bp, Artificial Sequence; identical to SEQ ID NO: 178
  Description of Artificial Sequence: Synthetic primer
  5' 56-FAM

SEQ ID NO: 190 - DNA, 32 bp, Artificial Sequence; identical to SEQ ID NO: 35
  Description of Artificial Sequence: Synthetic primer
  5' 56-FAM

SEQ ID NO: 191 - DNA, 21 bp, Artificial Sequence
  Description of Artificial Sequence: Synthetic primer
  5' 56-FAM
catttgtttgcctacgccaca

SEQ ID NO: 192 - DNA, 28 bp, Artificial Sequence
  Description of Artificial Sequence: Synthetic primer
  5' 56-FAM
caatatctaatgtccttgcctacgccat

SEQ ID NO: 193 - DNA, 17 bp, Artificial Sequence
  Description of Artificial Sequence: Synthetic primer
  5' 56-FAM
tcgttgcctacgccacg

SEQ ID NO: 194 - DNA, 25 bp, Artificial Sequence
  Description of Artificial Sequence: Synthetic primer
  5' 56-FAM
cattatacgagttgcctacgccact

SEQ ID NO: 195 - DNA, 36 bp, Artificial Sequence; identical to SEQ ID NO: 36
  Description of Artificial Sequence: Synthetic primer
  5' 56-FAM

SEQ ID NO: 196 - DNA, 46 bp, Artificial Sequence; identical to SEQ ID NO: 78
  Description of Artificial Sequence: Synthetic primer
  5' 56-FAM

SEQ ID NO: 197 - DNA, 49 bp, Artificial Sequence; identical to SEQ ID NO: 170
  Description of Artificial Sequence: Synthetic primer
  5' 56-FAM

SEQ ID NO: 198 - DNA, 19 bp, Artificial Sequence
  Description of Artificial Sequence: Synthetic primer
  5' 56-FAM
caccgacacagcaggtcac

SEQ ID NO: 199 - DNA, 19 bp, Artificial Sequence
  Description of Artificial Sequence: Synthetic primer
  5' 56-FAM
caccgacacagcaggtcat

SEQ ID NO: 200 - DNA, 34 bp, Artificial Sequence; identical to SEQ ID NO: 174
  Description of Artificial Sequence: Synthetic primer
  5' 56-FAM

SEQ ID NO: 201 - DNA, 30 bp, Artificial Sequence; identical to SEQ ID NO: 175
  Description of Artificial Sequence: Synthetic primer
  5' 56-FAM

SEQ ID NO: 202 - DNA, 42 bp, Artificial Sequence; identical to SEQ ID NO: 176
  Description of Artificial Sequence: Synthetic primer

SEQ ID NO: 203 - DNA, 24 bp, Artificial Sequence
  Description of Artificial Sequence: Synthetic primer
ccgcattttggtctagctacagag

SEQ ID NO: 204 - DNA, 29 bp, Artificial Sequence
  Description of Artificial Sequence: Synthetic primer
gcatatcacattttggtctagctacagat

SEQ ID NO: 205 - DNA, 34 bp, Artificial Sequence; identical to SEQ ID NO: 182
  Description of Artificial Sequence: Synthetic primer

SEQ ID NO: 206 - DNA, 39 bp, Artificial Sequence; identical to SEQ ID NO: 180
  Description of Artificial Sequence: Synthetic primer

SEQ ID NO: 207 - DNA, 33 bp, Artificial Sequence; identical to SEQ ID NO: 183
  Description of Artificial Sequence: Synthetic primer
  5' Q670

SEQ ID NO: 208 - DNA, 26 bp, Artificial Sequence
  Description of Artificial Sequence: Synthetic primer
  5' Q670
ctacacttcattaagattggatccac

SEQ ID NO: 209 - DNA, 27 bp, Artificial Sequence
  Description of Artificial Sequence: Synthetic primer
ctcattccaagtgtgtactactcccaa

SEQ ID NO: 210 - DNA, 17 bp, Artificial Sequence
  Description of Artificial Sequence: Synthetic oligonucleotide
tattatatattcaattg

SEQ ID NO: 211 - DNA, 105 bp, Artificial Sequence
  Description of Artificial Sequence: Synthetic polynucleotide
tctagatattagtgtaaatatataaccaatttaatgatctatgcaaatagttcactaaataatgtaatattcttggcttatcattgaaattaaaatttattatat

SEQ ID NO: 212 - DNA, 36 bp, Artificial Sequence
  Description of Artificial Sequence: Synthetic oligonucleotide
catcatgtatgagtttataatataatcaattaattt

SEQ ID NO: 213 - DNA, 113 bp, Artificial Sequence
  Description of Artificial Sequence: Synthetic polynucleotide
tatcacatggaaatattatatagatacaatcatttccgtaaaatttcaaattaaatgatttcttgaatttcttaatttaaaatatatctttattcgagttaaatgatgtagaa

SEQ ID NO: 214 - DNA, 63 bp, Artificial Sequence
  Description of Artificial Sequence: Synthetic oligonucleotide
aaagtacttaattttatgaatcatgttttgagtacgaattttaacttaaacaatttaataatc

SEQ ID NO: 215 - DNA, 81 bp, Artificial Sequence
  Description of Artificial Sequence: Synthetic oligonucleotide
tgaaatcataagattacatatctttattggaaaaaaatatgttatctttcaactattcttcttatagattgaaatagtata

SEQ ID NO: 216 - DNA, 87 bp, Artificial Sequence
  Description of Artificial Sequence: Synthetic oligonucleotide
gaatttatattacacctttgttttaaaaactaattcgtttataatattgaagtcgataaaaagatttacagtaattatattcaattt

SEQ ID NO: 217 - DNA, 18 bp, Artificial Sequence
  Description of Artificial Sequence: Synthetic oligonucleotide
tttaaatgttactttaaa

SEQ ID NO: 218 - DNA, 93 bp, Artificial Sequence
  Description of Artificial Sequence: Synthetic oligonucleotide
tattattaaataaaaatcgaatgttattcactgcttcattagatagactgctttattacaatttatgagtaatttcataatatgaaattataa

SEQ ID NO: 219 - DNA, 66 bp, Artificial Sequence
  Description of Artificial Sequence: Synthetic oligonucleotide
gaaattaagtaatctattctcatatttagtatattatcatgaaagaatttaaattatttcgttaca

SEQ ID NO: 220 - DNA, 200 bp, Artificial Sequence
  Description of Artificial Sequence: Synthetic polynucleotide
atttatctgatgtaattaaaatatctatattttagtgataagactattttattatacaaaataagatacaaataaataaaactacataaaagttgtgattgtatctcctaatttctaaaaaatttaaagagtttttaatttgaatctagtaacagtcatactcgttaatataacccttttttattgcagattgatattga

SEQ ID NO: 221 - DNA, 87 bp, Artificial Sequence
  Description of Artificial Sequence: Synthetic oligonucleotide
tatgttaatcaaagataatcataaatcaatgctttatcactattatgttgtatcttttaatagagatgacttaaattattattataa

SEQ ID NO: 222 - DNA, 31 bp, Artificial Sequence
  Description of Artificial Sequence: Synthetic oligonucleotide
atacaatacttgtattaattttcattgaaga

SEQ ID NO: 223 - DNA, 114 bp, Artificial Sequence
  Description of Artificial Sequence: Synthetic polynucleotide
taatgattattgcctataatttacaatatacgcttcttatatataattattttaattgcactgaataaatatttaaataacttcttaatgaagttaaaagtcagtataggatta

SEQ ID NO: 224 - DNA, 62 bp, Artificial Sequence
  Description of Artificial Sequence: Synthetic oligonucleotide
taataacaatcggtctaattttactatgtggttatttctgtttaaaacaaatttaaaataat

SEQ ID NO: 225 - DNA, 34 bp, Artificial Sequence
  Description of Artificial Sequence: Synthetic oligonucleotide
tcattataatttagaaattgctattatcaatagt

SEQ ID NO: 226 - DNA, 99 bp, Artificial Sequence
  Description of Artificial Sequence: Synthetic oligonucleotide
gtaattaaaattattttttgtatgactgattatttaatagtaaggctaaaagataaaaaacacctcacttttactaatattctatttataatttgatat

SEQ ID NO: 227 - DNA, 158 bp, Artificial Sequence
  Description of Artificial Sequence: Synthetic polynucleotide
tgcacatctattatttgataacaaaggactgtatagaaaatacaaataactagctattcatgttcaattacgctataatattgatatagatatatattttaattaaaatataaatgttttgaatatgtactttataatcttaacgatttttttaatta

SEQ ID NO: 228 - DNA, 166 bp, Artificial Sequence
  Description of Artificial Sequence: Synthetic polynucleotide
gttttattcataaataacttttatagaaatgttataatgctttatagattaagtgttattataattattattaacgactcacgtagtcacaaatcatagacatgttaagatatataatgtttcatacttacttatataaaattttattataagattaaaacgctaa

SEQ ID NO: 229 - DNA, 42 bp, Artificial Sequence
  Description of Artificial Sequence: Synthetic oligonucleotide
acatatgtcaatgactataatttaatattaaatcggtatttt

SEQ ID NO: 230 - DNA, 176 bp, Artificial Sequence
  Description of Artificial Sequence: Synthetic polynucleotide
aagtttcaaaacaaaacatacctcttaacttggaatttatatattcacatatatgttaaaattttgttttttatatagattattacttaaaagagataaataatcaattttaattgactataattcgataacagtagtgataaactttttaataattatcagtattcattaggtgt

SEQ ID NO: 231 - DNA, 165 bp, Artificial Sequence
  Description of Artificial Sequence: Synthetic polynucleotide
tagtatattatttatccttaagatctcttgtgtatatagatacaatataatctgcttagattcacaatggagaaattgtatatattatatcatttaaaaatatgtacaaagatcagtacctttagatttttatatagaattaataaatatttatataaatctaac

SEQ ID NO: 232 - DNA, 15 bp, Artificial Sequence
  Description of Artificial Sequence: Synthetic oligonucleotide
aataatttgattcta

SEQ ID NO: 233 - DNA, 54 bp, Artificial Sequence
  Description of Artificial Sequence: Synthetic oligonucleotide
gtttaaaatattaggaattaaattcaatatttctcttgagattataatacactt

SEQ ID NO: 234 - DNA, 178 bp, Artificial Sequence
  Description of Artificial Sequence: Synthetic polynucleotide
ttacttttattaatataatatccaagaacatgacattattttctaccttatagtgttttgttaatgttaagataaactttaacaagaataattaatcgaatttatgtattgatatacgtatttaagctattatcgataagattattctaacaaatgaaaaatgaaattatattatcta

SEQ ID NO: 235 - DNA, 63 bp, Artificial Sequence
  Description of Artificial Sequence: Synthetic oligonucleotide
atatgtcgtataatagttttcataatattataaccttaaattataaataaacggctttaagtt

SEQ ID NO: 236 - DNA, 132 bp, Artificial Sequence
  Description of Artificial Sequence: Synthetic polynucleotide
tttctctgttaatatcatagtagaattaagtctataatataatcaaaagaatatctacatgatagacttgctattaaatttaacgttacatatggattaattatttattttttatactagaaagtaatcaat

SEQ ID NO: 237 - DNA, 60 bp, Artificial Sequence
  Description of Artificial Sequence: Synthetic oligonucleotide
agattttaaaatttatatgtcattccgaataaacgtagatatgtatactacattaatatt

SEQ ID NO: 238 - DNA, 57 bp, Artificial Sequence
  Description of Artificial Sequence: Synthetic oligonucleotide
tttcttataatgtagctctaaatagatttaataaaatctaatattagaattctagtt

SEQ ID NO: 239 - DNA, 185 bp, Artificial Sequence
  Description of Artificial Sequence: Synthetic polynucleotide
gtaagtttgcattttagctaagattcattattatagtaggactattaaattttaacaaatgagtaaaaatttcttttacattttcattgtagccatattgtaaaaatttaaaattattatacatttatgtaaaaatacacacattaaaaaaaacgttttcatttttacagatttacagaaatgtt

SEQ ID NO: 240 - DNA, 9 bp, Artificial Sequence
  Description of Artificial Sequence: Synthetic oligonucleotide
tatttaatt

SEQ ID NO: 241 - DNA, 183 bp, Artificial Sequence
  Description of Artificial Sequence: Synthetic polynucleotide
tgttgaaattttcttttaatatatattatcaaattattgcaatatgatttatctcatgtactaagataccagattacaaaattacttatacgaagttactaatttgttaatttaagatacaacataagtatacaataagaaatttagcgtttaaaatatctatttattttgaataatcggata

SEQ ID NO: 242 - DNA, 119 bp, Artificial Sequence
  Description of Artificial Sequence: Synthetic polynucleotide
atttaaaatctgtaaattctgtttagaatttatcctattgacaaataatttttaataatttattccaatggacttataaatgaaattatttcaataagtaataccagtttatgaattag

SEQ ID NO: 243 - DNA, 13 bp, Artificial Sequence
  Description of Artificial Sequence: Synthetic oligonucleotide
ttatacaagtatt

SEQ ID NO: 244 - DNA, 116 bp, Artificial Sequence
  Description of Artificial Sequence: Synthetic polynucleotide
aattctggtattttaagaaatattaacttagagatagttatttatcttgaattcgatatctattatcgtacataatattattcacagttaaatgtataaaaattaaaatacacttt

SEQ ID NO: 245 - DNA, 40 bp, Artificial Sequence
  Description of Artificial Sequence: Synthetic oligonucleotide
actaactgatattatgaatatcctaatagttattagaatt

SEQ ID NO: 246 - DNA, 77 bp, Artificial Sequence
  Description of Artificial Sequence: Synthetic oligonucleotide
ccatttggtattaaattttaatcggaaatattgaatattaaattctactcataataatgaatttcttttaattgaaa

SEQ ID NO: 247 - DNA, 125 bp, Artificial Sequence
  Description of Artificial Sequence: Synthetic polynucleotide
tgattgctggtataactactcttttcgactttaaatgaatataaattattaaaatttatttactaaattgaattcaatttgactaaataaattgaatattgtgtctaaatatcaaaaagatctat

SEQ ID NO: 248 - DNA, 17 bp, Artificial Sequence
  Description of Artificial Sequence: Synthetic oligonucleotide
ttaacaagtattttatt

SEQ ID NO: 249 - DNA, 185 bp, Artificial Sequence
  Description of Artificial Sequence: Synthetic polynucleotide
ttacggattccggattatgttttgtcataattatataatatttaaaagatgtatatcaatacctaataatataagcattagatacaataattttaatagttattatacaagaaaacaagacatatgtattgacttctatatagtaatataagatcttcatatatttttttatactttcttaaaga

SEQ ID NO: 250 - DNA, 74 bp, Artificial Sequence
  Description of Artificial Sequence: Synthetic oligonucleotide
gtctgttaagttgcactatatacatataatatatatatttttgtgtttttttaaactagaaaaaaacatataca

SEQ ID NO: 251 - DNA, 140 bp, Artificial Sequence
  Description of Artificial Sequence: Synthetic polynucleotide
cttcaggtgtgaattgttacgttatacttatgaaataaaatagtatatattccaacagataatttgtttaataaatattataataaaacgacattgaatttttgattttctattaacatactacttaaatacagaatatt

SEQ ID NO: 252 - DNA, 10 bp, Artificial Sequence
  Description of Artificial Sequence: Synthetic oligonucleotide
tacatagtta

SEQ ID NO: 253 - DNA, 8 bp, Artificial Sequence
  Description of Artificial Sequence: Synthetic oligonucleotide
taattatt

SEQ ID NO: 254 - DNA, 58 bp, Artificial Sequence
  Description of Artificial Sequence: Synthetic oligonucleotide
atattttataaactagcagtatttaaatgttaaaatcaaattattcaagtatcgtttt

SEQ ID NO: 255 - DNA, 142 bp, Artificial Sequence
  Description of Artificial Sequence: Synthetic polynucleotide
accattaattaatttttgcatatacttgttactaacagatgtatgtcaaatatagtacaactttcaacattaaatataatgttgaataacatgtatggtctttttaaaaatacattttgataatatatgtttgaatataata

SEQ ID NO: 256 - DNA, 172 bp, Artificial Sequence
  Description of Artificial Sequence: Synthetic polynucleotide
gtgacaaaaaaatcagattaatgattttataattattataaatttgattgagtaaaatgacaaaataatatgaaatttcctctaaactgtttatacattatcttcttattaatctatatccttaatggaattatttgattataagttcatgattgatcgcaatcattataat

SEQ ID NO: 257 - DNA, 174 bp, Artificial Sequence
  Description of Artificial Sequence: Synthetic polynucleotide
ttaaaataataatttattacaattaaatcactaaccaagatattaatcagtagttatattttacggatgctattaattaaactaaataaattatttcttcttcaattctttgtaccttataatgatatgttgaaatgaaaagaatcattaattaggagtaatgtcaagtttttt

SEQ ID NO: 258 - DNA, 93 bp, Artificial Sequence
  Description of Artificial Sequence: Synthetic oligonucleotide
ctgaaaaactacgtgttatattaaatatgttataatatctattttcaagaaactaggtaatttgtatatttattcataataacttaatgacta

SEQ ID NO: 259 - DNA, 164 bp, Artificial Sequence
  Description of Artificial Sequence: Synthetic polynucleotide
aactacgtaaacttaaattttacgttaattatatttaatttaatcataagtgattcgctatctcgaaattgtgtaataaaggagtcttaattttctaattattgattagataatatcatttatcaaaatataataaaaaaatatgtttggctaaattaccattt

SEQ ID NO: 260 - DNA, 17 bp, Artificial Sequence
  Description of Artificial Sequence: Synthetic oligonucleotide
agaattattatttctta

SEQ ID NO: 261 - DNA, 78 bp, Artificial Sequence
  Description of Artificial Sequence: Synthetic oligonucleotide
atcttataatagtaactatagtatatttatgattcataaataaatactactagtattttgcatataattggatactta

SEQ ID NO: 262 - DNA, 145 bp, Artificial Sequence
  Description of Artificial Sequence: Synthetic polynucleotide
taataataatcttttttctctttagttaacactaagatagaaatattatttatctataggtaataatataatttttagagatttccttatagtgtattgacaataacaaaaatattcataaatgatcaggtattttaccaataag

SEQ ID NO: 263 - DNA, 129 bp, Artificial Sequence
  Description of Artificial Sequence: Synthetic polynucleotide
gtaaattaacatattaaatattcgttacaaaatatttattggagcaataaactttgtgaaaaaaagatgtttctaattttctaaaactaatgtgtctatataattagtttatttactatctaaatcttt

SEQ ID NO: 264 - DNA, 99 bp, Artificial Sequence
  Description of Artificial Sequence: Synthetic oligonucleotide
atgataataagttattactttttgtgtaatttataaaataatttagaaattcgtttaagaagagttacttactttccaacttaatattcttaataacaa

SEQ ID NO: 265 - DNA, 38 bp, Artificial Sequence
  Description of Artificial Sequence: Synthetic oligonucleotide
atcttttttacaattatgttaaaataaattgactagta

SEQ ID NO: 266 - DNA, 177 bp, Artificial Sequence
  Description of Artificial Sequence: Synthetic polynucleotide
tattgtaaattaatcaagtccataacgaattatacgatttctattttaaagactatataaattaatttcttattccttgaagataagataatatatatagtgtaccattgtataaaaagtgattgattcttaattatttggataaaactatttttcccaaatatattatgtaatata

SEQ ID NO: 267 - DNA, 116 bp, Artificial Sequence
  Description of Artificial Sequence: Synthetic polynucleotide
actcaaaatcatctattataaagagttagttattagtttgttaattaatacatatttttctgtctcattaatttgctaattaacatagaaatttgaagacgataatatttataaaa

SEQ ID NO: 268 - DNA, 149 bp, Artificial Sequence
  Description of Artificial Sequence: Synthetic polynucleotide
atttaattgatcattattaattcgtgcaaaatggaattattaattattaaaatgcagaaaatttataataagtaaacattggcaccatgaaatagtatttattactatacaaaaaatgtatcttactttactatttatttctttattgt

SEQ ID NO: 269 - DNA, 61 bp, Artificial Sequence
  Description of Artificial Sequence: Synthetic oligonucleotide
ccgttgaaatgtcaatattcaatgatttaatactattatttcaaatgtataatagtataat

SEQ ID NO: 270 - DNA, 72 bp, Artificial Sequence
  Description of Artificial Sequence: Synthetic oligonucleotide
atagtcaactttatataatatttttggtaaaaaaccttgagttctatcacattttgaaaagttatatttaaa

SEQ ID NO: 271 - DNA, 125 bp, Artificial Sequence
  Description of Artificial Sequence: Synthetic polynucleotide
ttataggtttataatgaaatttcatattaacgatatatcgatgatctaatcttaataataaacttaaactaaacagttatcatctttacagttattttaaattttttaatgtggattgaaacaaa

SEQ ID NO: 272 - DNA, 182 bp, Artificial Sequence
  Description of Artificial Sequence: Synthetic polynucleotide
gtattgcatacaaaaagctatcaaattcaaaaacatcaagatattaaaattgatataagtatctcaatcatttaaatttttaagttaaatcaatgtcttttttagtagtaaatgtaatcctataccttaaaagattaatgatattttgtattttgtatattatttaggtgtaaactcttaat

SEQ ID NO: 273 - DNA, 28 bp, Artificial Sequence
  Description of Artificial Sequence: Synthetic oligonucleotide
atttatcttttaaacatgtatgaaatat

SEQ ID NO: 274 - DNA, 170 bp, Artificial Sequence
  Description of Artificial Sequence: Synthetic polynucleotide
ttttctttgtaatacaaaccagatatcgttaagaaaaagtattagtgaaattcaactttatattgtataattaattaacgaaagtcttttattcaacttggaattaagacattagcataaaaatttgtattttaattaattttaacaatatcaaaacattcattgtttga

SEQ ID NO: 275 - DNA, 184 bp, Artificial Sequence
  Description of Artificial Sequence: Synthetic polynucleotide
tttacaaattatatgtatgaagaaaatttagtatattaattttatttcactgtatccattaagttaagtactcgataatttgacttcatttagagatccataagttaattaaaagatctcaattaatctggataaaatttttaaaataaaatgaatcctaaattttaatcatcttatgaagttt

SEQ ID NO: 276 - DNA, 94 bp, Artificial Sequence
  Description of Artificial Sequence: Synthetic oligonucleotide
ttattagtctaaaaatacatgttttaaatattgaacaataatacacgtagtataatgtcagatatacattagactttattttaattaatgttct

SEQ ID NO: 277 - DNA, 161 bp, Artificial Sequence
  Description of Artificial Sequence: Synthetic polynucleotide
tatgcatttaatgattatttttttattagaatcttgattatgaaagcttcattaaaatcaatatttaaatttttttaataataactttcaatcaactgtcaactgaattaatatttaataaatattccagtggaccgaatataaagattacatagaatgga

SEQ ID NO: 278 - DNA, 29 bp, Artificial Sequence
  Description of Artificial Sequence: Synthetic oligonucleotide
ttatgaatgtaatatatactttcttaata

SEQ ID NO: 279 - DNA, 99 bp, Artificial Sequence
  Description of Artificial Sequence: Synthetic oligonucleotide
ctttgtataataatatgctgagataaggtttctaaatctaaaaaatttaatcttaaatatacttttatgtaaaattatcaattaaggaatctttatttc

SEQ ID NO: 280 - DNA, 164 bp, Artificial Sequence
  Description of Artificial Sequence: Synthetic polynucleotide
aatctttttcgagaccttaaaaaagttagctgttgttaatttcaaattataatcagagtgacaacaatacatcttattgataacattaattttaaattttcgtgaattagtaaaaatatatctagaatacatttttaatgctatatttaaattattagtataat

SEQ ID NO: 281 - DNA, 97 bp, Artificial Sequence
  Description of Artificial Sequence: Synthetic oligonucleotide
tcactatatatctttagttacaaatatagtattaaattcaatctttaatattttggagtttaaaacattaactgtaaatggtataataatcatttga

SEQ ID NO: 282 - DNA, 53 bp, Artificial Sequence
  Description of Artificial Sequence: Synthetic oligonucleotide
catcaaaagatattatcgttagaaatgtcatcaatttagtttatatattatta

SEQ ID NO: 283 - DNA, 60 bp, Artificial Sequence
  Description of Artificial Sequence: Synthetic oligonucleotide
aaagataaacggtcatttaatattttttttattcattacaataaagatttttggaacaca

SEQ ID NO: 284 - DNA, 54 bp, Artificial Sequence
  Description of Artificial Sequence: Synthetic oligonucleotide
aaaatattattttctgatacttagcatatgtagattaaacttatgattctaata

SEQ ID NO: 285 - DNA, 116 bp, Artificial Sequence
  Description of Artificial Sequence: Synthetic polynucleotide
ttttcaaaattagaaagtattatgagaatatattaagatcatttataacgattcttaatacatatgcattcaaaatgatcactcataattttttagatcataaattgatttttgat

SEQ ID NO: 286 - DNA, 73 bp, Artificial Sequence
  Description of Artificial Sequence: Synthetic oligonucleotide
atctctatatgaaaaataaattcaacaatgtgttttttttggttattatcaactatatgcagaaaaaatattt

SEQ ID NO: 287 - DNA, 104 bp, Artificial Sequence
  Description of Artificial Sequence: Synthetic polynucleotide
cttataaagagattaaattatgatcaacatttaaatgtttatggttctattgaaaacatatatatttaaggattacatgtatttctttcaataaataacatttc

SEQ ID NO: 288 - DNA, 181 bp, Artificial Sequence
  Description of Artificial Sequence: Synthetic polynucleotide
ctttactaattgaggtttaagcagttatctatataattatgaattagcaaatttccagtctttctgataaatctaatattaaggtactgctttataaaaagactaataaattatatgatcttgctattagcttaaaattaaattaatatattatgacaaataatatattttgaaataactt

SEQ ID NO: 289 - DNA, 148 bp, Artificial Sequence
  Description of Artificial Sequence: Synthetic polynucleotide
gtttcacatgaaatatttatgctgaaaatgtcagttcaatcttttttactgtacatgatatagatataataattatacataaaaaattttgttgaatattaatatgctaaaaagctacattttttaaatataaatatccattgatatt

SEQ ID NO: 290 - DNA, 170 bp, Artificial Sequence
  Description of Artificial Sequence: Synthetic polynucleotide
tcgagatataaaatttaatgttataaacacattcgtcatatattctcattcattaaaatagattatattcttaaaatttaatgattctaaaattttataatataaacaaatttttaggtttggatgaaaactttcctaaatcaactttgtaattgtgagtagaaaacttg

SEQ ID NO: 291 - DNA, 105 bp, Artificial Sequence
  Description of Artificial Sequence: Synthetic polynucleotide
tttaaaaactgtatgcatatttatatttgtatcctaaatatagataacttataaagttccataaatctagacgataaagtcatttattaaatgatatttgattta

SEQ ID NO: 292 - DNA, 111 bp, Artificial Sequence
  Description of Artificial Sequence: Synthetic polynucleotide
aaaaatagtatttatttagtagactagtcttattttaataaaaaaaaagttccagtgaaataactaacctattgattttaaatttcagaagttattttactttatgttacc

SEQ ID NO: 293 - DNA, 108 bp, Artificial Sequence
  Description of Artificial Sequence: Synthetic polynucleotide
acattatgtgatatttaacgttagtttagatcattatttatctcccaattatttaattagaataaaaaaaagttaaaatctttaaggttcatacatgtatatataatt

SEQ ID NO: 294 - DNA, 176 bp, Artificial Sequence
  Description of Artificial Sequence: Synthetic polynucleotide
aattccttaattcttttacatatttataaataataggagcataaattagaaaaaggtatactattaataccaactctaatatgctttacagcataatacatattttttttaatttatcatggaggatttattatagattaagatagattaaataatccattttgaatttattgtaa

SEQ ID NO: 295 - DNA, 79 bp, Artificial Sequence
  Description of Artificial Sequence: Synthetic oligonucleotide
tagaataacatactgtattttactgtattatatcttgtttagtttttaatccataatagaaattaagaaatcataaatt

SEQ ID NO: 296 - DNA, 78 bp, Artificial Sequence
  Description of Artificial Sequence: Synthetic oligonucleotide
aaactttatttaaggataatacactttgaagaaattgatttttttttatatttacgaaaattaactcactaaattagt

SEQ ID NO: 297 - DNA, 38 bp, Artificial Sequence
  Description of Artificial Sequence: Synthetic oligonucleotide
tttttataacatttaaaaattcaaatttagcgtattag

SEQ ID NO: 298 - DNA, 198 bp, Artificial Sequence
  Description of Artificial Sequence: Synthetic polynucleotide
tcagataactttaaaagattcccattatttttgaatatctacgatagaatattgagatatctttttaatttaccgaatatatgagaattagtataattttatcatttatttactgatataatatattatgatacaattttattactgaaatatctcaaatagtagtaataattttaaaaaacagcgaatcaaattgtt

SEQ ID NO: 299 - DNA, 21 bp, Artificial Sequence
  Description of Artificial Sequence: Synthetic oligonucleotide
aagtttcttgctattataaaa

SEQ ID NO: 300 - DNA, 169 bp, Artificial Sequence
  Description of Artificial Sequence: Synthetic polynucleotide
ttaaacataatattcaaatatttataaaattaagatttatattacgattagatgaaagccatttttgtcaagtttccaccatctttaaatgtataaaaattttatataaattaagttacttgatagattattgctaaaataaaagtgttttaggtacttattaccttta

SEQ ID NO: 301 - DNA, 145 bp, Artificial Sequence
  Description of Artificial Sequence: Synthetic polynucleotide
aatgtagattcaaaaatgatttaaccatatttatattagttaaagtttttaatgtgtagactaaaatatctcttattattttaatgcctttttaaatccaatagttcgtttatgtacaaaaataatagatataatacattcaaga

SEQ ID NO: 302 - DNA, 164 bp, Artificial Sequence
  Description of Artificial Sequence: Synthetic polynucleotide
cagaatttatctgttttatatcatttaaaaacaataattatttttcattatctaattatcctgtggaaattcgttaaaatatatattttggcataatttaatgttggaactatataaacatatatattgtcttattaaaagtatagactaaaaaaacaggactt

SEQ ID NO: 303 - DNA, 189 bp, Artificial Sequence
  Description of Artificial Sequence: Synthetic polynucleotide
aagaaccaaaccaaataattttgatgatgtaaaaatgtgatttattttaattagtcctagtaattttaaatctattaattaatgtcaatttattacagtacaagaaaatattatacttggcaattattgcataagtttcatttttgtaaattgtaaaaaaaatattatacttttttccgatttctaaat

SEQ ID NO: 304 - DNA, 64 bp, Artificial Sequence
  Description of Artificial Sequence: Synthetic oligonucleotide
cacttatgtaattacttttactgaatcaattaaataggtacaaataattttagttatattatag

SEQ ID NO: 305 - DNA, 21 bp, Artificial Sequence
  Description of Artificial Sequence: Synthetic oligonucleotide
attaaattagctgtaacttat

SEQ ID NO: 306 - DNA, 103 bp, Artificial Sequence
  Description of Artificial Sequence: Synthetic polynucleotide
ataataatataattttaatgttttaaagtaactgacaaattacagttacgtacaaaacatagacatatatagcttattggttttttaaaagtcttcttttaat

SEQ ID NO: 307 - DNA, 65 bp, Artificial Sequence
  Description of Artificial Sequence: Synthetic oligonucleotide
aaatactcataaagataactaatccaattttgattttaatgttaatgtattaacttttatagtag

SEQ ID NO: 308 - DNA, 43 bp, Artificial Sequence
  Description of Artificial Sequence: Synthetic oligonucleotide
ttacgattcattatatttttcatttatgcaatgaagataaaaa

SEQ ID NO: 309 - DNA, 148 bp, Artificial Sequence
  Description of Artificial Sequence: Synthetic polynucleotide
atatagttttttacaaatataaaattgttattttccaattatctattataaaatggtacctagtacaaaaaaattaaaaatgcagttatattagaatacttttatattaacagttggctttaaactgcttgataattgcttatataat

SEQ ID NO: 310 - DNA, 178 bp, Artificial Sequence
  Description of Artificial Sequence: Synthetic polynucleotide
taataaacggtgatgttagaataatttatacaaattttataatttttttaatattcatccatttaacatattatacatacaaacaaaataaatttcaggaactgaatcgtgaaaaaatattgataatatagtaattaatgttttcctattctgctttttgatgagattttttaataac

SEQ ID NO: 311 - DNA, 5 bp, Artificial Sequence
  Description of Artificial Sequence: Synthetic oligonucleotide
tttaa

SEQ ID NO: 312 - DNA, 162 bp, Artificial Sequence
  Description of Artificial Sequence: Synthetic polynucleotide
tcctataacacggtctaaaccattaaacaaaaatttttagaaatatactaaatttcttaatataatagtgatcagaaggatcctattttgttattgaatgtttaaaatagtttatatgtaatccgataaaattattattatgatttttacttagtattaaat

SEQ ID NO: 313 - DNA, 75 bp, Artificial Sequence
  Description of Artificial Sequence: Synthetic oligonucleotide
ttgatctaaaaataaattgtaatttttaaagatattctaaatatattaatgccattttttagaacagtctcgata

SEQ ID NO: 314 - DNA, 106 bp, Artificial Sequence
  Description of Artificial Sequence: Synthetic polynucleotide
atttagagtgttaatagggttaatctactaattagtaatatattaaactaacttgtacattttaatctacaaataaacttaattatgctaactattttatatatag

SEQ ID NO: 315 - DNA, 37 bp, Artificial Sequence
  Description of Artificial Sequence: Synthetic oligonucleotide
tattcaaggtttacaaatattgtttatattacataat

SEQ ID NO: 316 - DNA, 136 bp, Artificial Sequence
  Description of Artificial Sequence: Synthetic polynucleotide
tgaaatctattattataagtatatacattatagacatttttatggtaatttataaatatacgaaagaaggttactacttaaaaactactgttacatctaatttattgatatccactgttttaaaattattaaatgt

SEQ ID NO: 317 - DNA, 95 bp, Artificial Sequence
  Description of Artificial Sequence: Synthetic oligonucleotide
atcatcaaatatttaagtaataatagtaattcgaatattatattgttttctaatatactacggaatatttttatgacaatgttgttaaataacac

SEQ ID NO: 318 - DNA, 29 bp, Artificial Sequence
  Description of Artificial Sequence: Synthetic oligonucleotide
tttagactattcgtaaatttatattaata

SEQ ID NO: 319 - DNA, 71 bp, Artificial Sequence
  Description of Artificial Sequence: Synthetic oligonucleotide
ctgttattcttattcaattatttgaaataatcaagtttgacaaaaattgttataacatattaaattgagca

SEQ ID NO: 320 - DNA, 57 bp, Artificial Sequence
  Description of Artificial Sequence: Synthetic oligonucleotide
aaattaaagaatcctaagttatcctaatttgttactaatattgttatagttaatatt

SEQ ID NO: 321 - DNA, 196 bp, Artificial Sequence
  Description of Artificial Sequence: Synthetic polynucleotide
aatagttatattgggtgtataatcatctaattataatcactatatatatcatccgattataatttttgtgcaatagaaaatataaatagaatgcttatattcataatagtgtggaataatctaatatccatgaacactaatttatatttatataaccttttaaatttctattaaaaatttattcgattagtagata

SEQ ID NO: 322 - DNA, 64 bp, Artificial Sequence
  Description of Artificial Sequence: Synthetic oligonucleotide
aactattagtaagaatatttttacttatattgcttaattggataaatatgaaacaatttcattc

SEQ ID NO: 323 - DNA, 19 bp, Artificial Sequence
  Description of Artificial Sequence: Synthetic oligonucleotide
tattataaatatttgatct

SEQ ID NO: 324 - DNA, 82 bp, Artificial Sequence
  Description of Artificial Sequence: Synthetic oligonucleotide
attaaaaaataaatgttaattagtataaagcagcctaatagtctatttgctttgaaataagcttcatttttattacatttta

SEQ ID NO: 325 - DNA, 138 bp, Artificial Sequence
  Description of Artificial Sequence: Synthetic polynucleotide
agtgtaatatattaaatagcaggtcaatctttattaaaattttttaacaaatttgaaaataatttatcttatgcgaaatagtaatattttaattctaatctattatttaaatataataccagtagcatgacttacttg

SEQ ID NO: 326 - DNA, 66 bp, Artificial Sequence
  Description of Artificial Sequence: Synthetic oligonucleotide
tctttatctaggtacagaaaagtaatattcatttgattcaaaataaactattttttaaatgttaat

SEQ ID NO: 327 - DNA, 38 bp, Artificial Sequence
  Description of Artificial Sequence: Synthetic oligonucleotide
tatttcctaatataaaataatgtgtctaatatatttga

SEQ ID NO: 328 - DNA, 43 bp, Artificial Sequence
  Description of Artificial Sequence: Synthetic oligonucleotide
tatcgaatattaaatcagatcagtttcattttgaatattaata

SEQ ID NO: 329 - DNA, 193 bp, Artificial Sequence
  Description of Artificial Sequence: Synthetic polynucleotide
ttgtcctgttttcatttttcagtctaacaatttatttttttacctgtcaaaaaatttatctaagagataaatttataatagcagaatcaaataaatttggaattttgtactggatatattaataaacgataattcaaatatatagattaacatcgatttataaaatttaaaactttttgaaacagtataatga

SEQ ID NO: 330 - DNA, 150 bp, Artificial Sequence
  Description of Artificial Sequence: Synthetic polynucleotide
agggtgactttatattagtattttttacaaaataacttagcaaaaataccttaacacatatactaatctaggaaataaaaatattttttgaaattgttcataaagtattttttttatatagctatcttatatagtgttgatcacataaaa

SEQ ID NO: 331 - DNA, 10 bp, Artificial Sequence
  Description of Artificial Sequence: Synthetic oligonucleotide
catttgaaat

SEQ ID NO: 332 - DNA, 99 bp, Artificial Sequence
  Description of Artificial Sequence: Synthetic oligonucleotide
tcatttaatttgaatcataaatatatcttagaatacacttaattttgaattatatcctatgaaaaaatttattttaatttagaagatcagttatgacgt

SEQ ID NO: 333 - DNA, 175 bp, Artificial Sequence
  Description of Artificial Sequence: Synthetic polynucleotide
aatattgtttaagattttacttttcaatttaaaaataatgattgaaagtcattgtgttctaatttctgtagacttattatatgaaaatcatatgttatatacttcagtgaaatacctttaaaaaaaattgatatcacaactaaattagtatgatatacattcataatacattgat

SEQ ID NO: 334 - DNA, 190 bp, Artificial Sequence
  Description of Artificial Sequence: Synthetic polynucleotide
gaatgaaatcaaacaataggtaatatgatgtttttaattattataatatttatctccattaacgatttatattttgattcccgcaaaaagttttttctatagaatatatgaagattaaattaaatccagaattttaattaaataaaataaattgcttatcgcgttcattcatattaatgatttatagaca

SEQ ID NO: 335 - DNA, 132 bp, Artificial Sequence
  Description of Artificial Sequence: Synthetic polynucleotide
tctttaatataataaataaacatagtaatcttgtccaagtctagaaaagtaattttcgtttattttaattttttacacagaaatgctaaaatgtattaatataaagtcactatcatggtatagttatttata

SEQ ID NO: 336 - DNA, 91 bp, Artificial Sequence
  Description of Artificial Sequence: Synthetic oligonucleotide
agataatggattaggtttaacttaaatacaaattaaatagattctttacaaaacattgttctaatctttgactgaattatacttttatata

SEQ ID NO: 337 - DNA, 16 bp, Artificial Sequence
  Description of Artificial Sequence: Synthetic oligonucleotide
tgttaatattacatat

SEQ ID NO: 338 - DNA, 79 bp, Artificial Sequence
  Description of Artificial Sequence: Synthetic oligonucleotide
ataataacgattaatttgattatgttgaatgatatattaacaaatatttgttctgctcacatatattaaatatttctaa

SEQ ID NO: 339 - DNA, 23 bp, Artificial Sequence
  Description of Artificial Sequence: Synthetic oligonucleotide
ttcatagtgcatataataattat

SEQ ID NO: 340 - DNA, 186 bp, Artificial Sequence
  Description of Artificial Sequence: Synthetic polynucleotide
attaaattattaaaatgtgacgttcgaataatataaataattagttataagaaatatgttttatattattgttctctctcaatgaatatcgactttataattctattggacagaattttaatatatatggaaatattcatattcaaaattcggtcatacctatcattaatttatagcataataata

SEQ ID NO: 341 - DNA, 119 bp, Artificial Sequence
  Description of Artificial Sequence: Synthetic polynucleotide
ataatatcaattttatctataaaaatagtacatgattatttattatattctattacagattataataccaaataaagtagattggctatgaatttcaacgatggtttacttatatttat

SEQ ID NO: 342 - DNA, 87 bp, Artificial Sequence
  Description of Artificial Sequence: Synthetic oligonucleotide
ttcaacgataatattttctttacgaatcaaacgaatttaaatttttaggaagtttatattcatgaaaaaatatttacagattttatt

SEQ ID NO: 343 - DNA, 95 bp, Artificial Sequence
  Description of Artificial Sequence: Synthetic oligonucleotide
ttatcaaactttcgatcatataattcaggataatattaattgagttcattaaaatttacataattttaataaaaatcggtaaattttttgaactg

SEQ ID NO: 344 - DNA, 200 bp, Artificial Sequence
  Description of Artificial Sequence: Synthetic polynucleotide
aatacaagaaaccattattataaagaaaactacaatagaatatagttgtattttgtaaaaattgatttgaattatcatcttttaaacttattgagatatatagagaatattttcattatgaccttctttgtcaaaaagaatatctaaataaattactacactattgatagcagtattttttttatatgctttatttcgaa

SEQ ID NO: 345 - DNA, 177 bp, Artificial Sequence
  Description of Artificial Sequence: Synthetic polynucleotide
gaaagtagatctaatttacacatattataaataaagattttaaatatattaagctatatacattattttttcaaatattttactattatgacttattcttttaagtgtaaaaaacgtcatgacaaacttaaaatgaattaatctatccttgaaatgtatgatgagtatctttgtatt

SEQ ID NO: 346 - DNA, 51 bp, Artificial Sequence
  Description of Artificial Sequence: Synthetic oligonucleotide
ctcctattaaaattaagtagatacattaatgttctattattatagtgtaaa

SEQ ID NO: 347 - DNA, 95 bp, Artificial Sequence
  Description of Artificial Sequence: Synthetic oligonucleotide
atgtaacagtattttattagtattaaattaaaacataatagtaagctaaaaatttacttttattactgctacatgtttaatatatgccattgata

SEQ ID NO: 348 - DNA, 183 bp, Artificial Sequence
  Description of Artificial Sequence: Synthetic polynucleotide
atttattcaaaatgttttagccttccatagaatttactaaattaaaattatataaatactttctagaattgttagtttttaagcgtacaaattatcttgtacactcaatattccaaaaaacgataataaatataaagatttgtgaacatgttgttgatttataggattaattataaatttaat

SEQ ID NO: 349 - DNA, 125 bp, Artificial Sequence
  Description of Artificial Sequence: Synthetic polynucleotide
ttttagttcaatagataaaaactcttataaatccagattctcaataatgttatttatgactttgatctaaattatcaaaataattttatattaaatttttaggtaaagtcacaattaggatagat

SEQ ID NO: 350 - DNA, 166 bp, Artificial Sequence
  Description of Artificial Sequence: Synthetic polynucleotide
taacttcgatcaaaaatttattgtaactaagatataattgttaatataaaaaataagtcatagctgaataaatttccaatataatttatactatggctttgtatatatctatgtattaatttacaaaacgttaacttttataatttcatcttgaatttggatagat

SEQ ID NO: 351 - DNA, 76 bp, Artificial Sequence
  Description of Artificial Sequence: Synthetic oligonucleotide
tattaattatcatcactaatatatattatggatttgtggattaacgttacttgaaatattctaaaacaaaattatt

SEQ ID NO: 352 - DNA, 17 bp, Artificial Sequence
  Description of Artificial Sequence: Synthetic oligonucleotide
taataaattgtttactt

SEQ ID NO: 353 - DNA, 197 bp, Artificial Sequence
  Description of Artificial Sequence: Synthetic polynucleotide
ccttgactcccaatatgttattttatttatgtattttgtataatcatattcaaaaattaagacatagaagataacattttgaaagcattaacacaattcaaattttttagttgaatattaagtaataatacgttatatttataattttgtatcttttatctgaagataataaatagtttgaaatattaaaacaacgt

SEQ ID NO: 354 - DNA, 173 bp, Artificial Sequence
  Description of Artificial Sequence: Synthetic polynucleotide
gatgttaatttttagatagaaatcaaactcattaataaattgaatatttgttttatttagaattacacttagaaggtattaacttatacctattaacacattatattaaattaagttacaaaaatcacagctttaagatgattttgtttgttataaagtatttcatcaaaact

SEQ ID NO: 355 - DNA, 115 bp, Artificial Sequence
  Description of Artificial Sequence: Synthetic polynucleotide
tttaacttatcaagttttacgctttaaataaaccttcaaagatctattgtggatattttgtttatataaggaatattaagtaattatataaaaaaacgatcatcatttttataaa

SEQ ID NO: 356 - DNA, 146 bp, Artificial Sequence
  Description of Artificial Sequence: Synthetic polynucleotide
tttatcagtattttcagatcaaattgacgactaatgagatttatacatatctaatatttatagattaacaagtataagtacaaaaaaaaaatattcatttagctcgttttttatattattttgctatgatatatagttaaatcaat

SEQ ID NO: 357 - DNA, 184 bp, Artificial Sequence
  Description of Artificial Sequence: Synthetic polynucleotide
ttattaattttaaattattgtatctaattaaatttttgtgttactgtaaaaccctcgtaaaacagtacagatacataaattttcgttcatttgaattaaagagttttatgacaaacaatgtaaatcatgaattaggcaaaaaatattgaatttttattttgaaatcaatttatatcataactat

SEQ ID NO: 358 - DNA, 98 bp, Artificial Sequence
  Description of Artificial Sequence: Synthetic oligonucleotide
attaattatggtaaatagatctatacagaatttaagttctaacaatgaaaacttttttaatatttacatttttcagagttgatctaacataatttaat

SEQ ID NO: 359 - DNA, 114 bp, Artificial Sequence
  Description of Artificial Sequence: Synthetic polynucleotide
tctaattaagcatagttataaagcttcggtaataacattgtgtttgcttattttgattaatttaattcaatttttatattaacattcaaaaaagcaaacagtattaatataata

SEQ ID NO: 360 - DNA, 155 bp, Artificial Sequence
  Description of Artificial Sequence: Synthetic polynucleotide
tagttatattatttaaatttcctattaaaggataatattcgaataaaaatgcctttgatataataattgtcatactcttattactttgatcataaactattgaaactcttttataaaaagagtaaatcataggcttaatagttttaagtataata

SEQ ID NO: 361 - DNA, 197 bp, Artificial Sequence
  Description of Artificial Sequence: Synthetic polynucleotide
gtatggaattaaaattaatcttatgtaagcattctataaattctagatccaatgcaatttacaaataaattatatttttaatttttgttttaatttattcagtttctctattaatataatgtattgcttaaatgttctattaaacagaaacttaagaccattaaacataaggattcaagaaagtttatgaatattaa

SEQ ID NO: 362 - DNA, 28 bp, Artificial Sequence
  Description of Artificial Sequence: Synthetic oligonucleotide
atctattttataattgatagattcaaat

SEQ ID NO: 363 - DNA, 137 bp, Artificial Sequence
  Description of Artificial Sequence: Synthetic polynucleotide
atatgttatcaaacgaatcttaattaactattttagatgacagagttataaaaacttacgttgtctattattcgtattaatattgcattatttacatttatcatgattatataaagttaaaaacatataagatattt

SEQ ID NO: 364 - DNA, 146 bp, Artificial Sequence
  Description of Artificial Sequence: Synthetic polynucleotide
taaaaaacaatatcaaattttaatatatctattaaatattttaaaatcagggagttattcctaaagattttaagtacacgtagttattaattttttaattaatatgtaatttatgatgcctttagtctagatactttcaagaatca

SEQ ID NO: 365 - DNA, 170 bp, Artificial Sequence
  Description of Artificial Sequence: Synthetic polynucleotide
aaaaaattaggtattataaaaaaaattaaataaaattagtcatcaattctagattcactcttagatagctaaccgataatggccaatctttatatactttaatctatatttgttttttaatttgcaattattaatctgtgtttatagaattagtgaatgatattcaaata

SEQ ID NO: 366 - DNA, 155 bp, Artificial Sequence
  Description of Artificial Sequence: Synthetic polynucleotide
agaagtcatttgatagtaacatttgacagacattagtcaaacattgatccttttaataaaatattattcacaaataataactatacttttagctattaatttagaattaaaactatttattagatttaaatttaaatattcattatttgtatggg

SEQ ID NO: 367 - DNA, 27 bp, Artificial Sequence
  Description of Artificial Sequence: Synthetic oligonucleotide
atttgatctaaaaaattttatttcgta

SEQ ID NO: 368 - DNA, 121 bp, Artificial Sequence
  Description of Artificial Sequence: Synthetic polynucleotide
attgttaaagattaatgattgtatacagagagcaaattttattattaaactagagatatccattttgataattttactagactaatctaacatatctattgataaatttttcattatacaa

SEQ ID NO: 369 - DNA, 152 bp, Artificial Sequence
  Description of Artificial Sequence: Synthetic polynucleotide
aattagtactttttaaatgcaaagttctccttttatctactatatttgagaaaaacatatgcatttcgaccactataaatatagatatattactttttagtctagagaagagataataaaatagaaaattttttttttatttataatgaaat

SEQ ID NO: 370 - DNA, 94 bp, Artificial Sequence
  Description of Artificial Sequence: Synthetic oligonucleotide
attagttatttgttcagtaaataaaatttttcagaaaaaaagttccatgatttataatcaaagtcttctttattattatataagtctaaactga

SEQ ID NO: 371 - DNA, 151 bp, Artificial Sequence
  Description of Artificial Sequence: Synthetic polynucleotide
atttgttatataataacaattatattcaatccgaaataatgcttaaaacgactaacatgtattgttatgtaatttcgtaaatattgtataaaataattcaaataaattgaattcattaaaacttatttcaagattgcgttagtagtttttc

SEQ ID NO: 372 - DNA, 140 bp, Artificial Sequence
  Description of Artificial Sequence: Synthetic polynucleotide
atttctaaattattgcaatcagatataataataatattattatagctagtaacatacaaattattctaaaaacgatctatatagaatataagaatttcatttagtggctttattaggatatatccagtttttactatatg

SEQ ID NO: 373 - DNA, 151 bp, Artificial Sequence
  Description of Artificial Sequence: Synthetic polynucleotide
taacttataatgttcgtttatatacaataaaattgctattcttgtcaaaaattcgaaatagccaaaagaaataattcaagatttgttataaattttaatataaacacttgctagtatttagaataactgctttaaaatttgtattagtttt

SEQ ID NO: 374 - DNA, 44 bp, Artificial Sequence
  Description of Artificial Sequence: Synthetic oligonucleotide
taattattttcatatttagatcgaactttgattaaagaaatcta

SEQ ID NO: 375 - DNA, 188 bp, Artificial Sequence
  Description of Artificial Sequence: Synthetic polynucleotide
ctctatatttctttatataattctaaatgttactattaattatctattttttaaaataaggtgtaattgttgcatctaatcattatcatattatatagcaaacaaaaggattcaaaacatgttaataggaagaaagactaggagttcttttcaatgttaaatattttataaataatataatctattaa

SEQ ID NO: 376 - DNA, 96 bp, Artificial Sequence
  Description of Artificial Sequence: Synthetic oligonucleotide
tgagtttattgtatcctgtttaatatatatattatattaaaaacaatgatcgactattctaaaattaaataataactttagattcgtatcaaatgt

SEQ ID NO: 377 - DNA, 13 bp, Artificial Sequence
  Description of Artificial Sequence: Synthetic oligonucleotide
cataaagttttta

SEQ ID NO: 378 - DNA, 27 bp, Artificial Sequence
  Description of Artificial Sequence: Synthetic oligonucleotide
ataaataatttaatgtttcttatatcg

SEQ ID NO: 379 - DNA, 56 bp, Artificial Sequence
  Description of Artificial Sequence: Synthetic oligonucleotide
aatttttaattctatgcaatcaatcgtattattgtaaaataatgtaaactaatgtt

SEQ ID NO: 380 - DNA, 107 bp, Artificial Sequence
  Description of Artificial Sequence: Synthetic polynucleotide
tttaaatatgtttatagcttactcgaattagtaattatataatttaaaatattggttttatattaataacaactcatgccatgcaatatatgtaatttaaagcaatt

SEQ ID NO: 381 - DNA, 177 bp, Artificial Sequence
  Description of Artificial Sequence: Synthetic polynucleotide
cttttaataataaaaaaagattttttttaaatatcattacacgtttatactacattttagtgaatttcacagaaatatgcatatgagatgagcaagtatgaaaattcttgtcaaatttttataacctgtgaatttgtttatactaacaagtaatttatatatttttatcataaataa

SEQ ID NO: 382 - DNA, 192 bp, Artificial Sequence
  Description of Artificial Sequence: Synthetic polynucleotide
tgctttaagaattattgttaaatacaactttataacctaaattgtaagtatgtcacctaactattttattgagacaataaaatattatataatgtgagcgagataatagagaatatattttctaatattacttagactcatgctaaatttaatatttagtatttttaatttttaaatatacactagattaac

SEQ ID NO: 383 - DNA, 163 bp, Artificial Sequence
  Description of Artificial Sequence: Synthetic polynucleotide
atttgttattaattattataactaggaataaattttatatcaagagtaatataaatctatctaaacattagtcttgagaatgcccaatcaatcttttgaatttaatataatataatattacagaataatagcgtttatccgactatatgataatttatgattt

SEQ ID NO: 384 - DNA, 17 bp, Artificial Sequence
  Description of Artificial Sequence: Synthetic oligonucleotide
tattcaatttgaatatt

SEQ ID NO: 385 - DNA, 31 bp, Artificial Sequence
  Description of Artificial Sequence: Synthetic oligonucleotide
gtttatacaatagtttattatagtctaacaa

SEQ ID NO: 386 - DNA, 157 bp, Artificial Sequence
  Description of Artificial Sequence: Synthetic polynucleotide
tcgtctctactaatagtgtaagtattaagataaataaaaaattttatgttatgatatatttgataatatactatatttttaggctaatgtatttgaacggcatctaaatttattttcaacatctcataatatatgatatatatttctaaataacaaa

SEQ ID NO: 387 - DNA, 149 bp, Artificial Sequence
  Description of Artificial Sequence: Synthetic polynucleotide
ctagtgtaagttatatctttgaaatttaaacgacaaatattgccaatcatgcaataaatctgtatattataatttttttactataattaataaagtcttaaggttgataataatattttttagctataaatagatacaatttcattata

SEQ ID NO: 388 - DNA, 70 bp, Artificial Sequence
  Description of Artificial Sequence: Synthetic oligonucleotide
attacacatagctataattcagaaattattgtattagttctaataataaaaagtatgttatcgttttaac

SEQ ID NO: 389 - DNA, 41 bp, Artificial Sequence
  Description of Artificial Sequence: Synthetic oligonucleotide
atcttattttctgtcgtttattaaaagcaaaagaaataatt

SEQ ID NO: 390 - DNA, 182 bp, Artificial Sequence
  Description of Artificial Sequence: Synthetic polynucleotide
atttgctataatatattactcatgtttttttaagaatatgagatataaaaaatattctgcatatacataaatagtagtaaattttttagtttttattatgaatttgaataattaaacaacttaatacttatttattagaataatctaaaaggtttgcaaggttattcaaaaccacgtaccct

SEQ ID NO: 391 - DNA, 169 bp, Artificial Sequence
  Description of Artificial Sequence: Synthetic polynucleotide
tcaagatacgttattattaagttttttaatagcaatgtagattaattacctcaatatagattataaaaagaatataatttgtaaaaaattcattttcaaaaagacatagtttttttcattgttaaacattctacagtatttagcaagtatttttctactatattaatga

SEQ ID NO: 392 - DNA, 61 bp, Artificial Sequence
  Description of Artificial Sequence: Synthetic oligonucleotide
tttgtagattttaactatttaatactaaaaatagattcttagtcagtatactcatataaag

SEQ ID NO: 393 - DNA, 180 bp, Artificial Sequence
  Description of Artificial Sequence: Synthetic polynucleotide
tttttaaaaagagagtatgcatttttattagtaaggtaccatatatttaaaaattatcaaatttagcgactaagacttcttcactaaaattatttttatattgtttatatttgtacacttaaaacttctttctacagaattattaataagcattatgaaacaaaagttatggataaaata

SEQ ID NO: 394 - DNA, 200 bp, Artificial Sequence
  Description of Artificial Sequence: Synthetic polynucleotide
tttaatagaaattaaatttttaatcttctctcgatagaattttaactaagaattccatcaaataatttgtatcctatttgagaatatattaatcagagaattgatgagaatgcaagtttgccattttttataattatttatattgacccaaatttactgttatataattactagaataaaaaattataaacgagaaattt

SEQ ID NO: 395 - DNA, 9 bp, Artificial Sequence
  Description of Artificial Sequence: Synthetic oligonucleotide
tttttataa

SEQ ID NO: 396 - DNA, 34 bp, Artificial Sequence
  Description of Artificial Sequence: Synthetic oligonucleotide
ttaatttaaaagaaaggatatttcattttcttac

SEQ ID NO: 397 - DNA, 119 bp, Artificial Sequence
  Description of Artificial Sequence: Synthetic polynucleotide
agttattctttttaaaattgtgaaatgattttcgttcaagatatttcctaatttatttaatcacggatatgcataaacaattaatatttataagtcatataaatatcatattaaataga

SEQ ID NO: 398 - DNA, 116 bp, Artificial Sequence
  Description of Artificial Sequence: Synthetic polynucleotide
tatgtactgattttaaatttaaaaactttatttaatttagtaagtatcaattttatgatcttatccaaaagaggctatcgtatattaaactagtagaaacatataaattaatcttt

SEQ ID NO: 399 - DNA, 21 bp, Artificial Sequence
  Description of Artificial Sequence: Synthetic oligonucleotide
caaattttattaatgtatacg

SEQ ID NO: 400 - DNA, 125 bp, Artificial Sequence
  Description of Artificial Sequence: Synthetic polynucleotide
tagaaaattggcccctattaacactatacaaatgaaaatatctattttattatacaggatattaatatgtaaaatcttatttctaattttttatttaattttacttatttataaaaggagaagga

SEQ ID NO: 401 - DNA, 13 bp, Artificial Sequence
  Description of Artificial Sequence: Synthetic oligonucleotide
ctagatttattaa

SEQ ID NO: 402 - DNA, 37 bp, Artificial Sequence
  Description of Artificial Sequence: Synthetic oligonucleotide
ttattttaattttagtctacaacgtaattaattaaag

SEQ ID NO: 403 - DNA, 28 bp, Artificial Sequence
  Description of Artificial Sequence: Synthetic oligonucleotide
ttatacataatatcatgttataaattgt

SEQ ID NO: 404 - DNA, 194 bp, Artificial Sequence
  Description of Artificial Sequence: Synthetic polynucleotide
cttaaaacaaaattttacaatatgaaaaaagattccgatataatgtttatataataaatcaccgatagtttattatgtatggattagaatataatctaaaattattttgtgttatcgacttatttaaatatgttttttcaaagtcttaaacaaatatttctctttttgttgatatatttaaagagcaaaacatc

SEQ ID NO: 405 - DNA, 163 bp, Artificial Sequence
  Description of Artificial Sequence: Synthetic polynucleotide
gaaaaaaatcaaattaatgataacgacttaatataaatttttgatgaactttaacaaacgatacgttatattaaatgggagttttaaatttgccaatatttatacttttctcgttataatttttaaatacatcgttataatttgtcaagtaataaattttact

SEQ ID NO: 406 - DNA, 170 bp, Artificial Sequence
  Description of Artificial Sequence: Synthetic polynucleotide
ttaattaacacaattttcgattatgaatattcttatgtgttaaatgatttattaacataaatttaccatttaaactttaatataagcgcaggttgatggataattattattaaccctcttaatttaaattttcaaaagtgattatagtctaatataaagaaatatcagaa

SEQ ID NO: 407 - DNA, 131 bp, Artificial Sequence
  Description of Artificial Sequence: Synthetic polynucleotide
gcaacgtattaaattataatttaagtgattttataaatgttataaaagataattaaaaatttggttctcactaattcagtattttaacttctttcataaaatctagattgaagaatatagattttcaatcc

SEQ ID NO: 408 - DNA, 177 bp, Artificial Sequence
  Description of Artificial Sequence: Synthetic polynucleotide
ataagttttctattgataatatatgtatgttagtatataatttatttcatataatatatacttatgaatttattattaactgcatagtgataaagaaatctgagtatttataagcatctaatgaataagaaaattcttcatcaatttataccatgtaaaataatctaagttccactt

SEQ ID NO: 409 - DNA, 17 bp, Artificial Sequence
  Description of Artificial Sequence: Synthetic oligonucleotide
tattttgtcttaataaa

SEQ ID NO: 410 - DNA, 137 bp, Artificial Sequence
  Description of Artificial Sequence: Synthetic polynucleotide
attctattctgttctaaattttaaatacataaacttgtttgtgtttttgtaaaatgtcaattatttcaaaatgcatctaatttaatcttgtaaaagaactttgaaattacaaattaattagataagagcaataatta

SEQ ID NO: 411 - DNA, 197 bp, Artificial Sequence
  Description of Artificial Sequence: Synthetic polynucleotide
atcaatattataatcttaatattttcatataaagaattttaaacattttttaaatgaattctttatatagatcgatacaaatttatatcatttcatttgtgtagctctgcaatttatactaggttttaagaacatatagtaataaacaggttattaacaaaaaattgattgattcactatttctgttaaaatgagaa

SEQ ID NO: 412 - DNA, 192 bp, Artificial Sequence
  Description of Artificial Sequence: Synthetic polynucleotide
tttcgtgatgaaactataattagaggagctttcagtaatgatgttacaatactttatattgaatttttttttatatattaataaataaaatataatctaagtatccacttaaaattaaatattatcatgtcattaataatttaaattctactcaaatttcattattggactgttagatatcacagtaagaaa

SEQ ID NO: 413 - DNA, 127 bp, Artificial Sequence
  Description of Artificial Sequence: Synthetic polynucleotide
ttaataaatattagattgtgttaaaatttagtatttagctttacgattttataaacgtttgaaaaacttgaattacttatactaaagtattcatatacttaataacaattttaatctatcgaaagtc

SEQ ID NO: 414 - DNA, 103 bp, Artificial Sequence
  Description of Artificial Sequence: Synthetic polynucleotide
ataatactaggttctccgaaaattataacataacggttagtttacaaaaattttaataaaatatttgtttctgtaagtaattttaacagtacatattttaatt

SEQ ID NO: 415 - DNA, 65 bp, Artificial Sequence
  Description of Artificial Sequence: Synthetic oligonucleotide
tcttacatagtgttaaatacacaaattagtttctagatttttaattaagttacaagaaaatttat

SEQ ID NO: 416 - DNA, 128 bp, Artificial Sequence
  Description of Artificial Sequence: Synthetic polynucleotide
atgaaataaaattgcaatacttcttataaatgattttcataagaacgtatttatcaatgataattataacttatttaattagattttatgtctcaattgctgtagtaacattcatataagtaattata

SEQ ID NO: 417 - DNA, 62 bp, Artificial Sequence
  Description of Artificial Sequence: Synthetic oligonucleotide
acttcacaatcgaaaatgcgtatttatataaaatatttattttttattgaaattgattcgaa

SEQ ID NO: 418 - DNA, 113 bp, Artificial Sequence
  Description of Artificial Sequence: Synthetic polynucleotide
ataaagaataataaaatttaatgtagatctgagtcaaaaattttgacacttttatatctgtccgtcattatgttcaataataatattataaattttggtaaaactttaacttt

SEQ ID NO: 419 - DNA, 46 bp, Artificial Sequence
  Description of Artificial Sequence: Synthetic oligonucleotide
ataatatttaaaaatttatttaatgcgcatttataagttgctcata

SEQ ID NO: 420 - DNA, 24 bp, Artificial Sequence
  Description of Artificial Sequence: Synthetic oligonucleotide
caatttttaattatgtaacaatgt

SEQ ID NO: 421 - DNA, 7 bp, Artificial Sequence
  Description of Artificial Sequence: Synthetic oligonucleotide
taatttt

SEQ ID NO: 422 - DNA, 142 bp, Artificial Sequence
  Description of Artificial Sequence: Synthetic polynucleotide
attgtaaacgaagtttacttttaaattgaattgaatcttatatcatgctcttaattttatactctcaaattaacattaaaataaacttaatctataatttgacgtgcatgtaaagaaattaagtttatagaattaatttagt

SEQ ID NO: 423 - DNA, 70 bp, Artificial Sequence
  Description of Artificial Sequence: Synthetic oligonucleotide
atatggagttaaacatttaatgacttttgaaaaatctcgacaattttagaatatttctactaataattat

SEQ ID NO: 424 - DNA, 193 bp, Artificial Sequence
  Description of Artificial Sequence: Synthetic polynucleotide
tatttataatttacatttcaaaaaaatttgaaagaaatattataagtttatggtaatattttttggaaccaccaataagttgaataataacattagataactgttatcctattaagtatatataacataaaattcttgttctaagctgtaccttttgaacaatatttcaagtttgttcaatgttataatataa

SEQ ID NO: 425 - DNA, 184 bp, Artificial Sequence
  Description of Artificial Sequence: Synthetic polynucleotide
aactgttactatttaagccatctaaattataattctcaatttaagacattatttttttatttgtttacatttttagagtgaataacgtgttgatataaatacagagatatacttactgttctaataaaactttcaattatatgataagacaattacaaatattaaatgagataataatgtttaa

SEQ ID NO: 426 - DNA, 45 bp, Artificial Sequence
  Description of Artificial Sequence: Synthetic oligonucleotide
gttttcactaaaaaaaattgcgaattataattgttttactattaa

SEQ ID NO: 427 - DNA, 7 bp, Artificial Sequence
  Description of Artificial Sequence: Synthetic oligonucleotide
ttatatt

SEQ ID NO: 428 - DNA, 39 bp, Artificial Sequence
  Description of Artificial Sequence: Synthetic oligonucleotide
ttacgtaaaacctttttatgtattatatataaagtatta

SEQ ID NO: 429 - DNA, 120 bp, Artificial Sequence
  Description of Artificial Sequence: Synthetic polynucleotide
aattcaaattggatctaaatatcgattatcattagagattgacttagatcaactttgctttcttaatttatttaatgaaattttaaaacatactgtaaaattaaaactttaatttagaag

SEQ ID NO: 430 - DNA, 157 bp, Artificial Sequence
  Description of Artificial Sequence: Synthetic polynucleotide
atcatcttagctatataattttttcaaattagaattttatttattatttattgaattatattagcactatcactatactaagtaagattgataagtataattcacaattcataaatcagataaattaaagtttcaaagaaatatgtagttgcagttt

SEQ ID NO: 431 - DNA, 139 bp, Artificial Sequence
  Description of Artificial Sequence: Synthetic polynucleotide
taatttagtttagaaagacactacttaaaaataaatgtaaagctaaaataaattaaatggttttctttttatatttttcaggatccacactagacagttttattttaattcaaaatattatgtttattattatagaact

SEQ ID NO: 432 - DNA, 52 bp, Artificial Sequence
  Description of Artificial Sequence: Synthetic oligonucleotide
tgtgtaatatctctttgctatattactaattgaaacaaaaataatttatgta

SEQ ID NO: 433 - DNA, 168 bp, Artificial Sequence
  Description of Artificial Sequence: Synthetic polynucleotide
taacaattctttgtataattatatgattgttaatctgcaatacagtcttttaattattagattactactcattgttcgaatgttcatttatcataatattaacgaatataaagatttatcgaaactttttttagatcaaaaaaaatttagaaaagattaatgtaaata

SEQ ID NO: 434 - DNA, 44 bp, Artificial Sequence
  Description of Artificial Sequence: Synthetic oligonucleotide
atagaaatatataatctttttcattagaatttttaagcttagca

SEQ ID NO: 435 - DNA, 58 bp, Artificial Sequence
  Description of Artificial Sequence: Synthetic oligonucleotide
atcatagatgtatataaaacgcaaatattttctcatttttgaaaatatttttatgtaa

SEQ ID NO: 436 - DNA, 128 bp, Artificial Sequence
  Description of Artificial Sequence: Synthetic polynucleotide
ataaaccagactaagaaaattaatatagatttacattataagcattgatacacattaacaaattatatggttttattttgaagtgcatataattttaatattattcaatgttcattttttgaattcta

SEQ ID NO: 437 - DNA, 5 bp, Artificial Sequence
  Description of Artificial Sequence: Synthetic oligonucleotide
attat

SEQ ID NO: 438 - DNA, 190 bp, Artificial Sequence
  Description of Artificial Sequence: Synthetic polynucleotide
taaaagtaaaatgagagtcttattttaaaattcagtaataattggtaactttgtttgaaggataattgataattatatcagatttcaaagtactataaagtagattaatatttacatacattcaaactactatatattgtgcaatactatctcaaattacaatatttttatagtttttcttataccaata

SEQ ID NO: 439 - DNA, 146 bp, Artificial Sequence
  Description of Artificial Sequence: Synthetic polynucleotide
accggtggatatatataatgtgtctttaacaattgtttttgaatttaaattttaaaattaggatatcatcatataattgtattacagaaaattaaaaattataagtaaatatattgtcttctctacattaatttaaacaatatcct

SEQ ID NO: 440 - DNA, 85 bp, Artificial Sequence
  Description of Artificial Sequence: Synthetic oligonucleotide
cttttattatacttttaatttgaaaagacattgtaaattattaaaatggaaatcaaacatcaattttactaatattattgtcagg

SEQ ID NO: 441 - DNA, 143 bp, Artificial Sequence
  Description of Artificial Sequence: Synthetic polynucleotide
atacgttagaacgcaatagtagtaactttattatgctagttaatattcttaacagataaaaaaaaagtaattatgcggctttttatagttattcatagaaattaacattttctattatctatttatttaacataaataaattt

SEQ ID NO: 442 - DNA, 135 bp, Artificial Sequence
  Description of Artificial Sequence: Synthetic polynucleotide
atattgatattacatcaatacatgtctagtcacaaatagtattattattctaatagtattttattcatttaaaaaagaagattcgatattacttagatatagttcaattattattcacaattgtaggtaattaaa

SEQ ID NO: 443 - DNA, 135 bp, Artificial Sequence
  Description of Artificial Sequence: Synthetic polynucleotide
taattagaaaaaatttataacaaaaagccttttataaaatagttgtttgtgattattgtaactgttttgtataagaaactatctagtcttatatttaacagaattatttctcattaataatacgtttaccataaa

SEQ ID NO: 444 - DNA, 44 bp, Artificial Sequence
  Description of Artificial Sequence: Synthetic oligonucleotide
ttaaaagttaaattgctattctaagttaattcattagattaact

SEQ ID NO: 445 - DNA, 77 bp, Artificial Sequence
  Description of Artificial Sequence: Synthetic oligonucleotide
atagaatatctatatgtagttttgacacttctaaattatttaattagttaactgattaaaacttttaatatgatcaa

SEQ ID NO: 446 - DNA, 55 bp, Artificial Sequence
  Description of Artificial Sequence: Synthetic oligonucleotide
tatctcctaatatcttaagagattatgaatattgaaatattcttattattgaaaa

SEQ ID NO: 447 - DNA, 88 bp, Artificial Sequence
  Description of Artificial Sequence: Synthetic oligonucleotide
cataaacttaaaattaattgattattaatcaatacaagttcagtattataattatggaaatggtttttactatatttcatttaacgta

SEQ ID NO: 448 - DNA, 81 bp, Artificial Sequence
  Description of Artificial Sequence: Synthetic oligonucleotide
tataggcaattaataaacaatttaaaataaaccttcttataccatggtttttctataagttttaagattaatatgtgatat

SEQ ID NO: 449 - DNA, 95 bp, Artificial Sequence
  Description of Artificial Sequence: Synthetic oligonucleotide
tgggaaaaaattctgattaaatgaatttatcaaacattcttagtaattatataaattcatgaatatttttacaatccataatgtttaattgactt

SEQ ID NO: 450 - DNA, 198 bp, Artificial Sequence
  Description of Artificial Sequence: Synthetic polynucleotide
tttaatttatctattgaactgaccattatttataatcatataaattaagtttttttttaatgtactacacaaattttgtaaaaaatttttgaaattaataaagaaaatcttaacgtagaaaatggcttcctatagaagaaagctatttaaagattttttatattcacagtcaagtagcttaaaattatttttcaaagt

SEQ ID NO: 451 - DNA, 102 bp, Artificial Sequence
  Description of Artificial Sequence: Synthetic polynucleotide
aactccaataataggatcttatatatagaaaaactgtatgaagaaaataaatatatattgtctctatatcttataaatatttttcgtttattttgtacttag

SEQ ID NO: 452 - DNA, 156 bp, Artificial Sequence
  Description of Artificial Sequence: Synthetic polynucleotide
taattatccaaataaatacaatcatatatagtaagattttctaatatagttcattgaatgacaggcgtacattcgaatatttatactacaattatttattcaataattagttttactataaaagaataagtttgtatatctttatatgttagatat

SEQ ID NO: 453 - DNA, 156 bp, Artificial Sequence
  Description of Artificial Sequence: Synthetic polynucleotide
attttctacacatttgttgcttacgctattacaaataagtaatacatctataatgtagtaaatgctaaaattcctttacttatttatttgaattgatgttatttaataataataacaaaattgagaataagaatataaatgttttaaaacttagtt

SEQ ID NO: 454 - DNA, 181 bp, Artificial Sequence
  Description of Artificial Sequence: Synthetic polynucleotide
attttgatctgaattaattaacttaagaaaaattatagcatagaaaatcgttgttttattcaaaaataaggcctaactagaattataggtattctatattttaagttttaatcatattaaaattaaaaaaattcataattattaagttctctattgtaaccgttcaaagttttcgcatatt

SEQ ID NO: 455 - DNA, 77 bp, Artificial Sequence
  Description of Artificial Sequence: Synthetic oligonucleotide
cttctatgttatatatcgctaagaagggtaataaatattataaatttttttatgtttatataacattcaaataatac

SEQ ID NO: 456 - DNA, 146 bp, Artificial Sequence
  Description of Artificial Sequence: Synthetic polynucleotide
aatatagtcaactttacgttaatagatttgaatctgaactttataaggtgtcattttatagatgtaaataatttttcacatacatatattcattgatttaaatatttcataaataatatactgatccgaaatgtaataaattttaa

SEQ ID NO: 457 - DNA, 25 bp, Artificial Sequence
  Description of Artificial Sequence: Synthetic oligonucleotide
taaagaatataatttctgtaatctt

SEQ ID NO: 458 - DNA, 107 bp, Artificial Sequence
  Description of Artificial Sequence: Synthetic polynucleotide
ctaaatattaactaatatttatataagtttagtaatcatatgaggtactaaagaaatatttaggaatattatttatatttttttcaagaaattcattaaccgttctc

SEQ ID NO: 459 - DNA, 62 bp, Artificial Sequence
  Description of Artificial Sequence: Synthetic oligonucleotide
ttgagattttataattcgatatcaatatacaaacttttaaggtatcaattatttaatagtca

SEQ ID NO: 460 - DNA, 150 bp, Artificial Sequence
  Description of Artificial Sequence: Synthetic polynucleotide
actcttaagtagtttcataagaccatttatagaaaacgtatgtatagtattaaagtcgaagttttatttaatttccagcagtgcaagttgcccaatccaatttttagacgaatgtcctttataagttacagaaattcttgacatatagat

SEQ ID NO: 461 - DNA, 36 bp, Artificial Sequence
  Description of Artificial Sequence: Synthetic oligonucleotide
gtcaattttatggttaggatcttaaaaaacctctta

SEQ ID NO: 462 - DNA, 55 bp, Artificial Sequence
  Description of Artificial Sequence: Synthetic oligonucleotide
tcaacattaaatcagatatgcagttactatattatgtttacagctgatggtacta

SEQ ID NO: 463 - DNA, 190 bp, Artificial Sequence
  Description of Artificial Sequence: Synthetic polynucleotide
aagtcaaagattcaagtaacaaattaacttgatgtccaccgtagcaaagttcatgtttggtatctagatctataagggtattttttcaaaatagttcgcaaatcttgtatcatctatttaaatagagttctacttgttagaagaaaaatattcatgcaaatgctctcatatatttactatgtttgagacc

SEQ ID NO: 464 - DNA, 42 bp, Artificial Sequence
  Description of Artificial Sequence: Synthetic oligonucleotide
ttcaaaattcgaatcgacttaattctctagggtttataaagt

SEQ ID NO: 465 - DNA, 165 bp, Artificial Sequence
  Description of Artificial Sequence: Synthetic polynucleotide
gttataggcttcattgagcactaaagcgtaataaattctgatattaacctccaagatgaattacgcttaagactgttgtgtactgtatagaatgagaatctacaatagatcagaatacaccttttttgtcatataaaaataattattttctatgatctgactttt

SEQ ID NO: 466 - DNA, 175 bp, Artificial Sequence
  Description of Artificial Sequence: Synthetic polynucleotide
acacttttacgactcttaagacaattttaatgttttaacctaaacattagcctatagtaactactaatgcatatgatttgtcctaatctatatcaatatcaaagtgatattgtataagagtcatgttattaaaggtgtctgaggaagaatgggctgatattcaattccaagtact

SEQ ID NO: 467 - DNA, 145 bp, Artificial Sequence
  Description of Artificial Sequence: Synthetic polynucleotide
attgaatcaaataggattagtaaaagattttaatgtcatcataaaccactagtgcttgaaacatcttaaacggtgttaacggtttataaattactgattaccttttcccaaatcttgagtattatttaattgtacccagagtgtt

SEQ ID NO: 468 - DNA, 86 bp, Artificial Sequence
  Description of Artificial Sequence: Synthetic oligonucleotide
taaatttattgttatggaattactagaatcaaattagatgataaatttctcagtatcaactccagtttactggcgatgctattaca

SEQ ID NO: 469 - DNA, 148 bp, Artificial Sequence
  Description of Artificial Sequence: Synthetic polynucleotide
atatatcgctaaaacattttttagcgagaaaaaacagccactagattcaatagtggaaaatatatgggaataattattaatgagcttggagcagcgattttatcattttcccttaaactatttcgctattcgtttaacctagattttt

SEQ ID NO: 470 - DNA, 166 bp, Artificial Sequence
  Description of Artificial Sequence: Synthetic polynucleotide
atatgtgtcatgtattattatgaattttgatcgtctttacttatactgcgaacgcatttacatattatgaattagaatacaggcaaacaatatcccaaacttgattggaaaacaagcaaaagatctataggtataagtctattttactattaagttggtactttcc

SEQ ID NO: 471 - DNA, 122 bp, Artificial Sequence
  Description of Artificial Sequence: Synthetic polynucleotide
ctttgaacgcagttgagttagtatttagttgtaaatagaatttgtaaggaaatcttatctaagaccgacttaacatttactgatttatacaaatgcttaacccccaagatcataatttgtat

SEQ ID NO: 472 - DNA, 118 bp, Artificial Sequence
  Description of Artificial Sequence: Synthetic polynucleotide
aatttaatctgaaacggacaaaggatttgtgcactaattagtaagctgtatattgtatagacagaaattcatgtatttccttaattaatgtctaatcgcatccagttacctaatttat

SEQ ID NO: 473 - DNA, 11 bp, Artificial Sequence
  Description of Artificial Sequence: Synthetic oligonucleotide
ttctaagtatt

SEQ ID NO: 474 - DNA, 193 bp, Artificial Sequence
  Description of Artificial Sequence: Synthetic polynucleotide
tctcacacacagtaatttgagttaatgcgagaagtgaaaaaccaacaaattttattaattactgatgctaaattttttgagactattctattatctatcgaaacagattatttgcgaaggttgttagtattaggagcaatgtttgaaatttaccttcaactcaaataccaatattttaaactcctgttttgga

SEQ ID NO: 475 - DNA, 42 bp, Artificial Sequence
  Description of Artificial Sequence: Synthetic oligonucleotide
ttaataaacttaatctctctgagagtttcatgagtgctaata

SEQ ID NO: 476 - DNA, 84 bp, Artificial Sequence
  Description of Artificial Sequence: Synthetic oligonucleotide
aattatcggtatatcgataatcatttcatccaaaatagtaaatcattcgttaggattctgaaaagctaaatgtcttacttgttg

SEQ ID NO: 477 - DNA, 47 bp, Artificial Sequence
  Description of Artificial Sequence: Synthetic oligonucleotide
gaagataccattcattacgatttatgtaatcattctagattatggca

SEQ ID NO: 478 - DNA, 85 bp, Artificial Sequence
  Description of Artificial Sequence: Synthetic oligonucleotide
aattctataagttctcataactcgttggtcatattttggtctcataggcgtcttgaaatgataattaataagtaacttcaaataa

SEQ ID NO: 479 - DNA, 43 bp, Artificial Sequence
  Description of Artificial Sequence: Synthetic oligonucleotide
cgtaatgtcttaaataccaagcttgtattaattgtagtatcaa

SEQ ID NO: 480 - DNA, 16 bp, Artificial Sequence
  Description of Artificial Sequence: Synthetic oligonucleotide
gattaattattcgcat

SEQ ID NO: 481 - DNA, 94 bp, Artificial Sequence
  Description of Artificial Sequence: Synthetic oligonucleotide
ttagtaaataagaagaatttaatatatccaagggcctcgtggctaaatcattaatactctgcgaaaagcactttcaaattttttgatttttcgt

SEQ ID NO: 482 - DNA, 103 bp, Artificial Sequence
  Description of Artificial Sequence: Synthetic polynucleotide
aattatacaaattttcgaatatcaaccaatagacaatcgattttctaagtgaacactttaatacgtaatgcttgatttcagtagtgataattggcgtctagtt

SEQ ID NO: 483 - DNA, 54 bp, Artificial Sequence
  Description of Artificial Sequence: Synthetic oligonucleotide
ataatatacatggtaagtaataaattgactcctattagcttcgtgttatcagct

SEQ ID NO: 484 - DNA, 76 bp, Artificial Sequence
  Description of Artificial Sequence: Synthetic oligonucleotide
ataaaacagagatatgcttatgcacaaaaataataatttcagttagtccttgtctgccttgttgtacaattttatg

SEQ ID NO: 485 - DNA, 53 bp, Artificial Sequence
  Description of Artificial Sequence: Synthetic oligonucleotide
ataaagctaagtctaacacaagataattttattttgttatgttgaccgtctta

SEQ ID NO: 486 - DNA, 48 bp, Artificial Sequence
  Description of Artificial Sequence: Synthetic oligonucleotide
ctgcaatttttataatccgcggtttaaaaatgactttgtgaaaatact

SEQ ID NO: 487 - DNA, 65 bp, Artificial Sequence
  Description of Artificial Sequence: Synthetic oligonucleotide
aatatttctaaatttattgcccagggctagttttgattcttttatcccagaaaaaaagttagtaa

SEQ ID NO: 488 - DNA, 188 bp, Artificial Sequence
  Description of Artificial Sequence: Synthetic polynucleotide
gtgaataagatagagtatattaatatctttctgaaaaccaaatgtatcctcgtagatatcatttatacgacttatgtcaatgtcaaaatagttcatatatatatattggtcattttaacgccttatggcaggctctagtcgaatctaaattaattctcatgtaaagttaactgacagtgagtattcca

SEQ ID NO: 489 - DNA, 188 bp, Artificial Sequence
  Description of Artificial Sequence: Synthetic polynucleotide
agattgaatattattgttctaacaaccttcgctcggaagatatttgaaggatataaccaacgaaaagttcatcttaattacacgtaatggattttggggtatcctattaactcattgcattaaaaacttaaaatttgactatatatccaataatgtaatgattttacgtttgctagtcattcgcgaat

SEQ ID NO: 490 - DNA, 196 bp, Artificial Sequence
  Description of Artificial Sequence: Synthetic polynucleotide
aggaaacttctatggggctttcgtaaatcagaaatatgtttaaattttacagggattaatacgaactctcatgtttctttatagtttcatctctgcaaagacaagaatacggacgtaatacatgattgcctcagtaattatatttacgagttaaaacgatacaatactaatataatttacccgatttgattttatt

SEQ ID NO: 491 - DNA, 144 bp, Artificial Sequence
  Description of Artificial Sequence: Synthetic polynucleotide
ttataaagtgtaacaaggactgatgtgaaatatagtaaagtaacattcacactttttcctattagtgaatttcattaaatttaaaatggttaaactgtcaagtccaggtctccttattttgtcagagtcgccatttaataaatc

SEQ ID NO: 492 - DNA, 86 bp, Artificial Sequence
  Description of Artificial Sequence: Synthetic oligonucleotide
gttcattgaaagtaattatgtataataggtatcaatttttaaatggtcgcatagtccttctctacgcaaattagtaacttaaatca

SEQ ID NO: 493 - DNA, 78 bp, Artificial Sequence
  Description of Artificial Sequence: Synthetic oligonucleotide
ttaaactgactacaggtgacacacctgatagactttacctattgaactttgtttaaaattttaaattggatattaagt

SEQ ID NO: 494 - DNA, 192 bp, Artificial Sequence
  Description of Artificial Sequence: Synthetic polynucleotide
ggcaagtataagcaaaaacgccgtaaactttggcggtatagttagttcctaatccgtaaaagtaattctgacgtgtcaatattaaaatctagtaattatagtacatacatcagttatgaacctaataattattgtcaaagatttcatgataagatttttttctttaccgactaagtttctgactaattttat

SEQ ID NO: 495 - DNA, 120 bp, Artificial Sequence
  Description of Artificial Sequence: Synthetic polynucleotide
taggttacttatttctttaacggactaaacgaattatataaaagtgtcattatagatttgtgtaacccagcgaatgtatgaagttcattcatactgtatgttcctgccaaaaaactataa

SEQ ID NO: 496 - DNA, 187 bp, Artificial Sequence
  Description of Artificial Sequence: Synthetic polynucleotide
tagacctattgacgcgtttcacatctactggtaaattgtagtcgtttcatagacaataaatatggcgtttataaacacattgtgatatatattattcatgatgaattagattaattcctagttagaaaaccgctacaatttagtctaattacggattggatacttaccagaatttataatagcaact

SEQ ID NO: 497 - DNA, 142 bp, Artificial Sequence
  Description of Artificial Sequence: Synthetic polynucleotide
attgaagcaaaggctaaggccgaatatgacgtatactcatatttagcttgctaagatgtttatatataattttaatacgggtcttccttagatttaatcacaaataaagcatcaaacgtcttatcattgatcatttgtatat

SEQ ID NO: 498 - DNA, 172 bp, Artificial Sequence
  Description of Artificial Sequence: Synthetic polynucleotide
atatactaatcaaagaaataggcacctattaaaaagtgtaattggtagggtattttgttcattatttcttatgtttgtgttcatagtccagtgatcaagtattttagtagctctaagtaacagattgtgctttaacattttacacaaccataacactacatacatatacgaa

SEQ ID NO: 499 - DNA, 22 bp, Artificial Sequence
  Description of Artificial Sequence: Synthetic oligonucleotide
gtatatgccgtatattttcaaa

SEQ ID NO: 500 - DNA, 57 bp, Artificial Sequence
  Description of Artificial Sequence: Synthetic oligonucleotide
tctttacaaatataagctgactaggtatcgaggagtacttattactcatatttttaa

SEQ ID NO: 501 - DNA, 159 bp, Artificial Sequence
  Description of Artificial Sequence: Synthetic polynucleotide
agcaaaatcttttaacttaaaatttagcagctccaagatttactcgcgtataatatgtttattgtctaattcttcaagtattcgtttgggggaaaaaagatattataaaaattaggactctacaaactccagtatattttgaagattcagtaccttgtt

SEQ ID NO: 502 - DNA, 147 bp, Artificial Sequence
  Description of Artificial Sequence: Synthetic polynucleotide
gttcaatgaggcctgcttttattccaacaaataatttggagttcattataatatagcggtatacatccaatataggtcattagaaaagattgcttaaacaagcacgttgtattctcatattatatgttagcgatcaatttatacata

SEQ ID NO: 503 - DNA, 53 bp, Artificial Sequence
  Description of Artificial Sequence: Synthetic oligonucleotide
cttagtattttcaatgaatatcaaagcagctttattaggtagtcaaacttatt

SEQ ID NO: 504 - DNA, 164 bp, Artificial Sequence
  Description of Artificial Sequence: Synthetic polynucleotide
taaactatcgtctgtaacaatctggtattcaagatttatcaatccagatagtaatagttaattatactgtctttacgtcatttattaattactcaatgaatacctaagatagattgcccaggctagatagtgtgactcgatataaaaatttagtatgtaattgc

SEQ ID NO: 505 - DNA, 57 bp, Artificial Sequence
  Description of Artificial Sequence: Synthetic oligonucleotide
ttatctcagtaatgtccagttaatttctaactacgacaaatggttgtatatgataat

SEQ ID NO: 506 - DNA, 151 bp, Artificial Sequence
  Description of Artificial Sequence: Synthetic polynucleotide
attatctagttaataaccttgtagaactataaggtttaaagcgtttcttattttcgcacagtagggtatctatcatatttaacatacttattggtacagacggtcgatataaaaatctttaacgtaattactaacacgatcttatgataga

SEQ ID NO: 507 - DNA, 72 bp, Artificial Sequence
  Description of Artificial Sequence: Synthetic oligonucleotide
ctgcagcttttatggtgtatacatttatagaatgatatatcttataatgaaataacgaaccttctaaagctt

SEQ ID NO: 508 - DNA, 158 bp, Artificial Sequence
  Description of Artificial Sequence: Synthetic polynucleotide
ttctaatcactaccttggtgggcggaaattgaagtttaccactattgctctataatttatagtcgtggtaatattatatatacaaagacattataatttaaaaaaaggtgtaactgaccagcttttctcaatataaaacacgcgttaatttgttttaa

SEQ ID NO: 509 - DNA, 64 bp, Artificial Sequence
  Description of Artificial Sequence: Synthetic oligonucleotide
tagactaagccaagtacaaatacttagtatttctcggtgaaattcctgtatttatttgaaatat

SEQ ID NO: 510 - DNA, 155 bp, Artificial Sequence
  Description of Artificial Sequence: Synthetic polynucleotide
aactgcgttatagatccgtcattttacctgtatgatcttttttgatcaattaatctgctaacaaaatcgtgaatttatacgtcgttatatagttaaccacagaagacgtagatatgtaaaagagttcataaaaattatagcgaattcatgtttca

SEQ ID NO: 511 - DNA, 153 bp, Artificial Sequence
  Description of Artificial Sequence: Synthetic polynucleotide
ggctgtactattacgtattgtttgcccgttcgaattgttcacttttttcgttatagaaaaatgagtataaaaatgctatctttcacataaattaagtaatgattttacaaattgaattgaaaaaactgcgaagataatcatctacccagttat

SEQ ID NO: 512 - DNA, 129 bp, Artificial Sequence
  Description of Artificial Sequence: Synthetic polynucleotide
atatacctgatctgattaatactaattgtgcaatacccgagggaaggtacgttctaattttataagtttctattgtgcgtaaatcgaaagcatacgattaaaaatttatcacactacttaaattatttg

SEQ ID NO: 513 - DNA, 79 bp, Artificial Sequence
  Description of Artificial Sequence: Synthetic oligonucleotide
gatattattactgagaataattcgaactatacttattgataaattatcatgtagccggtcattagacttctgctataat

SEQ ID NO: 514 - DNA, 10 bp, Artificial Sequence
  Description of Artificial Sequence: Synthetic oligonucleotide
gatcattatt

SEQ ID NO: 515 - DNA, 6 bp, Artificial Sequence
  Description of Artificial Sequence: Synthetic oligonucleotide
ttttaa

SEQ ID NO: 516 - DNA, 146 bp, Artificial Sequence
  Description of Artificial Sequence: Synthetic polynucleotide
tttaacagtactaatcgtaacatggtttacttaatctcaattataataagacaggtaagttatcgcgtaatgtttatactggaagactatttgtataaaaaatcgacgaagacattatatttggcttcaaatcctatcttttgcta

SEQ ID NO: 517 - DNA, 97 bp, Artificial Sequence
  Description of Artificial Sequence: Synthetic oligonucleotide
ttatacttaaaaacgttaataaagaaactggctagtaaatagacctatttacaagtagtatttcccttgcatttcctatatttgaattgatgctggt

SEQ ID NO: 518 - DNA, 154 bp, Artificial Sequence
  Description of Artificial Sequence: Synthetic polynucleotide
actttacatggtgttatagaaaattgcgctactacatagattagaaatttaaaaacacccttatgaagttctaaagccattgttgcattttacttccaattatgccattgttagatattatgcagtaacattcatacagagttggagatattat

SEQ ID NO: 519 - DNA, 145 bp, Artificial Sequence
  Description of Artificial Sequence: Synthetic polynucleotide
aattcttcatactcatattaatattgggattttcatcatgtggaaaatagttatatcaaagcattcatttgcaactaagctcgaactagaatctatacggtctcattaaagtctattgtagtgaactcaattaagtatgatattg

SEQ ID NO: 520 - DNA, 176 bp, Artificial Sequence
  Description of Artificial Sequence: Synthetic polynucleotide
atttatttcgagaaaaataaagaaggtctagtttggtatcactagcttgattttatataattaaataacgtcaacaatcagttatggtactctcgtggttacatgttcatttaacttcatcatattttctaacatacctaacaattcaattagtaaagaggagcttacggtgacta

SEQ ID NO: 521 - DNA, 95 bp, Artificial Sequence
  Description of Artificial Sequence: Synthetic oligonucleotide
acatgttatcttaaaaatcgctataattgatgttcaacagtacgactgatgtttattggttgagttaccgtacttagaataaacaatcaatttac

SEQ ID NO: 522 - DNA, 53 bp, Artificial Sequence
  Description of Artificial Sequence: Synthetic oligonucleotide
agtgagtttaactaattatttccgtgcaaaatttacctattgtaatactagat

SEQ ID NO: 523 - DNA, 148 bp, Artificial Sequence
  Description of Artificial Sequence: Synthetic polynucleotide
aagagtatcattttaaagggcatagtcaagagatcttgattccaataatgtgaggtgttgttatccaataattgatgacacagaaccctattcttacaatcttgttaatttaattaaaaacgaaaataccgtttcttttgatttcatc

SEQ ID NO: 524 - DNA, 58 bp, Artificial Sequence
  Description of Artificial Sequence: Synthetic oligonucleotide
gaacattattgtttctttaatattagtcttatataaacatagacttactacaagcggg

SEQ ID NO: 525 - DNA, 104 bp, Artificial Sequence
  Description of Artificial Sequence: Synthetic polynucleotide
tcgtacaaacggatttaattatgaggcagaatgatcaatcagcactcaagtttatttaaaattaacgtcttgttttcaattacgctcatattaagaatttgtat

SEQ ID NO: 526 - DNA, 179 bp, Artificial Sequence
  Description of Artificial Sequence: Synthetic polynucleotide
aaacaattactcttccgaaagtattgttagatacacgtttaggaaactgaaattcatcagatatttaatactctaatgtataaatcgaaataattggtgtcaatatcagggtttttttcctattcatacgaccgctgttaatgctacaaatagctttattactaattggaggattttaa

SEQ ID NO: 527 - DNA, 174 bp, Artificial Sequence
  Description of Artificial Sequence: Synthetic polynucleotide
tatactatcatgtacaataatttattaagattggatattgccagttcccgagcgttatgcaatattataagaactttattatgtctaataatagcatcgtgggtacattatatacaagtggaattactttgccctaaatttaccatgcatgacataaattaagtatcagcgatt

SEQ ID NO: 528 - DNA, 192 bp, Artificial Sequence
  Description of Artificial Sequence: Synthetic polynucleotide
gcaatatgatactattaattcacctatattctgagagctactattaaattaatccgtaatacatggtgtgatatgacctaaaccccgtatcaaggtatctttaaagaaattgataagtaaatctttatcataactagttttccatttcttagatttatgatgtagacgtagatgctagaatctggtataaat

SEQ ID NO: 529 - DNA, 167 bp, Artificial Sequence
  Description of Artificial Sequence: Synthetic polynucleotide
aaagataatttatcatttactacaacctctgttattagtacttatcgtttggatgataaacgtagccttatttgtgtgaagcaacttaattactaagaactgaagacgtcataatatgtttctctagtgagattcttagataaaaaactagatgtccctacttaaga

SEQ ID NO: 530 - DNA, 194 bp, Artificial Sequence
  Description of Artificial Sequence: Synthetic polynucleotide
acctttaccaacatctcgatcctatcatattaatggtataaaacaactagtaaacacactatttttttataatagcagttgtagggtatttttactatatagataaaacattctctatgtggtggtccggaaagaaaattttggttatttgattattgacactaccaaatcaatgttaaatggttgtacggaac

SEQ ID NO: 531 - DNA, 178 bp, Artificial Sequence
  Description of Artificial Sequence: Synthetic polynucleotide
gtagtaattataacataggtataatcccatatgatgatatctaatagaattaaactctgcatatgtctttagtatacaaatttttttcgctataatattttcagagcctaaatcaaaagctctctatgtgaaacacttatgtgaaatcgagttgttcgctctatgataactaggatga

SEQ ID NO: 532 - DNA, 99 bp, Artificial Sequence
  Description of Artificial Sequence: Synthetic oligonucleotide
ttcattaaacttagagttaaaattgagctaaacttctagctatacgcatgtgcactggttctgaatatatttatattaactaaattttagagacttagc

SEQ ID NO: 533 - DNA, 181 bp, Artificial Sequence
  Description of Artificial Sequence: Synthetic polynucleotide
ctttctcaagtaatctattttctagtaggaattcccgaatagacccaggctatttaacatagttgactatataattgaaagagtcatgtctagctatattacgattagcattcatagcaagtcctgatatgatattttaagtaaacacgagattattaatgtagaatgaaaattattttcc

SEQ ID NO: 534 - DNA, 128 bp, Artificial Sequence
  Description of Artificial Sequence: Synthetic polynucleotide
tagaaagtcttattaacttttattagaatcttttggttcaccaacattaatcgttactctatgcgatgattcataattgagtaaaagtaagtcagaaatagtttcataaaatcgatcggttcccagat

SEQ ID NO: 535 - DNA, 146 bp, Artificial Sequence
  Description of Artificial Sequence: Synthetic polynucleotide
aaatggataagaagcaagttgcgtactgcaacgataactactatactttcttaagtattatggaaacttcataatttaaacaaattttgcattaaagttataggtcggctacctcttttcttttaaatttaccaattagattatgg

SEQ ID NO: 536 - DNA, 58 bp, Artificial Sequence
  Description of Artificial Sequence: Synthetic oligonucleotide
aaggaatattgaatatcacccaatatttttagagttatactatgcgattttagcctta

SEQ ID NO: 537 - DNA, 163 bp, Artificial Sequence
  Description of Artificial Sequence: Synthetic polynucleotide
agttatcaaaaaacgcttgaaaggatagtattaagcttgaaattttagtggaatatagccatgtcatagtttctatatacttttccgttctttaatacgcataaatgtccataatttatacgcttgttgaagaaactaccataaagtgtagtttcctaataac

SEQ ID NO: 538 - DNA, 49 bp, Artificial Sequence
  Description of Artificial Sequence: Synthetic oligonucleotide
aattgagttcaaaagttaatatccattattgacgatttagtccaattgc

SEQ ID NO: 539 - DNA, 191 bp, Artificial Sequence
  Description of Artificial Sequence: Synthetic polynucleotide
atgctcctttgaattgctcctttcaccctatttacatcaacttactgacgtataacataatatttagatgtaatgtagatatatacatcggtttgagttgagatgtgtataaaaaagttaaaaatagtcatcgttacagcttgcatcgttataagaaatataccatgtatttatatatctgaaatacatgg

SEQ ID NO: 540 - DNA, 128 bp, Artificial Sequence
  Description of Artificial Sequence: Synthetic polynucleotide
tgtcatttcagttagtcatgatatagacatcgaacactatcacactatgaatgcttacaataacaatcttccagtttgtattttaaatcttaagcaatagagggtatttttgtgattacagatagtaa

SEQ ID NO: 541 - DNA, 180 bp, Artificial Sequence
  Description of Artificial Sequence: Synthetic polynucleotide
tataagattctagttctatatattgttgcttgacttgataatttatatgagtggaattcgctacacatactaactgaatcgccgtaatcatacatatatattgatatcccagcataggagaaaataatctattatttatgaaaaaatttactaaaagtctttttgcaacggttaccggcg

SEQ ID NO: 542 - DNA, 78 bp, Artificial Sequence
  Description of Artificial Sequence: Synthetic oligonucleotide
aagcaaataattttatcaagccagtgaatttctaataaaattaagtctattagctgagaattgcagtctgtctctttt

SEQ ID NO: 543 - DNA, 105 bp, Artificial Sequence
  Description of Artificial Sequence: Synthetic polynucleotide
taaacgtgcatcacagttaaatgaacttggtgtgtataattctatatcatttaaaaatagtcaaagatttactataatcataacttgcgtttaagcggcttcttt

SEQ ID NO: 544 - DNA, 141 bp, Artificial Sequence
  Description of Artificial Sequence: Synthetic polynucleotide
ttttttccaaaaaacaattggaatttttttgcacctgaaatgacatttccttgatctcaatgattcgaatagggagaatgtataactaatatcaagctacggttctgatattgataatatttatgtgaactgaacactaac

SEQ ID NO: 545 - DNA, 26 bp, Artificial Sequence
  Description of Artificial Sequence: Synthetic oligonucleotide
taaaattttacgatatcgatctgatt

SEQ ID NO: 546 - DNA, 126 bp, Artificial Sequence
  Description of Artificial Sequence: Synthetic polynucleotide
gtatcatgttagttgtaaagagattagtatagaagtaattataaaaaaaaatcgacattcaccttagcctattttcttattttggtagaattactctctatactgaatctcatctaaagaggctct

SEQ ID NO: 547 - DNA, 34 bp, Artificial Sequence
  Description of Artificial Sequence: Synthetic oligonucleotide
atttatacgttttcaagtgcagtatatatccaag

SEQ ID NO: 548 - DNA, 71 bp, Artificial Sequence
  Description of Artificial Sequence: Synthetic oligonucleotide
atgtgaatctaagttaagtttggctatttatataagtaataccttccaagtatatattaaaccagtgtctc

SEQ ID NO: 549 - DNA, 101 bp, Artificial Sequence
  Description of Artificial Sequence: Synthetic polynucleotide
atggcaaataagcttttttgatctggaacgattctttttaaaacactcattaaataataatacgctctccgaatatataggggtcctttattgtataaaga

SEQ ID NO: 550 - DNA, 166 bp, Artificial Sequence
  Description of Artificial Sequence: Synthetic polynucleotide
tattgtgattgtctcaaaaaaacaaatattactgtgtaacatttctacatgcagacgagagcttcattcggtgaagttatgtctgtatcctattctaattgcgaagtatgaaactaacacttaatcatacatcagttgttagtaatatataactttattgtaataa

SEQ ID NO: 551 - DNA, 131 bp, Artificial Sequence
  Description of Artificial Sequence: Synthetic polynucleotide
attaccatgttttttttaagactcttagtaatcttgaaagttctagatgattcaatttatcttaggtttaagaaaattggttggcgatataacataatcacactacaatcaagtatctgactccaagatag

SEQ ID NO: 552 - DNA, 130 bp, Artificial Sequence
  Description of Artificial Sequence: Synthetic polynucleotide
tacctccatatgagaagaaggtatatatactatttttattcgcttagataggataaatatggttatctcatttttctggtctatgagataaaaaatagactctccatcaaaagtttcaatctaaactgtg

SEQ ID NO: 553 - DNA, 190 bp, Artificial Sequence
  Description of Artificial Sequence: Synthetic polynucleotide
attggggtctataaaactgtggtttatattaactagaaacattcttattgacgttcggttcattagagcaacggaataaagcctttgaaaagctcatcaacatttcctacaaaattatatatcaattatggtatatgacttatgtttttcctaaatacatcttgttaataacgcatttgaaatctggaaa

SEQ ID NO: 554 - DNA, 77 bp, Artificial Sequence
  Description of Artificial Sequence: Synthetic oligonucleotide
ataatctctacaaattggactgctctataatttgatattattaagcgcaattttgagatatcatagcatgttatgac

SEQ ID NO: 555 - DNA, 135 bp, Artificial Sequence
  Description of Artificial Sequence: Synthetic polynucleotide
aatctaccgaatgcccgattttaaaaccgggataaaataacattaactacatttttagtttatttaaaatagtgtgaaggtcaacactcaatgttttgtagtttaatgtatatgcagcctaacagtgatttttac

SEQ ID NO: 556 - DNA, 16 bp, Artificial Sequence
  Description of Artificial Sequence: Synthetic oligonucleotide
tttcaattctgtaaag

SEQ ID NO: 557 - DNA, 163 bp, Artificial Sequence
  Description of Artificial Sequence: Synthetic polynucleotide
gtacgattcagatgaattagttattctacacatgccattacaattattataagagaaactaagtatctttagggtttgcaataaaacttcatttccaatatattatatagagtacttactgtgaaatcgcattttcaacgcgattgttataatgtgcactaga

SEQ ID NO: 558 - DNA, 41 bp, Artificial Sequence
  Description of Artificial Sequence: Synthetic oligonucleotide
gtgctttatctaagctaaaagtcactcaaattttattaagg

SEQ ID NO: 559 - DNA, 138 bp, Artificial Sequence
  Description of Artificial Sequence: Synthetic polynucleotide
cgaataagaagtagtttagggttaaaatcagcaatgattggtcaggtacaacttaaattactctctatcattgcttaagcggtatagttcatattaatttattacgtccattatcttaaaactatatacttcagttaa

SEQ ID NO: 560 - DNA, 159 bp, Artificial Sequence
  Description of Artificial Sequence: Synthetic polynucleotide
tcatgaatcttgttataattttgatgatgaccaaatcgaagcttctatttaatcttactttgtcgttaagatttaaaggatcttaaatacgtaattgatgatgcttggatatccattttgctgaacaaataaacggtaacattagaccaatcaatacta

SEQ ID NO: 561 - DNA, 159 bp, Artificial Sequence
  Description of Artificial Sequence: Synthetic polynucleotide
taatttggtataatttctgagcccacagtataagtaaaatgacaaataattaactatgctaatatttgtaaccaagctatattagaaatgatattcatatgttttttaattgagtctcagagatagctaatctttcgtcaatttgcccactgtgtgcaa

SEQ ID NO: 562 - DNA, 186 bp, Artificial Sequence
  Description of Artificial Sequence: Synthetic polynucleotide
ttgttatttctattttaacatcaaatcagttgaggactcttttttagcaagctagttacgatctgattactctgtcgcaaaaagcatataatctattttcgcaagatcatggggaatcctagagcttctaaatataaagaatttagtaagtgaatattataaattgctatcttactcaagaataaa

SEQ ID NO: 563 - DNA, 48 bp, Artificial Sequence
  Description of Artificial Sequence: Synthetic oligonucleotide
ttcaataatttatgtctaaagcattacacgctaaatactgtgtgttag

SEQ ID NO: 564 - DNA, 189 bp, Artificial Sequence
  Description of Artificial Sequence: Synthetic polynucleotide
gtgtacataaatgatttttatgccgagaaaaaaatgatcggatataataaacgaaaaatttccctagaataaaggatacattatatacattttcctactagatgggagtcatccgtgcttatgatagtaattaatttttgtgatttcctacagtctgatactgatattcactttacatttctcaaagct

SEQ ID NO: 565 - DNA, 190 bp, Artificial Sequence
  Description of Artificial Sequence: Synthetic polynucleotide
gtatacgcatagaacccagaacaatggttgaaataaatatctgttataataataatctagctatattgcaatcgtcacgttatattttgtcaagtaaaggttcttcatgaaagttatatgtaccgtatttctatcgttatactgaaagtgagacaaagaaagacttctttttatttttcactaacgtatc

SEQ ID NO: 566 - DNA, 124 bp, Artificial Sequence
  Description of Artificial Sequence: Synthetic polynucleotide
agttggagaaatcaatttagtcagactagccgtgctagttattatctagatgatagactcaagattagtatttttaacatgacaacaaacattcattactcaataggttttcaattatactttt

SEQ ID NO: 567 - DNA, 149 bp, Artificial Sequence
  Description of Artificial Sequence: Synthetic polynucleotide
gtggctcctgaaacaaccagacagaattcatttatattggaaacttttaagcaccaagcttaaactatagccttatagacatgtatttattccaagttatattagatttatttatatagcgttgatgttgtataactgcaatttaagaa

SEQ ID NO: 568 - DNA, 66 bp, Artificial Sequence
  Description of Artificial Sequence: Synthetic oligonucleotide
ttaatgcatggaagtaagtaggactttattcattctattattattgactcaatacactataatgca

SEQ ID NO: 569 - DNA, 186 bp, Artificial Sequence
  Description of Artificial Sequence: Synthetic polynucleotide
ccggacgttttggtatagtataatattcgtattgtttagatcaaacataaataaaaatctgcgttacagtttattaatagtagaaatactacaattgttgtttagttacaagtgagtctattctaccttaacaatcctatatttgaatggtactaacaatatagcgatgaaacatttctcacacgt

SEQ ID NO: 570 - DNA, 36 bp, Artificial Sequence
  Description of Artificial Sequence: Synthetic oligonucleotide
tggcattttacaaataattaattatacgttgtagcc

SEQ ID NO: 571 - DNA, 85 bp, Artificial Sequence
  Description of Artificial Sequence: Synthetic oligonucleotide
acagacttatggcttaatcgactcaaactcaatgagtttaactgtttgtactaaatatagtattgaatcacgtatattaagtttt

SEQ ID NO: 572 - DNA, 190 bp, Artificial Sequence
  Description of Artificial Sequence: Synthetic polynucleotide
ttatcggttatatcggctaacttgttgaataatgacttgatagatttcttgtatcaacattttgcgtcgttattgtacatagaattgaataaattaatccccaggtaaaataacgaaaagttaaacagggatcaaataaataaccccaaggttctttctgatgctattttgattacatactatatctaat

SEQ ID NO: 573 - DNA, 142 bp, Artificial Sequence
  Description of Artificial Sequence: Synthetic polynucleotide
tccattgaactaaaaagttatcattttatacacgatttttaaagcatttcattttttaagagtggggactcaagtaatcttgtttttttaatcacgacagtgatgttaataactgaagtacaataacaggtctaaagcctca

SEQ ID NO: 574 - DNA, 54 bp, Artificial Sequence
  Description of Artificial Sequence: Synthetic oligonucleotide
atattaatctgtctcctgatgtatattacagatcgatcaatttagatcagagta

SEQ ID NO: 575 - DNA, 40 bp, Artificial Sequence
  Description of Artificial Sequence: Synthetic oligonucleotide
gtctttgacatttaattataagggaacgccaatcattata

SEQ ID NO: 576 - DNA, 92 bp, Artificial Sequence
  Description of Artificial Sequence: Synthetic oligonucleotide
tattacgaattactatttttaaaagtttaagtacatatttaagatattagcaaaccagacatcgcaaccatgtgtttgatttgcgtgtcaat

SEQ ID NO: 577 - DNA, 98 bp, Artificial Sequence
  Description of Artificial Sequence: Synthetic oligonucleotide
aacatccgagagttaaaatcaaaaattgaattaccgccaacattgacgtatttttactatgggttatttgatttttgttagcatttataaaattccag

SEQ ID NO: 578 - DNA, 134 bp, Artificial Sequence
  Description of Artificial Sequence: Synthetic polynucleotide
aatgaatctacaagtcccactttttcgaatcctttaaagtggaagtttacctgccctataaaaatcgatttatagcgttaagttttcgatgttgaatatttaacaggcttgtaattaaaaaagaattacttgat

SEQ ID NO: 579 - DNA, 127 bp, Artificial Sequence
  Description of Artificial Sequence: Synthetic polynucleotide
gtgatatgacgtaatttatattctgtcaaagccttataaagatagtagtgcacattctattagagtttactaattctaagactcctgatttaataaccataacggcgaacattctgagattataatt

SEQ ID NO: 580 - DNA, 61 bp, Artificial Sequence
  Description of Artificial Sequence: Synthetic oligonucleotide
aaagtcaaaatcgagaatatagattcgtgatagtgcatcacttttttatgcattaactctt

SEQ ID NO: 581 - DNA, 40 bp, Artificial Sequence
  Description of Artificial Sequence: Synthetic oligonucleotide
gcaaggttctttcattatatctagttaaaaaaatcctgga

SEQ ID NO: 582 - DNA, 65 bp, Artificial Sequence
  Description of Artificial Sequence: Synthetic oligonucleotide
taaaattttaatttattcgatataaaaatcacgaagagttgttttatgcttgctatactccggca

SEQ ID NO: 583 - DNA, 200 bp, Artificial Sequence
  Description of Artificial Sequence: Synthetic polynucleotide
atatattaaattgtaaagaattttcaattacaaactagactctaattttcatatatcgtcgatggggaacagtccaaagtcgaataattagctgaactggaatgtgatatatgcgaataacgtattcatctgttacttaattatctcggcggcccttttttccaaatctttataatgaaataagataaacttaattgcgt

SEQ ID NO: 584 - DNA, 98 bp, Artificial Sequence
  Description of Artificial Sequence: Synthetic oligonucleotide
atgccatagattatggaagtgacactctcatacatacaattgtcttatgctagaattgctctattaataatgtttaattaaagtatgtacgatactat

SEQ ID NO: 585 - DNA, 83 bp, Artificial Sequence
  Description of Artificial Sequence: Synthetic oligonucleotide
gtctatacccattaaagccataaaagtattatccttactttgtttttttatggaatgcaaagtagttaacaaagacattagtg

SEQ ID NO: 586 - DNA, 186 bp, Artificial Sequence
  Description of Artificial Sequence: Synthetic polynucleotide
gggaaaataactaatatctatgcgatcgttaaatgaatttttctttatgctgattttcgcattctatgttttagcgtttcgaatatacacaagtttcccaagcaagcaacatttaggaattatattaccgtactatttacggtacagtttttgattacacatgaacataaagaaaaataaatgtat

SEQ ID NO: 587 - DNA, 120 bp, Artificial Sequence
  Description of Artificial Sequence: Synthetic polynucleotide
tgacactttagtttaataggatctctcagaattgatagtgacttgacaataacttgcattagcaaatcacacatagttataggagtcattcaaggatttatttttaacctaatgcaatta

SEQ ID NO: 588 - DNA, 61 bp, Artificial Sequence
  Description of Artificial Sequence: Synthetic oligonucleotide
aaagggaataaaataaacatcttatttatatatcgtattgttcgtgcgttataacctgcct

SEQ ID NO: 589 - DNA, 105 bp, Artificial Sequence
  Description of Artificial Sequence: Synthetic polynucleotide
atttttttgtagcaattaggtaggcaacatgtttatcgtattaaactaatcatattcttataacgatttttcgaaaacctcatattacattgctagaggaagcaa

SEQ ID NO: 590 - DNA, 101 bp, Artificial Sequence
  Description of Artificial Sequence: Synthetic polynucleotide
tgtcagaatttatttctagcattaaatctatttagacgtaaacaaaatacaggtactcctacattcgagaaaagttatggatgttcatctgcataagtttt

SEQ ID NO: 591 - DNA, 143 bp, Artificial Sequence
  Description of Artificial Sequence: Synthetic polynucleotide
tatccaacctgtttacaattttaggtttagttctgaaatttcgacactgccagatatgtagagaataacttgagtaaagtatcttgtcttaagcaatttattctcggataaaaaacttatctacggttttcaataataagaaa

SEQ ID NO: 592 - DNA, 80 bp, Artificial Sequence
  Description of Artificial Sequence: Synthetic oligonucleotide
agcttgaatattagacaaaattttaataacttcgaccttaatgacctctattggatactttgacaatgcgtatagatatg

SEQ ID NO: 593 - DNA, 87 bp, Artificial Sequence
  Description of Artificial Sequence: Synthetic oligonucleotide
aaatgccttccattaaaaatctactagatgacttttattgatgagtaaccacatattctcacttggtgttaattggaattatgaaga

SEQ ID NO: 594 - DNA, 76 bp, Artificial Sequence
  Description of Artificial Sequence: Synthetic oligonucleotide
ttaacaacgatgaaactaattctagctataataccaattcaattagcacgtagtgatttttgtgatctgttttaga

SEQ ID NO: 595 - DNA, 157 bp, Artificial Sequence
  Description of Artificial Sequence: Synthetic polynucleotide
tttgattactttgtagccgacggatatatattcaatgcacccatggttgttagatattagtatctttggagcaaaaatacctttaatttcttccaaatgcctaaacataatattaccgttaatcgtaattaaagagttgtatataatatgagcaaat

SEQ ID NO: 596 - DNA, 91 bp, Artificial Sequence
  Description of Artificial Sequence: Synthetic oligonucleotide
ttactcctcatttactaaattaagcgtcttcgaacaggatgataagaaaaaatgatactctcgattggtattttatatatctttatagagt

SEQ ID NO: 597 - DNA, 35 bp, Artificial Sequence
  Description of Artificial Sequence: Synthetic oligonucleotide
cactagttaatataatgtaaactatgtcattgtgc

SEQ ID NO: 598 - DNA, 114 bp, Artificial Sequence
  Description of Artificial Sequence: Synthetic polynucleotide
gagttagaatgagaaatacataatgtaactatagcaaaatcgcactgtacttaaatttcttccttatcattcttcttaatattgtgagcaagtgtattcgaaactgtagcttta

SEQ ID NO: 599 - DNA, 197 bp, Artificial Sequence
  Description of Artificial Sequence: Synthetic polynucleotide
cataaagtttttgtttttattcaaaatgatttaatttaactttattgcctttactgattattggacaatcatgcgataaaacagataagagagtacaatacacagctactgtttacatagtatttagtctccatgttacacctgttcccatattagcgatggtttgttgtagtaaaaccaataaaacgagtatagaa

SEQ ID NO: 600 - DNA, 10 bp, Artificial Sequence
  Description of Artificial Sequence: Synthetic oligonucleotide
atgtcttaat

SEQ ID NO: 601 - DNA, 147 bp, Artificial Sequence
  Description of Artificial Sequence: Synthetic polynucleotide
tgtcatagatgtatcacagccttttcgtaaaaaataaggctattaaaaaaactcatttattgttgtccaactagatttaaagcatccgcctacactaattcagggaacttttatgtattcagaataagtattaggtaattgtagttt

SEQ ID NO: 602 - DNA, 104 bp, Artificial Sequence
  Description of Artificial Sequence: Synthetic polynucleotide
agcaaaaggttaccttacttaacgtagatgcatagttctaaactttttatggttttactgtaataatcgactaaatcgaaatacggatatttattcttatacga

SEQ ID NO: 603 - DNA, 95 bp, Artificial Sequence
  Description of Artificial Sequence: Synthetic oligonucleotide
atgtcttaagcgaactagacttgttattgctcactattgtggtcattacagtatggtctaatagtattatataacttactaataaatacaacaag

SEQ ID NO: 604 - DNA, 169 bp, Artificial Sequence
  Description of Artificial Sequence: Synthetic polynucleotide
aagcaaattataatttccatagtatgcaactgtatcatttagatgatcgtagtatactccagtctgcaatagactaaatgttttcacttcacagttgtatttagagaatatataagtacatgatggaaaatgcttttacttgctttatctatacgagtaattagcacaa

SEQ ID NO: 605 - DNA, 54 bp, Artificial Sequence
  Description of Artificial Sequence: Synthetic oligonucleotide
gaattagattgtcctactagtagaatctaaggttaactcaattttttaccgaat

SEQ ID NO: 606 - DNA, 178 bp, Artificial Sequence
  Description of Artificial Sequence: Synthetic polynucleotide
tcatggaaattttagttggattcgataaagttagtttacacatgtaaatggaatgtacttgatacagaccatattttattagtgcaacattttacatgaagattcacttaaaaactatggtctctacaataaattccctggttcataataattcaatgatgaatccttttcagcaagt

SEQ ID NO: 607 - DNA, 56 bp, Artificial Sequence
  Description of Artificial Sequence: Synthetic oligonucleotide
caaaagtcttgtttcagaatttatggctaacaattttgatagtatgtaccactata

SEQ ID NO: 608 - DNA, 105 bp, Artificial Sequence
  Description of Artificial Sequence: Synthetic polynucleotide
aaaaaatttcgcttctagaatcctaaaataatttttagttattgatattgatatatcttcgtagtgagttaagcaagccttaacaagtctgacacttagtctagt

SEQ ID NO: 609 - DNA, 61 bp, Artificial Sequence
  Description of Artificial Sequence: Synthetic oligonucleotide
tgaatgtacaaacgataagaatccgtctcatcatcaggcttgtaatatttgattttttaaa

SEQ ID NO: 610 - DNA, 135 bp, Artificial Sequence
  Description of Artificial Sequence: Synthetic polynucleotide
taaatggataccttttccttctattgtctctacataaattcgagacaagctgtgacccttaaaagtagcagttgatcatgtatgataataactagaaattattcttagattaagtaaatggttatcttacatgaa

SEQ ID NO: 611 - DNA, 181 bp, Artificial Sequence
  Description of Artificial Sequence: Synthetic polynucleotide
atcataaaagctgaaaattcaccttcattaatagaagggtttcttaaagatgaaggtatttcacaaattgttttaataattgtttgcttactagttctcgtaaacaatactcaaatcgttgttaacataagggggatgggacccgcttttatttacctaactacttcaaaatttaatgaat

SEQ ID NO: 612 - DNA, 79 bp, Artificial Sequence
  Description of Artificial Sequence: Synthetic oligonucleotide
gtttacagagagctttttacttatagataagctgaacctttaaagattcaattattaagtcttaacaatttccgagtat

SEQ ID NO: 613 - DNA, 143 bp, Artificial Sequence
  Description of Artificial Sequence: Synthetic polynucleotide
gataatcaagcccagagatactataaagtttctttacgtatctagaactgatagttattgtgtaacgaattatcgtactaatatttatactatgtaacttgaatatcaagtacgttctatagtttgaatcgtacacgttaaca

SEQ ID NO: 614 - DNA, 150 bp, Artificial Sequence
  Description of Artificial Sequence: Synthetic polynucleotide
caaaattagatgttttattttatattaaaaatttcttttgcttaacgctcctcacaagagtttttcccgttattagaacgagcataagcgagatatattatagtagttattaaatatacgtctcgaattaggaacagcttataacggaca

SEQ ID NO: 615 - DNA, 123 bp, Artificial Sequence
  Description of Artificial Sequence: Synthetic polynucleotide
agcgacgggtttgattcatgtgactatgactatatatactatcgaagatcgtgtaaatcattctaaattaaattataataactgatctactatagatcgatcaggtttttaccaaaatatttc

SEQ ID NO: 616 - DNA, 105 bp, Artificial Sequence
  Description of Artificial Sequence: Synthetic polynucleotide
agaatcaattattcattttgacgaagtcgatcacactaattgttctaatgatattcatatgttaaactacgtttaaagattcaggtgctaactatataactttgg

SEQ ID NO: 617 - DNA, 114 bp, Artificial Sequence
  Description of Artificial Sequence: Synthetic polynucleotide
agaggtaataataacagaaacatcagtaaaatgcgaactaagattgcggtgtcattacaatgaaattattcaccctccggtttagatattttatttcgtactttatttctttat

SEQ ID NO: 618 - DNA, 96 bp, Artificial Sequence
  Description of Artificial Sequence: Synthetic oligonucleotide
agcatctaaagcattgatttatgatatgtagaatataaattgctttgtaaattccattgaacgaccacaatacttttgagcttctttgtacgtaaa

SEQ ID NO: 619 - DNA, 166 bp, Artificial Sequence
  Description of Artificial Sequence: Synthetic polynucleotide
ttagttacttggatatataatatgactatttattagatataacgtgtatcaaaactgcagttatactttagtggacctagttcttcttgaagacaaatgtgctactccaatttatctatttgcatcataaccaagtaaatgtctgtgctagaaaacatgtaataaa

SEQ ID NO: 620 - DNA, 157 bp, Artificial Sequence
  Description of Artificial Sequence: Synthetic polynucleotide
aagcacacagttaatgtgtaatatgtataataaagatacttataagtacattatcttttggcactcctaatattttcccgtcgggttgttacgaatgactgagtatatattcatccaatatttagaattatttagcgctcgaattaaaaatacatgt

SEQ ID NO: 621 - DNA, 181 bp, Artificial Sequence
  Description of Artificial Sequence: Synthetic polynucleotide
tattatattattacattcttaactatatgatataaaatgccattaagttagttaatactttacgtaataatgagagacgaaaataataaaacagctgtttcatcccgcaattgtcatttctgttaattgcttctgaaggttcctatatatttcggccatgaaacgattgagaagcaaggtc

SEQ ID NO: 622 - DNA, 103 bp, Artificial Sequence
  Description of Artificial Sequence: Synthetic polynucleotide
aatactttccttaaaatagatttacgcacgaatattaaatttaatgattagggctagctattccatttctagattgagtgcaaatattcactttacggatgaa

SEQ ID NO: 623 - DNA, 40 bp, Artificial Sequence
  Description of Artificial Sequence: Synthetic oligonucleotide
cacaaataggttagtctctaatagatttacgtaatattcg

SEQ ID NO: 624 - DNA, 188 bp, Artificial Sequence
  Description of Artificial Sequence: Synthetic polynucleotide
aataaaataacttttcaggcaagcacttagtaaagaatgtttacattttctgctaattatatgtgatacatttacatttaaaatagggtagtctgtactttatcggaaattaaccattacaaattcgtgagaaaaattgaatcacttacaaccttatttctctgttgcttcggtgactatgagctaga

SEQ ID NO: 625 - DNA, 164 bp, Artificial Sequence
  Description of Artificial Sequence: Synthetic polynucleotide
ttttacgcagtaagttcgcgagatctgtaagtgaattaaattcttttaagtagaatcaccacataaattgtgccttattaagtcccatgattttttcatacgatctttcgctgactgtataaagagaacaatattaaattaaaccttttggaaataaaagtatt

SEQ ID NO: 626 - DNA, 85 bp, Artificial Sequence
  Description of Artificial Sequence: Synthetic oligonucleotide
aattgttttcttttagagtagctacttctacaacgtattcatattatttaaaagtaccgtatatactaaggtaacgaaggtcata

SEQ ID NO: 627 - DNA, 22 bp, Artificial Sequence
  Description of Artificial Sequence: Synthetic oligonucleotide
tgttatcatcaagattatacgt

SEQ ID NO: 628 - DNA, 135 bp, Artificial Sequence
  Description of Artificial Sequence: Synthetic polynucleotide
taagatatcaatatgagaaggccatcgtttatctctaacatgaaccatttcgtcaaattcagaatagatatggattgatactagctgtatttgttataatatgcatcgctattcacgaattcagttaataattta

SEQ ID NO: 629 - DNA, 28 bp, Artificial Sequence
  Description of Artificial Sequence: Synthetic oligonucleotide
aattttagaatgtgctccaaatctgatt

SEQ ID NO: 630 - DNA, 24 bp, Artificial Sequence
  Description of Artificial Sequence: Synthetic oligonucleotide
ttgaattcctgtagaatacttaat

SEQ ID NO: 631 - DNA, 44 bp, Artificial Sequence
  Description of Artificial Sequence: Synthetic oligonucleotide
atataattcattttgtcttcaggtggtcataaatgatcatcaaa

SEQ ID NO: 632 - DNA, 185 bp, Artificial Sequence
  Description of Artificial Sequence: Synthetic polynucleotide
atattcatagttcgtttgtgataaaaaccaaaaacttcatgtgggttagaaaaattgactgttacctatgccctacaggttccaatcttatatattacatcgtgtatcctcatagtaatgtcgtatttgtatatttcatccgtataaaagaaaatagtagataattatcaaagtttagtagtatc

SEQ ID NO: 633 - DNA, 91 bp, Artificial Sequence
  Description of Artificial Sequence: Synthetic oligonucleotide
atatttgcctagagattatgactttagttcatttcaacttttaatatgactagatatacgtcacaataaatagtcgaagctcaggtttata

SEQ ID NO: 634 - DNA, 113 bp, Artificial Sequence
  Description of Artificial Sequence: Synthetic polynucleotide
gatagaaaaataaaaatatgatattccgtatgatcataatcaatattcgatatttcatcactcccattcattggataatccatgtaataatttactttgggctggtagttttg

SEQ ID NO: 635 - DNA, 109 bp, Artificial Sequence
  Description of Artificial Sequence: Synthetic polynucleotide
tgacaaatcttttagtaagttcagtgatatgcattgagacttcctatagtatctactatgttaatcgacctctgtctatgaataaatgaaggtctcaaaaaaataattt

SEQ ID NO: 636 - DNA, 25 bp, Artificial Sequence
  Description of Artificial Sequence: Synthetic oligonucleotide
atttttcatacaagcattgtttgaa

SEQ ID NO: 637 - DNA, 72 bp, Artificial Sequence
  Description of Artificial Sequence: Synthetic oligonucleotide
tcaaagtttatgttctcttaaagatacaaagtccagttatatacgtgtgctctagaatatacagatatttat

SEQ ID NO: 638 - DNA, 56 bp, Artificial Sequence
  Description of Artificial Sequence: Synthetic oligonucleotide
ttaacgctcctagaccaattaatattagattggtgttaacatatgactttaatgta

SEQ ID NO: 639 - DNA, 141 bp, Artificial Sequence
  Description of Artificial Sequence: Synthetic polynucleotide
gaataatgttataattgctttatctttcttgttaatgatacggctattgactatctcaaaatatcttcaacgttagatgtccttaataagaccggtttaagaagcgaaacacaaatgttgacttaatcgatagatattaca

SEQ ID NO: 640 - DNA, 51 bp, Artificial Sequence
  Description of Artificial Sequence: Synthetic oligonucleotide
ctttgaagcattttaaaattcggcttttaatgatttaaagaactgattcac

SEQ ID NO: 641 - DNA, 167 bp, Artificial Sequence
  Description of Artificial Sequence: Synthetic polynucleotide
attattctcaaaggggttatcctcgagtatttttacttataaaagaaaacactaaatggacgcttaatatctactcaaagataatttctatcatctaagaaatatatactgtttgttgtaactgtagttggtaacggaatcgttcatggtactgttaaaaatctcac

SEQ ID NO: 642 - DNA, 140 bp, Artificial Sequence
  Description of Artificial Sequence: Synthetic polynucleotide
ctatcaattcaggtttgttttatagtaaataggcctatctaggttagttattaatatcgttacgtcaattcccgtaagttataaaaattaatattaacacacactatgaaaaatgtcaggaaagtctcgtacgatatgct

SEQ ID NO: 643 - DNA, 86 bp, Artificial Sequence
  Description of Artificial Sequence: Synthetic oligonucleotide
cttccttgttataaaaggaattcatactacactaatttcaagatttttattctgttgaacgtaggaatttgaatggatcctaaaaa

SEQ ID NO: 644 - DNA, 78 bp, Artificial Sequence
  Description of Artificial Sequence: Synthetic oligonucleotide
attttaaatgggttaaaattagaggctctaaacgatgtacttgtaattccaccctataattctaataatatctgatgt

SEQ ID NO: 645 - DNA, 196 bp, Artificial Sequence
  Description of Artificial Sequence: Synthetic polynucleotide
gcgttactatattgccagttgaaaagaaaaattaaaagatctaaataaattctgtaactttttccctataatttatttatagtgaacaataacagttttgtccaatcattaagcatcgcaatcagtttaaaacagtgccctgtttaaagattccacttctattgtataatttcagtgtttgtgaggaaaggtgtca

SEQ ID NO: 646 - DNA, 123 bp, Artificial Sequence
  Description of Artificial Sequence: Synthetic polynucleotide
cttagtaaaaatctatctaacaactaatatgatacatcaaattcagattctaacaattttaatgtgaggtgttggacgattttctttgccagttaagtaaaagcaattggcctcaaatttttg

SEQ ID NO: 647 - DNA, 72 bp, Artificial Sequence
  Description of Artificial Sequence: Synthetic oligonucleotide
aatatctatcgagtctgcgcctaacaagctttttatattaattaatgtgaactaaatagtctatagttgaat

SEQ ID NO: 648 - DNA, 81 bp, Artificial Sequence
  Description of Artificial Sequence: Synthetic oligonucleotide
cttaaaatacccctttttcagtaaacttcggaatactctttaagagtataaaatattagtagtagcatgcgtgattgtaat

SEQ ID NO: 649 - DNA, 156 bp, Artificial Sequence
  Description of Artificial Sequence: Synthetic polynucleotide
atatgttctgtagtaattgctttaagctaaatttatcccttattataaaaattctgacgtaactcgcatacggtttgaaaagttagaacgttcactttaatgacgtttctaagtgctatatgctcgaatcataaaacgaaaagatgacatttatta

SEQ ID NO: 650 - DNA, 113 bp, Artificial Sequence
  Description of Artificial Sequence: Synthetic polynucleotide
gcattattgagcatttattccatctttggatgaatactactgcaggtcaataatcgagtaaaaatcatttgaaattatacaggataatactaacatgtctttatttagtctta

SEQ ID NO: 651 - DNA, 66 bp, Artificial Sequence
  Description of Artificial Sequence: Synthetic oligonucleotide
cttcacatttcgaagtaaggtcgaaagatagtttaatattttacttatattttcacgaagtaacat

SEQ ID NO: 652 - DNA, 15 bp, Artificial Sequence
  Description of Artificial Sequence: Synthetic oligonucleotide
taaccttatgtaagt

SEQ ID NO: 653 - DNA, 46 bp, Artificial Sequence
  Description of Artificial Sequence: Synthetic oligonucleotide
taattctgattaaggtagttaagcattacatacatctagctattta

SEQ ID NO: 654 - DNA, 100 bp, Artificial Sequence
  Description of Artificial Sequence: Synthetic polynucleotide
catatactactcaacgtgataaacgagtttattaatacagtaagtatagtgcgaatctatttagccggagtataattacgtcattaaattatgtttcact

SEQ ID NO: 655 - DNA, 129 bp, Artificial Sequence
  Description of Artificial Sequence: Synthetic polynucleotide
cttatacttcttcattacagaaagagaggttttacgaacagacgaaaaatttttttaaggttatagtttgattcataacatgctatatgaataccgctaatcgtaatattctgtttatctacaaaggac

SEQ ID NO: 656 - DNA, 88 bp, Artificial Sequence
  Description of Artificial Sequence: Synthetic oligonucleotide
tgtttgaactgacttctctcagtatagaaaagtaactaaatcaataatgggtccctttgctatcattttaaattaaggtaatagttca

SEQ ID NO: 657 - DNA, 191 bp, Artificial Sequence
  Description of Artificial Sequence: Synthetic polynucleotide
ttcgtattcagggtatgattttcatccgttatggtttcaagtagaataataggggatacaaaatgaatcctttttaaaatcctaaaaccagattcagtttatgattcaataatctttactgaccttaaactgtaccttaacaacagcaatgatcaattcgtgtaaaatttttagaatactaatttggattg

SEQ ID NO: 658 - DNA, 129 bp, Artificial Sequence
  Description of Artificial Sequence: Synthetic polynucleotide
gaaaggacggttaattggcctaataatatatgaatctttataattagttcaacaataaaagctattgatctctatacgtgatcatctagctagatacatcttatgctggtataatataactcagttttc

SEQ ID NO: 659 - DNA, 13 bp, Artificial Sequence
  Description of Artificial Sequence: Synthetic oligonucleotide
tatagtcatttta

SEQ ID NO: 660 - DNA, 74 bp, Artificial Sequence
  Description of Artificial Sequence: Synthetic oligonucleotide
gaataatatttgacatttaagttattgggaccatttgttgccaaaactagtgaattaatatatttcaacgctcc

SEQ ID NO: 661 - DNA, 105 bp, Artificial Sequence
  Description of Artificial Sequence: Synthetic polynucleotide
ccgtataggacttttaagtgaatattcttctaatatattacatacagccaatcgaggttttattggaaactagttgcaacatttatatttataaaggctcttaaa

SEQ ID NO: 662 - DNA, 182 bp, Artificial Sequence
  Description of Artificial Sequence: Synthetic polynucleotide
ataacattgatatagtatatcatataagattaaaatatcgataccatacactataatttctgacccccttgtgaagcgttctaatgttatattattggtagcttttcatattgaagaatgtgttgattaaaccactagttaaatccatattctccataactaaaatgggcgagggtagattt

SEQ ID NO: 663 - DNA, 133 bp, Artificial Sequence
  Description of Artificial Sequence: Synthetic polynucleotide
taatggttatttaaatggaaaattattatcatatggactagtagtaaaccactgttttagtacacacaatcctgtcatatcacctgttaacacgattcatagtatgtaataatttaggatctttatcgagtat

SEQ ID NO: 664 - DNA, 59 bp, Artificial Sequence
  Description of Artificial Sequence: Synthetic oligonucleotide
atatgaatttattgttcgagttaaatcttatagactcgatcaatgtaagttctaatcac

SEQ ID NO: 665 - DNA, 179 bp, Artificial Sequence
  Description of Artificial Sequence: Synthetic polynucleotide
atggagcatgcttttatttagtggctaaatatttcccttgactgctagatcaactgtcttcattaagatacaatacatttatagtatacatgtaaataattatggtacagcaagcaataacaaaattcttcaattataatttgtctaaatcatgtgtatgcggagtaccaatattagtt

SEQ ID NO: 666 - DNA, 15 bp, Artificial Sequence
  Description of Artificial Sequence: Synthetic oligonucleotide
attatgtgcaactta

SEQ ID NO: 667 - DNA, 110 bp, Artificial Sequence
  Description of Artificial Sequence: Synthetic polynucleotide
aatggttacgaacattactataggggttttaagaaatatcctaacatattgaatatttatcctaaacttaacacctatctattaaatgtgacagttcggtttataggttc

SEQ ID NO: 668 - DNA, 73 bp, Artificial Sequence
  Description of Artificial Sequence: Synthetic oligonucleotide
aaagtcctaacgtgaatcaacaacttatttaaactgaaagattggtctacgtacaattttgtttattgtttat

SEQ ID NO: 669 - DNA, 84 bp, Artificial Sequence
  Description of Artificial Sequence: Synthetic oligonucleotide
ccactcaataatgagtgatgatatgatcttttcaatatacaaatttctaatcgttataaactgtatacatttttcgagggaatg

SEQ ID NO: 670 - DNA, 5 bp, Artificial Sequence
  Description of Artificial Sequence: Synthetic oligonucleotide
tattt

SEQ ID NO: 671 - DNA, 174 bp, Artificial Sequence
  Description of Artificial Sequence: Synthetic polynucleotide
gtaagtagtggaatcgattgacttaaatcaaggttttcattcttcctgaatgaaattaggattgtaataataatttatacactcttctgaagccaggctgtttccatcaatgttatataaactgacaaacataaatataattcaatatagtagtctctatcgcacgttaagttt

SEQ ID NO: 672 - DNA, 15 bp, Artificial Sequence
  Description of Artificial Sequence: Synthetic oligonucleotide
taatagcttatatcg

SEQ ID NO: 673 - DNA, 122 bp, Artificial Sequence
  Description of Artificial Sequence: Synthetic polynucleotide
gtcacagtttaaattatcaattgataccaaagtaacgttaagtttttgtagactacagcctagtctcgacattaccatttatatagtgttttgatcgatgaattacattaaataagatgtca

SEQ ID NO: 674 - DNA, 195 bp, Artificial Sequence
  Description of Artificial Sequence: Synthetic polynucleotide
cgcttgttatatatctggggctaacttaggaaattctatgatttattattatgaagcaaggaggaatatacttattataaatcgtgtgtgcttctacaaaaatcactgttaaagcataacgtttttgttgttacctaataacatgacctcaatctgaaaagcataacaaatttactgaaacttaactatgttcta

SEQ ID NO: 675 - DNA, 132 bp, Artificial Sequence
  Description of Artificial Sequence: Synthetic polynucleotide
ataaaacaactggtaaattttccttggactatctaagattttattgttctcttaaagcatcttgtcggaaatacaggtatacgtcttgaaaaactttatgtacagacaagtataatcgttacttaattagat

SEQ ID NO: 676 - DNA, 46 bp, Artificial Sequence
  Description of Artificial Sequence: Synthetic oligonucleotide
cagccctatgtattattatgactaaaagtctaaaatttgagtattt

SEQ ID NO: 677 - DNA, 187 bp, Artificial Sequence
  Description of Artificial Sequence: Synthetic polynucleotide
caaaattgattctgagtgaaagaaatataaaataataattggattacctttcatattttgcacgatattgtgaaacctgctcaaatctgcgtttttcatgaagatattataacagttatgattccatgcaattcgtgactctttaacacaatgagtgcggacaagcgtttatatcatattctattaa

SEQ ID NO: 678 - DNA, 154 bp, Artificial Sequence
  Description of Artificial Sequence: Synthetic polynucleotide
gtgcatcatgccatattattatgcgcaccttatgtctgtagtcattaaatatgttacaatgggaaactactactatatatgaagattgttatagaagactttctgcagattattaccacgaaaatagcatgttattaacatgaaattttatact

SEQ ID NO: 679 - DNA, 58 bp, Artificial Sequence
  Description of Artificial Sequence: Synthetic oligonucleotide
gagagcaatacaagaaagcgaaaatacacctttggtttttttcattttaaatcttttt

SEQ ID NO: 680 - DNA, 84 bp, Artificial Sequence
  Description of Artificial Sequence: Synthetic oligonucleotide
gtagctatttgtctttcgttggaataaacttttattaaccctaagatacacaatgtaaaataagaagacatttttgttcacagt

SEQ ID NO: 681 - DNA, 193 bp, Artificial Sequence
  Description of Artificial Sequence: Synthetic polynucleotide
attttgacattgcagtaagttttcttctttgttccagttgtgatgtaatctttagaatttataggggtattcatatccgtaataatcactgggcttattacgtaaaaattaggttaaatatctaagaacaactttaactacacctattcgacataaagattaccactaaagaaaaatcgtgtaaactattgat

SEQ ID NO: 682 - DNA, 163 bp, Artificial Sequence
  Description of Artificial Sequence: Synthetic polynucleotide
cgagttaattgagtacactagcatagttaggccaattgcttcagtacaaccattagataaagatgttagtatgaacaataaattctccttcgaacaatgtccgataattagctttttttaacaattatgagataatatactagcgttgactttttttatataa

SEQ ID NO: 683 - DNA, 47 bp, Artificial Sequence
  Description of Artificial Sequence: Synthetic oligonucleotide
ctattatcatatgctggtctagatctgaataagcatatagaaattct

SEQ ID NO: 684 - DNA, 73 bp, Artificial Sequence
  Description of Artificial Sequence: Synthetic oligonucleotide
atatcaaaaaaatcttgtcgacatctgaatgtcttgtacaagttaacgaattctctataaattattttgttgg

SEQ ID NO: 685 - DNA, 15 bp, Artificial Sequence
  Description of Artificial Sequence: Synthetic oligonucleotide
acgcttaatttatag

SEQ ID NO: 686 - DNA, 61 bp, Artificial Sequence
  Description of Artificial Sequence: Synthetic oligonucleotide
caatgacagagttcatgttttaatgtaagattgactttttaagctttcgccaaaatcaaat

SEQ ID NO: 687 - DNA, 164 bp, Artificial Sequence
  Description of Artificial Sequence: Synthetic polynucleotide
tgaaaacatgcttgtatcttatagattattcatctaaaacgatgggaacctttgataaggacaaataaataagatagattattagtttaatatctcgattcgttctaatacacataatttattgttcactacagtgtacggttatcgtaccattaaccttagtg

SEQ ID NO: 688 - DNA, 125 bp, Artificial Sequence
  Description of Artificial Sequence: Synthetic polynucleotide
aaacttggtattttaaattagttatatactggccatacagaacgttaaatgtaagaaatttatgacatgtgtcataatttttttagactacatcgcatatcgttagatacagcaatttatctccg

SEQ ID NO: 689 - DNA, 175 bp, Artificial Sequence
  Description of Artificial Sequence: Synthetic polynucleotide
ttggattaattatgtaggtatagaggatagtattttactaactaataggtataaaatgtcacttgaattcatatggtattccgtataaaactgacctaattcgtcacaataataggattctatagaacatattacctacaaactttccatgtggtaaacattaccgtttcgattc

SEQ ID NO: 690 - DNA, 17 bp, Artificial Sequence
  Description of Artificial Sequence: Synthetic oligonucleotide
tttaatagctttatcag

SEQ ID NO: 691 - DNA, 19 bp, Artificial Sequence
  Description of Artificial Sequence: Synthetic oligonucleotide
atctattgttataatgatc

SEQ ID NO: 692 - DNA, 35 bp, Artificial Sequence
  Description of Artificial Sequence: Synthetic oligonucleotide
agctattatcgtaatataacgaattcgttgaatct

SEQ ID NO: 693 - DNA, 146 bp, Artificial Sequence
  Description of Artificial Sequence: Synthetic polynucleotide
gctcacatataaagtatacaagtatataataaacttactgtgtttatagaatttactaaaagcatgttggtaaagattacaatgtcgtgtcaattcttctagattttaatgatactgctgtattcgtgatagcatataacaccctt

SEQ ID NO: 694 - DNA, 153 bp, Artificial Sequence
  Description of Artificial Sequence: Synthetic polynucleotide
gtcctaaggtgattcttaaacgttgtacatgatttaattattggggtatttagttatatcgtcgtaagtcgtaagattaaaggccttatcattaatcccaaaaaatttcaccaacataaaacaatctaattaggattcttacattaatagttt

SEQ ID NO: 695 - DNA, 13 bp, Artificial Sequence
  Description of Artificial Sequence: Synthetic oligonucleotide
actaatatttttg

SEQ ID NO: 696 - DNA, 92 bp, Artificial Sequence
  Description of Artificial Sequence: Synthetic oligonucleotide
ggattccttataaaactgttctatgatgaatcattcgttaaagatatgtaaatatttgactaaaaactactctattcgtcgtgtagttaaac

SEQ ID NO: 697 - DNA, 161 bp, Artificial Sequence
  Description of Artificial Sequence: Synthetic polynucleotide
aaataactatccattaatcccgaaatttaagaatataattgattatggttgcaatgattgtacttttattatgtatatgcgatgtgtatacatacactgagcgtactgtgaatacactttaacagacctaataaatgttctattgagcaagtgctacactt

SEQ ID NO: 698 - DNA, 83 bp, Artificial Sequence
  Description of Artificial Sequence: Synthetic oligonucleotide
cgaaattttaaaagtagctcattcgtcaatgtagtaacgtacaattaaagttatataaatactctaccttagctttaggtttg

SEQ ID NO: 699 - DNA, 111 bp, Artificial Sequence
  Description of Artificial Sequence: Synthetic polynucleotide
gtataagcagtcactttcttattttgatagtacaaagatctaattctctgaataaagtgatttgttaatctctaggacatgacacttgacaacatcataaattgtagattt

SEQ ID NO: 700 - DNA, 161 bp, Artificial Sequence
  Description of Artificial Sequence: Synthetic polynucleotide
taagatattttaattgcattacgtttaatctttatcagatagtatatctaataatcaaatatcaccgatctaagtaacgattcgttttcagatgaaccgttatgatcctaatagtaaaaccatgatatagccggattgaagtgacaagcttttactggtta

SEQ ID NO: 701 - DNA, 169 bp, Artificial Sequence
  Description of Artificial Sequence: Synthetic polynucleotide
aatattatttcaggcaaaaaggtttattaagtccggaaattattatcaatatactgacaattccgctagagttgaataagcccgttccggcttctgtgcttaataatataggccttattaaatatttcaattattttaaacataataattaaagacatggttgccgtat

SEQ ID NO: 702 - DNA, 18 bp, Artificial Sequence
  Description of Artificial Sequence: Synthetic oligonucleotide
tattgtattcataagcta

SEQ ID NO: 703 - DNA, 125 bp, Artificial Sequence
  Description of Artificial Sequence: Synthetic polynucleotide
ttggataatcaatttatgatttcttttgtgaacataaggatcgtataagctgcttataacaccgtataccgtaataatacgaaagcacataataaagatgaatttcttttttcgtcactattagt

SEQ ID NO: 704 - DNA, 10 bp, Artificial Sequence
  Description of Artificial Sequence: Synthetic oligonucleotide
atcgatttta

SEQ ID NO: 705 - DNA, 137 bp, Artificial Sequence
  Description of Artificial Sequence: Synthetic polynucleotide
tttatcaaaaaggttagtgtttacatacaatgcgcgtcacattacgaagtagtatgtcgctatagctaaacttaatacgagattattttgtttaagaacttcactcatgcgttattattaaaataaagatcattctt

SEQ ID NO: 706 - DNA, 36 bp, Artificial Sequence
  Description of Artificial Sequence: Synthetic oligonucleotide
tagtttgtatctttaaccatcgttagaacatagaat

SEQ ID NO: 707 - DNA, 182 bp, Artificial Sequence
  Description of Artificial Sequence: Synthetic polynucleotide
tatcggacctttaataagagcgtagtaaatattaaatgccgactggagtgtacaccaacatatgtacaatacatgaatatcttctctgaaaaattttacaaattaactaacgtctctacatttgagtttctatagttattgactattattttagagaaggtgatcatggttttaatatccta

SEQ ID NO: 708 - DNA, 89 bp, Artificial Sequence
  Description of Artificial Sequence: Synthetic oligonucleotide
ataattgatcttatgcaatttatgacgaaaacttttaagtagctctgcattagttgttagcgcaaacagttataatatcacatactgat

SEQ ID NO: 709 - DNA, 140 bp, Artificial Sequence
  Description of Artificial Sequence: Synthetic polynucleotide
ttgtcacagtcgcgactatataaaattgacattttcgattggtaacaattttaccccctattttataaagctatgattgttttctctcaatataacggttgaaaacttagaaaatgaatataaggaagaattaggactct

SEQ ID NO: 710 - DNA, 76 bp, Artificial Sequence
  Description of Artificial Sequence: Synthetic oligonucleotide
atgggctatctccgtgtattataaatcaatgattcataaggtactcacaactacggtccctgtatgatgtaaggct

SEQ ID NO: 711 - DNA, 148 bp, Artificial Sequence
  Description of Artificial Sequence: Synthetic polynucleotide
gcgtataaaaatcgtggtccataacttaggttcggtatctttcttctacctaactggagaacaaataatagggcatgacacccgtgtgttaaactcattcaatcctaatgttctctaaaaatagatttgcgtgtgcgagtattgccga

SEQ ID NO: 712 - DNA, 141 bp, Artificial Sequence
  Description of Artificial Sequence: Synthetic polynucleotide
ggcaacggtttctccgttttatcggcatgtgctatgaaatattagtattactaatgttgctagtcctttgaatagaagcacgtctagatggtaagactatcacgcacaaagataagcgcactgtacatatagtccctacat

SEQ ID NO: 713 - DNA, 181 bp, Artificial Sequence
  Description of Artificial Sequence: Synthetic polynucleotide
caacattcatgtcttagtgaagggtacactaccctagctcctctgttgtctggttaaagttatattgcttcgattacaaggaaatttcgccgttacgaagtgcggaggtagtggacgatatggtcttaagaaccgacgttaagcaaacaacacttaaaatctccatatcttttgactaaat

SEQ ID NO: 714 - DNA, 75 bp, Artificial Sequence
  Description of Artificial Sequence: Synthetic oligonucleotide
atggttgacattctgaattccaaaaactgctcatgcgccgtttacacatacatggatattgaacgatgacttggt

SEQ ID NO: 715 - DNA, 98 bp, Artificial Sequence
  Description of Artificial Sequence: Synthetic oligonucleotide
ggtctaaactcagtgtgctgtcatttaaatcactataattgtagaaacaaacccgcctcataagattagtcgcttatgcgctgaactggggatttatt

SEQ ID NO: 716 - DNA, 157 bp, Artificial Sequence
  Description of Artificial Sequence: Synthetic polynucleotide
attaagtaatgcgatctattttgcaggactaaatgagatgcagcgaacacctgataaatctgtttctattcatgcgcgttgcgagtcttattctcgacaaatatgattatatctcagccgccacgtaatagcaaaatggcaaggctgtatgttactc

SEQ ID NO: 717 - DNA, 193 bp, Artificial Sequence
  Description of Artificial Sequence: Synthetic polynucleotide
cttactgtctatcataacaagaaatcgggaatgattgtgcggcaactagtccctcgaattaaactattgacattggcttactatgattgaaattcaaattgctcgagatagtaaattctggcttgcacgtcgacgtacagatgtacagcgtattgatctggtataattcatagattaccctgccaccaggttt

SEQ ID NO: 718 - DNA, 32 bp, Artificial Sequence
  Description of Artificial Sequence: Synthetic oligonucleotide
gaacgctgcaccgttatatgttaatgaatttc

SEQ ID NO: 719 - DNA, 189 bp, Artificial Sequence
  Description of Artificial Sequence: Synthetic polynucleotide
tgattatgcttttcatgtgtgaagatacgaacagctccattcatcccccaatctgtgggtcgatactttctgcgtaagaaactaaaccatagtattccccagtgcgtatcgcattttgaaaataagcgagtaaattagtataattgcacaatgttaggcttgggtgaagattgctaactcgcacaattt

SEQ ID NO: 720 - DNA, 56 bp, Artificial Sequence
  Description of Artificial Sequence: Synthetic oligonucleotide
atcctaagaagataagacccacgtgttagctcactagttctgttttgatgaatgct

SEQ ID NO: 721 - DNA, 13 bp, Artificial Sequence
  Description of Artificial Sequence: Synthetic oligonucleotide
atcgtgtttcata

SEQ ID NO: 722 - DNA, 116 bp, Artificial Sequence
  Description of Artificial Sequence: Synthetic polynucleotide
ttacccgttacaccggagtcatatgatctaccgagatagtaaatgagatgttcatttcgtgaacgtgccctttactaagcctcttaaataaatggggcgttgtcacagtttaaaat

SEQ ID NO: 723 - DNA, 107 bp, Artificial Sequence
  Description of Artificial Sequence: Synthetic polynucleotide
gaggtcaattgcttctctttctggtaacctctataattatctttaaaggcgtacaagggagaccctcattcatgtagctaaaaagagtacctctgacagattggtaa

SEQ ID NO: 724 - DNA, 111 bp, Artificial Sequence
  Description of Artificial Sequence: Synthetic polynucleotide
gcctgagtgatacttcagctagattatcacgcgcgccgttaaagacttaacatatacaattgagctaatagtcccaattttgaactatgtgggtccatttggacatgaatt

SEQ ID NO: 725 - DNA, 88 bp, Artificial Sequence
  Description of Artificial Sequence: Synthetic oligonucleotide
cagggcgagtgttaattcaatagttaaataaactaaacgtgctcgacttacagatcatttattttaccgttcctgtggcgacgcatta

SEQ ID NO: 726 - DNA, 162 bp, Artificial Sequence
  Description of Artificial Sequence: Synthetic polynucleotide
tcgattcatcttaacgcgtacgatttaaaatgtggtatccgcggattgataacatttcgaaaaaatcgctggaaatcactcatgctgcaccaatcatgtaggccaattataccatgtggtcagttgttaagatacttctggattctttagtgcaaatgagcc

SEQ ID NO: 727 - DNA, 57 bp, Artificial Sequence
  Description of Artificial Sequence: Synthetic oligonucleotide
cttctttagggttgagatctataacgtgcaatatttaacaggagtcgtaacctacac

SEQ ID NO: 728 - DNA, 169 bp, Artificial Sequence
  Description of Artificial Sequence: Synthetic polynucleotide
ttatttgctaggtattttttgacagttcaagatagccctcgggcccagaattatgccgtccaggaaattcagttaaaattagttatcagagaatccttcgaggtgatcacatcaacaagcatgggatcggagtaacatataatattgtattaattaccctgtgcttccc

SEQ ID NO: 729 - DNA, 170 bp, Artificial Sequence
  Description of Artificial Sequence: Synthetic polynucleotide
tccatattagaatattccgttgccagttaactaaataccagctgatgcctttataaaatctgcagttaggtaagaatacggtggtagggaaagccatccgattttttgttaccagtaaagcaatctccctacccgcgagaataagaacttcttattggcacgtattggtg

SEQ ID NO: 730 - DNA, 51 bp, Artificial Sequence
  Description of Artificial Sequence: Synthetic oligonucleotide
cacttggatagtgagaatttatttgagtcggtatatgacttaaccccaacc

SEQ ID NO: 731 - DNA, 93 bp, Artificial Sequence
  Description of Artificial Sequence: Synthetic oligonucleotide
gacctgctatataagcaaattcgtatgatgaacgtttctaaagtatagcagtctttatgctatccatgttgttaagcacgcgcatccggtaat

SEQ ID NO: 732 - DNA, 116 bp, Artificial Sequence
  Description of Artificial Sequence: Synthetic polynucleotide
atcaccgtgaacaagggatcaatagtatgcacactacagttttcattatcttttcctcattcaattattttttctggcggatcccgaaaggaagagtgatgtgaggtacacgatca

SEQ ID NO: 733 - DNA, 177 bp, Artificial Sequence
  Description of Artificial Sequence: Synthetic polynucleotide
gtttaatccccataccagttttgactccaactaacgatcaggccgattgtgccgtggttcagggtttactctgtattcgctttagtctattattaagttggcactagaagcggatcatcggctgagtcaccataccatataaaaaataaatttagggcaagagcagaatattaaatt

SEQ ID NO: 734 - DNA, 71 bp, Artificial Sequence
  Description of Artificial Sequence: Synthetic oligonucleotide
gtgaggttcaacggggaccatcacatatcgttatcgagcagtatttattttaccatatgatatcataagcc

SEQ ID NO: 735 - DNA, 40 bp, Artificial Sequence
  Description of Artificial Sequence: Synthetic oligonucleotide
atcaggtcatataaggttccgaactgttaaactctctagg

SEQ ID NO: 736 - DNA, 73 bp, Artificial Sequence
  Description of Artificial Sequence: Synthetic oligonucleotide
caatcaagtacgatacattctttcactattagtgatgcaatactaattttagacttgtgtacgggcccgtgga

SEQ ID NO: 737 - DNA, 39 bp, Artificial Sequence
  Description of Artificial Sequence: Synthetic oligonucleotide
cgggccaggttatatccatatagccttattattaattag

SEQ ID NO: 738 - DNA, 102 bp, Artificial Sequence
  Description of Artificial Sequence: Synthetic polynucleotide
tctcgatacttgctatgaggaccattattaatccaaagaatgtagctaatagtattgaaatgcccaagttaattgttcgctaatgaccgggttactgtccgc

SEQ ID NO: 739 - DNA, 128 bp, Artificial Sequence
  Description of Artificial Sequence: Synthetic polynucleotide
gtcgcattacaccatagaccggataatatgggttcaacgcattagagttattttacacatctgtttgactattatcttaggtgcaagcgtcttggttgtaaaagaaatacctcgttccagtgacaaac

SEQ ID NO: 740 - DNA, 63 bp, Artificial Sequence
  Description of Artificial Sequence: Synthetic oligonucleotide
ttcaagctgtgtcattttgacctgcttaacacaaatcttaggttagagaaacttgatacggtc

SEQ ID NO: 741 - DNA, 137 bp, Artificial Sequence
  Description of Artificial Sequence: Synthetic polynucleotide
atccttcaaccttgagtaaagttaaacgagggtcacttcggagtctagtactagaagaataaatttccctcacgactacaaagggcgggaatgtactttgtttacgattattcatttggtcctcttaagatcgaact

SEQ ID NO: 742 - DNA, 84 bp, Artificial Sequence
  Description of Artificial Sequence: Synthetic oligonucleotide
acattcgttgctcatgcagggaatgaacgaaagccctatcggttattggtataccttaataaatcttgctaatatgcctgatta

SEQ ID NO: 743 - DNA, 70 bp, Artificial Sequence
  Description of Artificial Sequence: Synthetic oligonucleotide
tacgttggtcttaattacattaccccgaaaatcggtagaatttagtggtctgaatgcaactctgaagacc

SEQ ID NO: 744 - DNA, 76 bp, Artificial Sequence
  Description of Artificial Sequence: Synthetic oligonucleotide
gtctaccttgatgacagatctgcgtctaattcaaatactctcgccaatgttcagataggattaattcggagaatgt

SEQ ID NO: 745 - DNA, 130 bp, Artificial Sequence
  Description of Artificial Sequence: Synthetic polynucleotide
tctgaaataatatactaaccgcggcttacggccattggacacgtggatgaacccttagatactatacgttgtcaaaagatatttcctggttgtaaggcccgagcagtgatattctcgttatataatacta

SEQ ID NO: 746 - DNA, 164 bp, Artificial Sequence
  Description of Artificial Sequence: Synthetic polynucleotide
acagcaaagttagctggtgacataatggtacgcaatagcctgactactcctttcgataatacttgagatccagaacggctatcctcagtgcctgaaatttagttttttctaacgaatagggactgtaataatcgtgttctaattgaagagctcctgttaatcat

SEQ ID NO: 747 - DNA, 56 bp, Artificial Sequence
  Description of Artificial Sequence: Synthetic oligonucleotide
gttatattttaaccagaacttcatcaggaagcgctcggaggactatactcgtttta

SEQ ID NO: 748 - DNA, 111 bp, Artificial Sequence
  Description of Artificial Sequence: Synthetic polynucleotide
acacgctataaaaactacgaggaatatttgttccgacgtgagactttaggacctcatacgagccagcatctaaatttgattaacgtcaagtcgttaattgggtgtcctttt

SEQ ID NO: 749 - DNA, 33 bp, Artificial Sequence
  Description of Artificial Sequence: Synthetic oligonucleotide
ttatatccacccgggttaatagctgtagtatta

SEQ ID NO: 750 - DNA, 50 bp, Artificial Sequence
  Description of Artificial Sequence: Synthetic oligonucleotide
tccttagtacacttgcgggattataattactagagtcggaccagtataac

SEQ ID NO: 751 - DNA, 91 bp, Artificial Sequence
  Description of Artificial Sequence: Synthetic oligonucleotide
tgctgaaggtaaacaggaacacttcctccaactgaacttaaagattaagcttgtttgattatggaaggcctctctttattttagcgcagac

SEQ ID NO: 752 - DNA, 113 bp, Artificial Sequence
  Description of Artificial Sequence: Synthetic polynucleotide
actcgattggagtatgcttctaacatcctacctgttggcgtattggacaaacagtttctagttcaaattaatctcttaagtcaatgtaattgagcacaagtggcccaaagttg

SEQ ID NO: 753 - DNA, 167 bp, Artificial Sequence
  Description of Artificial Sequence: Synthetic polynucleotide
aaccaataccattgaaggtggaccgtcatttcgcttttggattatgcgacttggaaaacattagtcactaatctgatagtatcaacgatgtttgcacactccggctagtcggaacaagtttgtaatgatgtcagagactactatagttcacccactattatgaagtt

SEQ ID NO: 754 - DNA, 76 bp, Artificial Sequence
  Description of Artificial Sequence: Synthetic oligonucleotide
tcctaaagaatagatgctgagagttatccactttttcggggtaccatttatcaggagtattaattaaccggcccat

SEQ ID NO: 755 - DNA, 200 bp, Artificial Sequence
  Description of Artificial Sequence: Synthetic polynucleotide
tgcgatatctagttctttttaataggatatcgaacgaaagtttcccttagtcacatcgcaaaaacgcatctgtatatgagtttcaacagaatgacaaccactaagcggtagcttaaatagtttcgataatgcttatcaaacagcaaattcggggactcttaactgtgcttcgtgtgggagctgctgtgactgccacttaa

SEQ ID NO: 756 - DNA, 34 bp, Artificial Sequence
  Description of Artificial Sequence: Synthetic oligonucleotide
gttctgatgagataattctcagaatctttgcaac

SEQ ID NO: 757 - DNA, 8 bp, Artificial Sequence
  Description of Artificial Sequence: Synthetic oligonucleotide
ttttgcaa

SEQ ID NO: 758 - DNA, 20 bp, Artificial Sequence
  Description of Artificial Sequence: Synthetic oligonucleotide
cgtatggatcaagtaacctt

SEQ ID NO: 759 - DNA, 12 bp, Artificial Sequence
  Description of Artificial Sequence: Synthetic oligonucleotide
tgctttaactag

SEQ ID NO: 760 - DNA, 15 bp, Artificial Sequence
  Description of Artificial Sequence: Synthetic oligonucleotide
acggtctatatcgta

SEQ ID NO: 761 - DNA, 37 bp, Artificial Sequence
  Description of Artificial Sequence: Synthetic oligonucleotide
gggtggtaaatacttatcctcaccaactaattgttag

SEQ ID NO: 762 - DNA, 17 bp, Artificial Sequence
  Description of Artificial Sequence: Synthetic oligonucleotide
ttgactgagcaattact

SEQ ID NO: 763 - DNA, 34 bp, Artificial Sequence
  Description of Artificial Sequence: Synthetic oligonucleotide
tctgtcataccatttcgttagtagaatgaacatg

SEQ ID NO: 764 - DNA, 157 bp, Artificial Sequence
  Description of Artificial Sequence: Synthetic polynucleotide
atactttcccatgccgaattacatatttcgttttcaaagcataattttccggacaagcggccgtgtaattttaagtttatcatggattagatcggtggtcaagggtgggaaactgctcattagataataatccaatggccctcaacaccataagagt

SEQ ID NO: 765 - DNA, 110 bp, Artificial Sequence
  Description of Artificial Sequence: Synthetic polynucleotide
taagcgtaatataccaaggatagttccttaggcatatctatccgacaaacttgaatgtaaactttgactttacacgtcaatcgtttgggcaacttcagtagcgtcagggt

SEQ ID NO: 766 - DNA, 7 bp, Artificial Sequence
  Description of Artificial Sequence: Synthetic oligonucleotide
gtatcat

SEQ ID NO: 767 - DNA, 114 bp, Artificial Sequence
  Description of Artificial Sequence: Synthetic polynucleotide
acgacgaatcacaaactggttttcgcgtcttaaaaaagtcggggttaatactgtaagatcctgtgtcatagctcatgtaatgaattgccatcctgctatttattgtcgtaacaa

SEQ ID NO: 768 - DNA, 151 bp, Artificial Sequence
  Description of Artificial Sequence: Synthetic polynucleotide
caatccaggctcactctcatacctaagatatgacggttggcaacactggcaagtgaccaaagatccattgggcgactagatcaatgcatttgtgtgcatttgattacttcatgactactttaggttctagtttacatagagtgtattaaaa

SEQ ID NO: 769 - DNA, 71 bp, Artificial Sequence
  Description of Artificial Sequence: Synthetic oligonucleotide
tttacaagatgaataactactaacgtctatgaagtctgggacatcctatcgacgtagcagtattctttgcg

SEQ ID NO: 770 - DNA, 138 bp, Artificial Sequence
  Description of Artificial Sequence: Synthetic polynucleotide
attcatttttgcgtattcttagttacctattcctaaagtaggagtacatctgtataggacttgccactgggtaagcaacgtaaaaattttcagggaaggctaacttaagtgcgcaaacctgttgcaattgactacacc

SEQ ID NO: 771 - DNA, 6 bp, Artificial Sequence
  Description of Artificial Sequence: Synthetic oligonucleotide
ttcgta

SEQ ID NO: 772 - DNA, 32 bp, Artificial Sequence
  Description of Artificial Sequence: Synthetic oligonucleotide
aatttaggtatctaccctaatcggggcttata

SEQ ID NO: 773 - DNA, 61 bp, Artificial Sequence
  Description of Artificial Sequence: Synthetic oligonucleotide
agaaccaccctatgactgactctggcgtacagagcagatttatatgtcttatttatagatg

SEQ ID NO: 774 - DNA, 7 bp, Artificial Sequence
  Description of Artificial Sequence: Synthetic oligonucleotide
acttatg

SEQ ID NO: 775 - DNA, 143 bp, Artificial Sequence
  Description of Artificial Sequence: Synthetic polynucleotide
aacggctttatccgtacaatgccctgattaataaaattagatgaaggagtatcaatgcattagcgcagtgcatttcaatcgtatgggacgattgcgtttcccccagtaagacgctaagttacttactagcttatttcaatttg

SEQ ID NO: 776 - DNA, 82 bp, Artificial Sequence
  Description of Artificial Sequence: Synthetic oligonucleotide
ttccaccttcgatgacacccaggttagtattacgttgcggttagcacaaggatttaaaattctgaatagttgaatatgcact

SEQ ID NO: 777 - DNA, 158 bp, Artificial Sequence
  Description of Artificial Sequence: Synthetic polynucleotide
aatgatgcaccacgcgagaattgcattatcgcgcgactctagtttgtttggtgctcaatgaaaaaaacggagatccatctgatatggactgataaaagtttatcgcttatgtcctatcatggtctgataattctcaactgaacatgattcaagtctct

SEQ ID NO: 778 - DNA, 44 bp, Artificial Sequence
  Description of Artificial Sequence: Synthetic oligonucleotide
tgcgaaggcaagactattacatcaactcggcgtttttatattta

SEQ ID NO: 779 - DNA, 63 bp, Artificial Sequence
  Description of Artificial Sequence: Synthetic oligonucleotide
ctttgttcaacatctcgacgctaatatgacatattatactagctagatgacggcttgttgaga

SEQ ID NO: 780 - DNA, 161 bp, Artificial Sequence
  Description of Artificial Sequence: Synthetic polynucleotide
actttattgaagtgggtcggtcggccaaagataatgtttttgctctaaccctacacacccaactactcgagtttacactaatggtataaaacaagatttctcttactttgcttcaattgggaatacgacattcagaaaccgtaggtgactgttgtaagagg

SEQ ID NO: 781 - DNA, 11 bp, Artificial Sequence
  Description of Artificial Sequence: Synthetic oligonucleotide
ttgtactaagc

SEQ ID NO: 782 - DNA, 77 bp, Artificial Sequence
  Description of Artificial Sequence: Synthetic oligonucleotide
aggtcttattcttaactgtgccaagcacgggtcacttaacgaaaatatgaattatgttacgacgcctctggataatt

SEQ ID NO: 783 - DNA, 172 bp, Artificial Sequence
  Description of Artificial Sequence: Synthetic polynucleotide
ttaaacctttaagtttaaatgccttgtagtgcgacgtccccgggtattctttacctcatatcgtaatttgatgggctatagattcccgtctatagctacgcaagacaatctaatttctagtaaccgagcattagaagcggaaaacaattttggactatctaggaagataggc

SEQ ID NO: 784 - DNA, 127 bp, Artificial Sequence
  Description of Artificial Sequence: Synthetic polynucleotide
ctatttcggatataccctctcggctagagggtcctttacgggaaagatcagcgatgtctaactagacaaagtttttatttcgccttgaaactacctgtaacgtaattacgctaataaggaatgttaa

SEQ ID NO: 785 - DNA, 92 bp, Artificial Sequence
  Description of Artificial Sequence: Synthetic oligonucleotide
ctgcgctgtaatatatatcgagactcattctttcggtaactttacaggtgaaaccgttaatccgaatgggcacattaagttgtactcaagta

SEQ ID NO: 786 - DNA, 161 bp, Artificial Sequence
  Description of Artificial Sequence: Synthetic polynucleotide
gattaaatttataagctccaccaacatgcggtaaaaaactatcgtaaacgatgcttgggtccgcttctagttgaccatctctggtgtactgattgattaggaattggccctcaataagtcacaaatttagaggattatgtcttttatgcgcaccacgatga

SEQ ID NO: 787 - DNA, 86 bp, Artificial Sequence
  Description of Artificial Sequence: Synthetic oligonucleotide
cattgtttactgatcacctaacgtactagtctctaatgaagtaaaccacgactgattaggtattgggcttcaagtgttcgaagcat

SEQ ID NO: 788 - DNA, 195 bp, Artificial Sequence
  Description of Artificial Sequence: Synthetic polynucleotide
atagcgagttgaattaacatattacgttgaatggcggcccgaacaaacttagtatcacgcttgtaaacacctgttacgggattctaggcccaatatcctacggacgtgtcttataataaaacgttaaaattccgtcaaacctcgattgtttacattagtgagaaggctgatgtgtctcgtagttattcgactact

SEQ ID NO: 789 - DNA, 18 bp, Artificial Sequence
  Description of Artificial Sequence: Synthetic oligonucleotide
atcagcgagttcaatttt

SEQ ID NO: 790 - DNA, 133 bp, Artificial Sequence
  Description of Artificial Sequence: Synthetic polynucleotide
gcgtggtcagaaattgtcgaatgctagtataagtatcttgcttctcgatcatctattatttcaatattgacctagacgatacctcaggaaagtcatggaaggtcataatcatactgatgatggttcctaccac

SEQ ID NO: 791 - DNA, 79 bp, Artificial Sequence
  Description of Artificial Sequence: Synthetic oligonucleotide
agaatggcattactcgtttgcatagtctagctaactagtaactcgccattgtaggaaataagattttacgactctgttc

SEQ ID NO: 792 - DNA, 20 bp, Artificial Sequence
  Description of Artificial Sequence: Synthetic oligonucleotide
agattaatgatgacttcccg

SEQ ID NO: 793 - DNA, 35 bp, Artificial Sequence
  Description of Artificial Sequence: Synthetic oligonucleotide
catcgtaaacgattactcactttggtagtcgagta

SEQ ID NO: 794 - DNA, 116 bp, Artificial Sequence
  Description of Artificial Sequence: Synthetic polynucleotide
gtttcagttcggtatcagtatacaattacgttaaatagattgtaatcagacatttccaatttcttctactgctggggacacagacacgttcaaatggaaactgcatctgacgggct

SEQ ID NO: 795 - DNA, 27 bp, Artificial Sequence
  Description of Artificial Sequence: Synthetic oligonucleotide
ctggatctatctaatgaagagcacttt

SEQ ID NO: 796 - DNA, 156 bp, Artificial Sequence
  Description of Artificial Sequence: Synthetic polynucleotide
taagaggttggaatgtagtatactacataatccaagaccggatcattctttaatgccttatactcaagagggctagatatgctttgaccccttagagcgtgtcgcacatgccatccatgtagtaacttgaatagctggttctagcttaaattcata

SEQ ID NO: 797 - DNA, 186 bp, Artificial Sequence
  Description of Artificial Sequence: Synthetic polynucleotide
cgacgagataaccattagatgggtcttaatgaatattaagcagcctctcgccacatagggatagcacttggttagagacatttagtcccgtcatagtacgactggtctgagtagcttctaaatataaagatgacttactaagttaatcgagttttactaatgcactttcattcactcctgcgagtt

SEQ ID NO: 798 - DNA, 127 bp, Artificial Sequence
  Description of Artificial Sequence: Synthetic polynucleotide
aataataagttcactttcgtccaaatattagagaatcatactcgggaatgaggctcccttactcggcctattgttactaaccgattaactatgggtaaactgttaatcggctgtatcaatacggggt

SEQ ID NO: 799 - DNA, 40 bp, Artificial Sequence
  Description of Artificial Sequence: Synthetic oligonucleotide
gatggagacgatgttatctctctaaccaatagctctgtaa

SEQ ID NO: 800 - DNA, 128 bp, Artificial Sequence
  Description of Artificial Sequence: Synthetic polynucleotide
acaataccctgtcaaagattaggtaaaataggcactgtgttattggtctagtaacaaacgaaccgcattctggaagcggtacttccatggttaaattctcgttgacatcctttaactattgagcttgt

SEQ ID NO: 801 - DNA, 54 bp, Artificial Sequence
  Description of Artificial Sequence: Synthetic oligonucleotide
gagtaatgtggacctggtttcattgctaaattaaagttcatcaccttactcaag

SEQ ID NO: 802 - DNA, 107 bp, Artificial Sequence
  Description of Artificial Sequence: Synthetic polynucleotide
ttatacttgcgctccatccacatttttcgggctcttctgttctgggacttgaaataatattcaagaaaacatattaatcgtgtgaaaagaaaggagcgtcactagcg

SEQ ID NO: 803 - DNA, 158 bp, Artificial Sequence
  Description of Artificial Sequence: Synthetic polynucleotide
tgtagaagtgttccagatattccattaaaaacctaaaattctaactcaccatatgcctatcactactacggcctacgttatttgtgctatatgcgtttgggtcaggttttaagtggagccgttggccaccagatagtaagataaattgatcaagcgat

SEQ ID NO: 804 - DNA, 199 bp, Artificial Sequence
  Description of Artificial Sequence: Synthetic polynucleotide
aaatttcgaccatgcagttagagtagctcggctcgtagtagttcttaataatgacggtatggattgcctgtttctcatatagttaactaaatttcaaaatctgcccaaccgagttgaaaattcgcttgataaagttatttcgcatacagtccgtataggatagtctataagaccgaccgcccttgataaccttagggta

SEQ ID NO: 805 - DNA, 16 bp, Artificial Sequence
  Description of Artificial Sequence: Synthetic oligonucleotide
tctctagttaagcagt

SEQ ID NO: 806 - DNA, 25 bp, Artificial Sequence
  Description of Artificial Sequence: Synthetic oligonucleotide
tcacagtacgtgtgttaacacgtta

SEQ ID NO: 807 - DNA, 35 bp, Artificial Sequence
  Description of Artificial Sequence: Synthetic oligonucleotide
atatacggctatgatctcatcggtgtacgatcata

SEQ ID NO: 808 - DNA, 13 bp, Artificial Sequence
  Description of Artificial Sequence: Synthetic oligonucleotide
tgttctcaagtta

SEQ ID NO: 809 - DNA, 174 bp, Artificial Sequence
  Description of Artificial Sequence: Synthetic polynucleotide
aaacgtaaagctcatattactaacaaaatttagtcacttactaatctttcccgaactgaacactttacacggctgtacgtgtaaacatgatgaagcgcaggttatcccgtatataaatgtcgcgtgatgtagcacgtccttggtaaatattgcttgtggtatcgatctgtatgg

SEQ ID NO: 810 - DNA, 140 bp, Artificial Sequence
  Description of Artificial Sequence: Synthetic polynucleotide
gattagagtagggagaatggtgtccttattcctagtctgcacaacttataaaataaccgagggtttaagaactatttcgtgccgatgccctaatgcagatgatcatgtgtatctcctcaatactaacgaataacttcgtc

SEQ ID NO: 811 - DNA, 169 bp, Artificial Sequence
  Description of Artificial Sequence: Synthetic polynucleotide
ttatgacactacattcatcactaggtcgtgacgactatctttgttatcgaatatccgttagcgagtcctataaacctctatgaatttgtgccatcggaatatagcgtaggtcaaaggcgaatatgcgatatgtttgtttccaatatagggtaagatccaaaacgcttca

SEQ ID NO: 812 - DNA, 29 bp, Artificial Sequence
  Description of Artificial Sequence: Synthetic oligonucleotide
aatgatgtttgtactaagtcatccagtct

SEQ ID NO: 813 - DNA, 144 bp, Artificial Sequence
  Description of Artificial Sequence: Synthetic polynucleotide
cgatacatgctgatacgaggggtaaagtacaatttcgaatagcaaacaccgaatatgggcctaaatctattctgtatctcttcatggatgtttgtaggattatttacagatgggtcagcattctactatacctttccgtaccaa

SEQ ID NO: 814 - DNA, 98 bp, Artificial Sequence
  Description of Artificial Sequence: Synthetic oligonucleotide
gtttacagcaaagccaaatcacttttgcgtaattcatgattgttacgagctccaaggttatagactttacctaaaggatatcattgtgaccgtggcta

SEQ ID NO: 815 - DNA, 15 bp, Artificial Sequence
  Description of Artificial Sequence: Synthetic oligonucleotide
agtgacagtatctct

SEQ ID NO: 816 - DNA, 184 bp, Artificial Sequence
  Description of Artificial Sequence: Synthetic polynucleotide
tttgaaaaccaacgacattcgacattcccgtgtggcaagtagtgacaatctcaatttcgttgataggctgtgaatagagtgatctttttaagttaccttcggtaatctatttcaaccgattatgcgttatacaagtagagatatgcaaaataccaggagttggctacgaagacctcctcttcat

SEQ ID NO: 817 - DNA, 61 bp, Artificial Sequence
  Description of Artificial Sequence: Synthetic oligonucleotide
attaagatgttacaaaattgagccgtctgtccaagggtagttcatcccagtgtcaacttat

SEQ ID NO: 818 - DNA, 77 bp, Artificial Sequence
  Description of Artificial Sequence: Synthetic oligonucleotide
tcagggtctcgaccttttgaactaaaaatacgttgatatcaaaggtcataaggcatcacaatggtgtatccttgctt

SEQ ID NO: 819 - DNA, 58 bp, Artificial Sequence
  Description of Artificial Sequence: Synthetic oligonucleotide
ttattgaagtcggcactatacgactgcgcaactaggttgtatttttacaatgaatacc

SEQ ID NO: 820 - DNA, 135 bp, Artificial Sequence
  Description of Artificial Sequence: Synthetic polynucleotide
aagcaccaatacatctgaaaacgaactattgaacgtggtaattgggtagtgtcacacttaaccgacctatatgttcttggaggatattcgtgtgaccactttgactttagtattaacaggcttacttaagctcgc

SEQ ID NO: 821 - DNA, 124 bp, Artificial Sequence
  Description of Artificial Sequence: Synthetic polynucleotide
cactgcactcggatagaccattttatgtttgctagcatccttactgattgttaatcaagtgttatagcagaaagatagtaatattcgtaactcgcaaaaattgggtgacgaggctccctattca

SEQ ID NO: 822 - DNA, 68 bp, Artificial Sequence
  Description of Artificial Sequence: Synthetic oligonucleotide
aactttcttaagaatgccgcatgaaaatctcagacgatcgaatgtaggtatcttttcattgtgctcag

SEQ ID NO: 823 - DNA, 111 bp, Artificial Sequence
  Description of Artificial Sequence: Synthetic polynucleotide
acccggaccaaagttttctttataagcgagttcccttatgtttactcaagctacgacaagataaaattttgaggtgagagttggtgaatgagaaatctccttctgacccat

SEQ ID NO: 824 - DNA, 102 bp, Artificial Sequence
  Description of Artificial Sequence: Synthetic polynucleotide
ggcggatgtcagtgtttttcacaaatcgagaatggactgcaattagaaatctacagttacgtattctacatagatctccccaggatatatgttctcatacgt

SEQ ID NO: 825 - DNA, 101 bp, Artificial Sequence
  Description of Artificial Sequence: Synthetic polynucleotide
tcagttatgactcgaaatttaacgttttctctaagtgacagatcagattgcagaacgactctctgcgaaatgctttggcaactcctttgaaagactgatag

SEQ ID NO: 826 - DNA, 21 bp, Artificial Sequence
  Description of Artificial Sequence: Synthetic oligonucleotide
tacgcagtttatgactatgca

SEQ ID NO: 827 - DNA, 102 bp, Artificial Sequence
  Description of Artificial Sequence: Synthetic polynucleotide
ggcttagaacgtatttataaatcgctatggctgaagtaaatactttagaccgcgatgccgcttcatttttctcaaagttagtcaacattctatgaggcaagc

SEQ ID NO: 828 - DNA, 145 bp, Artificial Sequence
  Description of Artificial Sequence: Synthetic polynucleotide
agccttgcgttaaaatatttaaacactatttgaacatatacatagaaatggccgctgacttttcctggagcagtggcagtaaggaacgtatcgtggtctgcttatcataccaacattcattagagctgtgtaaactcctgctatg

SEQ ID NO: 829 - DNA, 166 bp, Artificial Sequence
  Description of Artificial Sequence: Synthetic polynucleotide
agtttatggagcaggaagatggtgtatggaagggggtttaaatagcctcctataattttgtttaaacttctacgtcaattcaattggaccttcacaaataaccgtttccgaactattcgaatgtcacccaatgcaaggcccctattgtccatgctataaactagtg

SEQ ID NO: 830 - DNA, 81 bp, Artificial Sequence
  Description of Artificial Sequence: Synthetic oligonucleotide
gtagactagcataatcgaatcgattccgattaataggaaaatccatgcttgtgctcgttttctctatgtcccaggagataa

SEQ ID NO: 831 - DNA, 17 bp, Artificial Sequence
  Description of Artificial Sequence: Synthetic oligonucleotide
gatgttcaaactagctt

SEQ ID NO: 832 - DNA, 167 bp, Artificial Sequence
  Description of Artificial Sequence: Synthetic polynucleotide
ccttagcgaaaatcgataaaagagtcaatgcctagatgcgttaccaattatttatggcctgtaagtataccgtagcttgtagcaaagccgagaagttcatcttttaacttaacccattgggggtgtgataaacgtaataattccttcgatttactcttaggcccgat

SEQ ID NO: 833 - DNA, 139 bp, Artificial Sequence
  Description of Artificial Sequence: Synthetic polynucleotide
tatatgtcatatcgaaaggctggggcatatatgtgctgaattccatttacaagcggactgcaagagctataagacgatcatatccctgcaagatactagttaaatcatattctcgatctgagtcttgcagttctttcat

SEQ ID NO: 834 - DNA, 141 bp, Artificial Sequence
  Description of Artificial Sequence: Synthetic polynucleotide
ataaacacgatcccgacgattatgctttctcacattggttatgttctattattaaatagttgctgtaaatacgagtcaccttgactataagagaggaatcttggttatcagggatacacacgcgattgcctaacggatcgc

SEQ ID NO: 835 - DNA, 106 bp, Artificial Sequence
  Description of Artificial Sequence: Synthetic polynucleotide
gggcccatactacattgctaattagtagatacgagggcagcgttcctctcttcttgatgaattgttcagactatagtttattcgagaaaaacctatacggactaat

SEQ ID NO: 836 - DNA, 55 bp, Artificial Sequence
  Description of Artificial Sequence: Synthetic oligonucleotide
gtggttaactgtaatctttaacccttaacagtaggcgaccaacgttaaatttcgg

SEQ ID NO: 837 - DNA, 170 bp, Artificial Sequence
  Description of Artificial Sequence: Synthetic polynucleotide
gttaagttgaagggtagtttcaaggcacttatcgacaaaatccggaccagcagctgtgtaccagtaggttctcgttagccttcccgtacctttaatattggtaaacgtacaaatctaatctctcattatatatcaactattatggaacagacccggagttgatgtatgaa

SEQ ID NO: 838 - DNA, 68 bp, Artificial Sequence
  Description of Artificial Sequence: Synthetic oligonucleotide
aaacaaatactatacgattcgtataagaggttgtcgtaagtctagtgactactgcttctttctgcgac

SEQ ID NO: 839 - DNA, 191 bp, Artificial Sequence
  Description of Artificial Sequence: Synthetic polynucleotide
tgactgacctacggtaactcacataaaactcacccaaattgacctacttaccagagtgtggtattattgtagtgctatgtgttaacgctgagtgcagatgacactcccccgttctcctcattaggtttgaattgagaagttagtacactgaatatgatgaaccataatgcataagggactttaattttgag

SEQ ID NO: 840 - DNA, 186 bp, Artificial Sequence
  Description of Artificial Sequence: Synthetic polynucleotide
ggcccaaaattaatcgccaagatctctcccaggaatgatccaaagtcttttttaagatatttcattttacgctaatagcattgtggcgggatatcttgggtacacgaaggtatagtaagggtcttctaattgacaaagccacttatacaaagaatccatcttgacatgcttggtgctaccttggta

SEQ ID NO: 841 - DNA, 64 bp, Artificial Sequence
  Description of Artificial Sequence: Synthetic oligonucleotide
gaatgtcttttacttacgtgccattacttcaaaactatcaagagagaggggaccatttatgtct

SEQ ID NO: 842 - DNA, 101 bp, Artificial Sequence
  Description of Artificial Sequence: Synthetic polynucleotide
atgttctaatccaagaacatgaattcgaatcctatctatccagctgctggaatgtgcttaggagacactttttcctacttatgatagaagcgactgtggaa

SEQ ID NO: 843 - DNA, 145 bp, Artificial Sequence
  Description of Artificial Sequence: Synthetic polynucleotide
aaataattggaggaatgcccactgattatacaatatcctcatattacaaggcataataactttggagttcgtcagcttcactattgctgattgcgcgaaatgattcgcgatttttttacatataggctccaggcagtggccgaca

SEQ ID NO: 844 - DNA, 172 bp, Artificial Sequence
  Description of Artificial Sequence: Synthetic polynucleotide
gtcaagtaaatgcagactcttcgcaaggaatttttcgtttacacgccttcaccgcatgattcatatcgcagtacttactccattttaattgacaatataccggcctgatagtggagcggttatcagggctgtgtaaatggaaataatattataagtctataacgaatctggc

SEQ ID NO: 845 - DNA, 130 bp, Artificial Sequence
  Description of Artificial Sequence: Synthetic polynucleotide
agttcggaattagagacacttcctgtcgtggggctacggttaaacggatacaccccctggcttcactttaattttgctaaaaaactacctatatcttaaaaaggataatttagggaagaggccatctttt

SEQ ID NO: 846 - DNA, 12 bp, Artificial Sequence
  Description of Artificial Sequence: Synthetic oligonucleotide
cagtcatattgt

SEQ ID NO: 847 - DNA, 200 bp, Artificial Sequence
  Description of Artificial Sequence: Synthetic polynucleotide
tggtctggaacacctataattaatggacacgaagtactgttgcgtttcctaagagatggactttcacgctattcgcaacaaactagcataacttgccattgcgtttattaagataatgtaagctgcgactgaaattttacaactaaatttctaatatgcctcgacagcatgcacgtgatcgcttagtccatatggatggg

SEQ ID NO: 848 - DNA, 106 bp, Artificial Sequence
  Description of Artificial Sequence: Synthetic polynucleotide
attgaacaaactaagttaacccttgggtgtaaagatgtatggtcactacgatttttacgcttcacccaggaatataacggccatttacagttcttatgtctgcgag

SEQ ID NO: 849 - DNA, 141 bp, Artificial Sequence
  Description of Artificial Sequence: Synthetic polynucleotide
tgaaccagagacagattgagatcaaaagtgcgcctaataagatatcacgcttactggcttaaaatcgcagtagtcttgctttcacgttattttgaagatcctagatattaagtcgcttagtatattggttagcccccagtc

SEQ ID NO: 850 - DNA, 118 bp, Artificial Sequence
  Description of Artificial Sequence: Synthetic polynucleotide
gaataccgcatcgaatacactcttaatacagttcgattttgtagatctatttcaccgatataatatataagcacgtagactggtctttggaagatgtccgttaacgcgggtccttgaa

SEQ ID NO: 851 - DNA, 105 bp, Artificial Sequence
  Description of Artificial Sequence: Synthetic polynucleotide
cggaccgatacctgggtgcctatttggtgtaggtaaatcctgacgtctagtgaaggacccgtaaatacttaatattatcgaatattatccctattgataccataa

SEQ ID NO: 852 - DNA, 37 bp, Artificial Sequence
  Description of Artificial Sequence: Synthetic oligonucleotide
tatttgaataacttgtgacagacgcaactgtcgtact

SEQ ID NO: 853 - DNA, 196 bp, Artificial Sequence
  Description of Artificial Sequence: Synthetic polynucleotide
tcgtgagaatccttgactacttttccctactatgacttagaatgctgcatcttagacagatatcgatagtcggacgtcgtatagaagaccaactagttgaagccaattacgtcatctaatccatgtaagttcaattaacagatttaagcgagcttgcatttatttcgacagtaagttctgaattggtaggcgaccg

SEQ ID NO: 854 - DNA, 59 bp, Artificial Sequence
  Description of Artificial Sequence: Synthetic oligonucleotide
taaagtagctacgtcccattatttgtccaattgtcgacacgttatggcttaatagaagt

SEQ ID NO: 855 - DNA, 150 bp, Artificial Sequence
  Description of Artificial Sequence: Synthetic polynucleotide
tcccacacccattatgcatactagattcaaatggattagagtgattctgcaggtcaatgtataacaataagtgggccttgactgttcatacattgggatttgtgcagataccatattcatccagcgagtgtccaaaagtgagacttcatt

SEQ ID NO: 856 - DNA, 106 bp, Artificial Sequence
  Description of Artificial Sequence: Synthetic polynucleotide
agtttagggtatcatcagaaaattgttctgctaacgggaattgtgggtcctcaagaattgtatgtactcattatcatacaacactatacggtgacactcctgcatc

SEQ ID NO: 857 - DNA, 121 bp, Artificial Sequence
  Description of Artificial Sequence: Synthetic polynucleotide
acgtggtatacggaagcgcatgtacttcaaaccagaccgttgtgagctttcgatcaactctttattgtagttcggtgtcataataatcgatttacgtttaatgtcaaaacagaagccctaa

SEQ ID NO: 858 - DNA, 118 bp, Artificial Sequence
  Description of Artificial Sequence: Synthetic polynucleotide
ctcatatgcacgccggcttaaatcgtgcttatcgaaattacacggtgcaaagcttcttatgtatcaagtcttaattacatctcatttgtatcatcgatgggaatggagtaaaagtgac

SEQ ID NO: 859 - DNA, 162 bp, Artificial Sequence
  Description of Artificial Sequence: Synthetic polynucleotide
tagacctgagcctacatttgaggtttattttctgaaaccgctaatctagcacttaacggtcaatctaacggcgagcaatatgaactcagtcaatttcgtaatttttttagggcgaccaagtgcgtcgcgaattcattagcaagtaaagtgcgataatcattt

SEQ ID NO: 860 - DNA, 21 bp, Artificial Sequence
  Description of Artificial Sequence: Synthetic oligonucleotide
tatctttaaaacacgtgggct

SEQ ID NO: 861 - DNA, 87 bp, Artificial Sequence
  Description of Artificial Sequence: Synthetic oligonucleotide
aatattcacttagatgtttgaattaagcggtcgtctcaagggtgcggtctcgactcgttgacataatactcatcaatttagaacaca

SEQ ID NO: 862 - DNA, 18 bp, Artificial Sequence
  Description of Artificial Sequence: Synthetic oligonucleotide
attaactctagcggttta

SEQ ID NO: 863 - DNA, 67 bp, Artificial Sequence
  Description of Artificial Sequence: Synthetic oligonucleotide
acaataggttaggaattagccagagtttctctcaaatgcacttattaaactctggtggaactgcctt

SEQ ID NO: 864 - DNA, 93 bp, Artificial Sequence
  Description of Artificial Sequence: Synthetic oligonucleotide
tcaacgctaatatatgctgttaatcggtacgttcactatcaagtggggatacaaacggctatatcttcagttgctacattgtcgtattcaaga

SEQ ID NO: 865 - DNA, 157 bp, Artificial Sequence
  Description of Artificial Sequence: Synthetic polynucleotide
attaatagcatactgttggggtcactagtagtcctaagctgttaaatatagctgaattaatctacaaacaccattcgtgctataaataaactgtgctagggactgccggtgggaaaatcccctagcatcaatttatgcttccggacgtttgatcatt

SEQ ID NO: 866 - DNA, 142 bp, Artificial Sequence
  Description of Artificial Sequence: Synthetic polynucleotide
tgtgatattggtattagaagaagtgggcaacctccttaggtaggcccatctgatcttatccgacagccagcatgttcttttgccatcattattttaaaaattactaaggaagccatgctaacagctaataagatcagtctgt

SEQ ID NO: 867 - DNA, 156 bp, Artificial Sequence
  Description of Artificial Sequence: Synthetic polynucleotide
accatgcaatgagtatatccgtgttctatctctcatccatgtccgagtatgacaggtgctagtatacccaacggtatgttagctacaggtgtaaaagtgatcactgatattatttaagtaacgtgaccattcccatggatctaaaatttggctgaa

SEQ ID NO: 868 - DNA, 87 bp, Artificial Sequence
  Description of Artificial Sequence: Synthetic oligonucleotide
tattctcaacgaacgagattccaattcctctaagccataatcttaacacgtattgatgatgtgatgtactgaggctggagttcatga

SEQ ID NO: 869 - DNA, 29 bp, Artificial Sequence
  Description of Artificial Sequence: Synthetic oligonucleotide
attcttctagtgcttacaacgttaaggat

SEQ ID NO: 870 - DNA, 33 bp, Artificial Sequence
  Description of Artificial Sequence: Synthetic oligonucleotide
aaaatttttggaattcggcgctgacaactttct

SEQ ID NO: 871 - DNA, 150 bp, Artificial Sequence
  Description of Artificial Sequence: Synthetic polynucleotide
tattgttttatttcatagatagtaaaaccgttacattgactgaccaattatccacgcgatgactacccagttcgcaacgcatgccttcaaaggacatgttgaactttggatcctgtgcgaattgataatggctaagataagcggtcagat

SEQ ID NO: 872 - DNA, 191 bp, Artificial Sequence
  Description of Artificial Sequence: Synthetic polynucleotide
ttatggtattgaggattagtctgcgcattaacgccttacccatgtaaaacaatgatgtcacagtaaaccgaagatcttgatgagcggaacaaaaagcagtatgtgagttcgacaatcgtcagtaggctgccgttcgttgattgttctataatactcttcttatccaagactatcccactattatgttagac

SEQ ID NO: 873 - DNA, 120 bp, Artificial Sequence
  Description of Artificial Sequence: Synthetic polynucleotide
tcgtaaaggtcaaatagaactatctggataatctcctcctgctgattttacaaagttctatcgcattccgtgcgatgatatatcagtttgcaatcgcaagccagatggaagtagcgtaat

SEQ ID NO: 874 - DNA, 35 bp, Artificial Sequence
  Description of Artificial Sequence: Synthetic oligonucleotide
aaatatgtatgacaacttgttggacttcgtgccca

SEQ ID NO: 875 - DNA, 23 bp, Artificial Sequence
  Description of Artificial Sequence: Synthetic oligonucleotide
cagagtatatctttcgtacgtta

SEQ ID NO: 876 - DNA, 79 bp, Artificial Sequence
  Description of Artificial Sequence: Synthetic oligonucleotide
atgcccagtaaaacgttatattgacaacattgatttttcagattggccatataatttccggtatagtacccggagtgtc

SEQ ID NO: 877 - DNA, 180 bp, Artificial Sequence
  Description of Artificial Sequence: Synthetic polynucleotide
aatttttccatacggttcgaccataaccgatgcacagtagttagccataactgtgaaaaagccttccgggtgggggtgactggcattggaattactaatgaatgcggacactaagagatgaatttcttttttctaccttatcagacttacttggtacgctatttcaaattacagaccaaa

SEQ ID NO: 878 - DNA, 189 bp, Artificial Sequence
  Description of Artificial Sequence: Synthetic polynucleotide
taggtttttcaggacccatctattctcacgtatttagaactacctttatgagtattactacactacgtacgaagcgaatacatatgctccgagaacttgccatattaacagctagagaacagtgtgaaccacgaggcgtatttgttccgttcgtggtgatgagttacattgactagatgatattcataa

SEQ ID NO: 879 - DNA, 163 bp, Artificial Sequence
  Description of Artificial Sequence: Synthetic polynucleotide
cagactcttgccgttcaaatatctttctcataggtgttctggcggtaaagttatggttcaaacttcgagcactcgtgaactaaacgaaatcggagccactattccagtgaattcaagacttgaaagacatgatctaagcttgttgggtataacatttatttac

SEQ ID NO: 880 - DNA, 57 bp, Artificial Sequence
  Description of Artificial Sequence: Synthetic oligonucleotide
taaccagcacaagtgaagccttgttcaccatatattttatgcgtgcagtatagttga

SEQ ID NO: 881 - DNA, 35 bp, Artificial Sequence
  Description of Artificial Sequence: Synthetic oligonucleotide
agtttgaaggtttagttaactacagccccgattca

SEQ ID NO: 882 - DNA, 102 bp, Artificial Sequence
  Description of Artificial Sequence: Synthetic polynucleotide
gtgtgaatttcccagacagttaactgaataaaaagtgtggtaaacgagtcggcgtaaggacccttcatatgtgctaacaattcctttcactgatatcttttc

SEQ ID NO: 883 - DNA, 158 bp, Artificial Sequence
  Description of Artificial Sequence: Synthetic polynucleotide
cgtaagttgcttttactttacattgtaccgtactagaatcacatgtagtgacgatccccaagttaagcgattatctggagagttctaaatgtcttttaagctctaaggttcgtaagaccttcataggggctaaacactcaagccttaaatgctgagaa

SEQ ID NO: 884 - DNA, 95 bp, Artificial Sequence
  Description of Artificial Sequence: Synthetic oligonucleotide
agcactttgcgctagtctttattgtacggcacagggtatattgcccaataagactatttcgcgaaatgatacgacccgttagaatagtaattatc

SEQ ID NO: 885 - DNA, 127 bp, Artificial Sequence
  Description of Artificial Sequence: Synthetic polynucleotide
gatatccatgaactaatcatataaactccaggtaaattactgcgcttgttgttggtctcaagcgaaaagttgtaacgcaaccatttggacagttaaagtccgtaccaatgttttgatcgatctggct

SEQ ID NO: 886 - DNA, 175 bp, Artificial Sequence
  Description of Artificial Sequence: Synthetic polynucleotide
tatcaaggaccaggcatattaatcatctgaaactataatattatcgagagttagcgcatgcagtacgaccactataggacctgtatttttggcatatagattgccggtttgattcttgaaaccctaacctatacatttgagaggagaatcgtgtcccaaggttcgcagtcctatt

SEQ ID NO: 887 - DNA, 109 bp, Artificial Sequence
  Description of Artificial Sequence: Synthetic polynucleotide
tttagggtattatcggatggttattacttccacccaactaataccagttgaacgtctggcataaatatcaagaatctgagaccggtatatttcgtgatcgaaatttccg

SEQ ID NO: 888 - DNA, 77 bp, Artificial Sequence
  Description of Artificial Sequence: Synthetic oligonucleotide
gatatgcctgatcataacatcctatggaggttgtcgggcgaaacaactcagcgcattaatttgatattatatctact

SEQ ID NO: 889 - DNA, 21 bp, Artificial Sequence
  Description of Artificial Sequence: Synthetic oligonucleotide
tacagtactcttactaaggtg

SEQ ID NO: 890 - DNA, 79 bp, Artificial Sequence
  Description of Artificial Sequence: Synthetic oligonucleotide
tttgtctcaatattactgggccaacgtgttccatattagtaacgttcttcattaatgaaactgacgtctacaaggggaa

SEQ ID NO: 891 - DNA, 51 bp, Artificial Sequence
  Description of Artificial Sequence: Synthetic oligonucleotide
tctcttacgagtcgaaatgagctcgtatcttgagacaacttactagatatg

SEQ ID NO: 892 - DNA, 123 bp, Artificial Sequence
  Description of Artificial Sequence: Synthetic polynucleotide
ttggacaccatgctggatagtctatggcaaagactgcatttcctggatacaatggcataaactgactctacgtgaagatattaaggtcataattcttaattattttcgagttccccggctaat

SEQ ID NO: 893 - DNA, 148 bp, Artificial Sequence
  Description of Artificial Sequence: Synthetic polynucleotide
gcttatccgatcggctagctggcatacttcggatactggcgtacccaaggctttgatgctgattatggtaactagccactgctcgatgacccgtatagaataaaactaaaatcaaagcagtaatagtactttatattaattttgattt

SEQ ID NO: 894 - DNA, 11 bp, Artificial Sequence
  Description of Artificial Sequence: Synthetic oligonucleotide
acgaacttgtt

SEQ ID NO: 895 - DNA, 197 bp, Artificial Sequence
  Description of Artificial Sequence: Synthetic polynucleotide
agataatctgcatgaattgcaatacaggatgtcgatatgtttcgatttcgtagtaccaataatcgattaaatcttcacgtgcatgtattggaacctgattacacttaactcatgtttccttataaggggaaaacacgaccgtgaagtgtcgtaatattgcatactatcctcgcaagactgcgagatgcgactttccg

SEQ ID NO: 896 - DNA, 62 bp, Artificial Sequence
  Description of Artificial Sequence: Synthetic oligonucleotide
gatgtttacttttgtaaaaccccacctgacacggacatcgaggtttggtttaaaatttgcaa

SEQ ID NO: 897 - DNA, 135 bp, Artificial Sequence
  Description of Artificial Sequence: Synthetic polynucleotide
ttacggaagatttcaataaattgcaactgagggtcaatagacattcttctggctgtcaatgctcaaccatcatgatgatatgattacttcagtggcactatatgcaatcgtgcactatacactggattcgactgg

SEQ ID NO: 898 - DNA, 94 bp, Artificial Sequence
  Description of Artificial Sequence: Synthetic oligonucleotide
cattttcgctacggtcattgtagtaataccgtgcgagcacccggcagctcgacaagataataattggttactattaagctattgtttaatataa

SEQ ID NO: 899 - DNA, 59 bp, Artificial Sequence
  Description of Artificial Sequence: Synthetic oligonucleotide
aagactattagcaaacagcaatattttttgggagtgtactcctgtcagtactactcgtt

SEQ ID NO: 900 - DNA, 39 bp, Artificial Sequence
  Description of Artificial Sequence: Synthetic oligonucleotide
agtcctatcgtatattcaactattatgttgataacgcgg

SEQ ID NO: 901 - DNA, 103 bp, Artificial Sequence
  Description of Artificial Sequence: Synthetic polynucleotide
aattcctcccattcaactgatgagaagtttatttagtgacattactcaggcgctggagccggatttaatttggtaacagaacaattgttcaatacttgactcg

SEQ ID NO: 902 - DNA, 19 bp, Artificial Sequence
  Description of Artificial Sequence: Synthetic oligonucleotide
gctaatattatttcacgtg

SEQ ID NO: 903 - DNA, 5 bp, Artificial Sequence
  Description of Artificial Sequence: Synthetic oligonucleotide
tgatc

SEQ ID NO: 904 - DNA, 111 bp, Artificial Sequence
  Description of Artificial Sequence: Synthetic polynucleotide
acgatgtcgacttacgaaacaaattaaatagtatggtacaggattccccacttccataccaagtgaaccgttctacgacgagaggttatcttgtttcgatgggatattttt

SEQ ID NO: 905 - DNA, 99 bp, Artificial Sequence
  Description of Artificial Sequence: Synthetic oligonucleotide
acttgttcctggactgaagaatgcttcacgccgaggacatattgtctaatttatctggttagcaaaattaaggtactcctgccttcaatatgtaagata

SEQ ID NO: 906 - DNA, 53 bp, Artificial Sequence
  Description of Artificial Sequence: Synthetic oligonucleotide
ccttctctattgtcatgcgagcgtagtcttaataaataaatagtcgtggctaa

SEQ ID NO: 907 - DNA, 19 bp, Artificial Sequence
  Description of Artificial Sequence: Synthetic oligonucleotide
gctgtcactttaatagtat

SEQ ID NO: 908 - DNA, 127 bp, Artificial Sequence
  Description of Artificial Sequence: Synthetic polynucleotide
cttaaatatgttattggcaggagatttgtacgaataatggaaatggaagacttctatgagcgcccgcccctttacaggacttatactctcaatcggctttatttggaaataaatccgccgtcaatta

SEQ ID NO: 909 - DNA, 83 bp, Artificial Sequence
  Description of Artificial Sequence: Synthetic oligonucleotide
ccgctttctccgattcgccagctttataggtacaaagtattgacaattagggatagccgcttggattatcaatttaataagat

SEQ ID NO: 910 - DNA, 94 bp, Artificial Sequence
  Description of Artificial Sequence: Synthetic oligonucleotide
actagtagttcgataacataccagtgttcccattcagcggtcttattgagctgacacctagcaatgtatttgaaattgagactagaagtttcta

SEQ ID NO: 911 - DNA, 124 bp, Artificial Sequence
  Description of Artificial Sequence: Synthetic polynucleotide
tcgtaaaaacctgtctgagtaaggtgagatcactgttctagcttatgagctaaactataatagaggtaatcggctgcttatcctttcggtattaagctacataaactcatgttagtccgctaac

SEQ ID NO: 912 - DNA, 18 bp, Artificial Sequence
  Description of Artificial Sequence: Synthetic oligonucleotide
caattagtgcctaatgtt

SEQ ID NO: 913 - DNA, 40 bp, Artificial Sequence
  Description of Artificial Sequence: Synthetic oligonucleotide
gaccaactaaaggaccgtcgaatctgtttatatgttcatg

SEQ ID NO: 914 - DNA, 129 bp, Artificial Sequence
  Description of Artificial Sequence: Synthetic polynucleotide
gagatgtaaaaacacatcttacaggtttagggtgcactcattttacaatcatttcatccgtctatggctttcatcagagtgagttggatgagattgcaagctttaaaccgattaaacatcctccgagtt

SEQ ID NO: 915 - DNA, 116 bp, Artificial Sequence
  Description of Artificial Sequence: Synthetic polynucleotide
ggaaagttgtgactgctctctgtctatacgcctaataagcaatattgataaatatgcgattggatctagcaaatcctaggttacaacatgcctagatgtcactccttgtggcttaa

SEQ ID NO: 916 - DNA, 70 bp, Artificial Sequence
  Description of Artificial Sequence: Synthetic oligonucleotide
aaagctcgtggcctctacaaaaaaagttcactctattgggtacagagtcccattcgttaggtgtaattta

SEQ ID NO: 917 - DNA, 66 bp, Artificial Sequence
  Description of Artificial Sequence: Synthetic oligonucleotide
aacctgacacggaatttctgcaccgatccttcatgaatattttcgaatgaagatgaggtattgtct

SEQ ID NO: 918 - DNA, 5 bp, Artificial Sequence
  Description of Artificial Sequence: Synthetic oligonucleotide
actgt

SEQ ID NO: 919 - DNA, 177 bp, Artificial Sequence
  Description of Artificial Sequence: Synthetic polynucleotide
caaagagataagtataaatattcagtctgttaacatggtattcggatctgcggatacagtaatcttcacgaatgtatcgaggccattactacaattacagagctgacagccatatcgaagatttgtacactgttggctgggtcatcctacaatccattgtcgaattttaccgtttgc

SEQ ID NO: 920 - DNA, 12 bp, Artificial Sequence
  Description of Artificial Sequence: Synthetic oligonucleotide
gtactcattatg

SEQ ID NO: 921 - DNA, 55 bp, Artificial Sequence
  Description of Artificial Sequence: Synthetic oligonucleotide
ggttttattcgcaatcattactagtctgatacctggtaacatgagacctgaacga

SEQ ID NO: 922 - DNA, 170 bp, Artificial Sequence
  Description of Artificial Sequence: Synthetic polynucleotide
tgatcaattatgacgcattcactctacaattatttaaagagtagcgcttccactacaactatcacatttttatggactttctcagcgtacgtgcaatcaagggattggagacaagtatctcatatttaggaccgaagctggagaggctgcggttttacaaacagttcatg

SEQ ID NO: 923 - DNA, 45 bp, Artificial Sequence
  Description of Artificial Sequence: Synthetic oligonucleotide
tatctgagtaaggatgaacactctggacattgtgactaccttatc

SEQ ID NO: 924 - DNA, 16 bp, Artificial Sequence
  Description of Artificial Sequence: Synthetic oligonucleotide
tgcttcacggattata

SEQ ID NO: 925 - DNA, 173 bp, Artificial Sequence
  Description of Artificial Sequence: Synthetic polynucleotide
cagtcaacttcatcggccgtgggtaagttcactgggaatactgacgcttctgcctatgtataactaaacttcattagataaagcaatctggataatttgttaaggttttctactaccgacgaaatcgtatcaatgggtgatctgaaaatacctcgatttgtagcgttctcaaa

SEQ ID NO: 926 - DNA, 93 bp, Artificial Sequence
  Description of Artificial Sequence: Synthetic oligonucleotide
aaataccgtattctgaatgactaattcgtcagttttagtgggccacagatttaagtgtctatgttctggttatacaagaaaccatccgccagt

SEQ ID NO: 927 - DNA, 156 bp, Artificial Sequence
  Description of Artificial Sequence: Synthetic polynucleotide
ttacataagttaagacagttgacctattgccattgtaatgtccatggggtaacatttgaggggaataagcagttttactcacatcccatatcgttcatatttggctaatccagctcaggttgtagactctacgtcaagtctaccaagacaaatggt

SEQ ID NO: 928 - DNA, 89 bp, Artificial Sequence
  Description of Artificial Sequence: Synthetic oligonucleotide
agtcagcgttttttgatgaagtttacctaggaatttcgcgttacacgacatagagaatggccttaatcgttccataaaccatattgact

SEQ ID NO: 929 - DNA, 113 bp, Artificial Sequence
  Description of Artificial Sequence: Synthetic polynucleotide
gattaactaagagttcgcgttaatttgggggtcattccatttaacaaatatatcatctgaaatttcggtgccagtggcttaggagacttacacactaaacgtgaactcccttt

SEQ ID NO: 930 - DNA, 124 bp, Artificial Sequence
  Description of Artificial Sequence: Synthetic polynucleotide
ttgctttgtcttctatcttcgttgggttacgagtcggtcagactgattacaaaaatatacagtaacattgtgttctgtaccagaaacacggaccattaagctatctaactgaagtgctgcaaaa

SEQ ID NO: 931 - DNA, 96 bp, Artificial Sequence
  Description of Artificial Sequence: Synthetic oligonucleotide
agaagtgctaatattagggtatactttaagaaatttatactgtcgagattctgattaatatcccaacccggaggccgttcctttgtccaggcacat

SEQ ID NO: 932 - DNA, 68 bp, Artificial Sequence
  Description of Artificial Sequence: Synthetic oligonucleotide
cttgattcatgtcttgcgggtcatctaaagtttcatgtataactctaaaacgacatgtaaagccggta

SEQ ID NO: 933 - DNA, 7 bp, Artificial Sequence
  Description of Artificial Sequence: Synthetic oligonucleotide
taatctg

SEQ ID NO: 934 - DNA, 148 bp, Artificial Sequence
  Description of Artificial Sequence: Synthetic polynucleotide
cctacttgttacattcatagtctacagaacgagttaagtctttagcgtaagcaataccatcctctgtctagtagccgacgtttcggtgaaatactctcgtattgaaacaatcttctgtgaagtaactaaggctattaagggataaggt

SEQ ID NO: 935 - DNA, 10 bp, Artificial Sequence
  Description of Artificial Sequence: Synthetic oligonucleotide
tctgaagatc

SEQ ID NO: 936 - DNA, 109 bp, Artificial Sequence
  Description of Artificial Sequence: Synthetic polynucleotide
cgatacgtctgttcttattacgatacatgactcggctcttttttgcctgaagcaagatttacaattctgacaaaagctagtgagcagtttatatgaacggaaactactg

SEQ ID NO: 937 - DNA, 129 bp, Artificial Sequence
  Description of Artificial Sequence: Synthetic polynucleotide
tacagaattacgggcagttatgtgggaggaatttcagtaaagctatatccatgtgactcgtgttaaactcatctattctccgaagaaccaccagtctgtcattaattcaccatgactattttatgtagg

SEQ ID NO: 938 - DNA, 118 bp, Artificial Sequence
  Description of Artificial Sequence: Synthetic polynucleotide
ctagcctagtataaggcgttagcactttatagataaccctcgtaaatgttgtctcgaataatttattggtaaactcttaaggtatgacgcgtgagatcgtccaaaaccagtgccttat

SEQ ID NO: 939 - DNA, 19 bp, Artificial Sequence
  Description of Artificial Sequence: Synthetic oligonucleotide
tctaataagatgcttgttc

SEQ ID NO: 940 - DNA, 133 bp, Artificial Sequence
  Description of Artificial Sequence: Synthetic polynucleotide
ttagtccttgtaatttaacgatatgtcctactcaaaagaactttagatcatctaaaggaggctactttaaccggggtcgtatcagcattatgatactcttaagagttgccgatgtatgcatgctggtaccaac

SEQ ID NO: 941 - DNA, 110 bp, Artificial Sequence
  Description of Artificial Sequence: Synthetic polynucleotide
tcagtttatcctaagatcgtcatggtacagaagatcgaacgttaaacccattcaatgaatgcagcgtgtatcatcgtagctgtgcactagcattgtaagagattattcct

SEQ ID NO: 942 - DNA, 126 bp, Artificial Sequence
  Description of Artificial Sequence: Synthetic polynucleotide
tacctcaatctccattataatgtcactttaaggtcttcgcataagcttaaggacgttatgagccgtagagtaaatgcacaactcgaattggcgactctatatgatgcagtagttcgcaaattttgg

SEQ ID NO: 943 - DNA, 159 bp, Artificial Sequence
  Description of Artificial Sequence: Synthetic polynucleotide
ttctcagataacggaaagtgtcgcatagattaaaaccccgatataaatatctgttaagcactgtaggaactatgctattgtggttctctgccttagttgaagcgttataagtttgtaaattcaggcctttcattccccgaatacagatagaatgcccgt

SEQ ID NO: 944 - DNA, 137 bp, Artificial Sequence
  Description of Artificial Sequence: Synthetic polynucleotide
acttttggtgccctgtccatagaaatgttgaactccatacacaagtataatattaagtacgataggatgtggacccgaggtgactatttggtcatctcccacaagtaaacggttttgcttcgaatgttcaattaaca

SEQ ID NO: 945 - DNA, 13 bp, Artificial Sequence
  Description of Artificial Sequence: Synthetic oligonucleotide
tgttcttagaact

SEQ ID NO: 946 - DNA, 13 bp, Artificial Sequence
  Description of Artificial Sequence: Synthetic oligonucleotide
ctgcatgtattta

SEQ ID NO: 947 - DNA, 156 bp, Artificial Sequence
  Description of Artificial Sequence: Synthetic polynucleotide
gtagctattccttgatgagttagagtaagattcaatcctccggagctaatggaaaccgtttctagtgtaatttttccaagatttgccgcatgaaatgattcacaaacaattcaaactctagtattaagctcctcctataggacgaggtgttcgacg

SEQ ID NO: 948 - DNA, 167 bp, Artificial Sequence
  Description of Artificial Sequence: Synthetic polynucleotide
acattccctatgtctattcttgtggctaaacgtagtagttttctaattacccaatgaattttagcgcgaataaaaagttgactacaggcttacgaattaactcgctagcactttttcgatatgcatggaaggcccgcaagatcgagtagtgtaatggcactaatagc

SEQ ID NO: 949 - DNA, 59 bp, Artificial Sequence
  Description of Artificial Sequence: Synthetic oligonucleotide
taagaagcctttagaaacagcttcttcttatgcacgactatggttgctacaagatttgt

SEQ ID NO: 950 - DNA, 108 bp, Artificial Sequence
  Description of Artificial Sequence: Synthetic polynucleotide
tccagacctcttaagacaacttctaactcgattcatgcttaacgcaggtcctttatcgtagaatgagtgagtgaatgcagtagagatgttttatatcttaagtacgca

SEQ ID NO: 951 - DNA, 129 bp, Artificial Sequence
  Description of Artificial Sequence: Synthetic polynucleotide
agataggtattgcagtacatttgagcacacattcggtctcatgtaggcaagatactaagtcaaccaaatgtaagtgaattatttcttatgcgatccgttagacatcacaccgcttagttttatcgtgct

SEQ ID NO: 952 - DNA, 38 bp, Artificial Sequence
  Description of Artificial Sequence: Synthetic oligonucleotide
agtactgtttactccctatagtaatctaaggtgctgaa

SEQ ID NO: 953 - DNA, 26 bp, Artificial Sequence
  Description of Artificial Sequence: Synthetic oligonucleotide
cttcgttctgaaactcgagatgaatt

SEQ ID NO: 954 - DNA, 61 bp, Artificial Sequence
  Description of Artificial Sequence: Synthetic oligonucleotide
agactaatccttaaattgcctatgaggtctttctcgaggatttgaaagcacgtgatcctaa

SEQ ID NO: 955 - DNA, 185 bp, Artificial Sequence
  Description of Artificial Sequence: Synthetic polynucleotide
cttaaagtttctacatgaaatgagatcaaacgtatgcgaagcatgtgagtcttggcttatccccctcgcccagaacggataaaagaattgttcccaggtacgtatgttggcccatagtaatttatatatcaccggggttaacatattgtggttaaacctaacgctgtctaaatacgtattgctat

SEQ ID NO: 956 - DNA, 128 bp, Artificial Sequence
  Description of Artificial Sequence: Synthetic polynucleotide
aacagcatattctgaaatcatatgtacctaggtcacgatgaggttacactatcgcccgctctcttctcctttaagaatcaggtaaattggtggtggtgctagattgtaacaggtcacaatttattaaa

SEQ ID NO: 957 - DNA, 160 bp, Artificial Sequence
  Description of Artificial Sequence: Synthetic polynucleotide
atcgctttctacatggcgcgtagtttaactatcttttagggaagcaatgatattaatgtgagccacaggactctcacgtacctggtttcgcataggatcgacagaagagtttcatacagtaaatatacgaacagttccactatcgtatggaattatctca

SEQ ID NO: 958 - DNA, 30 bp, Artificial Sequence
  Description of Artificial Sequence: Synthetic oligonucleotide
aaggcataccttacgttattaatgcagtcg

SEQ ID NO: 959 - DNA, 155 bp, Artificial Sequence
  Description of Artificial Sequence: Synthetic polynucleotide
tagatcgaatttgcagttactctatggctattatcgtaggtatgcccttaagggaatgctcaattaggactttgacccataccatctcgtatcgaatatcgtctgtcgtcaaagggtagttaggaacttcgtaactatgaacacatatccaaaga

SEQ ID NO: 960 - DNA, 13 bp, Artificial Sequence
  Description of Artificial Sequence: Synthetic oligonucleotide
catcatttcaggg

SEQ ID NO: 961 - DNA, 187 bp, Artificial Sequence
  Description of Artificial Sequence: Synthetic polynucleotide
cataatgtgaaagcttcctataactcccttatcagagtgttcgaccggccgattgttgcacgttaagcactcacatctgtaaagagacgggatctccttggaagtccactacagccccaggcctaggttctaggtcatgagatgtgcatcgacgttgaggggtcttgtggtagccacacaaagttct

SEQ ID NO: 962 - DNA, 96 bp, Artificial Sequence
  Description of Artificial Sequence: Synthetic oligonucleotide
ttattcttgtgaccgcacctacggcatcgcacctcgcctccacggtctgagaggatactttatggggatgtatctacgagagaaacaaggtcgata

SEQ ID NO: 963 - DNA, 188 bp, Artificial Sequence
  Description of Artificial Sequence: Synthetic polynucleotide
cggactcaagcgaaggtctgaagaatcacgatctagtggcaattactatacagtccctataatttcgagttccgtgcgttatgcggactactgtcatcagtctacggtatacaccgcttagcgcgggacgttcgctccggacatactcactctgggaactacgtatggacgaggacacatttgtggac

SEQ ID NO: 964 - DNA, 195 bp, Artificial Sequence
  Description of Artificial Sequence: Synthetic polynucleotide
tccatgctgatatcaatgtatccttcacgcaacttgcacgctacttatatatgggcgtttactaactctgcaggcgctctaatatgttggcgataagtacgtacttgggagagcactccgagaggcatggaacggtcgcggaatacgtaggcatccgctgaccactactcgatgactttggatggacctgcatca

SEQ ID NO: 965 - DNA, 74 bp, Artificial Sequence
  Description of Artificial Sequence: Synthetic oligonucleotide
cgttatctaatgtcatttgttctctgtcaggttcccggcaacggagccacaagctcagaggagactattagacg

SEQ ID NO: 966 - DNA, 139 bp, Artificial Sequence
  Description of Artificial Sequence: Synthetic polynucleotide
cgtattttgagacgttcacggctttactggtccggttttggattagagctctgagctatgcgcatccaaagcacacgcgaatagaccttaacttctgctcactctccaccagaggaggtatgaatgacggcgcgttaaa

SEQ ID NO: 967 - DNA, 58 bp, Artificial Sequence
  Description of Artificial Sequence: Synthetic oligonucleotide
gccatatttaaacccccccgattgtagcgattgccgatcggggcaatgtgatattgta

SEQ ID NO: 968 - DNA, 129 bp, Artificial Sequence
  Description of Artificial Sequence: Synthetic polynucleotide
aagtcgcgaagccaagtaatgctcaccgactattatgtggacagattcgtcccgtaaacactcgtgtatggtccctattggaggcctgtgcctaggagagaccaaagcggttgctcaacttctttatgc

SEQ ID NO: 969 - DNA, 166 bp, Artificial Sequence
  Description of Artificial Sequence: Synthetic polynucleotide
atttattaccgtgccttctctgtaggacagacacgatgtccgaggcacgcgtgtgtaatacggccttctgagcaaaatctacaatcgacatcgtgtatttatagggctaaaggcctactgattgcgttcggaccttgacacggtcgccgcatataacggagcgatc

SEQ ID NO: 970 - DNA, 94 bp, Artificial Sequence
  Description of Artificial Sequence: Synthetic oligonucleotide
ctactggcgaatccgcgggtgatctttttatgacccttcggatagaccctcggcgtcatatagctggactacatatgaggaacatagatgctca

SEQ ID NO: 971 - DNA, 164 bp, Artificial Sequence
  Description of Artificial Sequence: Synthetic polynucleotide
taacactggatgcagcggccgtctactctcttggatcatgcgaggtaatcgccaccgcctggacatgttcgacgtcccacggcggaataattctgaattgccaacaataggagcactgttgtcagatttcgtagtgacattcaaaagttctggacgagctctag

SEQ ID NO: 972 - DNA, 164 bp, Artificial Sequence
  Description of Artificial Sequence: Synthetic polynucleotide
atcacatcgacttgtagaagctccaaggaccgagtgccacaacgatcaagctttgcgtagatgatccgagatggcgggtgattccccgaatttgcaccgcaatcaatccgactttttcgatgtgctagaaatttgcggcttacttgggctgacgttgagcacac

SEQ ID NO: 973 - DNA, 184 bp, Artificial Sequence
  Description of Artificial Sequence: Synthetic polynucleotide
acccaagggatcatcgcgagcttcgagagtcttcttatctaaaatcaagtgccggttcaaactgttagatcatatatcctgcacggtaatatgccgagccacggaccctaggtgggacgcctccatcggtgatgcaccgaagtgttttgctaatagtctgcgtagtccctaatgtgggcgaaac

SEQ ID NO: 974 - DNA, 77 bp, Artificial Sequence
  Description of Artificial Sequence: Synthetic oligonucleotide
ggtatagctcggcacgcccgtgacacgcactaacaacgttatggtgctatgacattagatccataagtgtttcctgg

SEQ ID NO: 975 - DNA, 75 bp, Artificial Sequence
  Description of Artificial Sequence: Synthetic oligonucleotide
cggtcggatggctaagcctcatgtcggccgtactcgggatattcaagttccaacttacataaattgctagtgcat

SEQ ID NO: 976 - DNA, 99 bp, Artificial Sequence
  Description of Artificial Sequence: Synthetic oligonucleotide
gagggctcggtaccgatatcatcaacgttactgagatgacaccatttcgtggcaagctttacattgaccctaggtagaattccttgttcggatcagcgc

SEQ ID NO: 977 - DNA, 152 bp, Artificial Sequence
  Description of Artificial Sequence: Synthetic polynucleotide
tgattaaccctgtgagctctcagatccttaactcgagtctgggatgtataaacatcttaaccgatgcatcgacagactgggcaaacgtgaatcgatgacggtagagggtctcccctggctcccggaaacgctcgtgacgatctatgtcattg

SEQ ID NO: 978 - DNA, 176 bp, Artificial Sequence
  Description of Artificial Sequence: Synthetic polynucleotide
gtttgggagatgcatcatagaacgacgctgccaaatcattgcgcattactcccctaggcagctctcaagaattgcttcacctgtatagcagagtggtccatgaagtcattcagttggatttttgagaatgggcagcactgatgggaaccgcgctgacaacggattttcccacccgc

SEQ ID NO: 979 - DNA, 154 bp, Artificial Sequence
  Description of Artificial Sequence: Synthetic polynucleotide
aattgctttaaatcggaactaagagtcttttcgcagtagagtcagtggataaagtagcgcttctgatcctagatccggaagtatcagagggaacctgtctgccacgttgcgcttgcagatctttacctcgagagtcgcccctgctgcacgcaca

SEQ ID NO: 980 - DNA, 126 bp, Artificial Sequence
  Description of Artificial Sequence: Synthetic polynucleotide
tcctgagtcccgcgtgagcaagggtgagactgacccaagtcagtcattctaattttagatatctcggccatgcttcgtgggagatagctaaatatacgtccagtgacgtactcaaagtccctcggt

SEQ ID NO: 981 - DNA, 68 bp, Artificial Sequence
  Description of Artificial Sequence: Synthetic oligonucleotide
gcaaatccatagctgtcctcaaggtctttaaaaggtatatgcacttctcagcgtcgaaggtcggcgcg

SEQ ID NO: 982 - DNA, 188 bp, Artificial Sequence
  Description of Artificial Sequence: Synthetic polynucleotide
gcgataaattatgttctgactgacaaccaccaccacggctcatcgcgacgcgacttggaactgtcctatccggagctacatagttataggaaattgagcagcacgatgattcgcgggcgttcactttgtataaacaagttcgcggaatgcgattccgggatttatgcccgacactatttgcggccgtg

SEQ ID NO: 983 - DNA, 89 bp, Artificial Sequence
  Description of Artificial Sequence: Synthetic oligonucleotide
aaatcgttcgtctgtcgcatggcgtgcgtacccattcaatcagttcgactattagtgcgcgtgaaactgaagcatcagtcaacggctga

SEQ ID NO: 984 - DNA, 191 bp, Artificial Sequence
  Description of Artificial Sequence: Synthetic polynucleotide
accaccgcttggggcataagacctctcgtgtacatctatgaatggcgatacatgtattattgaattgacgtttgcgtggagataccaaggaagtgtgtcctccggttccccaaagtccttcactaggactggaagacggctctacattaggtactgggcagggtttcaccaaacacttttccactcgcagg

SEQ ID NO: 985 - DNA, 142 bp, Artificial Sequence
  Description of Artificial Sequence: Synthetic polynucleotide
tatctaagagactccggtttttgggatgtcttagccctcgtgagaattcgtcccaacttccttgaggcaagtatgatggccggctatgcatgccatgatcacaagccatcattaatgatgccgccgtcaacagcgggaaagt

SEQ ID NO: 986 - DNA, 44 bp, Artificial Sequence
  Description of Artificial Sequence: Synthetic oligonucleotide
atattaagctcgaagggtcttgcaccgggctgacgtaactctca

SEQ ID NO: 987 - DNA, 44 bp, Artificial Sequence
  Description of Artificial Sequence: Synthetic oligonucleotide
atgcgatatttgcctaaactggtgccagtggactagcatccacg

SEQ ID NO: 988 - DNA, 77 bp, Artificial Sequence
  Description of Artificial Sequence: Synthetic oligonucleotide
taatacttcctaggtaattaccatctagacggagcgtagccccgcttcattcttgacggtgtacagggcaagcgatg

SEQ ID NO: 989 - DNA, 42 bp, Artificial Sequence
  Description of Artificial Sequence: Synthetic oligonucleotide
catggcatcgcttcgagtgactcgagcagctgattttcaata

SEQ ID NO: 990 - DNA, 195 bp, Artificial Sequence
  Description of Artificial Sequence: Synthetic polynucleotide
ctgtgttggtattacggagacatttgaccgtttcggggtgtactaaaacattgataaagcctattagggcaagcgagtagtctgtgcccgtgtgctaaattcaaagaacccggcgtaagccaccatgctccacattcatggtccccgaccagtagtgcttacgtgttgggcactgatcagcaacacccctgattt

SEQ ID NO: 991 - DNA, 134 bp, Artificial Sequence
  Description of Artificial Sequence: Synthetic polynucleotide
tgtagtcgctcaccgatactctctgccctcgccacggctcccttgatcccatttcggatgcttgttaaagtgcgacgaaaagtgtcatcgcatggagaagcacgattgtcatgtttacgatgagaaaagaagtg

SEQ ID NO: 992 - DNA, 99 bp, Artificial Sequence
  Description of Artificial Sequence: Synthetic oligonucleotide
tcgtacgcctaaaaggcatctgacccatctaagctgttggtctgcagggattagccggctgaaggcaaccattccacctgtgtgattgtctaatttaga

SEQ ID NO: 993 - DNA, 86 bp, Artificial Sequence
  Description of Artificial Sequence: Synthetic oligonucleotide
gatcgcatcccggtttggcgaatacttgaacaacgatacttcggggacttattcaatggcgatatgctgactttaaggctacccgc

SEQ ID NO: 994 - DNA, 169 bp, Artificial Sequence
  Description of Artificial Sequence: Synthetic polynucleotide
gtgttctggggttgagagcccgcctgatcctgggacatcctgtattcaaattacaagaccgaaccaggctacaaatggttgttggaacccattaaagcagtatcaaactgacacttgcgtcgtgcgtgggttactgtttctctctcaaatagccggccgcgtaaaccga

SEQ ID NO: 995 - DNA, 55 bp, Artificial Sequence
  Description of Artificial Sequence: Synthetic oligonucleotide
ggtgattttgtagacaattacccatcttcacccatgctacgggctgcgaagttag

SEQ ID NO: 996 - DNA, 102 bp, Artificial Sequence
  Description of Artificial Sequence: Synthetic polynucleotide
atgacggacccgcttgaagactccggtcagtcaggtactactctgttactaagtacaagattgtctaaagcattggttaccccgttatctggacgcgcgtga

SEQ ID NO: 997 - DNA, 190 bp, Artificial Sequence
  Description of Artificial Sequence: Synthetic polynucleotide
gaagcgagcccttgtcactgacagcgtggctaatctcggtagggggcacttaacgcccgtagatttatgcgagcacgagacacttgccttgagtcatcccattcaaggtatgatgacccgatgtagcgttgcaggatccttattaagctcactgaaacataacttccgggtattaggccactatgtatct

SEQ ID NO: 998 - DNA, 78 bp, Artificial Sequence
  Description of Artificial Sequence: Synthetic oligonucleotide
cgccgcaagttgcatttttctcacaaaagacgagcgagtagcatatgctctgtctcctcttggaagggatatgagctc

SEQ ID NO: 999 - DNA, 70 bp, Artificial Sequence
  Description of Artificial Sequence: Synthetic oligonucleotide
tcatcgaaaagatcatgagactaatggttaaatcttttccctcctttgaggcacggcggcccggcaggtt

SEQ ID NO: 1000 - DNA, 118 bp, Artificial Sequence
  Description of Artificial Sequence: Synthetic polynucleotide
gcgcaaccataggaagcgaattcgatacattcagtaaaggtacgggcttaccaatcgcctcactctgcgcgtttagggcttggccataagtaactattgataggttcgctcgctgctt

SEQ ID NO: 1001 - DNA, 14 bp, Artificial Sequence
  Description of Artificial Sequence: Synthetic oligonucleotide
aggtcgaattcttc

SEQ ID NO: 1002 - DNA, 24 bp, Artificial Sequence
  Description of Artificial Sequence: Synthetic oligonucleotide
ttggcaaagcgcacctactgagtt

SEQ ID NO: 1003 - DNA, 82 bp, Artificial Sequence
  Description of Artificial Sequence: Synthetic oligonucleotide
gcatattgctaaagtcttgcacggatgttaacgaggtcttcacgtcgttattcgaacgccgaaagatccgatgcgacttcgc

SEQ ID NO: 1004 - DNA, 165 bp, Artificial Sequence
  Description of Artificial Sequence: Synthetic polynucleotide
ccggatcgccctgcatgagcacgccaaaagttaagcaggactacagtctgttttgaaacagtaactagactctggatgcttgatttccgggcattgtacggcacgctgtcgtatcgagtagggctgtacataagtccacgtaccagcatgcatattcgtatctgc

SEQ ID NO: 1005 - DNA, 168 bp, Artificial Sequence
  Description of Artificial Sequence: Synthetic polynucleotide
gcgcgccgtgtagatgccattccgtaacgcaccatcatatcaatcatctaagtcgtccatggtggatcctcctgcgtatccaggtattcgactatccatggtttcaagtcgcagatagaaggagctgttcgtcgggacatcaccgagaaagtcttgaaacataggggt

SEQ ID NO: 1006 - DNA, 98 bp, Artificial Sequence
  Description of Artificial Sequence: Synthetic oligonucleotide
ggagtcatgatcagtattccgggatttcagtggtgcctacggtcgccaactagagttctgttccatcagggaaactcgttacgtaaaacctcacatcg

SEQ ID NO: 1007 - DNA, 80 bp, Artificial Sequence
  Description of Artificial Sequence: Synthetic oligonucleotide
ccaaccgtggtttacagaatttttatgctcctgacgacgacaccctcagggaggtgaaaaacctgattgtgacttcggcg

SEQ ID NO: 1008 - DNA, 136 bp, Artificial Sequence
  Description of Artificial Sequence: Synthetic polynucleotide
cgccctgcgcgcgggccaatgcgtctggaaatttgggggataaggcagagttcatacctttaatggtaccatttgcgacgcaatctgatttccggctcgtcaagtataccatccacaatagatacactatcgatgg

SEQ ID NO: 1009 - DNA, 13 bp, Artificial Sequence
  Description of Artificial Sequence: Synthetic oligonucleotide
ctgctgcgattaa

SEQ ID NO: 1010 - DNA, 109 bp, Artificial Sequence
  Description of Artificial Sequence: Synthetic polynucleotide
tgctgggaatcctcccagagttagtcgcgacacatgatcgagaagaggttaatattatatttcctgattcctccgcgcaaagtgctcttcggaggcacgttaacgcagc

SEQ ID NO: 1011 - DNA, 153 bp, Artificial Sequence
  Description of Artificial Sequence: Synthetic polynucleotide
agagtgtgtataatatcgcggacgatgtgcttcggcctgccatttcgactcaaggacatgcgagtcgctccaaaaacatgctttcacaggttggacggattctcatatgaccctccggccagtcaaccagcaaatgaatcgattgttcttggg

SEQ ID NO: 1012 - DNA, 144 bp, Artificial Sequence
  Description of Artificial Sequence: Synthetic polynucleotide
aagtcgggcctattggctcaacgtcgtgacacatcagagggtgcaccccgttctattttcatcttgagctacgctgctacatgttgcgcgcagaactacgcagctttagacaagaggggaccttggagtataaaaaaccgtttc

SEQ ID NO: 1013 - DNA, 116 bp, Artificial Sequence
  Description of Artificial Sequence: Synthetic polynucleotide
tgtgggcaacgtctaaccttttccggcccgatgagactcattacgacattctggtcgctggctacccggaggattcgatagtttcatccgagaagctaacatgcagtgcatgaaaa

SEQ ID NO: 1014 - DNA, 17 bp, Artificial Sequence
  Description of Artificial Sequence: Synthetic oligonucleotide
tcagtacgccaagttgt

SEQ ID NO: 1015 - DNA, 131 bp, Artificial Sequence
  Description of Artificial Sequence: Synthetic polynucleotide
atcactagggatttaggtattggacttcaatccaacggcctcggtagggcatgtcctcaccgtacctacgaaatataactagtgcacatccgtcgcagggtataggttctgtaggcatgatttccagccgt

SEQ ID NO: 1016 - DNA, 154 bp, Artificial Sequence
  Description of Artificial Sequence: Synthetic polynucleotide
gcggcgggagcgtactctaaactggttatttagggattaaacctagcatatgtaatagacgtccgcgtccagcccagaacataggacccgtatcaattccgccaacagtagctgtgctatatgccggggttccattcatccttacggttgagtt

SEQ ID NO: 1017 - DNA, 163 bp, Artificial Sequence
  Description of Artificial Sequence: Synthetic polynucleotide
tcacgtgaacgtgaacctgagacaactggaacgttcctcgtaggcccagttcgtacgacctttaaagcgatcctgctgcaggtggccgccaagtgaaagccataaaggatctggtttgaaaattgtctggtcatcatacccgtcctgttattcggtatacgtt

SEQ ID NO: 1018 - DNA, 128 bp, Artificial Sequence
  Description of Artificial Sequence: Synthetic polynucleotide
actgattatcgctcacccttaccgtaatcaggcatggagagctaatgtgtcctgcaccgttacgtctaatagagccaccggtcgattgatgcgatatcgcttcttgaacggaaaatagcgcgcgtgag

SEQ ID NO: 1019 - DNA, 16 bp, Artificial Sequence
  Description of Artificial Sequence: Synthetic oligonucleotide
accgctaagtttgcag

SEQ ID NO: 1020 - DNA, 150 bp, Artificial Sequence
  Description of Artificial Sequence: Synthetic polynucleotide
catagtattgctgatcactgctatgtctctcaaagtggtaataggggcgtctataacctatgcgatgccgcctcgggcgaccgatagtcatcgggcgtagcaaagataatcaagtgctaaaccctgcgctaccagtttgtcgagctcatt

SEQ ID NO: 1021 - DNA, 6 bp, Artificial Sequence
  Description of Artificial Sequence: Synthetic oligonucleotide
tagttc

SEQ ID NO: 1022 - DNA, 110 bp, Artificial Sequence
  Description of Artificial Sequence: Synthetic polynucleotide
atgtatttgcggatccgctaaagtcagagaggatccttaatctctgaacattcggtgggatggtgttcgcaaagcctacgggccgcattatttagcaacacctcccagct

SEQ ID NO: 1023 - DNA, 80 bp, Artificial Sequence
  Description of Artificial Sequence: Synthetic oligonucleotide
gtgaccgcatagtaaccagtggcatctccttgggtgcaacacagatattttgtaaggaaggaatcgcattccctgcgcct

SEQ ID NO: 1024 - DNA, 29 bp, Artificial Sequence
  Description of Artificial Sequence: Synthetic oligonucleotide
ttttacaaatccgcgtggtagtagccagc

SEQ ID NO: 1025 - DNA, 187 bp, Artificial Sequence
  Description of Artificial Sequence: Synthetic polynucleotide
aactccgcagtcttctgagtgacgcataaaactcagaggcgactcaccggttaaacgcgtgtttgttgaatagtgtagcagcccttggaggatagtcgactcaataatgcatagtcccattccggcggaggctgatgcttgaaaccccgtgactacctttatcaagcggtgctgttgcttctaatac

SEQ ID NO: 1026 - DNA, 34 bp, Artificial Sequence
  Description of Artificial Sequence: Synthetic oligonucleotide
aatctcggccaggcgaacgaattatgcttgtctt

SEQ ID NO: 1027 - DNA, 102 bp, Artificial Sequence
  Description of Artificial Sequence: Synthetic polynucleotide
ttgctgctatatcggctgcgcatgacgaaaggtgatgaagatgcaacccctactgcgttctacacatatatccaggcgggttttgatctgactaaactgccg

SEQ ID NO: 1028 - DNA, 96 bp, Artificial Sequence
  Description of Artificial Sequence: Synthetic oligonucleotide
cttagtgttaaacgagtccgtcacactcaaatacaatgcacatgttgtcccagggctgctggctacctatgtactgaccgtagcgtagggggtaca

SEQ ID NO: 1029 - DNA, 10 bp, Artificial Sequence
  Description of Artificial Sequence: Synthetic oligonucleotide
ggccttttaa

SEQ ID NO: 1030 - DNA, 195 bp, Artificial Sequence
  Description of Artificial Sequence: Synthetic polynucleotide
tacgatgggccgtcctcaggtgtctactactccggcttgacgcctcagtgctgcgctaagtagacctagtgttctttgttccgcaaaacctagaacttaaggcttagccgtagtcattacgtaaaggttaccacgtcgctatgataatgatattgctagctaagacaagcgtacaactggagcccggtagactgg

SEQ ID NO: 1031 - DNA, 198 bp, Artificial Sequence
  Description of Artificial Sequence: Synthetic polynucleotide
actaactctcgtcctaaacaaggcgtcatctgcggatattgtacacgtcaggctcgatcgttgtgtctgtccatgacaccagtaggcatgtgcacaaacagtactgctcggtcggctatactgcacagatacctgacgctcaatggtatggaaatattgttagcctgacaagccagcgcacgttgtattttagggcgg

SEQ ID NO: 1032 - DNA, 161 bp, Artificial Sequence
  Description of Artificial Sequence: Synthetic polynucleotide
aatacggatgtgcggtgccctcatcgaattagaggctccgagtaaatgccaactgccatcagaattgggctaatatgactttacgttcatccaaacaagctaagcttcgtgtcatccagcgtccgacgcgcttcgtgggtgctggggaatacgatattcct

SEQ ID NO: 1033 - DNA, 27 bp, Artificial Sequence
  Description of Artificial Sequence: Synthetic oligonucleotide
taactggtctctgcctatcgatagagt

SEQ ID NO: 1034 - DNA, 158 bp, Artificial Sequence
  Description of Artificial Sequence: Synthetic polynucleotide
gcggagtatatcttaagagcccaataatgcccctccactgggctcttgtcttcgtgcgtatcgcaatgagctgggtaacacacccccttgaaagtcattacgagtgggtcataaatgttgtctcgcgtatagcaaagatccaggcactggttgatacg

SEQ ID NO: 1035 - DNA, 34 bp, Artificial Sequence
  Description of Artificial Sequence: Synthetic oligonucleotide
cgttatcgtgcacagatatagtcgtttcagcgac

SEQ ID NO: 1036 - DNA, 6 bp, Artificial Sequence
  Description of Artificial Sequence: Synthetic oligonucleotide
tgcatt

SEQ ID NO: 1037 - DNA, 89 bp, Artificial Sequence
  Description of Artificial Sequence: Synthetic oligonucleotide
tcaagacttgtgcttgtaaacccggatgtgccctgttccaaacgctggagagagaacctgcgctttaggtcgaaatacagcgatcttct

SEQ ID NO: 1038 - DNA, 30 bp, Artificial Sequence
  Description of Artificial Sequence: Synthetic oligonucleotide
gcgtccattttatatacgtcgctgcagaag

SEQ ID NO: 1039 - DNA, 35 bp, Artificial Sequence
  Description of Artificial Sequence: Synthetic oligonucleotide
tcttgatcaaggatttactcctcggtagcgtacga

SEQ ID NO: 1040 - DNA, 58 bp, Artificial Sequence
  Description of Artificial Sequence: Synthetic oligonucleotide
aggggctgttcataagttcgtttgggtgagccaaatatcactgaccagctcatcctac

SEQ ID NO: 1041 - DNA, 104 bp, Artificial Sequence
  Description of Artificial Sequence: Synthetic polynucleotide
cccattgtttccgacgtgttgatgggtattgaccggtagtcggcatctgtgaaaataaaaggtcatagtactgcacactagagtgacgagcccgcactcactcc

SEQ ID NO: 1042 - DNA, 154 bp, Artificial Sequence
  Description of Artificial Sequence: Synthetic polynucleotide
ggccatagacgcggtctcggaattatgccttctactgatggacacacaccacagataatgtgttctgtccgtagtcgggctaggaacatcctagtattgagattgtcggctctgttgaccatattacgcgacaggagaccggattccctacaat

SEQ ID NO: 1043 - DNA, 195 bp, Artificial Sequence
  Description of Artificial Sequence: Synthetic polynucleotide
tgtgggttagttatcgccacggggaaccttgcgtacaaggggcacctttgcgtacaccagaggccacgtatttgtgggaatggaccgcacactagtgagcctctagtgcagcgctaactgtgccgtttctctctatatttaaagccactgaataatttatccgcagtaaagcggtacccattttagaaaccagtc

SEQ ID NO: 1044 - DNA, 96 bp, Artificial Sequence
  Description of Artificial Sequence: Synthetic oligonucleotide
catgacttagttcgtagcggttaggatcatagagccgtgttcactgtgcgttcccaagtacaacagcacccagcagccctgctataggtgagtata

SEQ ID NO: 1045 - DNA, 161 bp, Artificial Sequence
  Description of Artificial Sequence: Synthetic polynucleotide
gggcacataaatagagaagcactttaggaacctaacggtgaatatctggcctatgttcggcccggcagtcatattcggtcatttacggtgcgtggagtcgacgaaccgttcatccacttaggcctgtgcttaatccatcaaggtaatacctcgctaggcct

SEQ ID NO: 1046 - DNA, 82 bp, Artificial Sequence
  Description of Artificial Sequence: Synthetic oligonucleotide
ttgcatgcatctagtcccgtgaattttatgtttcaccgcacattggttcaccagtaagtcgccgggagaaggagacacctag

SEQ ID NO: 1047 - DNA, 10 bp, Artificial Sequence
  Description of Artificial Sequence: Synthetic oligonucleotide
ctaattgcgt

SEQ ID NO: 1048 - DNA, 89 bp, Artificial Sequence
  Description of Artificial Sequence: Synthetic oligonucleotide
ttcttaacatcatccactttgaggtagctgagtccgacccgtgaagggactagacgccgaccatcaactggtgagcttcgttggtaaat

SEQ ID NO: 1049 - DNA, 142 bp, Artificial Sequence
  Description of Artificial Sequence: Synthetic polynucleotide
gtgtgggcgtaagggctcacaacgaggggtctaccttgaacagtatccatagattgagctgcaaccatcgcctgcaattggcgcactcccaatccattgtcctgtatttatcgtggaaactcgacttaacataggtgagtct

SEQ ID NO: 1050 - DNA, 27 bp, Artificial Sequence
  Description of Artificial Sequence: Synthetic oligonucleotide
catggatcgttacgtcgtaagtcattc

SEQ ID NO: 1051 - DNA, 141 bp, Artificial Sequence
  Description of Artificial Sequence: Synthetic polynucleotide
gtagcaattagctgaacttatcaggatcatggactaagcaggggttgtcaattattttgtaatccgcagaacttctaatctgcctgagctctgaacgggtgcggcaatcgtaaccgcgaatgccagctcctcagctggccc

SEQ ID NO: 1052 - DNA, 5 bp, Artificial Sequence
  Description of Artificial Sequence: Synthetic oligonucleotide
gtact

SEQ ID NO: 1053 - DNA, 69 bp, Artificial Sequence
  Description of Artificial Sequence: Synthetic oligonucleotide
gagcaaatattactggcaaggatagccactggaacctcactcagacttacgtctttcgccggttgggtt

SEQ ID NO: 1054 - DNA, 173 bp, Artificial Sequence
  Description of Artificial Sequence: Synthetic polynucleotide
cggtcaccggaaatccagcatctaccttacaagaatgtcgattgaccccacggtttgcttaccactgtcggtgcttgaatgagatgctctttcgacccaaaatgagggtaagggaggttgtgctcggtcgtaacaacgctacaatatacaccggcacaacgttttcgtgtgtg

SEQ ID NO: 1055 - DNA, 153 bp, Artificial Sequence
  Description of Artificial Sequence: Synthetic polynucleotide
ttgccgtccgcacaagaatcgattgttccctacattagagtgtataacacgaacatacgggaatgcccagtgttttggctcttggacgtatcggctcagatgtgatgggcaccctgtgatagtacttacgtagaaaccgaagcgtcgcccatc

SEQ ID NO: 1056 - DNA, 39 bp, Artificial Sequence
  Description of Artificial Sequence: Synthetic oligonucleotide
tcgagtatcagctatgtttagggcgtatacccatctcga

SEQ ID NO: 1057 - DNA, 143 bp, Artificial Sequence
  Description of Artificial Sequence: Synthetic polynucleotide
atcttcagcgtcctggaatccctgtaggtcgccagtgcgcatgccttgcggaagtagcaattgggacgtgaagacttggcgttcgtttacaagcaaggccgacgtctccaaataccctatccagaatttataattgatcagtt

SEQ ID NO: 1058 - DNA, 15 bp, Artificial Sequence
  Description of Artificial Sequence: Synthetic oligonucleotide
aagtacgtcctttgt

SEQ ID NO: 1059 - DNA, 155 bp, Artificial Sequence
  Description of Artificial Sequence: Synthetic polynucleotide
aagggcttaaagtgccccatgcaaacggccacaaaggcgtactccggtctacttggtgccgctctgctccaatcactggtaatacgtgggtaataatcagtttggacgcgtattagcgtgttgtagccaccggacatgattcatgccttattaat

SEQ ID NO: 1060 - DNA, 188 bp, Artificial Sequence
  Description of Artificial Sequence: Synthetic polynucleotide
cattatttacctgctagactccgggtgcttgaggcttcttcctaactagtagaacgtagctaagtcatttccggaccgtttgcccggcgggcataccaaaagagactgcggaaagccggaaagcggtaacagctggactaggagcacgtttctatcgaatactcgattgcgtatctagcccagtctat

SEQ ID NO: 1061 - DNA, 31 bp, Artificial Sequence
  Description of Artificial Sequence: Synthetic oligonucleotide
aatcatcctctcggtttggagatagacttcg

SEQ ID NO: 1062 - DNA, 70 bp, Artificial Sequence
  Description of Artificial Sequence: Synthetic oligonucleotide
catgaacaacttgcacccaggatgggatatctgaggtatcagtccagtgtagttcacttctgcttccgag

SEQ ID NO: 1063 - DNA, 64 bp, Artificial Sequence
  Description of Artificial Sequence: Synthetic oligonucleotide
gtagtcttaatagtccaggcgtgactaacccaatgatctactcataccgcgatctgatggggcg

SEQ ID NO: 1064 - DNA, 158 bp, Artificial Sequence
  Description of Artificial Sequence: Synthetic polynucleotide
ggccgacttccaacttctatctacgtcctaggaacatgggtaactcggctaaggcaatgccacggacgcccgaccaattactatcgccctgcctgcaagagctggatttgaagctatatgttgacgtaagaatgttgagatgttcgaacttgcttgtg

SEQ ID NO: 1065 - DNA, 94 bp, Artificial Sequence
  Description of Artificial Sequence: Synthetic oligonucleotide
cctttcgtgcatggtcgctccgcacatatataatagcgtcggcagctcagcccgaaagtaatagtggagtacgtgctttgttacgcgatcataa

SEQ ID NO: 1066 - DNA, 5 bp, Artificial Sequence
  Description of Artificial Sequence: Synthetic oligonucleotide
atctg

SEQ ID NO: 1067 - DNA, 195 bp, Artificial Sequence
  Description of Artificial Sequence: Synthetic polynucleotide
gctcgttggattcataggccggggggtcaatggcttatgaggctatgacagccgagtggtccccttaccctttctaactgagatgaaagccaggcattcgtgaaagaatacgcgcggcgattacaccgcttcgtaacgcggcttcaaagtttgtttattaaccccaccatagattcaaatccacgttttaggtca

SEQ ID NO: 1068 - DNA, 104 bp, Artificial Sequence
  Description of Artificial Sequence: Synthetic polynucleotide
gtcaaacgttggatggcagactcccacacgccaacgtctgtagatagacgtttacggctcggacaggtctagtgtaatcaagtttatcatgtacgactggtccc

SEQ ID NO: 1069 - DNA, 199 bp, Artificial Sequence
  Description of Artificial Sequence: Synthetic polynucleotide
ccttggtggcaattaggcgtccatagtactttgtttgagggggccccttagtcgccgctgtttatgtctaaagcccaaggcagtaagtatgcaacccttccttgggtgtagaaacagttgactacatgccctacgtggagagcttaaatcgtagccgacaatcatggtaccacctcataactccaaagaggtcgtctag

SEQ ID NO: 1070 - DNA, 64 bp, Artificial Sequence
  Description of Artificial Sequence: Synthetic oligonucleotide
gtcccgtatattcgcccgtgggaacacgtctacgaaaatctgtggatgccataactgatcatgg

SEQ ID NO: 1071 - DNA, 141 bp, Artificial Sequence
  Description of Artificial Sequence: Synthetic polynucleotide
tattgtctctctctatatcctcccggtgatggccgattggattgaggctggttgagaccaacacggtagcatcatcaggttttactaacgtagctgaggcaatgacgccgcccgcgataaactggacctgcatgacaaata

SEQ ID NO: 1072 - DNA, 65 bp, Artificial Sequence
  Description of Artificial Sequence: Synthetic oligonucleotide
ccgctaaggaggatcgtatcatacctgccctctcccgacgatgtgcatagaggttaggtatttaa

SEQ ID NO: 1073 - DNA, 153 bp, Artificial Sequence
  Description of Artificial Sequence: Synthetic polynucleotide
tacacgttacgaggaagtcctcgagctaggtgctacccgcacgttcagagttaaatcactttcagttccgatcgttcgttcggtcttgcaccatgggtctgtatattaatacacagagcaagttggccgctatcaagcagggcacactgggaa

SEQ ID NO: 1074 - DNA, 171 bp, Artificial Sequence
  Description of Artificial Sequence: Synthetic polynucleotide
cccggttagtttgacgtggttggaacaggagtgtccttggaacattatcggaaaaacccaccgctactaagaatacggaccttcctcccccgtaacaaaggcaatgccaagtgtcagtttttcgagcgtgataggttctccacgggcaggaatgcactttgctagcttttt

SEQ ID NO: 1075 - DNA, 11 bp, Artificial Sequence
  Description of Artificial Sequence: Synthetic oligonucleotide
gtattcagtct

SEQ ID NO: 1076 - DNA, 104 bp, Artificial Sequence
  Description of Artificial Sequence: Synthetic polynucleotide
gcttttctttcaagggatgcgtagaaataccggctctgatgatatacagtgatacgaccacaggccgtccgggtcgcaacagcctatggccggtacaactttat

SEQ ID NO: 1077 - DNA, 105 bp, Artificial Sequence
  Description of Artificial Sequence: Synthetic polynucleotide
tacccattaggtttattcatcgctcgcaatgataaggggcgcaactgggaaaggtgggcgcctttacacgctgctcaatagctgacagtcactctcgtgttaaca

SEQ ID NO: 1078 - DNA, 151 bp, Artificial Sequence
  Description of Artificial Sequence: Synthetic polynucleotide
tactaagatgagtacatcctatttccgcccgaaaatctatcgaacccacgtcgatcagggggcgtattcgtgctgtctacacagtcatgggattcaatgtagtccaacactgctttggactcgctggggcgtgtctgcacatagaagagtt

SEQ ID NO: 1079 - DNA, 8 bp, Artificial Sequence
  Description of Artificial Sequence: Synthetic oligonucleotide
agatgctc

SEQ ID NO: 1080 - DNA, 68 bp, Artificial Sequence
  Description of Artificial Sequence: Synthetic oligonucleotide
cgccgagttgtcggcagaatcacaacattttctcagtcggctgcgtttatcaaatgaggactgcaacg

SEQ ID NO: 1081 - DNA, 67 bp, Artificial Sequence
  Description of Artificial Sequence: Synthetic oligonucleotide
gctcatgatgcgttaagtagctttggacgcgacgatccgatacccagcagttacgtacatttttagc

SEQ ID NO: 1082 - DNA, 43 bp, Artificial Sequence
  Description of Artificial Sequence: Synthetic oligonucleotide
gggaaagactgcagatgtgtcacttttacccttgtctgaactc

SEQ ID NO: 1083 - DNA, 54 bp, Artificial Sequence
  Description of Artificial Sequence: Synthetic oligonucleotide
aacccacatcgcatggtcgttccgaaagttatcggtgatgctttgatgcgctaa

SEQ ID NO: 1084 - DNA, 121 bp, Artificial Sequence
  Description of Artificial Sequence: Synthetic polynucleotide
ataagccactccccagatcgctggaacttccgcgtaaatctcctactgaaacatgggtggaggaacgtggtattctgaccttaagagtgtaatttcgccgtggttcgaaactctagggcct

SEQ ID NO: 1085 - DNA, 67 bp, Artificial Sequence
  Description of Artificial Sequence: Synthetic oligonucleotide
gttgagcggctactgcatgttcactgaggggccacatcagagctgtcaacttttcacctaatagtta

SEQ ID NO: 1086 - DNA, 149 bp, Artificial Sequence
  Description of Artificial Sequence: Synthetic polynucleotide
cagctgacgctcgaacgagtattgttagcctggggcggatcattcgagttgttacgccccattagttcctatagcaccagctgtcagacccgtgcctacataggagatacgcaattctttagtttcagtaaccagagcagcgattagga

SEQ ID NO: 1087 - DNA, 47 bp, Artificial Sequence
  Description of Artificial Sequence: Synthetic oligonucleotide
ttcggttacctattgttaatcgcgaaaagacgcgactgcattcgtgc

SEQ ID NO: 1088 - DNA, 188 bp, Artificial Sequence
  Description of Artificial Sequence: Synthetic polynucleotide
agcctagatcaggtcgtaccggccaatcgcgcggttgccgcgtttctggcaacgaaacacagaatcacatgggttttttcgtctggtggcttaactttagcacacaacgggatttcacgtgaccgggacttttacaaaagggaactctttcttgcactgtgagcaaacccctctgaaatgagagctga

SEQ ID NO: 1089 - DNA, 200 bp, Artificial Sequence
  Description of Artificial Sequence: Synthetic polynucleotide
gaggcccctcctatcgtggtatgttagttgccaacattttgtcgctctccttgcgctttaacgcccccaataagaggggacagaggtttttgtgtgcacttccgaaatgaattgagagcctcaaagatggcccgcaggatctaagcggctcacaagaagtccacattagacaagcgatgtcctcttaagatacgcatggg

SEQ ID NO: 1090 - DNA, 132 bp, Artificial Sequence
  Description of Artificial Sequence: Synthetic polynucleotide
ctcccgtagcgcaggactaaaattgttatggcacccgggccgctgagccatacgtgaccagcccttaggggatgtagcatttaacagtaagttgatatccttatcttaagacattagccctggacgtgagct

SEQ ID NO: 1091 - DNA, 56 bp, Artificial Sequence
  Description of Artificial Sequence: Synthetic oligonucleotide
gcggtactaaagcccgtgtgtcgaattatgactagctacgcgtaacgccatgactt

SEQ ID NO: 1092 - DNA, 53 bp, Artificial Sequence
  Description of Artificial Sequence: Synthetic oligonucleotide
acttaagctgtcagacgctctgtaaacggcagctctatcgagtaattgctcgg

SEQ ID NO: 1093 - DNA, 5 bp, Artificial Sequence
  Description of Artificial Sequence: Synthetic oligonucleotide
acgtt

SEQ ID NO: 1094 - DNA, 101 bp, Artificial Sequence
  Description of Artificial Sequence: Synthetic polynucleotide
ttgaaagcgaggcatgcacatgtgacacgggccggaccttttgtggaccgcccccatccacatcacaatacggaattcttgaattttggcgaatggtttta

SEQ ID NO: 1095 - DNA, 37 bp, Artificial Sequence
  Description of Artificial Sequence: Synthetic oligonucleotide
agcaacatcggtcccgacttctgatttacgagaggtt

SEQ ID NO: 1096 - DNA, 196 bp, Artificial Sequence
  Description of Artificial Sequence: Synthetic polynucleotide
gagagcgacaaactctgacttcggagatatcgaatgtcgccttgttctgcgtgaaagctgcaaaactccagtcacgtgcctgtagtatgccaaggtggaatacatcccttcgatgtccatacaaccttgattcggggttcggagtgtactcttccaggtcggtttacatacgactgccgcgacgggacaaaatcat

SEQ ID NO: 1097 - DNA, 48 bp, Artificial Sequence
  Description of Artificial Sequence: Synthetic oligonucleotide
atatatggctgtgcgagcctactaagcggtgcttaactcaggcaactc

SEQ ID NO: 1098 - DNA, 134 bp, Artificial Sequence
  Description of Artificial Sequence: Synthetic polynucleotide
atccaggcaccatgtttcaggttcttcatccctacacgaaagcgcaacgcgtacattgctttcaatcgtgagggaggacccggttagtttgctaggatgcaagttacgcagtcgaaatgccatgtcattgtcag

SEQ ID NO: 1099 - DNA, 24 bp, Artificial Sequence
  Description of Artificial Sequence: Synthetic oligonucleotide
gaatacccattgagtgcaggcttc

SEQ ID NO: 1100 - DNA, 46 bp, Artificial Sequence
  Description of Artificial Sequence: Synthetic oligonucleotide
tgctcttgatgctatacttagggataagacatgcaggtaccgcctc

SEQ ID NO: 1101 - DNA, 64 bp, Artificial Sequence
  Description of Artificial Sequence: Synthetic oligonucleotide
aactccgggtaccgtccttatgggtgttataactcatagcataggacggattccaagtgcagcc

SEQ ID NO: 1102 - DNA, 124 bp, Artificial Sequence
  Description of Artificial Sequence: Synthetic polynucleotide
tgctgatagcagcgagtgtttgagctaacctgatggcgataaacactatacggtatcaatccacgcacacgttaacgcatgtttgggtcgctgccagccctcgggactttacaggaatcctagt

SEQ ID NO: 1103 - DNA, 52 bp, Artificial Sequence
  Description of Artificial Sequence: Synthetic oligonucleotide
agtttgccagtcgacggaacccagccttgttaacgttgaagtcagatgccta

SEQ ID NO: 1104 - DNA, 91 bp, Artificial Sequence
  Description of Artificial Sequence: Synthetic oligonucleotide
acactcttgaggctttgcattgcgaacgtaaagcggctgaagaatcagatactgcaactcagctgtcggcatctaacgttcctggtttcgt

SEQ ID NO: 1105 - DNA, 153 bp, Artificial Sequence
  Description of Artificial Sequence: Synthetic polynucleotide
ccaggttagaacaaccaccaggacgctacaccagtggctcgcttctaccgtgtgtatcaggcctccctcagtatgtacctgtgtcggtttcatagaaacgacacgaatgttgcaattgaatcattcattatgttatctgaggggacgagggcg

SEQ ID NO: 1106 - DNA, 152 bp, Artificial Sequence
  Description of Artificial Sequence: Synthetic polynucleotide
caccttttgggtgcacgaaagcctaggttatgccgtcggcacatcgatctaagcaaaaagtagcaagtcgacgtgccatatgcctcggtagtcctctagcgttaaacttactaatgactccggaatatcgccggggccatatttggagtgtc

SEQ ID NO: 1107 - DNA, 78 bp, Artificial Sequence
  Description of Artificial Sequence: Synthetic oligonucleotide
aggggacactgtaacagaacccttgagctttaatgacatgcgccatctcgttggtcgtccatggaattccttgtacag

SEQ ID NO: 1108 - DNA, 68 bp, Artificial Sequence
  Description of Artificial Sequence: Synthetic oligonucleotide
ccggtcaagctaaatcgatcgtacaacacccgggcagttcctttatgacgcacttgggggtgatatta

SEQ ID NO: 1109 - DNA, 160 bp, Artificial Sequence
  Description of Artificial Sequence: Synthetic polynucleotide
cggtccgacgcgacctagtagctcggcgaattcaggacacctaaattttctagaactagtgtgcccggctggatagaggtggggaggtaagagctatatccctcgctctaccaatagatgttcaactgtcttgtctaaaagccacactttctctacggga

SEQ ID NO: 1110 - DNA, 176 bp, Artificial Sequence
  Description of Artificial Sequence: Synthetic polynucleotide
ggttcttgccctctaccaaggttaagaaacatctgcaactacacagtcatagtgggcgttccaagtgttctgatcctcccgaccgttaggcgcaccatagacaaagggtgaccaccattagtgtgttaacccgccgcaagcattgtaattagaggctgtggaattcgtgtggcatg

SEQ ID NO: 1111 - DNA, 161 bp, Artificial Sequence
  Description of Artificial Sequence: Synthetic polynucleotide
ggacctagatctagagattgccatctgcatcagtgctattatcgtccagagacgttactccggattagctagtcccacgccaaagttcctgctagagcttgatttaatagcaagctcccgtgggaactcccattagagagagttagtgagagggccttccg

SEQ ID NO: 1112 - DNA, 6 bp, Artificial Sequence
  Description of Artificial Sequence: Synthetic oligonucleotide
gtttac

SEQ ID NO: 1113 - DNA, 182 bp, Artificial Sequence
  Description of Artificial Sequence: Synthetic polynucleotide
cgtgatcagaataagatattttaggtactggttcttgctacgtggcttgccgcaacaaaatgccgggtttctctcgccgtccacctcaaattagtgccagccgggctttacacgacgagcagagggcggttgaagtggctctgactctaaaaagctatggataccactaaacttgtgcctac

SEQ ID NO: 1114 - DNA, 175 bp, Artificial Sequence
  Description of Artificial Sequence: Synthetic polynucleotide
agcctaattattagatattacatattaccagtaccactagcggccaggtgaatttgcccacggctgcttttgttttagatagcaggtagtccggcggctcggccatcgcgaaactccaccacgcaagctagtggtagtgtccagtttatagcagtgatggaacctggctcatcag

SEQ ID NO: 1115 - DNA, 96 bp, Artificial Sequence
  Description of Artificial Sequence: Synthetic oligonucleotide
aagaacctgcaatgctttactggtgtagcgaatgtcacgcgtccttacgcggtaaatggagtgccgtatgggcattacttccttggcccaccaaaa

SEQ ID NO: 1116 - DNA, 11 bp, Artificial Sequence
  Description of Artificial Sequence: Synthetic oligonucleotide
tttagatctgc

SEQ ID NO: 1117 - DNA, 25 bp, Artificial Sequence
  Description of Artificial Sequence: Synthetic oligonucleotide
gaagggacaagttcttccatcgttc

SEQ ID NO: 1118 - DNA, 57 bp, Artificial Sequence
  Description of Artificial Sequence: Synthetic oligonucleotide
ctctgccagcacaaacattcacatcgttatttgcatgtcggacgggagatattggcg

SEQ ID NO: 1119 - DNA, 156 bp, Artificial Sequence
  Description of Artificial Sequence: Synthetic polynucleotide
gtggctgtcgggactaatgaagggctagaaagccagagcgacggtttgtatccccttcagcaacgtgctggtgtgaacgcaaaacgtcgacattcgcttagcggtcttgttaaccattttagcgatcccacgcaactgattagttaacactccact

SEQ ID NO: 1120 - DNA, 149 bp, Artificial Sequence
  Description of Artificial Sequence: Synthetic polynucleotide
cggtgccagaggcgttctacccgagttggattagaccacctcgatctaggttctaatcctctagattcggtgatgaaggcttgctaaataaagactcttaactcttctacattaccgagctagagggagcggtgacgtagactccccag

SEQ ID NO: 1121 - DNA, 102 bp, Artificial Sequence
  Description of Artificial Sequence: Synthetic polynucleotide
atgaatacggtatttagatgtcacggctcgccgagcaaacacgttggcgagcgtcggtacaaagttccctaggaactctcatgtacttgtgtcaatccctgt

SEQ ID NO: 1122 - DNA, 18 bp, Artificial Sequence
  Description of Artificial Sequence: Synthetic oligonucleotide
tgtgcgtgaactccatat

SEQ ID NO: 1123 - DNA, 69 bp, Artificial Sequence
  Description of Artificial Sequence: Synthetic oligonucleotide
ctggttcatgttggcggtacaagtagggatcatacaagacttttactacctgaccactcccgcatggga

SEQ ID NO: 1124 - DNA, 159 bp, Artificial Sequence
  Description of Artificial Sequence: Synthetic polynucleotide
tccttatggtttatctggggctaaacaagttttagggtcactaactggagaggtcctgacgcaacttcgtgacagtggtgcgtcctaattcacatttttgagaccctattaaagagcgcggagccctaatgaatccacgatgaatgcggctcgcacccc

SEQ ID NO: 1125 - DNA, 191 bp, Artificial Sequence
  Description of Artificial Sequence: Synthetic polynucleotide
gaaaaagcacacaggcttttatcgttaataaaggtcggtgtggtgtgaaggtacgctctccctcgctttgtgtgcattagtcgttgaaacagaccgccccaaagcctaccaagcccacacttggttttcgtctgtaaaatgccacacgatcctactcgatagcctattaggtacggtgcgtatggtagcgg

SEQ ID NO: 1126 - DNA, 116 bp, Artificial Sequence
  Description of Artificial Sequence: Synthetic polynucleotide
tgcgtggctcagtctacactacgccggacgttttaaccgtatgtaaaaagtttgtaaagtgaaccatcccggctcggctctgagacaagccgcaaagcgactgctatggactttgt

SEQ ID NO: 1127 - DNA, 84 bp, Artificial Sequence
  Description of Artificial Sequence: Synthetic oligonucleotide
caggtcccggaccagtcagctagcacagtgacccaatcagagcatcgagttactacgtcggatcttaatggtatctggattgtt

SEQ ID NO: 1128 - DNA, 30 bp, Artificial Sequence
  Description of Artificial Sequence: Synthetic oligonucleotide
ggactaaattccacctcgtggttatagcgt

SEQ ID NO: 1129 - DNA, 136 bp, Artificial Sequence
  Description of Artificial Sequence: Synthetic polynucleotide
agcactttctcttggttattctcgggcgcgaagttcctgcttaatgtcggttctgctaacaagaacgccgatcaaggaagatccagttgaagcaacgtccaatgcgttaaacaggcgggcgtgacttcaccatacg

SEQ ID NO: 1130 - DNA, 173 bp, Artificial Sequence
  Description of Artificial Sequence: Synthetic polynucleotide
catccctacagattgagtgctggtgggatgttaaaaccttttcgatcaatttcgagtgaacctccgtttagcaaacgaaatttcgaaacccgaagtcagcgcgcgaagacctatactcaatccgtgcgagctctaatccactggtttcgggttgaggtccaggcagggttcgc

SEQ ID NO: 1131 - DNA, 73 bp, Artificial Sequence
  Description of Artificial Sequence: Synthetic oligonucleotide
tttcgggaacagaagactttgctcgacggaacggctgtgtaaagacagaccgtccccatgcttatttattgcc

SEQ ID NO: 1132 - DNA, 151 bp, Artificial Sequence
  Description of Artificial Sequence: Synthetic polynucleotide
ggtctcttttgcactaactgattctgtagctaacccggtaacggctttcattactaaagcgcggaaccgtactgtcaaacgacatgcccagtgcacctcgaatgtactagtgtcacctaggggtaatagcaggatagggctcgctggttat

SEQ ID NO: 1133 - DNA, 22 bp, Artificial Sequence
  Description of Artificial Sequence: Synthetic oligonucleotide
ccaatttatgtaggtgtccacg

SEQ ID NO: 1134 - DNA, 24 bp, Artificial Sequence
  Description of Artificial Sequence: Synthetic oligonucleotide
tacccacggcaggggtacattatt

SEQ ID NO: 1135 - DNA, 75 bp, Artificial Sequence
  Description of Artificial Sequence: Synthetic oligonucleotide
aaattcaaggtcgttgcaataggttgctttacgcaagcgcgtctacgcttgcatcgacctacggtcgactaagtt

SEQ ID NO: 1136 - DNA, 195 bp, Artificial Sequence
  Description of Artificial Sequence: Synthetic polynucleotide
agtataagcacgccatctacctatctcgcttaatgtgctacattgtacgcgatccggggttggtcagcaattgccctgagaacaagtttccccaacaatagagtagcgagtttttcgtacagtgcgcgcgacttcggcgtacgatactataaggacaggagagacatccactggtctcctttacgcgttgggtta

SEQ ID NO: 1137 - DNA, 157 bp, Artificial Sequence
  Description of Artificial Sequence: Synthetic polynucleotide
ccgttgagaaccgatgcccttctctagttggacatcgaacgcgcggggctctggaattcagcgtaggtggaaaagcgccgctacacagcaaaacattttgcttaccaccgtatctgttaaagcttgtagctcacattcgcttgtatgaggttcgaaa

SEQ ID NO: 1138 - DNA, 114 bp, Artificial Sequence
  Description of Artificial Sequence: Synthetic polynucleotide
cactgttctagtaagggccgtttggctcgaaggactacttcaacctatccagtgtacggatgtgacctgttaacaaggggtctaaactagtcggaatctcacctgcctgtaacg

SEQ ID NO: 1139 - DNA, 166 bp, Artificial Sequence
  Description of Artificial Sequence: Synthetic polynucleotide
atataccttgtatcaactctccgtgcccgcagatcttctgggcattttacggtctgagcgtaattcatgtatggatcaagagtcacggctagctccttagatagagcggtctgcgcacaagatgatcggggtatactctacggatccacagtaggaacacgactcg

SEQ ID NO: 1140 - DNA, 88 bp, Artificial Sequence
  Description of Artificial Sequence: Synthetic oligonucleotide
agtcgttggaagacagggtgaacaggtacacgtccgtatggctcattcgcacaggttcaatatcatagttactctttgcacggcccca

SEQ ID NO: 1141 - DNA, 44 bp, Artificial Sequence
  Description of Artificial Sequence: Synthetic oligonucleotide
tataattcacctagagttggatggcgccccagagttcgaccagt

SEQ ID NO: 1142 - DNA, 160 bp, Artificial Sequence
  Description of Artificial Sequence: Synthetic polynucleotide
tgccccatgtgccgcccgtggacactgaaactttgtccgggaagaaggtgttacagtcgaccggttacccgtgtgttaagataacacaaggagcaaacgtgcgtggttggttcggaacttactcctgttacgtatcatcataacaaatcccttatcgcga

SEQ ID NO: 1143 - DNA, 159 bp, Artificial Sequence
  Description of Artificial Sequence: Synthetic polynucleotide
agtccgcaaacggatttttaactcttgggaggtcggaacgactaccttgatcgtacgcgtggatcgacagaaatggccatcgcactgcacccaggttttatcccgagcacgagttacaaccctttttaagtataccattgcttggcatggggttagtac

SEQ ID NO: 1144 - DNA, 197 bp, Artificial Sequence
  Description of Artificial Sequence: Synthetic polynucleotide
ttttgagccctctgtaaagttcgagtgacgtacctgaacgactggaaggaatctcgcgcatgtatgtattgaaaccccttgcaatccttcggatcgagtggtcatcaggctacgcggaacctctccgttgcagggtgtacctgggatagcaccaacaacattacagataaggcgcgcatcatcttttaattggccag

SEQ ID NO: 1145 - DNA, 60 bp, Artificial Sequence
  Description of Artificial Sequence: Synthetic oligonucleotide
gccgccctataggtatcagccttggttataaaaattgcttcgaccgcggacgatgacagt

SEQ ID NO: 1146 - DNA, 71 bp, Artificial Sequence
  Description of Artificial Sequence: Synthetic oligonucleotide
gtgcagctaagtgtgctactcaaatgctcggtcaaattttagaggctaactgggccgtcactccaactgtt

SEQ ID NO: 1147 - DNA, 112 bp, Artificial Sequence
  Description of Artificial Sequence: Synthetic polynucleotide
ctaggcccacatcttcttagcccgagtaaaacccctattggcggtgaggacctatgcagatgctagacaggatgcattctgtgtgggccacctttgacgaaagtaagtcatt

SEQ ID NO: 1148 - DNA, 69 bp, Artificial Sequence
  Description of Artificial Sequence: Synthetic oligonucleotide
cttatcatagcctatgagcatcatgggtatccacggtgacgaaagagggtatctctctcggtactgcac

SEQ ID NO: 1149 - DNA, 93 bp, Artificial Sequence
  Description of Artificial Sequence: Synthetic oligonucleotide
aggtgcgcgtagtttaattaccgcagctctgcgtctagaacagtgcgatctctagggcgaagtaacagacccgaatagaccgtcacttctttt

SEQ ID NO: 1150 - DNA, 179 bp, Artificial Sequence
  Description of Artificial Sequence: Synthetic polynucleotide
ttatcgcggagataatgtactgtatgccttagatcccacgacaaaggtctgacacagctccgctaccgatctgacagcgcaaatattacgtcattcctatacactaggtggtcgatcaggtggtggcaacgcgcttttcgcggcatagataaagagttccgcactcttggttgtagtcg

SEQ ID NO: 1151 - DNA, 5 bp, Artificial Sequence
  Description of Artificial Sequence: Synthetic oligonucleotide
gatct

SEQ ID NO: 1152 - DNA, 96 bp, Artificial Sequence
  Description of Artificial Sequence: Synthetic oligonucleotide
gatgtatgactatgacaatcgggatatcccctgttcatttgctccacacgggaaaggacacgaattcacaggcggccattatgtcatggggctcct

SEQ ID NO: 1153 - DNA, 179 bp, Artificial Sequence
  Description of Artificial Sequence: Synthetic polynucleotide
aagttttacattctgtctgtttgcatcttgcgcctcatactcgtgcgcgccacgggtaagagaagcgaccctaccctcgacatacttggcatagccaggacaagtggcgttggagacgtcgtgagtcaaattgagtaaaatcaagggacgtcttttcattctcaaggacgttgcctaac

SEQ ID NO: 1154 - DNA, 157 bp, Artificial Sequence
  Description of Artificial Sequence: Synthetic polynucleotide
ataaaccgacttgcggaaccgccacatataccgccgacacacgcgcaagagtgctgtaccgactaaaggcgcgtcacacgggaccgatatgaggatagttgcgatgggtcttttatgtatccacatttgactgagtattcttttcaggtcttgttcg

SEQ ID NO: 1155 - DNA, 92 bp, Artificial Sequence
  Description of Artificial Sequence: Synthetic oligonucleotide
ctcagcagtgatctcttcatgtcaaactccagtaatgatactcactgaccgtgcctggcgggcgttagaaagcgagtaaatcgtggttcgca

SEQ ID NO: 1156 - DNA, 176 bp, Artificial Sequence
  Description of Artificial Sequence: Synthetic polynucleotide
gttagctaggaggcagccattataatggagccttgttccatactaaaatgccactgcgtagtggggaattccctactgaccaaaacggaggttacggaggggttacctcactacatacgatatctccgatacccagggggtagaccaacccttcagcaggtgcttcttttttgcgc

SEQ ID NO: 1157 - DNA, 180 bp, Artificial Sequence
  Description of Artificial Sequence: Synthetic polynucleotide
tcggagtccaggctaagccccgacccgctgaaaggctgcaagattgcgtcagaaaagttacctgcctcgcatttgaccgctccttgttatttccgcgctctctggaggttacataacagacttagaggacatgctggaagcgcagaaaccatctgagtgactgtgatattaatcatggtt

SEQ ID NO: 1158 - DNA, 50 bp, Artificial Sequence
  Description of Artificial Sequence: Synthetic oligonucleotide
ttgcgggaccaattaggttatttactaaggcctctagagccctctcagag

SEQ ID NO: 1159 - DNA, 156 bp, Artificial Sequence
  Description of Artificial Sequence: Synthetic polynucleotide
gggattcacgatttatgcatcgtgactgagcaggatgtgctgcagcggtcagatgtgcgaggcatttccagccataacatcctgaatgcctaacccctctgcttaactacctctaaggctcgcctcaacgtcgagttaggataataggcggataat

SEQ ID NO: 1160 - DNA, 126 bp, Artificial Sequence
  Description of Artificial Sequence: Synthetic polynucleotide
cccggcctatgggttacaaatcgcaaaatgtcacagaacgcagatctcagcactccccgtatgtacattttcttgtcaggccagaagtcgatggagggctggatccaggtgtattttatgtcgatc

SEQ ID NO: 1161 - DNA, 57 bp, Artificial Sequence
  Description of Artificial Sequence: Synthetic oligonucleotide
ctgcaacattttctcggaaaaggcctcgaagcgtggcgtgattccagatttaacgct

SEQ ID NO: 1162 - DNA, 60 bp, Artificial Sequence
  Description of Artificial Sequence: Synthetic oligonucleotide
aggttttccctccagaaatgcagagcataggaccctttaagctgtccagacctgggtgat

SEQ ID NO: 1163 - DNA, 197 bp, Artificial Sequence
  Description of Artificial Sequence: Synthetic polynucleotide
gaaaccgtgcttcccctgcttggcgtctctcataaattgcgcggctcttgcgctgttatgtagctgaaggcatgtgacctaatcttagccccaaacgggttaagttgttcgagggtgataagacggctcataccacagtcctaacggagcaggaggtcaactttacagtacaccgcgagatttatcgcaaaatgact

SEQ ID NO: 1164 - DNA, 114 bp, Artificial Sequence
  Description of Artificial Sequence: Synthetic polynucleotide
gagcacttgacgcgtgtagattgtttacacgtgttagccgagacatacccagagctagttagaatacgggatcccgtttgcatgaccatcctatggcggactatctctatcgac

SEQ ID NO: 1165 - DNA, 37 bp, Artificial Sequence
  Description of Artificial Sequence: Synthetic oligonucleotide
tttccaggcattccactaggggggctcaatatgacat

SEQ ID NO: 1166 - DNA, 141 bp, Artificial Sequence
  Description of Artificial Sequence: Synthetic polynucleotide
gacgccgcggtgactaccttatcggcagatgactcgctgtgggtcccgtattccacaatgatgataaggaaacacggtggtcgatctctcgcactaccacgatattgggttttcgactggaaaaagctttgcatcaaatct

SEQ ID NO: 1167 - DNA, 60 bp, Artificial Sequence
  Description of Artificial Sequence: Synthetic oligonucleotide
acttgaaaccatggttgcttcgagtagcgccgtgtgcctgtagcgaacaattaccatgac

SEQ ID NO: 1168 - DNA, 69 bp, Artificial Sequence
  Description of Artificial Sequence: Synthetic oligonucleotide
ctaccgtgggaacccgttgctcgggttctgagcacttgaaatacggagcagaaagttcatcatccttta

SEQ ID NO: 1169 - DNA, 11 bp, Artificial Sequence
  Description of Artificial Sequence: Synthetic oligonucleotide
ctagttcgtta

SEQ ID NO: 1170 - DNA, 138 bp, Artificial Sequence
  Description of Artificial Sequence: Synthetic polynucleotide
cgttttgagattgtagtgcagaactcgtgttggagagcactgtctacgaacacactatgattcccaccgcttgtagggtcgccaaactaccttaggatacgttctatttgggcccaagcagcaaagttctgccgacag

SEQ ID NO: 1171 - DNA, 14 bp, Artificial Sequence
  Description of Artificial Sequence: Synthetic oligonucleotide
cgtttttacgcaag

SEQ ID NO: 1172 - DNA, 183 bp, Artificial Sequence
  Description of Artificial Sequence: Synthetic polynucleotide
ctctagtgttccttaagttggctgtgttagggtctatctctaaccctctattttggtagtgaacggatcatgcagcagctatgatgttaatacgctcacagcggagacgcggagaaagttccccatcgaccttcctgaaacaggaattctgaaagcaaaggcgcgcacgacgtgtcttacgcc

SEQ ID NO: 1173 - DNA, 165 bp, Artificial Sequence
  Description of Artificial Sequence: Synthetic polynucleotide
tataaggcggaagacctcaaacgttttcgatctacgagtgtaaaccaggtcctgtgccagggtagcactctgtgctgttatactagtctgaccgcgtgagaggcacaccaccaactccctcagctagccaacgtgtgggaactcgaattagtttgtgtaacgttt

SEQ ID NO: 1174 - DNA, 89 bp, Artificial Sequence
  Description of Artificial Sequence: Synthetic oligonucleotide
ttattagtgtacctcgataggtagagcgcgccatttcactattggagtgcgcataggtgcactccggcaaaactgtagccacccgtata

SEQ ID NO: 1175 - DNA, 121 bp, Artificial Sequence
  Description of Artificial Sequence: Synthetic polynucleotide
gcacctacccacgataaacgtttcatctacttgtgtgggtcgtggatcgcaagcattaatcctggcagttgggagtggcacctcctctatggaagatgacaaaccaagctatggtatcgct

SEQ ID NO: 1176 - DNA, 98 bp, Artificial Sequence
  Description of Artificial Sequence: Synthetic oligonucleotide
cctcgagttcacttgcttcggaggtctggaatcatcgacggtacaataaatgcggtaaacgacagttcgctcgagtagaccttcgttccatgttagac

SEQ ID NO: 1177 - DNA, 47 bp, Artificial Sequence
  Description of Artificial Sequence: Synthetic oligonucleotide
ggcttatcggtgttcacacaaatggacgcgatatctccaattgtgct

SEQ ID NO: 1178 - DNA, 35 bp, Artificial Sequence
  Description of Artificial Sequence: Synthetic oligonucleotide
agatgacattagaggctccctattttcgagccgtt

SEQ ID NO: 1179 - DNA, 197 bp, Artificial Sequence
  Description of Artificial Sequence: Synthetic polynucleotide
taccccgttttcgggacccgctataaaatgaaggtaccccacggaggacctatcgtataatccaatagcgttgcgcgatttatcgtcccggcggggtagacctccaactgggataatgtcttattacataagacctctccgaaactagtgtccggccaggagctagattacgggattcttctggattgtaggcgaat

SEQ ID NO: 1180 - DNA, 41 bp, Artificial Sequence
  Description of Artificial Sequence: Synthetic oligonucleotide
gttctcgcataatgagctctgttggtcagatgccaaacagc

SEQ ID NO: 1181 - DNA, 20 bp, Artificial Sequence
  Description of Artificial Sequence: Synthetic oligonucleotide
gatgccactagtaacctggt

SEQ ID NO: 1182 - DNA, 144 bp, Artificial Sequence
  Description of Artificial Sequence: Synthetic polynucleotide
cggttcgttagctttcgatcgcggtgaaagataacccctattcgtacgacttcaggcccccctgataactccgcaaagcatgtgactagagcgtttgaatatctcgaatgatccgagaattgtgaaagtacccggggttccgag

SEQ ID NO: 1183 - DNA, 53 bp, Artificial Sequence
  Description of Artificial Sequence: Synthetic oligonucleotide
ccctgtaatttagatccgggcacccgttacatgaaaactttacctggtggagg

SEQ ID NO: 1184 - DNA, 12 bp, Artificial Sequence
  Description of Artificial Sequence: Synthetic oligonucleotide
catagcgtcagt

SEQ ID NO: 1185 - DNA, 32 bp, Artificial Sequence
  Description of Artificial Sequence: Synthetic oligonucleotide
tcgtacacctcaagtcggctgagtatcaggat

SEQ ID NO: 1186 - DNA, 119 bp, Artificial Sequence
  Description of Artificial Sequence: Synthetic polynucleotide
tttcctaggattgcggtcgggctggctgaatgtttgcgaatgttcggatcatcagccctgaaacgccacgctgcacaacatttgtcattgccagtgaccttaggataaacgacttaaca

SEQ ID NO: 1187 - DNA, 156 bp, Artificial Sequence
  Description of Artificial Sequence: Synthetic polynucleotide
aggggaaagtcggatagccgcggaatttgtcccgagcttagtacgccagcccaccttgaattgtgtttctcagggggccactgtataatcttgtaccctttgagaatttgcgtacaatgagttcgccacaattaacgaactccgaaatggccgcac

SEQ ID NO: 1188 - DNA, 47 bp, Artificial Sequence
  Description of Artificial Sequence: Synthetic oligonucleotide
tttcgttgttaacatcaatactgatggggtaacgcccgccactgagt

SEQ ID NO: 1189 - DNA, 16 bp, Artificial Sequence
  Description of Artificial Sequence: Synthetic oligonucleotide
agggtgaccttaatcc

SEQ ID NO: 1190 - DNA, 174 bp, Artificial Sequence
  Description of Artificial Sequence: Synthetic polynucleotide
gcctactactaggggataactgattccaccgcgcaggatctttcgactcaacatgtctgactagtgttgtgctactacctgggaaaagctgatgcttgtctttaaacattcaatatacgcaaggcatcgccactggaacaatgtgggtcgccgggacttgagctggcaatccgt

SEQ ID NO: 1191 - DNA, 112 bp, Artificial Sequence
  Description of Artificial Sequence: Synthetic polynucleotide
cgctaacggtctccttcccggcgaagggatggaaaattgacatttaatgattttgcacatgtctcagctgagacgaactagcgcgctgctttctaaaatgctgaccgggacc

SEQ ID NO: 1192 - DNA, 99 bp, Artificial Sequence
  Description of Artificial Sequence: Synthetic oligonucleotide
tgagcttgagagactgaataacgccccgatgcatagtcctcaaacaaccttcagcggtgtccgttgttatacccatgggtgtactaggtgcttatgtac

SEQ ID NO: 1193 - DNA, 195 bp, Artificial Sequence
  Description of Artificial Sequence: Synthetic polynucleotide
atattggacggcatgcttgagtacaatagactcccttgtgtggaatacaccagtccggagcgcgcattgaggttgtatagcttaatgcataaaacctctgtctttcggggtctctatacaacctaaagactctgaaacgagagacccatagaattctgccgccttgctcgcggcgcccctgagtggtctatggta

SEQ ID NO: 1194 - DNA, 144 bp, Artificial Sequence
  Description of Artificial Sequence: Synthetic polynucleotide
cccacctggaacagttacggtttatgtccccaaggcctgggcatggtctagtccgcttaagggcttttactcgtagtccgtattgtgcacaagtacatactatagaatatacacacgtaggaaatggcggtgccacagcgagct

SEQ ID NO: 1195 - DNA, 17 bp, Artificial Sequence
  Description of Artificial Sequence: Synthetic oligonucleotide
tatggggacctctatca

SEQ ID NO: 1196 - DNA, 57 bp, Artificial Sequence
  Description of Artificial Sequence: Synthetic oligonucleotide
tcgcatagtcgactggtggaaaaggcgacagcctttcgtacaatctgttctcgcata

SEQ ID NO: 1197 - DNA, 182 bp, Artificial Sequence
  Description of Artificial Sequence: Synthetic polynucleotide
cccgacagtagatagtgattcgcgtagaagcactagatgttactttcgcgccccggctcccatacccccttgtgtgcagtccggaaagtgaatttaacgagactcaggggttagatcactctaccgggcggatacttcgtgattaactgattgcagcgaatttacttggcacatatgaagct

SEQ ID NO: 1198 - DNA, 111 bp, Artificial Sequence
  Description of Artificial Sequence: Synthetic polynucleotide
atcaacaagctcattgtcctctcattggccgaaagactgcctgctcccagggagggattaacgactgctatgggccgtctggactaactatttggtcgggataaatatttc

SEQ ID NO: 1199 - DNA, 164 bp, Artificial Sequence
  Description of Artificial Sequence: Synthetic polynucleotide
acttcagccaaagatattgattgacaactcccaccgtgtacgaacgatgtcctaatctgcatggccaactagtcccctgtgagccgttacagcaggttaggtctatatgctttgtggggtggatcgggagctaagctcaatcggacacgtctcaagttcagcag

SEQ ID NO: 1200 - DNA, 36 bp, Artificial Sequence
  Description of Artificial Sequence: Synthetic oligonucleotide
gtagaagtactaatggcgcaactcgttgagctctcc

SEQ ID NO: 1201 - DNA, 44 bp, Artificial Sequence
  Description of Artificial Sequence: Synthetic oligonucleotide
ttcgccccgggaacaaaattgtaggttgcctttcccagggaata

SEQ ID NO: 1202 - DNA, 155 bp, Artificial Sequence
  Description of Artificial Sequence: Synthetic polynucleotide
tacatggggcgcgctgccaaactaatcgttactgtcactgaaccgttctgactgtgaccgtatctaacatccaggactcaatgttgttagggatcgatactatatacatgggccaggacatatcgggggacttactgttcaattgacgcctccgg

SEQ ID NO: 1203 - DNA, 133 bp, Artificial Sequence
  Description of Artificial Sequence: Synthetic polynucleotide
ataggggagcctagtgccatagcttatgatgaccggcgaaggccaattaggacgcactcctagcgtctaatgacacaatgtctaatcctctgcgagttggtatgcagcatactcggtcgcttctattcagact

SEQ ID NO: 1204 - DNA, 60 bp, Artificial Sequence
  Description of Artificial Sequence: Synthetic oligonucleotide
gtggtgtccccccaccgaccatggaggttgagaatttctagcatcgctctggataataaa

SEQ ID NO: 1205 - DNA, 66 bp, Artificial Sequence
  Description of Artificial Sequence: Synthetic oligonucleotide
agatacaatgcctgagtgacgtcgcgcctctcgccttaaaagaggctttctacttttagatagggc

SEQ ID NO: 1206 - DNA, 106 bp, Artificial Sequence
  Description of Artificial Sequence: Synthetic polynucleotide
tgaacgaacatgcgcttcacgccgagcgtccagtaacctatgatttctaccctttatgatatgggtatgcaatcactatcaggaggttcgaaccgtggcgtgtcga

SEQ ID NO: 1207 - DNA, 176 bp, Artificial Sequence
  Description of Artificial Sequence: Synthetic polynucleotide
cctagtgcccctttataactcgttgaagaaaatggcgggtttacctggccacctgtgaacggattaagtgatcctcaaagcgtgggacccccgacaatttgccctaaccattgcccgcgaagttggtcacaatagcggaatggggagtatataatcgtataagtctccgcgctgtt

SEQ ID NO: 1208 - DNA, 185 bp, Artificial Sequence
  Description of Artificial Sequence: Synthetic polynucleotide
ctcctgggttataagtcgggagatagactagacgctaatattcgtcttatccgtgtcctagctgtaatcactccccgttctaggaaggcgcaacgaggggtacgccaccttaaccggtctcaaggaacaacttgttatgctgccggacttagcggaatatgggtttagcatcagaattccacacg

SEQ ID NO: 1209 - DNA, 184 bp, Artificial Sequence
  Description of Artificial Sequence: Synthetic polynucleotide
ccggggctcttttccaggatcttcgaactacattggcgatccattaggtctcataagcgcggtcttgcaccatgactagcatagacaaatctggagtgtaccggtgtgccctcatacaggctatgtttcggacggaaaagacgctgcgggtcacgacgacctaattactttgcaaaagacgatt

SEQ ID NO: 1210 - DNA, 196 bp, Artificial Sequence
  Description of Artificial Sequence: Synthetic polynucleotide
gcgaagcacatcccaacatcactatcgcattccacgctgcttgccgatcgccattttttgttgtgcatagtctgcccaggagcaggcctaccggagagcccgtctgcgtgttggccagccgatacatgaccagggtatacggacgctcccatgccgagaggcttggggggcccggcatacgtattggaaggtggac

SEQ ID NO: 1211 - DNA, 64 bp, Artificial Sequence
  Description of Artificial Sequence: Synthetic oligonucleotide
tggtgcgacattggcagcgatcactgtggactcgctcaatggggcacatcgatgccttcgcacc

SEQ ID NO: 1212 - DNA, 77 bp, Artificial Sequence
  Description of Artificial Sequence: Synthetic oligonucleotide
gacagcgctgtacgggccagtgtgaactgacactgctgactggtgatcccccagtgtatccgagtgcaccctgtacg

SEQ ID NO: 1213 - DNA, 34 bp, Artificial Sequence
  Description of Artificial Sequence: Synthetic oligonucleotide
gcgcatatgtatggccttccgacagggcatccgt

SEQ ID NO: 1214 - DNA, 138 bp, Artificial Sequence
  Description of Artificial Sequence: Synthetic polynucleotide
cgtctcccacgacgtctaacggggaagccgcggtgcctaagtggccgcttggctccacaccaccggtcctagatgagcgccccatttcccataggaggttagagaaccgattcttgggagctgtgactgttcgtggaa

SEQ ID NO: 1215 - DNA, 147 bp, Artificial Sequence
  Description of Artificial Sequence: Synthetic polynucleotide
ggccggtggcaccaggggctaacgggctcaagacgagacctgatatagtgcccccgcagtcgattcaactgtgatatagtaatcaattgaggtcatggcctgtgctcgtctggcgcctagggcagtgccccgaccgcatccctgtcc

SEQ ID NO: 1216 - DNA, 194 bp, Artificial Sequence
  Description of Artificial Sequence: Synthetic polynucleotide
aggtcgggcaccttggtcacccgcacgctacagttcgcggtccccttgcgagtggtgaagacagctctcatcccgtgtactacaggtctgtcgccctcaggggttgagagtactgggagcgtatcgggtacaactgcggggcccccaactgcaccgcctcagaatatgacgaagcaacgggctaatctggcttt

SEQ ID NO: 1217 - DNA, 83 bp, Artificial Sequence
  Description of Artificial Sequence: Synthetic oligonucleotide
gataatgccacccggcgaactgcggtgatgtgagtacccggatactgctagtttgccatcagttcacgtgggcagctcgcctc

SEQ ID NO: 1218 - DNA, 23 bp, Artificial Sequence
  Description of Artificial Sequence: Synthetic oligonucleotide
cgtacgatcttacggctgatgct

SEQ ID NO: 1219 - DNA, 6 bp, Artificial Sequence
  Description of Artificial Sequence: Synthetic oligonucleotide
gctatt

SEQ ID NO: 1220 - DNA, 21 bp, Artificial Sequence
  Description of Artificial Sequence: Synthetic oligonucleotide
gccctggagtaccctggatat

SEQ ID NO: 1221 - DNA, 91 bp, Artificial Sequence
  Description of Artificial Sequence: Synthetic oligonucleotide
gcactgtatcagtgtctggccagtgttagaggacgcccagagcgctccaagcgttagccggtgtcacctcaccagtgcagccggctgatta

SEQ ID NO: 1222 - DNA, 44 bp, Artificial Sequence
  Description of Artificial Sequence: Synthetic oligonucleotide
cctgtctagggggtgatggaatcccccgcagtccactctatgag

SEQ ID NO: 1223 - DNA, 82 bp, Artificial Sequence
  Description of Artificial Sequence: Synthetic oligonucleotide
cggtccgtcgaataataggagatgaagcccccgctcgtttgcccggagctgggccctgagcttccccagaatttgtaacgtg

SEQ ID NO: 1224 - DNA, 121 bp, Artificial Sequence
  Description of Artificial Sequence: Synthetic polynucleotide
cccctaacgggacgctgtgtcccctgaggtcggctggtgagggaaggtccattggtcactttgtcaaagactctactttacgcacaggtgaatgattacgggcaccgccggcccagcacgc

SEQ ID NO: 1225 - DNA, 68 bp, Artificial Sequence
  Description of Artificial Sequence: Synthetic oligonucleotide
tgacgtgccgtgcgcgaggtccgccggtacaaaaccgcatttccctagatcataagtgtgctggctcg

SEQ ID NO: 1226 - DNA, 131 bp, Artificial Sequence
  Description of Artificial Sequence: Synthetic polynucleotide
taaaataggcccttagagtccggatccgacttgggtaggtgtccgaatttgcccgcattctcaggacgcaccgtctcccggtgcctcgtcggttggcgaaacgctaaccgcctatgcaaccgggggaaggc

SEQ ID NO: 1227 - DNA, 174 bp, Artificial Sequence
  Description of Artificial Sequence: Synthetic polynucleotide
ctacaagcatgggttcacgcccgacagtgcttcaccctcactccggtcgcaagggccaggtcaccacctgatctgtctggatgcgaaagaccattcgtgggaactgttcgtctcctgggcatcgatgagcgggtgcggggatcccgtctcgatgaatccagagatcgagcggtc

SEQ ID NO: 1228 - DNA, 34 bp, Artificial Sequence
  Description of Artificial Sequence: Synthetic oligonucleotide
tcggctcctactgcgtcgaggtaatagcccatgg

SEQ ID NO: 1229 - DNA, 99 bp, Artificial Sequence
  Description of Artificial Sequence: Synthetic oligonucleotide
gtgctgctggggacgtctaccccggaatctcacgaccgccacgttcggccgctgtgaagggtgcagcattcgtgtaggaactacgctactacttaatcg

SEQ ID NO: 1230 - DNA, 168 bp, Artificial Sequence
  Description of Artificial Sequence: Synthetic polynucleotide
taaggaaaatcggcaagcggggtcagcctcgacgcgaaacttcgttgcctacggtacgcaacccgttcatctggaggaagtcagtgctgacatgtctatcagcggaacgccggcccggtcttcgccctgtgcttgggtccggcaggtcgattattgctacacgcgccc

SEQ ID NO: 1231 - DNA, 72 bp, Artificial Sequence
  Description of Artificial Sequence: Synthetic oligonucleotide
cgccggcgtgtgttgtctgctaggatctgcaccgccaaaaaccaaattcggcgcgctagacttctgctggga

SEQ ID NO: 1232 - DNA, 122 bp, Artificial Sequence
  Description of Artificial Sequence: Synthetic polynucleotide
ctacgaaggtcgaataactccaaggctgtccaggactcaagctgtcgggcctaaggtctaaaatcccgtttagaccgcgggtcctgggtggcagggttccgtccttccgggcctccgatcga

SEQ ID NO: 1233 - DNA, 154 bp, Artificial Sequence
  Description of Artificial Sequence: Synthetic polynucleotide
tctaggggggtttctggtcattaactcatatcccagctccgcacctccgccgcccttgcaagacgtcgtcaaccgccggcgctaagtacgcacactgaagcatgacgcgcctcgtggatgcgggaattcgagagtgccgtagtgatacgtgggg

SEQ ID NO: 1234 - DNA, 142 bp, Artificial Sequence
  Description of Artificial Sequence: Synthetic polynucleotide
acgaaccaccagtgcattagcctggaacggttcaacttcacaggacgcgacccgcgcttcggtcggatctagcatggcgatgccttaaaccaccagtctccaagattgggcgggtgggcttgagcgcttcggtgtcgcctgt

SEQ ID NO: 1235 - DNA, 150 bp, Artificial Sequence
  Description of Artificial Sequence: Synthetic polynucleotide
cacgaaagtaaagtcggacgctagaccttcgcccgatgcagcgcgtagatcatgggttacagccgcgtcggccagtattggggtcgtggctgtttgcccctcacataccacttgccgaacgcccgttattcgcacggatgggcgaagccg

SEQ ID NO: 1236 - DNA, 116 bp, Artificial Sequence
  Description of Artificial Sequence: Synthetic polynucleotide
ccgggctatgtcatcgagtccaggggtggtggaccaatctccctagtgggcacgcactctactatcatcacactcgcgcgacagcaaatggtgctctaaatgggcgcggtgcttgc

SEQ ID NO: 1237 - DNA, 76 bp, Artificial Sequence
  Description of Artificial Sequence: Synthetic oligonucleotide
acatattccacacgcttgagcttgctcactagcatgcggtcgggacggaggcgccctggttaatgaatgccgctcg

SEQ ID NO: 1238 - DNA, 50 bp, Artificial Sequence
  Description of Artificial Sequence: Synthetic oligonucleotide
atcagccggcgtaggacgccagcgatagtgctgactggttcctcacgatc

SEQ ID NO: 1239 - DNA, 155 bp, Artificial Sequence
  Description of Artificial Sequence: Synthetic polynucleotide
ttatagaggaggcatgtgcaatagcagccgtccggtcgtcttgctcttagacgctctgtgtgttgcgtctccaggcgagcgggacccacgccgttcagtgtagactggcgttttcaagggacctgcaacaaaccagcccgcaccagcaggcgcac

SEQ ID NO: 1240 - DNA, 66 bp, Artificial Sequence
  Description of Artificial Sequence: Synthetic oligonucleotide
tgcaagatccgcagtagcgagtgcgttcattcgtctcggttcacccgaccctcagttggggaaacg

SEQ ID NO: 1241 - DNA, 88 bp, Artificial Sequence
  Description of Artificial Sequence: Synthetic oligonucleotide
cgcagctcttaggagtacggccttcatcatttccgttagacgagattatacgcccagactccttccgggcagaggcggccgatgcggg

SEQ ID NO: 1242 - DNA, 125 bp, Artificial Sequence
  Description of Artificial Sequence: Synthetic polynucleotide
cgctcccgcggcggagccgtggcatggccggggtctgcatacccacatctgcgacggggcgtcctcgatatagcagaaagcaaggcttctatcgtgaactattacaccgttcccattggagttga

SEQ ID NO: 1243 - DNA, 47 bp, Artificial Sequence
  Description of Artificial Sequence: Synthetic oligonucleotide
tctatcagctctgctagcgggactggacgggtcatccgatggacacc

SEQ ID NO: 1244 - DNA, 104 bp, Artificial Sequence
  Description of Artificial Sequence: Synthetic polynucleotide
tgtctatgcacatcttctctccgacagtacattggggacccaggccatgtgcgaggtccgcggatggtcccgaggtccgcaggaacaaggaccgccgacttgtt

SEQ ID NO: 1245 - DNA, 166 bp, Artificial Sequence
  Description of Artificial Sequence: Synthetic polynucleotide
cgcggagtgcagccggtgcgggttcttgctttcgatacccagccatactcgggcagccttattccggtttggaagacatggccaacgcctaagacgcaaagtattagcggcatacctcccatgacccgtggtgaggcgtccccgacgcagtttcggacgcagttga

SEQ ID NO: 1246 - DNA, 132 bp, Artificial Sequence
  Description of Artificial Sequence: Synthetic polynucleotide
gcgggaaattgcaactgtacgaacccggtatctggagccggccttgatgaggcggttgcagcgcacggacgactcgttgactcgtgcttctgcttaattactgagcacgcctcgtccccggacctcaaggca

SEQ ID NO: 1247 - DNA, 140 bp, Artificial Sequence
  Description of Artificial Sequence: Synthetic polynucleotide
ccgtctgggtattcccggtgcgtgaaagggactacttggatgcaacggcccggacggctacgttccatattccgccaagggtcgcggcggacgtacgcctgacttactacaagtgagcatagccccgtgctgcagcatca

SEQ ID NO: 1248 - DNA, 138 bp, Artificial Sequence
  Description of Artificial Sequence: Synthetic polynucleotide
ccacttgctcgaatgcaaaagtccaggtgcgtgcggaatccgtagtgtgatatcggccggcgctctcggccgctagagccccgatgtgggttccgagaccagcttcatacagccgacagtggtagtgctgacccctat

SEQ ID NO: 1249 - DNA, 88 bp, Artificial Sequence
  Description of Artificial Sequence: Synthetic oligonucleotide
ccggagcgggcccctaagtgataacagcaacttatcctcgatttatttgggacgcgttgccgaacggtgctcccctccggcaggagtg

SEQ ID NO: 1250 - DNA, 107 bp, Artificial Sequence
  Description of Artificial Sequence: Synthetic polynucleotide
gtgattgccacagataccaaacagggagattagtcggtcacacgggttgcctcgcgggtcccggcgccggctgtcggatcagttcgtgttgcaacattgcccacacc

SEQ ID NO: 1251 - DNA, 58 bp, Artificial Sequence
  Description of Artificial Sequence: Synthetic oligonucleotide
tcggcctgtaccctgtcgaatacgaactggccggtcaccatggctaggtatgtggcca

SEQ ID NO: 1252 - DNA, 15 bp, Artificial Sequence
  Description of Artificial Sequence: Synthetic oligonucleotide
gatgcccctaagtgt

SEQ ID NO: 1253 - DNA, 18 bp, Artificial Sequence
  Description of Artificial Sequence: Synthetic oligonucleotide
tggctcaagggactcttc

SEQ ID NO: 1254 - DNA, 87 bp, Artificial Sequence
  Description of Artificial Sequence: Synthetic oligonucleotide
cccatagttgccacctggttttgccaggtacctcactcggaagaggcacgtcgcgggtggtgtagcgccgaatggaccaaccctgat

SEQ ID NO: 1255 - DNA, 62 bp, Artificial Sequence
  Description of Artificial Sequence: Synthetic oligonucleotide
gtaagccagccataaccttaacgcgtctgagggctgcagcagattgtcgcgttcgtcgctcg

SEQ ID NO: 1256 - DNA, 13 bp, Artificial Sequence
  Description of Artificial Sequence: Synthetic oligonucleotide
ctgcgtattctga

SEQ ID NO: 1257 - DNA, 23 bp, Artificial Sequence
  Description of Artificial Sequence: Synthetic oligonucleotide
aacatccgggtcgaggtcctttt

SEQ ID NO: 1258 - DNA, 144 bp, Artificial Sequence
  Description of Artificial Sequence: Synthetic polynucleotide
gggctctcttttttcgtctgacgtcccagcaatgcatcaggggacgttgcacgggtgcttctagaatagccccggagagccgagggctctaacaagctcggccacgtcgccgccgcgatggaagcgctccagtgctacatagta

SEQ ID NO: 1259 - DNA, 113 bp, Artificial Sequence
  Description of Artificial Sequence: Synthetic polynucleotide
ccaagggcacctgcaatgtcgactcgctttgagtaacagtggtgttccgacctgtgccctcgacgtgtataatttcccacgtggccacagcggtaggcacacttcggcgggag

SEQ ID NO: 1260 - DNA, 51 bp, Artificial Sequence
  Description of Artificial Sequence: Synthetic oligonucleotide
tcaagggggtcggcggatccgaggacgcaaccgttaccttatctgcactct

SEQ ID NO: 1261 - DNA, 163 bp, Artificial Sequence
  Description of Artificial Sequence: Synthetic polynucleotide
ctgcgctcataagtaataccacgggcgtactccggcccccgcccggactgtacactctgtccttgaggggccatcccgcagcgcttgggccggacgaccagttgaggcatgactttggtcattttgaagcaagtttaccgagtaccaagggcgaggtgtgtac

SEQ ID NO: 1262 - DNA, 121 bp, Artificial Sequence
  Description of Artificial Sequence: Synthetic polynucleotide
cgtcgggccggcaacaaagtggatcccggttggcggttaaagtggccagaggagatatgtcctcccacccggcttgcctaagtcgtgcacgacacctaggacctatcacttgcgctcgttg

SEQ ID NO: 1263 - DNA, 95 bp, Artificial Sequence
  Description of Artificial Sequence: Synthetic oligonucleotide
cagcagagggagtcgcttggtgcgaaccactgtttcttagtcgtgacggaccgcctgtaacgaaggtcactcggtcttcaggcagcctgaacccc

SEQ ID NO: 1264 - DNA, 103 bp, Artificial Sequence
  Description of Artificial Sequence: Synthetic polynucleotide
cagtggctgttcccccacggactgcttgtattttggctacacgagcctgcttgaaggaggagcaacgttaagcgcgttcactcgcaccatctgagcacgggcg

SEQ ID NO: 1265 - DNA, 48 bp, Artificial Sequence
  Description of Artificial Sequence: Synthetic oligonucleotide
ggggggccgcagtcacctcgagtcctcttagatctgcagcacgttaat

SEQ ID NO: 1266 - DNA, 179 bp, Artificial Sequence
  Description of Artificial Sequence: Synthetic polynucleotide
gcttgtggtagcttacgggggttgaccgttgaagccccctcatcggtcgctgaggttcatccacaaacctggctgcgatatatactgccgcacccatcacggacggagcgtcacctgggcagatcaaggacatcttagtcagtgggccggcggaatcgaggttcctcgctgccgccata

SEQ ID NO: 1267 - DNA, 175 bp, Artificial Sequence
  Description of Artificial Sequence: Synthetic polynucleotide
gttggtcttatgttaggtgggttggccggcgatttcatcgtttggactcgaatggaagcccctccagccatccactgggggtccggtatgcaaccgggcaccacctcatagtcaggcgcgtacaaagcgcaggtataccccggccacgacaatcagcgacccaggtatgcgtcgc

SEQ ID NO: 1268 - DNA, 198 bp, Artificial Sequence
  Description of Artificial Sequence: Synthetic polynucleotide
cactcggaacagcgttaagtgctcctgggatcgcatcgcggtcgcaaatgacgattgccaacctggggaccctgaccagtcattagatctgggagggactctgacggcggttgacaaaaagtgggtgcccggcgggcgggatcgacaaactccgtctctttggtcattgtactgtacccgatgtctcccccccgcgcc

SEQ ID NO: 1269 - DNA, 171 bp, Artificial Sequence
  Description of Artificial Sequence: Synthetic polynucleotide
ctgcctgggttcatgtgctaacacccccttgagcgatgactggagtctatgagggatcgcgtcgcgacccagatgaggcggagattgccccacggtatgaggacctgttccccacatcgacccagccagtagcggtgtctgcaacgccgatctgggcctagcttacaggta

SEQ ID NO: 1270 - DNA, 135 bp, Artificial Sequence
  Description of Artificial Sequence: Synthetic polynucleotide
tgctcgacaaaggggagaacgcgtcggctgcatcgtctacggggtatcgcgtccaagccccgcactgcactcgcgtgaatacccacagccgcgacggtctggataagcagcctttcggtagcattgtgtcgattt

SEQ ID NO: 1271 - DNA, 156 bp, Artificial Sequence
  Description of Artificial Sequence: Synthetic polynucleotide
tgaagaccctcggttcaggctgcagggcagtaacggcaggcaaacccatttggtctgtggtaacgactgccagctgataattttgtacccggcgcatccacatgtgagacaagtcccctacgctcgccatggccgttgcgctggtcgctggccgga

SEQ ID NO: 1272 - DNA, 175 bp, Artificial Sequence
  Description of Artificial Sequence: Synthetic polynucleotide
cggcaatgcgggcgcgcgagctctgtcccagtaaaaggcgcagccggagaacctgcctcgtcttttagcagggcaagccgactaccgttcgtcggtaaatatacttcgcccggacaccgtcaattatggctgatgcaaccgcccggagcggggttgtcttaattggtgcgactcc

SEQ ID NO: 1273 - DNA, 49 bp, Artificial Sequence
  Description of Artificial Sequence: Synthetic oligonucleotide
atttaggcgtcacggtaacagcgcctcgtatgtctgctggacgccatcg

SEQ ID NO: 1274 - DNA, 68 bp, Artificial Sequence
  Description of Artificial Sequence: Synthetic oligonucleotide
tacatttgataggcctgagactggtatccaagttgggccgccaatggcgccgcccggcgcgttcacta

SEQ ID NO: 1275 - DNA, 198 bp, Artificial Sequence
  Description of Artificial Sequence: Synthetic polynucleotide
tccgcggactcctaataggcacacccgagtttcgtcgtcgggctgaggtggaacgagcgccaggcccacccatcaccgagaaggtccgcggctgttcctggcaggagaggggttgtcacattctacgttctaccgactccactaggtccttgtggccgcaacgccgtgaagagtgtcatcataggttagtctaacgcg

SEQ ID NO: 1276 - DNA, 38 bp, Artificial Sequence
  Description of Artificial Sequence: Synthetic oligonucleotide
ccgtctgcttgtaaggagtccagacggatttccgcacg

SEQ ID NO: 1277 - DNA, 126 bp, Artificial Sequence
  Description of Artificial Sequence: Synthetic polynucleotide
cagttgcaggaggatacgtgcggacgtcgcggggcccaggttgtggactccaaacgttgtgaacccgggctactcagtgacctgatcttcccctctccgaactaggcccagagagtgatcattcct

SEQ ID NO: 1278 - DNA, 144 bp, Artificial Sequence
  Description of Artificial Sequence: Synthetic polynucleotide
gcgtctggcttccattctacggagcacctctctcagtgcgatgattctgtcagtgaccgcgtgaccagccctgtgagaccgggtatcacgagtaagccggcacaccgtgcgggaagcgtgcacacgagtgatcccacagtggtt

SEQ ID NO: 1279 - DNA, 122 bp, Artificial Sequence
  Description of Artificial Sequence: Synthetic polynucleotide
gtcgagtcgaagagagctcgccgtttccgcacacctgtgttcacaagtgcgacgtttccaatggcacaacgtacctatagatgctgcatctcgggtgagactccccggccggtctggagcgg

SEQ ID NO: 1280 - DNA, 199 bp, Artificial Sequence
  Description of Artificial Sequence: Synthetic polynucleotide
ggtgttgtcggatgcccccgagctcggagggcatccttgtattcccactaacattctactcgcagccgcgacggaaatcctcatctgccggatgcctcggggtgcaacagccttgtgttgaaccgggtcgctagggaggcattgcccttaccattgaagcggcctgaggtcgcctgacagtgacgcggcaagacataca

SEQ ID NO: 1281 - DNA, 138 bp, Artificial Sequence
  Description of Artificial Sequence: Synthetic polynucleotide
ctacgacacgatgactcagcctcctcgataggtagtgcgtggttggctgcaagcctcgtaactggcgcggggcggattacgttcacggtcccgtcgacgcacaccaacggttgaggaacacaattgcgggccttcttc

SEQ ID NO: 1282 - DNA, 104 bp, Artificial Sequence
  Description of Artificial Sequence: Synthetic polynucleotide
ggaacgcaggtgccatagtgcgccggggcctctagaggagtcgaccccctctcctcggtggacacatataacgtcttttccctacggaaccgggaatgtgcttg

SEQ ID NO: 1283 - DNA, 66 bp, Artificial Sequence
  Description of Artificial Sequence: Synthetic oligonucleotide
agtccctcgacagccgtctccggtctgcatgttgtgctctgaggggaggccatccttcggaaaaaa

SEQ ID NO: 1284 - DNA, 49 bp, Artificial Sequence
  Description of Artificial Sequence: Synthetic oligonucleotide
agcctgtggtgctactgagcgttaagcgcctggctcaacttacgatcgc

SEQ ID NO: 1285 - DNA, 55 bp, Artificial Sequence
  Description of Artificial Sequence: Synthetic oligonucleotide
agggattttctgaatcatcggcccccctccggcgctcatcggggggaaatgatac

SEQ ID NO: 1286 - DNA, 87 bp, Artificial Sequence
  Description of Artificial Sequence: Synthetic oligonucleotide
tgggtagcacccccgcacgcactaaggacgtctgtattgcggtggattgcccctcagctggagtgatatccaagaggactcgtcccg

SEQ ID NO: 1287 - DNA, 113 bp, Artificial Sequence
  Description of Artificial Sequence: Synthetic polynucleotide
tgcatccgccggcgaaaaacttggggacggcgggggattacccgtccaccgcaaacttgtagtttcatgcctgggctgcgtgcgttctaaacttccagcttgcataaccgcgg

SEQ ID NO: 1288 - DNA, 93 bp, Artificial Sequence
  Description of Artificial Sequence: Synthetic oligonucleotide
cgagctgtgtacgccaatcgtctcacgtgatagtcgtgctgcccgcgaggagaccccgcctacaggttcatctggaggtacgagtgttacatc

SEQ ID NO: 1289 - DNA, 41 bp, Artificial Sequence
  Description of Artificial Sequence: Synthetic oligonucleotide
taagaccgcggggtgttcgcgagatccggtactctcctaca

SEQ ID NO: 1290 - DNA, 68 bp, Artificial Sequence
  Description of Artificial Sequence: Synthetic oligonucleotide
ttggctgtcaaatcggcgttcgctgccgatcgccttctcctgcgagaaaagctgccggcagaggtcaa

SEQ ID NO: 1291 - DNA, 155 bp, Artificial Sequence
  Description of Artificial Sequence: Synthetic polynucleotide
ggtgtcactctatttatcagtgctaatgcgaggcggctccgcccgcgggtagcgccgagaccaatctataacgttgccacggccaggtgcagcccgctccctaataggattcagagcacggggggtaacgctatttgacgtccacacgtgcggct

SEQ ID NO: 1292 - DNA, 165 bp, Artificial Sequence
  Description of Artificial Sequence: Synthetic polynucleotide
tgacaagattcagccgcgacgtaaaccttcatctccgtgctggtgctttgcgagaggctttacggcggccagcccgggcatctcattctgcccagcgcggtaggagggaactcagcgcaaatggaagtccgaactagtcttagacacgcgcgtggttccccgctg

SEQ ID NO: 1293 - DNA, 51 bp, Artificial Sequence
  Description of Artificial Sequence: Synthetic oligonucleotide
aggcccacagctgcccttaacgcgatgcagctcgtcgtagatatttcgggg

SEQ ID NO: 1294 - DNA, 59 bp, Artificial Sequence
  Description of Artificial Sequence: Synthetic oligonucleotide
caactcagggcacctccgctgaaagtcatggtggatccactcgggttactttgctcggg

SEQ ID NO: 1295 - DNA, 58 bp, Artificial Sequence
  Description of Artificial Sequence: Synthetic oligonucleotide
caggccgattgcctcgcaccccatatttgtagagtgagcctatgcgcgttgagccgga

SEQ ID NO: 1296 - DNA, 163 bp, Artificial Sequence
  Description of Artificial Sequence: Synthetic polynucleotide
aggtatcaacacccggttgacaggctagtagtaagcgggcaattgtaggggaagatcgccctgtcatagttgctctcgccgggtccgtgcgtgactacgcagcaatgtccagcatgtcgacgcgggttgccgcacctcccctcccgtggaggttcctaatacc

SEQ ID NO: 1297 - DNA, 49 bp, Artificial Sequence
  Description of Artificial Sequence: Synthetic oligonucleotide
aatggcgttccaaagggcatctccctgcttgacgaggtagtgcccttgc

SEQ ID NO: 1298 - DNA, 191 bp, Artificial Sequence
  Description of Artificial Sequence: Synthetic polynucleotide
atgcgccggtgcattgcgccgttccccctatggccatcaccgtactgccgtatcccagcagctttacctgtaatgtagagctatacatcggtgtgaggggcgaggtggctaaacacgggccaacgagtccgcgtgccagcgggcctcgggagcagacctataccctgtatgtcgagatctgacagccatgg

SEQ ID NO: 1299 - DNA, 128 bp, Artificial Sequence
  Description of Artificial Sequence: Synthetic polynucleotide
tggcatgtcagtgaggccggcgatagccagcgccccctatccccctctgaaggctgacaagaacactcttcccgttggtattgtacatcgtccgccatagaggggagtggtgtgatgcccgagagtcc

SEQ ID NO: 1300 - DNA, 180 bp, Artificial Sequence
  Description of Artificial Sequence: Synthetic polynucleotide
tcgaagctgctagggcgctcgagtgttgcgtgacttgctaagttagctgaggggactgcgcgacccatacgaacggccgcgccgtcagcatacctctatatggatctcccagcatcggcgcaccgaatctatgcgggctgaaaccatgtcctcaaagtcttggtcccacggggaccggcg

SEQ ID NO: 1301 - DNA, 78 bp, Artificial Sequence
  Description of Artificial Sequence: Synthetic oligonucleotide
cagccaagccttttatcacgcccgggcagtgctaatccaattacgtcgatgagcggagcagggccgtcggtcgcttgt

SEQ ID NO: 1302 - DNA, 105 bp, Artificial Sequence
  Description of Artificial Sequence: Synthetic polynucleotide
taaccgggcatcacacgtacctgaacttggtggggagccttcgcgctcctgtcaaaagcgtcaacgctttcctagaatcagcactggcggggcagcggctgcgtt

SEQ ID NO: 1303 - DNA, 141 bp, Artificial Sequence
  Description of Artificial Sequence: Synthetic polynucleotide
gttttgccccccaacacttggccgttttttgcaccggaccggaccgttccttgctcgccaggatgcgcagagggagaatgtagaccgacgagcaagctacggtgctgatagggagactattgcggtgacctgcacccgcac

SEQ ID NO: 1304 - DNA, 26 bp, Artificial Sequence
  Description of Artificial Sequence: Synthetic oligonucleotide
tccaatgttccgagatcgctcggatg

SEQ ID NO: 1305 - DNA, 126 bp, Artificial Sequence
  Description of Artificial Sequence: Synthetic polynucleotide
ggatcatgttcgttggccagcgattaggctcgaagtcatgagacaaccaaagcgaccttccccttagcctaggggcttcggtgggtagaatgcctctcgctacggccgctccgcgaaagcggctct

SEQ ID NO: 1306 - DNA, 34 bp, Artificial Sequence
  Description of Artificial Sequence: Synthetic oligonucleotide
agttagccgtttgcaagtgcagtcgcgctcccag

SEQ ID NO: 1307 - DNA, 71 bp, Artificial Sequence
  Description of Artificial Sequence: Synthetic oligonucleotide
ctctgcagcgaagggacgtttggctctggatctaaggcataccggccaagtctctcgtaacccagggtcgc

SEQ ID NO: 1308 - DNA, 101 bp, Artificial Sequence
  Description of Artificial Sequence: Synthetic polynucleotide
agggcccagcagctgttttgatctggaacgcggctgtgtcacacacgcagtcactaatcctacgcgctccgactagcgaggggtcctgtattggcgcaagc

SEQ ID NO: 1309 - DNA, 166 bp, Artificial Sequence
  Description of Artificial Sequence: Synthetic polynucleotide
gattgtgatggtctcaccccaacaccgagtacggtgtcccatttcgacatgccgccgagagcttcatgcggggccggtctggcggtatcctagtcgaagtgcgaagtctgcacctaccactgcatcagccatcaggtgttcggcctagagcccggtagggtaagca

SEQ ID NO: 1310 - DNA, 131 bp, Artificial Sequence
  Description of Artificial Sequence: Synthetic polynucleotide
cgtaccaggttgtttttaagactcgtaggaagctggccagggcgagatgctgcaagggctcggcggtttccgaacatgggtggccgctcgaaccgactcaccctcccatcaagtctctgcctccacgagag

SEQ ID NO: 1311 - DNA, 130 bp, Artificial Sequence
  Description of Artificial Sequence: Synthetic polynucleotide
gccctccagatgagaagaaggtagctctccgctttttcggcgcttcgcgcggatcactctcgttatcgcagttttcggggctaggcgagcacacagagacgcgcccgcaacagggtccagctaaacggtg

SEQ ID NO: 1312 - DNA, 190 bp, Artificial Sequence
  Description of Artificial Sequence: Synthetic polynucleotide
cttggggtcgatccaactggggttgagcttaacgcgacaccggctgagtgaccttcgggtcagtagcgcaccggaagaaagcctgggccaagcgccgcaccatggcctaccccagtagagcgccattagggtctctgacttctgggttgccgccagccctcttgttactaacgccgttgacagctggaaa

SEQ ID NO: 1313 - DNA, 77 bp, Artificial Sequence
  Description of Artificial Sequence: Synthetic oligonucleotide
agaagcgctccccattcgacggctcgctacttggctatgaggacgcgcactgttgcgatctcatagcaggtgaggcc

SEQ ID NO: 1314 - DNA, 135 bp, Artificial Sequence
  Description of Artificial Sequence: Synthetic polynucleotide
catcgaccgaaggcccgatgttacccccgggctaacagacccgtaactcccttgtgagggtctttccaatagtgtgcaggtcaaccctcaaggggtggtagtgtcctggagaggcagccgcccagtgctggttac

SEQ ID NO: 1315 - DNA, 16 bp, Artificial Sequence
  Description of Artificial Sequence: Synthetic oligonucleotide
tttcccgtctggaaag

SEQ ID NO: 1316 - DNA, 163 bp, Artificial Sequence
  Description of Artificial Sequence: Synthetic polynucleotide
gtacgattcagatgcattaggtcttcgacacaggccctgacaatgatgctcagcgaacctaagtatcttgcggggtggccctcccacgtcatgtccactcgcttatagcgagtcctgagggggcaatcgcagttgccacgcgctggtgcgccggggcactcga

SEQ ID NO: 1317 - DNA, 41 bp, Artificial Sequence
  Description of Artificial Sequence: Synthetic oligonucleotide
gggcgtgatcgaagcgaccagtcacgcccattttattccgg

SEQ ID NO: 1318 - DNA, 138 bp, Artificial Sequence
  Description of Artificial Sequence: Synthetic polynucleotide
cgacgacgaagtcggtgagggggaaccgccgcaatgattggtccggtccaccttacatgccgctctcgcctggcggacgcggtcgagtgcctcttaatgtcgtacgtccagtagcttcaaactcgatacgtcaggtac

SEQ ID NO: 1319 - DNA, 159 bp, Artificial Sequence
  Description of Artificial Sequence: Synthetic polynucleotide
tccggaagcttgggatactggggatgatgcccaactcgcagcgtctattgaagctgactgggtcggtaagatttcaaggctcgtaccgacgtacttgaggatgcgtggctcgccattgggctgaccaaatacccgggcccaggcgccccctccctccta

SEQ ID NO: 1320 - DNA, 159 bp, Artificial Sequence
  Description of Artificial Sequence: Synthetic polynucleotide
tcctgggggatactggcggagcccacagtatacgtaaacggacacagcatgcactctgcgcatcttggtcacccagctatagtcgacaggagcttcctatggttgttaattgcggcgcagcgcgagctcctctggcggcaattggcccactgggtgccc

SEQ ID NO: 1321 - DNA, 186 bp, Artificial Sequence
  Description of Artificial Sequence: Synthetic polynucleotide
ttggtagtgctctttgcacctcaccgccgttgaggacgcttgtttagccagctagttccgcgcggatgcctctggcgcaaaaagcagctaagcgatgttcgcccgatcatggggactcctcgagcttcgaccgcgaacgacggtagtcagtgcagaggagcacgtgctagctgacgccagcctaca

SEQ ID NO: 1322 - DNA, 48 bp, Artificial Sequence
  Description of Artificial Sequence: Synthetic oligonucleotide
tgccatcaggtatgtctacagcaggccccgctacctactgggggttag

SEQ ID NO: 1323 - DNA, 189 bp, Artificial Sequence
  Description of Artificial Sequence: Synthetic polynucleotide
gggtcccgcactgcggtttcggccgagccaaacatgatcggagctcctacaggcacactttcccgagaataaaggagacatgcgctacaggttccgacgagcggggagtcctccgggcggctgctagtccttactgttggtgatggcctacaggctgcgactgagatgcactttacatttcgccccgct

SEQ ID NO: 1324 - DNA, 190 bp, Artificial Sequence
  Description of Artificial Sequence: Synthetic polynucleotide
ggatccgccgcgaacccagcacaaggggggccatacagatctgttcgaagcatacgctcgctagattgccctcggcccgtgctcttttgtcaagtcacggtgctgcatgacagtgagagggaccgtagtgcgctcgtgctccggcacctgagcccaagaaagactgcgtgttattgtgcacgcccgtagc

SEQ ID NO: 1325 - DNA, 124 bp, Artificial Sequence
  Description of Artificial Sequence: Synthetic polynucleotide
cggtggcgaactccctttaggcagacgagccgggctagtgcttctctagatgagcgacgccagcgtcgtcgttggaacctgccaacccccatgcattactccataggggttccatgatacgggg

SEQ ID NO: 1326 - DNA, 149 bp, Artificial Sequence
  Description of Artificial Sequence: Synthetic polynucleotide
ggggcgcctgccccacccagacagaattccggtatattggcaccttgtcagccccaagcttccaggagagcctgctagccctggcttgaggcccagtgctatgagattgagggatctagcgttgaggttgtagacctgcacttgcagcc

SEQ ID NO: 1327 - DNA, 66 bp, Artificial Sequence
  Description of Artificial Sequence: Synthetic oligonucleotide
ttcctgcagggaagtcagtaggacttgagtccgtctattcggcgggactcccgacactcgactgca

SEQ ID NO: 1328 - DNA, 186 bp, Artificial Sequence
  Description of Artificial Sequence: Synthetic polynucleotide
ccggccggggtgggctaggagcatcgtcggcgggtttagctcacccagacataacactctgcgggccagtgtagtcatcggcgccatccgacaagggtggtttcgttccaagggaggctatgcgcccttcaccatcctcgatttgcatggtactaacaatatagcgcggaaaccttgcgcccacgt

SEQ ID NO: 1329 - DNA, 36 bp, Artificial Sequence
  Description of Artificial Sequence: Synthetic oligonucleotide
tggccgttgaccaataattcattagccgtgggcgcc

SEQ ID NO: 1330 - DNA, 85 bp, Artificial Sequence
  Description of Artificial Sequence: Synthetic oligonucleotide
ccagccttctggctgacgcgcctcaacctcaaggagttgcccgggttggccgaaagagagtatggcctcacgtatatgcacggtt

SEQ ID NO: 1331 - DNA, 190 bp, Artificial Sequence
  Description of Artificial Sequence: Synthetic polynucleotide
ggagcggggatctcggctaccgtggtgcctactgcctggatagaggtctggtatccccagggtgcgtccttcttgtacatcgaagggactacatgactcccccgggaaaagaacgcaaagttaaccagggagcccataaagccccccacggggcgttctgcggctctgtggcgtacctcctatcgctcag

SEQ ID NO: 1332 - DNA, 142 bp, Artificial Sequence
  Description of Artificial Sequence: Synthetic polynucleotide
gccagggcactcacacggtctcagggtatacccgatgtttcaagcagttccgtttttacgcggggggactcacgtaatctggttgtgggactcacgaccgtgatgttcataccggccggaccagaacagggctcacgccgcc

SEQ ID NO: 1333 - DNA, 54 bp, Artificial Sequence
  Description of Artificial Sequence: Synthetic oligonucleotide
ctctgacgctggctccggaggtatattaccgagcgatcacttgcgatccgaggc

SEQ ID NO: 1334 - DNA, 40 bp, Artificial Sequence
  Description of Artificial Sequence: Synthetic oligonucleotide
gtcgtggcccggtaattataagggaccgccccgcagtatc

SEQ ID NO: 1335 - DNA, 92 bp, Artificial Sequence
  Description of Artificial Sequence: Synthetic oligonucleotide
tattccgccggactatggttacaagtttccgtaccgagtgacgctaggcgcaaacccgacctcgcacccctgtgttggatgtgcggggcaag

SEQ ID NO: 1336 - DNA, 98 bp, Artificial Sequence
  Description of Artificial Sequence: Synthetic oligonucleotide
accctccgcgaggtaacagcaccaattgccttcccgcccacattgacggagggtgcctatgggtgatttgatgtgggggcgccttgcgacaattccag

SEQ ID NO: 1337 - DNA, 134 bp, Artificial Sequence
  Description of Artificial Sequence: Synthetic polynucleotide
catgacgcgacaagtcccacttgttcgactccgtgaccggggcaggggcccggccctagcaacagcgctttagagcgttaaggtgtcgcgggtgcatcgttcccaggcttgtcattaaacaagcattccgtgcg

SEQ ID NO: 1338 - DNA, 127 bp, Artificial Sequence
  Description of Artificial Sequence: Synthetic polynucleotide
gggagcggccgtaagttatcttctggcaaagccgtatcacgatagtagggcacaggctatgagcgtttacgcctgcgcagactcctgatgtactcacccgcccggcgaccctgctgagaggctccgt

SEQ ID NO: 1339 - DNA, 61 bp, Artificial Sequence
  Description of Artificial Sequence: Synthetic oligonucleotide
caagtcaccatcgagcatagcgcttcgggatcgtgcatcactgttggcggcatgaccgctg

SEQ ID NO: 1340 - DNA, 40 bp, Artificial Sequence
  Description of Artificial Sequence: Synthetic oligonucleotide
gcacggttctttcatgagcgctcggtaaccaacgccggga

SEQ ID NO: 1341 - DNA, 65 bp, Artificial Sequence
  Description of Artificial Sequence: Synthetic oligonucleotide
taccctgtgaatggcggcgagatacaactcacgcagagttggtttaggcttcctcgacgccggcc

SEQ ID NO: 1342 - DNA, 200 bp, Artificial Sequence
  Description of Artificial Sequence: Synthetic polynucleotide
agagagtaccggggccagccgtttcaagtacacacgcgactctaagtttcctctagcgtcgagggggacccgtcccaaggcgacgacttagctgaactggcatgtgatctaggcgaatcccgtattccgcggtgcctgcatgcgctcggcggcccgtttggccaactcggtatacggaaatccgctacactgcatggcgg

SEQ ID NO: 1343 - DNA, 98 bp, Artificial Sequence
  Description of Artificial Sequence: Synthetic oligonucleotide
aggccctagagtctggccgggccactctcagacctaccattggcttatgcgagacgggctcgcgtaagactggttcattccagtaggtacgcgcctag

SEQ ID NO: 1344 - DNA, 83 bp, Artificial Sequence
  Description of Artificial Sequence: Synthetic oligonucleotide
gtctctaccccgtaacgccctaaaagtcttctccggacggggttggtttctggaatgcaacgtcggtcacaccgcgagtaggg

SEQ ID NO: 1345 - DNA, 186 bp, Artificial Sequence
  Description of Artificial Sequence: Synthetic polynucleotide
gggcacatcactcctatctctgcgatcggtaacggaaggtgtctggcggcggattggcgcattctatgttttagcgggtcgccgctaccccagggtcccaagcacgcaccattgcggaagtatcgtcccggactctggacggtacagtggttgcttccaccggacccgacagaacactaactggag

SEQ ID NO: 1346 - DNA, 120 bp, Artificial Sequence
  Description of Artificial Sequence: Synthetic polynucleotide
tgacacttgagtgtaagaggatcgcgccgcagtgatagggccgtgacccgaccttgccgtcgcaaagcaccccgagttctaggaggcctgcaaggcgttctggttccccgcatgccatta

SEQ ID NO: 1347 - DNA, 61 bp, Artificial Sequence
  Description of Artificial Sequence: Synthetic oligonucleotide
aacgggcagcacagaacccgcgtagttctatcgcgtcttgtgcgtgcgtgataacctgccg

SEQ ID NO: 1348 - DNA, 105 bp, Artificial Sequence
  Description of Artificial Sequence: Synthetic polynucleotide
aggttggggtagcaagtaggtcggccccagggtgcgcgtattaacctaatcagcttcggctcccgatttggccaacacctcagctgacattgctagcggccgcca

SEQ ID NO: 1349 - DNA, 101 bp, Artificial Sequence
  Description of Artificial Sequence: Synthetic polynucleotide
tgtcagacgtgagggctcgcaggaaatcgcgggcgccgtaaccaaactcccgggactcctcccttcgagacacgttctggagggtcatctgcatacggttt

SEQ ID NO: 1350 - DNA, 143 bp, Artificial Sequence
  Description of Artificial Sequence: Synthetic polynucleotide
tatccaaccggtttccaagtgtaggtggcgttctgaaaggtcgacagtgcccgatcgggagagcctaacgtgagtcccgtctcttgtcgtccgcccttgagtcgcggcgccccaactgatcgacgggtgtccagaatcagaca

SEQ ID NO: 1351 - DNA, 80 bp, Artificial Sequence
  Description of Artificial Sequence: Synthetic oligonucleotide
agcttgacgagtagacacaaggttaatccctgcgacctgactgaccgcgagtggctccggtgccactgcgtctcgctagg

SEQ ID NO: 1352 - DNA, 87 bp, Artificial Sequence
  Description of Artificial Sequence: Synthetic oligonucleotide
caaggccgtccagtcaaccgcgccgcgcggactgttagtgatgcgtaaccaccgagtctcacttggtgtgacgtggccttctgaaga

SEQ ID NO: 1353 - DNA, 76 bp, Artificial Sequence
  Description of Artificial Sequence: Synthetic oligonucleotide
ttcacaccgaggaccctccggctagcgataagaccccttcacttcgcacgtagtgatgggtgggatcggtgttagc

SEQ ID NO: 1354 - DNA, 157 bp, Artificial Sequence
  Description of Artificial Sequence: Synthetic polynucleotide
tttcattacggtggcgccgccggagagatatgccaggcacccagggtggttagagcggagtctctttggagccacaataccgttaatttcggcccaatgccgccacataagcgtaccgttaatcggccgtcccgcgtgggagctccgcggcgcaact

SEQ ID NO: 1355 - DNA, 91 bp, Artificial Sequence
  Description of Artificial Sequence: Synthetic oligonucleotide
ggcctccgccgggactcaaggccgcctctgcgaccaggctgatcagacacaatgctactcgcgattggtcgtttagatctcgtgagagagt

SEQ ID NO: 1356 - DNA, 35 bp, Artificial Sequence
  Description of Artificial Sequence: Synthetic oligonucleotide
cactagtgaagctactgtacccgctgtcagggtgc

SEQ ID NO: 1357 - DNA, 114 bp, Artificial Sequence
  Description of Artificial Sequence: Synthetic polynucleotide
gagttcgaatgcgacatccatactggcacgagagcaacctcgcccggtccttccagtgcgtccttagcctgcttcggaatcgggtgagcaagtgtcggcgcaactgtcgcggta

SEQ ID NO: 1358 - DNA, 197 bp, Artificial Sequence
  Description of Artificial Sequence: Synthetic polynucleotide
ccgaacgttttggttgggattcaaactgcttgaatttacctgtatggccgttacggagtcttggcccatccggcgagaacccagatcccagcggccactccacagcgactgtgtcccgcgtatgtaggcgcccgggtacacctgtgcccagaggagcgctgggtggtggtaggaccccccctaacccgagtagagaa

SEQ ID NO: 1359 - DNA, 10 bp, Artificial Sequence
  Description of Artificial Sequence: Synthetic oligonucleotide
cgcgcttaag

SEQ ID NO: 1360 - DNA, 147 bp, Artificial Sequence
  Description of Artificial Sequence: Synthetic polynucleotide
ggtcatagcgggatcccagccttttcgtacaaaagacggctcttcaacaccctcagttctggttggccaccgagatttacagcagccgcctacactccgtcagggaacggggcggtattcagccgcaggatgcggtccgtggcgggt

SEQ ID NO: 1361 - DNA, 104 bp, Artificial Sequence
  Description of Artificial Sequence: Synthetic polynucleotide
agcacacggttccctgacttcacggcgctgcctaggtcgcacctgtttcgggggttccggtaagacgcgacgaactcgaactacggatagtgctgctgatccga

SEQ ID NO: 1362 - DNA, 95 bp, Artificial Sequence
  Description of Artificial Sequence: Synthetic oligonucleotide
ctgtcggccgcgacctagacgtgtgatggctcactagtgtggtccttccagtatgggctcctcggaggctcgaacggacgcataaatcccacaag

SEQ ID NO: 1363 - DNA, 169 bp, Artificial Sequence
  Description of Artificial Sequence: Synthetic polynucleotide
aagcaactgcgaatttccataggcggccacgggagccgtgcgctgatcggcgtatcctccaggcggcaatagcgtcactgtggtcacttcccagttggattgcgagccgcgatacgtacatgagggacactgcttttactggcgttctctagacgcgtacggcgcccac

SEQ ID NO: 1364 - DNA, 54 bp, Artificial Sequence
  Description of Artificial Sequence: Synthetic oligonucleotide
gactgagattgtcctccgcggagaagcgaagggtcccgcactttgttaccgcct

SEQ ID NO: 1365 - DNA, 178 bp, Artificial Sequence
  Description of Artificial Sequence: Synthetic polynucleotide
gcctggcacgttgagttggcttcgctccaggtagtggacacatgtccctggaagggccgggatccagaccatatggtatgagtgcaccattggacctgacgatgcccggacaccctatggtctctacaagaacgtcccggggtccgactccttcactgatgaagccgggtccgccagt

SEQ ID NO: 1366 - DNA, 56 bp, Artificial Sequence
  Description of Artificial Sequence: Synthetic oligonucleotide
caccagtcttgtggcagcctggatggcgcacaattgggagagtatgtacccctctc

SEQ ID NO: 1367 - DNA, 105 bp, Artificial Sequence
  Description of Artificial Sequence: Synthetic polynucleotide
acccacggtcccttctcgccgcctaaaagacggggtcggtagggagatggatagctcttcgtagtgcgttcagcaagccttcacaagtctgacccgtcggcgagt

SEQ ID NO: 1368 - DNA, 61 bp, Artificial Sequence
  Description of Artificial Sequence: Synthetic oligonucleotide
tgactgtcccaacgctacgaatccggctcctccgcaggcgtgtaatcggggatgtggtaca

SEQ ID NO: 1369 - DNA, 135 bp, Artificial Sequence
  Description of Artificial Sequence: Synthetic polynucleotide
gaaatggagacctgtgcctgctagtgtctctccatccctgcgagccaagctgggccccggacaagtcgccggtgctccgggaggatcagcactagcaattagtctgagctgcagtacatggtgctcttacaggcc

SEQ ID NO: 1370 - DNA, 181 bp, Artificial Sequence
  Description of Artificial Sequence: Synthetic polynucleotide
atcctacccgctgaaaattccccgtcaggaagcgaagggtggctgcacgctgaagggctgtcccacagtgttgtcagacgtgttggcggactaggtctcggcaaccctcctcaaatcggggttaccataagggggaggggccccgcttggctttaccgcccgacgtcccactttactgaag

SEQ ID NO: 1371 - DNA, 79 bp, Artificial Sequence
  Description of Artificial Sequence: Synthetic oligonucleotide
gtggccagcgagctggttacgtatagctaagctgaacctttaacgcgtcacttctgccgtcgtccccagggccgaggat

SEQ ID NO: 1372 - DNA, 143 bp, Artificial Sequence
  Description of Artificial Sequence: Synthetic polynucleotide
gcgaatcccgcgcagagctcctctaccgtgtcgttccgtagctagaactgcgagttctggtggcccgaattatcggactactatttcgactagggaacgggccgcgcacgtacggtcgataggtggcagcgtacccgttaacc

SEQ ID NO: 1373 - DNA, 150 bp, Artificial Sequence
  Description of Artificial Sequence: Synthetic polynucleotide
ccaactgcgatgtttgattttctattcacacggtcgtggccttcacgctcctcaccagagttgtgcccggtattagcccgcgcatcagcgcgagataggcgcggcgggagtacagagccgtcgcgcaggaggaaccgcttagcacggaca

SEQ ID NO: 1374 - DNA, 123 bp, Artificial Sequence
  Description of Artificial Sequence: Synthetic polynucleotide
agcgccggggttgatgcatgggactatgactatctagagtctcgcagatcgggtaccgccggcgcccttaccttatcatcacggagctacgcgagagcgctccggggtttaccaccatatgtc

SEQ ID NO: 1375 - DNA, 105 bp, Artificial Sequence
  Description of Artificial Sequence: Synthetic polynucleotide
agacgccattaggcatgttgacgcagtcgatcacacgcagggggctactgctcttcatatgttcacctccggtgcccgatgcagcggctaccgagataccgtggg

SEQ ID NO: 1376 - DNA, 114 bp, Artificial Sequence
  Description of Artificial Sequence: Synthetic polynucleotide
agcggtaagaagcccagaaccagcagtcccatgcgcccgccgatggcggtggcattaccatgcccgtcgtcaccctccggttgcgagagtttatgtcgtacggtagggctttat

SEQ ID NO: 1377 - DNA, 96 bp, Artificial Sequence
  Description of Artificial Sequence: Synthetic oligonucleotide
cgcagctacagcagtgctggatgatatgtcgcctataccgtgcgtggtaacggccattgaacgcccacaatacgttggcgcgtcgttggccgtcca

SEQ ID NO: 1378 - DNA, 166 bp, Artificial Sequence
  Description of Artificial Sequence: Synthetic polynucleotide
tgagttccttggagctcgccgcggacgcgttaggcgagctcccggggatccacactgccgtgatactgtaggggaccgaggtcggcttgccgaccaatgtgctccgccactttatcgatttgcatcataaccacgtacaggtctgggcgagacaacctggaatacc

SEQ ID NO: 1379 - DNA, 157 bp, Artificial Sequence
  Description of Artificial Sequence: Synthetic polynucleotide
cagccccccgttacgggggaatcggtataagacagagacttagcaggcccgtcgcgtttcgcacgcctaatcttttcccgtcggggggtgccgccggactgcggctctaggcctccaatatttagaattcgggagcgctcgaaggccaacgacatgt

SEQ ID NO: 1380 - DNA, 181 bp, Artificial Sequence
  Description of Artificial Sequence: Synthetic polynucleotide
taggatcggattacatgcgtacctcgaggctctaaactgcccggccgtgcgtgaatactggacgtaatacggagagacgcaactccgacacccgctgtgtcatcccgccatggtcagttcggtgccgggcgtctgaagggtccgctctagttcggccctgaaccgattgcgcagcaaggtc

SEQ ID NO: 1381 - DNA, 103 bp, Artificial Sequence
  Description of Artificial Sequence: Synthetic polynucleotide
catactgtccgtacactagcgttaggcacgcatctgcactttaatgaggcgggcgagcgattccagtgcgcgcttgcgtgccaagctgcactttacggcggca

SEQ ID NO: 1382 - DNA, 40 bp, Artificial Sequence
  Description of Artificial Sequence: Synthetic oligonucleotide
caccaagaggttcggctcgcatcgatgtacgtcatcggcg

SEQ ID NO: 1383 - DNA, 188 bp, Artificial Sequence
  Description of Artificial Sequence: Synthetic polynucleotide
aagccaatacctttgccggcacgcccgtagtacagaatgtttacagtttcggctaaggatcggtgatccctggccctgtaacatagggtagtctgtacgttatcggcccggccccaggaccacttcgggagaaccctggaatcccggccaaccgtaggtctcgggtgcgtcggggccgatgcgctagc

SEQ ID NO: 1384 - DNA, 164 bp, Artificial Sequence
  Description of Artificial Sequence: Synthetic polynucleotide
tgggacgcaggacgtgcgcgagagcgggacgtgccggccctgcgtttacgtagaatcaccacctacatggtgccgtattccgtcccatgatttgtgcatccgctcgtgcgcggcctgtatacagcgcacaagatgcaaggacaccgttgggcactacccgtatt

SEQ ID NO: 1385 - DNA, 85 bp, Artificial Sequence
  Description of Artificial Sequence: Synthetic oligonucleotide
cagggtggtctgttagcgtcgcgacgtcgaccacggatgcctattatgtaaaaggaccgtatctacgccgcgcccgaaggtcctc

SEQ ID NO: 1386 - DNA, 22 bp, Artificial Sequence
  Description of Artificial Sequence: Synthetic oligonucleotide
ggtgatcctcaagatgctccgt

SEQ ID NO: 1387 - DNA, 135 bp, Artificial Sequence
  Description of Artificial Sequence: Synthetic polynucleotide
tccgatctcaagaggcgccggccctcggttagctcgcccatgacccattgcgtcacaggccgacgagatagggagtgatccgagcggtatttgttagcatcggccgcgcgattcacgacttcagtgactactgga

SEQ ID NO: 1388 - DNA, 28 bp, Artificial Sequence
  Description of Artificial Sequence: Synthetic oligonucleotide
cattttagaatgtgcgccaccgcggcgt

SEQ ID NO: 1389 - DNA, 24 bp, Artificial Sequence
  Description of Artificial Sequence: Synthetic oligonucleotide
gtgaatgccggtcgcatccgtcat

SEQ ID NO: 1390 - DNA, 44 bp, Artificial Sequence
  Description of Artificial Sequence: Synthetic oligonucleotide
atatacttcatgtgggcttcaggggggcctccaggagcatcccc

SEQ ID NO: 1391 - DNA, 185 bp, Artificial Sequence
  Description of Artificial Sequence: Synthetic polynucleotide
ctaggcagagttcgggtgtgctaccacccaacaccgtcatgtggggtcgacaccgtgcctgtgaccgatgcccgaccggggcccatcgtatagctgacctcgtgtatccgcatacgactggcgtcgtggtagctggcagccgtatccaagaaaagaggagcgccgtatcaccgtttagtagtctc

SEQ ID NO: 1392 - DNA, 91 bp, Artificial Sequence
  Description of Artificial Sequence: Synthetic oligonucleotide
atagtggcctagaccttctgactgtcgggcatggcacctttgacgctgccgagagatacgtccccagcaatcgtcgacgcgcaggggtatc

SEQ ID NO: 1393 - DNA, 113 bp, Artificial Sequence
  Description of Artificial Sequence: Synthetic polynucleotide
gagagaccaagaacactatgatatgccgtcggctcagccgcaatatgcgatatttccgcccgccccttcctgggatacgccctgtcatactgtccggtgggctggtagtgggg

SEQ ID NO: 1394 - DNA, 109 bp, Artificial Sequence
  Description of Artificial Sequence: Synthetic polynucleotide
ggacaactctgttagtccggtcagtgatcggccgtgagactgccgatcgtatctcctaggtgacgcgcgcgctggctatgcataccggaagggctcaccaacctcatgt

SEQ ID NO: 1395 - DNA, 25 bp, Artificial Sequence
  Description of Artificial Sequence: Synthetic oligonucleotide
agtggtcagccaagcctggtttcca

SEQ ID NO: 1396 - DNA, 72 bp, Artificial Sequence
  Description of Artificial Sequence: Synthetic oligonucleotide
tcaacgtgtatgggctctgcacgctaccaagtcccgtgagctccgggtgcgcgcgaagcgacagatatttct

SEQ ID NO: 1397 - DNA, 56 bp, Artificial Sequence
  Description of Artificial Sequence: Synthetic oligonucleotide
tgaacgctcctcgacccagtcctctgagctgggtgtgaacagcggactgtaatgtc

SEQ ID NO: 1398 - DNA, 141 bp, Artificial Sequence
  Description of Artificial Sequence: Synthetic polynucleotide
gcagaagggtatccgggcgttatcgtgcttgttacggcgacggctcgtgacgatctccaaatatcttccacgtgcgatggcctgcagccgaccggtgtaagaagcgacacacccctggtgcctgcctcgatagctaggcca

SEQ ID NO: 1399 - DNA, 51 bp, Artificial Sequence
  Description of Artificial Sequence: Synthetic oligonucleotide
cgtgcaagccggttcaaattcggctgtgcctgatgtacagaccggcgtcac

SEQ ID NO: 1400 - DNA, 167 bp, Artificial Sequence
  Description of Artificial Sequence: Synthetic polynucleotide
atgattctcccaggggttcgccgcgagtattgttcctgagcaccgcacccactacagggacgcgtacgatcgccgcacagagaagtgctcgcctctacgacatcgatactgtgtgtggtaacggtcgttggtcacggcagcggtcaggggcctgttaaaccgcgcac

SEQ ID NO: 1401 - DNA, 140 bp, Artificial Sequence
  Description of Artificial Sequence: Synthetic polynucleotide
ctcgcactgcaggtgtggtttatagtcactaggcctagctcggtgagtgcggacgagcggtacggccagtcccgtaagtgctaaacctgcagagtaacccacccgaggaaccctgtcaggcccgtcgcgtacgctatgct

SEQ ID NO: 1402 - DNA, 86 bp, Artificial Sequence
  Description of Artificial Sequence: Synthetic oligonucleotide
cttccttgttatcaaaggcctgcatacgaccctccgtgcccgagtgttagtctggggcccgtaggaatgtgcagggcgccgaacaa

SEQ ID NO: 1403 - DNA, 78 bp, Artificial Sequence
  Description of Artificial Sequence: Synthetic oligonucleotide
cgtgtacatgggggaccctgagaggctctacacgagggcctggtcatgcccccctctaattcgaatcagatctgcggt

SEQ ID NO: 1404 - DNA, 196 bp, Artificial Sequence
  Description of Artificial Sequence: Synthetic polynucleotide
gcgttccgctagtgccagttgcacagaacactgccaagatcgacatcccttcgggcccgttgtccctatacgttcgttatagggaacacgcacagtgtgggcccatcattcagcagcgcaatcagttgaaaacagggcccggtggcacgatgccccttcgcgtgtctcctgtccgggtgggtgaggaacggggtca

SEQ ID NO: 1405 - DNA, 123 bp, Artificial Sequence
  Description of Artificial Sequence: Synthetic polynucleotide
cttcgtcccactctatcgaacaactaagatgagacctcccagtccgctgctccccatggtaaggggaggtgttggccgcttgtctttgccagggacggacaagccatgggcctgcaaggtgtg

SEQ ID NO: 1406 - DNA, 72 bp, Artificial Sequence
  Description of Artificial Sequence: Synthetic oligonucleotide
acgagcgatcgcgtcggcgcctcccccgcgtttgatattaatgccggtgcacgaactcgtctagagttgaag

SEQ ID NO: 1407 - DNA, 81 bp, Artificial Sequence
  Description of Artificial Sequence: Synthetic oligonucleotide
cttaccagacccctggttcagtcaccggcggaatactcgttaagcggcgaaaagcttcgtcgtcgcaggcgggcttgtcag

SEQ ID NO: 1408 - DNA, 156 bp, Artificial Sequence
  Description of Artificial Sequence: Synthetic polynucleotide
cgctgttctgtcgtaagtgcggtaagctaaagttctcccggcttagacaactgcggacggcactcgcagccgggttgaaacgttagcccgttcacgggccggccgggtctcagggctagcggctcgactcatacaccgaccagatgacatgtattc

SEQ ID NO: 1409 - DNA, 113 bp, Artificial Sequence
  Description of Artificial Sequence: Synthetic polynucleotide
gcctgattgcgcagtgcttccatcttgggatgactcctacggcaggtcacgccgcgagtcccaatcaggggacagtagacaggctacgactcccatggcgttatttcggctga

SEQ ID NO: 1410 - DNA, 66 bp, Artificial Sequence
  Description of Artificial Sequence: Synthetic oligonucleotide
cgtcaccgggcgaagtaaggtcgcacgcgaggttaagcgttgccttagcttttcccgcagtcacat

SEQ ID NO: 1411 - DNA, 15 bp, Artificial Sequence
  Description of Artificial Sequence: Synthetic oligonucleotide
gccccttatgtaagg

SEQ ID NO: 1412 - DNA, 46 bp, Artificial Sequence
  Description of Artificial Sequence: Synthetic oligonucleotide
gccttcggagtaagggaggtaagccttccatacctcgcgcgatttc

SEQ ID NO: 1413 - DNA, 100 bp, Artificial Sequence
  Description of Artificial Sequence: Synthetic polynucleotide
catctactccgcaccgtgctaaccgcggggctgaatccagtccggatagtgcgaagctattgcgccggagtcgcatgacggccttacaggagggttcact

SEQ ID NO: 1414 - DNA, 129 bp, Artificial Sequence
  Description of Artificial Sequence: Synthetic polynucleotide
cgtagcggtcggccttcccgacagagagggtttccgaacagccgaacaatgtgtgtacggtgctaggttgaggccgaacatgctctctgcagaccgcgactcgtcatatgctggttatctccccaggcc

SEQ ID NO: 1415 - DNA, 88 bp, Artificial Sequence
  Description of Artificial Sequence: Synthetic oligonucleotide
tgttggcccggacgtctcgcagtatcgacacgtcactcaagcacgcctgggtcccggtgcgagcctggtacattaaggtaatagtgcc

SEQ ID NO: 1416 - DNA, 191 bp, Artificial Sequence
  Description of Artificial Sequence: Synthetic polynucleotide
ttcgtatgccggggaggctggtcctccgtgctgggttcaagtagaagaagaggggagaccacatgcctccgttgtcccatccgcaccccagcgtccggttatgctgcactacgctggacggcccttcaccgggaccgtaaccccagcactgatccatgcgtgtaaacgtgggagaatcctaattgcgatgg

SEQ ID NO: 1417 - DNA, 129 bp, Artificial Sequence
  Description of Artificial Sequence: Synthetic polynucleotide
gcaaggccggtgacgtggcctcagaatagctgaatcttgatacttcggtccacaagaccagctctggctctctcgacgggaggctcgagcgcgctccctcggctgctgggagaatatcacgcagttttc

SEQ ID NO: 1418 - DNA, 13 bp, Artificial Sequence
  Description of Artificial Sequence: Synthetic oligonucleotide
tatcggccttgta

SEQ ID NO: 1419 - DNA, 74 bp, Artificial Sequence
  Description of Artificial Sequence: Synthetic oligonucleotide
gcagcatctttgacagttaagttctggggcccctttggggcccaaacgagtgaatgcagcgcgttcaccgcgcc

SEQ ID NO: 1420 - DNA, 105 bp, Artificial Sequence
  Description of Artificial Sequence: Synthetic polynucleotide
ccgtctcggacgttgaagtgcatcttcttcgcagcgaggccagaccgccactcgaggttggatgggaaccgagttgccacatttagcgtgcgcaagccgcttcaa

SEQ ID NO: 1421 - DNA, 182 bp, Artificial Sequence
  Description of Artificial Sequence: Synthetic polynucleotide
agccccttgatcgcgtcgagccgagccgattcaacgatcgataccctccactataagttctgacccccgggtgccgcgtgcgaatgggctattcgtggtagcttgtcatagggacgcaggtggggaggacccccctagttaaagccctcgtctccctcacgaaaaggggcgagggtagcttt

SEQ ID NO: 1422 - DNA, 133 bp, Artificial Sequence
  Description of Artificial Sequence: Synthetic polynucleotide
gaaggggtctgtcaagggcaacttcttcgcatagggactaggagtcccccactgggggcgtccacacactcctggcatagcacctgttaacacgattccgcgtctgtcataagggcggctcttgctcgcggat

SEQ ID NO: 1423 - DNA, 59 bp, Artificial Sequence
  Description of Artificial Sequence: Synthetic oligonucleotide
ctatgaatggcttggtcgcgttaaagcggcgcgacgcgctccatgtaagttcgactccc

SEQ ID NO: 1424 - DNA, 179 bp, Artificial Sequence
  Description of Artificial Sequence: Synthetic polynucleotide
atggagcaggctgttcggtagtggctcactaggtccctggactgcgagctcacctggctgcatgcagataccctacctgtagaggagacatgtcactcagtcgggtacagccagccctcacacaagtcgtcccttataagtgggcgacctcctgtggctgcggcggacccatcggagtt

SEQ ID NO: 1425 - DNA, 15 bp, Artificial Sequence
  Description of Artificial Sequence: Synthetic oligonucleotide
attcggtgcacctga

SEQ ID NO: 1426 - DNA, 110 bp, Artificial Sequence
  Description of Artificial Sequence: Synthetic polynucleotide
aatggttccgcaccgtacgatcggggttggacccactagcctaacctcttgaatagggcgcctacactgaccaccgctcgatgacctgggaccgttcgggtgataggggc

SEQ ID NO: 1427 - DNA, 73 bp, Artificial Sequence
  Description of Artificial Sequence: Synthetic oligonucleotide
cacgtcctaacgggaagcacccacgtcttgccactgcacgaggggtctacggccaatgttgtgtagggtttct

SEQ ID NO: 1428 - DNA, 84 bp, Artificial Sequence
  Description of Artificial Sequence: Synthetic oligonucleotide
cccctcccgcctgagggatgagcggatctggtccatctacaaatggctaagcgttcgcccctgtctacaggttgcgagggaatg

SEQ ID NO: 1429 - DNA, 5 bp, Artificial Sequence
  Description of Artificial Sequence: Synthetic oligonucleotide
tacgt

SEQ ID NO: 1430 - DNA, 174 bp, Artificial Sequence
  Description of Artificial Sequence: Synthetic polynucleotide
gtaaggcgtggaagcgatggccttaaagcccggtggtccttctgcctgcctgcaagtaggagtggactcctaaggtctacactcggctgacgcccggctggttccatcacggttctctacactgaccaccatacctagaaggcaagctcgtcggcgcgatcgcacgttacgggg

SEQ ID NO: 1431 - DNA, 15 bp, Artificial Sequence
  Description of Artificial Sequence: Synthetic oligonucleotide
gactagcttcgatcg

SEQ ID NO: 1432 - DNA, 122 bp, Artificial Sequence
  Description of Artificial Sequence: Synthetic polynucleotide
ggcccagtttcaattatccctggcgcccaacgtaccgtgcagggggtgtagactaccgccgcgtcgcgaccgtcccattgatatcgtgggttgatcgaggcatgccattaaatccgagggca

SEQ ID NO: 1433 - DNA, 195 bp, Artificial Sequence
  Description of Artificial Sequence: Synthetic polynucleotide
cgcgtggtatagatcgggggctaccgtaggccagtctaggatttagtcgtcggcagcacggaggcatatactgatgcgcaatcgggtgggctgcgacacccctccctgggcaagcagcccgggtttgtggttacctcctaccctgccctcacgctgcaaagcagaacaaagttactgacccggaacgctgttctc

SEQ ID NO: 1434 - DNA, 132 bp, Artificial Sequence
  Description of Artificial Sequence: Synthetic polynucleotide
agacaccacctgggccagttgccggggacgcgctcagcgttgcttgggctcttacagcatcttggcggcaagacagggatccgtcttgaaaaacggtctgtccagccacgtctcagcggtacttaatgcgct

SEQ ID NO: 1435 - DNA, 46 bp, Artificial Sequence
  Description of Artificial Sequence: Synthetic oligonucleotide
cagccctaggtctgagtctgactccaaggctcacagtggagtcgtt

SEQ ID NO: 1436 - DNA, 187 bp, Artificial Sequence
  Description of Artificial Sequence: Synthetic polynucleotide
ccacattgcttcggcgggaaagaactcgaaaatcctccgtggattaccggtcagcggtggcacgatatggggacaccggcgcaaatctgcgtttggcatgcagcgattcgacccggtatgcttccctgccagtcgtgccgctgtcccacaaggcgtgcggacaagcgggtagctcctctgctctgaa

SEQ ID NO: 1437 - DNA, 154 bp, Artificial Sequence
  Description of Artificial Sequence: Synthetic polynucleotide
gggcatcctgccctctgatgaggcgccccgtatggctgtaggcaggccatatgggaccatgggacccgccgactctcgatgacgcttgtgatcgaagacgtgctgccgcttcttaccacgccactagcaggtgattaacaggcaattggcgact

SEQ ID NO: 1438 - DNA, 58 bp, Artificial Sequence
  Description of Artificial Sequence: Synthetic oligonucleotide
gcgagcaatccacgacagcgacactacccctgtgggtttgggcagtttccagctgtgt

SEQ ID NO: 1439 - DNA, 84 bp, Artificial Sequence
  Description of Artificial Sequence: Synthetic oligonucleotide
ggagctcggtggctttcgttggcatcccctttgcgtaaccctcagctaccccatggaaaagaagcagacctggtggggcccagt

SEQ ID NO: 1440 - DNA, 193 bp, Artificial Sequence
  Description of Artificial Sequence: Synthetic polynucleotide
cgttggaccgggccgtacgggttcggctggggtcccggggtgctgtcctcggtagaagttctaggggtagtcctagccggcagaatcccggggctgattacggaaaaagtcgggtcacgcgcgccgaaccactttacctacccctcttcgacataaagatgccccctaaagacccatcgtgtcaactattgct

SEQ ID NO: 1441 - DNA, 163 bp, Artificial Sequence
  Description of Artificial Sequence: Synthetic polynucleotide
cgaggtcatggcgtcccctagcatagtgcggccccgggcgtccgtacaacgatgcgctaaagatgttaggatgcacactacattcgcctgcgcacacggtccgagcattagcgtgggggcaccattcggagctcatctacgagcggtgacttgtttgatctcc

SEQ ID NO: 1442 - DNA, 47 bp, Artificial Sequence
  Description of Artificial Sequence: Synthetic oligonucleotide
cgcgtatcataggcgggtctagatctgcctacgcagcgagccatgct

SEQ ID NO: 1443 - DNA, 73 bp, Artificial Sequence
  Description of Artificial Sequence: Synthetic oligonucleotide
atctcaaaaacatcgggtcgccatcggcctgtctgggacacgttcacgaagtcgctcgccatgcttgtgtggg

SEQ ID NO: 1444 - DNA, 15 bp, Artificial Sequence
  Description of Artificial Sequence: Synthetic oligonucleotide
acgcgtcattgctag

SEQ ID NO: 1445 - DNA, 61 bp, Artificial Sequence
  Description of Artificial Sequence: Synthetic oligonucleotide
cactgccagaggtccgggtgtcatgtacgatggacttggtccgcgttcgccacaatccaag

SEQ ID NO: 1446 - DNA, 164 bp, Artificial Sequence
  Description of Artificial Sequence: Synthetic polynucleotide
tgacaccatgcgtggagcgtatcgattcttcctcgccaacgaggggaccctgtgctccggaccaagcaagacgatcgcggcttcgtttcctatctcgaggcgtgctcagccacatcaggtatggtgcactacaggggacggttcgcggacccttaaccgtaggg

SEQ ID NO: 1447 - DNA, 125 bp, Artificial Sequence
  Description of Artificial Sequence: Synthetic polynucleotide
aaacgtgggatgttacaggagtgagagccgggccagccccaacgttaactgtcagacctttctgcccggtggcatcagtttgttcgccgccatcgcatagcgttagcgacagcccggtagctccg

SEQ ID NO: 1448 - DNA, 175 bp, Artificial Sequence
  Description of Artificial Sequence: Synthetic polynucleotide
ttggagtccgtcggtaggtctagaggctaggatttgactaacgcctcggtagcaaaggtcactggaagtcagctgggagtccgtatcaacctgccctactgcgtcccactccgcggagtcgcgagcacagagtcccgacaaacttgcccggtggtacccatgcccgtgtcgatgc

SEQ ID NO: 1449 - DNA, 17 bp, Artificial Sequence
  Description of Artificial Sequence: Synthetic oligonucleotide
tgtcagacctggatccg

SEQ ID NO: 1450 - DNA, 19 bp, Artificial Sequence
  Description of Artificial Sequence: Synthetic oligonucleotide
atcgcgtggtatcctgatc

SEQ ID NO: 1451 - DNA, 35 bp, Artificial Sequence
  Description of Artificial Sequence: Synthetic oligonucleotide
cgcgagtatcgtacgataacgcatgcgttgcctcg

SEQ ID NO: 1452 - DNA, 146 bp, Artificial Sequence
  Description of Artificial Sequence: Synthetic polynucleotide
gcgcccagataccggatacacggagataagaaactgacggggttgctcgaagtgactccccgcatgtgggtaaagcttcccctggcgggtcccttcttctcgatttgactgagcctgctgtctgcgggctagcagagaccacccgt

SEQ ID NO: 1453 - DNA, 153 bp, Artificial Sequence
  Description of Artificial Sequence: Synthetic polynucleotide
gtccgaaggtgaggcttacacgttgtacctgcgggaattctgggggtatgtcgtgagcgcggcggacggcgtcagctgccaggccttagcattcatcccacaaacgggcccccacctcaaaccagcgcattcggatgcttacattactcgttg

SEQ ID NO: 1454 - DNA, 13 bp, Artificial Sequence
  Description of Artificial Sequence: Synthetic oligonucleotide
acgcatcttttgg

SEQ ID NO: 1455 - DNA, 92 bp, Artificial Sequence
  Description of Artificial Sequence: Synthetic oligonucleotide
ggatgccttatccacctgggctatgctgaagccttcgtgaacgcgatgtaaatcggggccgccaacctacgctattcgtcgggtcgggcaac

SEQ ID NO: 1456 - DNA, 161 bp, Artificial Sequence
  Description of Artificial Sequence: Synthetic polynucleotide
aaataacgatccagtcctcccgaactggacgaagagccgtgctgatggttgcaatgctgggcctttgagtcgggatctgcgatgggtagacatccccggagcgtacggggccgccactttacccgacctcagccctggtcgagtgagcaagtgctcccctt

SEQ ID NO: 1457 - DNA, 83 bp, Artificial Sequence
  Description of Artificial Sequence: Synthetic oligonucleotide
cgaaaggttaaaagtcgctccgtcgtccatgtcggaacgtacccgtcccgtgcgagccatcctgtacctgagcgttagggttg

SEQ ID NO: 1458 - DNA, 111 bp, Artificial Sequence
  Description of Artificial Sequence: Synthetic polynucleotide
ggatcagcaggcacgttcggattggcctagtcccccgagctcagtcgctgcatacagtgatgtgggacgctctcggccaggacacttgacaacatcatacctggtcgcgtg

SEQ ID NO: 1459 - DNA, 161 bp, Artificial Sequence
  Description of Artificial Sequence: Synthetic polynucleotide
tcagatcttttcctggcagtacggtgcctcgttagcagctagtatcgctaagacgccacgcgcaccgatcgaagtaccgagtcgtgtgccgaggcaccgggaggctcctactcgtcaaacccggctctagccggcttgcagtgacaagcgggtactggtga

SEQ ID NO: 1460 - DNA, 163 bp, Artificial Sequence
  Description of Artificial Sequence: Synthetic polynucleotide
acctttattttaaacgtataattgatatattcgtgaggaacatttttagatctatctcaatgacaaaaattaactatttgatagtttagagtattgttcaaatatgacccatactaaaattatcggaaaatttaaattcaggttagtaattatcacgttacat

SEQ ID NO: 1461 - DNA, 38 bp, Artificial Sequence
  Description of Artificial Sequence: Synthetic oligonucleotide
atagttatcagagcacttattattttatagtaatacta

SEQ ID NO: 1462 - DNA, 100 bp, Artificial Sequence
  Description of Artificial Sequence: Synthetic polynucleotide
aatgtaatattcagagtacacgtccttacaaactgaaattattttgaatatattccacttgaattgagtaatcatacgtaaatttatatattgtaattgt

SEQ ID NO: 1463 - DNA, 121 bp, Artificial Sequence
  Description of Artificial Sequence: Synthetic polynucleotide
agatatattcgtcaataatttttcagtttatatacagtcaaacattggaaaatttcaaaataaatggcactaatcgtgtcgaatatttttatacaatgtaagacattcttaatgctttgta

SEQ ID NO: 1464 - DNA, 36 bp, Artificial Sequence
  Description of Artificial Sequence: Synthetic oligonucleotide
ttcacataattaatgttaattcagtttacaaaggtt

SEQ ID NO: 1465 - DNA, 184 bp, Artificial Sequence
  Description of Artificial Sequence: Synthetic polynucleotide
gaatcgactaataaagtccgataatgaatatatgtactattcggattaaaatttcggtcagcatcagagaacatatactaatagtcaaacttatgatttatcgttacagatttattaatttactgaatgaaatagatgtatattttatttttatatttgcatcgaaaatttttatcaaaatccc

SEQ ID NO: 1466 - DNA, 155 bp, Artificial Sequence
  Description of Artificial Sequence: Synthetic polynucleotide
acatcataaaatattgtataggagtcattacgtaattttaacatgatatgtaaatactttaagaacttaataatgtaatggtccagcatacatttaaatgatgtcctctattattcgtgaatatcaagtatctattgcgaaactattttttaaat

SEQ ID NO: 1467 - DNA, 16 bp, Artificial Sequence
  Description of Artificial Sequence: Synthetic oligonucleotide
tacatattttaacagg

SEQ ID NO: 1468 - DNA, 143 bp, Artificial Sequence
  Description of Artificial Sequence: Synthetic polynucleotide
aatttataatactataatgcctttatgcgaatatacaatttgcgatttattgatttgatccaatatataacattcaatcagttaccagatgattatgttattagagttaccagaatgattaaaatatatatgctattagttca

SEQ ID NO: 1469 - DNA, 29 bp, Artificial Sequence
  Description of Artificial Sequence: Synthetic oligonucleotide
gagattatttatttagaatatatctccat

SEQ ID NO: 1470 - DNA, 100 bp, Artificial Sequence
  Description of Artificial Sequence: Synthetic polynucleotide
ttcaaactaaattcatttctaacaatctctttaattagctagatttaggaggtatttgtagataatactttcaacgatttaggataatatatattgacaa

SEQ ID NO: 1471 - DNA, 152 bp, Artificial Sequence
  Description of Artificial Sequence: Synthetic polynucleotide
tagaacttattgatagttaggaatccttacaagttaaacaagaaagttcgtttttataggattaatactaatggatatagactgtcaactgtattttctcaatcttcacaatctatatatttaaatttatatgctaaaaatcagtcgaaatt

SEQ ID NO: 1472 - DNA, 192 bp, Artificial Sequence
  Description of Artificial Sequence: Synthetic polynucleotide
ctatgttattagtttgtaatattattctaatgacgacataaaaccactaatttaattcattatgaaattgttcatctggtaatcttaccggtatccaacgtcctgtaagtttatttcgaaaataagaggtaattggtgaaatttacaacaaataaatttttaaaatttgattcttaaatagaagcataacat

SEQ ID NO: 1473 - DNA, 118 bp, Artificial Sequence
  Description of Artificial Sequence: Synthetic polynucleotide
gatacgttatttaacgcaacttctataaaaaaaataatttcgatttaataatgccttaagtacattgtcccatattgtactgggtaattagaaaaatatgatttataatttgtcttta

SEQ ID NO: 1474 - DNA, 127 bp, Artificial Sequence
  Description of Artificial Sequence: Synthetic polynucleotide
tggattttaattttccatgctttagcttattgttataaagatagcataattataataccctaactagattataaacaacaaaaactgattaaattttttgttcattaaatatgggtaataccgtgta

SEQ ID NO: 1475 - DNA, 166 bp, Artificial Sequence
  Description of Artificial Sequence: Synthetic polynucleotide
gaatcacttatctacattacaaatcatcaataattgatatctgaatttttattgaagctcagattggttcttatttatattatatttgaggaaaatttattgaattctttaacaattacgccaatatgaagtatcagatagaattaaacatgttatggacttcaaa

SEQ ID NO: 1476 - DNA, 167 bp, Artificial Sequence
  Description of Artificial Sequence: Synthetic polynucleotide
tgaagacactatttacatgcaaataatgtgtgttatagatatgcggtcacagatattatactttataaatgtaaaaacttatgtgatcattgtgatattagatttatgctctttcatataaacaactatatacaagcaagttcatatctatatatataatttatttc

SEQ ID NO: 1477 - DNA, 157 bp, Artificial Sequence
  Description of Artificial Sequence: Synthetic polynucleotide
gcaatttaaatcgaattcatttatcttttcataataaatgtttggtagcaactttagcttattaatatatttcatataatgtttatatatttctagaatggaaccagcactaaattcaattcattttgtagaaggaaaataaactcgtttaggcaaa

SEQ ID NO: 1478 - DNA, 139 bp, Artificial Sequence
  Description of Artificial Sequence: Synthetic polynucleotide
agcgatctgtgttataaatatagtctttttataatctttcagaaccaggaccactaataatgtaaatattatatcactagtttatgaaaacttagagcgtttccttaggatatatttatttacaaagaatttataaaat

SEQ ID NO: 1479 - DNA, 86 bp, Artificial Sequence
  Description of Artificial Sequence: Synthetic oligonucleotide
tgattttatacaataaattaaccttttggaatgtctatcaattattatcagcatacctttagtataagagcaaaaaatttggttta

SEQ ID NO: 1480 - DNA, 148 bp, Artificial Sequence
  Description of Artificial Sequence: Synthetic polynucleotide
gacaaaaatctaaaaaagatactttaagttgttaatctcgaaagtaccttgtattttaacctgtttccgttttagagacaagttcgttaatcgttgaataaattattaaatttaactattctgaagttagaaataactaaattttttc

SEQ ID NO: 1481 - DNA, 34 bp, Artificial Sequence
  Description of Artificial Sequence: Synthetic oligonucleotide
gttacatatgtaaatgactaaatttattccttga

SEQ ID NO: 1482 - DNA, 50 bp, Artificial Sequence
  Description of Artificial Sequence: Synthetic oligonucleotide
agaatatataaattgttatagtctaacacgattgcacttgatattacttt

SEQ ID NO: 1483 - DNA, 105 bp, Artificial Sequence
  Description of Artificial Sequence: Synthetic polynucleotide
tatactcaatcatctaattcgtaagtgatttgcttttagatgtgacttcgtaaaattaaaatacgcatttttagttatgaaacatgacaaatatctttaaataag

SEQ ID NO: 1484 - DNA, 137 bp, Artificial Sequence
  Description of Artificial Sequence: Synthetic polynucleotide
atcttattttacagtattaaagacattttaaataacatcattgtatcctcaaaaactttagtctcagattaggtataggacatgtattaaaagttattatagatagttacatagtcagaagtacttaattagcttct

SEQ ID NO: 1485 - DNA, 162 bp, Artificial Sequence
  Description of Artificial Sequence: Synthetic polynucleotide
tgactgaaataaaacttgtattcatctatatactattgtccattgaaagtattgtaagttcttcttggttagttaattataaatacaatttcaaaaaatctctcgtataccttctgaacaagaattagatattgaagcaagtgagaattttaaattatttac

SEQ ID NO: 1486 - DNA, 22 bp, Artificial Sequence
  Description of Artificial Sequence: Synthetic oligonucleotide
ctttttatagtatgaaatatac

SEQ ID NO: 1487 - DNA, 200 bp, Artificial Sequence
  Description of Artificial Sequence: Synthetic polynucleotide
cttataactgataaatacaaaagtagataaatcttttcaaaactgactatgaggtaattagcctttgtgcatatttatagaatctagatgcaataaactgtgataaacatcttacaacatgataacattagaattcaatacactatatgtttttttgtataaaatggatttctgtgaataagtaatttgtttcattttcc

SEQ ID NO: 1488 - DNA, 132 bp, Artificial Sequence
  Description of Artificial Sequence: Synthetic polynucleotide
aaactataagtattttataacgtgattcatatttactaattaaaatgttttatgagttacctatattaacaacttttgcgaaaggtatgactaaatttcatattgcaaacccatgattagtagttttgcaaa

SEQ ID NO: 1489 - DNA, 15 bp, Artificial Sequence
  Description of Artificial Sequence: Synthetic oligonucleotide
atttttataagcatt

SEQ ID NO: 1490 - DNA, 92 bp, Artificial Sequence
  Description of Artificial Sequence: Synthetic oligonucleotide
aggttttcgtattatgtcagtttaatataaaaaaaacccatattatgttagttcgtaacgtgttatcattcacataaacttatagtaaatat

SEQ ID NO: 1491 - DNA, 187 bp, Artificial Sequence
  Description of Artificial Sequence: Synthetic polynucleotide
aagaagagcgtcttgataatattcttataatatcaactttaatttataaatcgtataaaaagcagctgaaaaaaatgagggattttgtaatattcctttatgtaaataaacaatattcccgaagctaattattttatatatttattacggcaatcctatgcaattttgacatcatttttgatgtact

SEQ ID NO: 1492 - DNA, 36 bp, Artificial Sequence
  Description of Artificial Sequence: Synthetic oligonucleotide
tactaatatgatttagacattttaatatgaccatgt

SEQ ID NO: 1493 - DNA, 138 bp, Artificial Sequence
  Description of Artificial Sequence: Synthetic polynucleotide
taacttttaataggtttagctttttgcaaagtacgtattaatactatcatataactctcacaatgataattattaactttttcgaagaacatgtactagaatgcgaataaggtcatttatttaaattgatgtaacaat

SEQ ID NO: 1494 - DNA, 15 bp, Artificial Sequence
  Description of Artificial Sequence: Synthetic oligonucleotide
atatatatttcagtt

SEQ ID NO: 1495 - DNA, 75 bp, Artificial Sequence
  Description of Artificial Sequence: Synthetic oligonucleotide
taagtatttaactttttgagtaagtaaatcactatatatattatactaaattcaagagctgatcttccatatgga

SEQ ID NO: 1496 - DNA, 181 bp, Artificial Sequence
  Description of Artificial Sequence: Synthetic polynucleotide
ctactcttaagttacaattttttatacaagttatacaatataaattatataagcagtattaaccagacaaagaaggtatatttgttcactgaaaaaaaaattcttgctttaataaattttttactaatcgctataaaggtaatcaacagtttttctcaaggtttggctgtggatttaattt

SEQ ID NO: 1497 - DNA, 151 bp, Artificial Sequence
  Description of Artificial Sequence: Synthetic polynucleotide
gcttatcttctattattataagctcactatagtgaaatctaaacacataatacgcaactattgaataaatatattaaaagattaattcatcattgtagttttgaataaatttgacttgaggtgttactctattgagtgttttacataaaat

SEQ ID NO: 1498 - DNA, 129 bp, Artificial Sequence
  Description of Artificial Sequence: Synthetic polynucleotide
ttaaattttaactttaataaaaaaaaataacattgatagttcattatattcaattattgtgctaatttagaatcttcttatgggagcaaaaacgtatttgcatcactactgggttagcgtataactcta

SEQ ID NO: 1499 - DNA, 163 bp, Artificial Sequence
  Description of Artificial Sequence: Synthetic polynucleotide
aatttaacataaacaatcactaaaactgttatttgacgtcatttaattcaatagaaacgtttatgatattgtagtaactagttaatatctgaattgtagaaacattaactaaatttttactgtcttaatccttttagtacaacatttatggaaatggggctat

SEQ ID NO: 1500 - DNA, 128 bp, Artificial Sequence
  Description of Artificial Sequence: Synthetic polynucleotide
taaagatagtcacttttgagtgttaattgaatgccttcaattatatatatctcgcttgaatagtatcgattaatgtaaatcaactttaattatttactttaaaaacgagtcaatttaactaaagaacg

SEQ ID NO: 1501 - DNA, 143 bp, Artificial Sequence
  Description of Artificial Sequence: Synthetic polynucleotide
agttttcctttacgaaaaaaactagaattttatagaaataataacataacattctgcaaaatatgatttcatgctatataattgatcaaggataaaaaatgggctttattctattcctacaatcattgggtatttgttttttt

SEQ ID NO: 1502 - DNA, 45 bp, Artificial Sequence
  Description of Artificial Sequence: Synthetic oligonucleotide
aattctcaagtagttatttacttacaagtaatattatacaggttt

SEQ ID NO: 1503 - DNA, 190 bp, Artificial Sequence
  Description of Artificial Sequence: Synthetic polynucleotide
actagttaacatcttgatctttacttcttcttggttgtggaatattaatgcggcataaataccttattgtacgaaaaatagaattaattccgcgtacttatttgtgatcttttcttttaaagtataacgaacatcaataaatgtaaataaagaattctaatatataataagatatataatatttgaacta

SEQ ID NO: 1504 - DNA, 9 bp, Artificial Sequence
  Description of Artificial Sequence: Synthetic oligonucleotide
ttacgaatt

SEQ ID NO: 1505 - DNA, 62 bp, Artificial Sequence
  Description of Artificial Sequence: Synthetic oligonucleotide
gaatctaacaattttgagtttaatataatgtatgaatatagaatcagattctctatcatctt

SEQ ID NO: 1506 - DNA, 172 bp, Artificial Sequence
  Description of Artificial Sequence: Synthetic polynucleotide
catttcatttcctttagaaccgtcaagattatcggtgatgaatgtatagaagacatgcagttaagctatattacaacttataaattcatatgcatattggagttaaacgaaatttattattcttttaacatatttaatatgccctttagtaagaattaaatttttaaaataa

SEQ ID NO: 1507 - DNA, 129 bp, Artificial Sequence
  Description of Artificial Sequence: Synthetic polynucleotide
gccataggatgtataatatagctaaattaatagttctagcgaaatcatgaactcatcaatttgccattatttagaaaatgcgagaactttattacgtattcagatatatcttttatattattaaaattt

SEQ ID NO: 1508 - DNA, 106 bp, Artificial Sequence
  Description of Artificial Sequence: Synthetic polynucleotide
aataattatacgctatataatattcattacagagttagaccagcattagtttatgaagcactgttaattggagcattaaactatttaaatacttttcagtaatttt

SEQ ID NO: 1509 - DNA, 57 bp, Artificial Sequence
  Description of Artificial Sequence: Synthetic oligonucleotide
tgattttctcaacaatatatacctatctaaagagttattttaatcagtgatagatag

SEQ ID NO: 1510 - DNA, 165 bp, Artificial Sequence
  Description of Artificial Sequence: Synthetic polynucleotide
tttaaatggataaatgactactacatcttttaaattgacggaatctaggacagaaactcttgatctgatttttcagaatacaaaaattattcattataccgatgctttattaacatttaataggttttaggattttaatttcataactaagaattataatctagt

SEQ ID NO: 1511 - DNA, 199 bp, Artificial Sequence
  Description of Artificial Sequence: Synthetic polynucleotide
atatactaaccttcatgatttgctttaatgtaataattaagttttaataactttcactactaacaaggaaaacacattctattgagtatatttatatatagaaattagtcgaagttttttattaaggcccgaatcattttaaagtaaggtttagagaatcatctgtatcaatatcaattagatagatttatgttcaact

SEQ ID NO: 1512 - DNA, 188 bp, Artificial Sequence
  Description of Artificial Sequence: Synthetic polynucleotide
gcttataatgtgatatataacgttcattagttaaattaattatctaaaaatagttatcctctagtatgatcctactagttctaccaatattaagcgatattttacgattttggatctacaatattgcttggagataaaataacaaatcttatttattttttaagtttagtcaaaaccaaggtaagaaa

SEQ ID NO: 1513 - DNA, 134 bp, Artificial Sequence
  Description of Artificial Sequence: Synthetic polynucleotide
ggttatatcataatagatgtaaagagcatcgttaactaataatgactctttataaaagtaaaactaaatttaattaatttttgttgatataatatactgacataatcattcgttactaattcctctgattgcgt

SEQ ID NO: 1514 - DNA, 24 bp, Artificial Sequence
  Description of Artificial Sequence: Synthetic oligonucleotide
cacgataattgcttttaatgaaat

SEQ ID NO: 1515 - DNA, 87 bp, Artificial Sequence
  Description of Artificial Sequence: Synthetic oligonucleotide
ttttactgatacaaaactaccattttagaataagaatttgttttttaattatcattttaatgcagttagagatgttcgtaacaacaa

SEQ ID NO: 1516 - DNA, 83 bp, Artificial Sequence
  Description of Artificial Sequence: Synthetic oligonucleotide
ttaaaattggttcgattacacaatttataaactgacaggctctaaatttgtcttaagtataaatattaatgatccaaatttgt

SEQ ID NO: 1517 - DNA, 17 bp, Artificial Sequence
  Description of Artificial Sequence: Synthetic oligonucleotide
atgaatttctatagatc

SEQ ID NO: 1518 - DNA, 68 bp, Artificial Sequence
  Description of Artificial Sequence: Synthetic oligonucleotide
actataaataaataaaatgtggtaccttattcaatgtgatcacataatgtctttttatagtatttcag

SEQ ID NO: 1519 - DNA, 101 bp, Artificial Sequence
  Description of Artificial Sequence: Synthetic polynucleotide
ctttttacacggttactatcgggatatataatactgtaattgtaaactcatttacgaatgaaagttactatgtaatatataatcgaattaatttcataatt

SEQ ID NO: 1520 - DNA, 142 bp, Artificial Sequence
  Description of Artificial Sequence: Synthetic polynucleotide
attcattgaaatttgtatacataaataattttatcaaaatgtaaagcatcgtatacaatcctcaggctctagatattggtattattatttaaatgaaagacatatagttgttagaaattctcatatgacttctacatttgat

SEQ ID NO: 1521 - DNA, 94 bp, Artificial Sequence
  Description of Artificial Sequence: Synthetic oligonucleotide
tgattattaattaagatatcaaatgtaagactatagcccttcagttctaccatgattttaaaatcagatattatgaaattgtttgatatttaac

SEQ ID NO: 1522 - DNA, 42 bp, Artificial Sequence
  Description of Artificial Sequence: Synthetic oligonucleotide
atagcaaatgaattgtcacagctttatatttatctagattta

SEQ ID NO: 1523 - DNA, 139 bp, Artificial Sequence
  Description of Artificial Sequence: Synthetic polynucleotide
ttaaggtaataactcaaaatttaataatcttttacttttcgtatttttaagattttaggctagatgtataagaatttagacgagttcaatttgaataaatttaaacaactttcaattggctaggaaaccattcctaaca

SEQ ID NO: 1524 - DNA, 51 bp, Artificial Sequence
  Description of Artificial Sequence: Synthetic oligonucleotide
agtttggaactacattattaaaaatctacagttattatttcgatttaacag

SEQ ID NO: 1525 - DNA, 138 bp, Artificial Sequence
  Description of Artificial Sequence: Synthetic polynucleotide
ttattttagagaaaaaccatggaagtttgaagtgtaatgagattttttcaactcatttacattaaagaatgacttcaaatggtaataaattttcgtgcatacattattatattcttaccaacattattgtcaaacatt

SEQ ID NO: 1526 - DNA, 90 bp, Artificial Sequence
  Description of Artificial Sequence: Synthetic oligonucleotide
ttaatacttctaggatatagatgtttaaaacttatagctaccatctaatagaagtacttcctaagatacgttaagttttttttaatgaaa

SEQ ID NO: 1527 - DNA, 166 bp, Artificial Sequence
  Description of Artificial Sequence: Synthetic polynucleotide
gatatgcggaacattaaataattttagggtttttaaagttttttatgcaatatattgttttcgcttattcaaataaaacgtttcatatttacaacatcgataataactacctcaatgtaaacatgtaatcgaaaagatttaatacatctgaatataatttagttgc

SEQ ID NO: 1528 - DNA, 88 bp, Artificial Sequence
  Description of Artificial Sequence: Synthetic oligonucleotide
cgaagaaatttatttaaaaaggctttatggttcttaatacttattcctgtagaatatctaatgtacatatactgcataacataaagtt

SEQ ID NO: 1529 - DNA, 178 bp, Artificial Sequence
  Description of Artificial Sequence: Synthetic polynucleotide
atttgaacttataacaaagaactatttatcggtataggaatcaggatttatacgattgaacttactaattattaaataattaatttttaagttattgtttattcacattaaattatgaggagcttatcgagagtaacatgataatatttaacccttcttagtacaactttaacatgcc

SEQ ID NO: 1530 - DNA, 7 bp, Artificial Sequence
  Description of Artificial Sequence: Synthetic oligonucleotide
tattatt

SEQ ID NO: 1531 - DNA, 146 bp, Artificial Sequence
  Description of Artificial Sequence: Synthetic polynucleotide
aataatttctgaaatattttgaaagctcaattttcatgtcgtaaatataagtaaatgattagcagtccacgaggcccttttacattcaatgtatcttatacgtcttaaatttttaataaatgattaattattgtcaataatggaaa

SEQ ID NO: 1532 - DNA, 161 bp, Artificial Sequence
  Description of Artificial Sequence: Synthetic polynucleotide
tttaattataaatcagtaacacgatgattaagtgagtttatatttaaaatagcctcaaaaagtcttaacgttaaattaaaacatcttgcacataggcttagcttttgagatggtgtctttgatttataaaacttcaacctcaatttttataaatagtaatt

SEQ ID NO: 1533 - DNA, 155 bp, Artificial Sequence
  Description of Artificial Sequence: Synthetic polynucleotide
tgctagctacatcgtactagattgttaaaaatttgtctatcaatgtattgatactacataacttgtgtatttggacatagattaaaaatttaacatttttttatttctaaatatgaaattgaaaatacgctaaaaagccctaattagtgtactaa

SEQ ID NO: 1534 - DNA, 98 bp, Artificial Sequence
  Description of Artificial Sequence: Synthetic oligonucleotide
tcaattattcatctatgtcaactaacgacataatcaaattgattgattttaattaattctattagtcaggcaatgaatacgatatagtagttatgtat

SEQ ID NO: 1535 - DNA, 141 bp, Artificial Sequence
  Description of Artificial Sequence: Synthetic polynucleotide
gaaaccaatagatacttctttttgagtaaacataaataatctttattcttaatataaagtcaaataagttgtaaatttgtatacaatctttagtatagcatagttgattaagagtgtctattttggataactatcctccat

SEQ ID NO: 1536 - DNA, 23 bp, Artificial Sequence
  Description of Artificial Sequence: Synthetic oligonucleotide
aaacttcttgtattaatgtatta

SEQ ID NO: 1537 - DNA, 41 bp, Artificial Sequence
  Description of Artificial Sequence: Synthetic oligonucleotide
aaatgtaaataatacttgaatttccctaatcggtatttagt

SEQ ID NO: 1538 - DNA, 61 bp, Artificial Sequence
  Description of Artificial Sequence: Synthetic oligonucleotide
taatattttcatttataaatcacgttaatacaattttcaatttaagggattagaacggttc

SEQ ID NO: 1539 - DNA, 199 bp, Artificial Sequence
  Description of Artificial Sequence: Synthetic polynucleotide
cattactgtttcaacttgcctataaattactacttaaattaatatttaagcatggaatagaatgaattataataggagatactactcgtctatataaacagtagccaatttaatataatactaattattttcggaatatttttagtaaaatgtctatataatcacgtatatgctagtaattttttggcatttatgaacg

SEQ ID NO: 1540 - DNA, 144 bp, Artificial Sequence
  Description of Artificial Sequence: Synthetic polynucleotide
agcttctaagcgttcatttcattattgtctatacagaaagaattaaatagttaatcggaacgattttgaaaatttgtataagtttccatgcatatgattctaaataattaataatagtttcacgatctatcaaaactataatgt

SEQ ID NO: 1541 - DNA, 73 bp, Artificial Sequence
  Description of Artificial Sequence: Synthetic oligonucleotide
taacacgatataaggttgtacaacttaataaacattgtctattttcttagattaacaaagtggcaatttttat

SEQ ID NO: 1542 - DNA, 129 bp, Artificial Sequence
  Description of Artificial Sequence: Synthetic polynucleotide
tacgactctcttgatgtatattattttttttataaattaatatattctgagaaaatcgactttccctttctcaaaagagagtacgaatttagttatagatataccaaaagatattaaagaaacgtttag

SEQ ID NO: 1543 - DNA, 87 bp, Artificial Sequence
  Description of Artificial Sequence: Synthetic oligonucleotide
atacaagaggttatataattaatgcttctcataagaaatgtcgaatttatgttattaattactctgtcctattgtaaatcataatat

SEQ ID NO: 1544 - DNA, 101 bp, Artificial Sequence
  Description of Artificial Sequence: Synthetic polynucleotide
gctactgaatcgaatttatagtggtgtttagctcttatgtatttcattattatttaaatatttgatagtattaaaacttaaaaccctaaaacactaataga

SEQ ID NO: 1545 - DNA, 134 bp, Artificial Sequence
  Description of Artificial Sequence: Synthetic polynucleotide
attctgtaaattaatacaatgccacataaattaaattgtgccgatgaggcaaatagtttatacatttaagtgtgcaccattattatgtaatcgtattatttcattataataaattttaagttctaattaagatc

SEQ ID NO: 1546 - DNA, 153 bp, Artificial Sequence
  Description of Artificial Sequence: Synthetic polynucleotide
ttcacatttcagtataagctaagtaacatatttttatttaggacattaggacatgagtatatatttactcaacaattttataactacgatttatgaacttgtggattggcattcttaaaattaaaatagtcaagtaaatatctaatcaactgt

SEQ ID NO: 1547 - DNA, 183 bp, Artificial Sequence
  Description of Artificial Sequence: Synthetic polynucleotide
tttagaattgtctatagaaatattacctcttaggttaacaaaataatttgttcttttgtgaaactacattaatcaaaagtttaataaatgaaaataatttttttcatccaagagctatgtcttcaatcaaactaatttagtgaatatagactgatgatattaaaacgatgtgttttttcgcca

SEQ ID NO: 1548 - DNA, 174 bp, Artificial Sequence
  Description of Artificial Sequence: Synthetic polynucleotide
ttaactagattaacgatggcgacttaattctgaattgtctgatagacagattttaaaatttaactccctataaatcttacacttaattatttaaagaattatatgtcgagattaattgtttagatctactaagattctaggtctacttttctaataaattaaaggattaaataa

SEQ ID NO: 1549 - DNA, 163 bp, Artificial Sequence
  Description of Artificial Sequence: Synthetic polynucleotide
ttcactgaacatactaatgtatacctagaatataaattgtttaagtttccttaaagataattaacttatactgtttttataagtaacctctgaaccaaaaatgtctagcgactgtttaaaaatttgattgtattgtaagagaagtaattaactaaattgttct

SEQ ID NO: 1550 - DNA, 138 bp, Artificial Sequence
  Description of Artificial Sequence: Synthetic polynucleotide
tatcaataggcaatatgatctagttaattctgtagagataatgaaataatttaacctgctgttgatatatcgattatgagtatacgaacatttttcatttgtcaaacattctccatattaaaattataatatagcatt

SEQ ID NO: 1551 - DNA, 107 bp, Artificial Sequence
  Description of Artificial Sequence: Synthetic polynucleotide
attttctttatctgatacacaacaaattaaagaataattttagaatgaagaatacctatatactgcgtaagatattagatttctgagtatttttaagcttctctaag

SEQ ID NO: 1552 - DNA, 20 bp, Artificial Sequence
  Description of Artificial Sequence: Synthetic oligonucleotide
attaaacattatgtcatttg

SEQ ID NO: 1553 - DNA, 143 bp, Artificial Sequence
  Description of Artificial Sequence: Synthetic polynucleotide
gatctcagattaatttatcacatctagctttgtttgaggactttaaaatttttaaaaactaggtatagtaatagatatttaatcttatttaccgtaaaatataaaaatgatttaactaagcattcattcactttatctgaagg

SEQ ID NO: 1554 - DNA, 30 bp, Artificial Sequence
  Description of Artificial Sequence: Synthetic oligonucleotide
ttcagatagttatcaattaatagtctatta

SEQ ID NO: 1555 - DNA, 15 bp, Artificial Sequence
  Description of Artificial Sequence: Synthetic oligonucleotide
tttactagatattta

SEQ ID NO: 1556 - DNA, 195 bp, Artificial Sequence
  Description of Artificial Sequence: Synthetic polynucleotide
tatttgaacaaaagtacaattgaacgatatttgagacataagttagcgaaaaacattacccagatttatcatttttacgtagattatataagaatatagaaatcaggtgctaactttagaccttactatctaaatctattggcattaattgtttgaatatttatagcacaattttcttttttaattaatatatgc

SEQ ID NO: 1557 - DNA, 165 bp, Artificial Sequence
  Description of Artificial Sequence: Synthetic polynucleotide
atagcatatagcataatagtaatgctataacaattacaatattgtgtttcacgtaaattacaaactatgtctattgacgtttagtaaattcaaattatttaggtattattctttccttaattaaacaatggagatattttcgaaagaaatctacttgtttagcta

SEQ ID NO: 1558 - DNA, 58 bp, Artificial Sequence
  Description of Artificial Sequence: Synthetic oligonucleotide
ttgaataacgaatacatcatgttaattttttcttatacgattaaaggtcatgtaatac

SEQ ID NO: 1559 - DNA, 27 bp, Artificial Sequence
  Description of Artificial Sequence: Synthetic oligonucleotide
cgtgaaatatttataatgattacatct

SEQ ID NO: 1560 - DNA, 102 bp, Artificial Sequence
  Description of Artificial Sequence: Synthetic polynucleotide
atgtaataactatgttcttggaataaatttctatacacgttatggctaaaatatgcctttttctactaatagacaaattctaatatgtaaagaaatgttatt

SEQ ID NO: 1561 - DNA, 149 bp, Artificial Sequence
  Description of Artificial Sequence: Synthetic polynucleotide
atatacgtactatatcataaatctttacaaatcctagaggctattagaatcatagagtatttcaaagttagtatggataaatagcttatttaatcatatcataatgtttttaaatgagtctattgcattaacacgcaatattattgttt

SEQ ID NO: 1562 - DNA, 142 bp, Artificial Sequence
  Description of Artificial Sequence: Synthetic polynucleotide
tcttgtccttaaattgattaccatattagttttcgcaacatgagtaaaaacattaacaatactttctattataaaaacggaaatgttaattaatattatttcataagagttaaatgatatttaagtggattagtatgtcctc

SEQ ID NO: 1563 - DNA, 84 bp, Artificial Sequence
  Description of Artificial Sequence: Synthetic oligonucleotide
ctattttctataatagaatgaggattttcataaattaggtgtcgttaatcgaattgcaattcttactaataaaataattactac

SEQ ID NO: 1564 - DNA, 44 bp, Artificial Sequence
  Description of Artificial Sequence: Synthetic oligonucleotide
aaactttaaattacgtctatgatttgtgcaagtaaattttctaa

SEQ ID NO: 1565 - DNA, 68 bp, Artificial Sequence
  Description of Artificial Sequence: Synthetic oligonucleotide
gattcccaaaattttaattaaaacaagtatgatattgctaagcgtcttaaggtttttaaaattattct

SEQ ID NO: 1566 - DNA, 23 bp, Artificial Sequence
  Description of Artificial Sequence: Synthetic oligonucleotide
ttcataggttatttaaaatattc

SEQ ID NO: 1567 - DNA, 55 bp, Artificial Sequence
  Description of Artificial Sequence: Synthetic oligonucleotide
agtttaccatacgcaatttcaattgtatatatctatgtttataattatagtagaa

SEQ ID NO: 1568 - DNA, 152 bp, Artificial Sequence
  Description of Artificial Sequence: Synthetic polynucleotide
tatccaaaataatttaactgcaatatgtaaaaaagattacacatgatgtctaagattcatttatatctaacgctttaaattattgttgataaatgtgaaagaatacatattattcttactaagtagttaatttggcgaatcttgtgcttcac

SEQ ID NO: 1569 - DNA, 171 bp, Artificial Sequence
  Description of Artificial Sequence: Synthetic polynucleotide
gttctgaaaggaattcaattatagttataacaataatgcttctacttaatgaattcaattgtttgttttatcttatactggtagtatacagattatagatatattatgtccatttagaatatataaaccataaatccaaaataatatacccatgagtttatggtccagaat

SEQ ID NO: 1570 - DNA, 121 bp, Artificial Sequence
  Description of Artificial Sequence: Synthetic polynucleotide
aataacaacaatgtttactattatactaatagtagatgtttcagagaattataaatgtctttatcattcaggtatttgttatagactctaaagtattcctaaacataactatttcgtaagg

SEQ ID NO: 1571 - DNA, 172 bp, Artificial Sequence
  Description of Artificial Sequence: Synthetic polynucleotide
attccaaagtaactatttcttgcttagttaattaatagcttgacaatacattgataatgataagcacatgtataatagtaatttataccttatactaacatactatgttgtttttagactaatacgtacatgatgatatgttagattgtgatcaccatatttaaagaaatta

SEQ ID NO: 1572 - DNA, 62 bp, Artificial Sequence
  Description of Artificial Sequence: Synthetic oligonucleotide
taatagacctaaaatacttttattttcgtatttactagtgtacatctatagtaggaaaaatt

SEQ ID NO: 1573 - DNA, 6 bp, Artificial Sequence
  Description of Artificial Sequence: Synthetic oligonucleotide
tatatt

SEQ ID NO: 1574 - DNA, 109 bp, Artificial Sequence
  Description of Artificial Sequence: Synthetic polynucleotide
attggaatccttttgaaattatctttttttattgtttattaattacattctgtaaaacctaataactaaagatacgaaatcgagtttctacactatgtaaaagaaaggt

SEQ ID NO: 1575 - DNA, 129 bp, Artificial Sequence
  Description of Artificial Sequence: Synthetic polynucleotide
gatagtacagatttacagtaacattaattttaaattaagaacaaccacaagtagtgtggtaaagacgttattagttattgttaataattctttaacagtttataatatcttagtacttattcaaccctt

SEQ ID NO: 1576 - DNA, 82 bp, Artificial Sequence
  Description of Artificial Sequence: Synthetic oligonucleotide
aacagtaataaatctcttaagtttaaattaaacgttatcaatgccattcattgagtaatgtatatttttaataacgtttcgg

SEQ ID NO: 1577 - DNA, 101 bp, Artificial Sequence
  Description of Artificial Sequence: Synthetic polynucleotide
aaacctcggatatagcattatcatgtattaatttgtgagttgtcaaaactttcagatcagtttattaagtactttaaaatttttaataacacaaattgtat

SEQ ID NO: 1578 - DNA, 176 bp, Artificial Sequence
  Description of Artificial Sequence: Synthetic polynucleotide
aagcctgatgaaagaattaaggataattattgtattactaatataaaacttcattgtattaccgtaatcccgataatattattactgccatacaagtaattactaattggtattcaagtcgtcgttgattaaagtatattaacggttctaattaattattatatctagatacatta

SEQ ID NO: 1579 - DNA, 152 bp, Artificial Sequence
  Description of Artificial Sequence: Synthetic polynucleotide
atatattcttctatcaaaatttaaaagagagtataatatagccataaaacgttgtcaatattattgtcggcaattataaatgtatttagagcattaatggttacaatatcaagttctagtaaggaacattgtttttcaattctacatctcat

SEQ ID NO: 1580 - DNA, 20 bp, Artificial Sequence
  Description of Artificial Sequence: Synthetic oligonucleotide
ttcatttttaagtcaagata

SEQ ID NO: 1581 - DNA, 77 bp, Artificial Sequence
  Description of Artificial Sequence: Synthetic oligonucleotide
aaaaataatttgatgatttttacatattagaatcatgattttttaacggattatctctccagtttattagaaaccga

SEQ ID NO: 1582 - DNA, 141 bp, Artificial Sequence
  Description of Artificial Sequence: Synthetic polynucleotide
taatgaaccatctatctaaaatgtatactagacttagatacttaaaaatctctttactaaaatagaggaaaatggtaaagtaacgttttgcgtttggattataatgactacaatttttcttctaatttgttatcattatat

SEQ ID NO: 1583 - DNA, 69 bp, Artificial Sequence
  Description of Artificial Sequence: Synthetic oligonucleotide
attatttgattaatgtaaaatgtatgaaacttgtaactgattcgaatcttatcattctcaatctgaata

SEQ ID NO: 1584 - DNA, 110 bp, Artificial Sequence
  Description of Artificial Sequence: Synthetic polynucleotide
ggacttatgtaaatatctaataaaatatttcaaaaaacattcttttatgtttcgtatcgctaactaatataaactttagatggatgtagctaattttatattccagtaga

SEQ ID NO: 1585 - DNA, 171 bp, Artificial Sequence
  Description of Artificial Sequence: Synthetic polynucleotide
atagaacggatataaattatttttataataggttaagattagaagttaaactaaatacactaactctggtccgtgaatctacttagcattaattttttcagttttaagaatctcggaataccatttatttttatgatattcttgaatataacatatcaaaagtagcaatct

SEQ ID NO: 1586 - DNA, 43 bp, Artificial Sequence
  Description of Artificial Sequence: Synthetic oligonucleotide
gaactatcgattcagtcaatattttttttatatgagtaaacaa

SEQ ID NO: 1587 - DNA, 120 bp, Artificial Sequence
  Description of Artificial Sequence: Synthetic polynucleotide
cttatatctattgtgcccgtttaacttccataagaatatatctgatattacttatatacgagatcctattaagatttattatataataggtttaatcggattaaaaaacagaaattgaga

SEQ ID NO: 1588 - DNA, 116 bp, Artificial Sequence
  Description of Artificial Sequence: Synthetic polynucleotide
aaattagtatctcaataattatgttatgtacaacagtaccggtaaatgcaggtatcatagttatcaaaactttatttatatgattaaatcttatacatagcttatggaatttctta

SEQ ID NO: 1589 - DNA, 64 bp, Artificial Sequence
  Description of Artificial Sequence: Synthetic oligonucleotide
ataatatacaatgaaccaatctaaaattatatgatcatttcgtttgttcatggatatgatacgt

SEQ ID NO: 1590 - DNA, 166 bp, Artificial Sequence
  Description of Artificial Sequence: Synthetic polynucleotide
ttattctaaacaatcctggtggattaattattagctaggagttaacaaatattgttcggtgaatctccaatttactatagttattcttgtataacatatatatttatttacaattttaataacaaaataaaaaattgcattattcgatcgtaaaggaacatatcgt

SEQ ID NO: 1591 - DNA, 199 bp, Artificial Sequence
  Description of Artificial Sequence: Synthetic polynucleotide
tataaaaatgtaattgtgaatacataagagatcgaaggtattttatatacgacaagatcatcataacttttatgtttattttttcttgctatattgagaagaattgcctcatcaatacattatcaaatagctaaaaattttgatgtcttttgcttaactaaattaagaatgatcatcatgatccatttatcaagatatt

SEQ ID NO: 1592 - DNA, 95 bp, Artificial Sequence
  Description of Artificial Sequence: Synthetic oligonucleotide
aataagtgtactaacaatgtaccgttataagaggactaagtattttactacatttctactttataaagatgttaataatgtattattaattcttc

SEQ ID NO: 1593 - DNA, 144 bp, Artificial Sequence
  Description of Artificial Sequence: Synthetic polynucleotide
ttcatcaatttttataataaatagaagcggttcagacttgctactttttgtactatatgcaaatttaaatagaataatcataaatctacgtaaaatgtgacacaattaatctagattaaatgttgtacatgattatgagctttc

SEQ ID NO: 1594 - DNA, 177 bp, Artificial Sequence
  Description of Artificial Sequence: Synthetic polynucleotide
atatatagaaaaacataacattatattatgtgtcagagttaatgaaacttatttaagatagtttttgtttagttaagtaaaatcgttatcacttgtcatatacttcaatttataagagatatatacgtatcactaaacccctttgaaaaatgggattatatgactcccttttagcat

SEQ ID NO: 1595 - DNA, 62 bp, Artificial Sequence
  Description of Artificial Sequence: Synthetic oligonucleotide
ttatcttttgaatctagattatttctggagaaaaagttcataatattataaccgaacatatt

SEQ ID NO: 1596 - DNA, 73 bp, Artificial Sequence
  Description of Artificial Sequence: Synthetic oligonucleotide
ttctaatttcgatgtttcattaaatacctttggatcacatggatattttagtgaatagacaaaaaatactata

SEQ ID NO: 1597 - DNA, 24 bp, Artificial Sequence
  Description of Artificial Sequence: Synthetic oligonucleotide
aggattattgtcataataatctac

SEQ ID NO: 1598 - DNA, 148 bp, Artificial Sequence
  Description of Artificial Sequence: Synthetic polynucleotide
taatttttaaaattacaaattgtttgtatccccagtaagggaaaattaacaaatcttagtagcttactcgattgatgtaatttcttatagagaacttacagcatactttttaattatatgagattcaatttcatcaatatgatatgaa

SEQ ID NO: 1599 - DNA, 179 bp, Artificial Sequence
  Description of Artificial Sequence: Synthetic polynucleotide
agtacgttaaattagaaagaataagatacttcttaggtttagtttatttctcgatagtcagataaagaatctcacgatattttataatattacacttctttgtattagtctctttaaacattagtagaaatactaactgcctaattcaaatttaaatttttatattcaaaacaggagag

SEQ ID NO: 1600 - DNA, 64 bp, Artificial Sequence
  Description of Artificial Sequence: Synthetic oligonucleotide
tcaatatgaattaaattctctatcaagcaagtatgaaaaatttgaatgtgtctatgcttctaat

SEQ ID NO: 1601 - DNA, 10 bp, Artificial Sequence
  Description of Artificial Sequence: Synthetic oligonucleotide
tttcattgaa

SEQ ID NO: 1602 - DNA, 82 bp, Artificial Sequence
  Description of Artificial Sequence: Synthetic oligonucleotide
ttagaatgtgttaaatttcattttatactcaataataacttcatatacaaccgctgtaaaattttatgattgggaatcagat

SEQ ID NO: 1603 - DNA, 116 bp, Artificial Sequence
  Description of Artificial Sequence: Synthetic polynucleotide
ataattttctatttgctactcatttagcttaactaactaggtaattttaagtattattataacgagattataaactaacaatgtcttcaattaaagtatcaagacgatttggtaga

SEQ ID NO: 1604 - DNA, 187 bp, Artificial Sequence
  Description of Artificial Sequence: Synthetic polynucleotide
ctttagttcctccagtactcaaaacaaggcaatttaagttactattttgtggtttagtaatatgtatagaaaaattataaaaataagtgtatacctcgcttgtaatctgtatttacatctgaaatatttaataaagcgactatatatacatacattttaactaatgattagtttaactgattgaata

SEQ ID NO: 1605 - DNA, 38 bp, Artificial Sequence
  Description of Artificial Sequence: Synthetic oligonucleotide
atattatgtcagcaaaattctaatttatatagtgcatt

SEQ ID NO: 1606 - DNA, 178 bp, Artificial Sequence
  Description of Artificial Sequence: Synthetic polynucleotide
atgcgtgcataccatatgagggtagatatctcaataatgttaaaattactatggaaaaagcctttatttttgttaagttttttggtcaatcgagaatatcataacaatcttcaatatgtgtttattttaaataatactcatataagaaccaatttgatcaaatttttcaaatactaat

SEQ ID NO: 1607 - DNA, 189 bp, Artificial Sequence
  Description of Artificial Sequence: Synthetic polynucleotide
attcaaaacttgtatttttatagcataaactttgggtaatataattatatctacatagcgtatagaaagatgctacactaaattattgcattttatattcttatagtcaggcgttctaaataaaatggaatttcatcataaaaatatatttaatgacgcgagtcttgaatatgatcacaattatctttt

SEQ ID NO: 1608 - DNA, 166 bp, Artificial Sequence
  Description of Artificial Sequence: Synthetic polynucleotide
tattgaatttaaggaaagtcttcccccttcagagttaaatttaaatgatcattaacaattcattatatttaaatagttagtctaaaaaacattttgtttcgaatattatgccctaatgtttgagtgatatgatatgtttaaaaattagtagatcttaccataaaca

SEQ ID NO: 1609 - DNA, 115 bp, Artificial Sequence
  Description of Artificial Sequence: Synthetic polynucleotide
agttacaatttaactccaactttttagaggatgttttaagattgaactataagctataattgaaaacaagtaacatcttattcattgatatctcgagtcattttaaaaagtattt

SEQ ID NO: 1610 - DNA, 130 bp, Artificial Sequence
  Description of Artificial Sequence: Synthetic polynucleotide
tatttaattctctacaaaagtgggatttatgattaaatagatgaattctgcaatatgtaagaaattttgtatatatatactcgcttttacaactttaaaacaagcacctttataaagtgtaattcatcgt

SEQ ID NO: 1611 - DNA, 148 bp, Artificial Sequence
  Description of Artificial Sequence: Synthetic polynucleotide
ttttatattcaggatttagcggggacagtatgtaaaattcaggattaactttatgttacattctatttattttctgacagaccacatataataattaaaatcataaaccaaaatcatttaacataaattctgatgtttgaatttagta

SEQ ID NO: 1612 - DNA, 42 bp, Artificial Sequence
  Description of Artificial Sequence: Synthetic oligonucleotide
ttattacgtacacgactttattagtatttgataaaatgatac

SEQ ID NO: 1613 - DNA, 182 bp, Artificial Sequence
  Description of Artificial Sequence: Synthetic polynucleotide
gttatatattaaaattgattaatcagtaataattatattatcccagaatcgatttacttttttgaatttattaatccattgagcatctactgaattgtttatgtataggtcacgttgcggtaataaattcgaaaataaagctaatttttacgaatctcacaaatctaatagataaatgctaa

SEQ ID NO: 1614 - DNA, 199 bp, Artificial Sequence
  Description of Artificial Sequence: Synthetic polynucleotide
gtttatcgctttaactaaattatattacattctcaggagaaaatttgccattgaagctaaaaatatgtttatcaattaaccaatataattaacatcagtggcttttgaagttcacatttcactgtgacgtttgaagcataataataaatttcatgttagtagtagattttatttaaataatttctgaataaattacata

SEQ ID NO: 1615 - DNA, 23 bp, Artificial Sequence
  Description of Artificial Sequence: Synthetic oligonucleotide
tttgaactttaatagtctaatat

SEQ ID NO: 1616 - DNA, 87 bp, Artificial Sequence
  Description of Artificial Sequence: Synthetic oligonucleotide
gttgataaactttgtaattaaattattttgttatagaaagatttatttactccatattatctgaatacagaaacctacgcataatgt

SEQ ID NO: 1617 - DNA, 72 bp, Artificial Sequence
  Description of Artificial Sequence: Synthetic oligonucleotide
tatcctatatacggactttttagaaaagtgcgcattactatataaatatctgagaattaagaatctttatat

SEQ ID NO: 1618 - DNA, 94 bp, Artificial Sequence
  Description of Artificial Sequence: Synthetic oligonucleotide
tattctatatatattagcataggagatcaggtaataatttcttcgcaatttgattacttgtataaatctaaatccgaaatcagttattttaaaa

SEQ ID NO: 1619 - DNA, 89 bp, Artificial Sequence
  Description of Artificial Sequence: Synthetic oligonucleotide
agtgcgtggtataatctaagtctctattttttataattacatgttataactatctgacgtcaaactattaaagaataacgtataaatta

SEQ ID NO: 1620 - DNA, 36 bp, Artificial Sequence
  Description of Artificial Sequence: Synthetic oligonucleotide
atcattgttaattagaatttacgatatgtctatcaa

SEQ ID NO: 1621 - DNA, 53 bp, Artificial Sequence
  Description of Artificial Sequence: Synthetic oligonucleotide
ttaatttttactagtcaaaatatatattacaccaatcgaggggttaattattt

SEQ ID NO: 1622 - DNA, 93 bp, Artificial Sequence
  Description of Artificial Sequence: Synthetic oligonucleotide
ttaaaaaatatacattacggaaaatttatgtcttaattatttatctagtcgtttgacataattttgcaattctggaacaacgttagtcataat

SEQ ID NO: 1623 - DNA, 121 bp, Artificial Sequence
  Description of Artificial Sequence: Synthetic polynucleotide
gcactttggaatctaagtaaattggtagtattaaactcgatacattaagtaaaattttctattggtttataattataaatgatccatataattataatggtactcgtatacatctaaccta

SEQ ID NO: 1624 - DNA, 185 bp, Artificial Sequence
  Description of Artificial Sequence: Synthetic polynucleotide
ataatagatataagatttttattacgaaaccacacttacatggttcgtttttattcggctaatgaatagtaaatacgtactaacaataaactagtatatttcattatttacttgatcgtttgaattcatcactaaaaatcagaaaattgttgtttgattattactcattagtggaagaaaattac

SEQ ID NO: 1625 - DNA, 66 bp, Artificial Sequence
  Description of Artificial Sequence: Synthetic oligonucleotide
atcaatataaatgaaccaggctatttctacatcggtatattaattttttttcaagaattttaagga

SEQ ID NO: 1626 - DNA, 15 bp, Artificial Sequence
  Description of Artificial Sequence: Synthetic oligonucleotide
ttatttatagttaac

SEQ ID NO: 1627 - DNA, 62 bp, Artificial Sequence
  Description of Artificial Sequence: Synthetic oligonucleotide
ttaatttgatggccaatcttacgcactaatatttaaaataatgtaatagatacgtttattat

SEQ ID NO: 1628 - DNA, 74 bp, Artificial Sequence
  Description of Artificial Sequence: Synthetic oligonucleotide
tatttagttacactattgttttgaattatataactttaatatgtgctgcctagataattaaacactgacaagaa

SEQ ID NO: 1629 - DNA, 88 bp, Artificial Sequence
  Description of Artificial Sequence: Synthetic oligonucleotide
caattatggtttaagattaggatatttattcagctttataaaacaagaaagatgattacaactatcattgatctactaattcttgact

SEQ ID NO: 1630 - DNA, 180 bp, Artificial Sequence
  Description of Artificial Sequence: Synthetic polynucleotide
ataatgataatgattaactatttatagtaacctcgcatttatcttagcatagaacttttaccaattgaatctaatctgttataatagatatagtagaagcagtctaaatacttgtcgtagttatatatataacaaccagatttgtggatttgtcaacagaaatttataatcattatttta

SEQ ID NO: 1631 - DNA, 101 bp, Artificial Sequence
  Description of Artificial Sequence: Synthetic polynucleotide
acaatgataagatagaatcgcaaatataaagagtatttattaattttatcagatgatttctttataatctatgcaccttcattgtaaatcttagtcttgat

SEQ ID NO: 1632 - DNA, 193 bp, Artificial Sequence
  Description of Artificial Sequence: Synthetic polynucleotide
atatagtataaagaattattaattggaaaataatgcttctctttaaaaattagaaatttaagtattatcttagaccgtctaaataagtattttaattattgttgacgaataaattctttgagagaagacccttaaaattaaatacacgaatatttgcattttcctcttatgtcgttcctaatgacgtgcacat

SEQ ID NO: 1633 - DNA, 113 bp, Artificial Sequence
  Description of Artificial Sequence: Synthetic polynucleotide
agaagcagtaaaagactcaacattgttaagttatttatattaaagtcaattaacatgatgtatattaaatatacttttggcgactttacttttgttacacatagccaaatttt

SEQ ID NO: 1634 - DNA, 138 bp, Artificial Sequence
  Description of Artificial Sequence: Synthetic polynucleotide
acattatgtcgatctctataaacaatttttttatacttttgtaaaataagtaatttgcgaaaaaatagtatctactttttaagatcttaacgcctaatttcttgaggacgttttaaaacggataaacgaatttgtaaa

SEQ ID NO: 1635 - DNA, 168 bp, Artificial Sequence
  Description of Artificial Sequence: Synthetic polynucleotide
gtttgatgatcgtattacttgaattgtaatacagatttctttaagatagttttattaatttcccgttttataaaaaaagatagtagataacaaaactttagaattaccccatcttgagaataagataatatagtttctataattacagcaactgcattaagtcactta

SEQ ID NO: 1636 - DNA, 101 bp, Artificial Sequence
  Description of Artificial Sequence: Synthetic polynucleotide
attcaaggatagaaattataataattattatgtataagttacttctactctaattgtaaggattccaaatgattatattcaaatatttagcagtctgcctt

SEQ ID NO: 1637 - DNA, 25 bp, Artificial Sequence
  Description of Artificial Sequence: Synthetic oligonucleotide
ttttgatagactatcgataaatatc

SEQ ID NO: 1638 - DNA, 182 bp, Artificial Sequence
  Description of Artificial Sequence: Synthetic polynucleotide
tttgcaggaataatatatagaattagtttagaattccactaaaccataagtacacgtaatatattcgtagatatttatcgattacattattcgaaatttgtttatcgaatatagttatttgcaaattaattagaatagcttccctccggaatagtaaattaatttctcttatgaaatattaa

SEQ ID NO: 1639 - DNA, 187 bp, Artificial Sequence
  Description of Artificial Sequence: Synthetic polynucleotide
aataccattttatataataaatgaatcatttcaaatatgcgagcctacattaatatcatatgttaggatacaccatattatgaatgacaagttagttctaacttattttatttaatgcgtgagcaaagttttatttatttttttttaatcaaaaacataactacgaaaattagtgcagtgcttgaga

SEQ ID NO: 1640 - DNA, 54 bp, Artificial Sequence
  Description of Artificial Sequence: Synthetic oligonucleotide
tataactgttgaacacttaataattatgtgttacactcttatagtagataaatt

SEQ ID NO: 1641 - DNA, 75 bp, Artificial Sequence
  Description of Artificial Sequence: Synthetic oligonucleotide
atgtttcctaactaatagaatttaaagtaagagcgaaagaaatttttgaatgactatcatattcttattttcatc

SEQ ID NO: 1642 - DNA, 75 bp, Artificial Sequence
  Description of Artificial Sequence: Synthetic oligonucleotide
ctatatgtttgattgagtgtatagtataaaaacacaaagtttatcttaatattagcaagcacttatcatcattat

SEQ ID NO: 1643 - DNA, 123 bp, Artificial Sequence
  Description of Artificial Sequence: Synthetic polynucleotide
taacatagaattctctcaatcatttattattaataattacccaggtatacttaatataactgtacatgtgatatgtggaaagaatcagtgtatctaatatgagtttttaaaatgaatctttca

SEQ ID NO: 1644 - DNA, 115 bp, Artificial Sequence
  Description of Artificial Sequence: Synthetic polynucleotide
actatgttaccatctattattgaatacaacatgcaagattgtttcagttgaatatctcgtgcatgtaaatttaaaatatttatattaacagaaacaagaattttgtctagttaat

SEQ ID NO: 1645 - DNA, 14 bp, Artificial Sequence
  Description of Artificial Sequence: Synthetic oligonucleotide
ttatactttataga

SEQ ID NO: 1646 - DNA, 147 bp, Artificial Sequence
  Description of Artificial Sequence: Synthetic polynucleotide
tctcataataccaattggtcttactaagaataactggaaatacaagcgtttagctttatagtaaaattttataagttattttaaaaaaagactgtattgatttttacttcaaaagaccgtagaatatatttctttattgacattcag

SEQ ID NO: 1647 - DNA, 165 bp, Artificial Sequence
  Description of Artificial Sequence: Synthetic polynucleotide
tcttatatctatatacaagtttagactttaggaaatacctctgttatgaaaatttatacaattcactgaaactattgtcaagaaatgatgtatagaacgagtatttcttaacaataaatatttactattttttaagtaccaactatttgatgaatgactttgtag

SEQ ID NO: 1648 - DNA, 68 bp, Artificial Sequence
  Description of Artificial Sequence: Synthetic oligonucleotide
tttaatacttacttttaaattctataagaataatatatgtggtatgtcacgatgaagtcacattatca

SEQ ID NO: 1649 - DNA, 166 bp, Artificial Sequence
  Description of Artificial Sequence: Synthetic polynucleotide
tatttatagtaaaagagacctttgtatcattgcctctgaggaggtaccaatttatattaatttagtgaatcatttacaataattactgccttaacaaatgaaataatagattgttatattaatatcattgatctaccagaattgcaaaatttttagttctattaaa

SEQ ID NO: 1650 - DNA, 6 bp, Artificial Sequence
  Description of Artificial Sequence: Synthetic oligonucleotide
tttata

SEQ ID NO: 1651 - DNA, 122 bp, Artificial Sequence
  Description of Artificial Sequence: Synthetic polynucleotide
caaacattatatctctatatattggtgattaatttaattaacgtacttaggaaatcgtattgtaagatattttgtatataaaacgcacatttatgtgtatcaaacaacgtttatgacactta

SEQ ID NO: 1652 - DNA, 146 bp, Artificial Sequence
  Description of Artificial Sequence: Synthetic polynucleotide
gaaaaaatgaacaatttaatctagtagtgtcatcagttcttgatatgatacatcaacacgttaatgtgattcttcaagattttatattattaaacaactatatcattaattattgtatgacgtgaatgtacaatgatcattttcat

SEQ ID NO: 1653 - DNA, 62 bp, Artificial Sequence
  Description of Artificial Sequence: Synthetic oligonucleotide
tctttaactcactataataatgcgtagaaaaataatatttatattcataaggggactttttt

SEQ ID NO: 1654 - DNA, 82 bp, Artificial Sequence
  Description of Artificial Sequence: Synthetic oligonucleotide
atttagaatatgaaggatacatgtcttattattttacatccagacacagtgattaccttattatttaagatacttaaatgat

SEQ ID NO: 1655 - DNA, 101 bp, Artificial Sequence
  Description of Artificial Sequence: Synthetic polynucleotide
tgcatcttgttaatttatgaatttactatcaattctgatatgtataaaatgatatcataagactgaccatatgcgttaatatatttctaacatataatgga

SEQ ID NO: 1656 - DNA, 54 bp, Artificial Sequence
  Description of Artificial Sequence: Synthetic oligonucleotide
ttttaatacgtatttccgaacataatatggactaagttaataaatacttatgtt

SEQ ID NO: 1657 - DNA, 112 bp, Artificial Sequence
  Description of Artificial Sequence: Synthetic polynucleotide
caaaactatattgtaccttgatgttacataattgttcgaggacatacttaataattataaaaattaacagcagagtgttttaactaatcttgtatatgatttcaaactagtt

SEQ ID NO: 1658 - DNA, 30 bp, Artificial Sequence
  Description of Artificial Sequence: Synthetic oligonucleotide
tttgagtatttctataatgataacataatc

SEQ ID NO: 1659 - DNA, 56 bp, Artificial Sequence
  Description of Artificial Sequence: Synthetic oligonucleotide
gaattttctagattataaattatcatggctttactattacagcacgaagttaaaat

SEQ ID NO: 1660 - DNA, 124 bp, Artificial Sequence
  Description of Artificial Sequence: Synthetic polynucleotide
tcccggaatttcaaagtatgccgtttaaaaatttttctctctgattgaattaagatagatttattactatatcgacaaaatttgtattttgacatagaaatttagtaacaaattttaagtacaa

SEQ ID NO: 1661 - DNA, 196 bp, Artificial Sequence
  Description of Artificial Sequence: Synthetic polynucleotide
ataagatgtacaaataagttctcatatttcattagggtttataccacgctaattaagtgatgaatgtcattcgtatttttaattaataggtcaagttccaatatattttaatataattttttggttacgaccactgatataataagtatacaacatcaaattgctatcagaaaaatttttaaggaattcacatatt

SEQ ID NO: 1662 - DNA, 133 bp, Artificial Sequence
  Description of Artificial Sequence: Synthetic polynucleotide
tattaaagttgtgatatataaattgtacatgacaattaactgaaccatgtatcgacatttttacatctcttaccaaaatacgttttaatagaaatgaaaacttagatggactatttatgtattgttctttaat

SEQ ID NO: 1663 - DNA, 77 bp, Artificial Sequence
  Description of Artificial Sequence: Synthetic oligonucleotide
ttgaattcctataaatacttatgtaatttttggattgattgaaaaattctcagaaactattacttaactctataagg

SEQ ID NO: 1664 - DNA, 11 bp, Artificial Sequence
  Description of Artificial Sequence: Synthetic oligonucleotide
atagtatttca

SEQ ID NO: 1665 - DNA, 55 bp, Artificial Sequence
  Description of Artificial Sequence: Synthetic oligonucleotide
attccttaataaaattgcttgaagttttatacaaagttgtttgtaattaacatca

SEQ ID NO: 1666 - DNA, 42 bp, Artificial Sequence
  Description of Artificial Sequence: Synthetic oligonucleotide
tttttagttatctatgaaaagatgatattcaccaatacgatt

SEQ ID NO: 1667 - DNA, 50 bp, Artificial Sequence
  Description of Artificial Sequence: Synthetic oligonucleotide
tagttctaaagttttcgacatgaactattatttaactagatcattagaat

SEQ ID NO: 1668 - DNA, 181 bp, Artificial Sequence
  Description of Artificial Sequence: Synthetic polynucleotide
taaataatagtctaaacttgatgagatttatattttgttgattcacacattcgttaactccaaaatacgaattttgacaatacaattattttaactttcgattagtgattaataactttctagtattactttttacaagtaaatcagtgcttattaaagagcaagatagaagttatgaatc

SEQ ID NO: 1669 - DNA, 161 bp, Artificial Sequence
  Description of Artificial Sequence: Synthetic polynucleotide
attacatgagaaactaacattaaaaacactattataaagatatacttttactgataatatgtctaagttgagcgtaaataccgttcatttattttttacaatatataattttttaattgtatgtccggatgcctttactatgtaagcagtgaaaatctaga

SEQ ID NO: 1670 - DNA, 109 bp, Artificial Sequence
  Description of Artificial Sequence: Synthetic polynucleotide
gttcaaatatgtataaaatatttcatattactaaagaattgtaaattgttatttctattgctatcaatatgtaatagcggaataactgactctgttactgattcactaa

SEQ ID NO: 1671 - DNA, 137 bp, Artificial Sequence
  Description of Artificial Sequence: Synthetic polynucleotide
aatatattacatttgtatcttaaagttgcgggttagtaacaggttaaaaatattgaaaatatgaattaaaactcttataagtctctttaattttaactaattgtctaaagattgattcttagctaaacaactctccg

SEQ ID NO: 1672 - DNA, 86 bp, Artificial Sequence
  Description of Artificial Sequence: Synthetic oligonucleotide
aatgcgatggctattttcaagatacaccataggattataatttcctaaattttatagacttcattatattaatatgagttataata

SEQ ID NO: 1673 - DNA, 85 bp, Artificial Sequence
  Description of Artificial Sequence: Synthetic oligonucleotide
tgtatttaatgtcatcttatgattcgatataagacagtaagggtattacatatttatcttataactacaattaatacgtaatcat

SEQ ID NO: 1674 - DNA, 115 bp, Artificial Sequence
  Description of Artificial Sequence: Synthetic polynucleotide
aagctaaatctaactatgatactattcgctataaataagactcttttcgattttatggattaaagacttgaatattaagttctaattgttacaattctaacgggtaattataata

SEQ ID NO: 1675 - DNA, 76 bp, Artificial Sequence
  Description of Artificial Sequence: Synthetic oligonucleotide
tattttagtctttaaggcaccaatggtaagctatattataacgacaatcatattaagattagttatttaactatat

SEQ ID NO: 1676 - DNA, 61 bp, Artificial Sequence
  Description of Artificial Sequence: Synthetic oligonucleotide
cttgatttccgtataatagagatttacaactaaggttcaatttattttaatttcgtaaaaa

SEQ ID NO: 1677 - DNA, 65 bp, Artificial Sequence
  Description of Artificial Sequence: Synthetic oligonucleotide
gaacgatatttattgcaatatgaccactttattataatatcgtatagggaaatcatttttaacat

SEQ ID NO: 1678 - DNA, 65 bp, Artificial Sequence
  Description of Artificial Sequence: Synthetic oligonucleotide
atttatgactaagaactaagtttaatatgaccagggatgctttcttttatatcactaaaatatta

SEQ ID NO: 1679 - DNA, 96 bp, Artificial Sequence
  Description of Artificial Sequence: Synthetic oligonucleotide
aaagatttactgagaatttattattgttttacaatacaattagacctaaacggacataaatttcatagtgtatgtgaaacatatccatttattcgt

SEQ ID NO: 1680 - DNA, 66 bp, Artificial Sequence
  Description of Artificial Sequence: Synthetic oligonucleotide
tacctatatgttatgttataaaaagaattctattatagaaactgttctcaaactgtactaatttgg

SEQ ID NO: 1681 - DNA, 6 bp, Artificial Sequence
  Description of Artificial Sequence: Synthetic oligonucleotide
atttat

SEQ ID NO: 1682 - DNA, 179 bp, Artificial Sequence
  Description of Artificial Sequence: Synthetic polynucleotide
tattactttatttacgatatgttttcttataagttacttcaacgtgcttatcacctaaatagttataggattattgaaactttaactcaaaaactacctgaaggaacatcaaacgtcaagtggtggttgtaatttaaataataattttaataatttattgagttaaaataaatccagat

SEQ ID NO: 1683 - DNA, 192 bp, Artificial Sequence
  Description of Artificial Sequence: Synthetic polynucleotide
acttacatgaatggattgttccacctctaataataatataccaggttcaaactttctgaaataatgatttagaaagatatatgaatcattaaattttaatctcccagtaaatagttgtttattgataagtatgcatatttaatattaataagttcaagatgttactgtacatgatgaaatcaatgttcttac

SEQ ID NO: 1684 - DNA, 36 bp, Artificial Sequence
  Description of Artificial Sequence: Synthetic oligonucleotide
ttcattaagactcgagttaataaactgtttttataa

SEQ ID NO: 1685 - DNA, 177 bp, Artificial Sequence
  Description of Artificial Sequence: Synthetic polynucleotide
cggtacttgatactgtaactgtctaagaaattgaagtaacttaccattagtaccttatcgattataatagcataatattattccttgtttattttgtggtttatacatatcctattgaaagttaatatttcaaaataatccgataagcagaaaaagatataatataattcagatatt

SEQ ID NO: 1686 - DNA, 162 bp, Artificial Sequence
  Description of Artificial Sequence: Synthetic polynucleotide
atctccatctcaagctaccattattatttgtagataattcataccgacaatgatgcgaatgaacgtaaaatattggattcgatatctgtatctgttttattaacaatattatatatgtaattaatgtattaattattaaataattacaatacggattgatga

SEQ ID NO: 1687 - DNA, 77 bp, Artificial Sequence
  Description of Artificial Sequence: Synthetic oligonucleotide
ttatcaactgacataataactatttctttaattactttgtatgtatatattaggtggggacttataaacatcataaa

SEQ ID NO: 1688 - DNA, 188 bp, Artificial Sequence
  Description of Artificial Sequence: Synthetic polynucleotide
caaaatttcgatacaacataattgacatttggaaaaacttattcgaaaaactttctatcgttaaacggaaccaatttatctataatattcagatatgatattatggtactacaatatatgagaaattccattataataataggctttcttgatgttgggttaaatctctgattatattttattaagtt

SEQ ID NO: 1689 - DNA, 45 bp, Artificial Sequence
  Description of Artificial Sequence: Synthetic oligonucleotide
cagtgtactatctttagtattttaacatttaagttaaatgacaat

SEQ ID NO: 1690 - DNA, 131 bp, Artificial Sequence
  Description of Artificial Sequence: Synthetic polynucleotide
agtgagtataagttcctcatcttgtaatttttttaacgacatctattaattgcgtagtaaaatgattttacctccaaattatactttttaagttacggaaaaacaaaatttcttattaaaattagagagaa

SEQ ID NO: 1691 - DNA, 48 bp, Artificial Sequence
  Description of Artificial Sequence: Synthetic oligonucleotide
gttaatctaattagaacacaaatcgatatcaatagttttcggattatt

SEQ ID NO: 1692 - DNA, 135 bp, Artificial Sequence
  Description of Artificial Sequence: Synthetic polynucleotide
gtcaaaattctctattaacgaactattctatacattaaaataagataatgaaattttagaagcaaatcttttggctattattggatatgttctagttcgtgatacattatttatgtaacatatagaatttaccta

SEQ ID NO: 1693 - DNA, 115 bp, Artificial Sequence
  Description of Artificial Sequence: Synthetic polynucleotide
aaccactatatagttttatgttgagtctaaaatcgcgatcgattatgtattttcctcacatcaatagattattataatttgacttgtaataagaagatttatataatataaacag

SEQ ID NO: 1694 - DNA, 141 bp, Artificial Sequence
  Description of Artificial Sequence: Synthetic polynucleotide
agtatgttgtgcaaattatttaacattactagagtttttaaatatcagataagctccataaaattcataaatactagactggcttatactacaaattattaagtgtaattagtcttttgatcattaacagtagattacttt

SEQ ID NO: 1695 - DNA, 133 bp, Artificial Sequence
  Description of Artificial Sequence: Synthetic polynucleotide
cgatgatcaagttaattaagtatattgattattctaggagtgcatttgcaataatctaggcttcatactattatcttcgaacttataataaaattaataagtcaatttcataaaaatgattattttaatccgt

SEQ ID NO: 1696 - DNA, 166 bp, Artificial Sequence
  Description of Artificial Sequence: Synthetic polynucleotide
aatctatgcttgagtatgtataaatgttgaaacctaaattaagttatatataatttgtgatccattactagcaatagttacaaatattgttaattctttgctaattagtccattcaaataaatttggattgcaattacaatctatatatcaaaaagatctggtatc

SEQ ID NO: 1697 - DNA, 180 bp, Artificial Sequence
  Description of Artificial Sequence: Synthetic polynucleotide
cattctttgtaattaataatctaaagtgaagtatcataactaagctgttgtgatctgatatttgtctggaacaaatattttaaccatttctgactttaaatactaaaggatttccataagattattaaaagaaatcttgtacctgctatattaaatgacagaataatctaaatttgttat

SEQ ID NO: 1698 - DNA, 138 bp, Artificial Sequence
  Description of Artificial Sequence: Synthetic polynucleotide
acattaatcaaaatttgaagttaactgtcattaacggataagttattctagtttatagatctatagaaactcgtagcacttaatgacactaaatactatacgtaatactgtttgtatattattatttatatactagtg

SEQ ID NO: 1699 - DNA, 166 bp, Artificial Sequence
  Description of Artificial Sequence: Synthetic polynucleotide
taatagaggatacatttccgtttatctgaattacacaagtttcactgaactgatggaatttttatctattacaaacggaaataatccaaaaactatttttgtagactaataaaaaactctcataatgatattatttaattatatttggtcaatttaagattttggt

SEQ ID NO: 1700 - DNA, 181 bp, Artificial Sequence
  Description of Artificial Sequence: Synthetic polynucleotide
atatctagttaaggataatatacgtatgattaatgaagaacctgtgcacaacttatgacacactttaaatataaaattaatatcaaggatgatctcttaatacaaatattataagtagtgaaagagcattaatatatattatgcattcctcctgttttttttaactgattattttgctttt

SEQ ID NO: 1701 - DNA, 153 bp, Artificial Sequence
  Description of Artificial Sequence: Synthetic polynucleotide
tcataatatacataaaaatatttgtatcctatgcaagaatctgttttttcattatacaagatacgcgtataacttgtctgatacttgaaacaattttagtttatgggttcaaaattcttatggtataaagagatttaactatacttagaaaac

SEQ ID NO: 1702 - DNA, 158 bp, Artificial Sequence
  Description of Artificial Sequence: Synthetic polynucleotide
taagaatgtacattttattcaaaataatctgtttgttgcagtattttggaggacgatattttaattttcaaaaatcaggtgcattaagacctaatattctactctaactaatatataaatgattacgttaaatcagctaaacaatttattattaactg

SEQ ID NO: 1703 - DNA, 46 bp, Artificial Sequence
  Description of Artificial Sequence: Synthetic oligonucleotide
cttgttaaaggtaattatgcttttattctaagaaccatataatata

SEQ ID NO: 1704 - DNA, 130 bp, Artificial Sequence
  Description of Artificial Sequence: Synthetic polynucleotide
attagaaaattcatgtattaattctagaactgttaacatttatctgaaagttttcagttatcaaatttataaaataagcatcctagcctcccattgggtaggttattggttaatatattaaatctataaa

SEQ ID NO: 1705 - DNA, 5 bp, Artificial Sequence
  Description of Artificial Sequence: Synthetic oligonucleotide
ttatt

SEQ ID NO: 1706 - DNA, 84 bp, Artificial Sequence
  Description of Artificial Sequence: Synthetic oligonucleotide
ataccttataatgtgactattaaatctaaatgttccagtagcttaaagagagttgtatacgattaatatatattaattccttat

SEQ ID NO: 1707 - DNA, 32 bp, Artificial Sequence
  Description of Artificial Sequence: Synthetic oligonucleotide
tagtagacttcaatgaatactttgattaatac

SEQ ID NO: 1708 - DNA, 74 bp, Artificial Sequence
  Description of Artificial Sequence: Synthetic oligonucleotide
ccattttaatttgaaattgcagaatcattgtttcgaacataatttcttagatgaacaattaattaagaattctg

SEQ ID NO: 1709 - DNA, 72 bp, Artificial Sequence
  Description of Artificial Sequence: Synthetic oligonucleotide
taacttccgacttatactaatatatatgaatcttagctatttcttgggtaagcaatatgattaagtataaaa

SEQ ID NO: 1710 - DNA, 17 bp, Artificial Sequence
  Description of Artificial Sequence: Synthetic oligonucleotide
agtttctatcgaatatt

SEQ ID NO: 1711 - DNA, 72 bp, Artificial Sequence
  Description of Artificial Sequence: Synthetic oligonucleotide
cgagtttgtataaactcacgatagttaatttaataaacacgggtccgtatagcttctaagcaatagtctttt

SEQ ID NO: 1712 - DNA, 33 bp, Artificial Sequence
  Description of Artificial Sequence: Synthetic oligonucleotide
attgatacatctttagacaggacttcgtttata

SEQ ID NO: 1713 - DNA, 91 bp, Artificial Sequence
  Description of Artificial Sequence: Synthetic oligonucleotide
ccaaaagccttgagacattatttattggctcaactatatactgatagcattcctaaatatatataaagctgcgttggttgttgatactgta

SEQ ID NO: 1714 - DNA, 93 bp, Artificial Sequence
  Description of Artificial Sequence: Synthetic oligonucleotide
agtaagactcatctacttgcttattaattcaggttcactaatgtatcaaacgattaacagtcagactctgtatgctagtcttaagtaaggtag

SEQ ID NO: 1715 - DNA, 74 bp, Artificial Sequence
  Description of Artificial Sequence: Synthetic oligonucleotide
gagtatagccaaagctgatggtctacacattatagatacacttattaagtaattacttgattcgtagttcactt

SEQ ID NO: 1716 - DNA, 192 bp, Artificial Sequence
  Description of Artificial Sequence: Synthetic polynucleotide
gtaaaatccatacgaaattagacaaatttcatggttatgagggatttggactcgagctaattgatattgcgtttcttcttaagaattttcaacatcgctttagaaggggaacgtgtccacaacaaagtaccttcccacacatgttattcattacattataaaggttctaagtagaactagaatcctttttgt

SEQ ID NO: 1717 - DNA, 128 bp, Artificial Sequence
  Description of Artificial Sequence: Synthetic polynucleotide
atcaataatatgaaatagaatttaataatgacctctgtgaattcctcttggccgatttcagtcttaaaaattaattgtcacacggggcagctgagacctttttaaccgtagtttattttaaccggaag

SEQ ID NO: 1718 - DNA, 161 bp, Artificial Sequence
  Description of Artificial Sequence: Synthetic polynucleotide
atctaagagggaatggctataaatttggtctaatacatgttacttgattataactgatcggatacatgcagcactatttatcctcccctagatcttttcattagtgtgaaatggaagctgaactaataattcttattgcgacggacctacataaatatcga

SEQ ID NO: 1719 - DNA, 5 bp, Artificial Sequence
  Description of Artificial Sequence: Synthetic oligonucleotide
tttta

SEQ ID NO: 1720 - DNA, 179 bp, Artificial Sequence
  Description of Artificial Sequence: Synthetic polynucleotide
taccggctatttttgtttgtacttaatactttgctattagctggagacgggtacataatactgttcacggttgggaccaatattcctgttgtaccctaatagtaaatataaacatagcgatataaagtaagagacgtaaagaatatagattattctagctcctacactcagattaccat

SEQ ID NO: 1721 - DNA, 54 bp, Artificial Sequence
  Description of Artificial Sequence: Synthetic oligonucleotide
aacatcacatgtaatttactaagcgtttgctttaagtggtctagtacatcagta

SEQ ID NO: 1722 - DNA, 142 bp, Artificial Sequence
  Description of Artificial Sequence: Synthetic polynucleotide
gattgatggaaccttacagcattgtcagatacgagtaactacttacattcttggtatgatgagtctcctatttgatatatacatagtagaaacgtcggtctgaaacattcagaatatcttcattataacacagttcattgat

SEQ ID NO: 1723 - DNA, 77 bp, Artificial Sequence
  Description of Artificial Sequence: Synthetic oligonucleotide
tggagttttcgatacctaagggtttaagaaatgatcacattccaaactctatattttaatcaattgacagccgagtt

SEQ ID NO: 1724 - DNA, 174 bp, Artificial Sequence
  Description of Artificial Sequence: Synthetic polynucleotide
tcgtctttttccttttagcgtggaactattaaggatcaccaaagaatatgtaattgttttcttgagacatccttatcgcgacgcttaaacaaggtaaggcattgtttatgggttcttaatgacagctccactgaactactccattaaactataagaataataaaataagtggta

SEQ ID NO: 1725 - DNA, 18 bp, Artificial Sequence
  Description of Artificial Sequence: Synthetic oligonucleotide
aactgtgtatcttgatca

SEQ ID NO: 1726 - DNA, 163 bp, Artificial Sequence
  Description of Artificial Sequence: Synthetic polynucleotide
acggtatctgtagtgatttctacgcccgaggtcgatgataaggacttccgtgcactacaagtatgatacaatgtaatcttgttgtaattattgatgacaaaaagaactatgtatctcaattacatggaatgttataatccctaatctatgtactatctctata

SEQ ID NO: 1727 - DNA, 83 bp, Artificial Sequence
  Description of Artificial Sequence: Synthetic oligonucleotide
ctccataaataaggttctgggataactcgatcttggaattactgtaccaggatactaattttttagatactataatagtgcct

SEQ ID NO: 1728 - DNA, 137 bp, Artificial Sequence
  Description of Artificial Sequence: Synthetic polynucleotide
tagaaggatacttcaatagttctaaagttactctcgtaattaacggactggcaaagcatcattcttgatactccccatcgtatctgtagatttagaagttcaatttaagcttggtatggacaatttatctattagaa

SEQ ID NO: 1729 - DNA, 59 bp, Artificial Sequence
  Description of Artificial Sequence: Synthetic oligonucleotide
gcaacagaatagatcgatgtccatgataagtaccaaatttcgttttttacgtttctaga

SEQ ID NO: 1730 - DNA, 43 bp, Artificial Sequence
  Description of Artificial Sequence: Synthetic oligonucleotide
tgattgatctccaaaatacttggattgatatcagtctacagtt

SEQ ID NO: 1731 - DNA, 131 bp, Artificial Sequence
  Description of Artificial Sequence: Synthetic polynucleotide
tgtagtttcctcacatatcgtttttgttttaccgtttttaaaaacatcaatttacttgagggacaggatgctggcagaaactcaagaaactaaatgtggagctacatttacaagttccttatagtcaaaat

SEQ ID NO: 1732 - DNA, 85 bp, Artificial Sequence
  Description of Artificial Sequence: Synthetic oligonucleotide
ttttaatgagtaccttataatgtataaaacttcccaccgctttagttgctatgattgaacgaagcatgattgcaactttaatgag

SEQ ID NO: 1733 - DNA, 134 bp, Artificial Sequence
  Description of Artificial Sequence: Synthetic polynucleotide
cttaatggcagtatacctgtcacgtccaagagaggcacggtaagacgaaatttaatctaaaaatatatttctagcatcttctatttgagcattgccgggcagagtaattcatttatctgttcaaattatttata

SEQ ID NO: 1734 - DNA, 21 bp, Artificial Sequence
  Description of Artificial Sequence: Synthetic oligonucleotide
catgttgaatactgtatattc

SEQ ID NO: 1735 - DNA, 64 bp, Artificial Sequence
  Description of Artificial Sequence: Synthetic oligonucleotide
gcaacagatgttcttggttatatattctatccgctagtttgtaatgattcgagcaaaaaacact

SEQ ID NO: 1736 - DNA, 66 bp, Artificial Sequence
  Description of Artificial Sequence: Synthetic oligonucleotide
aaccctgattgtgttaaagaatttctactgtgttaccgttagtcgaataattacaattgtcacaag

SEQ ID NO: 1737 - DNA, 59 bp, Artificial Sequence
  Description of Artificial Sequence: Synthetic oligonucleotide
catgcgtttctccaacttcaacaataaagggattcgatatgtaatatcgttatggttaa

SEQ ID NO: 1738 - DNA, 28 bp, Artificial Sequence
  Description of Artificial Sequence: Synthetic oligonucleotide
tctgtcgataatattattctgctaagaa

SEQ ID NO: 1739 - DNA, 90 bp, Artificial Sequence
  Description of Artificial Sequence: Synthetic oligonucleotide
taatcttcgcagaaacatcaatcgaccaatttatgttctttgatttaatgtctaactagcttagagagccggttgtgatatacaaatgat

SEQ ID NO: 1740 - DNA, 133 bp, Artificial Sequence
  Description of Artificial Sequence: Synthetic polynucleotide
attctctataatataaactgtaccataacgggccggtccacaatgtcaaaattttataaagttcgtgctctatattgtgaacatttcaagcgtctactgctaaaagtgatgattaaatggcagatgctgtatt

SEQ ID NO: 1741 - DNA, 7 bp, Artificial Sequence
  Description of Artificial Sequence: Synthetic oligonucleotide
ttatcag

SEQ ID NO: 1742 - DNA, 172 bp, Artificial Sequence
  Description of Artificial Sequence: Synthetic polynucleotide
cgtaatatattacgcggatgcttatgtatagttctcgtcaaataaaatgtatataggtaaagtaaattaacgattactgcgttctttaggcattctagcgggttaattctaagaatcaccagtgcatatgtcgtaaccgctatcatttatgtataactcatactcgcaagca

SEQ ID NO: 1743 - DNA, 63 bp, Artificial Sequence
  Description of Artificial Sequence: Synthetic oligonucleotide
tttgtgccctcaatcttacatatttgtgggaccgtaaattatggtgaaaaaagtatatacacc

SEQ ID NO: 1744 - DNA, 12 bp, Artificial Sequence
  Description of Artificial Sequence: Synthetic oligonucleotide
ctttgtactaga

SEQ ID NO: 1745 - DNA, 23 bp, Artificial Sequence
  Description of Artificial Sequence: Synthetic oligonucleotide
tttgtataagggctcataaactc

SEQ ID NO: 1746 - DNA, 154 bp, Artificial Sequence
  Description of Artificial Sequence: Synthetic polynucleotide
taggacgacgtacagttctcattcagttgatctttcggaacgacattataataaaccatgcaaatcatactaatattattagtcatagcagatacatcttaaaaaacctgtgtataatggtatatttggagttttgctttcgcagcgtagatct

SEQ ID NO: 1747 - DNA, 88 bp, Artificial Sequence
  Description of Artificial Sequence: Synthetic oligonucleotide
cgagggttctttagtataaccattaagtgtttcacaacatagctcatcgtatctggaaaagatattcgttaacttatcagacatagtt

SEQ ID NO: 1748 - DNA, 117 bp, Artificial Sequence
  Description of Artificial Sequence: Synthetic polynucleotide
tgtatcgcacactataaaccaaagttgtagccacatatcgaatttgcttcgatagcataggcagttgttaaatatctcgcattctagtgaaactatataaggttaattatctgttga

SEQ ID NO: 1749 - DNA, 9 bp, Artificial Sequence
  Description of Artificial Sequence: Synthetic oligonucleotide
ttactgtat

SEQ ID NO: 1750 - DNA, 57 bp, Artificial Sequence
  Description of Artificial Sequence: Synthetic oligonucleotide
attaggttttttattttcaatgatatgaaactcgaatcacaatgtcgatcatagcgc

SEQ ID NO: 1751 - DNA, 54 bp, Artificial Sequence
  Description of Artificial Sequence: Synthetic oligonucleotide
cgatcattcctttcggttggaaatactaaatataagctgttagcaataatttcg

SEQ ID NO: 1752 - DNA, 31 bp, Artificial Sequence
  Description of Artificial Sequence: Synthetic oligonucleotide
agttcgaaatgatattctaattgctactagc

SEQ ID NO: 1753 - DNA, 59 bp, Artificial Sequence
  Description of Artificial Sequence: Synthetic oligonucleotide
caactacacataattaagttggtttggatccatagctcatattatcgtaggaattcgat

SEQ ID NO: 1754 - DNA, 73 bp, Artificial Sequence
  Description of Artificial Sequence: Synthetic oligonucleotide
ttaatatgatcacgccaagaatttttttcaatacgagtattatgttaacttacgacaggccgttaatgtatcg

SEQ ID NO: 1755 - DNA, 89 bp, Artificial Sequence
  Description of Artificial Sequence: Synthetic oligonucleotide
tcaataattactaccaaaggcgcaatatagggtagattttgtgtttttatatcactgtactgggaatcttatcaacagactactctgat

SEQ ID NO: 1756 - DNA, 185 bp, Artificial Sequence
  Description of Artificial Sequence: Synthetic polynucleotide
tttttttaaattttgttgcctctagacagtttattcgttggttcaacagaatgcggacaggtggatttcagccttgaacaaatcctaaaaaaagatcattgtgctgcataatctcagatacgttgtcgcgcttagtaagagaaataagtaattattcttagacaccatctacttacaacaaaatg

SEQ ID NO: 1757 - DNA, 67 bp, Artificial Sequence
  Description of Artificial Sequence: Synthetic oligonucleotide
ctacacgatttgagatggttcccttaataatacattaatatgcacttgcgatatgatagtcaagttt

SEQ ID NO: 1758 - DNA, 38 bp, Artificial Sequence
  Description of Artificial Sequence: Synthetic oligonucleotide
atcgtggttatttcctaaatcatcttacatggagataa

SEQ ID NO: 1759 - DNA, 154 bp, Artificial Sequence
  Description of Artificial Sequence: Synthetic polynucleotide
agtatcgtaagaataaatgcgagaaattattactcagttcttatttatggttcacttcccattcgaaagttgcaaaataccaatgtatatcgtcttatcccagggtggggctaagaaagctactctattattctttataacataagctatatgg

SEQ ID NO: 1760 - DNA, 44 bp, Artificial Sequence
  Description of Artificial Sequence: Synthetic oligonucleotide
aactttggaaatcatgttagatcttggagtaatttctaactcac

SEQ ID NO: 1761 - DNA, 129 bp, Artificial Sequence
  Description of Artificial Sequence: Synthetic polynucleotide
ccttgaagattatccatttcattttggacattacatctgtagaatcatattctccgtcatgcaaagactgaatattagtcgttactacggagttatcaatgctatatctgtggaaaagatagtaatcag

SEQ ID NO: 1762 - DNA, 103 bp, Artificial Sequence
  Description of Artificial Sequence: Synthetic polynucleotide
tcgtatatttcgtatctagagccatagatattgattaactgatcgacaaattcagatggaaccagtgcgaagatttccaacactttagcatattaatgctttg

SEQ ID NO: 1763 - DNA, 55 bp, Artificial Sequence
  Description of Artificial Sequence: Synthetic oligonucleotide
atttacatgtaaaatttttaagtactataacactatatcagtcgcctcgtggtgg

SEQ ID NO: 1764 - DNA, 47 bp, Artificial Sequence
  Description of Artificial Sequence: Synthetic oligonucleotide
gtcaagcatcatcgcatatgttgtttgtaaatgcgtaatcataaatc

SEQ ID NO: 1765 - DNA, 119 bp, Artificial Sequence
  Description of Artificial Sequence: Synthetic polynucleotide
tatctggatttgtacattaaataatgtttagaagtcatagcctatatcattaatgcagcatgaccttccaaaggcgaaaatgatcgataatcggttcatgtttttccaactcaggttta

SEQ ID NO: 1766 - DNA, 98 bp, Artificial Sequence
  Description of Artificial Sequence: Synthetic oligonucleotide
ttaatttactatcagaagtaatcaggcttatattaaaacttatagaccattccatttcggttaattgtggagtcattgtcagtcagcagcggtacaca

SEQ ID NO: 1767 - DNA, 148 bp, Artificial Sequence
  Description of Artificial Sequence: Synthetic polynucleotide
atcatgtttatttagatctctatcctgcaacagggattataggcaggttgtattatttataaccatgaagacagtgacaaattggaggtctctgaaatagctcttcgatacatcaatttactatctacaatgaaattgccatatatcg

SEQ ID NO: 1768 - DNA, 139 bp, Artificial Sequence
  Description of Artificial Sequence: Synthetic polynucleotide
catttttatgacttataggtaaattaattctagaagactaatagagtggtttatccgagacagttatgaagtcctgaagctaatataccagtcattcatactagacacactcaaccaattgcatgaccgttttggtgtt

SEQ ID NO: 1769 - DNA, 158 bp, Artificial Sequence
  Description of Artificial Sequence: Synthetic polynucleotide
tattttgtaaactcctcctataaactcgagatgctagcaaaaaataatttaatgattcgcactaattagtcatgctcaacgcagttccgttttattaagattaagacacactatagattttgtcttgggttgaacggacgtctggaaattacgatgat

SEQ ID NO: 1770 - DNA, 47 bp, Artificial Sequence
  Description of Artificial Sequence: Synthetic oligonucleotide
attccgtagcaagtatgttcgaaatcaacttttgatcgaaattgcta

SEQ ID NO: 1771 - DNA, 200 bp, Artificial Sequence
  Description of Artificial Sequence: Synthetic polynucleotide
tgtgagaaaatcgatacgtactaggattttattctatgcacttatattttgatagcactaagtatacgatacggtcacagttaaagtatctacttgccttatgtggagtaaacttaaagaattgaaatgtacctccccttcaaatacagatcagctaatagtaacttttggcttgaccaatatcccgactagtaggttag

SEQ ID NO: 1772 - DNA, 168 bp, Artificial Sequence
  Description of Artificial Sequence: Synthetic polynucleotide
ttacaagcacatttaaaggtccgtagccagtgtcctatcatatcaattcgaccttcagtatcatgtaaaatcaatggttttggtatctctagagacatagatttgtcaacctatatcattattcgatggatataagatgttcatctgctatgcattggggataaaaaa

SEQ ID NO: 1773 - DNA, 74 bp, Artificial Sequence
  Description of Artificial Sequence: Synthetic oligonucleotide
gcttactatgttaattaaagacgctgaagtctgtttaagctttcagatataacacttataagagacgattcttc

SEQ ID NO: 1774 - DNA, 184 bp, Artificial Sequence
  Description of Artificial Sequence: Synthetic polynucleotide
ttaacttagggtattataatatctgctaagagctaagaactaaatattttatttttcaacggactgcgttgtagcactaaatcgtgggttgaataacctctcatacgtaactttccctgaccgaactatatgtcgtccgtattctagcgaaaaaaacagagaattttagttgattccgagttaa

SEQ ID NO: 1775 - DNA, 164 bp, Artificial Sequence
  Description of Artificial Sequence: Synthetic polynucleotide
ggacttcgatcaaatgagtctattaaagtagtggcctacgtagacctaatagctcattataaagaattagatcaagtatgcttattccatttaattgctacagtttaaatatggctttttttacaatcatccatgtatgccgatttaatcgcaaggacagcgta

SEQ ID NO: 1776 - DNA, 86 bp, Artificial Sequence
  Description of Artificial Sequence: Synthetic oligonucleotide
tatagttttatttcgaacttggtatatggaatgggcgttgaaaacccacatcatgtaacgcaagataaaatagtccttcttttacc

SEQ ID NO: 1777 - DNA, 140 bp, Artificial Sequence
  Description of Artificial Sequence: Synthetic polynucleotide
gaatcgggctgtaagtactatagattgagagaggcccccagacctttacatcttatcatagatttgatttaagaacagacggcttctcaataatccatgtagatttagacattttccttttataatttaaaatctatgga

SEQ ID NO: 1778 - DNA, 146 bp, Artificial Sequence
  Description of Artificial Sequence: Synthetic polynucleotide
aagttgcatataatctacaattgatcctttcgcactctgatgttaatcctatattagtaatcactcacgaagcacacgcatagtatgtaagatttatcgactatcttgttgtaattatagtaggaacgtataaggggcaattgcta

SEQ ID NO: 1779 - DNA, 18 bp, Artificial Sequence
  Description of Artificial Sequence: Synthetic oligonucleotide
tttacagtttcatagagc

SEQ ID NO: 1780 - DNA, 136 bp, Artificial Sequence
  Description of Artificial Sequence: Synthetic polynucleotide
ttaccagtaaatctttactctatgtagcttggatagaaaataatgttgcgttaaaatgaagcatccacgctgtatcactcgatattgttctaatttacacgaaaacacgttctggaaagtacaattttgttgagtc

SEQ ID NO: 1781 - DNA, 109 bp, Artificial Sequence
  Description of Artificial Sequence: Synthetic polynucleotide
gacgtatcaagactttcggtcgcgataattttaaaagttctagaacattttccagtagaccatatatttgggtaaatctaatcacaggtttaacgggcattttaacatc

SEQ ID NO: 1782 - DNA, 163 bp, Artificial Sequence
  Description of Artificial Sequence: Synthetic polynucleotide
agttttgactacttatcaataggaacgtgaaatggtaggagcacttcataaggcgcatatctttacttcttgttaactaccctattaatatcaataggtcagatagagaaacatttgcaagcaaacaatgcctagagtgttggatttctttcctattctatat

SEQ ID NO: 1783 - DNA, 139 bp, Artificial Sequence
  Description of Artificial Sequence: Synthetic polynucleotide
attcgacagcgaagaggtataatcctatttaatgcataaaaattaattccaatgcaccaatccgatgagatagcgtctgtttcggtttgttctccataataattatttttgttgaaacaccgatgattatcaagcgagt

SEQ ID NO: 1784 - DNA, 196 bp, Artificial Sequence
  Description of Artificial Sequence: Synthetic polynucleotide
tgattgtagttttcgagtaggctatcaagatcagaacgcttttaagttaaatacgctcatcatcatttccacttattaacgtcgttattctacataaacaaggtaatctgtgtggactgtagaaaagaatatacagatgcctttgtacaacgcacatataatggcatgtcgctatattacgcaaaaatttggtctt

SEQ ID NO: 1785 - DNA, 165 bp, Artificial Sequence
  Description of Artificial Sequence: Synthetic polynucleotide
ttatagatgaaggaataatccggactttcgttatttgaactcttatattctgtcaaatacaaagatgcatattggaagtctacgatttgaacaaaaaactaattattcgttttcgctttgctaaatgcttacaccttgtacctatgaagcgatggtgcacatacg

SEQ ID NO: 1786 - DNA, 38 bp, Artificial Sequence
  Description of Artificial Sequence: Synthetic oligonucleotide
tggactagtgtattatcaattagttataccctgaatac

SEQ ID NO: 1787 - DNA, 169 bp, Artificial Sequence
  Description of Artificial Sequence: Synthetic polynucleotide
tcttatgctccacgggatctaattaataattacgaagacgatcaatatcggcatttctagttagagttcttttaaataataaatacgtaaagttccccttaggtgtaaagtatcggctcacgagttgcgtagcctaacggattatttaatattataatatattcagcgc

SEQ ID NO: 1788 - DNA, 182 bp, Artificial Sequence
  Description of Artificial Sequence: Synthetic polynucleotide
ttggcagtaatgattgaaaaatacgtgtctacactctcagaaaatacgagatctctatctcttcaggatttcacagatgaaagttatgctttactgaccattttttgattcaggtgttgttaaactaatgacacgcgacaagttgaagtcaacaaaactcctgttgacataaatgtattttt

SEQ ID NO: 1789 - DNA, 150 bp, Artificial Sequence
  Description of Artificial Sequence: Synthetic polynucleotide
ctgctgcattattttagctgattaaagaccaacctgccataagatagaactaggagagacggtgtatactattgacaatattaatgttagatctaattactctgtgagtaaagtattagaacacgctttcgatattctgacttcttccta

SEQ ID NO: 1790 - DNA, 114 bp, Artificial Sequence
  Description of Artificial Sequence: Synthetic polynucleotide
atttcacacactgtcagtcttgccagtaggcataatggttcgctaaagtatgtttttactaatttaattaaggtatatggtgtagacaactgtaacattacacttcaagtaaac

SEQ ID NO: 1791 - DNA, 50 bp, Artificial Sequence
  Description of Artificial Sequence: Synthetic oligonucleotide
gaagattactggataatactatttggattacaatgtgacatttacctcct

SEQ ID NO: 1792 - DNA, 29 bp, Artificial Sequence
  Description of Artificial Sequence: Synthetic oligonucleotide
tcacaaaatctagctatggttctattagg

SEQ ID NO: 1793 - DNA, 139 bp, Artificial Sequence
  Description of Artificial Sequence: Synthetic polynucleotide
taatgatgttttttgattgtaaactggctttattacaaatcaaacaaagttatacttcgtataacataactgacccatgcatggtccaaatttgggtccgaaggtgtccgtgtaaacgtttggttaaaccactaaaatc

SEQ ID NO: 1794 - DNA, 196 bp, Artificial Sequence
  Description of Artificial Sequence: Synthetic polynucleotide
aggatctcgatcttataaatgtcacgaagtcagtgattcatatttctagtccgctacacctcttagcactaaagttaggttttaaattctacagtcttatgtgcacgaataatcgtagatgtatattctagattttaatatcacaacttcctttagagtgtatagcaaccgtacagataaacggtgtgagtaaaag

SEQ ID NO: 1795 - DNA, 88 bp, Artificial Sequence
  Description of Artificial Sequence: Synthetic oligonucleotide
aattaacttaatttaactgttgactacatgcagcctaggtagtttgacgtgaatatttgagccgaacgtacaaccttttcaatttaag

SEQ ID NO: 1796 - DNA, 43 bp, Artificial Sequence
  Description of Artificial Sequence: Synthetic oligonucleotide
tccctgcaatttcatatttgtgacttgatgtacaaagagatat

SEQ ID NO: 1797 - DNA, 183 bp, Artificial Sequence
  Description of Artificial Sequence: Synthetic polynucleotide
acataacttgcgcaagcactgattacagagaatcgtatagttaacgctagaagctataacatggttaaggacccataaaaaatcgatttttttcatggcgcataactccttctattgttttcaacatctcaagtattgtaatcacgcgggcgaagatgatgtaacattgagtttttttattat

SEQ ID NO: 1798 - DNA, 46 bp, Artificial Sequence
  Description of Artificial Sequence: Synthetic oligonucleotide
gatttaatacatcttggagccgtagacatatgctaacgattctatt

SEQ ID NO: 1799 - DNA, 192 bp, Artificial Sequence
  Description of Artificial Sequence: Synthetic polynucleotide
catcatctcaaaataggaacagataacccaaattaaggctgtttttagcacgtactattgaggttcgcatagtacgcggggtaaaacaatctctctacatgtggaaccgacctttaagtttgttataacatagttataacaaattgaagaatgtatgaaaacagcttcttcaccttattttgttttggtttt

SEQ ID NO: 1800 - DNA, 49 bp, Artificial Sequence
  Description of Artificial Sequence: Synthetic oligonucleotide
catatcctttaagtgtttaattaaggagtcgtaactacttgaaagtcct

SEQ ID NO: 1801 - DNA, 80 bp, Artificial Sequence
  Description of Artificial Sequence: Synthetic oligonucleotide
atttaagcgctgattataatagtctcggtgatatttaactcacatttctacagtagatcgccatacgtgagactaagaat

SEQ ID NO: 1802 - DNA, 112 bp, Artificial Sequence
  Description of Artificial Sequence: Synthetic polynucleotide
aagaggagactgagacaacaagttttgtttcgctacgcgtgacacgtgccatcgacagttgttatactaacatgcttatatcattatcatctttaaaaatattatattagtt

SEQ ID NO: 1803 - DNA, 187 bp, Artificial Sequence
  Description of Artificial Sequence: Synthetic polynucleotide
atttattttgggttaactttgtcatttaaataagtctccacatatgagttgaatgttcattagaaaaataaatgaaactaactgctgatatatggttatagcttgatctactccctccaagccgtttgtagatactgtaatgcaaaaaccgataaatatgagtaccggacgctcatctccggtgtta

SEQ ID NO: 1804 - DNA, 156 bp, Artificial Sequence
  Description of Artificial Sequence: Synthetic polynucleotide
caaatgtcattttagtaaccaaacatgagctatggtggaataatccaaactgaagatttttgctcacatatgagtaatactcagttcattatcgtaactcagtacgtcatggtttggcggcttagaacccttttattcaattgtagaatatctgaa

SEQ ID NO: 1805 - DNA, 175 bp, Artificial Sequence
  Description of Artificial Sequence: Synthetic polynucleotide
gatcaaacattgtgattagacatttcattaatatcctcattatattaattaaaccaaattcattaatgtgtatcgtgagctcgcttcaccaagtgcctaaagagtgtcacaaaagggtaatattggcatcatgcgaaaatttcatttctattagaggttgttggcttatccgcga

SEQ ID NO: 1806 - DNA, 162 bp, Artificial Sequence
  Description of Artificial Sequence: Synthetic polynucleotide
tatttgattttcacgaaacatttgcatagcgttttcgatatatgttcaagatgtacatggaggatacatatacctttaattgtatcttgatacgatcgtcaataaaagaaacagcatgacaagtgatttccgaatcgtctactatttcaagcccttggcaag

SEQ ID NO: 1807 - DNA, 76 bp, Artificial Sequence
  Description of Artificial Sequence: Synthetic oligonucleotide
atcgtatttgtgcttgattatgagtaaatcaaatttaaaaccttatcaatggataagcttggaaccgctcgtctca

SEQ ID NO: 1808 - DNA, 84 bp, Artificial Sequence
  Description of Artificial Sequence: Synthetic oligonucleotide
gtactggaaactgtacctttccgaaagtctagaatatattatttgacatcccagtaacatgtttaatatcggtgaaattgctat

SEQ ID NO: 1809 - DNA, 100 bp, Artificial Sequence
  Description of Artificial Sequence: Synthetic polynucleotide
tagggttgttcgttctactgtcggtggaagtcacattatacgtccaacagaactctaattgagcaatcaaaactaatttagtcattttatcaatattgaa

SEQ ID NO: 1810 - DNA, 80 bp, Artificial Sequence
  Description of Artificial Sequence: Synthetic oligonucleotide
ttcgtttaccaaattagattggaattcaaccttcctatgcgcagtagtataatgtagcatcacttaggatgcatataaag

SEQ ID NO: 1811 - DNA, 54 bp, Artificial Sequence
  Description of Artificial Sequence: Synthetic oligonucleotide
tgccgaatcctatgttcggcagtattatggacataacaaatattttagtttaca

SEQ ID NO: 1812 - DNA, 33 bp, Artificial Sequence
  Description of Artificial Sequence: Synthetic oligonucleotide
atagtactatgtcgcccatattaaattttaggt

SEQ ID NO: 1813 - DNA, 53 bp, Artificial Sequence
  Description of Artificial Sequence: Synthetic oligonucleotide
tcgtctcagttgagtgtttagctttaaaagtaataacctgctacatagaatac

SEQ ID NO: 1814 - DNA, 155 bp, Artificial Sequence
  Description of Artificial Sequence: Synthetic polynucleotide
tgataatattaaactttagtcgtatttgacgtttaaaaccataccacttttaacgcccagggaaagcttaaaaagtaggctctggaggttgcagttattattgcgtagtcaataattaacttgggcgtttcccataaccagtatattcaataact

SEQ ID NO: 1815 - DNA, 24 bp, Artificial Sequence
  Description of Artificial Sequence: Synthetic oligonucleotide
caggcatagactcattgttatatt

SEQ ID NO: 1816 - DNA, 185 bp, Artificial Sequence
  Description of Artificial Sequence: Synthetic polynucleotide
aattttgcagggtataccatagtaatgttatcttacattcgttggactatgttctaaacgtataagacgagggtagcaatatatacaacgtattctcaatccaacgcaaactgtcggatctgactatagattaggttctaccggaatagatttacacgacaattgatttactagtactatttcat

SEQ ID NO: 1817 - DNA, 100 bp, Artificial Sequence
  Description of Artificial Sequence: Synthetic polynucleotide
tgtttgaaacggaaaatttttaacagcataagaaaattcataatggtttgctctttcttagattgtccacaaaagccgcgttgacatctcgattgatact

SEQ ID NO: 1818 - DNA, 64 bp, Artificial Sequence
  Description of Artificial Sequence: Synthetic oligonucleotide
aacgattgcctagtgctcactcgatatctgttattgttcaataatataaagtagttaactgacg

SEQ ID NO: 1819 - DNA, 86 bp, Artificial Sequence
  Description of Artificial Sequence: Synthetic oligonucleotide
cttaataaagagcttatgaataggacagaaagtttaaatcatcttgctttcccactaaagtgttcccctgttagtggaatttatgc

SEQ ID NO: 1820 - DNA, 98 bp, Artificial Sequence
  Description of Artificial Sequence: Synthetic oligonucleotide
tatggctgaaagatcgatttcaatatatatacttagatttcagaatctccgagagcctagtacgaatcaaacatttgatcggaaggctttactctttt

SEQ ID NO: 1821 - DNA, 32 bp, Artificial Sequence
  Description of Artificial Sequence: Synthetic oligonucleotide
tgattaaaagatcaatggtccatttgactctt

SEQ ID NO: 1822 - DNA, 52 bp, Artificial Sequence
  Description of Artificial Sequence: Synthetic oligonucleotide
gaaggtaatacattacttgccgtgcagtacatcttcttataatagattcagt

SEQ ID NO: 1823 - DNA, 15 bp, Artificial Sequence
  Description of Artificial Sequence: Synthetic oligonucleotide
tgtatttcactaatg

SEQ ID NO: 1824 - DNA, 119 bp, Artificial Sequence
  Description of Artificial Sequence: Synthetic polynucleotide
actgataacatatttttaagcacgctactaaacaaactaaggatttttaatattcctgagttggattgcgcctaagattgcttttgcagtaatctatccatgattgtgctacatggaaa

SEQ ID NO: 1825 - DNA, 99 bp, Artificial Sequence
  Description of Artificial Sequence: Synthetic oligonucleotide
tcttgttctggccaaatctagacgtatatatatgataaatatcggttttatatccgattacagacaatgctaaaggattacaaagttggacagtctcct

SEQ ID NO: 1826 - DNA, 143 bp, Artificial Sequence
  Description of Artificial Sequence: Synthetic polynucleotide
tctagatgaattagatatattgtacgaagactaaatggacaaagttttccacttatgtgattagtttctattatatatacgcttattctaccgaatgccaaatctcaggcacaacggctacagtcgggaattctaagtgcatt

SEQ ID NO: 1827 - DNA, 116 bp, Artificial Sequence
  Description of Artificial Sequence: Synthetic polynucleotide
ttctatcggaaatgggggagtaaattaggcaatcaattcatttttgcagtttatttaattattaagacttaatggagtcttatctaacgactcataaacccccgaagtttccgaca

SEQ ID NO: 1828 - DNA, 41 bp, Artificial Sequence
  Description of Artificial Sequence: Synthetic oligonucleotide
tgtattttaagctttaagtttccggactgtgcacaacaaaa

SEQ ID NO: 1829 - DNA, 13 bp, Artificial Sequence
  Description of Artificial Sequence: Synthetic oligonucleotide
cgatcattgatat

SEQ ID NO: 1830 - DNA, 99 bp, Artificial Sequence
  Description of Artificial Sequence: Synthetic oligonucleotide
cagaaagaagtctcttgtttcacttcttgaaaatgcacatgttgaaattgttaattattcagagtaataggggcatgctaaatcttatcgtccaccata

SEQ ID NO: 1831 - DNA, 111 bp, Artificial Sequence
  Description of Artificial Sequence: Synthetic polynucleotide
aaactaaatcagtcaagaaatatagtcacgaattttactgagaatttctaaccatcaaatcggcgctggatcttttaagttcttctgagcctgacatttagtttggatgat

SEQ ID NO: 1832 - DNA, 111 bp, Artificial Sequence
  Description of Artificial Sequence: Synthetic polynucleotide
agcaagtatttccgatttaggtatgtaaaaaaccgagttacttatatctgtaacccaagatgactaacatctgtcatagtgtatactcgtttctctatagtattagacagg

SEQ ID NO: 1833 - DNA, 84 bp, Artificial Sequence
  Description of Artificial Sequence: Synthetic oligonucleotide
gatatacgtattcgaaccgattcagatttaaacattaatctattagaatacttggacattgcgctttgaacaagtttgtagtcc

SEQ ID NO: 1834 - DNA, 69 bp, Artificial Sequence
  Description of Artificial Sequence: Synthetic oligonucleotide
gatatacgatcttataagggtgattgcatgataattgacagatctattcatcgtgacatttaccacact

SEQ ID NO: 1835 - DNA, 131 bp, Artificial Sequence
  Description of Artificial Sequence: Synthetic polynucleotide
gaccttcattttaccggggcaccaaatcacttgggcactacaattcagtcaaattaatagtctttagagtagagcgacgttgatgtgttgaatttaaattactcgttacttaaaatttataaatgtcttaa

SEQ ID NO: 1836 - DNA, 59 bp, Artificial Sequence
  Description of Artificial Sequence: Synthetic oligonucleotide
tacatagataatgaattctagaatatttcggtgtcttcgtagactcatcagagaactct

SEQ ID NO: 1837 - DNA, 195 bp, Artificial Sequence
  Description of Artificial Sequence: Synthetic polynucleotide
ttcacatctagaggttatacgtcaatagtattattaatcttccttacaaagaaaggtgacaacttatatcatataatcgagtaatggcacattttatcccaaaggcgtgctacaaggggttttactcctgttgataaaggacgtcttattctcgttgtaaaaacatcaaaaaacaactttcggcagttttggtgt

SEQ ID NO: 1838 - DNA, 161 bp, Artificial Sequence
  Description of Artificial Sequence: Synthetic polynucleotide
aatcgctaaggatcatagttgtttttgatttatgcatcacgttccatataatacggccttgattaagatttcaaaaaatcgcaatggactttcggactcgataggtattacttaatacacggaatatgcatacactaaatactttctgtcagcaagggtat

SEQ ID NO: 1839 - DNA, 72 bp, Artificial Sequence
  Description of Artificial Sequence: Synthetic oligonucleotide
ctcgattagcattttaacgggatacttagccttctattagagacattaacaacttacgagttataatgtgta

SEQ ID NO: 1840 - DNA, 137 bp, Artificial Sequence
  Description of Artificial Sequence: Synthetic polynucleotide
ttgaaactaaattgctcagtcgggcgctaagccagatcggaatcgttccaaaagtagcttatgctataatttaagtatatataagcatccgttttaagtttcattttactttatatagtaagaaagtaatgctctcc

SEQ ID NO: 1841 - DNA, 37 bp, Artificial Sequence
  Description of Artificial Sequence: Synthetic oligonucleotide
gtatgagctataacttccaaaatgattcatagcgttt

SEQ ID NO: 1842 - DNA, 142 bp, Artificial Sequence
  Description of Artificial Sequence: Synthetic polynucleotide
caagcaattggaacggataactacagttcttaatgaaaaattgcagtttactccttaacattagctattaatttaccacatcttagattatatacgattaggggtttcatccgagaggtaggagttcattcttttcgaatac

SEQ ID NO: 1843 - DNA, 193 bp, Artificial Sequence
  Description of Artificial Sequence: Synthetic polynucleotide
attattaaaaccattagtgatactttaaccgttaaacaacattagctgttacagtaagaagacgattatatgagtattctgtttaaagttttgtcatagagtatccgaaaacattacgtggttcacccttaaactcaatcgcaatatggatacaagttactttcattgcatgctactttgtgttcgacgggcg

SEQ ID NO: 1844 - DNA, 126 bp, Artificial Sequence
  Description of Artificial Sequence: Synthetic polynucleotide
atagcgataatttactttgaattgtactatcgcgtgttacattaatatgttaactataaatttctaaggcagaagggctctacgcaagtaattgcaacgcagaccaaatcttaggtatttccctgt

SEQ ID NO: 1845 - DNA, 67 bp, Artificial Sequence
  Description of Artificial Sequence: Synthetic oligonucleotide
cctgtccaaaaagaggcttgagttttttaagctacagttttaaccttttaagcttatcaataatgga

SEQ ID NO: 1846 - DNA, 96 bp, Artificial Sequence
  Description of Artificial Sequence: Synthetic oligonucleotide
ctttttttcataatcctaaaaacaattggttttaggggtctcctcagtagtatctacaagaaacatatagagtctataagacttaaagttgctggc

SEQ ID NO: 1847 - DNA, 161 bp, Artificial Sequence
  Description of Artificial Sequence: Synthetic polynucleotide
caatctcggtaactgtctatataagttctccagagtaatgtttatactgtagtaaatcgtatgatcgcttctcgaaaatttggaaactattttttacagtagttcaacggaatggcattacaagtgttaaataatattatagaatgcgcgctcaccgacca

SEQ ID NO: 1848 - DNA, 33 bp, Artificial Sequence
  Description of Artificial Sequence: Synthetic oligonucleotide
tattccacattaggttttagcaaggaaatcttt

SEQ ID NO: 1849 - DNA, 158 bp, Artificial Sequence
  Description of Artificial Sequence: Synthetic polynucleotide
aatttaccaactaatgttatgagcaaggcaaacttgctttgtgtttgctttagctcactagacgatacaatacctttttttaaggagtagctttaatggaacgaatgagtctaacagaagttcggactgatacaattcttaacattttataatccgac

SEQ ID NO: 1850 - DNA, 32 bp, Artificial Sequence
  Description of Artificial Sequence: Synthetic oligonucleotide
tcgcttatggtatttacacaatacgtagaatt

SEQ ID NO: 1851 - DNA, 163 bp, Artificial Sequence
  Description of Artificial Sequence: Synthetic polynucleotide
agccaaagcacattgcgaggatgattttatgagataaccatagagatttagctccatggtacactggtgattttttccaagctaaatagtaaaccttgaccatgttacttttaaatatattctcgtattactagccacctttaatagagtatggactatattg

SEQ ID NO: 1852 - DNA, 45 bp, Artificial Sequence
  Description of Artificial Sequence: Synthetic oligonucleotide
cctcttttttgctaagtatggtaacctgatgaacataaattaagt

SEQ ID NO: 1853 - DNA, 43 bp, Artificial Sequence
  Description of Artificial Sequence: Synthetic oligonucleotide
ttatattatacacttcccagatctaggtatttcatggtgagaa

SEQ ID NO: 1854 - DNA, 42 bp, Artificial Sequence
  Description of Artificial Sequence: Synthetic oligonucleotide
atataagaacttttttccttgatcagacatcgaaagtgcgtt

SEQ ID NO: 1855 - DNA, 56 bp, Artificial Sequence
  Description of Artificial Sequence: Synthetic oligonucleotide
attggtcactacttatctctgtctgtctactattgaaaggattgaaaacaataatg

SEQ ID NO: 1856 - DNA, 70 bp, Artificial Sequence
  Description of Artificial Sequence: Synthetic oligonucleotide
aagtttcattggtagattctaatgattcacacgtctatttaaaagcaatcagctttagctggaatgccta

SEQ ID NO: 1857 - DNA, 133 bp, Artificial Sequence
  Description of Artificial Sequence: Synthetic polynucleotide
acctataattgttctgaataggtttcatttatattgtctatgagtgaaacccacttactcatagtaaattcactaagtgacctatcagggaataactggttagctaaccacgaatctaggtttgcttaagaag

SEQ ID NO: 1858 - DNA, 177 bp, Artificial Sequence
  Description of Artificial Sequence: Synthetic polynucleotide
tcttattgtcacttacatttgggtaattaacaatgtccgagtgatgtacctacaacacaagtgtcggttatatgacgatgagggatcctagttgaacagttttacaaatattttttcaagcaattctcccacatagaatatatcttgttgccagcttaatatgggtataaacaataa

SEQ ID NO: 1859 - DNA, 177 bp, Artificial Sequence
  Description of Artificial Sequence: Synthetic polynucleotide
aggatcgacttgcgtaacatattcttcttacaccatatctatctgtgctcagtgttgaatgcaacaggctataaggataatttaaatactgaattgagtcaaataaacttggagctctacacaattatgctgacaactgtttagaaatacctgtatgtttatttatggctgatacat

SEQ ID NO: 1860 - DNA, 48 bp, Artificial Sequence
  Description of Artificial Sequence: Synthetic oligonucleotide
atcgaattcacggtatattattgtacttctcatagcacagaatgtgta

SEQ ID NO: 1861 - DNA, 104 bp, Artificial Sequence
  Description of Artificial Sequence: Synthetic polynucleotide
agaagtgacttagagattcaacacatgtatgcaggattttacgaagctattctactgtaaaactaatttgccactgagtcgatcttttaacttcgtgttataac

SEQ ID NO: 1862 - DNA, 158 bp, Artificial Sequence
  Description of Artificial Sequence: Synthetic polynucleotide
gcattaagcttgttaatggaccccgttcatttgtataaataaaaggtaacgataacaaaaatgattaatacacaatctgtacacgcattatggagtctctacgtacattctgtatgagtgtttgtaatcttcccttcggagcatattcaattttgaga

SEQ ID NO: 1863 - DNA, 27 bp, Artificial Sequence
  Description of Artificial Sequence: Synthetic oligonucleotide
cggtttctaaatccaatgtatgtttaa

SEQ ID NO: 1864 - DNA, 66 bp, Artificial Sequence
  Description of Artificial Sequence: Synthetic oligonucleotide
atcattaactaattcttcaggttttgatctaatggccgttagaatttttcagagcatacaagcaga

SEQ ID NO: 1865 - DNA, 67 bp, Artificial Sequence
  Description of Artificial Sequence: Synthetic oligonucleotide
tcttttgaaagatcgttggtatgataaaaacagtttgctcggacccaaattacttatttctgcaaat

SEQ ID NO: 1866 - DNA, 161 bp, Artificial Sequence
  Description of Artificial Sequence: Synthetic polynucleotide
aattagacagaatacataaaaattaatttgctagtctagttccaggtaagtcaatgattcatggtccatgcgtcattcatatgcgctataatactgtccggtcttgctagccgtcatgaaaacaaaaagatgtttacttttctgattgcttaaatagtgac

SEQ ID NO: 1867 - DNA, 40 bp, Artificial Sequence
  Description of Artificial Sequence: Synthetic oligonucleotide
accaaataatgtgagtaacgtcgagtttatttgaacctct

SEQ ID NO: 1868 - DNA, 68 bp, Artificial Sequence
  Description of Artificial Sequence: Synthetic oligonucleotide
ttagtaacttgctttagaaaaatctggacaagtgattctcatttggttgcattaattcaaacctacga

SEQ ID NO: 1869 - DNA, 183 bp, Artificial Sequence
  Description of Artificial Sequence: Synthetic polynucleotide
tcatggcgcacaaagacaatgaataacatgtccactctaattttaacgttttatttgtattaaacgataaatatgatgtcttatcatccctcttttacaacggtttcctgtaacgggaagaaatcgtaatgctgtaagacttaaatcatagttgtctgacgaacggagtacggctatagattt

SEQ ID NO: 1870 - DNA, 189 bp, Artificial Sequence
  Description of Artificial Sequence: Synthetic polynucleotide
tacgcttggcttgcatcttaaatgaacgatttagagcgattcagccataaagctaaaagtagagttataatgtatagtgttgtccttaagttgacatctcgaatgatttaccacgcttatgcacatacagacgtctcttttagggtccagatcactgaataaatttattgaactatatgaatttcacaa

SEQ ID NO: 1871 - DNA, 187 bp, Artificial Sequence
  Description of Artificial Sequence: Synthetic polynucleotide
aattgaagttccttctaatttcagctcgtagccaagctatcagtcttgaactgtggaacaggtctagatactttgttgtaaatcaacatggagatgttaatcgagattcgcccggaaatattgtattctttctctccagtattacgatatatattttaacgtacaaggtataaaataaaatcagatc

SEQ ID NO: 1872 - DNA, 20 bp, Artificial Sequence
  Description of Artificial Sequence: Synthetic oligonucleotide
tttctacatgtagtaatcga

SEQ ID NO: 1873 - DNA, 86 bp, Artificial Sequence
  Description of Artificial Sequence: Synthetic oligonucleotide
aatatttgtagatataatttcttgttactctggcgatgtgaaactaacacactctaaacggcaatatcttgttggcaccttgagaa

SEQ ID NO: 1874 - DNA, 156 bp, Artificial Sequence
  Description of Artificial Sequence: Synthetic polynucleotide
ctagtaactattatcgatacatagtgatgcattaaatgtgtaaatactttatatagtatccgtctgaccactttctattgaagaccccgattagacccgcttaaatgcttgttacagtaagtataggaagaaaccgacgctgtagtttttttagaa

SEQ ID NO: 1875 - DNA, 18 bp, Artificial Sequence
  Description of Artificial Sequence: Synthetic oligonucleotide
tggtacaagttatcttca

SEQ ID NO: 1876 - DNA, 70 bp, Artificial Sequence
  Description of Artificial Sequence: Synthetic oligonucleotide
ctatctcttcagttaacaatttgccacatataaaagttagacctgggggtgaacttatgtagttcaaatt

SEQ ID NO: 1877 - DNA, 120 bp, Artificial Sequence
  Description of Artificial Sequence: Synthetic polynucleotide
atgacataacaactacacttactaggcacaattataaccggtctttttgataataggtgcacgatagcagttatctgctcgaacactgtattttaatttgttaattgagacaagtcagtg

SEQ ID NO: 1878 - DNA, 142 bp, Artificial Sequence
  Description of Artificial Sequence: Synthetic polynucleotide
agttatctttcctagatacgttgcactgtagttagcaaaattgaaactaatacatgagtgaagatataagaaattttcgcctgagacttgctctttcataaaattatatccatggtttacacttcgacaatgatgtaccggt

SEQ ID NO: 1879 - DNA, 63 bp, Artificial Sequence
  Description of Artificial Sequence: Synthetic oligonucleotide
ctggaaatagactctccaggttcactttggatctataacatatgatagcatgacagtttatta

SEQ ID NO: 1880 - DNA, 173 bp, Artificial Sequence
  Description of Artificial Sequence: Synthetic polynucleotide
agttatacgtgataggatttctctttaatctatgatacataacgaaaaattgtaatacggaaatacgctgtatttgtttatactatccgaaggaagagccatcatacgcttcaaaattagatctgtctctaaaccggtatgacacgatagattatagtcccgcttagtttcgt

SEQ ID NO: 1881 - DNA, 113 bp, Artificial Sequence
  Description of Artificial Sequence: Synthetic polynucleotide
ttagtatactttacgaatgaagcatacggaagtacatcagtggctattgagtcatcatcgtcgcacctatatttcataaacatattatataccagatttggtaatgttgatct

SEQ ID NO: 1882 - DNA, 18 bp, Artificial Sequence
  Description of Artificial Sequence: Synthetic oligonucleotide
tctatattggcagacatt

SEQ ID NO: 1883 - DNA, 100 bp, Artificial Sequence
  Description of Artificial Sequence: Synthetic polynucleotide
cttattaagtatgaagtcgaatccgttataacatacctaacttaatcttgtgaataaaacacaccctttaggtaatgcaatcgttgtggggttttatcga

SEQ ID NO: 1884 - DNA, 71 bp, Artificial Sequence
  Description of Artificial Sequence: Synthetic oligonucleotide
gtctgcgaaatagcgcattggtattataactaatggatagctcttcctcatatttttcataagtaaacgaa

SEQ ID NO: 1885 - DNA, 145 bp, Artificial Sequence
  Description of Artificial Sequence: Synthetic polynucleotide
tgtcaactgttctattgatttgagaactacctagtggcgcctcaggtaacattacgcatagatcaaaattaataggtagtattttctaaacttgaccataaatgtaagtggctactatttagtgaacatagctagcacatacttt

SEQ ID NO: 1886 - DNA, 161 bp, Artificial Sequence
  Description of Artificial Sequence: Synthetic polynucleotide
ctaatagaacaacgccatcagatgaatgtgaacattcctagttgatgcatagtttattttgtgagctaatgcttcggattagtaattcaagatacgcttcgttctaacatacgacaagatgaaccattcgtatcatttaccaagtttattgatacgtagat

SEQ ID NO: 1887 - DNA, 33 bp, Artificial Sequence
  Description of Artificial Sequence: Synthetic oligonucleotide
agtgttcttctaataagaacagcttagttattc

SEQ ID NO: 1888 - DNA, 162 bp, Artificial Sequence
  Description of Artificial Sequence: Synthetic polynucleotide
caatgtataacctagtagtctctaaaaaaagtttacgcgacaatcgatgtcaactctcattgaatggttactctcttaataaggtagctgaaaactactatttcgaatttattcaagattatcgctagtgtagtaatctcagtgtagatgagcccgagtttt

SEQ ID NO: 1889 - DNA, 54 bp, Artificial Sequence
  Description of Artificial Sequence: Synthetic oligonucleotide
gaagattgctatgataaatagaatgagtttcatatttattcgtctcccgctaac

SEQ ID NO: 1890 - DNA, 132 bp, Artificial Sequence
  Description of Artificial Sequence: Synthetic polynucleotide
aagctgacctatcatgggcaagggatgaccggagtactgttatagttttagacatacatagacttatatttgatagttaacaacgattccttctaataccttattatagtatcacggtgttactaataccat

SEQ ID NO: 1891 - DNA, 90 bp, Artificial Sequence
  Description of Artificial Sequence: Synthetic oligonucleotide
aatattttacatacactggtaaaattcagctcaagcaggtgtctctaggattatcatgacctaagtacgtgatatttagcacgttttaat

SEQ ID NO: 1892 - DNA, 44 bp, Artificial Sequence
  Description of Artificial Sequence: Synthetic oligonucleotide
aagagtagattgtacgtttaaattcaatgcttaatgtccactct

SEQ ID NO: 1893 - DNA, 13 bp, Artificial Sequence
  Description of Artificial Sequence: Synthetic oligonucleotide
atgacgcaatttt

SEQ ID NO: 1894 - DNA, 159 bp, Artificial Sequence
  Description of Artificial Sequence: Synthetic polynucleotide
aactgaattctcttggtaatcgtctaaggatgggtatataatatattaatcaagctccttaacaattcatttgacttacatatgtacaagacgctaaaccaatagcgccttgctggttaaatctgtttaaaactaatgatgcatcttatttggggatgc

SEQ ID NO: 1895 - DNA, 49 bp, Artificial Sequence
  Description of Artificial Sequence: Synthetic oligonucleotide
caaagttgacaggttgatatctaaacccatcgttataatctttttgtga

SEQ ID NO: 1896 - DNA, 190 bp, Artificial Sequence
  Description of Artificial Sequence: Synthetic polynucleotide
attaatacttctttgtaggagagtatgattccgtggatgagaaaacgagacaatctacgcttatgccacagctaaatttactaggtatcaaacattaccctcattatttattcttaggatatggattaatctatactaaccatgctgattgatatgctgtgcccgaatcaattgtaattagcggtcaata

SEQ ID NO: 1897 - DNA, 40 bp, Artificial Sequence
  Description of Artificial Sequence: Synthetic oligonucleotide
aaggtggccaatcccatagttgttatctaataaatgactt

SEQ ID NO: 1898 - DNA, 12 bp, Artificial Sequence
  Description of Artificial Sequence: Synthetic oligonucleotide
aacttgtatcgt

SEQ ID NO: 1899 - DNA, 106 bp, Artificial Sequence
  Description of Artificial Sequence: Synthetic polynucleotide
ggtgattttggggtgttacttactcaatataagatctaattttacagtgctttcgtagtaccatcgatgcctacagattctaaactaaactaaaagattcaatgac

SEQ ID NO: 1900 - DNA, 93 bp, Artificial Sequence
  Description of Artificial Sequence: Synthetic oligonucleotide
gcatatatattacgtctaaagtatacacttaaggacgaatcaccttagggtaaagttctgtagttttccctgaagagagctttcaattatatc

SEQ ID NO: 1901 - DNA, 74 bp, Artificial Sequence
  Description of Artificial Sequence: Synthetic oligonucleotide
tagatcagttacagcacttgtacaactatattgataataccttcttagggtggtataatgatttagccacttaa

SEQ ID NO: 1902 - DNA, 163 bp, Artificial Sequence
  Description of Artificial Sequence: Synthetic polynucleotide
tagactgattatacgtcaaaagttagcctaaaaagtgtgtccaatcagattgatgacacgactaagcatgtacattgtcttcatagcactcttctagctaatatccgggaagctgtagtatgataataagacgtttttctatattagatattgtttacattcc

SEQ ID NO: 1903 - DNA, 178 bp, Artificial Sequence
  Description of Artificial Sequence: Synthetic polynucleotide
gctatgttaatggcattaagagtattacgttgctcgctccattgcaataaccgaatctacttcaggattccagtttaagctccaatcttgtatataactatttccatagattatatgctaatattagtgaaaacttactaactgggggtgggaaaatggcttaaactcatacttaaga

SEQ ID NO: 1904 - DNA, 6 bp, Artificial Sequence
  Description of Artificial Sequence: Synthetic oligonucleotide
ttgtca

SEQ ID NO: 1905 - DNA, 94 bp, Artificial Sequence
  Description of Artificial Sequence: Synthetic oligonucleotide
accgatactgcgtatcggttgaagtctaatatccacaaatggtctcgaataacttatgttcttttatcatattagtgtctcaagaaaaagttga

SEQ ID NO: 1906 - DNA, 84 bp, Artificial Sequence
  Description of Artificial Sequence: Synthetic oligonucleotide
agaatcgtaagtttgaatatagttgcgacaaacaacttttccacagattacaggtccttaatacttattgatggcttagtattc

SEQ ID NO: 1907 - DNA, 199 bp, Artificial Sequence
  Description of Artificial Sequence: Synthetic polynucleotide
tttccgggaataaaaggaactgtctactaaggtgaatgaagccaataccggacgtcctaaatttatcgaaagaaaaacgattttttaatgccatctttagttattatatgctaatctaatcagcgaaattgtgtccttgttgtataaacattcgagattggtgacataatgttcatcttagtattatacctccccattg

SEQ ID NO: 1908 - DNA, 110 bp, Artificial Sequence
  Description of Artificial Sequence: Synthetic polynucleotide
agacttcacatgcaactttgacgagataaatattcatagtgcggtcgttcagttttaatacagacttaggatactagcaaatgcatagtcgctaactattttgttttcaa

SEQ ID NO: 1909 - DNA, 31 bp, Artificial Sequence
  Description of Artificial Sequence: Synthetic oligonucleotide
ctattaaccttggatcaattcgaggttaaat

SEQ ID NO: 1910 - DNA, 32 bp, Artificial Sequence
  Description of Artificial Sequence: Synthetic oligonucleotide
cggctttaaatgtttatgacagtaattcaact

SEQ ID NO: 1911 - DNA, 178 bp, Artificial Sequence
  Description of Artificial Sequence: Synthetic polynucleotide
ttccccgatgaacttgtataatatcagcatttatttcccatactatgcttaaatatataatgtcagtctagtaagtggacgcattttgttttgtgtcaaaaatacaagataactttaccgtaaagtgtgataaaggaagtgagtcaacgagccgcatcttacagataccttttggtca

SEQ ID NO: 1912 - DNA, 91 bp, Artificial Sequence
  Description of Artificial Sequence: Synthetic oligonucleotide
cagatgtctaggctaatgtatgtaggctaaaacttaattttacactagacatccatatgcaacttgattatacgtttagtagtcatctagt

SEQ ID NO: 1913 - DNA, 199 bp, Artificial Sequence
  Description of Artificial Sequence: Synthetic polynucleotide
tccacgggatgagacctattttaaaagtaattaccttaagttatatttgaatcaattgtaaggtgtgttagcactttaacgcactggtgaaggctctccataagtacttaaaaacctaatttaaaattaatttacgcccagttgtcttataccaagagtactctgtcctcttgtcacatgtaatatatatggaggaatg

SEQ ID NO: 1914 - DNA, 82 bp, Artificial Sequence
  Description of Artificial Sequence: Synthetic oligonucleotide
gaggaaaataatattcaggttccctcgaggtgacatataccgtatttaaagcctacatattttttagctgtcatcgtaatta

SEQ ID NO: 1915 - DNA, 128 bp, Artificial Sequence
  Description of Artificial Sequence: Synthetic polynucleotide
agtaataagtggcataaacctttatgacattgaagcatatcactatattgaggctatcgcatttttctctaaaagaagctcttcaaatcggcgttaaagcaatatgtgcttacagctattattggtct

SEQ ID NO: 1916 - DNA, 146 bp, Artificial Sequence
  Description of Artificial Sequence: Synthetic polynucleotide
atagatagctgaatagagattataaatggaattttgcttccacccttgctctggatgttaaaggtttaaatgaacattgttcacaatgcctaaacactgccatactatctaaaaaggtatatttgacactgtcgtgtatatttgcc

SEQ ID NO: 1917 - DNA, 170 bp, Artificial Sequence
  Description of Artificial Sequence: Synthetic polynucleotide
gttgatagcaatctaatacattattatcggtaacttgcgcacgcatttgtaatatatagccaaatatttgtcttctgtcctcttccgtaccttatcacaaaaaacatagacatttacattgaataataggcgtaaaaagctgcaatagcttgtgtagggttaggtagtat

SEQ ID NO: 1918 - DNA, 72 bp, Artificial Sequence
  Description of Artificial Sequence: Synthetic oligonucleotide
ctaaaactatttaaatagcttgagatttcaattgactatgttttaaacctacagagcctatggtcttacggg

SEQ ID NO: 1919 - DNA, 163 bp, Artificial Sequence
  Description of Artificial Sequence: Synthetic polynucleotide
tttctatggttaataaagcgaccatctccataatataaagtgccatctacggagtaatcaatattcttgtgtattaccaccctgtgtactcgtctgtgttagttcagggagtatacaaattaaattaaaccacgagactgagtttaacaagtatagtgtattt

SEQ ID NO: 1920 - DNA, 97 bp, Artificial Sequence
  Description of Artificial Sequence: Synthetic oligonucleotide
tacgtgtcaacaacgcatgaaaggtctttctaaatttaatctaattacgcattccgtacatgtggtgggagaatattcaaattttttatgtcactaa

SEQ ID NO: 1921 - DNA, 100 bp, Artificial Sequence
  Description of Artificial Sequence: Synthetic polynucleotide
gtaaaaaattcatatagttaatttatcgtgtagttccaaactcggaattgactattcgagaatccctttcctattgactagtacgtagcaaggactttga

SEQ ID NO: 1922 - DNA, 74 bp, Artificial Sequence
  Description of Artificial Sequence: Synthetic oligonucleotide
gtaattatattttgctgatacaagacctaaagtcaggtggtaaaagcgttttctcaatgttattaaatacccct

SEQ ID NO: 1923 - DNA, 139 bp, Artificial Sequence
  Description of Artificial Sequence: Synthetic polynucleotide
tctgtaagcttttcttcatggcgagtgtttttataatactaatgtagagcaacgtctcctgaaggtgatagactaccgaatcattgccacctgtactttataattaattgaaataggaattcaacgtcaaaacttaaga

SEQ ID NO: 1924 - DNA, 6 bp, Artificial Sequence
  Description of Artificial Sequence: Synthetic oligonucleotide
gtactt

SEQ ID NO: 1925 - DNA, 31 bp, Artificial Sequence
  Description of Artificial Sequence: Synthetic oligonucleotide
agatagttatccattagatcatgcgatattc

SEQ ID NO: 1926 - DNA, 96 bp, Artificial Sequence
  Description of Artificial Sequence: Synthetic oligonucleotide
ctcgtatataatgatcagcagcaagtgtcctaaagcatgtaagctagtaagtgtctctttatagagttatgtacatatttcaacatttgataacct

SEQ ID NO: 1927 - DNA, 129 bp, Artificial Sequence
  Description of Artificial Sequence: Synthetic polynucleotide
gtttgaattcctttctgccacacaagcgtatttgccggtcgagatggttgtggaaaaactctgttatataaagtcaccagtattaaatattgatctgaacaactattttatagatatagctacatcaat

SEQ ID NO: 1928 - DNA, 155 bp, Artificial Sequence
  Description of Artificial Sequence: Synthetic polynucleotide
tttagaaagctcgagccaatatgttatcgcccttttgaatttactggttgatttaaatctaaaaggaatcggttccactcgcacctctatatcagaatcaatgcgacttagaagtattaggaattcgtaaagtttaaattaaatttaactgccgg

SEQ ID NO: 1929 - DNA, 70 bp, Artificial Sequence
  Description of Artificial Sequence: Synthetic oligonucleotide
gagcatattgtcatgccgctcttgattttttagaatgtaacagtaatgcgtcctataaaactaacgatta

SEQ ID NO: 1930 - DNA, 140 bp, Artificial Sequence
  Description of Artificial Sequence: Synthetic polynucleotide
gactattgccctcgcactacaggcttaattgttggataaataagtttttcgaggaatatattattattatcggcacgtaagaaatctcggtaggttattaatgccaaaattcccaatttcattagatagtatccacaatg

SEQ ID NO: 1931 - DNA, 60 bp, Artificial Sequence
  Description of Artificial Sequence: Synthetic oligonucleotide
tgacccatttcagagatcaagatccagtttatgtgttagtaaataccgttctgaattata

SEQ ID NO: 1932 - DNA, 125 bp, Artificial Sequence
  Description of Artificial Sequence: Synthetic polynucleotide
tgtcttattacatccaaatgttgtaacttaagttgcgacaagattattttttaaggagaacggagcaagagtcacgtccactaacacaggcccttttagacgtttaattatatttacgtaattat

SEQ ID NO: 1933 - DNA, 118 bp, Artificial Sequence
  Description of Artificial Sequence: Synthetic polynucleotide
cgctatatttgattactagtgacaaaatacaggaatccattttttcagttcgggttcgatagacaaagtgagtcgacctcgttatgattatgagacccctatacaaattaatatttta

SEQ ID NO: 1934 - DNA, 59 bp, Artificial Sequence
  Description of Artificial Sequence: Synthetic oligonucleotide
ctcaacagttgcattttggaactacaggctagaagtgactactaaatattactatttgt

SEQ ID NO: 1935 - DNA, 80 bp, Artificial Sequence
  Description of Artificial Sequence: Synthetic oligonucleotide
aaaattgttgcgactaaagtcagctttatatcacttatcggctagagaattatcaccttgtaggcataaatattgtcagc

SEQ ID NO: 1936 - DNA, 132 bp, Artificial Sequence
  Description of Artificial Sequence: Synthetic polynucleotide
ttccaatattcctagagacctcgaaagatacatgaacgagtattagttcatgtgtggcccatacttgacatttaatctatgatgaaatgctataaaaaatttttagggcaaattctggtctttgtctaaccg

SEQ ID NO: 1937 - DNA, 91 bp, Artificial Sequence
  Description of Artificial Sequence: Synthetic oligonucleotide
tagcagaacttaattatgggacgtaagcaccgtttatccttaatctatagatagtgatacatttgctcttatgtactacataatcagtgat

SEQ ID NO: 1938 - DNA, 58 bp, Artificial Sequence
  Description of Artificial Sequence: Synthetic oligonucleotide
tacaaagtgtggcggtcattttatgattcaaaaccttaattcattattgcagataccg

SEQ ID NO: 1939 - DNA, 174 bp, Artificial Sequence
  Description of Artificial Sequence: Synthetic polynucleotide
acttacgagttgtctacgttaataacatcccagattgattattcagttagacactcaactcgtgtgtctgatatcatattagagactgtcggattcccaataggtctagacaactagcgagataattgatccattggttgttcataatttaaattataagggtcaataatatac

SEQ ID NO: 1940 - DNA, 54 bp, Artificial Sequence
  Description of Artificial Sequence: Synthetic oligonucleotide
ggttactataaatcatacaatgttttctttgctcagaacaaatgtttaccggag

SEQ ID NO: 1941 - DNA, 200 bp, Artificial Sequence
  Description of Artificial Sequence: Synthetic polynucleotide
aacaatcctactgttaacaaatggaggtaaaaacaatatcggaatcaagggccttaccgttgaagaagagctaccagtgtcaattcagtacttcgttgtcaatttcgttccttaatccattgttcgtatcgtaatcagtaacgaattctttatatagaaagtactggatactaagtaagttcatgtttctaatcgttgta

SEQ ID NO: 1942 - DNA, 62 bp, Artificial Sequence
  Description of Artificial Sequence: Synthetic oligonucleotide
aaagattcagcaagaattgaactagttttttgtataacatcgggtgtaacttcatccttcat

SEQ ID NO: 1943 - DNA, 104 bp, Artificial Sequence
  Description of Artificial Sequence: Synthetic polynucleotide
attttttgaattcggaacttcaaacggagttctcaacattgtattatttctcaatcaatacgcgaaggattgcgataattagcggtttgctcagaatcacaata

SEQ ID NO: 1944 - DNA, 189 bp, Artificial Sequence
  Description of Artificial Sequence: Synthetic polynucleotide
ttaagcaatcactaggcttaagatcgtcatgacgagctgaaattaatgtaaccattctactagtaccacctacgtaaaggatctttcgtataataatactttagttatatgcttggacagttcttcttatcagcaaagggttaggaatagtcattcaaatcaatctacatgtaaggtcatgtcgttgat

SEQ ID NO: 1945 - DNA, 74 bp, Artificial Sequence
  Description of Artificial Sequence: Synthetic oligonucleotide
ttatgacttaaatttatgtatctcagtactgtttacagaaatacgaaacgccaaggtgagtttctctatcagta

SEQ ID NO: 1946 - DNA, 93 bp, Artificial Sequence
  Description of Artificial Sequence: Synthetic oligonucleotide
aaacttctcgaagcgatactattactatacggaaaaaatcgttttagatctaattctaggtctttttggatcggaaaacggctatattcctag

SEQ ID NO: 1947 - DNA, 31 bp, Artificial Sequence
  Description of Artificial Sequence: Synthetic oligonucleotide
atgctcaatattttaagtgataagacccttg

SEQ ID NO: 1948 - DNA, 177 bp, Artificial Sequence
  Description of Artificial Sequence: Synthetic polynucleotide
ttatttaagtaattatagaaaactggatgtttatccgaatagtactaactttttgccacaaacaaacaactcttcaacagacgatctctgaattgttacacgataagcgtggcttattctatcagttagagcctattctttgattagtagttataagtgactgacgcggagacattt

SEQ ID NO: 1949 - DNA, 48 bp, Artificial Sequence
  Description of Artificial Sequence: Synthetic oligonucleotide
taattataaaccatttgttgtataagcgtcgcagaatccgatagttct

SEQ ID NO: 1950 - DNA, 67 bp, Artificial Sequence
  Description of Artificial Sequence: Synthetic oligonucleotide
tttacaagtagcccatgatctttgttcctcttaagatgctaataatgatagaaggaattacttctag

SEQ ID NO: 1951 - DNA, 130 bp, Artificial Sequence
  Description of Artificial Sequence: Synthetic polynucleotide
gattttcaccttgtgggtactatcaatcaacaatgtaatcaaataaatatctaaacgtggatacggataactttgtctatgcttagagaatatccttggttcagcgaccttttatgtgaacacagtatta

SEQ ID NO: 1952 - DNA, 162 bp, Artificial Sequence
  Description of Artificial Sequence: Synthetic polynucleotide
tgttatatcctaatttccctatttaatggtataaaaacgactggctgaaaagtgtaaatgttagaggtaaaagatctccttactaaattgtagtcttatactggcatagttcaatcacgacaatgcgccgcgcttcattaatcctgtttgaaagtcatatag

SEQ ID NO: 1953 - DNA, 150 bp, Artificial Sequence
  Description of Artificial Sequence: Synthetic polynucleotide
actgttattggaagaattatcagcatatagtggtaattttgcttagaatttcacataccaaaagtattcctgatagattttattgccaaatttacgcactatggatgcccatgggcctcaagaaataatggctcagtacttatacatcgt

SEQ ID NO: 1954 - DNA, 104 bp, Artificial Sequence
  Description of Artificial Sequence: Synthetic polynucleotide
taacctgtctattttgcactcatcgagcgtcatcagatagtaacgtagtaaagttaacggaattgctagtttaacagattcgtatttaaacgatatttccgata

SEQ ID NO: 1955 - DNA, 169 bp, Artificial Sequence
  Description of Artificial Sequence: Synthetic polynucleotide
tcaaaagcgttggacgactatctttccccccttccatatgataaaatacttaagaagggaattagtttatagagaatttgggaatccagcagtatcaagggtcaccggtactatgtcgattaacatacatttattagttttatttaattatcttagacgtgattaactc

SEQ ID NO: 1956 - DNA, 193 bp, Artificial Sequence
  Description of Artificial Sequence: Synthetic polynucleotide
cggattatccctaaattgtatctatgagggcttaaaatcgtcagacccagaatttagatctttctgcatcatgttatatatcaggggagacatgggctttacatcaactgtgttatatctaataggttctaatcaaaaattaatttatcatgtataattgcgtacagcatgtcagtaagtaatgatcccatca

SEQ ID NO: 1957 - DNA, 53 bp, Artificial Sequence
  Description of Artificial Sequence: Synthetic oligonucleotide
cgtatctgaaaatatctcatcatttgagaaagaaatttagtgctctggcttac

SEQ ID NO: 1958 - DNA, 43 bp, Artificial Sequence
  Description of Artificial Sequence: Synthetic oligonucleotide
agtcgctggtaaacgtaatataatctaattatcgccattttgt

SEQ ID NO: 1959 - DNA, 184 bp, Artificial Sequence
  Description of Artificial Sequence: Synthetic polynucleotide
tcacgtaaaactcccccgtccgtagactaaacctttattgagttttagctggttaccctcttagtataagtaacttagggagtagttatattagtgttctatgttttaatatggaaatccgcgctcttagataacaaattaaatttgccataaaacaatattggaacaagtcaaagcggatgtt

SEQ ID NO: 1960 - DNA, 20 bp, Artificial Sequence
  Description of Artificial Sequence: Synthetic oligonucleotide
ttgctatgaatagcccatgt

SEQ ID NO: 1961 - DNA, 61 bp, Artificial Sequence
  Description of Artificial Sequence: Synthetic oligonucleotide
catgacaggtgctttaacgtcaccgatgggacttttctaacatttatcgagtactgctaga

SEQ ID NO: 1962 - DNA, 40 bp, Artificial Sequence
  Description of Artificial Sequence: Synthetic oligonucleotide
tggagcactttcaacctgatccggaattatatcggtgaca

SEQ ID NO: 1963 - DNA, 46 bp, Artificial Sequence
  Description of Artificial Sequence: Synthetic oligonucleotide
gtacccatgttgtaacaagcgctatagacagttgattgctctgcta

SEQ ID NO: 1964 - DNA, 126 bp, Artificial Sequence
  Description of Artificial Sequence: Synthetic polynucleotide
ccaggaccagacaatgagtctaacagaatgaaggcaagtattcttatggtacagcaattatcgcacatatctatggtttacttttctgcatggtgttaggcagcttccgcagaccgtcatcgtctg

SEQ ID NO: 1965 - DNA, 68 bp, Artificial Sequence
  Description of Artificial Sequence: Synthetic oligonucleotide
aatagttcgcctgctacctcctttgtcgagcaaggaaaacgttataacgttgtatctcgagatgtacg

SEQ ID NO: 1966 - DNA, 88 bp, Artificial Sequence
  Description of Artificial Sequence: Synthetic oligonucleotide
tttaacgtaaatccggtgttctttgagccaggaagacagtcaaaccctttgtgatgaaatccatgaacccacgcttgtgatatttggc

SEQ ID NO: 1967 - DNA, 64 bp, Artificial Sequence
  Description of Artificial Sequence: Synthetic oligonucleotide
aatggttacggcacgcctcggccatatacattccgaaatctgagtttgaatgtctagtacttag

SEQ ID NO: 1968 - DNA, 28 bp, Artificial Sequence
  Description of Artificial Sequence: Synthetic oligonucleotide
atcattcttgcagcgttaagcatcggta

SEQ ID NO: 1969 - DNA, 6 bp, Artificial Sequence
  Description of Artificial Sequence: Synthetic oligonucleotide
cttagt

SEQ ID NO: 1970 - DNA, 170 bp, Artificial Sequence
  Description of Artificial Sequence: Synthetic polynucleotide
tatcaccaagactcgtgtcgggagttactaaagagatgtgacacgagaaaagttttatttagtaattctttccagcctcccctccagattggggatctctagggatatcgccatgagccctgcctgatctgaacgagcctgtaatagaattagtacccaatcgtgatttg

SEQ ID NO: 1971 - DNA, 183 bp, Artificial Sequence
  Description of Artificial Sequence: Synthetic polynucleotide
tagccaacaagttgcacgcatttttttcctgagggtaagccttattaaccattacgcattctgttccgtagtcaggttacggaatgcaggtgacatgttcggaatactaacatgcgatcaaagcttggggaactcgatgtcaggtccaaactacgattttacgggaattcctcactaccgaag

SEQ ID NO: 1972 - DNA, 200 bp, Artificial Sequence
  Description of Artificial Sequence: Synthetic polynucleotide
caccgattgacggagtgaccaattcttatgattgttacttatttggccgtgtcgagaacggagagcgcaccacagggtatgagttcttcattttctgagcatacattttcaggcatataagaacctcgccactatagccccccgataccatgcgacgggagatgaatattataactgagggagttcttacgaatatactc

SEQ ID NO: 1973 - DNA, 90 bp, Artificial Sequence
  Description of Artificial Sequence: Synthetic oligonucleotide
ccctagtcccggaatttgcgtgagaaaacagttcacctatatggctatataggtagacgaatcttgtgagttcattccggttcacgtaca

SEQ ID NO: 1974 - DNA, 148 bp, Artificial Sequence
  Description of Artificial Sequence: Synthetic polynucleotide
tcacatttttgtatgggccggaccgaatgcgctggttgaaataaatacgcaaaccgaccggctgtttaccatacaaaaggcgttttactatcaatcgtggcgctatacccagagggttagactcccttagatgactttagagtcttta

SEQ ID NO: 1975 - DNA, 183 bp, Artificial Sequence
  Description of Artificial Sequence: Synthetic polynucleotide
gatgctattagcgcaaaagggtcccatcacgacctaattttttatagtcgttctgcaatcgaatagcatagtgcttgtagtcttaggagaatgtcttacagtacaatcaggccaagccgcagagttcctggggtatattgtgccaccatgtcactaggctatcctgactaaccaattgcagag

SEQ ID NO: 1976 - DNA, 200 bp, Artificial Sequence
  Description of Artificial Sequence: Synthetic polynucleotide
gccgaactccttattttggcttaaggcccctgcaactcgtttacagataacaggctaccaaatggatgtgctttatgttaattagatgcttggagtaacttatactttaggtacacagacctcatagcatggcaatgttgctcgcactagaagccgtcagcccaaggttaatacagtggatcgagtgaagacctctcgag

SEQ ID NO: 1977 - DNA, 54 bp, Artificial Sequence
  Description of Artificial Sequence: Synthetic oligonucleotide
tccagcttacctatgatgctctggtctacagattgagagcgatgtatccataag

SEQ ID NO: 1978 - DNA, 72 bp, Artificial Sequence
  Description of Artificial Sequence: Synthetic oligonucleotide
acacgacggtttagataacttccactctttcggacgtgtttacactgccgtttataggtaagcgtgacaaag

SEQ ID NO: 1979 - DNA, 95 bp, Artificial Sequence
  Description of Artificial Sequence: Synthetic oligonucleotide
aactgtttatcacaaggctacgtggattggactaccgggcggactctaactatcagatcatgagacgtatattctttacttgagcaatcgacgct

SEQ ID NO: 1980 - DNA, 78 bp, Artificial Sequence
  Description of Artificial Sequence: Synthetic oligonucleotide
ttcattagcgaggacttaacagtcgtgcgagtcggtcctttatatcttaagccgctgaaactctattccagaaatgga

SEQ ID NO: 1981 - DNA, 160 bp, Artificial Sequence
  Description of Artificial Sequence: Synthetic polynucleotide
ttaatcataggatgtccaaatcaaaacaaacagtgtgatcataccattgtcgtggtattcttgtatgcgcgaattcgaatagcgagagagctactggggtcgcctgcccagaccatataaggactggtattgttaacttcccttcacgccaatggtctcg

SEQ ID NO: 1982 - DNA, 97 bp, Artificial Sequence
  Description of Artificial Sequence: Synthetic oligonucleotide
actgcgattcgagtcattatctgacgcccgcggaataaactcccattacgagctggtttattaccagtgtactagggaatagatcgttagactttta

SEQ ID NO: 1983 - DNA, 178 bp, Artificial Sequence
  Description of Artificial Sequence: Synthetic polynucleotide
tcctgttgtcctcccgactcaaagaatatgtgtcctcaaagcagcatggagacgaaagtttctgcataggtatgatgccattgggacacacctgagagacataacctgtaaaatggaatagttcttgcttctgcttttcagtcaccaggttctcgagtaaattacgagggtcctagtc

SEQ ID NO: 1984 - DNA, 153 bp, Artificial Sequence
  Description of Artificial Sequence: Synthetic polynucleotide
atgagagtacctctgcttcagctttagtagttggacatacagtagtttgttgggccgcccgccagagtctgctaattcgtgtattatgatattcgtactaacccattccgtttgattacaccacaacataccacgggaaggcgaaatggaaaa

SEQ ID NO: 1985 - DNA, 31 bp, Artificial Sequence
  Description of Artificial Sequence: Synthetic oligonucleotide
tcggattctaaaacattgttggtactgctac

SEQ ID NO: 1986 - DNA, 155 bp, Artificial Sequence
  Description of Artificial Sequence: Synthetic polynucleotide
cccctttagtaaccacatgtgccaacaggcttcgtatagggtacttagtaccccctagttctgggaaatactaaggagagcgatggaaccgttttgatcggtttagctattccgaatgctaatactcgataatgatgttgttccaagacctagat

SEQ ID NO: 1987 - DNA, 142 bp, Artificial Sequence
  Description of Artificial Sequence: Synthetic polynucleotide
aggatattgcagttttcttggcggatgaatccagacttgtggagtcaatgattaacagttaatggtagtgcccctattctccaaccaccctgtaagaaccatgttctatatcgttatgcgcgtaatcgaggaacctgcacaa

SEQ ID NO: 1988 - DNA, 81 bp, Artificial Sequence
  Description of Artificial Sequence: Synthetic oligonucleotide
cgcgcgttttatgagtcgtataaacaaccctaaaaggcggactcctttgcagcctgtgaatgaggcgctatttaacttaat

SEQ ID NO: 1989 - DNA, 107 bp, Artificial Sequence
  Description of Artificial Sequence: Synthetic polynucleotide
acgcataccccgttggcagtgcaaatatccccttgtgttatagtagacctcctctaaaggtggctcgtaagttggacgatatatggaaatctgtgtagcctataaca

SEQ ID NO: 1990 - DNA, 45 bp, Artificial Sequence
  Description of Artificial Sequence: Synthetic oligonucleotide
tgttcgttgagaagaatcataaggtttctcgaccagatcccgtac

SEQ ID NO: 1991 - DNA, 79 bp, Artificial Sequence
  Description of Artificial Sequence: Synthetic oligonucleotide
atatttagcagtcattagaccgttgatacatttcgttggagcacctgtgcccctaagccatatgcttaagggacttaga

SEQ ID NO: 1992 - DNA, 118 bp, Artificial Sequence
  Description of Artificial Sequence: Synthetic polynucleotide
caatatgccagtattggtacaatgaccgatctggcgtgctctaatgccatttgcttggttttgaactaagcgaaggttctcaggtcttagacccatcagagaaactcacctgtaatga

SEQ ID NO: 1993 - DNA, 135 bp, Artificial Sequence
  Description of Artificial Sequence: Synthetic polynucleotide
ctcatcgagtaatactctcagcaagccttgtgaatccctaagcatcaaagaagttataactctcttaattctagtgagcgcaatccggggtgttcaagctagagtgtacgttccgatagtctcaaggtgtagtcg

SEQ ID NO: 1994 - DNA, 67 bp, Artificial Sequence
  Description of Artificial Sequence: Synthetic oligonucleotide
cttcatttcctcacagtaattctccgatggtaagcttctaggaagggcataggtcaccggtgaaaat

SEQ ID NO: 1995 - DNA, 55 bp, Artificial Sequence
  Description of Artificial Sequence: Synthetic oligonucleotide
attcgaatgcctaggtccggatgttttataacggaacaaaatgacccgtttctcg

SEQ ID NO: 1996 - DNA, 87 bp, Artificial Sequence
  Description of Artificial Sequence: Synthetic oligonucleotide
cttcatttgttcgataggatgggctcagtctacgtataaacgttacatatgagacacaaatcctcaaggacgtgttgcgttctcgca

SEQ ID NO: 1997 - DNA, 159 bp, Artificial Sequence
  Description of Artificial Sequence: Synthetic polynucleotide
caaatattctctcctgatttcagtgccaaaagttttatttgcaagatgatgacagtggttgccggtggtaaataccacggtcacgtactaagttcatattcgcgaaggctaatttacgcttagtaaccgatagacctgcactgtgtcgtcaaagcgccg

SEQ ID NO: 1998 - DNA, 191 bp, Artificial Sequence
  Description of Artificial Sequence: Synthetic polynucleotide
cgattgggacctgaatttgtcgggtattatgcaacatctctagaaggaaaattagactattcactaacccattattagaagtatatggcgtttcgatgtacatttcgtcaagacccgaccgtttaccagtccgtggtacctgctccaagcactttattgaggggatccgtatagactgaatacgctccgag

SEQ ID NO: 1999 - DNA, 50 bp, Artificial Sequence
  Description of Artificial Sequence: Synthetic oligonucleotide
ctgatgctcaaacatttaatactgcccgcgacttggtaagtctgattgag

SEQ ID NO: 2000 - DNA, 15 bp, Artificial Sequence
  Description of Artificial Sequence: Synthetic oligonucleotide
gagtattgacattcc

SEQ ID NO: 2001 - DNA, 180 bp, Artificial Sequence
  Description of Artificial Sequence: Synthetic polynucleotide
gcagggtggatctgtgttaatcgctatgttatccgggtgaacactacacccgtctgctacatcatgaatctatacaacgagcctctaatatcagttctcgttgggtcagatctaaatagagtcctcgcgcagtgagtgacctcctactttgatattgaaaacgggctgaaaaactatgta

SEQ ID NO: 2002 - DNA, 190 bp, Artificial Sequence
  Description of Artificial Sequence: Synthetic polynucleotide
ctgtccaaccatgaataccacaagacggttctgaggtttaatggggcatcgtcgattgatcctctttgacttgacgtgatctaagtcaaattcatgttcgaacggaggcctatacttagtgaaagccttcatcatataaacagcgcagcgggatctgatgaggatgtcgatttcttacagcacctcaatt

SEQ ID NO: 2003 - DNA, 193 bp, Artificial Sequence
  Description of Artificial Sequence: Synthetic polynucleotide
gtcaagcagtttatcagcacgccgtcattaaaatacatattacctgagagtatctattgcagcatttgtaagcatgcacgggccgcgtgcgtcttccgtcaggcaattactgcctgaacgcggctttattttgttcagcaggcaatttgtggctataagctaaataatagtgccacataacaggctatggaca

SEQ ID NO: 2004 - DNA, 83 bp, Artificial Sequence
  Description of Artificial Sequence: Synthetic oligonucleotide
agacgacctccatgtttgaaattataaatcttttatggtagaggctacgctcacactctcaattggtttcagtggagcgagcc

SEQ ID NO: 2005 - DNA, 185 bp, Artificial Sequence
  Description of Artificial Sequence: Synthetic polynucleotide
tataaatacttgcggaggtattagcatcgccttagattataatgagtatatctactttgatccctcctcttgtcacgtattgtgagttctaaccgcatgttggtaatggcacacacggcggcgaaccaaggttgaccacaatcgacgccacgacgtcgctcgttgtaaatgagaagtgatttaca

SEQ ID NO: 2006 - DNA, 12 bp, Artificial Sequence
  Description of Artificial Sequence: Synthetic oligonucleotide
cggtttatacat

SEQ ID NO: 2007 - DNA, 57 bp, Artificial Sequence
  Description of Artificial Sequence: Synthetic oligonucleotide
gtagtgtagctaaacattgggttttctactatgtccgtattaccgtacggaccacaa

SEQ ID NO: 2008 - DNA, 200 bp, Artificial Sequence
  Description of Artificial Sequence: Synthetic polynucleotide
atgagcgatccgattaaatcttttggcatctctggtaagacacgatatggcgaaactggacagaccgccaatgctctttaagtcgcaatagcgattcaccccgtaccggttcacgcagaacgggtatttcctcgatcatcaacaattaacctgtgaatagagttaggaaattactgttttgacgtttcgctgtagtggac

SEQ ID NO: 2009 - DNA, 16 bp, Artificial Sequence
  Description of Artificial Sequence: Synthetic oligonucleotide
tgtcatatgatctagc

SEQ ID NO: 2010 - DNA, 83 bp, Artificial Sequence
  Description of Artificial Sequence: Synthetic oligonucleotide
aggttgctcggactccatatcgcatcccgttgtagttatgacgtcgatctgatgtaaaacttatgccaatgaatacagagttc

SEQ ID NO: 2011 - DNA, 29 bp, Artificial Sequence
  Description of Artificial Sequence: Synthetic oligonucleotide
cgtttaggcataaggtcatccatgtttca

SEQ ID NO: 2012 - DNA, 42 bp, Artificial Sequence
  Description of Artificial Sequence: Synthetic oligonucleotide
aaacatgcgcggttattcggtatattctcatagctgaagctc

SEQ ID NO: 2013 - DNA, 155 bp, Artificial Sequence
  Description of Artificial Sequence: Synthetic polynucleotide
tgtttgtacgggatattactgcataagaatgatcaaactcgggcgctttgtgagactctaagaactctcaggaggccgtgcagcagttaggaaatgtgattcctattcagcggttttcgatttcacttccaactcgacatttcaaagctcaaacc

SEQ ID NO: 2014 - DNA, 135 bp, Artificial Sequence
  Description of Artificial Sequence: Synthetic polynucleotide
cctaggggttgtacgatagcgagccggttctctcaatagtgtccacatctgtacagcccgtaatacgcaaatattacgtcattcaggtctgagtacgctagcctttaattacaagtgtaataactcatgggtgaa

SEQ ID NO: 2015 - DNA, 113 bp, Artificial Sequence
  Description of Artificial Sequence: Synthetic polynucleotide
cattgcatgacattggcacttaaaatctgttccaagaaaatggtcctcttcaagacgcaacacgcgtaagcctgtaaaggggacgcgttctggtacattgttttgtacattgc

SEQ ID NO: 2016 - DNA, 103 bp, Artificial Sequence
  Description of Artificial Sequence: Synthetic polynucleotide
agtcatacagagcgctttacgccctaccacctatgagttgggacaatttttcgaatgtcttaaggattgctagatccgctcagtacggcaaacggtaattgta

SEQ ID NO: 2017 - DNA, 76 bp, Artificial Sequence
  Description of Artificial Sequence: Synthetic oligonucleotide
ttcgggcaggtacttcagaagacattagtcgaccggctattcaattattttgaatccagttaacgcagcctctgag

SEQ ID NO: 2018 - DNA, 113 bp, Artificial Sequence
  Description of Artificial Sequence: Synthetic polynucleotide
tagacaacccttagcgtataaacgcaaacgtgccctttataggcaaattctgaggcttgtgagtactgtgacaggaaagaacctcttcaggcgtgatcatgttttctatcgct

SEQ ID NO: 2019 - DNA, 6 bp, Artificial Sequence
  Description of Artificial Sequence: Synthetic oligonucleotide
agttct

SEQ ID NO: 2020 - DNA, 176 bp, Artificial Sequence
  Description of Artificial Sequence: Synthetic polynucleotide
gtctcatatagtggatagatcctgggagtcgccaatggcttacttataacctccctcattcttgagcgtgtgtactgcaagctctttagaatttctcagggactaatcaattatgggcatggcagacaacgaattcacaagcgtacttgaatacgtaaattatgcagtgcgccagc

SEQ ID NO: 2021 - DNA, 92 bp, Artificial Sequence
  Description of Artificial Sequence: Synthetic oligonucleotide
accctgctgcaatgtgactaccgtcttagatcttagtaacatttaaaaggtacttaggcggtgcctcctaaggaaatagtcgactcgttgta

SEQ ID NO: 2022 - DNA, 42 bp, Artificial Sequence
  Description of Artificial Sequence: Synthetic oligonucleotide
actcgcattcttttgtggtaggctaaaatcgaaagttccacg

SEQ ID NO: 2023 - DNA, 34 bp, Artificial Sequence
  Description of Artificial Sequence: Synthetic oligonucleotide
atgtattctaagcaaaacgttgctgattctgcgc

SEQ ID NO: 2024 - DNA, 82 bp, Artificial Sequence
  Description of Artificial Sequence: Synthetic oligonucleotide
agtctttcgttgaacactaaggcaaggatgctccagcgctccttcatctcaaccttgttataaggtaagtgtaggaatctag

SEQ ID NO: 2025 - DNA, 160 bp, Artificial Sequence
  Description of Artificial Sequence: Synthetic polynucleotide
ccacttgtctgtagcctgtctaccccaaaacgattagtagagaatattgagatccccaagctcctagcatgaggtaacccgagtagagtgatgcctttctaggaggtttagagtatttgtgtatacctagttatgaaagcctacattaccggcgcgctaa

SEQ ID NO: 2026 - DNA, 92 bp, Artificial Sequence
  Description of Artificial Sequence: Synthetic oligonucleotide
aaaggtgcgcagtacggacaactctgaggatctatgctcgaaatctaatttatatccgtggattgcagatactcgccctgatatgcctttat

SEQ ID NO: 2027 - DNA, 46 bp, Artificial Sequence
  Description of Artificial Sequence: Synthetic oligonucleotide
aatagttctaacccgaactctccttatttcagtagggcatgggagt

SEQ ID NO: 2028 - DNA, 13 bp, Artificial Sequence
  Description of Artificial Sequence: Synthetic oligonucleotide
ctgactattttag

SEQ ID NO: 2029 - DNA, 42 bp, Artificial Sequence
  Description of Artificial Sequence: Synthetic oligonucleotide
aggctaatacatccctggagatttgactctaaagcgttcttg

SEQ ID NO: 2030 - DNA, 77 bp, Artificial Sequence
  Description of Artificial Sequence: Synthetic oligonucleotide
ttcgccagttagccgattattcctgaggctgtaagtcatttttaggccgaaatcaagaccgcctaaaggtcaaatgt

SEQ ID NO: 2031 - DNA, 69 bp, Artificial Sequence
  Description of Artificial Sequence: Synthetic oligonucleotide
ggagaacctgtgaggtttcctactggcaagtcaacgtttcttaccactgtacgggttaacaaacatttt

SEQ ID NO: 2032 - DNA, 99 bp, Artificial Sequence
  Description of Artificial Sequence: Synthetic oligonucleotide
gatcagaagattacttcccaagaatggaccagtttcgtgcggcagcatgatcattttcagtcgcaagaacggtaattacagagctttgcgtccttttac

SEQ ID NO: 2033 - DNA, 185 bp, Artificial Sequence
  Description of Artificial Sequence: Synthetic polynucleotide
agattagacaaccgttacatatcgtccgagcttagcgagctccttgtataaaattcaccatatggagctcagttagataaagacacagtgcatgttggtaacatcggtggattagctagtccttgggatttcgctactttcttttacagccatgaaccgtgacgattcccagtgctcaggctaga

SEQ ID NO: 2034 - DNA, 188 bp, Artificial Sequence
  Description of Artificial Sequence: Synthetic polynucleotide
tactgggaatgtcacaagatgtactgagtctagcataagctctaaattggacacgcgctcagagttactactccgtcatgacgatgagaaagtgtacactggtgcatggtagacaagataagtcattagtatctccagtactccgaatgccccgcattgctttatggttactgtctttcctgaatccg

SEQ ID NO: 2035 - DNA, 31 bp, Artificial Sequence
  Description of Artificial Sequence: Synthetic oligonucleotide
aagttgtagctttctatggtaaactcatccg

SEQ ID NO: 2036 - DNA, 80 bp, Artificial Sequence
  Description of Artificial Sequence: Synthetic oligonucleotide
gccccacaacaaccttagcaggcatattttgtgagggatggcatttgcagaagttttatctcaggtaagaactaccttcg

SEQ ID NO: 2037 - DNA, 65 bp, Artificial Sequence
  Description of Artificial Sequence: Synthetic oligonucleotide
agccatggctcttctgcgatctttaaaaacagtttgtgctgcatgggagtataatcttgacacca

SEQ ID NO: 2038 - DNA, 83 bp, Artificial Sequence
  Description of Artificial Sequence: Synthetic oligonucleotide
cgttaaactgcgttgagaaagcattccgcatacaacttaatgcattgtaaactttacggttcgcgcaggtcttaatctctggg

SEQ ID NO: 2039 - DNA, 85 bp, Artificial Sequence
  Description of Artificial Sequence: Synthetic oligonucleotide
cactatagatcgtatcattttgggctttcagtaaggtaatacggctatattcaaacgtgtcaagaacagctctggtcccggcagc

SEQ ID NO: 2040 - DNA, 183 bp, Artificial Sequence
  Description of Artificial Sequence: Synthetic polynucleotide
tataatggcggcggtttagaccatgtgcatcactacaacctacataaactaatgccatattacgaaatatcagttttaagtctaaattaccgaccgactaatctcgcggtcttgccaggtaggtgaagatctaggatatcggctttagcgccgtctgaggaggttgcccatatggtcgcatct

SEQ ID NO: 2041 - DNA, 180 bp, Artificial Sequence
  Description of Artificial Sequence: Synthetic polynucleotide
gacctgttaataatcgcgcttaaaaaagtaaatcatgtgctacaagcataaccccctactcataacccagtcggcttttctaactacatattgtaggaggttgatgggtatcgaactgagatgtttttccccatatgctgtgagatcccgtcggctggctgacaggtagagattcgagct

SEQ ID NO: 2042 - DNA, 188 bp, Artificial Sequence
  Description of Artificial Sequence: Synthetic polynucleotide
gacattgtcctgttcgaggctgatttgcaaacccgaactggctatgagtatctgacgatagcactgcgcctttttagtccagtgcacgcctttgcgttctgaaccagttccacaccactatctgagtatcttagatagatacgtgggagaaaaagaatagcaccttgagtaagacttcttataatgag

SEQ ID NO: 2043 - DNA, 140 bp, Artificial Sequence
  Description of Artificial Sequence: Synthetic polynucleotide
ttatgcgatcaccgagtctgaagattgaccatgctccccataagttcaatttgtgccatatctagtattcacccacagtatatgaggtttaacggaagttgccattctagcgaaggagtacgcggacgaatttatgctgc

SEQ ID NO: 2044 - DNA, 138 bp, Artificial Sequence
  Description of Artificial Sequence: Synthetic polynucleotide
gttcacaataacgcgaagaattatcaggtttccagcgggcaataaatttcctaccagcgacctatgtatctggccaatagcgtatcctggtctggcagcagtttagacaatcacgttgtaccgtcagatttatggtgt

SEQ ID NO: 2045 - DNA, 167 bp, Artificial Sequence
  Description of Artificial Sequence: Synthetic polynucleotide
aggtcctctcataaaacttcgtgattacgatgacaaatacggtagcagcagatttgcctctggaagtgacaggcgagcgctcacaagcttataacgttatttttgggaggtgtgtaggtttttccataagcaaaatttcaagcctgtccaatgccctattgatcccc

SEQ ID NO: 2046 - DNA, 20 bp, Artificial Sequence
  Description of Artificial Sequence: Synthetic oligonucleotide
ctgtatgtatcgctaagcta

SEQ ID NO: 2047 - DNA, 176 bp, Artificial Sequence
  Description of Artificial Sequence: Synthetic polynucleotide
cgggttacgagaaatttaagattccagccatgcagtatttatgcttgctcaaaatgaatctttacgtaaagtgtcgcggctttcctttgtgcacccgactagtctggcctatacgactgtcgtctctttgactcaataactgagaacgaacaaggccagggtcgaatttgaagaca

SEQ ID NO: 2048 - DNA, 33 bp, Artificial Sequence
  Description of Artificial Sequence: Synthetic oligonucleotide
agcggttaatgtctcgtatatacgacgatccta

SEQ ID NO: 2049 - DNA, 54 bp, Artificial Sequence
  Description of Artificial Sequence: Synthetic oligonucleotide
ccatctttgggtatactactcgtgagggacttacgataatgcactaattcgagc

SEQ ID NO: 2050 - DNA, 25 bp, Artificial Sequence
  Description of Artificial Sequence: Synthetic oligonucleotide
atctgtgctcagcggttaatctaat

SEQ ID NO: 2051 - DNA, 145 bp, Artificial Sequence
  Description of Artificial Sequence: Synthetic polynucleotide
caatatcgggaacgtggtccccatatcccttgaagagactaaacttccctattcctagttccattatcggggggttataactatgagggctccgcaaggctaatagatattagtgtttcatgactgccgggtaatatcataagtc

SEQ ID NO: 2052 - DNA, 166 bp, Artificial Sequence
  Description of Artificial Sequence: Synthetic polynucleotide
atatggtggcattcttaaggcctatgcggctagtaaaccgaggatcaatccgtcgtttctcagccggaagcacagtatcttagtataccatgtagctccgctatgtgagaataataagctacggtaacgacacccgatgcttatcttgtaccttctatagtagtag

SEQ ID NO: 2053 - DNA, 31 bp, Artificial Sequence
  Description of Artificial Sequence: Synthetic oligonucleotide
actactcttcttatttgcgagataaaggtcg

SEQ ID NO: 2054 - DNA, 93 bp, Artificial Sequence
  Description of Artificial Sequence: Synthetic oligonucleotide
gaatcaactgagtactgtgaatctctgccctgcacttgtgaagttcgccgccaagaataggtcagtcattttggtaattatcgaagtcctata

SEQ ID NO: 2055 - DNA, 180 bp, Artificial Sequence
  Description of Artificial Sequence: Synthetic polynucleotide
gataattcgtccacttaatcgacggctctgtgttaagttaggcagtcattttgatctagcaccagctatgttgaccttaacatttgtacaacgctaattcgcaataatcaatacggtagaaatcacatgcgtttggcagagcgcagccgctgtcctgggagttacgacgtacgatgatca

SEQ ID NO: 2056 - DNA, 87 bp, Artificial Sequence
  Description of Artificial Sequence: Synthetic oligonucleotide
atagaaattcttacacgttttatagttatgtcgcgcccgaagccgtcgagcggatagtaacttgtgatgatatccgagcctcttcaa

SEQ ID NO: 2057 - DNA, 32 bp, Artificial Sequence
  Description of Artificial Sequence: Synthetic oligonucleotide
tttctcagatcacggagattattctgcagcag

SEQ ID NO: 2058 - DNA, 148 bp, Artificial Sequence
  Description of Artificial Sequence: Synthetic polynucleotide
aggtcagggtacatcgcggtattctttactgcctttcaatagtagttaaccatagtgtgaaccttgaacatggagtcatagcttctgtgtctgattttccgagacacaaactaagctccggcagttcctcgtggtaacgaacagacaa

SEQ ID NO: 2059 - DNA, 133 bp, Artificial Sequence
  Description of Artificial Sequence: Synthetic polynucleotide
atatacctggatttcgctactttcatcactgacttatccgataatgtattatctagtcagatttaacggatgcctggggctcgaacacgatcgatgctgacggtcaaggcgaaattgttccacatgaataggc

SEQ ID NO: 2060 - DNA, 29 bp, Artificial Sequence
  Description of Artificial Sequence: Synthetic oligonucleotide
tatgtactctctgaggcaacagtactttg

SEQ ID NO: 2061 - DNA, 95 bp, Artificial Sequence
  Description of Artificial Sequence: Synthetic oligonucleotide
gagtcagttggcgcatcaacggcactctgtccttattgtatcgtaggagtccctaagaagctattgtgggtatataactcaccgcaaacttaata

SEQ ID NO: 2062 - DNA, 123 bp, Artificial Sequence
  Description of Artificial Sequence: Synthetic polynucleotide
acagatctgcagtagttccaaggtgttataacaagaatctctgtggacttcgctaatctgctacttatgttatcctaaagatccagctgtagtgcaagatcgtatcgctcagggtgtgcaacc

SEQ ID NO: 2063 - DNA, 154 bp, Artificial Sequence
  Description of Artificial Sequence: Synthetic polynucleotide
gcctccatgcagggccagagagatatcgtgtagttttttaggcggatcatgaattaccctttttcgccacacacagtagtacttgtcaacttccgccacataaattgatgatttaggaaggaaatgacaattgtctgtacccagaagtctgtcg

SEQ ID NO: 2064 - DNA, 174 bp, Artificial Sequence
  Description of Artificial Sequence: Synthetic polynucleotide
atttaaacttttccctgttcaatcaagggattgacacactccatattccttcgcgtaacattggtcgttcgtacactcctaatgcgaggagaacttctccagaagatggtcccggtgaaagtgctattgacattatcagatggttgaggtacagatcacgggtggacataccga

SEQ ID NO: 2065 - DNA, 5 bp, Artificial Sequence
  Description of Artificial Sequence: Synthetic oligonucleotide
tacgt

SEQ ID NO: 2066 - DNA, 53 bp, Artificial Sequence
  Description of Artificial Sequence: Synthetic oligonucleotide
gtggttatgtgaccacgtgctgtccacaaatcgctatcaactaattaatggtt

SEQ ID NO: 2067 - DNA, 123 bp, Artificial Sequence
  Description of Artificial Sequence: Synthetic polynucleotide
atagagcacggtggattagttccgccatttcccgcaaggacatgtcgcgccgcgggactcacgagtacgttataaactgctgttcttgaataattgatctatttgattatcactcgaataaat

SEQ ID NO: 2068 - DNA, 164 bp, Artificial Sequence
  Description of Artificial Sequence: Synthetic polynucleotide
gtaattcccgtatctctactgtcggaaactgtccattaagcgcaggcttggagcacactgggatctacgatgtttaaaaagaatgccaaccttcaacataaagtcgttgttcaaggcacgaaacgatcttcaggagattcctcttttgtgggaagctcttagtt

SEQ ID NO: 2069 - DNA, 77 bp, Artificial Sequence
  Description of Artificial Sequence: Synthetic oligonucleotide
ggatagactccaacactagcggtatgcattccttggtcaatatacactgtagacgggaactgtacattttaccggtt

SEQ ID NO: 2070 - DNA, 19 bp, Artificial Sequence
  Description of Artificial Sequence: Synthetic oligonucleotide
gttaattgagtatcgccca

SEQ ID NO: 2071 - DNA, 154 bp, Artificial Sequence
  Description of Artificial Sequence: Synthetic polynucleotide
taaacgggtatggaatgttgctcttgtaagctactctttccgcaggggccttcttcgtagacggtcaatacacccaataagttagtttgaagcagatgcccgctcagaaaagactctcacgttcttctatataagtagtgtgacgaactagcat

SEQ ID NO: 2072 - DNA, 200 bp, Artificial Sequence
  Description of Artificial Sequence: Synthetic polynucleotide
ccaatatatcgacctcattacagcataatagtcgaatgtatgggtgaagttgctctggggtaccagatagacgttatccgagaagatacgcacattccgtgtagacaccgtcagtgaagatgctcgatcagtgttttacatgttaatcgtgagggtcacctcaaacaacgacgctccgttgtcgcgcatttacttatcta

SEQ ID NO: 2073 - DNA, 11 bp, Artificial Sequence
  Description of Artificial Sequence: Synthetic oligonucleotide
tgttcgaaatc

SEQ ID NO: 2074 - DNA, 44 bp, Artificial Sequence
  Description of Artificial Sequence: Synthetic oligonucleotide
gatgtactccttaaaccacaaacagtgactggtctgttttagtg

SEQ ID NO: 2075 - DNA, 14 bp, Artificial Sequence
  Description of Artificial Sequence: Synthetic oligonucleotide
tagtaccagtttgc

SEQ ID NO: 2076 - DNA, 145 bp, Artificial Sequence
  Description of Artificial Sequence: Synthetic polynucleotide
gatccaatcttcggatgttctcataaagcttccggattaacggagttagagggtcacattatcgttccatcccttgattatagccggcattggattctactagcactctcaggcggaacctttatagagagcaaagatatcgtag

SEQ ID NO: 2077 - DNA, 97 bp, Artificial Sequence
  Description of Artificial Sequence: Synthetic oligonucleotide
gtaaaaaaattattgatcggcacgggttcctttcttctaacgagttatggggctactattgcaacgttagtagtaccgtgtcctcatacgacacacg

SEQ ID NO: 2078 - DNA, 190 bp, Artificial Sequence
  Description of Artificial Sequence: Synthetic polynucleotide
ccggcacgggtataataaccagcggctcaaaatctccctgtggaacacttgggtcggtcggaaaatggataacgggtgttgttaagtgaagcaaaattggtcgtttctaatttgttcacaatgcagcctacatctgtatgacgatttctctcaaacacagtatccttctcaattatagagctcgatccgt

SEQ ID NO: 2079 - DNA, 170 bp, Artificial Sequence
  Description of Artificial Sequence: Synthetic polynucleotide
gcggtcagcaagagtcctttgaagctgaacatccaataagctatggcccacagacttagctccctccaaaggacccgaggtgcactgctatgctcgaaagtagataaaatcgcatgtagttgatgcgttgaattttttcatgtcacaagtgtagttcagttctttatgct

SEQ ID NO: 2080 - DNA, 42 bp, Artificial Sequence
  Description of Artificial Sequence: Synthetic oligonucleotide
cctgccttaagatctatgtatactcatgggtagattacaggc

SEQ ID NO: 2081 - DNA, 183 bp, Artificial Sequence
  Description of Artificial Sequence: Synthetic polynucleotide
tcaacgcatcaatcgccagttattaaattaagttaaacgtgtttacattccgggtcagcccatagtacatggcgccctcgtgattggacttcgtcaagcagtggaccaagaaaagtacttgctttgtgctgtactgcggttttctcggcctagacgaataacaaacagttaagctcaaggttg

SEQ ID NO: 2082 - DNA, 45 bp, Artificial Sequence
  Description of Artificial Sequence: Synthetic oligonucleotide
tccaggtgcgatcgtgaccaacattggcaatgttatagttcctaa

SEQ ID NO: 2083 - DNA, 167 bp, Artificial Sequence
  Description of Artificial Sequence: Synthetic polynucleotide
aattaaatccttttagctagtggtgttataacatcgcctttggtaataattgaaatcggatgatgcgaccctgtacccctcactagtctacaacacggtcgcgattaggtgaactctcagggggggcacctcgcaactagtaggataggctattctctcatatgaat

SEQ ID NO: 2084 - DNA, 152 bp, Artificial Sequence
  Description of Artificial Sequence: Synthetic polynucleotide
gttgtgcaatcaggtgttttcctccatatttatttgcaacggtgatgctcccaaaaaccataagttatgtccagggtacctcctgtaacttatatacccttgaggagcgaaacgattcatgaacatgtggcaaatactgggcatggcggacc

SEQ ID NO: 2085 - DNA, 84 bp, Artificial Sequence
  Description of Artificial Sequence: Synthetic oligonucleotide
aactatatagtgcaatgcttttcaccagtgagaattcgtccattgtaactgacaatcctccgggtcgagatgcgatgctgaatt

SEQ ID NO: 2086 - DNA, 65 bp, Artificial Sequence
  Description of Artificial Sequence: Synthetic oligonucleotide
tcagctttaggtaagcgagttcattgtccacttcgtagcgagataagtcaacatgtttcataccg

SEQ ID NO: 2087 - DNA, 200 bp, Artificial Sequence
  Description of Artificial Sequence: Synthetic polynucleotide
gcttcgcgcaaccaacacttgtgaaaatgggctcttagcgatacgtgtctcttgtagcctacagccatgatgcagagaatgccaccccaccacaaagagctatactgatagtaccagtgggttataaacattcatggctaggaattaatatttgagcaagtaatccagcctgtctaatcatgggcttggtgtgtcttttg

SEQ ID NO: 2088 - DNA, 41 bp, Artificial Sequence
  Description of Artificial Sequence: Synthetic oligonucleotide
ggttccctgttacgtgtataaatcgaaaaccatcgcattgg

SEQ ID NO: 2089 - DNA, 131 bp, Artificial Sequence
  Description of Artificial Sequence: Synthetic polynucleotide
agctcaattatccgcctgagtgcacgaagatatgcactgtcggtcgcacaatacgagatacctgtgtatgatgaatgttccaatcctagatcatggggagatgcagactcaacgacctttttgcattattt

SEQ ID NO: 2090 - DNA, 35 bp, Artificial Sequence
  Description of Artificial Sequence: Synthetic oligonucleotide
gcttacccttaggtaaaatcaatggcggattcttt

SEQ ID NO: 2091 - DNA, 80 bp, Artificial Sequence
  Description of Artificial Sequence: Synthetic oligonucleotide
caacatatgttttatgataatcggtcggccggcaaatatagtaatcttgttggccggaccaaagtgcgtctcacactgca

SEQ ID NO: 2092 - DNA, 34 bp, Artificial Sequence
  Description of Artificial Sequence: Synthetic oligonucleotide
gcagtcgatagttatattccgaagcaccttatgt

SEQ ID NO: 2093 - DNA, 51 bp, Artificial Sequence
  Description of Artificial Sequence: Synthetic oligonucleotide
tggagctagcgtcagccttataccgtcgttgtatattcaaagcagcaaatt

SEQ ID NO: 2094 - DNA, 135 bp, Artificial Sequence
  Description of Artificial Sequence: Synthetic polynucleotide
cttgagttaaacagctaactctcatgatcgtcggcatttcccccatcatgagcgaataagtccgtcgagcgaaaacatcttgtcgtaaagatattctagagttttgaagtgatcgttcgagatgatgtgcacgcc

SEQ ID NO: 2095 - DNA, 123 bp, Artificial Sequence
  Description of Artificial Sequence: Synthetic polynucleotide
gtggcgcgtaaatacatttgggtgataagttccatctctatatcagtagttcaaaaggttggtaaccctcccaccctagtctctacctttgaaactaagaattgacgcttgggtaactcaggg

SEQ ID NO: 2096 - DNA, 37 bp, Artificial Sequence
  Description of Artificial Sequence: Synthetic oligonucleotide
cctcggattgttatgttacactagcgacaaagtgtac

SEQ ID NO: 2097 - DNA, 174 bp, Artificial Sequence
  Description of Artificial Sequence: Synthetic polynucleotide
cttttgaccagaggttcgcaggttggaagtgaattaagagggacggacaacttttcgtgtcacattgtgttggaatagccgcactctacccacgacagtttcaaccaaaatagctcttaaagtactgcctggacaacattagtttccagcttatcagtgtacgttacgtcatcg

SEQ ID NO: 2098 - DNA, 144 bp, Artificial Sequence
  Description of Artificial Sequence: Synthetic polynucleotide
ctcataaaccaatttgttgtaagtatccggtagcgcggatttatatccctgcccgactcgtcggtgtggattgggaagaaacttgcctattaacgtaacgcagctctaggaagaaactcagattccgattttcacgttacatag

SEQ ID NO: 2099 - DNA, 20 bp, Artificial Sequence
  Description of Artificial Sequence: Synthetic oligonucleotide
gccattgaactttttacgga

SEQ ID NO: 2100 - DNA, 160 bp, Artificial Sequence
  Description of Artificial Sequence: Synthetic polynucleotide
gtatcatggtgaggactcagacatagttacctagtgcactagtccaaagccctacacgagcctccttataggttttgaagcaagggaacagggttgtatattatgggactactcttggttctcacgaaaatgccgctgaaactattatcgaccttcgtac

SEQ ID NO: 2101 - DNA, 127 bp, Artificial Sequence
  Description of Artificial Sequence: Synthetic polynucleotide
ttcatagtctgctaatggctatctggggaagccccaggaaccgcatgctggtataagcactttagctagcatcacttcgatactcaaacagacatctattttgggtgcttgttagttaaccgtaaag

SEQ ID NO: 2102 - DNA, 132 bp, Artificial Sequence
  Description of Artificial Sequence: Synthetic polynucleotide
cgcttcgaagaaacagtctgtgggctctcctgtgtacatagagccactcgagctgccgtatacacttcccagagattgtcgataacggtaaatatacaagttttgaacatcgagaactttgtacgttgttta

SEQ ID NO: 2103 - DNA, 110 bp, Artificial Sequence
  Description of Artificial Sequence: Synthetic polynucleotide
acagtatatgtctacgaaagaatttcaacgtacgtggacgactgcaggcctctgtcattccgtgggcgttctactcgaatatcaacggagaagtatttatcaattccttg

SEQ ID NO: 2104 - DNA, 128 bp, Artificial Sequence
  Description of Artificial Sequence: Synthetic polynucleotide
gctagtccttgagctttcttagccgggcttactagccgagaaaaatcttacacagtcctttctagttatggatgttttcatagacctaagcggcagttagacagtccactaataagatgcaagatcgg

SEQ ID NO: 2105 - DNA, 157 bp, Artificial Sequence
  Description of Artificial Sequence: Synthetic polynucleotide
aggcaatctaataccgagcggatcattctctgaagggagatagcgcaggtcatcccgggttcttaggccctgtgtatattctagtcgcggaattcgagttataccaatgtgcacaggtacgtcatcactaacatctatcctaagtagcatttaatta

SEQ ID NO: 2106 - DNA, 153 bp, Artificial Sequence
  Description of Artificial Sequence: Synthetic polynucleotide
ggattacgcccagaagacctagtcaaggattctgtgcgtaatgaaatttgtatttgacaactgttaagttatctctgttggatattaatgagtgcaaccttggcgtacatacccttgcatagactagctccatgcaaatggcgagcagccccc

SEQ ID NO: 2107 - DNA, 156 bp, Artificial Sequence
  Description of Artificial Sequence: Synthetic polynucleotide
taaagccataatatttcgagtcaggcgcgctaggaatgtcaagatagttccgtctcaacgtccttgtttgcagcgtaaataactagagtatcgtgtgattttacgatataacctccctcagtagtcacggcgagctctacgtaagctgattaggcc

SEQ ID NO: 2108 - DNA, 74 bp, Artificial Sequence
  Description of Artificial Sequence: Synthetic oligonucleotide
ctgagattcactgaagcgagagcccgctctgttgttgtcaacatgcatgctttaatgtgtaccaaaattaactg

SEQ ID NO: 2109 - DNA, 147 bp, Artificial Sequence
  Description of Artificial Sequence: Synthetic polynucleotide
ttttccgagtttgggtataagacggtgttgcgtcgagtctacattgcgagcactgaacactatggatagaggtctcatatctaaagataaaacctcacattactctaatctcgctcaatatgcacacagtccggacgtagccgggtt

SEQ ID NO: 2110 - DNA, 180 bp, Artificial Sequence
  Description of Artificial Sequence: Synthetic polynucleotide
ctcatccagcttcatcttcaacaaagaccggcggacgaattgagcttttggccatagtcgccaattaaaggagttctagtagcccgcccgctataaaaggtagtgatctatctctgcctgtttatggcattgcttaaaccagatatgtcgtggacagttagataatggatacgattgact

SEQ ID NO: 2111 - DNA, 82 bp, Artificial Sequence
  Description of Artificial Sequence: Synthetic oligonucleotide
gaaccatcgttgttgcactgtttgtcaagtcccgtgcaatatagcatttgccaaatgtaaacacagagctctgagttgctga

SEQ ID NO: 2112 - DNA, 14 bp, Artificial Sequence
  Description of Artificial Sequence: Synthetic oligonucleotide
tccgcttaataggt

SEQ ID NO: 2113 - DNA, 134 bp, Artificial Sequence
  Description of Artificial Sequence: Synthetic polynucleotide
tcactcacgtttactcctaatgagcaaatactgacaggggtggtcatcctcacggtcaatctggggtagtaccgatacagtcgatgctttggacgaacagtctctgttagatcagctataaatcaatgttcatg

SEQ ID NO: 2114 - DNA, 197 bp, Artificial Sequence
  Description of Artificial Sequence: Synthetic polynucleotide
ctaattgcggataagcgcagagtaggattcacatttgcgacttacaagcgtgtctactgatggtctcgtatcatgctgtaattgtacaactaacagtttatcgattaccgccatttagggccaacagcattatatataggccgaataaatgcagagtaatttccgcacgaacgttttccggtccgtgctgccgacag

SEQ ID NO: 2115 - DNA, 90 bp, Artificial Sequence
  Description of Artificial Sequence: Synthetic oligonucleotide
gctttatatacccgaagcttgtttaattacgaccgctaggcatcatcaaagggttcagccgattttgccaattgagtccgacagaatgtg

SEQ ID NO: 2116 - DNA, 50 bp, Artificial Sequence
  Description of Artificial Sequence: Synthetic oligonucleotide
aaaatgactgactacctttctgcttgcgatttcgaatcgggggattacac

SEQ ID NO: 2117 - DNA, 113 bp, Artificial Sequence
  Description of Artificial Sequence: Synthetic polynucleotide
taaattgtgttcaaattgaccgcccgctatatagacgtaattgaaaagattgaactgtaccggactctcagagcggtttacttgcgctactcggctgataaccactcggatgt

SEQ ID NO: 2118 - DNA, 108 bp, Artificial Sequence
  Description of Artificial Sequence: Synthetic polynucleotide
tgctgtttcccaataatgaaggcagctaattctagagccgtcccgatgcacgatggtcaatactaaatagatctcttatagtgcacgcgagtttgtggagacttactc

SEQ ID NO: 2119 - DNA, 116 bp, Artificial Sequence
  Description of Artificial Sequence: Synthetic polynucleotide
aacataaatcgacaacggattccaggtgtcatagtagactatgcttagttctatgagtcctttcagatcgtcatcacagtcggactcagtaggtttgaatgtgttccagacgccgc

SEQ ID NO: 2120 - DNA, 11 bp, Artificial Sequence
  Description of Artificial Sequence: Synthetic oligonucleotide
agcttcgatta

SEQ ID NO: 2121 - DNA, 67 bp, Artificial Sequence
  Description of Artificial Sequence: Synthetic oligonucleotide
agtggttgctagtctctttgaaagcggatggcgacctagagctgaatatcatcaaaacccattctct

SEQ ID NO: 2122 - DNA, 34 bp, Artificial Sequence
  Description of Artificial Sequence: Synthetic oligonucleotide
agtcctcttgacagctcatgtttactgaaggata

SEQ ID NO: 2123 - DNA, 177 bp, Artificial Sequence
  Description of Artificial Sequence: Synthetic polynucleotide
tgatgaattaacatgaaatacgatagtgtcatcgctcgtgcgctcagtgtgttgctcagaataactcttctgacatttccttggaaacaagggacgtaaacggcctttgttgcatatgtaacagtctgtgtaaagccttatgccgcacgctcggaaatttgtaggcccacctaaact

SEQ ID NO: 2124 - DNA, 92 bp, Artificial Sequence
  Description of Artificial Sequence: Synthetic oligonucleotide
gtccttaaggcattgataaagtcaagcccttaacctgtgtgcacacctgtttgaaaggcatagtcgcggaaaagtgtttcattgactttcca

SEQ ID NO: 2125 - DNA, 28 bp, Artificial Sequence
  Description of Artificial Sequence: Synthetic oligonucleotide
tacaaagtgctctttcggacgtaacgtt

SEQ ID NO: 2126 - DNA, 130 bp, Artificial Sequence
  Description of Artificial Sequence: Synthetic polynucleotide
tgctgtcgtaccggatcgcatcttctgctataagcaaacaggacggctgaacttcatgttgacaaaggttactatgcatttaagactcgatagcatacctcttgatgttccaggagggtgactcctataa

SEQ ID NO: 2127 - DNA, 42 bp, Artificial Sequence
  Description of Artificial Sequence: Synthetic oligonucleotide
cttcgaacgtttaccgcataaatcctagattttgaagcgtgg

SEQ ID NO: 2128 - DNA, 141 bp, Artificial Sequence
  Description of Artificial Sequence: Synthetic polynucleotide
ctacatggtattgtggtagctcttggtgctaatcaggattaggtgttactacgacgtaaccatcatactgtagctaaaacgtcatagtcctagagggcccgctctaggcgactactgatcgccaataagataactctattt

SEQ ID NO: 2129 - DNA, 108 bp, Artificial Sequence
  Description of Artificial Sequence: Synthetic polynucleotide
gaattgcactacacctacccgctattcgcttgaatctaccttggacatcggctgatgctacgtatgtaattctggtgaaatggtgattcagcacttgaagacgaatag

SEQ ID NO: 2130 - DNA, 80 bp, Artificial Sequence
  Description of Artificial Sequence: Synthetic oligonucleotide
gtagggaagcaggctacctatccattcgaaagttgccaattatgcgcgtgtactatcaccttgtatgacatacagcattg

SEQ ID NO: 2131 - DNA, 196 bp, Artificial Sequence
  Description of Artificial Sequence: Synthetic polynucleotide
ataagaacttcctatgcgtccataagtccgttcgactgcaacgggttaattattacaataaccataagtacctatcactgtattcgcggttgctgctcttggcagtaacagtagcagattgttaacaacaagttggcacaatggattttgctctgggtgtggtcagactcccgcacgttcacggagatcatagacg

SEQ ID NO: 2132 - DNA, 9 bp, Artificial Sequence
  Description of Artificial Sequence: Synthetic oligonucleotide
gatgcctta

SEQ ID NO: 2133 - DNA, 153 bp, Artificial Sequence
  Description of Artificial Sequence: Synthetic polynucleotide
agacacggaataataatggcgtttaggtcttaggctcttgcgactaagcgctttttactcttctatgtctcggaggcctcctctcggcgtaaattatcgcgcaattttagaagttaaatcagagactcgaacaacaaatgagcgcttgacacg

SEQ ID NO: 2134 - DNA, 189 bp, Artificial Sequence
  Description of Artificial Sequence: Synthetic polynucleotide
aattgccttatttttcgaattggtgatctcgggcccgtgtactgctagccataaattcacgataagagcttgagttcccaggcaacactggcgctgcgttagttttgtacttcccgtgtaacctgcacaaaacgtgaaaaggcaagtgttttgagaatcatctgtacaactgggacaatcaccgattaa

SEQ ID NO: 2135 - DNA, 109 bp, Artificial Sequence
  Description of Artificial Sequence: Synthetic polynucleotide
attactgatctacgtgccgtagaaaggcactaaccctttttttcgtgctataagacaataacgacgatgtactcgggaattcacggctatggtttaaaccgtgggcttc

SEQ ID NO: 2136 - DNA, 136 bp, Artificial Sequence
  Description of Artificial Sequence: Synthetic polynucleotide
atggtcacgccccaagtgaagcgcacatgtgcagagactgaatctacttaattattgctgtctgagcgcttctgaaatatatttacaatggaccagtcccagtggcactttatgttgattcaggatctcgataagc

SEQ ID NO: 2137 - DNA, 152 bp, Artificial Sequence
  Description of Artificial Sequence: Synthetic polynucleotide
ctaaatattggatcctctgtcacatatatttcagcaattccagagagtatagcttatgacgcaaaccactagaaagcgtatgccgcttcgatgttgtgagggggtatccgctagccgcttccttgggatataattagaactgctaagctccg

SEQ ID NO: 2138 - DNA, 7 bp, Artificial Sequence
  Description of Artificial Sequence: Synthetic oligonucleotide
atgcttt

SEQ ID NO: 2139 - DNA, 96 bp, Artificial Sequence
  Description of Artificial Sequence: Synthetic oligonucleotide
ggtgttaacacaagaccgcggacgaccaaggttttaactcaaaggcgcccggtcagtaggactatattcttatcgtttaattagatcttctattgc

SEQ ID NO: 2140 - DNA, 30 bp, Artificial Sequence
  Description of Artificial Sequence: Synthetic oligonucleotide
taaggcttctacttcaatgcgtgatctaag

SEQ ID NO: 2141 - DNA, 26 bp, Artificial Sequence
  Description of Artificial Sequence: Synthetic oligonucleotide
acactctagaggtattttacgtgatc

SEQ ID NO: 2142 - DNA, 32 bp, Artificial Sequence
  Description of Artificial Sequence: Synthetic oligonucleotide
agtgcgctaactaaataatctttcttgggcgc

SEQ ID NO: 2143 - DNA, 79 bp, Artificial Sequence
  Description of Artificial Sequence: Synthetic oligonucleotide
attaaaccacactaccccgtttcttgtatgtcgcagcagggaacgctgaaagtgtttctcgtcttatttaaaggggata

SEQ ID NO: 2144 - DNA, 145 bp, Artificial Sequence
  Description of Artificial Sequence: Synthetic polynucleotide
gcgcttctacagaaataatagattcatgactaggtaggtgatttgttgcttatcctatcgccttgacagctataatatttctcaatggggcctcgaggcatagatcgcacatcggtaattaagtttggcaaacgcccacctcagg

SEQ ID NO: 2145 - DNA, 7 bp, Artificial Sequence
  Description of Artificial Sequence: Synthetic oligonucleotide
gctttta

SEQ ID NO: 2146 - DNA, 153 bp, Artificial Sequence
  Description of Artificial Sequence: Synthetic polynucleotide
aaaaaatactggaattgcttgattggggtaagagggtctactggagtttccactttcgtgggcaagtgacgaatgccagtcaaaatcggacatgcgctatcaccaactctcctttttccgcggcctttaacaactcgatatatcgagcttata

SEQ ID NO: 2147 - DNA, 61 bp, Artificial Sequence
  Description of Artificial Sequence: Synthetic oligonucleotide
gtttcagaactagccgcgaggaaagtattttattacagagcgtgctctctatcttcaagct

SEQ ID NO: 2148 - DNA, 99 bp, Artificial Sequence
  Description of Artificial Sequence: Synthetic oligonucleotide
ctcataatcgattatcccgtgacgcagctcaatgccggattgtaataccgtccaggtacgtgtctagagcttgttgaattatatacgcgcgatagtaaa

SEQ ID NO: 2149 - DNA, 86 bp, Artificial Sequence
  Description of Artificial Sequence: Synthetic oligonucleotide
tcaagacctgtaattgagtgacgtccaagatattgatggtaataacggcttgtccgcgtggccctttacaccaagtacagctattt

SEQ ID NO: 2150 - DNA, 120 bp, Artificial Sequence
  Description of Artificial Sequence: Synthetic polynucleotide
tatcagaataatcagtggaacacgaccgttgttatccctcgtgcgagtgccctttacccgtcggatggagggaagatgtttacccatgatcgcacatataagattagtaacatctgttac

SEQ ID NO: 2151 - DNA, 92 bp, Artificial Sequence
  Description of Artificial Sequence: Synthetic oligonucleotide
cgttagcactttttccggagtgataacaagaaagtaaccaaggagcgttcgcaatgaattctgagtcttttgtcatcgatcgactctcgtac

SEQ ID NO: 2152 - DNA, 130 bp, Artificial Sequence
  Description of Artificial Sequence: Synthetic polynucleotide
cgccaaaggggacttacatgtatggttttagccagacgatcctccgtatttgacacccctagtaaaccctgatgcagtggtggggatacaaattacttcctaggtctaacttttattgaaccaaggttag

SEQ ID NO: 2153 - DNA, 193 bp, Artificial Sequence
  Description of Artificial Sequence: Synthetic polynucleotide
aaataccgaggtctccaatgatgttatccttcctgccactagctagccgaactaggagccatacttcgtctttgtatgggatgcttacaacatctagcaataacgcagcccttcaatgtcgtaacaggcattaacataacgtgttaaattcgttagggagtgattactcgcattgttagggcggaagtacgtg

SEQ ID NO: 2154 - DNA, 66 bp, Artificial Sequence
  Description of Artificial Sequence: Synthetic oligonucleotide
cttttcatgaattgtggtggagtgaacgacactgttctcataacgatcgatgttacctacccagaa

SEQ ID NO: 2155 - DNA, 195 bp, Artificial Sequence
  Description of Artificial Sequence: Synthetic polynucleotide
tagcgaggggtttgacactcttacgaaaatctaagttctatgtcagcttcgtgtcacgattaacagagaaagagcagccactgcgcgagagtttcttcgtttaagtagattatttttgcgagtcaagcgcctgttaaaggcgtcccccagcttcgctaaccaggatcagattatatcttaaaaacccgttgtatc

SEQ ID NO: 2156 - DNA, 38 bp, Artificial Sequence
  Description of Artificial Sequence: Synthetic oligonucleotide
ccatagtatatttattatggtcagcgtccggccaagta

SEQ ID NO: 2157 - DNA, 193 bp, Artificial Sequence
  Description of Artificial Sequence: Synthetic polynucleotide
cggactgttgatagtaaatgaccaggacgtcaaagaatcgtcggatccaattaagggcaggaatctctctatttacgaaggagacgggtctataacttctttagcactagctcaggcttgactcatgtccccctgcatcggctgtcataatccgttaacatctatgtaaatttggtctgctagagtgaaactc

SEQ ID NO: 2158 - DNA, 53 bp, Artificial Sequence
  Description of Artificial Sequence: Synthetic oligonucleotide
tcagaattaagctttgctaggctctgtatcgagtacatctcaagtatgacctg

SEQ ID NO: 2159 - DNA, 60 bp, Artificial Sequence
  Description of Artificial Sequence: Synthetic oligonucleotide
tagttattatactgcaacctgagtagggatctaatatctctggcgacgtccatcgaagct

SEQ ID NO: 2160 - DNA, 34 bp, Artificial Sequence
  Description of Artificial Sequence: Synthetic oligonucleotide
gcgcttatatacagattaaaagtctcgcgttctg

SEQ ID NO: 2161 - DNA, 124 bp, Artificial Sequence
  Description of Artificial Sequence: Synthetic polynucleotide
aagccgtctttaatgtcaagatcacattactacgtgactaacatgatcccttactgtcaaggttcgcatccttctctactcttgacaggttgagcgataaaaagggatggggtagagttatccg

SEQ ID NO: 2162 - DNA, 89 bp, Artificial Sequence
  Description of Artificial Sequence: Synthetic oligonucleotide
acctgtggagtggtcgcatgttactgataataaaaaacttgcgttgcgattcgcaatcgcgcatgcatatattacaactccgggacctt

SEQ ID NO: 2163 - DNA, 187 bp, Artificial Sequence
  Description of Artificial Sequence: Synthetic polynucleotide
atgtagcattgagaaccaggtccagcgctatcaggttacgtgtctgtatcctgagccggtttttcaccaagttctgatctagaatctaatagtaaacgtatcgtatgatcccacatgatacccacagcataatgagatgctggaagtggcgaatttacattctagatgctgcgtccaaagtcgcctg

SEQ ID NO: 2164 - DNA, 194 bp, Artificial Sequence
  Description of Artificial Sequence: Synthetic polynucleotide
tgggttatgatattcgaacggtaagaaccgagcaacagacctggcgcacaattcctacgttctaaaaggcgttctctatattagaacgctgaggaagttaatgctgtgcacttattagttgcactcgttgagtgttctgcctttacaatgtctgcctaaagccgaggtacacaagatcaatctcagccctgtat

SEQ ID NO: 2165 - DNA, 79 bp, Artificial Sequence
  Description of Artificial Sequence: Synthetic oligonucleotide
tacattatactccgaatggagttgaagcgtagaatcgtatcctatctgatgctactctcttgactcgcaaagcttggga

SEQ ID NO: 2166 - DNA, 58 bp, Artificial Sequence
  Description of Artificial Sequence: Synthetic oligonucleotide
tctcacacaaagtgaatcctagtgattccgtctagaagtgttatcgtgggactacctg

SEQ ID NO: 2167 - DNA, 133 bp, Artificial Sequence
  Description of Artificial Sequence: Synthetic polynucleotide
ttcggccgtattttcacttttgaacaagtcaagcaactagtgcctccgaaggacgcgcatcttaaacatgttaatggaggatttctggtataataacctggttcataatgagccgacctgaatacgtttgccg

SEQ ID NO: 2168 - DNA, 9 bp, Artificial Sequence
  Description of Artificial Sequence: Synthetic oligonucleotide
ctgtagtac

SEQ ID NO: 2169 - DNA, 54 bp, Artificial Sequence
  Description of Artificial Sequence: Synthetic oligonucleotide
ctacacactgcgttagagtgtggaaattcggcacatgttactgtttcagatcac

SEQ ID NO: 2170 - DNA, 56 bp, Artificial Sequence
  Description of Artificial Sequence: Synthetic oligonucleotide
atatgcgcacgggcacggtgtgacacctaaattcctatgtttctataggcatatta

SEQ ID NO: 2171 - DNA, 108 bp, Artificial Sequence
  Description of Artificial Sequence: Synthetic polynucleotide
gtacatctccagcggtaccattaatagcttgtttgatgagctatgtcaccgctgcctgaggcactaacacaagggtttgaaaagtcttttgatatatgcacacgatgc

SEQ ID NO: 2172 - DNA, 17 bp, Artificial Sequence
  Description of Artificial Sequence: Synthetic oligonucleotide
atatgtctgctgattac

SEQ ID NO: 2173 - DNA, 148 bp, Artificial Sequence
  Description of Artificial Sequence: Synthetic polynucleotide
aatggtgtccaacggcgtatcgatagtcctgctgtacactaccagtcctcaccctagagatccttacgtctagagaaactacaacgtgttaaggtgaatgttgtgagttggtactgcgcatttagcaagtttccaatttagaactacg

SEQ ID NO: 2174 - DNA, 65 bp, Artificial Sequence
  Description of Artificial Sequence: Synthetic oligonucleotide
aaaaacgtcaactgaactgattcttatgtactctacgggacacgggttttggcaacttgctcgtt

SEQ ID NO: 2175 - DNA, 158 bp, Artificial Sequence
  Description of Artificial Sequence: Synthetic polynucleotide
agtgctggcctaatccatcttgtaccttgtaatcgatataatcctactattctcacaagccgctaaaaatgctagggtggaagaggagtgcttatagagccggacattaagacggcgggctcattatcgctcggcttcttgatattccacaaatatgt

SEQ ID NO: 2176 - DNA, 200 bp, Artificial Sequence
  Description of Artificial Sequence: Synthetic polynucleotide
agtgaggtttcagtgacaatttgtgccttccgtgctcagtcctttttctggaaagtggcgggggagacttctcccttagatagatcactctgagaacctgagcacggcataccaaagtacgaatctcacatcagtagctctacctgggcgaagttcgacaattggtgtacatcggtaacaataaatttattaacactcaa

SEQ ID NO: 2177 - DNA, 63 bp, Artificial Sequence
  Description of Artificial Sequence: Synthetic oligonucleotide
tgtaatatctgaccacttcggattatttgagctagccaacgtggctgcatacacagtgatcga

SEQ ID NO: 2178 - DNA, 123 bp, Artificial Sequence
  Description of Artificial Sequence: Synthetic polynucleotide
agtttttggacgcataagctctcgccttgtcctttttgctaactaggtaattacattaagtcgccatatccaaaaatagcagacgttcgatgataccggtcaattaggggagggcttagcacc

SEQ ID NO: 2179 - DNA, 121 bp, Artificial Sequence
  Description of Artificial Sequence: Synthetic polynucleotide
gccgtttacggataatctgttcattcctgaaaagctaaaggagtaacctgcaggcttacattcagctaaaagtcgtgcgctcgtagacgtttcgtactaatgatgccccagtcatgtaatg

SEQ ID NO: 2180 - DNA, 168 bp, Artificial Sequence
  Description of Artificial Sequence: Synthetic polynucleotide
gttggacagttgattaagcgacgtaaactcgcacgccgtgtaaaggtaatagcggcaaacgaacgtccgtagcctgaaatttgcagaccgaactgttctattaactgtagcaatcctctccaagttaagttataccaggtgctgtatctcttgtctctagatgcttta

SEQ ID NO: 2181 - DNA, 5 bp, Artificial Sequence
  Description of Artificial Sequence: Synthetic oligonucleotide
tcgta

SEQ ID NO: 2182 - DNA, 15 bp, Artificial Sequence
  Description of Artificial Sequence: Synthetic oligonucleotide
actttacttggacag

SEQ ID NO: 2183 - DNA, 165 bp, Artificial Sequence
  Description of Artificial Sequence: Synthetic polynucleotide
ttgtttggggaatataagtttcatgcctatgtaaggtggcacgtccctacgttcagatgagatgaaaaaacacaaaggctcacgatgctgagtgagtcctttatataggtatcaccatcccatacgcagtcactacaccccattgaattggccttctggggcatt

SEQ ID NO: 2184 - DNA, 70 bp, Artificial Sequence
  Description of Artificial Sequence: Synthetic oligonucleotide
tttgtagtcataatttaagaaagcacagttcaagttaggctattccacgttcaggacgccgggtatccct

SEQ ID NO: 2185 - DNA, 142 bp, Artificial Sequence
  Description of Artificial Sequence: Synthetic polynucleotide
gccctctcgacttttgtttcgcgcaatagatcccttagtgagattctgctaaaagccataatattgcaattgtcacatctgttaacacctgaggaaagagcactcgtgtaagtaagagtccttgtcgataagggttggccaa

SEQ ID NO: 2186 - DNA, 185 bp, Artificial Sequence
  Description of Artificial Sequence: Synthetic polynucleotide
gacgacattcacgttatactggtgatcgagcggtatcgacatcaatcccccctcagcttatataatatggcggatgcagaacagaaattaccattattaagaactgtttaaagcgagcagaactcgttgaagcttgtctcccgtgagacaagctgatgtggtatactctcttgctgtgtttgtcc

SEQ ID NO: 2187 - DNA, 180 bp, Artificial Sequence
  Description of Artificial Sequence: Synthetic polynucleotide
gatgtaaatacttattgactgcaggaagctcgcttaaacactatccaccacctcgcgcgttgatgactcgtgtcataaccagttgcttatcagcgagatgttacgcagcattaggcaatattttatacaaccagttagtataggtagatggctcggtaggatatggatttgcccagctcc

SEQ ID NO: 2188 - DNA, 10 bp, Artificial Sequence
  Description of Artificial Sequence: Synthetic oligonucleotide
cgtacgattt

SEQ ID NO: 2189 - DNA, 84 bp, Artificial Sequence
  Description of Artificial Sequence: Synthetic oligonucleotide
gtgtgcacctcgtatttaatttgggaaactaccactaccgttggcgtctggaacgaactagagtatttcggtctatactacaaa

SEQ ID NO: 2190 - DNA, 129 bp, Artificial Sequence
  Description of Artificial Sequence: Synthetic polynucleotide
tttaaacacccgaccaatgacatctcatcaattttggcgtttcagtctcggaagagttatccataaaatgtggtgtacaacacgatgcgcttggggcaccaggtttttaagtaatggcctgcctcggaa

SEQ ID NO: 2191 - DNA, 43 bp, Artificial Sequence
  Description of Artificial Sequence: Synthetic oligonucleotide
ctactatccttatgcagcacgtgataaggtttgctcaattgag

SEQ ID NO: 2192 - DNA, 90 bp, Artificial Sequence
  Description of Artificial Sequence: Synthetic oligonucleotide
gtgtccgtcgtaggtataagtccgattgacatattgttagaggggcggcacatgtcgcctacaaatcaactctcgtaatcttcatatcaa

SEQ ID NO: 2193 - DNA, 64 bp, Artificial Sequence
  Description of Artificial Sequence: Synthetic oligonucleotide
atgcgagtaggttacgcttctacactagctgaatttgcaaccctgtgaaactgcaatattggtc

SEQ ID NO: 2194 - DNA, 165 bp, Artificial Sequence
  Description of Artificial Sequence: Synthetic polynucleotide
tttaccccagaactatccctcaccaatgaggctaacgatattagattgtgtatgagattgcttctagagaactcgagtgaacggagaggtatctggaagacacatcctgttctcgttggcctccctaacgtaaggtggatctcctataacttttcaaagcgtgga

SEQ ID NO: 2195 - DNA, 133 bp, Artificial Sequence
  Description of Artificial Sequence: Synthetic polynucleotide
cttacggacacatcacgctgagtcaatctggctgttataattcgacgaccttatatctgtgatgaaagctctgtcacattgcctaggaccttgatatacacttcgattggaactgtaatggaggcattgcaag

SEQ ID NO: 2196 - DNA, 140 bp, Artificial Sequence
  Description of Artificial Sequence: Synthetic polynucleotide
ctaggtctcctgggacgaaaaaacagtttcaaaatgaaaactagagcctataagggtctccttcaaatgcgtagatcggctccctagtgcgtttcatttccgttaggttaaatccgactacactgtggtttagaggtcct

SEQ ID NO: 2197 - DNA, 30 bp, Artificial Sequence
  Description of Artificial Sequence: Synthetic oligonucleotide
gtctccaatctattagtcatatggaatggc

SEQ ID NO: 2198 - DNA, 92 bp, Artificial Sequence
  Description of Artificial Sequence: Synthetic oligonucleotide
ggcattttagtcggataacatgatgtgcatcgagacgcagccctataactatggcatttactgttctcaaggcgtacttgtaaaatcccagt

SEQ ID NO: 2199 - DNA, 98 bp, Artificial Sequence
  Description of Artificial Sequence: Synthetic oligonucleotide
tttcctagacgagcgtctgctaacgtgtaaaaagtacacatgctgtgaagcctcagctaacttctctatttgcatgagatgaccgtgccggattatga

SEQ ID NO: 2200 - DNA, 98 bp, Artificial Sequence
  Description of Artificial Sequence: Synthetic oligonucleotide
aagatagggatgtttcgggccactgtaacgttatgatcttagttgcacacgggtgcacaatcgattaatgtgggctctttcaactataacccactcac

SEQ ID NO: 2201 - DNA, 38 bp, Artificial Sequence
  Description of Artificial Sequence: Synthetic oligonucleotide
cagaatcggaattctgattccttatttacaacgtgcgg

SEQ ID NO: 2202 - DNA, 42 bp, Artificial Sequence
  Description of Artificial Sequence: Synthetic oligonucleotide
ttaagcattctttgtggtcctctgtcacgaaagctagcagaa

SEQ ID NO: 2203 - DNA, 124 bp, Artificial Sequence
  Description of Artificial Sequence: Synthetic polynucleotide
acttgcctcactggtcactatcaactggcattatgaagcaaaaagtttgtccaaaaggggcccgagctttgttttgctgcgtcttcaattacagctaagttgaggttataggaatcgaactcac

SEQ ID NO: 2204 - DNA, 95 bp, Artificial Sequence
  Description of Artificial Sequence: Synthetic oligonucleotide
agtgcttccactagagtggtcgagacataattactctagtcccagagtggttgaacctcgggtataacaattcagtttggccgtcaatacctaat

SEQ ID NO: 2205 - DNA, 182 bp, Artificial Sequence
  Description of Artificial Sequence: Synthetic polynucleotide
gttcaatccacacggtcgtacctctatgcgatcgtaagatcagcgtagataacagcgcagtaagaattaccacaacggtttagatgcgtaattcctgcttatttgagaggtaaaatcacctcgaatcttcccgagtaagtctgcgtaaaaggcgtatgcgtattacttttgtatcggtccgt

SEQ ID NO: 2206 - DNA, 26 bp, Artificial Sequence
  Description of Artificial Sequence: Synthetic oligonucleotide
gcaagtaaatgtacgcccttttttga

SEQ ID NO: 2207 - DNA, 116 bp, Artificial Sequence
  Description of Artificial Sequence: Synthetic polynucleotide
attcagaggatggtcgaataccttattaaactctcagttccacgggcaggcctgcggtatctcattatttcatgagcattttaaaggcactcgcgtataagggttataaacggccc

SEQ ID NO: 2208 - DNA, 130 bp, Artificial Sequence
  Description of Artificial Sequence: Synthetic polynucleotide
gatcttcgtaagcaccttgttatctgtttctaaattatgtatctccttcaaaccgcacaatagatattggcgagatagatcccgtacaaggttaaccaattcacaatgactgccggtgcagggggtgggc

SEQ ID NO: 2209 - DNA, 59 bp, Artificial Sequence
  Description of Artificial Sequence: Synthetic oligonucleotide
attctcctaggaactcgatccgactaagcatggattagtatttacttggcctgaggcaa

SEQ ID NO: 2210 - DNA, 139 bp, Artificial Sequence
  Description of Artificial Sequence: Synthetic polynucleotide
gcgggcattaacgcacacatgtactgatttggaacttaaggtgctggggtgcgagtttactctacttctttcgtaactgccaccgacagtcgacgagccacacatgcagctttgagatgccggagccgacgaccggctc

SEQ ID NO: 2211 - DNA, 50 bp, Artificial Sequence
  Description of Artificial Sequence: Synthetic oligonucleotide
aatgccgcatacgtcggtttgtcacctctgctagccagggtgtaaagtca

SEQ ID NO: 2212 - DNA, 60 bp, Artificial Sequence
  Description of Artificial Sequence: Synthetic oligonucleotide
aaggccgggaggcgggagtgtcaacttaatattacgacgcttcatcgcctttcgccctat

SEQ ID NO: 2213 - DNA, 36 bp, Artificial Sequence
  Description of Artificial Sequence: Synthetic oligonucleotide
ttcgtggcatcatcattgcatccagggcataatcgg

SEQ ID NO: 2214 - DNA, 187 bp, Artificial Sequence
  Description of Artificial Sequence: Synthetic polynucleotide
gactccatttgccggaattttcccgtcgaccaagagtccgcaaggaggagcctcggtttacgaactccgctctaggtgagaaacggttaccgccctatggccgggcaccatgcaatccgaagtagtcattccactgaattccgttagactgattggcagtatgagggccttgcgatgggcatccagt

SEQ ID NO: 2215 - DNA, 143 bp, Artificial Sequence
  Description of Artificial Sequence: Synthetic polynucleotide
acgtgcgcctaccggtgaccggattggtcgctacagctcgctgtcgtaaatacatcgcacccttacgataacgctagcaattgcggcggtagtaggccaatcgctatgaatgcaggtcgtattcgcgccgctggcattgataa

SEQ ID NO: 2216 - DNA, 141 bp, Artificial Sequence
  Description of Artificial Sequence: Synthetic polynucleotide
atacgtttgatcttccacctgttatattcttcggtgattctggcataagagtaaccgggaatcacacgggcgcaagagcctcaggtcaggcggcgcctgcttcaaaatctaccctgtcgatggcacgccggaagtggcctg

SEQ ID NO: 2217 - DNA, 146 bp, Artificial Sequence
  Description of Artificial Sequence: Synthetic polynucleotide
cccggattcttttttactaccgacgcgtgatagcttcgccacgcgtaacttgagcccagatgaatagcccatagcgcctgaatgcatcatgattggccgggaggacgttcggcctaggcagtacgcagggcgtatgacttactagc

SEQ ID NO: 2218 - DNA, 24 bp, Artificial Sequence
  Description of Artificial Sequence: Synthetic oligonucleotide
cccggtttagaacgtgccattatg

SEQ ID NO: 2219 - DNA, 185 bp, Artificial Sequence
  Description of Artificial Sequence: Synthetic polynucleotide
aggtaaatttagggggtgtaaccgatagcgtgggtgcggggccatatattcccgagtccggccctaatccaacgtacccgcacgtccgacttttctatcgcccatttcaacagggacaagttctataccagccgttgctggtatctcccacgcgtgcagggatattagtggcacaacatggggtc

SEQ ID NO: 2220 - DNA, 89 bp, Artificial Sequence
  Description of Artificial Sequence: Synthetic oligonucleotide
cacgtcagggggacacgcgcattaaagggacggctgctctttaggacactactggttcctcactcgttgaacgtaccgaattgtgtcca

SEQ ID NO: 2221 - DNA, 152 bp, Artificial Sequence
  Description of Artificial Sequence: Synthetic polynucleotide
gctgcccggatcgagacaattcaggtggtgggcttgcaagctctatagctttcaaccccggtaataacgagaccatgcacctctgcctgtgagactgtatccggactagtagcaagcatgggtgagtttgcccccacgacttgcgaatctgt

SEQ ID NO: 2222 - DNA, 96 bp, Artificial Sequence
  Description of Artificial Sequence: Synthetic oligonucleotide
cctcctagtcgtgtatgacgcgaagctttcctcccaaatgacgcctgtacatgtagtgcaatatgaggctaggcggcaggcccctacgtggttaga

SEQ ID NO: 2223 - DNA, 7 bp, Artificial Sequence
  Description of Artificial Sequence: Synthetic oligonucleotide
acttttg

SEQ ID NO: 2224 - DNA, 25 bp, Artificial Sequence
  Description of Artificial Sequence: Synthetic oligonucleotide
aatctgctccatgttcgtaggcgat

SEQ ID NO: 2225 - DNA, 124 bp, Artificial Sequence
  Description of Artificial Sequence: Synthetic polynucleotide
gcggaagcataccgtcggcttgcattgttcggtaagtccgctccgcagccgttcgacagcaaggttcctgaacctcacggcagtagcgatccttttctcaacgggagaatattacagtggtcga

SEQ ID NO: 2226 - DNA, 80 bp, Artificial Sequence
  Description of Artificial Sequence: Synthetic oligonucleotide
tcacgggctactacattactaagcgcaccaattcaggcgaggttaacctgcgctcgtcccggacttagtgtcgaagggtg

SEQ ID NO: 2227 - DNA, 171 bp, Artificial Sequence
  Description of Artificial Sequence: Synthetic polynucleotide
aggatgtaggaggggtccattcatgctcaactgctcttgagtttctacttctcgacggctcaatgattgtggcggaacggtaccatacgcggaagccgaagatcccggaccctccggtgtactcctcccgtcgtgcaaatacgccgaggagcataatcgaatgcggcattc

SEQ ID NO: 2228 - DNA, 66 bp, Artificial Sequence
  Description of Artificial Sequence: Synthetic oligonucleotide
gcacactcaatattcgccccgggcatccgagtggtcattgttggagaggtaaagggcccctatttc

SEQ ID NO: 2229 - DNA, 186 bp, Artificial Sequence
  Description of Artificial Sequence: Synthetic polynucleotide
tactctagagtagccggactttctttttaggcactatagtcttgcatgcccgaggaaaccgcatgcgtagcataaaggcgacggatcgccgacccctaggtgtcttagagttgaccgagcggaatgcgcactactgtaagacgtgcctgtaccccgactgtacttacgcgtcgcatgcgaggtgcc

SEQ ID NO: 2230 - DNA, 82 bp, Artificial Sequence
  Description of Artificial Sequence: Synthetic oligonucleotide
gagtagggcggcatttctcgtttgcggttctcattggccaactctaccgctcggaagcgaccaaacaggtcataagctcatg

SEQ ID NO: 2231 - DNA, 56 bp, Artificial Sequence
  Description of Artificial Sequence: Synthetic oligonucleotide
atgcgagactctgcccctccagaacgtggtaacgtaagcctgatctatgcgtttgg

SEQ ID NO: 2232 - DNA, 178 bp, Artificial Sequence
  Description of Artificial Sequence: Synthetic polynucleotide
acttaagtatcgggcggagcaacaggagcgttgactctccggcaataaaaactgtgagactttgtgttcagctgtccggaccagtatctgatttttcacaatgcgtgggtgctagcgccccaacctcaaggacaacccacttggcctcgccaggtattgtcgagggctccgaccgtgt

SEQ ID NO: 2233 - DNA, 6 bp, Artificial Sequence
  Description of Artificial Sequence: Synthetic oligonucleotide
atttcg

SEQ ID NO: 2234 - DNA, 188 bp, Artificial Sequence
  Description of Artificial Sequence: Synthetic polynucleotide
cggcctcacggcccgcggcaactattactagcacctggttctgtcccctatagctacacagcacgtcctacagtggattcaaccgacagttgttaggcagcactgcggactccggcagaatggtgcgcaaaaattacgggctggtgtagcattcgtctgggacattagctagatcgtttacggttagg

SEQ ID NO: 2235 - DNA, 197 bp, Artificial Sequence
  Description of Artificial Sequence: Synthetic polynucleotide
atcaacggaccgggtgtcctctcctctggtctagtatcatcgacggcgcagcgcttctaacgcgctatccctaggttcaaatcaaattaggtgggggtcatgtcccacggcagaaataagtatcgaacgcgccgcaatacaaggagatctgtcgctatgcgggcgggggtcaaagtccccgttttgcgttccaagct

SEQ ID NO: 2236 - DNA, 35 bp, Artificial Sequence
  Description of Artificial Sequence: Synthetic oligonucleotide
catgatcttatcctcgctggacactgttggacgag

SEQ ID NO: 2237 - DNA, 72 bp, Artificial Sequence
  Description of Artificial Sequence: Synthetic oligonucleotide
aactatcggaccttgacttggatttatgagggtctcgcagcgacgaacacatcggcgcgctcctcaggattt

SEQ ID NO: 2238 - DNA, 25 bp, Artificial Sequence
  Description of Artificial Sequence: Synthetic oligonucleotide
gcttggactaatcttacgtgctgac

SEQ ID NO: 2239 - DNA, 158 bp, Artificial Sequence
  Description of Artificial Sequence: Synthetic polynucleotide
ctgggccatgggatcgtgaaaaacctattctagaaacctttgagtttagtacaggccagcgtctcccagcgcctgccggtacgcacctgattcacaagtcatgaccgaaacctcggtcgggatctgtctgggattcgggcctgtagacgcactattgg

SEQ ID NO: 2240 - DNA, 136 bp, Artificial Sequence
  Description of Artificial Sequence: Synthetic polynucleotide
gaatgactaatagtaagtagagtgaggtctaagaccccgcggcacaagctttgtgtaatttcgtctgccgtacagccgtggcaggccgtcctcatggtactcgactctatctggcgctccatgcccgcaggcatga

SEQ ID NO: 2241 - DNA, 178 bp, Artificial Sequence
  Description of Artificial Sequence: Synthetic polynucleotide
gattaacgcccggggcttcaggtctccacgcgactccaagctgatcgcgaatacacctaacacgtcattgggcccccgcttcacagtatcctggggcctgggtagtagcttactcgtttgactgacggtatggagatgaagggttgatcaatctaaggttcgagcttgtgcccaaaca

SEQ ID NO: 2242 - DNA, 63 bp, Artificial Sequence
  Description of Artificial Sequence: Synthetic oligonucleotide
gactcaagcgtccatagccgtactgaaggtacatctgactgaggttacgcgtactctggcgct

SEQ ID NO: 2243 - DNA, 120 bp, Artificial Sequence
  Description of Artificial Sequence: Synthetic polynucleotide
ttgcggactttagactttatagacatcacggtcagtcgcagtgataaccgcatcccctactccagggaggcgcgccggtccgatctacgtataattgcggcttaaccaaacggggtgcgg

SEQ ID NO: 2244 - DNA, 93 bp, Artificial Sequence
  Description of Artificial Sequence: Synthetic oligonucleotide
cccagtgatctggagcctacgagctcggctcggaaatcgtgaaagacgtgttttcatccactagacgaactcggcgcactccgtttgtttagg

SEQ ID NO: 2245 - DNA, 15 bp, Artificial Sequence
  Description of Artificial Sequence: Synthetic oligonucleotide
gcgaccaattctgtg

SEQ ID NO: 2246 - DNA, 66 bp, Artificial Sequence
  Description of Artificial Sequence: Synthetic oligonucleotide
tccccaagtaccccgcaacttccctcttagggggattacttgcggtgagttgcagggatgaacgat

SEQ ID NO: 2247 - DNA, 141 bp, Artificial Sequence
  Description of Artificial Sequence: Synthetic polynucleotide
gtacagccccccactcccgtattaagtgagtaggatttgccaatatttggtgtagcaacccgtaaccgtggggagctagtattcgtggatcctgtaaccaaatggtgcacggaaccttagtgtcgactcccgctgcccggg

SEQ ID NO: 2248 - DNA, 16 bp, Artificial Sequence
  Description of Artificial Sequence: Synthetic oligonucleotide
agacctttcgatgtcg

SEQ ID NO: 2249 - DNA, 155 bp, Artificial Sequence
  Description of Artificial Sequence: Synthetic polynucleotide
gcggacgatctgatctcgtgttgctgcccccggttgaaaacgtctgtcggcgcgccaggggcccccggatcacatttcaaccacgcttactgttaaacgtccgtttgagtgaaccgcagtcagtggctaaagtcttgattaacaagatgggcaat

SEQ ID NO: 2250 - DNA, 90 bp, Artificial Sequence
  Description of Artificial Sequence: Synthetic oligonucleotide
tagtagatgccaatgattggaaacgggtcggcctgacagcgtgaattccgtcaatccttgtcctcgtgtagcagcccacccatctgtgga

SEQ ID NO: 2251 - DNA, 74 bp, Artificial Sequence
  Description of Artificial Sequence: Synthetic oligonucleotide
cgttccacggtgtagacacacatccccatgtggtagcggtgaatctccagtccgacgaggtgttagcagtatct

SEQ ID NO: 2252 - DNA, 130 bp, Artificial Sequence
  Description of Artificial Sequence: Synthetic polynucleotide
atattcggctcgcctgcgggtgtgaaaggtaagtttcgtcaactctacgagccgtacgaacgactatatgtcggccacacggttacgttcgtagcgtgatgaccctcgagcgagattcttccccaggcaa

SEQ ID NO: 2253 - DNA, 104 bp, Artificial Sequence
  Description of Artificial Sequence: Synthetic polynucleotide
tgcaaatcctcaccggttggcccaactactgggatctagtatagggctgcttcgtgcgcgaaagctgaaaccaatgtcgtttgctagctcaccgtggggcacta

SEQ ID NO: 2254 - DNA, 11 bp, Artificial Sequence
  Description of Artificial Sequence: Synthetic oligonucleotide
gcatgtccgta

SEQ ID NO: 2255 - DNA, 10 bp, Artificial Sequence
  Description of Artificial Sequence: Synthetic oligonucleotide
tatctgatgc

SEQ ID NO: 2256 - DNA, 107 bp, Artificial Sequence
  Description of Artificial Sequence: Synthetic polynucleotide
agaccccgcgaagcgaggcacatagattaaaactttcctgatttgctacggggagtgatgtggctccctctcattcggcagtctcagtggagccagtcttcgcgaca

SEQ ID NO: 2257 - DNA, 17 bp, Artificial Sequence
  Description of Artificial Sequence: Synthetic oligonucleotide
ttcctaaggtgctactg

SEQ ID NO: 2258 - DNA, 72 bp, Artificial Sequence
  Description of Artificial Sequence: Synthetic oligonucleotide
aacgagagttcgcgtgaaaagtctcacctggggtaagtttttagcccttacgccagcactctctggtgaccg

SEQ ID NO: 2259 - DNA, 103 bp, Artificial Sequence
  Description of Artificial Sequence: Synthetic polynucleotide
aacgagtctgcggccagactgcatctattcggcttgtgtgtcacctgaactcaggtcgccagtgaggtcgcgaaacatcccctgaatattactgtacacgggg

SEQ ID NO: 2260 - DNA, 87 bp, Artificial Sequence
  Description of Artificial Sequence: Synthetic oligonucleotide
actgtgactaaaactgggtcgggatttgtaggttctactccccacagctttatactcggacgaggtcgatgtccatgccgacgacgc

SEQ ID NO: 2261 - DNA, 124 bp, Artificial Sequence
  Description of Artificial Sequence: Synthetic polynucleotide
tacgttcggcaccgagttcaggtggagaggttgactccggtaccagcgttatccgattaactcctaggaactcgggtgtcttttgaggtcccagtgatacgcgcccataactaagagccacgcc

SEQ ID NO: 2262 - DNA, 75 bp, Artificial Sequence
  Description of Artificial Sequence: Synthetic oligonucleotide
tgcctgcgagattggctaatggttcaccgatctgactactgttcgtgcggacggataaccacctgtcgctcagaa

SEQ ID NO: 2263 - DNA, 119 bp, Artificial Sequence
  Description of Artificial Sequence: Synthetic polynucleotide
gtttagccgcgcgacaggggttgctcacgcagctactaggaagcgttcctcctacgtgtggcgacgtattgtatctattgatgaaggaaggcccgctcacaaccgtcactaatactgtc

SEQ ID NO: 2264 - DNA, 56 bp, Artificial Sequence
  Description of Artificial Sequence: Synthetic oligonucleotide
tgttgtgctcccataatcaggacacgaacgtgtagcggctgttcacacagcgtgtc

SEQ ID NO: 2265 - DNA, 196 bp, Artificial Sequence
  Description of Artificial Sequence: Synthetic polynucleotide
ctcgtaaccacaggcaattaaaatgactgtgtcgtggggccccggctgtattagagacttgaaacgcgagtcgggggggagcttcgcaggctagcaatcattcgtgtctggctacttgggtcaaagtccatggatatggcccaatgctatgcccttccacactgtccgcccattgagcttgcgctaaactcccgaa

SEQ ID NO: 2266 - DNA, 67 bp, Artificial Sequence
  Description of Artificial Sequence: Synthetic oligonucleotide
ggcgggctctccctaatccacgcctaacgccaatattaattattgggcgctcggatgcgtgatggaa

SEQ ID NO: 2267 - DNA, 16 bp, Artificial Sequence
  Description of Artificial Sequence: Synthetic oligonucleotide
tgcattaaggttcccg

SEQ ID NO: 2268 - DNA, 169 bp, Artificial Sequence
  Description of Artificial Sequence: Synthetic polynucleotide
gcgtgagtgagtaaacacgacatgtaaatgtataccccgactggaggccgaacgtatttgctcttacgctctccccgaaagacgtttggttccgtcgagctacggggggacatagcacattccggacatggtcagacatgccccgtcgcctttccgtcaatgcaggtgt

SEQ ID NO: 2269 - DNA, 31 bp, Artificial Sequence
  Description of Artificial Sequence: Synthetic oligonucleotide
ataatctctttccaggtgggaccggtgacct

SEQ ID NO: 2270 - DNA, 149 bp, Artificial Sequence
  Description of Artificial Sequence: Synthetic polynucleotide
tgggggaggattattcagaaattcgcccctacgcagcgaccatgccagggtattctggacataggcagttccacacggaccgtctggatcccttatatttgacacaggctaatcttcatcttggcgacgtcggccccaggagcttgtag

SEQ ID NO: 2271 - DNA, 9 bp, Artificial Sequence
  Description of Artificial Sequence: Synthetic oligonucleotide
gtaatctcg

SEQ ID NO: 2272 - DNA, 125 bp, Artificial Sequence
  Description of Artificial Sequence: Synthetic polynucleotide
ggggctttaggctccttcctgggccgaccgtacacccccattctgaaggacatggagcagcgtccggttctcctagatcaggaacagaagcggacgtggtgatagaatttaactcattgcacctt

SEQ ID NO: 2273 - DNA, 58 bp, Artificial Sequence
  Description of Artificial Sequence: Synthetic oligonucleotide
cactatggctaagtcctaggcgtcgacgcttggaaagagcgtatctgtgactccctta

SEQ ID NO: 2274 - DNA, 9 bp, Artificial Sequence
  Description of Artificial Sequence: Synthetic oligonucleotide
cctgattga

SEQ ID NO: 2275 - DNA, 11 bp, Artificial Sequence
  Description of Artificial Sequence: Synthetic oligonucleotide
ttcggaatcgc

SEQ ID NO: 2276 - DNA, 121 bp, Artificial Sequence
  Description of Artificial Sequence: Synthetic polynucleotide
gggctgtacggaatagctaacgtacgcggtatgcaccattctcggccttgtctcagcgtagcgaatgtcatggtagccatgccgtcacacacctaacgaacgctgcggctaagatttgcgt

SEQ ID NO: 2277 - DNA, 134 bp, Artificial Sequence
  Description of Artificial Sequence: Synthetic polynucleotide
ctagagttggcggagcaacaccggaagagcacgcgctgtctaccgccacacgaagggcgtagtatctcagtgacataggataatcgtatcgtctgactcctttatcctgagttttcaccttaggccgttcgggc

SEQ ID NO: 2278 - DNA, 191 bp, Artificial Sequence
  Description of Artificial Sequence: Synthetic polynucleotide
ttcgtcggagtacgtgcccgcgataacgactgaagtagcgatagcagtcttcggccgtactagagagatgagtctgccccggtacgtagcccgcagcttgattgaccaccgtatccctcaggtgatgccaaaccagtaggaattacaaggccgttttcccgcagtatttcggtgcttggatgcatccgtac

SEQ ID NO: 2279 - DNA, 101 bp, Artificial Sequence
  Description of Artificial Sequence: Synthetic polynucleotide
ccgatatgcgtactgaggcgtggccagttgcaacctgactgaagctagctccaggtacaacgggattgatggtcgatagttcactgctacctgtcccttca

SEQ ID NO: 2280 - DNA, 23 bp, Artificial Sequence
  Description of Artificial Sequence: Synthetic oligonucleotide
cgggtacgccctttgcaattaga

SEQ ID NO: 2281 - DNA, 176 bp, Artificial Sequence
  Description of Artificial Sequence: Synthetic polynucleotide
gttagtagatcgcggtgaccccaggccctcagcaagttggcagactgggtaaacgggtttttctgtcccgcccgctcgcacaccttcgtgaatccatacgtcgatccctgaatagtcgaagcagggggttatgtatagatgtcctagaactggcaacgctcagtacgtcagacctg

SEQ ID NO: 2282 - DNA, 178 bp, Artificial Sequence
  Description of Artificial Sequence: Synthetic polynucleotide
tcacccagtggtactaatgccagaatgtccgggtggacgtccgccggcgaaagcgtatgcccctcgtgatgggcataacaggtatgacgggtctcgactaggaatgtctgcgtctcataatagtattactaacattctgtctggcgaacacgttctcgatcacccgacgtcggtgcca

SEQ ID NO: 2283 - DNA, 185 bp, Artificial Sequence
  Description of Artificial Sequence: Synthetic polynucleotide
tgcgtagacgttttatacttagacatgtagtcgtcctgaaagtccgtcaagaactgggagggatcctggattcgacataaagtcatcctagctaggctgggccaatctagacgcatgctgcccagtgtttcccgcctctgacacggctacccgtcgaccttgtgtcgcacgggcatgacgggaac

SEQ ID NO: 2284 - DNA, 69 bp, Artificial Sequence
  Description of Artificial Sequence: Synthetic oligonucleotide
agactacggtctccggggccaggttgtaagcgactgttccttcaccaggaattctcagtgcaatattcg

SEQ ID NO: 2285 - DNA, 21 bp, Artificial Sequence
  Description of Artificial Sequence: Synthetic oligonucleotide
ttcttaacggactgcctgatg

SEQ ID NO: 2286 - DNA, 19 bp, Artificial Sequence
  Description of Artificial Sequence: Synthetic oligonucleotide
tttggccacgcgatacagt

SEQ ID NO: 2287 - DNA, 22 bp, Artificial Sequence
  Description of Artificial Sequence: Synthetic oligonucleotide
agaacctttgggtactgtcccg

SEQ ID NO: 2288 - DNA, 44 bp, Artificial Sequence
  Description of Artificial Sequence: Synthetic oligonucleotide
gaggccttatcgcagctgtagtatctgctcactaacggctggca

SEQ ID NO: 2289 - DNA, 186 bp, Artificial Sequence
  Description of Artificial Sequence: Synthetic polynucleotide
ataaggttcctcgacacgagccaactaaatacttgccagagttgcggcgcaaggtaattcaggtcgagccttgtgtggttaaaccttcgttctggcggctgtcacggaagtaggcaactccgactttaagccacctcgagtggcttcgcgctcctccggggatgacctcatacatgcggccgtgaa

SEQ ID NO: 2290 - DNA, 97 bp, Artificial Sequence
  Description of Artificial Sequence: Synthetic oligonucleotide
tttgttggggctgtctgtcgccgccacgctgcggtaccctgggagcctcagactccttatatagaatatgaggacccgcacctaagagtgtacataa

SEQ ID NO: 2291 - DNA, 187 bp, Artificial Sequence
  Description of Artificial Sequence: Synthetic polynucleotide
agggccgtagtcgaaaccacgccgcgttatggttcccgttttgagtggaagaagagtagtcgccaactctgtgaggctctccttgggtaaaatcgcccggcctacacgggaagtgccaatccttgtcgtaatatagttggactcagctcgctcactccccagaaggatctggcccgagtcactatag

SEQ ID NO: 2292 - DNA, 101 bp, Artificial Sequence
  Description of Artificial Sequence: Synthetic polynucleotide
gcgaccaactgtcatctcgggtcgacacccacactgatcgcgttatcgtctttgcagtctaagtaaccgggtgtacagatttgggcctacaaatgcggggt

SEQ ID NO: 2293 - DNA, 187 bp, Artificial Sequence
  Description of Artificial Sequence: Synthetic polynucleotide
aggacgaccattgcgacagtttccaagggatctcgtggaaacccagtggtgcccgttgggtcgttacgaggtgtgaccactggcactaggacatactaactgagcctgaccaagtaggcattacagcagttgggctcgcacgatcttcaaatctgtcggcggcccgaccgtcctttgacattacttc

SEQ ID NO: 2294 - DNA, 89 bp, Artificial Sequence
  Description of Artificial Sequence: Synthetic oligonucleotide
ggacctgtctctacgagattcaaacgccttctcttagaaaggtagtctcgactacgccctatcgcgaacgggtacggggtatcaggctg

SEQ ID NO: 2295 - DNA, 29 bp, Artificial Sequence
  Description of Artificial Sequence: Synthetic oligonucleotide
gatgattcagtcagtctgcgcatctacgt

SEQ ID NO: 2296 - DNA, 75 bp, Artificial Sequence
  Description of Artificial Sequence: Synthetic oligonucleotide
gctttcaattgagatgcaattaacgttcgcaagcggcgttcagggcgccgtggagtccctcagtcaatttgaccc

SEQ ID NO: 2297 - DNA, 29 bp, Artificial Sequence
  Description of Artificial Sequence: Synthetic oligonucleotide
aacgatctccttttgtgaccgaattgggc

SEQ ID NO: 2298 - DNA, 91 bp, Artificial Sequence
  Description of Artificial Sequence: Synthetic oligonucleotide
cgaattcctctgtcttaggagttaccgaaaaggggcgggacattgttgcaggacccatgagctccgaccccacgtgactgttccgattgac

SEQ ID NO: 2299 - DNA, 62 bp, Artificial Sequence
  Description of Artificial Sequence: Synthetic oligonucleotide
aacagcacattcatcctccagttatggagcactgtttgcggcatggctgagggacgcttccg

SEQ ID NO: 2300 - DNA, 133 bp, Artificial Sequence
  Description of Artificial Sequence: Synthetic polynucleotide
tcgaccgcagggatctagttccaagcggcttgattgcctggctcaccatgccgctggtgggcaacaggacctgcttggcatctcaaagcaggtgaaaatctagtgacgaatattcatccctggactcttggtc

SEQ ID NO: 2301 - DNA, 117 bp, Artificial Sequence
  Description of Artificial Sequence: Synthetic polynucleotide
acggcctaacatgcgagaaccaagaaattagtgatggcgcgcttccagctttcgccgcgcgtcctttcatgcgttggacacccacatttcggtggcggtcatgatgagtagatcacg

SEQ ID NO: 2302 - DNA, 133 bp, Artificial Sequence
  Description of Artificial Sequence: Synthetic polynucleotide
ccgatcttacggcgatctcttgccctggcggttactgtaccaactgtatacttatatgaggagggtgttaaagcctagcccagactgccaagaggtcctattcgcgggcccatactggtgaaagccgcacggt

SEQ ID NO: 2303 - DNA, 144 bp, Artificial Sequence
  Description of Artificial Sequence: Synthetic polynucleotide
cactgaatgtcgagcttgttgtgactcctgtggacatagcccgctaccgcagggcaaaaaacgctccggttttcgacctaattggcaacccgcctggacggaaggacgccttttggggcagttgtactactagtatgatcgcca

SEQ ID NO: 2304 - DNA, 35 bp, Artificial Sequence
  Description of Artificial Sequence: Synthetic oligonucleotide
ggtctccctcgagatatgagcctactcattgagtg

SEQ ID NO: 2305 - DNA, 129 bp, Artificial Sequence
  Description of Artificial Sequence: Synthetic polynucleotide
ctcgtcataacccgtgcaacggcggcttagactcgcgtatcaacatcgattgcgttgttgaccgagcgatactgtggatcaggtcttgagctcgcgatagcccatggatctcgtagcacaagctgagca

SEQ ID NO: 2306 - DNA, 69 bp, Artificial Sequence
  Description of Artificial Sequence: Synthetic oligonucleotide
ccgctttcgctcgctcttggacgcctagcttgcaaaagagggtaagggtgacacacctttgtagttaac

SEQ ID NO: 2307 - DNA, 131 bp, Artificial Sequence
  Description of Artificial Sequence: Synthetic polynucleotide
gtcaagaactagtacggctggtcgagcgtcaccactaggtcttacccgtttcaattgccatatgagccctacgcggggtcccgcccatgaggtttctacatggtgctgtataccccgagtgaggcaagaga

SEQ ID NO: 2308 - DNA, 197 bp, Artificial Sequence
  Description of Artificial Sequence: Synthetic polynucleotide
actaatagcaacccttttagcaggcagcgccgtcttgagtgacgctgccgcgccctgaatccatacttaaacctaaaagtaccccagatcgcgtctggctcatatcggtcattcagtgggagtatgctcgcccaagcccctgatgtgtgtgtaacgtgccagagtggcagagggtcgtgtggccagagttaccgatg

SEQ ID NO: 2309 - DNA, 167 bp, Artificial Sequence
  Description of Artificial Sequence: Synthetic polynucleotide
atacatggttcagcagcaccgctatcttttacatggctgcgacccatcggactagggtcgtaggttactaggcaagcacagtctcagctggccgtgacgcttgtcgctcgtatgcaagccggaaattaaataatgtcaacgcgtgctcagccttgtcgcgtaccggg

SEQ ID NO: 2310 - DNA, 124 bp, Artificial Sequence
  Description of Artificial Sequence: Synthetic polynucleotide
accccagtggtttgcacacgatgcacgacgatcaatgtcagatggatcgttctaacctgcagttggggtcaccatggtcaaagggtatttgcttgaggcgtctccacggtcccaccaactgggc

SEQ ID NO: 2311 - DNA, 117 bp, Artificial Sequence
  Description of Artificial Sequence: Synthetic polynucleotide
cggcgagcgtcgaggggaactgcttggatttctattctgagtatggcaacgctctgcaccttcgtggacccgtccgttgccgacaaaattacacaggttccaagagagctcagccta

SEQ ID NO: 2312 - DNA, 78 bp, Artificial Sequence
  Description of Artificial Sequence: Synthetic oligonucleotide
tattatctgtatacgcccataaggatcttccggcccatggggacctcacggcgctctgtaggtcttgagaaacgacgg

SEQ ID NO: 2313 - DNA, 20 bp, Artificial Sequence
  Description of Artificial Sequence: Synthetic oligonucleotide
actagtaggtccgcttctag

SEQ ID NO: 2314 - DNA, 132 bp, Artificial Sequence
  Description of Artificial Sequence: Synthetic polynucleotide
cgtggtggagctacgtgatgacgctatcgttcgagactcgcgtgtcgatcgcgccccgccaccaatcaccacgggcatgtgttcaaagttgttgatgtaaagagtccaacgccggataaattattgcgcctc

SEQ ID NO: 2315 - DNA, 12 bp, Artificial Sequence
  Description of Artificial Sequence: Synthetic oligonucleotide
gtacgttcgcta

SEQ ID NO: 2316 - DNA, 80 bp, Artificial Sequence
  Description of Artificial Sequence: Synthetic oligonucleotide
ttccgcaggagcacacacggtaccgcttggcctgatgagttaaggtatattgacgcgagcaccacctggctgtatgactc

SEQ ID NO: 2317 - DNA, 18 bp, Artificial Sequence
  Description of Artificial Sequence: Synthetic oligonucleotide
tgcggagtttaccatcat

SEQ ID NO: 2318 - DNA, 150 bp, Artificial Sequence
  Description of Artificial Sequence: Synthetic polynucleotide
tgaacaatctctcgcgaaccgagtcacacagtgttcgggctaacggcgcgccagctcagccagtgcgatggacctgttgttagattggaacgatccatatcggctcaatggaacgctatagtcgtatctggggccgtacctccgtgtact

SEQ ID NO: 2319 - DNA, 115 bp, Artificial Sequence
  Description of Artificial Sequence: Synthetic polynucleotide
gggccaatgcgacaaagaagatcacgtgcgacgaagcttatagcgttctccaatggtgctggttttcaggtccctcagtgtggatgttcgacccgcgttcacagtgccccactat

SEQ ID NO: 2320 - DNA, 90 bp, Artificial Sequence
  Description of Artificial Sequence: Synthetic oligonucleotide
gtatctgccgtgacttgagccgtcctggacgcttgaggacactgcacaagttcagttgaacgcagagatcggtctcataaggctttccca

SEQ ID NO: 2321 - DNA, 130 bp, Artificial Sequence
  Description of Artificial Sequence: Synthetic polynucleotide
atgttcgcggtaccgatccaaagcaaagggatgacgcggctttctgtaaagtgccgggtcgtaacgttatgattgacaccgtgtgtaacggccaccgacgtccaagcgcggtaccttcttccatccagtt

SEQ ID NO: 2322 - DNA, 99 bp, Artificial Sequence
  Description of Artificial Sequence: Synthetic oligonucleotide
acctaatctcgcaaccgtgcttcgcgggtgcatgtcgcgacaacctggactaaccgaactgtagggcgctgggatctatactgtgtttacgaacctgga

SEQ ID NO: 2323 - DNA, 133 bp, Artificial Sequence
  Description of Artificial Sequence: Synthetic polynucleotide
tcgcgtattaaacctattcgttcggcctgattgcggcggattgccacgtcccatcaatcacttcagtagaccccccgagcaagtcctggaggtggcgaatgaatgccagggcgcggtgttttacagaacattg

SEQ ID NO: 2324 - DNA, 52 bp, Artificial Sequence
  Description of Artificial Sequence: Synthetic oligonucleotide
taatcccggctacattgtacacaggtcattgcgggatcggtacgtctcgcga

SEQ ID NO: 2325 - DNA, 45 bp, Artificial Sequence
  Description of Artificial Sequence: Synthetic oligonucleotide
ctacagggagctgttactactcgcaacgtgccactgcggagattt

SEQ ID NO: 2326 - DNA, 46 bp, Artificial Sequence
  Description of Artificial Sequence: Synthetic oligonucleotide
gtgtgtaagcctgctttaatcctgtcccgcacagcgggcaagttaa

SEQ ID NO: 2327 - DNA, 24 bp, Artificial Sequence
  Description of Artificial Sequence: Synthetic oligonucleotide
tttcgactgatctcctggggaaac

SEQ ID NO: 2328 - DNA, 72 bp, Artificial Sequence
  Description of Artificial Sequence: Synthetic oligonucleotide
ttggacttcacttgccaatgacgcggcgccgtgcgtatatgaatctgagcggaagttcctggctcctaaaac

SEQ ID NO: 2329 - DNA, 55 bp, Artificial Sequence
  Description of Artificial Sequence: Synthetic oligonucleotide
gtgtcgcccctgactaattccctaatcaactaacggaggtcgcacggtttggagg

SEQ ID NO: 2330 - DNA, 143 bp, Artificial Sequence
  Description of Artificial Sequence: Synthetic polynucleotide
tctatgcattccaattcaagtccgttttgggtgataacgcgcgactggacagcggcagaccccggctatcctgcgcactgagctgccagttaagggagcactgggggatctccatgcctgacaattctcgagttgccgtaaaa

SEQ ID NO: 2331 - DNA, 178 bp, Artificial Sequence
  Description of Artificial Sequence: Synthetic polynucleotide
gcacacgctcgtatgtatcggaatcacctgtcaaagtttacctcaccgtcaaatatatctcaactgctcctattgggatgtgttatgccgtgtggagcagatcaggatgtcatcttcggagagccgtctccgttgaaccagggaccgccgctggcgtgtagcggccgaggcgcacaaa

SEQ ID NO: 2332 - DNA, 28 bp, Artificial Sequence
  Description of Artificial Sequence: Synthetic oligonucleotide
tctccctctgctcgaaagggaagttatg

SEQ ID NO: 2333 - DNA, 118 bp, Artificial Sequence
  Description of Artificial Sequence: Synthetic polynucleotide
gaaggtgtctgcgtcttcatagccaggcggtttaacgccaacgtgcttacgggatttgttgaacgaccgcagctagccccggaaaaacgttcgtactacctctgagctgcagtatgcc

SEQ ID NO: 2334 - DNA, 193 bp, Artificial Sequence
  Description of Artificial Sequence: Synthetic polynucleotide
tcacgtcctccgcaaagctgcttgatctttaatggtactgtggggccgtcccggtctggccgtggatatgtgagctactgtacttcaaaaatcacgttttcccgagactgtccacatgtatgagggaccacgccccccttatgcactgacactggcgatgcaaaacagagagccgaacggcgggtggaggcat

SEQ ID NO: 2335 - DNA, 61 bp, Artificial Sequence
  Description of Artificial Sequence: Synthetic oligonucleotide
ctgtgggccccatgtgctcatcgtcgtcgatgaggcgatctttaataatacctcacgaagg

SEQ ID NO: 2336 - DNA, 130 bp, Artificial Sequence
  Description of Artificial Sequence: Synthetic polynucleotide
gctaggacaaattatgcggactgagatcgttcgaagatccataccgacctcttacggacttgtgcgagcagtttcttctcttacgcatcgcatacgtggccggagaattgagggccgcaccatgggtccc

SEQ ID NO: 2337 - DNA, 107 bp, Artificial Sequence
  Description of Artificial Sequence: Synthetic polynucleotide
ataaccgacctgtaggagagtccatccacgtacccgtcgctgtagacactcgttgcggtgttcatgtccgaaggctcttacagtggcatgctgctacgaagataggc

SEQ ID NO: 2338 - DNA, 135 bp, Artificial Sequence
  Description of Artificial Sequence: Synthetic polynucleotide
gccgtcaaaggcggtcattgcgcgggtccgtactttagctcaacaatgacacagctgattcatttaaccccttacaatgggggtggtggggtcggcacaaccgctcccgcgtcaatctaacggaatcttgcaggt

SEQ ID NO: 2339 - DNA, 91 bp, Artificial Sequence
  Description of Artificial Sequence: Synthetic oligonucleotide
cggcacgtggagtcgtgatcttgtgagagtaagggcgagtgtcaaatcagatgagcttgcgtccgccacctcctatacccaagccacttct

SEQ ID NO: 2340 - DNA, 142 bp, Artificial Sequence
  Description of Artificial Sequence: Synthetic polynucleotide
ccgcttaagccggtacgctcacagtaactggatcatagtgaagcggaattgcgacgaggagaccgcgtctgcgtaccctatgtatacaaaacacccggtgccgagcttatgcttcctctttgtgggcgtctcgacgctgtga

SEQ ID NO: 2341 - DNA, 140 bp, Artificial Sequence
  Description of Artificial Sequence: Synthetic polynucleotide
aggccgcgagcctaagatcaagatagagtctagtacagggatctcgagtgtcgacgatgtcttagtcccatgcaaaccctcttcgaagctctgcattcctggttcgctgggaaaatccctgtcctgatggcccgtgagcg

SEQ ID NO: 2342 - DNA, 143 bp, Artificial Sequence
  Description of Artificial Sequence: Synthetic polynucleotide
aagagtaatatgagccaacttagggccccttcctgggtaaaacatttcctacgaggcgatgacacggcgggtctgcgttgtgggtgcccgcgcaaacctccccgagttcaattgaccgtttcgcggtaagttagaccgtcact

SEQ ID NO: 2343 - DNA, 166 bp, Artificial Sequence
  Description of Artificial Sequence: Synthetic polynucleotide
gagtggacttttcgatgctattgccctggcgtacgtgtacgatacaacgaatgaatcttggtggctattaggccaacacgggcacctccggctgaactttggtaatatcctccgtggccgaaaggccccatcgcgtttcgaatggggacagagtcatccaccgcca

SEQ ID NO: 2344 - DNA, 9 bp, Artificial Sequence
  Description of Artificial Sequence: Synthetic oligonucleotide
tgacgcatt

SEQ ID NO: 2345 - DNA, 126 bp, Artificial Sequence
  Description of Artificial Sequence: Synthetic polynucleotide
aggcacgtcgaggggtctttgcctcctgagcgtctgaagaactatttacacccctcgtgagcccccgtaataagcgtaaccacttctggccttgggagaggttcaattgaactttcgcagcgagga

SEQ ID NO: 2346 - DNA, 88 bp, Artificial Sequence
  Description of Artificial Sequence: Synthetic oligonucleotide
caggaagctttctcgcttggtccgttacgaattcagacggtcgtcagagaatctagctgtcaatccctagcgggtgacctgcagaccg

SEQ ID NO: 2347 - DNA, 175 bp, Artificial Sequence
  Description of Artificial Sequence: Synthetic polynucleotide
gtgtctctgtctggtcacgccgtcggcacgtatagggtgcgccacagatctacgtgattctcgccattcagttgctagagtccaaatccccagcgcaatataataagcttgcgtcggggcgtgtcgagaaaggaacgctattgccgtcagacgaccttgctagccgggaaaactc

SEQ ID NO: 2348 - DNA, 151 bp, Artificial Sequence
  Description of Artificial Sequence: Synthetic polynucleotide
aaacctaggcaatggaaggatggtggtacggcaccacgctagtccagagtgcgacatctgcctttttattaacatcggcgccaacgtacttggttggatattgacgttcgccacgttccctccaccggggccgtgacctttagtccgggaa

SEQ ID NO: 2349 - DNA, 62 bp, Artificial Sequence
  Description of Artificial Sequence: Synthetic oligonucleotide
gcgaggattcgtagtgtataaccccgagcgggccgccctctagcatgacatatggctttcat

SEQ ID NO: 2350 - DNA, 77 bp, Artificial Sequence
  Description of Artificial Sequence: Synthetic oligonucleotide
acgatatgtcccattctcgccccagtagtagaggagtacagccgatgctagtgtggatcatactcggccggtgtacc

SEQ ID NO: 2351 - DNA, 115 bp, Artificial Sequence
  Description of Artificial Sequence: Synthetic polynucleotide
gacaaacgctcggattgtagcggccttggttcccatcggccctaccagctgcggcggcgtattacattatgactgaagttagtctctgccggtggcataaaaacgtcttagccag

SEQ ID NO: 2352 - DNA, 110 bp, Artificial Sequence
  Description of Artificial Sequence: Synthetic polynucleotide
ctaagtcggttgatgcgctgaattctcccgtagtagtagtctgaaattaccacggtggttggaccagtctgagacccaagaccacagttttcaacgcgcgccgcccggtg

SEQ ID NO: 2353 - DNA, 117 bp, Artificial Sequence
  Description of Artificial Sequence: Synthetic polynucleotide
catcacgccagtggacttgatccgccaccattgggctttgcgcggagagcctgagttcgggagcaaacaataggtagccctaagctcgcgtgagtctgttaaggaatcctccttact

SEQ ID NO: 2354 - DNA, 17 bp, Artificial Sequence
  Description of Artificial Sequence: Synthetic oligonucleotide
atttcttcctgacggga

SEQ ID NO: 2355 - DNA, 145 bp, Artificial Sequence
  Description of Artificial Sequence: Synthetic polynucleotide
ggaccaattcggggatctggcgtccccccaggtttagtcaaaggcgttagagatgtcggaagtgcactacttcattggcgtatcacacctatggtggtctgaccggaacttaatccagtgctgatataaatccccgcgtcccggc

SEQ ID NO: 2356 - DNA, 163 bp, Artificial Sequence
  Description of Artificial Sequence: Synthetic polynucleotide
gtcaaacattggggcgctcctaatccgctcgaggcacactgttctggaagccataccactgggaagttatatagtgtacttgaagcagtgtttgtatagcgattccagggcagtgccgtgcacgtcagtgttcaaggccgacaagtccccctgtccactgcgc

SEQ ID NO: 2357 - DNA, 29 bp, Artificial Sequence
  Description of Artificial Sequence: Synthetic oligonucleotide
cgatccgccgtatagattgctctaaggtt

SEQ ID NO: 2358 - DNA, 152 bp, Artificial Sequence
  Description of Artificial Sequence: Synthetic polynucleotide
tccgggttagatagctgcccttatatgcccggatattgcatgagcatttccgggagtcgttatctccgaaacagagcccgttcctctgacttgatctcatgtacggagccccatttgcgcgaaatgctggcggcaaagcacgcaagaaggcg

SEQ ID NO: 2359 - DNA, 92 bp, Artificial Sequence
  Description of Artificial Sequence: Synthetic oligonucleotide
gcacaatgcattataaatggtccttgcggctcgccctacggacccgaagttgagggcttgataagggtagcctacgccctcgcacatgtgtt

SEQ ID NO: 2360 - DNA, 132 bp, Artificial Sequence
  Description of Artificial Sequence: Synthetic polynucleotide
tgctgctagaccctacgctggcggaagtcagttcacaccagtacccgcatgtcttggtcatgtggacgaatccgaccgtctcacgacgtcctagagacgcgtctatcgtggcggatatgtcgtaggattaaa

SEQ ID NO: 2361 - DNA, 92 bp, Artificial Sequence
  Description of Artificial Sequence: Synthetic oligonucleotide
tgcatctagttgaggatagttcggccctagcttttctcaccattaacagacatgcgccctggagcgggggccggtcccaggactcaaatgat

SEQ ID NO: 2362 - DNA, 99 bp, Artificial Sequence
  Description of Artificial Sequence: Synthetic oligonucleotide
cccctcagttgcacttgctgcggttatggtccatcacccgctgtatttggaagggcgaacgcggtgcgacttaaacggcactttgaagagcacaacgat

SEQ ID NO: 2363 - DNA, 106 bp, Artificial Sequence
  Description of Artificial Sequence: Synthetic polynucleotide
cgcccattccataatccagtcgagctgacggcatgacgtagtcaaacagtattgttagtcacatgtgtcacgctgccgtgtctcggacgtgaggccgcgggcaatt

SEQ ID NO: 2364 - DNA, 81 bp, Artificial Sequence
  Description of Artificial Sequence: Synthetic oligonucleotide
ccattggatggttcaaccgttcggctcgacaatcaaatattgaaacccatctcagtgagggggcagtctgtgcggccgctc

SEQ ID NO: 2365 - DNA, 113 bp, Artificial Sequence
  Description of Artificial Sequence: Synthetic polynucleotide
agcaactcgactggttgcgtccacctttacttatccgaaccaataggttcagctgagggtctgacacgcacctggagagacgtcaaccctggcattccctgagaggggttgtg

SEQ ID NO: 2366 - DNA, 178 bp, Artificial Sequence
  Description of Artificial Sequence: Synthetic polynucleotide
gcaacgttaccagtacgattgtgcgggggtatcagccgatggggaacattatcccggtagagtggtacctaggcatcggagcactcttctaagatctgatccatgcactacctcaagtctgtgcacttttccccgtagactaagctggcgtctgccctcgaagccatggacggaagct

SEQ ID NO: 2367 - DNA, 156 bp, Artificial Sequence
  Description of Artificial Sequence: Synthetic polynucleotide
ttatctcggatagaatggtttgttcgtcactgcccctcggcgattaaccacctagattcggatgtcgcacgggggtcagaacgaactggcccgctatcgtgggattactaaaagcacactgttggctgctagctggtacgacgtacgaccgaccca

SEQ ID NO: 2368 - DNA, 120 bp, Artificial Sequence
  Description of Artificial Sequence: Synthetic polynucleotide
aggcgagagggtgtgctttgttcccgatccctactggaattcgcgacataactcagcgacgaagtgcgttccgcacgatcagattgcccgtcttatagcacacggagaatcccctgggta

SEQ ID NO: 2369 - DNA, 20 bp, Artificial Sequence
  Description of Artificial Sequence: Synthetic oligonucleotide
caacggttcatccggttagt

SEQ ID NO: 2370 - DNA, 126 bp, Artificial Sequence
  Description of Artificial Sequence: Synthetic polynucleotide
atggcgttgataacgctccgtagcacctgactacccattagaccctttaactgcaggagtgaagctacatggggatggatgcatgggatcgctgaaattgcacctgtgccactccttcggctgcgc

SEQ ID NO: 2371 - DNA, 88 bp, Artificial Sequence
  Description of Artificial Sequence: Synthetic oligonucleotide
tatgtcggtatctgcgccgccgcctgcatagagcttcctgatccaagaggaccgctacgaagtatgggttagaggaattcctctagcc

SEQ ID NO: 2372 - DNA, 128 bp, Artificial Sequence
  Description of Artificial Sequence: Synthetic polynucleotide
cataagcttccgctattgtgcgcggcacgtggttaggttcgcaccagtaggcgactgccttcactgccagaggtcccgccgtaaattgcggcggaacatttgtccctttcgcataagaaaataggagc

SEQ ID NO: 2373 - DNA, 121 bp, Artificial Sequence
  Description of Artificial Sequence: Synthetic polynucleotide
tcccgtcgtcgagtattgccaatttagcattaacattaccccgaaggggcgggagtcttgaagtcgcactgcggctctgcaaattacctgctgagaactgcccgagctgacggttacggca

SEQ ID NO: 2374 - DNA, 54 bp, Artificial Sequence
  Description of Artificial Sequence: Synthetic oligonucleotide
tccgaacgatcactgtagaatgcacagcgagttctatcgtttcaccgggcgtgt

SEQ ID NO: 2375 - DNA, 134 bp, Artificial Sequence
  Description of Artificial Sequence: Synthetic polynucleotide
actcactcccggtgtgcaatgggaagtcgctccgtggagtgtcatttaccatccggataaatctcacctcgaaggcgctcgaaagacgctcggcctcgtgattgggttcacattctgatagattacgcgacgag

SEQ ID NO: 2376 - DNA, 192 bp, Artificial Sequence
  Description of Artificial Sequence: Synthetic polynucleotide
aagattgccgcctcggtgcttcaagtacaccttagggcgcccgcgtaaatggcgcttatactcccttaaagatacatgtgtgtgcgttcaagtatgcagggcacttgcgtggacgaatcttggcgcgctcgaccacaaattcagcccgtgccgcgctcgttcgatgctagaaatagatcgaatcgcgacggt

SEQ ID NO: 2377 - DNA, 24 bp, Artificial Sequence
  Description of Artificial Sequence: Synthetic oligonucleotide
actgaacttgttagtcccggtcag

SEQ ID NO: 2378 - DNA, 7 bp, Artificial Sequence
  Description of Artificial Sequence: Synthetic oligonucleotide
gttctat

SEQ ID NO: 2379 - DNA, 110 bp, Artificial Sequence
  Description of Artificial Sequence: Synthetic polynucleotide
cctcgggtacctgccccaccggtgcggacgttactaaatgtgcccagaggttaaaccccgttaacagcacatggggtgaagttggcgttggtctgattcacacagttact

SEQ ID NO: 2380 - DNA, 51 bp, Artificial Sequence
  Description of Artificial Sequence: Synthetic oligonucleotide
tgtcgggtacatccgcagatcgatcggaagaatatgctcgcatgtccctcg

SEQ ID NO: 2381 - DNA, 29 bp, Artificial Sequence
  Description of Artificial Sequence: Synthetic oligonucleotide
agacgctagtccgtttatcggctgtacta

SEQ ID NO: 2382 - DNA, 175 bp, Artificial Sequence
  Description of Artificial Sequence: Synthetic polynucleotide
atggacttgacctaaaagcccaggcacaggccgcggcgcacgtgtacgttatctttagcaacgggggactgcgcgcatccatccaagtgccgcgacctcactatcttccttctgtcaggaggcactagtggccaggtctatgcagatatcgtcaaggcgaaggttatattggtct

SEQ ID NO: 2383 - DNA, 172 bp, Artificial Sequence
  Description of Artificial Sequence: Synthetic polynucleotide
gtgggccacgggctcgatcatgaactcactctgagtggcgcgcacttcaaggacactatcatctttgcgcgtggggccgcgactgatcgttactgcgaacgctgacggtgctagtaccgcaggagatgtcctccgataagtttaacccattatgattcaaaaacgttgccgc

SEQ ID NO: 2384 - DNA, 38 bp, Artificial Sequence
  Description of Artificial Sequence: Synthetic oligonucleotide
caacctccgaccagagggtttaggtgccgttacttagt

SEQ ID NO: 2385 - DNA, 35 bp, Artificial Sequence
  Description of Artificial Sequence: Synthetic oligonucleotide
ggaaagttcattccactgggtaccgccttgctatg

SEQ ID NO: 2386 - DNA, 102 bp, Artificial Sequence
  Description of Artificial Sequence: Synthetic polynucleotide
tccttgcacgccgaaacctccgcttgatgacgctctgggtcacggcgggcggagcgcaattgtgggtaagtcgtttactccattactaaacatcggtcagaa

SEQ ID NO: 2387 - DNA, 60 bp, Artificial Sequence
  Description of Artificial Sequence: Synthetic oligonucleotide
agctgccattgtttaacggcattcaatgcagtgtactcaccggagcggagttctgacgcc

SEQ ID NO: 2388 - DNA, 68 bp, Artificial Sequence
  Description of Artificial Sequence: Synthetic oligonucleotide
ggcttgacaccaccgatgcgtgtaatacgaaggatattggtgccgtccaccagtgcctggctatctta

SEQ ID NO: 2389 - DNA, 57 bp, Artificial Sequence
  Description of Artificial Sequence: Synthetic oligonucleotide
tccacgggtagcagtgataccctgacttgggcggtgttaaccatgtccctctaatga

SEQ ID NO: 2390 - DNA, 37 bp, Artificial Sequence
  Description of Artificial Sequence: Synthetic oligonucleotide
cggtcttgatggattcctagcgcatatgagcacagcc

SEQ ID NO: 2391 - DNA, 195 bp, Artificial Sequence
  Description of Artificial Sequence: Synthetic polynucleotide
cccatacggtcccccaccgaccgtggttttattaaaataactcctttagccctaccggtcacaggatgtgaaccggttcgtgagaggcagtttcctacgtaacgcaccgaatgaacgccaactgttggccagcgttattgggggacagcgctttacgctggcgtcgacatgctggagaccggtggttagatctag

SEQ ID NO: 2392 - DNA, 118 bp, Artificial Sequence
  Description of Artificial Sequence: Synthetic polynucleotide
attcacgcgagccatctgttaactaggtcccatgatttgacccaacgccactagggctacgttctacggttcgttgataagccactggagatacgccgcatagcaggtcgggtgcggt

SEQ ID NO: 2393 - DNA, 167 bp, Artificial Sequence
  Description of Artificial Sequence: Synthetic polynucleotide
ctacggctgttgggttcttttaataagcgttacgttgtagtaaaccccgtatcaacgagttacgcagctgtacctaacgtgtcatccggtcgctggctcggctatcggtggtaacatccggacggaaccaccaaccaatcgcgggtgggcgaacccgaattcagtcg

SEQ ID NO: 2394 - DNA, 187 bp, Artificial Sequence
  Description of Artificial Sequence: Synthetic polynucleotide
cagggcggaccagatcccaccttccgtccgtcgttccagtcagtagagcgaacctttaacaacgctgtgatgcggcactggtccaagaacggcgtcgcaattctttaattcttgcaagagacttcgccgttgtggatcacattcgcgcggttacgagctgagtgactagctctagtgagggcaagca

SEQ ID NO: 2395 - DNA, 89 bp, Artificial Sequence
  Description of Artificial Sequence: Synthetic oligonucleotide
gacaggcccggcatggcgaaacccttggtaaaagggcccagcctgcttgctcagggctgtactattcaaattgttgcaggcatcttact

SEQ ID NO: 2396 - DNA, 181 bp, Artificial Sequence
  Description of Artificial Sequence: Synthetic polynucleotide
aacttcggcattgaatgctgcgtcagtaccgcgagctacgcttcacaaagtgtggctttttcgcggcggataaatcgctatagcatccgtcgatatgtaaccgcagcccctatggccggggcacgccgatagatattgtcctcgtactccgtcgggaagtctggtaggccaggaaatacct

SEQ ID NO: 2397 - DNA, 172 bp, Artificial Sequence
  Description of Artificial Sequence: Synthetic polynucleotide
gcagcaacggacacgcttggccatctccctgaccggaagggcggttaggctttgataccgatgcgacagattgttatcttttatccgcgaatgccgggttgccgggccaatgccgactacgtcacgtggcattacagccagaatccaacattcttgcgggaagactttgatc

SEQ ID NO: 2398 - DNA, 51 bp, Artificial Sequence
  Description of Artificial Sequence: Synthetic oligonucleotide
cgcggcggttcgtaaagaagtccgcaacacatttgctacagcgctcgtgtt

SEQ ID NO: 2399 - DNA, 18 bp, Artificial Sequence
  Description of Artificial Sequence: Synthetic oligonucleotide
ctgacggctatcgattta

SEQ ID NO: 2400 - DNA, 90 bp, Artificial Sequence
  Description of Artificial Sequence: Synthetic oligonucleotide
acgtcggttgcgtcactgtggcttccctgccatggtgatattgaaaccctgcagttgttgcgcgtacaccaaagcagactacgctagaga

SEQ ID NO: 2401 - DNA, 93 bp, Artificial Sequence
  Description of Artificial Sequence: Synthetic oligonucleotide
agttattggacgctcagcagcacgctccggggcgtagatcattgtgggtctacaccgctcatagcgattattcagttcaatggacggtcccca

SEQ ID NO: 2402 - DNA, 123 bp, Artificial Sequence
  Description of Artificial Sequence: Synthetic polynucleotide
tgatgtaaaccatttgcacttcaggtctccgcgatcgggtgggcaaatgctgattttcggttcttaacggcacccggtggccacgtcgccgcacccgcaaattgggttacgtggataacacaa

SEQ ID NO: 2403 - DNA, 191 bp, Artificial Sequence
  Description of Artificial Sequence: Synthetic polynucleotide
ctaccgatgcaaaaatgatgagcacctgttctatgagtactgtatatcatgcttcacgatgtttcacgcgcgtggaaccaatatccgcacaaggcgccctttgcggacctgcgtcttgtgtctggatgccccgacatgcagggcaggcctcgccgactatgtaggggcgccgtacgacagaatctttgagg

SEQ ID NO: 2404 - DNA, 66 bp, Artificial Sequence
  Description of Artificial Sequence: Synthetic oligonucleotide
cgattgtgcctacacttacacagactgtcatccctcgccggtagggggtctgcactgagatgagta

SEQ ID NO: 2405 - DNA, 137 bp, Artificial Sequence
  Description of Artificial Sequence: Synthetic polynucleotide
tagggctatccagttggtctcaccccagagaacaagggccatggctatgcagatcattccggtcgccagggtgttcattctaagcaagtttcagctctatcgctggccagcgttggcgtatcacagataacctggcg

SEQ ID NO: 2406 - DNA, 47 bp, Artificial Sequence
  Description of Artificial Sequence: Synthetic oligonucleotide
accgcgctgaagccggatgttctcacctttgggtcgataattcagta

SEQ ID NO: 2407 - DNA, 95 bp, Artificial Sequence
  Description of Artificial Sequence: Synthetic oligonucleotide
aggcgacgcatatagatgggcggtctttacggtaccctcgagaaccgtgtccctgagacgacttatgccggatgcttcgcgctctacaaactgta

SEQ ID NO: 2408 - DNA, 74 bp, Artificial Sequence
  Description of Artificial Sequence: Synthetic oligonucleotide
cacccaaacgccatgtgggtccttttgacgccgctctgttttgaagtacgaataggtgcccaacaggggagttc

SEQ ID NO: 2409 - DNA, 186 bp, Artificial Sequence
  Description of Artificial Sequence: Synthetic polynucleotide
aggagacgacagccatttcgaaggttcctgagttgtccgccgtgtcgggtatttgtgaatgggcgctggaagcctgcaagtatagattccccacgggtagaccccaggagccacggggctcactctgagaccatgcgtgctcgcaacaacctcgacaacttacgctgcgcgcatattttatttact

SEQ ID NO: 2410 - DNA, 122 bp, Artificial Sequence
  Description of Artificial Sequence: Synthetic polynucleotide
aggcggtcggcacaatatcgaacgtctctttgacttccgagtcaaactgcacggttccactccatgcttgtacacgtgtcactggactagcttcggaactcgcgtggctgaggcaatgggaa

SEQ ID NO: 2411 - DNA, 70 bp, Artificial Sequence
  Description of Artificial Sequence: Synthetic oligonucleotide
ggcttaagctatggtaactgaccgcttggcgttaaccccctgatgccctgagtcataagagttcggcacg

SEQ ID NO: 2412 - DNA, 172 bp, Artificial Sequence
  Description of Artificial Sequence: Synthetic polynucleotide
ttttctgtcaacgctctatcgaggtcccatacgagttacataaggcagctgtattacgcgcaggtcactaagccgtctggaaccccactttgggcacatgacgcggctaggtcgagggctacaacggggtgtgatttaccgttcacgggtggtcccgtagcgtacaaaccac

SEQ ID NO: 2413 - DNA, 178 bp, Artificial Sequence
  Description of Artificial Sequence: Synthetic polynucleotide
atcctagtatacgagcaacgcgctgatttcggatgcacacatcgtaggtatgcgctggagcgagaccggcacaaggatagtctacttgattcgattagtccgtccagttctttaagccccctgcaccctggttgagagcttaatggcgaaggcctgcccagatccttggcgtacgagc

SEQ ID NO: 2414 - DNA, 7 bp, Artificial Sequence
  Description of Artificial Sequence: Synthetic oligonucleotide
tttgtca

SEQ ID NO: 2415 - DNA, 162 bp, Artificial Sequence
  Description of Artificial Sequence: Synthetic polynucleotide
ccatgctgcggaacgtcacgtcatcttggctcagcggctgagctcgcctccattgcctaggattaatgtaggctccgagcacatgggaagagcaaagtattgagcctcagccatgcattacagttcacgtcactctagcggagtaccgggctgcaagttgtt

SEQ ID NO: 2416 - DNA, 5 bp, Artificial Sequence
  Description of Artificial Sequence: Synthetic oligonucleotide
cgatt

SEQ ID NO: 2417 - DNA, 148 bp, Artificial Sequence
  Description of Artificial Sequence: Synthetic polynucleotide
tctcaaccggttatccttggatgcggcctcagaagggaccgtgtggttcgccgttcaccattggaagttgtcagtataggctatcagactgtaggcggccagacgcacccgtagcccacacttgaatatatggcccaggcctatgata

SEQ ID NO: 2418 - DNA, 60 bp, Artificial Sequence
  Description of Artificial Sequence: Synthetic oligonucleotide
catctgatactctagtctgtgtggtacgacgaaggcagccccctccgtgatggcaattga

SEQ ID NO: 2419 - DNA, 13 bp, Artificial Sequence
  Description of Artificial Sequence: Synthetic oligonucleotide
cttcttggaacgt

SEQ ID NO: 2420 - DNA, 79 bp, Artificial Sequence
  Description of Artificial Sequence: Synthetic oligonucleotide
cctgccccgcgtaaattgtgaaccccttgacgtggcaagtgcatactaaagtcgttgactgatttcgaggtcaggtgcc

SEQ ID NO: 2421 - DNA, 130 bp, Artificial Sequence
  Description of Artificial Sequence: Synthetic polynucleotide
ggatgggttaaatcaatatcgatctcggtgggttggaatcctcctgctggtacccttgactgttgtaaccgaaaacgtcctacgggcgggcgtctcacgcaaggtagagcaccacacgtccatacgtcct

SEQ ID NO: 2422 - DNA, 157 bp, Artificial Sequence
  Description of Artificial Sequence: Synthetic polynucleotide
atcctcggaatctggcaagcgtattgtggcatcgaagctatccgaattccgccggccctctcgatgtaaagcatgctgaaattcggtggtacacactgccgtatgaaaacttgcactgggtcccgatagacgcgagtgcggtgcccttcactgaggc

SEQ ID NO: 2423 - DNA, 175 bp, Artificial Sequence
  Description of Artificial Sequence: Synthetic polynucleotide
taccttatttcaggtggctatcaacaacgcacgcacgggggcgcttccacaggatattctctagatggccgtatacacttagctcgcaccgctcgctccacttctctggccatgccgtggcgatggactgcggatgattaacgggcgtcaggattagacaaaggagatgagcgct

SEQ ID NO: 2424 - DNA, 78 bp, Artificial Sequence
  Description of Artificial Sequence: Synthetic oligonucleotide
aaacatgattcggtaagccgcccacctttaaaggtattgtgcgcccgaagggctggtccatcggatcggatttctcgc

SEQ ID NO: 2425 - DNA, 42 bp, Artificial Sequence
  Description of Artificial Sequence: Synthetic oligonucleotide
cgtctgtaggggatagttctacctagatgaagcccattcgcc

SEQ ID NO: 2426 - DNA, 133 bp, Artificial Sequence
  Description of Artificial Sequence: Synthetic polynucleotide
acaccttgggggaggtagagaacgtgttctaacactgacgtgaaagtcctagatccactccgggactttggcacgtgtttcctctcaacccattcatgcgatactcgaccgtctagcgcagtggcttggcgga

SEQ ID NO: 2427 - DNA, 19 bp, Artificial Sequence
  Description of Artificial Sequence: Synthetic oligonucleotide
ctgtcgtgatatcgaccga

SEQ ID NO: 2428 - DNA, 65 bp, Artificial Sequence
  Description of Artificial Sequence: Synthetic oligonucleotide
tcttccaacgatcagggtacgatatgccggaatgaaagggccccctttgagtgttcccatcgttg

SEQ ID NO: 2429 - DNA, 109 bp, Artificial Sequence
  Description of Artificial Sequence: Synthetic polynucleotide
cacagtaggcgtgacaacttctcggaaggccacgatgattggtccgcagatcactcattgactacggcgatttgtccactaggttccctgcgaggtgctacgtagcatt

SEQ ID NO: 2430 - DNA, 176 bp, Artificial Sequence
  Description of Artificial Sequence: Synthetic polynucleotide
taagttggttgccgtttccttacacgaatgccgacgcgcttgtcgcggaccttgcaaacccgtctattatacataccgctaaactctgggtatcggtgcctgctaagcgtgtgcaacgcttggccacggcgatgaccaccggaaacgccgtgagagcatcagattatacgaggtgg

SEQ ID NO: 2431 - DNA, 85 bp, Artificial Sequence
  Description of Artificial Sequence: Synthetic oligonucleotide
cgggttgactgcacgagcgccgtagccgacacgtagcctttaacaaattcgacatagcttctatctgggctaagctttgaggcgc

SEQ ID NO: 2432 - DNA, 197 bp, Artificial Sequence
  Description of Artificial Sequence: Synthetic polynucleotide
cggaccatgccacaacgctgaggttaagtttcagtagatcgttacgcttcgatcaccaagccggcccgcagatgaactgtcaaacttaggagcatcttcgagtcgcgccttcgctcgcgtggcagtaccgcgccgaaagcttgagagggcatcggaacttcagttgtggaccgtctctgaacgtggacttcttaagt

SEQ ID NO: 2433 - DNA, 122 bp, Artificial Sequence
  Description of Artificial Sequence: Synthetic polynucleotide
cattggacgaggctccagcaagcccgtgccccggagctagcattcgaggaccctgggttgagtaactttgctatagcgttttatcgcaaagctcgagctcgtgcatatgtagaacagccttc

SEQ ID NO: 2434 - DNA, 48 bp, Artificial Sequence
  Description of Artificial Sequence: Synthetic oligonucleotide
gcagacacctcgagcgcattcctccttgcagtggatattttgggcgaa

SEQ ID NO: 2435 - DNA, 97 bp, Artificial Sequence
  Description of Artificial Sequence: Synthetic oligonucleotide
cgcgacggctatcgcttgaactgaaagcctcaacggcacgacgcagatgaatccgttgaaccctgcatggttttgcgggatctgcttccggattatt

SEQ ID NO: 2436 - DNA, 168 bp, Artificial Sequence
  Description of Artificial Sequence: Synthetic polynucleotide
agactacgggctactcgtctaataggccggtccaatggacccattccgcgtaccctgcgtggtttcgcgcgacgctggacctggcagtaggacacagaagatcttaacggcatcgaccaacttccttgataaggggtgatagcagaacttttttggcgttcccactgg

SEQ ID NO: 2437 - DNA, 42 bp, Artificial Sequence
  Description of Artificial Sequence: Synthetic oligonucleotide
tttcttccgtggcgatgtgcaggcacagctcgaatctacaag

SEQ ID NO: 2438 - DNA, 133 bp, Artificial Sequence
  Description of Artificial Sequence: Synthetic polynucleotide
cgtggtgggcccttcgtttacaatcgttctactgcctatcggcgcctcgaaaacatcccaggaatgacgtgggcaaagggctgcttcgaagtttgtagtgcagccactataagctcatgagcctcagccgtag

SEQ ID NO: 2439 - DNA, 29 bp, Artificial Sequence
  Description of Artificial Sequence: Synthetic oligonucleotide
ccttttcacttacgtgtggaagcagagct

SEQ ID NO: 2440 - DNA, 145 bp, Artificial Sequence
  Description of Artificial Sequence: Synthetic polynucleotide
gttcgagagatcggccctcgaatctgcccaagaagcggtacctaacacgtctgcttgtgcagccccgtgtaactggttagcaagttcattggtgtaacttcgagaggtcaagccacctcagagcgtccttctgcttcgatgggaa

SEQ ID NO: 2441 - DNA, 97 bp, Artificial Sequence
  Description of Artificial Sequence: Synthetic oligonucleotide
ctcggaagagggcacggacgcgctttcataggagccgtcctttaaggaccggcgtgtactatacatgtgtcttccgtcattcagtcctgaatcagac

SEQ ID NO: 2442 - DNA, 82 bp, Artificial Sequence
  Description of Artificial Sequence: Synthetic oligonucleotide
cgattcaagcctgaggcacggggctaactacgtcgtcgtgaaacctattgaggcattcattactatactctcggggccgctg

SEQ ID NO: 2443 - DNA, 77 bp, Artificial Sequence
  Description of Artificial Sequence: Synthetic oligonucleotide
gtcgccagaaacgctgccctttgttgacggctaacgtcagtgacaagcccgagaccgattgttgagattcgagcttc

SEQ ID NO: 2444 - DNA, 144 bp, Artificial Sequence
  Description of Artificial Sequence: Synthetic polynucleotide
gcactgtgaggtgccgcggaagcccagagggccgccttacaaacgcctgcgtccgttaagatgtgtatcgcggtgaattcttttactgaggaatttcgtccgccccacaatttaatcgaagattagctatatgccgcgcgcacg

SEQ ID NO: 2445 - DNA, 52 bp, Artificial Sequence
  Description of Artificial Sequence: Synthetic oligonucleotide
aagttgctcatcgtcccccggcggccatagacgggggtcatatattatctga

SEQ ID NO: 2446 - DNA, 184 bp, Artificial Sequence
  Description of Artificial Sequence: Synthetic polynucleotide
aacagagcacgcgtgtggcaatcacagtgtgtggacatctccgcccggacattcaagggctagattcgtatccgcctttttggcgcgtagcgtctaggacccggaggaggttgtcgacaatatctgattgctaatatgcgcgtcctcaaggggtctgcatcacaactactcgccactgagacct

SEQ ID NO: 2447 - DNA, 90 bp, Artificial Sequence
  Description of Artificial Sequence: Synthetic oligonucleotide
ctatagcttaggctattcacatacggtgcaaccctagtgggctgtctggccggccatccgatcgcgaaaatggcaaagcgcggattttct

SEQ ID NO: 2448 - DNA, 116 bp, Artificial Sequence
  Description of Artificial Sequence: Synthetic polynucleotide
ccaacgctatcacacgaggtagagctgacggtggcgattcggagtgtgcgcgttgtccattttgagaatcgaattactgtccgctcccgcatgtggtgtctacacacctaaaccag

SEQ ID NO: 2449 - DNA, 94 bp, Artificial Sequence
  Description of Artificial Sequence: Synthetic oligonucleotide
ccccgactctcatgtggttgcaggccagtccttgagaggcccgataagcagtagctgtctggtcgtaacgccttgactgaaatgaaatcctgat

SEQ ID NO: 2450 - DNA, 184 bp, Artificial Sequence
  Description of Artificial Sequence: Synthetic polynucleotide
tcttgcgtcaacggatatcgtaccgtgcatccagaggcatcgcttcctcccaggaacaggccacggctctttgcctgtgctggtccgttgaagctctgagcagttgaatctggaatatgctacccgtcgtggccgcacactagttacggaatgtaatacaggagaacgtaggcgtaacgacctg

SEQ ID NO: 2451 - DNA, 150 bp, Artificial Sequence
  Description of Artificial Sequence: Synthetic polynucleotide
ttggaaaatatgcgaatagcggggtagggccggcgtccgaccccgctgactactgactcgcggctatagagtagggttgtggtgctctcactacgactgatttccctggtccaccttaaatccggcctagcgcactgtaacacaacgatt

SEQ ID NO: 2452 - DNA, 162 bp, Artificial Sequence
  Description of Artificial Sequence: Synthetic polynucleotide
gattcccggccgcaaaggtcgtgtgaatgatgcacacgtctcggctagggatgggaggtaaccgaccttccatagtgcgtgtctgagcctgatccgtgtcaccaaagacttgactctgactgcgtgattaaccccaggtctcttagcagctcatgaaacctg

SEQ ID NO: 2453 - DNA, 145 bp, Artificial Sequence
  Description of Artificial Sequence: Synthetic polynucleotide
cttatgagctgataggccagggtacaaggtccttagagtggttattcaggcggctgctcgcccaaaccaacgtgagcagcagtctagcgtggtgctatgtgaacagccagatcccttgtacgactcccgttaatactccgcgttc

SEQ ID NO: 2454 - DNA, 160 bp, Artificial Sequence
  Description of Artificial Sequence: Synthetic polynucleotide
tgtgtgacatgtggtaggagagcctcgtataacgtcagggttctttgtacccgcggacatctccgcctgggatttggatgcagtaattagacgacacaggtcaagccagcgcagccgtctaggtctcgtaccagctgactctacagacgccccaatcgca

SEQ ID NO: 2455 - DNA, 163 bp, Artificial Sequence
  Description of Artificial Sequence: Synthetic polynucleotide
caggtgggcgcatcccccgcggagcacagtgatgctttacgagctcctggcgcaagaaattttacgtactgtgcggtatgtagttcaagatgctttttgatgcctattagaaggcacgtcgatcaactcgggtctgtcctaaggacccacccagacgcagcct

SEQ ID NO: 2456 - DNA, 90 bp, Artificial Sequence
  Description of Artificial Sequence: Synthetic oligonucleotide
accacgcacggatgttatcggtcgtactaatttacttggtgtgtgcctaaggctaactcccgatgaccgcacgccagcagtgcaggtatg

SEQ ID NO: 2457 - DNA, 31 bp, Artificial Sequence
  Description of Artificial Sequence: Synthetic oligonucleotide
accctcggatacggtgttcgtgtagtatcac

SEQ ID NO: 2458 - DNA, 134 bp, Artificial Sequence
  Description of Artificial Sequence: Synthetic polynucleotide
ggtatcgctagttacctgtgcaacagggccaagccccggcccttggggcctattgtaactctcaaccagcgacttgggccttccgagtgagatatgtactgtagtgacggaatccatgtggaagtactatcacc

SEQ ID NO: 2459 - DNA, 83 bp, Artificial Sequence
  Description of Artificial Sequence: Synthetic oligonucleotide
ctattgtcgacattgccctaccagcactatgatgctatcgccgcccgcgtggcaaaatggggattcagggtatagtatgctgc

SEQ ID NO: 2460 - DNA, 102 bp, Artificial Sequence
  Description of Artificial Sequence: Synthetic polynucleotide
cgtacggagcgatcccacgccgacgggcggcatggcctcaactgccgtcacacgggggattaacgagtgtttctcgtgtgcccaagccgttgcacgctctgg

SEQ ID NO: 2461 - DNA, 163 bp, Artificial Sequence
  Description of Artificial Sequence: Synthetic polynucleotide
ttgacggcacccttaagactccacaatgggcgccgactacaccgagggcgccgggactggatgtaggttagtttgcggccgtcgggtactccagcaatcgtgcatcataggcccgactggttcgggcgtggacgggcttccatcccccccgcgtcgggaactc

SEQ ID NO: 2462 - DNA, 14 bp, Artificial Sequence
  Description of Artificial Sequence: Synthetic oligonucleotide
gccaggttacgctt

SEQ ID NO: 2463 - DNA, 49 bp, Artificial Sequence
  Description of Artificial Sequence: Synthetic oligonucleotide
cctagtatgggagtcgtacgggccggcgctttacaagtctcgcccgatc

SEQ ID NO: 2464 - DNA, 179 bp, Artificial Sequence
  Description of Artificial Sequence: Synthetic polynucleotide
ccggacactcttggccgcctggtcccggtgcgcacgcaactctcggctacctttgcatggaagtgcggggggccggcgcgccccttgctgcctttccacacggagacagaagtccagggccggcggactatagacggcacggcactgcgcttttacaacggtgcaggggcttaaatcga

SEQ ID NO: 2465 - DNA, 5 bp, Artificial Sequence
  Description of Artificial Sequence: Synthetic oligonucleotide
ttcgt

SEQ ID NO: 2466 - DNA, 8 bp, Artificial Sequence
  Description of Artificial Sequence: Synthetic oligonucleotide
actgtctg

SEQ ID NO: 2467 - DNA, 104 bp, Artificial Sequence
  Description of Artificial Sequence: Synthetic polynucleotide
agtttgccggctggtagtcgcggtcgcgcggctctcccgtagagccctcgaagccacattttgcaactacagtgttcaaggggcgatcgacgaccgcgccgagc

SEQ ID NO: 2468 - DNA, 162 bp, Artificial Sequence
  Description of Artificial Sequence: Synthetic polynucleotide
tggttacactcggctcggttcaacggccacgcgacaggacccaccgttgcgggaggccgggcccgtgtaggaaagacgtgtccccttgggccaactagctgaagctagggttgagccttccccgacgcactgcaagcccgtttgcgacgatgcttgccgctg

SEQ ID NO: 2469 - DNA, 37 bp, Artificial Sequence
  Description of Artificial Sequence: Synthetic oligonucleotide
tgggcgcccatgggactgaaacagtcgccgtcttgcc

SEQ ID NO: 2470 - DNA, 8 bp, Artificial Sequence
  Description of Artificial Sequence: Synthetic oligonucleotide
ctttagcg

SEQ ID NO: 2471 - DNA, 8 bp, Artificial Sequence
  Description of Artificial Sequence: Synthetic oligonucleotide
gagttctc

SEQ ID NO: 2472 - DNA, 37 bp, Artificial Sequence
  Description of Artificial Sequence: Synthetic oligonucleotide
gtgtcccgcgatcgggtactagtgaacccgtgcccag

SEQ ID NO: 2473 - DNA, 124 bp, Artificial Sequence
  Description of Artificial Sequence: Synthetic polynucleotide
ccgcggtgtcactgtatgacctcggccccgtgccggagggtaactccacggggtcctggcgtcctagttaggatcgcagcctactagcaacgtagccgcgggacggtcggcataccagctgatc

SEQ ID NO: 2474 - DNA, 142 bp, Artificial Sequence
  Description of Artificial Sequence: Synthetic polynucleotide
ggaagtgtcggcagtgacacctactctggcggcgcgacgcgcacgttggaatgcccaaccgtggctccgtacatcacccgctccccgagggtgaggtaggcgcaatccaccaggttccctagttcgttgcgccggggtatgc

SEQ ID NO: 2475 - DNA, 176 bp, Artificial Sequence
  Description of Artificial Sequence: Synthetic polynucleotide
ctgtttgcaacacagaccggggaagtctgaaccttgcgcggtccgtggtacccgattaccgcgcgatcccgagacgtgctcctgcccggcccactagaccttgctcggttggtgacaggacccaggcctggttacgccggcaaatagttaccggggaccgcgggtacgtggccgcg

SEQ ID NO: 2476 - DNA, 119 bp, Artificial Sequence
  Description of Artificial Sequence: Synthetic polynucleotide
gatcgcagttccggcccgggtgaccatttgcaacctacacgacccccgctgcaattggttgcggcatgggtggttcggcattgagatcacccctgggggtcaagtgacgggcgcccacc

SEQ ID NO: 2477 - DNA, 112 bp, Artificial Sequence
  Description of Artificial Sequence: Synthetic polynucleotide
aaacgctagcgtagaggggtccaccctgtggtcagcttatgttcccaatcaggtggcacgcacgccctccgatcctcctcgtgaggtgcgatgcggcgccgcgaagccgggt

SEQ ID NO: 2478 - DNA, 125 bp, Artificial Sequence
  Description of Artificial Sequence: Synthetic polynucleotide
tagaggcggctgtcgaagcaggttggcggagcccacactgagcggcggaaacgtcttgtccattcgtctggggagatgctccaagcgccgctccaagccccgcctggccgtcctctattgcagct

SEQ ID NO: 2479 - DNA, 104 bp, Artificial Sequence
  Description of Artificial Sequence: Synthetic polynucleotide
cggggtagccgcgacacccctacaggcgcaaggcgtctggggcgttgaacttatcggtatctgcccaatttggggccaaactgcggcgctcctgtcactcgcag

SEQ ID NO: 2480 - DNA, 109 bp, Artificial Sequence
  Description of Artificial Sequence: Synthetic polynucleotide
atggtgagcgctgggagctggtacccccttgaatgaagcgctgcctggggcgcctacctacgcacgaaacagcagccgcgcgtcggctcgcctgtatgacgttatgccc

SEQ ID NO: 2481 - DNA, 17 bp, Artificial Sequence
  Description of Artificial Sequence: Synthetic oligonucleotide
cagctggttcgcacttg

SEQ ID NO: 2482 - DNA, 177 bp, Artificial Sequence
  Description of Artificial Sequence: Synthetic polynucleotide
gcttagggtggattggcccaatcttcttcagtggggcgcccatctgcacatccgccggcgagtcacactggtgcgccaaaacagcgaggagttccttcggtgccgtactgttcgcggaatcgcacggggaactcacccctcggagtccgcgaccacggggggcatgtgacgccgtcc

SEQ ID NO: 2483 - DNA, 135 bp, Artificial Sequence
  Description of Artificial Sequence: Synthetic polynucleotide
cgcacccctccaggtctcgctcaggacctggagggcctgggatagagggttccgggaccatcccacatctgataaacatcagtgctgagggctgtttagcgggccgcgggacacgccctcttactcgcctgggtg

SEQ ID NO: 2484 - DNA, 53 bp, Artificial Sequence
  Description of Artificial Sequence: Synthetic oligonucleotide
gtagaggacggtgcccgccacatgactcgtcgtgatgtgctctccacacgcgg

SEQ ID NO: 2485 - DNA, 171 bp, Artificial Sequence
  Description of Artificial Sequence: Synthetic polynucleotide
actacccgccccagggtattgatgagccttaatcgtgaagcgcttagaccggggggccagccggtagccgtctggccccctcgtccgctggccgggcggacgcctcgtcgctaagtgcggtggcgacatccaccaacacggcgaacaggactagtggtgcattcttggctt

SEQ ID NO: 2486 - DNA, 156 bp, Artificial Sequence
  Description of Artificial Sequence: Synthetic polynucleotide
ttagaccccccgctgggcgctggagcgcaccgacggccaaaacgtagactgcatcgccaccccagcgttcgagttggacttagctgggtatatcggcgggctgggtccgctgtgaacccattctgacgccagcgacgctgaggatggcggtttccc

SEQ ID NO: 2487 - DNA, 96 bp, Artificial Sequence
  Description of Artificial Sequence: Synthetic oligonucleotide
agtggcggcttccccttccggttagtgacggcgcgcactgggcagccgaaaccccatgcgtgttgcaagagcaggctagtcgcgtcgtcccatagc

SEQ ID NO: 2488 - DNA, 78 bp, Artificial Sequence
  Description of Artificial Sequence: Synthetic oligonucleotide
tcaacggttcttatccaggaccaataggagggtctcgggctcactcgcgcgctcccgggggctgtgcacgtaccgagc

SEQ ID NO: 2489 - DNA, 197 bp, Artificial Sequence
  Description of Artificial Sequence: Synthetic polynucleotide
gcggacgtcaatcgccggctagcactccgcgaccgcataaatagttcccgggttatggccttgcgcgggcgcgcacgcttccgttcgggggtgcgtaacatgataacgccccgcgggtcgacagccctcggccatcccgtgacgagagggccatctgcaacggtcaggggctatgcgacgtgggtaagtcacctctc

SEQ ID NO: 2490 - DNA, 77 bp, Artificial Sequence
  Description of Artificial Sequence: Synthetic oligonucleotide
accccggggatagttgaagtcgccccaggccgtcactgcgacttgcgtcgcgagtccgaagagtctgctgagtcccg

SEQ ID NO: 2491 - DNA, 81 bp, Artificial Sequence
  Description of Artificial Sequence: Synthetic oligonucleotide
gcgcagcaagagccggaatgcgccgtcctcgttgacctctaggctgtgccctatatggtgccggtggccaacacacgtggc

SEQ ID NO: 2492 - DNA, 198 bp, Artificial Sequence
  Description of Artificial Sequence: Synthetic polynucleotide
accaatacttaattagcgcggatcgcaccaggtcaacctgccccttcgcgcccggacgagtctgccccgcttctcgctttccagcgcctctctccgcgcggaaccaagtgggacggcgtgcccgggcgaggacgggtgacgtgtggaaccgccgtagtagggcgggtgggggagtgcgatactctcatccctaggata

SEQ ID NO: 2493 - DNA, 125 bp, Artificial Sequence
  Description of Artificial Sequence: Synthetic polynucleotide
ggccacggggtccagctggcgcccgcaccaccatcggcaccccctgcgtgaggggagcgtacgaaagcgttctacatctataaaggctatggtacgcgcctgtgtaggtcgctcttggtcctcgg

SEQ ID NO: 2494 - DNA, 148 bp, Artificial Sequence
  Description of Artificial Sequence: Synthetic polynucleotide
ccaagggccccaacacgtactggagagtgtgaggcgcatcagacatgccggctagcgcctgcgtggatcaaggggtctgtcggggcccgtacggcagtgccaatctggatctctcggctccccgcgaatgcttcgcgcacttcggtcc

SEQ ID NO: 2495 - DNA, 151 bp, Artificial Sequence
  Description of Artificial Sequence: Synthetic polynucleotide
gcgtcctgctggtcaggcttcccggcagcgcggctccacaccggctggttgtgctcgaccgccacgaggatatcatggggggacaccagctgaggcataccagtagctaccgacgagtggctagagctctggtagcgccccagtcgcatct

SEQ ID NO: 2496 - DNA, 17 bp, Artificial Sequence
  Description of Artificial Sequence: Synthetic oligonucleotide
tcgtgttgctaccgacg

SEQ ID NO: 2497 - DNA, 192 bp, Artificial Sequence
  Description of Artificial Sequence: Synthetic polynucleotide
ggcggggtggccggacacgtacctaacggggtccccggcacccgacccttgtcatgatgtgcctacgccggccgtagtttgactagaccgcggacctcagctcgacttttagacgcccacgacccacggggtgcggtaacggcgagtgatcccacctgcgaaggtggttcaggcgctactgtgttgacgcac

SEQ ID NO: 2498 - DNA, 138 bp, Artificial Sequence
  Description of Artificial Sequence: Synthetic polynucleotide
tatatcagcaccgggccacagtgagctctccgcgctagactgcatccctttgcccacacggactcgccccgtgattgaggggtcaatccgcctattagacgcacaggcagtcgtgggcttggggggggagccccgggt

SEQ ID NO: 2499 - DNA, 89 bp, Artificial Sequence
  Description of Artificial Sequence: Synthetic oligonucleotide
ccagagccttagccttcgcgtcatgcaccgggcgcccgcggtcgaccaagatttacggtcatcggggcgtcattgtttgggcgaaccag

SEQ ID NO: 2500 - DNA, 134 bp, Artificial Sequence
  Description of Artificial Sequence: Synthetic polynucleotide
gagcgacactatcgcgccgccgaccgtcgcacccagcactgcccgtatcggagcgtgcttatataaggatctccactaggcgggtgttccgccaggtagcgggtcaggttaaggccttagtcgccgtccgggcg

SEQ ID NO: 2501 - DNA, 129 bp, Artificial Sequence
  Description of Artificial Sequence: Synthetic polynucleotide
tcgcacaatggtgcggctctaggcggtgactcctagtgcgcgacctgatcccccagcctgccggcgttgggtatactggcgcctacgatggtgttagaaagcgtcgcccactcgtgcacacggaccagg

SEQ ID NO: 2502 - DNA, 16 bp, Artificial Sequence
  Description of Artificial Sequence: Synthetic oligonucleotide
ctttgcgaacggcctg

SEQ ID NO: 2503 - DNA, 137 bp, Artificial Sequence
  Description of Artificial Sequence: Synthetic polynucleotide
gcgcctaccggggtccacggcaactcacgtgtgagcagcaattagggctcggtccgctagtcggccgacgcgcatcacaggaccgcgtccgttgaggcgcctcgagcatgctcagatctatctggtactctgcggtg

SEQ ID NO: 2504 - DNA, 99 bp, Artificial Sequence
  Description of Artificial Sequence: Synthetic oligonucleotide
tgctgccgtgcccgcgcgcaatttcggggttagtactttgcgggctgcagggtctcccgggaaactgtccagcaggccgtgcacagacccagcgccaaa

SEQ ID NO: 2505 - DNA, 196 bp, Artificial Sequence
  Description of Artificial Sequence: Synthetic polynucleotide
cgccaactgcttgaattctagcggcctggcctactcggaggggcacggatcgaacgccgtactccaacacgactcggcggagatcggcagataccctacaaggtgggccctcgcaaccatcttgtcggagccgtcacgggtccggtgtatcctcggctcgcggtacctcctgccgctgagaacgttctgggggggg

SEQ ID NO: 2506 - DNA, 197 bp, Artificial Sequence
  Description of Artificial Sequence: Synthetic polynucleotide
cacgacgaccactcgagtccccgacacactaggctgagcgctgggcgaaaggtgttgcctggcccccctttagaccctccgccacgggtgagatacatccgggaacgcggtaagttgggtagctctcgttccctccgtctgtggcgctccggggatgcacccgtggagcaacgtccctcaggcgagtcaggggagtg

SEQ ID NO: 2507 - DNA, 99 bp, Artificial Sequence
  Description of Artificial Sequence: Synthetic oligonucleotide
ttttcacgcaaagcccagaccggatttccatcgcgtggcgcggctggcctgtaccgtccggaggtgcaagctgcccggaacgacctcgacggttgacgg

SEQ ID NO: 2508 - DNA, 98 bp, Artificial Sequence
  Description of Artificial Sequence: Synthetic oligonucleotide
gaggcctggcggagtaattcccccccatgctagcacagctttacgggtgtgcgaggtgaggcgtagggtccctctacccggtaatccaagggccccct

SEQ ID NO: 2509 - DNA, 18 bp, Artificial Sequence
  Description of Artificial Sequence: Synthetic oligonucleotide
ctccgtctgatgaggact

SEQ ID NO: 2510 - DNA, 67 bp, Artificial Sequence
  Description of Artificial Sequence: Synthetic oligonucleotide
gggctgacgtaagggctgcaaatgcagcgagctgacgtctctgcccaggcgtgcctcttcccctgta

SEQ ID NO: 2511 - DNA, 54 bp, Artificial Sequence
  Description of Artificial Sequence: Synthetic oligonucleotide
ccctcgagatgcaaatggcgggggttggtcaatcactgcggtccgtctcgaccc

SEQ ID NO: 2512 - DNA, 187 bp, Artificial Sequence
  Description of Artificial Sequence: Synthetic polynucleotide
gcgtcccctttccgcacgctatgccgattggtggtgatccacgtgccaagacccgagcggatcggctggtcggtaatgacggctctaggcgctcgcgctctgggacaacatacggcactgagggtcgggacaggcgggacctcagcgattgaggccctcgccggatgcctaccacgttccaatccgt

SEQ ID NO: 2513 - DNA, 135 bp, Artificial Sequence
  Description of Artificial Sequence: Synthetic polynucleotide
tccaagcgatagccactgggcgttcggcacctggcgaatccgcacgggcctatagcacctgtacgcggcggtctgcccgttacatggcaggttccttggtcgtcggacaaggttacgtgtccgcgccgggccaaa

SEQ ID NO: 2514 - DNA, 140 bp, Artificial Sequence
  Description of Artificial Sequence: Synthetic polynucleotide
tgtacggtctggcttcgactaccgtcgaccgagttaggataagcgacgggctgtgccctcctgggggtatccgcagtcactagtccaaccgaatgcgagcaagccgcggatgccgtcccaccctgggcacgcggcgtcgt

SEQ ID NO: 2515 - DNA, 73 bp, Artificial Sequence
  Description of Artificial Sequence: Synthetic oligonucleotide
tccgtaccatcgactggtttgggtagcagcctctagcgccggccatcaggcagccgcatcggcatggcgttag

SEQ ID NO: 2516 - DNA, 82 bp, Artificial Sequence
  Description of Artificial Sequence: Synthetic oligonucleotide
ggacggcgttaggctctagtctgagccgcgataactcccttgcaaactccaggctcggagcgccggtttaggcccagctcgg

SEQ ID NO: 2517 - DNA, 179 bp, Artificial Sequence
  Description of Artificial Sequence: Synthetic polynucleotide
tagaccataagtggtaccagccagcgtccgcgatatgggctgcgtccggccccgccggccgttgaactctgccattcggatggcgcctgctcgagggtcgggtaccggtaccaggttcgcgggaccagcatcacttatgtgggcccgggaggtcatggccaaaacccttacgccccgga

SEQ ID NO: 2518 - DNA, 56 bp, Artificial Sequence
  Description of Artificial Sequence: Synthetic oligonucleotide
tccgcttgctccagtgcaaagggtgtagccactgatctcggcgtcgggcccacagg

SEQ ID NO: 2519 - DNA, 96 bp, Artificial Sequence
  Description of Artificial Sequence: Synthetic oligonucleotide
tcgagcgcccactctggccacccgtgggttatgccgggctgcttagggcagttgctagcgcccgacataatcatcgaccagtagcggcgcggatcg

SEQ ID NO: 2520 - DNA, 121 bp, Artificial Sequence
  Description of Artificial Sequence: Synthetic polynucleotide
ctatgcatagcacggcgctgtcggcgccacccccggtcgttccgtacttggcagtccctgtgatcaccgggagagccgaagacccaggtgtagcttaccgcgatcgagcggcgctggatga

SEQ ID NO: 2521 - DNA, 133 bp, Artificial Sequence
  Description of Artificial Sequence: Synthetic polynucleotide
cacccaccgagccgactggcagccgtagggccgttctctgacggagtggagcgggcctgctgtcagcattgcctcggtcaggtcggtggcacgtcaccccctgaacggcaacaccttcggtttatgggaagca

SEQ ID NO: 2522 - DNA, 163 bp, Artificial Sequence
  Description of Artificial Sequence: Synthetic polynucleotide
tacgcagaatatcgtcgaccggatacggtttagacgcagtctccccaggatcgctgtcgcctgcggtgccggcgtgggcacgcgtgccgagtcacactccccgtggtcggagaacatcccatagcgttcggagagacgccgacgtgtcctcctccgggtatgg

SEQ ID NO: 2523 - DNA, 90 bp, Artificial Sequence
  Description of Artificial Sequence: Synthetic oligonucleotide
ggccatggctctctctttggcctagctgatttactgcggaaatcgcccggcaaggctcgcgtaaaggcgacggccccgagcggcctgacg

SEQ ID NO: 2524 - DNA, 9 bp, Artificial Sequence
  Description of Artificial Sequence: Synthetic oligonucleotide
tgatcttcg

SEQ ID NO: 2525 - DNA, 42 bp, Artificial Sequence
  Description of Artificial Sequence: Synthetic oligonucleotide
gtgcctcgtgatggagagactcccaggtggccccattcatcg

SEQ ID NO: 2526 - DNA, 81 bp, Artificial Sequence
  Description of Artificial Sequence: Synthetic oligonucleotide
ctccgatcattgcaggccatgggtctacggctatccgggcgtacaccatagagggggggccctcgaccgacccggttgact

SEQ ID NO: 2527 - DNA, 131 bp, Artificial Sequence
  Description of Artificial Sequence: Synthetic polynucleotide
cgccacgcagctgctatgcccgagacgtctatttttcccgtgtgctcggctcgtgaagagaaacctcctgccttggtgtgcgccgggcagtcgccgagagggttggtgaccagcccgacgaaagacgcccg

SEQ ID NO: 2528 - DNA, 56 bp, Artificial Sequence
  Description of Artificial Sequence: Synthetic oligonucleotide
cagcagaggcctagccgcgatccggctccatggttggatgctatagcctcgggtcc

SEQ ID NO: 2529 - DNA, 90 bp, Artificial Sequence
  Description of Artificial Sequence: Synthetic oligonucleotide
gacgctgaattctcggcaaggcggcggctccgccaaccggtggtcaatctctcgtcgccgtggatgagagaggcctcgccgtcattagcc

SEQ ID NO: 2530 - DNA, 194 bp, Artificial Sequence
  Description of Artificial Sequence: Synthetic polynucleotide
actgcgccgcgagcgaacgttattgcgggcgagactgaaaagtcggacgagtcccgtcgatctgtgcctggacgggtctgccttagctccctgacatgttaccagcggggccccttagagaggcccggtggacacccgacctggtgcccgtgatggggggccgtcgcccccgctctccgggcaacaatcctata

SEQ ID NO: 2531 - DNA, 49 bp, Artificial Sequence
  Description of Artificial Sequence: Synthetic oligonucleotide
agcgtttggcggcagctccgatattcgggacgactccgttctaagcgcc

SEQ ID NO: 2532 - DNA, 7 bp, Artificial Sequence
  Description of Artificial Sequence: Synthetic oligonucleotide
tagcgct

SEQ ID NO: 2533 - DNA, 91 bp, Artificial Sequence
  Description of Artificial Sequence: Synthetic oligonucleotide
cataccgcgcagcgctcgtctacgtcggcgactcgtgttcagacgcgggaccgccggagatcttaggccactcgaccttgcttgggaatgg

SEQ ID NO: 2534 - DNA, 22 bp, Artificial Sequence
  Description of Artificial Sequence: Synthetic oligonucleotide
taatcggctggcgctcggctca

SEQ ID NO: 2535 - DNA, 49 bp, Artificial Sequence
  Description of Artificial Sequence: Synthetic oligonucleotide
tctacatacatcgatccgccgtggattgggcgggtgccatggctcccag

SEQ ID NO: 2536 - DNA, 69 bp, Artificial Sequence
  Description of Artificial Sequence: Synthetic oligonucleotide
caatcctgatggcaccgccacgagttccgagctggcgccgctgtgagtgagactggaatgcgccgctct

SEQ ID NO: 2537 - DNA, 176 bp, Artificial Sequence
  Description of Artificial Sequence: Synthetic polynucleotide
atatcgctttgttacattccgatccgctcagggtagtcatcccgccgtggggtgacagggatttgaaacggacgtcgcgctgatgccgtaccaagttatagccctgaggcgtgcccgctcgctacgctgcccaggcccgggactgcgaccggggcaacacccgcgcggggcccagg

SEQ ID NO: 2538 - DNA, 23 bp, Artificial Sequence
  Description of Artificial Sequence: Synthetic oligonucleotide
ccgattggtagggttacacccgc

SEQ ID NO: 2539 - DNA, 85 bp, Artificial Sequence
  Description of Artificial Sequence: Synthetic oligonucleotide
ccaggttcccgaagcagttcctgcggggctcacgcccgtagcaggcttttgagacggacccgagatccgtgctccttgaggagtc

SEQ ID NO: 2540 - DNA, 77 bp, Artificial Sequence
  Description of Artificial Sequence: Synthetic oligonucleotide
ccgcaggagccagacatgcccatgcgggttaggtcgtcgcctcgggagcgggcctcacctgactcgtgcgcaattta

SEQ ID NO: 2541 - DNA, 59 bp, Artificial Sequence
  Description of Artificial Sequence: Synthetic oligonucleotide
tagactatggttagggggccctgccaactgctcgcggcaatcacgcggcgactcggctc

SEQ ID NO: 2542 - DNA, 36 bp, Artificial Sequence
  Description of Artificial Sequence: Synthetic oligonucleotide
agccttcccgatggatgctagatccggttgcgcagc

SEQ ID NO: 2543 - DNA, 108 bp, Artificial Sequence
  Description of Artificial Sequence: Synthetic polynucleotide
cctatctcgcccgttttgggtctcaatgctgctgcatcccccggtgcggcgccaccagggacgggagagcactatgtcgagagggggtgcacggagtccgctaacacc

SEQ ID NO: 2544 - DNA, 61 bp, Artificial Sequence
  Description of Artificial Sequence: Synthetic oligonucleotide
ttccgatccggtaacacccgcgagacattgcgcgtattgtgcccgagactttgggggcccg

SEQ ID NO: 2545 - DNA, 7 bp, Artificial Sequence
  Description of Artificial Sequence: Synthetic oligonucleotide
ctcggta

SEQ ID NO: 2546 - DNA, 17 bp, Artificial Sequence
  Description of Artificial Sequence: Synthetic oligonucleotide
gctgctggtcactcatg

SEQ ID NO: 2547 - DNA, 152 bp, Artificial Sequence
  Description of Artificial Sequence: Synthetic polynucleotide
actggttgggagagtctccgccgaggagggctcgagcaccaagcacctgtatcgaaaccgtggcttggcgctgtcgacagggaccgcctggaattggcgccctcctcagttctctaaggggcccctgcgcgagatcagccacggttcctcgc

SEQ ID NO: 2548 - DNA, 198 bp, Artificial Sequence
  Description of Artificial Sequence: Synthetic polynucleotide
gaaggattcactggcgaacatggcgtgggtagtacccacccgcagcccgctcgacagctgaaacgcccatcgcttcatggcccgaatatgtcgcctgcgcgtgtggtcgtcgccctagctcgatgttttgagccctgcagtagtcttcggtagcacagcgtgcgctgacgagggcgcccgaggccggcagggccaccg

SEQ ID NO: 2549 - DNA, 179 bp, Artificial Sequence
  Description of Artificial Sequence: Synthetic polynucleotide
actgagcagggcgacgcccgcacacgcgttccagtctgtctcgccggtcccagagggactgcgccatcgcgccgcgcgcgattgccgcctatgttcggccccaggttaattttccacgacgtacgttcacccgccgccggcgaggagacacctgtgaagggatagtggtaggtaatggg

SEQ ID NO: 2550 - DNA, 83 bp, Artificial Sequence
  Description of Artificial Sequence: Synthetic oligonucleotide
tcccagaagctaagcggatccagcgcacactctgagccgtggggggcttctaggcgtctcccgtgcggttctagctccagtag

SEQ ID NO: 2551 - DNA, 96 bp, Artificial Sequence
  Description of Artificial Sequence: Synthetic oligonucleotide
cggggcgcacgctcgcaggttcggctcgcgtcccgccccgacgaaggtgcctcactgtgatcgcttgacattcgggcaaagatcagtgttcaaggc

SEQ ID NO: 2552 - DNA, 141 bp, Artificial Sequence
  Description of Artificial Sequence: Synthetic polynucleotide
tcgcttccattcgcggcccgtctcgcaaacgcgacatgctattaggtttaccagtcacaccgggaccgcgccttgcctgaccacgacatcgggggcagatggccttctgagcgaggaacgtgggcgtatccggtgggcggc

SEQ ID NO: 2553 - DNA, 189 bp, Artificial Sequence
  Description of Artificial Sequence: Synthetic polynucleotide
gtggggcttttagcgggtccgctcgggcactttgcgccggcttcgtgcagatccgaaacccggtacgttgctgggctgtcgaccttgcttatactacgtcacgtaacgtgtcagcccccaagggagcgccggccgtgccagccgcagacccaaacaacggggttccgtgacaacgcggggccggaacac

SEQ ID NO: 2554 - DNA, 76 bp, Artificial Sequence
  Description of Artificial Sequence: Synthetic oligonucleotide
gacccccagggtgaccagaccatcggtctatcgctattatagggtgctccaggcaccgccggtttcggagcggtgc

SEQ ID NO: 2555 - DNA, 137 bp, Artificial Sequence
  Description of Artificial Sequence: Synthetic polynucleotide
atttcggcccccaaacgggatcaactgccctggaggctaaagtggaggaactggttcaactcctgtcctagagagtcaccctcgtacgcgtggtccccgccagcccccggggggtgcaggcgcgcttttggcgcgtg

SEQ ID NO: 2556 - DNA, 45 bp, Artificial Sequence
  Description of Artificial Sequence: Synthetic oligonucleotide
gcggtccggatgccgtgcagtcctgacgagatcctagatcgcctt

SEQ ID NO: 2557 - DNA, 165 bp, Artificial Sequence
  Description of Artificial Sequence: Synthetic polynucleotide
gaccgtggggtgctgcgtccgtacccgcgggttggctccacaccgggccgagcaacagtttggctcctggggcctgcctcgagaaggggtcggatttctgcggactctaaatgaatacccccaaaaggctacccctcctggaccggtgcgtccaccgagacgtgt

SEQ ID NO: 2558 - DNA, 53 bp, Artificial Sequence
  Description of Artificial Sequence: Synthetic oligonucleotide
gccgtcgatacgcgagaggctgccgttccaccgctggatcgagatcgcgtcta

SEQ ID NO: 2559 - DNA, 76 bp, Artificial Sequence
  Description of Artificial Sequence: Synthetic oligonucleotide
agagcctgcatctccggcgcctcgtccgaatgcgctggataagtaagtgctgcggcgtgtgacgtccagccatgcc

SEQ ID NO: 2560 - DNA, 185 bp, Artificial Sequence
  Description of Artificial Sequence: Synthetic polynucleotide
atctcggcgcccggcactgatgacaacccacccctcaggggaggtgcccggccgagggggttcaccgtcggacgcacatgtatacacgccgctacggttttgagacgtgcgagccgggccctttggctaggctctagtatgctgtcgcggaggggacgtcacgccatggccttaacggatccacc

SEQ ID NO: 2561 - DNA, 33 bp, Artificial Sequence
  Description of Artificial Sequence: Synthetic oligonucleotide
cgtacgagtgccacatttgtgacgtcggtgccc

SEQ ID NO: 2562 - DNA, 113 bp, Artificial Sequence
  Description of Artificial Sequence: Synthetic polynucleotide
ccttgtcacggcatccggcaggatgaggcgcgaacttttctccatcccccctcaggataccccgcgggggaggatgaaacgcgcgctggcctactcgtgtgaggttgcagtcg

SEQ ID NO: 2563 - DNA, 35 bp, Artificial Sequence
  Description of Artificial Sequence: Synthetic oligonucleotide
tcgaggcaccaacggggcgacgtgcttctactgct

SEQ ID NO: 2564 - DNA, 194 bp, Artificial Sequence
  Description of Artificial Sequence: Synthetic polynucleotide
cgggttttagagcctccgcgtcccgcccccccgatacgcgtcacttcacgcactgctcgggccgttagggcacgtgcgccaggccaggggctaagaggaccccagcactggctaaggggccgcatcggtccggtgggtcgatcagcagtggccactcactgcggctgaagctgtttgtaaggactagactgtca

SEQ ID NO: 2565 - DNA, 82 bp, Artificial Sequence
  Description of Artificial Sequence: Synthetic oligonucleotide
cgttgccatggcacctaggtgggctccgcaagcctggcacacccctgaaccgggtttagtcgaagttcctgcgggtacgagc

SEQ ID NO: 2566 - DNA, 148 bp, Artificial Sequence
  Description of Artificial Sequence: Synthetic polynucleotide
gcgcttggcgttaggccctcgagcggccgcctaaggccactgtcctgttcggcggctaacagagtaaggggccccctcgacggttaccccagaaggtcagtcgccgaccaggcatccaagcgccttggtgactaagctgttgtggccg

SEQ ID NO: 2567 - DNA, 57 bp, Artificial Sequence
  Description of Artificial Sequence: Synthetic oligonucleotide
acggtgctcccccctggagggcatggttcagatgcagtgtgtcgacgcccctaactg

SEQ ID NO: 2568 - DNA, 173 bp, Artificial Sequence
  Description of Artificial Sequence: Synthetic polynucleotide
tcctggccgcataagtagttgccagcggcttccgccacgcctgtacgtgcgcggcgcttggtccaggacatgccggaatgcgcgctcgctaactagagacttgtctagacaggctcgctcggtccggcccgaggagcggtagagtcagctcccggggggccttaccacgacaa

SEQ ID NO: 2569 - DNA, 122 bp, Artificial Sequence
  Description of Artificial Sequence: Synthetic polynucleotide
gcgagaatcgaaccctgactagcccgatgtgcccgctggagtagtcctacacgtggcttctagtgcccgagcctcgcggccctatgcaaggattcggcgtgcaagcagcgcgtggtgcctcg

SEQ ID NO: 2570 - DNA, 26 bp, Artificial Sequence
  Description of Artificial Sequence: Synthetic oligonucleotide
cgggaaccagccgccttttgtgactg

SEQ ID NO: 2571 - DNA, 161 bp, Artificial Sequence
  Description of Artificial Sequence: Synthetic polynucleotide
gtgacaattcgcatcctgtggatgcagcagctttcgtgccgggaccatgtgctgggtcctcgacggcccgccgaagggaagggcgttccaagcccggaggggcctagccggtctcgagcgttacccacactgtccagagcgctcccgacttaagctcgacg

SEQ ID NO: 2572 - DNA, 56 bp, Artificial Sequence
  Description of Artificial Sequence: Synthetic oligonucleotide
ggggtggcttcgacgtagctgagtctaagcagtactcgaccggcgtccccgccact

SEQ ID NO: 2573 - DNA, 89 bp, Artificial Sequence
  Description of Artificial Sequence: Synthetic oligonucleotide
cgggacgggggcaataagaaccctgccgccagagcctggatgtgctacccgccattctgattccgtggggcgatgcgctctatcgtcct

SEQ ID NO: 2574 - DNA, 88 bp, Artificial Sequence
  Description of Artificial Sequence: Synthetic oligonucleotide
gccgcatggagatggtgcccgcgccatatgaggcgcgcagcctccccaggttttgtaaaggtcctaggctcgcggtactagtccagcc

SEQ ID NO: 2575 - DNA, 127 bp, Artificial Sequence
  Description of Artificial Sequence: Synthetic polynucleotide
tggcgtgaatagcgggcgaggtcactgcccacgcgccgatccccggcactgtctagctctatgtctttacagacgaggattcatgggcagctgactcgggtccagtacgcccgcccgggcagaccgg

SEQ ID NO: 2576 - DNA, 169 bp, Artificial Sequence
  Description of Artificial Sequence: Synthetic polynucleotide
tcgccccacactcgatacgtatcggtatttgccgtcgtcattcgcgtaccctagacaggaggggaggggtctagcgcgagggggtatggctagctgtcttgaagccgcagacggctcaaccccaggccgcccccccgctgacgatgcgcgtgtgcgatcctggcgaatc

SEQ ID NO: 2577 - DNA, 176 bp, Artificial Sequence
  Description of Artificial Sequence: Synthetic polynucleotide
cagcagtgcggcccgaccagggccctcaaccattccgtacgtctgctagatgaagttctttacttcaccctcccgcggccgggcgtaggggtccacccaggatggcagtgccgctgggcgggtgactccgcgtggaaccagaggcggctcagaccgtggggccttagatccatagt

SEQ ID NO: 2578 - DNA, 47 bp, Artificial Sequence
  Description of Artificial Sequence: Synthetic oligonucleotide
ctttcgggccctgattgaggcaccgctgcagggatagcccgtccaag

SEQ ID NO: 2579 - DNA, 26 bp, Artificial Sequence
  Description of Artificial Sequence: Synthetic oligonucleotide
actcggctgttagcggtcccactgag

SEQ ID NO: 2580 - DNA, 66 bp, Artificial Sequence
  Description of Artificial Sequence: Synthetic oligonucleotide
cccgaagtctagggcctccaggggtcactgtcctgtgctgttgagcgaagccgggcccaatgatcc

SEQ ID NO: 2581 - DNA, 102 bp, Artificial Sequence
  Description of Artificial Sequence: Synthetic polynucleotide
caggccatacgcattaccaggaagcgtcggtcggtcgcgccttggtgcagcagcccgcgctaactggcgattctgccgattccttcacgcgagcggcggagt

SEQ ID NO: 2582 - DNA, 128 bp, Artificial Sequence
  Description of Artificial Sequence: Synthetic polynucleotide
gtctgctgcctgtcctcgggccctgcagcagcgcgtgacttgacatgagactggggctagattgctatcaggggcggaccggccggaggatgttggaaccccccccgtggcagcaacactaatcctcc

SEQ ID NO: 2583 - DNA, 80 bp, Artificial Sequence
  Description of Artificial Sequence: Synthetic oligonucleotide
accgccgttaatttcgaccgcgtatggaccaacggatggccggctagcgacctcggcgcactgacagggttccgggcgtc

SEQ ID NO: 2584 - DNA, 124 bp, Artificial Sequence
  Description of Artificial Sequence: Synthetic polynucleotide
gcctgaataagaccctcctcgatgttcgcgtggtcttggactcgcccgacgctagctggggagccgggttctctacggcgcggacgggcggatgcctacgagacgcgcttggcaacctaccaca

SEQ ID NO: 2585 - DNA, 30 bp, Artificial Sequence
  Description of Artificial Sequence: Synthetic oligonucleotide
caccgtgtgaagccgtcttcctatgcgagg

SEQ ID NO: 2586 - DNA, 5 bp, Artificial Sequence
  Description of Artificial Sequence: Synthetic oligonucleotide
ctgtt

SEQ ID NO: 2587 - DNA, 55 bp, Artificial Sequence
  Description of Artificial Sequence: Synthetic oligonucleotide
gctcctggtaaattatgtctcggccacggctcggccagcggcgagaccgtgctta

SEQ ID NO: 2588 - DNA, 40 bp, Artificial Sequence
  Description of Artificial Sequence: Synthetic oligonucleotide
gctcaagacgatcgcgtgctgcgtgctaggacatcgcccg

SEQ ID NO: 2589 - DNA, 182 bp, Artificial Sequence
  Description of Artificial Sequence: Synthetic polynucleotide
gtaccattgttcaacccagtacgagaggggcccgtgtcggggggaagctccccctcggtgtaacgcccaggcactgacactgctctgcacatagggccgcgggagcccacagagagggtcttatgggtggtgtgcgccctagctgtcctttcgcccctagggcactcgcgggtcacccagca

SEQ ID NO: 2590 - DNA, 178 bp, Artificial Sequence
  Description of Artificial Sequence: Synthetic polynucleotide
gggctccaccgtgagtcggctgcctggcgttagatgcccagcgcatctgttcatccaactatgtagctaaaggcccaccgggttcgggatgcccccgccgcgcgcatgggcagtgtatgcgcaacgcagccagcgaacggttattcggtgaggccgtacggctgagcccggattcacc

SEQ ID NO: 2591 - DNA, 67 bp, Artificial Sequence
  Description of Artificial Sequence: Synthetic oligonucleotide
gccctctttcaggcatgatggtacccaacggggcgccggccttccggtgcagacaatggctcttgga

SEQ ID NO: 2592 - DNA, 23 bp, Artificial Sequence
  Description of Artificial Sequence: Synthetic oligonucleotide
caggatgtgccaggctctctgac

SEQ ID NO: 2593 - DNA, 20 bp, Artificial Sequence
  Description of Artificial Sequence: Synthetic oligonucleotide
gcaagctttgctgctaggcc

SEQ ID NO: 2594 - DNA, 57 bp, Artificial Sequence
  Description of Artificial Sequence: Synthetic oligonucleotide
catgtctccagctatccgccgtccgcggcgcaatcgaggtggcccgtattagggtga

SEQ ID NO: 2595 - DNA, 114 bp, Artificial Sequence
  Description of Artificial Sequence: Synthetic polynucleotide
acccagagctttcagctggcttaaccatgcagctcaccgagcgtatgaacgccagtgggcagccggccgggaccggcggttgcgcatcctgtcggatgcgcgtggccgtttacc

SEQ ID NO: 2596 - DNA, 51 bp, Artificial Sequence
  Description of Artificial Sequence: Synthetic oligonucleotide
acagtgccatacgccgcgtcgtgtccctcctagagggtcggcgtattcagg

SEQ ID NO: 2597 - DNA, 58 bp, Artificial Sequence
  Description of Artificial Sequence: Synthetic oligonucleotide
atcatacggcgcgtccagttggtcacgatcgctgtacttgccgcgacgaggggactcc

SEQ ID NO: 2598 - DNA, 120 bp, Artificial Sequence
  Description of Artificial Sequence: Synthetic polynucleotide
cacagcggtcagccatgcagacgtctagtatacttcggccccggcgtcagcgatgtccggaaggatgtggctgtgccggcccccccggcccaagctagcggtacttgcccggaagttagg

SEQ ID NO: 2599 - DNA, 103 bp, Artificial Sequence
  Description of Artificial Sequence: Synthetic polynucleotide
gcgcctggcggagcttacctcgacgtgtggccaccccggcgctctcagggtggtgctagtaaaacagaagcggcgtggtgccgtttccaccacacgaagcttc

SEQ ID NO: 2600 - DNA, 45 bp, Artificial Sequence
  Description of Artificial Sequence: Synthetic oligonucleotide
tggtagagacattgtcccgtggtccgctcccggacgtcaactggc

SEQ ID NO: 2601 - DNA, 115 bp, Artificial Sequence
  Description of Artificial Sequence: Synthetic polynucleotide
ctcggacccgtggtggctccgtatgtagggccggccgtggcccacctcaaaactcgaggcgcacgtgggcggactggccgcatgatttcgaaaagctcgtctcaagctcgagtcc

SEQ ID NO: 2602 - DNA, 199 bp, Artificial Sequence
  Description of Artificial Sequence: Synthetic polynucleotide
acgcgatgtctgccaggcgtacttcgaactgcaggggtgccatccgtcgcagaacctgcttggctcggccgggctgaaacaacgcgtgaactgtgagggctaccccgaggggccttcccagttgtcactaggctgctgagtcacggcccgggtaacgtgtcagctctgaccagcccccggtctcctgacgtcgaagggc

SEQ ID NO: 2603 - DNA, 122 bp, Artificial Sequence
  Description of Artificial Sequence: Synthetic polynucleotide
tggtggcgcttccgagacaccagacccccattgggtgcatggggctgccagtaggcatacgagcaggcgcctgccccgccagctcagccaccgggtttgtttccagttggtaaacaggctcg

SEQ ID NO: 2604 - DNA, 117 bp, Artificial Sequence
  Description of Artificial Sequence: Synthetic polynucleotide
tcgccaccagcataggccggatcccccgtaatgacggggtcctgccaatacgcgcataaccggttcctgcgtaacgcggtcggctaagccgtcatcttggcgtcgggtcgggaggcg

SEQ ID NO: 2605 - DNA, 11 bp, Artificial Sequence
  Description of Artificial Sequence: Synthetic oligonucleotide
atgtccttgcg

SEQ ID NO: 2606 - DNA, 192 bp, Artificial Sequence
  Description of Artificial Sequence: Synthetic polynucleotide
agcaaggggtaacctctgttgacgggtggccatggaccccggctgaatcccggccgagctaccgatacgttcataactcgtctcgcccacgcgcggctcttactcgtgcagcggtcgtgcaaccgggccccccggaagattcgcttccggatccttccgggggcgtaaggcgataattacgggggcgggacc

SEQ ID NO: 2607 - DNA, 34 bp, Artificial Sequence
  Description of Artificial Sequence: Synthetic oligonucleotide
gcgcggaatctgcttggagccagctgcctgtcca

SEQ ID NO: 2608 - DNA, 35 bp, Artificial Sequence
  Description of Artificial Sequence: Synthetic oligonucleotide
cgtggccgactccctcgcgttagcgagctaatagg

SEQ ID NO: 2609 - DNA, 132 bp, Artificial Sequence
  Description of Artificial Sequence: Synthetic polynucleotide
aaaggtctctccgtgcccccgacaggcccggggaccatcgacagcccgaccgtcgcattcgatcccaggttgtgactgataatacgcggggatctgccagtcctggcgtattggcggtttcccgacggggga

SEQ ID NO: 2610 - DNA, 142 bp, Artificial Sequence
  Description of Artificial Sequence: Synthetic polynucleotide
gagtcctgggccccctagaccggcgcgggaagtggaatcattgcccgttgcatgggcgccgcatctgactcccggcgggttgggtcatctcaattcattggtcgtctacggcgcgcaactgcgcagccgccaaagggccaac

SEQ ID NO: 2611 - DNA, 100 bp, Artificial Sequence
  Description of Artificial Sequence: Synthetic polynucleotide
ttcccgcactcccgagcgtgattctggacggactagacgccacgtagtgccgggggccgaaagtgggtgggacaagttagcccgctccctttcccggact

SEQ ID NO: 2612 - DNA, 74 bp, Artificial Sequence
  Description of Artificial Sequence: Synthetic oligonucleotide
atccccgctacaagggggccatccgacaggactcgttgatccccggatcgtccgttgaggggcctgctcgatgg

SEQ ID NO: 2613 - DNA, 60 bp, Artificial Sequence
  Description of Artificial Sequence: Synthetic oligonucleotide
cagtctcgaacaaggcacacatcgccgtaggcgcggcgttgctgttcgcgccgctttgag

SEQ ID NO: 2614 - DNA, 55 bp, Artificial Sequence
  Description of Artificial Sequence: Synthetic oligonucleotide
cgcaggtttcctcgggagctcggctcggtcttaagctagaagcgtgctcacccga

SEQ ID NO: 2615 - DNA, 108 bp, Artificial Sequence
  Description of Artificial Sequence: Synthetic polynucleotide
acgcggttatgctcacgctggcgagcactctcggtcaggaccctgccagatgggcgccgccaccacgggatcggatcgtgtaactcgggggttctacgcgagatcctc

SEQ ID NO: 2616 - DNA, 191 bp, Artificial Sequence
  Description of Artificial Sequence: Synthetic polynucleotide
gccagccctactggaaggacgcaaactagcggtcaatttggctcaggcagccgtcacggtcgcctggccagcttttcgggccccttccggcgcgaaccgcctccccctatgccgtgacgccgccagtcgggatgtgccccccgcggttagaagcgtgtcggtagccctaggggggatagtagaagtatagg

SEQ ID NO: 2617 - DNA, 106 bp, Artificial Sequence
  Description of Artificial Sequence: Synthetic polynucleotide
tggccgaggcgtactcggcgcaggccgcgcgataggcgctctcgaatcttcaccgcccccgactggatttttccccgcgagggatgagagatcaacttgcgatcgg

SEQ ID NO: 2618 - DNA, 107 bp, Artificial Sequence
  Description of Artificial Sequence: Synthetic polynucleotide
ctcctcacgacggcggcggtcggccctggttgttttcacacgaaccactgcgccccggtagggcaatttgacatgagatccgagcggcgcccgcgaggtttggacta

SEQ ID NO: 2619 - DNA, 67 bp, Artificial Sequence
  Description of Artificial Sequence: Synthetic oligonucleotide
gttagtcaatagtcgcccagacgggcagggggcggtcgttctgcacgcctctccattacgccctgag

SEQ ID NO: 2620 - DNA, 174 bp, Artificial Sequence
  Description of Artificial Sequence: Synthetic polynucleotide
gaaggtctggcgccttctgcgcgccacatcccgatatccccgggcactcgaggtaagctctctcgaggatccccttgcccgcccgtccgccaggtatgcgatctcgggcaattgtacgaggctgtacagtgcgcagtggagacgcaagaggtggcgcctgccaagctgtggagc

SEQ ID NO: 2621 - DNA, 197 bp, Artificial Sequence
  Description of Artificial Sequence: Synthetic polynucleotide
cctccggttcacggtactccgcagagagcggtgggctcgccacttcggccccgccggtctactccgcgggctgacttgcactagggggccaggcgcccctggacgtgagcatatgtggaggagaggcctactgactcgatcaccggcccgtggggtctgcacgacttgcttactgacggccaaggcataagaacatc

SEQ ID NO: 2622 - DNA, 63 bp, Artificial Sequence
  Description of Artificial Sequence: Synthetic oligonucleotide
aggtggtccccgcgcgcgattcatgccgatgttaagacacgcaactgggacccgtggccgctt

SEQ ID NO: 2623 - DNA, 173 bp, Artificial Sequence
  Description of Artificial Sequence: Synthetic polynucleotide
agcgcgggcgctgcagtcacggaccgggtgcattggtagttgagacagaacgagtcccctcgggagcaccacgccgggctggggcggcttcctatggcgcttgcatccaagtcgctcaagtcccgtcggcgcaactccagcgtccaagccctgtaagtacccgtgacgtcttg

SEQ ID NO: 2624 - DNA, 16 bp, Artificial Sequence
  Description of Artificial Sequence: Synthetic oligonucleotide
tgtcgcctcgatcgag

SEQ ID NO: 2625 - DNA, 18 bp, Artificial Sequence
  Description of Artificial Sequence: Synthetic oligonucleotide
agctgacccactttgtgg

SEQ ID NO: 2626 - DNA, 61 bp, Artificial Sequence
  Description of Artificial Sequence: Synthetic oligonucleotide
aggtgcatctcagttcgggggactcatcccgacgctgcgttggattcacggtcagccacgc

SEQ ID NO: 2627 - DNA, 17 bp, Artificial Sequence
  Description of Artificial Sequence: Synthetic oligonucleotide
tgctgcttgtacgcacg

SEQ ID NO: 2628 - DNA, 178 bp, Artificial Sequence
  Description of Artificial Sequence: Synthetic polynucleotide
tcggagacggggtgccctatgacgccttgtggcgctagtgcagcgacgtgagatcctaggccggccgcctggcctgatgcattgtcctaagcaggtcagacccacctgtgccgggtaccggtgcacaccacccacgctaatctagctgctgggccgatgggcacctgcccgatagtag

SEQ ID NO: 2629 - DNA, 193 bp, Artificial Sequence
  Description of Artificial Sequence: Synthetic polynucleotide
acgacccggtgctctgaaccgccgtgtggatggactgtgcatccctcaacatatgccggcgctgctaggtacccgggcgccctggtccaggtgggagttgatctatgtcgtggccttcaccgtcaagagtccggtcgcccacagaaacgagatccgactcgggccgatcgcactggttggccggcacgcaggc

SEQ ID NO: 2630 - DNA, 55 bp, Artificial Sequence
  Description of Artificial Sequence: Synthetic oligonucleotide
ttcgcagggaggcccctcatgcttacatatgttggcacgggacgccgcgtccagt

SEQ ID NO: 2631 - DNA, 192 bp, Artificial Sequence
  Description of Artificial Sequence: Synthetic polynucleotide
acatgctgaacagggcactatggatactggggaccaggccccctgtgcagccgtgcagtagagtccccaccggcccaatttggtccaatgccctaggtagctgcggtgcttccaactcgcagtcgggccaggctgctccagattggtacgcgtgcccggtcgtagcgtgctgcccgctgcagagggcgcagc

SEQ ID NO: 2632 - DNA, 88 bp, Artificial Sequence
  Description of Artificial Sequence: Synthetic oligonucleotide
gactacggctcctgccgggcccgcgggaactttacggagacgccggggctggcgcgactgcagactctcccggtctaaatacttttga

SEQ ID NO: 2633 - DNA, 150 bp, Artificial Sequence
  Description of Artificial Sequence: Synthetic polynucleotide
gaccgggcagggcataagcactgggacctttccccaagccgccgacatcctcagcgttctggtcgcccgcgccatcggcgtcattgtggcggcatccctcgagaagcgatacagcggttgtgagttaactaggcgcgcgggcctaggttc

SEQ ID NO: 2634 - DNA, 105 bp, Artificial Sequence
  Description of Artificial Sequence: Synthetic polynucleotide
gcgccaccacctctggtggatcctgcggaaggtaggcataatcttgtccctcccccagatagcgcgcctgctggccgatgcgggcaacgaccggagggcgtttag

SEQ ID NO: 2635 - DNA, 47 bp, Artificial Sequence
  Description of Artificial Sequence: Synthetic oligonucleotide
cgatggtcaggcagatccctaccccgcgagtcattggctggtggcca

SEQ ID NO: 2636 - DNA, 103 bp, Artificial Sequence
  Description of Artificial Sequence: Synthetic polynucleotide
cggtacgccttcgcgcgcgtagtactgccggcaaacgcacgtcctgcctgcgacaatgaggtggcgctcgtcacccgagagaagtatcgggatcctcgctggt

SEQ ID NO: 2637 - DNA, 47 bp, Artificial Sequence
  Description of Artificial Sequence: Synthetic oligonucleotide
tcgccccgcagtcagcgacttggcgacagggcattgctgtgcgtaca

SEQ ID NO: 2638 - DNA, 111 bp, Artificial Sequence
  Description of Artificial Sequence: Synthetic polynucleotide
ttcatggacctcccagcagacctgcgcgcttcgccagaaggcggggcgcactgaatcgtgcgctcaggtgcggaacgttaactccctcttaggcgccagtgtgggggccac

SEQ ID NO: 2639 - DNA, 61 bp, Artificial Sequence
  Description of Artificial Sequence: Synthetic oligonucleotide
agctgtttctggcaggccaaggagtccaggttaagtctgcccccgaggtgtgccctccgac

SEQ ID NO: 2640 - DNA, 135 bp, Artificial Sequence
  Description of Artificial Sequence: Synthetic polynucleotide
ccccgcgtcacgggaccaccagctcccggttcagggccgggtgcccgagccgactcttcgaccaccaggtccatgactggctagcgtaacggtcttgctggatgtctttatgaagggcgagagtcgtctgagacg

SEQ ID NO: 2641 - DNA, 91 bp, Artificial Sequence
  Description of Artificial Sequence: Synthetic oligonucleotide
gtgactgttcaagtagcctgcaatgcctcggagtacattgtagcgcactggttcctgcgggagcccgcgggtcgtcaagccgaccccccgg

SEQ ID NO: 2642 - DNA, 90 bp, Artificial Sequence
  Description of Artificial Sequence: Synthetic oligonucleotide
ccgggggaagtcgcgaccgcgtgtcgtcctctcgcgggactttccacggctctccgtgacctacggaaggcaatagagtgcagctcgcta

SEQ ID NO: 2643 - DNA, 107 bp, Artificial Sequence
  Description of Artificial Sequence: Synthetic polynucleotide
cgtcggccactaggtagcaccgaggtcccagtccggataccagccgctaaaagcccagatgcacggggtagggccgtggggtctttctcgggcatcgctcgtctctt

SEQ ID NO: 2644 - DNA, 33 bp, Artificial Sequence
  Description of Artificial Sequence: Synthetic oligonucleotide
ctcatgcgcggtgggtacccgttatgcctgaac

SEQ ID NO: 2645 - DNA, 139 bp, Artificial Sequence
  Description of Artificial Sequence: Synthetic polynucleotide
gacgggcgctgcccagaacccgtcctactatcgaggtctcaccgcgggtgtccgatctacctacggatccgcagggccgttgacatgccatgcccaccgggagtgcgggtgagacgcgaactgcgtctggtacctaggt

SEQ ID NO: 2646 - DNA, 86 bp, Artificial Sequence
  Description of Artificial Sequence: Synthetic oligonucleotide
ctggcgctaaatgcaggcagggtgaggtctcagacgtggcgtccaacatcttgtcacggttccgagctcccgtcgacccgacgcgt

SEQ ID NO: 2647 - DNA, 6 bp, Artificial Sequence
  Description of Artificial Sequence: Synthetic oligonucleotide
tatgct

SEQ ID NO: 2648 - DNA, 161 bp, Artificial Sequence
  Description of Artificial Sequence: Synthetic polynucleotide
cgacatttccctttaggcggtaagtcggccacgccggctgccgttaagcctgtgagttcgggggatcccacgagaccgaaccacgggcgggttggcgtggacctgctattgagtgacacaggaaccccctacctcggaagcctgctgcccaggggtcccgc

SEQ ID NO: 2649 - DNA, 86 bp, Artificial Sequence
  Description of Artificial Sequence: Synthetic oligonucleotide
gggtgtaggatccgttccggctgcgcatccaggaccctcttgttccctcgtgccacgcgaatgagaggacctcacgacgctagagg

SEQ ID NO: 2650 - DNA, 170 bp, Artificial Sequence
  Description of Artificial Sequence: Synthetic polynucleotide
aaccggcggcgacacggccctggtgtcacgatggcacgcgtccggccatattctctacgctcggccgtccgggcaggtcaagttctgagggctggtgtgagcgctcctcacggccacatggaccatataggccgagtcctagggctaaaagcttccgccgagctggcgct

SEQ ID NO: 2651 - DNA, 109 bp, Artificial Sequence
  Description of Artificial Sequence: Synthetic polynucleotide
agtgttgtgatccgtggccgcctgggcctcgggagtgccgtaagcccgagtcgcccaatttcgtccggccgggcacctctagtgacaatactaccgacaggcgaagcgc

SEQ ID NO: 2652 - DNA, 45 bp, Artificial Sequence
  Description of Artificial Sequence: Synthetic oligonucleotide
tcacacaccatatgtaggtgcccgcgattcgcttcgggggccggt

SEQ ID NO: 2653 - DNA, 81 bp, Artificial Sequence
  Description of Artificial Sequence: Synthetic oligonucleotide
ggggactggcagcgatgcgattgccggctatctggacatccatggcccatcccgctggcagcgaatccgggcagtcttcca

SEQ ID NO: 2654 - DNA, 121 bp, Artificial Sequence
  Description of Artificial Sequence: Synthetic polynucleotide
ggaccgcgccgctggttgccaccctaggggcgcaggagtcgggtcacatctcgggccgcggccggagcaccatctcgatcgtgcatagtgatgttctcagatgtgatgcgcccaaacctca

SEQ ID NO: 2655 - DNA, 28 bp, Artificial Sequence
  Description of Artificial Sequence: Synthetic oligonucleotide
cttataccgccgaagtgtccggcggtcg

SEQ ID NO: 2656 - DNA, 91 bp, Artificial Sequence
  Description of Artificial Sequence: Synthetic oligonucleotide
gcagcatatcgatctgggctcgccttcgctaccctcgggggcctttgggtcgcggatgcccaaagccaacaatggcctggagccttgagcg

SEQ ID NO: 2657 - DNA, 125 bp, Artificial Sequence
  Description of Artificial Sequence: Synthetic polynucleotide
gctccagggtcgccgggtctgggggggttacggatcgggccaacgcataattgggctacggacctgcttgctcgaaaaaggcccacgcgtcatatagtccccgctttccggcctactcaggcccg

SEQ ID NO: 2658 - DNA, 84 bp, Artificial Sequence
  Description of Artificial Sequence: Synthetic oligonucleotide
gcgccgtacaagacgagatcgccggcgatgtcgatccttccgcatcgggcggtgcttggcgcctgccacatacagtcggatcgt

SEQ ID NO: 2659 - DNA, 191 bp, Artificial Sequence
  Description of Artificial Sequence: Synthetic polynucleotide
cgctacgcctccgaggaaaacggcggaccgtttagcccgtcgcgcggggaggggcaccggaggggttccccctttataggatcatgcacgtgccatatagctgtatccgagaatgtccggggcccagcgcctcgacgatggtcctaggcggtttcgccggacgacgtaccacccgagttctcggcatccgc

SEQ ID NO: 2660 - DNA, 75 bp, Artificial Sequence
  Description of Artificial Sequence: Synthetic oligonucleotide
gggtgtccagatctagacggcttcgttggcgcaactcgtctaccccaccagtctgcgggacgggagccatcacgg

SEQ ID NO: 2661 - DNA, 172 bp, Artificial Sequence
  Description of Artificial Sequence: Synthetic polynucleotide
acgcccagatgtggttgataatcgccctttatatctgtgtgcaggcccgcccgtgtttccgaccgcccggtgccggtaggcctcggggtcagcacgcccgcagcgttcctctgcaacaataagtcgcgagtattccagcccggcatagagcgcaggggcagcggacggggca

SEQ ID NO: 2662 - DNA, 130 bp, Artificial Sequence
  Description of Artificial Sequence: Synthetic polynucleotide
acgatcgatagctgagtcgtggtacccccgggtgagcgccccggcttccaagcctagccttcgagtcctccctcggtgggatccggctcaggggcgaagtcagcgggcgtacgtaaccactatatccggg

SEQ ID NO: 2663 - DNA, 16 bp, Artificial Sequence
  Description of Artificial Sequence: Synthetic oligonucleotide
gccgaaccctgttggt

SEQ ID NO: 2664 - DNA, 52 bp, Artificial Sequence
  Description of Artificial Sequence: Synthetic oligonucleotide
atcgggcaaggtgtccctcctcgataaggagtcgaccctgccagtccggtgt

SEQ ID NO: 2665 - DNA, 182 bp, Artificial Sequence
  Description of Artificial Sequence: Synthetic polynucleotide
gggcccgcacaccacgtgggtttagaacctggggccggcgcctaccacggcgtcatcgcgtgaagacttaccccctcgaggacataagttgggacgccgcccggcccttagttggcgggttgaggggcgtgtgacctccagtgtgccacatcaatcatgccgcccttggatgcgggacctac

SEQ ID NO: 2666 - DNA, 38 bp, Artificial Sequence
  Description of Artificial Sequence: Synthetic oligonucleotide
tcccgcagcatagcgaggactgcgctactcggtgctgt

SEQ ID NO: 2667 - DNA, 41 bp, Artificial Sequence
  Description of Artificial Sequence: Synthetic oligonucleotide
gttcaccatcgcccccagtaagccgtggttcgcgggaagtg

SEQ ID NO: 2668 - DNA, 13 bp, Artificial Sequence
  Description of Artificial Sequence: Synthetic oligonucleotide
taggcatggcctc

SEQ ID NO: 2669 - DNA, 31 bp, Artificial Sequence
  Description of Artificial Sequence: Synthetic oligonucleotide
gacccgtggaccagtgtttcagatcgccggc

SEQ ID NO: 2670 - DNA, 22 bp, Artificial Sequence
  Description of Artificial Sequence: Synthetic oligonucleotide
gaatcggttgccgccccattgg

SEQ ID NO: 2671 - DNA, 99 bp, Artificial Sequence
  Description of Artificial Sequence: Synthetic oligonucleotide
ggcagcgccccggagctaaagctcatttgagcccccgaggggtatcgcgctgagtggggcggtcctactggcgccagcgtagtctttcgacatcaaccc

SEQ ID NO: 2672 - DNA, 117 bp, Artificial Sequence
  Description of Artificial Sequence: Synthetic polynucleotide
acaacgtcaacggtatcggggggacgacctcctggtcacgcccgccggacctgctcatggtacgtaggtcgcgtgacgcagctagccctgcggtggttgacctcttggccaacggca

SEQ ID NO: 2673 - DNA, 75 bp, Artificial Sequence
  Description of Artificial Sequence: Synthetic oligonucleotide
gtggtgggcacctggcaccacgtgttaaaccggggtagccctaccggcccacagtcggtgatcgtcgccagtact

SEQ ID NO: 2674 - DNA, 93 bp, Artificial Sequence
  Description of Artificial Sequence: Synthetic oligonucleotide
ctgtcagtacggtgcagtcgctcgatgctacggccatctgcccgatgtcgcgtacctcgacacccgaagcgactgcaaagcggcgtgggtgcg

SEQ ID NO: 2675 - DNA, 132 bp, Artificial Sequence
  Description of Artificial Sequence: Synthetic polynucleotide
ggtccttcgtgcggtgccctactaaccacgtcctcgcgggggttcggcacgcctcggcggcgccataggacgaaatcacctcgaacttcgaggaacagaagcttggaacgagcggcccgcgttgtcgttgct

SEQ ID NO: 2676 - DNA, 149 bp, Artificial Sequence
  Description of Artificial Sequence: Synthetic polynucleotide
aatcgttcagcagtcggtggacacccatccgacatcccaggcgccacccgcattcccgcggagcgtgatgggcggaccacggtgggcatacgcttgggcggtggctccacctttcctggacgctgagacttgcaagctcacttggggga

SEQ ID NO: 2677 - DNA, 92 bp, Artificial Sequence
  Description of Artificial Sequence: Synthetic oligonucleotide
aggtctacggggcggcgatcgctaccggttggctccccaagactgcttggtgctacgcccgccaaacgagttcaccgtgtactcagaggtcg

SEQ ID NO: 2678 - DNA, 165 bp, Artificial Sequence
  Description of Artificial Sequence: Synthetic polynucleotide
tcgcgcggagaaggtttccaacgcgcggtccacgtggttcccagactaatctggtcaggcgcggtattcgctcccggcgtaaggcggccagactcagtcgtacctgcaccgccccgcgctgccccggcgaggtggtcgcgacggtttaaataaggttggtcacac

SEQ ID NO: 2679 - DNA, 167 bp, Artificial Sequence
  Description of Artificial Sequence: Synthetic polynucleotide
agggactacccggacctcgaccccgcgcgcgtcagtcagatcgtcccgggggtgctttcgtcgggtcgccaagtcagctcccactattgcgaccaccatccggaggaggaagctacgtgcatgcagctgtgcaggggagaccgtcatcgtcgtaggccgtttcaggc

SEQ ID NO: 2680 - DNA, 68 bp, Artificial Sequence
  Description of Artificial Sequence: Synthetic oligonucleotide
tccggtccgccaggcttggctttacggcgtggactccgtggcccgactacacctgccagatgggagaa

SEQ ID NO: 2681 - DNA, 31 bp, Artificial Sequence
  Description of Artificial Sequence: Synthetic oligonucleotide
tcgccacgcattgtctagcgacggagcggct

SEQ ID NO: 2682 - DNA, 142 bp, Artificial Sequence
  Description of Artificial Sequence: Synthetic polynucleotide
tccggggtccgcgatagccagtgtcggcctgagtaccccgcctgcgtctactccgtcactaactcgcagacgctcgccactcgcaaggggtaccccgcgccggcgggggggtcggtcatgatcaattggagtgtgaaatcga

SEQ ID NO: 2683 - DNA, 184 bp, Artificial Sequence
  Description of Artificial Sequence: Synthetic polynucleotide
gcaccgatggccccatcggagggcggcgtttcagtacaaaagagggtgcatgttgcagcagctagcgtcgcgtttagccgccccacgtcgctcgtactactagccgcgtaggtaaacgcacgggccgcagcgtgccgaaggcctctctggtacccgctgtattataggccgcccggcgttgcgc

SEQ ID NO: 2684 - DNA, 169 bp, Artificial Sequence
  Description of Artificial Sequence: Synthetic polynucleotide
tgggagaacggggcacggtagaccgctgctgttccaaaccatgcctgagcggcttgccggcgtgactaccctcacttgaccgagctggccctgacccggaactaaggcggaccgagtctctctagcacggcacggggactgttcgtttctgctcacgcgtcgcgaggtc

SEQ ID NO: 2685 - DNA, 154 bp, Artificial Sequence
  Description of Artificial Sequence: Synthetic polynucleotide
cccgaacgatcacagaacgcacgcttcctgggctagctggcgtaatgaggaacgcggcgggcccggccggcaaaggttgacgtcacgtcgccgcgggacgctgttcaccctggtgacccccattagcggatttcctttcggctggcggtcgcta

SEQ ID NO: 2686 - DNA, 66 bp, Artificial Sequence
  Description of Artificial Sequence: Synthetic oligonucleotide
ggatagtgctgcttagccgcctctgtcacgtgaccattccctgcgcagagcgcggtacagggcagc

SEQ ID NO: 2687 - DNA, 15 bp, Artificial Sequence
  Description of Artificial Sequence: Synthetic oligonucleotide
agtggtcgcatttcc

SEQ ID NO: 2688 - DNA, 167 bp, Artificial Sequence
  Description of Artificial Sequence: Synthetic polynucleotide
cgtagcggccccgcgatgcggtgctgtggtcgcgagacgtcaaacgctttctgaccctggattgattgttcccccaggcacatcgccggcgtccaatgactggcttagcccgcgcgcccgcccgaaaaggacccccggtgggagcaggtgcaccaaaatggttgggt

SEQ ID NO: 2689 - DNA, 39 bp, Artificial Sequence
  Description of Artificial Sequence: Synthetic oligonucleotide
caaacctatggcttggggacgatcgggcggtctttcccc

SEQ ID NO: 2690 - DNA, 41 bp, Artificial Sequence
  Description of Artificial Sequence: Synthetic oligonucleotide
gtcatgctagataccctgagacgccggcctgctgcgctagg

SEQ ID NO: 2691 - DNA, 115 bp, Artificial Sequence
  Description of Artificial Sequence: Synthetic polynucleotide
cccagcgcgtgctcctgtcgcctgatctaaattaacagcccacgttgcacgcggtgtagtgcacactgtggcgggcggcacggggggtccttgctcgggcaaaatgagcgccacc

SEQ ID NO: 2692 - DNA, 20 bp, Artificial Sequence
  Description of Artificial Sequence: Synthetic oligonucleotide
tggggagctcctttagccac

SEQ ID NO: 2693 - DNA, 70 bp, Artificial Sequence
  Description of Artificial Sequence: Synthetic oligonucleotide
gacccgttcctggttccaaactgcggccgggtcgtctgcccaggatcgtacacctacagatgtcggggag

SEQ ID NO: 2694 - DNA, 196 bp, Artificial Sequence
  Description of Artificial Sequence: Synthetic polynucleotide
agcgctgtcctccatgggaggcccgagcggcgtggcactgcgaagttgtcgcggctctagagcccgggtacgtcgggcaagacttgcctatgttgcgctgggaccgcctgcagcagccaaggcgaatcagatatcacgctgtactggtccgttcgcacggccttagccgtggtcgaccgaaccacgtatccccacg

SEQ ID NO: 2695 - DNA, 82 bp, Artificial Sequence
  Description of Artificial Sequence: Synthetic oligonucleotide
actgatcggattgtgcggaatatgctacgcacggagcgtgcccggaagtccccgaggcttgccctccccctgtagtcggcag

SEQ ID NO: 2696 - DNA, 165 bp, Artificial Sequence
  Description of Artificial Sequence: Synthetic polynucleotide
tcaatgattcgtcccttcagtctaccctcttcctggagccaaagcgtacagtagtaggggcgcccgatcggcagggcggagcgcgcacccgaggtgcctaggcccgtgtggacgctcggctcgtatgcatcgctcgctgccacgatgtgaggcacgtcgcaaggc

SEQ ID NO: 2697 - DNA, 86 bp, Artificial Sequence
  Description of Artificial Sequence: Synthetic oligonucleotide
ctcggcccttctctagatgcagcccttgggtcggcactcaaggacggtactttagtcgccgaggtgcatccgcggcaaggacgcga

SEQ ID NO: 2698 - DNA, 62 bp, Artificial Sequence
  Description of Artificial Sequence: Synthetic oligonucleotide
ctaggggtgctggtgtggtacccccgctctaccaggacccagacaagtctcggggctcacgt

SEQ ID NO: 2699 - DNA, 148 bp, Artificial Sequence
  Description of Artificial Sequence: Synthetic polynucleotide
ccgaacgtagagcatgtgacggactagtaatgtcgtggccccgggccggccttcgcaagccccgtcggcataccacgctcgtcccccgagggtgggcgatcggtctccctgacctccgtggtagtgggatgtaaaccagcgcgattcg

SEQ ID NO: 2700 - DNA, 166 bp, Artificial Sequence
  Description of Artificial Sequence: Synthetic polynucleotide
acgggtgggttcttggggttgggtctagacccgggatgcttcggccgccggcccccggggcaaagccccgggagcatactgtggcgcgacgcaatcacaagatactgacagcgcctcgtgccgcatcatagttgtcctccctgcagtgcaaatctgtccggacacc

SEQ ID NO: 2701 - DNA, 58 bp, Artificial Sequence
  Description of Artificial Sequence: Synthetic oligonucleotide
ccgtgttcgacccagttgcgtcgcgatctcccatgacccatgctaggggagagcgatg

SEQ ID NO: 2702 - DNA, 155 bp, Artificial Sequence
  Description of Artificial Sequence: Synthetic polynucleotide
gcgccccccaatatagtgggccgtagcctctgctgctcacctagtggcccccggaggggcatcaaggagaggacgtggcggttcgctaagtgtaagccgagcacatgtccggactgtcagctacgtgagcaccagtgcgccctcgctgtcgctcg

SEQ ID NO: 2703 - DNA, 186 bp, Artificial Sequence
  Description of Artificial Sequence: Synthetic polynucleotide
ctcgggcttggtcggaacgcaattcgggggcacatccccaggagtgcaggaatgtgtgcccttccgccatcagtatacgcccaagctcgggtccccggagacggtgtccgccgactccctgcctgccgacgatcgagcgagtgccccgtgtaggcgcttggccgtacgccagagtgagtatactag

SEQ ID NO: 2704 - DNA, 92 bp, Artificial Sequence
  Description of Artificial Sequence: Synthetic oligonucleotide
gggcgatcgcaagcacctcagctgggctcctaatggcacgatctccgcgtggaccttagcccgcaggttgttgtccagcgtaggactcgcga

SEQ ID NO: 2705 - DNA, 152 bp, Artificial Sequence
  Description of Artificial Sequence: Synthetic polynucleotide
acaactcaaggcccctggttaactgtaactcgctccggtgctccggcctgctacggggctgcagcttgggcctgcgcacgggaaccgcgccgacccggctcgatctgaggaaacgtgaggactgccatccgtttgcgtggtgccggaatgac

SEQ ID NO: 2706 - DNA, 178 bp, Artificial Sequence
  Description of Artificial Sequence: Synthetic polynucleotide
tcgcggtgcgatcccgggtgcggtagcggtgctggtgccggggaaacacttaacttgcggtgaccagccgcattcctcagccgagaagtcacccccttccagcgctactatggagagtcttcggctccgtacaggcagcgaaggctggactctgcacgcagagtttgcgcccgcagcc

SEQ ID NO: 2707 - DNA, 161 bp, Artificial Sequence
  Description of Artificial Sequence: Synthetic polynucleotide
gtttaagcagcgtacctaaaaagcccctcgtggcagcccccgagtatacggagcggcttcacccaacggctaggtgcccatgtgtgtcgtcactacatcagatggggccgtcgctcgtacccgggcagtgagcctcccaggtgctgccgggggcgggcgtc

SEQ ID NO: 2708 - DNA, 159 bp, Artificial Sequence
  Description of Artificial Sequence: Synthetic polynucleotide
tttgggaacgcttcgggcgacggaacaacttggcgggaaacccgcgccggccgtgcctgatcccctcagaaagaccggctggattcaagggagcgctgtctgatcggggcttgtaaggcgtaccccccgttgcctcgcagtccgtcgttcccgctagac

SEQ ID NO: 2709 - DNA, 27 bp, Artificial Sequence
  Description of Artificial Sequence: Synthetic oligonucleotide
aggcctcgccatggctgttatgaccgt

SEQ ID NO: 2710 - DNA, 40 bp, Homo sapiens
ggccgcggcggcggaggcagcagcggcggcggcagtggcg

SEQ ID NO: 2711 - DNA, 40 bp, Homo sapiens
cgccactgccgccgccgctgctgcctccgccgccgcggcc

SEQ ID NO: 2712 - DNA, 40 bp, Homo sapiens
gccgcggcggcggaggcagcagcggcggcggcagtggcgg

SEQ ID NO: 2713 - DNA, 40 bp, Homo sapiens
ccgccactgccgccgccgctgctgcctccgccgccgcggc

SEQ ID NO: 2714 - DNA, 40 bp, Homo sapiens
ccgcggcggcggaggcagcagcggcggcggcagtggcggc

SEQ ID NO: 2715 - DNA, 40 bp, Homo sapiens
gccgccactgccgccgccgctgctgcctccgccgccgcgg

SEQ ID NO: 2716 - DNA, 40 bp, Homo sapiens
cgcggcggcggaggcagcagcggcggcggcagtggcggcg

SEQ ID NO: 2717 - DNA, 40 bp, Homo sapiens
cgccgccactgccgccgccgctgctgcctccgccgccgcg

SEQ ID NO: 2718 - DNA, 40 bp, Homo sapiens
gcggcggcggaggcagcagcggcggcggcagtggcggcgg

SEQ ID NO: 2719 - DNA, 40 bp, Homo sapiens
ccgccgccactgccgccgccgctgctgcctccgccgccgc

SEQ ID NO: 2720 - DNA, 40 bp, Homo sapiens
cggcggcggaggcagcagcggcggcggcagtggcggcggc

SEQ ID NO: 2721 - DNA, 40 bp, Homo sapiens
gccgccgccactgccgccgccgctgctgcctccgccgccg

SEQ ID NO: 2722 - DNA, 40 bp, Homo sapiens
ggcggcggaggcagcagcggcggcggcagtggcggcggcg

SEQ ID NO: 2723 - DNA, 40 bp, Homo sapiens
cgccgccgccactgccgccgccgctgctgcctccgccgcc

SEQ ID NO: 2724 - DNA, 40 bp, Homo sapiens
gcggcggaggcagcagcggcggcggcagtggcggcggcga

SEQ ID NO: 2725 - DNA, 40 bp, Homo sapiens
tcgccgccgccactgccgccgccgctgctgcctccgccgc

SEQ ID NO: 2726 - DNA, 40 bp, Homo sapiens
cggcggaggcagcagcggcggcggcagtggcggcggcgaa

SEQ ID NO: 2727 - DNA, 40 bp, Homo sapiens
ttcgccgccgccactgccgccgccgctgctgcctccgccg

SEQ ID NO: 2728 - DNA, 40 bp, Homo sapiens
ggcggaggcagcagcggcggcggcagtggcggcggcgaag

SEQ ID NO: 2729 - DNA, 40 bp, Homo sapiens
cttcgccgccgccactgccgccgccgctgctgcctccgcc

SEQ ID NO: 2730 - DNA, 40 bp, Homo sapiens
gcggaggcagcagcggcggcggcagtggcggcggcgaagg

SEQ ID NO: 2731 - DNA, 40 bp, Homo sapiens
ccttcgccgccgccactgccgccgccgctgctgcctccgc

SEQ ID NO: 2732 - DNA, 40 bp, Homo sapiens
cggaggcagcagcggcggcggcagtggcggcggcgaaggt

SEQ ID NO: 2733 - DNA, 40 bp, Homo sapiens
accttcgccgccgccactgccgccgccgctgctgcctccg

SEQ ID NO: 2734 - DNA, 40 bp, Homo sapiens
ggaggcagcagcggcggcggcagtggcggcggcgaaggtg

SEQ ID NO: 2735 - DNA, 40 bp, Homo sapiens
caccttcgccgccgccactgccgccgccgctgctgcctcc

SEQ ID NO: 2736 - DNA, 40 bp, Homo sapiens
gaggcagcagcggcggcggcagtggcggcggcgaaggtgg

SEQ ID NO: 2737 - DNA, 40 bp, Homo sapiens
ccaccttcgccgccgccactgccgccgccgctgctgcctc

SEQ ID NO: 2738 - DNA, 40 bp, Homo sapiens
aggcagcagcggcggcggcagtggcggcggcgaaggtggc

SEQ ID NO: 2739 - DNA, 40 bp, Homo sapiens
gccaccttcgccgccgccactgccgccgccgctgctgcct

SEQ ID NO: 2740 - DNA, 40 bp, Homo sapiens
ggcagcagcggcggcggcagtggcggcggcgaaggtggcg

SEQ ID NO: 2741 - DNA, 40 bp, Homo sapiens
cgccaccttcgccgccgccactgccgccgccgctgctgcc

SEQ ID NO: 2742 - DNA, 40 bp, Homo sapiens
gcagcagcggcggcggcagtggcggcggcgaaggtggcgg

SEQ ID NO: 2743 - DNA, 40 bp, Homo sapiens
ccgccaccttcgccgccgccactgccgccgccgctgctgc

SEQ ID NO: 2744 - DNA, 40 bp, Homo sapiens
cagcagcggcggcggcagtggcggcggcgaaggtggcggc

SEQ ID NO: 2745 - DNA, 40 bp, Homo sapiens
gccgccaccttcgccgccgccactgccgccgccgctgctg

SEQ ID NO: 2746 - DNA, 40 bp, Homo sapiens
agcagcggcggcggcagtggcggcggcgaaggtggcggcg

SEQ ID NO: 2747 - DNA, 40 bp, Homo sapiens
cgccgccaccttcgccgccgccactgccgccgccgctgct

SEQ ID NO: 2748 - DNA, 40 bp, Homo sapiens
gcagcggcggcggcagtggcggcggcgaaggtggcggcgg

SEQ ID NO: 2749 - DNA, 40 bp, Homo sapiens
ccgccgccaccttcgccgccgccactgccgccgccgctgc

SEQ ID NO: 2750 - DNA, 40 bp, Homo sapiens
cagcggcggcggcagtggcggcggcgaaggtggcggcggc

SEQ ID NO: 2751 - DNA, 40 bp, Homo sapiens
gccgccgccaccttcgccgccgccactgccgccgccgctg

SEQ ID NO: 2752 - DNA, 40 bp, Homo sapiens
agcggcggcggcagtggcggcggcgaaggtggcggcggct

SEQ ID NO: 2753 - DNA, 40 bp, Homo sapiens
agccgccgccaccttcgccgccgccactgccgccgccgct

SEQ ID NO: 2754 - DNA, 40 bp, Homo sapiens
gcggcggcggcagtggcggcggcgaaggtggcggcggctc

SEQ ID NO: 2755 - DNA, 40 bp, Homo sapiens
gagccgccgccaccttcgccgccgccactgccgccgccgc

SEQ ID NO: 2756 - DNA, 40 bp, Homo sapiens
cggcggcggcagtggcggcggcgaaggtggcggcggctcg

SEQ ID NO: 2757 - DNA, 40 bp, Homo sapiens
cgagccgccgccaccttcgccgccgccactgccgccgccg

SEQ ID NO: 2758 - DNA, 40 bp, Homo sapiens
ggcggcggcagtggcggcggcgaaggtggcggcggctcgg

SEQ ID NO: 2759 - DNA, 40 bp, Homo sapiens
ccgagccgccgccaccttcgccgccgccactgccgccgcc

SEQ ID NO: 2760 - DNA, 40 bp, Homo sapiens
gcggcggcagtggcggcggcgaaggtggcggcggctcggc

SEQ ID NO: 2761 - DNA, 40 bp, Homo sapiens
gccgagccgccgccaccttcgccgccgccactgccgccgc

SEQ ID NO: 2762 - DNA, 40 bp, Homo sapiens
cggcggcagtggcggcggcgaaggtggcggcggctcggcc

SEQ ID NO: 2763 - DNA, 40 bp, Homo sapiens
ggccgagccgccgccaccttcgccgccgccactgccgccg

SEQ ID NO: 2764 - DNA, 40 bp, Homo sapiens
ggcggcagtggcggcggcgaaggtggcggcggctcggcca

SEQ ID NO: 2765 - DNA, 40 bp, Homo sapiens
tggccgagccgccgccaccttcgccgccgccactgccgcc

SEQ ID NO: 2766 - DNA, 40 bp, Homo sapiens
gcggcagtggcggcggcgaaggtggcggcggctcggccag

SEQ ID NO: 2767 - DNA, 40 bp, Homo sapiens
ctggccgagccgccgccaccttcgccgccgccactgccgc

SEQ ID NO: 2768 - DNA, 40 bp, Homo sapiens
cggcagtggcggcggcgaaggtggcggcggctcggccagt

SEQ ID NO: 2769 - DNA, 40 bp, Homo sapiens
actggccgagccgccgccaccttcgccgccgccactgccg

SEQ ID NO: 2770 - DNA, 40 bp, Homo sapiens
ggcagtggcggcggcgaaggtggcggcggctcggccagta

SEQ ID NO: 2771 - DNA, 40 bp, Homo sapiens
tactggccgagccgccgccaccttcgccgccgccactgcc

SEQ ID NO: 2772 - DNA, 40 bp, Homo sapiens
gcagtggcggcggcgaaggtggcggcggctcggccagtac

SEQ ID NO: 2773 - DNA, 40 bp, Homo sapiens
gtactggccgagccgccgccaccttcgccgccgccactgc

SEQ ID NO: 2774 - DNA, 40 bp, Homo sapiens
cagtggcggcggcgaaggtggcggcggctcggccagtact

SEQ ID NO: 2775 - DNA, 40 bp, Homo sapiens
agtactggccgagccgccgccaccttcgccgccgccactg

SEQ ID NO: 2776 - DNA, 40 bp, Homo sapiens
agtggcggcggcgaaggtggcggcggctcggccagtactc

SEQ ID NO: 2777 - DNA, 40 bp, Homo sapiens
gagtactggccgagccgccgccaccttcgccgccgccact

SEQ ID NO: 2778 - DNA, 40 bp, Homo sapiens
gtggcggcggcgaaggtggcggcggctcggccagtactcc

SEQ ID NO: 2779 - DNA, 40 bp, Homo sapiens
ggagtactggccgagccgccgccaccttcgccgccgccac

SEQ ID NO: 2780 - DNA, 40 bp, Homo sapiens
tggcggcggcgaaggtggcggcggctcggccagtactccc

SEQ ID NO: 2781 - DNA, 40 bp, Homo sapiens
gggagtactggccgagccgccgccaccttcgccgccgcca

SEQ ID NO: 2782 - DNA, 40 bp, Homo sapiens
ggcggcggcgaaggtggcggcggctcggccagtactcccg

SEQ ID NO: 2783 - DNA, 40 bp, Homo sapiens
cgggagtactggccgagccgccgccaccttcgccgccgcc

SEQ ID NO: 2784 - DNA, 40 bp, Homo sapiens
gcggcggcgaaggtggcggcggctcggccagtactcccgg

SEQ ID NO: 2785 - DNA, 40 bp, Homo sapiens
ccgggagtactggccgagccgccgccaccttcgccgccgc

SEQ ID NO: 2786 - DNA, 40 bp, Homo sapiens
cggcggcgaaggtggcggcggctcggccagtactcccggc

SEQ ID NO: 2787 - DNA, 40 bp, Homo sapiens
gccgggagtactggccgagccgccgccaccttcgccgccg

SEQ ID NO: 2788 - DNA, 40 bp, Homo sapiens
ggcggcgaaggtggcggcggctcggccagtactcccggcc

SEQ ID NO: 2789 - DNA, 40 bp, Homo sapiens
ggccgggagtactggccgagccgccgccaccttcgccgcc

SEQ ID NO: 2790 - DNA, 40 bp, Homo sapiens
gcggcgaaggtggcggcggctcggccagtactcccggccc

SEQ ID NO: 2791 - DNA, 40 bp, Homo sapiens
gggccgggagtactggccgagccgccgccaccttcgccgc

SEQ ID NO: 2792 - DNA, 40 bp, Homo sapiens
cggcgaaggtggcggcggctcggccagtactcccggcccc

SEQ ID NO: 2793 - DNA, 40 bp, Homo sapiens
ggggccgggagtactggccgagccgccgccaccttcgccg

SEQ ID NO: 2794 - DNA, 40 bp, Homo sapiens
ggcgaaggtggcggcggctcggccagtactcccggccccc

SEQ ID NO: 2795 - DNA, 40 bp, Homo sapiens
gggggccgggagtactggccgagccgccgccaccttcgcc

SEQ ID NO: 2796 - DNA, 40 bp, Homo sapiens
gcgaaggtggcggcggctcggccagtactcccggcccccg

SEQ ID NO: 2797 - DNA, 40 bp, Homo sapiens
cgggggccgggagtactggccgagccgccgccaccttcgc

SEQ ID NO: 2798 - DNA, 40 bp, Homo sapiens
cgaaggtggcggcggctcggccagtactcccggcccccgc

SEQ ID NO: 2799 - DNA, 40 bp, Homo sapiens
gcgggggccgggagtactggccgagccgccgccaccttcg

SEQ ID NO: 2800 - DNA, 40 bp, Homo sapiens
gaaggtggcggcggctcggccagtactcccggcccccgcc

SEQ ID NO: 2801 - DNA, 40 bp, Homo sapiens
ggcgggggccgggagtactggccgagccgccgccaccttc

SEQ ID NO: 2802 - DNA, 40 bp, Homo sapiens
aaggtggcggcggctcggccagtactcccggcccccgcca

SEQ ID NO: 2803 - DNA, 40 bp, Homo sapiens
tggcgggggccgggagtactggccgagccgccgccacctt

SEQ ID NO: 2804 - DNA, 40 bp, Homo sapiens
aggtggcggcggctcggccagtactcccggcccccgccat

SEQ ID NO: 2805 - DNA, 40 bp, Homo sapiens
atggcgggggccgggagtactggccgagccgccgccacct

SEQ ID NO: 2806 - DNA, 40 bp, Homo sapiens
ggtggcggcggctcggccagtactcccggcccccgccatt

SEQ ID NO: 2807 - DNA, 40 bp, Homo sapiens
aatggcgggggccgggagtactggccgagccgccgccacc

SEQ ID NO: 2808 - DNA, 40 bp, Homo sapiens
gtggcggcggctcggccagtactcccggcccccgccattt

SEQ ID NO: 2809 - DNA, 40 bp, Homo sapiens
aaatggcgggggccgggagtactggccgagccgccgccac

SEQ ID NO: 2810 - DNA, 40 bp, Homo sapiens
tggcggcggctcggccagtactcccggcccccgccatttc

SEQ ID NO: 2811 - DNA, 40 bp, Homo sapiens
gaaatggcgggggccgggagtactggccgagccgccgcca

SEQ ID NO: 2812 - DNA, 40 bp, Homo sapiens
ggcggcggctcggccagtactcccggcccccgccatttcg

SEQ ID NO: 2813 - DNA, 40 bp, Homo sapiens
cgaaatggcgggggccgggagtactggccgagccgccgcc

SEQ ID NO: 2814 - DNA, 40 bp, Homo sapiens
gcggcggctcggccagtactcccggcccccgccatttcgg

SEQ ID NO: 2815 - DNA, 40 bp, Homo sapiens
ccgaaatggcgggggccgggagtactggccgagccgccgc

SEQ ID NO: 2816 - DNA, 40 bp, Homo sapiens
cggcggctcggccagtactcccggcccccgccatttcgga

SEQ ID NO: 2817 - DNA, 40 bp, Homo sapiens
tccgaaatggcgggggccgggagtactggccgagccgccg

SEQ ID NO: 2818 - DNA, 40 bp, Homo sapiens
ggcggctcggccagtactcccggcccccgccatttcggac

SEQ ID NO: 2819 - DNA, 40 bp, Homo sapiens
gtccgaaatggcgggggccgggagtactggccgagccgcc

SEQ ID NO: 2820 - DNA, 40 bp, Homo sapiens
gcggctcggccagtactcccggcccccgccatttcggact

SEQ ID NO: 2821 - DNA, 40 bp, Homo sapiens
agtccgaaatggcgggggccgggagtactggccgagccgc

SEQ ID NO: 2822 - DNA, 40 bp, Homo sapiens
cggctcggccagtactcccggcccccgccatttcggactg

SEQ ID NO: 2823 - DNA, 40 bp, Homo sapiens
cagtccgaaatggcgggggccgggagtactggccgagccg

SEQ ID NO: 2824 - DNA, 40 bp, Homo sapiens
ggctcggccagtactcccggcccccgccatttcggactgg

SEQ ID NO: 2825 - DNA, 40 bp, Homo sapiens
ccagtccgaaatggcgggggccgggagtactggccgagcc

SEQ ID NO: 2826 - DNA, 40 bp, Homo sapiens
gctcggccagtactcccggcccccgccatttcggactggg

SEQ ID NO: 2827 - DNA, 40 bp, Homo sapiens
cccagtccgaaatggcgggggccgggagtactggccgagc

SEQ ID NO: 2828 - DNA, 40 bp, Homo sapiens
ctcggccagtactcccggcccccgccatttcggactggga

SEQ ID NO: 2829 - DNA, 40 bp, Homo sapiens
tcccagtccgaaatggcgggggccgggagtactggccgag

SEQ ID NO: 2830 - DNA, 40 bp, Homo sapiens
tcggccagtactcccggcccccgccatttcggactgggag

SEQ ID NO: 2831 - DNA, 40 bp, Homo sapiens
ctcccagtccgaaatggcgggggccgggagtactggccga

SEQ ID NO: 2832 - DNA, 40 bp, Homo sapiens
cggccagtactcccggcccccgccatttcggactgggagc

SEQ ID NO: 2833 - DNA, 40 bp, Homo sapiens
gctcccagtccgaaatggcgggggccgggagtactggccg

SEQ ID NO: 2834 - DNA, 40 bp, Homo sapiens
ggccagtactcccggcccccgccatttcggactgggagcg

SEQ ID NO: 2835 - DNA, 40 bp, Homo sapiens
cgctcccagtccgaaatggcgggggccgggagtactggcc

SEQ ID NO: 2836 - DNA, 40 bp, Homo sapiens
gccagtactcccggcccccgccatttcggactgggagcga

SEQ ID NO: 2837 - DNA, 40 bp, Homo sapiens
tcgctcccagtccgaaatggcgggggccgggagtactggc

SEQ ID NO: 2838 - DNA, 40 bp, Homo sapiens
ccagtactcccggcccccgccatttcggactgggagcgag

SEQ ID NO: 2839 - DNA, 40 bp, Homo sapiens
ctcgctcccagtccgaaatggcgggggccgggagtactgg

SEQ ID NO: 2840 - DNA, 40 bp, Homo sapiens
cagtactcccggcccccgccatttcggactgggagcgagc

SEQ ID NO: 2841 - DNA, 40 bp, Homo sapiens
gctcgctcccagtccgaaatggcgggggccgggagtactg

SEQ ID NO: 2842 - DNA, 40 bp, Homo sapiens
agtactcccggcccccgccatttcggactgggagcgagcg

SEQ ID NO: 2843 - DNA, 40 bp, Homo sapiens
cgctcgctcccagtccgaaatggcgggggccgggagtact

SEQ ID NO: 2844 - DNA, 40 bp, Homo sapiens
gtactcccggcccccgccatttcggactgggagcgagcgc

SEQ ID NO: 2845 - DNA, 40 bp, Homo sapiens
gcgctcgctcccagtccgaaatggcgggggccgggagtac

SEQ ID NO: 2846 - DNA, 40 bp, Homo sapiens
tactcccggcccccgccatttcggactgggagcgagcgcg

SEQ ID NO: 2847 - DNA, 40 bp, Homo sapiens
cgcgctcgctcccagtccgaaatggcgggggccgggagta

SEQ ID NO: 2848 - DNA, 40 bp, Homo sapiens
actcccggcccccgccatttcggactgggagcgagcgcgg

SEQ ID NO: 2849 - DNA, 40 bp, Homo sapiens
ccgcgctcgctcccagtccgaaatggcgggggccgggagt

SEQ ID NO: 2850 - DNA, 40 bp, Homo sapiens
ctcccggcccccgccatttcggactgggagcgagcgcggc

SEQ ID NO: 2851 - DNA, 40 bp, Homo sapiens
gccgcgctcgctcccagtccgaaatggcgggggccgggag

SEQ ID NO: 2852 - DNA, 40 bp, Homo sapiens
tcccggcccccgccatttcggactgggagcgagcgcggcg

SEQ ID NO: 2853 - DNA, 40 bp, Homo sapiens
cgccgcgctcgctcccagtccgaaatggcgggggccggga

SEQ ID NO: 2854 - DNA, 40 bp, Homo sapiens
cccggcccccgccatttcggactgggagcgagcgcggcgc

SEQ ID NO: 2855 - DNA, 40 bp, Homo sapiens
gcgccgcgctcgctcccagtccgaaatggcgggggccggg

SEQ ID NO: 2856 - DNA, 40 bp, Homo sapiens
ccggcccccgccatttcggactgggagcgagcgcggcgca

SEQ ID NO: 2857 - DNA, 40 bp, Homo sapiens
tgcgccgcgctcgctcccagtccgaaatggcgggggccgg

SEQ ID NO: 2858 - DNA, 40 bp, Homo sapiens
cggcccccgccatttcggactgggagcgagcgcggcgcag

SEQ ID NO: 2859 - DNA, 40 bp, Homo sapiens
ctgcgccgcgctcgctcccagtccgaaatggcgggggccg

SEQ ID NO: 2860 - DNA, 40 bp, Homo sapiens
ggcccccgccatttcggactgggagcgagcgcggcgcagg

SEQ ID NO: 2861 - DNA, 40 bp, Homo sapiens
cctgcgccgcgctcgctcccagtccgaaatggcgggggcc

SEQ ID NO: 2862 - DNA, 40 bp, Homo sapiens
gcccccgccatttcggactgggagcgagcgcggcgcaggc

SEQ ID NO: 2863 - DNA, 40 bp, Homo sapiens
gcctgcgccgcgctcgctcccagtccgaaatggcgggggc

SEQ ID NO: 2864 - DNA, 40 bp, Homo sapiens
cccccgccatttcggactgggagcgagcgcggcgcaggca

SEQ ID NO: 2865 - DNA, 40 bp, Homo sapiens
tgcctgcgccgcgctcgctcccagtccgaaatggcggggg

SEQ ID NO: 2866 - DNA, 40 bp, Homo sapiens
ccccgccatttcggactgggagcgagcgcggcgcaggcac

SEQ ID NO: 2867 - DNA, 40 bp, Homo sapiens
gtgcctgcgccgcgctcgctcccagtccgaaatggcgggg

SEQ ID NO: 2868 - DNA, 40 bp, Homo sapiens
cccgccatttcggactgggagcgagcgcggcgcaggcact

SEQ ID NO: 2869 - DNA, 40 bp, Homo sapiens
agtgcctgcgccgcgctcgctcccagtccgaaatggcggg

SEQ ID NO: 2870 - DNA, 40 bp, Homo sapiens
ccgccatttcggactgggagcgagcgcggcgcaggcactg

SEQ ID NO: 2871 - DNA, 40 bp, Homo sapiens
cagtgcctgcgccgcgctcgctcccagtccgaaatggcgg

SEQ ID NO: 2872 - DNA, 40 bp, Homo sapiens
cgccatttcggactgggagcgagcgcggcgcaggcactga

SEQ ID NO: 2873 - DNA, 40 bp, Homo sapiens
tcagtgcctgcgccgcgctcgctcccagtccgaaatggcg

SEQ ID NO: 2874 - DNA, 40 bp, Homo sapiens
gccatttcggactgggagcgagcgcggcgcaggcactgaa

SEQ ID NO: 2875 - DNA, 40 bp, Homo sapiens
ttcagtgcctgcgccgcgctcgctcccagtccgaaatggc

SEQ ID NO: 2876 - DNA, 40 bp, Homo sapiens
ccatttcggactgggagcgagcgcggcgcaggcactgaag

SEQ ID NO: 2877 - DNA, 40 bp, Homo sapiens
cttcagtgcctgcgccgcgctcgctcccagtccgaaatgg

SEQ ID NO: 2878 - DNA, 40 bp, Homo sapiens
catttcggactgggagcgagcgcggcgcaggcactgaagg

SEQ ID NO: 2879 - DNA, 40 bp, Homo sapiens
ccttcagtgcctgcgccgcgctcgctcccagtccgaaatg

SEQ ID NO: 2880 - DNA, 40 bp, Homo sapiens
atttcggactgggagcgagcgcggcgcaggcactgaaggc

SEQ ID NO: 2881 - DNA, 40 bp, Homo sapiens
gccttcagtgcctgcgccgcgctcgctcccagtccgaaat

SEQ ID NO: 2882 - DNA, 40 bp, Homo sapiens
tttcggactgggagcgagcgcggcgcaggcactgaaggcg

SEQ ID NO: 2883 - DNA, 40 bp, Homo sapiens
cgccttcagtgcctgcgccgcgctcgctcccagtccgaaa

SEQ ID NO: 2884 - DNA, 40 bp, Homo sapiens
ttcggactgggagcgagcgcggcgcaggcactgaaggcgg

SEQ ID NO: 2885 - DNA, 40 bp, Homo sapiens
ccgccttcagtgcctgcgccgcgctcgctcccagtccgaa

SEQ ID NO: 2886 - DNA, 40 bp, Homo sapiens
tcggactgggagcgagcgcggcgcaggcactgaaggcggc

SEQ ID NO: 2887 - DNA, 40 bp, Homo sapiens
gccgccttcagtgcctgcgccgcgctcgctcccagtccga

SEQ ID NO: 2888 - DNA, 40 bp, Homo sapiens
cggactgggagcgagcgcggcgcaggcactgaaggcggcg

SEQ ID NO: 2889 - DNA, 40 bp, Homo sapiens
cgccgccttcagtgcctgcgccgcgctcgctcccagtccg

SEQ ID NO: 2890 - DNA, 40 bp, Homo sapiens
ggactgggagcgagcgcggcgcaggcactgaaggcggcgg

SEQ ID NO: 2891 - DNA, 40 bp, Homo sapiens
ccgccgccttcagtgcctgcgccgcgctcgctcccagtcc

SEQ ID NO: 2892 - DNA, 40 bp, Homo sapiens
gactgggagcgagcgcggcgcaggcactgaaggcggcggc

SEQ ID NO: 2893 - DNA, 40 bp, Homo sapiens
gccgccgccttcagtgcctgcgccgcgctcgctcccagtc

SEQ ID NO: 2894 - DNA, 40 bp, Homo sapiens
actgggagcgagcgcggcgcaggcactgaaggcggcggcg

SEQ ID NO: 2895 - DNA, 40 bp, Homo sapiens
cgccgccgccttcagtgcctgcgccgcgctcgctcccagt

SEQ ID NO: 2896 - DNA, 40 bp, Homo sapiens
ctgggagcgagcgcggcgcaggcactgaaggcggcggcgg

SEQ ID NO: 2897 - DNA, 40 bp, Homo sapiens
ccgccgccgccttcagtgcctgcgccgcgctcgctcccag

SEQ ID NO: 2898 - DNA, 40 bp, Homo sapiens
tgggagcgagcgcggcgcaggcactgaaggcggcggcggg

SEQ ID NO: 2899 - DNA, 40 bp, Homo sapiens
cccgccgccgccttcagtgcctgcgccgcgctcgctccca

SEQ ID NO: 2900 - DNA, 40 bp, Homo sapiens
gggagcgagcgcggcgcaggcactgaaggcggcggcgggg

SEQ ID NO: 2901 - DNA, 40 bp, Homo sapiens
ccccgccgccgccttcagtgcctgcgccgcgctcgctccc

SEQ ID NO: 2902 - DNA, 40 bp, Homo sapiens
ggagcgagcgcggcgcaggcactgaaggcggcggcggggc

SEQ ID NO: 2903 - DNA, 40 bp, Homo sapiens
gccccgccgccgccttcagtgcctgcgccgcgctcgctcc

SEQ ID NO: 2904 - DNA, 40 bp, Homo sapiens
gagcgagcgcggcgcaggcactgaaggcggcggcggggcc

SEQ ID NO: 2905 - DNA, 40 bp, Homo sapiens
ggccccgccgccgccttcagtgcctgcgccgcgctcgctc

SEQ ID NO: 2906 - DNA, 40 bp, Homo sapiens
agcgagcgcggcgcaggcactgaaggcggcggcggggcca

SEQ ID NO: 2907 - DNA, 40 bp, Homo sapiens
tggccccgccgccgccttcagtgcctgcgccgcgctcgct

SEQ ID NO: 2908 - DNA, 40 bp, Homo sapiens
gcgagcgcggcgcaggcactgaaggcggcggcggggccag

SEQ ID NO: 2909 - DNA, 40 bp, Homo sapiens
ctggccccgccgccgccttcagtgcctgcgccgcgctcgc

SEQ ID NO: 2910 - DNA, 40 bp, Homo sapiens
cgagcgcggcgcaggcactgaaggcggcggcggggccaga

SEQ ID NO: 2911 - DNA, 40 bp, Homo sapiens
tctggccccgccgccgccttcagtgcctgcgccgcgctcg

SEQ ID NO: 2912 - DNA, 40 bp, Homo sapiens
gagcgcggcgcaggcactgaaggcggcggcggggccagag

SEQ ID NO: 2913 - DNA, 40 bp, Homo sapiens
ctctggccccgccgccgccttcagtgcctgcgccgcgctc

SEQ ID NO: 2914 - DNA, 40 bp, Homo sapiens
agcgcggcgcaggcactgaaggcggcggcggggccagagg

SEQ ID NO: 2915 - DNA, 40 bp, Homo sapiens
cctctggccccgccgccgccttcagtgcctgcgccgcgct

SEQ ID NO: 2916 - DNA, 40 bp, Homo sapiens
gcgcggcgcaggcactgaaggcggcggcggggccagaggc

SEQ ID NO: 2917 - DNA, 40 bp, Homo sapiens
gcctctggccccgccgccgccttcagtgcctgcgccgcgc

SEQ ID NO: 2918 - DNA, 40 bp, Homo sapiens
cgcggcgcaggcactgaaggcggcggcggggccagaggct

SEQ ID NO: 2919 - DNA, 40 bp, Homo sapiens
agcctctggccccgccgccgccttcagtgcctgcgccgcg

SEQ ID NO: 2920 - DNA, 40 bp, Homo sapiens
gcggcgcaggcactgaaggcggcggcggggccagaggctc

SEQ ID NO: 2921 - DNA, 40 bp, Homo sapiens
gagcctctggccccgccgccgccttcagtgcctgcgccgc

SEQ ID NO: 2922 - DNA, 40 bp, Homo sapiens
cggcgcaggcactgaaggcggcggcggggccagaggctca

SEQ ID NO: 2923 - DNA, 40 bp, Homo sapiens
tgagcctctggccccgccgccgccttcagtgcctgcgccg

SEQ ID NO: 2924 - DNA, 40 bp, Homo sapiens
ggcgcaggcactgaaggcggcggcggggccagaggctcag

SEQ ID NO: 2925 - DNA, 40 bp, Homo sapiens
ctgagcctctggccccgccgccgccttcagtgcctgcgcc

SEQ ID NO: 2926 - DNA, 40 bp, Homo sapiens
gcgcaggcactgaaggcggcggcggggccagaggctcagc

SEQ ID NO: 2927 - DNA, 40 bp, Homo sapiens
gctgagcctctggccccgccgccgccttcagtgcctgcgc

SEQ ID NO: 2928 - DNA, 40 bp, Homo sapiens
cgcaggcactgaaggcggcggcggggccagaggctcagcg

SEQ ID NO: 2929 - DNA, 40 bp, Homo sapiens
cgctgagcctctggccccgccgccgccttcagtgcctgcg

SEQ ID NO: 2930 - DNA, 40 bp, Homo sapiens
gcaggcactgaaggcggcggcggggccagaggctcagcgg

SEQ ID NO: 2931 - DNA, 40 bp, Homo sapiens
ccgctgagcctctggccccgccgccgccttcagtgcctgc

SEQ ID NO: 2932 - DNA, 40 bp, Homo sapiens
caggcactgaaggcggcggcggggccagaggctcagcggc

SEQ ID NO: 2933 - DNA, 40 bp, Homo sapiens
gccgctgagcctctggccccgccgccgccttcagtgcctg

SEQ ID NO: 2934 - DNA, 40 bp, Homo sapiens
aggcactgaaggcggcggcggggccagaggctcagcggct

SEQ ID NO: 2935 - DNA, 40 bp, Homo sapiens
agccgctgagcctctggccccgccgccgccttcagtgcct

SEQ ID NO: 2936 - DNA, 40 bp, Homo sapiens
ggcactgaaggcggcggcggggccagaggctcagcggctc

SEQ ID NO: 2937 - DNA, 40 bp, Homo sapiens
gagccgctgagcctctggccccgccgccgccttcagtgcc

SEQ ID NO: 2938 - DNA, 40 bp, Homo sapiens
gcactgaaggcggcggcggggccagaggctcagcggctcc

SEQ ID NO: 2939 - DNA, 40 bp, Homo sapiens
ggagccgctgagcctctggccccgccgccgccttcagtgc

SEQ ID NO: 2940 - DNA, 40 bp, Homo sapiens
cactgaaggcggcggcggggccagaggctcagcggctccc

SEQ ID NO: 2941 - DNA, 40 bp, Homo sapiens
gggagccgctgagcctctggccccgccgccgccttcagtg

SEQ ID NO: 2942 - DNA, 40 bp, Homo sapiens
actgaaggcggcggcggggccagaggctcagcggctccca

SEQ ID NO: 2943 - DNA, 40 bp, Homo sapiens
tgggagccgctgagcctctggccccgccgccgccttcagt

SEQ ID NO: 2944 - DNA, 40 bp, Homo sapiens
ctgaaggcggcggcggggccagaggctcagcggctcccag

SEQ ID NO: 2945 - DNA, 40 bp, Homo sapiens
ctgggagccgctgagcctctggccccgccgccgccttcag

SEQ ID NO: 2946 - DNA, 40 bp, Homo sapiens
tgaaggcggcggcggggccagaggctcagcggctcccagg

SEQ ID NO: 2947 - DNA, 40 bp, Homo sapiens
cctgggagccgctgagcctctggccccgccgccgccttca

SEQ ID NO: 2948 - DNA, 40 bp, Homo sapiens
gaaggcggcggcggggccagaggctcagcggctcccaggt

SEQ ID NO: 2949 - DNA, 40 bp, Homo sapiens
acctgggagccgctgagcctctggccccgccgccgccttc

SEQ ID NO: 2950 - DNA, 40 bp, Homo sapiens
aaggcggcggcggggccagaggctcagcggctcccaggtg

SEQ ID NO: 2951 - DNA, 40 bp, Homo sapiens
cacctgggagccgctgagcctctggccccgccgccgcctt

SEQ ID NO: 2952 - DNA, 40 bp, Homo sapiens
aggcggcggcggggccagaggctcagcggctcccaggtgc

SEQ ID NO: 2953 - DNA, 40 bp, Homo sapiens
gcacctgggagccgctgagcctctggccccgccgccgcct

SEQ ID NO: 2954 - DNA, 40 bp, Homo sapiens
ggcggcggcggggccagaggctcagcggctcccaggtgcg

SEQ ID NO: 2955 - DNA, 40 bp, Homo sapiens
cgcacctgggagccgctgagcctctggccccgccgccgcc

SEQ ID NO: 2956 - DNA, 40 bp, Homo sapiens
gcggcggcggggccagaggctcagcggctcccaggtgcgg

SEQ ID NO: 2957 - DNA, 40 bp, Homo sapiens
ccgcacctgggagccgctgagcctctggccccgccgccgc

SEQ ID NO: 2958 - DNA, 40 bp, Homo sapiens
cggcggcggggccagaggctcagcggctcccaggtgcggg

SEQ ID NO: 2959 - DNA, 40 bp, Homo sapiens
cccgcacctgggagccgctgagcctctggccccgccgccg

SEQ ID NO: 2960 - DNA, 40 bp, Homo sapiens
ggcggcggggccagaggctcagcggctcccaggtgcggga

SEQ ID NO: 2961 - DNA, 40 bp, Homo sapiens
tcccgcacctgggagccgctgagcctctggccccgccgcc

SEQ ID NO: 2962 - DNA, 40 bp, Homo sapiens
gcggcggggccagaggctcagcggctcccaggtgcgggag

SEQ ID NO: 2963 - DNA, 40 bp, Homo sapiens
ctcccgcacctgggagccgctgagcctctggccccgccgc

SEQ ID NO: 2964 - DNA, 40 bp, Homo sapiens
cggcggggccagaggctcagcggctcccaggtgcgggaga

SEQ ID NO: 2965 - DNA, 40 bp, Homo sapiens
tctcccgcacctgggagccgctgagcctctggccccgccg

SEQ ID NO: 2966 - DNA, 40 bp, Homo sapiens
ggcggggccagaggctcagcggctcccaggtgcgggagag

SEQ ID NO: 2967 - DNA, 40 bp, Homo sapiens
ctctcccgcacctgggagccgctgagcctctggccccgcc

SEQ ID NO: 2968 - DNA, 40 bp, Homo sapiens
gcggggccagaggctcagcggctcccaggtgcgggagaga

SEQ ID NO: 2969 - DNA, 40 bp, Homo sapiens
tctctcccgcacctgggagccgctgagcctctggccccgc

SEQ ID NO: 2970 - DNA, 40 bp, Homo sapiens
cggggccagaggctcagcggctcccaggtgcgggagagag

SEQ ID NO: 2971 - DNA, 40 bp, Homo sapiens
ctctctcccgcacctgggagccgctgagcctctggccccg

SEQ ID NO: 2972 - DNA, 40 bp, Homo sapiens
ggggccagaggctcagcggctcccaggtgcgggagagagg

SEQ ID NO: 2973 - DNA, 40 bp, Homo sapiens
cctctctcccgcacctgggagccgctgagcctctggcccc

SEQ ID NO: 2974 - DNA, 40 bp, Homo sapiens
gggccagaggctcagcggctcccaggtgcgggagagaggt

SEQ ID NO: 2975 - DNA, 40 bp, Homo sapiens
acctctctcccgcacctgggagccgctgagcctctggccc

SEQ ID NO: 2976 - DNA, 40 bp, Homo sapiens
ggccagaggctcagcggctcccaggtgcgggagagaggta

SEQ ID NO: 2977 - DNA, 40 bp, Homo sapiens
tacctctctcccgcacctgggagccgctgagcctctggcc

SEQ ID NO: 2978 - DNA, 40 bp, Homo sapiens
gccagaggctcagcggctcccaggtgcgggagagaggtac

SEQ ID NO: 2979 - DNA, 40 bp, Homo sapiens
gtacctctctcccgcacctgggagccgctgagcctctggc

SEQ ID NO: 2980 - DNA, 40 bp, Homo sapiens
ccagaggctcagcggctcccaggtgcgggagagaggtacg

SEQ ID NO: 2981 - DNA, 40 bp, Homo sapiens
cgtacctctctcccgcacctgggagccgctgagcctctgg

SEQ ID NO: 2982 - DNA, 40 bp, Homo sapiens
cagaggctcagcggctcccaggtgcgggagagaggtacgg

SEQ ID NO: 2983 - DNA, 40 bp, Homo sapiens
ccgtacctctctcccgcacctgggagccgctgagcctctg

SEQ ID NO: 2984 - DNA, 40 bp, Homo sapiens
agaggctcagcggctcccaggtgcgggagagaggtacgga

SEQ ID NO: 2985 - DNA, 40 bp, Homo sapiens
tccgtacctctctcccgcacctgggagccgctgagcctct

SEQ ID NO: 2986 - DNA, 40 bp, Homo sapiens
gaggctcagcggctcccaggtgcgggagagaggtacggag

SEQ ID NO: 2987 - DNA, 40 bp, Homo sapiens
ctccgtacctctctcccgcacctgggagccgctgagcctc

SEQ ID NO: 2988 - DNA, 40 bp, Homo sapiens
aggctcagcggctcccaggtgcgggagagaggtacggagc

SEQ ID NO: 2989 - DNA, 40 bp, Homo sapiens
gctccgtacctctctcccgcacctgggagccgctgagcct

SEQ ID NO: 2990 - DNA, 40 bp, Homo sapiens
ggctcagcggctcccaggtgcgggagagaggtacggagcg

SEQ ID NO: 2991 - DNA, 40 bp, Homo sapiens
cgctccgtacctctctcccgcacctgggagccgctgagcc

SEQ ID NO: 2992 - DNA, 40 bp, Homo sapiens
gctcagcggctcccaggtgcgggagagaggtacggagcgg

SEQ ID NO: 2993 - DNA, 40 bp, Homo sapiens
ccgctccgtacctctctcccgcacctgggagccgctgagc

SEQ ID NO: 2994 - DNA, 40 bp, Homo sapiens
ctcagcggctcccaggtgcgggagagaggtacggagcgga

SEQ ID NO: 2995 - DNA, 40 bp, Homo sapiens
tccgctccgtacctctctcccgcacctgggagccgctgag

SEQ ID NO: 2996 - DNA, 40 bp, Homo sapiens
tcagcggctcccaggtgcgggagagaggtacggagcggac

SEQ ID NO: 2997 - DNA, 40 bp, Homo sapiens
gtccgctccgtacctctctcccgcacctgggagccgctga

SEQ ID NO: 2998 - DNA, 40 bp, Homo sapiens
cagcggctcccaggtgcgggagagaggtacggagcggacc

SEQ ID NO: 2999 - DNA, 40 bp, Homo sapiens
ggtccgctccgtacctctctcccgcacctgggagccgctg

SEQ ID NO: 3000 - DNA, 40 bp, Homo sapiens
agcggctcccaggtgcgggagagaggtacggagcggacca

SEQ ID NO: 3001 - DNA, 40 bp, Homo sapiens
tggtccgctccgtacctctctcccgcacctgggagccgct

SEQ ID NO: 3002 - DNA, 40 bp, Homo sapiens
gcggctcccaggtgcgggagagaggtacggagcggaccac

SEQ ID NO: 3003 - DNA, 40 bp, Homo sapiens
gtggtccgctccgtacctctctcccgcacctgggagccgc

SEQ ID NO: 3004 - DNA, 40 bp, Homo sapiens
cggctcccaggtgcgggagagaggtacggagcggaccacc

SEQ ID NO: 3005 - DNA, 40 bp, Homo sapiens
ggtggtccgctccgtacctctctcccgcacctgggagccg

SEQ ID NO: 3006 - DNA, 40 bp, Homo sapiens
ggctcccaggtgcgggagagaggtacggagcggaccaccc

SEQ ID NO: 3007 - DNA, 40 bp, Homo sapiens
gggtggtccgctccgtacctctctcccgcacctgggagcc

SEQ ID NO: 3008 - DNA, 40 bp, Homo sapiens
gctcccaggtgcgggagagaggtacggagcggaccacccc

SEQ ID NO: 3009 - DNA, 40 bp, Homo sapiens
ggggtggtccgctccgtacctctctcccgcacctgggagc

SEQ ID NO: 3010 - DNA, 40 bp, Homo sapiens
ctcccaggtgcgggagagaggtacggagcggaccacccct

SEQ ID NO: 3011 - DNA, 40 bp, Homo sapiens
aggggtggtccgctccgtacctctctcccgcacctgggag

SEQ ID NO: 3012 - DNA, 40 bp, Homo sapiens
tcccaggtgcgggagagaggtacggagcggaccacccctc

SEQ ID NO: 3013 - DNA, 40 bp, Homo sapiens
gaggggtggtccgctccgtacctctctcccgcacctggga

SEQ ID NO: 3014 - DNA, 40 bp, Homo sapiens
cccaggtgcgggagagaggtacggagcggaccacccctcc

SEQ ID NO: 3015 - DNA, 40 bp, Homo sapiens
ggaggggtggtccgctccgtacctctctcccgcacctggg

SEQ ID NO: 3016 - DNA, 40 bp, Homo sapiens
ccaggtgcgggagagaggtacggagcggaccacccctcct

SEQ ID NO: 3017 - DNA, 40 bp, Homo sapiens
aggaggggtggtccgctccgtacctctctcccgcacctgg

SEQ ID NO: 3018 - DNA, 40 bp, Homo sapiens
caggtgcgggagagaggtacggagcggaccacccctcctg

SEQ ID NO: 3019 - DNA, 40 bp, Homo sapiens
caggaggggtggtccgctccgtacctctctcccgcacctg

SEQ ID NO: 3020 - DNA, 40 bp, Homo sapiens
aggtgcgggagagaggtacggagcggaccacccctcctgg

SEQ ID NO: 3021 - DNA, 40 bp, Homo sapiens
ccaggaggggtggtccgctccgtacctctctcccgcacct

SEQ ID NO: 3022 - DNA, 40 bp, Homo sapiens
ggtgcgggagagaggtacggagcggaccacccctcctggg

SEQ ID NO: 3023 - DNA, 40 bp, Homo sapiens
cccaggaggggtggtccgctccgtacctctctcccgcacc

SEQ ID NO: 3024 - DNA, 40 bp, Homo sapiens
gtgcgggagagaggtacggagcggaccacccctcctgggc

SEQ ID NO: 3025 - DNA, 40 bp, Homo sapiens
gcccaggaggggtggtccgctccgtacctctctcccgcac

SEQ ID NO: 3026 - DNA, 40 bp, Homo sapiens
tgcgggagagaggtacggagcggaccacccctcctgggcc

SEQ ID NO: 3027 - DNA, 40 bp, Homo sapiens
ggcccaggaggggtggtccgctccgtacctctctcccgca

SEQ ID NO: 3028 - DNA, 40 bp, Homo sapiens
gcgggagagaggtacggagcggaccacccctcctgggccc

SEQ ID NO: 3029 - DNA, 40 bp, Homo sapiens
gggcccaggaggggtggtccgctccgtacctctctcccgc

SEQ ID NO: 3030 - DNA, 40 bp, Homo sapiens
cgggagagaggtacggagcggaccacccctcctgggcccc

SEQ ID NO: 3031 - DNA, 40 bp, Homo sapiens
ggggcccaggaggggtggtccgctccgtacctctctcccg

SEQ ID NO: 3032 - DNA, 40 bp, Homo sapiens
gggagagaggtacggagcggaccacccctcctgggcccct

SEQ ID NO: 3033 - DNA, 40 bp, Homo sapiens
aggggcccaggaggggtggtccgctccgtacctctctccc

SEQ ID NO: 3034 - DNA, 40 bp, Homo sapiens
ggagagaggtacggagcggaccacccctcctgggcccctg

SEQ ID NO: 3035 - DNA, 40 bp, Homo sapiens
caggggcccaggaggggtggtccgctccgtacctctctcc

SEQ ID NO: 3036 - DNA, 40 bp, Homo sapiens
gagagaggtacggagcggaccacccctcctgggcccctgc

SEQ ID NO: 3037 - DNA, 40 bp, Homo sapiens
gcaggggcccaggaggggtggtccgctccgtacctctctc

SEQ ID NO: 3038 - DNA, 40 bp, Homo sapiens
agagaggtacggagcggaccacccctcctgggcccctgcc

SEQ ID NO: 3039 - DNA, 40 bp, Homo sapiens
ggcaggggcccaggaggggtggtccgctccgtacctctct

SEQ ID NO: 3040 - DNA, 40 bp, Homo sapiens
gagaggtacggagcggaccacccctcctgggcccctgccc

SEQ ID NO: 3041 - DNA, 40 bp, Homo sapiens
gggcaggggcccaggaggggtggtccgctccgtacctctc

SEQ ID NO: 3042 - DNA, 40 bp, Homo sapiens
agaggtacggagcggaccacccctcctgggcccctgcccg

SEQ ID NO: 3043 - DNA, 40 bp, Homo sapiens
cgggcaggggcccaggaggggtggtccgctccgtacctct

SEQ ID NO: 3044 - DNA, 40 bp, Homo sapiens
gaggtacggagcggaccacccctcctgggcccctgcccgg

SEQ ID NO: 3045 - DNA, 40 bp, Homo sapiens
ccgggcaggggcccaggaggggtggtccgctccgtacctc

SEQ ID NO: 3046 - DNA, 40 bp, Homo sapiens
aggtacggagcggaccacccctcctgggcccctgcccggg

SEQ ID NO: 3047 - DNA, 40 bp, Homo sapiens
cccgggcaggggcccaggaggggtggtccgctccgtacct

SEQ ID NO: 3048 - DNA, 40 bp, Homo sapiens
ggtacggagcggaccacccctcctgggcccctgcccgggt

SEQ ID NO: 3049 - DNA, 40 bp, Homo sapiens
acccgggcaggggcccaggaggggtggtccgctccgtacc

SEQ ID NO: 3050 - DNA, 40 bp, Homo sapiens
gtacggagcggaccacccctcctgggcccctgcccgggtc

SEQ ID NO: 3051 - DNA, 40 bp, Homo sapiens
gacccgggcaggggcccaggaggggtggtccgctccgtac

SEQ ID NO: 3052 - DNA, 40 bp, Homo sapiens
tacggagcggaccacccctcctgggcccctgcccgggtcc

SEQ ID NO: 3053 - DNA, 40 bp, Homo sapiens
ggacccgggcaggggcccaggaggggtggtccgctccgta

SEQ ID NO: 3054 - DNA, 40 bp, Homo sapiens
acggagcggaccacccctcctgggcccctgcccgggtccc

SEQ ID NO: 3055 - DNA, 40 bp, Homo sapiens
gggacccgggcaggggcccaggaggggtggtccgctccgt

SEQ ID NO: 3056 - DNA, 40 bp, Homo sapiens
cggagcggaccacccctcctgggcccctgcccgggtcccg

SEQ ID NO: 3057 - DNA, 40 bp, Homo sapiens
cgggacccgggcaggggcccaggaggggtggtccgctccg

SEQ ID NO: 3058 - DNA, 40 bp, Homo sapiens
ggagcggaccacccctcctgggcccctgcccgggtcccga

SEQ ID NO: 3059 - DNA, 40 bp, Homo sapiens
tcgggacccgggcaggggcccaggaggggtggtccgctcc

SEQ ID NO: 3060 - DNA, 40 bp, Homo sapiens
gagcggaccacccctcctgggcccctgcccgggtcccgac

SEQ ID NO: 3061 - DNA, 40 bp, Homo sapiens
gtcgggacccgggcaggggcccaggaggggtggtccgctc

SEQ ID NO: 3062 - DNA, 40 bp, Homo sapiens
agcggaccacccctcctgggcccctgcccgggtcccgacc

SEQ ID NO: 3063 - DNA, 40 bp, Homo sapiens
ggtcgggacccgggcaggggcccaggaggggtggtccgct

SEQ ID NO: 3064 - DNA, 40 bp, Homo sapiens
gcggaccacccctcctgggcccctgcccgggtcccgaccc

SEQ ID NO: 3065 - DNA, 40 bp, Homo sapiens
gggtcgggacccgggcaggggcccaggaggggtggtccgc

SEQ ID NO: 3066 - DNA, 40 bp, Homo sapiens
cggaccacccctcctgggcccctgcccgggtcccgaccct

SEQ ID NO: 3067 - DNA, 40 bp, Homo sapiens
agggtcgggacccgggcaggggcccaggaggggtggtccg

SEQ ID NO: 3068 - DNA, 40 bp, Homo sapiens
ggaccacccctcctgggcccctgcccgggtcccgaccctc

SEQ ID NO: 3069 - DNA, 40 bp, Homo sapiens
gagggtcgggacccgggcaggggcccaggaggggtggtcc

SEQ ID NO: 3070 - DNA, 40 bp, Homo sapiens
gaccacccctcctgggcccctgcccgggtcccgaccctct

SEQ ID NO: 3071 - DNA, 40 bp, Homo sapiens
agagggtcgggacccgggcaggggcccaggaggggtggtc

SEQ ID NO: 3072 - DNA, 40 bp, Homo sapiens
accacccctcctgggcccctgcccgggtcccgaccctctt

SEQ ID NO: 3073 - DNA, 40 bp, Homo sapiens
aagagggtcgggacccgggcaggggcccaggaggggtggt

SEQ ID NO: 3074 - DNA, 40 bp, Homo sapiens
ccacccctcctgggcccctgcccgggtcccgaccctcttt

SEQ ID NO: 3075 - DNA, 40 bp, Homo sapiens
aaagagggtcgggacccgggcaggggcccaggaggggtgg

SEQ ID NO: 3076 - DNA, 40 bp, Homo sapiens
cacccctcctgggcccctgcccgggtcccgaccctctttg

SEQ ID NO: 3077 - DNA, 40 bp, Homo sapiens
caaagagggtcgggacccgggcaggggcccaggaggggtg

SEQ ID NO: 3078 - DNA, 40 bp, Homo sapiens
acccctcctgggcccctgcccgggtcccgaccctctttgc

SEQ ID NO: 3079 - DNA, 40 bp, Homo sapiens
gcaaagagggtcgggacccgggcaggggcccaggaggggt

SEQ ID NO: 3080 - DNA, 40 bp, Homo sapiens
cccctcctgggcccctgcccgggtcccgaccctctttgcc

SEQ ID NO: 3081 - DNA, 40 bp, Homo sapiens
ggcaaagagggtcgggacccgggcaggggcccaggagggg

SEQ ID NO: 3082 - DNA, 40 bp, Homo sapiens
ccctcctgggcccctgcccgggtcccgaccctctttgccg

SEQ ID NO: 3083 - DNA, 40 bp, Homo sapiens
cggcaaagagggtcgggacccgggcaggggcccaggaggg

SEQ ID NO: 3084 - DNA, 40 bp, Homo sapiens
cctcctgggcccctgcccgggtcccgaccctctttgccgg

SEQ ID NO: 3085 - DNA, 40 bp, Homo sapiens
ccggcaaagagggtcgggacccgggcaggggcccaggagg

SEQ ID NO: 3086 - DNA, 40 bp, Homo sapiens
ctcctgggcccctgcccgggtcccgaccctctttgccggc

SEQ ID NO: 3087 - DNA, 40 bp, Homo sapiens
gccggcaaagagggtcgggacccgggcaggggcccaggag

SEQ ID NO: 3088 - DNA, 40 bp, Homo sapiens
tcctgggcccctgcccgggtcccgaccctctttgccggcg

SEQ ID NO: 3089 - DNA, 40 bp, Homo sapiens
cgccggcaaagagggtcgggacccgggcaggggcccagga

SEQ ID NO: 3090 - DNA, 40 bp, Homo sapiens
cctgggcccctgcccgggtcccgaccctctttgccggcgc

SEQ ID NO: 3091 - DNA, 40 bp, Homo sapiens
gcgccggcaaagagggtcgggacccgggcaggggcccagg

SEQ ID NO: 3092 - DNA, 40 bp, Homo sapiens
ctgggcccctgcccgggtcccgaccctctttgccggcgcc

SEQ ID NO: 3093 - DNA, 40 bp, Homo sapiens
ggcgccggcaaagagggtcgggacccgggcaggggcccag

SEQ ID NO: 3094 - DNA, 40 bp, Homo sapiens
tgggcccctgcccgggtcccgaccctctttgccggcgccg

SEQ ID NO: 3095 - DNA, 40 bp, Homo sapiens
cggcgccggcaaagagggtcgggacccgggcaggggccca

SEQ ID NO: 3096 - DNA, 40 bp, Homo sapiens
gggcccctgcccgggtcccgaccctctttgccggcgccgg

SEQ ID NO: 3097 - DNA, 40 bp, Homo sapiens
ccggcgccggcaaagagggtcgggacccgggcaggggccc

SEQ ID NO: 3098 - DNA, 40 bp, Homo sapiens
ggcccctgcccgggtcccgaccctctttgccggcgccggg

SEQ ID NO: 3099 - DNA, 40 bp, Homo sapiens
cccggcgccggcaaagagggtcgggacccgggcaggggcc

SEQ ID NO: 3100 - DNA, 40 bp, Homo sapiens
gcccctgcccgggtcccgaccctctttgccggcgccgggc

SEQ ID NO: 3101 - DNA, 40 bp, Homo sapiens
gcccggcgccggcaaagagggtcgggacccgggcaggggc

SEQ ID NO: 3102 - DNA, 40 bp, Homo sapiens
cccctgcccgggtcccgaccctctttgccggcgccgggcg

SEQ ID NO: 3103 - DNA, 40 bp, Homo sapiens
cgcccggcgccggcaaagagggtcgggacccgggcagggg

SEQ ID NO: 3104 - DNA, 40 bp, Homo sapiens
ccctgcccgggtcccgaccctctttgccggcgccgggcgg

SEQ ID NO: 3105 - DNA, 40 bp, Homo sapiens
ccgcccggcgccggcaaagagggtcgggacccgggcaggg

SEQ ID NO: 3106 - DNA, 40 bp, Homo sapiens
cctgcccgggtcccgaccctctttgccggcgccgggcggg

SEQ ID NO: 3107 - DNA, 40 bp, Homo sapiens
cccgcccggcgccggcaaagagggtcgggacccgggcagg

SEQ ID NO: 3108 - DNA, 40 bp, Homo sapiens
ctgcccgggtcccgaccctctttgccggcgccgggcgggg

SEQ ID NO: 3109 - DNA, 40 bp, Homo sapiens
ccccgcccggcgccggcaaagagggtcgggacccgggcag

SEQ ID NO: 3110 - DNA, 40 bp, Homo sapiens
tgcccgggtcccgaccctctttgccggcgccgggcggggc

SEQ ID NO: 3111 - DNA, 40 bp, Homo sapiens
gccccgcccggcgccggcaaagagggtcgggacccgggca

SEQ ID NO: 3112 - DNA, 40 bp, Homo sapiens
gcccgggtcccgaccctctttgccggcgccgggcggggcc

SEQ ID NO: 3113 - DNA, 40 bp, Homo sapiens
ggccccgcccggcgccggcaaagagggtcgggacccgggc

SEQ ID NO: 3114 - DNA, 40 bp, Homo sapiens
cccgggtcccgaccctctttgccggcgccgggcggggccg

SEQ ID NO: 3115 - DNA, 40 bp, Homo sapiens
cggccccgcccggcgccggcaaagagggtcgggacccggg

SEQ ID NO: 3116 - DNA, 40 bp, Homo sapiens
ccgggtcccgaccctctttgccggcgccgggcggggccgg

SEQ ID NO: 3117 - DNA, 40 bp, Homo sapiens
ccggccccgcccggcgccggcaaagagggtcgggacccgg

SEQ ID NO: 3118 - DNA, 40 bp, Homo sapiens
cgggtcccgaccctctttgccggcgccgggcggggccggc

SEQ ID NO: 3119 - DNA, 40 bp, Homo sapiens
gccggccccgcccggcgccggcaaagagggtcgggacccg

SEQ ID NO: 3120 - DNA, 40 bp, Homo sapiens
gggtcccgaccctctttgccggcgccgggcggggccggcg

SEQ ID NO: 3121 - DNA, 40 bp, Homo sapiens
cgccggccccgcccggcgccggcaaagagggtcgggaccc

SEQ ID NO: 3122 - DNA, 40 bp, Homo sapiens
ggtcccgaccctctttgccggcgccgggcggggccggcgg

SEQ ID NO: 3123 - DNA, 40 bp, Homo sapiens
ccgccggccccgcccggcgccggcaaagagggtcgggacc

SEQ ID NO: 3124 - DNA, 40 bp, Homo sapiens
gtcccgaccctctttgccggcgccgggcggggccggcggc

SEQ ID NO: 3125 - DNA, 40 bp, Homo sapiens
gccgccggccccgcccggcgccggcaaagagggtcgggac

SEQ ID NO: 3126 - DNA, 40 bp, Homo sapiens
tcccgaccctctttgccggcgccgggcggggccggcggcg

SEQ ID NO: 3127 - DNA, 40 bp, Homo sapiens
cgccgccggccccgcccggcgccggcaaagagggtcggga

SEQ ID NO: 3128 - DNA, 40 bp, Homo sapiens
cccgaccctctttgccggcgccgggcggggccggcggcga

SEQ ID NO: 3129 - DNA, 40 bp, Homo sapiens
tcgccgccggccccgcccggcgccggcaaagagggtcggg

SEQ ID NO: 3130 - DNA, 40 bp, Homo sapiens
ccgaccctctttgccggcgccgggcggggccggcggcgag

SEQ ID NO: 3131 - DNA, 40 bp, Homo sapiens
ctcgccgccggccccgcccggcgccggcaaagagggtcgg

SEQ ID NO: 3132 - DNA, 40 bp, Homo sapiens
cgaccctctttgccggcgccgggcggggccggcggcgagt

SEQ ID NO: 3133 - DNA, 40 bp, Homo sapiens
actcgccgccggccccgcccggcgccggcaaagagggtcg

SEQ ID NO: 3134 - DNA, 40 bp, Homo sapiens
gaccctctttgccggcgccgggcggggccggcggcgagtg

SEQ ID NO: 3135 - DNA, 40 bp, Homo sapiens
cactcgccgccggccccgcccggcgccggcaaagagggtc

SEQ ID NO: 3136 - DNA, 40 bp, Homo sapiens
accctctttgccggcgccgggcggggccggcggcgagtga

SEQ ID NO: 3137 - DNA, 40 bp, Homo sapiens
tcactcgccgccggccccgcccggcgccggcaaagagggt

SEQ ID NO: 3138 - DNA, 40 bp, Homo sapiens
ccctctttgccggcgccgggcggggccggcggcgagtgaa

SEQ ID NO: 3139 - DNA, 40 bp, Homo sapiens
ttcactcgccgccggccccgcccggcgccggcaaagaggg

SEQ ID NO: 3140 - DNA, 40 bp, Homo sapiens
cctctttgccggcgccgggcggggccggcggcgagtgaat

SEQ ID NO: 3141 - DNA, 40 bp, Homo sapiens
attcactcgccgccggccccgcccggcgccggcaaagagg

SEQ ID NO: 3142 - DNA, 40 bp, Homo sapiens
ctctttgccggcgccgggcggggccggcggcgagtgaatg

SEQ ID NO: 3143 - DNA, 40 bp, Homo sapiens
cattcactcgccgccggccccgcccggcgccggcaaagag

SEQ ID NO: 3144 - DNA, 40 bp, Homo sapiens
tctttgccggcgccgggcggggccggcggcgagtgaatga

SEQ ID NO: 3145 - DNA, 40 bp, Homo sapiens
tcattcactcgccgccggccccgcccggcgccggcaaaga

SEQ ID NO: 3146 - DNA, 40 bp, Homo sapiens
ctttgccggcgccgggcggggccggcggcgagtgaatgaa

SEQ ID NO: 3147 - DNA, 40 bp, Homo sapiens
ttcattcactcgccgccggccccgcccggcgccggcaaag

SEQ ID NO: 3148 - DNA, 40 bp, Homo sapiens
tttgccggcgccgggcggggccggcggcgagtgaatgaat

SEQ ID NO: 3149 - DNA, 40 bp, Homo sapiens
attcattcactcgccgccggccccgcccggcgccggcaaa

SEQ ID NO: 3150 - DNA, 40 bp, Homo sapiens
ttgccggcgccgggcggggccggcggcgagtgaatgaatt

SEQ ID NO: 3151 - DNA, 40 bp, Homo sapiens
aattcattcactcgccgccggccccgcccggcgccggcaa

SEQ ID NO: 3152 - DNA, 40 bp, Homo sapiens
tgccggcgccgggcggggccggcggcgagtgaatgaatta

SEQ ID NO: 3153 - DNA, 40 bp, Homo sapiens
taattcattcactcgccgccggccccgcccggcgccggca

SEQ ID NO: 3154 - DNA, 40 bp, Homo sapiens
gccggcgccgggcggggccggcggcgagtgaatgaattag

SEQ ID NO: 3155 - DNA, 40 bp, Homo sapiens
ctaattcattcactcgccgccggccccgcccggcgccggc

SEQ ID NO: 3156 - DNA, 40 bp, Homo sapiens
ccggcgccgggcggggccggcggcgagtgaatgaattagg

SEQ ID NO: 3157 - DNA, 40 bp, Homo sapiens
cctaattcattcactcgccgccggccccgcccggcgccgg

SEQ ID NO: 3158 - DNA, 40 bp, Homo sapiens
cggcgccgggcggggccggcggcgagtgaatgaattaggg

SEQ ID NO: 3159 - DNA, 40 bp, Homo sapiens
ccctaattcattcactcgccgccggccccgcccggcgccg

SEQ ID NO: 3160 - DNA, 40 bp, Homo sapiens
ggcgccgggcggggccggcggcgagtgaatgaattagggg

SEQ ID NO: 3161 - DNA, 40 bp, Homo sapiens
cccctaattcattcactcgccgccggccccgcccggcgcc

SEQ ID NO: 3162 - DNA, 40 bp, Homo sapiens
gcgccgggcggggccggcggcgagtgaatgaattaggggt

SEQ ID NO: 3163 - DNA, 40 bp, Homo sapiens
acccctaattcattcactcgccgccggccccgcccggcgc

SEQ ID NO: 3164 - DNA, 40 bp, Homo sapiens
cgccgggcggggccggcggcgagtgaatgaattaggggtc

SEQ ID NO: 3165 - DNA, 40 bp, Homo sapiens
gacccctaattcattcactcgccgccggccccgcccggcg

SEQ ID NO: 3166 - DNA, 40 bp, Homo sapiens
gccgggcggggccggcggcgagtgaatgaattaggggtcc

SEQ ID NO: 3167 - DNA, 40 bp, Homo sapiens
ggacccctaattcattcactcgccgccggccccgcccggc

SEQ ID NO: 3168 - DNA, 40 bp, Homo sapiens
ccgggcggggccggcggcgagtgaatgaattaggggtccc

SEQ ID NO: 3169 - DNA, 40 bp, Homo sapiens
gggacccctaattcattcactcgccgccggccccgcccgg

SEQ ID NO: 3170 - DNA, 40 bp, Homo sapiens
cgggcggggccggcggcgagtgaatgaattaggggtcccc

SEQ ID NO: 3171 - DNA, 40 bp, Homo sapiens
ggggacccctaattcattcactcgccgccggccccgcccg

SEQ ID NO: 3172 - DNA, 40 bp, Homo sapiens
gggcggggccggcggcgagtgaatgaattaggggtccccg

SEQ ID NO: 3173 - DNA, 40 bp, Homo sapiens
cggggacccctaattcattcactcgccgccggccccgccc

SEQ ID NO: 3174 - DNA, 40 bp, Homo sapiens
ggcggggccggcggcgagtgaatgaattaggggtccccgg

SEQ ID NO: 3175 - DNA, 40 bp, Homo sapiens
ccggggacccctaattcattcactcgccgccggccccgcc

SEQ ID NO: 3176 - DNA, 40 bp, Homo sapiens
gcggggccggcggcgagtgaatgaattaggggtccccgga

SEQ ID NO: 3177 - DNA, 40 bp, Homo sapiens
tccggggacccctaattcattcactcgccgccggccccgc

SEQ ID NO: 3178 - DNA, 40 bp, Homo sapiens
cggggccggcggcgagtgaatgaattaggggtccccggag

SEQ ID NO: 3179 - DNA, 40 bp, Homo sapiens
ctccggggacccctaattcattcactcgccgccggccccg

SEQ ID NO: 3180 - DNA, 40 bp, Homo sapiens
ggggccggcggcgagtgaatgaattaggggtccccggagg

SEQ ID NO: 3181 - DNA, 40 bp, Homo sapiens
cctccggggacccctaattcattcactcgccgccggcccc

SEQ ID NO: 3182 - DNA, 40 bp, Homo sapiens
gggccggcggcgagtgaatgaattaggggtccccggaggg

SEQ ID NO: 3183 - DNA, 40 bp, Homo sapiens
ccctccggggacccctaattcattcactcgccgccggccc

SEQ ID NO: 3184 - DNA, 40 bp, Homo sapiens
ggccggcggcgagtgaatgaattaggggtccccggagggg

SEQ ID NO: 3185 - DNA, 40 bp, Homo sapiens
cccctccggggacccctaattcattcactcgccgccggcc

SEQ ID NO: 3186 - DNA, 40 bp, Homo sapiens
gccggcggcgagtgaatgaattaggggtccccggaggggc

SEQ ID NO: 3187 - DNA, 40 bp, Homo sapiens
gcccctccggggacccctaattcattcactcgccgccggc

SEQ ID NO: 3188 - DNA, 40 bp, Homo sapiens
ccggcggcgagtgaatgaattaggggtccccggaggggcg

SEQ ID NO: 3189 - DNA, 40 bp, Homo sapiens
cgcccctccggggacccctaattcattcactcgccgccgg

SEQ ID NO: 3190 - DNA, 40 bp, Homo sapiens
cggcggcgagtgaatgaattaggggtccccggaggggcgg

SEQ ID NO: 3191 - DNA, 40 bp, Homo sapiens
ccgcccctccggggacccctaattcattcactcgccgccg

SEQ ID NO: 3192 - DNA, 40 bp, Homo sapiens
ggcggcgagtgaatgaattaggggtccccggaggggcggg

SEQ ID NO: 3193 - DNA, 40 bp, Homo sapiens
cccgcccctccggggacccctaattcattcactcgccgcc

SEQ ID NO: 3194 - DNA, 40 bp, Homo sapiens
gcggcgagtgaatgaattaggggtccccggaggggcgggt

SEQ ID NO: 3195 - DNA, 40 bp, Homo sapiens
acccgcccctccggggacccctaattcattcactcgccgc

SEQ ID NO: 3196 - DNA, 40 bp, Homo sapiens
cggcgagtgaatgaattaggggtccccggaggggcgggtg

SEQ ID NO: 3197 - DNA, 40 bp, Homo sapiens
cacccgcccctccggggacccctaattcattcactcgccg

SEQ ID NO: 3198 - DNA, 40 bp, Homo sapiens
ggcgagtgaatgaattaggggtccccggaggggcgggtgg

SEQ ID NO: 3199 - DNA, 40 bp, Homo sapiens
ccacccgcccctccggggacccctaattcattcactcgcc

SEQ ID NO: 3200 - DNA, 40 bp, Homo sapiens
gcgagtgaatgaattaggggtccccggaggggcgggtggg

SEQ ID NO: 3201 - DNA, 40 bp, Homo sapiens
cccacccgcccctccggggacccctaattcattcactcgc

SEQ ID NO: 3202 - DNA, 40 bp, Homo sapiens
cgagtgaatgaattaggggtccccggaggggcgggtgggg

SEQ ID NO: 3203 - DNA, 40 bp, Homo sapiens
ccccacccgcccctccggggacccctaattcattcactcg

SEQ ID NO: 3204 - DNA, 40 bp, Homo sapiens
gagtgaatgaattaggggtccccggaggggcgggtggggg

SEQ ID NO: 3205 - DNA, 40 bp, Homo sapiens
cccccacccgcccctccggggacccctaattcattcactc

SEQ ID NO: 3206 - DNA, 40 bp, Homo sapiens
agtgaatgaattaggggtccccggaggggcgggtgggggg

SEQ ID NO: 3207 - DNA, 40 bp, Homo sapiens
ccccccacccgcccctccggggacccctaattcattcact

SEQ ID NO: 3208 - DNA, 40 bp, Homo sapiens
gtgaatgaattaggggtccccggaggggcgggtggggggc

SEQ ID NO: 3209 - DNA, 40 bp, Homo sapiens
gccccccacccgcccctccggggacccctaattcattcac

SEQ ID NO: 3210 - DNA, 40 bp, Homo sapiens
tgaatgaattaggggtccccggaggggcgggtggggggcg

SEQ ID NO: 3211 - DNA, 40 bp, Homo sapiens
cgccccccacccgcccctccggggacccctaattcattca

SEQ ID NO: 3212 - DNA, 40 bp, Homo sapiens
gaatgaattaggggtccccggaggggcgggtggggggcgc

SEQ ID NO: 3213 - DNA, 40 bp, Homo sapiens
gcgccccccacccgcccctccggggacccctaattcattc

SEQ ID NO: 3214 - DNA, 40 bp, Homo sapiens
aatgaattaggggtccccggaggggcgggtggggggcgcg

SEQ ID NO: 3215 - DNA, 40 bp, Homo sapiens
cgcgccccccacccgcccctccggggacccctaattcatt

SEQ ID NO: 3216 - DNA, 40 bp, Homo sapiens
atgaattaggggtccccggaggggcgggtggggggcgcgg

SEQ ID NO: 3217 - DNA, 40 bp, Homo sapiens
ccgcgccccccacccgcccctccggggacccctaattcat

SEQ ID NO: 3218 - DNA, 40 bp, Homo sapiens
tgaattaggggtccccggaggggcgggtggggggcgcggg

SEQ ID NO: 3219 - DNA, 40 bp, Homo sapiens
cccgcgccccccacccgcccctccggggacccctaattca

SEQ ID NO: 3220 - DNA, 40 bp, Homo sapiens
gaattaggggtccccggaggggcgggtggggggcgcgggc

SEQ ID NO: 3221 - DNA, 40 bp, Homo sapiens
gcccgcgccccccacccgcccctccggggacccctaattc

SEQ ID NO: 3222 - DNA, 40 bp, Homo sapiens
aattaggggtccccggaggggcgggtggggggcgcgggcg

SEQ ID NO: 3223 - DNA, 40 bp, Homo sapiens
cgcccgcgccccccacccgcccctccggggacccctaatt

SEQ ID NO: 3224 - DNA, 40 bp, Homo sapiens
attaggggtccccggaggggcgggtggggggcgcgggcgc

SEQ ID NO: 3225 - DNA, 40 bp, Homo sapiens
gcgcccgcgccccccacccgcccctccggggacccctaat

SEQ ID NO: 3226 - DNA, 40 bp, Homo sapiens
ttaggggtccccggaggggcgggtggggggcgcgggcgcg

SEQ ID NO: 3227 - DNA, 40 bp, Homo sapiens
cgcgcccgcgccccccacccgcccctccggggacccctaa

SEQ ID NO: 3228 - DNA, 40 bp, Homo sapiens
taggggtccccggaggggcgggtggggggcgcgggcgcgg

SEQ ID NO: 3229 - DNA, 40 bp, Homo sapiens
ccgcgcccgcgccccccacccgcccctccggggaccccta

SEQ ID NO: 3230 - DNA, 40 bp, Homo sapiens
aggggtccccggaggggcgggtggggggcgcgggcgcggg

SEQ ID NO: 3231 - DNA, 40 bp, Homo sapiens
cccgcgcccgcgccccccacccgcccctccggggacccct

SEQ ID NO: 3232 - DNA, 40 bp, Homo sapiens
ggggtccccggaggggcgggtggggggcgcgggcgcgggg

SEQ ID NO: 3233 - DNA, 40 bp, Homo sapiens
ccccgcgcccgcgccccccacccgcccctccggggacccc

SEQ ID NO: 3234 - DNA, 40 bp, Homo sapiens
gggtccccggaggggcgggtggggggcgcgggcgcggggt

SEQ ID NO: 3235 - DNA, 40 bp, Homo sapiens
accccgcgcccgcgccccccacccgcccctccggggaccc

SEQ ID NO: 3236 - DNA, 40 bp, Homo sapiens
ggtccccggaggggcgggtggggggcgcgggcgcggggtc

SEQ ID NO: 3237 - DNA, 40 bp, Homo sapiens
gaccccgcgcccgcgccccccacccgcccctccggggacc

SEQ ID NO: 3238 - DNA, 40 bp, Homo sapiens
gtccccggaggggcgggtggggggcgcgggcgcggggtcg

SEQ ID NO: 3239 - DNA, 40 bp, Homo sapiens
cgaccccgcgcccgcgccccccacccgcccctccggggac

SEQ ID NO: 3240 - DNA, 40 bp, Homo sapiens
tccccggaggggcgggtggggggcgcgggcgcggggtcgg

SEQ ID NO: 3241 - DNA, 40 bp, Homo sapiens
ccgaccccgcgcccgcgccccccacccgcccctccgggga

SEQ ID NO: 3242 - DNA, 40 bp, Homo sapiens
ccccggaggggcgggtggggggcgcgggcgcggggtcggg

SEQ ID NO: 3243 - DNA, 40 bp, Homo sapiens
cccgaccccgcgcccgcgccccccacccgcccctccgggg

SEQ ID NO: 3244 - DNA, 40 bp, Homo sapiens
cccggaggggcgggtggggggcgcgggcgcggggtcgggg

SEQ ID NO: 3245 - DNA, 40 bp, Homo sapiens
ccccgaccccgcgcccgcgccccccacccgcccctccggg

SEQ ID NO: 3246 - DNA, 40 bp, Homo sapiens
ccggaggggcgggtggggggcgcgggcgcggggtcggggc

SEQ ID NO: 3247 - DNA, 40 bp, Homo sapiens
gccccgaccccgcgcccgcgccccccacccgcccctccgg

SEQ ID NO: 3248 - DNA, 40 bp, Homo sapiens
cggaggggcgggtggggggcgcgggcgcggggtcggggcg

SEQ ID NO: 3249 - DNA, 40 bp, Homo sapiens
cgccccgaccccgcgcccgcgccccccacccgcccctccg

SEQ ID NO: 3250 - DNA, 40 bp, Homo sapiens
ggaggggcgggtggggggcgcgggcgcggggtcggggcgg

SEQ ID NO: 3251 - DNA, 40 bp, Homo sapiens
ccgccccgaccccgcgcccgcgccccccacccgcccctcc

SEQ ID NO: 3252 - DNA, 40 bp, Homo sapiens
gaggggcgggtggggggcgcgggcgcggggtcggggcggg

SEQ ID NO: 3253 - DNA, 40 bp, Homo sapiens
cccgccccgaccccgcgcccgcgccccccacccgcccctc

SEQ ID NO: 3254 - DNA, 40 bp, Homo sapiens
aggggcgggtggggggcgcgggcgcggggtcggggcgggc

SEQ ID NO: 3255 - DNA, 40 bp, Homo sapiens
gcccgccccgaccccgcgcccgcgccccccacccgcccct

SEQ ID NO: 3256 - DNA, 40 bp, Homo sapiens
ggggcgggtggggggcgcgggcgcggggtcggggcgggct

SEQ ID NO: 3257 - DNA, 40 bp, Homo sapiens
agcccgccccgaccccgcgcccgcgccccccacccgcccc

SEQ ID NO: 3258 - DNA, 40 bp, Homo sapiens
gggcgggtggggggcgcgggcgcggggtcggggcgggctg

SEQ ID NO: 3259 - DNA, 40 bp, Homo sapiens
cagcccgccccgaccccgcgcccgcgccccccacccgccc

SEQ ID NO: 3260 - DNA, 40 bp, Homo sapiens
ggcgggtggggggcgcgggcgcggggtcggggcgggctgg

SEQ ID NO: 3261 - DNA, 40 bp, Homo sapiens
ccagcccgccccgaccccgcgcccgcgccccccacccgcc

SEQ ID NO: 3262 - DNA, 40 bp, Homo sapiens
gcgggtggggggcgcgggcgcggggtcggggcgggctggg

SEQ ID NO: 3263 - DNA, 40 bp, Homo sapiens
cccagcccgccccgaccccgcgcccgcgccccccacccgc

SEQ ID NO: 3264 - DNA, 40 bp, Homo sapiens
cgggtggggggcgcgggcgcggggtcggggcgggctgggt

SEQ ID NO: 3265 - DNA, 40 bp, Homo sapiens
acccagcccgccccgaccccgcgcccgcgccccccacccg

SEQ ID NO: 3266 - DNA, 40 bp, Homo sapiens
gggtggggggcgcgggcgcggggtcggggcgggctgggtg

SEQ ID NO: 3267 - DNA, 40 bp, Homo sapiens
cacccagcccgccccgaccccgcgcccgcgccccccaccc

SEQ ID NO: 3268 - DNA, 40 bp, Homo sapiens
ggtggggggcgcgggcgcggggtcggggcgggctgggtga

SEQ ID NO: 3269 - DNA, 40 bp, Homo sapiens
tcacccagcccgccccgaccccgcgcccgcgccccccacc

SEQ ID NO: 3270 - DNA, 40 bp, Homo sapiens
gtggggggcgcgggcgcggggtcggggcgggctgggtgag

SEQ ID NO: 3271 - DNA, 40 bp, Homo sapiens
ctcacccagcccgccccgaccccgcgcccgcgccccccac

SEQ ID NO: 3272 - DNA, 40 bp, Homo sapiens
tggggggcgcgggcgcggggtcggggcgggctgggtgaga

SEQ ID NO: 3273 - DNA, 40 bp, Homo sapiens
tctcacccagcccgccccgaccccgcgcccgcgcccccca

SEQ ID NO: 3274 - DNA, 40 bp, Homo sapiens
ggggggcgcgggcgcggggtcggggcgggctgggtgagag

SEQ ID NO: 3275 - DNA, 40 bp, Homo sapiens
ctctcacccagcccgccccgaccccgcgcccgcgcccccc

SEQ ID NO: 3276 - DNA, 40 bp, Homo sapiens
gggggcgcgggcgcggggtcggggcgggctgggtgagagg

SEQ ID NO: 3277 - DNA, 40 bp, Homo sapiens
cctctcacccagcccgccccgaccccgcgcccgcgccccc

SEQ ID NO: 3278 - DNA, 40 bp, Homo sapiens
ggggcgcgggcgcggggtcggggcgggctgggtgagaggg

SEQ ID NO: 3279 - DNA, 40 bp, Homo sapiens
ccctctcacccagcccgccccgaccccgcgcccgcgcccc

SEQ ID NO: 3280 - DNA, 40 bp, Homo sapiens
gggcgcgggcgcggggtcggggcgggctgggtgagagggg

SEQ ID NO: 3281 - DNA, 40 bp, Homo sapiens
cccctctcacccagcccgccccgaccccgcgcccgcgccc

SEQ ID NO: 3282 - DNA, 40 bp, Homo sapiens
ggcgcgggcgcggggtcggggcgggctgggtgagaggggt

SEQ ID NO: 3283 - DNA, 40 bp, Homo sapiens
acccctctcacccagcccgccccgaccccgcgcccgcgcc

SEQ ID NO: 3284 - DNA, 40 bp, Homo sapiens
gcgcgggcgcggggtcggggcgggctgggtgagaggggtc

SEQ ID NO: 3285 - DNA, 40 bp, Homo sapiens
gacccctctcacccagcccgccccgaccccgcgcccgcgc

SEQ ID NO: 3286 - DNA, 40 bp, Homo sapiens
cgcgggcgcggggtcggggcgggctgggtgagaggggtct

SEQ ID NO: 3287 - DNA, 40 bp, Homo sapiens
agacccctctcacccagcccgccccgaccccgcgcccgcg

SEQ ID NO: 3288 - DNA, 40 bp, Homo sapiens
gcgggcgcggggtcggggcgggctgggtgagaggggtctg

SEQ ID NO: 3289 - DNA, 40 bp, Homo sapiens
cagacccctctcacccagcccgccccgaccccgcgcccgc

SEQ ID NO: 3290 - DNA, 40 bp, Homo sapiens
cgggcgcggggtcggggcgggctgggtgagaggggtctgc

SEQ ID NO: 3291 - DNA, 40 bp, Homo sapiens
gcagacccctctcacccagcccgccccgaccccgcgcccg

SEQ ID NO: 3292 - DNA, 40 bp, Homo sapiens
gggcgcggggtcggggcgggctgggtgagaggggtctgca

SEQ ID NO: 3293 - DNA, 40 bp, Homo sapiens
tgcagacccctctcacccagcccgccccgaccccgcgccc

SEQ ID NO: 3294 - DNA, 40 bp, Homo sapiens
ggcgcggggtcggggcgggctgggtgagaggggtctgcag

SEQ ID NO: 3295 - DNA, 40 bp, Homo sapiens
ctgcagacccctctcacccagcccgccccgaccccgcgcc

SEQ ID NO: 3296 - DNA, 40 bp, Homo sapiens
gcgcggggtcggggcgggctgggtgagaggggtctgcagg

SEQ ID NO: 3297 - DNA, 40 bp, Homo sapiens
cctgcagacccctctcacccagcccgccccgaccccgcgc

SEQ ID NO: 3298 - DNA, 40 bp, Homo sapiens
cgcggggtcggggcgggctgggtgagaggggtctgcaggg

SEQ ID NO: 3299 - DNA, 40 bp, Homo sapiens
ccctgcagacccctctcacccagcccgccccgaccccgcg

SEQ ID NO: 3300 - DNA, 40 bp, Homo sapiens
gcggggtcggggcgggctgggtgagaggggtctgcagggg

SEQ ID NO: 3301 - DNA, 40 bp, Homo sapiens
cccctgcagacccctctcacccagcccgccccgaccccgc

SEQ ID NO: 3302 - DNA, 40 bp, Homo sapiens
cggggtcggggcgggctgggtgagaggggtctgcaggggg

SEQ ID NO: 3303 - DNA, 40 bp, Homo sapiens
ccccctgcagacccctctcacccagcccgccccgaccccg

SEQ ID NO: 3304 - DNA, 40 bp, Homo sapiens
ggggtcggggcgggctgggtgagaggggtctgcagggggg

SEQ ID NO: 3305 - DNA, 40 bp, Homo sapiens
cccccctgcagacccctctcacccagcccgccccgacccc

SEQ ID NO: 3306 - DNA, 40 bp, Homo sapiens
gggtcggggcgggctgggtgagaggggtctgcagggggga

SEQ ID NO: 3307 - DNA, 40 bp, Homo sapiens
tcccccctgcagacccctctcacccagcccgccccgaccc

SEQ ID NO: 3308 - DNA, 40 bp, Homo sapiens
ggtcggggcgggctgggtgagaggggtctgcaggggggag

SEQ ID NO: 3309 - DNA, 40 bp, Homo sapiens
ctcccccctgcagacccctctcacccagcccgccccgacc

SEQ ID NO: 3310 - DNA, 40 bp, Homo sapiens
gtcggggcgggctgggtgagaggggtctgcaggggggagg

SEQ ID NO: 3311 - DNA, 40 bp, Homo sapiens
cctcccccctgcagacccctctcacccagcccgccccgac

SEQ ID NO: 3312 - DNA, 40 bp, Homo sapiens
tcggggcgggctgggtgagaggggtctgcaggggggaggc

SEQ ID NO: 3313 - DNA, 40 bp, Homo sapiens
gcctcccccctgcagacccctctcacccagcccgccccga

SEQ ID NO: 3314 - DNA, 40 bp, Homo sapiens
cggggcgggctgggtgagaggggtctgcaggggggaggcg

SEQ ID NO: 3315 - DNA, 40 bp, Homo sapiens
cgcctcccccctgcagacccctctcacccagcccgccccg

SEQ ID NO: 3316 - DNA, 40 bp, Homo sapiens
ggggcgggctgggtgagaggggtctgcaggggggaggcgc

SEQ ID NO: 3317 - DNA, 40 bp, Homo sapiens
gcgcctcccccctgcagacccctctcacccagcccgcccc

SEQ ID NO: 3318 - DNA, 40 bp, Homo sapiens
gggcgggctgggtgagaggggtctgcaggggggaggcgcg

SEQ ID NO: 3319 - DNA, 40 bp, Homo sapiens
cgcgcctcccccctgcagacccctctcacccagcccgccc

SEQ ID NO: 3320 - DNA, 40 bp, Homo sapiens
ggcgggctgggtgagaggggtctgcaggggggaggcgcgc

SEQ ID NO: 3321 - DNA, 40 bp, Homo sapiens
gcgcgcctcccccctgcagacccctctcacccagcccgcc

SEQ ID NO: 3322 - DNA, 40 bp, Homo sapiens
gcgggctgggtgagaggggtctgcaggggggaggcgcgcg

SEQ ID NO: 3323 - DNA, 40 bp, Homo sapiens
cgcgcgcctcccccctgcagacccctctcacccagcccgc

SEQ ID NO: 3324 - DNA, 40 bp, Homo sapiens
cgggctgggtgagaggggtctgcaggggggaggcgcgcgg

SEQ ID NO: 3325 - DNA, 40 bp, Homo sapiens
ccgcgcgcctcccccctgcagacccctctcacccagcccg

SEQ ID NO: 3326 - DNA, 40 bp, Homo sapiens
gggctgggtgagaggggtctgcaggggggaggcgcgcgga

SEQ ID NO: 3327 - DNA, 40 bp, Homo sapiens
tccgcgcgcctcccccctgcagacccctctcacccagccc

SEQ ID NO: 3328 - DNA, 40 bp, Homo sapiens
ggctgggtgagaggggtctgcaggggggaggcgcgcggac

SEQ ID NO: 3329 - DNA, 40 bp, Homo sapiens
gtccgcgcgcctcccccctgcagacccctctcacccagcc

SEQ ID NO: 3330 - DNA, 40 bp, Homo sapiens
gctgggtgagaggggtctgcaggggggaggcgcgcggacg

SEQ ID NO: 3331 - DNA, 40 bp, Homo sapiens
cgtccgcgcgcctcccccctgcagacccctctcacccagc

SEQ ID NO: 3332 - DNA, 40 bp, Homo sapiens
ctgggtgagaggggtctgcaggggggaggcgcgcggacgc

SEQ ID NO: 3333 - DNA, 40 bp, Homo sapiens
gcgtccgcgcgcctcccccctgcagacccctctcacccag

SEQ ID NO: 3334 - DNA, 40 bp, Homo sapiens
tgggtgagaggggtctgcaggggggaggcgcgcggacgcg

SEQ ID NO: 3335 - DNA, 40 bp, Homo sapiens
cgcgtccgcgcgcctcccccctgcagacccctctcaccca

SEQ ID NO: 3336 - DNA, 40 bp, Homo sapiens
gggtgagaggggtctgcaggggggaggcgcgcggacgcgg

SEQ ID NO: 3337 - DNA, 40 bp, Homo sapiens
ccgcgtccgcgcgcctcccccctgcagacccctctcaccc

SEQ ID NO: 3338 - DNA, 40 bp, Homo sapiens
ggtgagaggggtctgcaggggggaggcgcgcggacgcggc

SEQ ID NO: 3339 - DNA, 40 bp, Homo sapiens
gccgcgtccgcgcgcctcccccctgcagacccctctcacc

SEQ ID NO: 3340 - DNA, 40 bp, Homo sapiens
gtgagaggggtctgcaggggggaggcgcgcggacgcggcg

SEQ ID NO: 3341 - DNA, 40 bp, Homo sapiens
cgccgcgtccgcgcgcctcccccctgcagacccctctcac

SEQ ID NO: 3342 - DNA, 40 bp, Homo sapiens
tgagaggggtctgcaggggggaggcgcgcggacgcggcgg

SEQ ID NO: 3343 - DNA, 40 bp, Homo sapiens
ccgccgcgtccgcgcgcctcccccctgcagacccctctca

SEQ ID NO: 3344 - DNA, 40 bp, Homo sapiens
gagaggggtctgcaggggggaggcgcgcggacgcggcggc

SEQ ID NO: 3345 - DNA, 40 bp, Homo sapiens
gccgccgcgtccgcgcgcctcccccctgcagacccctctc

SEQ ID NO: 3346 - DNA, 40 bp, Homo sapiens
agaggggtctgcaggggggaggcgcgcggacgcggcggcg

SEQ ID NO: 3347 - DNA, 40 bp, Homo sapiens
cgccgccgcgtccgcgcgcctcccccctgcagacccctct

SEQ ID NO: 3348 - DNA, 40 bp, Homo sapiens
gaggggtctgcaggggggaggcgcgcggacgcggcggcgc

SEQ ID NO: 3349 - DNA, 40 bp, Homo sapiens
gcgccgccgcgtccgcgcgcctcccccctgcagacccctc

SEQ ID NO: 3350 - DNA, 40 bp, Homo sapiens
aggggtctgcaggggggaggcgcgcggacgcggcggcgcg

SEQ ID NO: 3351 - DNA, 40 bp, Homo sapiens
cgcgccgccgcgtccgcgcgcctcccccctgcagacccct

SEQ ID NO: 3352 - DNA, 40 bp, Homo sapiens
ggggtctgcaggggggaggcgcgcggacgcggcggcgcgg

SEQ ID NO: 3353 - DNA, 40 bp, Homo sapiens
ccgcgccgccgcgtccgcgcgcctcccccctgcagacccc

SEQ ID NO: 3354 - DNA, 40 bp, Homo sapiens
gggtctgcaggggggaggcgcgcggacgcggcggcgcggg

SEQ ID NO: 3355 - DNA, 40 bp, Homo sapiens
cccgcgccgccgcgtccgcgcgcctcccccctgcagaccc

SEQ ID NO: 3356 - DNA, 40 bp, Homo sapiens
ggtctgcaggggggaggcgcgcggacgcggcggcgcgggg

SEQ ID NO: 3357 - DNA, 40 bp, Homo sapiens
ccccgcgccgccgcgtccgcgcgcctcccccctgcagacc

SEQ ID NO: 3358 - DNA, 40 bp, Homo sapiens
gtctgcaggggggaggcgcgcggacgcggcggcgcgggga

SEQ ID NO: 3359 - DNA, 40 bp, Homo sapiens
tccccgcgccgccgcgtccgcgcgcctcccccctgcagac

SEQ ID NO: 3360 - DNA, 40 bp, Homo sapiens
tctgcaggggggaggcgcgcggacgcggcggcgcggggag

SEQ ID NO: 3361 - DNA, 40 bp, Homo sapiens
ctccccgcgccgccgcgtccgcgcgcctcccccctgcaga

SEQ ID NO: 3362 - DNA, 40 bp, Homo sapiens
ctgcaggggggaggcgcgcggacgcggcggcgcggggagt

SEQ ID NO: 3363 - DNA, 40 bp, Homo sapiens
actccccgcgccgccgcgtccgcgcgcctcccccctgcag

SEQ ID NO: 3364 - DNA, 40 bp, Homo sapiens
tgcaggggggaggcgcgcggacgcggcggcgcggggagtg

SEQ ID NO: 3365 - DNA, 40 bp, Homo sapiens
cactccccgcgccgccgcgtccgcgcgcctcccccctgca

SEQ ID NO: 3366 - DNA, 40 bp, Homo sapiens
gcaggggggaggcgcgcggacgcggcggcgcggggagtga

SEQ ID NO: 3367 - DNA, 40 bp, Homo sapiens
tcactccccgcgccgccgcgtccgcgcgcctcccccctgc

SEQ ID NO: 3368 - DNA, 40 bp, Homo sapiens
caggggggaggcgcgcggacgcggcggcgcggggagtgag

SEQ ID NO: 3369 - DNA, 40 bp, Homo sapiens
ctcactccccgcgccgccgcgtccgcgcgcctcccccctg

SEQ ID NO: 3370 - DNA, 40 bp, Homo sapiens
aggggggaggcgcgcggacgcggcggcgcggggagtgagg

SEQ ID NO: 3371 - DNA, 40 bp, Homo sapiens
cctcactccccgcgccgccgcgtccgcgcgcctcccccct

SEQ ID NO: 3372 - DNA, 40 bp, Homo sapiens
ggggggaggcgcgcggacgcggcggcgcggggagtgagga

SEQ ID NO: 3373 - DNA, 40 bp, Homo sapiens
tcctcactccccgcgccgccgcgtccgcgcgcctcccccc

SEQ ID NO: 3374 - DNA, 40 bp, Homo sapiens
gggggaggcgcgcggacgcggcggcgcggggagtgaggaa

SEQ ID NO: 3375 - DNA, 40 bp, Homo sapiens
ttcctcactccccgcgccgccgcgtccgcgcgcctccccc

SEQ ID NO: 3376 - DNA, 40 bp, Homo sapiens
ggggaggcgcgcggacgcggcggcgcggggagtgaggaat

SEQ ID NO: 3377 - DNA, 40 bp, Homo sapiens
attcctcactccccgcgccgccgcgtccgcgcgcctcccc

SEQ ID NO: 3378 - DNA, 40 bp, Homo sapiens
gggaggcgcgcggacgcggcggcgcggggagtgaggaatg

SEQ ID NO: 3379 - DNA, 40 bp, Homo sapiens
cattcctcactccccgcgccgccgcgtccgcgcgcctccc

SEQ ID NO: 3380 - DNA, 40 bp, Homo sapiens
ggaggcgcgcggacgcggcggcgcggggagtgaggaatgg

SEQ ID NO: 3381 - DNA, 40 bp, Homo sapiens
ccattcctcactccccgcgccgccgcgtccgcgcgcctcc

SEQ ID NO: 3382 - DNA, 40 bp, Homo sapiens
gaggcgcgcggacgcggcggcgcggggagtgaggaatggg

SEQ ID NO: 3383 - DNA, 40 bp, Homo sapiens
cccattcctcactccccgcgccgccgcgtccgcgcgcctc

SEQ ID NO: 3384 - DNA, 40 bp, Homo sapiens
aggcgcgcggacgcggcggcgcggggagtgaggaatgggc

SEQ ID NO: 3385 - DNA, 40 bp, Homo sapiens
gcccattcctcactccccgcgccgccgcgtccgcgcgcct

SEQ ID NO: 3386 - DNA, 40 bp, Homo sapiens
ggcgcgcggacgcggcggcgcggggagtgaggaatgggcg

SEQ ID NO: 3387 - DNA, 40 bp, Homo sapiens
cgcccattcctcactccccgcgccgccgcgtccgcgcgcc

SEQ ID NO: 3388 - DNA, 40 bp, Homo sapiens
gcgcgcggacgcggcggcgcggggagtgaggaatgggcgg

SEQ ID NO: 3389 - DNA, 40 bp, Homo sapiens
ccgcccattcctcactccccgcgccgccgcgtccgcgcgc

SEQ ID NO: 3390 - DNA, 40 bp, Homo sapiens
cgcgcggacgcggcggcgcggggagtgaggaatgggcggt

SEQ ID NO: 3391 - DNA, 40 bp, Homo sapiens
accgcccattcctcactccccgcgccgccgcgtccgcgcg

SEQ ID NO: 3392 - DNA, 40 bp, Homo sapiens
gcgcggacgcggcggcgcggggagtgaggaatgggcggtg

SEQ ID NO: 3393 - DNA, 40 bp, Homo sapiens
caccgcccattcctcactccccgcgccgccgcgtccgcgc

SEQ ID NO: 3394 - DNA, 40 bp, Homo sapiens
cgcggacgcggcggcgcggggagtgaggaatgggcggtgc

SEQ ID NO: 3395 - DNA, 40 bp, Homo sapiens
gcaccgcccattcctcactccccgcgccgccgcgtccgcg

SEQ ID NO: 3396 - DNA, 40 bp, Homo sapiens
gcggacgcggcggcgcggggagtgaggaatgggcggtgcg

SEQ ID NO: 3397 - DNA, 40 bp, Homo sapiens
cgcaccgcccattcctcactccccgcgccgccgcgtccgc

SEQ ID NO: 3398 - DNA, 40 bp, Homo sapiens
cggacgcggcggcgcggggagtgaggaatgggcggtgcgg

SEQ ID NO: 3399 - DNA, 40 bp, Homo sapiens
ccgcaccgcccattcctcactccccgcgccgccgcgtccg

SEQ ID NO: 3400 - DNA, 40 bp, Homo sapiens
ggacgcggcggcgcggggagtgaggaatgggcggtgcggg

SEQ ID NO: 3401 - DNA, 40 bp, Homo sapiens
cccgcaccgcccattcctcactccccgcgccgccgcgtcc

SEQ ID NO: 3402 - DNA, 40 bp, Homo sapiens
gacgcggcggcgcggggagtgaggaatgggcggtgcgggg

SEQ ID NO: 3403 - DNA, 40 bp, Homo sapiens
ccccgcaccgcccattcctcactccccgcgccgccgcgtc

SEQ ID NO: 3404 - DNA, 40 bp, Homo sapiens
acgcggcggcgcggggagtgaggaatgggcggtgcggggc

SEQ ID NO: 3405 - DNA, 40 bp, Homo sapiens
gccccgcaccgcccattcctcactccccgcgccgccgcgt

SEQ ID NO: 3406 - DNA, 40 bp, Homo sapiens
cgcggcggcgcggggagtgaggaatgggcggtgcggggct

SEQ ID NO: 3407 - DNA, 40 bp, Homo sapiens
agccccgcaccgcccattcctcactccccgcgccgccgcg

SEQ ID NO: 3408 - DNA, 40 bp, Homo sapiens
gcggcggcgcggggagtgaggaatgggcggtgcggggctg

SEQ ID NO: 3409 - DNA, 40 bp, Homo sapiens
cagccccgcaccgcccattcctcactccccgcgccgccgc

SEQ ID NO: 3410 - DNA, 40 bp, Homo sapiens
cggcggcgcggggagtgaggaatgggcggtgcggggctga

SEQ ID NO: 3411 - DNA, 40 bp, Homo sapiens
tcagccccgcaccgcccattcctcactccccgcgccgccg

SEQ ID NO: 3412 - DNA, 40 bp, Homo sapiens
ggcggcgcggggagtgaggaatgggcggtgcggggctgag

SEQ ID NO: 3413 - DNA, 40 bp, Homo sapiens
ctcagccccgcaccgcccattcctcactccccgcgccgcc

SEQ ID NO: 3414 - DNA, 40 bp, Homo sapiens
gcggcgcggggagtgaggaatgggcggtgcggggctgagg

SEQ ID NO: 3415 - DNA, 40 bp, Homo sapiens
cctcagccccgcaccgcccattcctcactccccgcgccgc

SEQ ID NO: 3416 - DNA, 40 bp, Homo sapiens
cggcgcggggagtgaggaatgggcggtgcggggctgagga

SEQ ID NO: 3417 - DNA, 40 bp, Homo sapiens
tcctcagccccgcaccgcccattcctcactccccgcgccg

SEQ ID NO: 3418 - DNA, 40 bp, Homo sapiens
ggcgcggggagtgaggaatgggcggtgcggggctgaggag

SEQ ID NO: 3419 - DNA, 40 bp, Homo sapiens
ctcctcagccccgcaccgcccattcctcactccccgcgcc

SEQ ID NO: 3420 - DNA, 40 bp, Homo sapiens
gcgcggggagtgaggaatgggcggtgcggggctgaggagg

SEQ ID NO: 3421 - DNA, 40 bp, Homo sapiens
cctcctcagccccgcaccgcccattcctcactccccgcgc

SEQ ID NO: 3422 - DNA, 40 bp, Homo sapiens
cgcggggagtgaggaatgggcggtgcggggctgaggaggg

SEQ ID NO: 3423 - DNA, 40 bp, Homo sapiens
ccctcctcagccccgcaccgcccattcctcactccccgcg

SEQ ID NO: 3424 - DNA, 40 bp, Homo sapiens
gcggggagtgaggaatgggcggtgcggggctgaggagggt

SEQ ID NO: 3425 - DNA, 40 bp, Homo sapiens
accctcctcagccccgcaccgcccattcctcactccccgc

SEQ ID NO: 3426 - DNA, 40 bp, Homo sapiens
cggggagtgaggaatgggcggtgcggggctgaggagggtg

SEQ ID NO: 3427 - DNA, 40 bp, Homo sapiens
caccctcctcagccccgcaccgcccattcctcactccccg

SEQ ID NO: 3428 - DNA, 40 bp, Homo sapiens
ggggagtgaggaatgggcggtgcggggctgaggagggtga

SEQ ID NO: 3429 - DNA, 40 bp, Homo sapiens
tcaccctcctcagccccgcaccgcccattcctcactcccc

SEQ ID NO: 3430 - DNA, 40 bp, Homo sapiens
gggagtgaggaatgggcggtgcggggctgaggagggtgag

SEQ ID NO: 3431 - DNA, 40 bp, Homo sapiens
ctcaccctcctcagccccgcaccgcccattcctcactccc

SEQ ID NO: 3432 - DNA, 40 bp, Homo sapiens
ggagtgaggaatgggcggtgcggggctgaggagggtgagg

SEQ ID NO: 3433 - DNA, 40 bp, Homo sapiens
cctcaccctcctcagccccgcaccgcccattcctcactcc

SEQ ID NO: 3434 - DNA, 40 bp, Homo sapiens
gagtgaggaatgggcggtgcggggctgaggagggtgaggc

SEQ ID NO: 3435 - DNA, 40 bp, Homo sapiens
gcctcaccctcctcagccccgcaccgcccattcctcactc

SEQ ID NO: 3436 - DNA, 40 bp, Homo sapiens
agtgaggaatgggcggtgcggggctgaggagggtgaggct

SEQ ID NO: 3437 - DNA, 40 bp, Homo sapiens
agcctcaccctcctcagccccgcaccgcccattcctcact

SEQ ID NO: 3438 - DNA, 40 bp, Homo sapiens
gtgaggaatgggcggtgcggggctgaggagggtgaggctg

SEQ ID NO: 3439 - DNA, 40 bp, Homo sapiens
cagcctcaccctcctcagccccgcaccgcccattcctcac

SEQ ID NO: 3440 - DNA, 40 bp, Homo sapiens
tgaggaatgggcggtgcggggctgaggagggtgaggctgg

SEQ ID NO: 3441 - DNA, 40 bp, Homo sapiens
ccagcctcaccctcctcagccccgcaccgcccattcctca

SEQ ID NO: 3442 - DNA, 40 bp, Homo sapiens
gaggaatgggcggtgcggggctgaggagggtgaggctgga

SEQ ID NO: 3443 - DNA, 40 bp, Homo sapiens
tccagcctcaccctcctcagccccgcaccgcccattcctc

SEQ ID NO: 3444 - DNA, 40 bp, Homo sapiens
aggaatgggcggtgcggggctgaggagggtgaggctggag

SEQ ID NO: 3445 - DNA, 40 bp, Homo sapiens
ctccagcctcaccctcctcagccccgcaccgcccattcct

SEQ ID NO: 3446 - DNA, 40 bp, Homo sapiens
ggaatgggcggtgcggggctgaggagggtgaggctggagg

SEQ ID NO: 3447 - DNA, 40 bp, Homo sapiens
cctccagcctcaccctcctcagccccgcaccgcccattcc

SEQ ID NO: 3448 - DNA, 40 bp, Homo sapiens
gaatgggcggtgcggggctgaggagggtgaggctggaggc

SEQ ID NO: 3449 - DNA, 40 bp, Homo sapiens
gcctccagcctcaccctcctcagccccgcaccgcccattc

SEQ ID NO: 3450 - DNA, 40 bp, Homo sapiens
aatgggcggtgcggggctgaggagggtgaggctggaggcg

SEQ ID NO: 3451 - DNA, 40 bp, Homo sapiens
cgcctccagcctcaccctcctcagccccgcaccgcccatt

SEQ ID NO: 3452 - DNA, 40 bp, Homo sapiens
atgggcggtgcggggctgaggagggtgaggctggaggcgg

SEQ ID NO: 3453 - DNA, 40 bp, Homo sapiens
ccgcctccagcctcaccctcctcagccccgcaccgcccat

SEQ ID NO: 3454 - DNA, 40 bp, Homo sapiens
tgggcggtgcggggctgaggagggtgaggctggaggcggt

SEQ ID NO: 3455 - DNA, 40 bp, Homo sapiens
accgcctccagcctcaccctcctcagccccgcaccgccca

SEQ ID NO: 3456 - DNA, 40 bp, Homo sapiens
gggcggtgcggggctgaggagggtgaggctggaggcggtc

SEQ ID NO: 3457 - DNA, 40 bp, Homo sapiens
gaccgcctccagcctcaccctcctcagccccgcaccgccc

SEQ ID NO: 3458 - DNA, 40 bp, Homo sapiens
ggcggtgcggggctgaggagggtgaggctggaggcggtcg

SEQ ID NO: 3459 - DNA, 40 bp, Homo sapiens
cgaccgcctccagcctcaccctcctcagccccgcaccgcc

SEQ ID NO: 3460 - DNA, 40 bp, Homo sapiens
gcggtgcggggctgaggagggtgaggctggaggcggtcgc

SEQ ID NO: 3461 - DNA, 40 bp, Homo sapiens
gcgaccgcctccagcctcaccctcctcagccccgcaccgc

SEQ ID NO: 3462 - DNA, 40 bp, Homo sapiens
cggtgcggggctgaggagggtgaggctggaggcggtcgcc

SEQ ID NO: 3463 - DNA, 40 bp, Homo sapiens
ggcgaccgcctccagcctcaccctcctcagccccgcaccg

SEQ ID NO: 3464 - DNA, 40 bp, Homo sapiens
ggtgcggggctgaggagggtgaggctggaggcggtcgccg

SEQ ID NO: 3465 - DNA, 40 bp, Homo sapiens
cggcgaccgcctccagcctcaccctcctcagccccgcacc

SEQ ID NO: 3466 - DNA, 40 bp, Homo sapiens
gtgcggggctgaggagggtgaggctggaggcggtcgccgc

SEQ ID NO: 3467 - DNA, 40 bp, Homo sapiens
gcggcgaccgcctccagcctcaccctcctcagccccgcac

SEQ ID NO: 3468 - DNA, 40 bp, Homo sapiens
tgcggggctgaggagggtgaggctggaggcggtcgccgct

SEQ ID NO: 3469 - DNA, 40 bp, Homo sapiens
agcggcgaccgcctccagcctcaccctcctcagccccgca

SEQ ID NO: 3470 - DNA, 40 bp, Homo sapiens
gcggggctgaggagggtgaggctggaggcggtcgccgctg

SEQ ID NO: 3471 - DNA, 40 bp, Homo sapiens
cagcggcgaccgcctccagcctcaccctcctcagccccgc

SEQ ID NO: 3472 - DNA, 40 bp, Homo sapiens
cggggctgaggagggtgaggctggaggcggtcgccgctgg

SEQ ID NO: 3473 - DNA, 40 bp, Homo sapiens
ccagcggcgaccgcctccagcctcaccctcctcagccccg

SEQ ID NO: 3474 - DNA, 40 bp, Homo sapiens
ggggctgaggagggtgaggctggaggcggtcgccgctggt

SEQ ID NO: 3475 - DNA, 40 bp, Homo sapiens
accagcggcgaccgcctccagcctcaccctcctcagcccc

SEQ ID NO: 3476 - DNA, 40 bp, Homo sapiens
gggctgaggagggtgaggctggaggcggtcgccgctggtg

SEQ ID NO: 3477 - DNA, 40 bp, Homo sapiens
caccagcggcgaccgcctccagcctcaccctcctcagccc

SEQ ID NO: 3478 - DNA, 40 bp, Homo sapiens
ggctgaggagggtgaggctggaggcggtcgccgctggtgc

SEQ ID NO: 3479 - DNA, 40 bp, Homo sapiens
gcaccagcggcgaccgcctccagcctcaccctcctcagcc

SEQ ID NO: 3480 - DNA, 40 bp, Homo sapiens
gctgaggagggtgaggctggaggcggtcgccgctggtgct

SEQ ID NO: 3481 - DNA, 40 bp, Homo sapiens
agcaccagcggcgaccgcctccagcctcaccctcctcagc

SEQ ID NO: 3482 - DNA, 40 bp, Homo sapiens
ctgaggagggtgaggctggaggcggtcgccgctggtgctg

SEQ ID NO: 3483 - DNA, 40 bp, Homo sapiens
cagcaccagcggcgaccgcctccagcctcaccctcctcag

SEQ ID NO: 3484 - DNA, 40 bp, Homo sapiens
tgaggagggtgaggctggaggcggtcgccgctggtgctgc

SEQ ID NO: 3485 - DNA, 40 bp, Homo sapiens
gcagcaccagcggcgaccgcctccagcctcaccctcctca

SEQ ID NO: 3486 - DNA, 40 bp, Homo sapiens
gaggagggtgaggctggaggcggtcgccgctggtgctgct

SEQ ID NO: 3487 - DNA, 40 bp, Homo sapiens
agcagcaccagcggcgaccgcctccagcctcaccctcctc

SEQ ID NO: 3488 - DNA, 40 bp, Homo sapiens
aggagggtgaggctggaggcggtcgccgctggtgctgctt

SEQ ID NO: 3489 - DNA, 40 bp, Homo sapiens
aagcagcaccagcggcgaccgcctccagcctcaccctcct

SEQ ID NO: 3490 - DNA, 40 bp, Homo sapiens
ggagggtgaggctggaggcggtcgccgctggtgctgcttc

SEQ ID NO: 3491 - DNA, 40 bp, Homo sapiens
gaagcagcaccagcggcgaccgcctccagcctcaccctcc

SEQ ID NO: 3492 - DNA, 40 bp, Homo sapiens
gagggtgaggctggaggcggtcgccgctggtgctgcttcc

SEQ ID NO: 3493 - DNA, 40 bp, Homo sapiens
ggaagcagcaccagcggcgaccgcctccagcctcaccctc

SEQ ID NO: 3494 - DNA, 40 bp, Homo sapiens
agggtgaggctggaggcggtcgccgctggtgctgcttcct

SEQ ID NO: 3495 - DNA, 40 bp, Homo sapiens
aggaagcagcaccagcggcgaccgcctccagcctcaccct

SEQ ID NO: 3496 - DNA, 40 bp, Homo sapiens
gggtgaggctggaggcggtcgccgctggtgctgcttcctg

SEQ ID NO: 3497 - DNA, 40 bp, Homo sapiens
caggaagcagcaccagcggcgaccgcctccagcctcaccc

SEQ ID NO: 3498 - DNA, 40 bp, Homo sapiens
ggtgaggctggaggcggtcgccgctggtgctgcttcctgg

SEQ ID NO: 3499 - DNA, 40 bp, Homo sapiens
ccaggaagcagcaccagcggcgaccgcctccagcctcacc

SEQ ID NO: 3500 - DNA, 40 bp, Homo sapiens
gtgaggctggaggcggtcgccgctggtgctgcttcctgga

SEQ ID NO: 3501 - DNA, 40 bp, Homo sapiens
tccaggaagcagcaccagcggcgaccgcctccagcctcac

SEQ ID NO: 3502 - DNA, 40 bp, Homo sapiens
tgaggctggaggcggtcgccgctggtgctgcttcctggac

SEQ ID NO: 3503 - DNA, 40 bp, Homo sapiens
gtccaggaagcagcaccagcggcgaccgcctccagcctca

SEQ ID NO: 3504 - DNA, 40 bp, Homo sapiens
gaggctggaggcggtcgccgctggtgctgcttcctggacg

SEQ ID NO: 3505 - DNA, 40 bp, Homo sapiens
cgtccaggaagcagcaccagcggcgaccgcctccagcctc

SEQ ID NO: 3506 - DNA, 40 bp, Homo sapiens
aggctggaggcggtcgccgctggtgctgcttcctggacgg

SEQ ID NO: 3507 - DNA, 40 bp, Homo sapiens
ccgtccaggaagcagcaccagcggcgaccgcctccagcct

SEQ ID NO: 3508 - DNA, 40 bp, Homo sapiens
ggctggaggcggtcgccgctggtgctgcttcctggacggg

SEQ ID NO: 3509 - DNA, 40 bp, Homo sapiens
cccgtccaggaagcagcaccagcggcgaccgcctccagcc

SEQ ID NO: 3510 - DNA, 40 bp, Homo sapiens
gctggaggcggtcgccgctggtgctgcttcctggacgggg

SEQ ID NO: 3511 - DNA, 40 bp, Homo sapiens
ccccgtccaggaagcagcaccagcggcgaccgcctccagc

SEQ ID NO: 3512 - DNA, 40 bp, Homo sapiens
ctggaggcggtcgccgctggtgctgcttcctggacgggga

SEQ ID NO: 3513 - DNA, 40 bp, Homo sapiens
tccccgtccaggaagcagcaccagcggcgaccgcctccag

SEQ ID NO: 3514 - DNA, 40 bp, Homo sapiens
tggaggcggtcgccgctggtgctgcttcctggacggggaa

SEQ ID NO: 3515 - DNA, 40 bp, Homo sapiens
ttccccgtccaggaagcagcaccagcggcgaccgcctcca

SEQ ID NO: 3516 - DNA, 40 bp, Homo sapiens
ggaggcggtcgccgctggtgctgcttcctggacggggaac

SEQ ID NO: 3517 - DNA, 40 bp, Homo sapiens
gttccccgtccaggaagcagcaccagcggcgaccgcctcc

SEQ ID NO: 3518 - DNA, 40 bp, Homo sapiens
gaggcggtcgccgctggtgctgcttcctggacggggaacc

SEQ ID NO: 3519 - DNA, 40 bp, Homo sapiens
ggttccccgtccaggaagcagcaccagcggcgaccgcctc

SEQ ID NO: 3520 - DNA, 40 bp, Homo sapiens
aggcggtcgccgctggtgctgcttcctggacggggaaccc

SEQ ID NO: 3521 - DNA, 40 bp, Homo sapiens
gggttccccgtccaggaagcagcaccagcggcgaccgcct

SEQ ID NO: 3522 - DNA, 40 bp, Homo sapiens
ggcggtcgccgctggtgctgcttcctggacggggaacccc

SEQ ID NO: 3523 - DNA, 40 bp, Homo sapiens
ggggttccccgtccaggaagcagcaccagcggcgaccgcc

SEQ ID NO: 3524 - DNA, 40 bp, Homo sapiens
gcggtcgccgctggtgctgcttcctggacggggaacccct

SEQ ID NO: 3525 - DNA, 40 bp, Homo sapiens
aggggttccccgtccaggaagcagcaccagcggcgaccgc

SEQ ID NO: 3526 - DNA, 40 bp, Homo sapiens
cggtcgccgctggtgctgcttcctggacggggaacccctt

SEQ ID NO: 3527 - DNA, 40 bp, Homo sapiens
aaggggttccccgtccaggaagcagcaccagcggcgaccg

SEQ ID NO: 3528 - DNA, 40 bp, Homo sapiens
ggtcgccgctggtgctgcttcctggacggggaaccccttc

SEQ ID NO: 3529 - DNA, 40 bp, Homo sapiens
gaaggggttccccgtccaggaagcagcaccagcggcgacc

SEQ ID NO: 3530 - DNA, 40 bp, Homo sapiens
gtcgccgctggtgctgcttcctggacggggaaccccttcc

SEQ ID NO: 3531 - DNA, 40 bp, Homo sapiens
ggaaggggttccccgtccaggaagcagcaccagcggcgac

SEQ ID NO: 3532 - DNA, 40 bp, Homo sapiens
tcgccgctggtgctgcttcctggacggggaaccccttcct

SEQ ID NO: 3533 - DNA, 40 bp, Homo sapiens
aggaaggggttccccgtccaggaagcagcaccagcggcga

SEQ ID NO: 3534 - DNA, 40 bp, Homo sapiens
cgccgctggtgctgcttcctggacggggaaccccttcctt

SEQ ID NO: 3535 - DNA, 40 bp, Homo sapiens
aaggaaggggttccccgtccaggaagcagcaccagcggcg

SEQ ID NO: 3536 - DNA, 40 bp, Homo sapiens
gccgctggtgctgcttcctggacggggaaccccttccttc

SEQ ID NO: 3537 - DNA, 40 bp, Homo sapiens
gaaggaaggggttccccgtccaggaagcagcaccagcggc

SEQ ID NO: 3538 - DNA, 40 bp, Homo sapiens
ccgctggtgctgcttcctggacggggaaccccttccttcc

SEQ ID NO: 3539 - DNA, 40 bp, Homo sapiens
ggaaggaaggggttccccgtccaggaagcagcaccagcgg

SEQ ID NO: 3540 - DNA, 40 bp, Homo sapiens
cgctggtgctgcttcctggacggggaaccccttccttcct

SEQ ID NO: 3541 - DNA, 40 bp, Homo sapiens
aggaaggaaggggttccccgtccaggaagcagcaccagcg

SEQ ID NO: 3542 - DNA, 40 bp, Homo sapiens
gctggtgctgcttcctggacggggaaccccttccttcctc

SEQ ID NO: 3543 - DNA, 40 bp, Homo sapiens
gaggaaggaaggggttccccgtccaggaagcagcaccagc

SEQ ID NO: 3544 - DNA, 40 bp, Homo sapiens
ctggtgctgcttcctggacggggaaccccttccttcctcc

SEQ ID NO: 3545 - DNA, 40 bp, Homo sapiens
ggaggaaggaaggggttccccgtccaggaagcagcaccag

SEQ ID NO: 3546 - DNA, 40 bp, Homo sapiens
tggtgctgcttcctggacggggaaccccttccttcctcct

SEQ ID NO: 3547 - DNA, 40 bp, Homo sapiens
aggaggaaggaaggggttccccgtccaggaagcagcacca

SEQ ID NO: 3548 - DNA, 40 bp, Homo sapiens
ggtgctgcttcctggacggggaaccccttccttcctcctc

SEQ ID NO: 3549 - DNA, 40 bp, Homo sapiens
gaggaggaaggaaggggttccccgtccaggaagcagcacc

SEQ ID NO: 3550 - DNA, 40 bp, Homo sapiens
gtgctgcttcctggacggggaaccccttccttcctcctcc

SEQ ID NO: 3551 - DNA, 40 bp, Homo sapiens
ggaggaggaaggaaggggttccccgtccaggaagcagcac

SEQ ID NO: 3552 - DNA, 40 bp, Homo sapiens
tgctgcttcctggacggggaaccccttccttcctcctccc

SEQ ID NO: 3553 - DNA, 40 bp, Homo sapiens
gggaggaggaaggaaggggttccccgtccaggaagcagca

SEQ ID NO: 3554 - DNA, 40 bp, Homo sapiens
gctgcttcctggacggggaaccccttccttcctcctcccc

SEQ ID NO: 3555 - DNA, 40 bp, Homo sapiens
ggggaggaggaaggaaggggttccccgtccaggaagcagc

SEQ ID NO: 3556 - DNA, 40 bp, Homo sapiens
ctgcttcctggacggggaaccccttccttcctcctccccg

SEQ ID NO: 3557 - DNA, 40 bp, Homo sapiens
cggggaggaggaaggaaggggttccccgtccaggaagcag

SEQ ID NO: 3558 - DNA, 40 bp, Homo sapiens
tgcttcctggacggggaaccccttccttcctcctccccga

SEQ ID NO: 3559 - DNA, 40 bp, Homo sapiens
tcggggaggaggaaggaaggggttccccgtccaggaagca

SEQ ID NO: 3560 - DNA, 40 bp, Homo sapiens
gcttcctggacggggaaccccttccttcctcctccccgag

SEQ ID NO: 3561 - DNA, 40 bp, Homo sapiens
ctcggggaggaggaaggaaggggttccccgtccaggaagc

SEQ ID NO: 3562 - DNA, 40 bp, Homo sapiens
cttcctggacggggaaccccttccttcctcctccccgaga

SEQ ID NO: 3563 - DNA, 40 bp, Homo sapiens
tctcggggaggaggaaggaaggggttccccgtccaggaag

SEQ ID NO: 3564 - DNA, 40 bp, Homo sapiens
ttcctggacggggaaccccttccttcctcctccccgagag

SEQ ID NO: 3565 - DNA, 40 bp, Homo sapiens
ctctcggggaggaggaaggaaggggttccccgtccaggaa

SEQ ID NO: 3566 - DNA, 40 bp, Homo sapiens
tcctggacggggaaccccttccttcctcctccccgagagc

SEQ ID NO: 3567 - DNA, 40 bp, Homo sapiens
gctctcggggaggaggaaggaaggggttccccgtccagga

SEQ ID NO: 3568 - DNA, 40 bp, Homo sapiens
cctggacggggaaccccttccttcctcctccccgagagcc

SEQ ID NO: 3569 - DNA, 40 bp, Homo sapiens
ggctctcggggaggaggaaggaaggggttccccgtccagg

SEQ ID NO: 3570 - DNA, 40 bp, Homo sapiens
ctggacggggaaccccttccttcctcctccccgagagccg

SEQ ID NO: 3571 - DNA, 40 bp, Homo sapiens
cggctctcggggaggaggaaggaaggggttccccgtccag

SEQ ID NO: 3572 - DNA, 40 bp, Homo sapiens
tggacggggaaccccttccttcctcctccccgagagccgc

SEQ ID NO: 3573 - DNA, 40 bp, Homo sapiens
gcggctctcggggaggaggaaggaaggggttccccgtcca

SEQ ID NO: 3574 - DNA, 40 bp, Homo sapiens
ggacggggaaccccttccttcctcctccccgagagccgcg

SEQ ID NO: 3575 - DNA, 40 bp, Homo sapiens
cgcggctctcggggaggaggaaggaaggggttccccgtcc

SEQ ID NO: 3576 - DNA, 40 bp, Homo sapiens
gacggggaaccccttccttcctcctccccgagagccgcgg

SEQ ID NO: 3577 - DNA, 40 bp, Homo sapiens
ccgcggctctcggggaggaggaaggaaggggttccccgtc

SEQ ID NO: 3578 - DNA, 40 bp, Homo sapiens
acggggaaccccttccttcctcctccccgagagccgcggc

SEQ ID NO: 3579 - DNA, 40 bp, Homo sapiens
gccgcggctctcggggaggaggaaggaaggggttccccgt

SEQ ID NO: 3580 - DNA, 40 bp, Homo sapiens
cggggaaccccttccttcctcctccccgagagccgcggct

SEQ ID NO: 3581 - DNA, 40 bp, Homo sapiens
agccgcggctctcggggaggaggaaggaaggggttccccg

SEQ ID NO: 3582 - DNA, 40 bp, Homo sapiens
ggggaaccccttccttcctcctccccgagagccgcggctg

SEQ ID NO: 3583 - DNA, 40 bp, Homo sapiens
cagccgcggctctcggggaggaggaaggaaggggttcccc

SEQ ID NO: 3584 - DNA, 40 bp, Homo sapiens
gggaaccccttccttcctcctccccgagagccgcggctgg

SEQ ID NO: 3585 - DNA, 40 bp, Homo sapiens
ccagccgcggctctcggggaggaggaaggaaggggttccc

SEQ ID NO: 3586 - DNA, 40 bp, Homo sapiens
ggaaccccttccttcctcctccccgagagccgcggctgga

SEQ ID NO: 3587 - DNA, 40 bp, Homo sapiens
tccagccgcggctctcggggaggaggaaggaaggggttcc

SEQ ID NO: 3588 - DNA, 40 bp, Homo sapiens
gaaccccttccttcctcctccccgagagccgcggctggag

SEQ ID NO: 3589 - DNA, 40 bp, Homo sapiens
ctccagccgcggctctcggggaggaggaaggaaggggttc

SEQ ID NO: 3590 - DNA, 40 bp, Homo sapiens
aaccccttccttcctcctccccgagagccgcggctggagg

SEQ ID NO: 3591 - DNA, 40 bp, Homo sapiens
cctccagccgcggctctcggggaggaggaaggaaggggtt

SEQ ID NO: 3592 - DNA, 40 bp, Homo sapiens
accccttccttcctcctccccgagagccgcggctggaggc

SEQ ID NO: 3593 - DNA, 40 bp, Homo sapiens
gcctccagccgcggctctcggggaggaggaaggaaggggt

SEQ ID NO: 3594 - DNA, 40 bp, Homo sapiens
ccccttccttcctcctccccgagagccgcggctggaggct

SEQ ID NO: 3595 - DNA, 40 bp, Homo sapiens
agcctccagccgcggctctcggggaggaggaaggaagggg

SEQ ID NO: 3596 - DNA, 40 bp, Homo sapiens
cccttccttcctcctccccgagagccgcggctggaggctt

SEQ ID NO: 3597 - DNA, 40 bp, Homo sapiens
aagcctccagccgcggctctcggggaggaggaaggaaggg

SEQ ID NO: 3598 - DNA, 40 bp, Homo sapiens
ccttccttcctcctccccgagagccgcggctggaggcttc

SEQ ID NO: 3599 - DNA, 40 bp, Homo sapiens
gaagcctccagccgcggctctcggggaggaggaaggaagg

SEQ ID NO: 3600 - DNA, 40 bp, Homo sapiens
cttccttcctcctccccgagagccgcggctggaggcttct

SEQ ID NO: 3601 - DNA, 40 bp, Homo sapiens
agaagcctccagccgcggctctcggggaggaggaaggaag

SEQ ID NO: 3602 - DNA, 40 bp, Homo sapiens
ttccttcctcctccccgagagccgcggctggaggcttctg

SEQ ID NO: 3603 - DNA, 40 bp, Homo sapiens
cagaagcctccagccgcggctctcggggaggaggaaggaa

SEQ ID NO: 3604 - DNA, 40 bp, Homo sapiens
tccttcctcctccccgagagccgcggctggaggcttctgg

SEQ ID NO: 3605 - DNA, 40 bp, Homo sapiens
ccagaagcctccagccgcggctctcggggaggaggaagga

SEQ ID NO: 3606 - DNA, 40 bp, Homo sapiens
ccttcctcctccccgagagccgcggctggaggcttctggg

SEQ ID NO: 3607 - DNA, 40 bp, Homo sapiens
cccagaagcctccagccgcggctctcggggaggaggaagg

SEQ ID NO: 3608 - DNA, 40 bp, Homo sapiens
cttcctcctccccgagagccgcggctggaggcttctgggg

SEQ ID NO: 3609 - DNA, 40 bp, Homo sapiens
ccccagaagcctccagccgcggctctcggggaggaggaag

SEQ ID NO: 3610 - DNA, 40 bp, Homo sapiens
ttcctcctccccgagagccgcggctggaggcttctgggga

SEQ ID NO: 3611 - DNA, 40 bp, Homo sapiens
tccccagaagcctccagccgcggctctcggggaggaggaa

SEQ ID NO: 3612 - DNA, 40 bp, Homo sapiens
tcctcctccccgagagccgcggctggaggcttctggggag

SEQ ID NO: 3613 - DNA, 40 bp, Homo sapiens
ctccccagaagcctccagccgcggctctcggggaggagga

SEQ ID NO: 3614 - DNA, 40 bp, Homo sapiens
cctcctccccgagagccgcggctggaggcttctggggaga

SEQ ID NO: 3615 - DNA, 40 bp, Homo sapiens
tctccccagaagcctccagccgcggctctcggggaggagg

SEQ ID NO: 3616 - DNA, 40 bp, Homo sapiens
ctcctccccgagagccgcggctggaggcttctggggagaa

SEQ ID NO: 3617 - DNA, 40 bp, Homo sapiens
ttctccccagaagcctccagccgcggctctcggggaggag

SEQ ID NO: 3618 - DNA, 40 bp, Homo sapiens
tcctccccgagagccgcggctggaggcttctggggagaaa

SEQ ID NO: 3619 - DNA, 40 bp, Homo sapiens
tttctccccagaagcctccagccgcggctctcggggagga

SEQ ID NO: 3620 - DNA, 40 bp, Homo sapiens
cctccccgagagccgcggctggaggcttctggggagaaac

SEQ ID NO: 3621 - DNA, 40 bp, Homo sapiens
gtttctccccagaagcctccagccgcggctctcggggagg

SEQ ID NO: 3622 - DNA, 40 bp, Homo sapiens
ctccccgagagccgcggctggaggcttctggggagaaact

SEQ ID NO: 3623 - DNA, 40 bp, Homo sapiens
agtttctccccagaagcctccagccgcggctctcggggag

SEQ ID NO: 3624 - DNA, 40 bp, Homo sapiens
tccccgagagccgcggctggaggcttctggggagaaactc

SEQ ID NO: 3625 - DNA, 40 bp, Homo sapiens
gagtttctccccagaagcctccagccgcggctctcgggga

SEQ ID NO: 3626 - DNA, 40 bp, Homo sapiens
ccccgagagccgcggctggaggcttctggggagaaactcg

SEQ ID NO: 3627 - DNA, 40 bp, Homo sapiens
cgagtttctccccagaagcctccagccgcggctctcgggg

SEQ ID NO: 3628 - DNA, 40 bp, Homo sapiens
cccgagagccgcggctggaggcttctggggagaaactcgg

SEQ ID NO: 3629 - DNA, 40 bp, Homo sapiens
ccgagtttctccccagaagcctccagccgcggctctcggg

SEQ ID NO: 3630 - DNA, 40 bp, Homo sapiens
ccgagagccgcggctggaggcttctggggagaaactcggg

SEQ ID NO: 3631 - DNA, 40 bp, Homo sapiens
cccgagtttctccccagaagcctccagccgcggctctcgg

SEQ ID NO: 3632 - DNA, 40 bp, Homo sapiens
cgagagccgcggctggaggcttctggggagaaactcgggc

SEQ ID NO: 3633 - DNA, 40 bp, Homo sapiens
gcccgagtttctccccagaagcctccagccgcggctctcg

SEQ ID NO: 3634 - DNA, 40 bp, Homo sapiens
gagagccgcggctggaggcttctggggagaaactcgggcc

SEQ ID NO: 3635 - DNA, 40 bp, Homo sapiens
ggcccgagtttctccccagaagcctccagccgcggctctc

SEQ ID NO: 3636 - DNA, 40 bp, Homo sapiens
agagccgcggctggaggcttctggggagaaactcgggccg

SEQ ID NO: 3637 - DNA, 40 bp, Homo sapiens
cggcccgagtttctccccagaagcctccagccgcggctct

SEQ ID NO: 3638 - DNA, 40 bp, Homo sapiens
gagccgcggctggaggcttctggggagaaactcgggccgg

SEQ ID NO: 3639 - DNA, 40 bp, Homo sapiens
ccggcccgagtttctccccagaagcctccagccgcggctc

SEQ ID NO: 3640 - DNA, 40 bp, Homo sapiens
agccgcggctggaggcttctggggagaaactcgggccggg

SEQ ID NO: 3641 - DNA, 40 bp, Homo sapiens
cccggcccgagtttctccccagaagcctccagccgcggct

SEQ ID NO: 3642 - DNA, 40 bp, Homo sapiens
gccgcggctggaggcttctggggagaaactcgggccgggc

SEQ ID NO: 3643 - DNA, 40 bp, Homo sapiens
gcccggcccgagtttctccccagaagcctccagccgcggc

SEQ ID NO: 3644 - DNA, 40 bp, Homo sapiens
ccgcggctggaggcttctggggagaaactcgggccgggcc

SEQ ID NO: 3645 - DNA, 40 bp, Homo sapiens
ggcccggcccgagtttctccccagaagcctccagccgcgg

SEQ ID NO: 3646 - DNA, 40 bp, Homo sapiens
cgcggctggaggcttctggggagaaactcgggccgggccg

SEQ ID NO: 3647 - DNA, 40 bp, Homo sapiens
cggcccggcccgagtttctccccagaagcctccagccgcg

SEQ ID NO: 3648 - DNA, 40 bp, Homo sapiens
gcggctggaggcttctggggagaaactcgggccgggccgg

SEQ ID NO: 3649 - DNA, 40 bp, Homo sapiens
ccggcccggcccgagtttctccccagaagcctccagccgc

SEQ ID NO: 3650 - DNA, 40 bp, Homo sapiens
cggctggaggcttctggggagaaactcgggccgggccggc

SEQ ID NO: 3651 - DNA, 40 bp, Homo sapiens
gccggcccggcccgagtttctccccagaagcctccagccg

SEQ ID NO: 3652 - DNA, 40 bp, Homo sapiens
ggctggaggcttctggggagaaactcgggccgggccggct

SEQ ID NO: 3653 - DNA, 40 bp, Homo sapiens
agccggcccggcccgagtttctccccagaagcctccagcc

SEQ ID NO: 3654 - DNA, 40 bp, Homo sapiens
gctggaggcttctggggagaaactcgggccgggccggctg

SEQ ID NO: 3655 - DNA, 40 bp, Homo sapiens
cagccggcccggcccgagtttctccccagaagcctccagc

SEQ ID NO: 3656 - DNA, 40 bp, Homo sapiens
ctggaggcttctggggagaaactcgggccgggccggctgc

SEQ ID NO: 3657 - DNA, 40 bp, Homo sapiens
gcagccggcccggcccgagtttctccccagaagcctccag

SEQ ID NO: 3658 - DNA, 40 bp, Homo sapiens
tggaggcttctggggagaaactcgggccgggccggctgcc

SEQ ID NO: 3659 - DNA, 40 bp, Homo sapiens
ggcagccggcccggcccgagtttctccccagaagcctcca

SEQ ID NO: 3660 - DNA, 40 bp, Homo sapiens
ggaggcttctggggagaaactcgggccgggccggctgccc

SEQ ID NO: 3661 - DNA, 40 bp, Homo sapiens
gggcagccggcccggcccgagtttctccccagaagcctcc

SEQ ID NO: 3662 - DNA, 40 bp, Homo sapiens
gaggcttctggggagaaactcgggccgggccggctgcccc

SEQ ID NO: 3663 - DNA, 40 bp, Homo sapiens
ggggcagccggcccggcccgagtttctccccagaagcctc

SEQ ID NO: 3664 - DNA, 40 bp, Homo sapiens
aggcttctggggagaaactcgggccgggccggctgcccct

SEQ ID NO: 3665 - DNA, 40 bp, Homo sapiens
aggggcagccggcccggcccgagtttctccccagaagcct

SEQ ID NO: 3666 - DNA, 40 bp, Homo sapiens
ggcttctggggagaaactcgggccgggccggctgcccctc

SEQ ID NO: 3667 - DNA, 40 bp, Homo sapiens
gaggggcagccggcccggcccgagtttctccccagaagcc

SEQ ID NO: 3668 - DNA, 40 bp, Homo sapiens
gcttctggggagaaactcgggccgggccggctgcccctcg

SEQ ID NO: 3669 - DNA, 40 bp, Homo sapiens
cgaggggcagccggcccggcccgagtttctccccagaagc

SEQ ID NO: 3670 - DNA, 40 bp, Homo sapiens
cttctggggagaaactcgggccgggccggctgcccctcgg

SEQ ID NO: 3671 - DNA, 40 bp, Homo sapiens
ccgaggggcagccggcccggcccgagtttctccccagaag

SEQ ID NO: 3672 - DNA, 40 bp, Homo sapiens
ttctggggagaaactcgggccgggccggctgcccctcgga

SEQ ID NO: 3673 - DNA, 40 bp, Homo sapiens
tccgaggggcagccggcccggcccgagtttctccccagaa

SEQ ID NO: 3674 - DNA, 40 bp, Homo sapiens
tctggggagaaactcgggccgggccggctgcccctcggag

SEQ ID NO: 3675 - DNA, 40 bp, Homo sapiens
ctccgaggggcagccggcccggcccgagtttctccccaga

SEQ ID NO: 3676 - DNA, 40 bp, Homo sapiens
ctggggagaaactcgggccgggccggctgcccctcggagc

SEQ ID NO: 3677 - DNA, 40 bp, Homo sapiens
gctccgaggggcagccggcccggcccgagtttctccccag

SEQ ID NO: 3678 - DNA, 40 bp, Homo sapiens
tggggagaaactcgggccgggccggctgcccctcggagcg

SEQ ID NO: 3679 - DNA, 40 bp, Homo sapiens
cgctccgaggggcagccggcccggcccgagtttctcccca

SEQ ID NO: 3680 - DNA, 40 bp, Homo sapiens
ggggagaaactcgggccgggccggctgcccctcggagcgg

SEQ ID NO: 3681 - DNA, 40 bp, Homo sapiens
ccgctccgaggggcagccggcccggcccgagtttctcccc

SEQ ID NO: 3682 - DNA, 40 bp, Homo sapiens
gggagaaactcgggccgggccggctgcccctcggagcggt

SEQ ID NO: 3683 - DNA, 40 bp, Homo sapiens
accgctccgaggggcagccggcccggcccgagtttctccc

SEQ ID NO: 3684 - DNA, 40 bp, Homo sapiens
ggagaaactcgggccgggccggctgcccctcggagcggtg

SEQ ID NO: 3685 - DNA, 40 bp, Homo sapiens
caccgctccgaggggcagccggcccggcccgagtttctcc

SEQ ID NO: 3686 - DNA, 40 bp, Homo sapiens
gagaaactcgggccgggccggctgcccctcggagcggtgg

SEQ ID NO: 3687 - DNA, 40 bp, Homo sapiens
ccaccgctccgaggggcagccggcccggcccgagtttctc

SEQ ID NO: 3688 - DNA, 40 bp, Homo sapiens
agaaactcgggccgggccggctgcccctcggagcggtggg

SEQ ID NO: 3689 - DNA, 40 bp, Homo sapiens
cccaccgctccgaggggcagccggcccggcccgagtttct

SEQ ID NO: 3690 - DNA, 40 bp, Homo sapiens
gaaactcgggccgggccggctgcccctcggagcggtgggg

SEQ ID NO: 3691 - DNA, 40 bp, Homo sapiens
ccccaccgctccgaggggcagccggcccggcccgagtttc

SEQ ID NO: 3692 - DNA, 40 bp, Homo sapiens
aaactcgggccgggccggctgcccctcggagcggtggggt

SEQ ID NO: 3693 - DNA, 40 bp, Homo sapiens
accccaccgctccgaggggcagccggcccggcccgagttt

SEQ ID NO: 3694 - DNA, 40 bp, Homo sapiens
aactcgggccgggccggctgcccctcggagcggtggggtg

SEQ ID NO: 3695 - DNA, 40 bp, Homo sapiens
caccccaccgctccgaggggcagccggcccggcccgagtt

SEQ ID NO: 3696 - DNA, 40 bp, Homo sapiens
actcgggccgggccggctgcccctcggagcggtggggtgc

SEQ ID NO: 3697 - DNA, 40 bp, Homo sapiens
gcaccccaccgctccgaggggcagccggcccggcccgagt

SEQ ID NO: 3698 - DNA, 40 bp, Homo sapiens
ctcgggccgggccggctgcccctcggagcggtggggtgcg

SEQ ID NO: 3699 - DNA, 40 bp, Homo sapiens
cgcaccccaccgctccgaggggcagccggcccggcccgag

SEQ ID NO: 3700 - DNA, 40 bp, Homo sapiens
tcgggccgggccggctgcccctcggagcggtggggtgcgg

SEQ ID NO: 3701 - DNA, 40 bp, Homo sapiens
ccgcaccccaccgctccgaggggcagccggcccggcccga

SEQ ID NO: 3702 - DNA, 40 bp, Homo sapiens
cgggccgggccggctgcccctcggagcggtggggtgcggt

SEQ ID NO: 3703 - DNA, 40 bp, Homo sapiens
accgcaccccaccgctccgaggggcagccggcccggcccg

SEQ ID NO: 3704 - DNA, 40 bp, Homo sapiens
gggccgggccggctgcccctcggagcggtggggtgcggtg

SEQ ID NO: 3705 - DNA, 40 bp, Homo sapiens
caccgcaccccaccgctccgaggggcagccggcccggccc

SEQ ID NO: 3706 - DNA, 40 bp, Homo sapiens
ggccgggccggctgcccctcggagcggtggggtgcggtgg

SEQ ID NO: 3707 - DNA, 40 bp, Homo sapiens
ccaccgcaccccaccgctccgaggggcagccggcccggcc

SEQ ID NO: 3708 - DNA, 40 bp, Homo sapiens
gccgggccggctgcccctcggagcggtggggtgcggtgga

SEQ ID NO: 3709 - DNA, 40 bp, Homo sapiens
tccaccgcaccccaccgctccgaggggcagccggcccggc

SEQ ID NO: 3710 - DNA, 40 bp, Homo sapiens
ccgggccggctgcccctcggagcggtggggtgcggtggag

SEQ ID NO: 3711 - DNA, 40 bp, Homo sapiens
ctccaccgcaccccaccgctccgaggggcagccggcccgg

SEQ ID NO: 3712 - DNA, 40 bp, Homo sapiens
cgggccggctgcccctcggagcggtggggtgcggtggagg

SEQ ID NO: 3713 - DNA, 40 bp, Homo sapiens
cctccaccgcaccccaccgctccgaggggcagccggcccg

SEQ ID NO: 3714 - DNA, 40 bp, Homo sapiens
gggccggctgcccctcggagcggtggggtgcggtggaggt

SEQ ID NO: 3715 - DNA, 40 bp, Homo sapiens
acctccaccgcaccccaccgctccgaggggcagccggccc

SEQ ID NO: 3716 - DNA, 40 bp, Homo sapiens
ggccggctgcccctcggagcggtggggtgcggtggaggtt

SEQ ID NO: 3717 - DNA, 40 bp, Homo sapiens
aacctccaccgcaccccaccgctccgaggggcagccggcc

SEQ ID NO: 3718 - DNA, 40 bp, Homo sapiens
gccggctgcccctcggagcggtggggtgcggtggaggtta

SEQ ID NO: 3719 - DNA, 40 bp, Homo sapiens
taacctccaccgcaccccaccgctccgaggggcagccggc

SEQ ID NO: 3720 - DNA, 40 bp, Homo sapiens
ccggctgcccctcggagcggtggggtgcggtggaggttac

SEQ ID NO: 3721 - DNA, 40 bp, Homo sapiens
gtaacctccaccgcaccccaccgctccgaggggcagccgg

SEQ ID NO: 3722 - DNA, 40 bp, Homo sapiens
cggctgcccctcggagcggtggggtgcggtggaggttact

SEQ ID NO: 3723 - DNA, 40 bp, Homo sapiens
agtaacctccaccgcaccccaccgctccgaggggcagccg

SEQ ID NO: 3724 - DNA, 40 bp, Homo sapiens
ggctgcccctcggagcggtggggtgcggtggaggttactc

SEQ ID NO: 3725 - DNA, 40 bp, Homo sapiens
gagtaacctccaccgcaccccaccgctccgaggggcagcc

SEQ ID NO: 3726 - DNA, 40 bp, Homo sapiens
gctgcccctcggagcggtggggtgcggtggaggttactcc

SEQ ID NO: 3727 - DNA, 40 bp, Homo sapiens
ggagtaacctccaccgcaccccaccgctccgaggggcagc

SEQ ID NO: 3728 - DNA, 40 bp, Homo sapiens
ctgcccctcggagcggtggggtgcggtggaggttactccc

SEQ ID NO: 3729 - DNA, 40 bp, Homo sapiens
gggagtaacctccaccgcaccccaccgctccgaggggcag

SEQ ID NO: 3730 - DNA, 40 bp, Homo sapiens
tgcccctcggagcggtggggtgcggtggaggttactcccg

SEQ ID NO: 3731 - DNA, 40 bp, Homo sapiens
cgggagtaacctccaccgcaccccaccgctccgaggggca

SEQ ID NO: 3732 - DNA, 40 bp, Homo sapiens
gcccctcggagcggtggggtgcggtggaggttactcccgc

SEQ ID NO: 3733 - DNA, 40 bp, Homo sapiens
gcgggagtaacctccaccgcaccccaccgctccgaggggc

SEQ ID NO: 3734 - DNA, 40 bp, Homo sapiens
cccctcggagcggtggggtgcggtggaggttactcccgcg

SEQ ID NO: 3735 - DNA, 40 bp, Homo sapiens
cgcgggagtaacctccaccgcaccccaccgctccgagggg

SEQ ID NO: 3736 - DNA, 40 bp, Homo sapiens
ccctcggagcggtggggtgcggtggaggttactcccgcgg

SEQ ID NO: 3737 - DNA, 40 bp, Homo sapiens
ccgcgggagtaacctccaccgcaccccaccgctccgaggg

SEQ ID NO: 3738 - DNA, 40 bp, Homo sapiens
cctcggagcggtggggtgcggtggaggttactcccgcggc

SEQ ID NO: 3739 - DNA, 40 bp, Homo sapiens
gccgcgggagtaacctccaccgcaccccaccgctccgagg

SEQ ID NO: 3740 - DNA, 40 bp, Homo sapiens
ctcggagcggtggggtgcggtggaggttactcccgcggcg

SEQ ID NO: 3741 - DNA, 40 bp, Homo sapiens
cgccgcgggagtaacctccaccgcaccccaccgctccgag

SEQ ID NO: 3742 - DNA, 40 bp, Homo sapiens
tcggagcggtggggtgcggtggaggttactcccgcggcgc

SEQ ID NO: 3743 - DNA, 40 bp, Homo sapiens
gcgccgcgggagtaacctccaccgcaccccaccgctccga

SEQ ID NO: 3744 - DNA, 40 bp, Homo sapiens
cggagcggtggggtgcggtggaggttactcccgcggcgcc

SEQ ID NO: 3745 - DNA, 40 bp, Homo sapiens
ggcgccgcgggagtaacctccaccgcaccccaccgctccg

SEQ ID NO: 3746 - DNA, 40 bp, Homo sapiens
ggagcggtggggtgcggtggaggttactcccgcggcgccc

SEQ ID NO: 3747 - DNA, 40 bp, Homo sapiens
gggcgccgcgggagtaacctccaccgcaccccaccgctcc

SEQ ID NO: 3748 - DNA, 40 bp, Homo sapiens
gagcggtggggtgcggtggaggttactcccgcggcgcccc

SEQ ID NO: 3749 - DNA, 40 bp, Homo sapiens
ggggcgccgcgggagtaacctccaccgcaccccaccgctc

SEQ ID NO: 3750 - DNA, 40 bp, Homo sapiens
agcggtggggtgcggtggaggttactcccgcggcgccccg

SEQ ID NO: 3751 - DNA, 40 bp, Homo sapiens
cggggcgccgcgggagtaacctccaccgcaccccaccgct

SEQ ID NO: 3752 - DNA, 40 bp, Homo sapiens
gcggtggggtgcggtggaggttactcccgcggcgccccgg

SEQ ID NO: 3753 - DNA, 40 bp, Homo sapiens
ccggggcgccgcgggagtaacctccaccgcaccccaccgc

SEQ ID NO: 3754 - DNA, 40 bp, Homo sapiens
cggtggggtgcggtggaggttactcccgcggcgccccggc

SEQ ID NO: 3755 - DNA, 40 bp, Homo sapiens
gccggggcgccgcgggagtaacctccaccgcaccccaccg

SEQ ID NO: 3756 - DNA, 40 bp, Homo sapiens
ggtggggtgcggtggaggttactcccgcggcgccccggcc

SEQ ID NO: 3757 - DNA, 40 bp, Homo sapiens
ggccggggcgccgcgggagtaacctccaccgcaccccacc

SEQ ID NO: 3758 - DNA, 40 bp, Homo sapiens
gtggggtgcggtggaggttactcccgcggcgccccggcct

SEQ ID NO: 3759 - DNA, 40 bp, Homo sapiens
aggccggggcgccgcgggagtaacctccaccgcaccccac

SEQ ID NO: 3760 - DNA, 40 bp, Homo sapiens
tggggtgcggtggaggttactcccgcggcgccccggcctc

SEQ ID NO: 3761 - DNA, 40 bp, Homo sapiens
gaggccggggcgccgcgggagtaacctccaccgcacccca

SEQ ID NO: 3762 - DNA, 40 bp, Homo sapiens
ggggtgcggtggaggttactcccgcggcgccccggcctcc

SEQ ID NO: 3763 - DNA, 40 bp, Homo sapiens
ggaggccggggcgccgcgggagtaacctccaccgcacccc

SEQ ID NO: 3764 - DNA, 40 bp, Homo sapiens
gggtgcggtggaggttactcccgcggcgccccggcctccc

SEQ ID NO: 3765 - DNA, 40 bp, Homo sapiens
gggaggccggggcgccgcgggagtaacctccaccgcaccc

SEQ ID NO: 3766 - DNA, 40 bp, Homo sapiens
ggtgcggtggaggttactcccgcggcgccccggcctcccc

SEQ ID NO: 3767 - DNA, 40 bp, Homo sapiens
ggggaggccggggcgccgcgggagtaacctccaccgcacc

SEQ ID NO: 3768 - DNA, 40 bp, Homo sapiens
gtgcggtggaggttactcccgcggcgccccggcctcccct

SEQ ID NO: 3769 - DNA, 40 bp, Homo sapiens
aggggaggccggggcgccgcgggagtaacctccaccgcac

SEQ ID NO: 3770 - DNA, 40 bp, Homo sapiens
tgcggtggaggttactcccgcggcgccccggcctcccctc

SEQ ID NO: 3771 - DNA, 40 bp, Homo sapiens
gaggggaggccggggcgccgcgggagtaacctccaccgca

SEQ ID NO: 3772 - DNA, 40 bp, Homo sapiens
gcggtggaggttactcccgcggcgccccggcctcccctcc

SEQ ID NO: 3773 - DNA, 40 bp, Homo sapiens
ggaggggaggccggggcgccgcgggagtaacctccaccgc

SEQ ID NO: 3774 - DNA, 40 bp, Homo sapiens
cggtggaggttactcccgcggcgccccggcctcccctccc

SEQ ID NO: 3775 - DNA, 40 bp, Homo sapiens
gggaggggaggccggggcgccgcgggagtaacctccaccg

SEQ ID NO: 3776 - DNA, 40 bp, Homo sapiens
ggtggaggttactcccgcggcgccccggcctcccctcccc

SEQ ID NO: 3777 - DNA, 40 bp, Homo sapiens
ggggaggggaggccggggcgccgcgggagtaacctccacc

SEQ ID NO: 3778 - DNA, 40 bp, Homo sapiens
gtggaggttactcccgcggcgccccggcctcccctccccc

SEQ ID NO: 3779 - DNA, 40 bp, Homo sapiens
gggggaggggaggccggggcgccgcgggagtaacctccac

SEQ ID NO: 3780 - DNA, 40 bp, Homo sapiens
tggaggttactcccgcggcgccccggcctcccctccccct

SEQ ID NO: 3781 - DNA, 40 bp, Homo sapiens
agggggaggggaggccggggcgccgcgggagtaacctcca

SEQ ID NO: 3782 - DNA, 40 bp, Homo sapiens
ggaggttactcccgcggcgccccggcctcccctccccctc

SEQ ID NO: 3783 - DNA, 40 bp, Homo sapiens
gagggggaggggaggccggggcgccgcgggagtaacctcc

SEQ ID NO: 3784 - DNA, 40 bp, Homo sapiens
gaggttactcccgcggcgccccggcctcccctccccctct

SEQ ID NO: 3785 - DNA, 40 bp, Homo sapiens
agagggggaggggaggccggggcgccgcgggagtaacctc

SEQ ID NO: 3786 - DNA, 40 bp, Homo sapiens
aggttactcccgcggcgccccggcctcccctccccctctc

SEQ ID NO: 3787 - DNA, 40 bp, Homo sapiens
gagagggggaggggaggccggggcgccgcgggagtaacct

SEQ ID NO: 3788 - DNA, 40 bp, Homo sapiens
ggttactcccgcggcgccccggcctcccctccccctctcc

SEQ ID NO: 3789 - DNA, 40 bp, Homo sapiens
ggagagggggaggggaggccggggcgccgcgggagtaacc

SEQ ID NO: 3790 - DNA, 40 bp, Homo sapiens
gttactcccgcggcgccccggcctcccctccccctctccc

SEQ ID NO: 3791 - DNA, 40 bp, Homo sapiens
gggagagggggaggggaggccggggcgccgcgggagtaac

SEQ ID NO: 3792 - DNA, 40 bp, Homo sapiens
ttactcccgcggcgccccggcctcccctccccctctcccc

SEQ ID NO: 3793 - DNA, 40 bp, Homo sapiens
ggggagagggggaggggaggccggggcgccgcgggagtaa

SEQ ID NO: 3794 - DNA, 40 bp, Homo sapiens
tactcccgcggcgccccggcctcccctccccctctccccg

SEQ ID NO: 3795 - DNA, 40 bp, Homo sapiens
cggggagagggggaggggaggccggggcgccgcgggagta

SEQ ID NO: 3796 - DNA, 40 bp, Homo sapiens
actcccgcggcgccccggcctcccctccccctctccccgc

SEQ ID NO: 3797 - DNA, 40 bp, Homo sapiens
gcggggagagggggaggggaggccggggcgccgcgggagt

SEQ ID NO: 3798 - DNA, 40 bp, Homo sapiens
ctcccgcggcgccccggcctcccctccccctctccccgct

SEQ ID NO: 3799 - DNA, 40 bp, Homo sapiens
agcggggagagggggaggggaggccggggcgccgcgggag

SEQ ID NO: 3800 - DNA, 40 bp, Homo sapiens
tcccgcggcgccccggcctcccctccccctctccccgctc

SEQ ID NO: 3801 - DNA, 40 bp, Homo sapiens
gagcggggagagggggaggggaggccggggcgccgcggga

SEQ ID NO: 3802 - DNA, 40 bp, Homo sapiens
cccgcggcgccccggcctcccctccccctctccccgctcc

SEQ ID NO: 3803 - DNA, 40 bp, Homo sapiens
ggagcggggagagggggaggggaggccggggcgccgcggg

SEQ ID NO: 3804 - DNA, 40 bp, Homo sapiens
ccgcggcgccccggcctcccctccccctctccccgctccc

SEQ ID NO: 3805 - DNA, 40 bp, Homo sapiens
gggagcggggagagggggaggggaggccggggcgccgcgg

SEQ ID NO: 3806 - DNA, 40 bp, Homo sapiens
cgcggcgccccggcctcccctccccctctccccgctcccg

SEQ ID NO: 3807 - DNA, 40 bp, Homo sapiens
cgggagcggggagagggggaggggaggccggggcgccgcg

SEQ ID NO: 3808 - DNA, 40 bp, Homo sapiens
gcggcgccccggcctcccctccccctctccccgctcccgc

SEQ ID NO: 3809 - DNA, 40 bp, Homo sapiens
gcgggagcggggagagggggaggggaggccggggcgccgc

SEQ ID NO: 3810 - DNA, 40 bp, Homo sapiens
cggcgccccggcctcccctccccctctccccgctcccgca

SEQ ID NO: 3811 - DNA, 40 bp, Homo sapiens
tgcgggagcggggagagggggaggggaggccggggcgccg

SEQ ID NO: 3812 - DNA, 40 bp, Homo sapiens
ggcgccccggcctcccctccccctctccccgctcccgcac

SEQ ID NO: 3813 - DNA, 40 bp, Homo sapiens
gtgcgggagcggggagagggggaggggaggccggggcgcc

SEQ ID NO: 3814 - DNA, 40 bp, Homo sapiens
gcgccccggcctcccctccccctctccccgctcccgcacc

SEQ ID NO: 3815 - DNA, 40 bp, Homo sapiens
ggtgcgggagcggggagagggggaggggaggccggggcgc

SEQ ID NO: 3816 - DNA, 40 bp, Homo sapiens
cgccccggcctcccctccccctctccccgctcccgcacct

SEQ ID NO: 3817 - DNA, 40 bp, Homo sapiens
aggtgcgggagcggggagagggggaggggaggccggggcg

SEQ ID NO: 3818 - DNA, 40 bp, Homo sapiens
gccccggcctcccctccccctctccccgctcccgcacctc

SEQ ID NO: 3819 - DNA, 40 bp, Homo sapiens
gaggtgcgggagcggggagagggggaggggaggccggggc

SEQ ID NO: 3820 - DNA, 40 bp, Homo sapiens
ccccggcctcccctccccctctccccgctcccgcacctct

SEQ ID NO: 3821 - DNA, 40 bp, Homo sapiens
agaggtgcgggagcggggagagggggaggggaggccgggg

SEQ ID NO: 3822 - DNA, 40 bp, Homo sapiens
cccggcctcccctccccctctccccgctcccgcacctctt

SEQ ID NO: 3823 - DNA, 40 bp, Homo sapiens
aagaggtgcgggagcggggagagggggaggggaggccggg

SEQ ID NO: 3824 - DNA, 40 bp, Homo sapiens
ccggcctcccctccccctctccccgctcccgcacctcttg

SEQ ID NO: 3825 - DNA, 40 bp, Homo sapiens
caagaggtgcgggagcggggagagggggaggggaggccgg

SEQ ID NO: 3826 - DNA, 40 bp, Homo sapiens
cggcctcccctccccctctccccgctcccgcacctcttgc

SEQ ID NO: 3827 - DNA, 40 bp, Homo sapiens
gcaagaggtgcgggagcggggagagggggaggggaggccg

SEQ ID NO: 3828 - DNA, 40 bp, Homo sapiens
ggcctcccctccccctctccccgctcccgcacctcttgcc

SEQ ID NO: 3829 - DNA, 40 bp, Homo sapiens
ggcaagaggtgcgggagcggggagagggggaggggaggcc

SEQ ID NO: 3830 - DNA, 40 bp, Homo sapiens
gcctcccctccccctctccccgctcccgcacctcttgcct

SEQ ID NO: 3831 - DNA, 40 bp, Homo sapiens
aggcaagaggtgcgggagcggggagagggggaggggaggc

SEQ ID NO: 3832 - DNA, 40 bp, Homo sapiens
cctcccctccccctctccccgctcccgcacctcttgcctc

SEQ ID NO: 3833 - DNA, 40 bp, Homo sapiens
gaggcaagaggtgcgggagcggggagagggggaggggagg

SEQ ID NO: 3834 - DNA, 40 bp, Homo sapiens
ctcccctccccctctccccgctcccgcacctcttgcctcc

SEQ ID NO: 3835 - DNA, 40 bp, Homo sapiens
ggaggcaagaggtgcgggagcggggagagggggaggggag

SEQ ID NO: 3836 - DNA, 40 bp, Homo sapiens
tcccctccccctctccccgctcccgcacctcttgcctccc

SEQ ID NO: 3837 - DNA, 40 bp, Homo sapiens
gggaggcaagaggtgcgggagcggggagagggggagggga

SEQ ID NO: 3838 - DNA, 40 bp, Homo sapiens
cccctccccctctccccgctcccgcacctcttgcctccct

SEQ ID NO: 3839 - DNA, 40 bp, Homo sapiens
agggaggcaagaggtgcgggagcggggagagggggagggg

SEQ ID NO: 3840 - DNA, 40 bp, Homo sapiens
ccctccccctctccccgctcccgcacctcttgcctccctt

SEQ ID NO: 3841 - DNA, 40 bp, Homo sapiens
aagggaggcaagaggtgcgggagcggggagagggggaggg

SEQ ID NO: 3842 - DNA, 40 bp, Homo sapiens
cctccccctctccccgctcccgcacctcttgcctcccttt

SEQ ID NO: 3843 - DNA, 40 bp, Homo sapiens
aaagggaggcaagaggtgcgggagcggggagagggggagg

SEQ ID NO: 3844 - DNA, 40 bp, Homo sapiens
ctccccctctccccgctcccgcacctcttgcctccctttc

SEQ ID NO: 3845 - DNA, 40 bp, Homo sapiens
gaaagggaggcaagaggtgcgggagcggggagagggggag

SEQ ID NO: 3846 - DNA, 40 bp, Homo sapiens
tccccctctccccgctcccgcacctcttgcctccctttcc

SEQ ID NO: 3847 - DNA, 40 bp, Homo sapiens
ggaaagggaggcaagaggtgcgggagcggggagaggggga

SEQ ID NO: 3848 - DNA, 40 bp, Homo sapiens
ccccctctccccgctcccgcacctcttgcctccctttcca

SEQ ID NO: 3849 - DNA, 40 bp, Homo sapiens
tggaaagggaggcaagaggtgcgggagcggggagaggggg

SEQ ID NO: 3850 - DNA, 40 bp, Homo sapiens
cccctctccccgctcccgcacctcttgcctccctttccag

SEQ ID NO: 3851 - DNA, 40 bp, Homo sapiens
ctggaaagggaggcaagaggtgcgggagcggggagagggg

SEQ ID NO: 3852 - DNA, 40 bp, Homo sapiens
ccctctccccgctcccgcacctcttgcctccctttccagc

SEQ ID NO: 3853 - DNA, 40 bp, Homo sapiens
gctggaaagggaggcaagaggtgcgggagcggggagaggg

SEQ ID NO: 3854 - DNA, 40 bp, Homo sapiens
cctctccccgctcccgcacctcttgcctccctttccagca

SEQ ID NO: 3855 - DNA, 40 bp, Homo sapiens
tgctggaaagggaggcaagaggtgcgggagcggggagagg

SEQ ID NO: 3856 - DNA, 40 bp, Homo sapiens
ctctccccgctcccgcacctcttgcctccctttccagcac

SEQ ID NO: 3857 - DNA, 40 bp, Homo sapiens
gtgctggaaagggaggcaagaggtgcgggagcggggagag

SEQ ID NO: 3858 - DNA, 40 bp, Homo sapiens
tctccccgctcccgcacctcttgcctccctttccagcact

SEQ ID NO: 3859 - DNA, 40 bp, Homo sapiens
agtgctggaaagggaggcaagaggtgcgggagcggggaga

SEQ ID NO: 3860 - DNA, 40 bp, Homo sapiens
ctccccgctcccgcacctcttgcctccctttccagcactc

SEQ ID NO: 3861 - DNA, 40 bp, Homo sapiens
gagtgctggaaagggaggcaagaggtgcgggagcggggag

SEQ ID NO: 3862 - DNA, 40 bp, Homo sapiens
tccccgctcccgcacctcttgcctccctttccagcactcg

SEQ ID NO: 3863 - DNA, 40 bp, Homo sapiens
cgagtgctggaaagggaggcaagaggtgcgggagcgggga

SEQ ID NO: 3864 - DNA, 40 bp, Homo sapiens
ccccgctcccgcacctcttgcctccctttccagcactcgg

SEQ ID NO: 3865 - DNA, 40 bp, Homo sapiens
ccgagtgctggaaagggaggcaagaggtgcgggagcgggg

SEQ ID NO: 3866 - DNA, 40 bp, Homo sapiens
cccgctcccgcacctcttgcctccctttccagcactcggc

SEQ ID NO: 3867 - DNA, 40 bp, Homo sapiens
gccgagtgctggaaagggaggcaagaggtgcgggagcggg

SEQ ID NO: 3868 - DNA, 40 bp, Homo sapiens
ccgctcccgcacctcttgcctccctttccagcactcggct

SEQ ID NO: 3869 - DNA, 40 bp, Homo sapiens
agccgagtgctggaaagggaggcaagaggtgcgggagcgg

SEQ ID NO: 3870 - DNA, 40 bp, Homo sapiens
cgctcccgcacctcttgcctccctttccagcactcggctg

SEQ ID NO: 3871 - DNA, 40 bp, Homo sapiens
cagccgagtgctggaaagggaggcaagaggtgcgggagcg

SEQ ID NO: 3872 - DNA, 40 bp, Homo sapiens
gctcccgcacctcttgcctccctttccagcactcggctgc

SEQ ID NO: 3873 - DNA, 40 bp, Homo sapiens
gcagccgagtgctggaaagggaggcaagaggtgcgggagc

SEQ ID NO: 3874 - DNA, 40 bp, Homo sapiens
ctcccgcacctcttgcctccctttccagcactcggctgcc

SEQ ID NO: 3875 - DNA, 40 bp, Homo sapiens
ggcagccgagtgctggaaagggaggcaagaggtgcgggag

SEQ ID NO: 3876 - DNA, 40 bp, Homo sapiens
tcccgcacctcttgcctccctttccagcactcggctgcct

SEQ ID NO: 3877 - DNA, 40 bp, Homo sapiens
aggcagccgagtgctggaaagggaggcaagaggtgcggga

SEQ ID NO: 3878 - DNA, 40 bp, Homo sapiens
cccgcacctcttgcctccctttccagcactcggctgcctc

SEQ ID NO: 3879 - DNA, 40 bp, Homo sapiens
gaggcagccgagtgctggaaagggaggcaagaggtgcggg

SEQ ID NO: 3880 - DNA, 40 bp, Homo sapiens
ccgcacctcttgcctccctttccagcactcggctgcctcg

SEQ ID NO: 3881 - DNA, 40 bp, Homo sapiens
cgaggcagccgagtgctggaaagggaggcaagaggtgcgg

SEQ ID NO: 3882 - DNA, 40 bp, Homo sapiens
cgcacctcttgcctccctttccagcactcggctgcctcgg

SEQ ID NO: 3883 - DNA, 40 bp, Homo sapiens
ccgaggcagccgagtgctggaaagggaggcaagaggtgcg

SEQ ID NO: 3884 - DNA, 40 bp, Homo sapiens
gcacctcttgcctccctttccagcactcggctgcctcggt

SEQ ID NO: 3885 - DNA, 40 bp, Homo sapiens
accgaggcagccgagtgctggaaagggaggcaagaggtgc

SEQ ID NO: 3886 - DNA, 40 bp, Homo sapiens
cacctcttgcctccctttccagcactcggctgcctcggtc

SEQ ID NO: 3887 - DNA, 40 bp, Homo sapiens
gaccgaggcagccgagtgctggaaagggaggcaagaggtg

SEQ ID NO: 3888 - DNA, 40 bp, Homo sapiens
acctcttgcctccctttccagcactcggctgcctcggtcc

SEQ ID NO: 3889 - DNA, 40 bp, Homo sapiens
ggaccgaggcagccgagtgctggaaagggaggcaagaggt

SEQ ID NO: 3890 - DNA, 40 bp, Homo sapiens
cctcttgcctccctttccagcactcggctgcctcggtcca

SEQ ID NO: 3891 - DNA, 40 bp, Homo sapiens
tggaccgaggcagccgagtgctggaaagggaggcaagagg

SEQ ID NO: 3892 - DNA, 40 bp, Homo sapiens
ctcttgcctccctttccagcactcggctgcctcggtccag

SEQ ID NO: 3893 - DNA, 40 bp, Homo sapiens
ctggaccgaggcagccgagtgctggaaagggaggcaagag

SEQ ID NO: 3894 - DNA, 40 bp, Homo sapiens
tcttgcctccctttccagcactcggctgcctcggtccagc

SEQ ID NO: 3895 - DNA, 40 bp, Homo sapiens
gctggaccgaggcagccgagtgctggaaagggaggcaaga

SEQ ID NO: 3896 - DNA, 40 bp, Homo sapiens
cttgcctccctttccagcactcggctgcctcggtccagcc

SEQ ID NO: 3897 - DNA, 40 bp, Homo sapiens
ggctggaccgaggcagccgagtgctggaaagggaggcaag

SEQ ID NO: 3898 - DNA, 40 bp, Homo sapiens
ttgcctccctttccagcactcggctgcctcggtccagcct

SEQ ID NO: 3899 - DNA, 40 bp, Homo sapiens
aggctggaccgaggcagccgagtgctggaaagggaggcaa

SEQ ID NO: 3900 - DNA, 40 bp, Homo sapiens
tgcctccctttccagcactcggctgcctcggtccagcctt

SEQ ID NO: 3901 - DNA, 40 bp, Homo sapiens
aaggctggaccgaggcagccgagtgctggaaagggaggca

SEQ ID NO: 3902 - DNA, 40 bp, Homo sapiens
gcctccctttccagcactcggctgcctcggtccagccttc

SEQ ID NO: 3903 - DNA, 40 bp, Homo sapiens
gaaggctggaccgaggcagccgagtgctggaaagggaggc

SEQ ID NO: 3904 - DNA, 40 bp, Homo sapiens
cctccctttccagcactcggctgcctcggtccagccttcc

SEQ ID NO: 3905 - DNA, 40 bp, Homo sapiens
ggaaggctggaccgaggcagccgagtgctggaaagggagg

SEQ ID NO: 3906 - DNA, 40 bp, Homo sapiens
ctccctttccagcactcggctgcctcggtccagccttccc

SEQ ID NO: 3907 - DNA, 40 bp, Homo sapiens
gggaaggctggaccgaggcagccgagtgctggaaagggag

SEQ ID NO: 3908 - DNA, 40 bp, Homo sapiens
tccctttccagcactcggctgcctcggtccagccttccct

SEQ ID NO: 3909 - DNA, 40 bp, Homo sapiens
agggaaggctggaccgaggcagccgagtgctggaaaggga

SEQ ID NO: 3910 - DNA, 40 bp, Homo sapiens
ccctttccagcactcggctgcctcggtccagccttccctg

SEQ ID NO: 3911 - DNA, 40 bp, Homo sapiens
cagggaaggctggaccgaggcagccgagtgctggaaaggg

SEQ ID NO: 3912 - DNA, 40 bp, Homo sapiens
cctttccagcactcggctgcctcggtccagccttccctgc

SEQ ID NO: 3913 - DNA, 40 bp, Homo sapiens
gcagggaaggctggaccgaggcagccgagtgctggaaagg

SEQ ID NO: 3914 - DNA, 40 bp, Homo sapiens
ctttccagcactcggctgcctcggtccagccttccctgct

SEQ ID NO: 3915 - DNA, 40 bp, Homo sapiens
agcagggaaggctggaccgaggcagccgagtgctggaaag

SEQ ID NO: 3916 - DNA, 40 bp, Homo sapiens
tttccagcactcggctgcctcggtccagccttccctgctg

SEQ ID NO: 3917 - DNA, 40 bp, Homo sapiens
cagcagggaaggctggaccgaggcagccgagtgctggaaa

SEQ ID NO: 3918 - DNA, 40 bp, Homo sapiens
ttccagcactcggctgcctcggtccagccttccctgctgc

SEQ ID NO: 3919 - DNA, 40 bp, Homo sapiens
gcagcagggaaggctggaccgaggcagccgagtgctggaa

SEQ ID NO: 3920 - DNA, 40 bp, Homo sapiens
tccagcactcggctgcctcggtccagccttccctgctgca

SEQ ID NO: 3921 - DNA, 40 bp, Homo sapiens
tgcagcagggaaggctggaccgaggcagccgagtgctgga

SEQ ID NO: 3922 - DNA, 40 bp, Homo sapiens
ccagcactcggctgcctcggtccagccttccctgctgcat

SEQ ID NO: 3923 - DNA, 40 bp, Homo sapiens
atgcagcagggaaggctggaccgaggcagccgagtgctgg

SEQ ID NO: 3924 - DNA, 40 bp, Homo sapiens
cagcactcggctgcctcggtccagccttccctgctgcatt

SEQ ID NO: 3925 - DNA, 40 bp, Homo sapiens
aatgcagcagggaaggctggaccgaggcagccgagtgctg

SEQ ID NO: 3926 - DNA, 40 bp, Homo sapiens
agcactcggctgcctcggtccagccttccctgctgcattt

SEQ ID NO: 3927 - DNA, 40 bp, Homo sapiens
aaatgcagcagggaaggctggaccgaggcagccgagtgct

SEQ ID NO: 3928 - DNA, 40 bp, Homo sapiens
gcactcggctgcctcggtccagccttccctgctgcatttg

SEQ ID NO: 3929 - DNA, 40 bp, Homo sapiens
caaatgcagcagggaaggctggaccgaggcagccgagtgc

SEQ ID NO: 3930 - DNA, 40 bp, Homo sapiens
cactcggctgcctcggtccagccttccctgctgcatttgg

SEQ ID NO: 3931 - DNA, 40 bp, Homo sapiens
ccaaatgcagcagggaaggctggaccgaggcagccgagtg

SEQ ID NO: 3932 - DNA, 40 bp, Homo sapiens
actcggctgcctcggtccagccttccctgctgcatttggc

SEQ ID NO: 3933 - DNA, 40 bp, Homo sapiens
gccaaatgcagcagggaaggctggaccgaggcagccgagt

SEQ ID NO: 3934 - DNA, 40 bp, Homo sapiens
ctcggctgcctcggtccagccttccctgctgcatttggca

SEQ ID NO: 3935 - DNA, 40 bp, Homo sapiens
tgccaaatgcagcagggaaggctggaccgaggcagccgag

SEQ ID NO: 3936 - DNA, 40 bp, Homo sapiens
tcggctgcctcggtccagccttccctgctgcatttggcat

SEQ ID NO: 3937 - DNA, 40 bp, Homo sapiens
atgccaaatgcagcagggaaggctggaccgaggcagccga

SEQ ID NO: 3938 - DNA, 40 bp, Homo sapiens
cggctgcctcggtccagccttccctgctgcatttggcatc

SEQ ID NO: 3939 - DNA, 40 bp, Homo sapiens
gatgccaaatgcagcagggaaggctggaccgaggcagccg

SEQ ID NO: 3940 - DNA, 40 bp, Homo sapiens
ggctgcctcggtccagccttccctgctgcatttggcatct

SEQ ID NO: 3941 - DNA, 40 bp, Homo sapiens
agatgccaaatgcagcagggaaggctggaccgaggcagcc

SEQ ID NO: 3942 - DNA, 40 bp, Homo sapiens
gctgcctcggtccagccttccctgctgcatttggcatctc

SEQ ID NO: 3943 - DNA, 40 bp, Homo sapiens
gagatgccaaatgcagcagggaaggctggaccgaggcagc

SEQ ID NO: 3944 - DNA, 40 bp, Homo sapiens
ctgcctcggtccagccttccctgctgcatttggcatctct

SEQ ID NO: 3945 - DNA, 40 bp, Homo sapiens
agagatgccaaatgcagcagggaaggctggaccgaggcag

SEQ ID NO: 3946 - DNA, 40 bp, Homo sapiens
tgcctcggtccagccttccctgctgcatttggcatctcta

SEQ ID NO: 3947 - DNA, 40 bp, Homo sapiens
tagagatgccaaatgcagcagggaaggctggaccgaggca

SEQ ID NO: 3948 - DNA, 40 bp, Homo sapiens
gcctcggtccagccttccctgctgcatttggcatctctag

SEQ ID NO: 3949 - DNA, 40 bp, Homo sapiens
ctagagatgccaaatgcagcagggaaggctggaccgaggc

SEQ ID NO: 3950 - DNA, 40 bp, Homo sapiens
cctcggtccagccttccctgctgcatttggcatctctagg

SEQ ID NO: 3951 - DNA, 40 bp, Homo sapiens
cctagagatgccaaatgcagcagggaaggctggaccgagg

SEQ ID NO: 3952 - DNA, 40 bp, Homo sapiens
ctcggtccagccttccctgctgcatttggcatctctagga

SEQ ID NO: 3953 - DNA, 40 bp, Homo sapiens
tcctagagatgccaaatgcagcagggaaggctggaccgag

SEQ ID NO: 3954 - DNA, 40 bp, Homo sapiens
tcggtccagccttccctgctgcatttggcatctctaggac

SEQ ID NO: 3955 - DNA, 40 bp, Homo sapiens
gtcctagagatgccaaatgcagcagggaaggctggaccga

SEQ ID NO: 3956 - DNA, 40 bp, Homo sapiens
cggtccagccttccctgctgcatttggcatctctaggacg

SEQ ID NO: 3957 - DNA, 40 bp, Homo sapiens
cgtcctagagatgccaaatgcagcagggaaggctggaccg

SEQ ID NO: 3958 - DNA, 40 bp, Homo sapiens
ggtccagccttccctgctgcatttggcatctctaggacga

SEQ ID NO: 3959 - DNA, 40 bp, Homo sapiens
tcgtcctagagatgccaaatgcagcagggaaggctggacc

SEQ ID NO: 3960 - DNA, 40 bp, Homo sapiens
gtccagccttccctgctgcatttggcatctctaggacgaa

SEQ ID NO: 3961 - DNA, 40 bp, Homo sapiens
ttcgtcctagagatgccaaatgcagcagggaaggctggac

SEQ ID NO: 3962 - DNA, 40 bp, Homo sapiens
tccagccttccctgctgcatttggcatctctaggacgaag

SEQ ID NO: 3963 - DNA, 40 bp, Homo sapiens
cttcgtcctagagatgccaaatgcagcagggaaggctgga

SEQ ID NO: 3964 - DNA, 40 bp, Homo sapiens
ccagccttccctgctgcatttggcatctctaggacgaagg

SEQ ID NO: 3965 - DNA, 40 bp, Homo sapiens
ccttcgtcctagagatgccaaatgcagcagggaaggctgg

SEQ ID NO: 3966 - DNA, 40 bp, Homo sapiens
cagccttccctgctgcatttggcatctctaggacgaaggt

SEQ ID NO: 3967 - DNA, 40 bp, Homo sapiens
accttcgtcctagagatgccaaatgcagcagggaaggctg

SEQ ID NO: 3968 - DNA, 40 bp, Homo sapiens
agccttccctgctgcatttggcatctctaggacgaaggta

SEQ ID NO: 3969 - DNA, 40 bp, Homo sapiens
taccttcgtcctagagatgccaaatgcagcagggaaggct

SEQ ID NO: 3970 - DNA, 40 bp, Homo sapiens
gccttccctgctgcatttggcatctctaggacgaaggtat

SEQ ID NO: 3971 - DNA, 40 bp, Homo sapiens
ataccttcgtcctagagatgccaaatgcagcagggaaggc

SEQ ID NO: 3972 - DNA, 40 bp, Homo sapiens
ccttccctgctgcatttggcatctctaggacgaaggtata

SEQ ID NO: 3973 - DNA, 40 bp, Homo sapiens
tataccttcgtcctagagatgccaaatgcagcagggaagg

SEQ ID NO: 3974 - DNA, 40 bp, Homo sapiens
cttccctgctgcatttggcatctctaggacgaaggtataa

SEQ ID NO: 3975 - DNA, 40 bp, Homo sapiens
ttataccttcgtcctagagatgccaaatgcagcagggaag

SEQ ID NO: 3976 - DNA, 40 bp, Homo sapiens
ttccctgctgcatttggcatctctaggacgaaggtataaa

SEQ ID NO: 3977 - DNA, 40 bp, Homo sapiens
tttataccttcgtcctagagatgccaaatgcagcagggaa

SEQ ID NO: 3978 - DNA, 40 bp, Homo sapiens
tccctgctgcatttggcatctctaggacgaaggtataaac

SEQ ID NO: 3979 - DNA, 40 bp, Homo sapiens
gtttataccttcgtcctagagatgccaaatgcagcaggga

SEQ ID NO: 3980 - DNA, 40 bp, Homo sapiens
ccctgctgcatttggcatctctaggacgaaggtataaact

SEQ ID NO: 3981 - DNA, 40 bp, Homo sapiens
agtttataccttcgtcctagagatgccaaatgcagcaggg

SEQ ID NO: 3982 - DNA, 40 bp, Homo sapiens
cctgctgcatttggcatctctaggacgaaggtataaactt

SEQ ID NO: 3983 - DNA, 40 bp, Homo sapiens
aagtttataccttcgtcctagagatgccaaatgcagcagg

SEQ ID NO: 3984 - DNA, 40 bp, Homo sapiens
ctgctgcatttggcatctctaggacgaaggtataaacttc

SEQ ID NO: 3985 - DNA, 40 bp, Homo sapiens
gaagtttataccttcgtcctagagatgccaaatgcagcag

SEQ ID NO: 3986 - DNA, 40 bp, Homo sapiens
tgctgcatttggcatctctaggacgaaggtataaacttct

SEQ ID NO: 3987 - DNA, 40 bp, Homo sapiens
agaagtttataccttcgtcctagagatgccaaatgcagca

SEQ ID NO: 3988 - DNA, 40 bp, Homo sapiens
gctgcatttggcatctctaggacgaaggtataaacttctc

SEQ ID NO: 3989 - DNA, 40 bp, Homo sapiens
gagaagtttataccttcgtcctagagatgccaaatgcagc

SEQ ID NO: 3990 - DNA, 40 bp, Homo sapiens
ctgcatttggcatctctaggacgaaggtataaacttctcc

SEQ ID NO: 3991 - DNA, 40 bp, Homo sapiens
ggagaagtttataccttcgtcctagagatgccaaatgcag

SEQ ID NO: 3992 - DNA, 40 bp, Homo sapiens
tgcatttggcatctctaggacgaaggtataaacttctccc

SEQ ID NO: 3993 - DNA, 40 bp, Homo sapiens
gggagaagtttataccttcgtcctagagatgccaaatgca

SEQ ID NO: 3994 - DNA, 40 bp, Homo sapiens
gcatttggcatctctaggacgaaggtataaacttctccct

SEQ ID NO: 3995 - DNA, 40 bp, Homo sapiens
agggagaagtttataccttcgtcctagagatgccaaatgc

SEQ ID NO: 3996 - DNA, 40 bp, Homo sapiens
catttggcatctctaggacgaaggtataaacttctccctc

SEQ ID NO: 3997 - DNA, 40 bp, Homo sapiens
gagggagaagtttataccttcgtcctagagatgccaaatg

SEQ ID NO: 3998 - DNA, 40 bp, Homo sapiens
atttggcatctctaggacgaaggtataaacttctccctcg

SEQ ID NO: 3999 - DNA, 40 bp, Homo sapiens
cgagggagaagtttataccttcgtcctagagatgccaaat

SEQ ID NO: 4000 - DNA, 40 bp, Homo sapiens
tttggcatctctaggacgaaggtataaacttctccctcga

SEQ ID NO: 4001 - DNA, 40 bp, Homo sapiens
tcgagggagaagtttataccttcgtcctagagatgccaaa

SEQ ID NO: 4002 - DNA, 40 bp, Homo sapiens
ttggcatctctaggacgaaggtataaacttctccctcgag

SEQ ID NO: 4003 - DNA, 40 bp, Homo sapiens
ctcgagggagaagtttataccttcgtcctagagatgccaa

SEQ ID NO: 4004 - DNA, 40 bp, Homo sapiens
tggcatctctaggacgaaggtataaacttctccctcgagc

SEQ ID NO: 4005 - DNA, 40 bp, Homo sapiens
gctcgagggagaagtttataccttcgtcctagagatgcca

SEQ ID NO: 4006 - DNA, 40 bp, Homo sapiens
ggcatctctaggacgaaggtataaacttctccctcgagcg

SEQ ID NO: 4007 - DNA, 40 bp, Homo sapiens
cgctcgagggagaagtttataccttcgtcctagagatgcc

SEQ ID NO: 4008 - DNA, 40 bp, Homo sapiens
gcatctctaggacgaaggtataaacttctccctcgagcgc

SEQ ID NO: 4009 - DNA, 40 bp, Homo sapiens
gcgctcgagggagaagtttataccttcgtcctagagatgc

SEQ ID NO: 4010 - DNA, 40 bp, Homo sapiens
catctctaggacgaaggtataaacttctccctcgagcgca

SEQ ID NO: 4011 - DNA, 40 bp, Homo sapiens
tgcgctcgagggagaagtttataccttcgtcctagagatg

SEQ ID NO: 4012 - DNA, 40 bp, Homo sapiens
atctctaggacgaaggtataaacttctccctcgagcgcag

SEQ ID NO: 4013 - DNA, 40 bp, Homo sapiens
ctgcgctcgagggagaagtttataccttcgtcctagagat

SEQ ID NO: 4014 - DNA, 40 bp, Homo sapiens
tctctaggacgaaggtataaacttctccctcgagcgcagg

SEQ ID NO: 4015 - DNA, 40 bp, Homo sapiens
cctgcgctcgagggagaagtttataccttcgtcctagaga

SEQ ID NO: 4016 - DNA, 40 bp, Homo sapiens
ctctaggacgaaggtataaacttctccctcgagcgcaggc

SEQ ID NO: 4017 - DNA, 40 bp, Homo sapiens
gcctgcgctcgagggagaagtttataccttcgtcctagag

SEQ ID NO: 4018 - DNA, 40 bp, Homo sapiens
tctaggacgaaggtataaacttctccctcgagcgcaggct

SEQ ID NO: 4019 - DNA, 40 bp, Homo sapiens
agcctgcgctcgagggagaagtttataccttcgtcctaga

SEQ ID NO: 4020 - DNA, 40 bp, Homo sapiens
ctaggacgaaggtataaacttctccctcgagcgcaggctg

SEQ ID NO: 4021 - DNA, 40 bp, Homo sapiens
cagcctgcgctcgagggagaagtttataccttcgtcctag

SEQ ID NO: 4022 - DNA, 40 bp, Homo sapiens
taggacgaaggtataaacttctccctcgagcgcaggctgg

SEQ ID NO: 4023 - DNA, 40 bp, Homo sapiens
ccagcctgcgctcgagggagaagtttataccttcgtccta

SEQ ID NO: 4024 - DNA, 40 bp, Homo sapiens
aggacgaaggtataaacttctccctcgagcgcaggctgga

SEQ ID NO: 4025 - DNA, 40 bp, Homo sapiens
tccagcctgcgctcgagggagaagtttataccttcgtcct

SEQ ID NO: 4026 - DNA, 40 bp, Homo sapiens
ggacgaaggtataaacttctccctcgagcgcaggctggac

SEQ ID NO: 4027 - DNA, 40 bp, Homo sapiens
gtccagcctgcgctcgagggagaagtttataccttcgtcc

SEQ ID NO: 4028 - DNA, 40 bp, Homo sapiens
gacgaaggtataaacttctccctcgagcgcaggctggacg

SEQ ID NO: 4029 - DNA, 40 bp, Homo sapiens
cgtccagcctgcgctcgagggagaagtttataccttcgtc

SEQ ID NO: 4030 - DNA, 40 bp, Homo sapiens
acgaaggtataaacttctccctcgagcgcaggctggacgg

SEQ ID NO: 4031 - DNA, 40 bp, Homo sapiens
ccgtccagcctgcgctcgagggagaagtttataccttcgt

SEQ ID NO: 4032 - DNA, 40 bp, Homo sapiens
cgaaggtataaacttctccctcgagcgcaggctggacgga

SEQ ID NO: 4033 - DNA, 40 bp, Homo sapiens
tccgtccagcctgcgctcgagggagaagtttataccttcg

SEQ ID NO: 4034 - DNA, 40 bp, Homo sapiens
gaaggtataaacttctccctcgagcgcaggctggacggat

SEQ ID NO: 4035 - DNA, 40 bp, Homo sapiens
atccgtccagcctgcgctcgagggagaagtttataccttc

SEQ ID NO: 4036 - DNA, 40 bp, Homo sapiens
aaggtataaacttctccctcgagcgcaggctggacggata

SEQ ID NO: 4037 - DNA, 40 bp, Homo sapiens
tatccgtccagcctgcgctcgagggagaagtttatacctt

SEQ ID NO: 4038 - DNA, 40 bp, Homo sapiens
aggtataaacttctccctcgagcgcaggctggacggatag

SEQ ID NO: 4039 - DNA, 40 bp, Homo sapiens
ctatccgtccagcctgcgctcgagggagaagtttatacct

SEQ ID NO: 4040 - DNA, 40 bp, Homo sapiens
ggtataaacttctccctcgagcgcaggctggacggatagt

SEQ ID NO: 4041 - DNA, 40 bp, Homo sapiens
actatccgtccagcctgcgctcgagggagaagtttatacc

SEQ ID NO: 4042 - DNA, 40 bp, Homo sapiens
gtataaacttctccctcgagcgcaggctggacggatagtg

SEQ ID NO: 4043 - DNA, 40 bp, Homo sapiens
cactatccgtccagcctgcgctcgagggagaagtttatac

SEQ ID NO: 4044 - DNA, 40 bp, Homo sapiens
tataaacttctccctcgagcgcaggctggacggatagtgg

SEQ ID NO: 4045 - DNA, 40 bp, Homo sapiens
ccactatccgtccagcctgcgctcgagggagaagtttata

SEQ ID NO: 4046 - DNA, 40 bp, Homo sapiens
ataaacttctccctcgagcgcaggctggacggatagtggt

SEQ ID NO: 4047 - DNA, 40 bp, Homo sapiens
accactatccgtccagcctgcgctcgagggagaagtttat

SEQ ID NO: 4048 - DNA, 40 bp, Homo sapiens
taaacttctccctcgagcgcaggctggacggatagtggtc

SEQ ID NO: 4049 - DNA, 40 bp, Homo sapiens
gaccactatccgtccagcctgcgctcgagggagaagttta

SEQ ID NO: 4050 - DNA, 40 bp, Homo sapiens
aaacttctccctcgagcgcaggctggacggatagtggtcc

SEQ ID NO: 4051 - DNA, 40 bp, Homo sapiens
ggaccactatccgtccagcctgcgctcgagggagaagttt

SEQ ID NO: 4052 - DNA, 40 bp, Homo sapiens
aacttctccctcgagcgcaggctggacggatagtggtcct

SEQ ID NO: 4053 - DNA, 40 bp, Homo sapiens
aggaccactatccgtccagcctgcgctcgagggagaagtt

SEQ ID NO: 4054 - DNA, 40 bp, Homo sapiens
acttctccctcgagcgcaggctggacggatagtggtcctt

SEQ ID NO: 4055 - DNA, 40 bp, Homo sapiens
aaggaccactatccgtccagcctgcgctcgagggagaagt

SEQ ID NO: 4056 - DNA, 40 bp, Homo sapiens
cttctccctcgagcgcaggctggacggatagtggtccttt

SEQ ID NO: 4057 - DNA, 40 bp, Homo sapiens
aaaggaccactatccgtccagcctgcgctcgagggagaag

SEQ ID NO: 4058 - DNA, 40 bp, Homo sapiens
ttctccctcgagcgcaggctggacggatagtggtcctttt

SEQ ID NO: 4059 - DNA, 40 bp, Homo sapiens
aaaaggaccactatccgtccagcctgcgctcgagggagaa

SEQ ID NO: 4060 - DNA, 40 bp, Homo sapiens
tctccctcgagcgcaggctggacggatagtggtccttttc

SEQ ID NO: 4061 - DNA, 40 bp, Homo sapiens
gaaaaggaccactatccgtccagcctgcgctcgagggaga

SEQ ID NO: 4062 - DNA, 40 bp, Homo sapiens
ctccctcgagcgcaggctggacggatagtggtccttttcc

SEQ ID NO: 4063 - DNA, 40 bp, Homo sapiens
ggaaaaggaccactatccgtccagcctgcgctcgagggag

SEQ ID NO: 4064 - DNA, 40 bp, Homo sapiens
tccctcgagcgcaggctggacggatagtggtccttttccg

SEQ ID NO: 4065 - DNA, 40 bp, Homo sapiens
cggaaaaggaccactatccgtccagcctgcgctcgaggga

SEQ ID NO: 4066 - DNA, 40 bp, Homo sapiens
ccctcgagcgcaggctggacggatagtggtccttttccgt

SEQ ID NO: 4067 - DNA, 40 bp, Homo sapiens
acggaaaaggaccactatccgtccagcctgcgctcgaggg

SEQ ID NO: 4068 - DNA, 40 bp, Homo sapiens
cctcgagcgcaggctggacggatagtggtccttttccgtg

SEQ ID NO: 4069 - DNA, 40 bp, Homo sapiens
cacggaaaaggaccactatccgtccagcctgcgctcgagg

SEQ ID NO: 4070 - DNA, 40 bp, Homo sapiens
ctcgagcgcaggctggacggatagtggtccttttccgtgt

SEQ ID NO: 4071 - DNA, 40 bp, Homo sapiens
acacggaaaaggaccactatccgtccagcctgcgctcgag

SEQ ID NO: 4072 - DNA, 40 bp, Homo sapiens
tcgagcgcaggctggacggatagtggtccttttccgtgtg

SEQ ID NO: 4073 - DNA, 40 bp, Homo sapiens
cacacggaaaaggaccactatccgtccagcctgcgctcga

SEQ ID NO: 4074 - DNA, 40 bp, Homo sapiens
cgagcgcaggctggacggatagtggtccttttccgtgtgt

SEQ ID NO: 4075 - DNA, 40 bp, Homo sapiens
acacacggaaaaggaccactatccgtccagcctgcgctcg

SEQ ID NO: 4076 - DNA, 40 bp, Homo sapiens
gagcgcaggctggacggatagtggtccttttccgtgtgta

SEQ ID NO: 4077 - DNA, 40 bp, Homo sapiens
tacacacggaaaaggaccactatccgtccagcctgcgctc

SEQ ID NO: 4078 - DNA, 40 bp, Homo sapiens
agcgcaggctggacggatagtggtccttttccgtgtgtag

SEQ ID NO: 4079 - DNA, 40 bp, Homo sapiens
ctacacacggaaaaggaccactatccgtccagcctgcgct

SEQ ID NO: 4080 - DNA, 40 bp, Homo sapiens
gcgcaggctggacggatagtggtccttttccgtgtgtagg

SEQ ID NO: 4081 - DNA, 40 bp, Homo sapiens
cctacacacggaaaaggaccactatccgtccagcctgcgc

SEQ ID NO: 4082 - DNA, 40 bp, Homo sapiens
cgcaggctggacggatagtggtccttttccgtgtgtaggg

SEQ ID NO: 4083 - DNA, 40 bp, Homo sapiens
ccctacacacggaaaaggaccactatccgtccagcctgcg

SEQ ID NO: 4084 - DNA, 40 bp, Homo sapiens
gcaggctggacggatagtggtccttttccgtgtgtagggg

SEQ ID NO: 4085 - DNA, 40 bp, Homo sapiens
cccctacacacggaaaaggaccactatccgtccagcctgc

SEQ ID NO: 4086 - DNA, 40 bp, Homo sapiens
caggctggacggatagtggtccttttccgtgtgtagggga

SEQ ID NO: 4087 - DNA, 40 bp, Homo sapiens
tcccctacacacggaaaaggaccactatccgtccagcctg

SEQ ID NO: 4088 - DNA, 40 bp, Homo sapiens
aggctggacggatagtggtccttttccgtgtgtaggggat

SEQ ID NO: 4089 - DNA, 40 bp, Homo sapiens
atcccctacacacggaaaaggaccactatccgtccagcct

SEQ ID NO: 4090 - DNA, 40 bp, Homo sapiens
ggctggacggatagtggtccttttccgtgtgtaggggatg

SEQ ID NO: 4091 - DNA, 40 bp, Homo sapiens
catcccctacacacggaaaaggaccactatccgtccagcc

SEQ ID NO: 4092 - DNA, 40 bp, Homo sapiens
gctggacggatagtggtccttttccgtgtgtaggggatgt

SEQ ID NO: 4093 - DNA, 40 bp, Homo sapiens
acatcccctacacacggaaaaggaccactatccgtccagc

SEQ ID NO: 4094 - DNA, 40 bp, Homo sapiens
ctggacggatagtggtccttttccgtgtgtaggggatgtg

SEQ ID NO: 4095 - DNA, 40 bp, Homo sapiens
cacatcccctacacacggaaaaggaccactatccgtccag

SEQ ID NO: 4096 - DNA, 40 bp, Homo sapiens
tggacggatagtggtccttttccgtgtgtaggggatgtgt

SEQ ID NO: 4097 - DNA, 40 bp, Homo sapiens
acacatcccctacacacggaaaaggaccactatccgtcca

SEQ ID NO: 4098 - DNA, 40 bp, Homo sapiens
ggacggatagtggtccttttccgtgtgtaggggatgtgtg

SEQ ID NO: 4099 - DNA, 40 bp, Homo sapiens
cacacatcccctacacacggaaaaggaccactatccgtcc

SEQ ID NO: 4100 - DNA, 40 bp, Homo sapiens
gacggatagtggtccttttccgtgtgtaggggatgtgtga

SEQ ID NO: 4101 - DNA, 40 bp, Homo sapiens
tcacacatcccctacacacggaaaaggaccactatccgtc

SEQ ID NO: 4102 - DNA, 40 bp, Homo sapiens
acggatagtggtccttttccgtgtgtaggggatgtgtgag

SEQ ID NO: 4103 - DNA, 40 bp, Homo sapiens
ctcacacatcccctacacacggaaaaggaccactatccgt

SEQ ID NO: 4104 - DNA, 40 bp, Homo sapiens
cggatagtggtccttttccgtgtgtaggggatgtgtgagt

SEQ ID NO: 4105 - DNA, 40 bp, Homo sapiens
actcacacatcccctacacacggaaaaggaccactatccg

SEQ ID NO: 4106 - DNA, 40 bp, Homo sapiens
ggatagtggtccttttccgtgtgtaggggatgtgtgagta

SEQ ID NO: 4107 - DNA, 40 bp, Homo sapiens
tactcacacatcccctacacacggaaaaggaccactatcc

SEQ ID NO: 4108 - DNA, 40 bp, Homo sapiens
gatagtggtccttttccgtgtgtaggggatgtgtgagtaa

SEQ ID NO: 4109 - DNA, 40 bp, Homo sapiens
ttactcacacatcccctacacacggaaaaggaccactatc

SEQ ID NO: 4110 - DNA, 40 bp, Homo sapiens
atagtggtccttttccgtgtgtaggggatgtgtgagtaag

SEQ ID NO: 4111 - DNA, 40 bp, Homo sapiens
cttactcacacatcccctacacacggaaaaggaccactat

SEQ ID NO: 4112 - DNA, 40 bp, Homo sapiens
tagtggtccttttccgtgtgtaggggatgtgtgagtaaga

SEQ ID NO: 4113 - DNA, 40 bp, Homo sapiens
tcttactcacacatcccctacacacggaaaaggaccacta

SEQ ID NO: 4114 - DNA, 40 bp, Homo sapiens
agtggtccttttccgtgtgtaggggatgtgtgagtaagag

SEQ ID NO: 4115 - DNA, 40 bp, Homo sapiens
ctcttactcacacatcccctacacacggaaaaggaccact

SEQ ID NO: 4116 - DNA, 40 bp, Homo sapiens
gtggtccttttccgtgtgtaggggatgtgtgagtaagagg

SEQ ID NO: 4117 - DNA, 40 bp, Homo sapiens
cctcttactcacacatcccctacacacggaaaaggaccac

SEQ ID NO: 4118 - DNA, 40 bp, Homo sapiens
tggtccttttccgtgtgtaggggatgtgtgagtaagaggg

SEQ ID NO: 4119 - DNA, 40 bp, Homo sapiens
ccctcttactcacacatcccctacacacggaaaaggacca

SEQ ID NO: 4120 - DNA, 40 bp, Homo sapiens
ggtccttttccgtgtgtaggggatgtgtgagtaagagggg

SEQ ID NO: 4121 - DNA, 40 bp, Homo sapiens
cccctcttactcacacatcccctacacacggaaaaggacc

SEQ ID NO: 4122 - DNA, 40 bp, Homo sapiens
gtccttttccgtgtgtaggggatgtgtgagtaagagggga

SEQ ID NO: 4123 - DNA, 40 bp, Homo sapiens
tcccctcttactcacacatcccctacacacggaaaaggac

SEQ ID NO: 4124 - DNA, 40 bp, Homo sapiens
tccttttccgtgtgtaggggatgtgtgagtaagaggggag

SEQ ID NO: 4125 - DNA, 40 bp, Homo sapiens
ctcccctcttactcacacatcccctacacacggaaaagga

SEQ ID NO: 4126 - DNA, 40 bp, Homo sapiens
ccttttccgtgtgtaggggatgtgtgagtaagaggggagg

SEQ ID NO: 4127 - DNA, 40 bp, Homo sapiens
cctcccctcttactcacacatcccctacacacggaaaagg

SEQ ID NO: 4128 - DNA, 40 bp, Homo sapiens
cttttccgtgtgtaggggatgtgtgagtaagaggggaggt

SEQ ID NO: 4129 - DNA, 40 bp, Homo sapiens
acctcccctcttactcacacatcccctacacacggaaaag

SEQ ID NO: 4130 - DNA, 40 bp, Homo sapiens
ttttccgtgtgtaggggatgtgtgagtaagaggggaggtc

SEQ ID NO: 4131 - DNA, 40 bp, Homo sapiens
gacctcccctcttactcacacatcccctacacacggaaaa

SEQ ID NO: 4132 - DNA, 40 bp, Homo sapiens
tttccgtgtgtaggggatgtgtgagtaagaggggaggtca

SEQ ID NO: 4133 - DNA, 40 bp, Homo sapiens
tgacctcccctcttactcacacatcccctacacacggaaa

SEQ ID NO: 4134 - DNA, 40 bp, Homo sapiens
ttccgtgtgtaggggatgtgtgagtaagaggggaggtcac

SEQ ID NO: 4135 - DNA, 40 bp, Homo sapiens
gtgacctcccctcttactcacacatcccctacacacggaa

SEQ ID NO: 4136 - DNA, 40 bp, Homo sapiens
tccgtgtgtaggggatgtgtgagtaagaggggaggtcacg

SEQ ID NO: 4137 - DNA, 40 bp, Homo sapiens
cgtgacctcccctcttactcacacatcccctacacacgga

SEQ ID NO: 4138 - DNA, 40 bp, Homo sapiens
ccgtgtgtaggggatgtgtgagtaagaggggaggtcacgt

SEQ ID NO: 4139 - DNA, 40 bp, Homo sapiens
acgtgacctcccctcttactcacacatcccctacacacgg

SEQ ID NO: 4140 - DNA, 40 bp, Homo sapiens
cgtgtgtaggggatgtgtgagtaagaggggaggtcacgtt

SEQ ID NO: 4141 - DNA, 40 bp, Homo sapiens
aacgtgacctcccctcttactcacacatcccctacacacg

SEQ ID NO: 4142 - DNA, 40 bp, Homo sapiens
gtgtgtaggggatgtgtgagtaagaggggaggtcacgttt

SEQ ID NO: 4143 - DNA, 40 bp, Homo sapiens
aaacgtgacctcccctcttactcacacatcccctacacac

SEQ ID NO: 4144 - DNA, 40 bp, Homo sapiens
tgtgtaggggatgtgtgagtaagaggggaggtcacgtttt

SEQ ID NO: 4145 - DNA, 40 bp, Homo sapiens
aaaacgtgacctcccctcttactcacacatcccctacaca

SEQ ID NO: 4146 - DNA, 40 bp, Homo sapiens
gtgtaggggatgtgtgagtaagaggggaggtcacgttttg

SEQ ID NO: 4147 - DNA, 40 bp, Homo sapiens
caaaacgtgacctcccctcttactcacacatcccctacac

SEQ ID NO: 4148 - DNA, 40 bp, Homo sapiens
tgtaggggatgtgtgagtaagaggggaggtcacgttttgg

SEQ ID NO: 4149 - DNA, 40 bp, Homo sapiens
ccaaaacgtgacctcccctcttactcacacatcccctaca

SEQ ID NO: 4150 - DNA, 40 bp, Homo sapiens
gtaggggatgtgtgagtaagaggggaggtcacgttttgga

SEQ ID NO: 4151 - DNA, 40 bp, Homo sapiens
tccaaaacgtgacctcccctcttactcacacatcccctac

SEQ ID NO: 4152 - DNA, 40 bp, Homo sapiens
taggggatgtgtgagtaagaggggaggtcacgttttggaa

SEQ ID NO: 4153 - DNA, 40 bp, Homo sapiens
ttccaaaacgtgacctcccctcttactcacacatccccta

SEQ ID NO: 4154 - DNA, 40 bp, Homo sapiens
aggggatgtgtgagtaagaggggaggtcacgttttggaag

SEQ ID NO: 4155 - DNA, 40 bp, Homo sapiens
cttccaaaacgtgacctcccctcttactcacacatcccct

SEQ ID NO: 4156 - DNA, 40 bp, Homo sapiens
ggggatgtgtgagtaagaggggaggtcacgttttggaaga

SEQ ID NO: 4157 - DNA, 40 bp, Homo sapiens
tcttccaaaacgtgacctcccctcttactcacacatcccc

SEQ ID NO: 4158 - DNA, 40 bp, Homo sapiens
gggatgtgtgagtaagaggggaggtcacgttttggaagag

SEQ ID NO: 4159 - DNA, 40 bp, Homo sapiens
ctcttccaaaacgtgacctcccctcttactcacacatccc

SEQ ID NO: 4160 - DNA, 40 bp, Homo sapiens
ggatgtgtgagtaagaggggaggtcacgttttggaagagc

SEQ ID NO: 4161 - DNA, 40 bp, Homo sapiens
gctcttccaaaacgtgacctcccctcttactcacacatcc

SEQ ID NO: 4162 - DNA, 40 bp, Homo sapiens
gatgtgtgagtaagaggggaggtcacgttttggaagagca

SEQ ID NO: 4163 - DNA, 40 bp, Homo sapiens
tgctcttccaaaacgtgacctcccctcttactcacacatc

SEQ ID NO: 4164 - DNA, 40 bp, Homo sapiens
atgtgtgagtaagaggggaggtcacgttttggaagagcat

SEQ ID NO: 4165 - DNA, 40 bp, Homo sapiens
atgctcttccaaaacgtgacctcccctcttactcacacat

SEQ ID NO: 4166 - DNA, 40 bp, Homo sapiens
tgtgtgagtaagaggggaggtcacgttttggaagagcata

SEQ ID NO: 4167 - DNA, 40 bp, Homo sapiens
tatgctcttccaaaacgtgacctcccctcttactcacaca

SEQ ID NO: 4168 - DNA, 40 bp, Homo sapiens
gtgtgagtaagaggggaggtcacgttttggaagagcatag

SEQ ID NO: 4169 - DNA, 40 bp, Homo sapiens
ctatgctcttccaaaacgtgacctcccctcttactcacac

SEQ ID NO: 4170 - DNA, 40 bp, Homo sapiens
tgtgagtaagaggggaggtcacgttttggaagagcatagg

SEQ ID NO: 4171 - DNA, 40 bp, Homo sapiens
cctatgctcttccaaaacgtgacctcccctcttactcaca

SEQ ID NO: 4172 - DNA, 40 bp, Homo sapiens
gtgagtaagaggggaggtcacgttttggaagagcatagga

SEQ ID NO: 4173 - DNA, 40 bp, Homo sapiens
tcctatgctcttccaaaacgtgacctcccctcttactcac

SEQ ID NO: 4174 - DNA, 40 bp, Homo sapiens
tgagtaagaggggaggtcacgttttggaagagcataggaa

SEQ ID NO: 4175 - DNA, 40 bp, Homo sapiens
ttcctatgctcttccaaaacgtgacctcccctcttactca

SEQ ID NO: 4176 - DNA, 40 bp, Homo sapiens
gagtaagaggggaggtcacgttttggaagagcataggaaa

SEQ ID NO: 4177 - DNA, 40 bp, Homo sapiens
tttcctatgctcttccaaaacgtgacctcccctcttactc

SEQ ID NO: 4178 - DNA, 40 bp, Homo sapiens
agtaagaggggaggtcacgttttggaagagcataggaaag

SEQ ID NO: 4179 - DNA, 40 bp, Homo sapiens
ctttcctatgctcttccaaaacgtgacctcccctcttact

SEQ ID NO: 4180 - DNA, 40 bp, Homo sapiens
gtaagaggggaggtcacgttttggaagagcataggaaagt

SEQ ID NO: 4181 - DNA, 40 bp, Homo sapiens
actttcctatgctcttccaaaacgtgacctcccctcttac

SEQ ID NO: 4182 - DNA, 40 bp, Homo sapiens
taagaggggaggtcacgttttggaagagcataggaaagtg

SEQ ID NO: 4183 - DNA, 40 bp, Homo sapiens
cactttcctatgctcttccaaaacgtgacctcccctctta

SEQ ID NO: 4184 - DNA, 40 bp, Homo sapiens
aagaggggaggtcacgttttggaagagcataggaaagtgc

SEQ ID NO: 4185 - DNA, 40 bp, Homo sapiens
gcactttcctatgctcttccaaaacgtgacctcccctctt

SEQ ID NO: 4186 - DNA, 40 bp, Homo sapiens
agaggggaggtcacgttttggaagagcataggaaagtgct

SEQ ID NO: 4187 - DNA, 40 bp, Homo sapiens
agcactttcctatgctcttccaaaacgtgacctcccctct

SEQ ID NO: 4188 - DNA, 40 bp, Homo sapiens
gaggggaggtcacgttttggaagagcataggaaagtgctt

SEQ ID NO: 4189 - DNA, 40 bp, Homo sapiens
aagcactttcctatgctcttccaaaacgtgacctcccctc

SEQ ID NO: 4190 - DNA, 40 bp, Homo sapiens
aggggaggtcacgttttggaagagcataggaaagtgctta

SEQ ID NO: 4191 - DNA, 40 bp, Homo sapiens
taagcactttcctatgctcttccaaaacgtgacctcccct

SEQ ID NO: 4192 - DNA, 40 bp, Homo sapiens
ggggaggtcacgttttggaagagcataggaaagtgcttag

SEQ ID NO: 4193 - DNA, 40 bp, Homo sapiens
ctaagcactttcctatgctcttccaaaacgtgacctcccc

SEQ ID NO: 4194 - DNA, 40 bp, Homo sapiens
gggaggtcacgttttggaagagcataggaaagtgcttaga

SEQ ID NO: 4195 - DNA, 40 bp, Homo sapiens
tctaagcactttcctatgctcttccaaaacgtgacctccc

SEQ ID NO: 4196 - DNA, 40 bp, Homo sapiens
ggaggtcacgttttggaagagcataggaaagtgcttagag

SEQ ID NO: 4197 - DNA, 40 bp, Homo sapiens
ctctaagcactttcctatgctcttccaaaacgtgacctcc

SEQ ID NO: 4198 - DNA, 40 bp, Homo sapiens
gaggtcacgttttggaagagcataggaaagtgcttagaga

SEQ ID NO: 4199 - DNA, 40 bp, Homo sapiens
tctctaagcactttcctatgctcttccaaaacgtgacctc

SEQ ID NO: 4200 - DNA, 40 bp, Homo sapiens
aggtcacgttttggaagagcataggaaagtgcttagagac

SEQ ID NO: 4201 - DNA, 40 bp, Homo sapiens
gtctctaagcactttcctatgctcttccaaaacgtgacct

SEQ ID NO: 4202 - DNA, 40 bp, Homo sapiens
ggtcacgttttggaagagcataggaaagtgcttagagacc

SEQ ID NO: 4203 - DNA, 40 bp, Homo sapiens
ggtctctaagcactttcctatgctcttccaaaacgtgacc

SEQ ID NO: 4204 - DNA, 40 bp, Homo sapiens
gtcacgttttggaagagcataggaaagtgcttagagacca

SEQ ID NO: 4205 - DNA, 40 bp, Homo sapiens
tggtctctaagcactttcctatgctcttccaaaacgtgac

SEQ ID NO: 4206 - DNA, 40 bp, Homo sapiens
tcacgttttggaagagcataggaaagtgcttagagaccac

SEQ ID NO: 4207 - DNA, 40 bp, Homo sapiens
gtggtctctaagcactttcctatgctcttccaaaacgtga

SEQ ID NO: 4208 - DNA, 40 bp, Homo sapiens
cacgttttggaagagcataggaaagtgcttagagaccact

SEQ ID NO: 4209 - DNA, 40 bp, Homo sapiens
agtggtctctaagcactttcctatgctcttccaaaacgtg

SEQ ID NO: 4210 - DNA, 40 bp, Homo sapiens
acgttttggaagagcataggaaagtgcttagagaccactg

SEQ ID NO: 4211 - DNA, 40 bp, Homo sapiens
cagtggtctctaagcactttcctatgctcttccaaaacgt

SEQ ID NO: 4212 - DNA, 40 bp, Homo sapiens
cgttttggaagagcataggaaagtgcttagagaccactgt

SEQ ID NO: 4213 - DNA, 40 bp, Homo sapiens
acagtggtctctaagcactttcctatgctcttccaaaacg

SEQ ID NO: 4214 - DNA, 40 bp, Homo sapiens
gttttggaagagcataggaaagtgcttagagaccactgtt

SEQ ID NO: 4215 - DNA, 40 bp, Homo sapiens
aacagtggtctctaagcactttcctatgctcttccaaaac

SEQ ID NO: 4216 - DNA, 40 bp, Homo sapiens
ttttggaagagcataggaaagtgcttagagaccactgttt

SEQ ID NO: 4217 - DNA, 40 bp, Homo sapiens
aaacagtggtctctaagcactttcctatgctcttccaaaa

SEQ ID NO: 4218 - DNA, 40 bp, Homo sapiens
tttggaagagcataggaaagtgcttagagaccactgtttg

SEQ ID NO: 4219 - DNA, 40 bp, Homo sapiens
caaacagtggtctctaagcactttcctatgctcttccaaa

SEQ ID NO: 4220 - DNA, 40 bp, Homo sapiens
ttggaagagcataggaaagtgcttagagaccactgtttga

SEQ ID NO: 4221 - DNA, 40 bp, Homo sapiens
tcaaacagtggtctctaagcactttcctatgctcttccaa

SEQ ID NO: 4222 - DNA, 40 bp, Homo sapiens
tggaagagcataggaaagtgcttagagaccactgtttgag

SEQ ID NO: 4223 - DNA, 40 bp, Homo sapiens
ctcaaacagtggtctctaagcactttcctatgctcttcca

SEQ ID NO: 4224 - DNA, 40 bp, Homo sapiens
ggaagagcataggaaagtgcttagagaccactgtttgagg

SEQ ID NO: 4225 - DNA, 40 bp, Homo sapiens
cctcaaacagtggtctctaagcactttcctatgctcttcc

SEQ ID NO: 4226 - DNA, 40 bp, Homo sapiens
gaagagcataggaaagtgcttagagaccactgtttgaggt

SEQ ID NO: 4227 - DNA, 40 bp, Homo sapiens
acctcaaacagtggtctctaagcactttcctatgctcttc

SEQ ID NO: 4228 - DNA, 40 bp, Homo sapiens
aagagcataggaaagtgcttagagaccactgtttgaggtt

SEQ ID NO: 4229 - DNA, 40 bp, Homo sapiens
aacctcaaacagtggtctctaagcactttcctatgctctt

SEQ ID NO: 4230 - DNA, 40 bp, Homo sapiens
agagcataggaaagtgcttagagaccactgtttgaggtta

SEQ ID NO: 4231 - DNA, 40 bp, Homo sapiens
taacctcaaacagtggtctctaagcactttcctatgctct

SEQ ID NO: 4232 - DNA, 40 bp, Homo sapiens
gagcataggaaagtgcttagagaccactgtttgaggttat

SEQ ID NO: 4233 - DNA, 40 bp, Homo sapiens
ataacctcaaacagtggtctctaagcactttcctatgctc

SEQ ID NO: 4234 - DNA, 40 bp, Homo sapiens
agcataggaaagtgcttagagaccactgtttgaggttatt

SEQ ID NO: 4235 - DNA, 40 bp, Homo sapiens
aataacctcaaacagtggtctctaagcactttcctatgct

SEQ ID NO: 4236 - DNA, 40 bp, Homo sapiens
gcataggaaagtgcttagagaccactgtttgaggttattg

SEQ ID NO: 4237 - DNA, 40 bp, Homo sapiens
caataacctcaaacagtggtctctaagcactttcctatgc

SEQ ID NO: 4238 - DNA, 40 bp, Homo sapiens
cataggaaagtgcttagagaccactgtttgaggttattgt

SEQ ID NO: 4239 - DNA, 40 bp, Homo sapiens
acaataacctcaaacagtggtctctaagcactttcctatg

SEQ ID NO: 4240 - DNA, 40 bp, Homo sapiens
ataggaaagtgcttagagaccactgtttgaggttattgtg

SEQ ID NO: 4241 - DNA, 40 bp, Homo sapiens
cacaataacctcaaacagtggtctctaagcactttcctat

SEQ ID NO: 4242 - DNA, 40 bp, Homo sapiens
taggaaagtgcttagagaccactgtttgaggttattgtgt

SEQ ID NO: 4243 - DNA, 40 bp, Homo sapiens
acacaataacctcaaacagtggtctctaagcactttccta

SEQ ID NO: 4244 - DNA, 40 bp, Homo sapiens
aggaaagtgcttagagaccactgtttgaggttattgtgtt

SEQ ID NO: 4245 - DNA, 40 bp, Homo sapiens
aacacaataacctcaaacagtggtctctaagcactttcct

SEQ ID NO: 4246 - DNA, 40 bp, Homo sapiens
ggaaagtgcttagagaccactgtttgaggttattgtgttt

SEQ ID NO: 4247 - DNA, 40 bp, Homo sapiens
aaacacaataacctcaaacagtggtctctaagcactttcc

SEQ ID NO: 4248 - DNA, 40 bp, Homo sapiens
gaaagtgcttagagaccactgtttgaggttattgtgtttg

SEQ ID NO: 4249 - DNA, 40 bp, Homo sapiens
caaacacaataacctcaaacagtggtctctaagcactttc

SEQ ID NO: 4250 - DNA, 40 bp, Homo sapiens
aaagtgcttagagaccactgtttgaggttattgtgtttgg

SEQ ID NO: 4251 - DNA, 40 bp, Homo sapiens
ccaaacacaataacctcaaacagtggtctctaagcacttt

SEQ ID NO: 4252 - DNA, 40 bp, Homo sapiens
aagtgcttagagaccactgtttgaggttattgtgtttgga

SEQ ID NO: 4253 - DNA, 40 bp, Homo sapiens
tccaaacacaataacctcaaacagtggtctctaagcactt

SEQ ID NO: 4254 - DNA, 40 bp, Homo sapiens
agtgcttagagaccactgtttgaggttattgtgtttggaa

SEQ ID NO: 4255 - DNA, 40 bp, Homo sapiens
ttccaaacacaataacctcaaacagtggtctctaagcact

SEQ ID NO: 4256 - DNA, 40 bp, Homo sapiens
gtgcttagagaccactgtttgaggttattgtgtttggaaa

SEQ ID NO: 4257 - DNA, 40 bp, Homo sapiens
tttccaaacacaataacctcaaacagtggtctctaagcac

SEQ ID NO: 4258 - DNA, 40 bp, Homo sapiens
tgcttagagaccactgtttgaggttattgtgtttggaaaa

SEQ ID NO: 4259 - DNA, 40 bp, Homo sapiens
ttttccaaacacaataacctcaaacagtggtctctaagca

SEQ ID NO: 4260 - DNA, 40 bp, Homo sapiens
gcttagagaccactgtttgaggttattgtgtttggaaaaa

SEQ ID NO: 4261 - DNA, 40 bp, Homo sapiens
tttttccaaacacaataacctcaaacagtggtctctaagc

SEQ ID NO: 4262 - DNA, 40 bp, Homo sapiens
cttagagaccactgtttgaggttattgtgtttggaaaaaa

SEQ ID NO: 4263 - DNA, 40 bp, Homo sapiens
ttttttccaaacacaataacctcaaacagtggtctctaag

SEQ ID NO: 4264 - DNA, 40 bp, Homo sapiens
ttagagaccactgtttgaggttattgtgtttggaaaaaaa

SEQ ID NO: 4265 - DNA, 40 bp, Homo sapiens
tttttttccaaacacaataacctcaaacagtggtctctaa

SEQ ID NO: 4266 - DNA, 40 bp, Homo sapiens
tagagaccactgtttgaggttattgtgtttggaaaaaaat

SEQ ID NO: 4267 - DNA, 40 bp, Homo sapiens
atttttttccaaacacaataacctcaaacagtggtctcta

SEQ ID NO: 4268 - DNA, 40 bp, Homo sapiens
agagaccactgtttgaggttattgtgtttggaaaaaaatg

SEQ ID NO: 4269 - DNA, 40 bp, Homo sapiens
catttttttccaaacacaataacctcaaacagtggtctct

SEQ ID NO: 4270 - DNA, 40 bp, Homo sapiens
gagaccactgtttgaggttattgtgtttggaaaaaaatgc

SEQ ID NO: 4271 - DNA, 40 bp, Homo sapiens
gcatttttttccaaacacaataacctcaaacagtggtctc

SEQ ID NO: 4272 - DNA, 40 bp, Homo sapiens
agaccactgtttgaggttattgtgtttggaaaaaaatgca

SEQ ID NO: 4273 - DNA, 40 bp, Homo sapiens
tgcatttttttccaaacacaataacctcaaacagtggtct

SEQ ID NO: 4274 - DNA, 40 bp, Homo sapiens
gaccactgtttgaggttattgtgtttggaaaaaaatgcat

SEQ ID NO: 4275 - DNA, 40 bp, Homo sapiens
atgcatttttttccaaacacaataacctcaaacagtggtc

SEQ ID NO: 4276 - DNA, 40 bp, Homo sapiens
accactgtttgaggttattgtgtttggaaaaaaatgcatc

SEQ ID NO: 4277 - DNA, 40 bp, Homo sapiens
gatgcatttttttccaaacacaataacctcaaacagtggt

SEQ ID NO: 4278 - DNA, 40 bp, Homo sapiens
ccactgtttgaggttattgtgtttggaaaaaaatgcatct

SEQ ID NO: 4279 - DNA, 40 bp, Homo sapiens
agatgcatttttttccaaacacaataacctcaaacagtgg

SEQ ID NO: 4280 - DNA, 40 bp, Homo sapiens
cactgtttgaggttattgtgtttggaaaaaaatgcatctg

SEQ ID NO: 4281 - DNA, 40 bp, Homo sapiens
cagatgcatttttttccaaacacaataacctcaaacagtg

SEQ ID NO: 4282 - DNA, 40 bp, Homo sapiens
actgtttgaggttattgtgtttggaaaaaaatgcatctgc

SEQ ID NO: 4283 - DNA, 40 bp, Homo sapiens
gcagatgcatttttttccaaacacaataacctcaaacagt

SEQ ID NO: 4284 - DNA, 40 bp, Homo sapiens
ctgtttgaggttattgtgtttggaaaaaaatgcatctgcc

SEQ ID NO: 4285 - DNA, 40 bp, Homo sapiens
ggcagatgcatttttttccaaacacaataacctcaaacag

SEQ ID NO: 4286 - DNA, 40 bp, Homo sapiens
tgtttgaggttattgtgtttggaaaaaaatgcatctgcct

SEQ ID NO: 4287 - DNA, 40 bp, Homo sapiens
aggcagatgcatttttttccaaacacaataacctcaaaca

SEQ ID NO: 4288 - DNA, 40 bp, Homo sapiens
gtttgaggttattgtgtttggaaaaaaatgcatctgcctc

SEQ ID NO: 4289 - DNA, 40 bp, Homo sapiens
gaggcagatgcatttttttccaaacacaataacctcaaac

SEQ ID NO: 4290 - DNA, 40 bp, Homo sapiens
tttgaggttattgtgtttggaaaaaaatgcatctgcctcc

SEQ ID NO: 4291 - DNA, 40 bp, Homo sapiens
ggaggcagatgcatttttttccaaacacaataacctcaaa

SEQ ID NO: 4292 - DNA, 40 bp, Homo sapiens
ttgaggttattgtgtttggaaaaaaatgcatctgcctccg

SEQ ID NO: 4293 - DNA, 40 bp, Homo sapiens
cggaggcagatgcatttttttccaaacacaataacctcaa

SEQ ID NO: 4294 - DNA, 40 bp, Homo sapiens
tgaggttattgtgtttggaaaaaaatgcatctgcctccga

SEQ ID NO: 4295 - DNA, 40 bp, Homo sapiens
tcggaggcagatgcatttttttccaaacacaataacctca

SEQ ID NO: 4296 - DNA, 40 bp, Homo sapiens
gaggttattgtgtttggaaaaaaatgcatctgcctccgag

SEQ ID NO: 4297 - DNA, 40 bp, Homo sapiens
ctcggaggcagatgcatttttttccaaacacaataacctc

SEQ ID NO: 4298 - DNA, 40 bp, Homo sapiens
aggttattgtgtttggaaaaaaatgcatctgcctccgagt

SEQ ID NO: 4299 - DNA, 40 bp, Homo sapiens
actcggaggcagatgcatttttttccaaacacaataacct

SEQ ID NO: 4300 - DNA, 40 bp, Homo sapiens
ggttattgtgtttggaaaaaaatgcatctgcctccgagtt

SEQ ID NO: 4301 - DNA, 40 bp, Homo sapiens
aactcggaggcagatgcatttttttccaaacacaataacc

SEQ ID NO: 4302 - DNA, 40 bp, Homo sapiens
gttattgtgtttggaaaaaaatgcatctgcctccgagttc

SEQ ID NO: 4303 - DNA, 40 bp, Homo sapiens
gaactcggaggcagatgcatttttttccaaacacaataac

SEQ ID NO: 4304 - DNA, 40 bp, Homo sapiens
ttattgtgtttggaaaaaaatgcatctgcctccgagttcc

SEQ ID NO: 4305 - DNA, 40 bp, Homo sapiens
ggaactcggaggcagatgcatttttttccaaacacaataa

SEQ ID NO: 4306 - DNA, 40 bp, Homo sapiens
tattgtgtttggaaaaaaatgcatctgcctccgagttcct

SEQ ID NO: 4307 - DNA, 40 bp, Homo sapiens
aggaactcggaggcagatgcatttttttccaaacacaata

SEQ ID NO: 4308 - DNA, 40 bp, Homo sapiens
attgtgtttggaaaaaaatgcatctgcctccgagttcctg

SEQ ID NO: 4309 - DNA, 40 bp, Homo sapiens
caggaactcggaggcagatgcatttttttccaaacacaat

SEQ ID NO: 4310 - DNA, 40 bp, Homo sapiens
ttgtgtttggaaaaaaatgcatctgcctccgagttcctga

SEQ ID NO: 4311 - DNA, 40 bp, Homo sapiens
tcaggaactcggaggcagatgcatttttttccaaacacaa

SEQ ID NO: 4312 - DNA, 40 bp, Homo sapiens
tgtgtttggaaaaaaatgcatctgcctccgagttcctgaa

SEQ ID NO: 4313 - DNA, 40 bp, Homo sapiens
ttcaggaactcggaggcagatgcatttttttccaaacaca

SEQ ID NO: 4314 - DNA, 40 bp, Homo sapiens
gtgtttggaaaaaaatgcatctgcctccgagttcctgaat

SEQ ID NO: 4315 - DNA, 40 bp, Homo sapiens
attcaggaactcggaggcagatgcatttttttccaaacac

SEQ ID NO: 4316 - DNA, 40 bp, Homo sapiens
tgtttggaaaaaaatgcatctgcctccgagttcctgaatg

SEQ ID NO: 4317 - DNA, 40 bp, Homo sapiens
cattcaggaactcggaggcagatgcatttttttccaaaca

SEQ ID NO: 4318 - DNA, 40 bp, Homo sapiens
gtttggaaaaaaatgcatctgcctccgagttcctgaatgc

SEQ ID NO: 4319 - DNA, 40 bp, Homo sapiens
gcattcaggaactcggaggcagatgcatttttttccaaac

SEQ ID NO: 4320 - DNA, 40 bp, Homo sapiens
tttggaaaaaaatgcatctgcctccgagttcctgaatgct

SEQ ID NO: 4321 - DNA, 40 bp, Homo sapiens
agcattcaggaactcggaggcagatgcatttttttccaaa

SEQ ID NO: 4322 - DNA, 40 bp, Homo sapiens
ttggaaaaaaatgcatctgcctccgagttcctgaatgctc

SEQ ID NO: 4323 - DNA, 40 bp, Homo sapiens
gagcattcaggaactcggaggcagatgcatttttttccaa

SEQ ID NO: 4324 - DNA, 40 bp, Homo sapiens
tggaaaaaaatgcatctgcctccgagttcctgaatgctcc

SEQ ID NO: 4325 - DNA, 40 bp, Homo sapiens
ggagcattcaggaactcggaggcagatgcatttttttcca

SEQ ID NO: 4326 - DNA, 40 bp, Homo sapiens
ggaaaaaaatgcatctgcctccgagttcctgaatgctccc

SEQ ID NO: 4327 - DNA, 40 bp, Homo sapiens
gggagcattcaggaactcggaggcagatgcatttttttcc

SEQ ID NO: 4328 - DNA, 40 bp, Homo sapiens
gaaaaaaatgcatctgcctccgagttcctgaatgctcccc

SEQ ID NO: 4329 - DNA, 40 bp, Homo sapiens
ggggagcattcaggaactcggaggcagatgcatttttttc

SEQ ID NO: 4330 - DNA, 40 bp, Homo sapiens
aaaaaaatgcatctgcctccgagttcctgaatgctcccct

SEQ ID NO: 4331 - DNA, 40 bp, Homo sapiens
aggggagcattcaggaactcggaggcagatgcattttttt

SEQ ID NO: 4332 - DNA, 40 bp, Homo sapiens
aaaaaatgcatctgcctccgagttcctgaatgctcccctc

SEQ ID NO: 4333 - DNA, 40 bp, Homo sapiens
gaggggagcattcaggaactcggaggcagatgcatttttt

SEQ ID NO: 4334 - DNA, 40 bp, Homo sapiens
aaaaatgcatctgcctccgagttcctgaatgctcccctcc

SEQ ID NO: 4335 - DNA, 40 bp, Homo sapiens
ggaggggagcattcaggaactcggaggcagatgcattttt

SEQ ID NO: 4336 - DNA, 40 bp, Homo sapiens
aaaatgcatctgcctccgagttcctgaatgctcccctccc

SEQ ID NO: 4337 - DNA, 40 bp, Homo sapiens
gggaggggagcattcaggaactcggaggcagatgcatttt

SEQ ID NO: 4338 - DNA, 40 bp, Homo sapiens
aaatgcatctgcctccgagttcctgaatgctcccctcccc

SEQ ID NO: 4339 - DNA, 40 bp, Homo sapiens
ggggaggggagcattcaggaactcggaggcagatgcattt

SEQ ID NO: 4340 - DNA, 40 bp, Homo sapiens
aatgcatctgcctccgagttcctgaatgctcccctccccc

SEQ ID NO: 4341 - DNA, 40 bp, Homo sapiens
gggggaggggagcattcaggaactcggaggcagatgcatt

SEQ ID NO: 4342 - DNA, 40 bp, Homo sapiens
atgcatctgcctccgagttcctgaatgctcccctccccca

SEQ ID NO: 4343 - DNA, 40 bp, Homo sapiens
tgggggaggggagcattcaggaactcggaggcagatgcat

SEQ ID NO: 4344 - DNA, 40 bp, Homo sapiens
tgcatctgcctccgagttcctgaatgctcccctcccccat

SEQ ID NO: 4345 - DNA, 40 bp, Homo sapiens
atgggggaggggagcattcaggaactcggaggcagatgca

SEQ ID NO: 4346 - DNA, 40 bp, Homo sapiens
gcatctgcctccgagttcctgaatgctcccctcccccatg

SEQ ID NO: 4347 - DNA, 40 bp, Homo sapiens
catgggggaggggagcattcaggaactcggaggcagatgc

SEQ ID NO: 4348 - DNA, 40 bp, Homo sapiens
catctgcctccgagttcctgaatgctcccctcccccatgt

SEQ ID NO: 4349 - DNA, 40 bp, Homo sapiens
acatgggggaggggagcattcaggaactcggaggcagatg

SEQ ID NO: 4350 - DNA, 40 bp, Homo sapiens
atctgcctccgagttcctgaatgctcccctcccccatgta

SEQ ID NO: 4351 - DNA, 40 bp, Homo sapiens
tacatgggggaggggagcattcaggaactcggaggcagat

SEQ ID NO: 4352 - DNA, 40 bp, Homo sapiens
tctgcctccgagttcctgaatgctcccctcccccatgtat

SEQ ID NO: 4353 - DNA, 40 bp, Homo sapiens
atacatgggggaggggagcattcaggaactcggaggcaga

SEQ ID NO: 4354 - DNA, 40 bp, Homo sapiens
ctgcctccgagttcctgaatgctcccctcccccatgtatg

SEQ ID NO: 4355 - DNA, 40 bp, Homo sapiens
catacatgggggaggggagcattcaggaactcggaggcag

SEQ ID NO: 4356 - DNA, 40 bp, Homo sapiens
tgcctccgagttcctgaatgctcccctcccccatgtatgg

SEQ ID NO: 4357 - DNA, 40 bp, Homo sapiens
ccatacatgggggaggggagcattcaggaactcggaggca

SEQ ID NO: 4358 - DNA, 40 bp, Homo sapiens
gcctccgagttcctgaatgctcccctcccccatgtatggg

SEQ ID NO: 4359 - DNA, 40 bp, Homo sapiens
cccatacatgggggaggggagcattcaggaactcggaggc

SEQ ID NO: 4360 - DNA, 40 bp, Homo sapiens
cctccgagttcctgaatgctcccctcccccatgtatgggc

SEQ ID NO: 4361 - DNA, 40 bp, Homo sapiens
gcccatacatgggggaggggagcattcaggaactcggagg

SEQ ID NO: 4362 - DNA, 40 bp, Homo sapiens
ctccgagttcctgaatgctcccctcccccatgtatgggct

SEQ ID NO: 4363 - DNA, 40 bp, Homo sapiens
agcccatacatgggggaggggagcattcaggaactcggag

SEQ ID NO: 4364 - DNA, 40 bp, Homo sapiens
tccgagttcctgaatgctcccctcccccatgtatgggctg

SEQ ID NO: 4365 - DNA, 40 bp, Homo sapiens
cagcccatacatgggggaggggagcattcaggaactcgga

SEQ ID NO: 4366 - DNA, 40 bp, Homo sapiens
ccgagttcctgaatgctcccctcccccatgtatgggctgt

SEQ ID NO: 4367 - DNA, 40 bp, Homo sapiens
acagcccatacatgggggaggggagcattcaggaactcgg

SEQ ID NO: 4368 - DNA, 40 bp, Homo sapiens
cgagttcctgaatgctcccctcccccatgtatgggctgtg

SEQ ID NO: 4369 - DNA, 40 bp, Homo sapiens
cacagcccatacatgggggaggggagcattcaggaactcg

SEQ ID NO: 4370 - DNA, 40 bp, Homo sapiens
gagttcctgaatgctcccctcccccatgtatgggctgtga

SEQ ID NO: 4371 - DNA, 40 bp, Homo sapiens
tcacagcccatacatgggggaggggagcattcaggaactc

SEQ ID NO: 4372 - DNA, 40 bp, Homo sapiens
agttcctgaatgctcccctcccccatgtatgggctgtgac

SEQ ID NO: 4373 - DNA, 40 bp, Homo sapiens
gtcacagcccatacatgggggaggggagcattcaggaact

SEQ ID NO: 4374 - DNA, 40 bp, Homo sapiens
gttcctgaatgctcccctcccccatgtatgggctgtgaca

SEQ ID NO: 4375 - DNA, 40 bp, Homo sapiens
tgtcacagcccatacatgggggaggggagcattcaggaac

SEQ ID NO: 4376 - DNA, 40 bp, Homo sapiens
ttcctgaatgctcccctcccccatgtatgggctgtgacat

SEQ ID NO: 4377 - DNA, 40 bp, Homo sapiens
atgtcacagcccatacatgggggaggggagcattcaggaa

SEQ ID NO: 4378 - DNA, 40 bp, Homo sapiens
tcctgaatgctcccctcccccatgtatgggctgtgacatt

SEQ ID NO: 4379 - DNA, 40 bp, Homo sapiens
aatgtcacagcccatacatgggggaggggagcattcagga

SEQ ID NO: 4380 - DNA, 40 bp, Homo sapiens
cctgaatgctcccctcccccatgtatgggctgtgacattg

SEQ ID NO: 4381 - DNA, 40 bp, Homo sapiens
caatgtcacagcccatacatgggggaggggagcattcagg

SEQ ID NO: 4382 - DNA, 40 bp, Homo sapiens
ctgaatgctcccctcccccatgtatgggctgtgacattgc

SEQ ID NO: 4383 - DNA, 40 bp, Homo sapiens
gcaatgtcacagcccatacatgggggaggggagcattcag

SEQ ID NO: 4384 - DNA, 40 bp, Homo sapiens
tgaatgctcccctcccccatgtatgggctgtgacattgct

SEQ ID NO: 4385 - DNA, 40 bp, Homo sapiens
agcaatgtcacagcccatacatgggggaggggagcattca

SEQ ID NO: 4386 - DNA, 40 bp, Homo sapiens
gaatgctcccctcccccatgtatgggctgtgacattgctg

SEQ ID NO: 4387 - DNA, 40 bp, Homo sapiens
cagcaatgtcacagcccatacatgggggaggggagcattc

SEQ ID NO: 4388 - DNA, 40 bp, Homo sapiens
aatgctcccctcccccatgtatgggctgtgacattgctgt

SEQ ID NO: 4389 - DNA, 40 bp, Homo sapiens
acagcaatgtcacagcccatacatgggggaggggagcatt

SEQ ID NO: 4390 - DNA, 40 bp, Homo sapiens
atgctcccctcccccatgtatgggctgtgacattgctgtg

SEQ ID NO: 4391 - DNA, 40 bp, Homo sapiens
cacagcaatgtcacagcccatacatgggggaggggagcat

SEQ ID NO: 4392 - DNA, 40 bp, Homo sapiens
tgctcccctcccccatgtatgggctgtgacattgctgtgg

SEQ ID NO: 4393 - DNA, 40 bp, Homo sapiens
ccacagcaatgtcacagcccatacatgggggaggggagca

SEQ ID NO: 4394 - DNA, 40 bp, Homo sapiens
gctcccctcccccatgtatgggctgtgacattgctgtggc

SEQ ID NO: 4395 - DNA, 40 bp, Homo sapiens
gccacagcaatgtcacagcccatacatgggggaggggagc

SEQ ID NO: 4396 - DNA, 40 bp, Homo sapiens
ctcccctcccccatgtatgggctgtgacattgctgtggcc

SEQ ID NO: 4397 - DNA, 40 bp, Homo sapiens
ggccacagcaatgtcacagcccatacatgggggaggggag

SEQ ID NO: 4398 - DNA, 40 bp, Homo sapiens
tcccctcccccatgtatgggctgtgacattgctgtggcca

SEQ ID NO: 4399 - DNA, 40 bp, Homo sapiens
tggccacagcaatgtcacagcccatacatgggggagggga

SEQ ID NO: 4400 - DNA, 40 bp, Homo sapiens
cccctcccccatgtatgggctgtgacattgctgtggccac

SEQ ID NO: 4401 - DNA, 40 bp, Homo sapiens
gtggccacagcaatgtcacagcccatacatgggggagggg

SEQ ID NO: 4402 - DNA, 40 bp, Homo sapiens
ccctcccccatgtatgggctgtgacattgctgtggccaca

SEQ ID NO: 4403 - DNA, 40 bp, Homo sapiens
tgtggccacagcaatgtcacagcccatacatgggggaggg

SEQ ID NO: 4404 - DNA, 40 bp, Homo sapiens
cctcccccatgtatgggctgtgacattgctgtggccacaa

SEQ ID NO: 4405 - DNA, 40 bp, Homo sapiens
ttgtggccacagcaatgtcacagcccatacatgggggagg

SEQ ID NO: 4406 - DNA, 40 bp, Homo sapiens
ctcccccatgtatgggctgtgacattgctgtggccacaaa

SEQ ID NO: 4407 - DNA, 40 bp, Homo sapiens
tttgtggccacagcaatgtcacagcccatacatgggggag

SEQ ID NO: 4408 - DNA, 40 bp, Homo sapiens
tcccccatgtatgggctgtgacattgctgtggccacaaag

SEQ ID NO: 4409 - DNA, 40 bp, Homo sapiens
ctttgtggccacagcaatgtcacagcccatacatggggga

SEQ ID NO: 4410 - DNA, 40 bp, Homo sapiens
cccccatgtatgggctgtgacattgctgtggccacaaagg

SEQ ID NO: 4411 - DNA, 40 bp, Homo sapiens
cctttgtggccacagcaatgtcacagcccatacatggggg

SEQ ID NO: 4412 - DNA, 40 bp, Homo sapiens
ccccatgtatgggctgtgacattgctgtggccacaaagga

SEQ ID NO: 4413 - DNA, 40 bp, Homo sapiens
tcctttgtggccacagcaatgtcacagcccatacatgggg

SEQ ID NO: 4414 - DNA, 40 bp, Homo sapiens
cccatgtatgggctgtgacattgctgtggccacaaaggag

SEQ ID NO: 4415 - DNA, 40 bp, Homo sapiens
ctcctttgtggccacagcaatgtcacagcccatacatggg

SEQ ID NO: 4416 - DNA, 40 bp, Homo sapiens
ccatgtatgggctgtgacattgctgtggccacaaaggagg

SEQ ID NO: 4417 - DNA, 40 bp, Homo sapiens
cctcctttgtggccacagcaatgtcacagcccatacatgg

SEQ ID NO: 4418 - DNA, 40 bp, Homo sapiens
catgtatgggctgtgacattgctgtggccacaaaggagga

SEQ ID NO: 4419 - DNA, 40 bp, Homo sapiens
tcctcctttgtggccacagcaatgtcacagcccatacatg

SEQ ID NO: 4420 - DNA, 40 bp, Homo sapiens
atgtatgggctgtgacattgctgtggccacaaaggaggag

SEQ ID NO: 4421 - DNA, 40 bp, Homo sapiens
ctcctcctttgtggccacagcaatgtcacagcccatacat

SEQ ID NO: 4422 - DNA, 40 bp, Homo sapiens
tgtatgggctgtgacattgctgtggccacaaaggaggagg

SEQ ID NO: 4423 - DNA, 40 bp, Homo sapiens
cctcctcctttgtggccacagcaatgtcacagcccataca

SEQ ID NO: 4424 - DNA, 40 bp, Homo sapiens
gtatgggctgtgacattgctgtggccacaaaggaggaggt

SEQ ID NO: 4425 - DNA, 40 bp, Homo sapiens
acctcctcctttgtggccacagcaatgtcacagcccatac

SEQ ID NO: 4426 - DNA, 40 bp, Homo sapiens
tatgggctgtgacattgctgtggccacaaaggaggaggtg

SEQ ID NO: 4427 - DNA, 40 bp, Homo sapiens
cacctcctcctttgtggccacagcaatgtcacagcccata

SEQ ID NO: 4428 - DNA, 40 bp, Homo sapiens
atgggctgtgacattgctgtggccacaaaggaggaggtgg

SEQ ID NO: 4429 - DNA, 40 bp, Homo sapiens
ccacctcctcctttgtggccacagcaatgtcacagcccat

SEQ ID NO: 4430 - DNA, 40 bp, Homo sapiens
tgggctgtgacattgctgtggccacaaaggaggaggtgga

SEQ ID NO: 4431 - DNA, 40 bp, Homo sapiens
tccacctcctcctttgtggccacagcaatgtcacagccca

SEQ ID NO: 4432 - DNA, 40 bp, Homo sapiens
gggctgtgacattgctgtggccacaaaggaggaggtggag

SEQ ID NO: 4433 - DNA, 40 bp, Homo sapiens
ctccacctcctcctttgtggccacagcaatgtcacagccc

SEQ ID NO: 4434 - DNA, 40 bp, Homo sapiens
ggctgtgacattgctgtggccacaaaggaggaggtggagg

SEQ ID NO: 4435 - DNA, 40 bp, Homo sapiens
cctccacctcctcctttgtggccacagcaatgtcacagcc

SEQ ID NO: 4436 - DNA, 40 bp, Homo sapiens
gctgtgacattgctgtggccacaaaggaggaggtggaggt

SEQ ID NO: 4437 - DNA, 40 bp, Homo sapiens
acctccacctcctcctttgtggccacagcaatgtcacagc

SEQ ID NO: 4438 - DNA, 40 bp, Homo sapiens
ctgtgacattgctgtggccacaaaggaggaggtggaggta

SEQ ID NO: 4439 - DNA, 40 bp, Homo sapiens
tacctccacctcctcctttgtggccacagcaatgtcacag

SEQ ID NO: 4440 - DNA, 40 bp, Homo sapiens
tgtgacattgctgtggccacaaaggaggaggtggaggtag

SEQ ID NO: 4441 - DNA, 40 bp, Homo sapiens
ctacctccacctcctcctttgtggccacagcaatgtcaca

SEQ ID NO: 4442 - DNA, 40 bp, Homo sapiens
gtgacattgctgtggccacaaaggaggaggtggaggtaga

SEQ ID NO: 4443 - DNA, 40 bp, Homo sapiens
tctacctccacctcctcctttgtggccacagcaatgtcac

SEQ ID NO: 4444 - DNA, 40 bp, Homo sapiens
tgacattgctgtggccacaaaggaggaggtggaggtagag

SEQ ID NO: 4445 - DNA, 40 bp, Homo sapiens
ctctacctccacctcctcctttgtggccacagcaatgtca

SEQ ID NO: 4446 - DNA, 40 bp, Homo sapiens
gacattgctgtggccacaaaggaggaggtggaggtagaga

SEQ ID NO: 4447 - DNA, 40 bp, Homo sapiens
tctctacctccacctcctcctttgtggccacagcaatgtc

SEQ ID NO: 4448 - DNA, 40 bp, Homo sapiens
acattgctgtggccacaaaggaggaggtggaggtagagat

SEQ ID NO: 4449 - DNA, 40 bp, Homo sapiens
atctctacctccacctcctcctttgtggccacagcaatgt

SEQ ID NO: 4450 - DNA, 40 bp, Homo sapiens
cattgctgtggccacaaaggaggaggtggaggtagagatg

SEQ ID NO: 4451 - DNA, 40 bp, Homo sapiens
catctctacctccacctcctcctttgtggccacagcaatg

SEQ ID NO: 4452 - DNA, 40 bp, Homo sapiens
attgctgtggccacaaaggaggaggtggaggtagagatgg

SEQ ID NO: 4453 - DNA, 40 bp, Homo sapiens
ccatctctacctccacctcctcctttgtggccacagcaat

SEQ ID NO: 4454 - DNA, 40 bp, Homo sapiens
ttgctgtggccacaaaggaggaggtggaggtagagatggt

SEQ ID NO: 4455 - DNA, 40 bp, Homo sapiens
accatctctacctccacctcctcctttgtggccacagcaa

SEQ ID NO: 4456 - DNA, 40 bp, Homo sapiens
tgctgtggccacaaaggaggaggtggaggtagagatggtg

SEQ ID NO: 4457 - DNA, 40 bp, Homo sapiens
caccatctctacctccacctcctcctttgtggccacagca

SEQ ID NO: 4458 - DNA, 40 bp, Homo sapiens
gctgtggccacaaaggaggaggtggaggtagagatggtgg

SEQ ID NO: 4459 - DNA, 40 bp, Homo sapiens
ccaccatctctacctccacctcctcctttgtggccacagc

SEQ ID NO: 4460 - DNA, 40 bp, Homo sapiens
ctgtggccacaaaggaggaggtggaggtagagatggtgga

SEQ ID NO: 4461 - DNA, 40 bp, Homo sapiens
tccaccatctctacctccacctcctcctttgtggccacag

SEQ ID NO: 4462 - DNA, 40 bp, Homo sapiens
tgtggccacaaaggaggaggtggaggtagagatggtggaa

SEQ ID NO: 4463 - DNA, 40 bp, Homo sapiens
ttccaccatctctacctccacctcctcctttgtggccaca

SEQ ID NO: 4464 - DNA, 40 bp, Homo sapiens
gtggccacaaaggaggaggtggaggtagagatggtggaag

SEQ ID NO: 4465 - DNA, 40 bp, Homo sapiens
cttccaccatctctacctccacctcctcctttgtggccac

SEQ ID NO: 4466 - DNA, 40 bp, Homo sapiens
tggccacaaaggaggaggtggaggtagagatggtggaaga

SEQ ID NO: 4467 - DNA, 40 bp, Homo sapiens
tcttccaccatctctacctccacctcctcctttgtggcca

SEQ ID NO: 4468 - DNA, 40 bp, Homo sapiens
ggccacaaaggaggaggtggaggtagagatggtggaagaa

SEQ ID NO: 4469 - DNA, 40 bp, Homo sapiens
ttcttccaccatctctacctccacctcctcctttgtggcc

SEQ ID NO: 4470 - DNA, 40 bp, Homo sapiens
gccacaaaggaggaggtggaggtagagatggtggaagaac

SEQ ID NO: 4471 - DNA, 40 bp, Homo sapiens
gttcttccaccatctctacctccacctcctcctttgtggc

SEQ ID NO: 4472 - DNA, 40 bp, Homo sapiens
ccacaaaggaggaggtggaggtagagatggtggaagaaca

SEQ ID NO: 4473 - DNA, 40 bp, Homo sapiens
tgttcttccaccatctctacctccacctcctcctttgtgg

SEQ ID NO: 4474 - DNA, 40 bp, Homo sapiens
cacaaaggaggaggtggaggtagagatggtggaagaacag

SEQ ID NO: 4475 - DNA, 40 bp, Homo sapiens
ctgttcttccaccatctctacctccacctcctcctttgtg

SEQ ID NO: 4476 - DNA, 40 bp, Homo sapiens
acaaaggaggaggtggaggtagagatggtggaagaacagg

SEQ ID NO: 4477 - DNA, 40 bp, Homo sapiens
cctgttcttccaccatctctacctccacctcctcctttgt

SEQ ID NO: 4478 - DNA, 40 bp, Homo sapiens
caaaggaggaggtggaggtagagatggtggaagaacaggt

SEQ ID NO: 4479 - DNA, 40 bp, Homo sapiens
acctgttcttccaccatctctacctccacctcctcctttg

SEQ ID NO: 4480 - DNA, 40 bp, Homo sapiens
aaaggaggaggtggaggtagagatggtggaagaacaggtg

SEQ ID NO: 4481 - DNA, 40 bp, Homo sapiens
cacctgttcttccaccatctctacctccacctcctccttt

SEQ ID NO: 4482 - DNA, 40 bp, Homo sapiens
aaggaggaggtggaggtagagatggtggaagaacaggtgg

SEQ ID NO: 4483 - DNA, 40 bp, Homo sapiens
ccacctgttcttccaccatctctacctccacctcctcctt

SEQ ID NO: 4484 - DNA, 40 bp, Homo sapiens
aggaggaggtggaggtagagatggtggaagaacaggtggc

SEQ ID NO: 4485 - DNA, 40 bp, Homo sapiens
gccacctgttcttccaccatctctacctccacctcctcct

SEQ ID NO: 4486 - DNA, 40 bp, Homo sapiens
ggaggaggtggaggtagagatggtggaagaacaggtggcc

SEQ ID NO: 4487 - DNA, 40 bp, Homo sapiens
ggccacctgttcttccaccatctctacctccacctcctcc

SEQ ID NO: 4488 - DNA, 40 bp, Homo sapiens
gaggaggtggaggtagagatggtggaagaacaggtggcca

SEQ ID NO: 4489 - DNA, 40 bp, Homo sapiens
tggccacctgttcttccaccatctctacctccacctcctc

SEQ ID NO: 4490 - DNA, 40 bp, Homo sapiens
aggaggtggaggtagagatggtggaagaacaggtggccaa

SEQ ID NO: 4491 - DNA, 40 bp, Homo sapiens
ttggccacctgttcttccaccatctctacctccacctcct

SEQ ID NO: 4492 - DNA, 40 bp, Homo sapiens
ggaggtggaggtagagatggtggaagaacaggtggccaac

SEQ ID NO: 4493 - DNA, 40 bp, Homo sapiens
gttggccacctgttcttccaccatctctacctccacctcc

SEQ ID NO: 4494 - DNA, 40 bp, Homo sapiens
gaggtggaggtagagatggtggaagaacaggtggccaaca

SEQ ID NO: 4495 - DNA, 40 bp, Homo sapiens
tgttggccacctgttcttccaccatctctacctccacctc

SEQ ID NO: 4496 - DNA, 40 bp, Homo sapiens
aggtggaggtagagatggtggaagaacaggtggccaacac

SEQ ID NO: 4497 - DNA, 40 bp, Homo sapiens
gtgttggccacctgttcttccaccatctctacctccacct

SEQ ID NO: 4498 - DNA, 40 bp, Homo sapiens
ggtggaggtagagatggtggaagaacaggtggccaacacc

SEQ ID NO: 4499 - DNA, 40 bp, Homo sapiens
ggtgttggccacctgttcttccaccatctctacctccacc

SEQ ID NO: 4500 - DNA, 40 bp, Homo sapiens
gtggaggtagagatggtggaagaacaggtggccaacaccc

SEQ ID NO: 4501 - DNA, 40 bp, Homo sapiens
gggtgttggccacctgttcttccaccatctctacctccac

SEQ ID NO: 4502 - DNA, 40 bp, Homo sapiens
tggaggtagagatggtggaagaacaggtggccaacaccct

SEQ ID NO: 4503 - DNA, 40 bp, Homo sapiens
agggtgttggccacctgttcttccaccatctctacctcca

SEQ ID NO: 4504 - DNA, 40 bp, Homo sapiens
ggaggtagagatggtggaagaacaggtggccaacacccta

SEQ ID NO: 4505 - DNA, 40 bp, Homo sapiens
tagggtgttggccacctgttcttccaccatctctacctcc

SEQ ID NO: 4506 - DNA, 40 bp, Homo sapiens
gaggtagagatggtggaagaacaggtggccaacaccctac

SEQ ID NO: 4507 - DNA, 40 bp, Homo sapiens
gtagggtgttggccacctgttcttccaccatctctacctc

SEQ ID NO: 4508 - DNA, 40 bp, Homo sapiens
aggtagagatggtggaagaacaggtggccaacaccctaca

SEQ ID NO: 4509 - DNA, 40 bp, Homo sapiens
tgtagggtgttggccacctgttcttccaccatctctacct

SEQ ID NO: 4510 - DNA, 40 bp, Homo sapiens
ggtagagatggtggaagaacaggtggccaacaccctacac

SEQ ID NO: 4511 - DNA, 40 bp, Homo sapiens
gtgtagggtgttggccacctgttcttccaccatctctacc

SEQ ID NO: 4512 - DNA, 40 bp, Homo sapiens
gtagagatggtggaagaacaggtggccaacaccctacacg

SEQ ID NO: 4513 - DNA, 40 bp, Homo sapiens
cgtgtagggtgttggccacctgttcttccaccatctctac

SEQ ID NO: 4514 - DNA, 40 bp, Homo sapiens
tagagatggtggaagaacaggtggccaacaccctacacgt

SEQ ID NO: 4515 - DNA, 40 bp, Homo sapiens
acgtgtagggtgttggccacctgttcttccaccatctcta

SEQ ID NO: 4516 - DNA, 40 bp, Homo sapiens
agagatggtggaagaacaggtggccaacaccctacacgta

SEQ ID NO: 4517 - DNA, 40 bp, Homo sapiens
tacgtgtagggtgttggccacctgttcttccaccatctct

SEQ ID NO: 4518 - DNA, 40 bp, Homo sapiens
gagatggtggaagaacaggtggccaacaccctacacgtag

SEQ ID NO: 4519 - DNA, 40 bp, Homo sapiens
ctacgtgtagggtgttggccacctgttcttccaccatctc

SEQ ID NO: 4520 - DNA, 40 bp, Homo sapiens
agatggtggaagaacaggtggccaacaccctacacgtaga

SEQ ID NO: 4521 - DNA, 40 bp, Homo sapiens
tctacgtgtagggtgttggccacctgttcttccaccatct

SEQ ID NO: 4522 - DNA, 40 bp, Homo sapiens
gatggtggaagaacaggtggccaacaccctacacgtagag

SEQ ID NO: 4523 - DNA, 40 bp, Homo sapiens
ctctacgtgtagggtgttggccacctgttcttccaccatc

SEQ ID NO: 4524 - DNA, 40 bp, Homo sapiens
atggtggaagaacaggtggccaacaccctacacgtagagc

SEQ ID NO: 4525 - DNA, 40 bp, Homo sapiens
gctctacgtgtagggtgttggccacctgttcttccaccat

SEQ ID NO: 4526 - DNA, 40 bp, Homo sapiens
tggtggaagaacaggtggccaacaccctacacgtagagcc

SEQ ID NO: 4527 - DNA, 40 bp, Homo sapiens
ggctctacgtgtagggtgttggccacctgttcttccacca

SEQ ID NO: 4528 - DNA, 40 bp, Homo sapiens
ggtggaagaacaggtggccaacaccctacacgtagagcct

SEQ ID NO: 4529 - DNA, 40 bp, Homo sapiens
aggctctacgtgtagggtgttggccacctgttcttccacc

SEQ ID NO: 4530 - DNA, 40 bp, Homo sapiens
gtggaagaacaggtggccaacaccctacacgtagagcctg

SEQ ID NO: 4531 - DNA, 40 bp, Homo sapiens
caggctctacgtgtagggtgttggccacctgttcttccac

SEQ ID NO: 4532 - DNA, 40 bp, Homo sapiens
tggaagaacaggtggccaacaccctacacgtagagcctgt

SEQ ID NO: 4533 - DNA, 40 bp, Homo sapiens
acaggctctacgtgtagggtgttggccacctgttcttcca

SEQ ID NO: 4534 - DNA, 40 bp, Homo sapiens
ggaagaacaggtggccaacaccctacacgtagagcctgtg

SEQ ID NO: 4535 - DNA, 40 bp, Homo sapiens
cacaggctctacgtgtagggtgttggccacctgttcttcc

SEQ ID NO: 4536 - DNA, 40 bp, Homo sapiens
gaagaacaggtggccaacaccctacacgtagagcctgtga

SEQ ID NO: 4537 - DNA, 40 bp, Homo sapiens
tcacaggctctacgtgtagggtgttggccacctgttcttc

SEQ ID NO: 4538 - DNA, 40 bp, Homo sapiens
aagaacaggtggccaacaccctacacgtagagcctgtgac

SEQ ID NO: 4539 - DNA, 40 bp, Homo sapiens
gtcacaggctctacgtgtagggtgttggccacctgttctt

SEQ ID NO: 4540 - DNA, 40 bp, Homo sapiens
agaacaggtggccaacaccctacacgtagagcctgtgacc

SEQ ID NO: 4541 - DNA, 40 bp, Homo sapiens
ggtcacaggctctacgtgtagggtgttggccacctgttct

SEQ ID NO: 4542 - DNA, 40 bp, Homo sapiens
gaacaggtggccaacaccctacacgtagagcctgtgacct

SEQ ID NO: 4543 - DNA, 40 bp, Homo sapiens
aggtcacaggctctacgtgtagggtgttggccacctgttc

SEQ ID NO: 4544 - DNA, 40 bp, Homo sapiens
aacaggtggccaacaccctacacgtagagcctgtgaccta

SEQ ID NO: 4545 - DNA, 40 bp, Homo sapiens
taggtcacaggctctacgtgtagggtgttggccacctgtt

SEQ ID NO: 4546 - DNA, 40 bp, Homo sapiens
acaggtggccaacaccctacacgtagagcctgtgacctac

SEQ ID NO: 4547 - DNA, 40 bp, Homo sapiens
gtaggtcacaggctctacgtgtagggtgttggccacctgt

SEQ ID NO: 4548 - DNA, 40 bp, Homo sapiens
caggtggccaacaccctacacgtagagcctgtgacctaca

SEQ ID NO: 4549 - DNA, 40 bp, Homo sapiens
tgtaggtcacaggctctacgtgtagggtgttggccacctg

SEQ ID NO: 4550 - DNA, 40 bp, Homo sapiens
aggtggccaacaccctacacgtagagcctgtgacctacag

SEQ ID NO: 4551 - DNA, 40 bp, Homo sapiens
ctgtaggtcacaggctctacgtgtagggtgttggccacct

SEQ ID NO: 4552 - DNA, 40 bp, Homo sapiens
ggtggccaacaccctacacgtagagcctgtgacctacagt

SEQ ID NO: 4553 - DNA, 40 bp, Homo sapiens
actgtaggtcacaggctctacgtgtagggtgttggccacc

SEQ ID NO: 4554 - DNA, 40 bp, Homo sapiens
gtggccaacaccctacacgtagagcctgtgacctacagtg

SEQ ID NO: 4555 - DNA, 40 bp, Homo sapiens
cactgtaggtcacaggctctacgtgtagggtgttggccac

SEQ ID NO: 4556 - DNA, 40 bp, Homo sapiens
tggccaacaccctacacgtagagcctgtgacctacagtga

SEQ ID NO: 4557 - DNA, 40 bp, Homo sapiens
tcactgtaggtcacaggctctacgtgtagggtgttggcca

SEQ ID NO: 4558 - DNA, 40 bp, Homo sapiens
ggccaacaccctacacgtagagcctgtgacctacagtgaa

SEQ ID NO: 4559 - DNA, 40 bp, Homo sapiens
ttcactgtaggtcacaggctctacgtgtagggtgttggcc

SEQ ID NO: 4560 - DNA, 40 bp, Homo sapiens
gccaacaccctacacgtagagcctgtgacctacagtgaaa

SEQ ID NO: 4561 - DNA, 40 bp, Homo sapiens
tttcactgtaggtcacaggctctacgtgtagggtgttggc

SEQ ID NO: 4562 - DNA, 40 bp, Homo sapiens
ccaacaccctacacgtagagcctgtgacctacagtgaaaa

SEQ ID NO: 4563 - DNA, 40 bp, Homo sapiens
ttttcactgtaggtcacaggctctacgtgtagggtgttgg

SEQ ID NO: 4564 - DNA, 40 bp, Homo sapiens
caacaccctacacgtagagcctgtgacctacagtgaaaag

SEQ ID NO: 4565 - DNA, 40 bp, Homo sapiens
cttttcactgtaggtcacaggctctacgtgtagggtgttg

SEQ ID NO: 4566 - DNA, 40 bp, Homo sapiens
aacaccctacacgtagagcctgtgacctacagtgaaaagg

SEQ ID NO: 4567 - DNA, 40 bp, Homo sapiens
ccttttcactgtaggtcacaggctctacgtgtagggtgtt

SEQ ID NO: 4568 - DNA, 40 bp, Homo sapiens
acaccctacacgtagagcctgtgacctacagtgaaaagga

SEQ ID NO: 4569 - DNA, 40 bp, Homo sapiens
tccttttcactgtaggtcacaggctctacgtgtagggtgt

SEQ ID NO: 4570 - DNA, 40 bp, Homo sapiens
caccctacacgtagagcctgtgacctacagtgaaaaggaa

SEQ ID NO: 4571 - DNA, 40 bp, Homo sapiens
ttccttttcactgtaggtcacaggctctacgtgtagggtg

SEQ ID NO: 4572 - DNA, 40 bp, Homo sapiens
accctacacgtagagcctgtgacctacagtgaaaaggaaa

SEQ ID NO: 4573 - DNA, 40 bp, Homo sapiens
tttccttttcactgtaggtcacaggctctacgtgtagggt

SEQ ID NO: 4574 - DNA, 40 bp, Homo sapiens
ccctacacgtagagcctgtgacctacagtgaaaaggaaaa

SEQ ID NO: 4575 - DNA, 40 bp, Homo sapiens
ttttccttttcactgtaggtcacaggctctacgtgtaggg

SEQ ID NO: 4576 - DNA, 40 bp, Homo sapiens
cctacacgtagagcctgtgacctacagtgaaaaggaaaaa

SEQ ID NO: 4577 - DNA, 40 bp, Homo sapiens
tttttccttttcactgtaggtcacaggctctacgtgtagg

SEQ ID NO: 4578 - DNA, 40 bp, Homo sapiens
ctacacgtagagcctgtgacctacagtgaaaaggaaaaag

SEQ ID NO: 4579 - DNA, 40 bp, Homo sapiens
ctttttccttttcactgtaggtcacaggctctacgtgtag

SEQ ID NO: 4580 - DNA, 40 bp, Homo sapiens
tacacgtagagcctgtgacctacagtgaaaaggaaaaagt

SEQ ID NO: 4581 - DNA, 40 bp, Homo sapiens
actttttccttttcactgtaggtcacaggctctacgtgta

SEQ ID NO: 4582 - DNA, 40 bp, Homo sapiens
acacgtagagcctgtgacctacagtgaaaaggaaaaagtt

SEQ ID NO: 4583 - DNA, 40 bp, Homo sapiens
aactttttccttttcactgtaggtcacaggctctacgtgt

SEQ ID NO: 4584 - DNA, 40 bp, Homo sapiens
cacgtagagcctgtgacctacagtgaaaaggaaaaagtta

SEQ ID NO: 4585 - DNA, 40 bp, Homo sapiens
taactttttccttttcactgtaggtcacaggctctacgtg

SEQ ID NO: 4586 - DNA, 40 bp, Homo sapiens
acgtagagcctgtgacctacagtgaaaaggaaaaagttaa

SEQ ID NO: 4587 - DNA, 40 bp, Homo sapiens
ttaactttttccttttcactgtaggtcacaggctctacgt

SEQ ID NO: 4588 - DNA, 40 bp, Homo sapiens
cgtagagcctgtgacctacagtgaaaaggaaaaagttaat

SEQ ID NO: 4589 - DNA, 40 bp, Homo sapiens
attaactttttccttttcactgtaggtcacaggctctacg

SEQ ID NO: 4590 - DNA, 40 bp, Homo sapiens
gtagagcctgtgacctacagtgaaaaggaaaaagttaatc

SEQ ID NO: 4591 - DNA, 40 bp, Homo sapiens
gattaactttttccttttcactgtaggtcacaggctctac

SEQ ID NO: 4592 - DNA, 40 bp, Homo sapiens
tagagcctgtgacctacagtgaaaaggaaaaagttaatcc

SEQ ID NO: 4593 - DNA, 40 bp, Homo sapiens
ggattaactttttccttttcactgtaggtcacaggctcta

SEQ ID NO: 4594 - DNA, 40 bp, Homo sapiens
agagcctgtgacctacagtgaaaaggaaaaagttaatccc

SEQ ID NO: 4595 - DNA, 40 bp, Homo sapiens
gggattaactttttccttttcactgtaggtcacaggctct

SEQ ID NO: 4596 - DNA, 40 bp, Homo sapiens
gagcctgtgacctacagtgaaaaggaaaaagttaatccca

SEQ ID NO: 4597 - DNA, 40 bp, Homo sapiens
tgggattaactttttccttttcactgtaggtcacaggctc

SEQ ID NO: 4598 - DNA, 40 bp, Homo sapiens
agcctgtgacctacagtgaaaaggaaaaagttaatcccag

SEQ ID NO: 4599 - DNA, 40 bp, Homo sapiens
ctgggattaactttttccttttcactgtaggtcacaggct

SEQ ID NO: 4600 - DNA, 40 bp, Homo sapiens
gcctgtgacctacagtgaaaaggaaaaagttaatcccaga

SEQ ID NO: 4601 - DNA, 40 bp, Homo sapiens
tctgggattaactttttccttttcactgtaggtcacaggc

SEQ ID NO: 4602 - DNA, 40 bp, Homo sapiens
cctgtgacctacagtgaaaaggaaaaagttaatcccagat

SEQ ID NO: 4603 - DNA, 40 bp, Homo sapiens
atctgggattaactttttccttttcactgtaggtcacagg

SEQ ID NO: 4604 - DNA, 40 bp, Homo sapiens
ctgtgacctacagtgaaaaggaaaaagttaatcccagatg

SEQ ID NO: 4605 - DNA, 40 bp, Homo sapiens
catctgggattaactttttccttttcactgtaggtcacag

SEQ ID NO: 4606 - DNA, 40 bp, Homo sapiens
tgtgacctacagtgaaaaggaaaaagttaatcccagatgg

SEQ ID NO: 4607 - DNA, 40 bp, Homo sapiens
ccatctgggattaactttttccttttcactgtaggtcaca

SEQ ID NO: 4608 - DNA, 40 bp, Homo sapiens
gtgacctacagtgaaaaggaaaaagttaatcccagatggt

SEQ ID NO: 4609 - DNA, 40 bp, Homo sapiens
accatctgggattaactttttccttttcactgtaggtcac

SEQ ID NO: 4610 - DNA, 40 bp, Homo sapiens
tgacctacagtgaaaaggaaaaagttaatcccagatggtc

SEQ ID NO: 4611 - DNA, 40 bp, Homo sapiens
gaccatctgggattaactttttccttttcactgtaggtca

SEQ ID NO: 4612 - DNA, 40 bp, Homo sapiens
gacctacagtgaaaaggaaaaagttaatcccagatggtct

SEQ ID NO: 4613 - DNA, 40 bp, Homo sapiens
agaccatctgggattaactttttccttttcactgtaggtc

SEQ ID NO: 4614 - DNA, 40 bp, Homo sapiens
acctacagtgaaaaggaaaaagttaatcccagatggtctg

SEQ ID NO: 4615 - DNA, 40 bp, Homo sapiens
cagaccatctgggattaactttttccttttcactgtaggt

SEQ ID NO: 4616 - DNA, 40 bp, Homo sapiens
cctacagtgaaaaggaaaaagttaatcccagatggtctgt

SEQ ID NO: 4617 - DNA, 40 bp, Homo sapiens
acagaccatctgggattaactttttccttttcactgtagg

SEQ ID NO: 4618 - DNA, 40 bp, Homo sapiens
ctacagtgaaaaggaaaaagttaatcccagatggtctgtt

SEQ ID NO: 4619 - DNA, 40 bp, Homo sapiens
aacagaccatctgggattaactttttccttttcactgtag

SEQ ID NO: 4620 - DNA, 40 bp, Homo sapiens
tacagtgaaaaggaaaaagttaatcccagatggtctgttt

SEQ ID NO: 4621 - DNA, 40 bp, Homo sapiens
aaacagaccatctgggattaactttttccttttcactgta

SEQ ID NO: 4622 - DNA, 40 bp, Homo sapiens
acagtgaaaaggaaaaagttaatcccagatggtctgtttt

SEQ ID NO: 4623 - DNA, 40 bp, Homo sapiens
aaaacagaccatctgggattaactttttccttttcactgt

SEQ ID NO: 4624 - DNA, 40 bp, Homo sapiens
cagtgaaaaggaaaaagttaatcccagatggtctgttttg

SEQ ID NO: 4625 - DNA, 40 bp, Homo sapiens
caaaacagaccatctgggattaactttttccttttcactg

SEQ ID NO: 4626 - DNA, 40 bp, Homo sapiens
agtgaaaaggaaaaagttaatcccagatggtctgttttgc

SEQ ID NO: 4627 - DNA, 40 bp, Homo sapiens
gcaaaacagaccatctgggattaactttttccttttcact

SEQ ID NO: 4628 - DNA, 40 bp, Homo sapiens
gtgaaaaggaaaaagttaatcccagatggtctgttttgct

SEQ ID NO: 4629 - DNA, 40 bp, Homo sapiens
agcaaaacagaccatctgggattaactttttccttttcac

SEQ ID NO: 4630 - DNA, 40 bp, Homo sapiens
tgaaaaggaaaaagttaatcccagatggtctgttttgctt

SEQ ID NO: 4631 - DNA, 40 bp, Homo sapiens
aagcaaaacagaccatctgggattaactttttccttttca

SEQ ID NO: 4632 - DNA, 40 bp, Homo sapiens
gaaaaggaaaaagttaatcccagatggtctgttttgcttg

SEQ ID NO: 4633 - DNA, 40 bp, Homo sapiens
caagcaaaacagaccatctgggattaactttttccttttc

SEQ ID NO: 4634 - DNA, 40 bp, Homo sapiens
aaaaggaaaaagttaatcccagatggtctgttttgcttgg

SEQ ID NO: 4635 - DNA, 40 bp, Homo sapiens
ccaagcaaaacagaccatctgggattaactttttcctttt

SEQ ID NO: 4636 - DNA, 40 bp, Homo sapiens
aaaggaaaaagttaatcccagatggtctgttttgcttggt

SEQ ID NO: 4637 - DNA, 40 bp, Homo sapiens
accaagcaaaacagaccatctgggattaactttttccttt

SEQ ID NO: 4638 - DNA, 40 bp, Homo sapiens
aaggaaaaagttaatcccagatggtctgttttgcttggtc

SEQ ID NO: 4639 - DNA, 40 bp, Homo sapiens
gaccaagcaaaacagaccatctgggattaactttttcctt

SEQ ID NO: 4640 - DNA, 40 bp, Homo sapiens
aggaaaaagttaatcccagatggtctgttttgcttggtca

SEQ ID NO: 4641 - DNA, 40 bp, Homo sapiens
tgaccaagcaaaacagaccatctgggattaactttttcct

SEQ ID NO: 4642 - DNA, 40 bp, Homo sapiens
ggaaaaagttaatcccagatggtctgttttgcttggtcaa

SEQ ID NO: 4643 - DNA, 40 bp, Homo sapiens
ttgaccaagcaaaacagaccatctgggattaactttttcc

SEQ ID NO: 4644 - DNA, 40 bp, Homo sapiens
gaaaaagttaatcccagatggtctgttttgcttggtcaag

SEQ ID NO: 4645 - DNA, 40 bp, Homo sapiens
cttgaccaagcaaaacagaccatctgggattaactttttc

SEQ ID NO: 4646 - DNA, 40 bp, Homo sapiens
aaaaagttaatcccagatggtctgttttgcttggtcaagt

SEQ ID NO: 4647 - DNA, 40 bp, Homo sapiens
acttgaccaagcaaaacagaccatctgggattaacttttt

SEQ ID NO: 4648 - DNA, 40 bp, Homo sapiens
aaaagttaatcccagatggtctgttttgcttggtcaagtt

SEQ ID NO: 4649 - DNA, 40 bp, Homo sapiens
aacttgaccaagcaaaacagaccatctgggattaactttt

SEQ ID NO: 4650 - DNA, 40 bp, Homo sapiens
aaagttaatcccagatggtctgttttgcttggtcaagtta

SEQ ID NO: 4651 - DNA, 40 bp, Homo sapiens
taacttgaccaagcaaaacagaccatctgggattaacttt

SEQ ID NO: 4652 - DNA, 40 bp, Homo sapiens
aagttaatcccagatggtctgttttgcttggtcaagttaa

SEQ ID NO: 4653 - DNA, 40 bp, Homo sapiens
ttaacttgaccaagcaaaacagaccatctgggattaactt

SEQ ID NO: 4654 - DNA, 40 bp, Homo sapiens
agttaatcccagatggtctgttttgcttggtcaagttaaa

SEQ ID NO: 4655 - DNA, 40 bp, Homo sapiens
tttaacttgaccaagcaaaacagaccatctgggattaact

SEQ ID NO: 4656 - DNA, 40 bp, Homo sapiens
gttaatcccagatggtctgttttgcttggtcaagttaaac

SEQ ID NO: 4657 - DNA, 40 bp, Homo sapiens
gtttaacttgaccaagcaaaacagaccatctgggattaac

SEQ ID NO: 4658 - DNA, 40 bp, Homo sapiens
ttaatcccagatggtctgttttgcttggtcaagttaaacc

SEQ ID NO: 4659 - DNA, 40 bp, Homo sapiens
ggtttaacttgaccaagcaaaacagaccatctgggattaa

SEQ ID NO: 4660 - DNA, 40 bp, Homo sapiens
taatcccagatggtctgttttgcttggtcaagttaaaccc

SEQ ID NO: 4661 - DNA, 40 bp, Homo sapiens
gggtttaacttgaccaagcaaaacagaccatctgggatta

SEQ ID NO: 4662 - DNA, 40 bp, Homo sapiens
aatcccagatggtctgttttgcttggtcaagttaaacccg

SEQ ID NO: 4663 - DNA, 40 bp, Homo sapiens
cgggtttaacttgaccaagcaaaacagaccatctgggatt

SEQ ID NO: 4664 - DNA, 40 bp, Homo sapiens
atcccagatggtctgttttgcttggtcaagttaaacccga

SEQ ID NO: 4665 - DNA, 40 bp, Homo sapiens
tcgggtttaacttgaccaagcaaaacagaccatctgggat

SEQ ID NO: 4666 - DNA, 40 bp, Homo sapiens
tcccagatggtctgttttgcttggtcaagttaaacccgaa

SEQ ID NO: 4667 - DNA, 40 bp, Homo sapiens
ttcgggtttaacttgaccaagcaaaacagaccatctggga

SEQ ID NO: 4668 - DNA, 40 bp, Homo sapiens
cccagatggtctgttttgcttggtcaagttaaacccgaag

SEQ ID NO: 4669 - DNA, 40 bp, Homo sapiens
cttcgggtttaacttgaccaagcaaaacagaccatctggg

SEQ ID NO: 4670 - DNA, 40 bp, Homo sapiens
ccagatggtctgttttgcttggtcaagttaaacccgaaga

SEQ ID NO: 4671 - DNA, 40 bp, Homo sapiens
tcttcgggtttaacttgaccaagcaaaacagaccatctgg

SEQ ID NO: 4672 - DNA, 40 bp, Homo sapiens
cagatggtctgttttgcttggtcaagttaaacccgaagaa

SEQ ID NO: 4673 - DNA, 40 bp, Homo sapiens
ttcttcgggtttaacttgaccaagcaaaacagaccatctg

SEQ ID NO: 4674 - DNA, 40 bp, Homo sapiens
agatggtctgttttgcttggtcaagttaaacccgaagaaa

SEQ ID NO: 4675 - DNA, 40 bp, Homo sapiens
tttcttcgggtttaacttgaccaagcaaaacagaccatct

SEQ ID NO: 4676 - DNA, 40 bp, Homo sapiens
gatggtctgttttgcttggtcaagttaaacccgaagaaaa

SEQ ID NO: 4677 - DNA, 40 bp, Homo sapiens
ttttcttcgggtttaacttgaccaagcaaaacagaccatc

SEQ ID NO: 4678 - DNA, 40 bp, Homo sapiens
atggtctgttttgcttggtcaagttaaacccgaagaaaac

SEQ ID NO: 4679 - DNA, 40 bp, Homo sapiens
gttttcttcgggtttaacttgaccaagcaaaacagaccat

SEQ ID NO: 4680 - DNA, 40 bp, Homo sapiens
tggtctgttttgcttggtcaagttaaacccgaagaaaacc

SEQ ID NO: 4681 - DNA, 40 bp, Homo sapiens
ggttttcttcgggtttaacttgaccaagcaaaacagacca

SEQ ID NO: 4682 - DNA, 40 bp, Homo sapiens
ggtctgttttgcttggtcaagttaaacccgaagaaaaccc

SEQ ID NO: 4683 - DNA, 40 bp, Homo sapiens
gggttttcttcgggtttaacttgaccaagcaaaacagacc

SEQ ID NO: 4684 - DNA, 40 bp, Homo sapiens
gtctgttttgcttggtcaagttaaacccgaagaaaacccg

SEQ ID NO: 4685 - DNA, 40 bp, Homo sapiens
cgggttttcttcgggtttaacttgaccaagcaaaacagac

SEQ ID NO: 4686 - DNA, 40 bp, Homo sapiens
tctgttttgcttggtcaagttaaacccgaagaaaacccgc

SEQ ID NO: 4687 - DNA, 40 bp, Homo sapiens
gcgggttttcttcgggtttaacttgaccaagcaaaacaga

SEQ ID NO: 4688 - DNA, 40 bp, Homo sapiens
ctgttttgcttggtcaagttaaacccgaagaaaacccgca

SEQ ID NO: 4689 - DNA, 40 bp, Homo sapiens
tgcgggttttcttcgggtttaacttgaccaagcaaaacag

SEQ ID NO: 4690 - DNA, 40 bp, Homo sapiens
tgttttgcttggtcaagttaaacccgaagaaaacccgcag

SEQ ID NO: 4691 - DNA, 40 bp, Homo sapiens
ctgcgggttttcttcgggtttaacttgaccaagcaaaaca

SEQ ID NO: 4692 - DNA, 40 bp, Homo sapiens
gttttgcttggtcaagttaaacccgaagaaaacccgcaga

SEQ ID NO: 4693 - DNA, 40 bp, Homo sapiens
tctgcgggttttcttcgggtttaacttgaccaagcaaaac

SEQ ID NO: 4694 - DNA, 40 bp, Homo sapiens
ttttgcttggtcaagttaaacccgaagaaaacccgcagag

SEQ ID NO: 4695 - DNA, 40 bp, Homo sapiens
ctctgcgggttttcttcgggtttaacttgaccaagcaaaa

SEQ ID NO: 4696 - DNA, 40 bp, Homo sapiens
tttgcttggtcaagttaaacccgaagaaaacccgcagagc

SEQ ID NO: 4697 - DNA, 40 bp, Homo sapiens
gctctgcgggttttcttcgggtttaacttgaccaagcaaa

SEQ ID NO: 4698 - DNA, 40 bp, Homo sapiens
ttgcttggtcaagttaaacccgaagaaaacccgcagagca

SEQ ID NO: 4699 - DNA, 40 bp, Homo sapiens
tgctctgcgggttttcttcgggtttaacttgaccaagcaa

SEQ ID NO: 4700 - DNA, 40 bp, Homo sapiens
tgcttggtcaagttaaacccgaagaaaacccgcagagcag

SEQ ID NO: 4701 - DNA, 40 bp, Homo sapiens
ctgctctgcgggttttcttcgggtttaacttgaccaagca

SEQ ID NO: 4702 - DNA, 40 bp, Homo sapiens
gcttggtcaagttaaacccgaagaaaacccgcagagcaga

SEQ ID NO: 4703 - DNA, 40 bp, Homo sapiens
tctgctctgcgggttttcttcgggtttaacttgaccaagc

SEQ ID NO: 4704 - DNA, 40 bp, Homo sapiens
cttggtcaagttaaacccgaagaaaacccgcagagcagaa

SEQ ID NO: 4705 - DNA, 40 bp, Homo sapiens
ttctgctctgcgggttttcttcgggtttaacttgaccaag

SEQ ID NO: 4706 - DNA, 40 bp, Homo sapiens
ttggtcaagttaaacccgaagaaaacccgcagagcagaag

SEQ ID NO: 4707 - DNA, 40 bp, Homo sapiens
cttctgctctgcgggttttcttcgggtttaacttgaccaa

SEQ ID NO: 4708 - DNA, 40 bp, Homo sapiens
tggtcaagttaaacccgaagaaaacccgcagagcagaagc

SEQ ID NO: 4709 - DNA, 40 bp, Homo sapiens
gcttctgctctgcgggttttcttcgggtttaacttgacca

SEQ ID NO: 4710 - DNA, 40 bp, Homo sapiens
ggtcaagttaaacccgaagaaaacccgcagagcagaagca

SEQ ID NO: 4711 - DNA, 40 bp, Homo sapiens
tgcttctgctctgcgggttttcttcgggtttaacttgacc

SEQ ID NO: 4712 - DNA, 40 bp, Homo sapiens
gtcaagttaaacccgaagaaaacccgcagagcagaagcaa

SEQ ID NO: 4713 - DNA, 40 bp, Homo sapiens
ttgcttctgctctgcgggttttcttcgggtttaacttgac

SEQ ID NO: 4714 - DNA, 40 bp, Homo sapiens
tcaagttaaacccgaagaaaacccgcagagcagaagcaag

SEQ ID NO: 4715 - DNA, 40 bp, Homo sapiens
cttgcttctgctctgcgggttttcttcgggtttaacttga

SEQ ID NO: 4716 - DNA, 40 bp, Homo sapiens
caagttaaacccgaagaaaacccgcagagcagaagcaagg

SEQ ID NO: 4717 - DNA, 40 bp, Homo sapiens
ccttgcttctgctctgcgggttttcttcgggtttaacttg

SEQ ID NO: 4718 - DNA, 40 bp, Homo sapiens
aagttaaacccgaagaaaacccgcagagcagaagcaaggc

SEQ ID NO: 4719 - DNA, 40 bp, Homo sapiens
gccttgcttctgctctgcgggttttcttcgggtttaactt

SEQ ID NO: 4720 - DNA, 40 bp, Homo sapiens
agttaaacccgaagaaaacccgcagagcagaagcaaggct

SEQ ID NO: 4721 - DNA, 40 bp, Homo sapiens
agccttgcttctgctctgcgggttttcttcgggtttaact

SEQ ID NO: 4722 - DNA, 40 bp, Homo sapiens
gttaaacccgaagaaaacccgcagagcagaagcaaggctt

SEQ ID NO: 4723 - DNA, 40 bp, Homo sapiens
aagccttgcttctgctctgcgggttttcttcgggtttaac

SEQ ID NO: 4724 - DNA, 40 bp, Homo sapiens
ttaaacccgaagaaaacccgcagagcagaagcaaggcttt

SEQ ID NO: 4725 - DNA, 40 bp, Homo sapiens
aaagccttgcttctgctctgcgggttttcttcgggtttaa

SEQ ID NO: 4726 - DNA, 40 bp, Homo sapiens
taaacccgaagaaaacccgcagagcagaagcaaggctttt

SEQ ID NO: 4727 - DNA, 40 bp, Homo sapiens
aaaagccttgcttctgctctgcgggttttcttcgggttta

SEQ ID NO: 4728 - DNA, 40 bp, Homo sapiens
aaacccgaagaaaacccgcagagcagaagcaaggcttttt

SEQ ID NO: 4729 - DNA, 40 bp, Homo sapiens
aaaaagccttgcttctgctctgcgggttttcttcgggttt

SEQ ID NO: 4730 - DNA, 40 bp, Homo sapiens
aacccgaagaaaacccgcagagcagaagcaaggctttttc

SEQ ID NO: 4731 - DNA, 40 bp, Homo sapiens
gaaaaagccttgcttctgctctgcgggttttcttcgggtt

SEQ ID NO: 4732 - DNA, 40 bp, Homo sapiens
acccgaagaaaacccgcagagcagaagcaaggctttttcc

SEQ ID NO: 4733 - DNA, 40 bp, Homo sapiens
ggaaaaagccttgcttctgctctgcgggttttcttcgggt

SEQ ID NO: 4734 - DNA, 40 bp, Homo sapiens
cccgaagaaaacccgcagagcagaagcaaggctttttcct

SEQ ID NO: 4735 - DNA, 40 bp, Homo sapiens
aggaaaaagccttgcttctgctctgcgggttttcttcggg

SEQ ID NO: 4736 - DNA, 40 bp, Homo sapiens
ccgaagaaaacccgcagagcagaagcaaggctttttcctt

SEQ ID NO: 4737 - DNA, 40 bp, Homo sapiens
aaggaaaaagccttgcttctgctctgcgggttttcttcgg

SEQ ID NO: 4738 - DNA, 40 bp, Homo sapiens
cgaagaaaacccgcagagcagaagcaaggctttttccttg

SEQ ID NO: 4739 - DNA, 40 bp, Homo sapiens
caaggaaaaagccttgcttctgctctgcgggttttcttcg

SEQ ID NO: 4740 - DNA, 40 bp, Homo sapiens
gaagaaaacccgcagagcagaagcaaggctttttccttgc

SEQ ID NO: 4741 - DNA, 40 bp, Homo sapiens
gcaaggaaaaagccttgcttctgctctgcgggttttcttc

SEQ ID NO: 4742 - DNA, 40 bp, Homo sapiens
aagaaaacccgcagagcagaagcaaggctttttccttgct

SEQ ID NO: 4743 - DNA, 40 bp, Homo sapiens
agcaaggaaaaagccttgcttctgctctgcgggttttctt

SEQ ID NO: 4744 - DNA, 40 bp, Homo sapiens
agaaaacccgcagagcagaagcaaggctttttccttgcta

SEQ ID NO: 4745 - DNA, 40 bp, Homo sapiens
tagcaaggaaaaagccttgcttctgctctgcgggttttct

SEQ ID NO: 4746 - DNA, 40 bp, Homo sapiens
gaaaacccgcagagcagaagcaaggctttttccttgctag

SEQ ID NO: 4747 - DNA, 40 bp, Homo sapiens
ctagcaaggaaaaagccttgcttctgctctgcgggttttc

SEQ ID NO: 4748 - DNA, 40 bp, Homo sapiens
aaaacccgcagagcagaagcaaggctttttccttgctagt

SEQ ID NO: 4749 - DNA, 40 bp, Homo sapiens
actagcaaggaaaaagccttgcttctgctctgcgggtttt

SEQ ID NO: 4750 - DNA, 40 bp, Homo sapiens
aaacccgcagagcagaagcaaggctttttccttgctagtt

SEQ ID NO: 4751 - DNA, 40 bp, Homo sapiens
aactagcaaggaaaaagccttgcttctgctctgcgggttt

SEQ ID NO: 4752 - DNA, 40 bp, Homo sapiens
aacccgcagagcagaagcaaggctttttccttgctagttg

SEQ ID NO: 4753 - DNA, 40 bp, Homo sapiens
caactagcaaggaaaaagccttgcttctgctctgcgggtt

SEQ ID NO: 4754 - DNA, 40 bp, Homo sapiens
acccgcagagcagaagcaaggctttttccttgctagttga

SEQ ID NO: 4755 - DNA, 40 bp, Homo sapiens
tcaactagcaaggaaaaagccttgcttctgctctgcgggt

SEQ ID NO: 4756 - DNA, 40 bp, Homo sapiens
cccgcagagcagaagcaaggctttttccttgctagttgag

SEQ ID NO: 4757 - DNA, 40 bp, Homo sapiens
ctcaactagcaaggaaaaagccttgcttctgctctgcggg

SEQ ID NO: 4758 - DNA, 40 bp, Homo sapiens
ccgcagagcagaagcaaggctttttccttgctagttgagt

SEQ ID NO: 4759 - DNA, 40 bp, Homo sapiens
actcaactagcaaggaaaaagccttgcttctgctctgcgg

SEQ ID NO: 4760 - DNA, 40 bp, Homo sapiens
cgcagagcagaagcaaggctttttccttgctagttgagtg

SEQ ID NO: 4761 - DNA, 40 bp, Homo sapiens
cactcaactagcaaggaaaaagccttgcttctgctctgcg

SEQ ID NO: 4762 - DNA, 40 bp, Homo sapiens
gcagagcagaagcaaggctttttccttgctagttgagtgt

SEQ ID NO: 4763 - DNA, 40 bp, Homo sapiens
acactcaactagcaaggaaaaagccttgcttctgctctgc

SEQ ID NO: 4764 - DNA, 40 bp, Homo sapiens
cagagcagaagcaaggctttttccttgctagttgagtgta

SEQ ID NO: 4765 - DNA, 40 bp, Homo sapiens
tacactcaactagcaaggaaaaagccttgcttctgctctg

SEQ ID NO: 4766 - DNA, 40 bp, Homo sapiens
agagcagaagcaaggctttttccttgctagttgagtgtag

SEQ ID NO: 4767 - DNA, 40 bp, Homo sapiens
ctacactcaactagcaaggaaaaagccttgcttctgctct

SEQ ID NO: 4768 - DNA, 40 bp, Homo sapiens
gagcagaagcaaggctttttccttgctagttgagtgtaga

SEQ ID NO: 4769 - DNA, 40 bp, Homo sapiens
tctacactcaactagcaaggaaaaagccttgcttctgctc

SEQ ID NO: 4770 - DNA, 40 bp, Homo sapiens
agcagaagcaaggctttttccttgctagttgagtgtagac

SEQ ID NO: 4771 - DNA, 40 bp, Homo sapiens
gtctacactcaactagcaaggaaaaagccttgcttctgct

SEQ ID NO: 4772 - DNA, 40 bp, Homo sapiens
gcagaagcaaggctttttccttgctagttgagtgtagaca

SEQ ID NO: 4773 - DNA, 40 bp, Homo sapiens
tgtctacactcaactagcaaggaaaaagccttgcttctgc

SEQ ID NO: 4774 - DNA, 40 bp, Homo sapiens
cagaagcaaggctttttccttgctagttgagtgtagacag

SEQ ID NO: 4775 - DNA, 40 bp, Homo sapiens
ctgtctacactcaactagcaaggaaaaagccttgcttctg

SEQ ID NO: 4776 - DNA, 40 bp, Homo sapiens
agaagcaaggctttttccttgctagttgagtgtagacagc

SEQ ID NO: 4777 - DNA, 40 bp, Homo sapiens
gctgtctacactcaactagcaaggaaaaagccttgcttct

SEQ ID NO: 4778 - DNA, 40 bp, Homo sapiens
gaagcaaggctttttccttgctagttgagtgtagacagca

SEQ ID NO: 4779 - DNA, 40 bp, Homo sapiens
tgctgtctacactcaactagcaaggaaaaagccttgcttc

SEQ ID NO: 4780 - DNA, 40 bp, Homo sapiens
aagcaaggctttttccttgctagttgagtgtagacagcaa

SEQ ID NO: 4781 - DNA, 40 bp, Homo sapiens
ttgctgtctacactcaactagcaaggaaaaagccttgctt

SEQ ID NO: 4782 - DNA, 40 bp, Homo sapiens
agcaaggctttttccttgctagttgagtgtagacagcaat

SEQ ID NO: 4783 - DNA, 40 bp, Homo sapiens
attgctgtctacactcaactagcaaggaaaaagccttgct

SEQ ID NO: 4784 - DNA, 40 bp, Homo sapiens
gcaaggctttttccttgctagttgagtgtagacagcaata

SEQ ID NO: 4785 - DNA, 40 bp, Homo sapiens
tattgctgtctacactcaactagcaaggaaaaagccttgc

SEQ ID NO: 4786 - DNA, 40 bp, Homo sapiens
caaggctttttccttgctagttgagtgtagacagcaatag

SEQ ID NO: 4787 - DNA, 40 bp, Homo sapiens
ctattgctgtctacactcaactagcaaggaaaaagccttg

SEQ ID NO: 4788 - DNA, 40 bp, Homo sapiens
aaggctttttccttgctagttgagtgtagacagcaatagc

SEQ ID NO: 4789 - DNA, 40 bp, Homo sapiens
gctattgctgtctacactcaactagcaaggaaaaagcctt

SEQ ID NO: 4790 - DNA, 40 bp, Homo sapiens
aggctttttccttgctagttgagtgtagacagcaatagca

SEQ ID NO: 4791 - DNA, 40 bp, Homo sapiens
tgctattgctgtctacactcaactagcaaggaaaaagcct

SEQ ID NO: 4792 - DNA, 40 bp, Homo sapiens
ggctttttccttgctagttgagtgtagacagcaatagcaa

SEQ ID NO: 4793 - DNA, 40 bp, Homo sapiens
ttgctattgctgtctacactcaactagcaaggaaaaagcc

SEQ ID NO: 4794 - DNA, 40 bp, Homo sapiens
gctttttccttgctagttgagtgtagacagcaatagcaaa

SEQ ID NO: 4795 - DNA, 40 bp, Homo sapiens
tttgctattgctgtctacactcaactagcaaggaaaaagc

SEQ ID NO: 4796 - DNA, 40 bp, Homo sapiens
ctttttccttgctagttgagtgtagacagcaatagcaaaa

SEQ ID NO: 4797 - DNA, 40 bp, Homo sapiens
ttttgctattgctgtctacactcaactagcaaggaaaaag

SEQ ID NO: 4798 - DNA, 40 bp, Homo sapiens
tttttccttgctagttgagtgtagacagcaatagcaaaaa

SEQ ID NO: 4799 - DNA, 40 bp, Homo sapiens
tttttgctattgctgtctacactcaactagcaaggaaaaa

SEQ ID NO: 4800 - DNA, 40 bp, Homo sapiens
ttttccttgctagttgagtgtagacagcaatagcaaaaat

SEQ ID NO: 4801 - DNA, 40 bp, Homo sapiens
atttttgctattgctgtctacactcaactagcaaggaaaa

SEQ ID NO: 4802 - DNA, 40 bp, Homo sapiens
tttccttgctagttgagtgtagacagcaatagcaaaaata

SEQ ID NO: 4803 - DNA, 40 bp, Homo sapiens
tatttttgctattgctgtctacactcaactagcaaggaaa

SEQ ID NO: 4804 - DNA, 40 bp, Homo sapiens
ttccttgctagttgagtgtagacagcaatagcaaaaatag

SEQ ID NO: 4805 - DNA, 40 bp, Homo sapiens
ctatttttgctattgctgtctacactcaactagcaaggaa

SEQ ID NO: 4806 - DNA, 40 bp, Homo sapiens
tccttgctagttgagtgtagacagcaatagcaaaaatagt

SEQ ID NO: 4807 - DNA, 40 bp, Homo sapiens
actatttttgctattgctgtctacactcaactagcaagga

SEQ ID NO: 4808 - DNA, 40 bp, Homo sapiens
ccttgctagttgagtgtagacagcaatagcaaaaatagta

SEQ ID NO: 4809 - DNA, 40 bp, Homo sapiens
tactatttttgctattgctgtctacactcaactagcaagg

SEQ ID NO: 4810 - DNA, 40 bp, Homo sapiens
cttgctagttgagtgtagacagcaatagcaaaaatagtac

SEQ ID NO: 4811 - DNA, 40 bp, Homo sapiens
gtactatttttgctattgctgtctacactcaactagcaag

SEQ ID NO: 4812 - DNA, 40 bp, Homo sapiens
ttgctagttgagtgtagacagcaatagcaaaaatagtact

SEQ ID NO: 4813 - DNA, 40 bp, Homo sapiens
agtactatttttgctattgctgtctacactcaactagcaa

SEQ ID NO: 4814 - DNA, 40 bp, Homo sapiens
tgctagttgagtgtagacagcaatagcaaaaatagtactt

SEQ ID NO: 4815 - DNA, 40 bp, Homo sapiens
aagtactatttttgctattgctgtctacactcaactagca

SEQ ID NO: 4816 - DNA, 40 bp, Homo sapiens
gctagttgagtgtagacagcaatagcaaaaatagtacttg

SEQ ID NO: 4817 - DNA, 40 bp, Homo sapiens
caagtactatttttgctattgctgtctacactcaactagc

SEQ ID NO: 4818 - DNA, 40 bp, Homo sapiens
ctagttgagtgtagacagcaatagcaaaaatagtacttga

SEQ ID NO: 4819 - DNA, 40 bp, Homo sapiens
tcaagtactatttttgctattgctgtctacactcaactag

SEQ ID NO: 4820 - DNA, 40 bp, Homo sapiens
tagttgagtgtagacagcaatagcaaaaatagtacttgaa

SEQ ID NO: 4821 - DNA, 40 bp, Homo sapiens
ttcaagtactatttttgctattgctgtctacactcaacta

SEQ ID NO: 4822 - DNA, 40 bp, Homo sapiens
agttgagtgtagacagcaatagcaaaaatagtacttgaag

SEQ ID NO: 4823 - DNA, 40 bp, Homo sapiens
cttcaagtactatttttgctattgctgtctacactcaact

SEQ ID NO: 4824 - DNA, 40 bp, Homo sapiens
gttgagtgtagacagcaatagcaaaaatagtacttgaagt

SEQ ID NO: 4825 - DNA, 40 bp, Homo sapiens
acttcaagtactatttttgctattgctgtctacactcaac

SEQ ID NO: 4826 - DNA, 40 bp, Homo sapiens
ttgagtgtagacagcaatagcaaaaatagtacttgaagtt

SEQ ID NO: 4827 - DNA, 40 bp, Homo sapiens
aacttcaagtactatttttgctattgctgtctacactcaa

SEQ ID NO: 4828 - DNA, 40 bp, Homo sapiens
tgagtgtagacagcaatagcaaaaatagtacttgaagttt

SEQ ID NO: 4829 - DNA, 40 bp, Homo sapiens
aaacttcaagtactatttttgctattgctgtctacactca

SEQ ID NO: 4830 - DNA, 40 bp, Homo sapiens
gagtgtagacagcaatagcaaaaatagtacttgaagttta

SEQ ID NO: 4831 - DNA, 40 bp, Homo sapiens
taaacttcaagtactatttttgctattgctgtctacactc

SEQ ID NO: 4832 - DNA, 40 bp, Homo sapiens
agtgtagacagcaatagcaaaaatagtacttgaagtttaa

SEQ ID NO: 4833 - DNA, 40 bp, Homo sapiens
ttaaacttcaagtactatttttgctattgctgtctacact

SEQ ID NO: 4834 - DNA, 40 bp, Homo sapiens
gtgtagacagcaatagcaaaaatagtacttgaagtttaat

SEQ ID NO: 4835 - DNA, 40 bp, Homo sapiens
attaaacttcaagtactatttttgctattgctgtctacac

SEQ ID NO: 4836 - DNA, 40 bp, Homo sapiens
tgtagacagcaatagcaaaaatagtacttgaagtttaatt

SEQ ID NO: 4837 - DNA, 40 bp, Homo sapiens
aattaaacttcaagtactatttttgctattgctgtctaca

SEQ ID NO: 4838 - DNA, 40 bp, Homo sapiens
gtagacagcaatagcaaaaatagtacttgaagtttaattt

SEQ ID NO: 4839 - DNA, 40 bp, Homo sapiens
aaattaaacttcaagtactatttttgctattgctgtctac

SEQ ID NO: 4840 - DNA, 40 bp, Homo sapiens
tagacagcaatagcaaaaatagtacttgaagtttaattta

SEQ ID NO: 4841 - DNA, 40 bp, Homo sapiens
taaattaaacttcaagtactatttttgctattgctgtcta

SEQ ID NO: 4842 - DNA, 40 bp, Homo sapiens
agacagcaatagcaaaaatagtacttgaagtttaatttac

SEQ ID NO: 4843 - DNA, 40 bp, Homo sapiens
gtaaattaaacttcaagtactatttttgctattgctgtct

SEQ ID NO: 4844 - DNA, 40 bp, Homo sapiens
gacagcaatagcaaaaatagtacttgaagtttaatttacc

SEQ ID NO: 4845 - DNA, 40 bp, Homo sapiens
ggtaaattaaacttcaagtactatttttgctattgctgtc

SEQ ID NO: 4846 - DNA, 40 bp, Homo sapiens
acagcaatagcaaaaatagtacttgaagtttaatttacct

SEQ ID NO: 4847 - DNA, 40 bp, Homo sapiens
aggtaaattaaacttcaagtactatttttgctattgctgt

SEQ ID NO: 4848 - DNA, 40 bp, Homo sapiens
cagcaatagcaaaaatagtacttgaagtttaatttacctg

SEQ ID NO: 4849 - DNA, 40 bp, Homo sapiens
caggtaaattaaacttcaagtactatttttgctattgctg

SEQ ID NO: 4850 - DNA, 40 bp, Homo sapiens
agcaatagcaaaaatagtacttgaagtttaatttacctgt

SEQ ID NO: 4851 - DNA, 40 bp, Homo sapiens
acaggtaaattaaacttcaagtactatttttgctattgct

SEQ ID NO: 4852 - DNA, 40 bp, Homo sapiens
gcaatagcaaaaatagtacttgaagtttaatttacctgtt

SEQ ID NO: 4853 - DNA, 40 bp, Homo sapiens
aacaggtaaattaaacttcaagtactatttttgctattgc

SEQ ID NO: 4854 - DNA, 40 bp, Homo sapiens
caatagcaaaaatagtacttgaagtttaatttacctgttc

SEQ ID NO: 4855 - DNA, 40 bp, Homo sapiens
gaacaggtaaattaaacttcaagtactatttttgctattg

SEQ ID NO: 4856 - DNA, 40 bp, Homo sapiens
aatagcaaaaatagtacttgaagtttaatttacctgttct

SEQ ID NO: 4857 - DNA, 40 bp, Homo sapiens
agaacaggtaaattaaacttcaagtactatttttgctatt

SEQ ID NO: 4858 - DNA, 40 bp, Homo sapiens
atagcaaaaatagtacttgaagtttaatttacctgttctt

SEQ ID NO: 4859 - DNA, 40 bp, Homo sapiens
aagaacaggtaaattaaacttcaagtactatttttgctat

SEQ ID NO: 4860 - DNA, 40 bp, Homo sapiens
tagcaaaaatagtacttgaagtttaatttacctgttcttg

SEQ ID NO: 4861 - DNA, 40 bp, Homo sapiens
caagaacaggtaaattaaacttcaagtactatttttgcta

SEQ ID NO: 4862 - DNA, 40 bp, Homo sapiens
agcaaaaatagtacttgaagtttaatttacctgttcttgt

SEQ ID NO: 4863 - DNA, 40 bp, Homo sapiens
acaagaacaggtaaattaaacttcaagtactatttttgct

SEQ ID NO: 4864 - DNA, 40 bp, Homo sapiens
gcaaaaatagtacttgaagtttaatttacctgttcttgtc

SEQ ID NO: 4865 - DNA, 40 bp, Homo sapiens
gacaagaacaggtaaattaaacttcaagtactatttttgc

SEQ ID NO: 4866 - DNA, 40 bp, Homo sapiens
caaaaatagtacttgaagtttaatttacctgttcttgtcc

SEQ ID NO: 4867 - DNA, 40 bp, Homo sapiens
ggacaagaacaggtaaattaaacttcaagtactatttttg

SEQ ID NO: 4868 - DNA, 40 bp, Homo sapiens
aaaaatagtacttgaagtttaatttacctgttcttgtcct

SEQ ID NO: 4869 - DNA, 40 bp, Homo sapiens
aggacaagaacaggtaaattaaacttcaagtactattttt

SEQ ID NO: 4870 - DNA, 40 bp, Homo sapiens
aaaatagtacttgaagtttaatttacctgttcttgtcctt

SEQ ID NO: 4871 - DNA, 40 bp, Homo sapiens
aaggacaagaacaggtaaattaaacttcaagtactatttt

SEQ ID NO: 4872 - DNA, 40 bp, Homo sapiens
aaatagtacttgaagtttaatttacctgttcttgtccttt

SEQ ID NO: 4873 - DNA, 40 bp, Homo sapiens
aaaggacaagaacaggtaaattaaacttcaagtactattt

SEQ ID NO: 4874 - DNA, 40 bp, Homo sapiens
aatagtacttgaagtttaatttacctgttcttgtcctttc

SEQ ID NO: 4875 - DNA, 40 bp, Homo sapiens
gaaaggacaagaacaggtaaattaaacttcaagtactatt

SEQ ID NO: 4876 - DNA, 40 bp, Homo sapiens
atagtacttgaagtttaatttacctgttcttgtcctttcc

SEQ ID NO: 4877 - DNA, 40 bp, Homo sapiens
ggaaaggacaagaacaggtaaattaaacttcaagtactat

SEQ ID NO: 4878 - DNA, 40 bp, Homo sapiens
tagtacttgaagtttaatttacctgttcttgtcctttccc

SEQ ID NO: 4879 - DNA, 40 bp, Homo sapiens
gggaaaggacaagaacaggtaaattaaacttcaagtacta

SEQ ID NO: 4880 - DNA, 40 bp, Homo sapiens
agtacttgaagtttaatttacctgttcttgtcctttcccc

SEQ ID NO: 4881 - DNA, 40 bp, Homo sapiens
ggggaaaggacaagaacaggtaaattaaacttcaagtact

SEQ ID NO: 4882 - DNA, 40 bp, Homo sapiens
gtacttgaagtttaatttacctgttcttgtcctttcccct

SEQ ID NO: 4883 - DNA, 40 bp, Homo sapiens
aggggaaaggacaagaacaggtaaattaaacttcaagtac

SEQ ID NO: 4884 - DNA, 40 bp, Homo sapiens
tacttgaagtttaatttacctgttcttgtcctttccccta

SEQ ID NO: 4885 - DNA, 40 bp, Homo sapiens
taggggaaaggacaagaacaggtaaattaaacttcaagta

SEQ ID NO: 4886 - DNA, 40 bp, Homo sapiens
acttgaagtttaatttacctgttcttgtcctttcccctat

SEQ ID NO: 4887 - DNA, 40 bp, Homo sapiens
ataggggaaaggacaagaacaggtaaattaaacttcaagt

SEQ ID NO: 4888 - DNA, 40 bp, Homo sapiens
cttgaagtttaatttacctgttcttgtcctttcccctatt

SEQ ID NO: 4889 - DNA, 40 bp, Homo sapiens
aataggggaaaggacaagaacaggtaaattaaacttcaag

SEQ ID NO: 4890 - DNA, 40 bp, Homo sapiens
ttgaagtttaatttacctgttcttgtcctttcccctattt

SEQ ID NO: 4891 - DNA, 40 bp, Homo sapiens
aaataggggaaaggacaagaacaggtaaattaaacttcaa

SEQ ID NO: 4892 - DNA, 40 bp, Homo sapiens
tgaagtttaatttacctgttcttgtcctttcccctatttc

SEQ ID NO: 4893 - DNA, 40 bp, Homo sapiens
gaaataggggaaaggacaagaacaggtaaattaaacttca

SEQ ID NO: 4894 - DNA, 40 bp, Homo sapiens
gaagtttaatttacctgttcttgtcctttcccctatttct

SEQ ID NO: 4895 - DNA, 40 bp, Homo sapiens
agaaataggggaaaggacaagaacaggtaaattaaacttc

SEQ ID NO: 4896 - DNA, 40 bp, Homo sapiens
aagtttaatttacctgttcttgtcctttcccctatttctt

SEQ ID NO: 4897 - DNA, 40 bp, Homo sapiens
aagaaataggggaaaggacaagaacaggtaaattaaactt

SEQ ID NO: 4898 - DNA, 40 bp, Homo sapiens
agtttaatttacctgttcttgtcctttcccctatttctta

SEQ ID NO: 4899 - DNA, 40 bp, Homo sapiens
taagaaataggggaaaggacaagaacaggtaaattaaact

SEQ ID NO: 4900 - DNA, 40 bp, Homo sapiens
gtttaatttacctgttcttgtcctttcccctatttcttat

SEQ ID NO: 4901 - DNA, 40 bp, Homo sapiens
ataagaaataggggaaaggacaagaacaggtaaattaaac

SEQ ID NO: 4902 - DNA, 40 bp, Homo sapiens
tttaatttacctgttcttgtcctttcccctatttcttatg

SEQ ID NO: 4903 - DNA, 40 bp, Homo sapiens
cataagaaataggggaaaggacaagaacaggtaaattaaa

SEQ ID NO: 4904 - DNA, 40 bp, Homo sapiens
ttaatttacctgttcttgtcctttcccctatttcttatgt

SEQ ID NO: 4905 - DNA, 40 bp, Homo sapiens
acataagaaataggggaaaggacaagaacaggtaaattaa

SEQ ID NO: 4906 - DNA, 40 bp, Homo sapiens
taatttacctgttcttgtcctttcccctatttcttatgta

SEQ ID NO: 4907 - DNA, 40 bp, Homo sapiens
tacataagaaataggggaaaggacaagaacaggtaaatta

SEQ ID NO: 4908 - DNA, 40 bp, Homo sapiens
aatttacctgttcttgtcctttcccctatttcttatgtat

SEQ ID NO: 4909 - DNA, 40 bp, Homo sapiens
atacataagaaataggggaaaggacaagaacaggtaaatt

SEQ ID NO: 4910 - DNA, 40 bp, Homo sapiens
atttacctgttcttgtcctttcccctatttcttatgtatt

SEQ ID NO: 4911 - DNA, 40 bp, Homo sapiens
aatacataagaaataggggaaaggacaagaacaggtaaat

SEQ ID NO: 4912 - DNA, 40 bp, Homo sapiens
tttacctgttcttgtcctttcccctatttcttatgtatta

SEQ ID NO: 4913 - DNA, 40 bp, Homo sapiens
taatacataagaaataggggaaaggacaagaacaggtaaa

SEQ ID NO: 4914 - DNA, 40 bp, Homo sapiens
ttacctgttcttgtcctttcccctatttcttatgtattac

SEQ ID NO: 4915 - DNA, 40 bp, Homo sapiens
gtaatacataagaaataggggaaaggacaagaacaggtaa

SEQ ID NO: 4916 - DNA, 40 bp, Homo sapiens
tacctgttcttgtcctttcccctatttcttatgtattacc

SEQ ID NO: 4917 - DNA, 40 bp, Homo sapiens
ggtaatacataagaaataggggaaaggacaagaacaggta

SEQ ID NO: 4918 - DNA, 40 bp, Homo sapiens
acctgttcttgtcctttcccctatttcttatgtattaccc

SEQ ID NO: 4919 - DNA, 40 bp, Homo sapiens
gggtaatacataagaaataggggaaaggacaagaacaggt

SEQ ID NO: 4920 - DNA, 40 bp, Homo sapiens
cctgttcttgtcctttcccctatttcttatgtattaccct

SEQ ID NO: 4921 - DNA, 40 bp, Homo sapiens
agggtaatacataagaaataggggaaaggacaagaacagg

SEQ ID NO: 4922 - DNA, 40 bp, Homo sapiens
ctgttcttgtcctttcccctatttcttatgtattaccctc

SEQ ID NO: 4923 - DNA, 40 bp, Homo sapiens
gagggtaatacataagaaataggggaaaggacaagaacag

SEQ ID NO: 4924 - DNA, 40 bp, Homo sapiens
tgttcttgtcctttcccctatttcttatgtattaccctca

SEQ ID NO: 4925 - DNA, 40 bp, Homo sapiens
tgagggtaatacataagaaataggggaaaggacaagaaca

SEQ ID NO: 4926 - DNA, 40 bp, Homo sapiens
gttcttgtcctttcccctatttcttatgtattaccctcat

SEQ ID NO: 4927 - DNA, 40 bp, Homo sapiens
atgagggtaatacataagaaataggggaaaggacaagaac

SEQ ID NO: 4928 - DNA, 40 bp, Homo sapiens
ttcttgtcctttcccctatttcttatgtattaccctcatc

SEQ ID NO: 4929 - DNA, 40 bp, Homo sapiens
gatgagggtaatacataagaaataggggaaaggacaagaa

SEQ ID NO: 4930 - DNA, 40 bp, Homo sapiens
tcttgtcctttcccctatttcttatgtattaccctcatcc

SEQ ID NO: 4931 - DNA, 40 bp, Homo sapiens
ggatgagggtaatacataagaaataggggaaaggacaaga

SEQ ID NO: 4932 - DNA, 40 bp, Homo sapiens
cttgtcctttcccctatttcttatgtattaccctcatccc

SEQ ID NO: 4933 - DNA, 40 bp, Homo sapiens
gggatgagggtaatacataagaaataggggaaaggacaag

SEQ ID NO: 4934 - DNA, 40 bp, Homo sapiens
ttgtcctttcccctatttcttatgtattaccctcatcccc

SEQ ID NO: 4935 - DNA, 40 bp, Homo sapiens
ggggatgagggtaatacataagaaataggggaaaggacaa

SEQ ID NO: 4936 - DNA, 40 bp, Homo sapiens
tgtcctttcccctatttcttatgtattaccctcatcccct

SEQ ID NO: 4937 - DNA, 40 bp, Homo sapiens
aggggatgagggtaatacataagaaataggggaaaggaca

SEQ ID NO: 4938 - DNA, 40 bp, Homo sapiens
gtcctttcccctatttcttatgtattaccctcatcccctc

SEQ ID NO: 4939 - DNA, 40 bp, Homo sapiens
gaggggatgagggtaatacataagaaataggggaaaggac

SEQ ID NO: 4940 - DNA, 40 bp, Homo sapiens
tcctttcccctatttcttatgtattaccctcatcccctcg

SEQ ID NO: 4941 - DNA, 40 bp, Homo sapiens
cgaggggatgagggtaatacataagaaataggggaaagga

SEQ ID NO: 4942 - DNA, 40 bp, Homo sapiens
cctttcccctatttcttatgtattaccctcatcccctcgt

SEQ ID NO: 4943 - DNA, 40 bp, Homo sapiens
acgaggggatgagggtaatacataagaaataggggaaagg

SEQ ID NO: 4944 - DNA, 40 bp, Homo sapiens
ctttcccctatttcttatgtattaccctcatcccctcgtc

SEQ ID NO: 4945 - DNA, 40 bp, Homo sapiens
gacgaggggatgagggtaatacataagaaataggggaaag

SEQ ID NO: 4946 - DNA, 40 bp, Homo sapiens
tttcccctatttcttatgtattaccctcatcccctcgtct

SEQ ID NO: 4947 - DNA, 40 bp, Homo sapiens
agacgaggggatgagggtaatacataagaaataggggaaa

SEQ ID NO: 4948 - DNA, 40 bp, Homo sapiens
ttcccctatttcttatgtattaccctcatcccctcgtctc

SEQ ID NO: 4949 - DNA, 40 bp, Homo sapiens
gagacgaggggatgagggtaatacataagaaataggggaa

SEQ ID NO: 4950 - DNA, 40 bp, Homo sapiens
tcccctatttcttatgtattaccctcatcccctcgtctct

SEQ ID NO: 4951 - DNA, 40 bp, Homo sapiens
agagacgaggggatgagggtaatacataagaaatagggga

SEQ ID NO: 4952 - DNA, 40 bp, Homo sapiens
cccctatttcttatgtattaccctcatcccctcgtctctt

SEQ ID NO: 4953 - DNA, 40 bp, Homo sapiens
aagagacgaggggatgagggtaatacataagaaatagggg

SEQ ID NO: 4954 - DNA, 40 bp, Homo sapiens
ccctatttcttatgtattaccctcatcccctcgtctcttt

SEQ ID NO: 4955 - DNA, 40 bp, Homo sapiens
aaagagacgaggggatgagggtaatacataagaaataggg

SEQ ID NO: 4956 - DNA, 40 bp, Homo sapiens
cctatttcttatgtattaccctcatcccctcgtctctttt

SEQ ID NO: 4957 - DNA, 40 bp, Homo sapiens
aaaagagacgaggggatgagggtaatacataagaaatagg

SEQ ID NO: 4958 - DNA, 40 bp, Homo sapiens
ctatttcttatgtattaccctcatcccctcgtctctttta

SEQ ID NO: 4959 - DNA, 40 bp, Homo sapiens
taaaagagacgaggggatgagggtaatacataagaaatag

SEQ ID NO: 4960 - DNA, 40 bp, Homo sapiens
tatttcttatgtattaccctcatcccctcgtctcttttat

SEQ ID NO: 4961 - DNA, 40 bp, Homo sapiens
ataaaagagacgaggggatgagggtaatacataagaaata

SEQ ID NO: 4962 - DNA, 40 bp, Homo sapiens
atttcttatgtattaccctcatcccctcgtctcttttata

SEQ ID NO: 4963 - DNA, 40 bp, Homo sapiens
tataaaagagacgaggggatgagggtaatacataagaaat

SEQ ID NO: 4964 - DNA, 40 bp, Homo sapiens
tttcttatgtattaccctcatcccctcgtctcttttatac

SEQ ID NO: 4965 - DNA, 40 bp, Homo sapiens
gtataaaagagacgaggggatgagggtaatacataagaaa

SEQ ID NO: 4966 - DNA, 40 bp, Homo sapiens
ttcttatgtattaccctcatcccctcgtctcttttatact

SEQ ID NO: 4967 - DNA, 40 bp, Homo sapiens
agtataaaagagacgaggggatgagggtaatacataagaa

SEQ ID NO: 4968 - DNA, 40 bp, Homo sapiens
tcttatgtattaccctcatcccctcgtctcttttatacta

SEQ ID NO: 4969 - DNA, 40 bp, Homo sapiens
tagtataaaagagacgaggggatgagggtaatacataaga

SEQ ID NO: 4970 - DNA, 40 bp, Homo sapiens
cttatgtattaccctcatcccctcgtctcttttatactac

SEQ ID NO: 4971 - DNA, 40 bp, Homo sapiens
gtagtataaaagagacgaggggatgagggtaatacataag

SEQ ID NO: 4972 - DNA, 40 bp, Homo sapiens
ttatgtattaccctcatcccctcgtctcttttatactacc

SEQ ID NO: 4973 - DNA, 40 bp, Homo sapiens
ggtagtataaaagagacgaggggatgagggtaatacataa

SEQ ID NO: 4974 - DNA, 40 bp, Homo sapiens
tatgtattaccctcatcccctcgtctcttttatactaccc

SEQ ID NO: 4975 - DNA, 40 bp, Homo sapiens
gggtagtataaaagagacgaggggatgagggtaatacata

SEQ ID NO: 4976 - DNA, 40 bp, Homo sapiens
atgtattaccctcatcccctcgtctcttttatactaccct

SEQ ID NO: 4977 - DNA, 40 bp, Homo sapiens
agggtagtataaaagagacgaggggatgagggtaatacat

SEQ ID NO: 4978 - DNA, 40 bp, Homo sapiens
tgtattaccctcatcccctcgtctcttttatactaccctc

SEQ ID NO: 4979 - DNA, 40 bp, Homo sapiens
gagggtagtataaaagagacgaggggatgagggtaataca

SEQ ID NO: 4980 - DNA, 40 bp, Homo sapiens
gtattaccctcatcccctcgtctcttttatactaccctca

SEQ ID NO: 4981 - DNA, 40 bp, Homo sapiens
tgagggtagtataaaagagacgaggggatgagggtaatac

SEQ ID NO: 4982 - DNA, 40 bp, Homo sapiens
tattaccctcatcccctcgtctcttttatactaccctcat

SEQ ID NO: 4983 - DNA, 40 bp, Homo sapiens
atgagggtagtataaaagagacgaggggatgagggtaata

SEQ ID NO: 4984 - DNA, 40 bp, Homo sapiens
attaccctcatcccctcgtctcttttatactaccctcatt

SEQ ID NO: 4985 - DNA, 40 bp, Homo sapiens
aatgagggtagtataaaagagacgaggggatgagggtaat

SEQ ID NO: 4986 - DNA, 40 bp, Homo sapiens
ttaccctcatcccctcgtctcttttatactaccctcattt

SEQ ID NO: 4987 - DNA, 40 bp, Homo sapiens
aaatgagggtagtataaaagagacgaggggatgagggtaa

SEQ ID NO: 4988 - DNA, 40 bp, Homo sapiens
taccctcatcccctcgtctcttttatactaccctcatttt

SEQ ID NO: 4989 - DNA, 40 bp, Homo sapiens
aaaatgagggtagtataaaagagacgaggggatgagggta

SEQ ID NO: 4990 - DNA, 40 bp, Homo sapiens
accctcatcccctcgtctcttttatactaccctcattttg

SEQ ID NO: 4991 - DNA, 40 bp, Homo sapiens
caaaatgagggtagtataaaagagacgaggggatgagggt

SEQ ID NO: 4992 - DNA, 40 bp, Homo sapiens
ccctcatcccctcgtctcttttatactaccctcattttgc

SEQ ID NO: 4993 - DNA, 40 bp, Homo sapiens
gcaaaatgagggtagtataaaagagacgaggggatgaggg

SEQ ID NO: 4994 - DNA, 40 bp, Homo sapiens
cctcatcccctcgtctcttttatactaccctcattttgca

SEQ ID NO: 4995 - DNA, 40 bp, Homo sapiens
tgcaaaatgagggtagtataaaagagacgaggggatgagg

SEQ ID NO: 4996 - DNA, 40 bp, Homo sapiens
ctcatcccctcgtctcttttatactaccctcattttgcag

SEQ ID NO: 4997 - DNA, 40 bp, Homo sapiens
ctgcaaaatgagggtagtataaaagagacgaggggatgag

SEQ ID NO: 4998 - DNA, 40 bp, Homo sapiens
tcatcccctcgtctcttttatactaccctcattttgcaga

SEQ ID NO: 4999 - DNA, 40 bp, Homo sapiens
tctgcaaaatgagggtagtataaaagagacgaggggatga

SEQ ID NO: 5000 - DNA, 40 bp, Homo sapiens
catcccctcgtctcttttatactaccctcattttgcagat

SEQ ID NO: 5001 - DNA, 40 bp, Homo sapiens
atctgcaaaatgagggtagtataaaagagacgaggggatg

SEQ ID NO: 5002 - DNA, 40 bp, Homo sapiens
atcccctcgtctcttttatactaccctcattttgcagatg

SEQ ID NO: 5003 - DNA, 40 bp, Homo sapiens
catctgcaaaatgagggtagtataaaagagacgaggggat

SEQ ID NO: 5004 - DNA, 40 bp, Homo sapiens
tcccctcgtctcttttatactaccctcattttgcagatgt

SEQ ID NO: 5005 - DNA, 40 bp, Homo sapiens
acatctgcaaaatgagggtagtataaaagagacgagggga

SEQ ID NO: 5006 - DNA, 40 bp, Homo sapiens
cccctcgtctcttttatactaccctcattttgcagatgtg

SEQ ID NO: 5007 - DNA, 40 bp, Homo sapiens
cacatctgcaaaatgagggtagtataaaagagacgagggg

SEQ ID NO: 5008 - DNA, 40 bp, Homo sapiens
ccctcgtctcttttatactaccctcattttgcagatgtgt

SEQ ID NO: 5009 - DNA, 40 bp, Homo sapiens
acacatctgcaaaatgagggtagtataaaagagacgaggg

SEQ ID NO: 5010 - DNA, 40 bp, Homo sapiens
cctcgtctcttttatactaccctcattttgcagatgtgtt

SEQ ID NO: 5011 - DNA, 40 bp, Homo sapiens
aacacatctgcaaaatgagggtagtataaaagagacgagg

SEQ ID NO: 5012 - DNA, 40 bp, Homo sapiens
ctcgtctcttttatactaccctcattttgcagatgtgttc

SEQ ID NO: 5013 - DNA, 40 bp, Homo sapiens
gaacacatctgcaaaatgagggtagtataaaagagacgag

SEQ ID NO: 5014 - DNA, 40 bp, Homo sapiens
tcgtctcttttatactaccctcattttgcagatgtgttct

SEQ ID NO: 5015 - DNA, 40 bp, Homo sapiens
agaacacatctgcaaaatgagggtagtataaaagagacga

SEQ ID NO: 5016 - DNA, 40 bp, Homo sapiens
cgtctcttttatactaccctcattttgcagatgtgttcta

SEQ ID NO: 5017 - DNA, 40 bp, Homo sapiens
tagaacacatctgcaaaatgagggtagtataaaagagacg

SEQ ID NO: 5018 - DNA, 40 bp, Homo sapiens
gtctcttttatactaccctcattttgcagatgtgttctac

SEQ ID NO: 5019 - DNA, 40 bp, Homo sapiens
gtagaacacatctgcaaaatgagggtagtataaaagagac

SEQ ID NO: 5020 - DNA, 40 bp, Homo sapiens
tctcttttatactaccctcattttgcagatgtgttctaca

SEQ ID NO: 5021 - DNA, 40 bp, Homo sapiens
tgtagaacacatctgcaaaatgagggtagtataaaagaga

SEQ ID NO: 5022 - DNA, 40 bp, Homo sapiens
ctcttttatactaccctcattttgcagatgtgttctacat

SEQ ID NO: 5023 - DNA, 40 bp, Homo sapiens
atgtagaacacatctgcaaaatgagggtagtataaaagag

SEQ ID NO: 5024 - DNA, 40 bp, Homo sapiens
tcttttatactaccctcattttgcagatgtgttctacatc

SEQ ID NO: 5025 - DNA, 40 bp, Homo sapiens
gatgtagaacacatctgcaaaatgagggtagtataaaaga

SEQ ID NO: 5026 - DNA, 40 bp, Homo sapiens
cttttatactaccctcattttgcagatgtgttctacatct

SEQ ID NO: 5027 - DNA, 40 bp, Homo sapiens
agatgtagaacacatctgcaaaatgagggtagtataaaag

SEQ ID NO: 5028 - DNA, 40 bp, Homo sapiens
ttttatactaccctcattttgcagatgtgttctacatctc

SEQ ID NO: 5029 - DNA, 40 bp, Homo sapiens
gagatgtagaacacatctgcaaaatgagggtagtataaaa

SEQ ID NO: 5030 - DNA, 40 bp, Homo sapiens
tttatactaccctcattttgcagatgtgttctacatctca

SEQ ID NO: 5031 - DNA, 40 bp, Homo sapiens
tgagatgtagaacacatctgcaaaatgagggtagtataaa

SEQ ID NO: 5032 - DNA, 40 bp, Homo sapiens
ttatactaccctcattttgcagatgtgttctacatctcaa

SEQ ID NO: 5033 - DNA, 40 bp, Homo sapiens
ttgagatgtagaacacatctgcaaaatgagggtagtataa

SEQ ID NO: 5034 - DNA, 40 bp, Homo sapiens
tatactaccctcattttgcagatgtgttctacatctcaag

SEQ ID NO: 5035 - DNA, 40 bp, Homo sapiens
cttgagatgtagaacacatctgcaaaatgagggtagtata

SEQ ID NO: 5036 - DNA, 40 bp, Homo sapiens
atactaccctcattttgcagatgtgttctacatctcaaga

SEQ ID NO: 5037 - DNA, 40 bp, Homo sapiens
tcttgagatgtagaacacatctgcaaaatgagggtagtat

SEQ ID NO: 5038 - DNA, 40 bp, Homo sapiens
tactaccctcattttgcagatgtgttctacatctcaagag

SEQ ID NO: 5039 - DNA, 40 bp, Homo sapiens
ctcttgagatgtagaacacatctgcaaaatgagggtagta

SEQ ID NO: 5040 - DNA, 40 bp, Homo sapiens
actaccctcattttgcagatgtgttctacatctcaagagt

SEQ ID NO: 5041 - DNA, 40 bp, Homo sapiens
actcttgagatgtagaacacatctgcaaaatgagggtagt

SEQ ID NO: 5042 - DNA, 40 bp, Homo sapiens
ctaccctcattttgcagatgtgttctacatctcaagagtt

SEQ ID NO: 5043 - DNA, 40 bp, Homo sapiens
aactcttgagatgtagaacacatctgcaaaatgagggtag

SEQ ID NO: 5044 - DNA, 40 bp, Homo sapiens
taccctcattttgcagatgtgttctacatctcaagagtta

SEQ ID NO: 5045 - DNA, 40 bp, Homo sapiens
taactcttgagatgtagaacacatctgcaaaatgagggta

SEQ ID NO: 5046 - DNA, 40 bp, Homo sapiens
accctcattttgcagatgtgttctacatctcaagagttat

SEQ ID NO: 5047 - DNA, 40 bp, Homo sapiens
ataactcttgagatgtagaacacatctgcaaaatgagggt

SEQ ID NO: 5048 - DNA, 40 bp, Homo sapiens
ccctcattttgcagatgtgttctacatctcaagagttatt

SEQ ID NO: 5049 - DNA, 40 bp, Homo sapiens
aataactcttgagatgtagaacacatctgcaaaatgaggg

SEQ ID NO: 5050 - DNA, 40 bp, Homo sapiens
cctcattttgcagatgtgttctacatctcaagagttatta

SEQ ID NO: 5051 - DNA, 40 bp, Homo sapiens
taataactcttgagatgtagaacacatctgcaaaatgagg

SEQ ID NO: 5052 - DNA, 40 bp, Homo sapiens
ctcattttgcagatgtgttctacatctcaagagttattac

SEQ ID NO: 5053 - DNA, 40 bp, Homo sapiens
gtaataactcttgagatgtagaacacatctgcaaaatgag

SEQ ID NO: 5054 - DNA, 40 bp, Homo sapiens
tcattttgcagatgtgttctacatctcaagagttattaca

SEQ ID NO: 5055 - DNA, 40 bp, Homo sapiens
tgtaataactcttgagatgtagaacacatctgcaaaatga

SEQ ID NO: 5056 - DNA, 40 bp, Homo sapiens
cattttgcagatgtgttctacatctcaagagttattacag

SEQ ID NO: 5057 - DNA, 40 bp, Homo sapiens
ctgtaataactcttgagatgtagaacacatctgcaaaatg

SEQ ID NO: 5058 - DNA, 40 bp, Homo sapiens
attttgcagatgtgttctacatctcaagagttattacagt

SEQ ID NO: 5059 - DNA, 40 bp, Homo sapiens
actgtaataactcttgagatgtagaacacatctgcaaaat

SEQ ID NO: 5060 - DNA, 40 bp, Homo sapiens
ttttgcagatgtgttctacatctcaagagttattacagta

SEQ ID NO: 5061 - DNA, 40 bp, Homo sapiens
tactgtaataactcttgagatgtagaacacatctgcaaaa

SEQ ID NO: 5062 - DNA, 40 bp, Homo sapiens
tttgcagatgtgttctacatctcaagagttattacagtac

SEQ ID NO: 5063 - DNA, 40 bp, Homo sapiens
gtactgtaataactcttgagatgtagaacacatctgcaaa

SEQ ID NO: 5064 - DNA, 40 bp, Homo sapiens
ttgcagatgtgttctacatctcaagagttattacagtact

SEQ ID NO: 5065 - DNA, 40 bp, Homo sapiens
agtactgtaataactcttgagatgtagaacacatctgcaa

SEQ ID NO: 5066 - DNA, 40 bp, Homo sapiens
tgcagatgtgttctacatctcaagagttattacagtactc

SEQ ID NO: 5067 - DNA, 40 bp, Homo sapiens
gagtactgtaataactcttgagatgtagaacacatctgca

SEQ ID NO: 5068 - DNA, 40 bp, Homo sapiens
gcagatgtgttctacatctcaagagttattacagtactcc

SEQ ID NO: 5069 - DNA, 40 bp, Homo sapiens
ggagtactgtaataactcttgagatgtagaacacatctgc

SEQ ID NO: 5070 - DNA, 40 bp, Homo sapiens
cagatgtgttctacatctcaagagttattacagtactcca

SEQ ID NO: 5071 - DNA, 40 bp, Homo sapiens
tggagtactgtaataactcttgagatgtagaacacatctg

SEQ ID NO: 5072 - DNA, 40 bp, Homo sapiens
agatgtgttctacatctcaagagttattacagtactccaa

SEQ ID NO: 5073 - DNA, 40 bp, Homo sapiens
ttggagtactgtaataactcttgagatgtagaacacatct

SEQ ID NO: 5074 - DNA, 40 bp, Homo sapiens
gatgtgttctacatctcaagagttattacagtactccaaa

SEQ ID NO: 5075 - DNA, 40 bp, Homo sapiens
tttggagtactgtaataactcttgagatgtagaacacatc

SEQ ID NO: 5076 - DNA, 40 bp, Homo sapiens
atgtgttctacatctcaagagttattacagtactccaaaa

SEQ ID NO: 5077 - DNA, 40 bp, Homo sapiens
ttttggagtactgtaataactcttgagatgtagaacacat

SEQ ID NO: 5078 - DNA, 40 bp, Homo sapiens
tgtgttctacatctcaagagttattacagtactccaaaac

SEQ ID NO: 5079 - DNA, 40 bp, Homo sapiens
gttttggagtactgtaataactcttgagatgtagaacaca

SEQ ID NO: 5080 - DNA, 40 bp, Homo sapiens
gtgttctacatctcaagagttattacagtactccaaaaca

SEQ ID NO: 5081 - DNA, 40 bp, Homo sapiens
tgttttggagtactgtaataactcttgagatgtagaacac

SEQ ID NO: 5082 - DNA, 40 bp, Homo sapiens
tgttctacatctcaagagttattacagtactccaaaacag

SEQ ID NO: 5083 - DNA, 40 bp, Homo sapiens
ctgttttggagtactgtaataactcttgagatgtagaaca

SEQ ID NO: 5084 - DNA, 40 bp, Homo sapiens
gttctacatctcaagagttattacagtactccaaaacagc

SEQ ID NO: 5085 - DNA, 40 bp, Homo sapiens
gctgttttggagtactgtaataactcttgagatgtagaac

SEQ ID NO: 5086 - DNA, 40 bp, Homo sapiens
ttctacatctcaagagttattacagtactccaaaacagca

SEQ ID NO: 5087 - DNA, 40 bp, Homo sapiens
tgctgttttggagtactgtaataactcttgagatgtagaa

SEQ ID NO: 5088 - DNA, 40 bp, Homo sapiens
tctacatctcaagagttattacagtactccaaaacagcac

SEQ ID NO: 5089 - DNA, 40 bp, Homo sapiens
gtgctgttttggagtactgtaataactcttgagatgtaga

SEQ ID NO: 5090 - DNA, 40 bp, Homo sapiens
ctacatctcaagagttattacagtactccaaaacagcact

SEQ ID NO: 5091 - DNA, 40 bp, Homo sapiens
agtgctgttttggagtactgtaataactcttgagatgtag

SEQ ID NO: 5092 - DNA, 40 bp, Homo sapiens
tacatctcaagagttattacagtactccaaaacagcactt

SEQ ID NO: 5093 - DNA, 40 bp, Homo sapiens
aagtgctgttttggagtactgtaataactcttgagatgta

SEQ ID NO: 5094 - DNA, 40 bp, Homo sapiens
acatctcaagagttattacagtactccaaaacagcactta

SEQ ID NO: 5095 - DNA, 40 bp, Homo sapiens
taagtgctgttttggagtactgtaataactcttgagatgt

SEQ ID NO: 5096 - DNA, 40 bp, Homo sapiens
catctcaagagttattacagtactccaaaacagcacttac

SEQ ID NO: 5097 - DNA, 40 bp, Homo sapiens
gtaagtgctgttttggagtactgtaataactcttgagatg

SEQ ID NO: 5098 - DNA, 40 bp, Homo sapiens
atctcaagagttattacagtactccaaaacagcacttaca

SEQ ID NO: 5099 - DNA, 40 bp, Homo sapiens
tgtaagtgctgttttggagtactgtaataactcttgagat

SEQ ID NO: 5100 - DNA, 40 bp, Homo sapiens
tctcaagagttattacagtactccaaaacagcacttacat

SEQ ID NO: 5101 - DNA, 40 bp, Homo sapiens
atgtaagtgctgttttggagtactgtaataactcttgaga

SEQ ID NO: 5102 - DNA, 40 bp, Homo sapiens
ctcaagagttattacagtactccaaaacagcacttacatg

SEQ ID NO: 5103 - DNA, 40 bp, Homo sapiens
catgtaagtgctgttttggagtactgtaataactcttgag

SEQ ID NO: 5104 - DNA, 40 bp, Homo sapiens
tcaagagttattacagtactccaaaacagcacttacatga

SEQ ID NO: 5105 - DNA, 40 bp, Homo sapiens
tcatgtaagtgctgttttggagtactgtaataactcttga

SEQ ID NO: 5106 - DNA, 40 bp, Homo sapiens
caagagttattacagtactccaaaacagcacttacatgat

SEQ ID NO: 5107 - DNA, 40 bp, Homo sapiens
atcatgtaagtgctgttttggagtactgtaataactcttg

SEQ ID NO: 5108 - DNA, 40 bp, Homo sapiens
aagagttattacagtactccaaaacagcacttacatgatt

SEQ ID NO: 5109 - DNA, 40 bp, Homo sapiens
aatcatgtaagtgctgttttggagtactgtaataactctt

SEQ ID NO: 5110 - DNA, 40 bp, Homo sapiens
agagttattacagtactccaaaacagcacttacatgattt

SEQ ID NO: 5111 - DNA, 40 bp, Homo sapiens
aaatcatgtaagtgctgttttggagtactgtaataactct

SEQ ID NO: 5112 - DNA, 40 bp, Homo sapiens
gagttattacagtactccaaaacagcacttacatgatttt

SEQ ID NO: 5113 - DNA, 40 bp, Homo sapiens
aaaatcatgtaagtgctgttttggagtactgtaataactc

SEQ ID NO: 5114 - DNA, 40 bp, Homo sapiens
agttattacagtactccaaaacagcacttacatgattttt

SEQ ID NO: 5115 - DNA, 40 bp, Homo sapiens
aaaaatcatgtaagtgctgttttggagtactgtaataact

SEQ ID NO: 5116 - DNA, 40 bp, Homo sapiens
gttattacagtactccaaaacagcacttacatgatttttt

SEQ ID NO: 5117 - DNA, 40 bp, Homo sapiens
aaaaaatcatgtaagtgctgttttggagtactgtaataac

SEQ ID NO: 5118 - DNA, 40 bp, Homo sapiens
ttattacagtactccaaaacagcacttacatgatttttta

SEQ ID NO: 5119 - DNA, 40 bp, Homo sapiens
taaaaaatcatgtaagtgctgttttggagtactgtaataa

SEQ ID NO: 5120 - DNA, 40 bp, Homo sapiens
tattacagtactccaaaacagcacttacatgattttttaa

SEQ ID NO: 5121 - DNA, 40 bp, Homo sapiens
ttaaaaaatcatgtaagtgctgttttggagtactgtaata

SEQ ID NO: 5122 - DNA, 40 bp, Homo sapiens
attacagtactccaaaacagcacttacatgattttttaaa

SEQ ID NO: 5123 - DNA, 40 bp, Homo sapiens
tttaaaaaatcatgtaagtgctgttttggagtactgtaat

SEQ ID NO: 5124 - DNA, 40 bp, Homo sapiens
ttacagtactccaaaacagcacttacatgattttttaaac

SEQ ID NO: 5125 - DNA, 40 bp, Homo sapiens
gtttaaaaaatcatgtaagtgctgttttggagtactgtaa

SEQ ID NO: 5126 - DNA, 40 bp, Homo sapiens
tacagtactccaaaacagcacttacatgattttttaaact

SEQ ID NO: 5127 - DNA, 40 bp, Homo sapiens
agtttaaaaaatcatgtaagtgctgttttggagtactgta

SEQ ID NO: 5128 - DNA, 40 bp, Homo sapiens
acagtactccaaaacagcacttacatgattttttaaactt

SEQ ID NO: 5129 - DNA, 40 bp, Homo sapiens
aagtttaaaaaatcatgtaagtgctgttttggagtactgt

SEQ ID NO: 5130 - DNA, 40 bp, Homo sapiens
cagtactccaaaacagcacttacatgattttttaaactta

SEQ ID NO: 5131 - DNA, 40 bp, Homo sapiens
taagtttaaaaaatcatgtaagtgctgttttggagtactg

SEQ ID NO: 5132 - DNA, 40 bp, Homo sapiens
agtactccaaaacagcacttacatgattttttaaacttac

SEQ ID NO: 5133 - DNA, 40 bp, Homo sapiens
gtaagtttaaaaaatcatgtaagtgctgttttggagtact

SEQ ID NO: 5134 - DNA, 40 bp, Homo sapiens
gtactccaaaacagcacttacatgattttttaaacttaca

SEQ ID NO: 5135 - DNA, 40 bp, Homo sapiens
tgtaagtttaaaaaatcatgtaagtgctgttttggagtac

SEQ ID NO: 5136 - DNA, 40 bp, Homo sapiens
tactccaaaacagcacttacatgattttttaaacttacag

SEQ ID NO: 5137 - DNA, 40 bp, Homo sapiens
ctgtaagtttaaaaaatcatgtaagtgctgttttggagta

SEQ ID NO: 5138 - DNA, 40 bp, Homo sapiens
actccaaaacagcacttacatgattttttaaacttacaga

SEQ ID NO: 5139 - DNA, 40 bp, Homo sapiens
tctgtaagtttaaaaaatcatgtaagtgctgttttggagt

SEQ ID NO: 5140 - DNA, 40 bp, Homo sapiens
ctccaaaacagcacttacatgattttttaaacttacagag

SEQ ID NO: 5141 - DNA, 40 bp, Homo sapiens
ctctgtaagtttaaaaaatcatgtaagtgctgttttggag

SEQ ID NO: 5142 - DNA, 40 bp, Homo sapiens
tccaaaacagcacttacatgattttttaaacttacagagg

SEQ ID NO: 5143 - DNA, 40 bp, Homo sapiens
cctctgtaagtttaaaaaatcatgtaagtgctgttttgga

SEQ ID NO: 5144 - DNA, 40 bp, Homo sapiens
ccaaaacagcacttacatgattttttaaacttacagagga

SEQ ID NO: 5145 - DNA, 40 bp, Homo sapiens
tcctctgtaagtttaaaaaatcatgtaagtgctgttttgg

SEQ ID NO: 5146 - DNA, 40 bp, Homo sapiens
caaaacagcacttacatgattttttaaacttacagaggaa

SEQ ID NO: 5147 - DNA, 40 bp, Homo sapiens
ttcctctgtaagtttaaaaaatcatgtaagtgctgttttg

SEQ ID NO: 5148 - DNA, 40 bp, Homo sapiens
aaaacagcacttacatgattttttaaacttacagaggaat

SEQ ID NO: 5149 - DNA, 40 bp, Homo sapiens
attcctctgtaagtttaaaaaatcatgtaagtgctgtttt

SEQ ID NO: 5150 - DNA, 40 bp, Homo sapiens
aaacagcacttacatgattttttaaacttacagaggaatt

SEQ ID NO: 5151 - DNA, 40 bp, Homo sapiens
aattcctctgtaagtttaaaaaatcatgtaagtgctgttt

SEQ ID NO: 5152 - DNA, 40 bp, Homo sapiens
aacagcacttacatgattttttaaacttacagaggaattg

SEQ ID NO: 5153 - DNA, 40 bp, Homo sapiens
caattcctctgtaagtttaaaaaatcatgtaagtgctgtt

SEQ ID NO: 5154 - DNA, 40 bp, Homo sapiens
acagcacttacatgattttttaaacttacagaggaattgt

SEQ ID NO: 5155 - DNA, 40 bp, Homo sapiens
acaattcctctgtaagtttaaaaaatcatgtaagtgctgt

SEQ ID NO: 5156 - DNA, 40 bp, Homo sapiens
cagcacttacatgattttttaaacttacagaggaattgta

SEQ ID NO: 5157 - DNA, 40 bp, Homo sapiens
tacaattcctctgtaagtttaaaaaatcatgtaagtgctg

SEQ ID NO: 5158 - DNA, 40 bp, Homo sapiens
agcacttacatgattttttaaacttacagaggaattgtag

SEQ ID NO: 5159 - DNA, 40 bp, Homo sapiens
ctacaattcctctgtaagtttaaaaaatcatgtaagtgct

SEQ ID NO: 5160 - DNA, 40 bp, Homo sapiens
gcacttacatgattttttaaacttacagaggaattgtagc

SEQ ID NO: 5161 - DNA, 40 bp, Homo sapiens
gctacaattcctctgtaagtttaaaaaatcatgtaagtgc

SEQ ID NO: 5162 - DNA, 40 bp, Homo sapiens
cacttacatgattttttaaacttacagaggaattgtagca

SEQ ID NO: 5163 - DNA, 40 bp, Homo sapiens
tgctacaattcctctgtaagtttaaaaaatcatgtaagtg

SEQ ID NO: 5164 - DNA, 40 bp, Homo sapiens
acttacatgattttttaaacttacagaggaattgtagcaa

SEQ ID NO: 5165 - DNA, 40 bp, Homo sapiens
ttgctacaattcctctgtaagtttaaaaaatcatgtaagt

SEQ ID NO: 5166 - DNA, 40 bp, Homo sapiens
cttacatgattttttaaacttacagaggaattgtagcaat

SEQ ID NO: 5167 - DNA, 40 bp, Homo sapiens
attgctacaattcctctgtaagtttaaaaaatcatgtaag

SEQ ID NO: 5168 - DNA, 40 bp, Homo sapiens
ttacatgattttttaaacttacagaggaattgtagcaatc

SEQ ID NO: 5169 - DNA, 40 bp, Homo sapiens
gattgctacaattcctctgtaagtttaaaaaatcatgtaa

SEQ ID NO: 5170 - DNA, 40 bp, Homo sapiens
tacatgattttttaaacttacagaggaattgtagcaatcc

SEQ ID NO: 5171 - DNA, 40 bp, Homo sapiens
ggattgctacaattcctctgtaagtttaaaaaatcatgta

SEQ ID NO: 5172 - DNA, 40 bp, Homo sapiens
acatgattttttaaacttacagaggaattgtagcaatcca

SEQ ID NO: 5173 - DNA, 40 bp, Homo sapiens
tggattgctacaattcctctgtaagtttaaaaaatcatgt

SEQ ID NO: 5174 - DNA, 40 bp, Homo sapiens
catgattttttaaacttacagaggaattgtagcaatccac

SEQ ID NO: 5175 - DNA, 40 bp, Homo sapiens
gtggattgctacaattcctctgtaagtttaaaaaatcatg

SEQ ID NO: 5176 - DNA, 40 bp, Homo sapiens
atgattttttaaacttacagaggaattgtagcaatccacc

SEQ ID NO: 5177 - DNA, 40 bp, Homo sapiens
ggtggattgctacaattcctctgtaagtttaaaaaatcat

SEQ ID NO: 5178 - DNA, 40 bp, Homo sapiens
tgattttttaaacttacagaggaattgtagcaatccacca

SEQ ID NO: 5179 - DNA, 40 bp, Homo sapiens
tggtggattgctacaattcctctgtaagtttaaaaaatca

SEQ ID NO: 5180 - DNA, 40 bp, Homo sapiens
gattttttaaacttacagaggaattgtagcaatccaccag

SEQ ID NO: 5181 - DNA, 40 bp, Homo sapiens
ctggtggattgctacaattcctctgtaagtttaaaaaatc

SEQ ID NO: 5182 - DNA, 40 bp, Homo sapiens
attttttaaacttacagaggaattgtagcaatccaccagc

SEQ ID NO: 5183 - DNA, 40 bp, Homo sapiens
gctggtggattgctacaattcctctgtaagtttaaaaaat

SEQ ID NO: 5184 - DNA, 40 bp, Homo sapiens
ttttttaaacttacagaggaattgtagcaatccaccagct

SEQ ID NO: 5185 - DNA, 40 bp, Homo sapiens
agctggtggattgctacaattcctctgtaagtttaaaaaa

SEQ ID NO: 5186 - DNA, 40 bp, Homo sapiens
tttttaaacttacagaggaattgtagcaatccaccagcta

SEQ ID NO: 5187 - DNA, 40 bp, Homo sapiens
tagctggtggattgctacaattcctctgtaagtttaaaaa

SEQ ID NO: 5188 - DNA, 40 bp, Homo sapiens
ttttaaacttacagaggaattgtagcaatccaccagctaa

SEQ ID NO: 5189 - DNA, 40 bp, Homo sapiens
ttagctggtggattgctacaattcctctgtaagtttaaaa

SEQ ID NO: 5190 - DNA, 40 bp, Homo sapiens
tttaaacttacagaggaattgtagcaatccaccagctaac

SEQ ID NO: 5191 - DNA, 40 bp, Homo sapiens
gttagctggtggattgctacaattcctctgtaagtttaaa

SEQ ID NO: 5192 - DNA, 40 bp, Homo sapiens
ttaaacttacagaggaattgtagcaatccaccagctaacc

SEQ ID NO: 5193 - DNA, 40 bp, Homo sapiens
ggttagctggtggattgctacaattcctctgtaagtttaa

SEQ ID NO: 5194 - DNA, 40 bp, Homo sapiens
taaacttacagaggaattgtagcaatccaccagctaaccg

SEQ ID NO: 5195 - DNA, 40 bp, Homo sapiens
cggttagctggtggattgctacaattcctctgtaagttta

SEQ ID NO: 5196 - DNA, 40 bp, Homo sapiens
aaacttacagaggaattgtagcaatccaccagctaaccgc

SEQ ID NO: 5197 - DNA, 40 bp, Homo sapiens
gcggttagctggtggattgctacaattcctctgtaagttt

SEQ ID NO: 5198 - DNA, 40 bp, Homo sapiens
aacttacagaggaattgtagcaatccaccagctaaccgcc

SEQ ID NO: 5199 - DNA, 40 bp, Homo sapiens
ggcggttagctggtggattgctacaattcctctgtaagtt

SEQ ID NO: 5200 - DNA, 40 bp, Homo sapiens
acttacagaggaattgtagcaatccaccagctaaccgcct

SEQ ID NO: 5201 - DNA, 40 bp, Homo sapiens
aggcggttagctggtggattgctacaattcctctgtaagt

SEQ ID NO: 5202 - DNA, 40 bp, Homo sapiens
cttacagaggaattgtagcaatccaccagctaaccgcctg

SEQ ID NO: 5203 - DNA, 40 bp, Homo sapiens
caggcggttagctggtggattgctacaattcctctgtaag

SEQ ID NO: 5204 - DNA, 40 bp, Homo sapiens
ttacagaggaattgtagcaatccaccagctaaccgcctga

SEQ ID NO: 5205 - DNA, 40 bp, Homo sapiens
tcaggcggttagctggtggattgctacaattcctctgtaa

SEQ ID NO: 5206 - DNA, 40 bp, Homo sapiens
tacagaggaattgtagcaatccaccagctaaccgcctgaa

SEQ ID NO: 5207 - DNA, 40 bp, Homo sapiens
ttcaggcggttagctggtggattgctacaattcctctgta

SEQ ID NO: 5208 - DNA, 40 bp, Homo sapiens
acagaggaattgtagcaatccaccagctaaccgcctgaaa

SEQ ID NO: 5209 - DNA, 40 bp, Homo sapiens
tttcaggcggttagctggtggattgctacaattcctctgt

SEQ ID NO: 5210 - DNA, 40 bp, Homo sapiens
cagaggaattgtagcaatccaccagctaaccgcctgaaat

SEQ ID NO: 5211 - DNA, 40 bp, Homo sapiens
atttcaggcggttagctggtggattgctacaattcctctg

SEQ ID NO: 5212 - DNA, 40 bp, Homo sapiens
agaggaattgtagcaatccaccagctaaccgcctgaaata

SEQ ID NO: 5213 - DNA, 40 bp, Homo sapiens
tatttcaggcggttagctggtggattgctacaattcctct

SEQ ID NO: 5214 - DNA, 40 bp, Homo sapiens
gaggaattgtagcaatccaccagctaaccgcctgaaatag

SEQ ID NO: 5215 - DNA, 40 bp, Homo sapiens
ctatttcaggcggttagctggtggattgctacaattcctc

SEQ ID NO: 5216 - DNA, 40 bp, Homo sapiens
aggaattgtagcaatccaccagctaaccgcctgaaataga

SEQ ID NO: 5217 - DNA, 40 bp, Homo sapiens
tctatttcaggcggttagctggtggattgctacaattcct

SEQ ID NO: 5218 - DNA, 40 bp, Homo sapiens
ggaattgtagcaatccaccagctaaccgcctgaaatagac

SEQ ID NO: 5219 - DNA, 40 bp, Homo sapiens
gtctatttcaggcggttagctggtggattgctacaattcc

SEQ ID NO: 5220 - DNA, 40 bp, Homo sapiens
gaattgtagcaatccaccagctaaccgcctgaaatagact

SEQ ID NO: 5221 - DNA, 40 bp, Homo sapiens
agtctatttcaggcggttagctggtggattgctacaattc

SEQ ID NO: 5222 - DNA, 40 bp, Homo sapiens
aattgtagcaatccaccagctaaccgcctgaaatagactt

SEQ ID NO: 5223 - DNA, 40 bp, Homo sapiens
aagtctatttcaggcggttagctggtggattgctacaatt

SEQ ID NO: 5224 - DNA, 40 bp, Homo sapiens
attgtagcaatccaccagctaaccgcctgaaatagactta

SEQ ID NO: 5225 - DNA, 40 bp, Homo sapiens
taagtctatttcaggcggttagctggtggattgctacaat

SEQ ID NO: 5226 - DNA, 40 bp, Homo sapiens
ttgtagcaatccaccagctaaccgcctgaaatagacttaa

SEQ ID NO: 5227 - DNA, 40 bp, Homo sapiens
ttaagtctatttcaggcggttagctggtggattgctacaa

SEQ ID NO: 5228 - DNA, 40 bp, Homo sapiens
tgtagcaatccaccagctaaccgcctgaaatagacttaaa

SEQ ID NO: 5229 - DNA, 40 bp, Homo sapiens
tttaagtctatttcaggcggttagctggtggattgctaca

SEQ ID NO: 5230 - DNA, 40 bp, Homo sapiens
gtagcaatccaccagctaaccgcctgaaatagacttaaac

SEQ ID NO: 5231 - DNA, 40 bp, Homo sapiens
gtttaagtctatttcaggcggttagctggtggattgctac

SEQ ID NO: 5232 - DNA, 40 bp, Homo sapiens
tagcaatccaccagctaaccgcctgaaatagacttaaaca

SEQ ID NO: 5233 - DNA, 40 bp, Homo sapiens
tgtttaagtctatttcaggcggttagctggtggattgcta

SEQ ID NO: 5234 - DNA, 40 bp, Homo sapiens
agcaatccaccagctaaccgcctgaaatagacttaaacat

SEQ ID NO: 5235 - DNA, 40 bp, Homo sapiens
atgtttaagtctatttcaggcggttagctggtggattgct

SEQ ID NO: 5236 - DNA, 40 bp, Homo sapiens
gcaatccaccagctaaccgcctgaaatagacttaaacatg

SEQ ID NO: 5237 - DNA, 40 bp, Homo sapiens
catgtttaagtctatttcaggcggttagctggtggattgc

SEQ ID NO: 5238 - DNA, 40 bp, Homo sapiens
caatccaccagctaaccgcctgaaatagacttaaacatgt

SEQ ID NO: 5239 - DNA, 40 bp, Homo sapiens
acatgtttaagtctatttcaggcggttagctggtggattg

SEQ ID NO: 5240 - DNA, 40 bp, Homo sapiens
aatccaccagctaaccgcctgaaatagacttaaacatgtg

SEQ ID NO: 5241 - DNA, 40 bp, Homo sapiens
cacatgtttaagtctatttcaggcggttagctggtggatt

SEQ ID NO: 5242 - DNA, 40 bp, Homo sapiens
atccaccagctaaccgcctgaaatagacttaaacatgtgc

SEQ ID NO: 5243 - DNA, 40 bp, Homo sapiens
gcacatgtttaagtctatttcaggcggttagctggtggat

SEQ ID NO: 5244 - DNA, 40 bp, Homo sapiens
tccaccagctaaccgcctgaaatagacttaaacatgtgca

SEQ ID NO: 5245 - DNA, 40 bp, Homo sapiens
tgcacatgtttaagtctatttcaggcggttagctggtgga

SEQ ID NO: 5246 - DNA, 40 bp, Homo sapiens
ccaccagctaaccgcctgaaatagacttaaacatgtgcat

SEQ ID NO: 5247 - DNA, 40 bp, Homo sapiens
atgcacatgtttaagtctatttcaggcggttagctggtgg

SEQ ID NO: 5248 - DNA, 40 bp, Homo sapiens
caccagctaaccgcctgaaatagacttaaacatgtgcatc

SEQ ID NO: 5249 - DNA, 40 bp, Homo sapiens
gatgcacatgtttaagtctatttcaggcggttagctggtg

SEQ ID NO: 5250 - DNA, 40 bp, Homo sapiens
accagctaaccgcctgaaatagacttaaacatgtgcatct

SEQ ID NO: 5251 - DNA, 40 bp, Homo sapiens
agatgcacatgtttaagtctatttcaggcggttagctggt

SEQ ID NO: 5252 - DNA, 40 bp, Homo sapiens
ccagctaaccgcctgaaatagacttaaacatgtgcatctc

SEQ ID NO: 5253 - DNA, 40 bp, Homo sapiens
gagatgcacatgtttaagtctatttcaggcggttagctgg

SEQ ID NO: 5254 - DNA, 40 bp, Homo sapiens
cagctaaccgcctgaaatagacttaaacatgtgcatctcc

SEQ ID NO: 5255 - DNA, 40 bp, Homo sapiens
ggagatgcacatgtttaagtctatttcaggcggttagctg

SEQ ID NO: 5256 - DNA, 40 bp, Homo sapiens
agctaaccgcctgaaatagacttaaacatgtgcatctcct

SEQ ID NO: 5257 - DNA, 40 bp, Homo sapiens
aggagatgcacatgtttaagtctatttcaggcggttagct

SEQ ID NO: 5258 - DNA, 40 bp, Homo sapiens
gctaaccgcctgaaatagacttaaacatgtgcatctcctt

SEQ ID NO: 5259 - DNA, 40 bp, Homo sapiens
aaggagatgcacatgtttaagtctatttcaggcggttagc

SEQ ID NO: 5260 - DNA, 40 bp, Homo sapiens
ctaaccgcctgaaatagacttaaacatgtgcatctccttt

SEQ ID NO: 5261 - DNA, 40 bp, Homo sapiens
aaaggagatgcacatgtttaagtctatttcaggcggttag

SEQ ID NO: 5262 - DNA, 40 bp, Homo sapiens
taaccgcctgaaatagacttaaacatgtgcatctcctttt

SEQ ID NO: 5263 - DNA, 40 bp, Homo sapiens
aaaaggagatgcacatgtttaagtctatttcaggcggtta

SEQ ID NO: 5264 - DNA, 40 bp, Homo sapiens
aaccgcctgaaatagacttaaacatgtgcatctccttttt

SEQ ID NO: 5265 - DNA, 40 bp, Homo sapiens
aaaaaggagatgcacatgtttaagtctatttcaggcggtt

SEQ ID NO: 5266 - DNA, 40 bp, Homo sapiens
accgcctgaaatagacttaaacatgtgcatctcctttttt

SEQ ID NO: 5267 - DNA, 40 bp, Homo sapiens
aaaaaaggagatgcacatgtttaagtctatttcaggcggt

SEQ ID NO: 5268 - DNA, 40 bp, Homo sapiens
ccgcctgaaatagacttaaacatgtgcatctccttttttt

SEQ ID NO: 5269 - DNA, 40 bp, Homo sapiens
aaaaaaaggagatgcacatgtttaagtctatttcaggcgg

SEQ ID NO: 5270 - DNA, 40 bp, Homo sapiens
cgcctgaaatagacttaaacatgtgcatctcctttttttt

SEQ ID NO: 5271 - DNA, 40 bp, Homo sapiens
aaaaaaaaggagatgcacatgtttaagtctatttcaggcg

SEQ ID NO: 5272 - DNA, 40 bp, Homo sapiens
gcctgaaatagacttaaacatgtgcatctccttttttttt

SEQ ID NO: 5273 - DNA, 40 bp, Homo sapiens
aaaaaaaaaggagatgcacatgtttaagtctatttcaggc

SEQ ID NO: 5274 - DNA, 40 bp, Homo sapiens
cctgaaatagacttaaacatgtgcatctcctttttttttt

SEQ ID NO: 5275 - DNA, 40 bp, Homo sapiens
aaaaaaaaaaggagatgcacatgtttaagtctatttcagg

SEQ ID NO: 5276 - DNA, 40 bp, Homo sapiens
ctgaaatagacttaaacatgtgcatctccttttttttttt

SEQ ID NO: 5277 - DNA, 40 bp, Homo sapiens
aaaaaaaaaaaggagatgcacatgtttaagtctatttcag

SEQ ID NO: 5278 - DNA, 40 bp, Homo sapiens
tgaaatagacttaaacatgtgcatctcctttttttttttt

SEQ ID NO: 5279 - DNA, 40 bp, Homo sapiens
aaaaaaaaaaaaggagatgcacatgtttaagtctatttca

SEQ ID NO: 5280 - DNA, 40 bp, Homo sapiens
gaaatagacttaaacatgtgcatctccttttttttttttt

SEQ ID NO: 5281 - DNA, 40 bp, Homo sapiens
aaaaaaaaaaaaaggagatgcacatgtttaagtctatttc

SEQ ID NO: 5282 - DNA, 40 bp, Homo sapiens
aaatagacttaaacatgtgcatctcctttttttttttttt

SEQ ID NO: 5283 - DNA, 40 bp, Homo sapiens
aaaaaaaaaaaaaaggagatgcacatgtttaagtctattt

SEQ ID NO: 5284 - DNA, 40 bp, Homo sapiens
aatagacttaaacatgtgcatctccttttttttttttttt

SEQ ID NO: 5285 - DNA, 40 bp, Homo sapiens
aaaaaaaaaaaaaaaggagatgcacatgtttaagtctatt

SEQ ID NO: 5286 - DNA, 40 bp, Homo sapiens
atagacttaaacatgtgcatctcctttttttttttttttt

SEQ ID NO: 5287 - DNA, 40 bp, Homo sapiens
aaaaaaaaaaaaaaaaggagatgcacatgtttaagtctat

SEQ ID NO: 5288 - DNA, 40 bp, Homo sapiens
tagacttaaacatgtgcatctccttttttttttttttttt

SEQ ID NO: 5289 - DNA, 40 bp, Homo sapiens
aaaaaaaaaaaaaaaaaggagatgcacatgtttaagtcta

SEQ ID NO: 5290 - DNA, 40 bp, Homo sapiens
agacttaaacatgtgcatctcctttttttttttttttttg

SEQ ID NO: 5291 - DNA, 40 bp, Homo sapiens
caaaaaaaaaaaaaaaaaggagatgcacatgtttaagtct

SEQ ID NO: 5292 - DNA, 40 bp, Homo sapiens
gacttaaacatgtgcatctcctttttttttttttttttga

SEQ ID NO: 5293 - DNA, 40 bp, Homo sapiens
tcaaaaaaaaaaaaaaaaaggagatgcacatgtttaagtc

SEQ ID NO: 5294 - DNA, 40 bp, Homo sapiens
acttaaacatgtgcatctcctttttttttttttttttgag

SEQ ID NO: 5295 - DNA, 40 bp, Homo sapiens
ctcaaaaaaaaaaaaaaaaaggagatgcacatgtttaagt

SEQ ID NO: 5296 - DNA, 40 bp, Homo sapiens
cttaaacatgtgcatctcctttttttttttttttttgaga

SEQ ID NO: 5297 - DNA, 40 bp, Homo sapiens
tctcaaaaaaaaaaaaaaaaaggagatgcacatgtttaag

SEQ ID NO: 5298 - DNA, 40 bp, Homo sapiens
ttaaacatgtgcatctcctttttttttttttttttgagac

SEQ ID NO: 5299 - DNA, 40 bp, Homo sapiens
gtctcaaaaaaaaaaaaaaaaaggagatgcacatgtttaa

SEQ ID NO: 5300 - DNA, 40 bp, Homo sapiens
taaacatgtgcatctcctttttttttttttttttgagaca

SEQ ID NO: 5301 - DNA, 40 bp, Homo sapiens
tgtctcaaaaaaaaaaaaaaaaaggagatgcacatgttta

SEQ ID NO: 5302 - DNA, 40 bp, Homo sapiens
aaacatgtgcatctcctttttttttttttttttgagacac

SEQ ID NO: 5303 - DNA, 40 bp, Homo sapiens
gtgtctcaaaaaaaaaaaaaaaaaggagatgcacatgttt

SEQ ID NO: 5304 - DNA, 40 bp, Homo sapiens
aacatgtgcatctcctttttttttttttttttgagacaca

SEQ ID NO: 5305 - DNA, 40 bp, Homo sapiens
tgtgtctcaaaaaaaaaaaaaaaaaggagatgcacatgtt

SEQ ID NO: 5306 - DNA, 40 bp, Homo sapiens
acatgtgcatctcctttttttttttttttttgagacacag

SEQ ID NO: 5307 - DNA, 40 bp, Homo sapiens
ctgtgtctcaaaaaaaaaaaaaaaaaggagatgcacatgt

SEQ ID NO: 5308 - DNA, 40 bp, Homo sapiens
catgtgcatctcctttttttttttttttttgagacacagt

SEQ ID NO: 5309 - DNA, 40 bp, Homo sapiens
actgtgtctcaaaaaaaaaaaaaaaaaggagatgcacatg

SEQ ID NO: 5310 - DNA, 40 bp, Homo sapiens
atgtgcatctcctttttttttttttttttgagacacagtc

SEQ ID NO: 5311 - DNA, 40 bp, Homo sapiens
gactgtgtctcaaaaaaaaaaaaaaaaaggagatgcacat

SEQ ID NO: 5312 - DNA, 40 bp, Homo sapiens
tgtgcatctcctttttttttttttttttgagacacagtct

SEQ ID NO: 5313 - DNA, 40 bp, Homo sapiens
agactgtgtctcaaaaaaaaaaaaaaaaaggagatgcaca

SEQ ID NO: 5314 - DNA, 40 bp, Homo sapiens
gtgcatctcctttttttttttttttttgagacacagtctc

SEQ ID NO: 5315 - DNA, 40 bp, Homo sapiens
gagactgtgtctcaaaaaaaaaaaaaaaaaggagatgcac

SEQ ID NO: 5316 - DNA, 40 bp, Homo sapiens
tgcatctcctttttttttttttttttgagacacagtctcg

SEQ ID NO: 5317 - DNA, 40 bp, Homo sapiens
cgagactgtgtctcaaaaaaaaaaaaaaaaaggagatgca

SEQ ID NO: 5318 - DNA, 40 bp, Homo sapiens
gcatctcctttttttttttttttttgagacacagtctcgc

SEQ ID NO: 5319 - DNA, 40 bp, Homo sapiens
gcgagactgtgtctcaaaaaaaaaaaaaaaaaggagatgc

SEQ ID NO: 5320 - DNA, 40 bp, Homo sapiens
catctcctttttttttttttttttgagacacagtctcgct

SEQ ID NO: 5321 - DNA, 40 bp, Homo sapiens
agcgagactgtgtctcaaaaaaaaaaaaaaaaaggagatg

SEQ ID NO: 5322 - DNA, 40 bp, Homo sapiens
atctcctttttttttttttttttgagacacagtctcgctc

SEQ ID NO: 5323 - DNA, 40 bp, Homo sapiens
gagcgagactgtgtctcaaaaaaaaaaaaaaaaaggagat

SEQ ID NO: 5324 - DNA, 40 bp, Homo sapiens
tctcctttttttttttttttttgagacacagtctcgctct

SEQ ID NO: 5325 - DNA, 40 bp, Homo sapiens
agagcgagactgtgtctcaaaaaaaaaaaaaaaaaggaga

SEQ ID NO: 5326 - DNA, 40 bp, Homo sapiens
ctcctttttttttttttttttgagacacagtctcgctctg

SEQ ID NO: 5327 - DNA, 40 bp, Homo sapiens
cagagcgagactgtgtctcaaaaaaaaaaaaaaaaaggag

SEQ ID NO: 5328 - DNA, 40 bp, Homo sapiens
tcctttttttttttttttttgagacacagtctcgctctgt

SEQ ID NO: 5329 - DNA, 40 bp, Homo sapiens
acagagcgagactgtgtctcaaaaaaaaaaaaaaaaagga

SEQ ID NO: 5330 - DNA, 40 bp, Homo sapiens
cctttttttttttttttttgagacacagtctcgctctgtt

SEQ ID NO: 5331 - DNA, 40 bp, Homo sapiens
aacagagcgagactgtgtctcaaaaaaaaaaaaaaaaagg

SEQ ID NO: 5332 - DNA, 40 bp, Homo sapiens
ctttttttttttttttttgagacacagtctcgctctgttg

SEQ ID NO: 5333 - DNA, 40 bp, Homo sapiens
caacagagcgagactgtgtctcaaaaaaaaaaaaaaaaag

SEQ ID NO: 5334 - DNA, 40 bp, Homo sapiens
tttttttttttttttttgagacacagtctcgctctgttgc

SEQ ID NO: 5335 - DNA, 40 bp, Homo sapiens
gcaacagagcgagactgtgtctcaaaaaaaaaaaaaaaaa

SEQ ID NO: 5336 - DNA, 40 bp, Homo sapiens
ttttttttttttttttgagacacagtctcgctctgttgcc

SEQ ID NO: 5337 - DNA, 40 bp, Homo sapiens
ggcaacagagcgagactgtgtctcaaaaaaaaaaaaaaaa

SEQ ID NO: 5338 - DNA, 40 bp, Homo sapiens
tttttttttttttttgagacacagtctcgctctgttgccc

SEQ ID NO: 5339 - DNA, 40 bp, Homo sapiens
gggcaacagagcgagactgtgtctcaaaaaaaaaaaaaaa

SEQ ID NO: 5340 - DNA, 40 bp, Homo sapiens
ttttttttttttttgagacacagtctcgctctgttgccca

SEQ ID NO: 5341 - DNA, 40 bp, Homo sapiens
tgggcaacagagcgagactgtgtctcaaaaaaaaaaaaaa

SEQ ID NO: 5342 - DNA, 40 bp, Homo sapiens
tttttttttttttgagacacagtctcgctctgttgcccag

SEQ ID NO: 5343 - DNA, 40 bp, Homo sapiens
ctgggcaacagagcgagactgtgtctcaaaaaaaaaaaaa

SEQ ID NO: 5344 - DNA, 40 bp, Homo sapiens
ttttttttttttgagacacagtctcgctctgttgcccagg

SEQ ID NO: 5345 - DNA, 40 bp, Homo sapiens
cctgggcaacagagcgagactgtgtctcaaaaaaaaaaaa

SEQ ID NO: 5346 - DNA, 40 bp, Homo sapiens
tttttttttttgagacacagtctcgctctgttgcccaggc

SEQ ID NO: 5347 - DNA, 40 bp, Homo sapiens
gcctgggcaacagagcgagactgtgtctcaaaaaaaaaaa

SEQ ID NO: 5348 - DNA, 40 bp, Homo sapiens
ttttttttttgagacacagtctcgctctgttgcccaggct

SEQ ID NO: 5349 - DNA, 40 bp, Homo sapiens
agcctgggcaacagagcgagactgtgtctcaaaaaaaaaa

SEQ ID NO: 5350 - DNA, 40 bp, Homo sapiens
tttttttttgagacacagtctcgctctgttgcccaggctg

SEQ ID NO: 5351 - DNA, 40 bp, Homo sapiens
cagcctgggcaacagagcgagactgtgtctcaaaaaaaaa

SEQ ID NO: 5352 - DNA, 40 bp, Homo sapiens
ttttttttgagacacagtctcgctctgttgcccaggctgg

SEQ ID NO: 5353 - DNA, 40 bp, Homo sapiens
ccagcctgggcaacagagcgagactgtgtctcaaaaaaaa

SEQ ID NO: 5354 - DNA, 40 bp, Homo sapiens
tttttttgagacacagtctcgctctgttgcccaggctgga

SEQ ID NO: 5355 - DNA, 40 bp, Homo sapiens
tccagcctgggcaacagagcgagactgtgtctcaaaaaaa

SEQ ID NO: 5356 - DNA, 40 bp, Homo sapiens
ttttttgagacacagtctcgctctgttgcccaggctggag

SEQ ID NO: 5357 - DNA, 40 bp, Homo sapiens
ctccagcctgggcaacagagcgagactgtgtctcaaaaaa

SEQ ID NO: 5358 - DNA, 40 bp, Homo sapiens
tttttgagacacagtctcgctctgttgcccaggctggagt

SEQ ID NO: 5359 - DNA, 40 bp, Homo sapiens
actccagcctgggcaacagagcgagactgtgtctcaaaaa

SEQ ID NO: 5360 - DNA, 40 bp, Homo sapiens
ttttgagacacagtctcgctctgttgcccaggctggagtg

SEQ ID NO: 5361 - DNA, 40 bp, Homo sapiens
cactccagcctgggcaacagagcgagactgtgtctcaaaa

SEQ ID NO: 5362 - DNA, 40 bp, Homo sapiens
tttgagacacagtctcgctctgttgcccaggctggagtgc

SEQ ID NO: 5363 - DNA, 40 bp, Homo sapiens
gcactccagcctgggcaacagagcgagactgtgtctcaaa

SEQ ID NO: 5364 - DNA, 40 bp, Homo sapiens
ttgagacacagtctcgctctgttgcccaggctggagtgca

SEQ ID NO: 5365 - DNA, 40 bp, Homo sapiens
tgcactccagcctgggcaacagagcgagactgtgtctcaa

SEQ ID NO: 5366 - DNA, 40 bp, Homo sapiens
tgagacacagtctcgctctgttgcccaggctggagtgcaa

SEQ ID NO: 5367 - DNA, 40 bp, Homo sapiens
ttgcactccagcctgggcaacagagcgagactgtgtctca

SEQ ID NO: 5368 - DNA, 40 bp, Homo sapiens
gagacacagtctcgctctgttgcccaggctggagtgcaat

SEQ ID NO: 5369 - DNA, 40 bp, Homo sapiens
attgcactccagcctgggcaacagagcgagactgtgtctc

SEQ ID NO: 5370 - DNA, 40 bp, Homo sapiens
agacacagtctcgctctgttgcccaggctggagtgcaatg

SEQ ID NO: 5371 - DNA, 40 bp, Homo sapiens
cattgcactccagcctgggcaacagagcgagactgtgtct

SEQ ID NO: 5372 - DNA, 40 bp, Homo sapiens
gacacagtctcgctctgttgcccaggctggagtgcaatgg

SEQ ID NO: 5373 - DNA, 40 bp, Homo sapiens
ccattgcactccagcctgggcaacagagcgagactgtgtc

SEQ ID NO: 5374 - DNA, 40 bp, Homo sapiens
acacagtctcgctctgttgcccaggctggagtgcaatggc

SEQ ID NO: 5375 - DNA, 40 bp, Homo sapiens
gccattgcactccagcctgggcaacagagcgagactgtgt

SEQ ID NO: 5376 - DNA, 40 bp, Homo sapiens
cacagtctcgctctgttgcccaggctggagtgcaatggcg

SEQ ID NO: 5377 - DNA, 40 bp, Homo sapiens
cgccattgcactccagcctgggcaacagagcgagactgtg

SEQ ID NO: 5378 - DNA, 40 bp, Homo sapiens
acagtctcgctctgttgcccaggctggagtgcaatggcgc

SEQ ID NO: 5379 - DNA, 40 bp, Homo sapiens
gcgccattgcactccagcctgggcaacagagcgagactgt

SEQ ID NO: 5380 - DNA, 40 bp, Homo sapiens
cagtctcgctctgttgcccaggctggagtgcaatggcgcg

SEQ ID NO: 5381 - DNA, 40 bp, Homo sapiens
cgcgccattgcactccagcctgggcaacagagcgagactg

SEQ ID NO: 5382 - DNA, 40 bp, Homo sapiens
agtctcgctctgttgcccaggctggagtgcaatggcgcgg

SEQ ID NO: 5383 - DNA, 40 bp, Homo sapiens
ccgcgccattgcactccagcctgggcaacagagcgagact

SEQ ID NO: 5384 - DNA, 40 bp, Homo sapiens
gtctcgctctgttgcccaggctggagtgcaatggcgcggt

SEQ ID NO: 5385 - DNA, 40 bp, Homo sapiens
accgcgccattgcactccagcctgggcaacagagcgagac

SEQ ID NO: 5386 - DNA, 40 bp, Homo sapiens
tctcgctctgttgcccaggctggagtgcaatggcgcggta

SEQ ID NO: 5387 - DNA, 40 bp, Homo sapiens
taccgcgccattgcactccagcctgggcaacagagcgaga

SEQ ID NO: 5388 - DNA, 40 bp, Homo sapiens
ctcgctctgttgcccaggctggagtgcaatggcgcggtat

SEQ ID NO: 5389 - DNA, 40 bp, Homo sapiens
ataccgcgccattgcactccagcctgggcaacagagcgag

SEQ ID NO: 5390 - DNA, 40 bp, Homo sapiens
tcgctctgttgcccaggctggagtgcaatggcgcggtatc

SEQ ID NO: 5391 - DNA, 40 bp, Homo sapiens
gataccgcgccattgcactccagcctgggcaacagagcga

SEQ ID NO: 5392 - DNA, 40 bp, Homo sapiens
cgctctgttgcccaggctggagtgcaatggcgcggtatcg

SEQ ID NO: 5393 - DNA, 40 bp, Homo sapiens
cgataccgcgccattgcactccagcctgggcaacagagcg

SEQ ID NO: 5394 - DNA, 40 bp, Homo sapiens
gctctgttgcccaggctggagtgcaatggcgcggtatcgg

SEQ ID NO: 5395 - DNA, 40 bp, Homo sapiens
ccgataccgcgccattgcactccagcctgggcaacagagc

SEQ ID NO: 5396 - DNA, 40 bp, Homo sapiens
ctctgttgcccaggctggagtgcaatggcgcggtatcggc

SEQ ID NO: 5397 - DNA, 40 bp, Homo sapiens
gccgataccgcgccattgcactccagcctgggcaacagag

SEQ ID NO: 5398 - DNA, 40 bp, Homo sapiens
tctgttgcccaggctggagtgcaatggcgcggtatcggct

SEQ ID NO: 5399 - DNA, 40 bp, Homo sapiens
agccgataccgcgccattgcactccagcctgggcaacaga

SEQ ID NO: 5400 - DNA, 40 bp, Homo sapiens
ctgttgcccaggctggagtgcaatggcgcggtatcggctc

SEQ ID NO: 5401 - DNA, 40 bp, Homo sapiens
gagccgataccgcgccattgcactccagcctgggcaacag

SEQ ID NO: 5402 - DNA, 40 bp, Homo sapiens
tgttgcccaggctggagtgcaatggcgcggtatcggctca

SEQ ID NO: 5403 - DNA, 40 bp, Homo sapiens
tgagccgataccgcgccattgcactccagcctgggcaaca

SEQ ID NO: 5404 - DNA, 40 bp, Homo sapiens
gttgcccaggctggagtgcaatggcgcggtatcggctcac

SEQ ID NO: 5405 - DNA, 40 bp, Homo sapiens
gtgagccgataccgcgccattgcactccagcctgggcaac

SEQ ID NO: 5406 - DNA, 40 bp, Homo sapiens
ttgcccaggctggagtgcaatggcgcggtatcggctcact

SEQ ID NO: 5407 - DNA, 40 bp, Homo sapiens
agtgagccgataccgcgccattgcactccagcctgggcaa

SEQ ID NO: 5408 - DNA, 40 bp, Homo sapiens
tgcccaggctggagtgcaatggcgcggtatcggctcactg

SEQ ID NO: 5409 - DNA, 40 bp, Homo sapiens
cagtgagccgataccgcgccattgcactccagcctgggca

SEQ ID NO: 5410 - DNA, 40 bp, Homo sapiens
gcccaggctggagtgcaatggcgcggtatcggctcactga

SEQ ID NO: 5411 - DNA, 40 bp, Homo sapiens
tcagtgagccgataccgcgccattgcactccagcctgggc

SEQ ID NO: 5412 - DNA, 40 bp, Homo sapiens
cccaggctggagtgcaatggcgcggtatcggctcactgaa

SEQ ID NO: 5413 - DNA, 40 bp, Homo sapiens
ttcagtgagccgataccgcgccattgcactccagcctggg

SEQ ID NO: 5414 - DNA, 40 bp, Homo sapiens
ccaggctggagtgcaatggcgcggtatcggctcactgaaa

SEQ ID NO: 5415 - DNA, 40 bp, Homo sapiens
tttcagtgagccgataccgcgccattgcactccagcctgg

SEQ ID NO: 5416 - DNA, 40 bp, Homo sapiens
caggctggagtgcaatggcgcggtatcggctcactgaaac

SEQ ID NO: 5417 - DNA, 40 bp, Homo sapiens
gtttcagtgagccgataccgcgccattgcactccagcctg

SEQ ID NO: 5418 - DNA, 40 bp, Homo sapiens
aggctggagtgcaatggcgcggtatcggctcactgaaacc

SEQ ID NO: 5419 - DNA, 40 bp, Homo sapiens
ggtttcagtgagccgataccgcgccattgcactccagcct

SEQ ID NO: 5420 - DNA, 40 bp, Homo sapiens
ggctggagtgcaatggcgcggtatcggctcactgaaacct

SEQ ID NO: 5421 - DNA, 40 bp, Homo sapiens
aggtttcagtgagccgataccgcgccattgcactccagcc

SEQ ID NO: 5422 - DNA, 40 bp, Homo sapiens
gctggagtgcaatggcgcggtatcggctcactgaaacctc

SEQ ID NO: 5423 - DNA, 40 bp, Homo sapiens
gaggtttcagtgagccgataccgcgccattgcactccagc

SEQ ID NO: 5424 - DNA, 40 bp, Homo sapiens
ctggagtgcaatggcgcggtatcggctcactgaaacctcc

SEQ ID NO: 5425 - DNA, 40 bp, Homo sapiens
ggaggtttcagtgagccgataccgcgccattgcactccag

SEQ ID NO: 5426 - DNA, 40 bp, Homo sapiens
tggagtgcaatggcgcggtatcggctcactgaaacctccg

SEQ ID NO: 5427 - DNA, 40 bp, Homo sapiens
cggaggtttcagtgagccgataccgcgccattgcactcca

SEQ ID NO: 5428 - DNA, 40 bp, Homo sapiens
ggagtgcaatggcgcggtatcggctcactgaaacctccgc

SEQ ID NO: 5429 - DNA, 40 bp, Homo sapiens
gcggaggtttcagtgagccgataccgcgccattgcactcc

SEQ ID NO: 5430 - DNA, 40 bp, Homo sapiens
gagtgcaatggcgcggtatcggctcactgaaacctccgcc

SEQ ID NO: 5431 - DNA, 40 bp, Homo sapiens
ggcggaggtttcagtgagccgataccgcgccattgcactc

SEQ ID NO: 5432 - DNA, 40 bp, Homo sapiens
agtgcaatggcgcggtatcggctcactgaaacctccgcct

SEQ ID NO: 5433 - DNA, 40 bp, Homo sapiens
aggcggaggtttcagtgagccgataccgcgccattgcact

SEQ ID NO: 5434 - DNA, 40 bp, Homo sapiens
gtgcaatggcgcggtatcggctcactgaaacctccgcctc

SEQ ID NO: 5435 - DNA, 40 bp, Homo sapiens
gaggcggaggtttcagtgagccgataccgcgccattgcac

SEQ ID NO: 5436 - DNA, 40 bp, Homo sapiens
tgcaatggcgcggtatcggctcactgaaacctccgcctcc

SEQ ID NO: 5437 - DNA, 40 bp, Homo sapiens
ggaggcggaggtttcagtgagccgataccgcgccattgca

SEQ ID NO: 5438 - DNA, 40 bp, Homo sapiens
gcaatggcgcggtatcggctcactgaaacctccgcctcct

SEQ ID NO: 5439 - DNA, 40 bp, Homo sapiens
aggaggcggaggtttcagtgagccgataccgcgccattgc

SEQ ID NO: 5440 - DNA, 40 bp, Homo sapiens
caatggcgcggtatcggctcactgaaacctccgcctcctg

SEQ ID NO: 5441 - DNA, 40 bp, Homo sapiens
caggaggcggaggtttcagtgagccgataccgcgccattg

SEQ ID NO: 5442 - DNA, 40 bp, Homo sapiens
aatggcgcggtatcggctcactgaaacctccgcctcctgg

SEQ ID NO: 5443 - DNA, 40 bp, Homo sapiens
ccaggaggcggaggtttcagtgagccgataccgcgccatt

SEQ ID NO: 5444 - DNA, 40 bp, Homo sapiens
atggcgcggtatcggctcactgaaacctccgcctcctggg

SEQ ID NO: 5445 - DNA, 40 bp, Homo sapiens
cccaggaggcggaggtttcagtgagccgataccgcgccat

SEQ ID NO: 5446 - DNA, 40 bp, Homo sapiens
tggcgcggtatcggctcactgaaacctccgcctcctgggt

SEQ ID NO: 5447 - DNA, 40 bp, Homo sapiens
acccaggaggcggaggtttcagtgagccgataccgcgcca

SEQ ID NO: 5448 - DNA, 40 bp, Homo sapiens
ggcgcggtatcggctcactgaaacctccgcctcctgggtt

SEQ ID NO: 5449 - DNA, 40 bp, Homo sapiens
aacccaggaggcggaggtttcagtgagccgataccgcgcc

SEQ ID NO: 5450 - DNA, 40 bp, Homo sapiens
gcgcggtatcggctcactgaaacctccgcctcctgggttc

SEQ ID NO: 5451 - DNA, 40 bp, Homo sapiens
gaacccaggaggcggaggtttcagtgagccgataccgcgc

SEQ ID NO: 5452 - DNA, 40 bp, Homo sapiens
cgcggtatcggctcactgaaacctccgcctcctgggttca

SEQ ID NO: 5453 - DNA, 40 bp, Homo sapiens
tgaacccaggaggcggaggtttcagtgagccgataccgcg

SEQ ID NO: 5454 - DNA, 40 bp, Homo sapiens
gcggtatcggctcactgaaacctccgcctcctgggttcaa

SEQ ID NO: 5455 - DNA, 40 bp, Homo sapiens
ttgaacccaggaggcggaggtttcagtgagccgataccgc

SEQ ID NO: 5456 - DNA, 40 bp, Homo sapiens
cggtatcggctcactgaaacctccgcctcctgggttcaag

SEQ ID NO: 5457 - DNA, 40 bp, Homo sapiens
cttgaacccaggaggcggaggtttcagtgagccgataccg

SEQ ID NO: 5458 - DNA, 40 bp, Homo sapiens
ggtatcggctcactgaaacctccgcctcctgggttcaagc

SEQ ID NO: 5459 - DNA, 40 bp, Homo sapiens
gcttgaacccaggaggcggaggtttcagtgagccgatacc

SEQ ID NO: 5460 - DNA, 40 bp, Homo sapiens
gtatcggctcactgaaacctccgcctcctgggttcaagca

SEQ ID NO: 5461 - DNA, 40 bp, Homo sapiens
tgcttgaacccaggaggcggaggtttcagtgagccgatac

SEQ ID NO: 5462 - DNA, 40 bp, Homo sapiens
tatcggctcactgaaacctccgcctcctgggttcaagcaa

SEQ ID NO: 5463 - DNA, 40 bp, Homo sapiens
ttgcttgaacccaggaggcggaggtttcagtgagccgata

SEQ ID NO: 5464 - DNA, 40 bp, Homo sapiens
atcggctcactgaaacctccgcctcctgggttcaagcaat

SEQ ID NO: 5465 - DNA, 40 bp, Homo sapiens
attgcttgaacccaggaggcggaggtttcagtgagccgat

SEQ ID NO: 5466 - DNA, 40 bp, Homo sapiens
tcggctcactgaaacctccgcctcctgggttcaagcaatt

SEQ ID NO: 5467 - DNA, 40 bp, Homo sapiens
aattgcttgaacccaggaggcggaggtttcagtgagccga

SEQ ID NO: 5468 - DNA, 40 bp, Homo sapiens
cggctcactgaaacctccgcctcctgggttcaagcaattc

SEQ ID NO: 5469 - DNA, 40 bp, Homo sapiens
gaattgcttgaacccaggaggcggaggtttcagtgagccg

SEQ ID NO: 5470 - DNA, 40 bp, Homo sapiens
ggctcactgaaacctccgcctcctgggttcaagcaattct

SEQ ID NO: 5471 - DNA, 40 bp, Homo sapiens
agaattgcttgaacccaggaggcggaggtttcagtgagcc

SEQ ID NO: 5472 - DNA, 40 bp, Homo sapiens
gctcactgaaacctccgcctcctgggttcaagcaattctc

SEQ ID NO: 5473 - DNA, 40 bp, Homo sapiens
gagaattgcttgaacccaggaggcggaggtttcagtgagc

SEQ ID NO: 5474 - DNA, 40 bp, Homo sapiens
ctcactgaaacctccgcctcctgggttcaagcaattctcc

SEQ ID NO: 5475 - DNA, 40 bp, Homo sapiens
ggagaattgcttgaacccaggaggcggaggtttcagtgag

SEQ ID NO: 5476 - DNA, 40 bp, Homo sapiens
tcactgaaacctccgcctcctgggttcaagcaattctcct

SEQ ID NO: 5477 - DNA, 40 bp, Homo sapiens
aggagaattgcttgaacccaggaggcggaggtttcagtga

SEQ ID NO: 5478 - DNA, 40 bp, Homo sapiens
cactgaaacctccgcctcctgggttcaagcaattctcctg

SEQ ID NO: 5479 - DNA, 40 bp, Homo sapiens
caggagaattgcttgaacccaggaggcggaggtttcagtg

SEQ ID NO: 5480 - DNA, 40 bp, Homo sapiens
actgaaacctccgcctcctgggttcaagcaattctcctgc

SEQ ID NO: 5481 - DNA, 40 bp, Homo sapiens
gcaggagaattgcttgaacccaggaggcggaggtttcagt

SEQ ID NO: 5482 - DNA, 40 bp, Homo sapiens
ctgaaacctccgcctcctgggttcaagcaattctcctgcc

SEQ ID NO: 5483 - DNA, 40 bp, Homo sapiens
ggcaggagaattgcttgaacccaggaggcggaggtttcag

SEQ ID NO: 5484 - DNA, 40 bp, Homo sapiens
tgaaacctccgcctcctgggttcaagcaattctcctgcct

SEQ ID NO: 5485 - DNA, 40 bp, Homo sapiens
aggcaggagaattgcttgaacccaggaggcggaggtttca

SEQ ID NO: 5486 - DNA, 40 bp, Homo sapiens
gaaacctccgcctcctgggttcaagcaattctcctgcctc

SEQ ID NO: 5487 - DNA, 40 bp, Homo sapiens
gaggcaggagaattgcttgaacccaggaggcggaggtttc

SEQ ID NO: 5488 - DNA, 40 bp, Homo sapiens
aaacctccgcctcctgggttcaagcaattctcctgcctca

SEQ ID NO: 5489 - DNA, 40 bp, Homo sapiens
tgaggcaggagaattgcttgaacccaggaggcggaggttt

SEQ ID NO: 5490 - DNA, 40 bp, Homo sapiens
aacctccgcctcctgggttcaagcaattctcctgcctcag

SEQ ID NO: 5491 - DNA, 40 bp, Homo sapiens
ctgaggcaggagaattgcttgaacccaggaggcggaggtt

SEQ ID NO: 5492 - DNA, 40 bp, Homo sapiens
acctccgcctcctgggttcaagcaattctcctgcctcagc

SEQ ID NO: 5493 - DNA, 40 bp, Homo sapiens
gctgaggcaggagaattgcttgaacccaggaggcggaggt

SEQ ID NO: 5494 - DNA, 40 bp, Homo sapiens
cctccgcctcctgggttcaagcaattctcctgcctcagcc

SEQ ID NO: 5495 - DNA, 40 bp, Homo sapiens
ggctgaggcaggagaattgcttgaacccaggaggcggagg

SEQ ID NO: 5496 - DNA, 40 bp, Homo sapiens
ctccgcctcctgggttcaagcaattctcctgcctcagcct

SEQ ID NO: 5497 - DNA, 40 bp, Homo sapiens
aggctgaggcaggagaattgcttgaacccaggaggcggag

SEQ ID NO: 5498 - DNA, 40 bp, Homo sapiens
tccgcctcctgggttcaagcaattctcctgcctcagcctc

SEQ ID NO: 5499 - DNA, 40 bp, Homo sapiens
gaggctgaggcaggagaattgcttgaacccaggaggcgga

SEQ ID NO: 5500 - DNA, 40 bp, Homo sapiens
ccgcctcctgggttcaagcaattctcctgcctcagcctcc

SEQ ID NO: 5501 - DNA, 40 bp, Homo sapiens
ggaggctgaggcaggagaattgcttgaacccaggaggcgg

SEQ ID NO: 5502 - DNA, 40 bp, Homo sapiens
cgcctcctgggttcaagcaattctcctgcctcagcctccc

SEQ ID NO: 5503 - DNA, 40 bp, Homo sapiens
gggaggctgaggcaggagaattgcttgaacccaggaggcg

SEQ ID NO: 5504 - DNA, 40 bp, Homo sapiens
gcctcctgggttcaagcaattctcctgcctcagcctcccg

SEQ ID NO: 5505 - DNA, 40 bp, Homo sapiens
cgggaggctgaggcaggagaattgcttgaacccaggaggc

SEQ ID NO: 5506 - DNA, 40 bp, Homo sapiens
cctcctgggttcaagcaattctcctgcctcagcctcccga

SEQ ID NO: 5507 - DNA, 40 bp, Homo sapiens
tcgggaggctgaggcaggagaattgcttgaacccaggagg

SEQ ID NO: 5508 - DNA, 40 bp, Homo sapiens
ctcctgggttcaagcaattctcctgcctcagcctcccgag

SEQ ID NO: 5509 - DNA, 40 bp, Homo sapiens
ctcgggaggctgaggcaggagaattgcttgaacccaggag

SEQ ID NO: 5510 - DNA, 40 bp, Homo sapiens
tcctgggttcaagcaattctcctgcctcagcctcccgagt

SEQ ID NO: 5511 - DNA, 40 bp, Homo sapiens
actcgggaggctgaggcaggagaattgcttgaacccagga

SEQ ID NO: 5512 - DNA, 40 bp, Homo sapiens
cctgggttcaagcaattctcctgcctcagcctcccgagta

SEQ ID NO: 5513 - DNA, 40 bp, Homo sapiens
tactcgggaggctgaggcaggagaattgcttgaacccagg

SEQ ID NO: 5514 - DNA, 40 bp, Homo sapiens
ctgggttcaagcaattctcctgcctcagcctcccgagtag

SEQ ID NO: 5515 - DNA, 40 bp, Homo sapiens
ctactcgggaggctgaggcaggagaattgcttgaacccag

SEQ ID NO: 5516 - DNA, 40 bp, Homo sapiens
tgggttcaagcaattctcctgcctcagcctcccgagtagc

SEQ ID NO: 5517 - DNA, 40 bp, Homo sapiens
gctactcgggaggctgaggcaggagaattgcttgaaccca

SEQ ID NO: 5518 - DNA, 40 bp, Homo sapiens
gggttcaagcaattctcctgcctcagcctcccgagtagct

SEQ ID NO: 5519 - DNA, 40 bp, Homo sapiens
agctactcgggaggctgaggcaggagaattgcttgaaccc

SEQ ID NO: 5520 - DNA, 40 bp, Homo sapiens
ggttcaagcaattctcctgcctcagcctcccgagtagctg

SEQ ID NO: 5521 - DNA, 40 bp, Homo sapiens
cagctactcgggaggctgaggcaggagaattgcttgaacc

SEQ ID NO: 5522 - DNA, 40 bp, Homo sapiens
gttcaagcaattctcctgcctcagcctcccgagtagctgg

SEQ ID NO: 5523 - DNA, 40 bp, Homo sapiens
ccagctactcgggaggctgaggcaggagaattgcttgaac

SEQ ID NO: 5524 - DNA, 40 bp, Homo sapiens
ttcaagcaattctcctgcctcagcctcccgagtagctggg

SEQ ID NO: 5525 - DNA, 40 bp, Homo sapiens
cccagctactcgggaggctgaggcaggagaattgcttgaa

SEQ ID NO: 5526 - DNA, 40 bp, Homo sapiens
tcaagcaattctcctgcctcagcctcccgagtagctggga

SEQ ID NO: 5527 - DNA, 40 bp, Homo sapiens
tcccagctactcgggaggctgaggcaggagaattgcttga

SEQ ID NO: 5528 - DNA, 40 bp, Homo sapiens
caagcaattctcctgcctcagcctcccgagtagctgggac

SEQ ID NO: 5529 - DNA, 40 bp, Homo sapiens
gtcccagctactcgggaggctgaggcaggagaattgcttg

SEQ ID NO: 5530 - DNA, 40 bp, Homo sapiens
aagcaattctcctgcctcagcctcccgagtagctgggact

SEQ ID NO: 5531 - DNA, 40 bp, Homo sapiens
agtcccagctactcgggaggctgaggcaggagaattgctt

SEQ ID NO: 5532 - DNA, 40 bp, Homo sapiens
agcaattctcctgcctcagcctcccgagtagctgggacta

SEQ ID NO: 5533 - DNA, 40 bp, Homo sapiens
tagtcccagctactcgggaggctgaggcaggagaattgct

SEQ ID NO: 5534 - DNA, 40 bp, Homo sapiens
gcaattctcctgcctcagcctcccgagtagctgggactag

SEQ ID NO: 5535 - DNA, 40 bp, Homo sapiens
ctagtcccagctactcgggaggctgaggcaggagaattgc

SEQ ID NO: 5536 - DNA, 40 bp, Homo sapiens
caattctcctgcctcagcctcccgagtagctgggactagt

SEQ ID NO: 5537 - DNA, 40 bp, Homo sapiens
actagtcccagctactcgggaggctgaggcaggagaattg

SEQ ID NO: 5538 - DNA, 40 bp, Homo sapiens
aattctcctgcctcagcctcccgagtagctgggactagta

SEQ ID NO: 5539 - DNA, 40 bp, Homo sapiens
tactagtcccagctactcgggaggctgaggcaggagaatt

SEQ ID NO: 5540 - DNA, 40 bp, Homo sapiens
attctcctgcctcagcctcccgagtagctgggactagtag

SEQ ID NO: 5541 - DNA, 40 bp, Homo sapiens
ctactagtcccagctactcgggaggctgaggcaggagaat

SEQ ID NO: 5542 - DNA, 40 bp, Homo sapiens
ttctcctgcctcagcctcccgagtagctgggactagtagg

SEQ ID NO: 5543 - DNA, 40 bp, Homo sapiens
cctactagtcccagctactcgggaggctgaggcaggagaa

SEQ ID NO: 5544 - DNA, 40 bp, Homo sapiens
tctcctgcctcagcctcccgagtagctgggactagtaggt

SEQ ID NO: 5545 - DNA, 40 bp, Homo sapiens
acctactagtcccagctactcgggaggctgaggcaggaga

SEQ ID NO: 5546 - DNA, 40 bp, Homo sapiens
ctcctgcctcagcctcccgagtagctgggactagtaggtg

SEQ ID NO: 5547 - DNA, 40 bp, Homo sapiens
cacctactagtcccagctactcgggaggctgaggcaggag

SEQ ID NO: 5548 - DNA, 40 bp, Homo sapiens
tcctgcctcagcctcccgagtagctgggactagtaggtgc

SEQ ID NO: 5549 - DNA, 40 bp, Homo sapiens
gcacctactagtcccagctactcgggaggctgaggcagga

SEQ ID NO: 5550 - DNA, 40 bp, Homo sapiens
cctgcctcagcctcccgagtagctgggactagtaggtgca

SEQ ID NO: 5551 - DNA, 40 bp, Homo sapiens
tgcacctactagtcccagctactcgggaggctgaggcagg

SEQ ID NO: 5552 - DNA, 40 bp, Homo sapiens
ctgcctcagcctcccgagtagctgggactagtaggtgcac

SEQ ID NO: 5553 - DNA, 40 bp, Homo sapiens
gtgcacctactagtcccagctactcgggaggctgaggcag

SEQ ID NO: 5554 - DNA, 40 bp, Homo sapiens
tgcctcagcctcccgagtagctgggactagtaggtgcacg

SEQ ID NO: 5555 - DNA, 40 bp, Homo sapiens
cgtgcacctactagtcccagctactcgggaggctgaggca

SEQ ID NO: 5556 - DNA, 40 bp, Homo sapiens
gcctcagcctcccgagtagctgggactagtaggtgcacgc

SEQ ID NO: 5557 - DNA, 40 bp, Homo sapiens
gcgtgcacctactagtcccagctactcgggaggctgaggc

SEQ ID NO: 5558 - DNA, 40 bp, Homo sapiens
cctcagcctcccgagtagctgggactagtaggtgcacgcc

SEQ ID NO: 5559 - DNA, 40 bp, Homo sapiens
ggcgtgcacctactagtcccagctactcgggaggctgagg

SEQ ID NO: 5560 - DNA, 40 bp, Homo sapiens
ctcagcctcccgagtagctgggactagtaggtgcacgcca

SEQ ID NO: 5561 - DNA, 40 bp, Homo sapiens
tggcgtgcacctactagtcccagctactcgggaggctgag

SEQ ID NO: 5562 - DNA, 40 bp, Homo sapiens
tcagcctcccgagtagctgggactagtaggtgcacgccac

SEQ ID NO: 5563 - DNA, 40 bp, Homo sapiens
gtggcgtgcacctactagtcccagctactcgggaggctga

SEQ ID NO: 5564 - DNA, 40 bp, Homo sapiens
cagcctcccgagtagctgggactagtaggtgcacgccacc

SEQ ID NO: 5565 - DNA, 40 bp, Homo sapiens
ggtggcgtgcacctactagtcccagctactcgggaggctg

SEQ ID NO: 5566 - DNA, 40 bp, Homo sapiens
agcctcccgagtagctgggactagtaggtgcacgccacca

SEQ ID NO: 5567 - DNA, 40 bp, Homo sapiens
tggtggcgtgcacctactagtcccagctactcgggaggct

SEQ ID NO: 5568 - DNA, 40 bp, Homo sapiens
gcctcccgagtagctgggactagtaggtgcacgccaccat

SEQ ID NO: 5569 - DNA, 40 bp, Homo sapiens
atggtggcgtgcacctactagtcccagctactcgggaggc

SEQ ID NO: 5570 - DNA, 40 bp, Homo sapiens
cctcccgagtagctgggactagtaggtgcacgccaccatg

SEQ ID NO: 5571 - DNA, 40 bp, Homo sapiens
catggtggcgtgcacctactagtcccagctactcgggagg

SEQ ID NO: 5572 - DNA, 40 bp, Homo sapiens
ctcccgagtagctgggactagtaggtgcacgccaccatgc

SEQ ID NO: 5573 - DNA, 40 bp, Homo sapiens
gcatggtggcgtgcacctactagtcccagctactcgggag

SEQ ID NO: 5574 - DNA, 40 bp, Homo sapiens
tcccgagtagctgggactagtaggtgcacgccaccatgcc

SEQ ID NO: 5575 - DNA, 40 bp, Homo sapiens
ggcatggtggcgtgcacctactagtcccagctactcggga

SEQ ID NO: 5576 - DNA, 40 bp, Homo sapiens
cccgagtagctgggactagtaggtgcacgccaccatgccc

SEQ ID NO: 5577 - DNA, 40 bp, Homo sapiens
gggcatggtggcgtgcacctactagtcccagctactcggg

SEQ ID NO: 5578 - DNA, 40 bp, Homo sapiens
ccgagtagctgggactagtaggtgcacgccaccatgccca

SEQ ID NO: 5579 - DNA, 40 bp, Homo sapiens
tgggcatggtggcgtgcacctactagtcccagctactcgg

SEQ ID NO: 5580 - DNA, 40 bp, Homo sapiens
cgagtagctgggactagtaggtgcacgccaccatgcccag

SEQ ID NO: 5581 - DNA, 40 bp, Homo sapiens
ctgggcatggtggcgtgcacctactagtcccagctactcg

SEQ ID NO: 5582 - DNA, 40 bp, Homo sapiens
gagtagctgggactagtaggtgcacgccaccatgcccagc

SEQ ID NO: 5583 - DNA, 40 bp, Homo sapiens
gctgggcatggtggcgtgcacctactagtcccagctactc

SEQ ID NO: 5584 - DNA, 40 bp, Homo sapiens
agtagctgggactagtaggtgcacgccaccatgcccagct

SEQ ID NO: 5585 - DNA, 40 bp, Homo sapiens
agctgggcatggtggcgtgcacctactagtcccagctact

SEQ ID NO: 5586 - DNA, 40 bp, Homo sapiens
gtagctgggactagtaggtgcacgccaccatgcccagcta

SEQ ID NO: 5587 - DNA, 40 bp, Homo sapiens
tagctgggcatggtggcgtgcacctactagtcccagctac

SEQ ID NO: 5588 - DNA, 40 bp, Homo sapiens
tagctgggactagtaggtgcacgccaccatgcccagctaa

SEQ ID NO: 5589 - DNA, 40 bp, Homo sapiens
ttagctgggcatggtggcgtgcacctactagtcccagcta

SEQ ID NO: 5590 - DNA, 40 bp, Homo sapiens
agctgggactagtaggtgcacgccaccatgcccagctaat

SEQ ID NO: 5591 - DNA, 40 bp, Homo sapiens
attagctgggcatggtggcgtgcacctactagtcccagct

SEQ ID NO: 5592 - DNA, 40 bp, Homo sapiens
gctgggactagtaggtgcacgccaccatgcccagctaatt

SEQ ID NO: 5593 - DNA, 40 bp, Homo sapiens
aattagctgggcatggtggcgtgcacctactagtcccagc

SEQ ID NO: 5594 - DNA, 40 bp, Homo sapiens
ctgggactagtaggtgcacgccaccatgcccagctaattt

SEQ ID NO: 5595 - DNA, 40 bp, Homo sapiens
aaattagctgggcatggtggcgtgcacctactagtcccag

SEQ ID NO: 5596 - DNA, 40 bp, Homo sapiens
tgggactagtaggtgcacgccaccatgcccagctaatttt

SEQ ID NO: 5597 - DNA, 40 bp, Homo sapiens
aaaattagctgggcatggtggcgtgcacctactagtccca

SEQ ID NO: 5598 - DNA, 40 bp, Homo sapiens
gggactagtaggtgcacgccaccatgcccagctaattttt

SEQ ID NO: 5599 - DNA, 40 bp, Homo sapiens
aaaaattagctgggcatggtggcgtgcacctactagtccc

SEQ ID NO: 5600 - DNA, 40 bp, Homo sapiens
ggactagtaggtgcacgccaccatgcccagctaatttttg

SEQ ID NO: 5601 - DNA, 40 bp, Homo sapiens
caaaaattagctgggcatggtggcgtgcacctactagtcc

SEQ ID NO: 5602 - DNA, 40 bp, Homo sapiens
gactagtaggtgcacgccaccatgcccagctaatttttgt

SEQ ID NO: 5603 - DNA, 40 bp, Homo sapiens
acaaaaattagctgggcatggtggcgtgcacctactagtc

SEQ ID NO: 5604 - DNA, 40 bp, Homo sapiens
actagtaggtgcacgccaccatgcccagctaatttttgta

SEQ ID NO: 5605 - DNA, 40 bp, Homo sapiens
tacaaaaattagctgggcatggtggcgtgcacctactagt

SEQ ID NO: 5606 - DNA, 40 bp, Homo sapiens
ctagtaggtgcacgccaccatgcccagctaatttttgtat

SEQ ID NO: 5607 - DNA, 40 bp, Homo sapiens
atacaaaaattagctgggcatggtggcgtgcacctactag

SEQ ID NO: 5608 - DNA, 40 bp, Homo sapiens
tagtaggtgcacgccaccatgcccagctaatttttgtatt

SEQ ID NO: 5609 - DNA, 40 bp, Homo sapiens
aatacaaaaattagctgggcatggtggcgtgcacctacta

SEQ ID NO: 5610 - DNA, 40 bp, Homo sapiens
agtaggtgcacgccaccatgcccagctaatttttgtattt

SEQ ID NO: 5611 - DNA, 40 bp, Homo sapiens
aaatacaaaaattagctgggcatggtggcgtgcacctact

SEQ ID NO: 5612 - DNA, 40 bp, Homo sapiens
gtaggtgcacgccaccatgcccagctaatttttgtatttt

SEQ ID NO: 5613 - DNA, 40 bp, Homo sapiens
aaaatacaaaaattagctgggcatggtggcgtgcacctac

SEQ ID NO: 5614 - DNA, 40 bp, Homo sapiens
taggtgcacgccaccatgcccagctaatttttgtattttt

SEQ ID NO: 5615 - DNA, 40 bp, Homo sapiens
aaaaatacaaaaattagctgggcatggtggcgtgcaccta

SEQ ID NO: 5616 - DNA, 40 bp, Homo sapiens
aggtgcacgccaccatgcccagctaatttttgtattttta

SEQ ID NO: 5617 - DNA, 40 bp, Homo sapiens
taaaaatacaaaaattagctgggcatggtggcgtgcacct

SEQ ID NO: 5618 - DNA, 40 bp, Homo sapiens
ggtgcacgccaccatgcccagctaatttttgtatttttag

SEQ ID NO: 5619 - DNA, 40 bp, Homo sapiens
ctaaaaatacaaaaattagctgggcatggtggcgtgcacc

SEQ ID NO: 5620 - DNA, 40 bp, Homo sapiens
gtgcacgccaccatgcccagctaatttttgtatttttagt

SEQ ID NO: 5621 - DNA, 40 bp, Homo sapiens
actaaaaatacaaaaattagctgggcatggtggcgtgcac

SEQ ID NO: 5622 - DNA, 40 bp, Homo sapiens
tgcacgccaccatgcccagctaatttttgtatttttagta

SEQ ID NO: 5623 - DNA, 40 bp, Homo sapiens
tactaaaaatacaaaaattagctgggcatggtggcgtgca

SEQ ID NO: 5624 - DNA, 40 bp, Homo sapiens
gcacgccaccatgcccagctaatttttgtatttttagtag

SEQ ID NO: 5625 - DNA, 40 bp, Homo sapiens
ctactaaaaatacaaaaattagctgggcatggtggcgtgc

SEQ ID NO: 5626 - DNA, 40 bp, Homo sapiens
cacgccaccatgcccagctaatttttgtatttttagtaga

SEQ ID NO: 5627 - DNA, 40 bp, Homo sapiens
tctactaaaaatacaaaaattagctgggcatggtggcgtg

SEQ ID NO: 5628 - DNA, 40 bp, Homo sapiens
acgccaccatgcccagctaatttttgtatttttagtagag

SEQ ID NO: 5629 - DNA, 40 bp, Homo sapiens
ctctactaaaaatacaaaaattagctgggcatggtggcgt

SEQ ID NO: 5630 - DNA, 40 bp, Homo sapiens
cgccaccatgcccagctaatttttgtatttttagtagaga

SEQ ID NO: 5631 - DNA, 40 bp, Homo sapiens
tctctactaaaaatacaaaaattagctgggcatggtggcg

SEQ ID NO: 5632 - DNA, 40 bp, Homo sapiens
gccaccatgcccagctaatttttgtatttttagtagagac

SEQ ID NO: 5633 - DNA, 40 bp, Homo sapiens
gtctctactaaaaatacaaaaattagctgggcatggtggc

SEQ ID NO: 5634 - DNA, 40 bp, Homo sapiens
ccaccatgcccagctaatttttgtatttttagtagagaca

SEQ ID NO: 5635 - DNA, 40 bp, Homo sapiens
tgtctctactaaaaatacaaaaattagctgggcatggtgg

SEQ ID NO: 5636 - DNA, 40 bp, Homo sapiens
caccatgcccagctaatttttgtatttttagtagagacag

SEQ ID NO: 5637 - DNA, 40 bp, Homo sapiens
ctgtctctactaaaaatacaaaaattagctgggcatggtg

SEQ ID NO: 5638 - DNA, 40 bp, Homo sapiens
accatgcccagctaatttttgtatttttagtagagacaga

SEQ ID NO: 5639 - DNA, 40 bp, Homo sapiens
tctgtctctactaaaaatacaaaaattagctgggcatggt

SEQ ID NO: 5640 - DNA, 40 bp, Homo sapiens
ccatgcccagctaatttttgtatttttagtagagacagag

SEQ ID NO: 5641 - DNA, 40 bp, Homo sapiens
ctctgtctctactaaaaatacaaaaattagctgggcatgg

SEQ ID NO: 5642 - DNA, 40 bp, Homo sapiens
catgcccagctaatttttgtatttttagtagagacagagt

SEQ ID NO: 5643 - DNA, 40 bp, Homo sapiens
actctgtctctactaaaaatacaaaaattagctgggcatg

SEQ ID NO: 5644 - DNA, 40 bp, Homo sapiens
atgcccagctaatttttgtatttttagtagagacagagtt

SEQ ID NO: 5645 - DNA, 40 bp, Homo sapiens
aactctgtctctactaaaaatacaaaaattagctgggcat

SEQ ID NO: 5646 - DNA, 40 bp, Homo sapiens
tgcccagctaatttttgtatttttagtagagacagagttt

SEQ ID NO: 5647 - DNA, 40 bp, Homo sapiens
aaactctgtctctactaaaaatacaaaaattagctgggca

SEQ ID NO: 5648 - DNA, 40 bp, Homo sapiens
gcccagctaatttttgtatttttagtagagacagagtttc

SEQ ID NO: 5649 - DNA, 40 bp, Homo sapiens
gaaactctgtctctactaaaaatacaaaaattagctgggc

SEQ ID NO: 5650 - DNA, 40 bp, Homo sapiens
cccagctaatttttgtatttttagtagagacagagtttca

SEQ ID NO: 5651 - DNA, 40 bp, Homo sapiens
tgaaactctgtctctactaaaaatacaaaaattagctggg

SEQ ID NO: 5652 - DNA, 40 bp, Homo sapiens
ccagctaatttttgtatttttagtagagacagagtttcat

SEQ ID NO: 5653 - DNA, 40 bp, Homo sapiens
atgaaactctgtctctactaaaaatacaaaaattagctgg

SEQ ID NO: 5654 - DNA, 40 bp, Homo sapiens
cagctaatttttgtatttttagtagagacagagtttcatc

SEQ ID NO: 5655 - DNA, 40 bp, Homo sapiens
gatgaaactctgtctctactaaaaatacaaaaattagctg

SEQ ID NO: 5656 - DNA, 40 bp, Homo sapiens
agctaatttttgtatttttagtagagacagagtttcatca

SEQ ID NO: 5657 - DNA, 40 bp, Homo sapiens
tgatgaaactctgtctctactaaaaatacaaaaattagct

SEQ ID NO: 5658 - DNA, 40 bp, Homo sapiens
gctaatttttgtatttttagtagagacagagtttcatcat

SEQ ID NO: 5659 - DNA, 40 bp, Homo sapiens
atgatgaaactctgtctctactaaaaatacaaaaattagc

SEQ ID NO: 5660 - DNA, 40 bp, Homo sapiens
ctaatttttgtatttttagtagagacagagtttcatcatg

SEQ ID NO: 5661 - DNA, 40 bp, Homo sapiens
catgatgaaactctgtctctactaaaaatacaaaaattag

SEQ ID NO: 5662 - DNA, 40 bp, Homo sapiens
taatttttgtatttttagtagagacagagtttcatcatgt

SEQ ID NO: 5663 - DNA, 40 bp, Homo sapiens
acatgatgaaactctgtctctactaaaaatacaaaaatta

SEQ ID NO: 5664 - DNA, 40 bp, Homo sapiens
aatttttgtatttttagtagagacagagtttcatcatgtt

SEQ ID NO: 5665 - DNA, 40 bp, Homo sapiens
aacatgatgaaactctgtctctactaaaaatacaaaaatt

SEQ ID NO: 5666 - DNA, 40 bp, Homo sapiens
atttttgtatttttagtagagacagagtttcatcatgttg

SEQ ID NO: 5667 - DNA, 40 bp, Homo sapiens
caacatgatgaaactctgtctctactaaaaatacaaaaat

SEQ ID NO: 5668 - DNA, 40 bp, Homo sapiens
tttttgtatttttagtagagacagagtttcatcatgttgg

SEQ ID NO: 5669 - DNA, 40 bp, Homo sapiens
ccaacatgatgaaactctgtctctactaaaaatacaaaaa

SEQ ID NO: 5670 - DNA, 40 bp, Homo sapiens
ttttgtatttttagtagagacagagtttcatcatgttggt

SEQ ID NO: 5671 - DNA, 40 bp, Homo sapiens
accaacatgatgaaactctgtctctactaaaaatacaaaa

SEQ ID NO: 5672 - DNA, 40 bp, Homo sapiens
tttgtatttttagtagagacagagtttcatcatgttggtc

SEQ ID NO: 5673 - DNA, 40 bp, Homo sapiens
gaccaacatgatgaaactctgtctctactaaaaatacaaa

SEQ ID NO: 5674 - DNA, 40 bp, Homo sapiens
ttgtatttttagtagagacagagtttcatcatgttggtca

SEQ ID NO: 5675 - DNA, 40 bp, Homo sapiens
tgaccaacatgatgaaactctgtctctactaaaaatacaa

SEQ ID NO: 5676 - DNA, 40 bp, Homo sapiens
tgtatttttagtagagacagagtttcatcatgttggtcag

SEQ ID NO: 5677 - DNA, 40 bp, Homo sapiens
ctgaccaacatgatgaaactctgtctctactaaaaataca

SEQ ID NO: 5678 - DNA, 40 bp, Homo sapiens
gtatttttagtagagacagagtttcatcatgttggtcagg

SEQ ID NO: 5679 - DNA, 40 bp, Homo sapiens
cctgaccaacatgatgaaactctgtctctactaaaaatac

SEQ ID NO: 5680 - DNA, 40 bp, Homo sapiens
tatttttagtagagacagagtttcatcatgttggtcagga

SEQ ID NO: 5681 - DNA, 40 bp, Homo sapiens
tcctgaccaacatgatgaaactctgtctctactaaaaata

SEQ ID NO: 5682 - DNA, 40 bp, Homo sapiens
atttttagtagagacagagtttcatcatgttggtcaggat

SEQ ID NO: 5683 - DNA, 40 bp, Homo sapiens
atcctgaccaacatgatgaaactctgtctctactaaaaat

SEQ ID NO: 5684 - DNA, 40 bp, Homo sapiens
tttttagtagagacagagtttcatcatgttggtcaggatg

SEQ ID NO: 5685 - DNA, 40 bp, Homo sapiens
catcctgaccaacatgatgaaactctgtctctactaaaaa

SEQ ID NO: 5686 - DNA, 40 bp, Homo sapiens
ttttagtagagacagagtttcatcatgttggtcaggatgg

SEQ ID NO: 5687 - DNA, 40 bp, Homo sapiens
ccatcctgaccaacatgatgaaactctgtctctactaaaa

SEQ ID NO: 5688 - DNA, 40 bp, Homo sapiens
tttagtagagacagagtttcatcatgttggtcaggatggt

SEQ ID NO: 5689 - DNA, 40 bp, Homo sapiens
accatcctgaccaacatgatgaaactctgtctctactaaa

SEQ ID NO: 5690 - DNA, 40 bp, Homo sapiens
ttagtagagacagagtttcatcatgttggtcaggatggtc

SEQ ID NO: 5691 - DNA, 40 bp, Homo sapiens
gaccatcctgaccaacatgatgaaactctgtctctactaa

SEQ ID NO: 5692 - DNA, 40 bp, Homo sapiens
tagtagagacagagtttcatcatgttggtcaggatggtct

SEQ ID NO: 5693 - DNA, 40 bp, Homo sapiens
agaccatcctgaccaacatgatgaaactctgtctctacta

SEQ ID NO: 5694 - DNA, 40 bp, Homo sapiens
agtagagacagagtttcatcatgttggtcaggatggtctc

SEQ ID NO: 5695 - DNA, 40 bp, Homo sapiens
gagaccatcctgaccaacatgatgaaactctgtctctact

SEQ ID NO: 5696 - DNA, 40 bp, Homo sapiens
gtagagacagagtttcatcatgttggtcaggatggtctcc

SEQ ID NO: 5697 - DNA, 40 bp, Homo sapiens
ggagaccatcctgaccaacatgatgaaactctgtctctac

SEQ ID NO: 5698 - DNA, 40 bp, Homo sapiens
tagagacagagtttcatcatgttggtcaggatggtctcca

SEQ ID NO: 5699 - DNA, 40 bp, Homo sapiens
tggagaccatcctgaccaacatgatgaaactctgtctcta

SEQ ID NO: 5700 - DNA, 40 bp, Homo sapiens
agagacagagtttcatcatgttggtcaggatggtctccat

SEQ ID NO: 5701 - DNA, 40 bp, Homo sapiens
atggagaccatcctgaccaacatgatgaaactctgtctct

SEQ ID NO: 5702 - DNA, 40 bp, Homo sapiens
gagacagagtttcatcatgttggtcaggatggtctccatc

SEQ ID NO: 5703 - DNA, 40 bp, Homo sapiens
gatggagaccatcctgaccaacatgatgaaactctgtctc

SEQ ID NO: 5704 - DNA, 40 bp, Homo sapiens
agacagagtttcatcatgttggtcaggatggtctccatct

SEQ ID NO: 5705 - DNA, 40 bp, Homo sapiens
agatggagaccatcctgaccaacatgatgaaactctgtct

SEQ ID NO: 5706 - DNA, 40 bp, Homo sapiens
gacagagtttcatcatgttggtcaggatggtctccatctg

SEQ ID NO: 5707 - DNA, 40 bp, Homo sapiens
cagatggagaccatcctgaccaacatgatgaaactctgtc

SEQ ID NO: 5708 - DNA, 40 bp, Homo sapiens
acagagtttcatcatgttggtcaggatggtctccatctgc

SEQ ID NO: 5709 - DNA, 40 bp, Homo sapiens
gcagatggagaccatcctgaccaacatgatgaaactctgt

SEQ ID NO: 5710 - DNA, 40 bp, Homo sapiens
cagagtttcatcatgttggtcaggatggtctccatctgct

SEQ ID NO: 5711 - DNA, 40 bp, Homo sapiens
agcagatggagaccatcctgaccaacatgatgaaactctg

SEQ ID NO: 5712 - DNA, 40 bp, Homo sapiens
agagtttcatcatgttggtcaggatggtctccatctgctc

SEQ ID NO: 5713 - DNA, 40 bp, Homo sapiens
gagcagatggagaccatcctgaccaacatgatgaaactct

SEQ ID NO: 5714 - DNA, 40 bp, Homo sapiens
gagtttcatcatgttggtcaggatggtctccatctgctct

SEQ ID NO: 5715 - DNA, 40 bp, Homo sapiens
agagcagatggagaccatcctgaccaacatgatgaaactc

SEQ ID NO: 5716 - DNA, 40 bp, Homo sapiens
agtttcatcatgttggtcaggatggtctccatctgctctg

SEQ ID NO: 5717 - DNA, 40 bp, Homo sapiens
cagagcagatggagaccatcctgaccaacatgatgaaact

SEQ ID NO: 5718 - DNA, 40 bp, Homo sapiens
gtttcatcatgttggtcaggatggtctccatctgctctgt

SEQ ID NO: 5719 - DNA, 40 bp, Homo sapiens
acagagcagatggagaccatcctgaccaacatgatgaaac

SEQ ID NO: 5720 - DNA, 40 bp, Homo sapiens
tttcatcatgttggtcaggatggtctccatctgctctgtt

SEQ ID NO: 5721 - DNA, 40 bp, Homo sapiens
aacagagcagatggagaccatcctgaccaacatgatgaaa

SEQ ID NO: 5722 - DNA, 40 bp, Homo sapiens
ttcatcatgttggtcaggatggtctccatctgctctgttg

SEQ ID NO: 5723 - DNA, 40 bp, Homo sapiens
caacagagcagatggagaccatcctgaccaacatgatgaa

SEQ ID NO: 5724 - DNA, 40 bp, Homo sapiens
tcatcatgttggtcaggatggtctccatctgctctgttgc

SEQ ID NO: 5725 - DNA, 40 bp, Homo sapiens
gcaacagagcagatggagaccatcctgaccaacatgatga

SEQ ID NO: 5726 - DNA, 40 bp, Homo sapiens
catcatgttggtcaggatggtctccatctgctctgttgcc

SEQ ID NO: 5727 - DNA, 40 bp, Homo sapiens
ggcaacagagcagatggagaccatcctgaccaacatgatg

SEQ ID NO: 5728 - DNA, 40 bp, Homo sapiens
atcatgttggtcaggatggtctccatctgctctgttgccc

SEQ ID NO: 5729 - DNA, 40 bp, Homo sapiens
gggcaacagagcagatggagaccatcctgaccaacatgat

SEQ ID NO: 5730 - DNA, 40 bp, Homo sapiens
tcatgttggtcaggatggtctccatctgctctgttgccca

SEQ ID NO: 5731 - DNA, 40 bp, Homo sapiens
tgggcaacagagcagatggagaccatcctgaccaacatga

SEQ ID NO: 5732 - DNA, 40 bp, Homo sapiens
catgttggtcaggatggtctccatctgctctgttgcccag

SEQ ID NO: 5733 - DNA, 40 bp, Homo sapiens
ctgggcaacagagcagatggagaccatcctgaccaacatg

SEQ ID NO: 5734 - DNA, 40 bp, Homo sapiens
atgttggtcaggatggtctccatctgctctgttgcccagg

SEQ ID NO: 5735 - DNA, 40 bp, Homo sapiens
cctgggcaacagagcagatggagaccatcctgaccaacat

SEQ ID NO: 5736 - DNA, 40 bp, Homo sapiens
tgttggtcaggatggtctccatctgctctgttgcccaggc

SEQ ID NO: 5737 - DNA, 40 bp, Homo sapiens
gcctgggcaacagagcagatggagaccatcctgaccaaca

SEQ ID NO: 5738 - DNA, 40 bp, Homo sapiens
gttggtcaggatggtctccatctgctctgttgcccaggct

SEQ ID NO: 5739 - DNA, 40 bp, Homo sapiens
agcctgggcaacagagcagatggagaccatcctgaccaac

SEQ ID NO: 5740 - DNA, 40 bp, Homo sapiens
ttggtcaggatggtctccatctgctctgttgcccaggctg

SEQ ID NO: 5741 - DNA, 40 bp, Homo sapiens
cagcctgggcaacagagcagatggagaccatcctgaccaa

SEQ ID NO: 5742 - DNA, 40 bp, Homo sapiens
tggtcaggatggtctccatctgctctgttgcccaggctgg

SEQ ID NO: 5743 - DNA, 40 bp, Homo sapiens
ccagcctgggcaacagagcagatggagaccatcctgacca

SEQ ID NO: 5744 - DNA, 40 bp, Homo sapiens
ggtcaggatggtctccatctgctctgttgcccaggctgga

SEQ ID NO: 5745 - DNA, 40 bp, Homo sapiens
tccagcctgggcaacagagcagatggagaccatcctgacc

SEQ ID NO: 5746 - DNA, 40 bp, Homo sapiens
gtcaggatggtctccatctgctctgttgcccaggctggag

SEQ ID NO: 5747 - DNA, 40 bp, Homo sapiens
ctccagcctgggcaacagagcagatggagaccatcctgac

SEQ ID NO: 5748 - DNA, 40 bp, Homo sapiens
tcaggatggtctccatctgctctgttgcccaggctggagt

SEQ ID NO: 5749 - DNA, 40 bp, Homo sapiens
actccagcctgggcaacagagcagatggagaccatcctga

SEQ ID NO: 5750 - DNA, 40 bp, Homo sapiens
caggatggtctccatctgctctgttgcccaggctggagtg

SEQ ID NO: 5751 - DNA, 40 bp, Homo sapiens
cactccagcctgggcaacagagcagatggagaccatcctg

SEQ ID NO: 5752 - DNA, 40 bp, Homo sapiens
aggatggtctccatctgctctgttgcccaggctggagtgc

SEQ ID NO: 5753 - DNA, 40 bp, Homo sapiens
gcactccagcctgggcaacagagcagatggagaccatcct

SEQ ID NO: 5754 - DNA, 40 bp, Homo sapiens
ggatggtctccatctgctctgttgcccaggctggagtgca

SEQ ID NO: 5755 - DNA, 40 bp, Homo sapiens
tgcactccagcctgggcaacagagcagatggagaccatcc

SEQ ID NO: 5756 - DNA, 40 bp, Homo sapiens
gatggtctccatctgctctgttgcccaggctggagtgcag

SEQ ID NO: 5757 - DNA, 40 bp, Homo sapiens
ctgcactccagcctgggcaacagagcagatggagaccatc

SEQ ID NO: 5758 - DNA, 40 bp, Homo sapiens
atggtctccatctgctctgttgcccaggctggagtgcagt

SEQ ID NO: 5759 - DNA, 40 bp, Homo sapiens
actgcactccagcctgggcaacagagcagatggagaccat

SEQ ID NO: 5760 - DNA, 40 bp, Homo sapiens
tggtctccatctgctctgttgcccaggctggagtgcagtg

SEQ ID NO: 5761 - DNA, 40 bp, Homo sapiens
cactgcactccagcctgggcaacagagcagatggagacca

SEQ ID NO: 5762 - DNA, 40 bp, Homo sapiens
ggtctccatctgctctgttgcccaggctggagtgcagtgg

SEQ ID NO: 5763 - DNA, 40 bp, Homo sapiens
ccactgcactccagcctgggcaacagagcagatggagacc

SEQ ID NO: 5764 - DNA, 40 bp, Homo sapiens
gtctccatctgctctgttgcccaggctggagtgcagtggc

SEQ ID NO: 5765 - DNA, 40 bp, Homo sapiens
gccactgcactccagcctgggcaacagagcagatggagac

SEQ ID NO: 5766 - DNA, 40 bp, Homo sapiens
tctccatctgctctgttgcccaggctggagtgcagtggcg

SEQ ID NO: 5767 - DNA, 40 bp, Homo sapiens
cgccactgcactccagcctgggcaacagagcagatggaga

SEQ ID NO: 5768 - DNA, 40 bp, Homo sapiens
ctccatctgctctgttgcccaggctggagtgcagtggcgc

SEQ ID NO: 5769 - DNA, 40 bp, Homo sapiens
gcgccactgcactccagcctgggcaacagagcagatggag

SEQ ID NO: 5770 - DNA, 40 bp, Homo sapiens
tccatctgctctgttgcccaggctggagtgcagtggcgcc

SEQ ID NO: 5771 - DNA, 40 bp, Homo sapiens
ggcgccactgcactccagcctgggcaacagagcagatgga

SEQ ID NO: 5772 - DNA, 40 bp, Homo sapiens
ccatctgctctgttgcccaggctggagtgcagtggcgccg

SEQ ID NO: 5773 - DNA, 40 bp, Homo sapiens
cggcgccactgcactccagcctgggcaacagagcagatgg

SEQ ID NO: 5774 - DNA, 40 bp, Homo sapiens
catctgctctgttgcccaggctggagtgcagtggcgccgt

SEQ ID NO: 5775 - DNA, 40 bp, Homo sapiens
acggcgccactgcactccagcctgggcaacagagcagatg

SEQ ID NO: 5776 - DNA, 40 bp, Homo sapiens
atctgctctgttgcccaggctggagtgcagtggcgccgtc

SEQ ID NO: 5777 - DNA, 40 bp, Homo sapiens
gacggcgccactgcactccagcctgggcaacagagcagat

SEQ ID NO: 5778 - DNA, 40 bp, Homo sapiens
tctgctctgttgcccaggctggagtgcagtggcgccgtct

SEQ ID NO: 5779 - DNA, 40 bp, Homo sapiens
agacggcgccactgcactccagcctgggcaacagagcaga

SEQ ID NO: 5780 - DNA, 40 bp, Homo sapiens
ctgctctgttgcccaggctggagtgcagtggcgccgtctc

SEQ ID NO: 5781 - DNA, 40 bp, Homo sapiens
gagacggcgccactgcactccagcctgggcaacagagcag

SEQ ID NO: 5782 - DNA, 40 bp, Homo sapiens
tgctctgttgcccaggctggagtgcagtggcgccgtctcg

SEQ ID NO: 5783 - DNA, 40 bp, Homo sapiens
cgagacggcgccactgcactccagcctgggcaacagagca

SEQ ID NO: 5784 - DNA, 40 bp, Homo sapiens
gctctgttgcccaggctggagtgcagtggcgccgtctcgg

SEQ ID NO: 5785 - DNA, 40 bp, Homo sapiens
ccgagacggcgccactgcactccagcctgggcaacagagc

SEQ ID NO: 5786 - DNA, 40 bp, Homo sapiens
ctctgttgcccaggctggagtgcagtggcgccgtctcggc

SEQ ID NO: 5787 - DNA, 40 bp, Homo sapiens
gccgagacggcgccactgcactccagcctgggcaacagag

SEQ ID NO: 5788 - DNA, 40 bp, Homo sapiens
tctgttgcccaggctggagtgcagtggcgccgtctcggct

SEQ ID NO: 5789 - DNA, 40 bp, Homo sapiens
agccgagacggcgccactgcactccagcctgggcaacaga

SEQ ID NO: 5790 - DNA, 40 bp, Homo sapiens
ctgttgcccaggctggagtgcagtggcgccgtctcggctc

SEQ ID NO: 5791 - DNA, 40 bp, Homo sapiens
gagccgagacggcgccactgcactccagcctgggcaacag

SEQ ID NO: 5792 - DNA, 40 bp, Homo sapiens
tgttgcccaggctggagtgcagtggcgccgtctcggctca

SEQ ID NO: 5793 - DNA, 40 bp, Homo sapiens
tgagccgagacggcgccactgcactccagcctgggcaaca

SEQ ID NO: 5794 - DNA, 40 bp, Homo sapiens
gttgcccaggctggagtgcagtggcgccgtctcggctcac

SEQ ID NO: 5795 - DNA, 40 bp, Homo sapiens
gtgagccgagacggcgccactgcactccagcctgggcaac

SEQ ID NO: 5796 - DNA, 40 bp, Homo sapiens
ttgcccaggctggagtgcagtggcgccgtctcggctcact

SEQ ID NO: 5797 - DNA, 40 bp, Homo sapiens
agtgagccgagacggcgccactgcactccagcctgggcaa

SEQ ID NO: 5798 - DNA, 40 bp, Homo sapiens
tgcccaggctggagtgcagtggcgccgtctcggctcactg

SEQ ID NO: 5799 - DNA, 40 bp, Homo sapiens
cagtgagccgagacggcgccactgcactccagcctgggca

SEQ ID NO: 5800 - DNA, 40 bp, Homo sapiens
gcccaggctggagtgcagtggcgccgtctcggctcactgc

SEQ ID NO: 5801 - DNA, 40 bp, Homo sapiens
gcagtgagccgagacggcgccactgcactccagcctgggc

SEQ ID NO: 5802 - DNA, 40 bp, Homo sapiens
cccaggctggagtgcagtggcgccgtctcggctcactgca

SEQ ID NO: 5803 - DNA, 40 bp, Homo sapiens
tgcagtgagccgagacggcgccactgcactccagcctggg

SEQ ID NO: 5804 - DNA, 40 bp, Homo sapiens
ccaggctggagtgcagtggcgccgtctcggctcactgcaa

SEQ ID NO: 5805 - DNA, 40 bp, Homo sapiens
ttgcagtgagccgagacggcgccactgcactccagcctgg

SEQ ID NO: 5806 - DNA, 40 bp, Homo sapiens
caggctggagtgcagtggcgccgtctcggctcactgcaac

SEQ ID NO: 5807 - DNA, 40 bp, Homo sapiens
gttgcagtgagccgagacggcgccactgcactccagcctg

SEQ ID NO: 5808 - DNA, 40 bp, Homo sapiens
aggctggagtgcagtggcgccgtctcggctcactgcaacc

SEQ ID NO: 5809 - DNA, 40 bp, Homo sapiens
ggttgcagtgagccgagacggcgccactgcactccagcct

SEQ ID NO: 5810 - DNA, 40 bp, Homo sapiens
ggctggagtgcagtggcgccgtctcggctcactgcaacct

SEQ ID NO: 5811 - DNA, 40 bp, Homo sapiens
aggttgcagtgagccgagacggcgccactgcactccagcc

SEQ ID NO: 5812 - DNA, 40 bp, Homo sapiens
gctggagtgcagtggcgccgtctcggctcactgcaacctc

SEQ ID NO: 5813 - DNA, 40 bp, Homo sapiens
gaggttgcagtgagccgagacggcgccactgcactccagc

SEQ ID NO: 5814 - DNA, 40 bp, Homo sapiens
ctggagtgcagtggcgccgtctcggctcactgcaacctct

SEQ ID NO: 5815 - DNA, 40 bp, Homo sapiens
agaggttgcagtgagccgagacggcgccactgcactccag

SEQ ID NO: 5816 - DNA, 40 bp, Homo sapiens
tggagtgcagtggcgccgtctcggctcactgcaacctctg

SEQ ID NO: 5817 - DNA, 40 bp, Homo sapiens
cagaggttgcagtgagccgagacggcgccactgcactcca

SEQ ID NO: 5818 - DNA, 40 bp, Homo sapiens
ggagtgcagtggcgccgtctcggctcactgcaacctctgc

SEQ ID NO: 5819 - DNA, 40 bp, Homo sapiens
gcagaggttgcagtgagccgagacggcgccactgcactcc

SEQ ID NO: 5820 - DNA, 40 bp, Homo sapiens
gagtgcagtggcgccgtctcggctcactgcaacctctgcc

SEQ ID NO: 5821 - DNA, 40 bp, Homo sapiens
ggcagaggttgcagtgagccgagacggcgccactgcactc

SEQ ID NO: 5822 - DNA, 40 bp, Homo sapiens
agtgcagtggcgccgtctcggctcactgcaacctctgcct

SEQ ID NO: 5823 - DNA, 40 bp, Homo sapiens
aggcagaggttgcagtgagccgagacggcgccactgcact

SEQ ID NO: 5824 - DNA, 40 bp, Homo sapiens
gtgcagtggcgccgtctcggctcactgcaacctctgcctc

SEQ ID NO: 5825 - DNA, 40 bp, Homo sapiens
gaggcagaggttgcagtgagccgagacggcgccactgcac

SEQ ID NO: 5826 - DNA, 40 bp, Homo sapiens
tgcagtggcgccgtctcggctcactgcaacctctgcctcc

SEQ ID NO: 5827 - DNA, 40 bp, Homo sapiens
ggaggcagaggttgcagtgagccgagacggcgccactgca

SEQ ID NO: 5828 - DNA, 40 bp, Homo sapiens
gcagtggcgccgtctcggctcactgcaacctctgcctcct

SEQ ID NO: 5829 - DNA, 40 bp, Homo sapiens
aggaggcagaggttgcagtgagccgagacggcgccactgc

SEQ ID NO: 5830 - DNA, 40 bp, Homo sapiens
cagtggcgccgtctcggctcactgcaacctctgcctcctg

SEQ ID NO: 5831 - DNA, 40 bp, Homo sapiens
caggaggcagaggttgcagtgagccgagacggcgccactg

SEQ ID NO: 5832 - DNA, 40 bp, Homo sapiens
agtggcgccgtctcggctcactgcaacctctgcctcctgc

SEQ ID NO: 5833 - DNA, 40 bp, Homo sapiens
gcaggaggcagaggttgcagtgagccgagacggcgccact

SEQ ID NO: 5834 - DNA, 40 bp, Homo sapiens
gtggcgccgtctcggctcactgcaacctctgcctcctgca

SEQ ID NO: 5835 - DNA, 40 bp, Homo sapiens
tgcaggaggcagaggttgcagtgagccgagacggcgccac

SEQ ID NO: 5836 - DNA, 40 bp, Homo sapiens
tggcgccgtctcggctcactgcaacctctgcctcctgcat

SEQ ID NO: 5837 - DNA, 40 bp, Homo sapiens
atgcaggaggcagaggttgcagtgagccgagacggcgcca

SEQ ID NO: 5838 - DNA, 40 bp, Homo sapiens
ggcgccgtctcggctcactgcaacctctgcctcctgcatt

SEQ ID NO: 5839 - DNA, 40 bp, Homo sapiens
aatgcaggaggcagaggttgcagtgagccgagacggcgcc

SEQ ID NO: 5840 - DNA, 40 bp, Homo sapiens
gcgccgtctcggctcactgcaacctctgcctcctgcattc

SEQ ID NO: 5841 - DNA, 40 bp, Homo sapiens
gaatgcaggaggcagaggttgcagtgagccgagacggcgc

SEQ ID NO: 5842 - DNA, 40 bp, Homo sapiens
cgccgtctcggctcactgcaacctctgcctcctgcattca

SEQ ID NO: 5843 - DNA, 40 bp, Homo sapiens
tgaatgcaggaggcagaggttgcagtgagccgagacggcg

SEQ ID NO: 5844 - DNA, 40 bp, Homo sapiens
gccgtctcggctcactgcaacctctgcctcctgcattcaa

SEQ ID NO: 5845 - DNA, 40 bp, Homo sapiens
ttgaatgcaggaggcagaggttgcagtgagccgagacggc

SEQ ID NO: 5846 - DNA, 40 bp, Homo sapiens
ccgtctcggctcactgcaacctctgcctcctgcattcaag

SEQ ID NO: 5847 - DNA, 40 bp, Homo sapiens
cttgaatgcaggaggcagaggttgcagtgagccgagacgg

SEQ ID NO: 5848 - DNA, 40 bp, Homo sapiens
cgtctcggctcactgcaacctctgcctcctgcattcaagc

SEQ ID NO: 5849 - DNA, 40 bp, Homo sapiens
gcttgaatgcaggaggcagaggttgcagtgagccgagacg

SEQ ID NO: 5850 - DNA, 40 bp, Homo sapiens
gtctcggctcactgcaacctctgcctcctgcattcaagca

SEQ ID NO: 5851 - DNA, 40 bp, Homo sapiens
tgcttgaatgcaggaggcagaggttgcagtgagccgagac

SEQ ID NO: 5852 - DNA, 40 bp, Homo sapiens
tctcggctcactgcaacctctgcctcctgcattcaagcaa

SEQ ID NO: 5853 - DNA, 40 bp, Homo sapiens
ttgcttgaatgcaggaggcagaggttgcagtgagccgaga

SEQ ID NO: 5854 - DNA, 40 bp, Homo sapiens
ctcggctcactgcaacctctgcctcctgcattcaagcaat

SEQ ID NO: 5855 - DNA, 40 bp, Homo sapiens
attgcttgaatgcaggaggcagaggttgcagtgagccgag

SEQ ID NO: 5856 - DNA, 40 bp, Homo sapiens
tcggctcactgcaacctctgcctcctgcattcaagcaatt

SEQ ID NO: 5857 - DNA, 40 bp, Homo sapiens
aattgcttgaatgcaggaggcagaggttgcagtgagccga

SEQ ID NO: 5858 - DNA, 40 bp, Homo sapiens
cggctcactgcaacctctgcctcctgcattcaagcaattc

SEQ ID NO: 5859 - DNA, 40 bp, Homo sapiens
gaattgcttgaatgcaggaggcagaggttgcagtgagccg

SEQ ID NO: 5860 - DNA, 40 bp, Homo sapiens
ggctcactgcaacctctgcctcctgcattcaagcaattct

SEQ ID NO: 5861 - DNA, 40 bp, Homo sapiens
agaattgcttgaatgcaggaggcagaggttgcagtgagcc

SEQ ID NO: 5862 - DNA, 40 bp, Homo sapiens
gctcactgcaacctctgcctcctgcattcaagcaattctc

SEQ ID NO: 5863 - DNA, 40 bp, Homo sapiens
gagaattgcttgaatgcaggaggcagaggttgcagtgagc

SEQ ID NO: 5864 - DNA, 40 bp, Homo sapiens
ctcactgcaacctctgcctcctgcattcaagcaattctcc

SEQ ID NO: 5865 - DNA, 40 bp, Homo sapiens
ggagaattgcttgaatgcaggaggcagaggttgcagtgag

SEQ ID NO: 5866 - DNA, 40 bp, Homo sapiens
tcactgcaacctctgcctcctgcattcaagcaattctcct

SEQ ID NO: 5867 - DNA, 40 bp, Homo sapiens
aggagaattgcttgaatgcaggaggcagaggttgcagtga

SEQ ID NO: 5868 - DNA, 40 bp, Homo sapiens
cactgcaacctctgcctcctgcattcaagcaattctcctg

SEQ ID NO: 5869 - DNA, 40 bp, Homo sapiens
caggagaattgcttgaatgcaggaggcagaggttgcagtg

SEQ ID NO: 5870 - DNA, 40 bp, Homo sapiens
actgcaacctctgcctcctgcattcaagcaattctcctgc

SEQ ID NO: 5871 - DNA, 40 bp, Homo sapiens
gcaggagaattgcttgaatgcaggaggcagaggttgcagt

SEQ ID NO: 5872 - DNA, 40 bp, Homo sapiens
ctgcaacctctgcctcctgcattcaagcaattctcctgcc

SEQ ID NO: 5873 - DNA, 40 bp, Homo sapiens
ggcaggagaattgcttgaatgcaggaggcagaggttgcag

SEQ ID NO: 5874 - DNA, 40 bp, Homo sapiens
tgcaacctctgcctcctgcattcaagcaattctcctgcct

SEQ ID NO: 5875 - DNA, 40 bp, Homo sapiens
aggcaggagaattgcttgaatgcaggaggcagaggttgca

SEQ ID NO: 5876 - DNA, 40 bp, Homo sapiens
gcaacctctgcctcctgcattcaagcaattctcctgcctc

SEQ ID NO: 5877 - DNA, 40 bp, Homo sapiens
gaggcaggagaattgcttgaatgcaggaggcagaggttgc

SEQ ID NO: 5878 - DNA, 40 bp, Homo sapiens
caacctctgcctcctgcattcaagcaattctcctgcctca

SEQ ID NO: 5879 - DNA, 40 bp, Homo sapiens
tgaggcaggagaattgcttgaatgcaggaggcagaggttg

SEQ ID NO: 5880 - DNA, 40 bp, Homo sapiens
aacctctgcctcctgcattcaagcaattctcctgcctcag

SEQ ID NO: 5881 - DNA, 40 bp, Homo sapiens
ctgaggcaggagaattgcttgaatgcaggaggcagaggtt

SEQ ID NO: 5882 - DNA, 40 bp, Homo sapiens
acctctgcctcctgcattcaagcaattctcctgcctcagc

SEQ ID NO: 5883 - DNA, 40 bp, Homo sapiens
gctgaggcaggagaattgcttgaatgcaggaggcagaggt

SEQ ID NO: 5884 - DNA, 40 bp, Homo sapiens
cctctgcctcctgcattcaagcaattctcctgcctcagcc

SEQ ID NO: 5885 - DNA, 40 bp, Homo sapiens
ggctgaggcaggagaattgcttgaatgcaggaggcagagg

SEQ ID NO: 5886 - DNA, 40 bp, Homo sapiens
ctctgcctcctgcattcaagcaattctcctgcctcagcct

SEQ ID NO: 5887 - DNA, 40 bp, Homo sapiens
aggctgaggcaggagaattgcttgaatgcaggaggcagag

SEQ ID NO: 5888 - DNA, 40 bp, Homo sapiens
tctgcctcctgcattcaagcaattctcctgcctcagcctc

SEQ ID NO: 5889 - DNA, 40 bp, Homo sapiens
gaggctgaggcaggagaattgcttgaatgcaggaggcaga

SEQ ID NO: 5890 - DNA, 40 bp, Homo sapiens
ctgcctcctgcattcaagcaattctcctgcctcagcctcc

SEQ ID NO: 5891 - DNA, 40 bp, Homo sapiens
ggaggctgaggcaggagaattgcttgaatgcaggaggcag

SEQ ID NO: 5892 - DNA, 40 bp, Homo sapiens
tgcctcctgcattcaagcaattctcctgcctcagcctccc

SEQ ID NO: 5893 - DNA, 40 bp, Homo sapiens
gggaggctgaggcaggagaattgcttgaatgcaggaggca

SEQ ID NO: 5894 - DNA, 40 bp, Homo sapiens
gcctcctgcattcaagcaattctcctgcctcagcctcccg

SEQ ID NO: 5895 - DNA, 40 bp, Homo sapiens
cgggaggctgaggcaggagaattgcttgaatgcaggaggc

SEQ ID NO: 5896 - DNA, 40 bp, Homo sapiens
cctcctgcattcaagcaattctcctgcctcagcctcccga

SEQ ID NO: 5897 - DNA, 40 bp, Homo sapiens
tcgggaggctgaggcaggagaattgcttgaatgcaggagg

SEQ ID NO: 5898 - DNA, 40 bp, Homo sapiens
ctcctgcattcaagcaattctcctgcctcagcctcccgaa

SEQ ID NO: 5899 - DNA, 40 bp, Homo sapiens
ttcgggaggctgaggcaggagaattgcttgaatgcaggag

SEQ ID NO: 5900 - DNA, 40 bp, Homo sapiens
tcctgcattcaagcaattctcctgcctcagcctcccgaat

SEQ ID NO: 5901 - DNA, 40 bp, Homo sapiens
attcgggaggctgaggcaggagaattgcttgaatgcagga

SEQ ID NO: 5902 - DNA, 40 bp, Homo sapiens
cctgcattcaagcaattctcctgcctcagcctcccgaata

SEQ ID NO: 5903 - DNA, 40 bp, Homo sapiens
tattcgggaggctgaggcaggagaattgcttgaatgcagg

SEQ ID NO: 5904 - DNA, 40 bp, Homo sapiens
ctgcattcaagcaattctcctgcctcagcctcccgaataa

SEQ ID NO: 5905 - DNA, 40 bp, Homo sapiens
ttattcgggaggctgaggcaggagaattgcttgaatgcag

SEQ ID NO: 5906 - DNA, 40 bp, Homo sapiens
tgcattcaagcaattctcctgcctcagcctcccgaataac

SEQ ID NO: 5907 - DNA, 40 bp, Homo sapiens
gttattcgggaggctgaggcaggagaattgcttgaatgca

SEQ ID NO: 5908 - DNA, 40 bp, Homo sapiens
gcattcaagcaattctcctgcctcagcctcccgaataact

SEQ ID NO: 5909 - DNA, 40 bp, Homo sapiens
agttattcgggaggctgaggcaggagaattgcttgaatgc

SEQ ID NO: 5910 - DNA, 40 bp, Homo sapiens
cattcaagcaattctcctgcctcagcctcccgaataactg

SEQ ID NO: 5911 - DNA, 40 bp, Homo sapiens
cagttattcgggaggctgaggcaggagaattgcttgaatg

SEQ ID NO: 5912 - DNA, 40 bp, Homo sapiens
attcaagcaattctcctgcctcagcctcccgaataactgg

SEQ ID NO: 5913 - DNA, 40 bp, Homo sapiens
ccagttattcgggaggctgaggcaggagaattgcttgaat

SEQ ID NO: 5914 - DNA, 40 bp, Homo sapiens
ttcaagcaattctcctgcctcagcctcccgaataactggg

SEQ ID NO: 5915 - DNA, 40 bp, Homo sapiens
cccagttattcgggaggctgaggcaggagaattgcttgaa

SEQ ID NO: 5916 - DNA, 40 bp, Homo sapiens
tcaagcaattctcctgcctcagcctcccgaataactggga

SEQ ID NO: 5917 - DNA, 40 bp, Homo sapiens
tcccagttattcgggaggctgaggcaggagaattgcttga

SEQ ID NO: 5918 - DNA, 40 bp, Homo sapiens
caagcaattctcctgcctcagcctcccgaataactgggat

SEQ ID NO: 5919 - DNA, 40 bp, Homo sapiens
atcccagttattcgggaggctgaggcaggagaattgcttg

SEQ ID NO: 5920 - DNA, 40 bp, Homo sapiens
aagcaattctcctgcctcagcctcccgaataactgggatt

SEQ ID NO: 5921 - DNA, 40 bp, Homo sapiens
aatcccagttattcgggaggctgaggcaggagaattgctt

SEQ ID NO: 5922 - DNA, 40 bp, Homo sapiens
agcaattctcctgcctcagcctcccgaataactgggatta

SEQ ID NO: 5923 - DNA, 40 bp, Homo sapiens
taatcccagttattcgggaggctgaggcaggagaattgct

SEQ ID NO: 5924 - DNA, 40 bp, Homo sapiens
gcaattctcctgcctcagcctcccgaataactgggattac

SEQ ID NO: 5925 - DNA, 40 bp, Homo sapiens
gtaatcccagttattcgggaggctgaggcaggagaattgc

SEQ ID NO: 5926 - DNA, 40 bp, Homo sapiens
caattctcctgcctcagcctcccgaataactgggattaca

SEQ ID NO: 5927 - DNA, 40 bp, Homo sapiens
tgtaatcccagttattcgggaggctgaggcaggagaattg

SEQ ID NO: 5928 - DNA, 40 bp, Homo sapiens
aattctcctgcctcagcctcccgaataactgggattacag

SEQ ID NO: 5929 - DNA, 40 bp, Homo sapiens
ctgtaatcccagttattcgggaggctgaggcaggagaatt

SEQ ID NO: 5930 - DNA, 40 bp, Homo sapiens
attctcctgcctcagcctcccgaataactgggattacagg

SEQ ID NO: 5931 - DNA, 40 bp, Homo sapiens
cctgtaatcccagttattcgggaggctgaggcaggagaat

SEQ ID NO: 5932 - DNA, 40 bp, Homo sapiens
ttctcctgcctcagcctcccgaataactgggattacaggt

SEQ ID NO: 5933 - DNA, 40 bp, Homo sapiens
acctgtaatcccagttattcgggaggctgaggcaggagaa

SEQ ID NO: 5934 - DNA, 40 bp, Homo sapiens
tctcctgcctcagcctcccgaataactgggattacaggtg

SEQ ID NO: 5935 - DNA, 40 bp, Homo sapiens
cacctgtaatcccagttattcgggaggctgaggcaggaga

SEQ ID NO: 5936 - DNA, 40 bp, Homo sapiens
ctcctgcctcagcctcccgaataactgggattacaggtgt

SEQ ID NO: 5937 - DNA, 40 bp, Homo sapiens
acacctgtaatcccagttattcgggaggctgaggcaggag

SEQ ID NO: 5938 - DNA, 40 bp, Homo sapiens
tcctgcctcagcctcccgaataactgggattacaggtgtc

SEQ ID NO: 5939 - DNA, 40 bp, Homo sapiens
gacacctgtaatcccagttattcgggaggctgaggcagga

SEQ ID NO: 5940 - DNA, 40 bp, Homo sapiens
cctgcctcagcctcccgaataactgggattacaggtgtct

SEQ ID NO: 5941 - DNA, 40 bp, Homo sapiens
agacacctgtaatcccagttattcgggaggctgaggcagg

SEQ ID NO: 5942 - DNA, 40 bp, Homo sapiens
ctgcctcagcctcccgaataactgggattacaggtgtctg

SEQ ID NO: 5943 - DNA, 40 bp, Homo sapiens
cagacacctgtaatcccagttattcgggaggctgaggcag

SEQ ID NO: 5944 - DNA, 40 bp, Homo sapiens
tgcctcagcctcccgaataactgggattacaggtgtctgc

SEQ ID NO: 5945 - DNA, 40 bp, Homo sapiens
gcagacacctgtaatcccagttattcgggaggctgaggca

SEQ ID NO: 5946 - DNA, 40 bp, Homo sapiens
gcctcagcctcccgaataactgggattacaggtgtctgct

SEQ ID NO: 5947 - DNA, 40 bp, Homo sapiens
agcagacacctgtaatcccagttattcgggaggctgaggc

SEQ ID NO: 5948 - DNA, 40 bp, Homo sapiens
cctcagcctcccgaataactgggattacaggtgtctgctg

SEQ ID NO: 5949 - DNA, 40 bp, Homo sapiens
cagcagacacctgtaatcccagttattcgggaggctgagg

SEQ ID NO: 5950 - DNA, 40 bp, Homo sapiens
ctcagcctcccgaataactgggattacaggtgtctgctgc

SEQ ID NO: 5951 - DNA, 40 bp, Homo sapiens
gcagcagacacctgtaatcccagttattcgggaggctgag

SEQ ID NO: 5952 - DNA, 40 bp, Homo sapiens
tcagcctcccgaataactgggattacaggtgtctgctgcc

SEQ ID NO: 5953 - DNA, 40 bp, Homo sapiens
ggcagcagacacctgtaatcccagttattcgggaggctga

SEQ ID NO: 5954 - DNA, 40 bp, Homo sapiens
cagcctcccgaataactgggattacaggtgtctgctgcca

SEQ ID NO: 5955 - DNA, 40 bp, Homo sapiens
tggcagcagacacctgtaatcccagttattcgggaggctg

SEQ ID NO: 5956 - DNA, 40 bp, Homo sapiens
agcctcccgaataactgggattacaggtgtctgctgccat

SEQ ID NO: 5957 - DNA, 40 bp, Homo sapiens
atggcagcagacacctgtaatcccagttattcgggaggct

SEQ ID NO: 5958 - DNA, 40 bp, Homo sapiens
gcctcccgaataactgggattacaggtgtctgctgccatg

SEQ ID NO: 5959 - DNA, 40 bp, Homo sapiens
catggcagcagacacctgtaatcccagttattcgggaggc

SEQ ID NO: 5960 - DNA, 40 bp, Homo sapiens
cctcccgaataactgggattacaggtgtctgctgccatgc

SEQ ID NO: 5961 - DNA, 40 bp, Homo sapiens
gcatggcagcagacacctgtaatcccagttattcgggagg

SEQ ID NO: 5962 - DNA, 40 bp, Homo sapiens
ctcccgaataactgggattacaggtgtctgctgccatgcc

SEQ ID NO: 5963 - DNA, 40 bp, Homo sapiens
ggcatggcagcagacacctgtaatcccagttattcgggag

SEQ ID NO: 5964 - DNA, 40 bp, Homo sapiens
tcccgaataactgggattacaggtgtctgctgccatgccc

SEQ ID NO: 5965 - DNA, 40 bp, Homo sapiens
gggcatggcagcagacacctgtaatcccagttattcggga

SEQ ID NO: 5966 - DNA, 40 bp, Homo sapiens
cccgaataactgggattacaggtgtctgctgccatgcccg

SEQ ID NO: 5967 - DNA, 40 bp, Homo sapiens
cgggcatggcagcagacacctgtaatcccagttattcggg

SEQ ID NO: 5968 - DNA, 40 bp, Homo sapiens
ccgaataactgggattacaggtgtctgctgccatgcccgg

SEQ ID NO: 5969 - DNA, 40 bp, Homo sapiens
ccgggcatggcagcagacacctgtaatcccagttattcgg

SEQ ID NO: 5970 - DNA, 40 bp, Homo sapiens
cgaataactgggattacaggtgtctgctgccatgcccggc

SEQ ID NO: 5971 - DNA, 40 bp, Homo sapiens
gccgggcatggcagcagacacctgtaatcccagttattcg

SEQ ID NO: 5972 - DNA, 40 bp, Homo sapiens
gaataactgggattacaggtgtctgctgccatgcccggct

SEQ ID NO: 5973 - DNA, 40 bp, Homo sapiens
agccgggcatggcagcagacacctgtaatcccagttattc

SEQ ID NO: 5974 - DNA, 40 bp, Homo sapiens
aataactgggattacaggtgtctgctgccatgcccggcta

SEQ ID NO: 5975 - DNA, 40 bp, Homo sapiens
tagccgggcatggcagcagacacctgtaatcccagttatt

SEQ ID NO: 5976 - DNA, 40 bp, Homo sapiens
ataactgggattacaggtgtctgctgccatgcccggctaa

SEQ ID NO: 5977 - DNA, 40 bp, Homo sapiens
ttagccgggcatggcagcagacacctgtaatcccagttat

SEQ ID NO: 5978 - DNA, 40 bp, Homo sapiens
taactgggattacaggtgtctgctgccatgcccggctaat

SEQ ID NO: 5979 - DNA, 40 bp, Homo sapiens
attagccgggcatggcagcagacacctgtaatcccagtta

SEQ ID NO: 5980 - DNA, 40 bp, Homo sapiens
aactgggattacaggtgtctgctgccatgcccggctaatt

SEQ ID NO: 5981 - DNA, 40 bp, Homo sapiens
aattagccgggcatggcagcagacacctgtaatcccagtt

SEQ ID NO: 5982 - DNA, 40 bp, Homo sapiens
actgggattacaggtgtctgctgccatgcccggctaattt

SEQ ID NO: 5983 - DNA, 40 bp, Homo sapiens
aaattagccgggcatggcagcagacacctgtaatcccagt

SEQ ID NO: 5984 - DNA, 40 bp, Homo sapiens
ctgggattacaggtgtctgctgccatgcccggctaatttt

SEQ ID NO: 5985 - DNA, 40 bp, Homo sapiens
aaaattagccgggcatggcagcagacacctgtaatcccag

SEQ ID NO: 5986 - DNA, 40 bp, Homo sapiens
tgggattacaggtgtctgctgccatgcccggctaattttt

SEQ ID NO: 5987 - DNA, 40 bp, Homo sapiens
aaaaattagccgggcatggcagcagacacctgtaatccca

SEQ ID NO: 5988 - DNA, 40 bp, Homo sapiens
gggattacaggtgtctgctgccatgcccggctaatttttt

SEQ ID NO: 5989 - DNA, 40 bp, Homo sapiens
aaaaaattagccgggcatggcagcagacacctgtaatccc

SEQ ID NO: 5990 - DNA, 40 bp, Homo sapiens
ggattacaggtgtctgctgccatgcccggctaattttttg

SEQ ID NO: 5991 - DNA, 40 bp, Homo sapiens
caaaaaattagccgggcatggcagcagacacctgtaatcc

SEQ ID NO: 5992 - DNA, 40 bp, Homo sapiens
gattacaggtgtctgctgccatgcccggctaattttttgt

SEQ ID NO: 5993 - DNA, 40 bp, Homo sapiens
acaaaaaattagccgggcatggcagcagacacctgtaatc

SEQ ID NO: 5994 - DNA, 40 bp, Homo sapiens
attacaggtgtctgctgccatgcccggctaattttttgta

SEQ ID NO: 5995 - DNA, 40 bp, Homo sapiens
tacaaaaaattagccgggcatggcagcagacacctgtaat

SEQ ID NO: 5996 - DNA, 40 bp, Homo sapiens
ttacaggtgtctgctgccatgcccggctaattttttgtat

SEQ ID NO: 5997 - DNA, 40 bp, Homo sapiens
atacaaaaaattagccgggcatggcagcagacacctgtaa

SEQ ID NO: 5998 - DNA, 40 bp, Homo sapiens
tacaggtgtctgctgccatgcccggctaattttttgtatt

SEQ ID NO: 5999 - DNA, 40 bp, Homo sapiens
aatacaaaaaattagccgggcatggcagcagacacctgta

SEQ ID NO: 6000 - DNA, 40 bp, Homo sapiens
acaggtgtctgctgccatgcccggctaattttttgtattt

SEQ ID NO: 6001 - DNA, 40 bp, Homo sapiens
aaatacaaaaaattagccgggcatggcagcagacacctgt

SEQ ID NO: 6002 - DNA, 40 bp, Homo sapiens
caggtgtctgctgccatgcccggctaattttttgtatttt

SEQ ID NO: 6003 - DNA, 40 bp, Homo sapiens
aaaatacaaaaaattagccgggcatggcagcagacacctg

SEQ ID NO: 6004 - DNA, 40 bp, Homo sapiens
aggtgtctgctgccatgcccggctaattttttgtattttt

SEQ ID NO: 6005 - DNA, 40 bp, Homo sapiens
aaaaatacaaaaaattagccgggcatggcagcagacacct

SEQ ID NO: 6006 - DNA, 40 bp, Homo sapiens
ggtgtctgctgccatgcccggctaattttttgtattttta

SEQ ID NO: 6007 - DNA, 40 bp, Homo sapiens
taaaaatacaaaaaattagccgggcatggcagcagacacc

SEQ ID NO: 6008 - DNA, 40 bp, Homo sapiens
gtgtctgctgccatgcccggctaattttttgtatttttag

SEQ ID NO: 6009 - DNA, 40 bp, Homo sapiens
ctaaaaatacaaaaaattagccgggcatggcagcagacac

SEQ ID NO: 6010 - DNA, 40 bp, Homo sapiens
tgtctgctgccatgcccggctaattttttgtatttttagt

SEQ ID NO: 6011 - DNA, 40 bp, Homo sapiens
actaaaaatacaaaaaattagccgggcatggcagcagaca

SEQ ID NO: 6012 - DNA, 40 bp, Homo sapiens
gtctgctgccatgcccggctaattttttgtatttttagta

SEQ ID NO: 6013 - DNA, 40 bp, Homo sapiens
tactaaaaatacaaaaaattagccgggcatggcagcagac

SEQ ID NO: 6014 - DNA, 40 bp, Homo sapiens
tctgctgccatgcccggctaattttttgtatttttagtag

SEQ ID NO: 6015 - DNA, 40 bp, Homo sapiens
ctactaaaaatacaaaaaattagccgggcatggcagcaga

SEQ ID NO: 6016 - DNA, 40 bp, Homo sapiens
ctgctgccatgcccggctaattttttgtatttttagtaga

SEQ ID NO: 6017 - DNA, 40 bp, Homo sapiens
tctactaaaaatacaaaaaattagccgggcatggcagcag

SEQ ID NO: 6018 - DNA, 40 bp, Homo sapiens
tgctgccatgcccggctaattttttgtatttttagtagag

SEQ ID NO: 6019 - DNA, 40 bp, Homo sapiens
ctctactaaaaatacaaaaaattagccgggcatggcagca

SEQ ID NO: 6020 - DNA, 40 bp, Homo sapiens
gctgccatgcccggctaattttttgtatttttagtagaga

SEQ ID NO: 6021 - DNA, 40 bp, Homo sapiens
tctctactaaaaatacaaaaaattagccgggcatggcagc

SEQ ID NO: 6022 - DNA, 40 bp, Homo sapiens
ctgccatgcccggctaattttttgtatttttagtagagac

SEQ ID NO: 6023 - DNA, 40 bp, Homo sapiens
gtctctactaaaaatacaaaaaattagccgggcatggcag

SEQ ID NO: 6024 - DNA, 40 bp, Homo sapiens
tgccatgcccggctaattttttgtatttttagtagagacg

SEQ ID NO: 6025 - DNA, 40 bp, Homo sapiens
cgtctctactaaaaatacaaaaaattagccgggcatggca

SEQ ID NO: 6026 - DNA, 40 bp, Homo sapiens
gccatgcccggctaattttttgtatttttagtagagacgg

SEQ ID NO: 6027 - DNA, 40 bp, Homo sapiens
ccgtctctactaaaaatacaaaaaattagccgggcatggc

SEQ ID NO: 6028 - DNA, 40 bp, Homo sapiens
ccatgcccggctaattttttgtatttttagtagagacggg

SEQ ID NO: 6029 - DNA, 40 bp, Homo sapiens
cccgtctctactaaaaatacaaaaaattagccgggcatgg

SEQ ID NO: 6030 - DNA, 40 bp, Homo sapiens
catgcccggctaattttttgtatttttagtagagacgggg

SEQ ID NO: 6031 - DNA, 40 bp, Homo sapiens
ccccgtctctactaaaaatacaaaaaattagccgggcatg

SEQ ID NO: 6032 - DNA, 40 bp, Homo sapiens
atgcccggctaattttttgtatttttagtagagacggggg

SEQ ID NO: 6033 - DNA, 40 bp, Homo sapiens
cccccgtctctactaaaaatacaaaaaattagccgggcat

SEQ ID NO: 6034 - DNA, 40 bp, Homo sapiens
tgcccggctaattttttgtatttttagtagagacgggggt

SEQ ID NO: 6035 - DNA, 40 bp, Homo sapiens
acccccgtctctactaaaaatacaaaaaattagccgggca

SEQ ID NO: 6036 - DNA, 40 bp, Homo sapiens
gcccggctaattttttgtatttttagtagagacgggggtt

SEQ ID NO: 6037 - DNA, 40 bp, Homo sapiens
aacccccgtctctactaaaaatacaaaaaattagccgggc

SEQ ID NO: 6038 - DNA, 40 bp, Homo sapiens
cccggctaattttttgtatttttagtagagacgggggttt

SEQ ID NO: 6039 - DNA, 40 bp, Homo sapiens
aaacccccgtctctactaaaaatacaaaaaattagccggg

SEQ ID NO: 6040 - DNA, 40 bp, Homo sapiens
ccggctaattttttgtatttttagtagagacgggggtttc

SEQ ID NO: 6041 - DNA, 40 bp, Homo sapiens
gaaacccccgtctctactaaaaatacaaaaaattagccgg

SEQ ID NO: 6042 - DNA, 40 bp, Homo sapiens
cggctaattttttgtatttttagtagagacgggggtttca

SEQ ID NO: 6043 - DNA, 40 bp, Homo sapiens
tgaaacccccgtctctactaaaaatacaaaaaattagccg

SEQ ID NO: 6044 - DNA, 40 bp, Homo sapiens
ggctaattttttgtatttttagtagagacgggggtttcac

SEQ ID NO: 6045 - DNA, 40 bp, Homo sapiens
gtgaaacccccgtctctactaaaaatacaaaaaattagcc

SEQ ID NO: 6046 - DNA, 40 bp, Homo sapiens
gctaattttttgtatttttagtagagacgggggtttcacc

SEQ ID NO: 6047 - DNA, 40 bp, Homo sapiens
ggtgaaacccccgtctctactaaaaatacaaaaaattagc

SEQ ID NO: 6048 - DNA, 40 bp, Homo sapiens
ctaattttttgtatttttagtagagacgggggtttcacca

SEQ ID NO: 6049 - DNA, 40 bp, Homo sapiens
tggtgaaacccccgtctctactaaaaatacaaaaaattag

SEQ ID NO: 6050 - DNA, 40 bp, Homo sapiens
taattttttgtatttttagtagagacgggggtttcaccat

SEQ ID NO: 6051 - DNA, 40 bp, Homo sapiens
atggtgaaacccccgtctctactaaaaatacaaaaaatta

SEQ ID NO: 6052 - DNA, 40 bp, Homo sapiens
aattttttgtatttttagtagagacgggggtttcaccatg

SEQ ID NO: 6053 - DNA, 40 bp, Homo sapiens
catggtgaaacccccgtctctactaaaaatacaaaaaatt

SEQ ID NO: 6054 - DNA, 40 bp, Homo sapiens
attttttgtatttttagtagagacgggggtttcaccatgt

SEQ ID NO: 6055 - DNA, 40 bp, Homo sapiens
acatggtgaaacccccgtctctactaaaaatacaaaaaat

SEQ ID NO: 6056 - DNA, 40 bp, Homo sapiens
ttttttgtatttttagtagagacgggggtttcaccatgtt

SEQ ID NO: 6057 - DNA, 40 bp, Homo sapiens
aacatggtgaaacccccgtctctactaaaaatacaaaaaa

SEQ ID NO: 6058 - DNA, 40 bp, Homo sapiens
tttttgtatttttagtagagacgggggtttcaccatgttg

SEQ ID NO: 6059 - DNA, 40 bp, Homo sapiens
caacatggtgaaacccccgtctctactaaaaatacaaaaa

SEQ ID NO: 6060 - DNA, 40 bp, Homo sapiens
ttttgtatttttagtagagacgggggtttcaccatgttgg

SEQ ID NO: 6061 - DNA, 40 bp, Homo sapiens
ccaacatggtgaaacccccgtctctactaaaaatacaaaa

SEQ ID NO: 6062 - DNA, 40 bp, Homo sapiens
tttgtatttttagtagagacgggggtttcaccatgttggt

SEQ ID NO: 6063 - DNA, 40 bp, Homo sapiens
accaacatggtgaaacccccgtctctactaaaaatacaaa

SEQ ID NO: 6064 - DNA, 40 bp, Homo sapiens
ttgtatttttagtagagacgggggtttcaccatgttggtc

SEQ ID NO: 6065 - DNA, 40 bp, Homo sapiens
gaccaacatggtgaaacccccgtctctactaaaaatacaa

SEQ ID NO: 6066 - DNA, 40 bp, Homo sapiens
tgtatttttagtagagacgggggtttcaccatgttggtca

SEQ ID NO: 6067 - DNA, 40 bp, Homo sapiens
tgaccaacatggtgaaacccccgtctctactaaaaataca

SEQ ID NO: 6068 - DNA, 40 bp, Homo sapiens
gtatttttagtagagacgggggtttcaccatgttggtcag

SEQ ID NO: 6069 - DNA, 40 bp, Homo sapiens
ctgaccaacatggtgaaacccccgtctctactaaaaatac

SEQ ID NO: 6070 - DNA, 40 bp, Homo sapiens
tatttttagtagagacgggggtttcaccatgttggtcagg

SEQ ID NO: 6071 - DNA, 40 bp, Homo sapiens
cctgaccaacatggtgaaacccccgtctctactaaaaata

SEQ ID NO: 6072 - DNA, 40 bp, Homo sapiens
atttttagtagagacgggggtttcaccatgttggtcaggc

SEQ ID NO: 6073 - DNA, 40 bp, Homo sapiens
gcctgaccaacatggtgaaacccccgtctctactaaaaat

SEQ ID NO: 6074 - DNA, 40 bp, Homo sapiens
tttttagtagagacgggggtttcaccatgttggtcaggct

SEQ ID NO: 6075 - DNA, 40 bp, Homo sapiens
agcctgaccaacatggtgaaacccccgtctctactaaaaa

SEQ ID NO: 6076 - DNA, 40 bp, Homo sapiens
ttttagtagagacgggggtttcaccatgttggtcaggctg

SEQ ID NO: 6077 - DNA, 40 bp, Homo sapiens
cagcctgaccaacatggtgaaacccccgtctctactaaaa

SEQ ID NO: 6078 - DNA, 40 bp, Homo sapiens
tttagtagagacgggggtttcaccatgttggtcaggctgg

SEQ ID NO: 6079 - DNA, 40 bp, Homo sapiens
ccagcctgaccaacatggtgaaacccccgtctctactaaa

SEQ ID NO: 6080 - DNA, 40 bp, Homo sapiens
ttagtagagacgggggtttcaccatgttggtcaggctggt

SEQ ID NO: 6081 - DNA, 40 bp, Homo sapiens
accagcctgaccaacatggtgaaacccccgtctctactaa

SEQ ID NO: 6082 - DNA, 40 bp, Homo sapiens
tagtagagacgggggtttcaccatgttggtcaggctggtc

SEQ ID NO: 6083 - DNA, 40 bp, Homo sapiens
gaccagcctgaccaacatggtgaaacccccgtctctacta

SEQ ID NO: 6084 - DNA, 40 bp, Homo sapiens
agtagagacgggggtttcaccatgttggtcaggctggtct

SEQ ID NO: 6085 - DNA, 40 bp, Homo sapiens
agaccagcctgaccaacatggtgaaacccccgtctctact

SEQ ID NO: 6086 - DNA, 40 bp, Homo sapiens
gtagagacgggggtttcaccatgttggtcaggctggtcta

SEQ ID NO: 6087 - DNA, 40 bp, Homo sapiens
tagaccagcctgaccaacatggtgaaacccccgtctctac

SEQ ID NO: 6088 - DNA, 40 bp, Homo sapiens
tagagacgggggtttcaccatgttggtcaggctggtctag

SEQ ID NO: 6089 - DNA, 40 bp, Homo sapiens
ctagaccagcctgaccaacatggtgaaacccccgtctcta

SEQ ID NO: 6090 - DNA, 40 bp, Homo sapiens
agagacgggggtttcaccatgttggtcaggctggtctaga

SEQ ID NO: 6091 - DNA, 40 bp, Homo sapiens
tctagaccagcctgaccaacatggtgaaacccccgtctct

SEQ ID NO: 6092 - DNA, 40 bp, Homo sapiens
gagacgggggtttcaccatgttggtcaggctggtctagaa

SEQ ID NO: 6093 - DNA, 40 bp, Homo sapiens
ttctagaccagcctgaccaacatggtgaaacccccgtctc

SEQ ID NO: 6094 - DNA, 40 bp, Homo sapiens
agacgggggtttcaccatgttggtcaggctggtctagaac

SEQ ID NO: 6095 - DNA, 40 bp, Homo sapiens
gttctagaccagcctgaccaacatggtgaaacccccgtct

SEQ ID NO: 6096 - DNA, 40 bp, Homo sapiens
gacgggggtttcaccatgttggtcaggctggtctagaact

SEQ ID NO: 6097 - DNA, 40 bp, Homo sapiens
agttctagaccagcctgaccaacatggtgaaacccccgtc

SEQ ID NO: 6098 - DNA, 40 bp, Homo sapiens
acgggggtttcaccatgttggtcaggctggtctagaactc

SEQ ID NO: 6099 - DNA, 40 bp, Homo sapiens
gagttctagaccagcctgaccaacatggtgaaacccccgt

SEQ ID NO: 6100 - DNA, 40 bp, Homo sapiens
cgggggtttcaccatgttggtcaggctggtctagaactcc

SEQ ID NO: 6101 - DNA, 40 bp, Homo sapiens
ggagttctagaccagcctgaccaacatggtgaaacccccg

SEQ ID NO: 6102 - DNA, 40 bp, Homo sapiens
gggggtttcaccatgttggtcaggctggtctagaactcct

SEQ ID NO: 6103 - DNA, 40 bp, Homo sapiens
aggagttctagaccagcctgaccaacatggtgaaaccccc

SEQ ID NO: 6104 - DNA, 40 bp, Homo sapiens
ggggtttcaccatgttggtcaggctggtctagaactcctg

SEQ ID NO: 6105 - DNA, 40 bp, Homo sapiens
caggagttctagaccagcctgaccaacatggtgaaacccc

SEQ ID NO: 6106 - DNA, 40 bp, Homo sapiens
gggtttcaccatgttggtcaggctggtctagaactcctga

SEQ ID NO: 6107 - DNA, 40 bp, Homo sapiens
tcaggagttctagaccagcctgaccaacatggtgaaaccc

SEQ ID NO: 6108 - DNA, 40 bp, Homo sapiens
ggtttcaccatgttggtcaggctggtctagaactcctgac

SEQ ID NO: 6109 - DNA, 40 bp, Homo sapiens
gtcaggagttctagaccagcctgaccaacatggtgaaacc

SEQ ID NO: 6110 - DNA, 40 bp, Homo sapiens
gtttcaccatgttggtcaggctggtctagaactcctgacc

SEQ ID NO: 6111 - DNA, 40 bp, Homo sapiens
ggtcaggagttctagaccagcctgaccaacatggtgaaac

SEQ ID NO: 6112 - DNA, 40 bp, Homo sapiens
tttcaccatgttggtcaggctggtctagaactcctgacct

SEQ ID NO: 6113 - DNA, 40 bp, Homo sapiens
aggtcaggagttctagaccagcctgaccaacatggtgaaa

SEQ ID NO: 6114 - DNA, 40 bp, Homo sapiens
ttcaccatgttggtcaggctggtctagaactcctgacctc

SEQ ID NO: 6115 - DNA, 40 bp, Homo sapiens
gaggtcaggagttctagaccagcctgaccaacatggtgaa

SEQ ID NO: 6116 - DNA, 40 bp, Homo sapiens
tcaccatgttggtcaggctggtctagaactcctgacctcg

SEQ ID NO: 6117 - DNA, 40 bp, Homo sapiens
cgaggtcaggagttctagaccagcctgaccaacatggtga

SEQ ID NO: 6118 - DNA, 40 bp, Homo sapiens
caccatgttggtcaggctggtctagaactcctgacctcgt

SEQ ID NO: 6119 - DNA, 40 bp, Homo sapiens
acgaggtcaggagttctagaccagcctgaccaacatggtg

SEQ ID NO: 6120 - DNA, 40 bp, Homo sapiens
accatgttggtcaggctggtctagaactcctgacctcgtg

SEQ ID NO: 6121 - DNA, 40 bp, Homo sapiens
cacgaggtcaggagttctagaccagcctgaccaacatggt

SEQ ID NO: 6122 - DNA, 40 bp, Homo sapiens
ccatgttggtcaggctggtctagaactcctgacctcgtga

SEQ ID NO: 6123 - DNA, 40 bp, Homo sapiens
tcacgaggtcaggagttctagaccagcctgaccaacatgg

SEQ ID NO: 6124 - DNA, 40 bp, Homo sapiens
catgttggtcaggctggtctagaactcctgacctcgtgat

SEQ ID NO: 6125 - DNA, 40 bp, Homo sapiens
atcacgaggtcaggagttctagaccagcctgaccaacatg

SEQ ID NO: 6126 - DNA, 40 bp, Homo sapiens
atgttggtcaggctggtctagaactcctgacctcgtgatc

SEQ ID NO: 6127 - DNA, 40 bp, Homo sapiens
gatcacgaggtcaggagttctagaccagcctgaccaacat

SEQ ID NO: 6128 - DNA, 40 bp, Homo sapiens
tgttggtcaggctggtctagaactcctgacctcgtgatct

SEQ ID NO: 6129 - DNA, 40 bp, Homo sapiens
agatcacgaggtcaggagttctagaccagcctgaccaaca

SEQ ID NO: 6130 - DNA, 40 bp, Homo sapiens
gttggtcaggctggtctagaactcctgacctcgtgatctg

SEQ ID NO: 6131 - DNA, 40 bp, Homo sapiens
cagatcacgaggtcaggagttctagaccagcctgaccaac

SEQ ID NO: 6132 - DNA, 40 bp, Homo sapiens
ttggtcaggctggtctagaactcctgacctcgtgatctgc

SEQ ID NO: 6133 - DNA, 40 bp, Homo sapiens
gcagatcacgaggtcaggagttctagaccagcctgaccaa

SEQ ID NO: 6134 - DNA, 40 bp, Homo sapiens
tggtcaggctggtctagaactcctgacctcgtgatctgcc

SEQ ID NO: 6135 - DNA, 40 bp, Homo sapiens
ggcagatcacgaggtcaggagttctagaccagcctgacca

SEQ ID NO: 6136 - DNA, 40 bp, Homo sapiens
ggtcaggctggtctagaactcctgacctcgtgatctgccc

SEQ ID NO: 6137 - DNA, 40 bp, Homo sapiens
gggcagatcacgaggtcaggagttctagaccagcctgacc

SEQ ID NO: 6138 - DNA, 40 bp, Homo sapiens
gtcaggctggtctagaactcctgacctcgtgatctgcccg

SEQ ID NO: 6139 - DNA, 40 bp, Homo sapiens
cgggcagatcacgaggtcaggagttctagaccagcctgac

SEQ ID NO: 6140 - DNA, 40 bp, Homo sapiens
tcaggctggtctagaactcctgacctcgtgatctgcccgc

SEQ ID NO: 6141 - DNA, 40 bp, Homo sapiens
gcgggcagatcacgaggtcaggagttctagaccagcctga

SEQ ID NO: 6142 - DNA, 40 bp, Homo sapiens
caggctggtctagaactcctgacctcgtgatctgcccgcc

SEQ ID NO: 6143 - DNA, 40 bp, Homo sapiens
ggcgggcagatcacgaggtcaggagttctagaccagcctg

SEQ ID NO: 6144 - DNA, 40 bp, Homo sapiens
aggctggtctagaactcctgacctcgtgatctgcccgcct

SEQ ID NO: 6145 - DNA, 40 bp, Homo sapiens
aggcgggcagatcacgaggtcaggagttctagaccagcct

SEQ ID NO: 6146 - DNA, 40 bp, Homo sapiens
ggctggtctagaactcctgacctcgtgatctgcccgcctc

SEQ ID NO: 6147 - DNA, 40 bp, Homo sapiens
gaggcgggcagatcacgaggtcaggagttctagaccagcc

SEQ ID NO: 6148 - DNA, 40 bp, Homo sapiens
gctggtctagaactcctgacctcgtgatctgcccgcctcg

SEQ ID NO: 6149 - DNA, 40 bp, Homo sapiens
cgaggcgggcagatcacgaggtcaggagttctagaccagc

SEQ ID NO: 6150 - DNA, 40 bp, Homo sapiens
ctggtctagaactcctgacctcgtgatctgcccgcctcgg

SEQ ID NO: 6151 - DNA, 40 bp, Homo sapiens
ccgaggcgggcagatcacgaggtcaggagttctagaccag

SEQ ID NO: 6152 - DNA, 40 bp, Homo sapiens
tggtctagaactcctgacctcgtgatctgcccgcctcggc

SEQ ID NO: 6153 - DNA, 40 bp, Homo sapiens
gccgaggcgggcagatcacgaggtcaggagttctagacca

SEQ ID NO: 6154 - DNA, 40 bp, Homo sapiens
ggtctagaactcctgacctcgtgatctgcccgcctcggcc

SEQ ID NO: 6155 - DNA, 40 bp, Homo sapiens
ggccgaggcgggcagatcacgaggtcaggagttctagacc

SEQ ID NO: 6156 - DNA, 40 bp, Homo sapiens
gtctagaactcctgacctcgtgatctgcccgcctcggcct

SEQ ID NO: 6157 - DNA, 40 bp, Homo sapiens
aggccgaggcgggcagatcacgaggtcaggagttctagac

SEQ ID NO: 6158 - DNA, 40 bp, Homo sapiens
tctagaactcctgacctcgtgatctgcccgcctcggcctc

SEQ ID NO: 6159 - DNA, 40 bp, Homo sapiens
gaggccgaggcgggcagatcacgaggtcaggagttctaga

SEQ ID NO: 6160 - DNA, 40 bp, Homo sapiens
ctagaactcctgacctcgtgatctgcccgcctcggcctcc

SEQ ID NO: 6161 - DNA, 40 bp, Homo sapiens
ggaggccgaggcgggcagatcacgaggtcaggagttctag

SEQ ID NO: 6162 - DNA, 40 bp, Homo sapiens
tagaactcctgacctcgtgatctgcccgcctcggcctccc

SEQ ID NO: 6163 - DNA, 40 bp, Homo sapiens
gggaggccgaggcgggcagatcacgaggtcaggagttcta

SEQ ID NO: 6164 - DNA, 40 bp, Homo sapiens
agaactcctgacctcgtgatctgcccgcctcggcctccca

SEQ ID NO: 6165 - DNA, 40 bp, Homo sapiens
tgggaggccgaggcgggcagatcacgaggtcaggagttct

SEQ ID NO: 6166 - DNA, 40 bp, Homo sapiens
gaactcctgacctcgtgatctgcccgcctcggcctcccac

SEQ ID NO: 6167 - DNA, 40 bp, Homo sapiens
gtgggaggccgaggcgggcagatcacgaggtcaggagttc

SEQ ID NO: 6168 - DNA, 40 bp, Homo sapiens
aactcctgacctcgtgatctgcccgcctcggcctcccaca

SEQ ID NO: 6169 - DNA, 40 bp, Homo sapiens
tgtgggaggccgaggcgggcagatcacgaggtcaggagtt

SEQ ID NO: 6170 - DNA, 40 bp, Homo sapiens
actcctgacctcgtgatctgcccgcctcggcctcccacag

SEQ ID NO: 6171 - DNA, 40 bp, Homo sapiens
ctgtgggaggccgaggcgggcagatcacgaggtcaggagt

SEQ ID NO: 6172 - DNA, 40 bp, Homo sapiens
ctcctgacctcgtgatctgcccgcctcggcctcccacagt

SEQ ID NO: 6173 - DNA, 40 bp, Homo sapiens
actgtgggaggccgaggcgggcagatcacgaggtcaggag

SEQ ID NO: 6174 - DNA, 40 bp, Homo sapiens
tcctgacctcgtgatctgcccgcctcggcctcccacagtg

SEQ ID NO: 6175 - DNA, 40 bp, Homo sapiens
cactgtgggaggccgaggcgggcagatcacgaggtcagga

SEQ ID NO: 6176 - DNA, 40 bp, Homo sapiens
cctgacctcgtgatctgcccgcctcggcctcccacagtgg

SEQ ID NO: 6177 - DNA, 40 bp, Homo sapiens
ccactgtgggaggccgaggcgggcagatcacgaggtcagg

SEQ ID NO: 6178 - DNA, 40 bp, Homo sapiens
ctgacctcgtgatctgcccgcctcggcctcccacagtggc

SEQ ID NO: 6179 - DNA, 40 bp, Homo sapiens
gccactgtgggaggccgaggcgggcagatcacgaggtcag

SEQ ID NO: 6180 - DNA, 40 bp, Homo sapiens
tgacctcgtgatctgcccgcctcggcctcccacagtggca

SEQ ID NO: 6181 - DNA, 40 bp, Homo sapiens
tgccactgtgggaggccgaggcgggcagatcacgaggtca

SEQ ID NO: 6182 - DNA, 40 bp, Homo sapiens
gacctcgtgatctgcccgcctcggcctcccacagtggcat

SEQ ID NO: 6183 - DNA, 40 bp, Homo sapiens
atgccactgtgggaggccgaggcgggcagatcacgaggtc

SEQ ID NO: 6184 - DNA, 40 bp, Homo sapiens
acctcgtgatctgcccgcctcggcctcccacagtggcatg

SEQ ID NO: 6185 - DNA, 40 bp, Homo sapiens
catgccactgtgggaggccgaggcgggcagatcacgaggt

SEQ ID NO: 6186 - DNA, 40 bp, Homo sapiens
cctcgtgatctgcccgcctcggcctcccacagtggcatgt

SEQ ID NO: 6187 - DNA, 40 bp, Homo sapiens
acatgccactgtgggaggccgaggcgggcagatcacgagg

SEQ ID NO: 6188 - DNA, 40 bp, Homo sapiens
ctcgtgatctgcccgcctcggcctcccacagtggcatgtg

SEQ ID NO: 6189 - DNA, 40 bp, Homo sapiens
cacatgccactgtgggaggccgaggcgggcagatcacgag

SEQ ID NO: 6190 - DNA, 40 bp, Homo sapiens
tcgtgatctgcccgcctcggcctcccacagtggcatgtgc

SEQ ID NO: 6191 - DNA, 40 bp, Homo sapiens
gcacatgccactgtgggaggccgaggcgggcagatcacga

SEQ ID NO: 6192 - DNA, 40 bp, Homo sapiens
cgtgatctgcccgcctcggcctcccacagtggcatgtgca

SEQ ID NO: 6193 - DNA, 40 bp, Homo sapiens
tgcacatgccactgtgggaggccgaggcgggcagatcacg

SEQ ID NO: 6194 - DNA, 40 bp, Homo sapiens
gtgatctgcccgcctcggcctcccacagtggcatgtgcat

SEQ ID NO: 6195 - DNA, 40 bp, Homo sapiens
atgcacatgccactgtgggaggccgaggcgggcagatcac

SEQ ID NO: 6196 - DNA, 40 bp, Homo sapiens
tgatctgcccgcctcggcctcccacagtggcatgtgcatc

SEQ ID NO: 6197 - DNA, 40 bp, Homo sapiens
gatgcacatgccactgtgggaggccgaggcgggcagatca

SEQ ID NO: 6198 - DNA, 40 bp, Homo sapiens
gatctgcccgcctcggcctcccacagtggcatgtgcatct

SEQ ID NO: 6199 - DNA, 40 bp, Homo sapiens
agatgcacatgccactgtgggaggccgaggcgggcagatc

SEQ ID NO: 6200 - DNA, 40 bp, Homo sapiens
atctgcccgcctcggcctcccacagtggcatgtgcatctt

SEQ ID NO: 6201 - DNA, 40 bp, Homo sapiens
aagatgcacatgccactgtgggaggccgaggcgggcagat

SEQ ID NO: 6202 - DNA, 40 bp, Homo sapiens
tctgcccgcctcggcctcccacagtggcatgtgcatctta

SEQ ID NO: 6203 - DNA, 40 bp, Homo sapiens
taagatgcacatgccactgtgggaggccgaggcgggcaga

SEQ ID NO: 6204 - DNA, 40 bp, Homo sapiens
ctgcccgcctcggcctcccacagtggcatgtgcatcttat

SEQ ID NO: 6205 - DNA, 40 bp, Homo sapiens
ataagatgcacatgccactgtgggaggccgaggcgggcag

SEQ ID NO: 6206 - DNA, 40 bp, Homo sapiens
tgcccgcctcggcctcccacagtggcatgtgcatcttata

SEQ ID NO: 6207 - DNA, 40 bp, Homo sapiens
tataagatgcacatgccactgtgggaggccgaggcgggca

SEQ ID NO: 6208 - DNA, 40 bp, Homo sapiens
gcccgcctcggcctcccacagtggcatgtgcatcttatag

SEQ ID NO: 6209 - DNA, 40 bp, Homo sapiens
ctataagatgcacatgccactgtgggaggccgaggcgggc

SEQ ID NO: 6210 - DNA, 40 bp, Homo sapiens
cccgcctcggcctcccacagtggcatgtgcatcttatagc

SEQ ID NO: 6211 - DNA, 40 bp, Homo sapiens
gctataagatgcacatgccactgtgggaggccgaggcggg

SEQ ID NO: 6212 - DNA, 40 bp, Homo sapiens
ccgcctcggcctcccacagtggcatgtgcatcttatagct

SEQ ID NO: 6213 - DNA, 40 bp, Homo sapiens
agctataagatgcacatgccactgtgggaggccgaggcgg

SEQ ID NO: 6214 - DNA, 40 bp, Homo sapiens
cgcctcggcctcccacagtggcatgtgcatcttatagctg

SEQ ID NO: 6215 - DNA, 40 bp, Homo sapiens
cagctataagatgcacatgccactgtgggaggccgaggcg

SEQ ID NO: 6216 - DNA, 40 bp, Homo sapiens
gcctcggcctcccacagtggcatgtgcatcttatagctga

SEQ ID NO: 6217 - DNA, 40 bp, Homo sapiens
tcagctataagatgcacatgccactgtgggaggccgaggc

SEQ ID NO: 6218 - DNA, 40 bp, Homo sapiens
cctcggcctcccacagtggcatgtgcatcttatagctgaa

SEQ ID NO: 6219 - DNA, 40 bp, Homo sapiens
ttcagctataagatgcacatgccactgtgggaggccgagg

SEQ ID NO: 6220 - DNA, 40 bp, Homo sapiens
ctcggcctcccacagtggcatgtgcatcttatagctgaag

SEQ ID NO: 6221 - DNA, 40 bp, Homo sapiens
cttcagctataagatgcacatgccactgtgggaggccgag

SEQ ID NO: 6222 - DNA, 40 bp, Homo sapiens
tcggcctcccacagtggcatgtgcatcttatagctgaagt

SEQ ID NO: 6223 - DNA, 40 bp, Homo sapiens
acttcagctataagatgcacatgccactgtgggaggccga

SEQ ID NO: 6224 - DNA, 40 bp, Homo sapiens
cggcctcccacagtggcatgtgcatcttatagctgaagtc

SEQ ID NO: 6225 - DNA, 40 bp, Homo sapiens
gacttcagctataagatgcacatgccactgtgggaggccg

SEQ ID NO: 6226 - DNA, 40 bp, Homo sapiens
ggcctcccacagtggcatgtgcatcttatagctgaagtct

SEQ ID NO: 6227 - DNA, 40 bp, Homo sapiens
agacttcagctataagatgcacatgccactgtgggaggcc

SEQ ID NO: 6228 - DNA, 40 bp, Homo sapiens
gcctcccacagtggcatgtgcatcttatagctgaagtcta

SEQ ID NO: 6229 - DNA, 40 bp, Homo sapiens
tagacttcagctataagatgcacatgccactgtgggaggc

SEQ ID NO: 6230 - DNA, 40 bp, Homo sapiens
cctcccacagtggcatgtgcatcttatagctgaagtctaa

SEQ ID NO: 6231 - DNA, 40 bp, Homo sapiens
ttagacttcagctataagatgcacatgccactgtgggagg

SEQ ID NO: 6232 - DNA, 40 bp, Homo sapiens
ctcccacagtggcatgtgcatcttatagctgaagtctaag

SEQ ID NO: 6233 - DNA, 40 bp, Homo sapiens
cttagacttcagctataagatgcacatgccactgtgggag

SEQ ID NO: 6234 - DNA, 40 bp, Homo sapiens
tcccacagtggcatgtgcatcttatagctgaagtctaagc

SEQ ID NO: 6235 - DNA, 40 bp, Homo sapiens
gcttagacttcagctataagatgcacatgccactgtggga

SEQ ID NO: 6236 - DNA, 40 bp, Homo sapiens
cccacagtggcatgtgcatcttatagctgaagtctaagcc

SEQ ID NO: 6237 - DNA, 40 bp, Homo sapiens
ggcttagacttcagctataagatgcacatgccactgtggg

SEQ ID NO: 6238 - DNA, 40 bp, Homo sapiens
ccacagtggcatgtgcatcttatagctgaagtctaagcct

SEQ ID NO: 6239 - DNA, 40 bp, Homo sapiens
aggcttagacttcagctataagatgcacatgccactgtgg

SEQ ID NO: 6240 - DNA, 40 bp, Homo sapiens
cacagtggcatgtgcatcttatagctgaagtctaagcctt

SEQ ID NO: 6241 - DNA, 40 bp, Homo sapiens
aaggcttagacttcagctataagatgcacatgccactgtg

SEQ ID NO: 6242 - DNA, 40 bp, Homo sapiens
acagtggcatgtgcatcttatagctgaagtctaagccttc

SEQ ID NO: 6243 - DNA, 40 bp, Homo sapiens
gaaggcttagacttcagctataagatgcacatgccactgt

SEQ ID NO: 6244 - DNA, 40 bp, Homo sapiens
cagtggcatgtgcatcttatagctgaagtctaagccttct

SEQ ID NO: 6245 - DNA, 40 bp, Homo sapiens
agaaggcttagacttcagctataagatgcacatgccactg

SEQ ID NO: 6246 - DNA, 40 bp, Homo sapiens
agtggcatgtgcatcttatagctgaagtctaagccttctt

SEQ ID NO: 6247 - DNA, 40 bp, Homo sapiens
aagaaggcttagacttcagctataagatgcacatgccact

SEQ ID NO: 6248 - DNA, 40 bp, Homo sapiens
gtggcatgtgcatcttatagctgaagtctaagccttctta

SEQ ID NO: 6249 - DNA, 40 bp, Homo sapiens
taagaaggcttagacttcagctataagatgcacatgccac

SEQ ID NO: 6250 - DNA, 40 bp, Homo sapiens
tggcatgtgcatcttatagctgaagtctaagccttcttaa

SEQ ID NO: 6251 - DNA, 40 bp, Homo sapiens
ttaagaaggcttagacttcagctataagatgcacatgcca

SEQ ID NO: 6252 - DNA, 40 bp, Homo sapiens
ggcatgtgcatcttatagctgaagtctaagccttcttaaa

SEQ ID NO: 6253 - DNA, 40 bp, Homo sapiens
tttaagaaggcttagacttcagctataagatgcacatgcc

SEQ ID NO: 6254 - DNA, 40 bp, Homo sapiens
gcatgtgcatcttatagctgaagtctaagccttcttaaat

SEQ ID NO: 6255 - DNA, 40 bp, Homo sapiens
atttaagaaggcttagacttcagctataagatgcacatgc

SEQ ID NO: 6256 - DNA, 40 bp, Homo sapiens
catgtgcatcttatagctgaagtctaagccttcttaaatc

SEQ ID NO: 6257 - DNA, 40 bp, Homo sapiens
gatttaagaaggcttagacttcagctataagatgcacatg

SEQ ID NO: 6258 - DNA, 40 bp, Homo sapiens
atgtgcatcttatagctgaagtctaagccttcttaaatct

SEQ ID NO: 6259 - DNA, 40 bp, Homo sapiens
agatttaagaaggcttagacttcagctataagatgcacat

SEQ ID NO: 6260 - DNA, 40 bp, Homo sapiens
tgtgcatcttatagctgaagtctaagccttcttaaatctt

SEQ ID NO: 6261 - DNA, 40 bp, Homo sapiens
aagatttaagaaggcttagacttcagctataagatgcaca

SEQ ID NO: 6262 - DNA, 40 bp, Homo sapiens
gtgcatcttatagctgaagtctaagccttcttaaatcttg

SEQ ID NO: 6263 - DNA, 40 bp, Homo sapiens
caagatttaagaaggcttagacttcagctataagatgcac

SEQ ID NO: 6264 - DNA, 40 bp, Homo sapiens
tgcatcttatagctgaagtctaagccttcttaaatcttga

SEQ ID NO: 6265 - DNA, 40 bp, Homo sapiens
tcaagatttaagaaggcttagacttcagctataagatgca

SEQ ID NO: 6266 - DNA, 40 bp, Homo sapiens
gcatcttatagctgaagtctaagccttcttaaatcttgag

SEQ ID NO: 6267 - DNA, 40 bp, Homo sapiens
ctcaagatttaagaaggcttagacttcagctataagatgc

SEQ ID NO: 6268 - DNA, 40 bp, Homo sapiens
catcttatagctgaagtctaagccttcttaaatcttgaga

SEQ ID NO: 6269 - DNA, 40 bp, Homo sapiens
tctcaagatttaagaaggcttagacttcagctataagatg

SEQ ID NO: 6270 - DNA, 40 bp, Homo sapiens
atcttatagctgaagtctaagccttcttaaatcttgagat

SEQ ID NO: 6271 - DNA, 40 bp, Homo sapiens
atctcaagatttaagaaggcttagacttcagctataagat

SEQ ID NO: 6272 - DNA, 40 bp, Homo sapiens
tcttatagctgaagtctaagccttcttaaatcttgagatc

SEQ ID NO: 6273 - DNA, 40 bp, Homo sapiens
gatctcaagatttaagaaggcttagacttcagctataaga

SEQ ID NO: 6274 - DNA, 40 bp, Homo sapiens
cttatagctgaagtctaagccttcttaaatcttgagatcc

SEQ ID NO: 6275 - DNA, 40 bp, Homo sapiens
ggatctcaagatttaagaaggcttagacttcagctataag

SEQ ID NO: 6276 - DNA, 40 bp, Homo sapiens
ttatagctgaagtctaagccttcttaaatcttgagatcca

SEQ ID NO: 6277 - DNA, 40 bp, Homo sapiens
tggatctcaagatttaagaaggcttagacttcagctataa

SEQ ID NO: 6278 - DNA, 40 bp, Homo sapiens
tatagctgaagtctaagccttcttaaatcttgagatccat

SEQ ID NO: 6279 - DNA, 40 bp, Homo sapiens
atggatctcaagatttaagaaggcttagacttcagctata

SEQ ID NO: 6280 - DNA, 40 bp, Homo sapiens
atagctgaagtctaagccttcttaaatcttgagatccatc

SEQ ID NO: 6281 - DNA, 40 bp, Homo sapiens
gatggatctcaagatttaagaaggcttagacttcagctat

SEQ ID NO: 6282 - DNA, 40 bp, Homo sapiens
tagctgaagtctaagccttcttaaatcttgagatccatca

SEQ ID NO: 6283 - DNA, 40 bp, Homo sapiens
tgatggatctcaagatttaagaaggcttagacttcagcta

SEQ ID NO: 6284 - DNA, 40 bp, Homo sapiens
agctgaagtctaagccttcttaaatcttgagatccatcaa

SEQ ID NO: 6285 - DNA, 40 bp, Homo sapiens
ttgatggatctcaagatttaagaaggcttagacttcagct

SEQ ID NO: 6286 - DNA, 40 bp, Homo sapiens
gctgaagtctaagccttcttaaatcttgagatccatcaaa

SEQ ID NO: 6287 - DNA, 40 bp, Homo sapiens
tttgatggatctcaagatttaagaaggcttagacttcagc

SEQ ID NO: 6288 - DNA, 40 bp, Homo sapiens
ctgaagtctaagccttcttaaatcttgagatccatcaaaa

SEQ ID NO: 6289 - DNA, 40 bp, Homo sapiens
ttttgatggatctcaagatttaagaaggcttagacttcag

SEQ ID NO: 6290 - DNA, 40 bp, Homo sapiens
tgaagtctaagccttcttaaatcttgagatccatcaaaac

SEQ ID NO: 6291 - DNA, 40 bp, Homo sapiens
gttttgatggatctcaagatttaagaaggcttagacttca

SEQ ID NO: 6292 - DNA, 40 bp, Homo sapiens
gaagtctaagccttcttaaatcttgagatccatcaaaaca

SEQ ID NO: 6293 - DNA, 40 bp, Homo sapiens
tgttttgatggatctcaagatttaagaaggcttagacttc

SEQ ID NO: 6294 - DNA, 40 bp, Homo sapiens
aagtctaagccttcttaaatcttgagatccatcaaaacag

SEQ ID NO: 6295 - DNA, 40 bp, Homo sapiens
ctgttttgatggatctcaagatttaagaaggcttagactt

SEQ ID NO: 6296 - DNA, 40 bp, Homo sapiens
agtctaagccttcttaaatcttgagatccatcaaaacaga

SEQ ID NO: 6297 - DNA, 40 bp, Homo sapiens
tctgttttgatggatctcaagatttaagaaggcttagact

SEQ ID NO: 6298 - DNA, 40 bp, Homo sapiens
gtctaagccttcttaaatcttgagatccatcaaaacagac

SEQ ID NO: 6299 - DNA, 40 bp, Homo sapiens
gtctgttttgatggatctcaagatttaagaaggcttagac

SEQ ID NO: 6300 - DNA, 40 bp, Homo sapiens
tctaagccttcttaaatcttgagatccatcaaaacagaca

SEQ ID NO: 6301 - DNA, 40 bp, Homo sapiens
tgtctgttttgatggatctcaagatttaagaaggcttaga

SEQ ID NO: 6302 - DNA, 40 bp, Homo sapiens
ctaagccttcttaaatcttgagatccatcaaaacagacag

SEQ ID NO: 6303 - DNA, 40 bp, Homo sapiens
ctgtctgttttgatggatctcaagatttaagaaggcttag

SEQ ID NO: 6304 - DNA, 40 bp, Homo sapiens
taagccttcttaaatcttgagatccatcaaaacagacagg

SEQ ID NO: 6305 - DNA, 40 bp, Homo sapiens
cctgtctgttttgatggatctcaagatttaagaaggctta

SEQ ID NO: 6306 - DNA, 40 bp, Homo sapiens
aagccttcttaaatcttgagatccatcaaaacagacaggt

SEQ ID NO: 6307 - DNA, 40 bp, Homo sapiens
acctgtctgttttgatggatctcaagatttaagaaggctt

SEQ ID NO: 6308 - DNA, 40 bp, Homo sapiens
agccttcttaaatcttgagatccatcaaaacagacaggtt

SEQ ID NO: 6309 - DNA, 40 bp, Homo sapiens
aacctgtctgttttgatggatctcaagatttaagaaggct

SEQ ID NO: 6310 - DNA, 40 bp, Homo sapiens
gccttcttaaatcttgagatccatcaaaacagacaggttt

SEQ ID NO: 6311 - DNA, 40 bp, Homo sapiens
aaacctgtctgttttgatggatctcaagatttaagaaggc

SEQ ID NO: 6312 - DNA, 40 bp, Homo sapiens
ccttcttaaatcttgagatccatcaaaacagacaggtttt

SEQ ID NO: 6313 - DNA, 40 bp, Homo sapiens
aaaacctgtctgttttgatggatctcaagatttaagaagg

SEQ ID NO: 6314 - DNA, 40 bp, Homo sapiens
cttcttaaatcttgagatccatcaaaacagacaggttttc

SEQ ID NO: 6315 - DNA, 40 bp, Homo sapiens
gaaaacctgtctgttttgatggatctcaagatttaagaag

SEQ ID NO: 6316 - DNA, 40 bp, Homo sapiens
ttcttaaatcttgagatccatcaaaacagacaggttttct

SEQ ID NO: 6317 - DNA, 40 bp, Homo sapiens
agaaaacctgtctgttttgatggatctcaagatttaagaa

SEQ ID NO: 6318 - DNA, 40 bp, Homo sapiens
tcttaaatcttgagatccatcaaaacagacaggttttcta

SEQ ID NO: 6319 - DNA, 40 bp, Homo sapiens
tagaaaacctgtctgttttgatggatctcaagatttaaga

SEQ ID NO: 6320 - DNA, 40 bp, Homo sapiens
cttaaatcttgagatccatcaaaacagacaggttttctaa

SEQ ID NO: 6321 - DNA, 40 bp, Homo sapiens
ttagaaaacctgtctgttttgatggatctcaagatttaag

SEQ ID NO: 6322 - DNA, 40 bp, Homo sapiens
ttaaatcttgagatccatcaaaacagacaggttttctaat

SEQ ID NO: 6323 - DNA, 40 bp, Homo sapiens
attagaaaacctgtctgttttgatggatctcaagatttaa

SEQ ID NO: 6324 - DNA, 40 bp, Homo sapiens
taaatcttgagatccatcaaaacagacaggttttctaatt

SEQ ID NO: 6325 - DNA, 40 bp, Homo sapiens
aattagaaaacctgtctgttttgatggatctcaagattta

SEQ ID NO: 6326 - DNA, 40 bp, Homo sapiens
aaatcttgagatccatcaaaacagacaggttttctaattg

SEQ ID NO: 6327 - DNA, 40 bp, Homo sapiens
caattagaaaacctgtctgttttgatggatctcaagattt

SEQ ID NO: 6328 - DNA, 40 bp, Homo sapiens
aatcttgagatccatcaaaacagacaggttttctaattgt

SEQ ID NO: 6329 - DNA, 40 bp, Homo sapiens
acaattagaaaacctgtctgttttgatggatctcaagatt

SEQ ID NO: 6330 - DNA, 40 bp, Homo sapiens
atcttgagatccatcaaaacagacaggttttctaattgtt

SEQ ID NO: 6331 - DNA, 40 bp, Homo sapiens
aacaattagaaaacctgtctgttttgatggatctcaagat

SEQ ID NO: 6332 - DNA, 40 bp, Homo sapiens
tcttgagatccatcaaaacagacaggttttctaattgtta

SEQ ID NO: 6333 - DNA, 40 bp, Homo sapiens
taacaattagaaaacctgtctgttttgatggatctcaaga

SEQ ID NO: 6334 - DNA, 40 bp, Homo sapiens
cttgagatccatcaaaacagacaggttttctaattgttat

SEQ ID NO: 6335 - DNA, 40 bp, Homo sapiens
ataacaattagaaaacctgtctgttttgatggatctcaag

SEQ ID NO: 6336 - DNA, 40 bp, Homo sapiens
ttgagatccatcaaaacagacaggttttctaattgttata

SEQ ID NO: 6337 - DNA, 40 bp, Homo sapiens
tataacaattagaaaacctgtctgttttgatggatctcaa

SEQ ID NO: 6338 - DNA, 40 bp, Homo sapiens
tgagatccatcaaaacagacaggttttctaattgttatac

SEQ ID NO: 6339 - DNA, 40 bp, Homo sapiens
gtataacaattagaaaacctgtctgttttgatggatctca

SEQ ID NO: 6340 - DNA, 40 bp, Homo sapiens
gagatccatcaaaacagacaggttttctaattgttataca

SEQ ID NO: 6341 - DNA, 40 bp, Homo sapiens
tgtataacaattagaaaacctgtctgttttgatggatctc

SEQ ID NO: 6342 - DNA, 40 bp, Homo sapiens
agatccatcaaaacagacaggttttctaattgttatacaa

SEQ ID NO: 6343 - DNA, 40 bp, Homo sapiens
ttgtataacaattagaaaacctgtctgttttgatggatct

SEQ ID NO: 6344 - DNA, 40 bp, Homo sapiens
gatccatcaaaacagacaggttttctaattgttatacaat

SEQ ID NO: 6345 - DNA, 40 bp, Homo sapiens
attgtataacaattagaaaacctgtctgttttgatggatc

SEQ ID NO: 6346 - DNA, 40 bp, Homo sapiens
atccatcaaaacagacaggttttctaattgttatacaatg

SEQ ID NO: 6347 - DNA, 40 bp, Homo sapiens
cattgtataacaattagaaaacctgtctgttttgatggat

SEQ ID NO: 6348 - DNA, 40 bp, Homo sapiens
tccatcaaaacagacaggttttctaattgttatacaatgt

SEQ ID NO: 6349 - DNA, 40 bp, Homo sapiens
acattgtataacaattagaaaacctgtctgttttgatgga

SEQ ID NO: 6350 - DNA, 40 bp, Homo sapiens
ccatcaaaacagacaggttttctaattgttatacaatgta

SEQ ID NO: 6351 - DNA, 40 bp, Homo sapiens
tacattgtataacaattagaaaacctgtctgttttgatgg

SEQ ID NO: 6352 - DNA, 40 bp, Homo sapiens
catcaaaacagacaggttttctaattgttatacaatgtat

SEQ ID NO: 6353 - DNA, 40 bp, Homo sapiens
atacattgtataacaattagaaaacctgtctgttttgatg

SEQ ID NO: 6354 - DNA, 40 bp, Homo sapiens
atcaaaacagacaggttttctaattgttatacaatgtata

SEQ ID NO: 6355 - DNA, 40 bp, Homo sapiens
tatacattgtataacaattagaaaacctgtctgttttgat

SEQ ID NO: 6356 - DNA, 40 bp, Homo sapiens
tcaaaacagacaggttttctaattgttatacaatgtatat

SEQ ID NO: 6357 - DNA, 40 bp, Homo sapiens
atatacattgtataacaattagaaaacctgtctgttttga

SEQ ID NO: 6358 - DNA, 40 bp, Homo sapiens
caaaacagacaggttttctaattgttatacaatgtatatg

SEQ ID NO: 6359 - DNA, 40 bp, Homo sapiens
catatacattgtataacaattagaaaacctgtctgttttg

SEQ ID NO: 6360 - DNA, 40 bp, Homo sapiens
aaaacagacaggttttctaattgttatacaatgtatatgt

SEQ ID NO: 6361 - DNA, 40 bp, Homo sapiens
acatatacattgtataacaattagaaaacctgtctgtttt

SEQ ID NO: 6362 - DNA, 40 bp, Homo sapiens
aaacagacaggttttctaattgttatacaatgtatatgtt

SEQ ID NO: 6363 - DNA, 40 bp, Homo sapiens
aacatatacattgtataacaattagaaaacctgtctgttt

SEQ ID NO: 6364 - DNA, 40 bp, Homo sapiens
aacagacaggttttctaattgttatacaatgtatatgtta

SEQ ID NO: 6365 - DNA, 40 bp, Homo sapiens
taacatatacattgtataacaattagaaaacctgtctgtt

SEQ ID NO: 6366 - DNA, 40 bp, Homo sapiens
acagacaggttttctaattgttatacaatgtatatgttat

SEQ ID NO: 6367 - DNA, 40 bp, Homo sapiens
ataacatatacattgtataacaattagaaaacctgtctgt

SEQ ID NO: 6368 - DNA, 40 bp, Homo sapiens
cagacaggttttctaattgttatacaatgtatatgttatg

SEQ ID NO: 6369 - DNA, 40 bp, Homo sapiens
cataacatatacattgtataacaattagaaaacctgtctg

SEQ ID NO: 6370 - DNA, 40 bp, Homo sapiens
agacaggttttctaattgttatacaatgtatatgttatgt

SEQ ID NO: 6371 - DNA, 40 bp, Homo sapiens
acataacatatacattgtataacaattagaaaacctgtct

SEQ ID NO: 6372 - DNA, 40 bp, Homo sapiens
gacaggttttctaattgttatacaatgtatatgttatgtt

SEQ ID NO: 6373 - DNA, 40 bp, Homo sapiens
aacataacatatacattgtataacaattagaaaacctgtc

SEQ ID NO: 6374 - DNA, 40 bp, Homo sapiens
acaggttttctaattgttatacaatgtatatgttatgttt

SEQ ID NO: 6375 - DNA, 40 bp, Homo sapiens
aaacataacatatacattgtataacaattagaaaacctgt

SEQ ID NO: 6376 - DNA, 40 bp, Homo sapiens
caggttttctaattgttatacaatgtatatgttatgttta

SEQ ID NO: 6377 - DNA, 40 bp, Homo sapiens
taaacataacatatacattgtataacaattagaaaacctg

SEQ ID NO: 6378 - DNA, 40 bp, Homo sapiens
aggttttctaattgttatacaatgtatatgttatgtttat

SEQ ID NO: 6379 - DNA, 40 bp, Homo sapiens
ataaacataacatatacattgtataacaattagaaaacct

SEQ ID NO: 6380 - DNA, 40 bp, Homo sapiens
ggttttctaattgttatacaatgtatatgttatgtttata

SEQ ID NO: 6381 - DNA, 40 bp, Homo sapiens
tataaacataacatatacattgtataacaattagaaaacc

SEQ ID NO: 6382 - DNA, 40 bp, Homo sapiens
gttttctaattgttatacaatgtatatgttatgtttataa

SEQ ID NO: 6383 - DNA, 40 bp, Homo sapiens
ttataaacataacatatacattgtataacaattagaaaac

SEQ ID NO: 6384 - DNA, 40 bp, Homo sapiens
ttttctaattgttatacaatgtatatgttatgtttataat

SEQ ID NO: 6385 - DNA, 40 bp, Homo sapiens
attataaacataacatatacattgtataacaattagaaaa

SEQ ID NO: 6386 - DNA, 40 bp, Homo sapiens
tttctaattgttatacaatgtatatgttatgtttataata

SEQ ID NO: 6387 - DNA, 40 bp, Homo sapiens
tattataaacataacatatacattgtataacaattagaaa

SEQ ID NO: 6388 - DNA, 40 bp, Homo sapiens
ttctaattgttatacaatgtatatgttatgtttataatag

SEQ ID NO: 6389 - DNA, 40 bp, Homo sapiens
ctattataaacataacatatacattgtataacaattagaa

SEQ ID NO: 6390 - DNA, 40 bp, Homo sapiens
tctaattgttatacaatgtatatgttatgtttataataga

SEQ ID NO: 6391 - DNA, 40 bp, Homo sapiens
tctattataaacataacatatacattgtataacaattaga

SEQ ID NO: 6392 - DNA, 40 bp, Homo sapiens
ctaattgttatacaatgtatatgttatgtttataatagaa

SEQ ID NO: 6393 - DNA, 40 bp, Homo sapiens
ttctattataaacataacatatacattgtataacaattag

SEQ ID NO: 6394 - DNA, 40 bp, Homo sapiens
taattgttatacaatgtatatgttatgtttataatagaaa

SEQ ID NO: 6395 - DNA, 40 bp, Homo sapiens
tttctattataaacataacatatacattgtataacaatta

SEQ ID NO: 6396 - DNA, 40 bp, Homo sapiens
aattgttatacaatgtatatgttatgtttataatagaaat

SEQ ID NO: 6397 - DNA, 40 bp, Homo sapiens
atttctattataaacataacatatacattgtataacaatt

SEQ ID NO: 6398 - DNA, 40 bp, Homo sapiens
attgttatacaatgtatatgttatgtttataatagaaatc

SEQ ID NO: 6399 - DNA, 40 bp, Homo sapiens
gatttctattataaacataacatatacattgtataacaat

SEQ ID NO: 6400 - DNA, 40 bp, Homo sapiens
ttgttatacaatgtatatgttatgtttataatagaaatca

SEQ ID NO: 6401 - DNA, 40 bp, Homo sapiens
tgatttctattataaacataacatatacattgtataacaa

SEQ ID NO: 6402 - DNA, 40 bp, Homo sapiens
tgttatacaatgtatatgttatgtttataatagaaatcat

SEQ ID NO: 6403 - DNA, 40 bp, Homo sapiens
atgatttctattataaacataacatatacattgtataaca

SEQ ID NO: 6404 - DNA, 40 bp, Homo sapiens
gttatacaatgtatatgttatgtttataatagaaatcatt

SEQ ID NO: 6405 - DNA, 40 bp, Homo sapiens
aatgatttctattataaacataacatatacattgtataac

SEQ ID NO: 6406 - DNA, 40 bp, Homo sapiens
ttatacaatgtatatgttatgtttataatagaaatcattt

SEQ ID NO: 6407 - DNA, 40 bp, Homo sapiens
aaatgatttctattataaacataacatatacattgtataa

SEQ ID NO: 6408 - DNA, 40 bp, Homo sapiens
tatacaatgtatatgttatgtttataatagaaatcatttt

SEQ ID NO: 6409 - DNA, 40 bp, Homo sapiens
aaaatgatttctattataaacataacatatacattgtata

SEQ ID NO: 6410 - DNA, 40 bp, Homo sapiens
atacaatgtatatgttatgtttataatagaaatcatttta

SEQ ID NO: 6411 - DNA, 40 bp, Homo sapiens
taaaatgatttctattataaacataacatatacattgtat

SEQ ID NO: 6412 - DNA, 40 bp, Homo sapiens
tacaatgtatatgttatgtttataatagaaatcattttac

SEQ ID NO: 6413 - DNA, 40 bp, Homo sapiens
gtaaaatgatttctattataaacataacatatacattgta

SEQ ID NO: 6414 - DNA, 40 bp, Homo sapiens
acaatgtatatgttatgtttataatagaaatcattttaca

SEQ ID NO: 6415 - DNA, 40 bp, Homo sapiens
tgtaaaatgatttctattataaacataacatatacattgt

SEQ ID NO: 6416 - DNA, 40 bp, Homo sapiens
caatgtatatgttatgtttataatagaaatcattttacaa

SEQ ID NO: 6417 - DNA, 40 bp, Homo sapiens
ttgtaaaatgatttctattataaacataacatatacattg

SEQ ID NO: 6418 - DNA, 40 bp, Homo sapiens
aatgtatatgttatgtttataatagaaatcattttacaaa

SEQ ID NO: 6419 - DNA, 40 bp, Homo sapiens
tttgtaaaatgatttctattataaacataacatatacatt

SEQ ID NO: 6420 - DNA, 40 bp, Homo sapiens
atgtatatgttatgtttataatagaaatcattttacaaat

SEQ ID NO: 6421 - DNA, 40 bp, Homo sapiens
atttgtaaaatgatttctattataaacataacatatacat

SEQ ID NO: 6422 - DNA, 40 bp, Homo sapiens
tgtatatgttatgtttataatagaaatcattttacaaata

SEQ ID NO: 6423 - DNA, 40 bp, Homo sapiens
tatttgtaaaatgatttctattataaacataacatataca

SEQ ID NO: 6424 - DNA, 40 bp, Homo sapiens
gtatatgttatgtttataatagaaatcattttacaaataa

SEQ ID NO: 6425 - DNA, 40 bp, Homo sapiens
ttatttgtaaaatgatttctattataaacataacatatac

SEQ ID NO: 6426 - DNA, 40 bp, Homo sapiens
tatatgttatgtttataatagaaatcattttacaaataag

SEQ ID NO: 6427 - DNA, 40 bp, Homo sapiens
cttatttgtaaaatgatttctattataaacataacatata

SEQ ID NO: 6428 - DNA, 40 bp, Homo sapiens
atatgttatgtttataatagaaatcattttacaaataagt

SEQ ID NO: 6429 - DNA, 40 bp, Homo sapiens
acttatttgtaaaatgatttctattataaacataacatat

SEQ ID NO: 6430 - DNA, 40 bp, Homo sapiens
tatgttatgtttataatagaaatcattttacaaataagtt

SEQ ID NO: 6431 - DNA, 40 bp, Homo sapiens
aacttatttgtaaaatgatttctattataaacataacata

SEQ ID NO: 6432 - DNA, 40 bp, Homo sapiens
atgttatgtttataatagaaatcattttacaaataagtta

SEQ ID NO: 6433 - DNA, 40 bp, Homo sapiens
taacttatttgtaaaatgatttctattataaacataacat

SEQ ID NO: 6434 - DNA, 40 bp, Homo sapiens
tgttatgtttataatagaaatcattttacaaataagttat

SEQ ID NO: 6435 - DNA, 40 bp, Homo sapiens
ataacttatttgtaaaatgatttctattataaacataaca

SEQ ID NO: 6436 - DNA, 40 bp, Homo sapiens
gttatgtttataatagaaatcattttacaaataagttata

SEQ ID NO: 6437 - DNA, 40 bp, Homo sapiens
tataacttatttgtaaaatgatttctattataaacataac

SEQ ID NO: 6438 - DNA, 40 bp, Homo sapiens
ttatgtttataatagaaatcattttacaaataagttataa

SEQ ID NO: 6439 - DNA, 40 bp, Homo sapiens
ttataacttatttgtaaaatgatttctattataaacataa

SEQ ID NO: 6440 - DNA, 40 bp, Homo sapiens
tatgtttataatagaaatcattttacaaataagttataaa

SEQ ID NO: 6441 - DNA, 40 bp, Homo sapiens
tttataacttatttgtaaaatgatttctattataaacata

SEQ ID NO: 6442 - DNA, 40 bp, Homo sapiens
atgtttataatagaaatcattttacaaataagttataaat

SEQ ID NO: 6443 - DNA, 40 bp, Homo sapiens
atttataacttatttgtaaaatgatttctattataaacat

SEQ ID NO: 6444 - DNA, 40 bp, Homo sapiens
tgtttataatagaaatcattttacaaataagttataaatg

SEQ ID NO: 6445 - DNA, 40 bp, Homo sapiens
catttataacttatttgtaaaatgatttctattataaaca

SEQ ID NO: 6446 - DNA, 40 bp, Homo sapiens
gtttataatagaaatcattttacaaataagttataaatgg

SEQ ID NO: 6447 - DNA, 40 bp, Homo sapiens
ccatttataacttatttgtaaaatgatttctattataaac

SEQ ID NO: 6448 - DNA, 40 bp, Homo sapiens
tttataatagaaatcattttacaaataagttataaatggg

SEQ ID NO: 6449 - DNA, 40 bp, Homo sapiens
cccatttataacttatttgtaaaatgatttctattataaa

SEQ ID NO: 6450 - DNA, 40 bp, Homo sapiens
ttataatagaaatcattttacaaataagttataaatggga

SEQ ID NO: 6451 - DNA, 40 bp, Homo sapiens
tcccatttataacttatttgtaaaatgatttctattataa

SEQ ID NO: 6452 - DNA, 40 bp, Homo sapiens
tataatagaaatcattttacaaataagttataaatgggaa

SEQ ID NO: 6453 - DNA, 40 bp, Homo sapiens
ttcccatttataacttatttgtaaaatgatttctattata

SEQ ID NO: 6454 - DNA, 40 bp, Homo sapiens
ataatagaaatcattttacaaataagttataaatgggaaa

SEQ ID NO: 6455 - DNA, 40 bp, Homo sapiens
tttcccatttataacttatttgtaaaatgatttctattat

SEQ ID NO: 6456 - DNA, 40 bp, Homo sapiens
taatagaaatcattttacaaataagttataaatgggaaag

SEQ ID NO: 6457 - DNA, 40 bp, Homo sapiens
ctttcccatttataacttatttgtaaaatgatttctatta

SEQ ID NO: 6458 - DNA, 40 bp, Homo sapiens
aatagaaatcattttacaaataagttataaatgggaaagg

SEQ ID NO: 6459 - DNA, 40 bp, Homo sapiens
cctttcccatttataacttatttgtaaaatgatttctatt

SEQ ID NO: 6460 - DNA, 40 bp, Homo sapiens
atagaaatcattttacaaataagttataaatgggaaaggt

SEQ ID NO: 6461 - DNA, 40 bp, Homo sapiens
acctttcccatttataacttatttgtaaaatgatttctat

SEQ ID NO: 6462 - DNA, 40 bp, Homo sapiens
tagaaatcattttacaaataagttataaatgggaaaggtc

SEQ ID NO: 6463 - DNA, 40 bp, Homo sapiens
gacctttcccatttataacttatttgtaaaatgatttcta

SEQ ID NO: 6464 - DNA, 40 bp, Homo sapiens
agaaatcattttacaaataagttataaatgggaaaggtct

SEQ ID NO: 6465 - DNA, 40 bp, Homo sapiens
agacctttcccatttataacttatttgtaaaatgatttct

SEQ ID NO: 6466 - DNA, 40 bp, Homo sapiens
gaaatcattttacaaataagttataaatgggaaaggtcta

SEQ ID NO: 6467 - DNA, 40 bp, Homo sapiens
tagacctttcccatttataacttatttgtaaaatgatttc

SEQ ID NO: 6468 - DNA, 40 bp, Homo sapiens
aaatcattttacaaataagttataaatgggaaaggtctat

SEQ ID NO: 6469 - DNA, 40 bp, Homo sapiens
atagacctttcccatttataacttatttgtaaaatgattt

SEQ ID NO: 6470 - DNA, 40 bp, Homo sapiens
aatcattttacaaataagttataaatgggaaaggtctatt

SEQ ID NO: 6471 - DNA, 40 bp, Homo sapiens
aatagacctttcccatttataacttatttgtaaaatgatt

SEQ ID NO: 6472 - DNA, 40 bp, Homo sapiens
atcattttacaaataagttataaatgggaaaggtctattt

SEQ ID NO: 6473 - DNA, 40 bp, Homo sapiens
aaatagacctttcccatttataacttatttgtaaaatgat

SEQ ID NO: 6474 - DNA, 40 bp, Homo sapiens
tcattttacaaataagttataaatgggaaaggtctatttg

SEQ ID NO: 6475 - DNA, 40 bp, Homo sapiens
caaatagacctttcccatttataacttatttgtaaaatga

SEQ ID NO: 6476 - DNA, 40 bp, Homo sapiens
cattttacaaataagttataaatgggaaaggtctatttgt

SEQ ID NO: 6477 - DNA, 40 bp, Homo sapiens
acaaatagacctttcccatttataacttatttgtaaaatg

SEQ ID NO: 6478 - DNA, 40 bp, Homo sapiens
attttacaaataagttataaatgggaaaggtctatttgta

SEQ ID NO: 6479 - DNA, 40 bp, Homo sapiens
tacaaatagacctttcccatttataacttatttgtaaaat

SEQ ID NO: 6480 - DNA, 40 bp, Homo sapiens
ttttacaaataagttataaatgggaaaggtctatttgtaa

SEQ ID NO: 6481 - DNA, 40 bp, Homo sapiens
ttacaaatagacctttcccatttataacttatttgtaaaa

SEQ ID NO: 6482 - DNA, 40 bp, Homo sapiens
tttacaaataagttataaatgggaaaggtctatttgtaat

SEQ ID NO: 6483 - DNA, 40 bp, Homo sapiens
attacaaatagacctttcccatttataacttatttgtaaa

SEQ ID NO: 6484 - DNA, 40 bp, Homo sapiens
ttacaaataagttataaatgggaaaggtctatttgtaatt

SEQ ID NO: 6485 - DNA, 40 bp, Homo sapiens
aattacaaatagacctttcccatttataacttatttgtaa

SEQ ID NO: 6486 - DNA, 40 bp, Homo sapiens
tacaaataagttataaatgggaaaggtctatttgtaatta

SEQ ID NO: 6487 - DNA, 40 bp, Homo sapiens
taattacaaatagacctttcccatttataacttatttgta

SEQ ID NO: 6488 - DNA, 40 bp, Homo sapiens
acaaataagttataaatgggaaaggtctatttgtaattat

SEQ ID NO: 6489 - DNA, 40 bp, Homo sapiens
ataattacaaatagacctttcccatttataacttatttgt

SEQ ID NO: 6490 - DNA, 40 bp, Homo sapiens
caaataagttataaatgggaaaggtctatttgtaattatc

SEQ ID NO: 6491 - DNA, 40 bp, Homo sapiens
gataattacaaatagacctttcccatttataacttatttg

SEQ ID NO: 6492 - DNA, 40 bp, Homo sapiens
aaataagttataaatgggaaaggtctatttgtaattatca

SEQ ID NO: 6493 - DNA, 40 bp, Homo sapiens
tgataattacaaatagacctttcccatttataacttattt

SEQ ID NO: 6494 - DNA, 40 bp, Homo sapiens
aataagttataaatgggaaaggtctatttgtaattatcag

SEQ ID NO: 6495 - DNA, 40 bp, Homo sapiens
ctgataattacaaatagacctttcccatttataacttatt

SEQ ID NO: 6496 - DNA, 40 bp, Homo sapiens
ataagttataaatgggaaaggtctatttgtaattatcagc

SEQ ID NO: 6497 - DNA, 40 bp, Homo sapiens
gctgataattacaaatagacctttcccatttataacttat

SEQ ID NO: 6498 - DNA, 40 bp, Homo sapiens
taagttataaatgggaaaggtctatttgtaattatcagct

SEQ ID NO: 6499 - DNA, 40 bp, Homo sapiens
agctgataattacaaatagacctttcccatttataactta

SEQ ID NO: 6500 - DNA, 40 bp, Homo sapiens
aagttataaatgggaaaggtctatttgtaattatcagctc

SEQ ID NO: 6501 - DNA, 40 bp, Homo sapiens
gagctgataattacaaatagacctttcccatttataactt

SEQ ID NO: 6502 - DNA, 40 bp, Homo sapiens
agttataaatgggaaaggtctatttgtaattatcagctca

SEQ ID NO: 6503 - DNA, 40 bp, Homo sapiens
tgagctgataattacaaatagacctttcccatttataact

SEQ ID NO: 6504 - DNA, 40 bp, Homo sapiens
gttataaatgggaaaggtctatttgtaattatcagctcag

SEQ ID NO: 6505 - DNA, 40 bp, Homo sapiens
ctgagctgataattacaaatagacctttcccatttataac

SEQ ID NO: 6506 - DNA, 40 bp, Homo sapiens
ttataaatgggaaaggtctatttgtaattatcagctcaga

SEQ ID NO: 6507 - DNA, 40 bp, Homo sapiens
tctgagctgataattacaaatagacctttcccatttataa

SEQ ID NO: 6508 - DNA, 40 bp, Homo sapiens
tataaatgggaaaggtctatttgtaattatcagctcagaa

SEQ ID NO: 6509 - DNA, 40 bp, Homo sapiens
ttctgagctgataattacaaatagacctttcccatttata

SEQ ID NO: 6510 - DNA, 40 bp, Homo sapiens
ataaatgggaaaggtctatttgtaattatcagctcagaat

SEQ ID NO: 6511 - DNA, 40 bp, Homo sapiens
attctgagctgataattacaaatagacctttcccatttat

SEQ ID NO: 6512 - DNA, 40 bp, Homo sapiens
taaatgggaaaggtctatttgtaattatcagctcagaatt

SEQ ID NO: 6513 - DNA, 40 bp, Homo sapiens
aattctgagctgataattacaaatagacctttcccattta

SEQ ID NO: 6514 - DNA, 40 bp, Homo sapiens
aaatgggaaaggtctatttgtaattatcagctcagaatta

SEQ ID NO: 6515 - DNA, 40 bp, Homo sapiens
taattctgagctgataattacaaatagacctttcccattt

SEQ ID NO: 6516 - DNA, 40 bp, Homo sapiens
aatgggaaaggtctatttgtaattatcagctcagaattaa

SEQ ID NO: 6517 - DNA, 40 bp, Homo sapiens
ttaattctgagctgataattacaaatagacctttcccatt

SEQ ID NO: 6518 - DNA, 40 bp, Homo sapiens
atgggaaaggtctatttgtaattatcagctcagaattaac

SEQ ID NO: 6519 - DNA, 40 bp, Homo sapiens
gttaattctgagctgataattacaaatagacctttcccat

SEQ ID NO: 6520 - DNA, 40 bp, Homo sapiens
tgggaaaggtctatttgtaattatcagctcagaattaacc

SEQ ID NO: 6521 - DNA, 40 bp, Homo sapiens
ggttaattctgagctgataattacaaatagacctttccca

SEQ ID NO: 6522 - DNA, 40 bp, Homo sapiens
gggaaaggtctatttgtaattatcagctcagaattaacca

SEQ ID NO: 6523 - DNA, 40 bp, Homo sapiens
tggttaattctgagctgataattacaaatagacctttccc

SEQ ID NO: 6524 - DNA, 40 bp, Homo sapiens
ggaaaggtctatttgtaattatcagctcagaattaaccat

SEQ ID NO: 6525 - DNA, 40 bp, Homo sapiens
atggttaattctgagctgataattacaaatagacctttcc

SEQ ID NO: 6526 - DNA, 40 bp, Homo sapiens
gaaaggtctatttgtaattatcagctcagaattaaccata

SEQ ID NO: 6527 - DNA, 40 bp, Homo sapiens
tatggttaattctgagctgataattacaaatagacctttc

SEQ ID NO: 6528 - DNA, 40 bp, Homo sapiens
aaaggtctatttgtaattatcagctcagaattaaccataa

SEQ ID NO: 6529 - DNA, 40 bp, Homo sapiens
ttatggttaattctgagctgataattacaaatagaccttt

SEQ ID NO: 6530 - DNA, 40 bp, Homo sapiens
aaggtctatttgtaattatcagctcagaattaaccataaa

SEQ ID NO: 6531 - DNA, 40 bp, Homo sapiens
tttatggttaattctgagctgataattacaaatagacctt

SEQ ID NO: 6532 - DNA, 40 bp, Homo sapiens
aggtctatttgtaattatcagctcagaattaaccataaaa

SEQ ID NO: 6533 - DNA, 40 bp, Homo sapiens
ttttatggttaattctgagctgataattacaaatagacct

SEQ ID NO: 6534 - DNA, 40 bp, Homo sapiens
ggtctatttgtaattatcagctcagaattaaccataaaac

SEQ ID NO: 6535 - DNA, 40 bp, Homo sapiens
gttttatggttaattctgagctgataattacaaatagacc

SEQ ID NO: 6536 - DNA, 40 bp, Homo sapiens
gtctatttgtaattatcagctcagaattaaccataaaact

SEQ ID NO: 6537 - DNA, 40 bp, Homo sapiens
agttttatggttaattctgagctgataattacaaatagac

SEQ ID NO: 6538 - DNA, 40 bp, Homo sapiens
tctatttgtaattatcagctcagaattaaccataaaactg

SEQ ID NO: 6539 - DNA, 40 bp, Homo sapiens
cagttttatggttaattctgagctgataattacaaataga

SEQ ID NO: 6540 - DNA, 40 bp, Homo sapiens
ctatttgtaattatcagctcagaattaaccataaaactgg

SEQ ID NO: 6541 - DNA, 40 bp, Homo sapiens
ccagttttatggttaattctgagctgataattacaaatag

SEQ ID NO: 6542 - DNA, 40 bp, Homo sapiens
tatttgtaattatcagctcagaattaaccataaaactggt

SEQ ID NO: 6543 - DNA, 40 bp, Homo sapiens
accagttttatggttaattctgagctgataattacaaata

SEQ ID NO: 6544 - DNA, 40 bp, Homo sapiens
atttgtaattatcagctcagaattaaccataaaactggtg

SEQ ID NO: 6545 - DNA, 40 bp, Homo sapiens
caccagttttatggttaattctgagctgataattacaaat

SEQ ID NO: 6546 - DNA, 40 bp, Homo sapiens
tttgtaattatcagctcagaattaaccataaaactggtgt

SEQ ID NO: 6547 - DNA, 40 bp, Homo sapiens
acaccagttttatggttaattctgagctgataattacaaa

SEQ ID NO: 6548 - DNA, 40 bp, Homo sapiens
ttgtaattatcagctcagaattaaccataaaactggtgtc

SEQ ID NO: 6549 - DNA, 40 bp, Homo sapiens
gacaccagttttatggttaattctgagctgataattacaa

SEQ ID NO: 6550 - DNA, 40 bp, Homo sapiens
tgtaattatcagctcagaattaaccataaaactggtgtca

SEQ ID NO: 6551 - DNA, 40 bp, Homo sapiens
tgacaccagttttatggttaattctgagctgataattaca

SEQ ID NO: 6552 - DNA, 40 bp, Homo sapiens
gtaattatcagctcagaattaaccataaaactggtgtcac

SEQ ID NO: 6553 - DNA, 40 bp, Homo sapiens
gtgacaccagttttatggttaattctgagctgataattac

SEQ ID NO: 6554 - DNA, 40 bp, Homo sapiens
taattatcagctcagaattaaccataaaactggtgtcact

SEQ ID NO: 6555 - DNA, 40 bp, Homo sapiens
agtgacaccagttttatggttaattctgagctgataatta

SEQ ID NO: 6556 - DNA, 40 bp, Homo sapiens
aattatcagctcagaattaaccataaaactggtgtcactg

SEQ ID NO: 6557 - DNA, 40 bp, Homo sapiens
cagtgacaccagttttatggttaattctgagctgataatt

SEQ ID NO: 6558 - DNA, 40 bp, Homo sapiens
attatcagctcagaattaaccataaaactggtgtcactga

SEQ ID NO: 6559 - DNA, 40 bp, Homo sapiens
tcagtgacaccagttttatggttaattctgagctgataat

SEQ ID NO: 6560 - DNA, 40 bp, Homo sapiens
ttatcagctcagaattaaccataaaactggtgtcactgaa

SEQ ID NO: 6561 - DNA, 40 bp, Homo sapiens
ttcagtgacaccagttttatggttaattctgagctgataa

SEQ ID NO: 6562 - DNA, 40 bp, Homo sapiens
tatcagctcagaattaaccataaaactggtgtcactgaag

SEQ ID NO: 6563 - DNA, 40 bp, Homo sapiens
cttcagtgacaccagttttatggttaattctgagctgata

SEQ ID NO: 6564 - DNA, 40 bp, Homo sapiens
atcagctcagaattaaccataaaactggtgtcactgaagt

SEQ ID NO: 6565 - DNA, 40 bp, Homo sapiens
acttcagtgacaccagttttatggttaattctgagctgat

SEQ ID NO: 6566 - DNA, 40 bp, Homo sapiens
tcagctcagaattaaccataaaactggtgtcactgaagtg

SEQ ID NO: 6567 - DNA, 40 bp, Homo sapiens
cacttcagtgacaccagttttatggttaattctgagctga

SEQ ID NO: 6568 - DNA, 40 bp, Homo sapiens
cagctcagaattaaccataaaactggtgtcactgaagtga

SEQ ID NO: 6569 - DNA, 40 bp, Homo sapiens
tcacttcagtgacaccagttttatggttaattctgagctg

SEQ ID NO: 6570 - DNA, 40 bp, Homo sapiens
agctcagaattaaccataaaactggtgtcactgaagtgac

SEQ ID NO: 6571 - DNA, 40 bp, Homo sapiens
gtcacttcagtgacaccagttttatggttaattctgagct

SEQ ID NO: 6572 - DNA, 40 bp, Homo sapiens
gctcagaattaaccataaaactggtgtcactgaagtgact

SEQ ID NO: 6573 - DNA, 40 bp, Homo sapiens
agtcacttcagtgacaccagttttatggttaattctgagc

SEQ ID NO: 6574 - DNA, 40 bp, Homo sapiens
ctcagaattaaccataaaactggtgtcactgaagtgactg

SEQ ID NO: 6575 - DNA, 40 bp, Homo sapiens
cagtcacttcagtgacaccagttttatggttaattctgag

SEQ ID NO: 6576 - DNA, 40 bp, Homo sapiens
tcagaattaaccataaaactggtgtcactgaagtgactga

SEQ ID NO: 6577 - DNA, 40 bp, Homo sapiens
tcagtcacttcagtgacaccagttttatggttaattctga

SEQ ID NO: 6578 - DNA, 40 bp, Homo sapiens
cagaattaaccataaaactggtgtcactgaagtgactgag

SEQ ID NO: 6579 - DNA, 40 bp, Homo sapiens
ctcagtcacttcagtgacaccagttttatggttaattctg

SEQ ID NO: 6580 - DNA, 40 bp, Homo sapiens
agaattaaccataaaactggtgtcactgaagtgactgagg

SEQ ID NO: 6581 - DNA, 40 bp, Homo sapiens
cctcagtcacttcagtgacaccagttttatggttaattct

SEQ ID NO: 6582 - DNA, 40 bp, Homo sapiens
gaattaaccataaaactggtgtcactgaagtgactgaggt

SEQ ID NO: 6583 - DNA, 40 bp, Homo sapiens
acctcagtcacttcagtgacaccagttttatggttaattc

SEQ ID NO: 6584 - DNA, 40 bp, Homo sapiens
aattaaccataaaactggtgtcactgaagtgactgaggtc

SEQ ID NO: 6585 - DNA, 40 bp, Homo sapiens
gacctcagtcacttcagtgacaccagttttatggttaatt

SEQ ID NO: 6586 - DNA, 40 bp, Homo sapiens
attaaccataaaactggtgtcactgaagtgactgaggtcc

SEQ ID NO: 6587 - DNA, 40 bp, Homo sapiens
ggacctcagtcacttcagtgacaccagttttatggttaat

SEQ ID NO: 6588 - DNA, 40 bp, Homo sapiens
ttaaccataaaactggtgtcactgaagtgactgaggtcca

SEQ ID NO: 6589 - DNA, 40 bp, Homo sapiens
tggacctcagtcacttcagtgacaccagttttatggttaa

SEQ ID NO: 6590 - DNA, 40 bp, Homo sapiens
taaccataaaactggtgtcactgaagtgactgaggtccaa

SEQ ID NO: 6591 - DNA, 40 bp, Homo sapiens
ttggacctcagtcacttcagtgacaccagttttatggtta

SEQ ID NO: 6592 - DNA, 40 bp, Homo sapiens
aaccataaaactggtgtcactgaagtgactgaggtccaaa

SEQ ID NO: 6593 - DNA, 40 bp, Homo sapiens
tttggacctcagtcacttcagtgacaccagttttatggtt

SEQ ID NO: 6594 - DNA, 40 bp, Homo sapiens
accataaaactggtgtcactgaagtgactgaggtccaaaa

SEQ ID NO: 6595 - DNA, 40 bp, Homo sapiens
ttttggacctcagtcacttcagtgacaccagttttatggt

SEQ ID NO: 6596 - DNA, 40 bp, Homo sapiens
ccataaaactggtgtcactgaagtgactgaggtccaaaat

SEQ ID NO: 6597 - DNA, 40 bp, Homo sapiens
attttggacctcagtcacttcagtgacaccagttttatgg

SEQ ID NO: 6598 - DNA, 40 bp, Homo sapiens
cataaaactggtgtcactgaagtgactgaggtccaaaatg

SEQ ID NO: 6599 - DNA, 40 bp, Homo sapiens
cattttggacctcagtcacttcagtgacaccagttttatg

SEQ ID NO: 6600 - DNA, 40 bp, Homo sapiens
ataaaactggtgtcactgaagtgactgaggtccaaaatgc

SEQ ID NO: 6601 - DNA, 40 bp, Homo sapiens
gcattttggacctcagtcacttcagtgacaccagttttat

SEQ ID NO: 6602 - DNA, 40 bp, Homo sapiens
taaaactggtgtcactgaagtgactgaggtccaaaatgct

SEQ ID NO: 6603 - DNA, 40 bp, Homo sapiens
agcattttggacctcagtcacttcagtgacaccagtttta

SEQ ID NO: 6604 - DNA, 40 bp, Homo sapiens
aaaactggtgtcactgaagtgactgaggtccaaaatgctg

SEQ ID NO: 6605 - DNA, 40 bp, Homo sapiens
cagcattttggacctcagtcacttcagtgacaccagtttt

SEQ ID NO: 6606 - DNA, 40 bp, Homo sapiens
aaactggtgtcactgaagtgactgaggtccaaaatgctga

SEQ ID NO: 6607 - DNA, 40 bp, Homo sapiens
tcagcattttggacctcagtcacttcagtgacaccagttt

SEQ ID NO: 6608 - DNA, 40 bp, Homo sapiens
aactggtgtcactgaagtgactgaggtccaaaatgctgac

SEQ ID NO: 6609 - DNA, 40 bp, Homo sapiens
gtcagcattttggacctcagtcacttcagtgacaccagtt

SEQ ID NO: 6610 - DNA, 40 bp, Homo sapiens
actggtgtcactgaagtgactgaggtccaaaatgctgact

SEQ ID NO: 6611 - DNA, 40 bp, Homo sapiens
agtcagcattttggacctcagtcacttcagtgacaccagt

SEQ ID NO: 6612 - DNA, 40 bp, Homo sapiens
ctggtgtcactgaagtgactgaggtccaaaatgctgactc

SEQ ID NO: 6613 - DNA, 40 bp, Homo sapiens
gagtcagcattttggacctcagtcacttcagtgacaccag

SEQ ID NO: 6614 - DNA, 40 bp, Homo sapiens
tggtgtcactgaagtgactgaggtccaaaatgctgactct

SEQ ID NO: 6615 - DNA, 40 bp, Homo sapiens
agagtcagcattttggacctcagtcacttcagtgacacca

SEQ ID NO: 6616 - DNA, 40 bp, Homo sapiens
ggtgtcactgaagtgactgaggtccaaaatgctgactctg

SEQ ID NO: 6617 - DNA, 40 bp, Homo sapiens
cagagtcagcattttggacctcagtcacttcagtgacacc

SEQ ID NO: 6618 - DNA, 40 bp, Homo sapiens
gtgtcactgaagtgactgaggtccaaaatgctgactctgc

SEQ ID NO: 6619 - DNA, 40 bp, Homo sapiens
gcagagtcagcattttggacctcagtcacttcagtgacac

SEQ ID NO: 6620 - DNA, 40 bp, Homo sapiens
tgtcactgaagtgactgaggtccaaaatgctgactctgca

SEQ ID NO: 6621 - DNA, 40 bp, Homo sapiens
tgcagagtcagcattttggacctcagtcacttcagtgaca

SEQ ID NO: 6622 - DNA, 40 bp, Homo sapiens
gtcactgaagtgactgaggtccaaaatgctgactctgcat

SEQ ID NO: 6623 - DNA, 40 bp, Homo sapiens
atgcagagtcagcattttggacctcagtcacttcagtgac

SEQ ID NO: 6624 - DNA, 40 bp, Homo sapiens
tcactgaagtgactgaggtccaaaatgctgactctgcatg

SEQ ID NO: 6625 - DNA, 40 bp, Homo sapiens
catgcagagtcagcattttggacctcagtcacttcagtga

SEQ ID NO: 6626 - DNA, 40 bp, Homo sapiens
cactgaagtgactgaggtccaaaatgctgactctgcatgt

SEQ ID NO: 6627 - DNA, 40 bp, Homo sapiens
acatgcagagtcagcattttggacctcagtcacttcagtg

SEQ ID NO: 6628 - DNA, 40 bp, Homo sapiens
actgaagtgactgaggtccaaaatgctgactctgcatgtt

SEQ ID NO: 6629 - DNA, 40 bp, Homo sapiens
aacatgcagagtcagcattttggacctcagtcacttcagt

SEQ ID NO: 6630 - DNA, 40 bp, Homo sapiens
ctgaagtgactgaggtccaaaatgctgactctgcatgtta

SEQ ID NO: 6631 - DNA, 40 bp, Homo sapiens
taacatgcagagtcagcattttggacctcagtcacttcag

SEQ ID NO: 6632 - DNA, 40 bp, Homo sapiens
tgaagtgactgaggtccaaaatgctgactctgcatgttat

SEQ ID NO: 6633 - DNA, 40 bp, Homo sapiens
ataacatgcagagtcagcattttggacctcagtcacttca

SEQ ID NO: 6634 - DNA, 40 bp, Homo sapiens
gaagtgactgaggtccaaaatgctgactctgcatgttata

SEQ ID NO: 6635 - DNA, 40 bp, Homo sapiens
tataacatgcagagtcagcattttggacctcagtcacttc

SEQ ID NO: 6636 - DNA, 40 bp, Homo sapiens
aagtgactgaggtccaaaatgctgactctgcatgttatag

SEQ ID NO: 6637 - DNA, 40 bp, Homo sapiens
ctataacatgcagagtcagcattttggacctcagtcactt

SEQ ID NO: 6638 - DNA, 40 bp, Homo sapiens
agtgactgaggtccaaaatgctgactctgcatgttataga

SEQ ID NO: 6639 - DNA, 40 bp, Homo sapiens
tctataacatgcagagtcagcattttggacctcagtcact

SEQ ID NO: 6640 - DNA, 40 bp, Homo sapiens
gtgactgaggtccaaaatgctgactctgcatgttatagac

SEQ ID NO: 6641 - DNA, 40 bp, Homo sapiens
gtctataacatgcagagtcagcattttggacctcagtcac

SEQ ID NO: 6642 - DNA, 40 bp, Homo sapiens
tgactgaggtccaaaatgctgactctgcatgttatagact

SEQ ID NO: 6643 - DNA, 40 bp, Homo sapiens
agtctataacatgcagagtcagcattttggacctcagtca

SEQ ID NO: 6644 - DNA, 40 bp, Homo sapiens
gactgaggtccaaaatgctgactctgcatgttatagacta

SEQ ID NO: 6645 - DNA, 40 bp, Homo sapiens
tagtctataacatgcagagtcagcattttggacctcagtc

SEQ ID NO: 6646 - DNA, 40 bp, Homo sapiens
actgaggtccaaaatgctgactctgcatgttatagactac

SEQ ID NO: 6647 - DNA, 40 bp, Homo sapiens
gtagtctataacatgcagagtcagcattttggacctcagt

SEQ ID NO: 6648 - DNA, 40 bp, Homo sapiens
ctgaggtccaaaatgctgactctgcatgttatagactaca

SEQ ID NO: 6649 - DNA, 40 bp, Homo sapiens
tgtagtctataacatgcagagtcagcattttggacctcag

SEQ ID NO: 6650 - DNA, 40 bp, Homo sapiens
tgaggtccaaaatgctgactctgcatgttatagactacag

SEQ ID NO: 6651 - DNA, 40 bp, Homo sapiens
ctgtagtctataacatgcagagtcagcattttggacctca

SEQ ID NO: 6652 - DNA, 40 bp, Homo sapiens
gaggtccaaaatgctgactctgcatgttatagactacaga

SEQ ID NO: 6653 - DNA, 40 bp, Homo sapiens
tctgtagtctataacatgcagagtcagcattttggacctc

SEQ ID NO: 6654 - DNA, 40 bp, Homo sapiens
aggtccaaaatgctgactctgcatgttatagactacagat

SEQ ID NO: 6655 - DNA, 40 bp, Homo sapiens
atctgtagtctataacatgcagagtcagcattttggacct

SEQ ID NO: 6656 - DNA, 40 bp, Homo sapiens
ggtccaaaatgctgactctgcatgttatagactacagata

SEQ ID NO: 6657 - DNA, 40 bp, Homo sapiens
tatctgtagtctataacatgcagagtcagcattttggacc

SEQ ID NO: 6658 - DNA, 40 bp, Homo sapiens
gtccaaaatgctgactctgcatgttatagactacagatat

SEQ ID NO: 6659 - DNA, 40 bp, Homo sapiens
atatctgtagtctataacatgcagagtcagcattttggac

SEQ ID NO: 6660 - DNA, 40 bp, Homo sapiens
tccaaaatgctgactctgcatgttatagactacagatatc

SEQ ID NO: 6661 - DNA, 40 bp, Homo sapiens
gatatctgtagtctataacatgcagagtcagcattttgga

SEQ ID NO: 6662 - DNA, 40 bp, Homo sapiens
ccaaaatgctgactctgcatgttatagactacagatatca

SEQ ID NO: 6663 - DNA, 40 bp, Homo sapiens
tgatatctgtagtctataacatgcagagtcagcattttgg

SEQ ID NO: 6664 - DNA, 40 bp, Homo sapiens
caaaatgctgactctgcatgttatagactacagatatcaa

SEQ ID NO: 6665 - DNA, 40 bp, Homo sapiens
ttgatatctgtagtctataacatgcagagtcagcattttg

SEQ ID NO: 6666 - DNA, 40 bp, Homo sapiens
aaaatgctgactctgcatgttatagactacagatatcaaa

SEQ ID NO: 6667 - DNA, 40 bp, Homo sapiens
tttgatatctgtagtctataacatgcagagtcagcatttt

SEQ ID NO: 6668 - DNA, 40 bp, Homo sapiens
aaatgctgactctgcatgttatagactacagatatcaaat

SEQ ID NO: 6669 - DNA, 40 bp, Homo sapiens
atttgatatctgtagtctataacatgcagagtcagcattt

SEQ ID NO: 6670 - DNA, 40 bp, Homo sapiens
aatgctgactctgcatgttatagactacagatatcaaata

SEQ ID NO: 6671 - DNA, 40 bp, Homo sapiens
tatttgatatctgtagtctataacatgcagagtcagcatt

SEQ ID NO: 6672 - DNA, 40 bp, Homo sapiens
atgctgactctgcatgttatagactacagatatcaaatat

SEQ ID NO: 6673 - DNA, 40 bp, Homo sapiens
atatttgatatctgtagtctataacatgcagagtcagcat

SEQ ID NO: 6674 - DNA, 40 bp, Homo sapiens
tgctgactctgcatgttatagactacagatatcaaatatg

SEQ ID NO: 6675 - DNA, 40 bp, Homo sapiens
catatttgatatctgtagtctataacatgcagagtcagca

SEQ ID NO: 6676 - DNA, 40 bp, Homo sapiens
gctgactctgcatgttatagactacagatatcaaatatgg

SEQ ID NO: 6677 - DNA, 40 bp, Homo sapiens
ccatatttgatatctgtagtctataacatgcagagtcagc

SEQ ID NO: 6678 - DNA, 40 bp, Homo sapiens
ctgactctgcatgttatagactacagatatcaaatatggt

SEQ ID NO: 6679 - DNA, 40 bp, Homo sapiens
accatatttgatatctgtagtctataacatgcagagtcag

SEQ ID NO: 6680 - DNA, 40 bp, Homo sapiens
tgactctgcatgttatagactacagatatcaaatatggtt

SEQ ID NO: 6681 - DNA, 40 bp, Homo sapiens
aaccatatttgatatctgtagtctataacatgcagagtca

SEQ ID NO: 6682 - DNA, 40 bp, Homo sapiens
gactctgcatgttatagactacagatatcaaatatggttg

SEQ ID NO: 6683 - DNA, 40 bp, Homo sapiens
caaccatatttgatatctgtagtctataacatgcagagtc

SEQ ID NO: 6684 - DNA, 40 bp, Homo sapiens
actctgcatgttatagactacagatatcaaatatggttgc

SEQ ID NO: 6685 - DNA, 40 bp, Homo sapiens
gcaaccatatttgatatctgtagtctataacatgcagagt

SEQ ID NO: 6686 - DNA, 40 bp, Homo sapiens
ctctgcatgttatagactacagatatcaaatatggttgct

SEQ ID NO: 6687 - DNA, 40 bp, Homo sapiens
agcaaccatatttgatatctgtagtctataacatgcagag

SEQ ID NO: 6688 - DNA, 40 bp, Homo sapiens
tctgcatgttatagactacagatatcaaatatggttgcta

SEQ ID NO: 6689 - DNA, 40 bp, Homo sapiens
tagcaaccatatttgatatctgtagtctataacatgcaga

SEQ ID NO: 6690 - DNA, 40 bp, Homo sapiens
ctgcatgttatagactacagatatcaaatatggttgctaa

SEQ ID NO: 6691 - DNA, 40 bp, Homo sapiens
ttagcaaccatatttgatatctgtagtctataacatgcag

SEQ ID NO: 6692 - DNA, 40 bp, Homo sapiens
tgcatgttatagactacagatatcaaatatggttgctaac

SEQ ID NO: 6693 - DNA, 40 bp, Homo sapiens
gttagcaaccatatttgatatctgtagtctataacatgca

SEQ ID NO: 6694 - DNA, 40 bp, Homo sapiens
gcatgttatagactacagatatcaaatatggttgctaaca

SEQ ID NO: 6695 - DNA, 40 bp, Homo sapiens
tgttagcaaccatatttgatatctgtagtctataacatgc

SEQ ID NO: 6696 - DNA, 40 bp, Homo sapiens
catgttatagactacagatatcaaatatggttgctaacaa

SEQ ID NO: 6697 - DNA, 40 bp, Homo sapiens
ttgttagcaaccatatttgatatctgtagtctataacatg

SEQ ID NO: 6698 - DNA, 40 bp, Homo sapiens
atgttatagactacagatatcaaatatggttgctaacaat

SEQ ID NO: 6699 - DNA, 40 bp, Homo sapiens
attgttagcaaccatatttgatatctgtagtctataacat

SEQ ID NO: 6700 - DNA, 40 bp, Homo sapiens
tgttatagactacagatatcaaatatggttgctaacaata

SEQ ID NO: 6701 - DNA, 40 bp, Homo sapiens
tattgttagcaaccatatttgatatctgtagtctataaca

SEQ ID NO: 6702 - DNA, 40 bp, Homo sapiens
gttatagactacagatatcaaatatggttgctaacaatag

SEQ ID NO: 6703 - DNA, 40 bp, Homo sapiens
ctattgttagcaaccatatttgatatctgtagtctataac

SEQ ID NO: 6704 - DNA, 40 bp, Homo sapiens
ttatagactacagatatcaaatatggttgctaacaatagt

SEQ ID NO: 6705 - DNA, 40 bp, Homo sapiens
actattgttagcaaccatatttgatatctgtagtctataa

SEQ ID NO: 6706 - DNA, 40 bp, Homo sapiens
tatagactacagatatcaaatatggttgctaacaatagtt

SEQ ID NO: 6707 - DNA, 40 bp, Homo sapiens
aactattgttagcaaccatatttgatatctgtagtctata

SEQ ID NO: 6708 - DNA, 40 bp, Homo sapiens
atagactacagatatcaaatatggttgctaacaatagttt

SEQ ID NO: 6709 - DNA, 40 bp, Homo sapiens
aaactattgttagcaaccatatttgatatctgtagtctat

SEQ ID NO: 6710 - DNA, 40 bp, Homo sapiens
tagactacagatatcaaatatggttgctaacaatagttta

SEQ ID NO: 6711 - DNA, 40 bp, Homo sapiens
taaactattgttagcaaccatatttgatatctgtagtcta

SEQ ID NO: 6712 - DNA, 40 bp, Homo sapiens
agactacagatatcaaatatggttgctaacaatagtttac

SEQ ID NO: 6713 - DNA, 40 bp, Homo sapiens
gtaaactattgttagcaaccatatttgatatctgtagtct

SEQ ID NO: 6714 - DNA, 40 bp, Homo sapiens
gactacagatatcaaatatggttgctaacaatagtttact

SEQ ID NO: 6715 - DNA, 40 bp, Homo sapiens
agtaaactattgttagcaaccatatttgatatctgtagtc

SEQ ID NO: 6716 - DNA, 40 bp, Homo sapiens
actacagatatcaaatatggttgctaacaatagtttactt

SEQ ID NO: 6717 - DNA, 40 bp, Homo sapiens
aagtaaactattgttagcaaccatatttgatatctgtagt

SEQ ID NO: 6718 - DNA, 40 bp, Homo sapiens
ctacagatatcaaatatggttgctaacaatagtttacttt

SEQ ID NO: 6719 - DNA, 40 bp, Homo sapiens
aaagtaaactattgttagcaaccatatttgatatctgtag

SEQ ID NO: 6720 - DNA, 40 bp, Homo sapiens
tacagatatcaaatatggttgctaacaatagtttactttg

SEQ ID NO: 6721 - DNA, 40 bp, Homo sapiens
caaagtaaactattgttagcaaccatatttgatatctgta

SEQ ID NO: 6722 - DNA, 40 bp, Homo sapiens
acagatatcaaatatggttgctaacaatagtttactttga

SEQ ID NO: 6723 - DNA, 40 bp, Homo sapiens
tcaaagtaaactattgttagcaaccatatttgatatctgt

SEQ ID NO: 6724 - DNA, 40 bp, Homo sapiens
cagatatcaaatatggttgctaacaatagtttactttgag

SEQ ID NO: 6725 - DNA, 40 bp, Homo sapiens
ctcaaagtaaactattgttagcaaccatatttgatatctg

SEQ ID NO: 6726 - DNA, 40 bp, Homo sapiens
agatatcaaatatggttgctaacaatagtttactttgaga

SEQ ID NO: 6727 - DNA, 40 bp, Homo sapiens
tctcaaagtaaactattgttagcaaccatatttgatatct

SEQ ID NO: 6728 - DNA, 40 bp, Homo sapiens
gatatcaaatatggttgctaacaatagtttactttgagac

SEQ ID NO: 6729 - DNA, 40 bp, Homo sapiens
gtctcaaagtaaactattgttagcaaccatatttgatatc

SEQ ID NO: 6730 - DNA, 40 bp, Homo sapiens
atatcaaatatggttgctaacaatagtttactttgagact

SEQ ID NO: 6731 - DNA, 40 bp, Homo sapiens
agtctcaaagtaaactattgttagcaaccatatttgatat

SEQ ID NO: 6732 - DNA, 40 bp, Homo sapiens
tatcaaatatggttgctaacaatagtttactttgagactg

SEQ ID NO: 6733 - DNA, 40 bp, Homo sapiens
cagtctcaaagtaaactattgttagcaaccatatttgata

SEQ ID NO: 6734 - DNA, 40 bp, Homo sapiens
atcaaatatggttgctaacaatagtttactttgagactgt

SEQ ID NO: 6735 - DNA, 40 bp, Homo sapiens
acagtctcaaagtaaactattgttagcaaccatatttgat

SEQ ID NO: 6736 - DNA, 40 bp, Homo sapiens
tcaaatatggttgctaacaatagtttactttgagactgta

SEQ ID NO: 6737 - DNA, 40 bp, Homo sapiens
tacagtctcaaagtaaactattgttagcaaccatatttga

SEQ ID NO: 6738 - DNA, 40 bp, Homo sapiens
caaatatggttgctaacaatagtttactttgagactgtag

SEQ ID NO: 6739 - DNA, 40 bp, Homo sapiens
ctacagtctcaaagtaaactattgttagcaaccatatttg

SEQ ID NO: 6740 - DNA, 40 bp, Homo sapiens
aaatatggttgctaacaatagtttactttgagactgtagc

SEQ ID NO: 6741 - DNA, 40 bp, Homo sapiens
gctacagtctcaaagtaaactattgttagcaaccatattt

SEQ ID NO: 6742 - DNA, 40 bp, Homo sapiens
aatatggttgctaacaatagtttactttgagactgtagcc

SEQ ID NO: 6743 - DNA, 40 bp, Homo sapiens
ggctacagtctcaaagtaaactattgttagcaaccatatt

SEQ ID NO: 6744 - DNA, 40 bp, Homo sapiens
atatggttgctaacaatagtttactttgagactgtagcca

SEQ ID NO: 6745 - DNA, 40 bp, Homo sapiens
tggctacagtctcaaagtaaactattgttagcaaccatat

SEQ ID NO: 6746 - DNA, 40 bp, Homo sapiens
tatggttgctaacaatagtttactttgagactgtagccat

SEQ ID NO: 6747 - DNA, 40 bp, Homo sapiens
atggctacagtctcaaagtaaactattgttagcaaccata

SEQ ID NO: 6748 - DNA, 40 bp, Homo sapiens
atggttgctaacaatagtttactttgagactgtagccatc

SEQ ID NO: 6749 - DNA, 40 bp, Homo sapiens
gatggctacagtctcaaagtaaactattgttagcaaccat

SEQ ID NO: 6750 - DNA, 40 bp, Homo sapiens
tggttgctaacaatagtttactttgagactgtagccatcc

SEQ ID NO: 6751 - DNA, 40 bp, Homo sapiens
ggatggctacagtctcaaagtaaactattgttagcaacca

SEQ ID NO: 6752 - DNA, 40 bp, Homo sapiens
ggttgctaacaatagtttactttgagactgtagccatcca

SEQ ID NO: 6753 - DNA, 40 bp, Homo sapiens
tggatggctacagtctcaaagtaaactattgttagcaacc

SEQ ID NO: 6754 - DNA, 40 bp, Homo sapiens
gttgctaacaatagtttactttgagactgtagccatccac

SEQ ID NO: 6755 - DNA, 40 bp, Homo sapiens
gtggatggctacagtctcaaagtaaactattgttagcaac

SEQ ID NO: 6756 - DNA, 40 bp, Homo sapiens
ttgctaacaatagtttactttgagactgtagccatccaca

SEQ ID NO: 6757 - DNA, 40 bp, Homo sapiens
tgtggatggctacagtctcaaagtaaactattgttagcaa

SEQ ID NO: 6758 - DNA, 40 bp, Homo sapiens
tgctaacaatagtttactttgagactgtagccatccacag

SEQ ID NO: 6759 - DNA, 40 bp, Homo sapiens
ctgtggatggctacagtctcaaagtaaactattgttagca

SEQ ID NO: 6760 - DNA, 40 bp, Homo sapiens
gctaacaatagtttactttgagactgtagccatccacagt

SEQ ID NO: 6761 - DNA, 40 bp, Homo sapiens
actgtggatggctacagtctcaaagtaaactattgttagc

SEQ ID NO: 6762 - DNA, 40 bp, Homo sapiens
ctaacaatagtttactttgagactgtagccatccacagta

SEQ ID NO: 6763 - DNA, 40 bp, Homo sapiens
tactgtggatggctacagtctcaaagtaaactattgttag

SEQ ID NO: 6764 - DNA, 40 bp, Homo sapiens
taacaatagtttactttgagactgtagccatccacagtat

SEQ ID NO: 6765 - DNA, 40 bp, Homo sapiens
atactgtggatggctacagtctcaaagtaaactattgtta

SEQ ID NO: 6766 - DNA, 40 bp, Homo sapiens
aacaatagtttactttgagactgtagccatccacagtata

SEQ ID NO: 6767 - DNA, 40 bp, Homo sapiens
tatactgtggatggctacagtctcaaagtaaactattgtt

SEQ ID NO: 6768 - DNA, 40 bp, Homo sapiens
acaatagtttactttgagactgtagccatccacagtatat

SEQ ID NO: 6769 - DNA, 40 bp, Homo sapiens
atatactgtggatggctacagtctcaaagtaaactattgt

SEQ ID NO: 6770 - DNA, 40 bp, Homo sapiens
caatagtttactttgagactgtagccatccacagtatatt

SEQ ID NO: 6771 - DNA, 40 bp, Homo sapiens
aatatactgtggatggctacagtctcaaagtaaactattg

SEQ ID NO: 6772 - DNA, 40 bp, Homo sapiens
aatagtttactttgagactgtagccatccacagtatattt

SEQ ID NO: 6773 - DNA, 40 bp, Homo sapiens
aaatatactgtggatggctacagtctcaaagtaaactatt

SEQ ID NO: 6774 - DNA, 40 bp, Homo sapiens
atagtttactttgagactgtagccatccacagtatatttg

SEQ ID NO: 6775 - DNA, 40 bp, Homo sapiens
caaatatactgtggatggctacagtctcaaagtaaactat

SEQ ID NO: 6776 - DNA, 40 bp, Homo sapiens
tagtttactttgagactgtagccatccacagtatatttgc

SEQ ID NO: 6777 - DNA, 40 bp, Homo sapiens
gcaaatatactgtggatggctacagtctcaaagtaaacta

SEQ ID NO: 6778 - DNA, 40 bp, Homo sapiens
agtttactttgagactgtagccatccacagtatatttgct

SEQ ID NO: 6779 - DNA, 40 bp, Homo sapiens
agcaaatatactgtggatggctacagtctcaaagtaaact

SEQ ID NO: 6780 - DNA, 40 bp, Homo sapiens
gtttactttgagactgtagccatccacagtatatttgctt

SEQ ID NO: 6781 - DNA, 40 bp, Homo sapiens
aagcaaatatactgtggatggctacagtctcaaagtaaac

SEQ ID NO: 6782 - DNA, 40 bp, Homo sapiens
tttactttgagactgtagccatccacagtatatttgcttt

SEQ ID NO: 6783 - DNA, 40 bp, Homo sapiens
aaagcaaatatactgtggatggctacagtctcaaagtaaa

SEQ ID NO: 6784 - DNA, 40 bp, Homo sapiens
ttactttgagactgtagccatccacagtatatttgctttt

SEQ ID NO: 6785 - DNA, 40 bp, Homo sapiens
aaaagcaaatatactgtggatggctacagtctcaaagtaa

SEQ ID NO: 6786 - DNA, 40 bp, Homo sapiens
tactttgagactgtagccatccacagtatatttgctttta

SEQ ID NO: 6787 - DNA, 40 bp, Homo sapiens
taaaagcaaatatactgtggatggctacagtctcaaagta

SEQ ID NO: 6788 - DNA, 40 bp, Homo sapiens
actttgagactgtagccatccacagtatatttgcttttaa

SEQ ID NO: 6789 - DNA, 40 bp, Homo sapiens
ttaaaagcaaatatactgtggatggctacagtctcaaagt

SEQ ID NO: 6790 - DNA, 40 bp, Homo sapiens
ctttgagactgtagccatccacagtatatttgcttttaag

SEQ ID NO: 6791 - DNA, 40 bp, Homo sapiens
cttaaaagcaaatatactgtggatggctacagtctcaaag

SEQ ID NO: 6792 - DNA, 40 bp, Homo sapiens
tttgagactgtagccatccacagtatatttgcttttaaga

SEQ ID NO: 6793 - DNA, 40 bp, Homo sapiens
tcttaaaagcaaatatactgtggatggctacagtctcaaa

SEQ ID NO: 6794 - DNA, 40 bp, Homo sapiens
ttgagactgtagccatccacagtatatttgcttttaagag

SEQ ID NO: 6795 - DNA, 40 bp, Homo sapiens
ctcttaaaagcaaatatactgtggatggctacagtctcaa

SEQ ID NO: 6796 - DNA, 40 bp, Homo sapiens
tgagactgtagccatccacagtatatttgcttttaagaga

SEQ ID NO: 6797 - DNA, 40 bp, Homo sapiens
tctcttaaaagcaaatatactgtggatggctacagtctca

SEQ ID NO: 6798 - DNA, 40 bp, Homo sapiens
gagactgtagccatccacagtatatttgcttttaagagat

SEQ ID NO: 6799 - DNA, 40 bp, Homo sapiens
atctcttaaaagcaaatatactgtggatggctacagtctc

SEQ ID NO: 6800 - DNA, 40 bp, Homo sapiens
agactgtagccatccacagtatatttgcttttaagagatg

SEQ ID NO: 6801 - DNA, 40 bp, Homo sapiens
catctcttaaaagcaaatatactgtggatggctacagtct

SEQ ID NO: 6802 - DNA, 40 bp, Homo sapiens
gactgtagccatccacagtatatttgcttttaagagatgg

SEQ ID NO: 6803 - DNA, 40 bp, Homo sapiens
ccatctcttaaaagcaaatatactgtggatggctacagtc

SEQ ID NO: 6804 - DNA, 40 bp, Homo sapiens
actgtagccatccacagtatatttgcttttaagagatggt

SEQ ID NO: 6805 - DNA, 40 bp, Homo sapiens
accatctcttaaaagcaaatatactgtggatggctacagt

SEQ ID NO: 6806 - DNA, 40 bp, Homo sapiens
ctgtagccatccacagtatatttgcttttaagagatggta

SEQ ID NO: 6807 - DNA, 40 bp, Homo sapiens
taccatctcttaaaagcaaatatactgtggatggctacag

SEQ ID NO: 6808 - DNA, 40 bp, Homo sapiens
tgtagccatccacagtatatttgcttttaagagatggtag

SEQ ID NO: 6809 - DNA, 40 bp, Homo sapiens
ctaccatctcttaaaagcaaatatactgtggatggctaca

SEQ ID NO: 6810 - DNA, 40 bp, Homo sapiens
gtagccatccacagtatatttgcttttaagagatggtaga

SEQ ID NO: 6811 - DNA, 40 bp, Homo sapiens
tctaccatctcttaaaagcaaatatactgtggatggctac

SEQ ID NO: 6812 - DNA, 40 bp, Homo sapiens
tagccatccacagtatatttgcttttaagagatggtagat

SEQ ID NO: 6813 - DNA, 40 bp, Homo sapiens
atctaccatctcttaaaagcaaatatactgtggatggcta

SEQ ID NO: 6814 - DNA, 40 bp, Homo sapiens
agccatccacagtatatttgcttttaagagatggtagatg

SEQ ID NO: 6815 - DNA, 40 bp, Homo sapiens
catctaccatctcttaaaagcaaatatactgtggatggct

SEQ ID NO: 6816 - DNA, 40 bp, Homo sapiens
gccatccacagtatatttgcttttaagagatggtagatgg

SEQ ID NO: 6817 - DNA, 40 bp, Homo sapiens
ccatctaccatctcttaaaagcaaatatactgtggatggc

SEQ ID NO: 6818 - DNA, 40 bp, Homo sapiens
ccatccacagtatatttgcttttaagagatggtagatggt

SEQ ID NO: 6819 - DNA, 40 bp, Homo sapiens
accatctaccatctcttaaaagcaaatatactgtggatgg

SEQ ID NO: 6820 - DNA, 40 bp, Homo sapiens
catccacagtatatttgcttttaagagatggtagatggta

SEQ ID NO: 6821 - DNA, 40 bp, Homo sapiens
taccatctaccatctcttaaaagcaaatatactgtggatg

SEQ ID NO: 6822 - DNA, 40 bp, Homo sapiens
atccacagtatatttgcttttaagagatggtagatggtaa

SEQ ID NO: 6823 - DNA, 40 bp, Homo sapiens
ttaccatctaccatctcttaaaagcaaatatactgtggat

SEQ ID NO: 6824 - DNA, 40 bp, Homo sapiens
tccacagtatatttgcttttaagagatggtagatggtaat

SEQ ID NO: 6825 - DNA, 40 bp, Homo sapiens
attaccatctaccatctcttaaaagcaaatatactgtgga

SEQ ID NO: 6826 - DNA, 40 bp, Homo sapiens
ccacagtatatttgcttttaagagatggtagatggtaatt

SEQ ID NO: 6827 - DNA, 40 bp, Homo sapiens
aattaccatctaccatctcttaaaagcaaatatactgtgg

SEQ ID NO: 6828 - DNA, 40 bp, Homo sapiens
cacagtatatttgcttttaagagatggtagatggtaattc

SEQ ID NO: 6829 - DNA, 40 bp, Homo sapiens
gaattaccatctaccatctcttaaaagcaaatatactgtg

SEQ ID NO: 6830 - DNA, 40 bp, Homo sapiens
acagtatatttgcttttaagagatggtagatggtaattca

SEQ ID NO: 6831 - DNA, 40 bp, Homo sapiens
tgaattaccatctaccatctcttaaaagcaaatatactgt

SEQ ID NO: 6832 - DNA, 40 bp, Homo sapiens
cagtatatttgcttttaagagatggtagatggtaattcag

SEQ ID NO: 6833 - DNA, 40 bp, Homo sapiens
ctgaattaccatctaccatctcttaaaagcaaatatactg

SEQ ID NO: 6834 - DNA, 40 bp, Homo sapiens
agtatatttgcttttaagagatggtagatggtaattcagt

SEQ ID NO: 6835 - DNA, 40 bp, Homo sapiens
actgaattaccatctaccatctcttaaaagcaaatatact

SEQ ID NO: 6836 - DNA, 40 bp, Homo sapiens
gtatatttgcttttaagagatggtagatggtaattcagtt

SEQ ID NO: 6837 - DNA, 40 bp, Homo sapiens
aactgaattaccatctaccatctcttaaaagcaaatatac

SEQ ID NO: 6838 - DNA, 40 bp, Homo sapiens
tatatttgcttttaagagatggtagatggtaattcagttt

SEQ ID NO: 6839 - DNA, 40 bp, Homo sapiens
aaactgaattaccatctaccatctcttaaaagcaaatata

SEQ ID NO: 6840 - DNA, 40 bp, Homo sapiens
atatttgcttttaagagatggtagatggtaattcagtttt

SEQ ID NO: 6841 - DNA, 40 bp, Homo sapiens
aaaactgaattaccatctaccatctcttaaaagcaaatat

SEQ ID NO: 6842 - DNA, 40 bp, Homo sapiens
tatttgcttttaagagatggtagatggtaattcagtttta

SEQ ID NO: 6843 - DNA, 40 bp, Homo sapiens
taaaactgaattaccatctaccatctcttaaaagcaaata

SEQ ID NO: 6844 - DNA, 40 bp, Homo sapiens
atttgcttttaagagatggtagatggtaattcagttttat

SEQ ID NO: 6845 - DNA, 40 bp, Homo sapiens
ataaaactgaattaccatctaccatctcttaaaagcaaat

SEQ ID NO: 6846 - DNA, 40 bp, Homo sapiens
tttgcttttaagagatggtagatggtaattcagttttatg

SEQ ID NO: 6847 - DNA, 40 bp, Homo sapiens
cataaaactgaattaccatctaccatctcttaaaagcaaa

SEQ ID NO: 6848 - DNA, 40 bp, Homo sapiens
ttgcttttaagagatggtagatggtaattcagttttatga

SEQ ID NO: 6849 - DNA, 40 bp, Homo sapiens
tcataaaactgaattaccatctaccatctcttaaaagcaa

SEQ ID NO: 6850 - DNA, 40 bp, Homo sapiens
tgcttttaagagatggtagatggtaattcagttttatgaa

SEQ ID NO: 6851 - DNA, 40 bp, Homo sapiens
ttcataaaactgaattaccatctaccatctcttaaaagca

SEQ ID NO: 6852 - DNA, 40 bp, Homo sapiens
gcttttaagagatggtagatggtaattcagttttatgaaa

SEQ ID NO: 6853 - DNA, 40 bp, Homo sapiens
tttcataaaactgaattaccatctaccatctcttaaaagc

SEQ ID NO: 6854 - DNA, 40 bp, Homo sapiens
cttttaagagatggtagatggtaattcagttttatgaaaa

SEQ ID NO: 6855 - DNA, 40 bp, Homo sapiens
ttttcataaaactgaattaccatctaccatctcttaaaag

SEQ ID NO: 6856 - DNA, 40 bp, Homo sapiens
ttttaagagatggtagatggtaattcagttttatgaaaaa

SEQ ID NO: 6857 - DNA, 40 bp, Homo sapiens
tttttcataaaactgaattaccatctaccatctcttaaaa

SEQ ID NO: 6858 - DNA, 40 bp, Homo sapiens
tttaagagatggtagatggtaattcagttttatgaaaaat

SEQ ID NO: 6859 - DNA, 40 bp, Homo sapiens
atttttcataaaactgaattaccatctaccatctcttaaa

SEQ ID NO: 6860 - DNA, 40 bp, Homo sapiens
ttaagagatggtagatggtaattcagttttatgaaaaata

SEQ ID NO: 6861 - DNA, 40 bp, Homo sapiens
tatttttcataaaactgaattaccatctaccatctcttaa

SEQ ID NO: 6862 - DNA, 40 bp, Homo sapiens
taagagatggtagatggtaattcagttttatgaaaaataa

SEQ ID NO: 6863 - DNA, 40 bp, Homo sapiens
ttatttttcataaaactgaattaccatctaccatctctta

SEQ ID NO: 6864 - DNA, 40 bp, Homo sapiens
aagagatggtagatggtaattcagttttatgaaaaataaa

SEQ ID NO: 6865 - DNA, 40 bp, Homo sapiens
tttatttttcataaaactgaattaccatctaccatctctt

SEQ ID NO: 6866 - DNA, 40 bp, Homo sapiens
agagatggtagatggtaattcagttttatgaaaaataaaa

SEQ ID NO: 6867 - DNA, 40 bp, Homo sapiens
ttttatttttcataaaactgaattaccatctaccatctct

SEQ ID NO: 6868 - DNA, 40 bp, Homo sapiens
gagatggtagatggtaattcagttttatgaaaaataaaaa

SEQ ID NO: 6869 - DNA, 40 bp, Homo sapiens
tttttatttttcataaaactgaattaccatctaccatctc

SEQ ID NO: 6870 - DNA, 40 bp, Homo sapiens
agatggtagatggtaattcagttttatgaaaaataaaaat

SEQ ID NO: 6871 - DNA, 40 bp, Homo sapiens
atttttatttttcataaaactgaattaccatctaccatct

SEQ ID NO: 6872 - DNA, 40 bp, Homo sapiens
gatggtagatggtaattcagttttatgaaaaataaaaatg

SEQ ID NO: 6873 - DNA, 40 bp, Homo sapiens
catttttatttttcataaaactgaattaccatctaccatc

SEQ ID NO: 6874 - DNA, 40 bp, Homo sapiens
atggtagatggtaattcagttttatgaaaaataaaaatga

SEQ ID NO: 6875 - DNA, 40 bp, Homo sapiens
tcatttttatttttcataaaactgaattaccatctaccat

SEQ ID NO: 6876 - DNA, 40 bp, Homo sapiens
tggtagatggtaattcagttttatgaaaaataaaaatgaa

SEQ ID NO: 6877 - DNA, 40 bp, Homo sapiens
ttcatttttatttttcataaaactgaattaccatctacca

SEQ ID NO: 6878 - DNA, 40 bp, Homo sapiens
ggtagatggtaattcagttttatgaaaaataaaaatgaat

SEQ ID NO: 6879 - DNA, 40 bp, Homo sapiens
attcatttttatttttcataaaactgaattaccatctacc

SEQ ID NO: 6880 - DNA, 40 bp, Homo sapiens
gtagatggtaattcagttttatgaaaaataaaaatgaatt

SEQ ID NO: 6881 - DNA, 40 bp, Homo sapiens
aattcatttttatttttcataaaactgaattaccatctac

SEQ ID NO: 6882 - DNA, 40 bp, Homo sapiens
tagatggtaattcagttttatgaaaaataaaaatgaattt

SEQ ID NO: 6883 - DNA, 40 bp, Homo sapiens
aaattcatttttatttttcataaaactgaattaccatcta

SEQ ID NO: 6884 - DNA, 40 bp, Homo sapiens
agatggtaattcagttttatgaaaaataaaaatgaatttt

SEQ ID NO: 6885 - DNA, 40 bp, Homo sapiens
aaaattcatttttatttttcataaaactgaattaccatct

SEQ ID NO: 6886 - DNA, 40 bp, Homo sapiens
gatggtaattcagttttatgaaaaataaaaatgaattttc

SEQ ID NO: 6887 - DNA, 40 bp, Homo sapiens
gaaaattcatttttatttttcataaaactgaattaccatc

SEQ ID NO: 6888 - DNA, 40 bp, Homo sapiens
atggtaattcagttttatgaaaaataaaaatgaattttct

SEQ ID NO: 6889 - DNA, 40 bp, Homo sapiens
agaaaattcatttttatttttcataaaactgaattaccat

SEQ ID NO: 6890 - DNA, 40 bp, Homo sapiens
tggtaattcagttttatgaaaaataaaaatgaattttctt

SEQ ID NO: 6891 - DNA, 40 bp, Homo sapiens
aagaaaattcatttttatttttcataaaactgaattacca

SEQ ID NO: 6892 - DNA, 40 bp, Homo sapiens
ggtaattcagttttatgaaaaataaaaatgaattttcttc

SEQ ID NO: 6893 - DNA, 40 bp, Homo sapiens
gaagaaaattcatttttatttttcataaaactgaattacc

SEQ ID NO: 6894 - DNA, 40 bp, Homo sapiens
gtaattcagttttatgaaaaataaaaatgaattttcttcc

SEQ ID NO: 6895 - DNA, 40 bp, Homo sapiens
ggaagaaaattcatttttatttttcataaaactgaattac

SEQ ID NO: 6896 - DNA, 40 bp, Homo sapiens
taattcagttttatgaaaaataaaaatgaattttcttcca

SEQ ID NO: 6897 - DNA, 40 bp, Homo sapiens
tggaagaaaattcatttttatttttcataaaactgaatta

SEQ ID NO: 6898 - DNA, 40 bp, Homo sapiens
aattcagttttatgaaaaataaaaatgaattttcttccat

SEQ ID NO: 6899 - DNA, 40 bp, Homo sapiens
atggaagaaaattcatttttatttttcataaaactgaatt

SEQ ID NO: 6900 - DNA, 40 bp, Homo sapiens
attcagttttatgaaaaataaaaatgaattttcttccatt

SEQ ID NO: 6901 - DNA, 40 bp, Homo sapiens
aatggaagaaaattcatttttatttttcataaaactgaat

SEQ ID NO: 6902 - DNA, 40 bp, Homo sapiens
ttcagttttatgaaaaataaaaatgaattttcttccatta

SEQ ID NO: 6903 - DNA, 40 bp, Homo sapiens
taatggaagaaaattcatttttatttttcataaaactgaa

SEQ ID NO: 6904 - DNA, 40 bp, Homo sapiens
tcagttttatgaaaaataaaaatgaattttcttccattac

SEQ ID NO: 6905 - DNA, 40 bp, Homo sapiens
gtaatggaagaaaattcatttttatttttcataaaactga

SEQ ID NO: 6906 - DNA, 40 bp, Homo sapiens
cagttttatgaaaaataaaaatgaattttcttccattaca

SEQ ID NO: 6907 - DNA, 40 bp, Homo sapiens
tgtaatggaagaaaattcatttttatttttcataaaactg

SEQ ID NO: 6908 - DNA, 40 bp, Homo sapiens
agttttatgaaaaataaaaatgaattttcttccattacaa

SEQ ID NO: 6909 - DNA, 40 bp, Homo sapiens
ttgtaatggaagaaaattcatttttatttttcataaaact

SEQ ID NO: 6910 - DNA, 40 bp, Homo sapiens
gttttatgaaaaataaaaatgaattttcttccattacaaa

SEQ ID NO: 6911 - DNA, 40 bp, Homo sapiens
tttgtaatggaagaaaattcatttttatttttcataaaac

SEQ ID NO: 6912 - DNA, 40 bp, Homo sapiens
ttttatgaaaaataaaaatgaattttcttccattacaaaa

SEQ ID NO: 6913 - DNA, 40 bp, Homo sapiens
ttttgtaatggaagaaaattcatttttatttttcataaaa

SEQ ID NO: 6914 - DNA, 40 bp, Homo sapiens
tttatgaaaaataaaaatgaattttcttccattacaaaat

SEQ ID NO: 6915 - DNA, 40 bp, Homo sapiens
attttgtaatggaagaaaattcatttttatttttcataaa

SEQ ID NO: 6916 - DNA, 40 bp, Homo sapiens
ttatgaaaaataaaaatgaattttcttccattacaaaatt

SEQ ID NO: 6917 - DNA, 40 bp, Homo sapiens
aattttgtaatggaagaaaattcatttttatttttcataa

SEQ ID NO: 6918 - DNA, 40 bp, Homo sapiens
tatgaaaaataaaaatgaattttcttccattacaaaattg

SEQ ID NO: 6919 - DNA, 40 bp, Homo sapiens
caattttgtaatggaagaaaattcatttttatttttcata

SEQ ID NO: 6920 - DNA, 40 bp, Homo sapiens
atgaaaaataaaaatgaattttcttccattacaaaattgt

SEQ ID NO: 6921 - DNA, 40 bp, Homo sapiens
acaattttgtaatggaagaaaattcatttttatttttcat

SEQ ID NO: 6922 - DNA, 40 bp, Homo sapiens
tgaaaaataaaaatgaattttcttccattacaaaattgtt

SEQ ID NO: 6923 - DNA, 40 bp, Homo sapiens
aacaattttgtaatggaagaaaattcatttttatttttca

SEQ ID NO: 6924 - DNA, 40 bp, Homo sapiens
gaaaaataaaaatgaattttcttccattacaaaattgttg

SEQ ID NO: 6925 - DNA, 40 bp, Homo sapiens
caacaattttgtaatggaagaaaattcatttttatttttc

SEQ ID NO: 6926 - DNA, 40 bp, Homo sapiens
aaaaataaaaatgaattttcttccattacaaaattgttgg

SEQ ID NO: 6927 - DNA, 40 bp, Homo sapiens
ccaacaattttgtaatggaagaaaattcatttttattttt

SEQ ID NO: 6928 - DNA, 40 bp, Homo sapiens
aaaataaaaatgaattttcttccattacaaaattgttgga

SEQ ID NO: 6929 - DNA, 40 bp, Homo sapiens
tccaacaattttgtaatggaagaaaattcatttttatttt

SEQ ID NO: 6930 - DNA, 40 bp, Homo sapiens
aaataaaaatgaattttcttccattacaaaattgttggat

SEQ ID NO: 6931 - DNA, 40 bp, Homo sapiens
atccaacaattttgtaatggaagaaaattcatttttattt

SEQ ID NO: 6932 - DNA, 40 bp, Homo sapiens
aataaaaatgaattttcttccattacaaaattgttggatt

SEQ ID NO: 6933 - DNA, 40 bp, Homo sapiens
aatccaacaattttgtaatggaagaaaattcatttttatt

SEQ ID NO: 6934 - DNA, 40 bp, Homo sapiens
ataaaaatgaattttcttccattacaaaattgttggattc

SEQ ID NO: 6935 - DNA, 40 bp, Homo sapiens
gaatccaacaattttgtaatggaagaaaattcatttttat

SEQ ID NO: 6936 - DNA, 40 bp, Homo sapiens
taaaaatgaattttcttccattacaaaattgttggattcg

SEQ ID NO: 6937 - DNA, 40 bp, Homo sapiens
cgaatccaacaattttgtaatggaagaaaattcattttta

SEQ ID NO: 6938 - DNA, 40 bp, Homo sapiens
aaaaatgaattttcttccattacaaaattgttggattcga

SEQ ID NO: 6939 - DNA, 40 bp, Homo sapiens
tcgaatccaacaattttgtaatggaagaaaattcattttt

SEQ ID NO: 6940 - DNA, 40 bp, Homo sapiens
aaaatgaattttcttccattacaaaattgttggattcgag

SEQ ID NO: 6941 - DNA, 40 bp, Homo sapiens
ctcgaatccaacaattttgtaatggaagaaaattcatttt

SEQ ID NO: 6942 - DNA, 40 bp, Homo sapiens
aaatgaattttcttccattacaaaattgttggattcgagt

SEQ ID NO: 6943 - DNA, 40 bp, Homo sapiens
actcgaatccaacaattttgtaatggaagaaaattcattt

SEQ ID NO: 6944 - DNA, 40 bp, Homo sapiens
aatgaattttcttccattacaaaattgttggattcgagtc

SEQ ID NO: 6945 - DNA, 40 bp, Homo sapiens
gactcgaatccaacaattttgtaatggaagaaaattcatt

SEQ ID NO: 6946 - DNA, 40 bp, Homo sapiens
atgaattttcttccattacaaaattgttggattcgagtcc

SEQ ID NO: 6947 - DNA, 40 bp, Homo sapiens
ggactcgaatccaacaattttgtaatggaagaaaattcat

SEQ ID NO: 6948 - DNA, 40 bp, Homo sapiens
tgaattttcttccattacaaaattgttggattcgagtcca

SEQ ID NO: 6949 - DNA, 40 bp, Homo sapiens
tggactcgaatccaacaattttgtaatggaagaaaattca

SEQ ID NO: 6950 - DNA, 40 bp, Homo sapiens
gaattttcttccattacaaaattgttggattcgagtccag

SEQ ID NO: 6951 - DNA, 40 bp, Homo sapiens
ctggactcgaatccaacaattttgtaatggaagaaaattc

SEQ ID NO: 6952 - DNA, 40 bp, Homo sapiens
aattttcttccattacaaaattgttggattcgagtccagt

SEQ ID NO: 6953 - DNA, 40 bp, Homo sapiens
actggactcgaatccaacaattttgtaatggaagaaaatt

SEQ ID NO: 6954 - DNA, 40 bp, Homo sapiens
attttcttccattacaaaattgttggattcgagtccagtc

SEQ ID NO: 6955 - DNA, 40 bp, Homo sapiens
gactggactcgaatccaacaattttgtaatggaagaaaat

SEQ ID NO: 6956 - DNA, 40 bp, Homo sapiens
ttttcttccattacaaaattgttggattcgagtccagtcc

SEQ ID NO: 6957 - DNA, 40 bp, Homo sapiens
ggactggactcgaatccaacaattttgtaatggaagaaaa

SEQ ID NO: 6958 - DNA, 40 bp, Homo sapiens
tttcttccattacaaaattgttggattcgagtccagtcca

SEQ ID NO: 6959 - DNA, 40 bp, Homo sapiens
tggactggactcgaatccaacaattttgtaatggaagaaa

SEQ ID NO: 6960 - DNA, 40 bp, Homo sapiens
ttcttccattacaaaattgttggattcgagtccagtccac

SEQ ID NO: 6961 - DNA, 40 bp, Homo sapiens
gtggactggactcgaatccaacaattttgtaatggaagaa

SEQ ID NO: 6962 - DNA, 40 bp, Homo sapiens
tcttccattacaaaattgttggattcgagtccagtccact

SEQ ID NO: 6963 - DNA, 40 bp, Homo sapiens
agtggactggactcgaatccaacaattttgtaatggaaga

SEQ ID NO: 6964 - DNA, 40 bp, Homo sapiens
cttccattacaaaattgttggattcgagtccagtccactc

SEQ ID NO: 6965 - DNA, 40 bp, Homo sapiens
gagtggactggactcgaatccaacaattttgtaatggaag

SEQ ID NO: 6966 - DNA, 40 bp, Homo sapiens
ttccattacaaaattgttggattcgagtccagtccactcc

SEQ ID NO: 6967 - DNA, 40 bp, Homo sapiens
ggagtggactggactcgaatccaacaattttgtaatggaa

SEQ ID NO: 6968 - DNA, 40 bp, Homo sapiens
tccattacaaaattgttggattcgagtccagtccactcct

SEQ ID NO: 6969 - DNA, 40 bp, Homo sapiens
aggagtggactggactcgaatccaacaattttgtaatgga

SEQ ID NO: 6970 - DNA, 40 bp, Homo sapiens
ccattacaaaattgttggattcgagtccagtccactcctt

SEQ ID NO: 6971 - DNA, 40 bp, Homo sapiens
aaggagtggactggactcgaatccaacaattttgtaatgg

SEQ ID NO: 6972 - DNA, 40 bp, Homo sapiens
cattacaaaattgttggattcgagtccagtccactcctta

SEQ ID NO: 6973 - DNA, 40 bp, Homo sapiens
taaggagtggactggactcgaatccaacaattttgtaatg

SEQ ID NO: 6974 - DNA, 40 bp, Homo sapiens
attacaaaattgttggattcgagtccagtccactccttac

SEQ ID NO: 6975 - DNA, 40 bp, Homo sapiens
gtaaggagtggactggactcgaatccaacaattttgtaat

SEQ ID NO: 6976 - DNA, 40 bp, Homo sapiens
ttacaaaattgttggattcgagtccagtccactccttact

SEQ ID NO: 6977 - DNA, 40 bp, Homo sapiens
agtaaggagtggactggactcgaatccaacaattttgtaa

SEQ ID NO: 6978 - DNA, 40 bp, Homo sapiens
tacaaaattgttggattcgagtccagtccactccttacta

SEQ ID NO: 6979 - DNA, 40 bp, Homo sapiens
tagtaaggagtggactggactcgaatccaacaattttgta

SEQ ID NO: 6980 - DNA, 40 bp, Homo sapiens
acaaaattgttggattcgagtccagtccactccttactag

SEQ ID NO: 6981 - DNA, 40 bp, Homo sapiens
ctagtaaggagtggactggactcgaatccaacaattttgt

SEQ ID NO: 6982 - DNA, 40 bp, Homo sapiens
caaaattgttggattcgagtccagtccactccttactagc

SEQ ID NO: 6983 - DNA, 40 bp, Homo sapiens
gctagtaaggagtggactggactcgaatccaacaattttg

SEQ ID NO: 6984 - DNA, 40 bp, Homo sapiens
aaaattgttggattcgagtccagtccactccttactagct

SEQ ID NO: 6985 - DNA, 40 bp, Homo sapiens
agctagtaaggagtggactggactcgaatccaacaatttt

SEQ ID NO: 6986 - DNA, 40 bp, Homo sapiens
aaattgttggattcgagtccagtccactccttactagctt

SEQ ID NO: 6987 - DNA, 40 bp, Homo sapiens
aagctagtaaggagtggactggactcgaatccaacaattt

SEQ ID NO: 6988 - DNA, 40 bp, Homo sapiens
aattgttggattcgagtccagtccactccttactagcttt

SEQ ID NO: 6989 - DNA, 40 bp, Homo sapiens
aaagctagtaaggagtggactggactcgaatccaacaatt

SEQ ID NO: 6990 - DNA, 40 bp, Homo sapiens
attgttggattcgagtccagtccactccttactagctttt

SEQ ID NO: 6991 - DNA, 40 bp, Homo sapiens
aaaagctagtaaggagtggactggactcgaatccaacaat

SEQ ID NO: 6992 - DNA, 40 bp, Homo sapiens
ttgttggattcgagtccagtccactccttactagcttttc

SEQ ID NO: 6993 - DNA, 40 bp, Homo sapiens
gaaaagctagtaaggagtggactggactcgaatccaacaa

SEQ ID NO: 6994 - DNA, 40 bp, Homo sapiens
tgttggattcgagtccagtccactccttactagcttttct

SEQ ID NO: 6995 - DNA, 40 bp, Homo sapiens
agaaaagctagtaaggagtggactggactcgaatccaaca

SEQ ID NO: 6996 - DNA, 40 bp, Homo sapiens
gttggattcgagtccagtccactccttactagcttttcta

SEQ ID NO: 6997 - DNA, 40 bp, Homo sapiens
tagaaaagctagtaaggagtggactggactcgaatccaac

SEQ ID NO: 6998 - DNA, 40 bp, Homo sapiens
ttggattcgagtccagtccactccttactagcttttctaa

SEQ ID NO: 6999 - DNA, 40 bp, Homo sapiens
ttagaaaagctagtaaggagtggactggactcgaatccaa

SEQ ID NO: 7000 - DNA, 40 bp, Homo sapiens
tggattcgagtccagtccactccttactagcttttctaac

SEQ ID NO: 7001 - DNA, 40 bp, Homo sapiens
gttagaaaagctagtaaggagtggactggactcgaatcca

SEQ ID NO: 7002 - DNA, 40 bp, Homo sapiens
ggattcgagtccagtccactccttactagcttttctaact

SEQ ID NO: 7003 - DNA, 40 bp, Homo sapiens
agttagaaaagctagtaaggagtggactggactcgaatcc

SEQ ID NO: 7004 - DNA, 40 bp, Homo sapiens
gattcgagtccagtccactccttactagcttttctaactc

SEQ ID NO: 7005 - DNA, 40 bp, Homo sapiens
gagttagaaaagctagtaaggagtggactggactcgaatc

SEQ ID NO: 7006 - DNA, 40 bp, Homo sapiens
attcgagtccagtccactccttactagcttttctaactct

SEQ ID NO: 7007 - DNA, 40 bp, Homo sapiens
agagttagaaaagctagtaaggagtggactggactcgaat

SEQ ID NO: 7008 - DNA, 40 bp, Homo sapiens
ttcgagtccagtccactccttactagcttttctaactctc

SEQ ID NO: 7009 - DNA, 40 bp, Homo sapiens
gagagttagaaaagctagtaaggagtggactggactcgaa

SEQ ID NO: 7010 - DNA, 40 bp, Homo sapiens
tcgagtccagtccactccttactagcttttctaactctcg

SEQ ID NO: 7011 - DNA, 40 bp, Homo sapiens
cgagagttagaaaagctagtaaggagtggactggactcga

SEQ ID NO: 7012 - DNA, 40 bp, Homo sapiens
cgagtccagtccactccttactagcttttctaactctcgg

SEQ ID NO: 7013 - DNA, 40 bp, Homo sapiens
ccgagagttagaaaagctagtaaggagtggactggactcg

SEQ ID NO: 7014 - DNA, 40 bp, Homo sapiens
gagtccagtccactccttactagcttttctaactctcggt

SEQ ID NO: 7015 - DNA, 40 bp, Homo sapiens
accgagagttagaaaagctagtaaggagtggactggactc

SEQ ID NO: 7016 - DNA, 40 bp, Homo sapiens
agtccagtccactccttactagcttttctaactctcggtg

SEQ ID NO: 7017 - DNA, 40 bp, Homo sapiens
caccgagagttagaaaagctagtaaggagtggactggact

SEQ ID NO: 7018 - DNA, 40 bp, Homo sapiens
gtccagtccactccttactagcttttctaactctcggtga

SEQ ID NO: 7019 - DNA, 40 bp, Homo sapiens
tcaccgagagttagaaaagctagtaaggagtggactggac

SEQ ID NO: 7020 - DNA, 40 bp, Homo sapiens
tccagtccactccttactagcttttctaactctcggtgag

SEQ ID NO: 7021 - DNA, 40 bp, Homo sapiens
ctcaccgagagttagaaaagctagtaaggagtggactgga

SEQ ID NO: 7022 - DNA, 40 bp, Homo sapiens
ccagtccactccttactagcttttctaactctcggtgagg

SEQ ID NO: 7023 - DNA, 40 bp, Homo sapiens
cctcaccgagagttagaaaagctagtaaggagtggactgg

SEQ ID NO: 7024 - DNA, 40 bp, Homo sapiens
cagtccactccttactagcttttctaactctcggtgaggg

SEQ ID NO: 7025 - DNA, 40 bp, Homo sapiens
ccctcaccgagagttagaaaagctagtaaggagtggactg

SEQ ID NO: 7026 - DNA, 40 bp, Homo sapiens
agtccactccttactagcttttctaactctcggtgaggga

SEQ ID NO: 7027 - DNA, 40 bp, Homo sapiens
tccctcaccgagagttagaaaagctagtaaggagtggact

SEQ ID NO: 7028 - DNA, 40 bp, Homo sapiens
gtccactccttactagcttttctaactctcggtgagggat

SEQ ID NO: 7029 - DNA, 40 bp, Homo sapiens
atccctcaccgagagttagaaaagctagtaaggagtggac

SEQ ID NO: 7030 - DNA, 40 bp, Homo sapiens
tccactccttactagcttttctaactctcggtgagggatc

SEQ ID NO: 7031 - DNA, 40 bp, Homo sapiens
gatccctcaccgagagttagaaaagctagtaaggagtgga

SEQ ID NO: 7032 - DNA, 40 bp, Homo sapiens
ccactccttactagcttttctaactctcggtgagggatcc

SEQ ID NO: 7033 - DNA, 40 bp, Homo sapiens
ggatccctcaccgagagttagaaaagctagtaaggagtgg

SEQ ID NO: 7034 - DNA, 40 bp, Homo sapiens
cactccttactagcttttctaactctcggtgagggatccc

SEQ ID NO: 7035 - DNA, 40 bp, Homo sapiens
gggatccctcaccgagagttagaaaagctagtaaggagtg

SEQ ID NO: 7036 - DNA, 40 bp, Homo sapiens
actccttactagcttttctaactctcggtgagggatcccc

SEQ ID NO: 7037 - DNA, 40 bp, Homo sapiens
ggggatccctcaccgagagttagaaaagctagtaaggagt

SEQ ID NO: 7038 - DNA, 40 bp, Homo sapiens
ctccttactagcttttctaactctcggtgagggatcccct

SEQ ID NO: 7039 - DNA, 40 bp, Homo sapiens
aggggatccctcaccgagagttagaaaagctagtaaggag

SEQ ID NO: 7040 - DNA, 40 bp, Homo sapiens
tccttactagcttttctaactctcggtgagggatcccctc

SEQ ID NO: 7041 - DNA, 40 bp, Homo sapiens
gaggggatccctcaccgagagttagaaaagctagtaagga

SEQ ID NO: 7042 - DNA, 40 bp, Homo sapiens
ccttactagcttttctaactctcggtgagggatcccctcc

SEQ ID NO: 7043 - DNA, 40 bp, Homo sapiens
ggaggggatccctcaccgagagttagaaaagctagtaagg

SEQ ID NO: 7044 - DNA, 40 bp, Homo sapiens
cttactagcttttctaactctcggtgagggatcccctccc

SEQ ID NO: 7045 - DNA, 40 bp, Homo sapiens
gggaggggatccctcaccgagagttagaaaagctagtaag

SEQ ID NO: 7046 - DNA, 40 bp, Homo sapiens
ttactagcttttctaactctcggtgagggatcccctccca

SEQ ID NO: 7047 - DNA, 40 bp, Homo sapiens
tgggaggggatccctcaccgagagttagaaaagctagtaa

SEQ ID NO: 7048 - DNA, 40 bp, Homo sapiens
tactagcttttctaactctcggtgagggatcccctcccag

SEQ ID NO: 7049 - DNA, 40 bp, Homo sapiens
ctgggaggggatccctcaccgagagttagaaaagctagta

SEQ ID NO: 7050 - DNA, 40 bp, Homo sapiens
actagcttttctaactctcggtgagggatcccctcccagc

SEQ ID NO: 7051 - DNA, 40 bp, Homo sapiens
gctgggaggggatccctcaccgagagttagaaaagctagt

SEQ ID NO: 7052 - DNA, 40 bp, Homo sapiens
ctagcttttctaactctcggtgagggatcccctcccagcc

SEQ ID NO: 7053 - DNA, 40 bp, Homo sapiens
ggctgggaggggatccctcaccgagagttagaaaagctag

SEQ ID NO: 7054 - DNA, 40 bp, Homo sapiens
tagcttttctaactctcggtgagggatcccctcccagccc

SEQ ID NO: 7055 - DNA, 40 bp, Homo sapiens
gggctgggaggggatccctcaccgagagttagaaaagcta

SEQ ID NO: 7056 - DNA, 40 bp, Homo sapiens
agcttttctaactctcggtgagggatcccctcccagccca

SEQ ID NO: 7057 - DNA, 40 bp, Homo sapiens
tgggctgggaggggatccctcaccgagagttagaaaagct

SEQ ID NO: 7058 - DNA, 40 bp, Homo sapiens
gcttttctaactctcggtgagggatcccctcccagcccat

SEQ ID NO: 7059 - DNA, 40 bp, Homo sapiens
atgggctgggaggggatccctcaccgagagttagaaaagc

SEQ ID NO: 7060 - DNA, 40 bp, Homo sapiens
cttttctaactctcggtgagggatcccctcccagcccatg

SEQ ID NO: 7061 - DNA, 40 bp, Homo sapiens
catgggctgggaggggatccctcaccgagagttagaaaag

SEQ ID NO: 7062 - DNA, 40 bp, Homo sapiens
ttttctaactctcggtgagggatcccctcccagcccatga

SEQ ID NO: 7063 - DNA, 40 bp, Homo sapiens
tcatgggctgggaggggatccctcaccgagagttagaaaa

SEQ ID NO: 7064 - DNA, 40 bp, Homo sapiens
tttctaactctcggtgagggatcccctcccagcccatgat

SEQ ID NO: 7065 - DNA, 40 bp, Homo sapiens
atcatgggctgggaggggatccctcaccgagagttagaaa

SEQ ID NO: 7066 - DNA, 40 bp, Homo sapiens
ttctaactctcggtgagggatcccctcccagcccatgatc

SEQ ID NO: 7067 - DNA, 40 bp, Homo sapiens
gatcatgggctgggaggggatccctcaccgagagttagaa

SEQ ID NO: 7068 - DNA, 40 bp, Homo sapiens
tctaactctcggtgagggatcccctcccagcccatgatct

SEQ ID NO: 7069 - DNA, 40 bp, Homo sapiens
agatcatgggctgggaggggatccctcaccgagagttaga

SEQ ID NO: 7070 - DNA, 40 bp, Homo sapiens
ctaactctcggtgagggatcccctcccagcccatgatctt

SEQ ID NO: 7071 - DNA, 40 bp, Homo sapiens
aagatcatgggctgggaggggatccctcaccgagagttag

SEQ ID NO: 7072 - DNA, 40 bp, Homo sapiens
taactctcggtgagggatcccctcccagcccatgatcttc

SEQ ID NO: 7073 - DNA, 40 bp, Homo sapiens
gaagatcatgggctgggaggggatccctcaccgagagtta

SEQ ID NO: 7074 - DNA, 40 bp, Homo sapiens
aactctcggtgagggatcccctcccagcccatgatcttca

SEQ ID NO: 7075 - DNA, 40 bp, Homo sapiens
tgaagatcatgggctgggaggggatccctcaccgagagtt

SEQ ID NO: 7076 - DNA, 40 bp, Homo sapiens
actctcggtgagggatcccctcccagcccatgatcttcat

SEQ ID NO: 7077 - DNA, 40 bp, Homo sapiens
atgaagatcatgggctgggaggggatccctcaccgagagt

SEQ ID NO: 7078 - DNA, 40 bp, Homo sapiens
ctctcggtgagggatcccctcccagcccatgatcttcatt

SEQ ID NO: 7079 - DNA, 40 bp, Homo sapiens
aatgaagatcatgggctgggaggggatccctcaccgagag

SEQ ID NO: 7080 - DNA, 40 bp, Homo sapiens
tctcggtgagggatcccctcccagcccatgatcttcattt

SEQ ID NO: 7081 - DNA, 40 bp, Homo sapiens
aaatgaagatcatgggctgggaggggatccctcaccgaga

SEQ ID NO: 7082 - DNA, 40 bp, Homo sapiens
ctcggtgagggatcccctcccagcccatgatcttcatttg

SEQ ID NO: 7083 - DNA, 40 bp, Homo sapiens
caaatgaagatcatgggctgggaggggatccctcaccgag

SEQ ID NO: 7084 - DNA, 40 bp, Homo sapiens
tcggtgagggatcccctcccagcccatgatcttcatttgg

SEQ ID NO: 7085 - DNA, 40 bp, Homo sapiens
ccaaatgaagatcatgggctgggaggggatccctcaccga

SEQ ID NO: 7086 - DNA, 40 bp, Homo sapiens
cggtgagggatcccctcccagcccatgatcttcatttggt

SEQ ID NO: 7087 - DNA, 40 bp, Homo sapiens
accaaatgaagatcatgggctgggaggggatccctcaccg

SEQ ID NO: 7088 - DNA, 40 bp, Homo sapiens
ggtgagggatcccctcccagcccatgatcttcatttggta

SEQ ID NO: 7089 - DNA, 40 bp, Homo sapiens
taccaaatgaagatcatgggctgggaggggatccctcacc

SEQ ID NO: 7090 - DNA, 40 bp, Homo sapiens
gtgagggatcccctcccagcccatgatcttcatttggtaa

SEQ ID NO: 7091 - DNA, 40 bp, Homo sapiens
ttaccaaatgaagatcatgggctgggaggggatccctcac

SEQ ID NO: 7092 - DNA, 40 bp, Homo sapiens
tgagggatcccctcccagcccatgatcttcatttggtaag

SEQ ID NO: 7093 - DNA, 40 bp, Homo sapiens
cttaccaaatgaagatcatgggctgggaggggatccctca

SEQ ID NO: 7094 - DNA, 40 bp, Homo sapiens
gagggatcccctcccagcccatgatcttcatttggtaaga

SEQ ID NO: 7095 - DNA, 40 bp, Homo sapiens
tcttaccaaatgaagatcatgggctgggaggggatccctc

SEQ ID NO: 7096 - DNA, 40 bp, Homo sapiens
agggatcccctcccagcccatgatcttcatttggtaagac

SEQ ID NO: 7097 - DNA, 40 bp, Homo sapiens
gtcttaccaaatgaagatcatgggctgggaggggatccct

SEQ ID NO: 7098 - DNA, 40 bp, Homo sapiens
gggatcccctcccagcccatgatcttcatttggtaagact

SEQ ID NO: 7099 - DNA, 40 bp, Homo sapiens
agtcttaccaaatgaagatcatgggctgggaggggatccc

SEQ ID NO: 7100 - DNA, 40 bp, Homo sapiens
ggatcccctcccagcccatgatcttcatttggtaagactc

SEQ ID NO: 7101 - DNA, 40 bp, Homo sapiens
gagtcttaccaaatgaagatcatgggctgggaggggatcc

SEQ ID NO: 7102 - DNA, 40 bp, Homo sapiens
gatcccctcccagcccatgatcttcatttggtaagactcc

SEQ ID NO: 7103 - DNA, 40 bp, Homo sapiens
ggagtcttaccaaatgaagatcatgggctgggaggggatc

SEQ ID NO: 7104 - DNA, 40 bp, Homo sapiens
atcccctcccagcccatgatcttcatttggtaagactcct

SEQ ID NO: 7105 - DNA, 40 bp, Homo sapiens
aggagtcttaccaaatgaagatcatgggctgggaggggat

SEQ ID NO: 7106 - DNA, 40 bp, Homo sapiens
tcccctcccagcccatgatcttcatttggtaagactcctt

SEQ ID NO: 7107 - DNA, 40 bp, Homo sapiens
aaggagtcttaccaaatgaagatcatgggctgggagggga

SEQ ID NO: 7108 - DNA, 40 bp, Homo sapiens
cccctcccagcccatgatcttcatttggtaagactccttt

SEQ ID NO: 7109 - DNA, 40 bp, Homo sapiens
aaaggagtcttaccaaatgaagatcatgggctgggagggg

SEQ ID NO: 7110 - DNA, 40 bp, Homo sapiens
ccctcccagcccatgatcttcatttggtaagactcctttg

SEQ ID NO: 7111 - DNA, 40 bp, Homo sapiens
caaaggagtcttaccaaatgaagatcatgggctgggaggg

SEQ ID NO: 7112 - DNA, 40 bp, Homo sapiens
cctcccagcccatgatcttcatttggtaagactcctttgg

SEQ ID NO: 7113 - DNA, 40 bp, Homo sapiens
ccaaaggagtcttaccaaatgaagatcatgggctgggagg

SEQ ID NO: 7114 - DNA, 40 bp, Homo sapiens
ctcccagcccatgatcttcatttggtaagactcctttgga

SEQ ID NO: 7115 - DNA, 40 bp, Homo sapiens
tccaaaggagtcttaccaaatgaagatcatgggctgggag

SEQ ID NO: 7116 - DNA, 40 bp, Homo sapiens
tcccagcccatgatcttcatttggtaagactcctttggaa

SEQ ID NO: 7117 - DNA, 40 bp, Homo sapiens
ttccaaaggagtcttaccaaatgaagatcatgggctggga

SEQ ID NO: 7118 - DNA, 40 bp, Homo sapiens
cccagcccatgatcttcatttggtaagactcctttggaac

SEQ ID NO: 7119 - DNA, 40 bp, Homo sapiens
gttccaaaggagtcttaccaaatgaagatcatgggctggg

SEQ ID NO: 7120 - DNA, 40 bp, Homo sapiens
ccagcccatgatcttcatttggtaagactcctttggaacc

SEQ ID NO: 7121 - DNA, 40 bp, Homo sapiens
ggttccaaaggagtcttaccaaatgaagatcatgggctgg

SEQ ID NO: 7122 - DNA, 40 bp, Homo sapiens
cagcccatgatcttcatttggtaagactcctttggaaccc

SEQ ID NO: 7123 - DNA, 40 bp, Homo sapiens
gggttccaaaggagtcttaccaaatgaagatcatgggctg

SEQ ID NO: 7124 - DNA, 40 bp, Homo sapiens
agcccatgatcttcatttggtaagactcctttggaaccca

SEQ ID NO: 7125 - DNA, 40 bp, Homo sapiens
tgggttccaaaggagtcttaccaaatgaagatcatgggct

SEQ ID NO: 7126 - DNA, 40 bp, Homo sapiens
gcccatgatcttcatttggtaagactcctttggaacccag

SEQ ID NO: 7127 - DNA, 40 bp, Homo sapiens
ctgggttccaaaggagtcttaccaaatgaagatcatgggc

SEQ ID NO: 7128 - DNA, 40 bp, Homo sapiens
cccatgatcttcatttggtaagactcctttggaacccagt

SEQ ID NO: 7129 - DNA, 40 bp, Homo sapiens
actgggttccaaaggagtcttaccaaatgaagatcatggg

SEQ ID NO: 7130 - DNA, 40 bp, Homo sapiens
ccatgatcttcatttggtaagactcctttggaacccagtt

SEQ ID NO: 7131 - DNA, 40 bp, Homo sapiens
aactgggttccaaaggagtcttaccaaatgaagatcatgg

SEQ ID NO: 7132 - DNA, 40 bp, Homo sapiens
catgatcttcatttggtaagactcctttggaacccagttc

SEQ ID NO: 7133 - DNA, 40 bp, Homo sapiens
gaactgggttccaaaggagtcttaccaaatgaagatcatg

SEQ ID NO: 7134 - DNA, 40 bp, Homo sapiens
atgatcttcatttggtaagactcctttggaacccagttct

SEQ ID NO: 7135 - DNA, 40 bp, Homo sapiens
agaactgggttccaaaggagtcttaccaaatgaagatcat

SEQ ID NO: 7136 - DNA, 40 bp, Homo sapiens
tgatcttcatttggtaagactcctttggaacccagttctc

SEQ ID NO: 7137 - DNA, 40 bp, Homo sapiens
gagaactgggttccaaaggagtcttaccaaatgaagatca

SEQ ID NO: 7138 - DNA, 40 bp, Homo sapiens
gatcttcatttggtaagactcctttggaacccagttctct

SEQ ID NO: 7139 - DNA, 40 bp, Homo sapiens
agagaactgggttccaaaggagtcttaccaaatgaagatc

SEQ ID NO: 7140 - DNA, 40 bp, Homo sapiens
atcttcatttggtaagactcctttggaacccagttctctc

SEQ ID NO: 7141 - DNA, 40 bp, Homo sapiens
gagagaactgggttccaaaggagtcttaccaaatgaagat

SEQ ID NO: 7142 - DNA, 40 bp, Homo sapiens
tcttcatttggtaagactcctttggaacccagttctctct

SEQ ID NO: 7143 - DNA, 40 bp, Homo sapiens
agagagaactgggttccaaaggagtcttaccaaatgaaga

SEQ ID NO: 7144 - DNA, 40 bp, Homo sapiens
cttcatttggtaagactcctttggaacccagttctctcta

SEQ ID NO: 7145 - DNA, 40 bp, Homo sapiens
tagagagaactgggttccaaaggagtcttaccaaatgaag

SEQ ID NO: 7146 - DNA, 40 bp, Homo sapiens
ttcatttggtaagactcctttggaacccagttctctctag

SEQ ID NO: 7147 - DNA, 40 bp, Homo sapiens
ctagagagaactgggttccaaaggagtcttaccaaatgaa

SEQ ID NO: 7148 - DNA, 40 bp, Homo sapiens
tcatttggtaagactcctttggaacccagttctctctagt

SEQ ID NO: 7149 - DNA, 40 bp, Homo sapiens
actagagagaactgggttccaaaggagtcttaccaaatga

SEQ ID NO: 7150 - DNA, 40 bp, Homo sapiens
catttggtaagactcctttggaacccagttctctctagtg

SEQ ID NO: 7151 - DNA, 40 bp, Homo sapiens
cactagagagaactgggttccaaaggagtcttaccaaatg

SEQ ID NO: 7152 - DNA, 40 bp, Homo sapiens
atttggtaagactcctttggaacccagttctctctagtgg

SEQ ID NO: 7153 - DNA, 40 bp, Homo sapiens
ccactagagagaactgggttccaaaggagtcttaccaaat

SEQ ID NO: 7154 - DNA, 40 bp, Homo sapiens
tttggtaagactcctttggaacccagttctctctagtgga

SEQ ID NO: 7155 - DNA, 40 bp, Homo sapiens
tccactagagagaactgggttccaaaggagtcttaccaaa

SEQ ID NO: 7156 - DNA, 40 bp, Homo sapiens
ttggtaagactcctttggaacccagttctctctagtggat

SEQ ID NO: 7157 - DNA, 40 bp, Homo sapiens
atccactagagagaactgggttccaaaggagtcttaccaa

SEQ ID NO: 7158 - DNA, 40 bp, Homo sapiens
tggtaagactcctttggaacccagttctctctagtggatt

SEQ ID NO: 7159 - DNA, 40 bp, Homo sapiens
aatccactagagagaactgggttccaaaggagtcttacca

SEQ ID NO: 7160 - DNA, 40 bp, Homo sapiens
ggtaagactcctttggaacccagttctctctagtggattt

SEQ ID NO: 7161 - DNA, 40 bp, Homo sapiens
aaatccactagagagaactgggttccaaaggagtcttacc

SEQ ID NO: 7162 - DNA, 40 bp, Homo sapiens
gtaagactcctttggaacccagttctctctagtggattta

SEQ ID NO: 7163 - DNA, 40 bp, Homo sapiens
taaatccactagagagaactgggttccaaaggagtcttac

SEQ ID NO: 7164 - DNA, 40 bp, Homo sapiens
taagactcctttggaacccagttctctctagtggatttaa

SEQ ID NO: 7165 - DNA, 40 bp, Homo sapiens
ttaaatccactagagagaactgggttccaaaggagtctta

SEQ ID NO: 7166 - DNA, 40 bp, Homo sapiens
aagactcctttggaacccagttctctctagtggatttaaa

SEQ ID NO: 7167 - DNA, 40 bp, Homo sapiens
tttaaatccactagagagaactgggttccaaaggagtctt

SEQ ID NO: 7168 - DNA, 40 bp, Homo sapiens
agactcctttggaacccagttctctctagtggatttaaat

SEQ ID NO: 7169 - DNA, 40 bp, Homo sapiens
atttaaatccactagagagaactgggttccaaaggagtct

SEQ ID NO: 7170 - DNA, 40 bp, Homo sapiens
gactcctttggaacccagttctctctagtggatttaaatg

SEQ ID NO: 7171 - DNA, 40 bp, Homo sapiens
catttaaatccactagagagaactgggttccaaaggagtc

SEQ ID NO: 7172 - DNA, 40 bp, Homo sapiens
actcctttggaacccagttctctctagtggatttaaatgt

SEQ ID NO: 7173 - DNA, 40 bp, Homo sapiens
acatttaaatccactagagagaactgggttccaaaggagt

SEQ ID NO: 7174 - DNA, 40 bp, Homo sapiens
ctcctttggaacccagttctctctagtggatttaaatgtg

SEQ ID NO: 7175 - DNA, 40 bp, Homo sapiens
cacatttaaatccactagagagaactgggttccaaaggag

SEQ ID NO: 7176 - DNA, 40 bp, Homo sapiens
tcctttggaacccagttctctctagtggatttaaatgtga

SEQ ID NO: 7177 - DNA, 40 bp, Homo sapiens
tcacatttaaatccactagagagaactgggttccaaagga

SEQ ID NO: 7178 - DNA, 40 bp, Homo sapiens
cctttggaacccagttctctctagtggatttaaatgtgat

SEQ ID NO: 7179 - DNA, 40 bp, Homo sapiens
atcacatttaaatccactagagagaactgggttccaaagg

SEQ ID NO: 7180 - DNA, 40 bp, Homo sapiens
ctttggaacccagttctctctagtggatttaaatgtgatt

SEQ ID NO: 7181 - DNA, 40 bp, Homo sapiens
aatcacatttaaatccactagagagaactgggttccaaag

SEQ ID NO: 7182 - DNA, 40 bp, Homo sapiens
tttggaacccagttctctctagtggatttaaatgtgattt

SEQ ID NO: 7183 - DNA, 40 bp, Homo sapiens
aaatcacatttaaatccactagagagaactgggttccaaa

SEQ ID NO: 7184 - DNA, 40 bp, Homo sapiens
ttggaacccagttctctctagtggatttaaatgtgatttg

SEQ ID NO: 7185 - DNA, 40 bp, Homo sapiens
caaatcacatttaaatccactagagagaactgggttccaa

SEQ ID NO: 7186 - DNA, 40 bp, Homo sapiens
tggaacccagttctctctagtggatttaaatgtgatttgg

SEQ ID NO: 7187 - DNA, 40 bp, Homo sapiens
ccaaatcacatttaaatccactagagagaactgggttcca

SEQ ID NO: 7188 - DNA, 40 bp, Homo sapiens
ggaacccagttctctctagtggatttaaatgtgatttggt

SEQ ID NO: 7189 - DNA, 40 bp, Homo sapiens
accaaatcacatttaaatccactagagagaactgggttcc

SEQ ID NO: 7190 - DNA, 40 bp, Homo sapiens
gaacccagttctctctagtggatttaaatgtgatttggtt

SEQ ID NO: 7191 - DNA, 40 bp, Homo sapiens
aaccaaatcacatttaaatccactagagagaactgggttc

SEQ ID NO: 7192 - DNA, 40 bp, Homo sapiens
aacccagttctctctagtggatttaaatgtgatttggttt

SEQ ID NO: 7193 - DNA, 40 bp, Homo sapiens
aaaccaaatcacatttaaatccactagagagaactgggtt

SEQ ID NO: 7194 - DNA, 40 bp, Homo sapiens
acccagttctctctagtggatttaaatgtgatttggtttt

SEQ ID NO: 7195 - DNA, 40 bp, Homo sapiens
aaaaccaaatcacatttaaatccactagagagaactgggt

SEQ ID NO: 7196 - DNA, 40 bp, Homo sapiens
cccagttctctctagtggatttaaatgtgatttggtttta

SEQ ID NO: 7197 - DNA, 40 bp, Homo sapiens
taaaaccaaatcacatttaaatccactagagagaactggg

SEQ ID NO: 7198 - DNA, 40 bp, Homo sapiens
ccagttctctctagtggatttaaatgtgatttggttttaa

SEQ ID NO: 7199 - DNA, 40 bp, Homo sapiens
ttaaaaccaaatcacatttaaatccactagagagaactgg

SEQ ID NO: 7200 - DNA, 40 bp, Homo sapiens
cagttctctctagtggatttaaatgtgatttggttttaaa

SEQ ID NO: 7201 - DNA, 40 bp, Homo sapiens
tttaaaaccaaatcacatttaaatccactagagagaactg

SEQ ID NO: 7202 - DNA, 40 bp, Homo sapiens
agttctctctagtggatttaaatgtgatttggttttaaaa

SEQ ID NO: 7203 - DNA, 40 bp, Homo sapiens
ttttaaaaccaaatcacatttaaatccactagagagaact

SEQ ID NO: 7204 - DNA, 40 bp, Homo sapiens
gttctctctagtggatttaaatgtgatttggttttaaaaa

SEQ ID NO: 7205 - DNA, 40 bp, Homo sapiens
tttttaaaaccaaatcacatttaaatccactagagagaac

SEQ ID NO: 7206 - DNA, 40 bp, Homo sapiens
ttctctctagtggatttaaatgtgatttggttttaaaaat

SEQ ID NO: 7207 - DNA, 40 bp, Homo sapiens
atttttaaaaccaaatcacatttaaatccactagagagaa

SEQ ID NO: 7208 - DNA, 40 bp, Homo sapiens
tctctctagtggatttaaatgtgatttggttttaaaaatc

SEQ ID NO: 7209 - DNA, 40 bp, Homo sapiens
gatttttaaaaccaaatcacatttaaatccactagagaga

SEQ ID NO: 7210 - DNA, 40 bp, Homo sapiens
ctctctagtggatttaaatgtgatttggttttaaaaatct

SEQ ID NO: 7211 - DNA, 40 bp, Homo sapiens
agatttttaaaaccaaatcacatttaaatccactagagag

SEQ ID NO: 7212 - DNA, 40 bp, Homo sapiens
tctctagtggatttaaatgtgatttggttttaaaaatctc

SEQ ID NO: 7213 - DNA, 40 bp, Homo sapiens
gagatttttaaaaccaaatcacatttaaatccactagaga

SEQ ID NO: 7214 - DNA, 40 bp, Homo sapiens
ctctagtggatttaaatgtgatttggttttaaaaatctca

SEQ ID NO: 7215 - DNA, 40 bp, Homo sapiens
tgagatttttaaaaccaaatcacatttaaatccactagag

SEQ ID NO: 7216 - DNA, 40 bp, Homo sapiens
tctagtggatttaaatgtgatttggttttaaaaatctcat

SEQ ID NO: 7217 - DNA, 40 bp, Homo sapiens
atgagatttttaaaaccaaatcacatttaaatccactaga

SEQ ID NO: 7218 - DNA, 40 bp, Homo sapiens
ctagtggatttaaatgtgatttggttttaaaaatctcatt

SEQ ID NO: 7219 - DNA, 40 bp, Homo sapiens
aatgagatttttaaaaccaaatcacatttaaatccactag

SEQ ID NO: 7220 - DNA, 40 bp, Homo sapiens
tagtggatttaaatgtgatttggttttaaaaatctcattc

SEQ ID NO: 7221 - DNA, 40 bp, Homo sapiens
gaatgagatttttaaaaccaaatcacatttaaatccacta

SEQ ID NO: 7222 - DNA, 40 bp, Homo sapiens
agtggatttaaatgtgatttggttttaaaaatctcattca

SEQ ID NO: 7223 - DNA, 40 bp, Homo sapiens
tgaatgagatttttaaaaccaaatcacatttaaatccact

SEQ ID NO: 7224 - DNA, 40 bp, Homo sapiens
gtggatttaaatgtgatttggttttaaaaatctcattcaa

SEQ ID NO: 7225 - DNA, 40 bp, Homo sapiens
ttgaatgagatttttaaaaccaaatcacatttaaatccac

SEQ ID NO: 7226 - DNA, 40 bp, Homo sapiens
tggatttaaatgtgatttggttttaaaaatctcattcaag

SEQ ID NO: 7227 - DNA, 40 bp, Homo sapiens
cttgaatgagatttttaaaaccaaatcacatttaaatcca

SEQ ID NO: 7228 - DNA, 40 bp, Homo sapiens
ggatttaaatgtgatttggttttaaaaatctcattcaagg

SEQ ID NO: 7229 - DNA, 40 bp, Homo sapiens
ccttgaatgagatttttaaaaccaaatcacatttaaatcc

SEQ ID NO: 7230 - DNA, 40 bp, Homo sapiens
gatttaaatgtgatttggttttaaaaatctcattcaagga

SEQ ID NO: 7231 - DNA, 40 bp, Homo sapiens
tccttgaatgagatttttaaaaccaaatcacatttaaatc

SEQ ID NO: 7232 - DNA, 40 bp, Homo sapiens
atttaaatgtgatttggttttaaaaatctcattcaaggaa

SEQ ID NO: 7233 - DNA, 40 bp, Homo sapiens
ttccttgaatgagatttttaaaaccaaatcacatttaaat

SEQ ID NO: 7234 - DNA, 40 bp, Homo sapiens
tttaaatgtgatttggttttaaaaatctcattcaaggaat

SEQ ID NO: 7235 - DNA, 40 bp, Homo sapiens
attccttgaatgagatttttaaaaccaaatcacatttaaa

SEQ ID NO: 7236 - DNA, 40 bp, Homo sapiens
ttaaatgtgatttggttttaaaaatctcattcaaggaatt

SEQ ID NO: 7237 - DNA, 40 bp, Homo sapiens
aattccttgaatgagatttttaaaaccaaatcacatttaa

SEQ ID NO: 7238 - DNA, 40 bp, Homo sapiens
taaatgtgatttggttttaaaaatctcattcaaggaattt

SEQ ID NO: 7239 - DNA, 40 bp, Homo sapiens
aaattccttgaatgagatttttaaaaccaaatcacattta

SEQ ID NO: 7240 - DNA, 40 bp, Homo sapiens
aaatgtgatttggttttaaaaatctcattcaaggaatttt

SEQ ID NO: 7241 - DNA, 40 bp, Homo sapiens
aaaattccttgaatgagatttttaaaaccaaatcacattt

SEQ ID NO: 7242 - DNA, 40 bp, Homo sapiens
aatgtgatttggttttaaaaatctcattcaaggaattttt

SEQ ID NO: 7243 - DNA, 40 bp, Homo sapiens
aaaaattccttgaatgagatttttaaaaccaaatcacatt

SEQ ID NO: 7244 - DNA, 40 bp, Homo sapiens
atgtgatttggttttaaaaatctcattcaaggaatttttt

SEQ ID NO: 7245 - DNA, 40 bp, Homo sapiens
aaaaaattccttgaatgagatttttaaaaccaaatcacat

SEQ ID NO: 7246 - DNA, 40 bp, Homo sapiens
tgtgatttggttttaaaaatctcattcaaggaattttttt

SEQ ID NO: 7247 - DNA, 40 bp, Homo sapiens
aaaaaaattccttgaatgagatttttaaaaccaaatcaca

SEQ ID NO: 7248 - DNA, 40 bp, Homo sapiens
gtgatttggttttaaaaatctcattcaaggaatttttttt

SEQ ID NO: 7249 - DNA, 40 bp, Homo sapiens
aaaaaaaattccttgaatgagatttttaaaaccaaatcac

SEQ ID NO: 7250 - DNA, 40 bp, Homo sapiens
tgatttggttttaaaaatctcattcaaggaattttttttt

SEQ ID NO: 7251 - DNA, 40 bp, Homo sapiens
aaaaaaaaattccttgaatgagatttttaaaaccaaatca

SEQ ID NO: 7252 - DNA, 40 bp, Homo sapiens
gatttggttttaaaaatctcattcaaggaatttttttttt

SEQ ID NO: 7253 - DNA, 40 bp, Homo sapiens
aaaaaaaaaattccttgaatgagatttttaaaaccaaatc

SEQ ID NO: 7254 - DNA, 40 bp, Homo sapiens
atttggttttaaaaatctcattcaaggaattttttttttt

SEQ ID NO: 7255 - DNA, 40 bp, Homo sapiens
aaaaaaaaaaattccttgaatgagatttttaaaaccaaat

SEQ ID NO: 7256 - DNA, 40 bp, Homo sapiens
tttggttttaaaaatctcattcaaggaatttttttttttt

SEQ ID NO: 7257 - DNA, 40 bp, Homo sapiens
aaaaaaaaaaaattccttgaatgagatttttaaaaccaaa

SEQ ID NO: 7258 - DNA, 40 bp, Homo sapiens
ttggttttaaaaatctcattcaaggaattttttttttttc

SEQ ID NO: 7259 - DNA, 40 bp, Homo sapiens
gaaaaaaaaaaaattccttgaatgagatttttaaaaccaa

SEQ ID NO: 7260 - DNA, 40 bp, Homo sapiens
tggttttaaaaatctcattcaaggaattttttttttttct

SEQ ID NO: 7261 - DNA, 40 bp, Homo sapiens
agaaaaaaaaaaaattccttgaatgagatttttaaaacca

SEQ ID NO: 7262 - DNA, 40 bp, Homo sapiens
ggttttaaaaatctcattcaaggaattttttttttttctg

SEQ ID NO: 7263 - DNA, 40 bp, Homo sapiens
cagaaaaaaaaaaaattccttgaatgagatttttaaaacc

SEQ ID NO: 7264 - DNA, 40 bp, Homo sapiens
gttttaaaaatctcattcaaggaattttttttttttctgg

SEQ ID NO: 7265 - DNA, 40 bp, Homo sapiens
ccagaaaaaaaaaaaattccttgaatgagatttttaaaac

SEQ ID NO: 7266 - DNA, 40 bp, Homo sapiens
ttttaaaaatctcattcaaggaattttttttttttctgga

SEQ ID NO: 7267 - DNA, 40 bp, Homo sapiens
tccagaaaaaaaaaaaattccttgaatgagatttttaaaa

SEQ ID NO: 7268 - DNA, 40 bp, Homo sapiens
tttaaaaatctcattcaaggaattttttttttttctggaa

SEQ ID NO: 7269 - DNA, 40 bp, Homo sapiens
ttccagaaaaaaaaaaaattccttgaatgagatttttaaa

SEQ ID NO: 7270 - DNA, 40 bp, Homo sapiens
ttaaaaatctcattcaaggaattttttttttttctggaaa

SEQ ID NO: 7271 - DNA, 40 bp, Homo sapiens
tttccagaaaaaaaaaaaattccttgaatgagatttttaa

SEQ ID NO: 7272 - DNA, 40 bp, Homo sapiens
taaaaatctcattcaaggaattttttttttttctggaaac

SEQ ID NO: 7273 - DNA, 40 bp, Homo sapiens
gtttccagaaaaaaaaaaaattccttgaatgagattttta

SEQ ID NO: 7274 - DNA, 40 bp, Homo sapiens
aaaaatctcattcaaggaattttttttttttctggaaaca

SEQ ID NO: 7275 - DNA, 40 bp, Homo sapiens
tgtttccagaaaaaaaaaaaattccttgaatgagattttt

SEQ ID NO: 7276 - DNA, 40 bp, Homo sapiens
aaaatctcattcaaggaattttttttttttctggaaacaa

SEQ ID NO: 7277 - DNA, 40 bp, Homo sapiens
ttgtttccagaaaaaaaaaaaattccttgaatgagatttt

SEQ ID NO: 7278 - DNA, 40 bp, Homo sapiens
aaatctcattcaaggaattttttttttttctggaaacaac

SEQ ID NO: 7279 - DNA, 40 bp, Homo sapiens
gttgtttccagaaaaaaaaaaaattccttgaatgagattt

SEQ ID NO: 7280 - DNA, 40 bp, Homo sapiens
aatctcattcaaggaattttttttttttctggaaacaacc

SEQ ID NO: 7281 - DNA, 40 bp, Homo sapiens
ggttgtttccagaaaaaaaaaaaattccttgaatgagatt

SEQ ID NO: 7282 - DNA, 40 bp, Homo sapiens
atctcattcaaggaattttttttttttctggaaacaacca

SEQ ID NO: 7283 - DNA, 40 bp, Homo sapiens
tggttgtttccagaaaaaaaaaaaattccttgaatgagat

SEQ ID NO: 7284 - DNA, 40 bp, Homo sapiens
tctcattcaaggaattttttttttttctggaaacaaccac

SEQ ID NO: 7285 - DNA, 40 bp, Homo sapiens
gtggttgtttccagaaaaaaaaaaaattccttgaatgaga

SEQ ID NO: 7286 - DNA, 40 bp, Homo sapiens
ctcattcaaggaattttttttttttctggaaacaaccacc

SEQ ID NO: 7287 - DNA, 40 bp, Homo sapiens
ggtggttgtttccagaaaaaaaaaaaattccttgaatgag

SEQ ID NO: 7288 - DNA, 40 bp, Homo sapiens
tcattcaaggaattttttttttttctggaaacaaccaccg

SEQ ID NO: 7289 - DNA, 40 bp, Homo sapiens
cggtggttgtttccagaaaaaaaaaaaattccttgaatga

SEQ ID NO: 7290 - DNA, 40 bp, Homo sapiens
cattcaaggaattttttttttttctggaaacaaccaccgc

SEQ ID NO: 7291 - DNA, 40 bp, Homo sapiens
gcggtggttgtttccagaaaaaaaaaaaattccttgaatg

SEQ ID NO: 7292 - DNA, 40 bp, Homo sapiens
attcaaggaattttttttttttctggaaacaaccaccgca

SEQ ID NO: 7293 - DNA, 40 bp, Homo sapiens
tgcggtggttgtttccagaaaaaaaaaaaattccttgaat

SEQ ID NO: 7294 - DNA, 40 bp, Homo sapiens
ttcaaggaattttttttttttctggaaacaaccaccgcat

SEQ ID NO: 7295 - DNA, 40 bp, Homo sapiens
atgcggtggttgtttccagaaaaaaaaaaaattccttgaa

SEQ ID NO: 7296 - DNA, 40 bp, Homo sapiens
tcaaggaattttttttttttctggaaacaaccaccgcata

SEQ ID NO: 7297 - DNA, 40 bp, Homo sapiens
tatgcggtggttgtttccagaaaaaaaaaaaattccttga

SEQ ID NO: 7298 - DNA, 40 bp, Homo sapiens
caaggaattttttttttttctggaaacaaccaccgcataa

SEQ ID NO: 7299 - DNA, 40 bp, Homo sapiens
ttatgcggtggttgtttccagaaaaaaaaaaaattccttg

SEQ ID NO: 7300 - DNA, 40 bp, Homo sapiens
aaggaattttttttttttctggaaacaaccaccgcataaa

SEQ ID NO: 7301 - DNA, 40 bp, Homo sapiens
tttatgcggtggttgtttccagaaaaaaaaaaaattcctt

SEQ ID NO: 7302 - DNA, 40 bp, Homo sapiens
aggaattttttttttttctggaaacaaccaccgcataaac

SEQ ID NO: 7303 - DNA, 40 bp, Homo sapiens
gtttatgcggtggttgtttccagaaaaaaaaaaaattcct

SEQ ID NO: 7304 - DNA, 40 bp, Homo sapiens
ggaattttttttttttctggaaacaaccaccgcataaaca

SEQ ID NO: 7305 - DNA, 40 bp, Homo sapiens
tgtttatgcggtggttgtttccagaaaaaaaaaaaattcc

SEQ ID NO: 7306 - DNA, 40 bp, Homo sapiens
gaattttttttttttctggaaacaaccaccgcataaacaa

SEQ ID NO: 7307 - DNA, 40 bp, Homo sapiens
ttgtttatgcggtggttgtttccagaaaaaaaaaaaattc

SEQ ID NO: 7308 - DNA, 40 bp, Homo sapiens
aattttttttttttctggaaacaaccaccgcataaacaag

SEQ ID NO: 7309 - DNA, 40 bp, Homo sapiens
cttgtttatgcggtggttgtttccagaaaaaaaaaaaatt

SEQ ID NO: 7310 - DNA, 40 bp, Homo sapiens
attttttttttttctggaaacaaccaccgcataaacaagt

SEQ ID NO: 7311 - DNA, 40 bp, Homo sapiens
acttgtttatgcggtggttgtttccagaaaaaaaaaaaat

SEQ ID NO: 7312 - DNA, 40 bp, Homo sapiens
ttttttttttttctggaaacaaccaccgcataaacaagta

SEQ ID NO: 7313 - DNA, 40 bp, Homo sapiens
tacttgtttatgcggtggttgtttccagaaaaaaaaaaaa

SEQ ID NO: 7314 - DNA, 40 bp, Homo sapiens
tttttttttttctggaaacaaccaccgcataaacaagtaa

SEQ ID NO: 7315 - DNA, 40 bp, Homo sapiens
ttacttgtttatgcggtggttgtttccagaaaaaaaaaaa

SEQ ID NO: 7316 - DNA, 40 bp, Homo sapiens
ttttttttttctggaaacaaccaccgcataaacaagtaaa

SEQ ID NO: 7317 - DNA, 40 bp, Homo sapiens
tttacttgtttatgcggtggttgtttccagaaaaaaaaaa

SEQ ID NO: 7318 - DNA, 40 bp, Homo sapiens
tttttttttctggaaacaaccaccgcataaacaagtaaac

SEQ ID NO: 7319 - DNA, 40 bp, Homo sapiens
gtttacttgtttatgcggtggttgtttccagaaaaaaaaa

SEQ ID NO: 7320 - DNA, 40 bp, Homo sapiens
ttttttttctggaaacaaccaccgcataaacaagtaaacc

SEQ ID NO: 7321 - DNA, 40 bp, Homo sapiens
ggtttacttgtttatgcggtggttgtttccagaaaaaaaa

SEQ ID NO: 7322 - DNA, 40 bp, Homo sapiens
tttttttctggaaacaaccaccgcataaacaagtaaaccg

SEQ ID NO: 7323 - DNA, 40 bp, Homo sapiens
cggtttacttgtttatgcggtggttgtttccagaaaaaaa

SEQ ID NO: 7324 - DNA, 40 bp, Homo sapiens
ttttttctggaaacaaccaccgcataaacaagtaaaccgg

SEQ ID NO: 7325 - DNA, 40 bp, Homo sapiens
ccggtttacttgtttatgcggtggttgtttccagaaaaaa

SEQ ID NO: 7326 - DNA, 40 bp, Homo sapiens
tttttctggaaacaaccaccgcataaacaagtaaaccgga

SEQ ID NO: 7327 - DNA, 40 bp, Homo sapiens
tccggtttacttgtttatgcggtggttgtttccagaaaaa

SEQ ID NO: 7328 - DNA, 40 bp, Homo sapiens
ttttctggaaacaaccaccgcataaacaagtaaaccggaa

SEQ ID NO: 7329 - DNA, 40 bp, Homo sapiens
ttccggtttacttgtttatgcggtggttgtttccagaaaa

SEQ ID NO: 7330 - DNA, 40 bp, Homo sapiens
tttctggaaacaaccaccgcataaacaagtaaaccggaag

SEQ ID NO: 7331 - DNA, 40 bp, Homo sapiens
cttccggtttacttgtttatgcggtggttgtttccagaaa

SEQ ID NO: 7332 - DNA, 40 bp, Homo sapiens
ttctggaaacaaccaccgcataaacaagtaaaccggaaga

SEQ ID NO: 7333 - DNA, 40 bp, Homo sapiens
tcttccggtttacttgtttatgcggtggttgtttccagaa

SEQ ID NO: 7334 - DNA, 40 bp, Homo sapiens
tctggaaacaaccaccgcataaacaagtaaaccggaagat

SEQ ID NO: 7335 - DNA, 40 bp, Homo sapiens
atcttccggtttacttgtttatgcggtggttgtttccaga

SEQ ID NO: 7336 - DNA, 40 bp, Homo sapiens
ctggaaacaaccaccgcataaacaagtaaaccggaagata

SEQ ID NO: 7337 - DNA, 40 bp, Homo sapiens
tatcttccggtttacttgtttatgcggtggttgtttccag

SEQ ID NO: 7338 - DNA, 40 bp, Homo sapiens
tggaaacaaccaccgcataaacaagtaaaccggaagatac

SEQ ID NO: 7339 - DNA, 40 bp, Homo sapiens
gtatcttccggtttacttgtttatgcggtggttgtttcca

SEQ ID NO: 7340 - DNA, 40 bp, Homo sapiens
ggaaacaaccaccgcataaacaagtaaaccggaagataca

SEQ ID NO: 7341 - DNA, 40 bp, Homo sapiens
tgtatcttccggtttacttgtttatgcggtggttgtttcc

SEQ ID NO: 7342 - DNA, 40 bp, Homo sapiens
gaaacaaccaccgcataaacaagtaaaccggaagatacat

SEQ ID NO: 7343 - DNA, 40 bp, Homo sapiens
atgtatcttccggtttacttgtttatgcggtggttgtttc

SEQ ID NO: 7344 - DNA, 40 bp, Homo sapiens
aaacaaccaccgcataaacaagtaaaccggaagatacatg

SEQ ID NO: 7345 - DNA, 40 bp, Homo sapiens
catgtatcttccggtttacttgtttatgcggtggttgttt

SEQ ID NO: 7346 - DNA, 40 bp, Homo sapiens
aacaaccaccgcataaacaagtaaaccggaagatacatgt

SEQ ID NO: 7347 - DNA, 40 bp, Homo sapiens
acatgtatcttccggtttacttgtttatgcggtggttgtt

SEQ ID NO: 7348 - DNA, 40 bp, Homo sapiens
acaaccaccgcataaacaagtaaaccggaagatacatgtg

SEQ ID NO: 7349 - DNA, 40 bp, Homo sapiens
cacatgtatcttccggtttacttgtttatgcggtggttgt

SEQ ID NO: 7350 - DNA, 40 bp, Homo sapiens
caaccaccgcataaacaagtaaaccggaagatacatgtgg

SEQ ID NO: 7351 - DNA, 40 bp, Homo sapiens
ccacatgtatcttccggtttacttgtttatgcggtggttg

SEQ ID NO: 7352 - DNA, 40 bp, Homo sapiens
aaccaccgcataaacaagtaaaccggaagatacatgtggc

SEQ ID NO: 7353 - DNA, 40 bp, Homo sapiens
gccacatgtatcttccggtttacttgtttatgcggtggtt

SEQ ID NO: 7354 - DNA, 40 bp, Homo sapiens
accaccgcataaacaagtaaaccggaagatacatgtggct

SEQ ID NO: 7355 - DNA, 40 bp, Homo sapiens
agccacatgtatcttccggtttacttgtttatgcggtggt

SEQ ID NO: 7356 - DNA, 40 bp, Homo sapiens
ccaccgcataaacaagtaaaccggaagatacatgtggctc

SEQ ID NO: 7357 - DNA, 40 bp, Homo sapiens
gagccacatgtatcttccggtttacttgtttatgcggtgg

SEQ ID NO: 7358 - DNA, 40 bp, Homo sapiens
caccgcataaacaagtaaaccggaagatacatgtggctct

SEQ ID NO: 7359 - DNA, 40 bp, Homo sapiens
agagccacatgtatcttccggtttacttgtttatgcggtg

SEQ ID NO: 7360 - DNA, 40 bp, Homo sapiens
accgcataaacaagtaaaccggaagatacatgtggctctg

SEQ ID NO: 7361 - DNA, 40 bp, Homo sapiens
cagagccacatgtatcttccggtttacttgtttatgcggt

SEQ ID NO: 7362 - DNA, 40 bp, Homo sapiens
ccgcataaacaagtaaaccggaagatacatgtggctctga

SEQ ID NO: 7363 - DNA, 40 bp, Homo sapiens
tcagagccacatgtatcttccggtttacttgtttatgcgg

SEQ ID NO: 7364 - DNA, 40 bp, Homo sapiens
cgcataaacaagtaaaccggaagatacatgtggctctgaa

SEQ ID NO: 7365 - DNA, 40 bp, Homo sapiens
ttcagagccacatgtatcttccggtttacttgtttatgcg

SEQ ID NO: 7366 - DNA, 40 bp, Homo sapiens
gcataaacaagtaaaccggaagatacatgtggctctgaat

SEQ ID NO: 7367 - DNA, 40 bp, Homo sapiens
attcagagccacatgtatcttccggtttacttgtttatgc

SEQ ID NO: 7368 - DNA, 40 bp, Homo sapiens
cataaacaagtaaaccggaagatacatgtggctctgaatt

SEQ ID NO: 7369 - DNA, 40 bp, Homo sapiens
aattcagagccacatgtatcttccggtttacttgtttatg

SEQ ID NO: 7370 - DNA, 40 bp, Homo sapiens
ataaacaagtaaaccggaagatacatgtggctctgaattc

SEQ ID NO: 7371 - DNA, 40 bp, Homo sapiens
gaattcagagccacatgtatcttccggtttacttgtttat

SEQ ID NO: 7372 - DNA, 40 bp, Homo sapiens
taaacaagtaaaccggaagatacatgtggctctgaattca

SEQ ID NO: 7373 - DNA, 40 bp, Homo sapiens
tgaattcagagccacatgtatcttccggtttacttgttta

SEQ ID NO: 7374 - DNA, 40 bp, Homo sapiens
aaacaagtaaaccggaagatacatgtggctctgaattcat

SEQ ID NO: 7375 - DNA, 40 bp, Homo sapiens
atgaattcagagccacatgtatcttccggtttacttgttt

SEQ ID NO: 7376 - DNA, 40 bp, Homo sapiens
aacaagtaaaccggaagatacatgtggctctgaattcata

SEQ ID NO: 7377 - DNA, 40 bp, Homo sapiens
tatgaattcagagccacatgtatcttccggtttacttgtt

SEQ ID NO: 7378 - DNA, 40 bp, Homo sapiens
acaagtaaaccggaagatacatgtggctctgaattcatat

SEQ ID NO: 7379 - DNA, 40 bp, Homo sapiens
atatgaattcagagccacatgtatcttccggtttacttgt

SEQ ID NO: 7380 - DNA, 40 bp, Homo sapiens
caagtaaaccggaagatacatgtggctctgaattcatata

SEQ ID NO: 7381 - DNA, 40 bp, Homo sapiens
tatatgaattcagagccacatgtatcttccggtttacttg

SEQ ID NO: 7382 - DNA, 40 bp, Homo sapiens
aagtaaaccggaagatacatgtggctctgaattcatatat

SEQ ID NO: 7383 - DNA, 40 bp, Homo sapiens
atatatgaattcagagccacatgtatcttccggtttactt

SEQ ID NO: 7384 - DNA, 40 bp, Homo sapiens
agtaaaccggaagatacatgtggctctgaattcatatata

SEQ ID NO: 7385 - DNA, 40 bp, Homo sapiens
tatatatgaattcagagccacatgtatcttccggtttact

SEQ ID NO: 7386 - DNA, 40 bp, Homo sapiens
gtaaaccggaagatacatgtggctctgaattcatatatat

SEQ ID NO: 7387 - DNA, 40 bp, Homo sapiens
atatatatgaattcagagccacatgtatcttccggtttac

SEQ ID NO: 7388 - DNA, 40 bp, Homo sapiens
taaaccggaagatacatgtggctctgaattcatatatata

SEQ ID NO: 7389 - DNA, 40 bp, Homo sapiens
tatatatatgaattcagagccacatgtatcttccggttta

SEQ ID NO: 7390 - DNA, 40 bp, Homo sapiens
aaaccggaagatacatgtggctctgaattcatatatatac

SEQ ID NO: 7391 - DNA, 40 bp, Homo sapiens
gtatatatatgaattcagagccacatgtatcttccggttt

SEQ ID NO: 7392 - DNA, 40 bp, Homo sapiens
aaccggaagatacatgtggctctgaattcatatatataca

SEQ ID NO: 7393 - DNA, 40 bp, Homo sapiens
tgtatatatatgaattcagagccacatgtatcttccggtt

SEQ ID NO: 7394 - DNA, 40 bp, Homo sapiens
accggaagatacatgtggctctgaattcatatatatacac

SEQ ID NO: 7395 - DNA, 40 bp, Homo sapiens
gtgtatatatatgaattcagagccacatgtatcttccggt

SEQ ID NO: 7396 - DNA, 40 bp, Homo sapiens
ccggaagatacatgtggctctgaattcatatatatacaca

SEQ ID NO: 7397 - DNA, 40 bp, Homo sapiens
tgtgtatatatatgaattcagagccacatgtatcttccgg

SEQ ID NO: 7398 - DNA, 40 bp, Homo sapiens
cggaagatacatgtggctctgaattcatatatatacacaa

SEQ ID NO: 7399 - DNA, 40 bp, Homo sapiens
ttgtgtatatatatgaattcagagccacatgtatcttccg

SEQ ID NO: 7400 - DNA, 40 bp, Homo sapiens
ggaagatacatgtggctctgaattcatatatatacacaaa

SEQ ID NO: 7401 - DNA, 40 bp, Homo sapiens
tttgtgtatatatatgaattcagagccacatgtatcttcc

SEQ ID NO: 7402 - DNA, 40 bp, Homo sapiens
gaagatacatgtggctctgaattcatatatatacacaaac

SEQ ID NO: 7403 - DNA, 40 bp, Homo sapiens
gtttgtgtatatatatgaattcagagccacatgtatcttc

SEQ ID NO: 7404 - DNA, 40 bp, Homo sapiens
aagatacatgtggctctgaattcatatatatacacaaact

SEQ ID NO: 7405 - DNA, 40 bp, Homo sapiens
agtttgtgtatatatatgaattcagagccacatgtatctt

SEQ ID NO: 7406 - DNA, 40 bp, Homo sapiens
agatacatgtggctctgaattcatatatatacacaaactc

SEQ ID NO: 7407 - DNA, 40 bp, Homo sapiens
gagtttgtgtatatatatgaattcagagccacatgtatct

SEQ ID NO: 7408 - DNA, 40 bp, Homo sapiens
gatacatgtggctctgaattcatatatatacacaaactct

SEQ ID NO: 7409 - DNA, 40 bp, Homo sapiens
agagtttgtgtatatatatgaattcagagccacatgtatc

SEQ ID NO: 7410 - DNA, 40 bp, Homo sapiens
atacatgtggctctgaattcatatatatacacaaactcta

SEQ ID NO: 7411 - DNA, 40 bp, Homo sapiens
tagagtttgtgtatatatatgaattcagagccacatgtat

SEQ ID NO: 7412 - DNA, 40 bp, Homo sapiens
tacatgtggctctgaattcatatatatacacaaactctaa

SEQ ID NO: 7413 - DNA, 40 bp, Homo sapiens
ttagagtttgtgtatatatatgaattcagagccacatgta

SEQ ID NO: 7414 - DNA, 40 bp, Homo sapiens
acatgtggctctgaattcatatatatacacaaactctaat

SEQ ID NO: 7415 - DNA, 40 bp, Homo sapiens
attagagtttgtgtatatatatgaattcagagccacatgt

SEQ ID NO: 7416 - DNA, 40 bp, Homo sapiens
catgtggctctgaattcatatatatacacaaactctaatc

SEQ ID NO: 7417 - DNA, 40 bp, Homo sapiens
gattagagtttgtgtatatatatgaattcagagccacatg

SEQ ID NO: 7418 - DNA, 40 bp, Homo sapiens
atgtggctctgaattcatatatatacacaaactctaatcc

SEQ ID NO: 7419 - DNA, 40 bp, Homo sapiens
ggattagagtttgtgtatatatatgaattcagagccacat

SEQ ID NO: 7420 - DNA, 40 bp, Homo sapiens
tgtggctctgaattcatatatatacacaaactctaatcca

SEQ ID NO: 7421 - DNA, 40 bp, Homo sapiens
tggattagagtttgtgtatatatatgaattcagagccaca

SEQ ID NO: 7422 - DNA, 40 bp, Homo sapiens
gtggctctgaattcatatatatacacaaactctaatccaa

SEQ ID NO: 7423 - DNA, 40 bp, Homo sapiens
ttggattagagtttgtgtatatatatgaattcagagccac

SEQ ID NO: 7424 - DNA, 40 bp, Homo sapiens
tggctctgaattcatatatatacacaaactctaatccaat

SEQ ID NO: 7425 - DNA, 40 bp, Homo sapiens
attggattagagtttgtgtatatatatgaattcagagcca

SEQ ID NO: 7426 - DNA, 40 bp, Homo sapiens
ggctctgaattcatatatatacacaaactctaatccaatg

SEQ ID NO: 7427 - DNA, 40 bp, Homo sapiens
cattggattagagtttgtgtatatatatgaattcagagcc

SEQ ID NO: 7428 - DNA, 40 bp, Homo sapiens
gctctgaattcatatatatacacaaactctaatccaatgt

SEQ ID NO: 7429 - DNA, 40 bp, Homo sapiens
acattggattagagtttgtgtatatatatgaattcagagc

SEQ ID NO: 7430 - DNA, 40 bp, Homo sapiens
ctctgaattcatatatatacacaaactctaatccaatgtc

SEQ ID NO: 7431 - DNA, 40 bp, Homo sapiens
gacattggattagagtttgtgtatatatatgaattcagag

SEQ ID NO: 7432 - DNA, 40 bp, Homo sapiens
tctgaattcatatatatacacaaactctaatccaatgtct

SEQ ID NO: 7433 - DNA, 40 bp, Homo sapiens
agacattggattagagtttgtgtatatatatgaattcaga

SEQ ID NO: 7434 - DNA, 40 bp, Homo sapiens
ctgaattcatatatatacacaaactctaatccaatgtctg

SEQ ID NO: 7435 - DNA, 40 bp, Homo sapiens
cagacattggattagagtttgtgtatatatatgaattcag

SEQ ID NO: 7436 - DNA, 40 bp, Homo sapiens
tgaattcatatatatacacaaactctaatccaatgtctgt

SEQ ID NO: 7437 - DNA, 40 bp, Homo sapiens
acagacattggattagagtttgtgtatatatatgaattca

SEQ ID NO: 7438 - DNA, 40 bp, Homo sapiens
gaattcatatatatacacaaactctaatccaatgtctgtc

SEQ ID NO: 7439 - DNA, 40 bp, Homo sapiens
gacagacattggattagagtttgtgtatatatatgaattc

SEQ ID NO: 7440 - DNA, 40 bp, Homo sapiens
aattcatatatatacacaaactctaatccaatgtctgtcc

SEQ ID NO: 7441 - DNA, 40 bp, Homo sapiens
ggacagacattggattagagtttgtgtatatatatgaatt

SEQ ID NO: 7442 - DNA, 40 bp, Homo sapiens
attcatatatatacacaaactctaatccaatgtctgtcca

SEQ ID NO: 7443 - DNA, 40 bp, Homo sapiens
tggacagacattggattagagtttgtgtatatatatgaat

SEQ ID NO: 7444 - DNA, 40 bp, Homo sapiens
ttcatatatatacacaaactctaatccaatgtctgtccac

SEQ ID NO: 7445 - DNA, 40 bp, Homo sapiens
gtggacagacattggattagagtttgtgtatatatatgaa

SEQ ID NO: 7446 - DNA, 40 bp, Homo sapiens
tcatatatatacacaaactctaatccaatgtctgtccaca

SEQ ID NO: 7447 - DNA, 40 bp, Homo sapiens
tgtggacagacattggattagagtttgtgtatatatatga

SEQ ID NO: 7448 - DNA, 40 bp, Homo sapiens
catatatatacacaaactctaatccaatgtctgtccacag

SEQ ID NO: 7449 - DNA, 40 bp, Homo sapiens
ctgtggacagacattggattagagtttgtgtatatatatg

SEQ ID NO: 7450 - DNA, 40 bp, Homo sapiens
atatatatacacaaactctaatccaatgtctgtccacagt

SEQ ID NO: 7451 - DNA, 40 bp, Homo sapiens
actgtggacagacattggattagagtttgtgtatatatat

SEQ ID NO: 7452 - DNA, 40 bp, Homo sapiens
tatatatacacaaactctaatccaatgtctgtccacagta

SEQ ID NO: 7453 - DNA, 40 bp, Homo sapiens
tactgtggacagacattggattagagtttgtgtatatata

SEQ ID NO: 7454 - DNA, 40 bp, Homo sapiens
atatatacacaaactctaatccaatgtctgtccacagtat

SEQ ID NO: 7455 - DNA, 40 bp, Homo sapiens
atactgtggacagacattggattagagtttgtgtatatat

SEQ ID NO: 7456 - DNA, 40 bp, Homo sapiens
tatatacacaaactctaatccaatgtctgtccacagtatt

SEQ ID NO: 7457 - DNA, 40 bp, Homo sapiens
aatactgtggacagacattggattagagtttgtgtatata

SEQ ID NO: 7458 - DNA, 40 bp, Homo sapiens
atatacacaaactctaatccaatgtctgtccacagtattt

SEQ ID NO: 7459 - DNA, 40 bp, Homo sapiens
aaatactgtggacagacattggattagagtttgtgtatat

SEQ ID NO: 7460 - DNA, 40 bp, Homo sapiens
tatacacaaactctaatccaatgtctgtccacagtatttc

SEQ ID NO: 7461 - DNA, 40 bp, Homo sapiens
gaaatactgtggacagacattggattagagtttgtgtata

SEQ ID NO: 7462 - DNA, 40 bp, Homo sapiens
atacacaaactctaatccaatgtctgtccacagtatttcc

SEQ ID NO: 7463 - DNA, 40 bp, Homo sapiens
ggaaatactgtggacagacattggattagagtttgtgtat

SEQ ID NO: 7464 - DNA, 40 bp, Homo sapiens
tacacaaactctaatccaatgtctgtccacagtatttcct

SEQ ID NO: 7465 - DNA, 40 bp, Homo sapiens
aggaaatactgtggacagacattggattagagtttgtgta

SEQ ID NO: 7466 - DNA, 40 bp, Homo sapiens
acacaaactctaatccaatgtctgtccacagtatttccta

SEQ ID NO: 7467 - DNA, 40 bp, Homo sapiens
taggaaatactgtggacagacattggattagagtttgtgt

SEQ ID NO: 7468 - DNA, 40 bp, Homo sapiens
cacaaactctaatccaatgtctgtccacagtatttcctag

SEQ ID NO: 7469 - DNA, 40 bp, Homo sapiens
ctaggaaatactgtggacagacattggattagagtttgtg

SEQ ID NO: 7470 - DNA, 40 bp, Homo sapiens
acaaactctaatccaatgtctgtccacagtatttcctagg

SEQ ID NO: 7471 - DNA, 40 bp, Homo sapiens
cctaggaaatactgtggacagacattggattagagtttgt

SEQ ID NO: 7472 - DNA, 40 bp, Homo sapiens
caaactctaatccaatgtctgtccacagtatttcctaggc

SEQ ID NO: 7473 - DNA, 40 bp, Homo sapiens
gcctaggaaatactgtggacagacattggattagagtttg

SEQ ID NO: 7474 - DNA, 40 bp, Homo sapiens
aaactctaatccaatgtctgtccacagtatttcctaggct

SEQ ID NO: 7475 - DNA, 40 bp, Homo sapiens
agcctaggaaatactgtggacagacattggattagagttt

SEQ ID NO: 7476 - DNA, 40 bp, Homo sapiens
aactctaatccaatgtctgtccacagtatttcctaggcta

SEQ ID NO: 7477 - DNA, 40 bp, Homo sapiens
tagcctaggaaatactgtggacagacattggattagagtt

SEQ ID NO: 7478 - DNA, 40 bp, Homo sapiens
actctaatccaatgtctgtccacagtatttcctaggctag

SEQ ID NO: 7479 - DNA, 40 bp, Homo sapiens
ctagcctaggaaatactgtggacagacattggattagagt

SEQ ID NO: 7480 - DNA, 40 bp, Homo sapiens
ctctaatccaatgtctgtccacagtatttcctaggctagt

SEQ ID NO: 7481 - DNA, 40 bp, Homo sapiens
actagcctaggaaatactgtggacagacattggattagag

SEQ ID NO: 7482 - DNA, 40 bp, Homo sapiens
tctaatccaatgtctgtccacagtatttcctaggctagta

SEQ ID NO: 7483 - DNA, 40 bp, Homo sapiens
tactagcctaggaaatactgtggacagacattggattaga

SEQ ID NO: 7484 - DNA, 40 bp, Homo sapiens
ctaatccaatgtctgtccacagtatttcctaggctagtaa

SEQ ID NO: 7485 - DNA, 40 bp, Homo sapiens
ttactagcctaggaaatactgtggacagacattggattag

SEQ ID NO: 7486 - DNA, 40 bp, Homo sapiens
taatccaatgtctgtccacagtatttcctaggctagtaaa

SEQ ID NO: 7487 - DNA, 40 bp, Homo sapiens
tttactagcctaggaaatactgtggacagacattggatta

SEQ ID NO: 7488 - DNA, 40 bp, Homo sapiens
aatccaatgtctgtccacagtatttcctaggctagtaaac

SEQ ID NO: 7489 - DNA, 40 bp, Homo sapiens
gtttactagcctaggaaatactgtggacagacattggatt

SEQ ID NO: 7490 - DNA, 40 bp, Homo sapiens
atccaatgtctgtccacagtatttcctaggctagtaaact

SEQ ID NO: 7491 - DNA, 40 bp, Homo sapiens
agtttactagcctaggaaatactgtggacagacattggat

SEQ ID NO: 7492 - DNA, 40 bp, Homo sapiens
tccaatgtctgtccacagtatttcctaggctagtaaactt

SEQ ID NO: 7493 - DNA, 40 bp, Homo sapiens
aagtttactagcctaggaaatactgtggacagacattgga

SEQ ID NO: 7494 - DNA, 40 bp, Homo sapiens
ccaatgtctgtccacagtatttcctaggctagtaaacttt

SEQ ID NO: 7495 - DNA, 40 bp, Homo sapiens
aaagtttactagcctaggaaatactgtggacagacattgg

SEQ ID NO: 7496 - DNA, 40 bp, Homo sapiens
caatgtctgtccacagtatttcctaggctagtaaactttt

SEQ ID NO: 7497 - DNA, 40 bp, Homo sapiens
aaaagtttactagcctaggaaatactgtggacagacattg

SEQ ID NO: 7498 - DNA, 40 bp, Homo sapiens
aatgtctgtccacagtatttcctaggctagtaaacttttt

SEQ ID NO: 7499 - DNA, 40 bp, Homo sapiens
aaaaagtttactagcctaggaaatactgtggacagacatt

SEQ ID NO: 7500 - DNA, 40 bp, Homo sapiens
atgtctgtccacagtatttcctaggctagtaaactttttg

SEQ ID NO: 7501 - DNA, 40 bp, Homo sapiens
caaaaagtttactagcctaggaaatactgtggacagacat

SEQ ID NO: 7502 - DNA, 40 bp, Homo sapiens
tgtctgtccacagtatttcctaggctagtaaactttttgg

SEQ ID NO: 7503 - DNA, 40 bp, Homo sapiens
ccaaaaagtttactagcctaggaaatactgtggacagaca

SEQ ID NO: 7504 - DNA, 40 bp, Homo sapiens
gtctgtccacagtatttcctaggctagtaaactttttggc

SEQ ID NO: 7505 - DNA, 40 bp, Homo sapiens
gccaaaaagtttactagcctaggaaatactgtggacagac

SEQ ID NO: 7506 - DNA, 40 bp, Homo sapiens
tctgtccacagtatttcctaggctagtaaactttttggcc

SEQ ID NO: 7507 - DNA, 40 bp, Homo sapiens
ggccaaaaagtttactagcctaggaaatactgtggacaga

SEQ ID NO: 7508 - DNA, 40 bp, Homo sapiens
ctgtccacagtatttcctaggctagtaaactttttggcct

SEQ ID NO: 7509 - DNA, 40 bp, Homo sapiens
aggccaaaaagtttactagcctaggaaatactgtggacag

SEQ ID NO: 7510 - DNA, 40 bp, Homo sapiens
tgtccacagtatttcctaggctagtaaactttttggcctt

SEQ ID NO: 7511 - DNA, 40 bp, Homo sapiens
aaggccaaaaagtttactagcctaggaaatactgtggaca

SEQ ID NO: 7512 - DNA, 40 bp, Homo sapiens
gtccacagtatttcctaggctagtaaactttttggcctta

SEQ ID NO: 7513 - DNA, 40 bp, Homo sapiens
taaggccaaaaagtttactagcctaggaaatactgtggac

SEQ ID NO: 7514 - DNA, 40 bp, Homo sapiens
tccacagtatttcctaggctagtaaactttttggccttaa

SEQ ID NO: 7515 - DNA, 40 bp, Homo sapiens
ttaaggccaaaaagtttactagcctaggaaatactgtgga

SEQ ID NO: 7516 - DNA, 40 bp, Homo sapiens
ccacagtatttcctaggctagtaaactttttggccttaac

SEQ ID NO: 7517 - DNA, 40 bp, Homo sapiens
gttaaggccaaaaagtttactagcctaggaaatactgtgg

SEQ ID NO: 7518 - DNA, 40 bp, Homo sapiens
cacagtatttcctaggctagtaaactttttggccttaacg

SEQ ID NO: 7519 - DNA, 40 bp, Homo sapiens
cgttaaggccaaaaagtttactagcctaggaaatactgtg

SEQ ID NO: 7520 - DNA, 40 bp, Homo sapiens
acagtatttcctaggctagtaaactttttggccttaacga

SEQ ID NO: 7521 - DNA, 40 bp, Homo sapiens
tcgttaaggccaaaaagtttactagcctaggaaatactgt

SEQ ID NO: 7522 - DNA, 40 bp, Homo sapiens
cagtatttcctaggctagtaaactttttggccttaacgac

SEQ ID NO: 7523 - DNA, 40 bp, Homo sapiens
gtcgttaaggccaaaaagtttactagcctaggaaatactg

SEQ ID NO: 7524 - DNA, 40 bp, Homo sapiens
agtatttcctaggctagtaaactttttggccttaacgacc

SEQ ID NO: 7525 - DNA, 40 bp, Homo sapiens
ggtcgttaaggccaaaaagtttactagcctaggaaatact

SEQ ID NO: 7526 - DNA, 40 bp, Homo sapiens
gtatttcctaggctagtaaactttttggccttaacgaccc

SEQ ID NO: 7527 - DNA, 40 bp, Homo sapiens
gggtcgttaaggccaaaaagtttactagcctaggaaatac

SEQ ID NO: 7528 - DNA, 40 bp, Homo sapiens
tatttcctaggctagtaaactttttggccttaacgacccc

SEQ ID NO: 7529 - DNA, 40 bp, Homo sapiens
ggggtcgttaaggccaaaaagtttactagcctaggaaata

SEQ ID NO: 7530 - DNA, 40 bp, Homo sapiens
atttcctaggctagtaaactttttggccttaacgacccct

SEQ ID NO: 7531 - DNA, 40 bp, Homo sapiens
aggggtcgttaaggccaaaaagtttactagcctaggaaat

SEQ ID NO: 7532 - DNA, 40 bp, Homo sapiens
tttcctaggctagtaaactttttggccttaacgacccctc

SEQ ID NO: 7533 - DNA, 40 bp, Homo sapiens
gaggggtcgttaaggccaaaaagtttactagcctaggaaa

SEQ ID NO: 7534 - DNA, 40 bp, Homo sapiens
ttcctaggctagtaaactttttggccttaacgacccctct

SEQ ID NO: 7535 - DNA, 40 bp, Homo sapiens
agaggggtcgttaaggccaaaaagtttactagcctaggaa

SEQ ID NO: 7536 - DNA, 40 bp, Homo sapiens
tcctaggctagtaaactttttggccttaacgacccctcta

SEQ ID NO: 7537 - DNA, 40 bp, Homo sapiens
tagaggggtcgttaaggccaaaaagtttactagcctagga

SEQ ID NO: 7538 - DNA, 40 bp, Homo sapiens
cctaggctagtaaactttttggccttaacgacccctctac

SEQ ID NO: 7539 - DNA, 40 bp, Homo sapiens
gtagaggggtcgttaaggccaaaaagtttactagcctagg

SEQ ID NO: 7540 - DNA, 40 bp, Homo sapiens
ctaggctagtaaactttttggccttaacgacccctctacc

SEQ ID NO: 7541 - DNA, 40 bp, Homo sapiens
ggtagaggggtcgttaaggccaaaaagtttactagcctag

SEQ ID NO: 7542 - DNA, 40 bp, Homo sapiens
taggctagtaaactttttggccttaacgacccctctaccc

SEQ ID NO: 7543 - DNA, 40 bp, Homo sapiens
gggtagaggggtcgttaaggccaaaaagtttactagccta

SEQ ID NO: 7544 - DNA, 40 bp, Homo sapiens
aggctagtaaactttttggccttaacgacccctctaccct

SEQ ID NO: 7545 - DNA, 40 bp, Homo sapiens
agggtagaggggtcgttaaggccaaaaagtttactagcct

SEQ ID NO: 7546 - DNA, 40 bp, Homo sapiens
ggctagtaaactttttggccttaacgacccctctaccctc

SEQ ID NO: 7547 - DNA, 40 bp, Homo sapiens
gagggtagaggggtcgttaaggccaaaaagtttactagcc

SEQ ID NO: 7548 - DNA, 40 bp, Homo sapiens
gctagtaaactttttggccttaacgacccctctaccctct

SEQ ID NO: 7549 - DNA, 40 bp, Homo sapiens
agagggtagaggggtcgttaaggccaaaaagtttactagc

SEQ ID NO: 7550 - DNA, 40 bp, Homo sapiens
ctagtaaactttttggccttaacgacccctctaccctctt

SEQ ID NO: 7551 - DNA, 40 bp, Homo sapiens
aagagggtagaggggtcgttaaggccaaaaagtttactag

SEQ ID NO: 7552 - DNA, 40 bp, Homo sapiens
tagtaaactttttggccttaacgacccctctaccctcttt

SEQ ID NO: 7553 - DNA, 40 bp, Homo sapiens
aaagagggtagaggggtcgttaaggccaaaaagtttacta

SEQ ID NO: 7554 - DNA, 40 bp, Homo sapiens
agtaaactttttggccttaacgacccctctaccctctttg

SEQ ID NO: 7555 - DNA, 40 bp, Homo sapiens
caaagagggtagaggggtcgttaaggccaaaaagtttact

SEQ ID NO: 7556 - DNA, 40 bp, Homo sapiens
gtaaactttttggccttaacgacccctctaccctctttgt

SEQ ID NO: 7557 - DNA, 40 bp, Homo sapiens
acaaagagggtagaggggtcgttaaggccaaaaagtttac

SEQ ID NO: 7558 - DNA, 40 bp, Homo sapiens
taaactttttggccttaacgacccctctaccctctttgtt

SEQ ID NO: 7559 - DNA, 40 bp, Homo sapiens
aacaaagagggtagaggggtcgttaaggccaaaaagttta

SEQ ID NO: 7560 - DNA, 40 bp, Homo sapiens
aaactttttggccttaacgacccctctaccctctttgttt

SEQ ID NO: 7561 - DNA, 40 bp, Homo sapiens
aaacaaagagggtagaggggtcgttaaggccaaaaagttt

SEQ ID NO: 7562 - DNA, 40 bp, Homo sapiens
aactttttggccttaacgacccctctaccctctttgtttt

SEQ ID NO: 7563 - DNA, 40 bp, Homo sapiens
aaaacaaagagggtagaggggtcgttaaggccaaaaagtt

SEQ ID NO: 7564 - DNA, 40 bp, Homo sapiens
actttttggccttaacgacccctctaccctctttgttttt

SEQ ID NO: 7565 - DNA, 40 bp, Homo sapiens
aaaaacaaagagggtagaggggtcgttaaggccaaaaagt

SEQ ID NO: 7566 - DNA, 40 bp, Homo sapiens
ctttttggccttaacgacccctctaccctctttgtttttt

SEQ ID NO: 7567 - DNA, 40 bp, Homo sapiens
aaaaaacaaagagggtagaggggtcgttaaggccaaaaag

SEQ ID NO: 7568 - DNA, 40 bp, Homo sapiens
tttttggccttaacgacccctctaccctctttgttttttt

SEQ ID NO: 7569 - DNA, 40 bp, Homo sapiens
aaaaaaacaaagagggtagaggggtcgttaaggccaaaaa

SEQ ID NO: 7570 - DNA, 40 bp, Homo sapiens
ttttggccttaacgacccctctaccctctttgtttttttg

SEQ ID NO: 7571 - DNA, 40 bp, Homo sapiens
caaaaaaacaaagagggtagaggggtcgttaaggccaaaa

SEQ ID NO: 7572 - DNA, 40 bp, Homo sapiens
tttggccttaacgacccctctaccctctttgtttttttga

SEQ ID NO: 7573 - DNA, 40 bp, Homo sapiens
tcaaaaaaacaaagagggtagaggggtcgttaaggccaaa

SEQ ID NO: 7574 - DNA, 40 bp, Homo sapiens
ttggccttaacgacccctctaccctctttgtttttttgag

SEQ ID NO: 7575 - DNA, 40 bp, Homo sapiens
ctcaaaaaaacaaagagggtagaggggtcgttaaggccaa

SEQ ID NO: 7576 - DNA, 40 bp, Homo sapiens
tggccttaacgacccctctaccctctttgtttttttgaga

SEQ ID NO: 7577 - DNA, 40 bp, Homo sapiens
tctcaaaaaaacaaagagggtagaggggtcgttaaggcca

SEQ ID NO: 7578 - DNA, 40 bp, Homo sapiens
ggccttaacgacccctctaccctctttgtttttttgagag

SEQ ID NO: 7579 - DNA, 40 bp, Homo sapiens
ctctcaaaaaaacaaagagggtagaggggtcgttaaggcc

SEQ ID NO: 7580 - DNA, 40 bp, Homo sapiens
gccttaacgacccctctaccctctttgtttttttgagaga

SEQ ID NO: 7581 - DNA, 40 bp, Homo sapiens
tctctcaaaaaaacaaagagggtagaggggtcgttaaggc

SEQ ID NO: 7582 - DNA, 40 bp, Homo sapiens
ccttaacgacccctctaccctctttgtttttttgagagag

SEQ ID NO: 7583 - DNA, 40 bp, Homo sapiens
ctctctcaaaaaaacaaagagggtagaggggtcgttaagg

SEQ ID NO: 7584 - DNA, 40 bp, Homo sapiens
cttaacgacccctctaccctctttgtttttttgagagaga

SEQ ID NO: 7585 - DNA, 40 bp, Homo sapiens
tctctctcaaaaaaacaaagagggtagaggggtcgttaag

SEQ ID NO: 7586 - DNA, 40 bp, Homo sapiens
ttaacgacccctctaccctctttgtttttttgagagagag

SEQ ID NO: 7587 - DNA, 40 bp, Homo sapiens
ctctctctcaaaaaaacaaagagggtagaggggtcgttaa

SEQ ID NO: 7588 - DNA, 40 bp, Homo sapiens
taacgacccctctaccctctttgtttttttgagagagaga

SEQ ID NO: 7589 - DNA, 40 bp, Homo sapiens
tctctctctcaaaaaaacaaagagggtagaggggtcgtta

SEQ ID NO: 7590 - DNA, 40 bp, Homo sapiens
aacgacccctctaccctctttgtttttttgagagagagag

SEQ ID NO: 7591 - DNA, 40 bp, Homo sapiens
ctctctctctcaaaaaaacaaagagggtagaggggtcgtt

SEQ ID NO: 7592 - DNA, 40 bp, Homo sapiens
acgacccctctaccctctttgtttttttgagagagagagt

SEQ ID NO: 7593 - DNA, 40 bp, Homo sapiens
actctctctctcaaaaaaacaaagagggtagaggggtcgt

SEQ ID NO: 7594 - DNA, 40 bp, Homo sapiens
cgacccctctaccctctttgtttttttgagagagagagtc

SEQ ID NO: 7595 - DNA, 40 bp, Homo sapiens
gactctctctctcaaaaaaacaaagagggtagaggggtcg

SEQ ID NO: 7596 - DNA, 40 bp, Homo sapiens
gacccctctaccctctttgtttttttgagagagagagtct

SEQ ID NO: 7597 - DNA, 40 bp, Homo sapiens
agactctctctctcaaaaaaacaaagagggtagaggggtc

SEQ ID NO: 7598 - DNA, 40 bp, Homo sapiens
acccctctaccctctttgtttttttgagagagagagtctc

SEQ ID NO: 7599 - DNA, 40 bp, Homo sapiens
gagactctctctctcaaaaaaacaaagagggtagaggggt

SEQ ID NO: 7600 - DNA, 40 bp, Homo sapiens
cccctctaccctctttgtttttttgagagagagagtctca

SEQ ID NO: 7601 - DNA, 40 bp, Homo sapiens
tgagactctctctctcaaaaaaacaaagagggtagagggg

SEQ ID NO: 7602 - DNA, 40 bp, Homo sapiens
ccctctaccctctttgtttttttgagagagagagtctcac

SEQ ID NO: 7603 - DNA, 40 bp, Homo sapiens
gtgagactctctctctcaaaaaaacaaagagggtagaggg

SEQ ID NO: 7604 - DNA, 40 bp, Homo sapiens
cctctaccctctttgtttttttgagagagagagtctcact

SEQ ID NO: 7605 - DNA, 40 bp, Homo sapiens
agtgagactctctctctcaaaaaaacaaagagggtagagg

SEQ ID NO: 7606 - DNA, 40 bp, Homo sapiens
ctctaccctctttgtttttttgagagagagagtctcactc

SEQ ID NO: 7607 - DNA, 40 bp, Homo sapiens
gagtgagactctctctctcaaaaaaacaaagagggtagag

SEQ ID NO: 7608 - DNA, 40 bp, Homo sapiens
tctaccctctttgtttttttgagagagagagtctcactct

SEQ ID NO: 7609 - DNA, 40 bp, Homo sapiens
agagtgagactctctctctcaaaaaaacaaagagggtaga

SEQ ID NO: 7610 - DNA, 40 bp, Homo sapiens
ctaccctctttgtttttttgagagagagagtctcactctg

SEQ ID NO: 7611 - DNA, 40 bp, Homo sapiens
cagagtgagactctctctctcaaaaaaacaaagagggtag

SEQ ID NO: 7612 - DNA, 40 bp, Homo sapiens
taccctctttgtttttttgagagagagagtctcactctgt

SEQ ID NO: 7613 - DNA, 40 bp, Homo sapiens
acagagtgagactctctctctcaaaaaaacaaagagggta

SEQ ID NO: 7614 - DNA, 40 bp, Homo sapiens
accctctttgtttttttgagagagagagtctcactctgtc

SEQ ID NO: 7615 - DNA, 40 bp, Homo sapiens
gacagagtgagactctctctctcaaaaaaacaaagagggt

SEQ ID NO: 7616 - DNA, 40 bp, Homo sapiens
ccctctttgtttttttgagagagagagtctcactctgtca

SEQ ID NO: 7617 - DNA, 40 bp, Homo sapiens
tgacagagtgagactctctctctcaaaaaaacaaagaggg

SEQ ID NO: 7618 - DNA, 40 bp, Homo sapiens
cctctttgtttttttgagagagagagtctcactctgtcac

SEQ ID NO: 7619 - DNA, 40 bp, Homo sapiens
gtgacagagtgagactctctctctcaaaaaaacaaagagg

SEQ ID NO: 7620 - DNA, 40 bp, Homo sapiens
ctctttgtttttttgagagagagagtctcactctgtcacc

SEQ ID NO: 7621 - DNA, 40 bp, Homo sapiens
ggtgacagagtgagactctctctctcaaaaaaacaaagag

SEQ ID NO: 7622 - DNA, 40 bp, Homo sapiens
tctttgtttttttgagagagagagtctcactctgtcaccc

SEQ ID NO: 7623 - DNA, 40 bp, Homo sapiens
gggtgacagagtgagactctctctctcaaaaaaacaaaga

SEQ ID NO: 7624 - DNA, 40 bp, Homo sapiens
ctttgtttttttgagagagagagtctcactctgtcaccca

SEQ ID NO: 7625 - DNA, 40 bp, Homo sapiens
tgggtgacagagtgagactctctctctcaaaaaaacaaag

SEQ ID NO: 7626 - DNA, 40 bp, Homo sapiens
tttgtttttttgagagagagagtctcactctgtcacccag

SEQ ID NO: 7627 - DNA, 40 bp, Homo sapiens
ctgggtgacagagtgagactctctctctcaaaaaaacaaa

SEQ ID NO: 7628 - DNA, 40 bp, Homo sapiens
ttgtttttttgagagagagagtctcactctgtcacccagg

SEQ ID NO: 7629 - DNA, 40 bp, Homo sapiens
cctgggtgacagagtgagactctctctctcaaaaaaacaa

SEQ ID NO: 7630 - DNA, 40 bp, Homo sapiens
tgtttttttgagagagagagtctcactctgtcacccaggc

SEQ ID NO: 7631 - DNA, 40 bp, Homo sapiens
gcctgggtgacagagtgagactctctctctcaaaaaaaca

SEQ ID NO: 7632 - DNA, 40 bp, Homo sapiens
gtttttttgagagagagagtctcactctgtcacccaggcc

SEQ ID NO: 7633 - DNA, 40 bp, Homo sapiens
ggcctgggtgacagagtgagactctctctctcaaaaaaac

SEQ ID NO: 7634 - DNA, 40 bp, Homo sapiens
tttttttgagagagagagtctcactctgtcacccaggccg

SEQ ID NO: 7635 - DNA, 40 bp, Homo sapiens
cggcctgggtgacagagtgagactctctctctcaaaaaaa

SEQ ID NO: 7636 - DNA, 40 bp, Homo sapiens
ttttttgagagagagagtctcactctgtcacccaggccgg

SEQ ID NO: 7637 - DNA, 40 bp, Homo sapiens
ccggcctgggtgacagagtgagactctctctctcaaaaaa

SEQ ID NO: 7638 - DNA, 40 bp, Homo sapiens
tttttgagagagagagtctcactctgtcacccaggccgga

SEQ ID NO: 7639 - DNA, 40 bp, Homo sapiens
tccggcctgggtgacagagtgagactctctctctcaaaaa

SEQ ID NO: 7640 - DNA, 40 bp, Homo sapiens
ttttgagagagagagtctcactctgtcacccaggccggaa

SEQ ID NO: 7641 - DNA, 40 bp, Homo sapiens
ttccggcctgggtgacagagtgagactctctctctcaaaa

SEQ ID NO: 7642 - DNA, 40 bp, Homo sapiens
tttgagagagagagtctcactctgtcacccaggccggaat

SEQ ID NO: 7643 - DNA, 40 bp, Homo sapiens
attccggcctgggtgacagagtgagactctctctctcaaa

SEQ ID NO: 7644 - DNA, 40 bp, Homo sapiens
ttgagagagagagtctcactctgtcacccaggccggaatg

SEQ ID NO: 7645 - DNA, 40 bp, Homo sapiens
cattccggcctgggtgacagagtgagactctctctctcaa

SEQ ID NO: 7646 - DNA, 40 bp, Homo sapiens
tgagagagagagtctcactctgtcacccaggccggaatgc

SEQ ID NO: 7647 - DNA, 40 bp, Homo sapiens
gcattccggcctgggtgacagagtgagactctctctctca

SEQ ID NO: 7648 - DNA, 40 bp, Homo sapiens
gagagagagagtctcactctgtcacccaggccggaatgca

SEQ ID NO: 7649 - DNA, 40 bp, Homo sapiens
tgcattccggcctgggtgacagagtgagactctctctctc

SEQ ID NO: 7650 - DNA, 40 bp, Homo sapiens
agagagagagtctcactctgtcacccaggccggaatgcag

SEQ ID NO: 7651 - DNA, 40 bp, Homo sapiens
ctgcattccggcctgggtgacagagtgagactctctctct

SEQ ID NO: 7652 - DNA, 40 bp, Homo sapiens
gagagagagtctcactctgtcacccaggccggaatgcagt

SEQ ID NO: 7653 - DNA, 40 bp, Homo sapiens
actgcattccggcctgggtgacagagtgagactctctctc

SEQ ID NO: 7654 - DNA, 40 bp, Homo sapiens
agagagagtctcactctgtcacccaggccggaatgcagtg

SEQ ID NO: 7655 - DNA, 40 bp, Homo sapiens
cactgcattccggcctgggtgacagagtgagactctctct

SEQ ID NO: 7656 - DNA, 40 bp, Homo sapiens
gagagagtctcactctgtcacccaggccggaatgcagtgg

SEQ ID NO: 7657 - DNA, 40 bp, Homo sapiens
ccactgcattccggcctgggtgacagagtgagactctctc

SEQ ID NO: 7658 - DNA, 40 bp, Homo sapiens
agagagtctcactctgtcacccaggccggaatgcagtggc

SEQ ID NO: 7659 - DNA, 40 bp, Homo sapiens
gccactgcattccggcctgggtgacagagtgagactctct

SEQ ID NO: 7660 - DNA, 40 bp, Homo sapiens
gagagtctcactctgtcacccaggccggaatgcagtggcg

SEQ ID NO: 7661 - DNA, 40 bp, Homo sapiens
cgccactgcattccggcctgggtgacagagtgagactctc

SEQ ID NO: 7662 - DNA, 40 bp, Homo sapiens
agagtctcactctgtcacccaggccggaatgcagtggcgc

SEQ ID NO: 7663 - DNA, 40 bp, Homo sapiens
gcgccactgcattccggcctgggtgacagagtgagactct

SEQ ID NO: 7664 - DNA, 40 bp, Homo sapiens
gagtctcactctgtcacccaggccggaatgcagtggcgcg

SEQ ID NO: 7665 - DNA, 40 bp, Homo sapiens
cgcgccactgcattccggcctgggtgacagagtgagactc

SEQ ID NO: 7666 - DNA, 40 bp, Homo sapiens
agtctcactctgtcacccaggccggaatgcagtggcgcga

SEQ ID NO: 7667 - DNA, 40 bp, Homo sapiens
tcgcgccactgcattccggcctgggtgacagagtgagact

SEQ ID NO: 7668 - DNA, 40 bp, Homo sapiens
gtctcactctgtcacccaggccggaatgcagtggcgcgat

SEQ ID NO: 7669 - DNA, 40 bp, Homo sapiens
atcgcgccactgcattccggcctgggtgacagagtgagac

SEQ ID NO: 7670 - DNA, 40 bp, Homo sapiens
tctcactctgtcacccaggccggaatgcagtggcgcgatc

SEQ ID NO: 7671 - DNA, 40 bp, Homo sapiens
gatcgcgccactgcattccggcctgggtgacagagtgaga

SEQ ID NO: 7672 - DNA, 40 bp, Homo sapiens
ctcactctgtcacccaggccggaatgcagtggcgcgatct

SEQ ID NO: 7673 - DNA, 40 bp, Homo sapiens
agatcgcgccactgcattccggcctgggtgacagagtgag

SEQ ID NO: 7674 - DNA, 40 bp, Homo sapiens
tcactctgtcacccaggccggaatgcagtggcgcgatctc

SEQ ID NO: 7675 - DNA, 40 bp, Homo sapiens
gagatcgcgccactgcattccggcctgggtgacagagtga

SEQ ID NO: 7676 - DNA, 40 bp, Homo sapiens
cactctgtcacccaggccggaatgcagtggcgcgatctcg

SEQ ID NO: 7677 - DNA, 40 bp, Homo sapiens
cgagatcgcgccactgcattccggcctgggtgacagagtg

SEQ ID NO: 7678 - DNA, 40 bp, Homo sapiens
actctgtcacccaggccggaatgcagtggcgcgatctcgg

SEQ ID NO: 7679 - DNA, 40 bp, Homo sapiens
ccgagatcgcgccactgcattccggcctgggtgacagagt

SEQ ID NO: 7680 - DNA, 40 bp, Homo sapiens
ctctgtcacccaggccggaatgcagtggcgcgatctcggc

SEQ ID NO: 7681 - DNA, 40 bp, Homo sapiens
gccgagatcgcgccactgcattccggcctgggtgacagag

SEQ ID NO: 7682 - DNA, 40 bp, Homo sapiens
tctgtcacccaggccggaatgcagtggcgcgatctcggcc

SEQ ID NO: 7683 - DNA, 40 bp, Homo sapiens
ggccgagatcgcgccactgcattccggcctgggtgacaga

SEQ ID NO: 7684 - DNA, 40 bp, Homo sapiens
ctgtcacccaggccggaatgcagtggcgcgatctcggccc

SEQ ID NO: 7685 - DNA, 40 bp, Homo sapiens
gggccgagatcgcgccactgcattccggcctgggtgacag

SEQ ID NO: 7686 - DNA, 40 bp, Homo sapiens
tgtcacccaggccggaatgcagtggcgcgatctcggcccg

SEQ ID NO: 7687 - DNA, 40 bp, Homo sapiens
cgggccgagatcgcgccactgcattccggcctgggtgaca

SEQ ID NO: 7688 - DNA, 40 bp, Homo sapiens
gtcacccaggccggaatgcagtggcgcgatctcggcccgc

SEQ ID NO: 7689 - DNA, 40 bp, Homo sapiens
gcgggccgagatcgcgccactgcattccggcctgggtgac

SEQ ID NO: 7690 - DNA, 40 bp, Homo sapiens
tcacccaggccggaatgcagtggcgcgatctcggcccgct

SEQ ID NO: 7691 - DNA, 40 bp, Homo sapiens
agcgggccgagatcgcgccactgcattccggcctgggtga

SEQ ID NO: 7692 - DNA, 40 bp, Homo sapiens
cacccaggccggaatgcagtggcgcgatctcggcccgcta

SEQ ID NO: 7693 - DNA, 40 bp, Homo sapiens
tagcgggccgagatcgcgccactgcattccggcctgggtg

SEQ ID NO: 7694 - DNA, 40 bp, Homo sapiens
acccaggccggaatgcagtggcgcgatctcggcccgctac

SEQ ID NO: 7695 - DNA, 40 bp, Homo sapiens
gtagcgggccgagatcgcgccactgcattccggcctgggt

SEQ ID NO: 7696 - DNA, 40 bp, Homo sapiens
cccaggccggaatgcagtggcgcgatctcggcccgctact

SEQ ID NO: 7697 - DNA, 40 bp, Homo sapiens
agtagcgggccgagatcgcgccactgcattccggcctggg

SEQ ID NO: 7698 - DNA, 40 bp, Homo sapiens
ccaggccggaatgcagtggcgcgatctcggcccgctacta

SEQ ID NO: 7699 - DNA, 40 bp, Homo sapiens
tagtagcgggccgagatcgcgccactgcattccggcctgg

SEQ ID NO: 7700 - DNA, 40 bp, Homo sapiens
caggccggaatgcagtggcgcgatctcggcccgctactac

SEQ ID NO: 7701 - DNA, 40 bp, Homo sapiens
gtagtagcgggccgagatcgcgccactgcattccggcctg

SEQ ID NO: 7702 - DNA, 40 bp, Homo sapiens
aggccggaatgcagtggcgcgatctcggcccgctactacc

SEQ ID NO: 7703 - DNA, 40 bp, Homo sapiens
ggtagtagcgggccgagatcgcgccactgcattccggcct

SEQ ID NO: 7704 - DNA, 40 bp, Homo sapiens
ggccggaatgcagtggcgcgatctcggcccgctactacct

SEQ ID NO: 7705 - DNA, 40 bp, Homo sapiens
aggtagtagcgggccgagatcgcgccactgcattccggcc

SEQ ID NO: 7706 - DNA, 40 bp, Homo sapiens
gccggaatgcagtggcgcgatctcggcccgctactacctc

SEQ ID NO: 7707 - DNA, 40 bp, Homo sapiens
gaggtagtagcgggccgagatcgcgccactgcattccggc

SEQ ID NO: 7708 - DNA, 40 bp, Homo sapiens
ccggaatgcagtggcgcgatctcggcccgctactacctcc

SEQ ID NO: 7709 - DNA, 40 bp, Homo sapiens
ggaggtagtagcgggccgagatcgcgccactgcattccgg

SEQ ID NO: 7710 - DNA, 40 bp, Homo sapiens
cggaatgcagtggcgcgatctcggcccgctactacctccg

SEQ ID NO: 7711 - DNA, 40 bp, Homo sapiens
cggaggtagtagcgggccgagatcgcgccactgcattccg

SEQ ID NO: 7712 - DNA, 40 bp, Homo sapiens
ggaatgcagtggcgcgatctcggcccgctactacctccga

SEQ ID NO: 7713 - DNA, 40 bp, Homo sapiens
tcggaggtagtagcgggccgagatcgcgccactgcattcc

SEQ ID NO: 7714 - DNA, 40 bp, Homo sapiens
gaatgcagtggcgcgatctcggcccgctactacctccgac

SEQ ID NO: 7715 - DNA, 40 bp, Homo sapiens
gtcggaggtagtagcgggccgagatcgcgccactgcattc

SEQ ID NO: 7716 - DNA, 40 bp, Homo sapiens
aatgcagtggcgcgatctcggcccgctactacctccgact

SEQ ID NO: 7717 - DNA, 40 bp, Homo sapiens
agtcggaggtagtagcgggccgagatcgcgccactgcatt

SEQ ID NO: 7718 - DNA, 40 bp, Homo sapiens
atgcagtggcgcgatctcggcccgctactacctccgactc

SEQ ID NO: 7719 - DNA, 40 bp, Homo sapiens
gagtcggaggtagtagcgggccgagatcgcgccactgcat

SEQ ID NO: 7720 - DNA, 40 bp, Homo sapiens
tgcagtggcgcgatctcggcccgctactacctccgactct

SEQ ID NO: 7721 - DNA, 40 bp, Homo sapiens
agagtcggaggtagtagcgggccgagatcgcgccactgca

SEQ ID NO: 7722 - DNA, 40 bp, Homo sapiens
gcagtggcgcgatctcggcccgctactacctccgactctc

SEQ ID NO: 7723 - DNA, 40 bp, Homo sapiens
gagagtcggaggtagtagcgggccgagatcgcgccactgc

SEQ ID NO: 7724 - DNA, 40 bp, Homo sapiens
cagtggcgcgatctcggcccgctactacctccgactctca

SEQ ID NO: 7725 - DNA, 40 bp, Homo sapiens
tgagagtcggaggtagtagcgggccgagatcgcgccactg

SEQ ID NO: 7726 - DNA, 40 bp, Homo sapiens
agtggcgcgatctcggcccgctactacctccgactctcag

SEQ ID NO: 7727 - DNA, 40 bp, Homo sapiens
ctgagagtcggaggtagtagcgggccgagatcgcgccact

SEQ ID NO: 7728 - DNA, 40 bp, Homo sapiens
gtggcgcgatctcggcccgctactacctccgactctcagg

SEQ ID NO: 7729 - DNA, 40 bp, Homo sapiens
cctgagagtcggaggtagtagcgggccgagatcgcgccac

SEQ ID NO: 7730 - DNA, 40 bp, Homo sapiens
tggcgcgatctcggcccgctactacctccgactctcaggc

SEQ ID NO: 7731 - DNA, 40 bp, Homo sapiens
gcctgagagtcggaggtagtagcgggccgagatcgcgcca

SEQ ID NO: 7732 - DNA, 40 bp, Homo sapiens
ggcgcgatctcggcccgctactacctccgactctcaggct

SEQ ID NO: 7733 - DNA, 40 bp, Homo sapiens
agcctgagagtcggaggtagtagcgggccgagatcgcgcc

SEQ ID NO: 7734 - DNA, 40 bp, Homo sapiens
gcgcgatctcggcccgctactacctccgactctcaggctc

SEQ ID NO: 7735 - DNA, 40 bp, Homo sapiens
gagcctgagagtcggaggtagtagcgggccgagatcgcgc

SEQ ID NO: 7736 - DNA, 40 bp, Homo sapiens
cgcgatctcggcccgctactacctccgactctcaggctca

SEQ ID NO: 7737 - DNA, 40 bp, Homo sapiens
tgagcctgagagtcggaggtagtagcgggccgagatcgcg

SEQ ID NO: 7738 - DNA, 40 bp, Homo sapiens
gcgatctcggcccgctactacctccgactctcaggctcaa

SEQ ID NO: 7739 - DNA, 40 bp, Homo sapiens
ttgagcctgagagtcggaggtagtagcgggccgagatcgc

SEQ ID NO: 7740 - DNA, 40 bp, Homo sapiens
cgatctcggcccgctactacctccgactctcaggctcaag

SEQ ID NO: 7741 - DNA, 40 bp, Homo sapiens
cttgagcctgagagtcggaggtagtagcgggccgagatcg

SEQ ID NO: 7742 - DNA, 40 bp, Homo sapiens
gatctcggcccgctactacctccgactctcaggctcaagc

SEQ ID NO: 7743 - DNA, 40 bp, Homo sapiens
gcttgagcctgagagtcggaggtagtagcgggccgagatc

SEQ ID NO: 7744 - DNA, 40 bp, Homo sapiens
atctcggcccgctactacctccgactctcaggctcaagcg

SEQ ID NO: 7745 - DNA, 40 bp, Homo sapiens
cgcttgagcctgagagtcggaggtagtagcgggccgagat

SEQ ID NO: 7746 - DNA, 40 bp, Homo sapiens
tctcggcccgctactacctccgactctcaggctcaagcga

SEQ ID NO: 7747 - DNA, 40 bp, Homo sapiens
tcgcttgagcctgagagtcggaggtagtagcgggccgaga

SEQ ID NO: 7748 - DNA, 40 bp, Homo sapiens
ctcggcccgctactacctccgactctcaggctcaagcgat

SEQ ID NO: 7749 - DNA, 40 bp, Homo sapiens
atcgcttgagcctgagagtcggaggtagtagcgggccgag

SEQ ID NO: 7750 - DNA, 40 bp, Homo sapiens
tcggcccgctactacctccgactctcaggctcaagcgatt

SEQ ID NO: 7751 - DNA, 40 bp, Homo sapiens
aatcgcttgagcctgagagtcggaggtagtagcgggccga

SEQ ID NO: 7752 - DNA, 40 bp, Homo sapiens
cggcccgctactacctccgactctcaggctcaagcgattc

SEQ ID NO: 7753 - DNA, 40 bp, Homo sapiens
gaatcgcttgagcctgagagtcggaggtagtagcgggccg

SEQ ID NO: 7754 - DNA, 40 bp, Homo sapiens
ggcccgctactacctccgactctcaggctcaagcgattct

SEQ ID NO: 7755 - DNA, 40 bp, Homo sapiens
agaatcgcttgagcctgagagtcggaggtagtagcgggcc

SEQ ID NO: 7756 - DNA, 40 bp, Homo sapiens
gcccgctactacctccgactctcaggctcaagcgattctc

SEQ ID NO: 7757 - DNA, 40 bp, Homo sapiens
gagaatcgcttgagcctgagagtcggaggtagtagcgggc

SEQ ID NO: 7758 - DNA, 40 bp, Homo sapiens
cccgctactacctccgactctcaggctcaagcgattctcc

SEQ ID NO: 7759 - DNA, 40 bp, Homo sapiens
ggagaatcgcttgagcctgagagtcggaggtagtagcggg

SEQ ID NO: 7760 - DNA, 40 bp, Homo sapiens
ccgctactacctccgactctcaggctcaagcgattctccc

SEQ ID NO: 7761 - DNA, 40 bp, Homo sapiens
gggagaatcgcttgagcctgagagtcggaggtagtagcgg

SEQ ID NO: 7762 - DNA, 40 bp, Homo sapiens
cgctactacctccgactctcaggctcaagcgattctcccg

SEQ ID NO: 7763 - DNA, 40 bp, Homo sapiens
cgggagaatcgcttgagcctgagagtcggaggtagtagcg

SEQ ID NO: 7764 - DNA, 40 bp, Homo sapiens
gctactacctccgactctcaggctcaagcgattctcccgc

SEQ ID NO: 7765 - DNA, 40 bp, Homo sapiens
gcgggagaatcgcttgagcctgagagtcggaggtagtagc

SEQ ID NO: 7766 - DNA, 40 bp, Homo sapiens
ctactacctccgactctcaggctcaagcgattctcccgcc

SEQ ID NO: 7767 - DNA, 40 bp, Homo sapiens
ggcgggagaatcgcttgagcctgagagtcggaggtagtag

SEQ ID NO: 7768 - DNA, 40 bp, Homo sapiens
tactacctccgactctcaggctcaagcgattctcccgcct

SEQ ID NO: 7769 - DNA, 40 bp, Homo sapiens
aggcgggagaatcgcttgagcctgagagtcggaggtagta

SEQ ID NO: 7770 - DNA, 40 bp, Homo sapiens
actacctccgactctcaggctcaagcgattctcccgcctc

SEQ ID NO: 7771 - DNA, 40 bp, Homo sapiens
gaggcgggagaatcgcttgagcctgagagtcggaggtagt

SEQ ID NO: 7772 - DNA, 40 bp, Homo sapiens
ctacctccgactctcaggctcaagcgattctcccgcctca

SEQ ID NO: 7773 - DNA, 40 bp, Homo sapiens
tgaggcgggagaatcgcttgagcctgagagtcggaggtag

SEQ ID NO: 7774 - DNA, 40 bp, Homo sapiens
tacctccgactctcaggctcaagcgattctcccgcctcag

SEQ ID NO: 7775 - DNA, 40 bp, Homo sapiens
ctgaggcgggagaatcgcttgagcctgagagtcggaggta

SEQ ID NO: 7776 - DNA, 40 bp, Homo sapiens
acctccgactctcaggctcaagcgattctcccgcctcagc

SEQ ID NO: 7777 - DNA, 40 bp, Homo sapiens
gctgaggcgggagaatcgcttgagcctgagagtcggaggt

SEQ ID NO: 7778 - DNA, 40 bp, Homo sapiens
cctccgactctcaggctcaagcgattctcccgcctcagct

SEQ ID NO: 7779 - DNA, 40 bp, Homo sapiens
agctgaggcgggagaatcgcttgagcctgagagtcggagg

SEQ ID NO: 7780 - DNA, 40 bp, Homo sapiens
ctccgactctcaggctcaagcgattctcccgcctcagctt

SEQ ID NO: 7781 - DNA, 40 bp, Homo sapiens
aagctgaggcgggagaatcgcttgagcctgagagtcggag

SEQ ID NO: 7782 - DNA, 40 bp, Homo sapiens
tccgactctcaggctcaagcgattctcccgcctcagcttc

SEQ ID NO: 7783 - DNA, 40 bp, Homo sapiens
gaagctgaggcgggagaatcgcttgagcctgagagtcgga

SEQ ID NO: 7784 - DNA, 40 bp, Homo sapiens
ccgactctcaggctcaagcgattctcccgcctcagcttcc

SEQ ID NO: 7785 - DNA, 40 bp, Homo sapiens
ggaagctgaggcgggagaatcgcttgagcctgagagtcgg

SEQ ID NO: 7786 - DNA, 40 bp, Homo sapiens
cgactctcaggctcaagcgattctcccgcctcagcttccc

SEQ ID NO: 7787 - DNA, 40 bp, Homo sapiens
gggaagctgaggcgggagaatcgcttgagcctgagagtcg

SEQ ID NO: 7788 - DNA, 40 bp, Homo sapiens
gactctcaggctcaagcgattctcccgcctcagcttcccg

SEQ ID NO: 7789 - DNA, 40 bp, Homo sapiens
cgggaagctgaggcgggagaatcgcttgagcctgagagtc

SEQ ID NO: 7790 - DNA, 40 bp, Homo sapiens
actctcaggctcaagcgattctcccgcctcagcttcccga

SEQ ID NO: 7791 - DNA, 40 bp, Homo sapiens
tcgggaagctgaggcgggagaatcgcttgagcctgagagt

SEQ ID NO: 7792 - DNA, 40 bp, Homo sapiens
ctctcaggctcaagcgattctcccgcctcagcttcccgag

SEQ ID NO: 7793 - DNA, 40 bp, Homo sapiens
ctcgggaagctgaggcgggagaatcgcttgagcctgagag

SEQ ID NO: 7794 - DNA, 40 bp, Homo sapiens
tctcaggctcaagcgattctcccgcctcagcttcccgagt

SEQ ID NO: 7795 - DNA, 40 bp, Homo sapiens
actcgggaagctgaggcgggagaatcgcttgagcctgaga

SEQ ID NO: 7796 - DNA, 40 bp, Homo sapiens
ctcaggctcaagcgattctcccgcctcagcttcccgagta

SEQ ID NO: 7797 - DNA, 40 bp, Homo sapiens
tactcgggaagctgaggcgggagaatcgcttgagcctgag

SEQ ID NO: 7798 - DNA, 40 bp, Homo sapiens
tcaggctcaagcgattctcccgcctcagcttcccgagtag

SEQ ID NO: 7799 - DNA, 40 bp, Homo sapiens
ctactcgggaagctgaggcgggagaatcgcttgagcctga

SEQ ID NO: 7800 - DNA, 40 bp, Homo sapiens
caggctcaagcgattctcccgcctcagcttcccgagtagc

SEQ ID NO: 7801 - DNA, 40 bp, Homo sapiens
gctactcgggaagctgaggcgggagaatcgcttgagcctg

SEQ ID NO: 7802 - DNA, 40 bp, Homo sapiens
aggctcaagcgattctcccgcctcagcttcccgagtagcc

SEQ ID NO: 7803 - DNA, 40 bp, Homo sapiens
ggctactcgggaagctgaggcgggagaatcgcttgagcct

SEQ ID NO: 7804 - DNA, 40 bp, Homo sapiens
ggctcaagcgattctcccgcctcagcttcccgagtagccg

SEQ ID NO: 7805 - DNA, 40 bp, Homo sapiens
cggctactcgggaagctgaggcgggagaatcgcttgagcc

SEQ ID NO: 7806 - DNA, 40 bp, Homo sapiens
gctcaagcgattctcccgcctcagcttcccgagtagccgg

SEQ ID NO: 7807 - DNA, 40 bp, Homo sapiens
ccggctactcgggaagctgaggcgggagaatcgcttgagc

SEQ ID NO: 7808 - DNA, 40 bp, Homo sapiens
ctcaagcgattctcccgcctcagcttcccgagtagccggg

SEQ ID NO: 7809 - DNA, 40 bp, Homo sapiens
cccggctactcgggaagctgaggcgggagaatcgcttgag

SEQ ID NO: 7810 - DNA, 40 bp, Homo sapiens
tcaagcgattctcccgcctcagcttcccgagtagccggga

SEQ ID NO: 7811 - DNA, 40 bp, Homo sapiens
tcccggctactcgggaagctgaggcgggagaatcgcttga

SEQ ID NO: 7812 - DNA, 40 bp, Homo sapiens
caagcgattctcccgcctcagcttcccgagtagccgggat

SEQ ID NO: 7813 - DNA, 40 bp, Homo sapiens
atcccggctactcgggaagctgaggcgggagaatcgcttg

SEQ ID NO: 7814 - DNA, 40 bp, Homo sapiens
aagcgattctcccgcctcagcttcccgagtagccgggatt

SEQ ID NO: 7815 - DNA, 40 bp, Homo sapiens
aatcccggctactcgggaagctgaggcgggagaatcgctt

SEQ ID NO: 7816 - DNA, 40 bp, Homo sapiens
agcgattctcccgcctcagcttcccgagtagccgggatta

SEQ ID NO: 7817 - DNA, 40 bp, Homo sapiens
taatcccggctactcgggaagctgaggcgggagaatcgct

SEQ ID NO: 7818 - DNA, 40 bp, Homo sapiens
gcgattctcccgcctcagcttcccgagtagccgggattac

SEQ ID NO: 7819 - DNA, 40 bp, Homo sapiens
gtaatcccggctactcgggaagctgaggcgggagaatcgc

SEQ ID NO: 7820 - DNA, 40 bp, Homo sapiens
cgattctcccgcctcagcttcccgagtagccgggattaca

SEQ ID NO: 7821 - DNA, 40 bp, Homo sapiens
tgtaatcccggctactcgggaagctgaggcgggagaatcg

SEQ ID NO: 7822 - DNA, 40 bp, Homo sapiens
gattctcccgcctcagcttcccgagtagccgggattacag

SEQ ID NO: 7823 - DNA, 40 bp, Homo sapiens
ctgtaatcccggctactcgggaagctgaggcgggagaatc

SEQ ID NO: 7824 - DNA, 40 bp, Homo sapiens
attctcccgcctcagcttcccgagtagccgggattacagg

SEQ ID NO: 7825 - DNA, 40 bp, Homo sapiens
cctgtaatcccggctactcgggaagctgaggcgggagaat

SEQ ID NO: 7826 - DNA, 40 bp, Homo sapiens
ttctcccgcctcagcttcccgagtagccgggattacaggc

SEQ ID NO: 7827 - DNA, 40 bp, Homo sapiens
gcctgtaatcccggctactcgggaagctgaggcgggagaa

SEQ ID NO: 7828 - DNA, 40 bp, Homo sapiens
tctcccgcctcagcttcccgagtagccgggattacaggct

SEQ ID NO: 7829 - DNA, 40 bp, Homo sapiens
agcctgtaatcccggctactcgggaagctgaggcgggaga

SEQ ID NO: 7830 - DNA, 40 bp, Homo sapiens
ctcccgcctcagcttcccgagtagccgggattacaggctc

SEQ ID NO: 7831 - DNA, 40 bp, Homo sapiens
gagcctgtaatcccggctactcgggaagctgaggcgggag

SEQ ID NO: 7832 - DNA, 40 bp, Homo sapiens
tcccgcctcagcttcccgagtagccgggattacaggctcc

SEQ ID NO: 7833 - DNA, 40 bp, Homo sapiens
ggagcctgtaatcccggctactcgggaagctgaggcggga

SEQ ID NO: 7834 - DNA, 40 bp, Homo sapiens
cccgcctcagcttcccgagtagccgggattacaggctccc

SEQ ID NO: 7835 - DNA, 40 bp, Homo sapiens
gggagcctgtaatcccggctactcgggaagctgaggcggg

SEQ ID NO: 7836 - DNA, 40 bp, Homo sapiens
ccgcctcagcttcccgagtagccgggattacaggctcccg

SEQ ID NO: 7837 - DNA, 40 bp, Homo sapiens
cgggagcctgtaatcccggctactcgggaagctgaggcgg

SEQ ID NO: 7838 - DNA, 40 bp, Homo sapiens
cgcctcagcttcccgagtagccgggattacaggctcccgc

SEQ ID NO: 7839 - DNA, 40 bp, Homo sapiens
gcgggagcctgtaatcccggctactcgggaagctgaggcg

SEQ ID NO: 7840 - DNA, 40 bp, Homo sapiens
gcctcagcttcccgagtagccgggattacaggctcccgcc

SEQ ID NO: 7841 - DNA, 40 bp, Homo sapiens
ggcgggagcctgtaatcccggctactcgggaagctgaggc

SEQ ID NO: 7842 - DNA, 40 bp, Homo sapiens
cctcagcttcccgagtagccgggattacaggctcccgcca

SEQ ID NO: 7843 - DNA, 40 bp, Homo sapiens
tggcgggagcctgtaatcccggctactcgggaagctgagg

SEQ ID NO: 7844 - DNA, 40 bp, Homo sapiens
ctcagcttcccgagtagccgggattacaggctcccgccac

SEQ ID NO: 7845 - DNA, 40 bp, Homo sapiens
gtggcgggagcctgtaatcccggctactcgggaagctgag

SEQ ID NO: 7846 - DNA, 40 bp, Homo sapiens
tcagcttcccgagtagccgggattacaggctcccgccacc

SEQ ID NO: 7847 - DNA, 40 bp, Homo sapiens
ggtggcgggagcctgtaatcccggctactcgggaagctga

SEQ ID NO: 7848 - DNA, 40 bp, Homo sapiens
cagcttcccgagtagccgggattacaggctcccgccaccg

SEQ ID NO: 7849 - DNA, 40 bp, Homo sapiens
cggtggcgggagcctgtaatcccggctactcgggaagctg

SEQ ID NO: 7850 - DNA, 40 bp, Homo sapiens
agcttcccgagtagccgggattacaggctcccgccaccgg

SEQ ID NO: 7851 - DNA, 40 bp, Homo sapiens
ccggtggcgggagcctgtaatcccggctactcgggaagct

SEQ ID NO: 7852 - DNA, 40 bp, Homo sapiens
gcttcccgagtagccgggattacaggctcccgccaccggg

SEQ ID NO: 7853 - DNA, 40 bp, Homo sapiens
cccggtggcgggagcctgtaatcccggctactcgggaagc

SEQ ID NO: 7854 - DNA, 40 bp, Homo sapiens
cttcccgagtagccgggattacaggctcccgccaccgggc

SEQ ID NO: 7855 - DNA, 40 bp, Homo sapiens
gcccggtggcgggagcctgtaatcccggctactcgggaag

SEQ ID NO: 7856 - DNA, 40 bp, Homo sapiens
ttcccgagtagccgggattacaggctcccgccaccgggct

SEQ ID NO: 7857 - DNA, 40 bp, Homo sapiens
agcccggtggcgggagcctgtaatcccggctactcgggaa

SEQ ID NO: 7858 - DNA, 40 bp, Homo sapiens
tcccgagtagccgggattacaggctcccgccaccgggcta

SEQ ID NO: 7859 - DNA, 40 bp, Homo sapiens
tagcccggtggcgggagcctgtaatcccggctactcggga

SEQ ID NO: 7860 - DNA, 40 bp, Homo sapiens
cccgagtagccgggattacaggctcccgccaccgggctaa

SEQ ID NO: 7861 - DNA, 40 bp, Homo sapiens
ttagcccggtggcgggagcctgtaatcccggctactcggg

SEQ ID NO: 7862 - DNA, 40 bp, Homo sapiens
ccgagtagccgggattacaggctcccgccaccgggctaat

SEQ ID NO: 7863 - DNA, 40 bp, Homo sapiens
attagcccggtggcgggagcctgtaatcccggctactcgg

SEQ ID NO: 7864 - DNA, 40 bp, Homo sapiens
cgagtagccgggattacaggctcccgccaccgggctaatt

SEQ ID NO: 7865 - DNA, 40 bp, Homo sapiens
aattagcccggtggcgggagcctgtaatcccggctactcg

SEQ ID NO: 7866 - DNA, 40 bp, Homo sapiens
gagtagccgggattacaggctcccgccaccgggctaattg

SEQ ID NO: 7867 - DNA, 40 bp, Homo sapiens
caattagcccggtggcgggagcctgtaatcccggctactc

SEQ ID NO: 7868 - DNA, 40 bp, Homo sapiens
agtagccgggattacaggctcccgccaccgggctaattgt

SEQ ID NO: 7869 - DNA, 40 bp, Homo sapiens
acaattagcccggtggcgggagcctgtaatcccggctact

SEQ ID NO: 7870 - DNA, 40 bp, Homo sapiens
gtagccgggattacaggctcccgccaccgggctaattgta

SEQ ID NO: 7871 - DNA, 40 bp, Homo sapiens
tacaattagcccggtggcgggagcctgtaatcccggctac

SEQ ID NO: 7872 - DNA, 40 bp, Homo sapiens
tagccgggattacaggctcccgccaccgggctaattgtat

SEQ ID NO: 7873 - DNA, 40 bp, Homo sapiens
atacaattagcccggtggcgggagcctgtaatcccggcta

SEQ ID NO: 7874 - DNA, 40 bp, Homo sapiens
agccgggattacaggctcccgccaccgggctaattgtatt

SEQ ID NO: 7875 - DNA, 40 bp, Homo sapiens
aatacaattagcccggtggcgggagcctgtaatcccggct

SEQ ID NO: 7876 - DNA, 40 bp, Homo sapiens
gccgggattacaggctcccgccaccgggctaattgtattt

SEQ ID NO: 7877 - DNA, 40 bp, Homo sapiens
aaatacaattagcccggtggcgggagcctgtaatcccggc

SEQ ID NO: 7878 - DNA, 40 bp, Homo sapiens
ccgggattacaggctcccgccaccgggctaattgtatttt

SEQ ID NO: 7879 - DNA, 40 bp, Homo sapiens
aaaatacaattagcccggtggcgggagcctgtaatcccgg

SEQ ID NO: 7880 - DNA, 40 bp, Homo sapiens
cgggattacaggctcccgccaccgggctaattgtattttt

SEQ ID NO: 7881 - DNA, 40 bp, Homo sapiens
aaaaatacaattagcccggtggcgggagcctgtaatcccg

SEQ ID NO: 7882 - DNA, 40 bp, Homo sapiens
gggattacaggctcccgccaccgggctaattgtattttta

SEQ ID NO: 7883 - DNA, 40 bp, Homo sapiens
taaaaatacaattagcccggtggcgggagcctgtaatccc

SEQ ID NO: 7884 - DNA, 40 bp, Homo sapiens
ggattacaggctcccgccaccgggctaattgtatttttag

SEQ ID NO: 7885 - DNA, 40 bp, Homo sapiens
ctaaaaatacaattagcccggtggcgggagcctgtaatcc

SEQ ID NO: 7886 - DNA, 40 bp, Homo sapiens
gattacaggctcccgccaccgggctaattgtatttttaga

SEQ ID NO: 7887 - DNA, 40 bp, Homo sapiens
tctaaaaatacaattagcccggtggcgggagcctgtaatc

SEQ ID NO: 7888 - DNA, 40 bp, Homo sapiens
attacaggctcccgccaccgggctaattgtatttttagat

SEQ ID NO: 7889 - DNA, 40 bp, Homo sapiens
atctaaaaatacaattagcccggtggcgggagcctgtaat

SEQ ID NO: 7890 - DNA, 40 bp, Homo sapiens
ttacaggctcccgccaccgggctaattgtatttttagata

SEQ ID NO: 7891 - DNA, 40 bp, Homo sapiens
tatctaaaaatacaattagcccggtggcgggagcctgtaa

SEQ ID NO: 7892 - DNA, 40 bp, Homo sapiens
tacaggctcccgccaccgggctaattgtatttttagatac

SEQ ID NO: 7893 - DNA, 40 bp, Homo sapiens
gtatctaaaaatacaattagcccggtggcgggagcctgta

SEQ ID NO: 7894 - DNA, 40 bp, Homo sapiens
acaggctcccgccaccgggctaattgtatttttagatacg

SEQ ID NO: 7895 - DNA, 40 bp, Homo sapiens
cgtatctaaaaatacaattagcccggtggcgggagcctgt

SEQ ID NO: 7896 - DNA, 40 bp, Homo sapiens
caggctcccgccaccgggctaattgtatttttagatacgg

SEQ ID NO: 7897 - DNA, 40 bp, Homo sapiens
ccgtatctaaaaatacaattagcccggtggcgggagcctg

SEQ ID NO: 7898 - DNA, 40 bp, Homo sapiens
aggctcccgccaccgggctaattgtatttttagatacggg

SEQ ID NO: 7899 - DNA, 40 bp, Homo sapiens
cccgtatctaaaaatacaattagcccggtggcgggagcct

SEQ ID NO: 7900 - DNA, 40 bp, Homo sapiens
ggctcccgccaccgggctaattgtatttttagatacggga

SEQ ID NO: 7901 - DNA, 40 bp, Homo sapiens
tcccgtatctaaaaatacaattagcccggtggcgggagcc

SEQ ID NO: 7902 - DNA, 40 bp, Homo sapiens
gctcccgccaccgggctaattgtatttttagatacgggat

SEQ ID NO: 7903 - DNA, 40 bp, Homo sapiens
atcccgtatctaaaaatacaattagcccggtggcgggagc

SEQ ID NO: 7904 - DNA, 40 bp, Homo sapiens
ctcccgccaccgggctaattgtatttttagatacgggatt

SEQ ID NO: 7905 - DNA, 40 bp, Homo sapiens
aatcccgtatctaaaaatacaattagcccggtggcgggag

SEQ ID NO: 7906 - DNA, 40 bp, Homo sapiens
tcccgccaccgggctaattgtatttttagatacgggattt

SEQ ID NO: 7907 - DNA, 40 bp, Homo sapiens
aaatcccgtatctaaaaatacaattagcccggtggcggga

SEQ ID NO: 7908 - DNA, 40 bp, Homo sapiens
cccgccaccgggctaattgtatttttagatacgggatttc

SEQ ID NO: 7909 - DNA, 40 bp, Homo sapiens
gaaatcccgtatctaaaaatacaattagcccggtggcggg

SEQ ID NO: 7910 - DNA, 40 bp, Homo sapiens
ccgccaccgggctaattgtatttttagatacgggatttca

SEQ ID NO: 7911 - DNA, 40 bp, Homo sapiens
tgaaatcccgtatctaaaaatacaattagcccggtggcgg

SEQ ID NO: 7912 - DNA, 40 bp, Homo sapiens
cgccaccgggctaattgtatttttagatacgggatttcac

SEQ ID NO: 7913 - DNA, 40 bp, Homo sapiens
gtgaaatcccgtatctaaaaatacaattagcccggtggcg

SEQ ID NO: 7914 - DNA, 40 bp, Homo sapiens
gccaccgggctaattgtatttttagatacgggatttcacc

SEQ ID NO: 7915 - DNA, 40 bp, Homo sapiens
ggtgaaatcccgtatctaaaaatacaattagcccggtggc

SEQ ID NO: 7916 - DNA, 40 bp, Homo sapiens
ccaccgggctaattgtatttttagatacgggatttcacca

SEQ ID NO: 7917 - DNA, 40 bp, Homo sapiens
tggtgaaatcccgtatctaaaaatacaattagcccggtgg

SEQ ID NO: 7918 - DNA, 40 bp, Homo sapiens
caccgggctaattgtatttttagatacgggatttcaccat

SEQ ID NO: 7919 - DNA, 40 bp, Homo sapiens
atggtgaaatcccgtatctaaaaatacaattagcccggtg

SEQ ID NO: 7920 - DNA, 40 bp, Homo sapiens
accgggctaattgtatttttagatacgggatttcaccatg

SEQ ID NO: 7921 - DNA, 40 bp, Homo sapiens
catggtgaaatcccgtatctaaaaatacaattagcccggt

SEQ ID NO: 7922 - DNA, 40 bp, Homo sapiens
ccgggctaattgtatttttagatacgggatttcaccatgt

SEQ ID NO: 7923 - DNA, 40 bp, Homo sapiens
acatggtgaaatcccgtatctaaaaatacaattagcccgg

SEQ ID NO: 7924 - DNA, 40 bp, Homo sapiens
cgggctaattgtatttttagatacgggatttcaccatgtt

SEQ ID NO: 7925 - DNA, 40 bp, Homo sapiens
aacatggtgaaatcccgtatctaaaaatacaattagcccg

SEQ ID NO: 7926 - DNA, 40 bp, Homo sapiens
gggctaattgtatttttagatacgggatttcaccatgttg

SEQ ID NO: 7927 - DNA, 40 bp, Homo sapiens
caacatggtgaaatcccgtatctaaaaatacaattagccc

SEQ ID NO: 7928 - DNA, 40 bp, Homo sapiens
ggctaattgtatttttagatacgggatttcaccatgttgg

SEQ ID NO: 7929 - DNA, 40 bp, Homo sapiens
ccaacatggtgaaatcccgtatctaaaaatacaattagcc

SEQ ID NO: 7930 - DNA, 40 bp, Homo sapiens
gctaattgtatttttagatacgggatttcaccatgttggc

SEQ ID NO: 7931 - DNA, 40 bp, Homo sapiens
gccaacatggtgaaatcccgtatctaaaaatacaattagc

SEQ ID NO: 7932 - DNA, 40 bp, Homo sapiens
ctaattgtatttttagatacgggatttcaccatgttggcc

SEQ ID NO: 7933 - DNA, 40 bp, Homo sapiens
ggccaacatggtgaaatcccgtatctaaaaatacaattag

SEQ ID NO: 7934 - DNA, 40 bp, Homo sapiens
taattgtatttttagatacgggatttcaccatgttggcca

SEQ ID NO: 7935 - DNA, 40 bp, Homo sapiens
tggccaacatggtgaaatcccgtatctaaaaatacaatta

SEQ ID NO: 7936 - DNA, 40 bp, Homo sapiens
aattgtatttttagatacgggatttcaccatgttggccag

SEQ ID NO: 7937 - DNA, 40 bp, Homo sapiens
ctggccaacatggtgaaatcccgtatctaaaaatacaatt

SEQ ID NO: 7938 - DNA, 40 bp, Homo sapiens
attgtatttttagatacgggatttcaccatgttggccagg

SEQ ID NO: 7939 - DNA, 40 bp, Homo sapiens
cctggccaacatggtgaaatcccgtatctaaaaatacaat

SEQ ID NO: 7940 - DNA, 40 bp, Homo sapiens
ttgtatttttagatacgggatttcaccatgttggccaggc

SEQ ID NO: 7941 - DNA, 40 bp, Homo sapiens
gcctggccaacatggtgaaatcccgtatctaaaaatacaa

SEQ ID NO: 7942 - DNA, 40 bp, Homo sapiens
tgtatttttagatacgggatttcaccatgttggccaggct

SEQ ID NO: 7943 - DNA, 40 bp, Homo sapiens
agcctggccaacatggtgaaatcccgtatctaaaaataca

SEQ ID NO: 7944 - DNA, 40 bp, Homo sapiens
gtatttttagatacgggatttcaccatgttggccaggctg

SEQ ID NO: 7945 - DNA, 40 bp, Homo sapiens
cagcctggccaacatggtgaaatcccgtatctaaaaatac

SEQ ID NO: 7946 - DNA, 40 bp, Homo sapiens
tatttttagatacgggatttcaccatgttggccaggctgg

SEQ ID NO: 7947 - DNA, 40 bp, Homo sapiens
ccagcctggccaacatggtgaaatcccgtatctaaaaata

SEQ ID NO: 7948 - DNA, 40 bp, Homo sapiens
atttttagatacgggatttcaccatgttggccaggctggt

SEQ ID NO: 7949 - DNA, 40 bp, Homo sapiens
accagcctggccaacatggtgaaatcccgtatctaaaaat

SEQ ID NO: 7950 - DNA, 40 bp, Homo sapiens
tttttagatacgggatttcaccatgttggccaggctggtc

SEQ ID NO: 7951 - DNA, 40 bp, Homo sapiens
gaccagcctggccaacatggtgaaatcccgtatctaaaaa

SEQ ID NO: 7952 - DNA, 40 bp, Homo sapiens
ttttagatacgggatttcaccatgttggccaggctggtct

SEQ ID NO: 7953 - DNA, 40 bp, Homo sapiens
agaccagcctggccaacatggtgaaatcccgtatctaaaa

SEQ ID NO: 7954 - DNA, 40 bp, Homo sapiens
tttagatacgggatttcaccatgttggccaggctggtctc

SEQ ID NO: 7955 - DNA, 40 bp, Homo sapiens
gagaccagcctggccaacatggtgaaatcccgtatctaaa

SEQ ID NO: 7956 - DNA, 40 bp, Homo sapiens
ttagatacgggatttcaccatgttggccaggctggtctcg

SEQ ID NO: 7957 - DNA, 40 bp, Homo sapiens
cgagaccagcctggccaacatggtgaaatcccgtatctaa

SEQ ID NO: 7958 - DNA, 40 bp, Homo sapiens
tagatacgggatttcaccatgttggccaggctggtctcga

SEQ ID NO: 7959 - DNA, 40 bp, Homo sapiens
tcgagaccagcctggccaacatggtgaaatcccgtatcta

SEQ ID NO: 7960 - DNA, 40 bp, Homo sapiens
agatacgggatttcaccatgttggccaggctggtctcgac

SEQ ID NO: 7961 - DNA, 40 bp, Homo sapiens
gtcgagaccagcctggccaacatggtgaaatcccgtatct

SEQ ID NO: 7962 - DNA, 40 bp, Homo sapiens
gatacgggatttcaccatgttggccaggctggtctcgacc

SEQ ID NO: 7963 - DNA, 40 bp, Homo sapiens
ggtcgagaccagcctggccaacatggtgaaatcccgtatc

SEQ ID NO: 7964 - DNA, 40 bp, Homo sapiens
atacgggatttcaccatgttggccaggctggtctcgacct

SEQ ID NO: 7965 - DNA, 40 bp, Homo sapiens
aggtcgagaccagcctggccaacatggtgaaatcccgtat

SEQ ID NO: 7966 - DNA, 40 bp, Homo sapiens
tacgggatttcaccatgttggccaggctggtctcgacctc

SEQ ID NO: 7967 - DNA, 40 bp, Homo sapiens
gaggtcgagaccagcctggccaacatggtgaaatcccgta

SEQ ID NO: 7968 - DNA, 40 bp, Homo sapiens
acgggatttcaccatgttggccaggctggtctcgacctcc

SEQ ID NO: 7969 - DNA, 40 bp, Homo sapiens
ggaggtcgagaccagcctggccaacatggtgaaatcccgt

SEQ ID NO: 7970 - DNA, 40 bp, Homo sapiens
cgggatttcaccatgttggccaggctggtctcgacctcct

SEQ ID NO: 7971 - DNA, 40 bp, Homo sapiens
aggaggtcgagaccagcctggccaacatggtgaaatcccg

SEQ ID NO: 7972 - DNA, 40 bp, Homo sapiens
gggatttcaccatgttggccaggctggtctcgacctcctg

SEQ ID NO: 7973 - DNA, 40 bp, Homo sapiens
caggaggtcgagaccagcctggccaacatggtgaaatccc

SEQ ID NO: 7974 - DNA, 40 bp, Homo sapiens
ggatttcaccatgttggccaggctggtctcgacctcctga

SEQ ID NO: 7975 - DNA, 40 bp, Homo sapiens
tcaggaggtcgagaccagcctggccaacatggtgaaatcc

SEQ ID NO: 7976 - DNA, 40 bp, Homo sapiens
gatttcaccatgttggccaggctggtctcgacctcctgac

SEQ ID NO: 7977 - DNA, 40 bp, Homo sapiens
gtcaggaggtcgagaccagcctggccaacatggtgaaatc

SEQ ID NO: 7978 - DNA, 40 bp, Homo sapiens
atttcaccatgttggccaggctggtctcgacctcctgacc

SEQ ID NO: 7979 - DNA, 40 bp, Homo sapiens
ggtcaggaggtcgagaccagcctggccaacatggtgaaat

SEQ ID NO: 7980 - DNA, 40 bp, Homo sapiens
tttcaccatgttggccaggctggtctcgacctcctgacct

SEQ ID NO: 7981 - DNA, 40 bp, Homo sapiens
aggtcaggaggtcgagaccagcctggccaacatggtgaaa

SEQ ID NO: 7982 - DNA, 40 bp, Homo sapiens
ttcaccatgttggccaggctggtctcgacctcctgacctc

SEQ ID NO: 7983 - DNA, 40 bp, Homo sapiens
gaggtcaggaggtcgagaccagcctggccaacatggtgaa

SEQ ID NO: 7984 - DNA, 40 bp, Homo sapiens
tcaccatgttggccaggctggtctcgacctcctgacctca

SEQ ID NO: 7985 - DNA, 40 bp, Homo sapiens
tgaggtcaggaggtcgagaccagcctggccaacatggtga

SEQ ID NO: 7986 - DNA, 40 bp, Homo sapiens
caccatgttggccaggctggtctcgacctcctgacctcag

SEQ ID NO: 7987 - DNA, 40 bp, Homo sapiens
ctgaggtcaggaggtcgagaccagcctggccaacatggtg

SEQ ID NO: 7988 - DNA, 40 bp, Homo sapiens
accatgttggccaggctggtctcgacctcctgacctcagg

SEQ ID NO: 7989 - DNA, 40 bp, Homo sapiens
cctgaggtcaggaggtcgagaccagcctggccaacatggt

SEQ ID NO: 7990 - DNA, 40 bp, Homo sapiens
ccatgttggccaggctggtctcgacctcctgacctcaggt

SEQ ID NO: 7991 - DNA, 40 bp, Homo sapiens
acctgaggtcaggaggtcgagaccagcctggccaacatgg

SEQ ID NO: 7992 - DNA, 40 bp, Homo sapiens
catgttggccaggctggtctcgacctcctgacctcaggtg

SEQ ID NO: 7993 - DNA, 40 bp, Homo sapiens
cacctgaggtcaggaggtcgagaccagcctggccaacatg

SEQ ID NO: 7994 - DNA, 40 bp, Homo sapiens
atgttggccaggctggtctcgacctcctgacctcaggtga

SEQ ID NO: 7995 - DNA, 40 bp, Homo sapiens
tcacctgaggtcaggaggtcgagaccagcctggccaacat

SEQ ID NO: 7996 - DNA, 40 bp, Homo sapiens
tgttggccaggctggtctcgacctcctgacctcaggtgat

SEQ ID NO: 7997 - DNA, 40 bp, Homo sapiens
atcacctgaggtcaggaggtcgagaccagcctggccaaca

SEQ ID NO: 7998 - DNA, 40 bp, Homo sapiens
gttggccaggctggtctcgacctcctgacctcaggtgatc

SEQ ID NO: 7999 - DNA, 40 bp, Homo sapiens
gatcacctgaggtcaggaggtcgagaccagcctggccaac

SEQ ID NO: 8000 - DNA, 40 bp, Homo sapiens
ttggccaggctggtctcgacctcctgacctcaggtgatcc

SEQ ID NO: 8001 - DNA, 40 bp, Homo sapiens
ggatcacctgaggtcaggaggtcgagaccagcctggccaa

SEQ ID NO: 8002 - DNA, 40 bp, Homo sapiens
tggccaggctggtctcgacctcctgacctcaggtgatccg

SEQ ID NO: 8003 - DNA, 40 bp, Homo sapiens
cggatcacctgaggtcaggaggtcgagaccagcctggcca

SEQ ID NO: 8004 - DNA, 40 bp, Homo sapiens
ggccaggctggtctcgacctcctgacctcaggtgatccgc

SEQ ID NO: 8005 - DNA, 40 bp, Homo sapiens
gcggatcacctgaggtcaggaggtcgagaccagcctggcc

SEQ ID NO: 8006 - DNA, 40 bp, Homo sapiens
gccaggctggtctcgacctcctgacctcaggtgatccgcc

SEQ ID NO: 8007 - DNA, 40 bp, Homo sapiens
ggcggatcacctgaggtcaggaggtcgagaccagcctggc

SEQ ID NO: 8008 - DNA, 40 bp, Homo sapiens
ccaggctggtctcgacctcctgacctcaggtgatccgccc

SEQ ID NO: 8009 - DNA, 40 bp, Homo sapiens
gggcggatcacctgaggtcaggaggtcgagaccagcctgg

SEQ ID NO: 8010 - DNA, 40 bp, Homo sapiens
caggctggtctcgacctcctgacctcaggtgatccgcccg

SEQ ID NO: 8011 - DNA, 40 bp, Homo sapiens
cgggcggatcacctgaggtcaggaggtcgagaccagcctg

SEQ ID NO: 8012 - DNA, 40 bp, Homo sapiens
aggctggtctcgacctcctgacctcaggtgatccgcccgc

SEQ ID NO: 8013 - DNA, 40 bp, Homo sapiens
gcgggcggatcacctgaggtcaggaggtcgagaccagcct

SEQ ID NO: 8014 - DNA, 40 bp, Homo sapiens
ggctggtctcgacctcctgacctcaggtgatccgcccgcc

SEQ ID NO: 8015 - DNA, 40 bp, Homo sapiens
ggcgggcggatcacctgaggtcaggaggtcgagaccagcc

SEQ ID NO: 8016 - DNA, 40 bp, Homo sapiens
gctggtctcgacctcctgacctcaggtgatccgcccgcct

SEQ ID NO: 8017 - DNA, 40 bp, Homo sapiens
aggcgggcggatcacctgaggtcaggaggtcgagaccagc

SEQ ID NO: 8018 - DNA, 40 bp, Homo sapiens
ctggtctcgacctcctgacctcaggtgatccgcccgccta

SEQ ID NO: 8019 - DNA, 40 bp, Homo sapiens
taggcgggcggatcacctgaggtcaggaggtcgagaccag

SEQ ID NO: 8020 - DNA, 40 bp, Homo sapiens
tggtctcgacctcctgacctcaggtgatccgcccgcctaa

SEQ ID NO: 8021 - DNA, 40 bp, Homo sapiens
ttaggcgggcggatcacctgaggtcaggaggtcgagacca

SEQ ID NO: 8022 - DNA, 40 bp, Homo sapiens
ggtctcgacctcctgacctcaggtgatccgcccgcctaag

SEQ ID NO: 8023 - DNA, 40 bp, Homo sapiens
cttaggcgggcggatcacctgaggtcaggaggtcgagacc

SEQ ID NO: 8024 - DNA, 40 bp, Homo sapiens
gtctcgacctcctgacctcaggtgatccgcccgcctaagc

SEQ ID NO: 8025 - DNA, 40 bp, Homo sapiens
gcttaggcgggcggatcacctgaggtcaggaggtcgagac

SEQ ID NO: 8026 - DNA, 40 bp, Homo sapiens
tctcgacctcctgacctcaggtgatccgcccgcctaagcc

SEQ ID NO: 8027 - DNA, 40 bp, Homo sapiens
ggcttaggcgggcggatcacctgaggtcaggaggtcgaga

SEQ ID NO: 8028 - DNA, 40 bp, Homo sapiens
ctcgacctcctgacctcaggtgatccgcccgcctaagcct

SEQ ID NO: 8029 - DNA, 40 bp, Homo sapiens
aggcttaggcgggcggatcacctgaggtcaggaggtcgag

SEQ ID NO: 8030 - DNA, 40 bp, Homo sapiens
tcgacctcctgacctcaggtgatccgcccgcctaagcctc

SEQ ID NO: 8031 - DNA, 40 bp, Homo sapiens
gaggcttaggcgggcggatcacctgaggtcaggaggtcga

SEQ ID NO: 8032 - DNA, 40 bp, Homo sapiens
cgacctcctgacctcaggtgatccgcccgcctaagcctcc

SEQ ID NO: 8033 - DNA, 40 bp, Homo sapiens
ggaggcttaggcgggcggatcacctgaggtcaggaggtcg

SEQ ID NO: 8034 - DNA, 40 bp, Homo sapiens
gacctcctgacctcaggtgatccgcccgcctaagcctccc

SEQ ID NO: 8035 - DNA, 40 bp, Homo sapiens
gggaggcttaggcgggcggatcacctgaggtcaggaggtc

SEQ ID NO: 8036 - DNA, 40 bp, Homo sapiens
acctcctgacctcaggtgatccgcccgcctaagcctccca

SEQ ID NO: 8037 - DNA, 40 bp, Homo sapiens
tgggaggcttaggcgggcggatcacctgaggtcaggaggt

SEQ ID NO: 8038 - DNA, 40 bp, Homo sapiens
cctcctgacctcaggtgatccgcccgcctaagcctcccaa

SEQ ID NO: 8039 - DNA, 40 bp, Homo sapiens
ttgggaggcttaggcgggcggatcacctgaggtcaggagg

SEQ ID NO: 8040 - DNA, 40 bp, Homo sapiens
ctcctgacctcaggtgatccgcccgcctaagcctcccaaa

SEQ ID NO: 8041 - DNA, 40 bp, Homo sapiens
tttgggaggcttaggcgggcggatcacctgaggtcaggag

SEQ ID NO: 8042 - DNA, 40 bp, Homo sapiens
tcctgacctcaggtgatccgcccgcctaagcctcccaaag

SEQ ID NO: 8043 - DNA, 40 bp, Homo sapiens
ctttgggaggcttaggcgggcggatcacctgaggtcagga

SEQ ID NO: 8044 - DNA, 40 bp, Homo sapiens
cctgacctcaggtgatccgcccgcctaagcctcccaaagt

SEQ ID NO: 8045 - DNA, 40 bp, Homo sapiens
actttgggaggcttaggcgggcggatcacctgaggtcagg

SEQ ID NO: 8046 - DNA, 40 bp, Homo sapiens
ctgacctcaggtgatccgcccgcctaagcctcccaaagtg

SEQ ID NO: 8047 - DNA, 40 bp, Homo sapiens
cactttgggaggcttaggcgggcggatcacctgaggtcag

SEQ ID NO: 8048 - DNA, 40 bp, Homo sapiens
tgacctcaggtgatccgcccgcctaagcctcccaaagtgc

SEQ ID NO: 8049 - DNA, 40 bp, Homo sapiens
gcactttgggaggcttaggcgggcggatcacctgaggtca

SEQ ID NO: 8050 - DNA, 40 bp, Homo sapiens
gacctcaggtgatccgcccgcctaagcctcccaaagtgct

SEQ ID NO: 8051 - DNA, 40 bp, Homo sapiens
agcactttgggaggcttaggcgggcggatcacctgaggtc

SEQ ID NO: 8052 - DNA, 40 bp, Homo sapiens
acctcaggtgatccgcccgcctaagcctcccaaagtgctg

SEQ ID NO: 8053 - DNA, 40 bp, Homo sapiens
cagcactttgggaggcttaggcgggcggatcacctgaggt

SEQ ID NO: 8054 - DNA, 40 bp, Homo sapiens
cctcaggtgatccgcccgcctaagcctcccaaagtgctgg

SEQ ID NO: 8055 - DNA, 40 bp, Homo sapiens
ccagcactttgggaggcttaggcgggcggatcacctgagg

SEQ ID NO: 8056 - DNA, 40 bp, Homo sapiens
ctcaggtgatccgcccgcctaagcctcccaaagtgctggg

SEQ ID NO: 8057 - DNA, 40 bp, Homo sapiens
cccagcactttgggaggcttaggcgggcggatcacctgag

SEQ ID NO: 8058 - DNA, 40 bp, Homo sapiens
tcaggtgatccgcccgcctaagcctcccaaagtgctggga

SEQ ID NO: 8059 - DNA, 40 bp, Homo sapiens
tcccagcactttgggaggcttaggcgggcggatcacctga

SEQ ID NO: 8060 - DNA, 40 bp, Homo sapiens
caggtgatccgcccgcctaagcctcccaaagtgctgggat

SEQ ID NO: 8061 - DNA, 40 bp, Homo sapiens
atcccagcactttgggaggcttaggcgggcggatcacctg

SEQ ID NO: 8062 - DNA, 40 bp, Homo sapiens
aggtgatccgcccgcctaagcctcccaaagtgctgggatt

SEQ ID NO: 8063 - DNA, 40 bp, Homo sapiens
aatcccagcactttgggaggcttaggcgggcggatcacct

SEQ ID NO: 8064 - DNA, 40 bp, Homo sapiens
ggtgatccgcccgcctaagcctcccaaagtgctgggatta

SEQ ID NO: 8065 - DNA, 40 bp, Homo sapiens
taatcccagcactttgggaggcttaggcgggcggatcacc

SEQ ID NO: 8066 - DNA, 40 bp, Homo sapiens
gtgatccgcccgcctaagcctcccaaagtgctgggattac

SEQ ID NO: 8067 - DNA, 40 bp, Homo sapiens
gtaatcccagcactttgggaggcttaggcgggcggatcac

SEQ ID NO: 8068 - DNA, 40 bp, Homo sapiens
tgatccgcccgcctaagcctcccaaagtgctgggattaca

SEQ ID NO: 8069 - DNA, 40 bp, Homo sapiens
tgtaatcccagcactttgggaggcttaggcgggcggatca

SEQ ID NO: 8070 - DNA, 40 bp, Homo sapiens
gatccgcccgcctaagcctcccaaagtgctgggattacag

SEQ ID NO: 8071 - DNA, 40 bp, Homo sapiens
ctgtaatcccagcactttgggaggcttaggcgggcggatc

SEQ ID NO: 8072 - DNA, 40 bp, Homo sapiens
atccgcccgcctaagcctcccaaagtgctgggattacagg

SEQ ID NO: 8073 - DNA, 40 bp, Homo sapiens
cctgtaatcccagcactttgggaggcttaggcgggcggat

SEQ ID NO: 8074 - DNA, 40 bp, Homo sapiens
tccgcccgcctaagcctcccaaagtgctgggattacaggc

SEQ ID NO: 8075 - DNA, 40 bp, Homo sapiens
gcctgtaatcccagcactttgggaggcttaggcgggcgga

SEQ ID NO: 8076 - DNA, 40 bp, Homo sapiens
ccgcccgcctaagcctcccaaagtgctgggattacaggcc

SEQ ID NO: 8077 - DNA, 40 bp, Homo sapiens
ggcctgtaatcccagcactttgggaggcttaggcgggcgg

SEQ ID NO: 8078 - DNA, 40 bp, Homo sapiens
cgcccgcctaagcctcccaaagtgctgggattacaggcca

SEQ ID NO: 8079 - DNA, 40 bp, Homo sapiens
tggcctgtaatcccagcactttgggaggcttaggcgggcg

SEQ ID NO: 8080 - DNA, 40 bp, Homo sapiens
gcccgcctaagcctcccaaagtgctgggattacaggccac

SEQ ID NO: 8081 - DNA, 40 bp, Homo sapiens
gtggcctgtaatcccagcactttgggaggcttaggcgggc

SEQ ID NO: 8082 - DNA, 40 bp, Homo sapiens
cccgcctaagcctcccaaagtgctgggattacaggccacc

SEQ ID NO: 8083 - DNA, 40 bp, Homo sapiens
ggtggcctgtaatcccagcactttgggaggcttaggcggg

SEQ ID NO: 8084 - DNA, 40 bp, Homo sapiens
ccgcctaagcctcccaaagtgctgggattacaggccacca

SEQ ID NO: 8085 - DNA, 40 bp, Homo sapiens
tggtggcctgtaatcccagcactttgggaggcttaggcgg

SEQ ID NO: 8086 - DNA, 40 bp, Homo sapiens
cgcctaagcctcccaaagtgctgggattacaggccaccac

SEQ ID NO: 8087 - DNA, 40 bp, Homo sapiens
gtggtggcctgtaatcccagcactttgggaggcttaggcg

SEQ ID NO: 8088 - DNA, 40 bp, Homo sapiens
gcctaagcctcccaaagtgctgggattacaggccaccaca

SEQ ID NO: 8089 - DNA, 40 bp, Homo sapiens
tgtggtggcctgtaatcccagcactttgggaggcttaggc

SEQ ID NO: 8090 - DNA, 40 bp, Homo sapiens
cctaagcctcccaaagtgctgggattacaggccaccacac

SEQ ID NO: 8091 - DNA, 40 bp, Homo sapiens
gtgtggtggcctgtaatcccagcactttgggaggcttagg

SEQ ID NO: 8092 - DNA, 40 bp, Homo sapiens
ctaagcctcccaaagtgctgggattacaggccaccacacc

SEQ ID NO: 8093 - DNA, 40 bp, Homo sapiens
ggtgtggtggcctgtaatcccagcactttgggaggcttag

SEQ ID NO: 8094 - DNA, 40 bp, Homo sapiens
taagcctcccaaagtgctgggattacaggccaccacaccc

SEQ ID NO: 8095 - DNA, 40 bp, Homo sapiens
gggtgtggtggcctgtaatcccagcactttgggaggctta

SEQ ID NO: 8096 - DNA, 40 bp, Homo sapiens
aagcctcccaaagtgctgggattacaggccaccacacccg

SEQ ID NO: 8097 - DNA, 40 bp, Homo sapiens
cgggtgtggtggcctgtaatcccagcactttgggaggctt

SEQ ID NO: 8098 - DNA, 40 bp, Homo sapiens
agcctcccaaagtgctgggattacaggccaccacacccgg

SEQ ID NO: 8099 - DNA, 40 bp, Homo sapiens
ccgggtgtggtggcctgtaatcccagcactttgggaggct

SEQ ID NO: 8100 - DNA, 40 bp, Homo sapiens
gcctcccaaagtgctgggattacaggccaccacacccggc

SEQ ID NO: 8101 - DNA, 40 bp, Homo sapiens
gccgggtgtggtggcctgtaatcccagcactttgggaggc

SEQ ID NO: 8102 - DNA, 40 bp, Homo sapiens
cctcccaaagtgctgggattacaggccaccacacccggcc

SEQ ID NO: 8103 - DNA, 40 bp, Homo sapiens
ggccgggtgtggtggcctgtaatcccagcactttgggagg

SEQ ID NO: 8104 - DNA, 40 bp, Homo sapiens
ctcccaaagtgctgggattacaggccaccacacccggcct

SEQ ID NO: 8105 - DNA, 40 bp, Homo sapiens
aggccgggtgtggtggcctgtaatcccagcactttgggag

SEQ ID NO: 8106 - DNA, 40 bp, Homo sapiens
tcccaaagtgctgggattacaggccaccacacccggccta

SEQ ID NO: 8107 - DNA, 40 bp, Homo sapiens
taggccgggtgtggtggcctgtaatcccagcactttggga

SEQ ID NO: 8108 - DNA, 40 bp, Homo sapiens
cccaaagtgctgggattacaggccaccacacccggcctac

SEQ ID NO: 8109 - DNA, 40 bp, Homo sapiens
gtaggccgggtgtggtggcctgtaatcccagcactttggg

SEQ ID NO: 8110 - DNA, 40 bp, Homo sapiens
ccaaagtgctgggattacaggccaccacacccggcctaca

SEQ ID NO: 8111 - DNA, 40 bp, Homo sapiens
tgtaggccgggtgtggtggcctgtaatcccagcactttgg

SEQ ID NO: 8112 - DNA, 40 bp, Homo sapiens
caaagtgctgggattacaggccaccacacccggcctacac

SEQ ID NO: 8113 - DNA, 40 bp, Homo sapiens
gtgtaggccgggtgtggtggcctgtaatcccagcactttg

SEQ ID NO: 8114 - DNA, 40 bp, Homo sapiens
aaagtgctgggattacaggccaccacacccggcctacact

SEQ ID NO: 8115 - DNA, 40 bp, Homo sapiens
agtgtaggccgggtgtggtggcctgtaatcccagcacttt

SEQ ID NO: 8116 - DNA, 40 bp, Homo sapiens
aagtgctgggattacaggccaccacacccggcctacactc

SEQ ID NO: 8117 - DNA, 40 bp, Homo sapiens
gagtgtaggccgggtgtggtggcctgtaatcccagcactt

SEQ ID NO: 8118 - DNA, 40 bp, Homo sapiens
agtgctgggattacaggccaccacacccggcctacactct

SEQ ID NO: 8119 - DNA, 40 bp, Homo sapiens
agagtgtaggccgggtgtggtggcctgtaatcccagcact

SEQ ID NO: 8120 - DNA, 40 bp, Homo sapiens
gtgctgggattacaggccaccacacccggcctacactctt

SEQ ID NO: 8121 - DNA, 40 bp, Homo sapiens
aagagtgtaggccgggtgtggtggcctgtaatcccagcac

SEQ ID NO: 8122 - DNA, 40 bp, Homo sapiens
tgctgggattacaggccaccacacccggcctacactctta

SEQ ID NO: 8123 - DNA, 40 bp, Homo sapiens
taagagtgtaggccgggtgtggtggcctgtaatcccagca

SEQ ID NO: 8124 - DNA, 40 bp, Homo sapiens
gctgggattacaggccaccacacccggcctacactcttaa

SEQ ID NO: 8125 - DNA, 40 bp, Homo sapiens
ttaagagtgtaggccgggtgtggtggcctgtaatcccagc

SEQ ID NO: 8126 - DNA, 40 bp, Homo sapiens
ctgggattacaggccaccacacccggcctacactcttaaa

SEQ ID NO: 8127 - DNA, 40 bp, Homo sapiens
tttaagagtgtaggccgggtgtggtggcctgtaatcccag

SEQ ID NO: 8128 - DNA, 40 bp, Homo sapiens
tgggattacaggccaccacacccggcctacactcttaaaa

SEQ ID NO: 8129 - DNA, 40 bp, Homo sapiens
ttttaagagtgtaggccgggtgtggtggcctgtaatccca

SEQ ID NO: 8130 - DNA, 40 bp, Homo sapiens
gggattacaggccaccacacccggcctacactcttaaaaa

SEQ ID NO: 8131 - DNA, 40 bp, Homo sapiens
tttttaagagtgtaggccgggtgtggtggcctgtaatccc

SEQ ID NO: 8132 - DNA, 40 bp, Homo sapiens
ggattacaggccaccacacccggcctacactcttaaaaat

SEQ ID NO: 8133 - DNA, 40 bp, Homo sapiens
atttttaagagtgtaggccgggtgtggtggcctgtaatcc

SEQ ID NO: 8134 - DNA, 40 bp, Homo sapiens
gattacaggccaccacacccggcctacactcttaaaaatt

SEQ ID NO: 8135 - DNA, 40 bp, Homo sapiens
aatttttaagagtgtaggccgggtgtggtggcctgtaatc

SEQ ID NO: 8136 - DNA, 40 bp, Homo sapiens
attacaggccaccacacccggcctacactcttaaaaatta

SEQ ID NO: 8137 - DNA, 40 bp, Homo sapiens
taatttttaagagtgtaggccgggtgtggtggcctgtaat

SEQ ID NO: 8138 - DNA, 40 bp, Homo sapiens
ttacaggccaccacacccggcctacactcttaaaaattat

SEQ ID NO: 8139 - DNA, 40 bp, Homo sapiens
ataatttttaagagtgtaggccgggtgtggtggcctgtaa

SEQ ID NO: 8140 - DNA, 40 bp, Homo sapiens
tacaggccaccacacccggcctacactcttaaaaattatc

SEQ ID NO: 8141 - DNA, 40 bp, Homo sapiens
gataatttttaagagtgtaggccgggtgtggtggcctgta

SEQ ID NO: 8142 - DNA, 40 bp, Homo sapiens
acaggccaccacacccggcctacactcttaaaaattatcg

SEQ ID NO: 8143 - DNA, 40 bp, Homo sapiens
cgataatttttaagagtgtaggccgggtgtggtggcctgt

SEQ ID NO: 8144 - DNA, 40 bp, Homo sapiens
caggccaccacacccggcctacactcttaaaaattatcga

SEQ ID NO: 8145 - DNA, 40 bp, Homo sapiens
tcgataatttttaagagtgtaggccgggtgtggtggcctg

SEQ ID NO: 8146 - DNA, 40 bp, Homo sapiens
aggccaccacacccggcctacactcttaaaaattatcgaa

SEQ ID NO: 8147 - DNA, 40 bp, Homo sapiens
ttcgataatttttaagagtgtaggccgggtgtggtggcct

SEQ ID NO: 8148 - DNA, 40 bp, Homo sapiens
ggccaccacacccggcctacactcttaaaaattatcgaag

SEQ ID NO: 8149 - DNA, 40 bp, Homo sapiens
cttcgataatttttaagagtgtaggccgggtgtggtggcc

SEQ ID NO: 8150 - DNA, 40 bp, Homo sapiens
gccaccacacccggcctacactcttaaaaattatcgaagg

SEQ ID NO: 8151 - DNA, 40 bp, Homo sapiens
ccttcgataatttttaagagtgtaggccgggtgtggtggc

SEQ ID NO: 8152 - DNA, 40 bp, Homo sapiens
ccaccacacccggcctacactcttaaaaattatcgaaggg

SEQ ID NO: 8153 - DNA, 40 bp, Homo sapiens
cccttcgataatttttaagagtgtaggccgggtgtggtgg

SEQ ID NO: 8154 - DNA, 40 bp, Homo sapiens
caccacacccggcctacactcttaaaaattatcgaagggg

SEQ ID NO: 8155 - DNA, 40 bp, Homo sapiens
ccccttcgataatttttaagagtgtaggccgggtgtggtg

SEQ ID NO: 8156 - DNA, 40 bp, Homo sapiens
accacacccggcctacactcttaaaaattatcgaaggggc

SEQ ID NO: 8157 - DNA, 40 bp, Homo sapiens
gccccttcgataatttttaagagtgtaggccgggtgtggt

SEQ ID NO: 8158 - DNA, 40 bp, Homo sapiens
ccacacccggcctacactcttaaaaattatcgaaggggcc

SEQ ID NO: 8159 - DNA, 40 bp, Homo sapiens
ggccccttcgataatttttaagagtgtaggccgggtgtgg

SEQ ID NO: 8160 - DNA, 40 bp, Homo sapiens
cacacccggcctacactcttaaaaattatcgaaggggccg

SEQ ID NO: 8161 - DNA, 40 bp, Homo sapiens
cggccccttcgataatttttaagagtgtaggccgggtgtg

SEQ ID NO: 8162 - DNA, 40 bp, Homo sapiens
acacccggcctacactcttaaaaattatcgaaggggccgg

SEQ ID NO: 8163 - DNA, 40 bp, Homo sapiens
ccggccccttcgataatttttaagagtgtaggccgggtgt

SEQ ID NO: 8164 - DNA, 40 bp, Homo sapiens
cacccggcctacactcttaaaaattatcgaaggggccggg

SEQ ID NO: 8165 - DNA, 40 bp, Homo sapiens
cccggccccttcgataatttttaagagtgtaggccgggtg

SEQ ID NO: 8166 - DNA, 40 bp, Homo sapiens
acccggcctacactcttaaaaattatcgaaggggccgggc

SEQ ID NO: 8167 - DNA, 40 bp, Homo sapiens
gcccggccccttcgataatttttaagagtgtaggccgggt

SEQ ID NO: 8168 - DNA, 40 bp, Homo sapiens
cccggcctacactcttaaaaattatcgaaggggccgggca

SEQ ID NO: 8169 - DNA, 40 bp, Homo sapiens
tgcccggccccttcgataatttttaagagtgtaggccggg

SEQ ID NO: 8170 - DNA, 40 bp, Homo sapiens
ccggcctacactcttaaaaattatcgaaggggccgggcac

SEQ ID NO: 8171 - DNA, 40 bp, Homo sapiens
gtgcccggccccttcgataatttttaagagtgtaggccgg

SEQ ID NO: 8172 - DNA, 40 bp, Homo sapiens
cggcctacactcttaaaaattatcgaaggggccgggcaca

SEQ ID NO: 8173 - DNA, 40 bp, Homo sapiens
tgtgcccggccccttcgataatttttaagagtgtaggccg

SEQ ID NO: 8174 - DNA, 40 bp, Homo sapiens
ggcctacactcttaaaaattatcgaaggggccgggcacat

SEQ ID NO: 8175 - DNA, 40 bp, Homo sapiens
atgtgcccggccccttcgataatttttaagagtgtaggcc

SEQ ID NO: 8176 - DNA, 40 bp, Homo sapiens
gcctacactcttaaaaattatcgaaggggccgggcacatt

SEQ ID NO: 8177 - DNA, 40 bp, Homo sapiens
aatgtgcccggccccttcgataatttttaagagtgtaggc

SEQ ID NO: 8178 - DNA, 40 bp, Homo sapiens
cctacactcttaaaaattatcgaaggggccgggcacattg

SEQ ID NO: 8179 - DNA, 40 bp, Homo sapiens
caatgtgcccggccccttcgataatttttaagagtgtagg

SEQ ID NO: 8180 - DNA, 40 bp, Homo sapiens
ctacactcttaaaaattatcgaaggggccgggcacattgg

SEQ ID NO: 8181 - DNA, 40 bp, Homo sapiens
ccaatgtgcccggccccttcgataatttttaagagtgtag

SEQ ID NO: 8182 - DNA, 40 bp, Homo sapiens
tacactcttaaaaattatcgaaggggccgggcacattggc

SEQ ID NO: 8183 - DNA, 40 bp, Homo sapiens
gccaatgtgcccggccccttcgataatttttaagagtgta

SEQ ID NO: 8184 - DNA, 40 bp, Homo sapiens
acactcttaaaaattatcgaaggggccgggcacattggct

SEQ ID NO: 8185 - DNA, 40 bp, Homo sapiens
agccaatgtgcccggccccttcgataatttttaagagtgt

SEQ ID NO: 8186 - DNA, 40 bp, Homo sapiens
cactcttaaaaattatcgaaggggccgggcacattggctc

SEQ ID NO: 8187 - DNA, 40 bp, Homo sapiens
gagccaatgtgcccggccccttcgataatttttaagagtg

SEQ ID NO: 8188 - DNA, 40 bp, Homo sapiens
actcttaaaaattatcgaaggggccgggcacattggctct

SEQ ID NO: 8189 - DNA, 40 bp, Homo sapiens
agagccaatgtgcccggccccttcgataatttttaagagt

SEQ ID NO: 8190 - DNA, 40 bp, Homo sapiens
ctcttaaaaattatcgaaggggccgggcacattggctctt

SEQ ID NO: 8191 - DNA, 40 bp, Homo sapiens
aagagccaatgtgcccggccccttcgataatttttaagag

SEQ ID NO: 8192 - DNA, 40 bp, Homo sapiens
tcttaaaaattatcgaaggggccgggcacattggctctta

SEQ ID NO: 8193 - DNA, 40 bp, Homo sapiens
taagagccaatgtgcccggccccttcgataatttttaaga

SEQ ID NO: 8194 - DNA, 40 bp, Homo sapiens
cttaaaaattatcgaaggggccgggcacattggctcttat

SEQ ID NO: 8195 - DNA, 40 bp, Homo sapiens
ataagagccaatgtgcccggccccttcgataatttttaag

SEQ ID NO: 8196 - DNA, 40 bp, Homo sapiens
ttaaaaattatcgaaggggccgggcacattggctcttatc

SEQ ID NO: 8197 - DNA, 40 bp, Homo sapiens
gataagagccaatgtgcccggccccttcgataatttttaa

SEQ ID NO: 8198 - DNA, 40 bp, Homo sapiens
taaaaattatcgaaggggccgggcacattggctcttatct

SEQ ID NO: 8199 - DNA, 40 bp, Homo sapiens
agataagagccaatgtgcccggccccttcgataattttta

SEQ ID NO: 8200 - DNA, 40 bp, Homo sapiens
aaaaattatcgaaggggccgggcacattggctcttatctg

SEQ ID NO: 8201 - DNA, 40 bp, Homo sapiens
cagataagagccaatgtgcccggccccttcgataattttt

SEQ ID NO: 8202 - DNA, 40 bp, Homo sapiens
aaaattatcgaaggggccgggcacattggctcttatctgt

SEQ ID NO: 8203 - DNA, 40 bp, Homo sapiens
acagataagagccaatgtgcccggccccttcgataatttt

SEQ ID NO: 8204 - DNA, 40 bp, Homo sapiens
aaattatcgaaggggccgggcacattggctcttatctgta

SEQ ID NO: 8205 - DNA, 40 bp, Homo sapiens
tacagataagagccaatgtgcccggccccttcgataattt

SEQ ID NO: 8206 - DNA, 40 bp, Homo sapiens
aattatcgaaggggccgggcacattggctcttatctgtaa

SEQ ID NO: 8207 - DNA, 40 bp, Homo sapiens
ttacagataagagccaatgtgcccggccccttcgataatt

SEQ ID NO: 8208 - DNA, 40 bp, Homo sapiens
attatcgaaggggccgggcacattggctcttatctgtaat

SEQ ID NO: 8209 - DNA, 40 bp, Homo sapiens
attacagataagagccaatgtgcccggccccttcgataat

SEQ ID NO: 8210 - DNA, 40 bp, Homo sapiens
ttatcgaaggggccgggcacattggctcttatctgtaatc

SEQ ID NO: 8211 - DNA, 40 bp, Homo sapiens
gattacagataagagccaatgtgcccggccccttcgataa

SEQ ID NO: 8212 - DNA, 40 bp, Homo sapiens
tatcgaaggggccgggcacattggctcttatctgtaatcc

SEQ ID NO: 8213 - DNA, 40 bp, Homo sapiens
ggattacagataagagccaatgtgcccggccccttcgata

SEQ ID NO: 8214 - DNA, 40 bp, Homo sapiens
atcgaaggggccgggcacattggctcttatctgtaatccc

SEQ ID NO: 8215 - DNA, 40 bp, Homo sapiens
gggattacagataagagccaatgtgcccggccccttcgat

SEQ ID NO: 8216 - DNA, 40 bp, Homo sapiens
tcgaaggggccgggcacattggctcttatctgtaatccca

SEQ ID NO: 8217 - DNA, 40 bp, Homo sapiens
tgggattacagataagagccaatgtgcccggccccttcga

SEQ ID NO: 8218 - DNA, 40 bp, Homo sapiens
cgaaggggccgggcacattggctcttatctgtaatcccag

SEQ ID NO: 8219 - DNA, 40 bp, Homo sapiens
ctgggattacagataagagccaatgtgcccggccccttcg

SEQ ID NO: 8220 - DNA, 40 bp, Homo sapiens
gaaggggccgggcacattggctcttatctgtaatcccagc

SEQ ID NO: 8221 - DNA, 40 bp, Homo sapiens
gctgggattacagataagagccaatgtgcccggccccttc

SEQ ID NO: 8222 - DNA, 40 bp, Homo sapiens
aaggggccgggcacattggctcttatctgtaatcccagca

SEQ ID NO: 8223 - DNA, 40 bp, Homo sapiens
tgctgggattacagataagagccaatgtgcccggcccctt

SEQ ID NO: 8224 - DNA, 40 bp, Homo sapiens
aggggccgggcacattggctcttatctgtaatcccagcac

SEQ ID NO: 8225 - DNA, 40 bp, Homo sapiens
gtgctgggattacagataagagccaatgtgcccggcccct

SEQ ID NO: 8226 - DNA, 40 bp, Homo sapiens
ggggccgggcacattggctcttatctgtaatcccagcact

SEQ ID NO: 8227 - DNA, 40 bp, Homo sapiens
agtgctgggattacagataagagccaatgtgcccggcccc

SEQ ID NO: 8228 - DNA, 40 bp, Homo sapiens
gggccgggcacattggctcttatctgtaatcccagcactt

SEQ ID NO: 8229 - DNA, 40 bp, Homo sapiens
aagtgctgggattacagataagagccaatgtgcccggccc

SEQ ID NO: 8230 - DNA, 40 bp, Homo sapiens
ggccgggcacattggctcttatctgtaatcccagcacttt

SEQ ID NO: 8231 - DNA, 40 bp, Homo sapiens
aaagtgctgggattacagataagagccaatgtgcccggcc

SEQ ID NO: 8232 - DNA, 40 bp, Homo sapiens
gccgggcacattggctcttatctgtaatcccagcactttg

SEQ ID NO: 8233 - DNA, 40 bp, Homo sapiens
caaagtgctgggattacagataagagccaatgtgcccggc

SEQ ID NO: 8234 - DNA, 40 bp, Homo sapiens
ccgggcacattggctcttatctgtaatcccagcactttgg

SEQ ID NO: 8235 - DNA, 40 bp, Homo sapiens
ccaaagtgctgggattacagataagagccaatgtgcccgg

SEQ ID NO: 8236 - DNA, 40 bp, Homo sapiens
cgggcacattggctcttatctgtaatcccagcactttggg

SEQ ID NO: 8237 - DNA, 40 bp, Homo sapiens
cccaaagtgctgggattacagataagagccaatgtgcccg

SEQ ID NO: 8238 - DNA, 40 bp, Homo sapiens
gggcacattggctcttatctgtaatcccagcactttggga

SEQ ID NO: 8239 - DNA, 40 bp, Homo sapiens
tcccaaagtgctgggattacagataagagccaatgtgccc

SEQ ID NO: 8240 - DNA, 40 bp, Homo sapiens
ggcacattggctcttatctgtaatcccagcactttgggag

SEQ ID NO: 8241 - DNA, 40 bp, Homo sapiens
ctcccaaagtgctgggattacagataagagccaatgtgcc

SEQ ID NO: 8242 - DNA, 40 bp, Homo sapiens
gcacattggctcttatctgtaatcccagcactttgggaga

SEQ ID NO: 8243 - DNA, 40 bp, Homo sapiens
tctcccaaagtgctgggattacagataagagccaatgtgc

SEQ ID NO: 8244 - DNA, 40 bp, Homo sapiens
cacattggctcttatctgtaatcccagcactttgggagac

SEQ ID NO: 8245 - DNA, 40 bp, Homo sapiens
gtctcccaaagtgctgggattacagataagagccaatgtg

SEQ ID NO: 8246 - DNA, 40 bp, Homo sapiens
acattggctcttatctgtaatcccagcactttgggagact

SEQ ID NO: 8247 - DNA, 40 bp, Homo sapiens
agtctcccaaagtgctgggattacagataagagccaatgt

SEQ ID NO: 8248 - DNA, 40 bp, Homo sapiens
cattggctcttatctgtaatcccagcactttgggagactg

SEQ ID NO: 8249 - DNA, 40 bp, Homo sapiens
cagtctcccaaagtgctgggattacagataagagccaatg

SEQ ID NO: 8250 - DNA, 40 bp, Homo sapiens
attggctcttatctgtaatcccagcactttgggagactga

SEQ ID NO: 8251 - DNA, 40 bp, Homo sapiens
tcagtctcccaaagtgctgggattacagataagagccaat

SEQ ID NO: 8252 - DNA, 40 bp, Homo sapiens
ttggctcttatctgtaatcccagcactttgggagactgag

SEQ ID NO: 8253 - DNA, 40 bp, Homo sapiens
ctcagtctcccaaagtgctgggattacagataagagccaa

SEQ ID NO: 8254 - DNA, 40 bp, Homo sapiens
tggctcttatctgtaatcccagcactttgggagactgagg

SEQ ID NO: 8255 - DNA, 40 bp, Homo sapiens
cctcagtctcccaaagtgctgggattacagataagagcca

SEQ ID NO: 8256 - DNA, 40 bp, Homo sapiens
ggctcttatctgtaatcccagcactttgggagactgaggc

SEQ ID NO: 8257 - DNA, 40 bp, Homo sapiens
gcctcagtctcccaaagtgctgggattacagataagagcc

SEQ ID NO: 8258 - DNA, 40 bp, Homo sapiens
gctcttatctgtaatcccagcactttgggagactgaggcg

SEQ ID NO: 8259 - DNA, 40 bp, Homo sapiens
cgcctcagtctcccaaagtgctgggattacagataagagc

SEQ ID NO: 8260 - DNA, 40 bp, Homo sapiens
ctcttatctgtaatcccagcactttgggagactgaggcgg

SEQ ID NO: 8261 - DNA, 40 bp, Homo sapiens
ccgcctcagtctcccaaagtgctgggattacagataagag

SEQ ID NO: 8262 - DNA, 40 bp, Homo sapiens
tcttatctgtaatcccagcactttgggagactgaggcggg

SEQ ID NO: 8263 - DNA, 40 bp, Homo sapiens
cccgcctcagtctcccaaagtgctgggattacagataaga

SEQ ID NO: 8264 - DNA, 40 bp, Homo sapiens
cttatctgtaatcccagcactttgggagactgaggcggga

SEQ ID NO: 8265 - DNA, 40 bp, Homo sapiens
tcccgcctcagtctcccaaagtgctgggattacagataag

SEQ ID NO: 8266 - DNA, 40 bp, Homo sapiens
ttatctgtaatcccagcactttgggagactgaggcgggag

SEQ ID NO: 8267 - DNA, 40 bp, Homo sapiens
ctcccgcctcagtctcccaaagtgctgggattacagataa

SEQ ID NO: 8268 - DNA, 40 bp, Homo sapiens
tatctgtaatcccagcactttgggagactgaggcgggagg

SEQ ID NO: 8269 - DNA, 40 bp, Homo sapiens
cctcccgcctcagtctcccaaagtgctgggattacagata

SEQ ID NO: 8270 - DNA, 40 bp, Homo sapiens
atctgtaatcccagcactttgggagactgaggcgggagga

SEQ ID NO: 8271 - DNA, 40 bp, Homo sapiens
tcctcccgcctcagtctcccaaagtgctgggattacagat

SEQ ID NO: 8272 - DNA, 40 bp, Homo sapiens
tctgtaatcccagcactttgggagactgaggcgggaggat

SEQ ID NO: 8273 - DNA, 40 bp, Homo sapiens
atcctcccgcctcagtctcccaaagtgctgggattacaga

SEQ ID NO: 8274 - DNA, 40 bp, Homo sapiens
ctgtaatcccagcactttgggagactgaggcgggaggatc

SEQ ID NO: 8275 - DNA, 40 bp, Homo sapiens
gatcctcccgcctcagtctcccaaagtgctgggattacag

SEQ ID NO: 8276 - DNA, 40 bp, Homo sapiens
tgtaatcccagcactttgggagactgaggcgggaggatcg

SEQ ID NO: 8277 - DNA, 40 bp, Homo sapiens
cgatcctcccgcctcagtctcccaaagtgctgggattaca

SEQ ID NO: 8278 - DNA, 40 bp, Homo sapiens
gtaatcccagcactttgggagactgaggcgggaggatcgc

SEQ ID NO: 8279 - DNA, 40 bp, Homo sapiens
gcgatcctcccgcctcagtctcccaaagtgctgggattac

SEQ ID NO: 8280 - DNA, 40 bp, Homo sapiens
taatcccagcactttgggagactgaggcgggaggatcgct

SEQ ID NO: 8281 - DNA, 40 bp, Homo sapiens
agcgatcctcccgcctcagtctcccaaagtgctgggatta

SEQ ID NO: 8282 - DNA, 40 bp, Homo sapiens
aatcccagcactttgggagactgaggcgggaggatcgctt

SEQ ID NO: 8283 - DNA, 40 bp, Homo sapiens
aagcgatcctcccgcctcagtctcccaaagtgctgggatt

SEQ ID NO: 8284 - DNA, 40 bp, Homo sapiens
atcccagcactttgggagactgaggcgggaggatcgcttg

SEQ ID NO: 8285 - DNA, 40 bp, Homo sapiens
caagcgatcctcccgcctcagtctcccaaagtgctgggat

SEQ ID NO: 8286 - DNA, 40 bp, Homo sapiens
tcccagcactttgggagactgaggcgggaggatcgcttga

SEQ ID NO: 8287 - DNA, 40 bp, Homo sapiens
tcaagcgatcctcccgcctcagtctcccaaagtgctggga

SEQ ID NO: 8288 - DNA, 40 bp, Homo sapiens
cccagcactttgggagactgaggcgggaggatcgcttgag

SEQ ID NO: 8289 - DNA, 40 bp, Homo sapiens
ctcaagcgatcctcccgcctcagtctcccaaagtgctggg

SEQ ID NO: 8290 - DNA, 40 bp, Homo sapiens
ccagcactttgggagactgaggcgggaggatcgcttgagg

SEQ ID NO: 8291 - DNA, 40 bp, Homo sapiens
cctcaagcgatcctcccgcctcagtctcccaaagtgctgg

SEQ ID NO: 8292 - DNA, 40 bp, Homo sapiens
cagcactttgggagactgaggcgggaggatcgcttgaggc

SEQ ID NO: 8293 - DNA, 40 bp, Homo sapiens
gcctcaagcgatcctcccgcctcagtctcccaaagtgctg

SEQ ID NO: 8294 - DNA, 40 bp, Homo sapiens
agcactttgggagactgaggcgggaggatcgcttgaggcc

SEQ ID NO: 8295 - DNA, 40 bp, Homo sapiens
ggcctcaagcgatcctcccgcctcagtctcccaaagtgct

SEQ ID NO: 8296 - DNA, 40 bp, Homo sapiens
gcactttgggagactgaggcgggaggatcgcttgaggcca

SEQ ID NO: 8297 - DNA, 40 bp, Homo sapiens
tggcctcaagcgatcctcccgcctcagtctcccaaagtgc

SEQ ID NO: 8298 - DNA, 40 bp, Homo sapiens
cactttgggagactgaggcgggaggatcgcttgaggccag

SEQ ID NO: 8299 - DNA, 40 bp, Homo sapiens
ctggcctcaagcgatcctcccgcctcagtctcccaaagtg

SEQ ID NO: 8300 - DNA, 40 bp, Homo sapiens
actttgggagactgaggcgggaggatcgcttgaggccagg

SEQ ID NO: 8301 - DNA, 40 bp, Homo sapiens
cctggcctcaagcgatcctcccgcctcagtctcccaaagt

SEQ ID NO: 8302 - DNA, 40 bp, Homo sapiens
ctttgggagactgaggcgggaggatcgcttgaggccagga

SEQ ID NO: 8303 - DNA, 40 bp, Homo sapiens
tcctggcctcaagcgatcctcccgcctcagtctcccaaag

SEQ ID NO: 8304 - DNA, 40 bp, Homo sapiens
tttgggagactgaggcgggaggatcgcttgaggccaggag

SEQ ID NO: 8305 - DNA, 40 bp, Homo sapiens
ctcctggcctcaagcgatcctcccgcctcagtctcccaaa

SEQ ID NO: 8306 - DNA, 40 bp, Homo sapiens
ttgggagactgaggcgggaggatcgcttgaggccaggagt

SEQ ID NO: 8307 - DNA, 40 bp, Homo sapiens
actcctggcctcaagcgatcctcccgcctcagtctcccaa

SEQ ID NO: 8308 - DNA, 40 bp, Homo sapiens
tgggagactgaggcgggaggatcgcttgaggccaggagtt

SEQ ID NO: 8309 - DNA, 40 bp, Homo sapiens
aactcctggcctcaagcgatcctcccgcctcagtctccca

SEQ ID NO: 8310 - DNA, 40 bp, Homo sapiens
gggagactgaggcgggaggatcgcttgaggccaggagttg

SEQ ID NO: 8311 - DNA, 40 bp, Homo sapiens
caactcctggcctcaagcgatcctcccgcctcagtctccc

SEQ ID NO: 8312 - DNA, 40 bp, Homo sapiens
ggagactgaggcgggaggatcgcttgaggccaggagttgg

SEQ ID NO: 8313 - DNA, 40 bp, Homo sapiens
ccaactcctggcctcaagcgatcctcccgcctcagtctcc

SEQ ID NO: 8314 - DNA, 40 bp, Homo sapiens
gagactgaggcgggaggatcgcttgaggccaggagttgga

SEQ ID NO: 8315 - DNA, 40 bp, Homo sapiens
tccaactcctggcctcaagcgatcctcccgcctcagtctc

SEQ ID NO: 8316 - DNA, 40 bp, Homo sapiens
agactgaggcgggaggatcgcttgaggccaggagttggag

SEQ ID NO: 8317 - DNA, 40 bp, Homo sapiens
ctccaactcctggcctcaagcgatcctcccgcctcagtct

SEQ ID NO: 8318 - DNA, 40 bp, Homo sapiens
gactgaggcgggaggatcgcttgaggccaggagttggaga

SEQ ID NO: 8319 - DNA, 40 bp, Homo sapiens
tctccaactcctggcctcaagcgatcctcccgcctcagtc

SEQ ID NO: 8320 - DNA, 40 bp, Homo sapiens
actgaggcgggaggatcgcttgaggccaggagttggagac

SEQ ID NO: 8321 - DNA, 40 bp, Homo sapiens
gtctccaactcctggcctcaagcgatcctcccgcctcagt

SEQ ID NO: 8322 - DNA, 40 bp, Homo sapiens
ctgaggcgggaggatcgcttgaggccaggagttggagacc

SEQ ID NO: 8323 - DNA, 40 bp, Homo sapiens
ggtctccaactcctggcctcaagcgatcctcccgcctcag

SEQ ID NO: 8324 - DNA, 40 bp, Homo sapiens
tgaggcgggaggatcgcttgaggccaggagttggagacca

SEQ ID NO: 8325 - DNA, 40 bp, Homo sapiens
tggtctccaactcctggcctcaagcgatcctcccgcctca

SEQ ID NO: 8326 - DNA, 40 bp, Homo sapiens
gaggcgggaggatcgcttgaggccaggagttggagaccag

SEQ ID NO: 8327 - DNA, 40 bp, Homo sapiens
ctggtctccaactcctggcctcaagcgatcctcccgcctc

SEQ ID NO: 8328 - DNA, 40 bp, Homo sapiens
aggcgggaggatcgcttgaggccaggagttggagaccagc

SEQ ID NO: 8329 - DNA, 40 bp, Homo sapiens
gctggtctccaactcctggcctcaagcgatcctcccgcct

SEQ ID NO: 8330 - DNA, 40 bp, Homo sapiens
ggcgggaggatcgcttgaggccaggagttggagaccagcg

SEQ ID NO: 8331 - DNA, 40 bp, Homo sapiens
cgctggtctccaactcctggcctcaagcgatcctcccgcc

SEQ ID NO: 8332 - DNA, 40 bp, Homo sapiens
gcgggaggatcgcttgaggccaggagttggagaccagcgt

SEQ ID NO: 8333 - DNA, 40 bp, Homo sapiens
acgctggtctccaactcctggcctcaagcgatcctcccgc

SEQ ID NO: 8334 - DNA, 40 bp, Homo sapiens
cgggaggatcgcttgaggccaggagttggagaccagcgta

SEQ ID NO: 8335 - DNA, 40 bp, Homo sapiens
tacgctggtctccaactcctggcctcaagcgatcctcccg

SEQ ID NO: 8336 - DNA, 40 bp, Homo sapiens
gggaggatcgcttgaggccaggagttggagaccagcgtac

SEQ ID NO: 8337 - DNA, 40 bp, Homo sapiens
gtacgctggtctccaactcctggcctcaagcgatcctccc

SEQ ID NO: 8338 - DNA, 40 bp, Homo sapiens
ggaggatcgcttgaggccaggagttggagaccagcgtact

SEQ ID NO: 8339 - DNA, 40 bp, Homo sapiens
agtacgctggtctccaactcctggcctcaagcgatcctcc

SEQ ID NO: 8340 - DNA, 40 bp, Homo sapiens
gaggatcgcttgaggccaggagttggagaccagcgtactc

SEQ ID NO: 8341 - DNA, 40 bp, Homo sapiens
gagtacgctggtctccaactcctggcctcaagcgatcctc

SEQ ID NO: 8342 - DNA, 40 bp, Homo sapiens
aggatcgcttgaggccaggagttggagaccagcgtactca

SEQ ID NO: 8343 - DNA, 40 bp, Homo sapiens
tgagtacgctggtctccaactcctggcctcaagcgatcct

SEQ ID NO: 8344 - DNA, 40 bp, Homo sapiens
ggatcgcttgaggccaggagttggagaccagcgtactcaa

SEQ ID NO: 8345 - DNA, 40 bp, Homo sapiens
ttgagtacgctggtctccaactcctggcctcaagcgatcc

SEQ ID NO: 8346 - DNA, 40 bp, Homo sapiens
gatcgcttgaggccaggagttggagaccagcgtactcaac

SEQ ID NO: 8347 - DNA, 40 bp, Homo sapiens
gttgagtacgctggtctccaactcctggcctcaagcgatc

SEQ ID NO: 8348 - DNA, 40 bp, Homo sapiens
atcgcttgaggccaggagttggagaccagcgtactcaaca

SEQ ID NO: 8349 - DNA, 40 bp, Homo sapiens
tgttgagtacgctggtctccaactcctggcctcaagcgat

SEQ ID NO: 8350 - DNA, 40 bp, Homo sapiens
tcgcttgaggccaggagttggagaccagcgtactcaacat

SEQ ID NO: 8351 - DNA, 40 bp, Homo sapiens
atgttgagtacgctggtctccaactcctggcctcaagcga

SEQ ID NO: 8352 - DNA, 40 bp, Homo sapiens
cgcttgaggccaggagttggagaccagcgtactcaacata

SEQ ID NO: 8353 - DNA, 40 bp, Homo sapiens
tatgttgagtacgctggtctccaactcctggcctcaagcg

SEQ ID NO: 8354 - DNA, 40 bp, Homo sapiens
gcttgaggccaggagttggagaccagcgtactcaacatag

SEQ ID NO: 8355 - DNA, 40 bp, Homo sapiens
ctatgttgagtacgctggtctccaactcctggcctcaagc

SEQ ID NO: 8356 - DNA, 40 bp, Homo sapiens
cttgaggccaggagttggagaccagcgtactcaacatagt

SEQ ID NO: 8357 - DNA, 40 bp, Homo sapiens
actatgttgagtacgctggtctccaactcctggcctcaag

SEQ ID NO: 8358 - DNA, 40 bp, Homo sapiens
ttgaggccaggagttggagaccagcgtactcaacatagtg

SEQ ID NO: 8359 - DNA, 40 bp, Homo sapiens
cactatgttgagtacgctggtctccaactcctggcctcaa

SEQ ID NO: 8360 - DNA, 40 bp, Homo sapiens
tgaggccaggagttggagaccagcgtactcaacatagtga

SEQ ID NO: 8361 - DNA, 40 bp, Homo sapiens
tcactatgttgagtacgctggtctccaactcctggcctca

SEQ ID NO: 8362 - DNA, 40 bp, Homo sapiens
gaggccaggagttggagaccagcgtactcaacatagtgag

SEQ ID NO: 8363 - DNA, 40 bp, Homo sapiens
ctcactatgttgagtacgctggtctccaactcctggcctc

SEQ ID NO: 8364 - DNA, 40 bp, Homo sapiens
aggccaggagttggagaccagcgtactcaacatagtgaga

SEQ ID NO: 8365 - DNA, 40 bp, Homo sapiens
tctcactatgttgagtacgctggtctccaactcctggcct

SEQ ID NO: 8366 - DNA, 40 bp, Homo sapiens
ggccaggagttggagaccagcgtactcaacatagtgagac

SEQ ID NO: 8367 - DNA, 40 bp, Homo sapiens
gtctcactatgttgagtacgctggtctccaactcctggcc

SEQ ID NO: 8368 - DNA, 40 bp, Homo sapiens
gccaggagttggagaccagcgtactcaacatagtgagacc

SEQ ID NO: 8369 - DNA, 40 bp, Homo sapiens
ggtctcactatgttgagtacgctggtctccaactcctggc

SEQ ID NO: 8370 - DNA, 40 bp, Homo sapiens
ccaggagttggagaccagcgtactcaacatagtgagacct

SEQ ID NO: 8371 - DNA, 40 bp, Homo sapiens
aggtctcactatgttgagtacgctggtctccaactcctgg

SEQ ID NO: 8372 - DNA, 40 bp, Homo sapiens
caggagttggagaccagcgtactcaacatagtgagacctt

SEQ ID NO: 8373 - DNA, 40 bp, Homo sapiens
aaggtctcactatgttgagtacgctggtctccaactcctg

SEQ ID NO: 8374 - DNA, 40 bp, Homo sapiens
aggagttggagaccagcgtactcaacatagtgagaccttg

SEQ ID NO: 8375 - DNA, 40 bp, Homo sapiens
caaggtctcactatgttgagtacgctggtctccaactcct

SEQ ID NO: 8376 - DNA, 40 bp, Homo sapiens
ggagttggagaccagcgtactcaacatagtgagaccttgt

SEQ ID NO: 8377 - DNA, 40 bp, Homo sapiens
acaaggtctcactatgttgagtacgctggtctccaactcc

SEQ ID NO: 8378 - DNA, 40 bp, Homo sapiens
gagttggagaccagcgtactcaacatagtgagaccttgtt

SEQ ID NO: 8379 - DNA, 40 bp, Homo sapiens
aacaaggtctcactatgttgagtacgctggtctccaactc

SEQ ID NO: 8380 - DNA, 40 bp, Homo sapiens
agttggagaccagcgtactcaacatagtgagaccttgtta

SEQ ID NO: 8381 - DNA, 40 bp, Homo sapiens
taacaaggtctcactatgttgagtacgctggtctccaact

SEQ ID NO: 8382 - DNA, 40 bp, Homo sapiens
gttggagaccagcgtactcaacatagtgagaccttgttat

SEQ ID NO: 8383 - DNA, 40 bp, Homo sapiens
ataacaaggtctcactatgttgagtacgctggtctccaac

SEQ ID NO: 8384 - DNA, 40 bp, Homo sapiens
ttggagaccagcgtactcaacatagtgagaccttgttata

SEQ ID NO: 8385 - DNA, 40 bp, Homo sapiens
tataacaaggtctcactatgttgagtacgctggtctccaa

SEQ ID NO: 8386 - DNA, 40 bp, Homo sapiens
tggagaccagcgtactcaacatagtgagaccttgttataa

SEQ ID NO: 8387 - DNA, 40 bp, Homo sapiens
ttataacaaggtctcactatgttgagtacgctggtctcca

SEQ ID NO: 8388 - DNA, 40 bp, Homo sapiens
ggagaccagcgtactcaacatagtgagaccttgttataaa

SEQ ID NO: 8389 - DNA, 40 bp, Homo sapiens
tttataacaaggtctcactatgttgagtacgctggtctcc

SEQ ID NO: 8390 - DNA, 40 bp, Homo sapiens
gagaccagcgtactcaacatagtgagaccttgttataaag

SEQ ID NO: 8391 - DNA, 40 bp, Homo sapiens
ctttataacaaggtctcactatgttgagtacgctggtctc

SEQ ID NO: 8392 - DNA, 40 bp, Homo sapiens
agaccagcgtactcaacatagtgagaccttgttataaaga

SEQ ID NO: 8393 - DNA, 40 bp, Homo sapiens
tctttataacaaggtctcactatgttgagtacgctggtct

SEQ ID NO: 8394 - DNA, 40 bp, Homo sapiens
gaccagcgtactcaacatagtgagaccttgttataaagaa

SEQ ID NO: 8395 - DNA, 40 bp, Homo sapiens
ttctttataacaaggtctcactatgttgagtacgctggtc

SEQ ID NO: 8396 - DNA, 40 bp, Homo sapiens
accagcgtactcaacatagtgagaccttgttataaagaaa

SEQ ID NO: 8397 - DNA, 40 bp, Homo sapiens
tttctttataacaaggtctcactatgttgagtacgctggt

SEQ ID NO: 8398 - DNA, 40 bp, Homo sapiens
ccagcgtactcaacatagtgagaccttgttataaagaaaa

SEQ ID NO: 8399 - DNA, 40 bp, Homo sapiens
ttttctttataacaaggtctcactatgttgagtacgctgg

SEQ ID NO: 8400 - DNA, 40 bp, Homo sapiens
cagcgtactcaacatagtgagaccttgttataaagaaaaa

SEQ ID NO: 8401 - DNA, 40 bp, Homo sapiens
tttttctttataacaaggtctcactatgttgagtacgctg

SEQ ID NO: 8402 - DNA, 40 bp, Homo sapiens
agcgtactcaacatagtgagaccttgttataaagaaaaaa

SEQ ID NO: 8403 - DNA, 40 bp, Homo sapiens
ttttttctttataacaaggtctcactatgttgagtacgct

SEQ ID NO: 8404 - DNA, 40 bp, Homo sapiens
gcgtactcaacatagtgagaccttgttataaagaaaaaaa

SEQ ID NO: 8405 - DNA, 40 bp, Homo sapiens
tttttttctttataacaaggtctcactatgttgagtacgc

SEQ ID NO: 8406 - DNA, 40 bp, Homo sapiens
cgtactcaacatagtgagaccttgttataaagaaaaaaaa

SEQ ID NO: 8407 - DNA, 40 bp, Homo sapiens
ttttttttctttataacaaggtctcactatgttgagtacg

SEQ ID NO: 8408 - DNA, 40 bp, Homo sapiens
gtactcaacatagtgagaccttgttataaagaaaaaaaaa

SEQ ID NO: 8409 - DNA, 40 bp, Homo sapiens
tttttttttctttataacaaggtctcactatgttgagtac

SEQ ID NO: 8410 - DNA, 40 bp, Homo sapiens
tactcaacatagtgagaccttgttataaagaaaaaaaaaa

SEQ ID NO: 8411 - DNA, 40 bp, Homo sapiens
ttttttttttctttataacaaggtctcactatgttgagta

SEQ ID NO: 8412 - DNA, 40 bp, Homo sapiens
actcaacatagtgagaccttgttataaagaaaaaaaaaat

SEQ ID NO: 8413 - DNA, 40 bp, Homo sapiens
attttttttttctttataacaaggtctcactatgttgagt

SEQ ID NO: 8414 - DNA, 40 bp, Homo sapiens
ctcaacatagtgagaccttgttataaagaaaaaaaaaatc

SEQ ID NO: 8415 - DNA, 40 bp, Homo sapiens
gattttttttttctttataacaaggtctcactatgttgag

SEQ ID NO: 8416 - DNA, 40 bp, Homo sapiens
tcaacatagtgagaccttgttataaagaaaaaaaaaatcc

SEQ ID NO: 8417 - DNA, 40 bp, Homo sapiens
ggattttttttttctttataacaaggtctcactatgttga

SEQ ID NO: 8418 - DNA, 40 bp, Homo sapiens
caacatagtgagaccttgttataaagaaaaaaaaaatcca

SEQ ID NO: 8419 - DNA, 40 bp, Homo sapiens
tggattttttttttctttataacaaggtctcactatgttg

SEQ ID NO: 8420 - DNA, 40 bp, Homo sapiens
aacatagtgagaccttgttataaagaaaaaaaaaatccag

SEQ ID NO: 8421 - DNA, 40 bp, Homo sapiens
ctggattttttttttctttataacaaggtctcactatgtt

SEQ ID NO: 8422 - DNA, 40 bp, Homo sapiens
acatagtgagaccttgttataaagaaaaaaaaaatccagg

SEQ ID NO: 8423 - DNA, 40 bp, Homo sapiens
cctggattttttttttctttataacaaggtctcactatgt

SEQ ID NO: 8424 - DNA, 40 bp, Homo sapiens
catagtgagaccttgttataaagaaaaaaaaaatccagga

SEQ ID NO: 8425 - DNA, 40 bp, Homo sapiens
tcctggattttttttttctttataacaaggtctcactatg

SEQ ID NO: 8426 - DNA, 40 bp, Homo sapiens
atagtgagaccttgttataaagaaaaaaaaaatccaggat

SEQ ID NO: 8427 - DNA, 40 bp, Homo sapiens
atcctggattttttttttctttataacaaggtctcactat

SEQ ID NO: 8428 - DNA, 40 bp, Homo sapiens
tagtgagaccttgttataaagaaaaaaaaaatccaggatt

SEQ ID NO: 8429 - DNA, 40 bp, Homo sapiens
aatcctggattttttttttctttataacaaggtctcacta

SEQ ID NO: 8430 - DNA, 40 bp, Homo sapiens
agtgagaccttgttataaagaaaaaaaaaatccaggatta

SEQ ID NO: 8431 - DNA, 40 bp, Homo sapiens
taatcctggattttttttttctttataacaaggtctcact

SEQ ID NO: 8432 - DNA, 40 bp, Homo sapiens
gtgagaccttgttataaagaaaaaaaaaatccaggattaa

SEQ ID NO: 8433 - DNA, 40 bp, Homo sapiens
ttaatcctggattttttttttctttataacaaggtctcac

SEQ ID NO: 8434 - DNA, 40 bp, Homo sapiens
tgagaccttgttataaagaaaaaaaaaatccaggattaaa

SEQ ID NO: 8435 - DNA, 40 bp, Homo sapiens
tttaatcctggattttttttttctttataacaaggtctca

SEQ ID NO: 8436 - DNA, 40 bp, Homo sapiens
gagaccttgttataaagaaaaaaaaaatccaggattaaaa

SEQ ID NO: 8437 - DNA, 40 bp, Homo sapiens
ttttaatcctggattttttttttctttataacaaggtctc

SEQ ID NO: 8438 - DNA, 40 bp, Homo sapiens
agaccttgttataaagaaaaaaaaaatccaggattaaaaa

SEQ ID NO: 8439 - DNA, 40 bp, Homo sapiens
tttttaatcctggattttttttttctttataacaaggtct

SEQ ID NO: 8440 - DNA, 40 bp, Homo sapiens
gaccttgttataaagaaaaaaaaaatccaggattaaaaaa

SEQ ID NO: 8441 - DNA, 40 bp, Homo sapiens
ttttttaatcctggattttttttttctttataacaaggtc

SEQ ID NO: 8442 - DNA, 40 bp, Homo sapiens
accttgttataaagaaaaaaaaaatccaggattaaaaaaa

SEQ ID NO: 8443 - DNA, 40 bp, Homo sapiens
tttttttaatcctggattttttttttctttataacaaggt

SEQ ID NO: 8444 - DNA, 40 bp, Homo sapiens
ccttgttataaagaaaaaaaaaatccaggattaaaaaaaa

SEQ ID NO: 8445 - DNA, 40 bp, Homo sapiens
ttttttttaatcctggattttttttttctttataacaagg

SEQ ID NO: 8446 - DNA, 40 bp, Homo sapiens
cttgttataaagaaaaaaaaaatccaggattaaaaaaaat

SEQ ID NO: 8447 - DNA, 40 bp, Homo sapiens
attttttttaatcctggattttttttttctttataacaag

SEQ ID NO: 8448 - DNA, 40 bp, Homo sapiens
ttgttataaagaaaaaaaaaatccaggattaaaaaaaatc

SEQ ID NO: 8449 - DNA, 40 bp, Homo sapiens
gattttttttaatcctggattttttttttctttataacaa

SEQ ID NO: 8450 - DNA, 40 bp, Homo sapiens
tgttataaagaaaaaaaaaatccaggattaaaaaaaatct

SEQ ID NO: 8451 - DNA, 40 bp, Homo sapiens
agattttttttaatcctggattttttttttctttataaca

SEQ ID NO: 8452 - DNA, 40 bp, Homo sapiens
gttataaagaaaaaaaaaatccaggattaaaaaaaatctt

SEQ ID NO: 8453 - DNA, 40 bp, Homo sapiens
aagattttttttaatcctggattttttttttctttataac

SEQ ID NO: 8454 - DNA, 40 bp, Homo sapiens
ttataaagaaaaaaaaaatccaggattaaaaaaaatcttt

SEQ ID NO: 8455 - DNA, 40 bp, Homo sapiens
aaagattttttttaatcctggattttttttttctttataa

SEQ ID NO: 8456 - DNA, 40 bp, Homo sapiens
tataaagaaaaaaaaaatccaggattaaaaaaaatctttg

SEQ ID NO: 8457 - DNA, 40 bp, Homo sapiens
caaagattttttttaatcctggattttttttttctttata

SEQ ID NO: 8458 - DNA, 40 bp, Homo sapiens
ataaagaaaaaaaaaatccaggattaaaaaaaatctttga

SEQ ID NO: 8459 - DNA, 40 bp, Homo sapiens
tcaaagattttttttaatcctggattttttttttctttat

SEQ ID NO: 8460 - DNA, 40 bp, Homo sapiens
taaagaaaaaaaaaatccaggattaaaaaaaatctttgat

SEQ ID NO: 8461 - DNA, 40 bp, Homo sapiens
atcaaagattttttttaatcctggattttttttttcttta

SEQ ID NO: 8462 - DNA, 40 bp, Homo sapiens
aaagaaaaaaaaaatccaggattaaaaaaaatctttgatt

SEQ ID NO: 8463 - DNA, 40 bp, Homo sapiens
aatcaaagattttttttaatcctggattttttttttcttt

SEQ ID NO: 8464 - DNA, 40 bp, Homo sapiens
aagaaaaaaaaaatccaggattaaaaaaaatctttgattt

SEQ ID NO: 8465 - DNA, 40 bp, Homo sapiens
aaatcaaagattttttttaatcctggattttttttttctt

SEQ ID NO: 8466 - DNA, 40 bp, Homo sapiens
agaaaaaaaaaatccaggattaaaaaaaatctttgatttg

SEQ ID NO: 8467 - DNA, 40 bp, Homo sapiens
caaatcaaagattttttttaatcctggattttttttttct

SEQ ID NO: 8468 - DNA, 40 bp, Homo sapiens
gaaaaaaaaaatccaggattaaaaaaaatctttgatttgt

SEQ ID NO: 8469 - DNA, 40 bp, Homo sapiens
acaaatcaaagattttttttaatcctggattttttttttc

SEQ ID NO: 8470 - DNA, 40 bp, Homo sapiens
aaaaaaaaaatccaggattaaaaaaaatctttgatttgtt

SEQ ID NO: 8471 - DNA, 40 bp, Homo sapiens
aacaaatcaaagattttttttaatcctggatttttttttt

SEQ ID NO: 8472 - DNA, 40 bp, Homo sapiens
aaaaaaaaatccaggattaaaaaaaatctttgatttgttt

SEQ ID NO: 8473 - DNA, 40 bp, Homo sapiens
aaacaaatcaaagattttttttaatcctggattttttttt

SEQ ID NO: 8474 - DNA, 40 bp, Homo sapiens
aaaaaaaatccaggattaaaaaaaatctttgatttgtttg

SEQ ID NO: 8475 - DNA, 40 bp, Homo sapiens
caaacaaatcaaagattttttttaatcctggatttttttt

SEQ ID NO: 8476 - DNA, 40 bp, Homo sapiens
aaaaaaatccaggattaaaaaaaatctttgatttgtttgg

SEQ ID NO: 8477 - DNA, 40 bp, Homo sapiens
ccaaacaaatcaaagattttttttaatcctggattttttt

SEQ ID NO: 8478 - DNA, 40 bp, Homo sapiens
aaaaaatccaggattaaaaaaaatctttgatttgtttggg

SEQ ID NO: 8479 - DNA, 40 bp, Homo sapiens
cccaaacaaatcaaagattttttttaatcctggatttttt

SEQ ID NO: 8480 - DNA, 40 bp, Homo sapiens
aaaaatccaggattaaaaaaaatctttgatttgtttggga

SEQ ID NO: 8481 - DNA, 40 bp, Homo sapiens
tcccaaacaaatcaaagattttttttaatcctggattttt

SEQ ID NO: 8482 - DNA, 40 bp, Homo sapiens
aaaatccaggattaaaaaaaatctttgatttgtttgggat

SEQ ID NO: 8483 - DNA, 40 bp, Homo sapiens
atcccaaacaaatcaaagattttttttaatcctggatttt

SEQ ID NO: 8484 - DNA, 40 bp, Homo sapiens
aaatccaggattaaaaaaaatctttgatttgtttgggatt

SEQ ID NO: 8485 - DNA, 40 bp, Homo sapiens
aatcccaaacaaatcaaagattttttttaatcctggattt

SEQ ID NO: 8486 - DNA, 40 bp, Homo sapiens
aatccaggattaaaaaaaatctttgatttgtttgggattt

SEQ ID NO: 8487 - DNA, 40 bp, Homo sapiens
aaatcccaaacaaatcaaagattttttttaatcctggatt

SEQ ID NO: 8488 - DNA, 40 bp, Homo sapiens
atccaggattaaaaaaaatctttgatttgtttgggattta

SEQ ID NO: 8489 - DNA, 40 bp, Homo sapiens
taaatcccaaacaaatcaaagattttttttaatcctggat

SEQ ID NO: 8490 - DNA, 40 bp, Homo sapiens
tccaggattaaaaaaaatctttgatttgtttgggatttat

SEQ ID NO: 8491 - DNA, 40 bp, Homo sapiens
ataaatcccaaacaaatcaaagattttttttaatcctgga

SEQ ID NO: 8492 - DNA, 40 bp, Homo sapiens
ccaggattaaaaaaaatctttgatttgtttgggatttatt

SEQ ID NO: 8493 - DNA, 40 bp, Homo sapiens
aataaatcccaaacaaatcaaagattttttttaatcctgg

SEQ ID NO: 8494 - DNA, 40 bp, Homo sapiens
caggattaaaaaaaatctttgatttgtttgggatttatta

SEQ ID NO: 8495 - DNA, 40 bp, Homo sapiens
taataaatcccaaacaaatcaaagattttttttaatcctg

SEQ ID NO: 8496 - DNA, 40 bp, Homo sapiens
aggattaaaaaaaatctttgatttgtttgggatttattaa

SEQ ID NO: 8497 - DNA, 40 bp, Homo sapiens
ttaataaatcccaaacaaatcaaagattttttttaatcct

SEQ ID NO: 8498 - DNA, 40 bp, Homo sapiens
ggattaaaaaaaatctttgatttgtttgggatttattaat

SEQ ID NO: 8499 - DNA, 40 bp, Homo sapiens
attaataaatcccaaacaaatcaaagattttttttaatcc

SEQ ID NO: 8500 - DNA, 40 bp, Homo sapiens
gattaaaaaaaatctttgatttgtttgggatttattaata

SEQ ID NO: 8501 - DNA, 40 bp, Homo sapiens
tattaataaatcccaaacaaatcaaagattttttttaatc

SEQ ID NO: 8502 - DNA, 40 bp, Homo sapiens
attaaaaaaaatctttgatttgtttgggatttattaatat

SEQ ID NO: 8503 - DNA, 40 bp, Homo sapiens
atattaataaatcccaaacaaatcaaagattttttttaat

SEQ ID NO: 8504 - DNA, 40 bp, Homo sapiens
ttaaaaaaaatctttgatttgtttgggatttattaatatt

SEQ ID NO: 8505 - DNA, 40 bp, Homo sapiens
aatattaataaatcccaaacaaatcaaagattttttttaa

SEQ ID NO: 8506 - DNA, 40 bp, Homo sapiens
taaaaaaaatctttgatttgtttgggatttattaatattt

SEQ ID NO: 8507 - DNA, 40 bp, Homo sapiens
aaatattaataaatcccaaacaaatcaaagatttttttta

SEQ ID NO: 8508 - DNA, 40 bp, Homo sapiens
aaaaaaaatctttgatttgtttgggatttattaatattta

SEQ ID NO: 8509 - DNA, 40 bp, Homo sapiens
taaatattaataaatcccaaacaaatcaaagatttttttt

SEQ ID NO: 8510 - DNA, 40 bp, Homo sapiens
aaaaaaatctttgatttgtttgggatttattaatatttac

SEQ ID NO: 8511 - DNA, 40 bp, Homo sapiens
gtaaatattaataaatcccaaacaaatcaaagattttttt

SEQ ID NO: 8512 - DNA, 40 bp, Homo sapiens
aaaaaatctttgatttgtttgggatttattaatatttacc

SEQ ID NO: 8513 - DNA, 40 bp, Homo sapiens
ggtaaatattaataaatcccaaacaaatcaaagatttttt

SEQ ID NO: 8514 - DNA, 40 bp, Homo sapiens
aaaaatctttgatttgtttgggatttattaatatttaccg

SEQ ID NO: 8515 - DNA, 40 bp, Homo sapiens
cggtaaatattaataaatcccaaacaaatcaaagattttt

SEQ ID NO: 8516 - DNA, 40 bp, Homo sapiens
aaaatctttgatttgtttgggatttattaatatttaccgt

SEQ ID NO: 8517 - DNA, 40 bp, Homo sapiens
acggtaaatattaataaatcccaaacaaatcaaagatttt

SEQ ID NO: 8518 - DNA, 40 bp, Homo sapiens
aaatctttgatttgtttgggatttattaatatttaccgta

SEQ ID NO: 8519 - DNA, 40 bp, Homo sapiens
tacggtaaatattaataaatcccaaacaaatcaaagattt

SEQ ID NO: 8520 - DNA, 40 bp, Homo sapiens
aatctttgatttgtttgggatttattaatatttaccgtat

SEQ ID NO: 8521 - DNA, 40 bp, Homo sapiens
atacggtaaatattaataaatcccaaacaaatcaaagatt

SEQ ID NO: 8522 - DNA, 40 bp, Homo sapiens
atctttgatttgtttgggatttattaatatttaccgtatt

SEQ ID NO: 8523 - DNA, 40 bp, Homo sapiens
aatacggtaaatattaataaatcccaaacaaatcaaagat

SEQ ID NO: 8524 - DNA, 40 bp, Homo sapiens
tctttgatttgtttgggatttattaatatttaccgtattg

SEQ ID NO: 8525 - DNA, 40 bp, Homo sapiens
caatacggtaaatattaataaatcccaaacaaatcaaaga

SEQ ID NO: 8526 - DNA, 40 bp, Homo sapiens
ctttgatttgtttgggatttattaatatttaccgtattgg

SEQ ID NO: 8527 - DNA, 40 bp, Homo sapiens
ccaatacggtaaatattaataaatcccaaacaaatcaaag

SEQ ID NO: 8528 - DNA, 40 bp, Homo sapiens
tttgatttgtttgggatttattaatatttaccgtattgga

SEQ ID NO: 8529 - DNA, 40 bp, Homo sapiens
tccaatacggtaaatattaataaatcccaaacaaatcaaa

SEQ ID NO: 8530 - DNA, 40 bp, Homo sapiens
ttgatttgtttgggatttattaatatttaccgtattggaa

SEQ ID NO: 8531 - DNA, 40 bp, Homo sapiens
ttccaatacggtaaatattaataaatcccaaacaaatcaa

SEQ ID NO: 8532 - DNA, 40 bp, Homo sapiens
tgatttgtttgggatttattaatatttaccgtattggaaa

SEQ ID NO: 8533 - DNA, 40 bp, Homo sapiens
tttccaatacggtaaatattaataaatcccaaacaaatca

SEQ ID NO: 8534 - DNA, 40 bp, Homo sapiens
gatttgtttgggatttattaatatttaccgtattggaaat

SEQ ID NO: 8535 - DNA, 40 bp, Homo sapiens
atttccaatacggtaaatattaataaatcccaaacaaatc

SEQ ID NO: 8536 - DNA, 40 bp, Homo sapiens
atttgtttgggatttattaatatttaccgtattggaaatt

SEQ ID NO: 8537 - DNA, 40 bp, Homo sapiens
aatttccaatacggtaaatattaataaatcccaaacaaat

SEQ ID NO: 8538 - DNA, 40 bp, Homo sapiens
tttgtttgggatttattaatatttaccgtattggaaatta

SEQ ID NO: 8539 - DNA, 40 bp, Homo sapiens
taatttccaatacggtaaatattaataaatcccaaacaaa

SEQ ID NO: 8540 - DNA, 40 bp, Homo sapiens
ttgtttgggatttattaatatttaccgtattggaaattaa

SEQ ID NO: 8541 - DNA, 40 bp, Homo sapiens
ttaatttccaatacggtaaatattaataaatcccaaacaa

SEQ ID NO: 8542 - DNA, 40 bp, Homo sapiens
tgtttgggatttattaatatttaccgtattggaaattaaa

SEQ ID NO: 8543 - DNA, 40 bp, Homo sapiens
tttaatttccaatacggtaaatattaataaatcccaaaca

SEQ ID NO: 8544 - DNA, 40 bp, Homo sapiens
gtttgggatttattaatatttaccgtattggaaattaaaa

SEQ ID NO: 8545 - DNA, 40 bp, Homo sapiens
ttttaatttccaatacggtaaatattaataaatcccaaac

SEQ ID NO: 8546 - DNA, 40 bp, Homo sapiens
tttgggatttattaatatttaccgtattggaaattaaaac

SEQ ID NO: 8547 - DNA, 40 bp, Homo sapiens
gttttaatttccaatacggtaaatattaataaatcccaaa

SEQ ID NO: 8548 - DNA, 40 bp, Homo sapiens
ttgggatttattaatatttaccgtattggaaattaaaaca

SEQ ID NO: 8549 - DNA, 40 bp, Homo sapiens
tgttttaatttccaatacggtaaatattaataaatcccaa

SEQ ID NO: 8550 - DNA, 40 bp, Homo sapiens
tgggatttattaatatttaccgtattggaaattaaaacaa

SEQ ID NO: 8551 - DNA, 40 bp, Homo sapiens
ttgttttaatttccaatacggtaaatattaataaatccca

SEQ ID NO: 8552 - DNA, 40 bp, Homo sapiens
gggatttattaatatttaccgtattggaaattaaaacaat

SEQ ID NO: 8553 - DNA, 40 bp, Homo sapiens
attgttttaatttccaatacggtaaatattaataaatccc

SEQ ID NO: 8554 - DNA, 40 bp, Homo sapiens
ggatttattaatatttaccgtattggaaattaaaacaatt

SEQ ID NO: 8555 - DNA, 40 bp, Homo sapiens
aattgttttaatttccaatacggtaaatattaataaatcc

SEQ ID NO: 8556 - DNA, 40 bp, Homo sapiens
gatttattaatatttaccgtattggaaattaaaacaattt

SEQ ID NO: 8557 - DNA, 40 bp, Homo sapiens
aaattgttttaatttccaatacggtaaatattaataaatc

SEQ ID NO: 8558 - DNA, 40 bp, Homo sapiens
atttattaatatttaccgtattggaaattaaaacaatttt

SEQ ID NO: 8559 - DNA, 40 bp, Homo sapiens
aaaattgttttaatttccaatacggtaaatattaataaat

SEQ ID NO: 8560 - DNA, 40 bp, Homo sapiens
tttattaatatttaccgtattggaaattaaaacaattttt

SEQ ID NO: 8561 - DNA, 40 bp, Homo sapiens
aaaaattgttttaatttccaatacggtaaatattaataaa

SEQ ID NO: 8562 - DNA, 40 bp, Homo sapiens
ttattaatatttaccgtattggaaattaaaacaatttttt

SEQ ID NO: 8563 - DNA, 40 bp, Homo sapiens
aaaaaattgttttaatttccaatacggtaaatattaataa

SEQ ID NO: 8564 - DNA, 40 bp, Homo sapiens
tattaatatttaccgtattggaaattaaaacaatttttta

SEQ ID NO: 8565 - DNA, 40 bp, Homo sapiens
taaaaaattgttttaatttccaatacggtaaatattaata

SEQ ID NO: 8566 - DNA, 40 bp, Homo sapiens
attaatatttaccgtattggaaattaaaacaattttttaa

SEQ ID NO: 8567 - DNA, 40 bp, Homo sapiens
ttaaaaaattgttttaatttccaatacggtaaatattaat

SEQ ID NO: 8568 - DNA, 40 bp, Homo sapiens
ttaatatttaccgtattggaaattaaaacaattttttaaa

SEQ ID NO: 8569 - DNA, 40 bp, Homo sapiens
tttaaaaaattgttttaatttccaatacggtaaatattaa

SEQ ID NO: 8570 - DNA, 40 bp, Homo sapiens
taatatttaccgtattggaaattaaaacaattttttaaaa

SEQ ID NO: 8571 - DNA, 40 bp, Homo sapiens
ttttaaaaaattgttttaatttccaatacggtaaatatta

SEQ ID NO: 8572 - DNA, 40 bp, Homo sapiens
aatatttaccgtattggaaattaaaacaattttttaaaat

SEQ ID NO: 8573 - DNA, 40 bp, Homo sapiens
attttaaaaaattgttttaatttccaatacggtaaatatt

SEQ ID NO: 8574 - DNA, 40 bp, Homo sapiens
atatttaccgtattggaaattaaaacaattttttaaaatg

SEQ ID NO: 8575 - DNA, 40 bp, Homo sapiens
cattttaaaaaattgttttaatttccaatacggtaaatat

SEQ ID NO: 8576 - DNA, 40 bp, Homo sapiens
tatttaccgtattggaaattaaaacaattttttaaaatgt

SEQ ID NO: 8577 - DNA, 40 bp, Homo sapiens
acattttaaaaaattgttttaatttccaatacggtaaata

SEQ ID NO: 8578 - DNA, 40 bp, Homo sapiens
atttaccgtattggaaattaaaacaattttttaaaatgta

SEQ ID NO: 8579 - DNA, 40 bp, Homo sapiens
tacattttaaaaaattgttttaatttccaatacggtaaat

SEQ ID NO: 8580 - DNA, 40 bp, Homo sapiens
tttaccgtattggaaattaaaacaattttttaaaatgtat

SEQ ID NO: 8581 - DNA, 40 bp, Homo sapiens
atacattttaaaaaattgttttaatttccaatacggtaaa

SEQ ID NO: 8582 - DNA, 40 bp, Homo sapiens
ttaccgtattggaaattaaaacaattttttaaaatgtatt

SEQ ID NO: 8583 - DNA, 40 bp, Homo sapiens
aatacattttaaaaaattgttttaatttccaatacggtaa

SEQ ID NO: 8584 - DNA, 40 bp, Homo sapiens
taccgtattggaaattaaaacaattttttaaaatgtattc

SEQ ID NO: 8585 - DNA, 40 bp, Homo sapiens
gaatacattttaaaaaattgttttaatttccaatacggta

SEQ ID NO: 8586 - DNA, 40 bp, Homo sapiens
accgtattggaaattaaaacaattttttaaaatgtattca

SEQ ID NO: 8587 - DNA, 40 bp, Homo sapiens
tgaatacattttaaaaaattgttttaatttccaatacggt

SEQ ID NO: 8588 - DNA, 40 bp, Homo sapiens
ccgtattggaaattaaaacaattttttaaaatgtattcat

SEQ ID NO: 8589 - DNA, 40 bp, Homo sapiens
atgaatacattttaaaaaattgttttaatttccaatacgg

SEQ ID NO: 8590 - DNA, 40 bp, Homo sapiens
cgtattggaaattaaaacaattttttaaaatgtattcatt

SEQ ID NO: 8591 - DNA, 40 bp, Homo sapiens
aatgaatacattttaaaaaattgttttaatttccaatacg

SEQ ID NO: 8592 - DNA, 40 bp, Homo sapiens
gtattggaaattaaaacaattttttaaaatgtattcattt

SEQ ID NO: 8593 - DNA, 40 bp, Homo sapiens
aaatgaatacattttaaaaaattgttttaatttccaatac

SEQ ID NO: 8594 - DNA, 40 bp, Homo sapiens
tattggaaattaaaacaattttttaaaatgtattcattta

SEQ ID NO: 8595 - DNA, 40 bp, Homo sapiens
taaatgaatacattttaaaaaattgttttaatttccaata

SEQ ID NO: 8596 - DNA, 40 bp, Homo sapiens
attggaaattaaaacaattttttaaaatgtattcatttaa

SEQ ID NO: 8597 - DNA, 40 bp, Homo sapiens
ttaaatgaatacattttaaaaaattgttttaatttccaat

SEQ ID NO: 8598 - DNA, 40 bp, Homo sapiens
ttggaaattaaaacaattttttaaaatgtattcatttaaa

SEQ ID NO: 8599 - DNA, 40 bp, Homo sapiens
tttaaatgaatacattttaaaaaattgttttaatttccaa

SEQ ID NO: 8600 - DNA, 40 bp, Homo sapiens
tggaaattaaaacaattttttaaaatgtattcatttaaaa

SEQ ID NO: 8601 - DNA, 40 bp, Homo sapiens
ttttaaatgaatacattttaaaaaattgttttaatttcca

SEQ ID NO: 8602 - DNA, 40 bp, Homo sapiens
ggaaattaaaacaattttttaaaatgtattcatttaaaaa

SEQ ID NO: 8603 - DNA, 40 bp, Homo sapiens
tttttaaatgaatacattttaaaaaattgttttaatttcc

SEQ ID NO: 8604 - DNA, 40 bp, Homo sapiens
gaaattaaaacaattttttaaaatgtattcatttaaaaat

SEQ ID NO: 8605 - DNA, 40 bp, Homo sapiens
atttttaaatgaatacattttaaaaaattgttttaatttc

SEQ ID NO: 8606 - DNA, 40 bp, Homo sapiens
aaattaaaacaattttttaaaatgtattcatttaaaaata

SEQ ID NO: 8607 - DNA, 40 bp, Homo sapiens
tatttttaaatgaatacattttaaaaaattgttttaattt

SEQ ID NO: 8608 - DNA, 40 bp, Homo sapiens
aattaaaacaattttttaaaatgtattcatttaaaaataa

SEQ ID NO: 8609 - DNA, 40 bp, Homo sapiens
ttatttttaaatgaatacattttaaaaaattgttttaatt

SEQ ID NO: 8610 - DNA, 40 bp, Homo sapiens
attaaaacaattttttaaaatgtattcatttaaaaataat

SEQ ID NO: 8611 - DNA, 40 bp, Homo sapiens
attatttttaaatgaatacattttaaaaaattgttttaat

SEQ ID NO: 8612 - DNA, 40 bp, Homo sapiens
ttaaaacaattttttaaaatgtattcatttaaaaataata

SEQ ID NO: 8613 - DNA, 40 bp, Homo sapiens
tattatttttaaatgaatacattttaaaaaattgttttaa

SEQ ID NO: 8614 - DNA, 40 bp, Homo sapiens
taaaacaattttttaaaatgtattcatttaaaaataataa

SEQ ID NO: 8615 - DNA, 40 bp, Homo sapiens
ttattatttttaaatgaatacattttaaaaaattgtttta

SEQ ID NO: 8616 - DNA, 40 bp, Homo sapiens
aaaacaattttttaaaatgtattcatttaaaaataataag

SEQ ID NO: 8617 - DNA, 40 bp, Homo sapiens
cttattatttttaaatgaatacattttaaaaaattgtttt

SEQ ID NO: 8618 - DNA, 40 bp, Homo sapiens
aaacaattttttaaaatgtattcatttaaaaataataagc

SEQ ID NO: 8619 - DNA, 40 bp, Homo sapiens
gcttattatttttaaatgaatacattttaaaaaattgttt

SEQ ID NO: 8620 - DNA, 40 bp, Homo sapiens
aacaattttttaaaatgtattcatttaaaaataataagcc

SEQ ID NO: 8621 - DNA, 40 bp, Homo sapiens
ggcttattatttttaaatgaatacattttaaaaaattgtt

SEQ ID NO: 8622 - DNA, 40 bp, Homo sapiens
acaattttttaaaatgtattcatttaaaaataataagccc

SEQ ID NO: 8623 - DNA, 40 bp, Homo sapiens
gggcttattatttttaaatgaatacattttaaaaaattgt

SEQ ID NO: 8624 - DNA, 40 bp, Homo sapiens
caattttttaaaatgtattcatttaaaaataataagccca

SEQ ID NO: 8625 - DNA, 40 bp, Homo sapiens
tgggcttattatttttaaatgaatacattttaaaaaattg

SEQ ID NO: 8626 - DNA, 40 bp, Homo sapiens
aattttttaaaatgtattcatttaaaaataataagcccat

SEQ ID NO: 8627 - DNA, 40 bp, Homo sapiens
atgggcttattatttttaaatgaatacattttaaaaaatt

SEQ ID NO: 8628 - DNA, 40 bp, Homo sapiens
attttttaaaatgtattcatttaaaaataataagcccatt

SEQ ID NO: 8629 - DNA, 40 bp, Homo sapiens
aatgggcttattatttttaaatgaatacattttaaaaaat

SEQ ID NO: 8630 - DNA, 40 bp, Homo sapiens
ttttttaaaatgtattcatttaaaaataataagcccatta

SEQ ID NO: 8631 - DNA, 40 bp, Homo sapiens
taatgggcttattatttttaaatgaatacattttaaaaaa

SEQ ID NO: 8632 - DNA, 40 bp, Homo sapiens
tttttaaaatgtattcatttaaaaataataagcccattac

SEQ ID NO: 8633 - DNA, 40 bp, Homo sapiens
gtaatgggcttattatttttaaatgaatacattttaaaaa

SEQ ID NO: 8634 - DNA, 40 bp, Homo sapiens
ttttaaaatgtattcatttaaaaataataagcccattact

SEQ ID NO: 8635 - DNA, 40 bp, Homo sapiens
agtaatgggcttattatttttaaatgaatacattttaaaa

SEQ ID NO: 8636 - DNA, 40 bp, Homo sapiens
tttaaaatgtattcatttaaaaataataagcccattactt

SEQ ID NO: 8637 - DNA, 40 bp, Homo sapiens
aagtaatgggcttattatttttaaatgaatacattttaaa

SEQ ID NO: 8638 - DNA, 40 bp, Homo sapiens
ttaaaatgtattcatttaaaaataataagcccattacttg

SEQ ID NO: 8639 - DNA, 40 bp, Homo sapiens
caagtaatgggcttattatttttaaatgaatacattttaa

SEQ ID NO: 8640 - DNA, 40 bp, Homo sapiens
taaaatgtattcatttaaaaataataagcccattacttgg

SEQ ID NO: 8641 - DNA, 40 bp, Homo sapiens
ccaagtaatgggcttattatttttaaatgaatacatttta

SEQ ID NO: 8642 - DNA, 40 bp, Homo sapiens
aaaatgtattcatttaaaaataataagcccattacttggt

SEQ ID NO: 8643 - DNA, 40 bp, Homo sapiens
accaagtaatgggcttattatttttaaatgaatacatttt

SEQ ID NO: 8644 - DNA, 40 bp, Homo sapiens
aaatgtattcatttaaaaataataagcccattacttggta

SEQ ID NO: 8645 - DNA, 40 bp, Homo sapiens
taccaagtaatgggcttattatttttaaatgaatacattt

SEQ ID NO: 8646 - DNA, 40 bp, Homo sapiens
aatgtattcatttaaaaataataagcccattacttggtaa

SEQ ID NO: 8647 - DNA, 40 bp, Homo sapiens
ttaccaagtaatgggcttattatttttaaatgaatacatt

SEQ ID NO: 8648 - DNA, 40 bp, Homo sapiens
atgtattcatttaaaaataataagcccattacttggtaac

SEQ ID NO: 8649 - DNA, 40 bp, Homo sapiens
gttaccaagtaatgggcttattatttttaaatgaatacat

SEQ ID NO: 8650 - DNA, 40 bp, Homo sapiens
tgtattcatttaaaaataataagcccattacttggtaaca

SEQ ID NO: 8651 - DNA, 40 bp, Homo sapiens
tgttaccaagtaatgggcttattatttttaaatgaataca

SEQ ID NO: 8652 - DNA, 40 bp, Homo sapiens
gtattcatttaaaaataataagcccattacttggtaacat

SEQ ID NO: 8653 - DNA, 40 bp, Homo sapiens
atgttaccaagtaatgggcttattatttttaaatgaatac

SEQ ID NO: 8654 - DNA, 40 bp, Homo sapiens
tattcatttaaaaataataagcccattacttggtaacatg

SEQ ID NO: 8655 - DNA, 40 bp, Homo sapiens
catgttaccaagtaatgggcttattatttttaaatgaata

SEQ ID NO: 8656 - DNA, 40 bp, Homo sapiens
attcatttaaaaataataagcccattacttggtaacatga

SEQ ID NO: 8657 - DNA, 40 bp, Homo sapiens
tcatgttaccaagtaatgggcttattatttttaaatgaat

SEQ ID NO: 8658 - DNA, 40 bp, Homo sapiens
ttcatttaaaaataataagcccattacttggtaacatgaa

SEQ ID NO: 8659 - DNA, 40 bp, Homo sapiens
ttcatgttaccaagtaatgggcttattatttttaaatgaa

SEQ ID NO: 8660 - DNA, 40 bp, Homo sapiens
tcatttaaaaataataagcccattacttggtaacatgaat

SEQ ID NO: 8661 - DNA, 40 bp, Homo sapiens
attcatgttaccaagtaatgggcttattatttttaaatga

SEQ ID NO: 8662 - DNA, 40 bp, Homo sapiens
catttaaaaataataagcccattacttggtaacatgaata

SEQ ID NO: 8663 - DNA, 40 bp, Homo sapiens
tattcatgttaccaagtaatgggcttattatttttaaatg

SEQ ID NO: 8664 - DNA, 40 bp, Homo sapiens
atttaaaaataataagcccattacttggtaacatgaataa

SEQ ID NO: 8665 - DNA, 40 bp, Homo sapiens
ttattcatgttaccaagtaatgggcttattatttttaaat

SEQ ID NO: 8666 - DNA, 40 bp, Homo sapiens
tttaaaaataataagcccattacttggtaacatgaataaa

SEQ ID NO: 8667 - DNA, 40 bp, Homo sapiens
tttattcatgttaccaagtaatgggcttattatttttaaa

SEQ ID NO: 8668 - DNA, 40 bp, Homo sapiens
ttaaaaataataagcccattacttggtaacatgaataaaa

SEQ ID NO: 8669 - DNA, 40 bp, Homo sapiens
ttttattcatgttaccaagtaatgggcttattatttttaa

SEQ ID NO: 8670 - DNA, 40 bp, Homo sapiens
taaaaataataagcccattacttggtaacatgaataaaat

SEQ ID NO: 8671 - DNA, 40 bp, Homo sapiens
attttattcatgttaccaagtaatgggcttattattttta

SEQ ID NO: 8672 - DNA, 40 bp, Homo sapiens
aaaaataataagcccattacttggtaacatgaataaaata

SEQ ID NO: 8673 - DNA, 40 bp, Homo sapiens
tattttattcatgttaccaagtaatgggcttattattttt

SEQ ID NO: 8674 - DNA, 40 bp, Homo sapiens
aaaataataagcccattacttggtaacatgaataaaatat

SEQ ID NO: 8675 - DNA, 40 bp, Homo sapiens
atattttattcatgttaccaagtaatgggcttattatttt

SEQ ID NO: 8676 - DNA, 40 bp, Homo sapiens
aaataataagcccattacttggtaacatgaataaaatatt

SEQ ID NO: 8677 - DNA, 40 bp, Homo sapiens
aatattttattcatgttaccaagtaatgggcttattattt

SEQ ID NO: 8678 - DNA, 40 bp, Homo sapiens
aataataagcccattacttggtaacatgaataaaatattt

SEQ ID NO: 8679 - DNA, 40 bp, Homo sapiens
aaatattttattcatgttaccaagtaatgggcttattatt

SEQ ID NO: 8680 - DNA, 40 bp, Homo sapiens
ataataagcccattacttggtaacatgaataaaatatttt

SEQ ID NO: 8681 - DNA, 40 bp, Homo sapiens
aaaatattttattcatgttaccaagtaatgggcttattat

SEQ ID NO: 8682 - DNA, 40 bp, Homo sapiens
taataagcccattacttggtaacatgaataaaatatttta

SEQ ID NO: 8683 - DNA, 40 bp, Homo sapiens
taaaatattttattcatgttaccaagtaatgggcttatta

SEQ ID NO: 8684 - DNA, 40 bp, Homo sapiens
aataagcccattacttggtaacatgaataaaatattttat

SEQ ID NO: 8685 - DNA, 40 bp, Homo sapiens
ataaaatattttattcatgttaccaagtaatgggcttatt

SEQ ID NO: 8686 - DNA, 40 bp, Homo sapiens
ataagcccattacttggtaacatgaataaaatattttatg

SEQ ID NO: 8687 - DNA, 40 bp, Homo sapiens
cataaaatattttattcatgttaccaagtaatgggcttat

SEQ ID NO: 8688 - DNA, 40 bp, Homo sapiens
taagcccattacttggtaacatgaataaaatattttatga

SEQ ID NO: 8689 - DNA, 40 bp, Homo sapiens
tcataaaatattttattcatgttaccaagtaatgggctta

SEQ ID NO: 8690 - DNA, 40 bp, Homo sapiens
aagcccattacttggtaacatgaataaaatattttatgaa

SEQ ID NO: 8691 - DNA, 40 bp, Homo sapiens
ttcataaaatattttattcatgttaccaagtaatgggctt

SEQ ID NO: 8692 - DNA, 40 bp, Homo sapiens
agcccattacttggtaacatgaataaaatattttatgaaa

SEQ ID NO: 8693 - DNA, 40 bp, Homo sapiens
tttcataaaatattttattcatgttaccaagtaatgggct

SEQ ID NO: 8694 - DNA, 40 bp, Homo sapiens
gcccattacttggtaacatgaataaaatattttatgaaaa

SEQ ID NO: 8695 - DNA, 40 bp, Homo sapiens
ttttcataaaatattttattcatgttaccaagtaatgggc

SEQ ID NO: 8696 - DNA, 40 bp, Homo sapiens
cccattacttggtaacatgaataaaatattttatgaaaaa

SEQ ID NO: 8697 - DNA, 40 bp, Homo sapiens
tttttcataaaatattttattcatgttaccaagtaatggg

SEQ ID NO: 8698 - DNA, 40 bp, Homo sapiens
ccattacttggtaacatgaataaaatattttatgaaaaat

SEQ ID NO: 8699 - DNA, 40 bp, Homo sapiens
atttttcataaaatattttattcatgttaccaagtaatgg

SEQ ID NO: 8700 - DNA, 40 bp, Homo sapiens
cattacttggtaacatgaataaaatattttatgaaaaata

SEQ ID NO: 8701 - DNA, 40 bp, Homo sapiens
tatttttcataaaatattttattcatgttaccaagtaatg

SEQ ID NO: 8702 - DNA, 40 bp, Homo sapiens
attacttggtaacatgaataaaatattttatgaaaaataa

SEQ ID NO: 8703 - DNA, 40 bp, Homo sapiens
ttatttttcataaaatattttattcatgttaccaagtaat

SEQ ID NO: 8704 - DNA, 40 bp, Homo sapiens
ttacttggtaacatgaataaaatattttatgaaaaataac

SEQ ID NO: 8705 - DNA, 40 bp, Homo sapiens
gttatttttcataaaatattttattcatgttaccaagtaa

SEQ ID NO: 8706 - DNA, 40 bp, Homo sapiens
tacttggtaacatgaataaaatattttatgaaaaataact

SEQ ID NO: 8707 - DNA, 40 bp, Homo sapiens
agttatttttcataaaatattttattcatgttaccaagta

SEQ ID NO: 8708 - DNA, 40 bp, Homo sapiens
acttggtaacatgaataaaatattttatgaaaaataacta

SEQ ID NO: 8709 - DNA, 40 bp, Homo sapiens
tagttatttttcataaaatattttattcatgttaccaagt

SEQ ID NO: 8710 - DNA, 40 bp, Homo sapiens
cttggtaacatgaataaaatattttatgaaaaataactat

SEQ ID NO: 8711 - DNA, 40 bp, Homo sapiens
atagttatttttcataaaatattttattcatgttaccaag

SEQ ID NO: 8712 - DNA, 40 bp, Homo sapiens
ttggtaacatgaataaaatattttatgaaaaataactatt

SEQ ID NO: 8713 - DNA, 40 bp, Homo sapiens
aatagttatttttcataaaatattttattcatgttaccaa

SEQ ID NO: 8714 - DNA, 40 bp, Homo sapiens
tggtaacatgaataaaatattttatgaaaaataactattt

SEQ ID NO: 8715 - DNA, 40 bp, Homo sapiens
aaatagttatttttcataaaatattttattcatgttacca

SEQ ID NO: 8716 - DNA, 40 bp, Homo sapiens
ggtaacatgaataaaatattttatgaaaaataactatttt

SEQ ID NO: 8717 - DNA, 40 bp, Homo sapiens
aaaatagttatttttcataaaatattttattcatgttacc

SEQ ID NO: 8718 - DNA, 40 bp, Homo sapiens
gtaacatgaataaaatattttatgaaaaataactattttc

SEQ ID NO: 8719 - DNA, 40 bp, Homo sapiens
gaaaatagttatttttcataaaatattttattcatgttac

SEQ ID NO: 8720 - DNA, 40 bp, Homo sapiens
taacatgaataaaatattttatgaaaaataactattttcc

SEQ ID NO: 8721 - DNA, 40 bp, Homo sapiens
ggaaaatagttatttttcataaaatattttattcatgtta

SEQ ID NO: 8722 - DNA, 40 bp, Homo sapiens
aacatgaataaaatattttatgaaaaataactattttcca

SEQ ID NO: 8723 - DNA, 40 bp, Homo sapiens
tggaaaatagttatttttcataaaatattttattcatgtt

SEQ ID NO: 8724 - DNA, 40 bp, Homo sapiens
acatgaataaaatattttatgaaaaataactattttccaa

SEQ ID NO: 8725 - DNA, 40 bp, Homo sapiens
ttggaaaatagttatttttcataaaatattttattcatgt

SEQ ID NO: 8726 - DNA, 40 bp, Homo sapiens
catgaataaaatattttatgaaaaataactattttccaaa

SEQ ID NO: 8727 - DNA, 40 bp, Homo sapiens
tttggaaaatagttatttttcataaaatattttattcatg

SEQ ID NO: 8728 - DNA, 40 bp, Homo sapiens
atgaataaaatattttatgaaaaataactattttccaaaa

SEQ ID NO: 8729 - DNA, 40 bp, Homo sapiens
ttttggaaaatagttatttttcataaaatattttattcat

SEQ ID NO: 8730 - DNA, 40 bp, Homo sapiens
tgaataaaatattttatgaaaaataactattttccaaaac

SEQ ID NO: 8731 - DNA, 40 bp, Homo sapiens
gttttggaaaatagttatttttcataaaatattttattca

SEQ ID NO: 8732 - DNA, 40 bp, Homo sapiens
gaataaaatattttatgaaaaataactattttccaaaaca

SEQ ID NO: 8733 - DNA, 40 bp, Homo sapiens
tgttttggaaaatagttatttttcataaaatattttattc

SEQ ID NO: 8734 - DNA, 40 bp, Homo sapiens
aataaaatattttatgaaaaataactattttccaaaacaa

SEQ ID NO: 8735 - DNA, 40 bp, Homo sapiens
ttgttttggaaaatagttatttttcataaaatattttatt

SEQ ID NO: 8736 - DNA, 40 bp, Homo sapiens
ataaaatattttatgaaaaataactattttccaaaacaaa

SEQ ID NO: 8737 - DNA, 40 bp, Homo sapiens
tttgttttggaaaatagttatttttcataaaatattttat

SEQ ID NO: 8738 - DNA, 40 bp, Homo sapiens
taaaatattttatgaaaaataactattttccaaaacaaaa

SEQ ID NO: 8739 - DNA, 40 bp, Homo sapiens
ttttgttttggaaaatagttatttttcataaaatatttta

SEQ ID NO: 8740 - DNA, 40 bp, Homo sapiens
aaaatattttatgaaaaataactattttccaaaacaaaac

SEQ ID NO: 8741 - DNA, 40 bp, Homo sapiens
gttttgttttggaaaatagttatttttcataaaatatttt

SEQ ID NO: 8742 - DNA, 40 bp, Homo sapiens
aaatattttatgaaaaataactattttccaaaacaaaacc

SEQ ID NO: 8743 - DNA, 40 bp, Homo sapiens
ggttttgttttggaaaatagttatttttcataaaatattt

SEQ ID NO: 8744 - DNA, 40 bp, Homo sapiens
aatattttatgaaaaataactattttccaaaacaaaacca

SEQ ID NO: 8745 - DNA, 40 bp, Homo sapiens
tggttttgttttggaaaatagttatttttcataaaatatt

SEQ ID NO: 8746 - DNA, 40 bp, Homo sapiens
atattttatgaaaaataactattttccaaaacaaaaccaa

SEQ ID NO: 8747 - DNA, 40 bp, Homo sapiens
ttggttttgttttggaaaatagttatttttcataaaatat

SEQ ID NO: 8748 - DNA, 40 bp, Homo sapiens
tattttatgaaaaataactattttccaaaacaaaaccaaa

SEQ ID NO: 8749 - DNA, 40 bp, Homo sapiens
tttggttttgttttggaaaatagttatttttcataaaata

SEQ ID NO: 8750 - DNA, 40 bp, Homo sapiens
attttatgaaaaataactattttccaaaacaaaaccaaaa

SEQ ID NO: 8751 - DNA, 40 bp, Homo sapiens
ttttggttttgttttggaaaatagttatttttcataaaat

SEQ ID NO: 8752 - DNA, 40 bp, Homo sapiens
ttttatgaaaaataactattttccaaaacaaaaccaaaac

SEQ ID NO: 8753 - DNA, 40 bp, Homo sapiens
gttttggttttgttttggaaaatagttatttttcataaaa

SEQ ID NO: 8754 - DNA, 40 bp, Homo sapiens
tttatgaaaaataactattttccaaaacaaaaccaaaact

SEQ ID NO: 8755 - DNA, 40 bp, Homo sapiens
agttttggttttgttttggaaaatagttatttttcataaa

SEQ ID NO: 8756 - DNA, 40 bp, Homo sapiens
ttatgaaaaataactattttccaaaacaaaaccaaaactt

SEQ ID NO: 8757 - DNA, 40 bp, Homo sapiens
aagttttggttttgttttggaaaatagttatttttcataa

SEQ ID NO: 8758 - DNA, 40 bp, Homo sapiens
tatgaaaaataactattttccaaaacaaaaccaaaactta

SEQ ID NO: 8759 - DNA, 40 bp, Homo sapiens
taagttttggttttgttttggaaaatagttatttttcata

SEQ ID NO: 8760 - DNA, 40 bp, Homo sapiens
atgaaaaataactattttccaaaacaaaaccaaaacttag

SEQ ID NO: 8761 - DNA, 40 bp, Homo sapiens
ctaagttttggttttgttttggaaaatagttatttttcat

SEQ ID NO: 8762 - DNA, 40 bp, Homo sapiens
tgaaaaataactattttccaaaacaaaaccaaaacttaga

SEQ ID NO: 8763 - DNA, 40 bp, Homo sapiens
tctaagttttggttttgttttggaaaatagttatttttca

SEQ ID NO: 8764 - DNA, 40 bp, Homo sapiens
gaaaaataactattttccaaaacaaaaccaaaacttagaa

SEQ ID NO: 8765 - DNA, 40 bp, Homo sapiens
ttctaagttttggttttgttttggaaaatagttatttttc

SEQ ID NO: 8766 - DNA, 40 bp, Homo sapiens
aaaaataactattttccaaaacaaaaccaaaacttagaaa

SEQ ID NO: 8767 - DNA, 40 bp, Homo sapiens
tttctaagttttggttttgttttggaaaatagttattttt

SEQ ID NO: 8768 - DNA, 40 bp, Homo sapiens
aaaataactattttccaaaacaaaaccaaaacttagaaaa

SEQ ID NO: 8769 - DNA, 40 bp, Homo sapiens
ttttctaagttttggttttgttttggaaaatagttatttt

SEQ ID NO: 8770 - DNA, 40 bp, Homo sapiens
aaataactattttccaaaacaaaaccaaaacttagaaaag

SEQ ID NO: 8771 - DNA, 40 bp, Homo sapiens
cttttctaagttttggttttgttttggaaaatagttattt

SEQ ID NO: 8772 - DNA, 40 bp, Homo sapiens
aataactattttccaaaacaaaaccaaaacttagaaaagt

SEQ ID NO: 8773 - DNA, 40 bp, Homo sapiens
acttttctaagttttggttttgttttggaaaatagttatt

SEQ ID NO: 8774 - DNA, 40 bp, Homo sapiens
ataactattttccaaaacaaaaccaaaacttagaaaagtg

SEQ ID NO: 8775 - DNA, 40 bp, Homo sapiens
cacttttctaagttttggttttgttttggaaaatagttat

SEQ ID NO: 8776 - DNA, 40 bp, Homo sapiens
taactattttccaaaacaaaaccaaaacttagaaaagtgg

SEQ ID NO: 8777 - DNA, 40 bp, Homo sapiens
ccacttttctaagttttggttttgttttggaaaatagtta

SEQ ID NO: 8778 - DNA, 40 bp, Homo sapiens
aactattttccaaaacaaaaccaaaacttagaaaagtggt

SEQ ID NO: 8779 - DNA, 40 bp, Homo sapiens
accacttttctaagttttggttttgttttggaaaatagtt

SEQ ID NO: 8780 - DNA, 40 bp, Homo sapiens
actattttccaaaacaaaaccaaaacttagaaaagtggta

SEQ ID NO: 8781 - DNA, 40 bp, Homo sapiens
taccacttttctaagttttggttttgttttggaaaatagt

SEQ ID NO: 8782 - DNA, 40 bp, Homo sapiens
ctattttccaaaacaaaaccaaaacttagaaaagtggtat

SEQ ID NO: 8783 - DNA, 40 bp, Homo sapiens
ataccacttttctaagttttggttttgttttggaaaatag

SEQ ID NO: 8784 - DNA, 40 bp, Homo sapiens
tattttccaaaacaaaaccaaaacttagaaaagtggtatt

SEQ ID NO: 8785 - DNA, 40 bp, Homo sapiens
aataccacttttctaagttttggttttgttttggaaaata

SEQ ID NO: 8786 - DNA, 40 bp, Homo sapiens
attttccaaaacaaaaccaaaacttagaaaagtggtattg

SEQ ID NO: 8787 - DNA, 40 bp, Homo sapiens
caataccacttttctaagttttggttttgttttggaaaat

SEQ ID NO: 8788 - DNA, 40 bp, Homo sapiens
ttttccaaaacaaaaccaaaacttagaaaagtggtattgt

SEQ ID NO: 8789 - DNA, 40 bp, Homo sapiens
acaataccacttttctaagttttggttttgttttggaaaa

SEQ ID NO: 8790 - DNA, 40 bp, Homo sapiens
tttccaaaacaaaaccaaaacttagaaaagtggtattgtt

SEQ ID NO: 8791 - DNA, 40 bp, Homo sapiens
aacaataccacttttctaagttttggttttgttttggaaa

SEQ ID NO: 8792 - DNA, 40 bp, Homo sapiens
ttccaaaacaaaaccaaaacttagaaaagtggtattgttt

SEQ ID NO: 8793 - DNA, 40 bp, Homo sapiens
aaacaataccacttttctaagttttggttttgttttggaa

SEQ ID NO: 8794 - DNA, 40 bp, Homo sapiens
tccaaaacaaaaccaaaacttagaaaagtggtattgtttc

SEQ ID NO: 8795 - DNA, 40 bp, Homo sapiens
gaaacaataccacttttctaagttttggttttgttttgga

SEQ ID NO: 8796 - DNA, 40 bp, Homo sapiens
ccaaaacaaaaccaaaacttagaaaagtggtattgtttca

SEQ ID NO: 8797 - DNA, 40 bp, Homo sapiens
tgaaacaataccacttttctaagttttggttttgttttgg

SEQ ID NO: 8798 - DNA, 40 bp, Homo sapiens
caaaacaaaaccaaaacttagaaaagtggtattgtttcac

SEQ ID NO: 8799 - DNA, 40 bp, Homo sapiens
gtgaaacaataccacttttctaagttttggttttgttttg

SEQ ID NO: 8800 - DNA, 40 bp, Homo sapiens
aaaacaaaaccaaaacttagaaaagtggtattgtttcaca

SEQ ID NO: 8801 - DNA, 40 bp, Homo sapiens
tgtgaaacaataccacttttctaagttttggttttgtttt

SEQ ID NO: 8802 - DNA, 40 bp, Homo sapiens
aaacaaaaccaaaacttagaaaagtggtattgtttcacac

SEQ ID NO: 8803 - DNA, 40 bp, Homo sapiens
gtgtgaaacaataccacttttctaagttttggttttgttt

SEQ ID NO: 8804 - DNA, 40 bp, Homo sapiens
aacaaaaccaaaacttagaaaagtggtattgtttcacact

SEQ ID NO: 8805 - DNA, 40 bp, Homo sapiens
agtgtgaaacaataccacttttctaagttttggttttgtt

SEQ ID NO: 8806 - DNA, 40 bp, Homo sapiens
acaaaaccaaaacttagaaaagtggtattgtttcacactt

SEQ ID NO: 8807 - DNA, 40 bp, Homo sapiens
aagtgtgaaacaataccacttttctaagttttggttttgt

SEQ ID NO: 8808 - DNA, 40 bp, Homo sapiens
caaaaccaaaacttagaaaagtggtattgtttcacacttc

SEQ ID NO: 8809 - DNA, 40 bp, Homo sapiens
gaagtgtgaaacaataccacttttctaagttttggttttg

SEQ ID NO: 8810 - DNA, 40 bp, Homo sapiens
aaaaccaaaacttagaaaagtggtattgtttcacacttca

SEQ ID NO: 8811 - DNA, 40 bp, Homo sapiens
tgaagtgtgaaacaataccacttttctaagttttggtttt

SEQ ID NO: 8812 - DNA, 40 bp, Homo sapiens
aaaccaaaacttagaaaagtggtattgtttcacacttcag

SEQ ID NO: 8813 - DNA, 40 bp, Homo sapiens
ctgaagtgtgaaacaataccacttttctaagttttggttt

SEQ ID NO: 8814 - DNA, 40 bp, Homo sapiens
aaccaaaacttagaaaagtggtattgtttcacacttcagt

SEQ ID NO: 8815 - DNA, 40 bp, Homo sapiens
actgaagtgtgaaacaataccacttttctaagttttggtt

SEQ ID NO: 8816 - DNA, 40 bp, Homo sapiens
accaaaacttagaaaagtggtattgtttcacacttcagta

SEQ ID NO: 8817 - DNA, 40 bp, Homo sapiens
tactgaagtgtgaaacaataccacttttctaagttttggt

SEQ ID NO: 8818 - DNA, 40 bp, Homo sapiens
ccaaaacttagaaaagtggtattgtttcacacttcagtaa

SEQ ID NO: 8819 - DNA, 40 bp, Homo sapiens
ttactgaagtgtgaaacaataccacttttctaagttttgg

SEQ ID NO: 8820 - DNA, 40 bp, Homo sapiens
caaaacttagaaaagtggtattgtttcacacttcagtaaa

SEQ ID NO: 8821 - DNA, 40 bp, Homo sapiens
tttactgaagtgtgaaacaataccacttttctaagttttg

SEQ ID NO: 8822 - DNA, 40 bp, Homo sapiens
aaaacttagaaaagtggtattgtttcacacttcagtaaat

SEQ ID NO: 8823 - DNA, 40 bp, Homo sapiens
atttactgaagtgtgaaacaataccacttttctaagtttt

SEQ ID NO: 8824 - DNA, 40 bp, Homo sapiens
aaacttagaaaagtggtattgtttcacacttcagtaaatc

SEQ ID NO: 8825 - DNA, 40 bp, Homo sapiens
gatttactgaagtgtgaaacaataccacttttctaagttt

SEQ ID NO: 8826 - DNA, 40 bp, Homo sapiens
aacttagaaaagtggtattgtttcacacttcagtaaatct

SEQ ID NO: 8827 - DNA, 40 bp, Homo sapiens
agatttactgaagtgtgaaacaataccacttttctaagtt

SEQ ID NO: 8828 - DNA, 40 bp, Homo sapiens
acttagaaaagtggtattgtttcacacttcagtaaatctc

SEQ ID NO: 8829 - DNA, 40 bp, Homo sapiens
gagatttactgaagtgtgaaacaataccacttttctaagt

SEQ ID NO: 8830 - DNA, 40 bp, Homo sapiens
cttagaaaagtggtattgtttcacacttcagtaaatctct

SEQ ID NO: 8831 - DNA, 40 bp, Homo sapiens
agagatttactgaagtgtgaaacaataccacttttctaag

SEQ ID NO: 8832 - DNA, 40 bp, Homo sapiens
ttagaaaagtggtattgtttcacacttcagtaaatctctt

SEQ ID NO: 8833 - DNA, 40 bp, Homo sapiens
aagagatttactgaagtgtgaaacaataccacttttctaa

SEQ ID NO: 8834 - DNA, 40 bp, Homo sapiens
tagaaaagtggtattgtttcacacttcagtaaatctcttt

SEQ ID NO: 8835 - DNA, 40 bp, Homo sapiens
aaagagatttactgaagtgtgaaacaataccacttttcta

SEQ ID NO: 8836 - DNA, 40 bp, Homo sapiens
agaaaagtggtattgtttcacacttcagtaaatctcttta

SEQ ID NO: 8837 - DNA, 40 bp, Homo sapiens
taaagagatttactgaagtgtgaaacaataccacttttct

SEQ ID NO: 8838 - DNA, 40 bp, Homo sapiens
gaaaagtggtattgtttcacacttcagtaaatctctttaa

SEQ ID NO: 8839 - DNA, 40 bp, Homo sapiens
ttaaagagatttactgaagtgtgaaacaataccacttttc

SEQ ID NO: 8840 - DNA, 40 bp, Homo sapiens
aaaagtggtattgtttcacacttcagtaaatctctttaat

SEQ ID NO: 8841 - DNA, 40 bp, Homo sapiens
attaaagagatttactgaagtgtgaaacaataccactttt

SEQ ID NO: 8842 - DNA, 40 bp, Homo sapiens
aaagtggtattgtttcacacttcagtaaatctctttaatg

SEQ ID NO: 8843 - DNA, 40 bp, Homo sapiens
cattaaagagatttactgaagtgtgaaacaataccacttt

SEQ ID NO: 8844 - DNA, 40 bp, Homo sapiens
aagtggtattgtttcacacttcagtaaatctctttaatga

SEQ ID NO: 8845 - DNA, 40 bp, Homo sapiens
tcattaaagagatttactgaagtgtgaaacaataccactt

SEQ ID NO: 8846 - DNA, 40 bp, Homo sapiens
agtggtattgtttcacacttcagtaaatctctttaatgat

SEQ ID NO: 8847 - DNA, 40 bp, Homo sapiens
atcattaaagagatttactgaagtgtgaaacaataccact

SEQ ID NO: 8848 - DNA, 40 bp, Homo sapiens
gtggtattgtttcacacttcagtaaatctctttaatgatg

SEQ ID NO: 8849 - DNA, 40 bp, Homo sapiens
catcattaaagagatttactgaagtgtgaaacaataccac

SEQ ID NO: 8850 - DNA, 40 bp, Homo sapiens
tggtattgtttcacacttcagtaaatctctttaatgatgt

SEQ ID NO: 8851 - DNA, 40 bp, Homo sapiens
acatcattaaagagatttactgaagtgtgaaacaatacca

SEQ ID NO: 8852 - DNA, 40 bp, Homo sapiens
ggtattgtttcacacttcagtaaatctctttaatgatgtg

SEQ ID NO: 8853 - DNA, 40 bp, Homo sapiens
cacatcattaaagagatttactgaagtgtgaaacaatacc

SEQ ID NO: 8854 - DNA, 40 bp, Homo sapiens
gtattgtttcacacttcagtaaatctctttaatgatgtgg

SEQ ID NO: 8855 - DNA, 40 bp, Homo sapiens
ccacatcattaaagagatttactgaagtgtgaaacaatac

SEQ ID NO: 8856 - DNA, 40 bp, Homo sapiens
tattgtttcacacttcagtaaatctctttaatgatgtggc

SEQ ID NO: 8857 - DNA, 40 bp, Homo sapiens
gccacatcattaaagagatttactgaagtgtgaaacaata

SEQ ID NO: 8858 - DNA, 40 bp, Homo sapiens
attgtttcacacttcagtaaatctctttaatgatgtggct

SEQ ID NO: 8859 - DNA, 40 bp, Homo sapiens
agccacatcattaaagagatttactgaagtgtgaaacaat

SEQ ID NO: 8860 - DNA, 40 bp, Homo sapiens
ttgtttcacacttcagtaaatctctttaatgatgtggctt

SEQ ID NO: 8861 - DNA, 40 bp, Homo sapiens
aagccacatcattaaagagatttactgaagtgtgaaacaa

SEQ ID NO: 8862 - DNA, 40 bp, Homo sapiens
tgtttcacacttcagtaaatctctttaatgatgtggctta

SEQ ID NO: 8863 - DNA, 40 bp, Homo sapiens
taagccacatcattaaagagatttactgaagtgtgaaaca

SEQ ID NO: 8864 - DNA, 40 bp, Homo sapiens
gtttcacacttcagtaaatctctttaatgatgtggcttaa

SEQ ID NO: 8865 - DNA, 40 bp, Homo sapiens
ttaagccacatcattaaagagatttactgaagtgtgaaac

SEQ ID NO: 8866 - DNA, 40 bp, Homo sapiens
tttcacacttcagtaaatctctttaatgatgtggcttaat

SEQ ID NO: 8867 - DNA, 40 bp, Homo sapiens
attaagccacatcattaaagagatttactgaagtgtgaaa

SEQ ID NO: 8868 - DNA, 40 bp, Homo sapiens
ttcacacttcagtaaatctctttaatgatgtggcttaata

SEQ ID NO: 8869 - DNA, 40 bp, Homo sapiens
tattaagccacatcattaaagagatttactgaagtgtgaa

SEQ ID NO: 8870 - DNA, 40 bp, Homo sapiens
tcacacttcagtaaatctctttaatgatgtggcttaatag

SEQ ID NO: 8871 - DNA, 40 bp, Homo sapiens
ctattaagccacatcattaaagagatttactgaagtgtga

SEQ ID NO: 8872 - DNA, 40 bp, Homo sapiens
cacacttcagtaaatctctttaatgatgtggcttaataga

SEQ ID NO: 8873 - DNA, 40 bp, Homo sapiens
tctattaagccacatcattaaagagatttactgaagtgtg

SEQ ID NO: 8874 - DNA, 40 bp, Homo sapiens
acacttcagtaaatctctttaatgatgtggcttaatagaa

SEQ ID NO: 8875 - DNA, 40 bp, Homo sapiens
ttctattaagccacatcattaaagagatttactgaagtgt

SEQ ID NO: 8876 - DNA, 40 bp, Homo sapiens
cacttcagtaaatctctttaatgatgtggcttaatagaag

SEQ ID NO: 8877 - DNA, 40 bp, Homo sapiens
cttctattaagccacatcattaaagagatttactgaagtg

SEQ ID NO: 8878 - DNA, 40 bp, Homo sapiens
acttcagtaaatctctttaatgatgtggcttaatagaaga

SEQ ID NO: 8879 - DNA, 40 bp, Homo sapiens
tcttctattaagccacatcattaaagagatttactgaagt

SEQ ID NO: 8880 - DNA, 40 bp, Homo sapiens
cttcagtaaatctctttaatgatgtggcttaatagaagat

SEQ ID NO: 8881 - DNA, 40 bp, Homo sapiens
atcttctattaagccacatcattaaagagatttactgaag

SEQ ID NO: 8882 - DNA, 40 bp, Homo sapiens
ttcagtaaatctctttaatgatgtggcttaatagaagata

SEQ ID NO: 8883 - DNA, 40 bp, Homo sapiens
tatcttctattaagccacatcattaaagagatttactgaa

SEQ ID NO: 8884 - DNA, 40 bp, Homo sapiens
tcagtaaatctctttaatgatgtggcttaatagaagatat

SEQ ID NO: 8885 - DNA, 40 bp, Homo sapiens
atatcttctattaagccacatcattaaagagatttactga

SEQ ID NO: 8886 - DNA, 40 bp, Homo sapiens
cagtaaatctctttaatgatgtggcttaatagaagatatg

SEQ ID NO: 8887 - DNA, 40 bp, Homo sapiens
catatcttctattaagccacatcattaaagagatttactg

SEQ ID NO: 8888 - DNA, 40 bp, Homo sapiens
agtaaatctctttaatgatgtggcttaatagaagatatgg

SEQ ID NO: 8889 - DNA, 40 bp, Homo sapiens
ccatatcttctattaagccacatcattaaagagatttact

SEQ ID NO: 8890 - DNA, 40 bp, Homo sapiens
gtaaatctctttaatgatgtggcttaatagaagatatgga

SEQ ID NO: 8891 - DNA, 40 bp, Homo sapiens
tccatatcttctattaagccacatcattaaagagatttac

SEQ ID NO: 8892 - DNA, 40 bp, Homo sapiens
taaatctctttaatgatgtggcttaatagaagatatggat

SEQ ID NO: 8893 - DNA, 40 bp, Homo sapiens
atccatatcttctattaagccacatcattaaagagattta

SEQ ID NO: 8894 - DNA, 40 bp, Homo sapiens
aaatctctttaatgatgtggcttaatagaagatatggatt

SEQ ID NO: 8895 - DNA, 40 bp, Homo sapiens
aatccatatcttctattaagccacatcattaaagagattt

SEQ ID NO: 8896 - DNA, 40 bp, Homo sapiens
aatctctttaatgatgtggcttaatagaagatatggattc

SEQ ID NO: 8897 - DNA, 40 bp, Homo sapiens
gaatccatatcttctattaagccacatcattaaagagatt

SEQ ID NO: 8898 - DNA, 40 bp, Homo sapiens
atctctttaatgatgtggcttaatagaagatatggattct

SEQ ID NO: 8899 - DNA, 40 bp, Homo sapiens
agaatccatatcttctattaagccacatcattaaagagat

SEQ ID NO: 8900 - DNA, 40 bp, Homo sapiens
tctctttaatgatgtggcttaatagaagatatggattctt

SEQ ID NO: 8901 - DNA, 40 bp, Homo sapiens
aagaatccatatcttctattaagccacatcattaaagaga

SEQ ID NO: 8902 - DNA, 40 bp, Homo sapiens
ctctttaatgatgtggcttaatagaagatatggattctta

SEQ ID NO: 8903 - DNA, 40 bp, Homo sapiens
taagaatccatatcttctattaagccacatcattaaagag

SEQ ID NO: 8904 - DNA, 40 bp, Homo sapiens
tctttaatgatgtggcttaatagaagatatggattcttat

SEQ ID NO: 8905 - DNA, 40 bp, Homo sapiens
ataagaatccatatcttctattaagccacatcattaaaga

SEQ ID NO: 8906 - DNA, 40 bp, Homo sapiens
ctttaatgatgtggcttaatagaagatatggattcttata

SEQ ID NO: 8907 - DNA, 40 bp, Homo sapiens
tataagaatccatatcttctattaagccacatcattaaag

SEQ ID NO: 8908 - DNA, 40 bp, Homo sapiens
tttaatgatgtggcttaatagaagatatggattcttatat

SEQ ID NO: 8909 - DNA, 40 bp, Homo sapiens
atataagaatccatatcttctattaagccacatcattaaa

SEQ ID NO: 8910 - DNA, 40 bp, Homo sapiens
ttaatgatgtggcttaatagaagatatggattcttatatc

SEQ ID NO: 8911 - DNA, 40 bp, Homo sapiens
gatataagaatccatatcttctattaagccacatcattaa

SEQ ID NO: 8912 - DNA, 40 bp, Homo sapiens
taatgatgtggcttaatagaagatatggattcttatatct

SEQ ID NO: 8913 - DNA, 40 bp, Homo sapiens
agatataagaatccatatcttctattaagccacatcatta

SEQ ID NO: 8914 - DNA, 40 bp, Homo sapiens
aatgatgtggcttaatagaagatatggattcttatatctg

SEQ ID NO: 8915 - DNA, 40 bp, Homo sapiens
cagatataagaatccatatcttctattaagccacatcatt

SEQ ID NO: 8916 - DNA, 40 bp, Homo sapiens
atgatgtggcttaatagaagatatggattcttatatctgc

SEQ ID NO: 8917 - DNA, 40 bp, Homo sapiens
gcagatataagaatccatatcttctattaagccacatcat

SEQ ID NO: 8918 - DNA, 40 bp, Homo sapiens
tgatgtggcttaatagaagatatggattcttatatctgca

SEQ ID NO: 8919 - DNA, 40 bp, Homo sapiens
tgcagatataagaatccatatcttctattaagccacatca

SEQ ID NO: 8920 - DNA, 40 bp, Homo sapiens
gatgtggcttaatagaagatatggattcttatatctgcat

SEQ ID NO: 8921 - DNA, 40 bp, Homo sapiens
atgcagatataagaatccatatcttctattaagccacatc

SEQ ID NO: 8922 - DNA, 40 bp, Homo sapiens
atgtggcttaatagaagatatggattcttatatctgcatc

SEQ ID NO: 8923 - DNA, 40 bp, Homo sapiens
gatgcagatataagaatccatatcttctattaagccacat

SEQ ID NO: 8924 - DNA, 40 bp, Homo sapiens
tgtggcttaatagaagatatggattcttatatctgcatct

SEQ ID NO: 8925 - DNA, 40 bp, Homo sapiens
agatgcagatataagaatccatatcttctattaagccaca

SEQ ID NO: 8926 - DNA, 40 bp, Homo sapiens
gtggcttaatagaagatatggattcttatatctgcatctg

SEQ ID NO: 8927 - DNA, 40 bp, Homo sapiens
cagatgcagatataagaatccatatcttctattaagccac

SEQ ID NO: 8928 - DNA, 40 bp, Homo sapiens
tggcttaatagaagatatggattcttatatctgcatctgc

SEQ ID NO: 8929 - DNA, 40 bp, Homo sapiens
gcagatgcagatataagaatccatatcttctattaagcca

SEQ ID NO: 8930 - DNA, 40 bp, Homo sapiens
ggcttaatagaagatatggattcttatatctgcatctgca

SEQ ID NO: 8931 - DNA, 40 bp, Homo sapiens
tgcagatgcagatataagaatccatatcttctattaagcc

SEQ ID NO: 8932 - DNA, 40 bp, Homo sapiens
gcttaatagaagatatggattcttatatctgcatctgcat

SEQ ID NO: 8933 - DNA, 40 bp, Homo sapiens
atgcagatgcagatataagaatccatatcttctattaagc

SEQ ID NO: 8934 - DNA, 40 bp, Homo sapiens
cttaatagaagatatggattcttatatctgcatctgcatt

SEQ ID NO: 8935 - DNA, 40 bp, Homo sapiens
aatgcagatgcagatataagaatccatatcttctattaag

SEQ ID NO: 8936 - DNA, 40 bp, Homo sapiens
ttaatagaagatatggattcttatatctgcatctgcattc

SEQ ID NO: 8937 - DNA, 40 bp, Homo sapiens
gaatgcagatgcagatataagaatccatatcttctattaa

SEQ ID NO: 8938 - DNA, 40 bp, Homo sapiens
taatagaagatatggattcttatatctgcatctgcattca

SEQ ID NO: 8939 - DNA, 40 bp, Homo sapiens
tgaatgcagatgcagatataagaatccatatcttctatta

SEQ ID NO: 8940 - DNA, 40 bp, Homo sapiens
aatagaagatatggattcttatatctgcatctgcattcaa

SEQ ID NO: 8941 - DNA, 40 bp, Homo sapiens
ttgaatgcagatgcagatataagaatccatatcttctatt

SEQ ID NO: 8942 - DNA, 40 bp, Homo sapiens
atagaagatatggattcttatatctgcatctgcattcaat

SEQ ID NO: 8943 - DNA, 40 bp, Homo sapiens
attgaatgcagatgcagatataagaatccatatcttctat

SEQ ID NO: 8944 - DNA, 40 bp, Homo sapiens
tagaagatatggattcttatatctgcatctgcattcaatc

SEQ ID NO: 8945 - DNA, 40 bp, Homo sapiens
gattgaatgcagatgcagatataagaatccatatcttcta

SEQ ID NO: 8946 - DNA, 40 bp, Homo sapiens
agaagatatggattcttatatctgcatctgcattcaatct

SEQ ID NO: 8947 - DNA, 40 bp, Homo sapiens
agattgaatgcagatgcagatataagaatccatatcttct

SEQ ID NO: 8948 - DNA, 40 bp, Homo sapiens
gaagatatggattcttatatctgcatctgcattcaatcta

SEQ ID NO: 8949 - DNA, 40 bp, Homo sapiens
tagattgaatgcagatgcagatataagaatccatatcttc

SEQ ID NO: 8950 - DNA, 40 bp, Homo sapiens
aagatatggattcttatatctgcatctgcattcaatctat

SEQ ID NO: 8951 - DNA, 40 bp, Homo sapiens
atagattgaatgcagatgcagatataagaatccatatctt

SEQ ID NO: 8952 - DNA, 40 bp, Homo sapiens
agatatggattcttatatctgcatctgcattcaatctatt

SEQ ID NO: 8953 - DNA, 40 bp, Homo sapiens
aatagattgaatgcagatgcagatataagaatccatatct

SEQ ID NO: 8954 - DNA, 40 bp, Homo sapiens
gatatggattcttatatctgcatctgcattcaatctatta

SEQ ID NO: 8955 - DNA, 40 bp, Homo sapiens
taatagattgaatgcagatgcagatataagaatccatatc

SEQ ID NO: 8956 - DNA, 40 bp, Homo sapiens
atatggattcttatatctgcatctgcattcaatctattat

SEQ ID NO: 8957 - DNA, 40 bp, Homo sapiens
ataatagattgaatgcagatgcagatataagaatccatat

SEQ ID NO: 8958 - DNA, 40 bp, Homo sapiens
tatggattcttatatctgcatctgcattcaatctattatg

SEQ ID NO: 8959 - DNA, 40 bp, Homo sapiens
cataatagattgaatgcagatgcagatataagaatccata

SEQ ID NO: 8960 - DNA, 40 bp, Homo sapiens
atggattcttatatctgcatctgcattcaatctattatga

SEQ ID NO: 8961 - DNA, 40 bp, Homo sapiens
tcataatagattgaatgcagatgcagatataagaatccat

SEQ ID NO: 8962 - DNA, 40 bp, Homo sapiens
tggattcttatatctgcatctgcattcaatctattatgat

SEQ ID NO: 8963 - DNA, 40 bp, Homo sapiens
atcataatagattgaatgcagatgcagatataagaatcca

SEQ ID NO: 8964 - DNA, 40 bp, Homo sapiens
ggattcttatatctgcatctgcattcaatctattatgatc

SEQ ID NO: 8965 - DNA, 40 bp, Homo sapiens
gatcataatagattgaatgcagatgcagatataagaatcc

SEQ ID NO: 8966 - DNA, 40 bp, Homo sapiens
gattcttatatctgcatctgcattcaatctattatgatca

SEQ ID NO: 8967 - DNA, 40 bp, Homo sapiens
tgatcataatagattgaatgcagatgcagatataagaatc

SEQ ID NO: 8968 - DNA, 40 bp, Homo sapiens
attcttatatctgcatctgcattcaatctattatgatcac

SEQ ID NO: 8969 - DNA, 40 bp, Homo sapiens
gtgatcataatagattgaatgcagatgcagatataagaat

SEQ ID NO: 8970 - DNA, 40 bp, Homo sapiens
ttcttatatctgcatctgcattcaatctattatgatcaca

SEQ ID NO: 8971 - DNA, 40 bp, Homo sapiens
tgtgatcataatagattgaatgcagatgcagatataagaa

SEQ ID NO: 8972 - DNA, 40 bp, Homo sapiens
tcttatatctgcatctgcattcaatctattatgatcacac

SEQ ID NO: 8973 - DNA, 40 bp, Homo sapiens
gtgtgatcataatagattgaatgcagatgcagatataaga

SEQ ID NO: 8974 - DNA, 40 bp, Homo sapiens
cttatatctgcatctgcattcaatctattatgatcacaca

SEQ ID NO: 8975 - DNA, 40 bp, Homo sapiens
tgtgtgatcataatagattgaatgcagatgcagatataag

SEQ ID NO: 8976 - DNA, 40 bp, Homo sapiens
ttatatctgcatctgcattcaatctattatgatcacacat

SEQ ID NO: 8977 - DNA, 40 bp, Homo sapiens
atgtgtgatcataatagattgaatgcagatgcagatataa

SEQ ID NO: 8978 - DNA, 40 bp, Homo sapiens
tatatctgcatctgcattcaatctattatgatcacacatc

SEQ ID NO: 8979 - DNA, 40 bp, Homo sapiens
gatgtgtgatcataatagattgaatgcagatgcagatata

SEQ ID NO: 8980 - DNA, 40 bp, Homo sapiens
atatctgcatctgcattcaatctattatgatcacacatct

SEQ ID NO: 8981 - DNA, 40 bp, Homo sapiens
agatgtgtgatcataatagattgaatgcagatgcagatat

SEQ ID NO: 8982 - DNA, 40 bp, Homo sapiens
tatctgcatctgcattcaatctattatgatcacacatctg

SEQ ID NO: 8983 - DNA, 40 bp, Homo sapiens
cagatgtgtgatcataatagattgaatgcagatgcagata

SEQ ID NO: 8984 - DNA, 40 bp, Homo sapiens
atctgcatctgcattcaatctattatgatcacacatctgg

SEQ ID NO: 8985 - DNA, 40 bp, Homo sapiens
ccagatgtgtgatcataatagattgaatgcagatgcagat

SEQ ID NO: 8986 - DNA, 40 bp, Homo sapiens
tctgcatctgcattcaatctattatgatcacacatctgga

SEQ ID NO: 8987 - DNA, 40 bp, Homo sapiens
tccagatgtgtgatcataatagattgaatgcagatgcaga

SEQ ID NO: 8988 - DNA, 40 bp, Homo sapiens
ctgcatctgcattcaatctattatgatcacacatctggaa

SEQ ID NO: 8989 - DNA, 40 bp, Homo sapiens
ttccagatgtgtgatcataatagattgaatgcagatgcag

SEQ ID NO: 8990 - DNA, 40 bp, Homo sapiens
tgcatctgcattcaatctattatgatcacacatctggaaa

SEQ ID NO: 8991 - DNA, 40 bp, Homo sapiens
tttccagatgtgtgatcataatagattgaatgcagatgca

SEQ ID NO: 8992 - DNA, 40 bp, Homo sapiens
gcatctgcattcaatctattatgatcacacatctggaaaa

SEQ ID NO: 8993 - DNA, 40 bp, Homo sapiens
ttttccagatgtgtgatcataatagattgaatgcagatgc

SEQ ID NO: 8994 - DNA, 40 bp, Homo sapiens
catctgcattcaatctattatgatcacacatctggaaaac

SEQ ID NO: 8995 - DNA, 40 bp, Homo sapiens
gttttccagatgtgtgatcataatagattgaatgcagatg

SEQ ID NO: 8996 - DNA, 40 bp, Homo sapiens
atctgcattcaatctattatgatcacacatctggaaaact

SEQ ID NO: 8997 - DNA, 40 bp, Homo sapiens
agttttccagatgtgtgatcataatagattgaatgcagat

SEQ ID NO: 8998 - DNA, 40 bp, Homo sapiens
tctgcattcaatctattatgatcacacatctggaaaactt

SEQ ID NO: 8999 - DNA, 40 bp, Homo sapiens
aagttttccagatgtgtgatcataatagattgaatgcaga

SEQ ID NO: 9000 - DNA, 40 bp, Homo sapiens
ctgcattcaatctattatgatcacacatctggaaaacttg

SEQ ID NO: 9001 - DNA, 40 bp, Homo sapiens
caagttttccagatgtgtgatcataatagattgaatgcag

SEQ ID NO: 9002 - DNA, 40 bp, Homo sapiens
tgcattcaatctattatgatcacacatctggaaaacttgt

SEQ ID NO: 9003 - DNA, 40 bp, Homo sapiens
acaagttttccagatgtgtgatcataatagattgaatgca

SEQ ID NO: 9004 - DNA, 40 bp, Homo sapiens
gcattcaatctattatgatcacacatctggaaaacttgtg

SEQ ID NO: 9005 - DNA, 40 bp, Homo sapiens
cacaagttttccagatgtgtgatcataatagattgaatgc

SEQ ID NO: 9006 - DNA, 40 bp, Homo sapiens
cattcaatctattatgatcacacatctggaaaacttgtga

SEQ ID NO: 9007 - DNA, 40 bp, Homo sapiens
tcacaagttttccagatgtgtgatcataatagattgaatg

SEQ ID NO: 9008 - DNA, 40 bp, Homo sapiens
attcaatctattatgatcacacatctggaaaacttgtgaa

SEQ ID NO: 9009 - DNA, 40 bp, Homo sapiens
ttcacaagttttccagatgtgtgatcataatagattgaat

SEQ ID NO: 9010 - DNA, 40 bp, Homo sapiens
ttcaatctattatgatcacacatctggaaaacttgtgaaa

SEQ ID NO: 9011 - DNA, 40 bp, Homo sapiens
tttcacaagttttccagatgtgtgatcataatagattgaa

SEQ ID NO: 9012 - DNA, 40 bp, Homo sapiens
tcaatctattatgatcacacatctggaaaacttgtgaaag

SEQ ID NO: 9013 - DNA, 40 bp, Homo sapiens
ctttcacaagttttccagatgtgtgatcataatagattga

SEQ ID NO: 9014 - DNA, 40 bp, Homo sapiens
caatctattatgatcacacatctggaaaacttgtgaaaga

SEQ ID NO: 9015 - DNA, 40 bp, Homo sapiens
tctttcacaagttttccagatgtgtgatcataatagattg

SEQ ID NO: 9016 - DNA, 40 bp, Homo sapiens
aatctattatgatcacacatctggaaaacttgtgaaagaa

SEQ ID NO: 9017 - DNA, 40 bp, Homo sapiens
ttctttcacaagttttccagatgtgtgatcataatagatt

SEQ ID NO: 9018 - DNA, 40 bp, Homo sapiens
atctattatgatcacacatctggaaaacttgtgaaagaat

SEQ ID NO: 9019 - DNA, 40 bp, Homo sapiens
attctttcacaagttttccagatgtgtgatcataatagat

SEQ ID NO: 9020 - DNA, 40 bp, Homo sapiens
tctattatgatcacacatctggaaaacttgtgaaagaatg

SEQ ID NO: 9021 - DNA, 40 bp, Homo sapiens
cattctttcacaagttttccagatgtgtgatcataataga

SEQ ID NO: 9022 - DNA, 40 bp, Homo sapiens
ctattatgatcacacatctggaaaacttgtgaaagaatgg

SEQ ID NO: 9023 - DNA, 40 bp, Homo sapiens
ccattctttcacaagttttccagatgtgtgatcataatag

SEQ ID NO: 9024 - DNA, 40 bp, Homo sapiens
tattatgatcacacatctggaaaacttgtgaaagaatggg

SEQ ID NO: 9025 - DNA, 40 bp, Homo sapiens
cccattctttcacaagttttccagatgtgtgatcataata

SEQ ID NO: 9026 - DNA, 40 bp, Homo sapiens
attatgatcacacatctggaaaacttgtgaaagaatggga

SEQ ID NO: 9027 - DNA, 40 bp, Homo sapiens
tcccattctttcacaagttttccagatgtgtgatcataat

SEQ ID NO: 9028 - DNA, 40 bp, Homo sapiens
ttatgatcacacatctggaaaacttgtgaaagaatgggag

SEQ ID NO: 9029 - DNA, 40 bp, Homo sapiens
ctcccattctttcacaagttttccagatgtgtgatcataa

SEQ ID NO: 9030 - DNA, 40 bp, Homo sapiens
tatgatcacacatctggaaaacttgtgaaagaatgggagt

SEQ ID NO: 9031 - DNA, 40 bp, Homo sapiens
actcccattctttcacaagttttccagatgtgtgatcata

SEQ ID NO: 9032 - DNA, 40 bp, Homo sapiens
atgatcacacatctggaaaacttgtgaaagaatgggagtt

SEQ ID NO: 9033 - DNA, 40 bp, Homo sapiens
aactcccattctttcacaagttttccagatgtgtgatcat

SEQ ID NO: 9034 - DNA, 40 bp, Homo sapiens
tgatcacacatctggaaaacttgtgaaagaatgggagtta

SEQ ID NO: 9035 - DNA, 40 bp, Homo sapiens
taactcccattctttcacaagttttccagatgtgtgatca

SEQ ID NO: 9036 - DNA, 40 bp, Homo sapiens
gatcacacatctggaaaacttgtgaaagaatgggagttaa

SEQ ID NO: 9037 - DNA, 40 bp, Homo sapiens
ttaactcccattctttcacaagttttccagatgtgtgatc

SEQ ID NO: 9038 - DNA, 40 bp, Homo sapiens
atcacacatctggaaaacttgtgaaagaatgggagttaaa

SEQ ID NO: 9039 - DNA, 40 bp, Homo sapiens
tttaactcccattctttcacaagttttccagatgtgtgat

SEQ ID NO: 9040 - DNA, 40 bp, Homo sapiens
tcacacatctggaaaacttgtgaaagaatgggagttaaaa

SEQ ID NO: 9041 - DNA, 40 bp, Homo sapiens
ttttaactcccattctttcacaagttttccagatgtgtga

SEQ ID NO: 9042 - DNA, 40 bp, Homo sapiens
cacacatctggaaaacttgtgaaagaatgggagttaaaag

SEQ ID NO: 9043 - DNA, 40 bp, Homo sapiens
cttttaactcccattctttcacaagttttccagatgtgtg

SEQ ID NO: 9044 - DNA, 40 bp, Homo sapiens
acacatctggaaaacttgtgaaagaatgggagttaaaagg

SEQ ID NO: 9045 - DNA, 40 bp, Homo sapiens
ccttttaactcccattctttcacaagttttccagatgtgt

SEQ ID NO: 9046 - DNA, 40 bp, Homo sapiens
cacatctggaaaacttgtgaaagaatgggagttaaaaggg

SEQ ID NO: 9047 - DNA, 40 bp, Homo sapiens
cccttttaactcccattctttcacaagttttccagatgtg

SEQ ID NO: 9048 - DNA, 40 bp, Homo sapiens
acatctggaaaacttgtgaaagaatgggagttaaaagggt

SEQ ID NO: 9049 - DNA, 40 bp, Homo sapiens
acccttttaactcccattctttcacaagttttccagatgt

SEQ ID NO: 9050 - DNA, 40 bp, Homo sapiens
catctggaaaacttgtgaaagaatgggagttaaaagggta

SEQ ID NO: 9051 - DNA, 40 bp, Homo sapiens
tacccttttaactcccattctttcacaagttttccagatg

SEQ ID NO: 9052 - DNA, 40 bp, Homo sapiens
atctggaaaacttgtgaaagaatgggagttaaaagggtaa

SEQ ID NO: 9053 - DNA, 40 bp, Homo sapiens
ttacccttttaactcccattctttcacaagttttccagat

SEQ ID NO: 9054 - DNA, 40 bp, Homo sapiens
tctggaaaacttgtgaaagaatgggagttaaaagggtaaa

SEQ ID NO: 9055 - DNA, 40 bp, Homo sapiens
tttacccttttaactcccattctttcacaagttttccaga

SEQ ID NO: 9056 - DNA, 40 bp, Homo sapiens
ctggaaaacttgtgaaagaatgggagttaaaagggtaaag

SEQ ID NO: 9057 - DNA, 40 bp, Homo sapiens
ctttacccttttaactcccattctttcacaagttttccag

SEQ ID NO: 9058 - DNA, 40 bp, Homo sapiens
tggaaaacttgtgaaagaatgggagttaaaagggtaaagg

SEQ ID NO: 9059 - DNA, 40 bp, Homo sapiens
cctttacccttttaactcccattctttcacaagttttcca

SEQ ID NO: 9060 - DNA, 40 bp, Homo sapiens
ggaaaacttgtgaaagaatgggagttaaaagggtaaagga

SEQ ID NO: 9061 - DNA, 40 bp, Homo sapiens
tcctttacccttttaactcccattctttcacaagttttcc

SEQ ID NO: 9062 - DNA, 40 bp, Homo sapiens
gaaaacttgtgaaagaatgggagttaaaagggtaaaggac

SEQ ID NO: 9063 - DNA, 40 bp, Homo sapiens
gtcctttacccttttaactcccattctttcacaagttttc

SEQ ID NO: 9064 - DNA, 40 bp, Homo sapiens
aaaacttgtgaaagaatgggagttaaaagggtaaaggaca

SEQ ID NO: 9065 - DNA, 40 bp, Homo sapiens
tgtcctttacccttttaactcccattctttcacaagtttt

SEQ ID NO: 9066 - DNA, 40 bp, Homo sapiens
aaacttgtgaaagaatgggagttaaaagggtaaaggacat

SEQ ID NO: 9067 - DNA, 40 bp, Homo sapiens
atgtcctttacccttttaactcccattctttcacaagttt

SEQ ID NO: 9068 - DNA, 40 bp, Homo sapiens
aacttgtgaaagaatgggagttaaaagggtaaaggacatc

SEQ ID NO: 9069 - DNA, 40 bp, Homo sapiens
gatgtcctttacccttttaactcccattctttcacaagtt

SEQ ID NO: 9070 - DNA, 40 bp, Homo sapiens
acttgtgaaagaatgggagttaaaagggtaaaggacatct

SEQ ID NO: 9071 - DNA, 40 bp, Homo sapiens
agatgtcctttacccttttaactcccattctttcacaagt

SEQ ID NO: 9072 - DNA, 40 bp, Homo sapiens
cttgtgaaagaatgggagttaaaagggtaaaggacatctt

SEQ ID NO: 9073 - DNA, 40 bp, Homo sapiens
aagatgtcctttacccttttaactcccattctttcacaag

SEQ ID NO: 9074 - DNA, 40 bp, Homo sapiens
ttgtgaaagaatgggagttaaaagggtaaaggacatctta

SEQ ID NO: 9075 - DNA, 40 bp, Homo sapiens
taagatgtcctttacccttttaactcccattctttcacaa

SEQ ID NO: 9076 - DNA, 40 bp, Homo sapiens
tgtgaaagaatgggagttaaaagggtaaaggacatcttaa

SEQ ID NO: 9077 - DNA, 40 bp, Homo sapiens
ttaagatgtcctttacccttttaactcccattctttcaca

SEQ ID NO: 9078 - DNA, 40 bp, Homo sapiens
gtgaaagaatgggagttaaaagggtaaaggacatcttaat

SEQ ID NO: 9079 - DNA, 40 bp, Homo sapiens
attaagatgtcctttacccttttaactcccattctttcac

SEQ ID NO: 9080 - DNA, 40 bp, Homo sapiens
tgaaagaatgggagttaaaagggtaaaggacatcttaatg

SEQ ID NO: 9081 - DNA, 40 bp, Homo sapiens
cattaagatgtcctttacccttttaactcccattctttca

SEQ ID NO: 9082 - DNA, 40 bp, Homo sapiens
gaaagaatgggagttaaaagggtaaaggacatcttaatgt

SEQ ID NO: 9083 - DNA, 40 bp, Homo sapiens
acattaagatgtcctttacccttttaactcccattctttc

SEQ ID NO: 9084 - DNA, 40 bp, Homo sapiens
aaagaatgggagttaaaagggtaaaggacatcttaatgtt

SEQ ID NO: 9085 - DNA, 40 bp, Homo sapiens
aacattaagatgtcctttacccttttaactcccattcttt

SEQ ID NO: 9086 - DNA, 40 bp, Homo sapiens
aagaatgggagttaaaagggtaaaggacatcttaatgtta

SEQ ID NO: 9087 - DNA, 40 bp, Homo sapiens
taacattaagatgtcctttacccttttaactcccattctt

SEQ ID NO: 9088 - DNA, 40 bp, Homo sapiens
agaatgggagttaaaagggtaaaggacatcttaatgttat

SEQ ID NO: 9089 - DNA, 40 bp, Homo sapiens
ataacattaagatgtcctttacccttttaactcccattct

SEQ ID NO: 9090 - DNA, 40 bp, Homo sapiens
gaatgggagttaaaagggtaaaggacatcttaatgttatt

SEQ ID NO: 9091 - DNA, 40 bp, Homo sapiens
aataacattaagatgtcctttacccttttaactcccattc

SEQ ID NO: 9092 - DNA, 40 bp, Homo sapiens
aatgggagttaaaagggtaaaggacatcttaatgttatta

SEQ ID NO: 9093 - DNA, 40 bp, Homo sapiens
taataacattaagatgtcctttacccttttaactcccatt

SEQ ID NO: 9094 - DNA, 40 bp, Homo sapiens
atgggagttaaaagggtaaaggacatcttaatgttattat

SEQ ID NO: 9095 - DNA, 40 bp, Homo sapiens
ataataacattaagatgtcctttacccttttaactcccat

SEQ ID NO: 9096 - DNA, 40 bp, Homo sapiens
tgggagttaaaagggtaaaggacatcttaatgttattatg

SEQ ID NO: 9097 - DNA, 40 bp, Homo sapiens
cataataacattaagatgtcctttacccttttaactccca

SEQ ID NO: 9098 - DNA, 40 bp, Homo sapiens
gggagttaaaagggtaaaggacatcttaatgttattatga

SEQ ID NO: 9099 - DNA, 40 bp, Homo sapiens
tcataataacattaagatgtcctttacccttttaactccc

SEQ ID NO: 9100 - DNA, 40 bp, Homo sapiens
ggagttaaaagggtaaaggacatcttaatgttattatgaa

SEQ ID NO: 9101 - DNA, 40 bp, Homo sapiens
ttcataataacattaagatgtcctttacccttttaactcc

SEQ ID NO: 9102 - DNA, 40 bp, Homo sapiens
gagttaaaagggtaaaggacatcttaatgttattatgaaa

SEQ ID NO: 9103 - DNA, 40 bp, Homo sapiens
tttcataataacattaagatgtcctttacccttttaactc

SEQ ID NO: 9104 - DNA, 40 bp, Homo sapiens
agttaaaagggtaaaggacatcttaatgttattatgaaaa

SEQ ID NO: 9105 - DNA, 40 bp, Homo sapiens
ttttcataataacattaagatgtcctttacccttttaact

SEQ ID NO: 9106 - DNA, 40 bp, Homo sapiens
gttaaaagggtaaaggacatcttaatgttattatgaaaac

SEQ ID NO: 9107 - DNA, 40 bp, Homo sapiens
gttttcataataacattaagatgtcctttacccttttaac

SEQ ID NO: 9108 - DNA, 40 bp, Homo sapiens
ttaaaagggtaaaggacatcttaatgttattatgaaaaca

SEQ ID NO: 9109 - DNA, 40 bp, Homo sapiens
tgttttcataataacattaagatgtcctttacccttttaa

SEQ ID NO: 9110 - DNA, 40 bp, Homo sapiens
taaaagggtaaaggacatcttaatgttattatgaaaacag

SEQ ID NO: 9111 - DNA, 40 bp, Homo sapiens
ctgttttcataataacattaagatgtcctttaccctttta

SEQ ID NO: 9112 - DNA, 40 bp, Homo sapiens
aaaagggtaaaggacatcttaatgttattatgaaaacagt

SEQ ID NO: 9113 - DNA, 40 bp, Homo sapiens
actgttttcataataacattaagatgtcctttaccctttt

SEQ ID NO: 9114 - DNA, 40 bp, Homo sapiens
aaagggtaaaggacatcttaatgttattatgaaaacagtt

SEQ ID NO: 9115 - DNA, 40 bp, Homo sapiens
aactgttttcataataacattaagatgtcctttacccttt

SEQ ID NO: 9116 - DNA, 40 bp, Homo sapiens
aagggtaaaggacatcttaatgttattatgaaaacagttt

SEQ ID NO: 9117 - DNA, 40 bp, Homo sapiens
aaactgttttcataataacattaagatgtcctttaccctt

SEQ ID NO: 9118 - DNA, 40 bp, Homo sapiens
agggtaaaggacatcttaatgttattatgaaaacagtttt

SEQ ID NO: 9119 - DNA, 40 bp, Homo sapiens
aaaactgttttcataataacattaagatgtcctttaccct

SEQ ID NO: 9120 - DNA, 40 bp, Homo sapiens
gggtaaaggacatcttaatgttattatgaaaacagttttg

SEQ ID NO: 9121 - DNA, 40 bp, Homo sapiens
caaaactgttttcataataacattaagatgtcctttaccc

SEQ ID NO: 9122 - DNA, 40 bp, Homo sapiens
ggtaaaggacatcttaatgttattatgaaaacagttttga

SEQ ID NO: 9123 - DNA, 40 bp, Homo sapiens
tcaaaactgttttcataataacattaagatgtcctttacc

SEQ ID NO: 9124 - DNA, 40 bp, Homo sapiens
gtaaaggacatcttaatgttattatgaaaacagttttgac

SEQ ID NO: 9125 - DNA, 40 bp, Homo sapiens
gtcaaaactgttttcataataacattaagatgtcctttac

SEQ ID NO: 9126 - DNA, 40 bp, Homo sapiens
taaaggacatcttaatgttattatgaaaacagttttgacc

SEQ ID NO: 9127 - DNA, 40 bp, Homo sapiens
ggtcaaaactgttttcataataacattaagatgtccttta

SEQ ID NO: 9128 - DNA, 40 bp, Homo sapiens
aaaggacatcttaatgttattatgaaaacagttttgacct

SEQ ID NO: 9129 - DNA, 40 bp, Homo sapiens
aggtcaaaactgttttcataataacattaagatgtccttt

SEQ ID NO: 9130 - DNA, 40 bp, Homo sapiens
aaggacatcttaatgttattatgaaaacagttttgacctc

SEQ ID NO: 9131 - DNA, 40 bp, Homo sapiens
gaggtcaaaactgttttcataataacattaagatgtcctt

SEQ ID NO: 9132 - DNA, 40 bp, Homo sapiens
aggacatcttaatgttattatgaaaacagttttgacctct

SEQ ID NO: 9133 - DNA, 40 bp, Homo sapiens
agaggtcaaaactgttttcataataacattaagatgtcct

SEQ ID NO: 9134 - DNA, 40 bp, Homo sapiens
ggacatcttaatgttattatgaaaacagttttgacctctt

SEQ ID NO: 9135 - DNA, 40 bp, Homo sapiens
aagaggtcaaaactgttttcataataacattaagatgtcc

SEQ ID NO: 9136 - DNA, 40 bp, Homo sapiens
gacatcttaatgttattatgaaaacagttttgacctcttg

SEQ ID NO: 9137 - DNA, 40 bp, Homo sapiens
caagaggtcaaaactgttttcataataacattaagatgtc

SEQ ID NO: 9138 - DNA, 40 bp, Homo sapiens
acatcttaatgttattatgaaaacagttttgacctcttgc

SEQ ID NO: 9139 - DNA, 40 bp, Homo sapiens
gcaagaggtcaaaactgttttcataataacattaagatgt

SEQ ID NO: 9140 - DNA, 40 bp, Homo sapiens
catcttaatgttattatgaaaacagttttgacctcttgca

SEQ ID NO: 9141 - DNA, 40 bp, Homo sapiens
tgcaagaggtcaaaactgttttcataataacattaagatg

SEQ ID NO: 9142 - DNA, 40 bp, Homo sapiens
atcttaatgttattatgaaaacagttttgacctcttgcac

SEQ ID NO: 9143 - DNA, 40 bp, Homo sapiens
gtgcaagaggtcaaaactgttttcataataacattaagat

SEQ ID NO: 9144 - DNA, 40 bp, Homo sapiens
tcttaatgttattatgaaaacagttttgacctcttgcaca

SEQ ID NO: 9145 - DNA, 40 bp, Homo sapiens
tgtgcaagaggtcaaaactgttttcataataacattaaga

SEQ ID NO: 9146 - DNA, 40 bp, Homo sapiens
cttaatgttattatgaaaacagttttgacctcttgcacac

SEQ ID NO: 9147 - DNA, 40 bp, Homo sapiens
gtgtgcaagaggtcaaaactgttttcataataacattaag

SEQ ID NO: 9148 - DNA, 40 bp, Homo sapiens
ttaatgttattatgaaaacagttttgacctcttgcacacc

SEQ ID NO: 9149 - DNA, 40 bp, Homo sapiens
ggtgtgcaagaggtcaaaactgttttcataataacattaa

SEQ ID NO: 9150 - DNA, 40 bp, Homo sapiens
taatgttattatgaaaacagttttgacctcttgcacacca

SEQ ID NO: 9151 - DNA, 40 bp, Homo sapiens
tggtgtgcaagaggtcaaaactgttttcataataacatta

SEQ ID NO: 9152 - DNA, 40 bp, Homo sapiens
aatgttattatgaaaacagttttgacctcttgcacaccag

SEQ ID NO: 9153 - DNA, 40 bp, Homo sapiens
ctggtgtgcaagaggtcaaaactgttttcataataacatt

SEQ ID NO: 9154 - DNA, 40 bp, Homo sapiens
atgttattatgaaaacagttttgacctcttgcacaccaga

SEQ ID NO: 9155 - DNA, 40 bp, Homo sapiens
tctggtgtgcaagaggtcaaaactgttttcataataacat

SEQ ID NO: 9156 - DNA, 40 bp, Homo sapiens
tgttattatgaaaacagttttgacctcttgcacaccagaa

SEQ ID NO: 9157 - DNA, 40 bp, Homo sapiens
ttctggtgtgcaagaggtcaaaactgttttcataataaca

SEQ ID NO: 9158 - DNA, 40 bp, Homo sapiens
gttattatgaaaacagttttgacctcttgcacaccagaaa

SEQ ID NO: 9159 - DNA, 40 bp, Homo sapiens
tttctggtgtgcaagaggtcaaaactgttttcataataac

SEQ ID NO: 9160 - DNA, 40 bp, Homo sapiens
ttattatgaaaacagttttgacctcttgcacaccagaaaa

SEQ ID NO: 9161 - DNA, 40 bp, Homo sapiens
ttttctggtgtgcaagaggtcaaaactgttttcataataa

SEQ ID NO: 9162 - DNA, 40 bp, Homo sapiens
tattatgaaaacagttttgacctcttgcacaccagaaaag

SEQ ID NO: 9163 - DNA, 40 bp, Homo sapiens
cttttctggtgtgcaagaggtcaaaactgttttcataata

SEQ ID NO: 9164 - DNA, 40 bp, Homo sapiens
attatgaaaacagttttgacctcttgcacaccagaaaagt

SEQ ID NO: 9165 - DNA, 40 bp, Homo sapiens
acttttctggtgtgcaagaggtcaaaactgttttcataat

SEQ ID NO: 9166 - DNA, 40 bp, Homo sapiens
ttatgaaaacagttttgacctcttgcacaccagaaaagtc

SEQ ID NO: 9167 - DNA, 40 bp, Homo sapiens
gacttttctggtgtgcaagaggtcaaaactgttttcataa

SEQ ID NO: 9168 - DNA, 40 bp, Homo sapiens
tatgaaaacagttttgacctcttgcacaccagaaaagtct

SEQ ID NO: 9169 - DNA, 40 bp, Homo sapiens
agacttttctggtgtgcaagaggtcaaaactgttttcata

SEQ ID NO: 9170 - DNA, 40 bp, Homo sapiens
atgaaaacagttttgacctcttgcacaccagaaaagtctt

SEQ ID NO: 9171 - DNA, 40 bp, Homo sapiens
aagacttttctggtgtgcaagaggtcaaaactgttttcat

SEQ ID NO: 9172 - DNA, 40 bp, Homo sapiens
tgaaaacagttttgacctcttgcacaccagaaaagtctta

SEQ ID NO: 9173 - DNA, 40 bp, Homo sapiens
taagacttttctggtgtgcaagaggtcaaaactgttttca

SEQ ID NO: 9174 - DNA, 40 bp, Homo sapiens
gaaaacagttttgacctcttgcacaccagaaaagtcttag

SEQ ID NO: 9175 - DNA, 40 bp, Homo sapiens
ctaagacttttctggtgtgcaagaggtcaaaactgttttc

SEQ ID NO: 9176 - DNA, 40 bp, Homo sapiens
aaaacagttttgacctcttgcacaccagaaaagtcttagt

SEQ ID NO: 9177 - DNA, 40 bp, Homo sapiens
actaagacttttctggtgtgcaagaggtcaaaactgtttt

SEQ ID NO: 9178 - DNA, 40 bp, Homo sapiens
aaacagttttgacctcttgcacaccagaaaagtcttagta

SEQ ID NO: 9179 - DNA, 40 bp, Homo sapiens
tactaagacttttctggtgtgcaagaggtcaaaactgttt

SEQ ID NO: 9180 - DNA, 40 bp, Homo sapiens
aacagttttgacctcttgcacaccagaaaagtcttagtaa

SEQ ID NO: 9181 - DNA, 40 bp, Homo sapiens
ttactaagacttttctggtgtgcaagaggtcaaaactgtt

SEQ ID NO: 9182 - DNA, 40 bp, Homo sapiens
acagttttgacctcttgcacaccagaaaagtcttagtaac

SEQ ID NO: 9183 - DNA, 40 bp, Homo sapiens
gttactaagacttttctggtgtgcaagaggtcaaaactgt

SEQ ID NO: 9184 - DNA, 40 bp, Homo sapiens
cagttttgacctcttgcacaccagaaaagtcttagtaacc

SEQ ID NO: 9185 - DNA, 40 bp, Homo sapiens
ggttactaagacttttctggtgtgcaagaggtcaaaactg

SEQ ID NO: 9186 - DNA, 40 bp, Homo sapiens
agttttgacctcttgcacaccagaaaagtcttagtaacct

SEQ ID NO: 9187 - DNA, 40 bp, Homo sapiens
aggttactaagacttttctggtgtgcaagaggtcaaaact

SEQ ID NO: 9188 - DNA, 40 bp, Homo sapiens
gttttgacctcttgcacaccagaaaagtcttagtaacctg

SEQ ID NO: 9189 - DNA, 40 bp, Homo sapiens
caggttactaagacttttctggtgtgcaagaggtcaaaac

SEQ ID NO: 9190 - DNA, 40 bp, Homo sapiens
ttttgacctcttgcacaccagaaaagtcttagtaacctga

SEQ ID NO: 9191 - DNA, 40 bp, Homo sapiens
tcaggttactaagacttttctggtgtgcaagaggtcaaaa

SEQ ID NO: 9192 - DNA, 40 bp, Homo sapiens
tttgacctcttgcacaccagaaaagtcttagtaacctgag

SEQ ID NO: 9193 - DNA, 40 bp, Homo sapiens
ctcaggttactaagacttttctggtgtgcaagaggtcaaa

SEQ ID NO: 9194 - DNA, 40 bp, Homo sapiens
ttgacctcttgcacaccagaaaagtcttagtaacctgagg

SEQ ID NO: 9195 - DNA, 40 bp, Homo sapiens
cctcaggttactaagacttttctggtgtgcaagaggtcaa

SEQ ID NO: 9196 - DNA, 40 bp, Homo sapiens
tgacctcttgcacaccagaaaagtcttagtaacctgaggg

SEQ ID NO: 9197 - DNA, 40 bp, Homo sapiens
ccctcaggttactaagacttttctggtgtgcaagaggtca

SEQ ID NO: 9198 - DNA, 40 bp, Homo sapiens
gacctcttgcacaccagaaaagtcttagtaacctgagggg

SEQ ID NO: 9199 - DNA, 40 bp, Homo sapiens
cccctcaggttactaagacttttctggtgtgcaagaggtc

SEQ ID NO: 9200 - DNA, 40 bp, Homo sapiens
acctcttgcacaccagaaaagtcttagtaacctgaggggt

SEQ ID NO: 9201 - DNA, 40 bp, Homo sapiens
acccctcaggttactaagacttttctggtgtgcaagaggt

SEQ ID NO: 9202 - DNA, 40 bp, Homo sapiens
cctcttgcacaccagaaaagtcttagtaacctgaggggtt

SEQ ID NO: 9203 - DNA, 40 bp, Homo sapiens
aacccctcaggttactaagacttttctggtgtgcaagagg

SEQ ID NO: 9204 - DNA, 40 bp, Homo sapiens
ctcttgcacaccagaaaagtcttagtaacctgaggggttc

SEQ ID NO: 9205 - DNA, 40 bp, Homo sapiens
gaacccctcaggttactaagacttttctggtgtgcaagag

SEQ ID NO: 9206 - DNA, 40 bp, Homo sapiens
tcttgcacaccagaaaagtcttagtaacctgaggggttcc

SEQ ID NO: 9207 - DNA, 40 bp, Homo sapiens
ggaacccctcaggttactaagacttttctggtgtgcaaga

SEQ ID NO: 9208 - DNA, 40 bp, Homo sapiens
cttgcacaccagaaaagtcttagtaacctgaggggttcct

SEQ ID NO: 9209 - DNA, 40 bp, Homo sapiens
aggaacccctcaggttactaagacttttctggtgtgcaag

SEQ ID NO: 9210 - DNA, 40 bp, Homo sapiens
ttgcacaccagaaaagtcttagtaacctgaggggttccta

SEQ ID NO: 9211 - DNA, 40 bp, Homo sapiens
taggaacccctcaggttactaagacttttctggtgtgcaa

SEQ ID NO: 9212 - DNA, 40 bp, Homo sapiens
tgcacaccagaaaagtcttagtaacctgaggggttcctag

SEQ ID NO: 9213 - DNA, 40 bp, Homo sapiens
ctaggaacccctcaggttactaagacttttctggtgtgca

SEQ ID NO: 9214 - DNA, 40 bp, Homo sapiens
gcacaccagaaaagtcttagtaacctgaggggttcctaga

SEQ ID NO: 9215 - DNA, 40 bp, Homo sapiens
tctaggaacccctcaggttactaagacttttctggtgtgc

SEQ ID NO: 9216 - DNA, 40 bp, Homo sapiens
cacaccagaaaagtcttagtaacctgaggggttcctagac

SEQ ID NO: 9217 - DNA, 40 bp, Homo sapiens
gtctaggaacccctcaggttactaagacttttctggtgtg

SEQ ID NO: 9218 - DNA, 40 bp, Homo sapiens
acaccagaaaagtcttagtaacctgaggggttcctagacc

SEQ ID NO: 9219 - DNA, 40 bp, Homo sapiens
ggtctaggaacccctcaggttactaagacttttctggtgt

SEQ ID NO: 9220 - DNA, 40 bp, Homo sapiens
caccagaaaagtcttagtaacctgaggggttcctagacca

SEQ ID NO: 9221 - DNA, 40 bp, Homo sapiens
tggtctaggaacccctcaggttactaagacttttctggtg

SEQ ID NO: 9222 - DNA, 40 bp, Homo sapiens
accagaaaagtcttagtaacctgaggggttcctagaccac

SEQ ID NO: 9223 - DNA, 40 bp, Homo sapiens
gtggtctaggaacccctcaggttactaagacttttctggt

SEQ ID NO: 9224 - DNA, 40 bp, Homo sapiens
ccagaaaagtcttagtaacctgaggggttcctagaccaca

SEQ ID NO: 9225 - DNA, 40 bp, Homo sapiens
tgtggtctaggaacccctcaggttactaagacttttctgg

SEQ ID NO: 9226 - DNA, 40 bp, Homo sapiens
cagaaaagtcttagtaacctgaggggttcctagaccacat

SEQ ID NO: 9227 - DNA, 40 bp, Homo sapiens
atgtggtctaggaacccctcaggttactaagacttttctg

SEQ ID NO: 9228 - DNA, 40 bp, Homo sapiens
agaaaagtcttagtaacctgaggggttcctagaccacatt

SEQ ID NO: 9229 - DNA, 40 bp, Homo sapiens
aatgtggtctaggaacccctcaggttactaagacttttct

SEQ ID NO: 9230 - DNA, 40 bp, Homo sapiens
gaaaagtcttagtaacctgaggggttcctagaccacattt

SEQ ID NO: 9231 - DNA, 40 bp, Homo sapiens
aaatgtggtctaggaacccctcaggttactaagacttttc

SEQ ID NO: 9232 - DNA, 40 bp, Homo sapiens
aaaagtcttagtaacctgaggggttcctagaccacatttt

SEQ ID NO: 9233 - DNA, 40 bp, Homo sapiens
aaaatgtggtctaggaacccctcaggttactaagactttt

SEQ ID NO: 9234 - DNA, 40 bp, Homo sapiens
aaagtcttagtaacctgaggggttcctagaccacattttg

SEQ ID NO: 9235 - DNA, 40 bp, Homo sapiens
caaaatgtggtctaggaacccctcaggttactaagacttt

SEQ ID NO: 9236 - DNA, 40 bp, Homo sapiens
aagtcttagtaacctgaggggttcctagaccacattttga

SEQ ID NO: 9237 - DNA, 40 bp, Homo sapiens
tcaaaatgtggtctaggaacccctcaggttactaagactt

SEQ ID NO: 9238 - DNA, 40 bp, Homo sapiens
agtcttagtaacctgaggggttcctagaccacattttgag

SEQ ID NO: 9239 - DNA, 40 bp, Homo sapiens
ctcaaaatgtggtctaggaacccctcaggttactaagact

SEQ ID NO: 9240 - DNA, 40 bp, Homo sapiens
gtcttagtaacctgaggggttcctagaccacattttgaga

SEQ ID NO: 9241 - DNA, 40 bp, Homo sapiens
tctcaaaatgtggtctaggaacccctcaggttactaagac

SEQ ID NO: 9242 - DNA, 40 bp, Homo sapiens
tcttagtaacctgaggggttcctagaccacattttgagaa

SEQ ID NO: 9243 - DNA, 40 bp, Homo sapiens
ttctcaaaatgtggtctaggaacccctcaggttactaaga

SEQ ID NO: 9244 - DNA, 40 bp, Homo sapiens
cttagtaacctgaggggttcctagaccacattttgagaac

SEQ ID NO: 9245 - DNA, 40 bp, Homo sapiens
gttctcaaaatgtggtctaggaacccctcaggttactaag

SEQ ID NO: 9246 - DNA, 40 bp, Homo sapiens
ttagtaacctgaggggttcctagaccacattttgagaact

SEQ ID NO: 9247 - DNA, 40 bp, Homo sapiens
agttctcaaaatgtggtctaggaacccctcaggttactaa

SEQ ID NO: 9248 - DNA, 40 bp, Homo sapiens
tagtaacctgaggggttcctagaccacattttgagaactg

SEQ ID NO: 9249 - DNA, 40 bp, Homo sapiens
cagttctcaaaatgtggtctaggaacccctcaggttacta

SEQ ID NO: 9250 - DNA, 40 bp, Homo sapiens
agtaacctgaggggttcctagaccacattttgagaactgt

SEQ ID NO: 9251 - DNA, 40 bp, Homo sapiens
acagttctcaaaatgtggtctaggaacccctcaggttact

SEQ ID NO: 9252 - DNA, 40 bp, Homo sapiens
gtaacctgaggggttcctagaccacattttgagaactgtt

SEQ ID NO: 9253 - DNA, 40 bp, Homo sapiens
aacagttctcaaaatgtggtctaggaacccctcaggttac

SEQ ID NO: 9254 - DNA, 40 bp, Homo sapiens
taacctgaggggttcctagaccacattttgagaactgttt

SEQ ID NO: 9255 - DNA, 40 bp, Homo sapiens
aaacagttctcaaaatgtggtctaggaacccctcaggtta

SEQ ID NO: 9256 - DNA, 40 bp, Homo sapiens
aacctgaggggttcctagaccacattttgagaactgtttt

SEQ ID NO: 9257 - DNA, 40 bp, Homo sapiens
aaaacagttctcaaaatgtggtctaggaacccctcaggtt

SEQ ID NO: 9258 - DNA, 40 bp, Homo sapiens
acctgaggggttcctagaccacattttgagaactgtttta

SEQ ID NO: 9259 - DNA, 40 bp, Homo sapiens
taaaacagttctcaaaatgtggtctaggaacccctcaggt

SEQ ID NO: 9260 - DNA, 40 bp, Homo sapiens
cctgaggggttcctagaccacattttgagaactgttttag

SEQ ID NO: 9261 - DNA, 40 bp, Homo sapiens
ctaaaacagttctcaaaatgtggtctaggaacccctcagg

SEQ ID NO: 9262 - DNA, 40 bp, Homo sapiens
ctgaggggttcctagaccacattttgagaactgttttagg

SEQ ID NO: 9263 - DNA, 40 bp, Homo sapiens
cctaaaacagttctcaaaatgtggtctaggaacccctcag

SEQ ID NO: 9264 - DNA, 40 bp, Homo sapiens
tgaggggttcctagaccacattttgagaactgttttaggc

SEQ ID NO: 9265 - DNA, 40 bp, Homo sapiens
gcctaaaacagttctcaaaatgtggtctaggaacccctca

SEQ ID NO: 9266 - DNA, 40 bp, Homo sapiens
gaggggttcctagaccacattttgagaactgttttaggct

SEQ ID NO: 9267 - DNA, 40 bp, Homo sapiens
agcctaaaacagttctcaaaatgtggtctaggaacccctc

SEQ ID NO: 9268 - DNA, 40 bp, Homo sapiens
aggggttcctagaccacattttgagaactgttttaggcta

SEQ ID NO: 9269 - DNA, 40 bp, Homo sapiens
tagcctaaaacagttctcaaaatgtggtctaggaacccct

SEQ ID NO: 9270 - DNA, 40 bp, Homo sapiens
ggggttcctagaccacattttgagaactgttttaggctat

SEQ ID NO: 9271 - DNA, 40 bp, Homo sapiens
atagcctaaaacagttctcaaaatgtggtctaggaacccc

SEQ ID NO: 9272 - DNA, 40 bp, Homo sapiens
gggttcctagaccacattttgagaactgttttaggctatg

SEQ ID NO: 9273 - DNA, 40 bp, Homo sapiens
catagcctaaaacagttctcaaaatgtggtctaggaaccc

SEQ ID NO: 9274 - DNA, 40 bp, Homo sapiens
ggttcctagaccacattttgagaactgttttaggctatgc

SEQ ID NO: 9275 - DNA, 40 bp, Homo sapiens
gcatagcctaaaacagttctcaaaatgtggtctaggaacc

SEQ ID NO: 9276 - DNA, 40 bp, Homo sapiens
gttcctagaccacattttgagaactgttttaggctatgca

SEQ ID NO: 9277 - DNA, 40 bp, Homo sapiens
tgcatagcctaaaacagttctcaaaatgtggtctaggaac

SEQ ID NO: 9278 - DNA, 40 bp, Homo sapiens
ttcctagaccacattttgagaactgttttaggctatgcaa

SEQ ID NO: 9279 - DNA, 40 bp, Homo sapiens
ttgcatagcctaaaacagttctcaaaatgtggtctaggaa

SEQ ID NO: 9280 - DNA, 40 bp, Homo sapiens
tcctagaccacattttgagaactgttttaggctatgcaaa

SEQ ID NO: 9281 - DNA, 40 bp, Homo sapiens
tttgcatagcctaaaacagttctcaaaatgtggtctagga

SEQ ID NO: 9282 - DNA, 40 bp, Homo sapiens
cctagaccacattttgagaactgttttaggctatgcaaac

SEQ ID NO: 9283 - DNA, 40 bp, Homo sapiens
gtttgcatagcctaaaacagttctcaaaatgtggtctagg

SEQ ID NO: 9284 - DNA, 40 bp, Homo sapiens
ctagaccacattttgagaactgttttaggctatgcaaact

SEQ ID NO: 9285 - DNA, 40 bp, Homo sapiens
agtttgcatagcctaaaacagttctcaaaatgtggtctag

SEQ ID NO: 9286 - DNA, 40 bp, Homo sapiens
tagaccacattttgagaactgttttaggctatgcaaactg

SEQ ID NO: 9287 - DNA, 40 bp, Homo sapiens
cagtttgcatagcctaaaacagttctcaaaatgtggtcta

SEQ ID NO: 9288 - DNA, 40 bp, Homo sapiens
agaccacattttgagaactgttttaggctatgcaaactgg

SEQ ID NO: 9289 - DNA, 40 bp, Homo sapiens
ccagtttgcatagcctaaaacagttctcaaaatgtggtct

SEQ ID NO: 9290 - DNA, 40 bp, Homo sapiens
gaccacattttgagaactgttttaggctatgcaaactggt

SEQ ID NO: 9291 - DNA, 40 bp, Homo sapiens
accagtttgcatagcctaaaacagttctcaaaatgtggtc

SEQ ID NO: 9292 - DNA, 40 bp, Homo sapiens
accacattttgagaactgttttaggctatgcaaactggtt

SEQ ID NO: 9293 - DNA, 40 bp, Homo sapiens
aaccagtttgcatagcctaaaacagttctcaaaatgtggt

SEQ ID NO: 9294 - DNA, 40 bp, Homo sapiens
ccacattttgagaactgttttaggctatgcaaactggttg

SEQ ID NO: 9295 - DNA, 40 bp, Homo sapiens
caaccagtttgcatagcctaaaacagttctcaaaatgtgg

SEQ ID NO: 9296 - DNA, 40 bp, Homo sapiens
cacattttgagaactgttttaggctatgcaaactggttgg

SEQ ID NO: 9297 - DNA, 40 bp, Homo sapiens
ccaaccagtttgcatagcctaaaacagttctcaaaatgtg

SEQ ID NO: 9298 - DNA, 40 bp, Homo sapiens
acattttgagaactgttttaggctatgcaaactggttggg

SEQ ID NO: 9299 - DNA, 40 bp, Homo sapiens
cccaaccagtttgcatagcctaaaacagttctcaaaatgt

SEQ ID NO: 9300 - DNA, 40 bp, Homo sapiens
cattttgagaactgttttaggctatgcaaactggttgggg

SEQ ID NO: 9301 - DNA, 40 bp, Homo sapiens
ccccaaccagtttgcatagcctaaaacagttctcaaaatg

SEQ ID NO: 9302 - DNA, 40 bp, Homo sapiens
attttgagaactgttttaggctatgcaaactggttggggg

SEQ ID NO: 9303 - DNA, 40 bp, Homo sapiens
cccccaaccagtttgcatagcctaaaacagttctcaaaat

SEQ ID NO: 9304 - DNA, 40 bp, Homo sapiens
ttttgagaactgttttaggctatgcaaactggttgggggg

SEQ ID NO: 9305 - DNA, 40 bp, Homo sapiens
ccccccaaccagtttgcatagcctaaaacagttctcaaaa

SEQ ID NO: 9306 - DNA, 40 bp, Homo sapiens
tttgagaactgttttaggctatgcaaactggttgggggga

SEQ ID NO: 9307 - DNA, 40 bp, Homo sapiens
tccccccaaccagtttgcatagcctaaaacagttctcaaa

SEQ ID NO: 9308 - DNA, 40 bp, Homo sapiens
ttgagaactgttttaggctatgcaaactggttggggggag

SEQ ID NO: 9309 - DNA, 40 bp, Homo sapiens
ctccccccaaccagtttgcatagcctaaaacagttctcaa

SEQ ID NO: 9310 - DNA, 40 bp, Homo sapiens
tgagaactgttttaggctatgcaaactggttggggggagg

SEQ ID NO: 9311 - DNA, 40 bp, Homo sapiens
cctccccccaaccagtttgcatagcctaaaacagttctca

SEQ ID NO: 9312 - DNA, 40 bp, Homo sapiens
gagaactgttttaggctatgcaaactggttggggggaggt

SEQ ID NO: 9313 - DNA, 40 bp, Homo sapiens
acctccccccaaccagtttgcatagcctaaaacagttctc

SEQ ID NO: 9314 - DNA, 40 bp, Homo sapiens
agaactgttttaggctatgcaaactggttggggggaggtt

SEQ ID NO: 9315 - DNA, 40 bp, Homo sapiens
aacctccccccaaccagtttgcatagcctaaaacagttct

SEQ ID NO: 9316 - DNA, 40 bp, Homo sapiens
gaactgttttaggctatgcaaactggttggggggaggttg

SEQ ID NO: 9317 - DNA, 40 bp, Homo sapiens
caacctccccccaaccagtttgcatagcctaaaacagttc

SEQ ID NO: 9318 - DNA, 40 bp, Homo sapiens
aactgttttaggctatgcaaactggttggggggaggttgg

SEQ ID NO: 9319 - DNA, 40 bp, Homo sapiens
ccaacctccccccaaccagtttgcatagcctaaaacagtt

SEQ ID NO: 9320 - DNA, 40 bp, Homo sapiens
actgttttaggctatgcaaactggttggggggaggttggg

SEQ ID NO: 9321 - DNA, 40 bp, Homo sapiens
cccaacctccccccaaccagtttgcatagcctaaaacagt

SEQ ID NO: 9322 - DNA, 40 bp, Homo sapiens
ctgttttaggctatgcaaactggttggggggaggttgggg

SEQ ID NO: 9323 - DNA, 40 bp, Homo sapiens
ccccaacctccccccaaccagtttgcatagcctaaaacag

SEQ ID NO: 9324 - DNA, 40 bp, Homo sapiens
tgttttaggctatgcaaactggttggggggaggttggggt

SEQ ID NO: 9325 - DNA, 40 bp, Homo sapiens
accccaacctccccccaaccagtttgcatagcctaaaaca

SEQ ID NO: 9326 - DNA, 40 bp, Homo sapiens
gttttaggctatgcaaactggttggggggaggttggggta

SEQ ID NO: 9327 - DNA, 40 bp, Homo sapiens
taccccaacctccccccaaccagtttgcatagcctaaaac

SEQ ID NO: 9328 - DNA, 40 bp, Homo sapiens
ttttaggctatgcaaactggttggggggaggttggggtag

SEQ ID NO: 9329 - DNA, 40 bp, Homo sapiens
ctaccccaacctccccccaaccagtttgcatagcctaaaa

SEQ ID NO: 9330 - DNA, 40 bp, Homo sapiens
tttaggctatgcaaactggttggggggaggttggggtagg

SEQ ID NO: 9331 - DNA, 40 bp, Homo sapiens
cctaccccaacctccccccaaccagtttgcatagcctaaa

SEQ ID NO: 9332 - DNA, 40 bp, Homo sapiens
ttaggctatgcaaactggttggggggaggttggggtaggc

SEQ ID NO: 9333 - DNA, 40 bp, Homo sapiens
gcctaccccaacctccccccaaccagtttgcatagcctaa

SEQ ID NO: 9334 - DNA, 40 bp, Homo sapiens
taggctatgcaaactggttggggggaggttggggtaggca

SEQ ID NO: 9335 - DNA, 40 bp, Homo sapiens
tgcctaccccaacctccccccaaccagtttgcatagccta

SEQ ID NO: 9336 - DNA, 40 bp, Homo sapiens
aggctatgcaaactggttggggggaggttggggtaggcag

SEQ ID NO: 9337 - DNA, 40 bp, Homo sapiens
ctgcctaccccaacctccccccaaccagtttgcatagcct

SEQ ID NO: 9338 - DNA, 40 bp, Homo sapiens
ggctatgcaaactggttggggggaggttggggtaggcaga

SEQ ID NO: 9339 - DNA, 40 bp, Homo sapiens
tctgcctaccccaacctccccccaaccagtttgcatagcc

SEQ ID NO: 9340 - DNA, 40 bp, Homo sapiens
gctatgcaaactggttggggggaggttggggtaggcagag

SEQ ID NO: 9341 - DNA, 40 bp, Homo sapiens
ctctgcctaccccaacctccccccaaccagtttgcatagc

SEQ ID NO: 9342 - DNA, 40 bp, Homo sapiens
ctatgcaaactggttggggggaggttggggtaggcagaga

SEQ ID NO: 9343 - DNA, 40 bp, Homo sapiens
tctctgcctaccccaacctccccccaaccagtttgcatag

SEQ ID NO: 9344 - DNA, 40 bp, Homo sapiens
tatgcaaactggttggggggaggttggggtaggcagagag

SEQ ID NO: 9345 - DNA, 40 bp, Homo sapiens
ctctctgcctaccccaacctccccccaaccagtttgcata

SEQ ID NO: 9346 - DNA, 40 bp, Homo sapiens
atgcaaactggttggggggaggttggggtaggcagagagc

SEQ ID NO: 9347 - DNA, 40 bp, Homo sapiens
gctctctgcctaccccaacctccccccaaccagtttgcat

SEQ ID NO: 9348 - DNA, 40 bp, Homo sapiens
tgcaaactggttggggggaggttggggtaggcagagagct

SEQ ID NO: 9349 - DNA, 40 bp, Homo sapiens
agctctctgcctaccccaacctccccccaaccagtttgca

SEQ ID NO: 9350 - DNA, 40 bp, Homo sapiens
gcaaactggttggggggaggttggggtaggcagagagcta

SEQ ID NO: 9351 - DNA, 40 bp, Homo sapiens
tagctctctgcctaccccaacctccccccaaccagtttgc

SEQ ID NO: 9352 - DNA, 40 bp, Homo sapiens
caaactggttggggggaggttggggtaggcagagagctag

SEQ ID NO: 9353 - DNA, 40 bp, Homo sapiens
ctagctctctgcctaccccaacctccccccaaccagtttg

SEQ ID NO: 9354 - DNA, 40 bp, Homo sapiens
aaactggttggggggaggttggggtaggcagagagctaga

SEQ ID NO: 9355 - DNA, 40 bp, Homo sapiens
tctagctctctgcctaccccaacctccccccaaccagttt

SEQ ID NO: 9356 - DNA, 40 bp, Homo sapiens
aactggttggggggaggttggggtaggcagagagctagaa

SEQ ID NO: 9357 - DNA, 40 bp, Homo sapiens
ttctagctctctgcctaccccaacctccccccaaccagtt

SEQ ID NO: 9358 - DNA, 40 bp, Homo sapiens
actggttggggggaggttggggtaggcagagagctagaag

SEQ ID NO: 9359 - DNA, 40 bp, Homo sapiens
cttctagctctctgcctaccccaacctccccccaaccagt

SEQ ID NO: 9360 - DNA, 40 bp, Homo sapiens
ctggttggggggaggttggggtaggcagagagctagaaga

SEQ ID NO: 9361 - DNA, 40 bp, Homo sapiens
tcttctagctctctgcctaccccaacctccccccaaccag

SEQ ID NO: 9362 - DNA, 40 bp, Homo sapiens
tggttggggggaggttggggtaggcagagagctagaagat

SEQ ID NO: 9363 - DNA, 40 bp, Homo sapiens
atcttctagctctctgcctaccccaacctccccccaacca

SEQ ID NO: 9364 - DNA, 40 bp, Homo sapiens
ggttggggggaggttggggtaggcagagagctagaagata

SEQ ID NO: 9365 - DNA, 40 bp, Homo sapiens
tatcttctagctctctgcctaccccaacctccccccaacc

SEQ ID NO: 9366 - DNA, 40 bp, Homo sapiens
gttggggggaggttggggtaggcagagagctagaagatac

SEQ ID NO: 9367 - DNA, 40 bp, Homo sapiens
gtatcttctagctctctgcctaccccaacctccccccaac

SEQ ID NO: 9368 - DNA, 40 bp, Homo sapiens
ttggggggaggttggggtaggcagagagctagaagataca

SEQ ID NO: 9369 - DNA, 40 bp, Homo sapiens
tgtatcttctagctctctgcctaccccaacctccccccaa

SEQ ID NO: 9370 - DNA, 40 bp, Homo sapiens
tggggggaggttggggtaggcagagagctagaagatacat

SEQ ID NO: 9371 - DNA, 40 bp, Homo sapiens
atgtatcttctagctctctgcctaccccaacctcccccca

SEQ ID NO: 9372 - DNA, 40 bp, Homo sapiens
ggggggaggttggggtaggcagagagctagaagatacatt

SEQ ID NO: 9373 - DNA, 40 bp, Homo sapiens
aatgtatcttctagctctctgcctaccccaacctcccccc

SEQ ID NO: 9374 - DNA, 40 bp, Homo sapiens
gggggaggttggggtaggcagagagctagaagatacattt

SEQ ID NO: 9375 - DNA, 40 bp, Homo sapiens
aaatgtatcttctagctctctgcctaccccaacctccccc

SEQ ID NO: 9376 - DNA, 40 bp, Homo sapiens
ggggaggttggggtaggcagagagctagaagatacatttt

SEQ ID NO: 9377 - DNA, 40 bp, Homo sapiens
aaaatgtatcttctagctctctgcctaccccaacctcccc

SEQ ID NO: 9378 - DNA, 40 bp, Homo sapiens
gggaggttggggtaggcagagagctagaagatacatttta

SEQ ID NO: 9379 - DNA, 40 bp, Homo sapiens
taaaatgtatcttctagctctctgcctaccccaacctccc

SEQ ID NO: 9380 - DNA, 40 bp, Homo sapiens
ggaggttggggtaggcagagagctagaagatacattttag

SEQ ID NO: 9381 - DNA, 40 bp, Homo sapiens
ctaaaatgtatcttctagctctctgcctaccccaacctcc

SEQ ID NO: 9382 - DNA, 40 bp, Homo sapiens
gaggttggggtaggcagagagctagaagatacattttagt

SEQ ID NO: 9383 - DNA, 40 bp, Homo sapiens
actaaaatgtatcttctagctctctgcctaccccaacctc

SEQ ID NO: 9384 - DNA, 40 bp, Homo sapiens
aggttggggtaggcagagagctagaagatacattttagtg

SEQ ID NO: 9385 - DNA, 40 bp, Homo sapiens
cactaaaatgtatcttctagctctctgcctaccccaacct

SEQ ID NO: 9386 - DNA, 40 bp, Homo sapiens
ggttggggtaggcagagagctagaagatacattttagtgt

SEQ ID NO: 9387 - DNA, 40 bp, Homo sapiens
acactaaaatgtatcttctagctctctgcctaccccaacc

SEQ ID NO: 9388 - DNA, 40 bp, Homo sapiens
gttggggtaggcagagagctagaagatacattttagtgta

SEQ ID NO: 9389 - DNA, 40 bp, Homo sapiens
tacactaaaatgtatcttctagctctctgcctaccccaac

SEQ ID NO: 9390 - DNA, 40 bp, Homo sapiens
ttggggtaggcagagagctagaagatacattttagtgtaa

SEQ ID NO: 9391 - DNA, 40 bp, Homo sapiens
ttacactaaaatgtatcttctagctctctgcctaccccaa

SEQ ID NO: 9392 - DNA, 40 bp, Homo sapiens
tggggtaggcagagagctagaagatacattttagtgtaat

SEQ ID NO: 9393 - DNA, 40 bp, Homo sapiens
attacactaaaatgtatcttctagctctctgcctacccca

SEQ ID NO: 9394 - DNA, 40 bp, Homo sapiens
ggggtaggcagagagctagaagatacattttagtgtaatt

SEQ ID NO: 9395 - DNA, 40 bp, Homo sapiens
aattacactaaaatgtatcttctagctctctgcctacccc

SEQ ID NO: 9396 - DNA, 40 bp, Homo sapiens
gggtaggcagagagctagaagatacattttagtgtaattc

SEQ ID NO: 9397 - DNA, 40 bp, Homo sapiens
gaattacactaaaatgtatcttctagctctctgcctaccc

SEQ ID NO: 9398 - DNA, 40 bp, Homo sapiens
ggtaggcagagagctagaagatacattttagtgtaattct

SEQ ID NO: 9399 - DNA, 40 bp, Homo sapiens
agaattacactaaaatgtatcttctagctctctgcctacc

SEQ ID NO: 9400 - DNA, 40 bp, Homo sapiens
gtaggcagagagctagaagatacattttagtgtaattctc

SEQ ID NO: 9401 - DNA, 40 bp, Homo sapiens
gagaattacactaaaatgtatcttctagctctctgcctac

SEQ ID NO: 9402 - DNA, 40 bp, Homo sapiens
taggcagagagctagaagatacattttagtgtaattctcc

SEQ ID NO: 9403 - DNA, 40 bp, Homo sapiens
ggagaattacactaaaatgtatcttctagctctctgccta

SEQ ID NO: 9404 - DNA, 40 bp, Homo sapiens
aggcagagagctagaagatacattttagtgtaattctcct

SEQ ID NO: 9405 - DNA, 40 bp, Homo sapiens
aggagaattacactaaaatgtatcttctagctctctgcct

SEQ ID NO: 9406 - DNA, 40 bp, Homo sapiens
ggcagagagctagaagatacattttagtgtaattctcctc

SEQ ID NO: 9407 - DNA, 40 bp, Homo sapiens
gaggagaattacactaaaatgtatcttctagctctctgcc

SEQ ID NO: 9408 - DNA, 40 bp, Homo sapiens
gcagagagctagaagatacattttagtgtaattctcctca

SEQ ID NO: 9409 - DNA, 40 bp, Homo sapiens
tgaggagaattacactaaaatgtatcttctagctctctgc

SEQ ID NO: 9410 - DNA, 40 bp, Homo sapiens
cagagagctagaagatacattttagtgtaattctcctcat

SEQ ID NO: 9411 - DNA, 40 bp, Homo sapiens
atgaggagaattacactaaaatgtatcttctagctctctg

SEQ ID NO: 9412 - DNA, 40 bp, Homo sapiens
agagagctagaagatacattttagtgtaattctcctcatc

SEQ ID NO: 9413 - DNA, 40 bp, Homo sapiens
gatgaggagaattacactaaaatgtatcttctagctctct

SEQ ID NO: 9414 - DNA, 40 bp, Homo sapiens
gagagctagaagatacattttagtgtaattctcctcatct

SEQ ID NO: 9415 - DNA, 40 bp, Homo sapiens
agatgaggagaattacactaaaatgtatcttctagctctc

SEQ ID NO: 9416 - DNA, 40 bp, Homo sapiens
agagctagaagatacattttagtgtaattctcctcatcta

SEQ ID NO: 9417 - DNA, 40 bp, Homo sapiens
tagatgaggagaattacactaaaatgtatcttctagctct

SEQ ID NO: 9418 - DNA, 40 bp, Homo sapiens
gagctagaagatacattttagtgtaattctcctcatctat

SEQ ID NO: 9419 - DNA, 40 bp, Homo sapiens
atagatgaggagaattacactaaaatgtatcttctagctc

SEQ ID NO: 9420 - DNA, 40 bp, Homo sapiens
agctagaagatacattttagtgtaattctcctcatctatt

SEQ ID NO: 9421 - DNA, 40 bp, Homo sapiens
aatagatgaggagaattacactaaaatgtatcttctagct

SEQ ID NO: 9422 - DNA, 40 bp, Homo sapiens
gctagaagatacattttagtgtaattctcctcatctattc

SEQ ID NO: 9423 - DNA, 40 bp, Homo sapiens
gaatagatgaggagaattacactaaaatgtatcttctagc

SEQ ID NO: 9424 - DNA, 40 bp, Homo sapiens
ctagaagatacattttagtgtaattctcctcatctattcc

SEQ ID NO: 9425 - DNA, 40 bp, Homo sapiens
ggaatagatgaggagaattacactaaaatgtatcttctag

SEQ ID NO: 9426 - DNA, 40 bp, Homo sapiens
tagaagatacattttagtgtaattctcctcatctattcct

SEQ ID NO: 9427 - DNA, 40 bp, Homo sapiens
aggaatagatgaggagaattacactaaaatgtatcttcta

SEQ ID NO: 9428 - DNA, 40 bp, Homo sapiens
agaagatacattttagtgtaattctcctcatctattccta

SEQ ID NO: 9429 - DNA, 40 bp, Homo sapiens
taggaatagatgaggagaattacactaaaatgtatcttct

SEQ ID NO: 9430 - DNA, 40 bp, Homo sapiens
gaagatacattttagtgtaattctcctcatctattcctaa

SEQ ID NO: 9431 - DNA, 40 bp, Homo sapiens
ttaggaatagatgaggagaattacactaaaatgtatcttc

SEQ ID NO: 9432 - DNA, 40 bp, Homo sapiens
aagatacattttagtgtaattctcctcatctattcctaat

SEQ ID NO: 9433 - DNA, 40 bp, Homo sapiens
attaggaatagatgaggagaattacactaaaatgtatctt

SEQ ID NO: 9434 - DNA, 40 bp, Homo sapiens
agatacattttagtgtaattctcctcatctattcctaatt

SEQ ID NO: 9435 - DNA, 40 bp, Homo sapiens
aattaggaatagatgaggagaattacactaaaatgtatct

SEQ ID NO: 9436 - DNA, 40 bp, Homo sapiens
gatacattttagtgtaattctcctcatctattcctaattg

SEQ ID NO: 9437 - DNA, 40 bp, Homo sapiens
caattaggaatagatgaggagaattacactaaaatgtatc

SEQ ID NO: 9438 - DNA, 40 bp, Homo sapiens
atacattttagtgtaattctcctcatctattcctaattgc

SEQ ID NO: 9439 - DNA, 40 bp, Homo sapiens
gcaattaggaatagatgaggagaattacactaaaatgtat

SEQ ID NO: 9440 - DNA, 40 bp, Homo sapiens
tacattttagtgtaattctcctcatctattcctaattgct

SEQ ID NO: 9441 - DNA, 40 bp, Homo sapiens
agcaattaggaatagatgaggagaattacactaaaatgta

SEQ ID NO: 9442 - DNA, 40 bp, Homo sapiens
acattttagtgtaattctcctcatctattcctaattgctt

SEQ ID NO: 9443 - DNA, 40 bp, Homo sapiens
aagcaattaggaatagatgaggagaattacactaaaatgt

SEQ ID NO: 9444 - DNA, 40 bp, Homo sapiens
cattttagtgtaattctcctcatctattcctaattgcttt

SEQ ID NO: 9445 - DNA, 40 bp, Homo sapiens
aaagcaattaggaatagatgaggagaattacactaaaatg

SEQ ID NO: 9446 - DNA, 40 bp, Homo sapiens
attttagtgtaattctcctcatctattcctaattgctttg

SEQ ID NO: 9447 - DNA, 40 bp, Homo sapiens
caaagcaattaggaatagatgaggagaattacactaaaat

SEQ ID NO: 9448 - DNA, 40 bp, Homo sapiens
ttttagtgtaattctcctcatctattcctaattgctttgg

SEQ ID NO: 9449 - DNA, 40 bp, Homo sapiens
ccaaagcaattaggaatagatgaggagaattacactaaaa

SEQ ID NO: 9450 - DNA, 40 bp, Homo sapiens
tttagtgtaattctcctcatctattcctaattgctttggc

SEQ ID NO: 9451 - DNA, 40 bp, Homo sapiens
gccaaagcaattaggaatagatgaggagaattacactaaa

SEQ ID NO: 9452 - DNA, 40 bp, Homo sapiens
ttagtgtaattctcctcatctattcctaattgctttggcc

SEQ ID NO: 9453 - DNA, 40 bp, Homo sapiens
ggccaaagcaattaggaatagatgaggagaattacactaa

SEQ ID NO: 9454 - DNA, 40 bp, Homo sapiens
tagtgtaattctcctcatctattcctaattgctttggcct

SEQ ID NO: 9455 - DNA, 40 bp, Homo sapiens
aggccaaagcaattaggaatagatgaggagaattacacta

SEQ ID NO: 9456 - DNA, 40 bp, Homo sapiens
agtgtaattctcctcatctattcctaattgctttggccta

SEQ ID NO: 9457 - DNA, 40 bp, Homo sapiens
taggccaaagcaattaggaatagatgaggagaattacact

SEQ ID NO: 9458 - DNA, 40 bp, Homo sapiens
gtgtaattctcctcatctattcctaattgctttggcctac

SEQ ID NO: 9459 - DNA, 40 bp, Homo sapiens
gtaggccaaagcaattaggaatagatgaggagaattacac

SEQ ID NO: 9460 - DNA, 40 bp, Homo sapiens
tgtaattctcctcatctattcctaattgctttggcctaca

SEQ ID NO: 9461 - DNA, 40 bp, Homo sapiens
tgtaggccaaagcaattaggaatagatgaggagaattaca

SEQ ID NO: 9462 - DNA, 40 bp, Homo sapiens
gtaattctcctcatctattcctaattgctttggcctacat

SEQ ID NO: 9463 - DNA, 40 bp, Homo sapiens
atgtaggccaaagcaattaggaatagatgaggagaattac

SEQ ID NO: 9464 - DNA, 40 bp, Homo sapiens
taattctcctcatctattcctaattgctttggcctacatt

SEQ ID NO: 9465 - DNA, 40 bp, Homo sapiens
aatgtaggccaaagcaattaggaatagatgaggagaatta

SEQ ID NO: 9466 - DNA, 40 bp, Homo sapiens
aattctcctcatctattcctaattgctttggcctacattt

SEQ ID NO: 9467 - DNA, 40 bp, Homo sapiens
aaatgtaggccaaagcaattaggaatagatgaggagaatt

SEQ ID NO: 9468 - DNA, 40 bp, Homo sapiens
attctcctcatctattcctaattgctttggcctacatttg

SEQ ID NO: 9469 - DNA, 40 bp, Homo sapiens
caaatgtaggccaaagcaattaggaatagatgaggagaat

SEQ ID NO: 9470 - DNA, 40 bp, Homo sapiens
ttctcctcatctattcctaattgctttggcctacatttga

SEQ ID NO: 9471 - DNA, 40 bp, Homo sapiens
tcaaatgtaggccaaagcaattaggaatagatgaggagaa

SEQ ID NO: 9472 - DNA, 40 bp, Homo sapiens
tctcctcatctattcctaattgctttggcctacatttgaa

SEQ ID NO: 9473 - DNA, 40 bp, Homo sapiens
ttcaaatgtaggccaaagcaattaggaatagatgaggaga

SEQ ID NO: 9474 - DNA, 40 bp, Homo sapiens
ctcctcatctattcctaattgctttggcctacatttgaaa

SEQ ID NO: 9475 - DNA, 40 bp, Homo sapiens
tttcaaatgtaggccaaagcaattaggaatagatgaggag

SEQ ID NO: 9476 - DNA, 40 bp, Homo sapiens
tcctcatctattcctaattgctttggcctacatttgaaat

SEQ ID NO: 9477 - DNA, 40 bp, Homo sapiens
atttcaaatgtaggccaaagcaattaggaatagatgagga

SEQ ID NO: 9478 - DNA, 40 bp, Homo sapiens
cctcatctattcctaattgctttggcctacatttgaaata

SEQ ID NO: 9479 - DNA, 40 bp, Homo sapiens
tatttcaaatgtaggccaaagcaattaggaatagatgagg

SEQ ID NO: 9480 - DNA, 40 bp, Homo sapiens
ctcatctattcctaattgctttggcctacatttgaaataa

SEQ ID NO: 9481 - DNA, 40 bp, Homo sapiens
ttatttcaaatgtaggccaaagcaattaggaatagatgag

SEQ ID NO: 9482 - DNA, 40 bp, Homo sapiens
tcatctattcctaattgctttggcctacatttgaaataaa

SEQ ID NO: 9483 - DNA, 40 bp, Homo sapiens
tttatttcaaatgtaggccaaagcaattaggaatagatga

SEQ ID NO: 9484 - DNA, 40 bp, Homo sapiens
catctattcctaattgctttggcctacatttgaaataaag

SEQ ID NO: 9485 - DNA, 40 bp, Homo sapiens
ctttatttcaaatgtaggccaaagcaattaggaatagatg

SEQ ID NO: 9486 - DNA, 40 bp, Homo sapiens
atctattcctaattgctttggcctacatttgaaataaagc

SEQ ID NO: 9487 - DNA, 40 bp, Homo sapiens
gctttatttcaaatgtaggccaaagcaattaggaatagat

SEQ ID NO: 9488 - DNA, 40 bp, Homo sapiens
tctattcctaattgctttggcctacatttgaaataaagcg

SEQ ID NO: 9489 - DNA, 40 bp, Homo sapiens
cgctttatttcaaatgtaggccaaagcaattaggaataga

SEQ ID NO: 9490 - DNA, 40 bp, Homo sapiens
ctattcctaattgctttggcctacatttgaaataaagcgt

SEQ ID NO: 9491 - DNA, 40 bp, Homo sapiens
acgctttatttcaaatgtaggccaaagcaattaggaatag

SEQ ID NO: 9492 - DNA, 40 bp, Homo sapiens
tattcctaattgctttggcctacatttgaaataaagcgtg

SEQ ID NO: 9493 - DNA, 40 bp, Homo sapiens
cacgctttatttcaaatgtaggccaaagcaattaggaata

SEQ ID NO: 9494 - DNA, 40 bp, Homo sapiens
attcctaattgctttggcctacatttgaaataaagcgtgg

SEQ ID NO: 9495 - DNA, 40 bp, Homo sapiens
ccacgctttatttcaaatgtaggccaaagcaattaggaat

SEQ ID NO: 9496 - DNA, 40 bp, Homo sapiens
ttcctaattgctttggcctacatttgaaataaagcgtgga

SEQ ID NO: 9497 - DNA, 40 bp, Homo sapiens
tccacgctttatttcaaatgtaggccaaagcaattaggaa

SEQ ID NO: 9498 - DNA, 40 bp, Homo sapiens
tcctaattgctttggcctacatttgaaataaagcgtggag

SEQ ID NO: 9499 - DNA, 40 bp, Homo sapiens
ctccacgctttatttcaaatgtaggccaaagcaattagga

SEQ ID NO: 9500 - DNA, 40 bp, Homo sapiens
cctaattgctttggcctacatttgaaataaagcgtggagg

SEQ ID NO: 9501 - DNA, 40 bp, Homo sapiens
cctccacgctttatttcaaatgtaggccaaagcaattagg

SEQ ID NO: 9502 - DNA, 40 bp, Homo sapiens
ctaattgctttggcctacatttgaaataaagcgtggaggc

SEQ ID NO: 9503 - DNA, 40 bp, Homo sapiens
gcctccacgctttatttcaaatgtaggccaaagcaattag

SEQ ID NO: 9504 - DNA, 40 bp, Homo sapiens
taattgctttggcctacatttgaaataaagcgtggaggca

SEQ ID NO: 9505 - DNA, 40 bp, Homo sapiens
tgcctccacgctttatttcaaatgtaggccaaagcaatta

SEQ ID NO: 9506 - DNA, 40 bp, Homo sapiens
aattgctttggcctacatttgaaataaagcgtggaggcaa

SEQ ID NO: 9507 - DNA, 40 bp, Homo sapiens
ttgcctccacgctttatttcaaatgtaggccaaagcaatt

SEQ ID NO: 9508 - DNA, 40 bp, Homo sapiens
attgctttggcctacatttgaaataaagcgtggaggcaaa

SEQ ID NO: 9509 - DNA, 40 bp, Homo sapiens
tttgcctccacgctttatttcaaatgtaggccaaagcaat

SEQ ID NO: 9510 - DNA, 40 bp, Homo sapiens
ttgctttggcctacatttgaaataaagcgtggaggcaaac

SEQ ID NO: 9511 - DNA, 40 bp, Homo sapiens
gtttgcctccacgctttatttcaaatgtaggccaaagcaa

SEQ ID NO: 9512 - DNA, 40 bp, Homo sapiens
tgctttggcctacatttgaaataaagcgtggaggcaaacg

SEQ ID NO: 9513 - DNA, 40 bp, Homo sapiens
cgtttgcctccacgctttatttcaaatgtaggccaaagca

SEQ ID NO: 9514 - DNA, 40 bp, Homo sapiens
gctttggcctacatttgaaataaagcgtggaggcaaacgg

SEQ ID NO: 9515 - DNA, 40 bp, Homo sapiens
ccgtttgcctccacgctttatttcaaatgtaggccaaagc

SEQ ID NO: 9516 - DNA, 40 bp, Homo sapiens
ctttggcctacatttgaaataaagcgtggaggcaaacggg

SEQ ID NO: 9517 - DNA, 40 bp, Homo sapiens
cccgtttgcctccacgctttatttcaaatgtaggccaaag

SEQ ID NO: 9518 - DNA, 40 bp, Homo sapiens
tttggcctacatttgaaataaagcgtggaggcaaacggga

SEQ ID NO: 9519 - DNA, 40 bp, Homo sapiens
tcccgtttgcctccacgctttatttcaaatgtaggccaaa

SEQ ID NO: 9520 - DNA, 40 bp, Homo sapiens
ttggcctacatttgaaataaagcgtggaggcaaacgggat

SEQ ID NO: 9521 - DNA, 40 bp, Homo sapiens
atcccgtttgcctccacgctttatttcaaatgtaggccaa

SEQ ID NO: 9522 - DNA, 40 bp, Homo sapiens
tggcctacatttgaaataaagcgtggaggcaaacgggata

SEQ ID NO: 9523 - DNA, 40 bp, Homo sapiens
tatcccgtttgcctccacgctttatttcaaatgtaggcca

SEQ ID NO: 9524 - DNA, 40 bp, Homo sapiens
ggcctacatttgaaataaagcgtggaggcaaacgggataa

SEQ ID NO: 9525 - DNA, 40 bp, Homo sapiens
ttatcccgtttgcctccacgctttatttcaaatgtaggcc

SEQ ID NO: 9526 - DNA, 40 bp, Homo sapiens
gcctacatttgaaataaagcgtggaggcaaacgggataag

SEQ ID NO: 9527 - DNA, 40 bp, Homo sapiens
cttatcccgtttgcctccacgctttatttcaaatgtaggc

SEQ ID NO: 9528 - DNA, 40 bp, Homo sapiens
cctacatttgaaataaagcgtggaggcaaacgggataaga

SEQ ID NO: 9529 - DNA, 40 bp, Homo sapiens
tcttatcccgtttgcctccacgctttatttcaaatgtagg

SEQ ID NO: 9530 - DNA, 40 bp, Homo sapiens
ctacatttgaaataaagcgtggaggcaaacgggataagat

SEQ ID NO: 9531 - DNA, 40 bp, Homo sapiens
atcttatcccgtttgcctccacgctttatttcaaatgtag

SEQ ID NO: 9532 - DNA, 40 bp, Homo sapiens
tacatttgaaataaagcgtggaggcaaacgggataagata

SEQ ID NO: 9533 - DNA, 40 bp, Homo sapiens
tatcttatcccgtttgcctccacgctttatttcaaatgta

SEQ ID NO: 9534 - DNA, 40 bp, Homo sapiens
acatttgaaataaagcgtggaggcaaacgggataagatac

SEQ ID NO: 9535 - DNA, 40 bp, Homo sapiens
gtatcttatcccgtttgcctccacgctttatttcaaatgt

SEQ ID NO: 9536 - DNA, 40 bp, Homo sapiens
catttgaaataaagcgtggaggcaaacgggataagataca

SEQ ID NO: 9537 - DNA, 40 bp, Homo sapiens
tgtatcttatcccgtttgcctccacgctttatttcaaatg

SEQ ID NO: 9538 - DNA, 40 bp, Homo sapiens
atttgaaataaagcgtggaggcaaacgggataagatacat

SEQ ID NO: 9539 - DNA, 40 bp, Homo sapiens
atgtatcttatcccgtttgcctccacgctttatttcaaat

SEQ ID NO: 9540 - DNA, 40 bp, Homo sapiens
tttgaaataaagcgtggaggcaaacgggataagatacatg

SEQ ID NO: 9541 - DNA, 40 bp, Homo sapiens
catgtatcttatcccgtttgcctccacgctttatttcaaa

SEQ ID NO: 9542 - DNA, 40 bp, Homo sapiens
ttgaaataaagcgtggaggcaaacgggataagatacatgt

SEQ ID NO: 9543 - DNA, 40 bp, Homo sapiens
acatgtatcttatcccgtttgcctccacgctttatttcaa

SEQ ID NO: 9544 - DNA, 40 bp, Homo sapiens
tgaaataaagcgtggaggcaaacgggataagatacatgtt

SEQ ID NO: 9545 - DNA, 40 bp, Homo sapiens
aacatgtatcttatcccgtttgcctccacgctttatttca

SEQ ID NO: 9546 - DNA, 40 bp, Homo sapiens
gaaataaagcgtggaggcaaacgggataagatacatgttt

SEQ ID NO: 9547 - DNA, 40 bp, Homo sapiens
aaacatgtatcttatcccgtttgcctccacgctttatttc

SEQ ID NO: 9548 - DNA, 40 bp, Homo sapiens
aaataaagcgtggaggcaaacgggataagatacatgtttg

SEQ ID NO: 9549 - DNA, 40 bp, Homo sapiens
caaacatgtatcttatcccgtttgcctccacgctttattt

SEQ ID NO: 9550 - DNA, 40 bp, Homo sapiens
aataaagcgtggaggcaaacgggataagatacatgtttgt

SEQ ID NO: 9551 - DNA, 40 bp, Homo sapiens
acaaacatgtatcttatcccgtttgcctccacgctttatt

SEQ ID NO: 9552 - DNA, 40 bp, Homo sapiens
ataaagcgtggaggcaaacgggataagatacatgtttgta

SEQ ID NO: 9553 - DNA, 40 bp, Homo sapiens
tacaaacatgtatcttatcccgtttgcctccacgctttat

SEQ ID NO: 9554 - DNA, 40 bp, Homo sapiens
taaagcgtggaggcaaacgggataagatacatgtttgtag

SEQ ID NO: 9555 - DNA, 40 bp, Homo sapiens
ctacaaacatgtatcttatcccgtttgcctccacgcttta

SEQ ID NO: 9556 - DNA, 40 bp, Homo sapiens
aaagcgtggaggcaaacgggataagatacatgtttgtagt

SEQ ID NO: 9557 - DNA, 40 bp, Homo sapiens
actacaaacatgtatcttatcccgtttgcctccacgcttt

SEQ ID NO: 9558 - DNA, 40 bp, Homo sapiens
aagcgtggaggcaaacgggataagatacatgtttgtagtg

SEQ ID NO: 9559 - DNA, 40 bp, Homo sapiens
cactacaaacatgtatcttatcccgtttgcctccacgctt

SEQ ID NO: 9560 - DNA, 40 bp, Homo sapiens
agcgtggaggcaaacgggataagatacatgtttgtagtgg

SEQ ID NO: 9561 - DNA, 40 bp, Homo sapiens
ccactacaaacatgtatcttatcccgtttgcctccacgct

SEQ ID NO: 9562 - DNA, 40 bp, Homo sapiens
gcgtggaggcaaacgggataagatacatgtttgtagtggt

SEQ ID NO: 9563 - DNA, 40 bp, Homo sapiens
accactacaaacatgtatcttatcccgtttgcctccacgc

SEQ ID NO: 9564 - DNA, 40 bp, Homo sapiens
cgtggaggcaaacgggataagatacatgtttgtagtggtt

SEQ ID NO: 9565 - DNA, 40 bp, Homo sapiens
aaccactacaaacatgtatcttatcccgtttgcctccacg

SEQ ID NO: 9566 - DNA, 40 bp, Homo sapiens
gtggaggcaaacgggataagatacatgtttgtagtggttg

SEQ ID NO: 9567 - DNA, 40 bp, Homo sapiens
caaccactacaaacatgtatcttatcccgtttgcctccac

SEQ ID NO: 9568 - DNA, 40 bp, Homo sapiens
tggaggcaaacgggataagatacatgtttgtagtggttgt

SEQ ID NO: 9569 - DNA, 40 bp, Homo sapiens
acaaccactacaaacatgtatcttatcccgtttgcctcca

SEQ ID NO: 9570 - DNA, 40 bp, Homo sapiens
ggaggcaaacgggataagatacatgtttgtagtggttgtt

SEQ ID NO: 9571 - DNA, 40 bp, Homo sapiens
aacaaccactacaaacatgtatcttatcccgtttgcctcc

SEQ ID NO: 9572 - DNA, 40 bp, Homo sapiens
gaggcaaacgggataagatacatgtttgtagtggttgtta

SEQ ID NO: 9573 - DNA, 40 bp, Homo sapiens
taacaaccactacaaacatgtatcttatcccgtttgcctc

SEQ ID NO: 9574 - DNA, 40 bp, Homo sapiens
aggcaaacgggataagatacatgtttgtagtggttgttaa

SEQ ID NO: 9575 - DNA, 40 bp, Homo sapiens
ttaacaaccactacaaacatgtatcttatcccgtttgcct

SEQ ID NO: 9576 - DNA, 40 bp, Homo sapiens
ggcaaacgggataagatacatgtttgtagtggttgttaac

SEQ ID NO: 9577 - DNA, 40 bp, Homo sapiens
gttaacaaccactacaaacatgtatcttatcccgtttgcc

SEQ ID NO: 9578 - DNA, 40 bp, Homo sapiens
gcaaacgggataagatacatgtttgtagtggttgttaact

SEQ ID NO: 9579 - DNA, 40 bp, Homo sapiens
agttaacaaccactacaaacatgtatcttatcccgtttgc

SEQ ID NO: 9580 - DNA, 40 bp, Homo sapiens
caaacgggataagatacatgtttgtagtggttgttaactt

SEQ ID NO: 9581 - DNA, 40 bp, Homo sapiens
aagttaacaaccactacaaacatgtatcttatcccgtttg

SEQ ID NO: 9582 - DNA, 40 bp, Homo sapiens
aaacgggataagatacatgtttgtagtggttgttaacttc

SEQ ID NO: 9583 - DNA, 40 bp, Homo sapiens
gaagttaacaaccactacaaacatgtatcttatcccgttt

SEQ ID NO: 9584 - DNA, 40 bp, Homo sapiens
aacgggataagatacatgtttgtagtggttgttaacttca

SEQ ID NO: 9585 - DNA, 40 bp, Homo sapiens
tgaagttaacaaccactacaaacatgtatcttatcccgtt

SEQ ID NO: 9586 - DNA, 40 bp, Homo sapiens
acgggataagatacatgtttgtagtggttgttaacttcac

SEQ ID NO: 9587 - DNA, 40 bp, Homo sapiens
gtgaagttaacaaccactacaaacatgtatcttatcccgt

SEQ ID NO: 9588 - DNA, 40 bp, Homo sapiens
cgggataagatacatgtttgtagtggttgttaacttcacc

SEQ ID NO: 9589 - DNA, 40 bp, Homo sapiens
ggtgaagttaacaaccactacaaacatgtatcttatcccg

SEQ ID NO: 9590 - DNA, 40 bp, Homo sapiens
gggataagatacatgtttgtagtggttgttaacttcaccc

SEQ ID NO: 9591 - DNA, 40 bp, Homo sapiens
gggtgaagttaacaaccactacaaacatgtatcttatccc

SEQ ID NO: 9592 - DNA, 40 bp, Homo sapiens
ggataagatacatgtttgtagtggttgttaacttcaccct

SEQ ID NO: 9593 - DNA, 40 bp, Homo sapiens
agggtgaagttaacaaccactacaaacatgtatcttatcc

SEQ ID NO: 9594 - DNA, 40 bp, Homo sapiens
gataagatacatgtttgtagtggttgttaacttcacccta

SEQ ID NO: 9595 - DNA, 40 bp, Homo sapiens
tagggtgaagttaacaaccactacaaacatgtatcttatc

SEQ ID NO: 9596 - DNA, 40 bp, Homo sapiens
ataagatacatgtttgtagtggttgttaacttcaccctag

SEQ ID NO: 9597 - DNA, 40 bp, Homo sapiens
ctagggtgaagttaacaaccactacaaacatgtatcttat

SEQ ID NO: 9598 - DNA, 40 bp, Homo sapiens
taagatacatgtttgtagtggttgttaacttcaccctaga

SEQ ID NO: 9599 - DNA, 40 bp, Homo sapiens
tctagggtgaagttaacaaccactacaaacatgtatctta

SEQ ID NO: 9600 - DNA, 40 bp, Homo sapiens
aagatacatgtttgtagtggttgttaacttcaccctagac

SEQ ID NO: 9601 - DNA, 40 bp, Homo sapiens
gtctagggtgaagttaacaaccactacaaacatgtatctt

SEQ ID NO: 9602 - DNA, 40 bp, Homo sapiens
agatacatgtttgtagtggttgttaacttcaccctagaca

SEQ ID NO: 9603 - DNA, 40 bp, Homo sapiens
tgtctagggtgaagttaacaaccactacaaacatgtatct

SEQ ID NO: 9604 - DNA, 40 bp, Homo sapiens
gatacatgtttgtagtggttgttaacttcaccctagacaa

SEQ ID NO: 9605 - DNA, 40 bp, Homo sapiens
ttgtctagggtgaagttaacaaccactacaaacatgtatc

SEQ ID NO: 9606 - DNA, 40 bp, Homo sapiens
atacatgtttgtagtggttgttaacttcaccctagacaag

SEQ ID NO: 9607 - DNA, 40 bp, Homo sapiens
cttgtctagggtgaagttaacaaccactacaaacatgtat

SEQ ID NO: 9608 - DNA, 40 bp, Homo sapiens
tacatgtttgtagtggttgttaacttcaccctagacaagc

SEQ ID NO: 9609 - DNA, 40 bp, Homo sapiens
gcttgtctagggtgaagttaacaaccactacaaacatgta

SEQ ID NO: 9610 - DNA, 40 bp, Homo sapiens
acatgtttgtagtggttgttaacttcaccctagacaagca

SEQ ID NO: 9611 - DNA, 40 bp, Homo sapiens
tgcttgtctagggtgaagttaacaaccactacaaacatgt

SEQ ID NO: 9612 - DNA, 40 bp, Homo sapiens
catgtttgtagtggttgttaacttcaccctagacaagcag

SEQ ID NO: 9613 - DNA, 40 bp, Homo sapiens
ctgcttgtctagggtgaagttaacaaccactacaaacatg

SEQ ID NO: 9614 - DNA, 40 bp, Homo sapiens
atgtttgtagtggttgttaacttcaccctagacaagcagc

SEQ ID NO: 9615 - DNA, 40 bp, Homo sapiens
gctgcttgtctagggtgaagttaacaaccactacaaacat

SEQ ID NO: 9616 - DNA, 40 bp, Homo sapiens
tgtttgtagtggttgttaacttcaccctagacaagcagcc

SEQ ID NO: 9617 - DNA, 40 bp, Homo sapiens
ggctgcttgtctagggtgaagttaacaaccactacaaaca

SEQ ID NO: 9618 - DNA, 40 bp, Homo sapiens
gtttgtagtggttgttaacttcaccctagacaagcagcca

SEQ ID NO: 9619 - DNA, 40 bp, Homo sapiens
tggctgcttgtctagggtgaagttaacaaccactacaaac

SEQ ID NO: 9620 - DNA, 40 bp, Homo sapiens
tttgtagtggttgttaacttcaccctagacaagcagccaa

SEQ ID NO: 9621 - DNA, 40 bp, Homo sapiens
ttggctgcttgtctagggtgaagttaacaaccactacaaa

SEQ ID NO: 9622 - DNA, 40 bp, Homo sapiens
ttgtagtggttgttaacttcaccctagacaagcagccaat

SEQ ID NO: 9623 - DNA, 40 bp, Homo sapiens
attggctgcttgtctagggtgaagttaacaaccactacaa

SEQ ID NO: 9624 - DNA, 40 bp, Homo sapiens
tgtagtggttgttaacttcaccctagacaagcagccaata

SEQ ID NO: 9625 - DNA, 40 bp, Homo sapiens
tattggctgcttgtctagggtgaagttaacaaccactaca

SEQ ID NO: 9626 - DNA, 40 bp, Homo sapiens
gtagtggttgttaacttcaccctagacaagcagccaataa

SEQ ID NO: 9627 - DNA, 40 bp, Homo sapiens
ttattggctgcttgtctagggtgaagttaacaaccactac

SEQ ID NO: 9628 - DNA, 40 bp, Homo sapiens
tagtggttgttaacttcaccctagacaagcagccaataag

SEQ ID NO: 9629 - DNA, 40 bp, Homo sapiens
cttattggctgcttgtctagggtgaagttaacaaccacta

SEQ ID NO: 9630 - DNA, 40 bp, Homo sapiens
agtggttgttaacttcaccctagacaagcagccaataagt

SEQ ID NO: 9631 - DNA, 40 bp, Homo sapiens
acttattggctgcttgtctagggtgaagttaacaaccact

SEQ ID NO: 9632 - DNA, 40 bp, Homo sapiens
gtggttgttaacttcaccctagacaagcagccaataagtc

SEQ ID NO: 9633 - DNA, 40 bp, Homo sapiens
gacttattggctgcttgtctagggtgaagttaacaaccac

SEQ ID NO: 9634 - DNA, 40 bp, Homo sapiens
tggttgttaacttcaccctagacaagcagccaataagtct

SEQ ID NO: 9635 - DNA, 40 bp, Homo sapiens
agacttattggctgcttgtctagggtgaagttaacaacca

SEQ ID NO: 9636 - DNA, 40 bp, Homo sapiens
ggttgttaacttcaccctagacaagcagccaataagtcta

SEQ ID NO: 9637 - DNA, 40 bp, Homo sapiens
tagacttattggctgcttgtctagggtgaagttaacaacc

SEQ ID NO: 9638 - DNA, 40 bp, Homo sapiens
gttgttaacttcaccctagacaagcagccaataagtctag

SEQ ID NO: 9639 - DNA, 40 bp, Homo sapiens
ctagacttattggctgcttgtctagggtgaagttaacaac

SEQ ID NO: 9640 - DNA, 40 bp, Homo sapiens
ttgttaacttcaccctagacaagcagccaataagtctagg

SEQ ID NO: 9641 - DNA, 40 bp, Homo sapiens
cctagacttattggctgcttgtctagggtgaagttaacaa

SEQ ID NO: 9642 - DNA, 40 bp, Homo sapiens
tgttaacttcaccctagacaagcagccaataagtctaggt

SEQ ID NO: 9643 - DNA, 40 bp, Homo sapiens
acctagacttattggctgcttgtctagggtgaagttaaca

SEQ ID NO: 9644 - DNA, 40 bp, Homo sapiens
gttaacttcaccctagacaagcagccaataagtctaggta

SEQ ID NO: 9645 - DNA, 40 bp, Homo sapiens
tacctagacttattggctgcttgtctagggtgaagttaac

SEQ ID NO: 9646 - DNA, 40 bp, Homo sapiens
ttaacttcaccctagacaagcagccaataagtctaggtag

SEQ ID NO: 9647 - DNA, 40 bp, Homo sapiens
ctacctagacttattggctgcttgtctagggtgaagttaa

SEQ ID NO: 9648 - DNA, 40 bp, Homo sapiens
taacttcaccctagacaagcagccaataagtctaggtaga

SEQ ID NO: 9649 - DNA, 40 bp, Homo sapiens
tctacctagacttattggctgcttgtctagggtgaagtta

SEQ ID NO: 9650 - DNA, 40 bp, Homo sapiens
aacttcaccctagacaagcagccaataagtctaggtagag

SEQ ID NO: 9651 - DNA, 40 bp, Homo sapiens
ctctacctagacttattggctgcttgtctagggtgaagtt

SEQ ID NO: 9652 - DNA, 40 bp, Homo sapiens
acttcaccctagacaagcagccaataagtctaggtagagc

SEQ ID NO: 9653 - DNA, 40 bp, Homo sapiens
gctctacctagacttattggctgcttgtctagggtgaagt

SEQ ID NO: 9654 - DNA, 40 bp, Homo sapiens
cttcaccctagacaagcagccaataagtctaggtagagca

SEQ ID NO: 9655 - DNA, 40 bp, Homo sapiens
tgctctacctagacttattggctgcttgtctagggtgaag

SEQ ID NO: 9656 - DNA, 40 bp, Homo sapiens
ttcaccctagacaagcagccaataagtctaggtagagcag

SEQ ID NO: 9657 - DNA, 40 bp, Homo sapiens
ctgctctacctagacttattggctgcttgtctagggtgaa

SEQ ID NO: 9658 - DNA, 40 bp, Homo sapiens
tcaccctagacaagcagccaataagtctaggtagagcaga

SEQ ID NO: 9659 - DNA, 40 bp, Homo sapiens
tctgctctacctagacttattggctgcttgtctagggtga

SEQ ID NO: 9660 - DNA, 40 bp, Homo sapiens
caccctagacaagcagccaataagtctaggtagagcagag

SEQ ID NO: 9661 - DNA, 40 bp, Homo sapiens
ctctgctctacctagacttattggctgcttgtctagggtg

SEQ ID NO: 9662 - DNA, 40 bp, Homo sapiens
accctagacaagcagccaataagtctaggtagagcagagt

SEQ ID NO: 9663 - DNA, 40 bp, Homo sapiens
actctgctctacctagacttattggctgcttgtctagggt

SEQ ID NO: 9664 - DNA, 40 bp, Homo sapiens
ccctagacaagcagccaataagtctaggtagagcagagta

SEQ ID NO: 9665 - DNA, 40 bp, Homo sapiens
tactctgctctacctagacttattggctgcttgtctaggg

SEQ ID NO: 9666 - DNA, 40 bp, Homo sapiens
cctagacaagcagccaataagtctaggtagagcagagtaa

SEQ ID NO: 9667 - DNA, 40 bp, Homo sapiens
ttactctgctctacctagacttattggctgcttgtctagg

SEQ ID NO: 9668 - DNA, 40 bp, Homo sapiens
ctagacaagcagccaataagtctaggtagagcagagtaag

SEQ ID NO: 9669 - DNA, 40 bp, Homo sapiens
cttactctgctctacctagacttattggctgcttgtctag

SEQ ID NO: 9670 - DNA, 40 bp, Homo sapiens
tagacaagcagccaataagtctaggtagagcagagtaagg

SEQ ID NO: 9671 - DNA, 40 bp, Homo sapiens
ccttactctgctctacctagacttattggctgcttgtcta

SEQ ID NO: 9672 - DNA, 40 bp, Homo sapiens
agacaagcagccaataagtctaggtagagcagagtaaggc

SEQ ID NO: 9673 - DNA, 40 bp, Homo sapiens
gccttactctgctctacctagacttattggctgcttgtct

SEQ ID NO: 9674 - DNA, 40 bp, Homo sapiens
gacaagcagccaataagtctaggtagagcagagtaaggcg

SEQ ID NO: 9675 - DNA, 40 bp, Homo sapiens
cgccttactctgctctacctagacttattggctgcttgtc

SEQ ID NO: 9676 - DNA, 40 bp, Homo sapiens
acaagcagccaataagtctaggtagagcagagtaaggcgg

SEQ ID NO: 9677 - DNA, 40 bp, Homo sapiens
ccgccttactctgctctacctagacttattggctgcttgt

SEQ ID NO: 9678 - DNA, 40 bp, Homo sapiens
caagcagccaataagtctaggtagagcagagtaaggcggg

SEQ ID NO: 9679 - DNA, 40 bp, Homo sapiens
cccgccttactctgctctacctagacttattggctgcttg

SEQ ID NO: 9680 - DNA, 40 bp, Homo sapiens
aagcagccaataagtctaggtagagcagagtaaggcgggg

SEQ ID NO: 9681 - DNA, 40 bp, Homo sapiens
ccccgccttactctgctctacctagacttattggctgctt

SEQ ID NO: 9682 - DNA, 40 bp, Homo sapiens
agcagccaataagtctaggtagagcagagtaaggcgggga

SEQ ID NO: 9683 - DNA, 40 bp, Homo sapiens
tccccgccttactctgctctacctagacttattggctgct

SEQ ID NO: 9684 - DNA, 40 bp, Homo sapiens
gcagccaataagtctaggtagagcagagtaaggcggggaa

SEQ ID NO: 9685 - DNA, 40 bp, Homo sapiens
ttccccgccttactctgctctacctagacttattggctgc

SEQ ID NO: 9686 - DNA, 40 bp, Homo sapiens
cagccaataagtctaggtagagcagagtaaggcggggaac

SEQ ID NO: 9687 - DNA, 40 bp, Homo sapiens
gttccccgccttactctgctctacctagacttattggctg

SEQ ID NO: 9688 - DNA, 40 bp, Homo sapiens
agccaataagtctaggtagagcagagtaaggcggggaact

SEQ ID NO: 9689 - DNA, 40 bp, Homo sapiens
agttccccgccttactctgctctacctagacttattggct

SEQ ID NO: 9690 - DNA, 40 bp, Homo sapiens
gccaataagtctaggtagagcagagtaaggcggggaacta

SEQ ID NO: 9691 - DNA, 40 bp, Homo sapiens
tagttccccgccttactctgctctacctagacttattggc

SEQ ID NO: 9692 - DNA, 40 bp, Homo sapiens
ccaataagtctaggtagagcagagtaaggcggggaactat

SEQ ID NO: 9693 - DNA, 40 bp, Homo sapiens
atagttccccgccttactctgctctacctagacttattgg

SEQ ID NO: 9694 - DNA, 40 bp, Homo sapiens
caataagtctaggtagagcagagtaaggcggggaactatg

SEQ ID NO: 9695 - DNA, 40 bp, Homo sapiens
catagttccccgccttactctgctctacctagacttattg

SEQ ID NO: 9696 - DNA, 40 bp, Homo sapiens
aataagtctaggtagagcagagtaaggcggggaactatgc

SEQ ID NO: 9697 - DNA, 40 bp, Homo sapiens
gcatagttccccgccttactctgctctacctagacttatt

SEQ ID NO: 9698 - DNA, 40 bp, Homo sapiens
ataagtctaggtagagcagagtaaggcggggaactatgcc

SEQ ID NO: 9699 - DNA, 40 bp, Homo sapiens
ggcatagttccccgccttactctgctctacctagacttat

SEQ ID NO: 9700 - DNA, 40 bp, Homo sapiens
taagtctaggtagagcagagtaaggcggggaactatgccg

SEQ ID NO: 9701 - DNA, 40 bp, Homo sapiens
cggcatagttccccgccttactctgctctacctagactta

SEQ ID NO: 9702 - DNA, 40 bp, Homo sapiens
aagtctaggtagagcagagtaaggcggggaactatgccgt

SEQ ID NO: 9703 - DNA, 40 bp, Homo sapiens
acggcatagttccccgccttactctgctctacctagactt

SEQ ID NO: 9704 - DNA, 40 bp, Homo sapiens
agtctaggtagagcagagtaaggcggggaactatgccgtg

SEQ ID NO: 9705 - DNA, 40 bp, Homo sapiens
cacggcatagttccccgccttactctgctctacctagact

SEQ ID NO: 9706 - DNA, 40 bp, Homo sapiens
gtctaggtagagcagagtaaggcggggaactatgccgtga

SEQ ID NO: 9707 - DNA, 40 bp, Homo sapiens
tcacggcatagttccccgccttactctgctctacctagac

SEQ ID NO: 9708 - DNA, 40 bp, Homo sapiens
tctaggtagagcagagtaaggcggggaactatgccgtgac

SEQ ID NO: 9709 - DNA, 40 bp, Homo sapiens
gtcacggcatagttccccgccttactctgctctacctaga

SEQ ID NO: 9710 - DNA, 40 bp, Homo sapiens
ctaggtagagcagagtaaggcggggaactatgccgtgacc

SEQ ID NO: 9711 - DNA, 40 bp, Homo sapiens
ggtcacggcatagttccccgccttactctgctctacctag

SEQ ID NO: 9712 - DNA, 40 bp, Homo sapiens
taggtagagcagagtaaggcggggaactatgccgtgaccg

SEQ ID NO: 9713 - DNA, 40 bp, Homo sapiens
cggtcacggcatagttccccgccttactctgctctaccta

SEQ ID NO: 9714 - DNA, 40 bp, Homo sapiens
aggtagagcagagtaaggcggggaactatgccgtgaccgt

SEQ ID NO: 9715 - DNA, 40 bp, Homo sapiens
acggtcacggcatagttccccgccttactctgctctacct

SEQ ID NO: 9716 - DNA, 40 bp, Homo sapiens
ggtagagcagagtaaggcggggaactatgccgtgaccgtg

SEQ ID NO: 9717 - DNA, 40 bp, Homo sapiens
cacggtcacggcatagttccccgccttactctgctctacc

SEQ ID NO: 9718 - DNA, 40 bp, Homo sapiens
gtagagcagagtaaggcggggaactatgccgtgaccgtgt

SEQ ID NO: 9719 - DNA, 40 bp, Homo sapiens
acacggtcacggcatagttccccgccttactctgctctac

SEQ ID NO: 9720 - DNA, 40 bp, Homo sapiens
tagagcagagtaaggcggggaactatgccgtgaccgtgtg

SEQ ID NO: 9721 - DNA, 40 bp, Homo sapiens
cacacggtcacggcatagttccccgccttactctgctcta

SEQ ID NO: 9722 - DNA, 40 bp, Homo sapiens
agagcagagtaaggcggggaactatgccgtgaccgtgtgt

SEQ ID NO: 9723 - DNA, 40 bp, Homo sapiens
acacacggtcacggcatagttccccgccttactctgctct

SEQ ID NO: 9724 - DNA, 40 bp, Homo sapiens
gagcagagtaaggcggggaactatgccgtgaccgtgtgtg

SEQ ID NO: 9725 - DNA, 40 bp, Homo sapiens
cacacacggtcacggcatagttccccgccttactctgctc

SEQ ID NO: 9726 - DNA, 40 bp, Homo sapiens
agcagagtaaggcggggaactatgccgtgaccgtgtgtga

SEQ ID NO: 9727 - DNA, 40 bp, Homo sapiens
tcacacacggtcacggcatagttccccgccttactctgct

SEQ ID NO: 9728 - DNA, 40 bp, Homo sapiens
gcagagtaaggcggggaactatgccgtgaccgtgtgtgat

SEQ ID NO: 9729 - DNA, 40 bp, Homo sapiens
atcacacacggtcacggcatagttccccgccttactctgc

SEQ ID NO: 9730 - DNA, 40 bp, Homo sapiens
cagagtaaggcggggaactatgccgtgaccgtgtgtgata

SEQ ID NO: 9731 - DNA, 40 bp, Homo sapiens
tatcacacacggtcacggcatagttccccgccttactctg

SEQ ID NO: 9732 - DNA, 40 bp, Homo sapiens
agagtaaggcggggaactatgccgtgaccgtgtgtgatac

SEQ ID NO: 9733 - DNA, 40 bp, Homo sapiens
gtatcacacacggtcacggcatagttccccgccttactct

SEQ ID NO: 9734 - DNA, 40 bp, Homo sapiens
gagtaaggcggggaactatgccgtgaccgtgtgtgataca

SEQ ID NO: 9735 - DNA, 40 bp, Homo sapiens
tgtatcacacacggtcacggcatagttccccgccttactc

SEQ ID NO: 9736 - DNA, 40 bp, Homo sapiens
agtaaggcggggaactatgccgtgaccgtgtgtgatacaa

SEQ ID NO: 9737 - DNA, 40 bp, Homo sapiens
ttgtatcacacacggtcacggcatagttccccgccttact

SEQ ID NO: 9738 - DNA, 40 bp, Homo sapiens
gtaaggcggggaactatgccgtgaccgtgtgtgatacaat

SEQ ID NO: 9739 - DNA, 40 bp, Homo sapiens
attgtatcacacacggtcacggcatagttccccgccttac

SEQ ID NO: 9740 - DNA, 40 bp, Homo sapiens
taaggcggggaactatgccgtgaccgtgtgtgatacaatt

SEQ ID NO: 9741 - DNA, 40 bp, Homo sapiens
aattgtatcacacacggtcacggcatagttccccgcctta

SEQ ID NO: 9742 - DNA, 40 bp, Homo sapiens
aaggcggggaactatgccgtgaccgtgtgtgatacaattt

SEQ ID NO: 9743 - DNA, 40 bp, Homo sapiens
aaattgtatcacacacggtcacggcatagttccccgcctt

SEQ ID NO: 9744 - DNA, 40 bp, Homo sapiens
aggcggggaactatgccgtgaccgtgtgtgatacaatttt

SEQ ID NO: 9745 - DNA, 40 bp, Homo sapiens
aaaattgtatcacacacggtcacggcatagttccccgcct

SEQ ID NO: 9746 - DNA, 40 bp, Homo sapiens
ggcggggaactatgccgtgaccgtgtgtgatacaattttt

SEQ ID NO: 9747 - DNA, 40 bp, Homo sapiens
aaaaattgtatcacacacggtcacggcatagttccccgcc

SEQ ID NO: 9748 - DNA, 40 bp, Homo sapiens
gcggggaactatgccgtgaccgtgtgtgatacaatttttc

SEQ ID NO: 9749 - DNA, 40 bp, Homo sapiens
gaaaaattgtatcacacacggtcacggcatagttccccgc

SEQ ID NO: 9750 - DNA, 40 bp, Homo sapiens
cggggaactatgccgtgaccgtgtgtgatacaatttttct

SEQ ID NO: 9751 - DNA, 40 bp, Homo sapiens
agaaaaattgtatcacacacggtcacggcatagttccccg

SEQ ID NO: 9752 - DNA, 40 bp, Homo sapiens
ggggaactatgccgtgaccgtgtgtgatacaatttttcta

SEQ ID NO: 9753 - DNA, 40 bp, Homo sapiens
tagaaaaattgtatcacacacggtcacggcatagttcccc

SEQ ID NO: 9754 - DNA, 40 bp, Homo sapiens
gggaactatgccgtgaccgtgtgtgatacaatttttctag

SEQ ID NO: 9755 - DNA, 40 bp, Homo sapiens
ctagaaaaattgtatcacacacggtcacggcatagttccc

SEQ ID NO: 9756 - DNA, 40 bp, Homo sapiens
ggaactatgccgtgaccgtgtgtgatacaatttttctagc

SEQ ID NO: 9757 - DNA, 40 bp, Homo sapiens
gctagaaaaattgtatcacacacggtcacggcatagttcc

SEQ ID NO: 9758 - DNA, 40 bp, Homo sapiens
gaactatgccgtgaccgtgtgtgatacaatttttctagcc

SEQ ID NO: 9759 - DNA, 40 bp, Homo sapiens
ggctagaaaaattgtatcacacacggtcacggcatagttc

SEQ ID NO: 9760 - DNA, 40 bp, Homo sapiens
aactatgccgtgaccgtgtgtgatacaatttttctagcct

SEQ ID NO: 9761 - DNA, 40 bp, Homo sapiens
aggctagaaaaattgtatcacacacggtcacggcatagtt

SEQ ID NO: 9762 - DNA, 40 bp, Homo sapiens
actatgccgtgaccgtgtgtgatacaatttttctagcctg

SEQ ID NO: 9763 - DNA, 40 bp, Homo sapiens
caggctagaaaaattgtatcacacacggtcacggcatagt

SEQ ID NO: 9764 - DNA, 40 bp, Homo sapiens
ctatgccgtgaccgtgtgtgatacaatttttctagcctgt

SEQ ID NO: 9765 - DNA, 40 bp, Homo sapiens
acaggctagaaaaattgtatcacacacggtcacggcatag

SEQ ID NO: 9766 - DNA, 40 bp, Homo sapiens
tatgccgtgaccgtgtgtgatacaatttttctagcctgtg

SEQ ID NO: 9767 - DNA, 40 bp, Homo sapiens
cacaggctagaaaaattgtatcacacacggtcacggcata

SEQ ID NO: 9768 - DNA, 40 bp, Homo sapiens
atgccgtgaccgtgtgtgatacaatttttctagcctgtgg

SEQ ID NO: 9769 - DNA, 40 bp, Homo sapiens
ccacaggctagaaaaattgtatcacacacggtcacggcat

SEQ ID NO: 9770 - DNA, 40 bp, Homo sapiens
tgccgtgaccgtgtgtgatacaatttttctagcctgtggt

SEQ ID NO: 9771 - DNA, 40 bp, Homo sapiens
accacaggctagaaaaattgtatcacacacggtcacggca

SEQ ID NO: 9772 - DNA, 40 bp, Homo sapiens
gccgtgaccgtgtgtgatacaatttttctagcctgtggtg

SEQ ID NO: 9773 - DNA, 40 bp, Homo sapiens
caccacaggctagaaaaattgtatcacacacggtcacggc

SEQ ID NO: 9774 - DNA, 40 bp, Homo sapiens
ccgtgaccgtgtgtgatacaatttttctagcctgtggtgc

SEQ ID NO: 9775 - DNA, 40 bp, Homo sapiens
gcaccacaggctagaaaaattgtatcacacacggtcacgg

SEQ ID NO: 9776 - DNA, 40 bp, Homo sapiens
cgtgaccgtgtgtgatacaatttttctagcctgtggtgct

SEQ ID NO: 9777 - DNA, 40 bp, Homo sapiens
agcaccacaggctagaaaaattgtatcacacacggtcacg

SEQ ID NO: 9778 - DNA, 40 bp, Homo sapiens
gtgaccgtgtgtgatacaatttttctagcctgtggtgctt

SEQ ID NO: 9779 - DNA, 40 bp, Homo sapiens
aagcaccacaggctagaaaaattgtatcacacacggtcac

SEQ ID NO: 9780 - DNA, 40 bp, Homo sapiens
tgaccgtgtgtgatacaatttttctagcctgtggtgcttt

SEQ ID NO: 9781 - DNA, 40 bp, Homo sapiens
aaagcaccacaggctagaaaaattgtatcacacacggtca

SEQ ID NO: 9782 - DNA, 40 bp, Homo sapiens
gaccgtgtgtgatacaatttttctagcctgtggtgctttt

SEQ ID NO: 9783 - DNA, 40 bp, Homo sapiens
aaaagcaccacaggctagaaaaattgtatcacacacggtc

SEQ ID NO: 9784 - DNA, 40 bp, Homo sapiens
accgtgtgtgatacaatttttctagcctgtggtgcttttt

SEQ ID NO: 9785 - DNA, 40 bp, Homo sapiens
aaaaagcaccacaggctagaaaaattgtatcacacacggt

SEQ ID NO: 9786 - DNA, 40 bp, Homo sapiens
ccgtgtgtgatacaatttttctagcctgtggtgctttttg

SEQ ID NO: 9787 - DNA, 40 bp, Homo sapiens
caaaaagcaccacaggctagaaaaattgtatcacacacgg

SEQ ID NO: 9788 - DNA, 40 bp, Homo sapiens
cgtgtgtgatacaatttttctagcctgtggtgctttttgc

SEQ ID NO: 9789 - DNA, 40 bp, Homo sapiens
gcaaaaagcaccacaggctagaaaaattgtatcacacacg

SEQ ID NO: 9790 - DNA, 40 bp, Homo sapiens
gtgtgtgatacaatttttctagcctgtggtgctttttgcg

SEQ ID NO: 9791 - DNA, 40 bp, Homo sapiens
cgcaaaaagcaccacaggctagaaaaattgtatcacacac

SEQ ID NO: 9792 - DNA, 40 bp, Homo sapiens
tgtgtgatacaatttttctagcctgtggtgctttttgcgg

SEQ ID NO: 9793 - DNA, 40 bp, Homo sapiens
ccgcaaaaagcaccacaggctagaaaaattgtatcacaca

SEQ ID NO: 9794 - DNA, 40 bp, Homo sapiens
gtgtgatacaatttttctagcctgtggtgctttttgcggc

SEQ ID NO: 9795 - DNA, 40 bp, Homo sapiens
gccgcaaaaagcaccacaggctagaaaaattgtatcacac

SEQ ID NO: 9796 - DNA, 40 bp, Homo sapiens
tgtgatacaatttttctagcctgtggtgctttttgcggca

SEQ ID NO: 9797 - DNA, 40 bp, Homo sapiens
tgccgcaaaaagcaccacaggctagaaaaattgtatcaca

SEQ ID NO: 9798 - DNA, 40 bp, Homo sapiens
gtgatacaatttttctagcctgtggtgctttttgcggcag

SEQ ID NO: 9799 - DNA, 40 bp, Homo sapiens
ctgccgcaaaaagcaccacaggctagaaaaattgtatcac

SEQ ID NO: 9800 - DNA, 40 bp, Homo sapiens
tgatacaatttttctagcctgtggtgctttttgcggcagg

SEQ ID NO: 9801 - DNA, 40 bp, Homo sapiens
cctgccgcaaaaagcaccacaggctagaaaaattgtatca

SEQ ID NO: 9802 - DNA, 40 bp, Homo sapiens
gatacaatttttctagcctgtggtgctttttgcggcaggg

SEQ ID NO: 9803 - DNA, 40 bp, Homo sapiens
ccctgccgcaaaaagcaccacaggctagaaaaattgtatc

SEQ ID NO: 9804 - DNA, 40 bp, Homo sapiens
atacaatttttctagcctgtggtgctttttgcggcagggc

SEQ ID NO: 9805 - DNA, 40 bp, Homo sapiens
gccctgccgcaaaaagcaccacaggctagaaaaattgtat

SEQ ID NO: 9806 - DNA, 40 bp, Homo sapiens
tacaatttttctagcctgtggtgctttttgcggcagggct

SEQ ID NO: 9807 - DNA, 40 bp, Homo sapiens
agccctgccgcaaaaagcaccacaggctagaaaaattgta

SEQ ID NO: 9808 - DNA, 40 bp, Homo sapiens
acaatttttctagcctgtggtgctttttgcggcagggctt

SEQ ID NO: 9809 - DNA, 40 bp, Homo sapiens
aagccctgccgcaaaaagcaccacaggctagaaaaattgt

SEQ ID NO: 9810 - DNA, 40 bp, Homo sapiens
caatttttctagcctgtggtgctttttgcggcagggctta

SEQ ID NO: 9811 - DNA, 40 bp, Homo sapiens
taagccctgccgcaaaaagcaccacaggctagaaaaattg

SEQ ID NO: 9812 - DNA, 40 bp, Homo sapiens
aatttttctagcctgtggtgctttttgcggcagggcttag

SEQ ID NO: 9813 - DNA, 40 bp, Homo sapiens
ctaagccctgccgcaaaaagcaccacaggctagaaaaatt

SEQ ID NO: 9814 - DNA, 40 bp, Homo sapiens
atttttctagcctgtggtgctttttgcggcagggcttagg

SEQ ID NO: 9815 - DNA, 40 bp, Homo sapiens
cctaagccctgccgcaaaaagcaccacaggctagaaaaat

SEQ ID NO: 9816 - DNA, 40 bp, Homo sapiens
tttttctagcctgtggtgctttttgcggcagggcttagga

SEQ ID NO: 9817 - DNA, 40 bp, Homo sapiens
tcctaagccctgccgcaaaaagcaccacaggctagaaaaa

SEQ ID NO: 9818 - DNA, 40 bp, Homo sapiens
ttttctagcctgtggtgctttttgcggcagggcttaggag

SEQ ID NO: 9819 - DNA, 40 bp, Homo sapiens
ctcctaagccctgccgcaaaaagcaccacaggctagaaaa

SEQ ID NO: 9820 - DNA, 40 bp, Homo sapiens
tttctagcctgtggtgctttttgcggcagggcttaggagt

SEQ ID NO: 9821 - DNA, 40 bp, Homo sapiens
actcctaagccctgccgcaaaaagcaccacaggctagaaa

SEQ ID NO: 9822 - DNA, 40 bp, Homo sapiens
ttctagcctgtggtgctttttgcggcagggcttaggagta

SEQ ID NO: 9823 - DNA, 40 bp, Homo sapiens
tactcctaagccctgccgcaaaaagcaccacaggctagaa

SEQ ID NO: 9824 - DNA, 40 bp, Homo sapiens
tctagcctgtggtgctttttgcggcagggcttaggagtaa

SEQ ID NO: 9825 - DNA, 40 bp, Homo sapiens
ttactcctaagccctgccgcaaaaagcaccacaggctaga

SEQ ID NO: 9826 - DNA, 40 bp, Homo sapiens
ctagcctgtggtgctttttgcggcagggcttaggagtaag

SEQ ID NO: 9827 - DNA, 40 bp, Homo sapiens
cttactcctaagccctgccgcaaaaagcaccacaggctag

SEQ ID NO: 9828 - DNA, 40 bp, Homo sapiens
tagcctgtggtgctttttgcggcagggcttaggagtaagg

SEQ ID NO: 9829 - DNA, 40 bp, Homo sapiens
ccttactcctaagccctgccgcaaaaagcaccacaggcta

SEQ ID NO: 9830 - DNA, 40 bp, Homo sapiens
agcctgtggtgctttttgcggcagggcttaggagtaaggt

SEQ ID NO: 9831 - DNA, 40 bp, Homo sapiens
accttactcctaagccctgccgcaaaaagcaccacaggct

SEQ ID NO: 9832 - DNA, 40 bp, Homo sapiens
gcctgtggtgctttttgcggcagggcttaggagtaaggtt

SEQ ID NO: 9833 - DNA, 40 bp, Homo sapiens
aaccttactcctaagccctgccgcaaaaagcaccacaggc

SEQ ID NO: 9834 - DNA, 40 bp, Homo sapiens
cctgtggtgctttttgcggcagggcttaggagtaaggtta

SEQ ID NO: 9835 - DNA, 40 bp, Homo sapiens
taaccttactcctaagccctgccgcaaaaagcaccacagg

SEQ ID NO: 9836 - DNA, 40 bp, Homo sapiens
ctgtggtgctttttgcggcagggcttaggagtaaggttag

SEQ ID NO: 9837 - DNA, 40 bp, Homo sapiens
ctaaccttactcctaagccctgccgcaaaaagcaccacag

SEQ ID NO: 9838 - DNA, 40 bp, Homo sapiens
tgtggtgctttttgcggcagggcttaggagtaaggttagt

SEQ ID NO: 9839 - DNA, 40 bp, Homo sapiens
actaaccttactcctaagccctgccgcaaaaagcaccaca

SEQ ID NO: 9840 - DNA, 40 bp, Homo sapiens
gtggtgctttttgcggcagggcttaggagtaaggttagta

SEQ ID NO: 9841 - DNA, 40 bp, Homo sapiens
tactaaccttactcctaagccctgccgcaaaaagcaccac

SEQ ID NO: 9842 - DNA, 40 bp, Homo sapiens
tggtgctttttgcggcagggcttaggagtaaggttagtat

SEQ ID NO: 9843 - DNA, 40 bp, Homo sapiens
atactaaccttactcctaagccctgccgcaaaaagcacca

SEQ ID NO: 9844 - DNA, 40 bp, Homo sapiens
ggtgctttttgcggcagggcttaggagtaaggttagtatg

SEQ ID NO: 9845 - DNA, 40 bp, Homo sapiens
catactaaccttactcctaagccctgccgcaaaaagcacc

SEQ ID NO: 9846 - DNA, 40 bp, Homo sapiens
gtgctttttgcggcagggcttaggagtaaggttagtatgt

SEQ ID NO: 9847 - DNA, 40 bp, Homo sapiens
acatactaaccttactcctaagccctgccgcaaaaagcac

SEQ ID NO: 9848 - DNA, 40 bp, Homo sapiens
tgctttttgcggcagggcttaggagtaaggttagtatgtt

SEQ ID NO: 9849 - DNA, 40 bp, Homo sapiens
aacatactaaccttactcctaagccctgccgcaaaaagca

SEQ ID NO: 9850 - DNA, 40 bp, Homo sapiens
gctttttgcggcagggcttaggagtaaggttagtatgtta

SEQ ID NO: 9851 - DNA, 40 bp, Homo sapiens
taacatactaaccttactcctaagccctgccgcaaaaagc

SEQ ID NO: 9852 - DNA, 40 bp, Homo sapiens
ctttttgcggcagggcttaggagtaaggttagtatgttat

SEQ ID NO: 9853 - DNA, 40 bp, Homo sapiens
ataacatactaaccttactcctaagccctgccgcaaaaag

SEQ ID NO: 9854 - DNA, 40 bp, Homo sapiens
tttttgcggcagggcttaggagtaaggttagtatgttatc

SEQ ID NO: 9855 - DNA, 40 bp, Homo sapiens
gataacatactaaccttactcctaagccctgccgcaaaaa

SEQ ID NO: 9856 - DNA, 40 bp, Homo sapiens
ttttgcggcagggcttaggagtaaggttagtatgttatca

SEQ ID NO: 9857 - DNA, 40 bp, Homo sapiens
tgataacatactaaccttactcctaagccctgccgcaaaa

SEQ ID NO: 9858 - DNA, 40 bp, Homo sapiens
tttgcggcagggcttaggagtaaggttagtatgttatcat

SEQ ID NO: 9859 - DNA, 40 bp, Homo sapiens
atgataacatactaaccttactcctaagccctgccgcaaa

SEQ ID NO: 9860 - DNA, 40 bp, Homo sapiens
ttgcggcagggcttaggagtaaggttagtatgttatcatt

SEQ ID NO: 9861 - DNA, 40 bp, Homo sapiens
aatgataacatactaaccttactcctaagccctgccgcaa

SEQ ID NO: 9862 - DNA, 40 bp, Homo sapiens
tgcggcagggcttaggagtaaggttagtatgttatcattt

SEQ ID NO: 9863 - DNA, 40 bp, Homo sapiens
aaatgataacatactaaccttactcctaagccctgccgca

SEQ ID NO: 9864 - DNA, 40 bp, Homo sapiens
gcggcagggcttaggagtaaggttagtatgttatcatttg

SEQ ID NO: 9865 - DNA, 40 bp, Homo sapiens
caaatgataacatactaaccttactcctaagccctgccgc

SEQ ID NO: 9866 - DNA, 40 bp, Homo sapiens
cggcagggcttaggagtaaggttagtatgttatcatttgg

SEQ ID NO: 9867 - DNA, 40 bp, Homo sapiens
ccaaatgataacatactaaccttactcctaagccctgccg

SEQ ID NO: 9868 - DNA, 40 bp, Homo sapiens
ggcagggcttaggagtaaggttagtatgttatcatttggg

SEQ ID NO: 9869 - DNA, 40 bp, Homo sapiens
cccaaatgataacatactaaccttactcctaagccctgcc

SEQ ID NO: 9870 - DNA, 40 bp, Homo sapiens
gcagggcttaggagtaaggttagtatgttatcatttggga

SEQ ID NO: 9871 - DNA, 40 bp, Homo sapiens
tcccaaatgataacatactaaccttactcctaagccctgc

SEQ ID NO: 9872 - DNA, 40 bp, Homo sapiens
cagggcttaggagtaaggttagtatgttatcatttgggaa

SEQ ID NO: 9873 - DNA, 40 bp, Homo sapiens
ttcccaaatgataacatactaaccttactcctaagccctg

SEQ ID NO: 9874 - DNA, 40 bp, Homo sapiens
agggcttaggagtaaggttagtatgttatcatttgggaaa

SEQ ID NO: 9875 - DNA, 40 bp, Homo sapiens
tttcccaaatgataacatactaaccttactcctaagccct

SEQ ID NO: 9876 - DNA, 40 bp, Homo sapiens
gggcttaggagtaaggttagtatgttatcatttgggaaac

SEQ ID NO: 9877 - DNA, 40 bp, Homo sapiens
gtttcccaaatgataacatactaaccttactcctaagccc

SEQ ID NO: 9878 - DNA, 40 bp, Homo sapiens
ggcttaggagtaaggttagtatgttatcatttgggaaacc

SEQ ID NO: 9879 - DNA, 40 bp, Homo sapiens
ggtttcccaaatgataacatactaaccttactcctaagcc

SEQ ID NO: 9880 - DNA, 40 bp, Homo sapiens
gcttaggagtaaggttagtatgttatcatttgggaaacca

SEQ ID NO: 9881 - DNA, 40 bp, Homo sapiens
tggtttcccaaatgataacatactaaccttactcctaagc

SEQ ID NO: 9882 - DNA, 40 bp, Homo sapiens
cttaggagtaaggttagtatgttatcatttgggaaaccaa

SEQ ID NO: 9883 - DNA, 40 bp, Homo sapiens
ttggtttcccaaatgataacatactaaccttactcctaag

SEQ ID NO: 9884 - DNA, 40 bp, Homo sapiens
ttaggagtaaggttagtatgttatcatttgggaaaccaaa

SEQ ID NO: 9885 - DNA, 40 bp, Homo sapiens
tttggtttcccaaatgataacatactaaccttactcctaa

SEQ ID NO: 9886 - DNA, 40 bp, Homo sapiens
taggagtaaggttagtatgttatcatttgggaaaccaaat

SEQ ID NO: 9887 - DNA, 40 bp, Homo sapiens
atttggtttcccaaatgataacatactaaccttactccta

SEQ ID NO: 9888 - DNA, 40 bp, Homo sapiens
aggagtaaggttagtatgttatcatttgggaaaccaaatt

SEQ ID NO: 9889 - DNA, 40 bp, Homo sapiens
aatttggtttcccaaatgataacatactaaccttactcct

SEQ ID NO: 9890 - DNA, 40 bp, Homo sapiens
ggagtaaggttagtatgttatcatttgggaaaccaaatta

SEQ ID NO: 9891 - DNA, 40 bp, Homo sapiens
taatttggtttcccaaatgataacatactaaccttactcc

SEQ ID NO: 9892 - DNA, 40 bp, Homo sapiens
gagtaaggttagtatgttatcatttgggaaaccaaattat

SEQ ID NO: 9893 - DNA, 40 bp, Homo sapiens
ataatttggtttcccaaatgataacatactaaccttactc

SEQ ID NO: 9894 - DNA, 40 bp, Homo sapiens
agtaaggttagtatgttatcatttgggaaaccaaattatt

SEQ ID NO: 9895 - DNA, 40 bp, Homo sapiens
aataatttggtttcccaaatgataacatactaaccttact

SEQ ID NO: 9896 - DNA, 40 bp, Homo sapiens
gtaaggttagtatgttatcatttgggaaaccaaattatta

SEQ ID NO: 9897 - DNA, 40 bp, Homo sapiens
taataatttggtttcccaaatgataacatactaaccttac

SEQ ID NO: 9898 - DNA, 40 bp, Homo sapiens
taaggttagtatgttatcatttgggaaaccaaattattat

SEQ ID NO: 9899 - DNA, 40 bp, Homo sapiens
ataataatttggtttcccaaatgataacatactaacctta

SEQ ID NO: 9900 - DNA, 40 bp, Homo sapiens
aaggttagtatgttatcatttgggaaaccaaattattatt

SEQ ID NO: 9901 - DNA, 40 bp, Homo sapiens
aataataatttggtttcccaaatgataacatactaacctt

SEQ ID NO: 9902 - DNA, 40 bp, Homo sapiens
aggttagtatgttatcatttgggaaaccaaattattattt

SEQ ID NO: 9903 - DNA, 40 bp, Homo sapiens
aaataataatttggtttcccaaatgataacatactaacct

SEQ ID NO: 9904 - DNA, 40 bp, Homo sapiens
ggttagtatgttatcatttgggaaaccaaattattatttt

SEQ ID NO: 9905 - DNA, 40 bp, Homo sapiens
aaaataataatttggtttcccaaatgataacatactaacc

SEQ ID NO: 9906 - DNA, 40 bp, Homo sapiens
gttagtatgttatcatttgggaaaccaaattattattttg

SEQ ID NO: 9907 - DNA, 40 bp, Homo sapiens
caaaataataatttggtttcccaaatgataacatactaac

SEQ ID NO: 9908 - DNA, 40 bp, Homo sapiens
ttagtatgttatcatttgggaaaccaaattattattttgg

SEQ ID NO: 9909 - DNA, 40 bp, Homo sapiens
ccaaaataataatttggtttcccaaatgataacatactaa

SEQ ID NO: 9910 - DNA, 40 bp, Homo sapiens
tagtatgttatcatttgggaaaccaaattattattttggg

SEQ ID NO: 9911 - DNA, 40 bp, Homo sapiens
cccaaaataataatttggtttcccaaatgataacatacta

SEQ ID NO: 9912 - DNA, 40 bp, Homo sapiens
agtatgttatcatttgggaaaccaaattattattttgggt

SEQ ID NO: 9913 - DNA, 40 bp, Homo sapiens
acccaaaataataatttggtttcccaaatgataacatact

SEQ ID NO: 9914 - DNA, 40 bp, Homo sapiens
gtatgttatcatttgggaaaccaaattattattttgggtc

SEQ ID NO: 9915 - DNA, 40 bp, Homo sapiens
gacccaaaataataatttggtttcccaaatgataacatac

SEQ ID NO: 9916 - DNA, 40 bp, Homo sapiens
tatgttatcatttgggaaaccaaattattattttgggtct

SEQ ID NO: 9917 - DNA, 40 bp, Homo sapiens
agacccaaaataataatttggtttcccaaatgataacata

SEQ ID NO: 9918 - DNA, 40 bp, Homo sapiens
atgttatcatttgggaaaccaaattattattttgggtctt

SEQ ID NO: 9919 - DNA, 40 bp, Homo sapiens
aagacccaaaataataatttggtttcccaaatgataacat

SEQ ID NO: 9920 - DNA, 40 bp, Homo sapiens
tgttatcatttgggaaaccaaattattattttgggtcttc

SEQ ID NO: 9921 - DNA, 40 bp, Homo sapiens
gaagacccaaaataataatttggtttcccaaatgataaca

SEQ ID NO: 9922 - DNA, 40 bp, Homo sapiens
gttatcatttgggaaaccaaattattattttgggtcttca

SEQ ID NO: 9923 - DNA, 40 bp, Homo sapiens
tgaagacccaaaataataatttggtttcccaaatgataac

SEQ ID NO: 9924 - DNA, 40 bp, Homo sapiens
ttatcatttgggaaaccaaattattattttgggtcttcag

SEQ ID NO: 9925 - DNA, 40 bp, Homo sapiens
ctgaagacccaaaataataatttggtttcccaaatgataa

SEQ ID NO: 9926 - DNA, 40 bp, Homo sapiens
tatcatttgggaaaccaaattattattttgggtcttcagt

SEQ ID NO: 9927 - DNA, 40 bp, Homo sapiens
actgaagacccaaaataataatttggtttcccaaatgata

SEQ ID NO: 9928 - DNA, 40 bp, Homo sapiens
atcatttgggaaaccaaattattattttgggtcttcagtc

SEQ ID NO: 9929 - DNA, 40 bp, Homo sapiens
gactgaagacccaaaataataatttggtttcccaaatgat

SEQ ID NO: 9930 - DNA, 40 bp, Homo sapiens
tcatttgggaaaccaaattattattttgggtcttcagtca

SEQ ID NO: 9931 - DNA, 40 bp, Homo sapiens
tgactgaagacccaaaataataatttggtttcccaaatga

SEQ ID NO: 9932 - DNA, 40 bp, Homo sapiens
catttgggaaaccaaattattattttgggtcttcagtcaa

SEQ ID NO: 9933 - DNA, 40 bp, Homo sapiens
ttgactgaagacccaaaataataatttggtttcccaaatg

SEQ ID NO: 9934 - DNA, 40 bp, Homo sapiens
atttgggaaaccaaattattattttgggtcttcagtcaat

SEQ ID NO: 9935 - DNA, 40 bp, Homo sapiens
attgactgaagacccaaaataataatttggtttcccaaat

SEQ ID NO: 9936 - DNA, 40 bp, Homo sapiens
tttgggaaaccaaattattattttgggtcttcagtcaatt

SEQ ID NO: 9937 - DNA, 40 bp, Homo sapiens
aattgactgaagacccaaaataataatttggtttcccaaa

SEQ ID NO: 9938 - DNA, 40 bp, Homo sapiens
ttgggaaaccaaattattattttgggtcttcagtcaatta

SEQ ID NO: 9939 - DNA, 40 bp, Homo sapiens
taattgactgaagacccaaaataataatttggtttcccaa

SEQ ID NO: 9940 - DNA, 40 bp, Homo sapiens
tgggaaaccaaattattattttgggtcttcagtcaattat

SEQ ID NO: 9941 - DNA, 40 bp, Homo sapiens
ataattgactgaagacccaaaataataatttggtttccca

SEQ ID NO: 9942 - DNA, 40 bp, Homo sapiens
gggaaaccaaattattattttgggtcttcagtcaattatg

SEQ ID NO: 9943 - DNA, 40 bp, Homo sapiens
cataattgactgaagacccaaaataataatttggtttccc

SEQ ID NO: 9944 - DNA, 40 bp, Homo sapiens
ggaaaccaaattattattttgggtcttcagtcaattatga

SEQ ID NO: 9945 - DNA, 40 bp, Homo sapiens
tcataattgactgaagacccaaaataataatttggtttcc

SEQ ID NO: 9946 - DNA, 40 bp, Homo sapiens
gaaaccaaattattattttgggtcttcagtcaattatgat

SEQ ID NO: 9947 - DNA, 40 bp, Homo sapiens
atcataattgactgaagacccaaaataataatttggtttc

SEQ ID NO: 9948 - DNA, 40 bp, Homo sapiens
aaaccaaattattattttgggtcttcagtcaattatgatg

SEQ ID NO: 9949 - DNA, 40 bp, Homo sapiens
catcataattgactgaagacccaaaataataatttggttt

SEQ ID NO: 9950 - DNA, 40 bp, Homo sapiens
aaccaaattattattttgggtcttcagtcaattatgatgc

SEQ ID NO: 9951 - DNA, 40 bp, Homo sapiens
gcatcataattgactgaagacccaaaataataatttggtt

SEQ ID NO: 9952 - DNA, 40 bp, Homo sapiens
accaaattattattttgggtcttcagtcaattatgatgct

SEQ ID NO: 9953 - DNA, 40 bp, Homo sapiens
agcatcataattgactgaagacccaaaataataatttggt

SEQ ID NO: 9954 - DNA, 40 bp, Homo sapiens
ccaaattattattttgggtcttcagtcaattatgatgctg

SEQ ID NO: 9955 - DNA, 40 bp, Homo sapiens
cagcatcataattgactgaagacccaaaataataatttgg

SEQ ID NO: 9956 - DNA, 40 bp, Homo sapiens
caaattattattttgggtcttcagtcaattatgatgctgt

SEQ ID NO: 9957 - DNA, 40 bp, Homo sapiens
acagcatcataattgactgaagacccaaaataataatttg

SEQ ID NO: 9958 - DNA, 40 bp, Homo sapiens
aaattattattttgggtcttcagtcaattatgatgctgtg

SEQ ID NO: 9959 - DNA, 40 bp, Homo sapiens
cacagcatcataattgactgaagacccaaaataataattt

SEQ ID NO: 9960 - DNA, 40 bp, Homo sapiens
aattattattttgggtcttcagtcaattatgatgctgtgt

SEQ ID NO: 9961 - DNA, 40 bp, Homo sapiens
acacagcatcataattgactgaagacccaaaataataatt

SEQ ID NO: 9962 - DNA, 40 bp, Homo sapiens
attattattttgggtcttcagtcaattatgatgctgtgta

SEQ ID NO: 9963 - DNA, 40 bp, Homo sapiens
tacacagcatcataattgactgaagacccaaaataataat

SEQ ID NO: 9964 - DNA, 40 bp, Homo sapiens
ttattattttgggtcttcagtcaattatgatgctgtgtat

SEQ ID NO: 9965 - DNA, 40 bp, Homo sapiens
atacacagcatcataattgactgaagacccaaaataataa

SEQ ID NO: 9966 - DNA, 40 bp, Homo sapiens
tattattttgggtcttcagtcaattatgatgctgtgtata

SEQ ID NO: 9967 - DNA, 40 bp, Homo sapiens
tatacacagcatcataattgactgaagacccaaaataata

SEQ ID NO: 9968 - DNA, 40 bp, Homo sapiens
attattttgggtcttcagtcaattatgatgctgtgtatat

SEQ ID NO: 9969 - DNA, 40 bp, Homo sapiens
atatacacagcatcataattgactgaagacccaaaataat

SEQ ID NO: 9970 - DNA, 40 bp, Homo sapiens
ttattttgggtcttcagtcaattatgatgctgtgtatatt

SEQ ID NO: 9971 - DNA, 40 bp, Homo sapiens
aatatacacagcatcataattgactgaagacccaaaataa

SEQ ID NO: 9972 - DNA, 40 bp, Homo sapiens
tattttgggtcttcagtcaattatgatgctgtgtatattt

SEQ ID NO: 9973 - DNA, 40 bp, Homo sapiens
aaatatacacagcatcataattgactgaagacccaaaata

SEQ ID NO: 9974 - DNA, 40 bp, Homo sapiens
attttgggtcttcagtcaattatgatgctgtgtatattta

SEQ ID NO: 9975 - DNA, 40 bp, Homo sapiens
taaatatacacagcatcataattgactgaagacccaaaat

SEQ ID NO: 9976 - DNA, 40 bp, Homo sapiens
ttttgggtcttcagtcaattatgatgctgtgtatatttag

SEQ ID NO: 9977 - DNA, 40 bp, Homo sapiens
ctaaatatacacagcatcataattgactgaagacccaaaa

SEQ ID NO: 9978 - DNA, 40 bp, Homo sapiens
tttgggtcttcagtcaattatgatgctgtgtatatttagt

SEQ ID NO: 9979 - DNA, 40 bp, Homo sapiens
actaaatatacacagcatcataattgactgaagacccaaa

SEQ ID NO: 9980 - DNA, 40 bp, Homo sapiens
ttgggtcttcagtcaattatgatgctgtgtatatttagtg

SEQ ID NO: 9981 - DNA, 40 bp, Homo sapiens
cactaaatatacacagcatcataattgactgaagacccaa

SEQ ID NO: 9982 - DNA, 40 bp, Homo sapiens
tgggtcttcagtcaattatgatgctgtgtatatttagtgt

SEQ ID NO: 9983 - DNA, 40 bp, Homo sapiens
acactaaatatacacagcatcataattgactgaagaccca

SEQ ID NO: 9984 - DNA, 40 bp, Homo sapiens
gggtcttcagtcaattatgatgctgtgtatatttagtgtt

SEQ ID NO: 9985 - DNA, 40 bp, Homo sapiens
aacactaaatatacacagcatcataattgactgaagaccc

SEQ ID NO: 9986 - DNA, 40 bp, Homo sapiens
ggtcttcagtcaattatgatgctgtgtatatttagtgttt

SEQ ID NO: 9987 - DNA, 40 bp, Homo sapiens
aaacactaaatatacacagcatcataattgactgaagacc

SEQ ID NO: 9988 - DNA, 40 bp, Homo sapiens
gtcttcagtcaattatgatgctgtgtatatttagtgttta

SEQ ID NO: 9989 - DNA, 40 bp, Homo sapiens
taaacactaaatatacacagcatcataattgactgaagac

SEQ ID NO: 9990 - DNA, 40 bp, Homo sapiens
tcttcagtcaattatgatgctgtgtatatttagtgtttat

SEQ ID NO: 9991 - DNA, 40 bp, Homo sapiens
ataaacactaaatatacacagcatcataattgactgaaga

SEQ ID NO: 9992 - DNA, 40 bp, Homo sapiens
cttcagtcaattatgatgctgtgtatatttagtgtttatc

SEQ ID NO: 9993 - DNA, 40 bp, Homo sapiens
gataaacactaaatatacacagcatcataattgactgaag

SEQ ID NO: 9994 - DNA, 40 bp, Homo sapiens
ttcagtcaattatgatgctgtgtatatttagtgtttatct

SEQ ID NO: 9995 - DNA, 40 bp, Homo sapiens
agataaacactaaatatacacagcatcataattgactgaa

SEQ ID NO: 9996 - DNA, 40 bp, Homo sapiens
tcagtcaattatgatgctgtgtatatttagtgtttatcta

SEQ ID NO: 9997 - DNA, 40 bp, Homo sapiens
tagataaacactaaatatacacagcatcataattgactga

SEQ ID NO: 9998 - DNA, 40 bp, Homo sapiens
cagtcaattatgatgctgtgtatatttagtgtttatctac

SEQ ID NO: 9999 - DNA, 40 bp, Homo sapiens
gtagataaacactaaatatacacagcatcataattgactg

SEQ ID NO: 10000 - DNA, 40 bp, Homo sapiens
agtcaattatgatgctgtgtatatttagtgtttatctaca

SEQ ID NO: 10001 - DNA, 40 bp, Homo sapiens
tgtagataaacactaaatatacacagcatcataattgact

SEQ ID NO: 10002 - DNA, 40 bp, Homo sapiens
gtcaattatgatgctgtgtatatttagtgtttatctacaa

SEQ ID NO: 10003 - DNA, 40 bp, Homo sapiens
ttgtagataaacactaaatatacacagcatcataattgac

SEQ ID NO: 10004 - DNA, 40 bp, Homo sapiens
tcaattatgatgctgtgtatatttagtgtttatctacaat

SEQ ID NO: 10005 - DNA, 40 bp, Homo sapiens
attgtagataaacactaaatatacacagcatcataattga

SEQ ID NO: 10006 - DNA, 40 bp, Homo sapiens
caattatgatgctgtgtatatttagtgtttatctacaata

SEQ ID NO: 10007 - DNA, 40 bp, Homo sapiens
tattgtagataaacactaaatatacacagcatcataattg

SEQ ID NO: 10008 - DNA, 40 bp, Homo sapiens
aattatgatgctgtgtatatttagtgtttatctacaatat

SEQ ID NO: 10009 - DNA, 40 bp, Homo sapiens
atattgtagataaacactaaatatacacagcatcataatt

SEQ ID NO: 10010 - DNA, 40 bp, Homo sapiens
attatgatgctgtgtatatttagtgtttatctacaatata

SEQ ID NO: 10011 - DNA, 40 bp, Homo sapiens
tatattgtagataaacactaaatatacacagcatcataat

SEQ ID NO: 10012 - DNA, 40 bp, Homo sapiens
ttatgatgctgtgtatatttagtgtttatctacaatatat

SEQ ID NO: 10013 - DNA, 40 bp, Homo sapiens
atatattgtagataaacactaaatatacacagcatcataa

SEQ ID NO: 10014 - DNA, 40 bp, Homo sapiens
tatgatgctgtgtatatttagtgtttatctacaatatatg

SEQ ID NO: 10015 - DNA, 40 bp, Homo sapiens
catatattgtagataaacactaaatatacacagcatcata

SEQ ID NO: 10016 - DNA, 40 bp, Homo sapiens
atgatgctgtgtatatttagtgtttatctacaatatatgc

SEQ ID NO: 10017 - DNA, 40 bp, Homo sapiens
gcatatattgtagataaacactaaatatacacagcatcat

SEQ ID NO: 10018 - DNA, 40 bp, Homo sapiens
tgatgctgtgtatatttagtgtttatctacaatatatgca

SEQ ID NO: 10019 - DNA, 40 bp, Homo sapiens
tgcatatattgtagataaacactaaatatacacagcatca

SEQ ID NO: 10020 - DNA, 40 bp, Homo sapiens
gatgctgtgtatatttagtgtttatctacaatatatgcac

SEQ ID NO: 10021 - DNA, 40 bp, Homo sapiens
gtgcatatattgtagataaacactaaatatacacagcatc

SEQ ID NO: 10022 - DNA, 40 bp, Homo sapiens
atgctgtgtatatttagtgtttatctacaatatatgcaca

SEQ ID NO: 10023 - DNA, 40 bp, Homo sapiens
tgtgcatatattgtagataaacactaaatatacacagcat

SEQ ID NO: 10024 - DNA, 40 bp, Homo sapiens
tgctgtgtatatttagtgtttatctacaatatatgcacat

SEQ ID NO: 10025 - DNA, 40 bp, Homo sapiens
atgtgcatatattgtagataaacactaaatatacacagca

SEQ ID NO: 10026 - DNA, 40 bp, Homo sapiens
gctgtgtatatttagtgtttatctacaatatatgcacatt

SEQ ID NO: 10027 - DNA, 40 bp, Homo sapiens
aatgtgcatatattgtagataaacactaaatatacacagc

SEQ ID NO: 10028 - DNA, 40 bp, Homo sapiens
ctgtgtatatttagtgtttatctacaatatatgcacattc

SEQ ID NO: 10029 - DNA, 40 bp, Homo sapiens
gaatgtgcatatattgtagataaacactaaatatacacag

SEQ ID NO: 10030 - DNA, 40 bp, Homo sapiens
tgtgtatatttagtgtttatctacaatatatgcacattca

SEQ ID NO: 10031 - DNA, 40 bp, Homo sapiens
tgaatgtgcatatattgtagataaacactaaatatacaca

SEQ ID NO: 10032 - DNA, 40 bp, Homo sapiens
gtgtatatttagtgtttatctacaatatatgcacattcat

SEQ ID NO: 10033 - DNA, 40 bp, Homo sapiens
atgaatgtgcatatattgtagataaacactaaatatacac

SEQ ID NO: 10034 - DNA, 40 bp, Homo sapiens
tgtatatttagtgtttatctacaatatatgcacattcatt

SEQ ID NO: 10035 - DNA, 40 bp, Homo sapiens
aatgaatgtgcatatattgtagataaacactaaatataca

SEQ ID NO: 10036 - DNA, 40 bp, Homo sapiens
gtatatttagtgtttatctacaatatatgcacattcatta

SEQ ID NO: 10037 - DNA, 40 bp, Homo sapiens
taatgaatgtgcatatattgtagataaacactaaatatac

SEQ ID NO: 10038 - DNA, 40 bp, Homo sapiens
tatatttagtgtttatctacaatatatgcacattcattaa

SEQ ID NO: 10039 - DNA, 40 bp, Homo sapiens
ttaatgaatgtgcatatattgtagataaacactaaatata

SEQ ID NO: 10040 - DNA, 40 bp, Homo sapiens
atatttagtgtttatctacaatatatgcacattcattaat

SEQ ID NO: 10041 - DNA, 40 bp, Homo sapiens
attaatgaatgtgcatatattgtagataaacactaaatat

SEQ ID NO: 10042 - DNA, 40 bp, Homo sapiens
tatttagtgtttatctacaatatatgcacattcattaatt

SEQ ID NO: 10043 - DNA, 40 bp, Homo sapiens
aattaatgaatgtgcatatattgtagataaacactaaata

SEQ ID NO: 10044 - DNA, 40 bp, Homo sapiens
atttagtgtttatctacaatatatgcacattcattaattt

SEQ ID NO: 10045 - DNA, 40 bp, Homo sapiens
aaattaatgaatgtgcatatattgtagataaacactaaat

SEQ ID NO: 10046 - DNA, 40 bp, Homo sapiens
tttagtgtttatctacaatatatgcacattcattaatttg

SEQ ID NO: 10047 - DNA, 40 bp, Homo sapiens
caaattaatgaatgtgcatatattgtagataaacactaaa

SEQ ID NO: 10048 - DNA, 40 bp, Homo sapiens
ttagtgtttatctacaatatatgcacattcattaatttgg

SEQ ID NO: 10049 - DNA, 40 bp, Homo sapiens
ccaaattaatgaatgtgcatatattgtagataaacactaa

SEQ ID NO: 10050 - DNA, 40 bp, Homo sapiens
tagtgtttatctacaatatatgcacattcattaatttgga

SEQ ID NO: 10051 - DNA, 40 bp, Homo sapiens
tccaaattaatgaatgtgcatatattgtagataaacacta

SEQ ID NO: 10052 - DNA, 40 bp, Homo sapiens
agtgtttatctacaatatatgcacattcattaatttggag

SEQ ID NO: 10053 - DNA, 40 bp, Homo sapiens
ctccaaattaatgaatgtgcatatattgtagataaacact

SEQ ID NO: 10054 - DNA, 40 bp, Homo sapiens
gtgtttatctacaatatatgcacattcattaatttggagc

SEQ ID NO: 10055 - DNA, 40 bp, Homo sapiens
gctccaaattaatgaatgtgcatatattgtagataaacac

SEQ ID NO: 10056 - DNA, 40 bp, Homo sapiens
tgtttatctacaatatatgcacattcattaatttggagct

SEQ ID NO: 10057 - DNA, 40 bp, Homo sapiens
agctccaaattaatgaatgtgcatatattgtagataaaca

SEQ ID NO: 10058 - DNA, 40 bp, Homo sapiens
gtttatctacaatatatgcacattcattaatttggagcta

SEQ ID NO: 10059 - DNA, 40 bp, Homo sapiens
tagctccaaattaatgaatgtgcatatattgtagataaac

SEQ ID NO: 10060 - DNA, 40 bp, Homo sapiens
tttatctacaatatatgcacattcattaatttggagctac

SEQ ID NO: 10061 - DNA, 40 bp, Homo sapiens
gtagctccaaattaatgaatgtgcatatattgtagataaa

SEQ ID NO: 10062 - DNA, 40 bp, Homo sapiens
ttatctacaatatatgcacattcattaatttggagctact

SEQ ID NO: 10063 - DNA, 40 bp, Homo sapiens
agtagctccaaattaatgaatgtgcatatattgtagataa

SEQ ID NO: 10064 - DNA, 40 bp, Homo sapiens
tatctacaatatatgcacattcattaatttggagctactc

SEQ ID NO: 10065 - DNA, 40 bp, Homo sapiens
gagtagctccaaattaatgaatgtgcatatattgtagata

SEQ ID NO: 10066 - DNA, 40 bp, Homo sapiens
atctacaatatatgcacattcattaatttggagctactca

SEQ ID NO: 10067 - DNA, 40 bp, Homo sapiens
tgagtagctccaaattaatgaatgtgcatatattgtagat

SEQ ID NO: 10068 - DNA, 40 bp, Homo sapiens
tctacaatatatgcacattcattaatttggagctactcat

SEQ ID NO: 10069 - DNA, 40 bp, Homo sapiens
atgagtagctccaaattaatgaatgtgcatatattgtaga

SEQ ID NO: 10070 - DNA, 40 bp, Homo sapiens
ctacaatatatgcacattcattaatttggagctactcatc

SEQ ID NO: 10071 - DNA, 40 bp, Homo sapiens
gatgagtagctccaaattaatgaatgtgcatatattgtag

SEQ ID NO: 10072 - DNA, 40 bp, Homo sapiens
tacaatatatgcacattcattaatttggagctactcatcc

SEQ ID NO: 10073 - DNA, 40 bp, Homo sapiens
ggatgagtagctccaaattaatgaatgtgcatatattgta

SEQ ID NO: 10074 - DNA, 40 bp, Homo sapiens
acaatatatgcacattcattaatttggagctactcatcct

SEQ ID NO: 10075 - DNA, 40 bp, Homo sapiens
aggatgagtagctccaaattaatgaatgtgcatatattgt

SEQ ID NO: 10076 - DNA, 40 bp, Homo sapiens
caatatatgcacattcattaatttggagctactcatccta

SEQ ID NO: 10077 - DNA, 40 bp, Homo sapiens
taggatgagtagctccaaattaatgaatgtgcatatattg

SEQ ID NO: 10078 - DNA, 40 bp, Homo sapiens
aatatatgcacattcattaatttggagctactcatcctat

SEQ ID NO: 10079 - DNA, 40 bp, Homo sapiens
ataggatgagtagctccaaattaatgaatgtgcatatatt

SEQ ID NO: 10080 - DNA, 40 bp, Homo sapiens
atatatgcacattcattaatttggagctactcatcctata

SEQ ID NO: 10081 - DNA, 40 bp, Homo sapiens
tataggatgagtagctccaaattaatgaatgtgcatatat

SEQ ID NO: 10082 - DNA, 40 bp, Homo sapiens
tatatgcacattcattaatttggagctactcatcctataa

SEQ ID NO: 10083 - DNA, 40 bp, Homo sapiens
ttataggatgagtagctccaaattaatgaatgtgcatata

SEQ ID NO: 10084 - DNA, 40 bp, Homo sapiens
atatgcacattcattaatttggagctactcatcctataat

SEQ ID NO: 10085 - DNA, 40 bp, Homo sapiens
attataggatgagtagctccaaattaatgaatgtgcatat

SEQ ID NO: 10086 - DNA, 40 bp, Homo sapiens
tatgcacattcattaatttggagctactcatcctataata

SEQ ID NO: 10087 - DNA, 40 bp, Homo sapiens
tattataggatgagtagctccaaattaatgaatgtgcata

SEQ ID NO: 10088 - DNA, 40 bp, Homo sapiens
atgcacattcattaatttggagctactcatcctataataa

SEQ ID NO: 10089 - DNA, 40 bp, Homo sapiens
ttattataggatgagtagctccaaattaatgaatgtgcat

SEQ ID NO: 10090 - DNA, 40 bp, Homo sapiens
tgcacattcattaatttggagctactcatcctataataaa

SEQ ID NO: 10091 - DNA, 40 bp, Homo sapiens
tttattataggatgagtagctccaaattaatgaatgtgca

SEQ ID NO: 10092 - DNA, 40 bp, Homo sapiens
gcacattcattaatttggagctactcatcctataataaat

SEQ ID NO: 10093 - DNA, 40 bp, Homo sapiens
atttattataggatgagtagctccaaattaatgaatgtgc

SEQ ID NO: 10094 - DNA, 40 bp, Homo sapiens
cacattcattaatttggagctactcatcctataataaata

SEQ ID NO: 10095 - DNA, 40 bp, Homo sapiens
tatttattataggatgagtagctccaaattaatgaatgtg

SEQ ID NO: 10096 - DNA, 40 bp, Homo sapiens
acattcattaatttggagctactcatcctataataaatag

SEQ ID NO: 10097 - DNA, 40 bp, Homo sapiens
ctatttattataggatgagtagctccaaattaatgaatgt

SEQ ID NO: 10098 - DNA, 40 bp, Homo sapiens
cattcattaatttggagctactcatcctataataaatagt

SEQ ID NO: 10099 - DNA, 40 bp, Homo sapiens
actatttattataggatgagtagctccaaattaatgaatg

SEQ ID NO: 10100 - DNA, 40 bp, Homo sapiens
attcattaatttggagctactcatcctataataaatagtt

SEQ ID NO: 10101 - DNA, 40 bp, Homo sapiens
aactatttattataggatgagtagctccaaattaatgaat

SEQ ID NO: 10102 - DNA, 40 bp, Homo sapiens
ttcattaatttggagctactcatcctataataaatagttg

SEQ ID NO: 10103 - DNA, 40 bp, Homo sapiens
caactatttattataggatgagtagctccaaattaatgaa

SEQ ID NO: 10104 - DNA, 40 bp, Homo sapiens
tcattaatttggagctactcatcctataataaatagttgt

SEQ ID NO: 10105 - DNA, 40 bp, Homo sapiens
acaactatttattataggatgagtagctccaaattaatga

SEQ ID NO: 10106 - DNA, 40 bp, Homo sapiens
cattaatttggagctactcatcctataataaatagttgtg

SEQ ID NO: 10107 - DNA, 40 bp, Homo sapiens
cacaactatttattataggatgagtagctccaaattaatg

SEQ ID NO: 10108 - DNA, 40 bp, Homo sapiens
attaatttggagctactcatcctataataaatagttgtgc

SEQ ID NO: 10109 - DNA, 40 bp, Homo sapiens
gcacaactatttattataggatgagtagctccaaattaat

SEQ ID NO: 10110 - DNA, 40 bp, Homo sapiens
ttaatttggagctactcatcctataataaatagttgtgca

SEQ ID NO: 10111 - DNA, 40 bp, Homo sapiens
tgcacaactatttattataggatgagtagctccaaattaa

SEQ ID NO: 10112 - DNA, 40 bp, Homo sapiens
taatttggagctactcatcctataataaatagttgtgcat

SEQ ID NO: 10113 - DNA, 40 bp, Homo sapiens
atgcacaactatttattataggatgagtagctccaaatta

SEQ ID NO: 10114 - DNA, 40 bp, Homo sapiens
aatttggagctactcatcctataataaatagttgtgcatt

SEQ ID NO: 10115 - DNA, 40 bp, Homo sapiens
aatgcacaactatttattataggatgagtagctccaaatt

SEQ ID NO: 10116 - DNA, 40 bp, Homo sapiens
atttggagctactcatcctataataaatagttgtgcattt

SEQ ID NO: 10117 - DNA, 40 bp, Homo sapiens
aaatgcacaactatttattataggatgagtagctccaaat

SEQ ID NO: 10118 - DNA, 40 bp, Homo sapiens
tttggagctactcatcctataataaatagttgtgcattta

SEQ ID NO: 10119 - DNA, 40 bp, Homo sapiens
taaatgcacaactatttattataggatgagtagctccaaa

SEQ ID NO: 10120 - DNA, 40 bp, Homo sapiens
ttggagctactcatcctataataaatagttgtgcatttac

SEQ ID NO: 10121 - DNA, 40 bp, Homo sapiens
gtaaatgcacaactatttattataggatgagtagctccaa

SEQ ID NO: 10122 - DNA, 40 bp, Homo sapiens
tggagctactcatcctataataaatagttgtgcatttact

SEQ ID NO: 10123 - DNA, 40 bp, Homo sapiens
agtaaatgcacaactatttattataggatgagtagctcca

SEQ ID NO: 10124 - DNA, 40 bp, Homo sapiens
ggagctactcatcctataataaatagttgtgcatttactc

SEQ ID NO: 10125 - DNA, 40 bp, Homo sapiens
gagtaaatgcacaactatttattataggatgagtagctcc

SEQ ID NO: 10126 - DNA, 40 bp, Homo sapiens
gagctactcatcctataataaatagttgtgcatttactcc

SEQ ID NO: 10127 - DNA, 40 bp, Homo sapiens
ggagtaaatgcacaactatttattataggatgagtagctc

SEQ ID NO: 10128 - DNA, 40 bp, Homo sapiens
agctactcatcctataataaatagttgtgcatttactccc

SEQ ID NO: 10129 - DNA, 40 bp, Homo sapiens
gggagtaaatgcacaactatttattataggatgagtagct

SEQ ID NO: 10130 - DNA, 40 bp, Homo sapiens
gctactcatcctataataaatagttgtgcatttactccca

SEQ ID NO: 10131 - DNA, 40 bp, Homo sapiens
tgggagtaaatgcacaactatttattataggatgagtagc

SEQ ID NO: 10132 - DNA, 40 bp, Homo sapiens
ctactcatcctataataaatagttgtgcatttactcccat

SEQ ID NO: 10133 - DNA, 40 bp, Homo sapiens
atgggagtaaatgcacaactatttattataggatgagtag

SEQ ID NO: 10134 - DNA, 40 bp, Homo sapiens
tactcatcctataataaatagttgtgcatttactcccatt

SEQ ID NO: 10135 - DNA, 40 bp, Homo sapiens
aatgggagtaaatgcacaactatttattataggatgagta

SEQ ID NO: 10136 - DNA, 40 bp, Homo sapiens
actcatcctataataaatagttgtgcatttactcccattt

SEQ ID NO: 10137 - DNA, 40 bp, Homo sapiens
aaatgggagtaaatgcacaactatttattataggatgagt

SEQ ID NO: 10138 - DNA, 40 bp, Homo sapiens
ctcatcctataataaatagttgtgcatttactcccatttt

SEQ ID NO: 10139 - DNA, 40 bp, Homo sapiens
aaaatgggagtaaatgcacaactatttattataggatgag

SEQ ID NO: 10140 - DNA, 40 bp, Homo sapiens
tcatcctataataaatagttgtgcatttactcccattttt

SEQ ID NO: 10141 - DNA, 40 bp, Homo sapiens
aaaaatgggagtaaatgcacaactatttattataggatga

SEQ ID NO: 10142 - DNA, 40 bp, Homo sapiens
catcctataataaatagttgtgcatttactcccatttttt

SEQ ID NO: 10143 - DNA, 40 bp, Homo sapiens
aaaaaatgggagtaaatgcacaactatttattataggatg

SEQ ID NO: 10144 - DNA, 40 bp, Homo sapiens
atcctataataaatagttgtgcatttactcccattttttt

SEQ ID NO: 10145 - DNA, 40 bp, Homo sapiens
aaaaaaatgggagtaaatgcacaactatttattataggat

SEQ ID NO: 10146 - DNA, 40 bp, Homo sapiens
tcctataataaatagttgtgcatttactcccatttttttc

SEQ ID NO: 10147 - DNA, 40 bp, Homo sapiens
gaaaaaaatgggagtaaatgcacaactatttattatagga

SEQ ID NO: 10148 - DNA, 40 bp, Homo sapiens
cctataataaatagttgtgcatttactcccatttttttct

SEQ ID NO: 10149 - DNA, 40 bp, Homo sapiens
agaaaaaaatgggagtaaatgcacaactatttattatagg

SEQ ID NO: 10150 - DNA, 40 bp, Homo sapiens
ctataataaatagttgtgcatttactcccatttttttctg

SEQ ID NO: 10151 - DNA, 40 bp, Homo sapiens
cagaaaaaaatgggagtaaatgcacaactatttattatag

SEQ ID NO: 10152 - DNA, 40 bp, Homo sapiens
tataataaatagttgtgcatttactcccatttttttctgc

SEQ ID NO: 10153 - DNA, 40 bp, Homo sapiens
gcagaaaaaaatgggagtaaatgcacaactatttattata

SEQ ID NO: 10154 - DNA, 40 bp, Homo sapiens
ataataaatagttgtgcatttactcccatttttttctgca

SEQ ID NO: 10155 - DNA, 40 bp, Homo sapiens
tgcagaaaaaaatgggagtaaatgcacaactatttattat

SEQ ID NO: 10156 - DNA, 40 bp, Homo sapiens
taataaatagttgtgcatttactcccatttttttctgcat

SEQ ID NO: 10157 - DNA, 40 bp, Homo sapiens
atgcagaaaaaaatgggagtaaatgcacaactatttatta

SEQ ID NO: 10158 - DNA, 40 bp, Homo sapiens
aataaatagttgtgcatttactcccatttttttctgcatt

SEQ ID NO: 10159 - DNA, 40 bp, Homo sapiens
aatgcagaaaaaaatgggagtaaatgcacaactatttatt

SEQ ID NO: 10160 - DNA, 40 bp, Homo sapiens
ataaatagttgtgcatttactcccatttttttctgcattt

SEQ ID NO: 10161 - DNA, 40 bp, Homo sapiens
aaatgcagaaaaaaatgggagtaaatgcacaactatttat

SEQ ID NO: 10162 - DNA, 40 bp, Homo sapiens
taaatagttgtgcatttactcccatttttttctgcatttc

SEQ ID NO: 10163 - DNA, 40 bp, Homo sapiens
gaaatgcagaaaaaaatgggagtaaatgcacaactattta

SEQ ID NO: 10164 - DNA, 40 bp, Homo sapiens
aaatagttgtgcatttactcccatttttttctgcatttct

SEQ ID NO: 10165 - DNA, 40 bp, Homo sapiens
agaaatgcagaaaaaaatgggagtaaatgcacaactattt

SEQ ID NO: 10166 - DNA, 40 bp, Homo sapiens
aatagttgtgcatttactcccatttttttctgcatttctc

SEQ ID NO: 10167 - DNA, 40 bp, Homo sapiens
gagaaatgcagaaaaaaatgggagtaaatgcacaactatt

SEQ ID NO: 10168 - DNA, 40 bp, Homo sapiens
atagttgtgcatttactcccatttttttctgcatttctct

SEQ ID NO: 10169 - DNA, 40 bp, Homo sapiens
agagaaatgcagaaaaaaatgggagtaaatgcacaactat

SEQ ID NO: 10170 - DNA, 40 bp, Homo sapiens
tagttgtgcatttactcccatttttttctgcatttctctc

SEQ ID NO: 10171 - DNA, 40 bp, Homo sapiens
gagagaaatgcagaaaaaaatgggagtaaatgcacaacta

SEQ ID NO: 10172 - DNA, 40 bp, Homo sapiens
agttgtgcatttactcccatttttttctgcatttctctcc

SEQ ID NO: 10173 - DNA, 40 bp, Homo sapiens
ggagagaaatgcagaaaaaaatgggagtaaatgcacaact

SEQ ID NO: 10174 - DNA, 40 bp, Homo sapiens
gttgtgcatttactcccatttttttctgcatttctctcct

SEQ ID NO: 10175 - DNA, 40 bp, Homo sapiens
aggagagaaatgcagaaaaaaatgggagtaaatgcacaac

SEQ ID NO: 10176 - DNA, 40 bp, Homo sapiens
ttgtgcatttactcccatttttttctgcatttctctcctt

SEQ ID NO: 10177 - DNA, 40 bp, Homo sapiens
aaggagagaaatgcagaaaaaaatgggagtaaatgcacaa

SEQ ID NO: 10178 - DNA, 40 bp, Homo sapiens
tgtgcatttactcccatttttttctgcatttctctcctta

SEQ ID NO: 10179 - DNA, 40 bp, Homo sapiens
taaggagagaaatgcagaaaaaaatgggagtaaatgcaca

SEQ ID NO: 10180 - DNA, 40 bp, Homo sapiens
gtgcatttactcccatttttttctgcatttctctccttat

SEQ ID NO: 10181 - DNA, 40 bp, Homo sapiens
ataaggagagaaatgcagaaaaaaatgggagtaaatgcac

SEQ ID NO: 10182 - DNA, 40 bp, Homo sapiens
tgcatttactcccatttttttctgcatttctctccttatt

SEQ ID NO: 10183 - DNA, 40 bp, Homo sapiens
aataaggagagaaatgcagaaaaaaatgggagtaaatgca

SEQ ID NO: 10184 - DNA, 40 bp, Homo sapiens
gcatttactcccatttttttctgcatttctctccttattt

SEQ ID NO: 10185 - DNA, 40 bp, Homo sapiens
aaataaggagagaaatgcagaaaaaaatgggagtaaatgc

SEQ ID NO: 10186 - DNA, 40 bp, Homo sapiens
catttactcccatttttttctgcatttctctccttattta

SEQ ID NO: 10187 - DNA, 40 bp, Homo sapiens
taaataaggagagaaatgcagaaaaaaatgggagtaaatg

SEQ ID NO: 10188 - DNA, 40 bp, Homo sapiens
atttactcccatttttttctgcatttctctccttatttat

SEQ ID NO: 10189 - DNA, 40 bp, Homo sapiens
ataaataaggagagaaatgcagaaaaaaatgggagtaaat

SEQ ID NO: 10190 - DNA, 40 bp, Homo sapiens
tttactcccatttttttctgcatttctctccttatttata

SEQ ID NO: 10191 - DNA, 40 bp, Homo sapiens
tataaataaggagagaaatgcagaaaaaaatgggagtaaa

SEQ ID NO: 10192 - DNA, 40 bp, Homo sapiens
ttactcccatttttttctgcatttctctccttatttataa

SEQ ID NO: 10193 - DNA, 40 bp, Homo sapiens
ttataaataaggagagaaatgcagaaaaaaatgggagtaa

SEQ ID NO: 10194 - DNA, 40 bp, Homo sapiens
tactcccatttttttctgcatttctctccttatttataat

SEQ ID NO: 10195 - DNA, 40 bp, Homo sapiens
attataaataaggagagaaatgcagaaaaaaatgggagta

SEQ ID NO: 10196 - DNA, 40 bp, Homo sapiens
actcccatttttttctgcatttctctccttatttataatt

SEQ ID NO: 10197 - DNA, 40 bp, Homo sapiens
aattataaataaggagagaaatgcagaaaaaaatgggagt

SEQ ID NO: 10198 - DNA, 40 bp, Homo sapiens
ctcccatttttttctgcatttctctccttatttataatta

SEQ ID NO: 10199 - DNA, 40 bp, Homo sapiens
taattataaataaggagagaaatgcagaaaaaaatgggag

SEQ ID NO: 10200 - DNA, 40 bp, Homo sapiens
tcccatttttttctgcatttctctccttatttataattat

SEQ ID NO: 10201 - DNA, 40 bp, Homo sapiens
ataattataaataaggagagaaatgcagaaaaaaatggga

SEQ ID NO: 10202 - DNA, 40 bp, Homo sapiens
cccatttttttctgcatttctctccttatttataattatg

SEQ ID NO: 10203 - DNA, 40 bp, Homo sapiens
cataattataaataaggagagaaatgcagaaaaaaatggg

SEQ ID NO: 10204 - DNA, 40 bp, Homo sapiens
ccatttttttctgcatttctctccttatttataattatgt

SEQ ID NO: 10205 - DNA, 40 bp, Homo sapiens
acataattataaataaggagagaaatgcagaaaaaaatgg

SEQ ID NO: 10206 - DNA, 40 bp, Homo sapiens
catttttttctgcatttctctccttatttataattatgtg

SEQ ID NO: 10207 - DNA, 40 bp, Homo sapiens
cacataattataaataaggagagaaatgcagaaaaaaatg

SEQ ID NO: 10208 - DNA, 40 bp, Homo sapiens
atttttttctgcatttctctccttatttataattatgtgt

SEQ ID NO: 10209 - DNA, 40 bp, Homo sapiens
acacataattataaataaggagagaaatgcagaaaaaaat

SEQ ID NO: 10210 - DNA, 40 bp, Homo sapiens
tttttttctgcatttctctccttatttataattatgtgtt

SEQ ID NO: 10211 - DNA, 40 bp, Homo sapiens
aacacataattataaataaggagagaaatgcagaaaaaaa

SEQ ID NO: 10212 - DNA, 40 bp, Homo sapiens
ttttttctgcatttctctccttatttataattatgtgtta

SEQ ID NO: 10213 - DNA, 40 bp, Homo sapiens
taacacataattataaataaggagagaaatgcagaaaaaa

SEQ ID NO: 10214 - DNA, 40 bp, Homo sapiens
tttttctgcatttctctccttatttataattatgtgttac

SEQ ID NO: 10215 - DNA, 40 bp, Homo sapiens
gtaacacataattataaataaggagagaaatgcagaaaaa

SEQ ID NO: 10216 - DNA, 40 bp, Homo sapiens
ttttctgcatttctctccttatttataattatgtgttaca

SEQ ID NO: 10217 - DNA, 40 bp, Homo sapiens
tgtaacacataattataaataaggagagaaatgcagaaaa

SEQ ID NO: 10218 - DNA, 40 bp, Homo sapiens
tttctgcatttctctccttatttataattatgtgttacat

SEQ ID NO: 10219 - DNA, 40 bp, Homo sapiens
atgtaacacataattataaataaggagagaaatgcagaaa

SEQ ID NO: 10220 - DNA, 40 bp, Homo sapiens
ttctgcatttctctccttatttataattatgtgttacatg

SEQ ID NO: 10221 - DNA, 40 bp, Homo sapiens
catgtaacacataattataaataaggagagaaatgcagaa

SEQ ID NO: 10222 - DNA, 40 bp, Homo sapiens
tctgcatttctctccttatttataattatgtgttacatga

SEQ ID NO: 10223 - DNA, 40 bp, Homo sapiens
tcatgtaacacataattataaataaggagagaaatgcaga

SEQ ID NO: 10224 - DNA, 40 bp, Homo sapiens
ctgcatttctctccttatttataattatgtgttacatgag

SEQ ID NO: 10225 - DNA, 40 bp, Homo sapiens
ctcatgtaacacataattataaataaggagagaaatgcag

SEQ ID NO: 10226 - DNA, 40 bp, Homo sapiens
tgcatttctctccttatttataattatgtgttacatgagg

SEQ ID NO: 10227 - DNA, 40 bp, Homo sapiens
cctcatgtaacacataattataaataaggagagaaatgca

SEQ ID NO: 10228 - DNA, 40 bp, Homo sapiens
gcatttctctccttatttataattatgtgttacatgaggg

SEQ ID NO: 10229 - DNA, 40 bp, Homo sapiens
ccctcatgtaacacataattataaataaggagagaaatgc

SEQ ID NO: 10230 - DNA, 40 bp, Homo sapiens
catttctctccttatttataattatgtgttacatgaggga

SEQ ID NO: 10231 - DNA, 40 bp, Homo sapiens
tccctcatgtaacacataattataaataaggagagaaatg

SEQ ID NO: 10232 - DNA, 40 bp, Homo sapiens
atttctctccttatttataattatgtgttacatgagggaa

SEQ ID NO: 10233 - DNA, 40 bp, Homo sapiens
ttccctcatgtaacacataattataaataaggagagaaat

SEQ ID NO: 10234 - DNA, 40 bp, Homo sapiens
tttctctccttatttataattatgtgttacatgagggaaa

SEQ ID NO: 10235 - DNA, 40 bp, Homo sapiens
tttccctcatgtaacacataattataaataaggagagaaa

SEQ ID NO: 10236 - DNA, 40 bp, Homo sapiens
ttctctccttatttataattatgtgttacatgagggaaag

SEQ ID NO: 10237 - DNA, 40 bp, Homo sapiens
ctttccctcatgtaacacataattataaataaggagagaa

SEQ ID NO: 10238 - DNA, 40 bp, Homo sapiens
tctctccttatttataattatgtgttacatgagggaaagg

SEQ ID NO: 10239 - DNA, 40 bp, Homo sapiens
cctttccctcatgtaacacataattataaataaggagaga

SEQ ID NO: 10240 - DNA, 40 bp, Homo sapiens
ctctccttatttataattatgtgttacatgagggaaagga

SEQ ID NO: 10241 - DNA, 40 bp, Homo sapiens
tcctttccctcatgtaacacataattataaataaggagag

SEQ ID NO: 10242 - DNA, 40 bp, Homo sapiens
tctccttatttataattatgtgttacatgagggaaaggag

SEQ ID NO: 10243 - DNA, 40 bp, Homo sapiens
ctcctttccctcatgtaacacataattataaataaggaga

SEQ ID NO: 10244 - DNA, 40 bp, Homo sapiens
ctccttatttataattatgtgttacatgagggaaaggagg

SEQ ID NO: 10245 - DNA, 40 bp, Homo sapiens
cctcctttccctcatgtaacacataattataaataaggag

SEQ ID NO: 10246 - DNA, 40 bp, Homo sapiens
tccttatttataattatgtgttacatgagggaaaggaggt

SEQ ID NO: 10247 - DNA, 40 bp, Homo sapiens
acctcctttccctcatgtaacacataattataaataagga

SEQ ID NO: 10248 - DNA, 40 bp, Homo sapiens
ccttatttataattatgtgttacatgagggaaaggaggtg

SEQ ID NO: 10249 - DNA, 40 bp, Homo sapiens
cacctcctttccctcatgtaacacataattataaataagg

SEQ ID NO: 10250 - DNA, 40 bp, Homo sapiens
cttatttataattatgtgttacatgagggaaaggaggtga

SEQ ID NO: 10251 - DNA, 40 bp, Homo sapiens
tcacctcctttccctcatgtaacacataattataaataag

SEQ ID NO: 10252 - DNA, 40 bp, Homo sapiens
ttatttataattatgtgttacatgagggaaaggaggtgaa

SEQ ID NO: 10253 - DNA, 40 bp, Homo sapiens
ttcacctcctttccctcatgtaacacataattataaataa

SEQ ID NO: 10254 - DNA, 40 bp, Homo sapiens
tatttataattatgtgttacatgagggaaaggaggtgaaa

SEQ ID NO: 10255 - DNA, 40 bp, Homo sapiens
tttcacctcctttccctcatgtaacacataattataaata

SEQ ID NO: 10256 - DNA, 40 bp, Homo sapiens
atttataattatgtgttacatgagggaaaggaggtgaaat

SEQ ID NO: 10257 - DNA, 40 bp, Homo sapiens
atttcacctcctttccctcatgtaacacataattataaat

SEQ ID NO: 10258 - DNA, 40 bp, Homo sapiens
tttataattatgtgttacatgagggaaaggaggtgaaatt

SEQ ID NO: 10259 - DNA, 40 bp, Homo sapiens
aatttcacctcctttccctcatgtaacacataattataaa

SEQ ID NO: 10260 - DNA, 40 bp, Homo sapiens
ttataattatgtgttacatgagggaaaggaggtgaaatta

SEQ ID NO: 10261 - DNA, 40 bp, Homo sapiens
taatttcacctcctttccctcatgtaacacataattataa

SEQ ID NO: 10262 - DNA, 40 bp, Homo sapiens
tataattatgtgttacatgagggaaaggaggtgaaattaa

SEQ ID NO: 10263 - DNA, 40 bp, Homo sapiens
ttaatttcacctcctttccctcatgtaacacataattata

SEQ ID NO: 10264 - DNA, 40 bp, Homo sapiens
ataattatgtgttacatgagggaaaggaggtgaaattaaa

SEQ ID NO: 10265 - DNA, 40 bp, Homo sapiens
tttaatttcacctcctttccctcatgtaacacataattat

SEQ ID NO: 10266 - DNA, 40 bp, Homo sapiens
taattatgtgttacatgagggaaaggaggtgaaattaaac

SEQ ID NO: 10267 - DNA, 40 bp, Homo sapiens
gtttaatttcacctcctttccctcatgtaacacataatta

SEQ ID NO: 10268 - DNA, 40 bp, Homo sapiens
aattatgtgttacatgagggaaaggaggtgaaattaaaca

SEQ ID NO: 10269 - DNA, 40 bp, Homo sapiens
tgtttaatttcacctcctttccctcatgtaacacataatt

SEQ ID NO: 10270 - DNA, 40 bp, Homo sapiens
attatgtgttacatgagggaaaggaggtgaaattaaacat

SEQ ID NO: 10271 - DNA, 40 bp, Homo sapiens
atgtttaatttcacctcctttccctcatgtaacacataat

SEQ ID NO: 10272 - DNA, 40 bp, Homo sapiens
ttatgtgttacatgagggaaaggaggtgaaattaaacatt

SEQ ID NO: 10273 - DNA, 40 bp, Homo sapiens
aatgtttaatttcacctcctttccctcatgtaacacataa

SEQ ID NO: 10274 - DNA, 40 bp, Homo sapiens
tatgtgttacatgagggaaaggaggtgaaattaaacattc

SEQ ID NO: 10275 - DNA, 40 bp, Homo sapiens
gaatgtttaatttcacctcctttccctcatgtaacacata

SEQ ID NO: 10276 - DNA, 40 bp, Homo sapiens
atgtgttacatgagggaaaggaggtgaaattaaacattca

SEQ ID NO: 10277 - DNA, 40 bp, Homo sapiens
tgaatgtttaatttcacctcctttccctcatgtaacacat

SEQ ID NO: 10278 - DNA, 40 bp, Homo sapiens
tgtgttacatgagggaaaggaggtgaaattaaacattcat

SEQ ID NO: 10279 - DNA, 40 bp, Homo sapiens
atgaatgtttaatttcacctcctttccctcatgtaacaca

SEQ ID NO: 10280 - DNA, 40 bp, Homo sapiens
gtgttacatgagggaaaggaggtgaaattaaacattcata

SEQ ID NO: 10281 - DNA, 40 bp, Homo sapiens
tatgaatgtttaatttcacctcctttccctcatgtaacac

SEQ ID NO: 10282 - DNA, 40 bp, Homo sapiens
tgttacatgagggaaaggaggtgaaattaaacattcatat

SEQ ID NO: 10283 - DNA, 40 bp, Homo sapiens
atatgaatgtttaatttcacctcctttccctcatgtaaca

SEQ ID NO: 10284 - DNA, 40 bp, Homo sapiens
gttacatgagggaaaggaggtgaaattaaacattcatatt

SEQ ID NO: 10285 - DNA, 40 bp, Homo sapiens
aatatgaatgtttaatttcacctcctttccctcatgtaac

SEQ ID NO: 10286 - DNA, 40 bp, Homo sapiens
ttacatgagggaaaggaggtgaaattaaacattcatatta

SEQ ID NO: 10287 - DNA, 40 bp, Homo sapiens
taatatgaatgtttaatttcacctcctttccctcatgtaa

SEQ ID NO: 10288 - DNA, 40 bp, Homo sapiens
tacatgagggaaaggaggtgaaattaaacattcatattat

SEQ ID NO: 10289 - DNA, 40 bp, Homo sapiens
ataatatgaatgtttaatttcacctcctttccctcatgta

SEQ ID NO: 10290 - DNA, 40 bp, Homo sapiens
acatgagggaaaggaggtgaaattaaacattcatattatt

SEQ ID NO: 10291 - DNA, 40 bp, Homo sapiens
aataatatgaatgtttaatttcacctcctttccctcatgt

SEQ ID NO: 10292 - DNA, 40 bp, Homo sapiens
catgagggaaaggaggtgaaattaaacattcatattattt

SEQ ID NO: 10293 - DNA, 40 bp, Homo sapiens
aaataatatgaatgtttaatttcacctcctttccctcatg

SEQ ID NO: 10294 - DNA, 40 bp, Homo sapiens
atgagggaaaggaggtgaaattaaacattcatattatttc

SEQ ID NO: 10295 - DNA, 40 bp, Homo sapiens
gaaataatatgaatgtttaatttcacctcctttccctcat

SEQ ID NO: 10296 - DNA, 40 bp, Homo sapiens
tgagggaaaggaggtgaaattaaacattcatattatttca

SEQ ID NO: 10297 - DNA, 40 bp, Homo sapiens
tgaaataatatgaatgtttaatttcacctcctttccctca

SEQ ID NO: 10298 - DNA, 40 bp, Homo sapiens
gagggaaaggaggtgaaattaaacattcatattatttcaa

SEQ ID NO: 10299 - DNA, 40 bp, Homo sapiens
ttgaaataatatgaatgtttaatttcacctcctttccctc

SEQ ID NO: 10300 - DNA, 40 bp, Homo sapiens
agggaaaggaggtgaaattaaacattcatattatttcaaa

SEQ ID NO: 10301 - DNA, 40 bp, Homo sapiens
tttgaaataatatgaatgtttaatttcacctcctttccct

SEQ ID NO: 10302 - DNA, 40 bp, Homo sapiens
gggaaaggaggtgaaattaaacattcatattatttcaaaa

SEQ ID NO: 10303 - DNA, 40 bp, Homo sapiens
ttttgaaataatatgaatgtttaatttcacctcctttccc

SEQ ID NO: 10304 - DNA, 40 bp, Homo sapiens
ggaaaggaggtgaaattaaacattcatattatttcaaaaa

SEQ ID NO: 10305 - DNA, 40 bp, Homo sapiens
tttttgaaataatatgaatgtttaatttcacctcctttcc

SEQ ID NO: 10306 - DNA, 40 bp, Homo sapiens
gaaaggaggtgaaattaaacattcatattatttcaaaaaa

SEQ ID NO: 10307 - DNA, 40 bp, Homo sapiens
ttttttgaaataatatgaatgtttaatttcacctcctttc

SEQ ID NO: 10308 - DNA, 40 bp, Homo sapiens
aaaggaggtgaaattaaacattcatattatttcaaaaaat

SEQ ID NO: 10309 - DNA, 40 bp, Homo sapiens
attttttgaaataatatgaatgtttaatttcacctccttt

SEQ ID NO: 10310 - DNA, 40 bp, Homo sapiens
aaggaggtgaaattaaacattcatattatttcaaaaaatt

SEQ ID NO: 10311 - DNA, 40 bp, Homo sapiens
aattttttgaaataatatgaatgtttaatttcacctcctt

SEQ ID NO: 10312 - DNA, 40 bp, Homo sapiens
aggaggtgaaattaaacattcatattatttcaaaaaattt

SEQ ID NO: 10313 - DNA, 40 bp, Homo sapiens
aaattttttgaaataatatgaatgtttaatttcacctcct

SEQ ID NO: 10314 - DNA, 40 bp, Homo sapiens
ggaggtgaaattaaacattcatattatttcaaaaaatttg

SEQ ID NO: 10315 - DNA, 40 bp, Homo sapiens
caaattttttgaaataatatgaatgtttaatttcacctcc

SEQ ID NO: 10316 - DNA, 40 bp, Homo sapiens
gaggtgaaattaaacattcatattatttcaaaaaatttga

SEQ ID NO: 10317 - DNA, 40 bp, Homo sapiens
tcaaattttttgaaataatatgaatgtttaatttcacctc

SEQ ID NO: 10318 - DNA, 40 bp, Homo sapiens
aggtgaaattaaacattcatattatttcaaaaaatttgaa

SEQ ID NO: 10319 - DNA, 40 bp, Homo sapiens
ttcaaattttttgaaataatatgaatgtttaatttcacct

SEQ ID NO: 10320 - DNA, 40 bp, Homo sapiens
ggtgaaattaaacattcatattatttcaaaaaatttgaaa

SEQ ID NO: 10321 - DNA, 40 bp, Homo sapiens
tttcaaattttttgaaataatatgaatgtttaatttcacc

SEQ ID NO: 10322 - DNA, 40 bp, Homo sapiens
gtgaaattaaacattcatattatttcaaaaaatttgaaac

SEQ ID NO: 10323 - DNA, 40 bp, Homo sapiens
gtttcaaattttttgaaataatatgaatgtttaatttcac

SEQ ID NO: 10324 - DNA, 40 bp, Homo sapiens
tgaaattaaacattcatattatttcaaaaaatttgaaaca

SEQ ID NO: 10325 - DNA, 40 bp, Homo sapiens
tgtttcaaattttttgaaataatatgaatgtttaatttca

SEQ ID NO: 10326 - DNA, 40 bp, Homo sapiens
gaaattaaacattcatattatttcaaaaaatttgaaacaa

SEQ ID NO: 10327 - DNA, 40 bp, Homo sapiens
ttgtttcaaattttttgaaataatatgaatgtttaatttc

SEQ ID NO: 10328 - DNA, 40 bp, Homo sapiens
aaattaaacattcatattatttcaaaaaatttgaaacaac

SEQ ID NO: 10329 - DNA, 40 bp, Homo sapiens
gttgtttcaaattttttgaaataatatgaatgtttaattt

SEQ ID NO: 10330 - DNA, 40 bp, Homo sapiens
aattaaacattcatattatttcaaaaaatttgaaacaact

SEQ ID NO: 10331 - DNA, 40 bp, Homo sapiens
agttgtttcaaattttttgaaataatatgaatgtttaatt

SEQ ID NO: 10332 - DNA, 40 bp, Homo sapiens
attaaacattcatattatttcaaaaaatttgaaacaacta

SEQ ID NO: 10333 - DNA, 40 bp, Homo sapiens
tagttgtttcaaattttttgaaataatatgaatgtttaat

SEQ ID NO: 10334 - DNA, 40 bp, Homo sapiens
ttaaacattcatattatttcaaaaaatttgaaacaactaa

SEQ ID NO: 10335 - DNA, 40 bp, Homo sapiens
ttagttgtttcaaattttttgaaataatatgaatgtttaa

SEQ ID NO: 10336 - DNA, 40 bp, Homo sapiens
taaacattcatattatttcaaaaaatttgaaacaactaac

SEQ ID NO: 10337 - DNA, 40 bp, Homo sapiens
gttagttgtttcaaattttttgaaataatatgaatgttta

SEQ ID NO: 10338 - DNA, 40 bp, Homo sapiens
aaacattcatattatttcaaaaaatttgaaacaactaact

SEQ ID NO: 10339 - DNA, 40 bp, Homo sapiens
agttagttgtttcaaattttttgaaataatatgaatgttt

SEQ ID NO: 10340 - DNA, 40 bp, Homo sapiens
aacattcatattatttcaaaaaatttgaaacaactaacta

SEQ ID NO: 10341 - DNA, 40 bp, Homo sapiens
tagttagttgtttcaaattttttgaaataatatgaatgtt

SEQ ID NO: 10342 - DNA, 40 bp, Homo sapiens
acattcatattatttcaaaaaatttgaaacaactaactaa

SEQ ID NO: 10343 - DNA, 40 bp, Homo sapiens
ttagttagttgtttcaaattttttgaaataatatgaatgt

SEQ ID NO: 10344 - DNA, 40 bp, Homo sapiens
cattcatattatttcaaaaaatttgaaacaactaactaaa

SEQ ID NO: 10345 - DNA, 40 bp, Homo sapiens
tttagttagttgtttcaaattttttgaaataatatgaatg

SEQ ID NO: 10346 - DNA, 40 bp, Homo sapiens
attcatattatttcaaaaaatttgaaacaactaactaaaa

SEQ ID NO: 10347 - DNA, 40 bp, Homo sapiens
ttttagttagttgtttcaaattttttgaaataatatgaat

SEQ ID NO: 10348 - DNA, 40 bp, Homo sapiens
ttcatattatttcaaaaaatttgaaacaactaactaaaaa

SEQ ID NO: 10349 - DNA, 40 bp, Homo sapiens
tttttagttagttgtttcaaattttttgaaataatatgaa

SEQ ID NO: 10350 - DNA, 40 bp, Homo sapiens
tcatattatttcaaaaaatttgaaacaactaactaaaaaa

SEQ ID NO: 10351 - DNA, 40 bp, Homo sapiens
ttttttagttagttgtttcaaattttttgaaataatatga

SEQ ID NO: 10352 - DNA, 40 bp, Homo sapiens
catattatttcaaaaaatttgaaacaactaactaaaaaat

SEQ ID NO: 10353 - DNA, 40 bp, Homo sapiens
attttttagttagttgtttcaaattttttgaaataatatg

SEQ ID NO: 10354 - DNA, 40 bp, Homo sapiens
atattatttcaaaaaatttgaaacaactaactaaaaaata

SEQ ID NO: 10355 - DNA, 40 bp, Homo sapiens
tattttttagttagttgtttcaaattttttgaaataatat

SEQ ID NO: 10356 - DNA, 40 bp, Homo sapiens
tattatttcaaaaaatttgaaacaactaactaaaaaatat

SEQ ID NO: 10357 - DNA, 40 bp, Homo sapiens
atattttttagttagttgtttcaaattttttgaaataata

SEQ ID NO: 10358 - DNA, 40 bp, Homo sapiens
attatttcaaaaaatttgaaacaactaactaaaaaatatg

SEQ ID NO: 10359 - DNA, 40 bp, Homo sapiens
catattttttagttagttgtttcaaattttttgaaataat

SEQ ID NO: 10360 - DNA, 40 bp, Homo sapiens
ttatttcaaaaaatttgaaacaactaactaaaaaatatgt

SEQ ID NO: 10361 - DNA, 40 bp, Homo sapiens
acatattttttagttagttgtttcaaattttttgaaataa

SEQ ID NO: 10362 - DNA, 40 bp, Homo sapiens
tatttcaaaaaatttgaaacaactaactaaaaaatatgtt

SEQ ID NO: 10363 - DNA, 40 bp, Homo sapiens
aacatattttttagttagttgtttcaaattttttgaaata

SEQ ID NO: 10364 - DNA, 40 bp, Homo sapiens
atttcaaaaaatttgaaacaactaactaaaaaatatgttt

SEQ ID NO: 10365 - DNA, 40 bp, Homo sapiens
aaacatattttttagttagttgtttcaaattttttgaaat

SEQ ID NO: 10366 - DNA, 40 bp, Homo sapiens
tttcaaaaaatttgaaacaactaactaaaaaatatgtttt

SEQ ID NO: 10367 - DNA, 40 bp, Homo sapiens
aaaacatattttttagttagttgtttcaaattttttgaaa

SEQ ID NO: 10368 - DNA, 40 bp, Homo sapiens
ttcaaaaaatttgaaacaactaactaaaaaatatgtttta

SEQ ID NO: 10369 - DNA, 40 bp, Homo sapiens
taaaacatattttttagttagttgtttcaaattttttgaa

SEQ ID NO: 10370 - DNA, 40 bp, Homo sapiens
tcaaaaaatttgaaacaactaactaaaaaatatgttttat

SEQ ID NO: 10371 - DNA, 40 bp, Homo sapiens
ataaaacatattttttagttagttgtttcaaattttttga

SEQ ID NO: 10372 - DNA, 40 bp, Homo sapiens
caaaaaatttgaaacaactaactaaaaaatatgttttatt

SEQ ID NO: 10373 - DNA, 40 bp, Homo sapiens
aataaaacatattttttagttagttgtttcaaattttttg

SEQ ID NO: 10374 - DNA, 40 bp, Homo sapiens
aaaaaatttgaaacaactaactaaaaaatatgttttattt

SEQ ID NO: 10375 - DNA, 40 bp, Homo sapiens
aaataaaacatattttttagttagttgtttcaaatttttt

SEQ ID NO: 10376 - DNA, 40 bp, Homo sapiens
aaaaatttgaaacaactaactaaaaaatatgttttatttt

SEQ ID NO: 10377 - DNA, 40 bp, Homo sapiens
aaaataaaacatattttttagttagttgtttcaaattttt

SEQ ID NO: 10378 - DNA, 40 bp, Homo sapiens
aaaatttgaaacaactaactaaaaaatatgttttattttc

SEQ ID NO: 10379 - DNA, 40 bp, Homo sapiens
gaaaataaaacatattttttagttagttgtttcaaatttt

SEQ ID NO: 10380 - DNA, 40 bp, Homo sapiens
aaatttgaaacaactaactaaaaaatatgttttattttct

SEQ ID NO: 10381 - DNA, 40 bp, Homo sapiens
agaaaataaaacatattttttagttagttgtttcaaattt

SEQ ID NO: 10382 - DNA, 40 bp, Homo sapiens
aatttgaaacaactaactaaaaaatatgttttattttctg

SEQ ID NO: 10383 - DNA, 40 bp, Homo sapiens
cagaaaataaaacatattttttagttagttgtttcaaatt

SEQ ID NO: 10384 - DNA, 40 bp, Homo sapiens
atttgaaacaactaactaaaaaatatgttttattttctgt

SEQ ID NO: 10385 - DNA, 40 bp, Homo sapiens
acagaaaataaaacatattttttagttagttgtttcaaat

SEQ ID NO: 10386 - DNA, 40 bp, Homo sapiens
tttgaaacaactaactaaaaaatatgttttattttctgta

SEQ ID NO: 10387 - DNA, 40 bp, Homo sapiens
tacagaaaataaaacatattttttagttagttgtttcaaa

SEQ ID NO: 10388 - DNA, 40 bp, Homo sapiens
ttgaaacaactaactaaaaaatatgttttattttctgtat

SEQ ID NO: 10389 - DNA, 40 bp, Homo sapiens
atacagaaaataaaacatattttttagttagttgtttcaa

SEQ ID NO: 10390 - DNA, 40 bp, Homo sapiens
tgaaacaactaactaaaaaatatgttttattttctgtatg

SEQ ID NO: 10391 - DNA, 40 bp, Homo sapiens
catacagaaaataaaacatattttttagttagttgtttca

SEQ ID NO: 10392 - DNA, 40 bp, Homo sapiens
gaaacaactaactaaaaaatatgttttattttctgtatgg

SEQ ID NO: 10393 - DNA, 40 bp, Homo sapiens
ccatacagaaaataaaacatattttttagttagttgtttc

SEQ ID NO: 10394 - DNA, 40 bp, Homo sapiens
aaacaactaactaaaaaatatgttttattttctgtatggt

SEQ ID NO: 10395 - DNA, 40 bp, Homo sapiens
accatacagaaaataaaacatattttttagttagttgttt

SEQ ID NO: 10396 - DNA, 40 bp, Homo sapiens
aacaactaactaaaaaatatgttttattttctgtatggtg

SEQ ID NO: 10397 - DNA, 40 bp, Homo sapiens
caccatacagaaaataaaacatattttttagttagttgtt

SEQ ID NO: 10398 - DNA, 40 bp, Homo sapiens
acaactaactaaaaaatatgttttattttctgtatggtgt

SEQ ID NO: 10399 - DNA, 40 bp, Homo sapiens
acaccatacagaaaataaaacatattttttagttagttgt

SEQ ID NO: 10400 - DNA, 40 bp, Homo sapiens
caactaactaaaaaatatgttttattttctgtatggtgtt

SEQ ID NO: 10401 - DNA, 40 bp, Homo sapiens
aacaccatacagaaaataaaacatattttttagttagttg

SEQ ID NO: 10402 - DNA, 40 bp, Homo sapiens
aactaactaaaaaatatgttttattttctgtatggtgttt

SEQ ID NO: 10403 - DNA, 40 bp, Homo sapiens
aaacaccatacagaaaataaaacatattttttagttagtt

SEQ ID NO: 10404 - DNA, 40 bp, Homo sapiens
actaactaaaaaatatgttttattttctgtatggtgtttg

SEQ ID NO: 10405 - DNA, 40 bp, Homo sapiens
caaacaccatacagaaaataaaacatattttttagttagt

SEQ ID NO: 10406 - DNA, 40 bp, Homo sapiens
ctaactaaaaaatatgttttattttctgtatggtgtttgt

SEQ ID NO: 10407 - DNA, 40 bp, Homo sapiens
acaaacaccatacagaaaataaaacatattttttagttag

SEQ ID NO: 10408 - DNA, 40 bp, Homo sapiens
taactaaaaaatatgttttattttctgtatggtgtttgtt

SEQ ID NO: 10409 - DNA, 40 bp, Homo sapiens
aacaaacaccatacagaaaataaaacatattttttagtta

SEQ ID NO: 10410 - DNA, 40 bp, Homo sapiens
aactaaaaaatatgttttattttctgtatggtgtttgtta

SEQ ID NO: 10411 - DNA, 40 bp, Homo sapiens
taacaaacaccatacagaaaataaaacatattttttagtt

SEQ ID NO: 10412 - DNA, 40 bp, Homo sapiens
actaaaaaatatgttttattttctgtatggtgtttgttat

SEQ ID NO: 10413 - DNA, 40 bp, Homo sapiens
ataacaaacaccatacagaaaataaaacatattttttagt

SEQ ID NO: 10414 - DNA, 40 bp, Homo sapiens
ctaaaaaatatgttttattttctgtatggtgtttgttata

SEQ ID NO: 10415 - DNA, 40 bp, Homo sapiens
tataacaaacaccatacagaaaataaaacatattttttag

SEQ ID NO: 10416 - DNA, 40 bp, Homo sapiens
taaaaaatatgttttattttctgtatggtgtttgttatac

SEQ ID NO: 10417 - DNA, 40 bp, Homo sapiens
gtataacaaacaccatacagaaaataaaacatatttttta

SEQ ID NO: 10418 - DNA, 40 bp, Homo sapiens
aaaaaatatgttttattttctgtatggtgtttgttataca

SEQ ID NO: 10419 - DNA, 40 bp, Homo sapiens
tgtataacaaacaccatacagaaaataaaacatatttttt

SEQ ID NO: 10420 - DNA, 40 bp, Homo sapiens
aaaaatatgttttattttctgtatggtgtttgttatacaa

SEQ ID NO: 10421 - DNA, 40 bp, Homo sapiens
ttgtataacaaacaccatacagaaaataaaacatattttt

SEQ ID NO: 10422 - DNA, 40 bp, Homo sapiens
aaaatatgttttattttctgtatggtgtttgttatacaat

SEQ ID NO: 10423 - DNA, 40 bp, Homo sapiens
attgtataacaaacaccatacagaaaataaaacatatttt

SEQ ID NO: 10424 - DNA, 40 bp, Homo sapiens
aaatatgttttattttctgtatggtgtttgttatacaatc

SEQ ID NO: 10425 - DNA, 40 bp, Homo sapiens
gattgtataacaaacaccatacagaaaataaaacatattt

SEQ ID NO: 10426 - DNA, 40 bp, Homo sapiens
aatatgttttattttctgtatggtgtttgttatacaatct

SEQ ID NO: 10427 - DNA, 40 bp, Homo sapiens
agattgtataacaaacaccatacagaaaataaaacatatt

SEQ ID NO: 10428 - DNA, 40 bp, Homo sapiens
atatgttttattttctgtatggtgtttgttatacaatctg

SEQ ID NO: 10429 - DNA, 40 bp, Homo sapiens
cagattgtataacaaacaccatacagaaaataaaacatat

SEQ ID NO: 10430 - DNA, 40 bp, Homo sapiens
tatgttttattttctgtatggtgtttgttatacaatctgt

SEQ ID NO: 10431 - DNA, 40 bp, Homo sapiens
acagattgtataacaaacaccatacagaaaataaaacata

SEQ ID NO: 10432 - DNA, 40 bp, Homo sapiens
atgttttattttctgtatggtgtttgttatacaatctgtc

SEQ ID NO: 10433 - DNA, 40 bp, Homo sapiens
gacagattgtataacaaacaccatacagaaaataaaacat

SEQ ID NO: 10434 - DNA, 40 bp, Homo sapiens
tgttttattttctgtatggtgtttgttatacaatctgtca

SEQ ID NO: 10435 - DNA, 40 bp, Homo sapiens
tgacagattgtataacaaacaccatacagaaaataaaaca

SEQ ID NO: 10436 - DNA, 40 bp, Homo sapiens
gttttattttctgtatggtgtttgttatacaatctgtcaa

SEQ ID NO: 10437 - DNA, 40 bp, Homo sapiens
ttgacagattgtataacaaacaccatacagaaaataaaac

SEQ ID NO: 10438 - DNA, 40 bp, Homo sapiens
ttttattttctgtatggtgtttgttatacaatctgtcaat

SEQ ID NO: 10439 - DNA, 40 bp, Homo sapiens
attgacagattgtataacaaacaccatacagaaaataaaa

SEQ ID NO: 10440 - DNA, 40 bp, Homo sapiens
tttattttctgtatggtgtttgttatacaatctgtcaata

SEQ ID NO: 10441 - DNA, 40 bp, Homo sapiens
tattgacagattgtataacaaacaccatacagaaaataaa

SEQ ID NO: 10442 - DNA, 40 bp, Homo sapiens
ttattttctgtatggtgtttgttatacaatctgtcaatat

SEQ ID NO: 10443 - DNA, 40 bp, Homo sapiens
atattgacagattgtataacaaacaccatacagaaaataa

SEQ ID NO: 10444 - DNA, 40 bp, Homo sapiens
tattttctgtatggtgtttgttatacaatctgtcaatatt

SEQ ID NO: 10445 - DNA, 40 bp, Homo sapiens
aatattgacagattgtataacaaacaccatacagaaaata

SEQ ID NO: 10446 - DNA, 40 bp, Homo sapiens
attttctgtatggtgtttgttatacaatctgtcaatattc

SEQ ID NO: 10447 - DNA, 40 bp, Homo sapiens
gaatattgacagattgtataacaaacaccatacagaaaat

SEQ ID NO: 10448 - DNA, 40 bp, Homo sapiens
ttttctgtatggtgtttgttatacaatctgtcaatattca

SEQ ID NO: 10449 - DNA, 40 bp, Homo sapiens
tgaatattgacagattgtataacaaacaccatacagaaaa

SEQ ID NO: 10450 - DNA, 40 bp, Homo sapiens
tttctgtatggtgtttgttatacaatctgtcaatattcat

SEQ ID NO: 10451 - DNA, 40 bp, Homo sapiens
atgaatattgacagattgtataacaaacaccatacagaaa

SEQ ID NO: 10452 - DNA, 40 bp, Homo sapiens
ttctgtatggtgtttgttatacaatctgtcaatattcatg

SEQ ID NO: 10453 - DNA, 40 bp, Homo sapiens
catgaatattgacagattgtataacaaacaccatacagaa

SEQ ID NO: 10454 - DNA, 40 bp, Homo sapiens
tctgtatggtgtttgttatacaatctgtcaatattcatgc

SEQ ID NO: 10455 - DNA, 40 bp, Homo sapiens
gcatgaatattgacagattgtataacaaacaccatacaga

SEQ ID NO: 10456 - DNA, 40 bp, Homo sapiens
ctgtatggtgtttgttatacaatctgtcaatattcatgca

SEQ ID NO: 10457 - DNA, 40 bp, Homo sapiens
tgcatgaatattgacagattgtataacaaacaccatacag

SEQ ID NO: 10458 - DNA, 40 bp, Homo sapiens
tgtatggtgtttgttatacaatctgtcaatattcatgcac

SEQ ID NO: 10459 - DNA, 40 bp, Homo sapiens
gtgcatgaatattgacagattgtataacaaacaccataca

SEQ ID NO: 10460 - DNA, 40 bp, Homo sapiens
gtatggtgtttgttatacaatctgtcaatattcatgcacc

SEQ ID NO: 10461 - DNA, 40 bp, Homo sapiens
ggtgcatgaatattgacagattgtataacaaacaccatac

SEQ ID NO: 10462 - DNA, 40 bp, Homo sapiens
tatggtgtttgttatacaatctgtcaatattcatgcacct

SEQ ID NO: 10463 - DNA, 40 bp, Homo sapiens
aggtgcatgaatattgacagattgtataacaaacaccata

SEQ ID NO: 10464 - DNA, 40 bp, Homo sapiens
atggtgtttgttatacaatctgtcaatattcatgcacctc

SEQ ID NO: 10465 - DNA, 40 bp, Homo sapiens
gaggtgcatgaatattgacagattgtataacaaacaccat

SEQ ID NO: 10466 - DNA, 40 bp, Homo sapiens
tggtgtttgttatacaatctgtcaatattcatgcacctct

SEQ ID NO: 10467 - DNA, 40 bp, Homo sapiens
agaggtgcatgaatattgacagattgtataacaaacacca

SEQ ID NO: 10468 - DNA, 40 bp, Homo sapiens
ggtgtttgttatacaatctgtcaatattcatgcacctctt

SEQ ID NO: 10469 - DNA, 40 bp, Homo sapiens
aagaggtgcatgaatattgacagattgtataacaaacacc

SEQ ID NO: 10470 - DNA, 40 bp, Homo sapiens
gtgtttgttatacaatctgtcaatattcatgcacctcttg

SEQ ID NO: 10471 - DNA, 40 bp, Homo sapiens
caagaggtgcatgaatattgacagattgtataacaaacac

SEQ ID NO: 10472 - DNA, 40 bp, Homo sapiens
tgtttgttatacaatctgtcaatattcatgcacctcttgg

SEQ ID NO: 10473 - DNA, 40 bp, Homo sapiens
ccaagaggtgcatgaatattgacagattgtataacaaaca

SEQ ID NO: 10474 - DNA, 40 bp, Homo sapiens
gtttgttatacaatctgtcaatattcatgcacctcttggg

SEQ ID NO: 10475 - DNA, 40 bp, Homo sapiens
cccaagaggtgcatgaatattgacagattgtataacaaac

SEQ ID NO: 10476 - DNA, 40 bp, Homo sapiens
tttgttatacaatctgtcaatattcatgcacctcttggga

SEQ ID NO: 10477 - DNA, 40 bp, Homo sapiens
tcccaagaggtgcatgaatattgacagattgtataacaaa

SEQ ID NO: 10478 - DNA, 40 bp, Homo sapiens
ttgttatacaatctgtcaatattcatgcacctcttgggag

SEQ ID NO: 10479 - DNA, 40 bp, Homo sapiens
ctcccaagaggtgcatgaatattgacagattgtataacaa

SEQ ID NO: 10480 - DNA, 40 bp, Homo sapiens
tgttatacaatctgtcaatattcatgcacctcttgggaga

SEQ ID NO: 10481 - DNA, 40 bp, Homo sapiens
tctcccaagaggtgcatgaatattgacagattgtataaca

SEQ ID NO: 10482 - DNA, 40 bp, Homo sapiens
gttatacaatctgtcaatattcatgcacctcttgggagac

SEQ ID NO: 10483 - DNA, 40 bp, Homo sapiens
gtctcccaagaggtgcatgaatattgacagattgtataac

SEQ ID NO: 10484 - DNA, 40 bp, Homo sapiens
ttatacaatctgtcaatattcatgcacctcttgggagaca

SEQ ID NO: 10485 - DNA, 40 bp, Homo sapiens
tgtctcccaagaggtgcatgaatattgacagattgtataa

SEQ ID NO: 10486 - DNA, 40 bp, Homo sapiens
tatacaatctgtcaatattcatgcacctcttgggagacag

SEQ ID NO: 10487 - DNA, 40 bp, Homo sapiens
ctgtctcccaagaggtgcatgaatattgacagattgtata

SEQ ID NO: 10488 - DNA, 40 bp, Homo sapiens
atacaatctgtcaatattcatgcacctcttgggagacagt

SEQ ID NO: 10489 - DNA, 40 bp, Homo sapiens
actgtctcccaagaggtgcatgaatattgacagattgtat

SEQ ID NO: 10490 - DNA, 40 bp, Homo sapiens
tacaatctgtcaatattcatgcacctcttgggagacagtg

SEQ ID NO: 10491 - DNA, 40 bp, Homo sapiens
cactgtctcccaagaggtgcatgaatattgacagattgta

SEQ ID NO: 10492 - DNA, 40 bp, Homo sapiens
acaatctgtcaatattcatgcacctcttgggagacagtgt

SEQ ID NO: 10493 - DNA, 40 bp, Homo sapiens
acactgtctcccaagaggtgcatgaatattgacagattgt

SEQ ID NO: 10494 - DNA, 40 bp, Homo sapiens
caatctgtcaatattcatgcacctcttgggagacagtgta

SEQ ID NO: 10495 - DNA, 40 bp, Homo sapiens
tacactgtctcccaagaggtgcatgaatattgacagattg

SEQ ID NO: 10496 - DNA, 40 bp, Homo sapiens
aatctgtcaatattcatgcacctcttgggagacagtgtat

SEQ ID NO: 10497 - DNA, 40 bp, Homo sapiens
atacactgtctcccaagaggtgcatgaatattgacagatt

SEQ ID NO: 10498 - DNA, 40 bp, Homo sapiens
atctgtcaatattcatgcacctcttgggagacagtgtatg

SEQ ID NO: 10499 - DNA, 40 bp, Homo sapiens
catacactgtctcccaagaggtgcatgaatattgacagat

SEQ ID NO: 10500 - DNA, 40 bp, Homo sapiens
tctgtcaatattcatgcacctcttgggagacagtgtatga

SEQ ID NO: 10501 - DNA, 40 bp, Homo sapiens
tcatacactgtctcccaagaggtgcatgaatattgacaga

SEQ ID NO: 10502 - DNA, 40 bp, Homo sapiens
ctgtcaatattcatgcacctcttgggagacagtgtatgaa

SEQ ID NO: 10503 - DNA, 40 bp, Homo sapiens
ttcatacactgtctcccaagaggtgcatgaatattgacag

SEQ ID NO: 10504 - DNA, 40 bp, Homo sapiens
tgtcaatattcatgcacctcttgggagacagtgtatgaaa

SEQ ID NO: 10505 - DNA, 40 bp, Homo sapiens
tttcatacactgtctcccaagaggtgcatgaatattgaca

SEQ ID NO: 10506 - DNA, 40 bp, Homo sapiens
gtcaatattcatgcacctcttgggagacagtgtatgaaaa

SEQ ID NO: 10507 - DNA, 40 bp, Homo sapiens
ttttcatacactgtctcccaagaggtgcatgaatattgac

SEQ ID NO: 10508 - DNA, 40 bp, Homo sapiens
tcaatattcatgcacctcttgggagacagtgtatgaaaag

SEQ ID NO: 10509 - DNA, 40 bp, Homo sapiens
cttttcatacactgtctcccaagaggtgcatgaatattga

SEQ ID NO: 10510 - DNA, 40 bp, Homo sapiens
caatattcatgcacctcttgggagacagtgtatgaaaagc

SEQ ID NO: 10511 - DNA, 40 bp, Homo sapiens
gcttttcatacactgtctcccaagaggtgcatgaatattg

SEQ ID NO: 10512 - DNA, 40 bp, Homo sapiens
aatattcatgcacctcttgggagacagtgtatgaaaagca

SEQ ID NO: 10513 - DNA, 40 bp, Homo sapiens
tgcttttcatacactgtctcccaagaggtgcatgaatatt

SEQ ID NO: 10514 - DNA, 40 bp, Homo sapiens
atattcatgcacctcttgggagacagtgtatgaaaagcaa

SEQ ID NO: 10515 - DNA, 40 bp, Homo sapiens
ttgcttttcatacactgtctcccaagaggtgcatgaatat

SEQ ID NO: 10516 - DNA, 40 bp, Homo sapiens
tattcatgcacctcttgggagacagtgtatgaaaagcaaa

SEQ ID NO: 10517 - DNA, 40 bp, Homo sapiens
tttgcttttcatacactgtctcccaagaggtgcatgaata

SEQ ID NO: 10518 - DNA, 40 bp, Homo sapiens
attcatgcacctcttgggagacagtgtatgaaaagcaaag

SEQ ID NO: 10519 - DNA, 40 bp, Homo sapiens
ctttgcttttcatacactgtctcccaagaggtgcatgaat

SEQ ID NO: 10520 - DNA, 40 bp, Homo sapiens
ttcatgcacctcttgggagacagtgtatgaaaagcaaaga

SEQ ID NO: 10521 - DNA, 40 bp, Homo sapiens
tctttgcttttcatacactgtctcccaagaggtgcatgaa

SEQ ID NO: 10522 - DNA, 40 bp, Homo sapiens
tcatgcacctcttgggagacagtgtatgaaaagcaaagag

SEQ ID NO: 10523 - DNA, 40 bp, Homo sapiens
ctctttgcttttcatacactgtctcccaagaggtgcatga

SEQ ID NO: 10524 - DNA, 40 bp, Homo sapiens
catgcacctcttgggagacagtgtatgaaaagcaaagagt

SEQ ID NO: 10525 - DNA, 40 bp, Homo sapiens
actctttgcttttcatacactgtctcccaagaggtgcatg

SEQ ID NO: 10526 - DNA, 40 bp, Homo sapiens
atgcacctcttgggagacagtgtatgaaaagcaaagagta

SEQ ID NO: 10527 - DNA, 40 bp, Homo sapiens
tactctttgcttttcatacactgtctcccaagaggtgcat

SEQ ID NO: 10528 - DNA, 40 bp, Homo sapiens
tgcacctcttgggagacagtgtatgaaaagcaaagagtaa

SEQ ID NO: 10529 - DNA, 40 bp, Homo sapiens
ttactctttgcttttcatacactgtctcccaagaggtgca

SEQ ID NO: 10530 - DNA, 40 bp, Homo sapiens
gcacctcttgggagacagtgtatgaaaagcaaagagtaac

SEQ ID NO: 10531 - DNA, 40 bp, Homo sapiens
gttactctttgcttttcatacactgtctcccaagaggtgc

SEQ ID NO: 10532 - DNA, 40 bp, Homo sapiens
cacctcttgggagacagtgtatgaaaagcaaagagtaaca

SEQ ID NO: 10533 - DNA, 40 bp, Homo sapiens
tgttactctttgcttttcatacactgtctcccaagaggtg

SEQ ID NO: 10534 - DNA, 40 bp, Homo sapiens
acctcttgggagacagtgtatgaaaagcaaagagtaacag

SEQ ID NO: 10535 - DNA, 40 bp, Homo sapiens
ctgttactctttgcttttcatacactgtctcccaagaggt

SEQ ID NO: 10536 - DNA, 40 bp, Homo sapiens
cctcttgggagacagtgtatgaaaagcaaagagtaacagt

SEQ ID NO: 10537 - DNA, 40 bp, Homo sapiens
actgttactctttgcttttcatacactgtctcccaagagg

SEQ ID NO: 10538 - DNA, 40 bp, Homo sapiens
ctcttgggagacagtgtatgaaaagcaaagagtaacagtc

SEQ ID NO: 10539 - DNA, 40 bp, Homo sapiens
gactgttactctttgcttttcatacactgtctcccaagag

SEQ ID NO: 10540 - DNA, 40 bp, Homo sapiens
tcttgggagacagtgtatgaaaagcaaagagtaacagtca

SEQ ID NO: 10541 - DNA, 40 bp, Homo sapiens
tgactgttactctttgcttttcatacactgtctcccaaga

SEQ ID NO: 10542 - DNA, 40 bp, Homo sapiens
cttgggagacagtgtatgaaaagcaaagagtaacagtcac

SEQ ID NO: 10543 - DNA, 40 bp, Homo sapiens
gtgactgttactctttgcttttcatacactgtctcccaag

SEQ ID NO: 10544 - DNA, 40 bp, Homo sapiens
ttgggagacagtgtatgaaaagcaaagagtaacagtcaca

SEQ ID NO: 10545 - DNA, 40 bp, Homo sapiens
tgtgactgttactctttgcttttcatacactgtctcccaa

SEQ ID NO: 10546 - DNA, 40 bp, Homo sapiens
tgggagacagtgtatgaaaagcaaagagtaacagtcacat

SEQ ID NO: 10547 - DNA, 40 bp, Homo sapiens
atgtgactgttactctttgcttttcatacactgtctccca

SEQ ID NO: 10548 - DNA, 40 bp, Homo sapiens
gggagacagtgtatgaaaagcaaagagtaacagtcacatg

SEQ ID NO: 10549 - DNA, 40 bp, Homo sapiens
catgtgactgttactctttgcttttcatacactgtctccc

SEQ ID NO: 10550 - DNA, 40 bp, Homo sapiens
ggagacagtgtatgaaaagcaaagagtaacagtcacatgg

SEQ ID NO: 10551 - DNA, 40 bp, Homo sapiens
ccatgtgactgttactctttgcttttcatacactgtctcc

SEQ ID NO: 10552 - DNA, 40 bp, Homo sapiens
gagacagtgtatgaaaagcaaagagtaacagtcacatgga

SEQ ID NO: 10553 - DNA, 40 bp, Homo sapiens
tccatgtgactgttactctttgcttttcatacactgtctc

SEQ ID NO: 10554 - DNA, 40 bp, Homo sapiens
agacagtgtatgaaaagcaaagagtaacagtcacatggat

SEQ ID NO: 10555 - DNA, 40 bp, Homo sapiens
atccatgtgactgttactctttgcttttcatacactgtct

SEQ ID NO: 10556 - DNA, 40 bp, Homo sapiens
gacagtgtatgaaaagcaaagagtaacagtcacatggatt

SEQ ID NO: 10557 - DNA, 40 bp, Homo sapiens
aatccatgtgactgttactctttgcttttcatacactgtc

SEQ ID NO: 10558 - DNA, 40 bp, Homo sapiens
acagtgtatgaaaagcaaagagtaacagtcacatggatta

SEQ ID NO: 10559 - DNA, 40 bp, Homo sapiens
taatccatgtgactgttactctttgcttttcatacactgt

SEQ ID NO: 10560 - DNA, 40 bp, Homo sapiens
cagtgtatgaaaagcaaagagtaacagtcacatggattac

SEQ ID NO: 10561 - DNA, 40 bp, Homo sapiens
gtaatccatgtgactgttactctttgcttttcatacactg

SEQ ID NO: 10562 - DNA, 40 bp, Homo sapiens
agtgtatgaaaagcaaagagtaacagtcacatggattact

SEQ ID NO: 10563 - DNA, 40 bp, Homo sapiens
agtaatccatgtgactgttactctttgcttttcatacact

SEQ ID NO: 10564 - DNA, 40 bp, Homo sapiens
gtgtatgaaaagcaaagagtaacagtcacatggattactg

SEQ ID NO: 10565 - DNA, 40 bp, Homo sapiens
cagtaatccatgtgactgttactctttgcttttcatacac

SEQ ID NO: 10566 - DNA, 40 bp, Homo sapiens
tgtatgaaaagcaaagagtaacagtcacatggattactga

SEQ ID NO: 10567 - DNA, 40 bp, Homo sapiens
tcagtaatccatgtgactgttactctttgcttttcataca

SEQ ID NO: 10568 - DNA, 40 bp, Homo sapiens
gtatgaaaagcaaagagtaacagtcacatggattactgat

SEQ ID NO: 10569 - DNA, 40 bp, Homo sapiens
atcagtaatccatgtgactgttactctttgcttttcatac

SEQ ID NO: 10570 - DNA, 40 bp, Homo sapiens
tatgaaaagcaaagagtaacagtcacatggattactgatt

SEQ ID NO: 10571 - DNA, 40 bp, Homo sapiens
aatcagtaatccatgtgactgttactctttgcttttcata

SEQ ID NO: 10572 - DNA, 40 bp, Homo sapiens
atgaaaagcaaagagtaacagtcacatggattactgatta

SEQ ID NO: 10573 - DNA, 40 bp, Homo sapiens
taatcagtaatccatgtgactgttactctttgcttttcat

SEQ ID NO: 10574 - DNA, 40 bp, Homo sapiens
tgaaaagcaaagagtaacagtcacatggattactgattac

SEQ ID NO: 10575 - DNA, 40 bp, Homo sapiens
gtaatcagtaatccatgtgactgttactctttgcttttca

SEQ ID NO: 10576 - DNA, 40 bp, Homo sapiens
gaaaagcaaagagtaacagtcacatggattactgattact

SEQ ID NO: 10577 - DNA, 40 bp, Homo sapiens
agtaatcagtaatccatgtgactgttactctttgcttttc

SEQ ID NO: 10578 - DNA, 40 bp, Homo sapiens
aaaagcaaagagtaacagtcacatggattactgattactg

SEQ ID NO: 10579 - DNA, 40 bp, Homo sapiens
cagtaatcagtaatccatgtgactgttactctttgctttt

SEQ ID NO: 10580 - DNA, 40 bp, Homo sapiens
aaagcaaagagtaacagtcacatggattactgattactga

SEQ ID NO: 10581 - DNA, 40 bp, Homo sapiens
tcagtaatcagtaatccatgtgactgttactctttgcttt

SEQ ID NO: 10582 - DNA, 40 bp, Homo sapiens
aagcaaagagtaacagtcacatggattactgattactgag

SEQ ID NO: 10583 - DNA, 40 bp, Homo sapiens
ctcagtaatcagtaatccatgtgactgttactctttgctt

SEQ ID NO: 10584 - DNA, 40 bp, Homo sapiens
agcaaagagtaacagtcacatggattactgattactgaga

SEQ ID NO: 10585 - DNA, 40 bp, Homo sapiens
tctcagtaatcagtaatccatgtgactgttactctttgct

SEQ ID NO: 10586 - DNA, 40 bp, Homo sapiens
gcaaagagtaacagtcacatggattactgattactgagat

SEQ ID NO: 10587 - DNA, 40 bp, Homo sapiens
atctcagtaatcagtaatccatgtgactgttactctttgc

SEQ ID NO: 10588 - DNA, 40 bp, Homo sapiens
caaagagtaacagtcacatggattactgattactgagata

SEQ ID NO: 10589 - DNA, 40 bp, Homo sapiens
tatctcagtaatcagtaatccatgtgactgttactctttg

SEQ ID NO: 10590 - DNA, 40 bp, Homo sapiens
aaagagtaacagtcacatggattactgattactgagatat

SEQ ID NO: 10591 - DNA, 40 bp, Homo sapiens
atatctcagtaatcagtaatccatgtgactgttactcttt

SEQ ID NO: 10592 - DNA, 40 bp, Homo sapiens
aagagtaacagtcacatggattactgattactgagatata

SEQ ID NO: 10593 - DNA, 40 bp, Homo sapiens
tatatctcagtaatcagtaatccatgtgactgttactctt

SEQ ID NO: 10594 - DNA, 40 bp, Homo sapiens
agagtaacagtcacatggattactgattactgagatatat

SEQ ID NO: 10595 - DNA, 40 bp, Homo sapiens
atatatctcagtaatcagtaatccatgtgactgttactct

SEQ ID NO: 10596 - DNA, 40 bp, Homo sapiens
gagtaacagtcacatggattactgattactgagatatatt

SEQ ID NO: 10597 - DNA, 40 bp, Homo sapiens
aatatatctcagtaatcagtaatccatgtgactgttactc

SEQ ID NO: 10598 - DNA, 40 bp, Homo sapiens
agtaacagtcacatggattactgattactgagatatattc

SEQ ID NO: 10599 - DNA, 40 bp, Homo sapiens
gaatatatctcagtaatcagtaatccatgtgactgttact

SEQ ID NO: 10600 - DNA, 40 bp, Homo sapiens
gtaacagtcacatggattactgattactgagatatattca

SEQ ID NO: 10601 - DNA, 40 bp, Homo sapiens
tgaatatatctcagtaatcagtaatccatgtgactgttac

SEQ ID NO: 10602 - DNA, 40 bp, Homo sapiens
taacagtcacatggattactgattactgagatatattcac

SEQ ID NO: 10603 - DNA, 40 bp, Homo sapiens
gtgaatatatctcagtaatcagtaatccatgtgactgtta

SEQ ID NO: 10604 - DNA, 40 bp, Homo sapiens
aacagtcacatggattactgattactgagatatattcact

SEQ ID NO: 10605 - DNA, 40 bp, Homo sapiens
agtgaatatatctcagtaatcagtaatccatgtgactgtt

SEQ ID NO: 10606 - DNA, 40 bp, Homo sapiens
acagtcacatggattactgattactgagatatattcactt

SEQ ID NO: 10607 - DNA, 40 bp, Homo sapiens
aagtgaatatatctcagtaatcagtaatccatgtgactgt

SEQ ID NO: 10608 - DNA, 40 bp, Homo sapiens
cagtcacatggattactgattactgagatatattcacttg

SEQ ID NO: 10609 - DNA, 40 bp, Homo sapiens
caagtgaatatatctcagtaatcagtaatccatgtgactg

SEQ ID NO: 10610 - DNA, 40 bp, Homo sapiens
agtcacatggattactgattactgagatatattcacttgc

SEQ ID NO: 10611 - DNA, 40 bp, Homo sapiens
gcaagtgaatatatctcagtaatcagtaatccatgtgact

SEQ ID NO: 10612 - DNA, 40 bp, Homo sapiens
gtcacatggattactgattactgagatatattcacttgca

SEQ ID NO: 10613 - DNA, 40 bp, Homo sapiens
tgcaagtgaatatatctcagtaatcagtaatccatgtgac

SEQ ID NO: 10614 - DNA, 40 bp, Homo sapiens
tcacatggattactgattactgagatatattcacttgcat

SEQ ID NO: 10615 - DNA, 40 bp, Homo sapiens
atgcaagtgaatatatctcagtaatcagtaatccatgtga

SEQ ID NO: 10616 - DNA, 40 bp, Homo sapiens
cacatggattactgattactgagatatattcacttgcatc

SEQ ID NO: 10617 - DNA, 40 bp, Homo sapiens
gatgcaagtgaatatatctcagtaatcagtaatccatgtg

SEQ ID NO: 10618 - DNA, 40 bp, Homo sapiens
acatggattactgattactgagatatattcacttgcatct

SEQ ID NO: 10619 - DNA, 40 bp, Homo sapiens
agatgcaagtgaatatatctcagtaatcagtaatccatgt

SEQ ID NO: 10620 - DNA, 40 bp, Homo sapiens
catggattactgattactgagatatattcacttgcatctt

SEQ ID NO: 10621 - DNA, 40 bp, Homo sapiens
aagatgcaagtgaatatatctcagtaatcagtaatccatg

SEQ ID NO: 10622 - DNA, 40 bp, Homo sapiens
atggattactgattactgagatatattcacttgcatcttt

SEQ ID NO: 10623 - DNA, 40 bp, Homo sapiens
aaagatgcaagtgaatatatctcagtaatcagtaatccat

SEQ ID NO: 10624 - DNA, 40 bp, Homo sapiens
tggattactgattactgagatatattcacttgcatctttt

SEQ ID NO: 10625 - DNA, 40 bp, Homo sapiens
aaaagatgcaagtgaatatatctcagtaatcagtaatcca

SEQ ID NO: 10626 - DNA, 40 bp, Homo sapiens
ggattactgattactgagatatattcacttgcatcttttt

SEQ ID NO: 10627 - DNA, 40 bp, Homo sapiens
aaaaagatgcaagtgaatatatctcagtaatcagtaatcc

SEQ ID NO: 10628 - DNA, 40 bp, Homo sapiens
gattactgattactgagatatattcacttgcatctttttt

SEQ ID NO: 10629 - DNA, 40 bp, Homo sapiens
aaaaaagatgcaagtgaatatatctcagtaatcagtaatc

SEQ ID NO: 10630 - DNA, 40 bp, Homo sapiens
attactgattactgagatatattcacttgcatcttttttt

SEQ ID NO: 10631 - DNA, 40 bp, Homo sapiens
aaaaaaagatgcaagtgaatatatctcagtaatcagtaat

SEQ ID NO: 10632 - DNA, 40 bp, Homo sapiens
ttactgattactgagatatattcacttgcatctttttttt

SEQ ID NO: 10633 - DNA, 40 bp, Homo sapiens
aaaaaaaagatgcaagtgaatatatctcagtaatcagtaa

SEQ ID NO: 10634 - DNA, 40 bp, Homo sapiens
tactgattactgagatatattcacttgcatcttttttttt

SEQ ID NO: 10635 - DNA, 40 bp, Homo sapiens
aaaaaaaaagatgcaagtgaatatatctcagtaatcagta

SEQ ID NO: 10636 - DNA, 40 bp, Homo sapiens
actgattactgagatatattcacttgcatctttttttttt

SEQ ID NO: 10637 - DNA, 40 bp, Homo sapiens
aaaaaaaaaagatgcaagtgaatatatctcagtaatcagt

SEQ ID NO: 10638 - DNA, 40 bp, Homo sapiens
ctgattactgagatatattcacttgcatcttttttttttt

SEQ ID NO: 10639 - DNA, 40 bp, Homo sapiens
aaaaaaaaaaagatgcaagtgaatatatctcagtaatcag

SEQ ID NO: 10640 - DNA, 40 bp, Homo sapiens
tgattactgagatatattcacttgcatctttttttttttt

SEQ ID NO: 10641 - DNA, 40 bp, Homo sapiens
aaaaaaaaaaaagatgcaagtgaatatatctcagtaatca

SEQ ID NO: 10642 - DNA, 40 bp, Homo sapiens
gattactgagatatattcacttgcatcttttttttttttt

SEQ ID NO: 10643 - DNA, 40 bp, Homo sapiens
aaaaaaaaaaaaagatgcaagtgaatatatctcagtaatc

SEQ ID NO: 10644 - DNA, 40 bp, Homo sapiens
attactgagatatattcacttgcatctttttttttttttg

SEQ ID NO: 10645 - DNA, 40 bp, Homo sapiens
caaaaaaaaaaaaagatgcaagtgaatatatctcagtaat

SEQ ID NO: 10646 - DNA, 40 bp, Homo sapiens
ttactgagatatattcacttgcatctttttttttttttga

SEQ ID NO: 10647 - DNA, 40 bp, Homo sapiens
tcaaaaaaaaaaaaagatgcaagtgaatatatctcagtaa

SEQ ID NO: 10648 - DNA, 40 bp, Homo sapiens
tactgagatatattcacttgcatctttttttttttttgag

SEQ ID NO: 10649 - DNA, 40 bp, Homo sapiens
ctcaaaaaaaaaaaaagatgcaagtgaatatatctcagta

SEQ ID NO: 10650 - DNA, 40 bp, Homo sapiens
actgagatatattcacttgcatctttttttttttttgaga

SEQ ID NO: 10651 - DNA, 40 bp, Homo sapiens
tctcaaaaaaaaaaaaagatgcaagtgaatatatctcagt

SEQ ID NO: 10652 - DNA, 40 bp, Homo sapiens
ctgagatatattcacttgcatctttttttttttttgagac

SEQ ID NO: 10653 - DNA, 40 bp, Homo sapiens
gtctcaaaaaaaaaaaaagatgcaagtgaatatatctcag

SEQ ID NO: 10654 - DNA, 40 bp, Homo sapiens
tgagatatattcacttgcatctttttttttttttgagacg

SEQ ID NO: 10655 - DNA, 40 bp, Homo sapiens
cgtctcaaaaaaaaaaaaagatgcaagtgaatatatctca

SEQ ID NO: 10656 - DNA, 40 bp, Homo sapiens
gagatatattcacttgcatctttttttttttttgagacgg

SEQ ID NO: 10657 - DNA, 40 bp, Homo sapiens
ccgtctcaaaaaaaaaaaaagatgcaagtgaatatatctc

SEQ ID NO: 10658 - DNA, 40 bp, Homo sapiens
agatatattcacttgcatctttttttttttttgagacgga

SEQ ID NO: 10659 - DNA, 40 bp, Homo sapiens
tccgtctcaaaaaaaaaaaaagatgcaagtgaatatatct

SEQ ID NO: 10660 - DNA, 40 bp, Homo sapiens
gatatattcacttgcatctttttttttttttgagacggag

SEQ ID NO: 10661 - DNA, 40 bp, Homo sapiens
ctccgtctcaaaaaaaaaaaaagatgcaagtgaatatatc

SEQ ID NO: 10662 - DNA, 40 bp, Homo sapiens
atatattcacttgcatctttttttttttttgagacggagt

SEQ ID NO: 10663 - DNA, 40 bp, Homo sapiens
actccgtctcaaaaaaaaaaaaagatgcaagtgaatatat

SEQ ID NO: 10664 - DNA, 40 bp, Homo sapiens
tatattcacttgcatctttttttttttttgagacggagtg

SEQ ID NO: 10665 - DNA, 40 bp, Homo sapiens
cactccgtctcaaaaaaaaaaaaagatgcaagtgaatata

SEQ ID NO: 10666 - DNA, 40 bp, Homo sapiens
atattcacttgcatctttttttttttttgagacggagtgg

SEQ ID NO: 10667 - DNA, 40 bp, Homo sapiens
ccactccgtctcaaaaaaaaaaaaagatgcaagtgaatat

SEQ ID NO: 10668 - DNA, 40 bp, Homo sapiens
tattcacttgcatctttttttttttttgagacggagtggc

SEQ ID NO: 10669 - DNA, 40 bp, Homo sapiens
gccactccgtctcaaaaaaaaaaaaagatgcaagtgaata

SEQ ID NO: 10670 - DNA, 40 bp, Homo sapiens
attcacttgcatctttttttttttttgagacggagtggct

SEQ ID NO: 10671 - DNA, 40 bp, Homo sapiens
agccactccgtctcaaaaaaaaaaaaagatgcaagtgaat

SEQ ID NO: 10672 - DNA, 40 bp, Homo sapiens
ttcacttgcatctttttttttttttgagacggagtggctc

SEQ ID NO: 10673 - DNA, 40 bp, Homo sapiens
gagccactccgtctcaaaaaaaaaaaaagatgcaagtgaa

SEQ ID NO: 10674 - DNA, 40 bp, Homo sapiens
tcacttgcatctttttttttttttgagacggagtggctct

SEQ ID NO: 10675 - DNA, 40 bp, Homo sapiens
agagccactccgtctcaaaaaaaaaaaaagatgcaagtga

SEQ ID NO: 10676 - DNA, 40 bp, Homo sapiens
cacttgcatctttttttttttttgagacggagtggctctg

SEQ ID NO: 10677 - DNA, 40 bp, Homo sapiens
cagagccactccgtctcaaaaaaaaaaaaagatgcaagtg

SEQ ID NO: 10678 - DNA, 40 bp, Homo sapiens
acttgcatctttttttttttttgagacggagtggctctgt

SEQ ID NO: 10679 - DNA, 40 bp, Homo sapiens
acagagccactccgtctcaaaaaaaaaaaaagatgcaagt

SEQ ID NO: 10680 - DNA, 40 bp, Homo sapiens
cttgcatctttttttttttttgagacggagtggctctgtc

SEQ ID NO: 10681 - DNA, 40 bp, Homo sapiens
gacagagccactccgtctcaaaaaaaaaaaaagatgcaag

SEQ ID NO: 10682 - DNA, 40 bp, Homo sapiens
ttgcatctttttttttttttgagacggagtggctctgtcg

SEQ ID NO: 10683 - DNA, 40 bp, Homo sapiens
cgacagagccactccgtctcaaaaaaaaaaaaagatgcaa

SEQ ID NO: 10684 - DNA, 40 bp, Homo sapiens
tgcatctttttttttttttgagacggagtggctctgtcgc

SEQ ID NO: 10685 - DNA, 40 bp, Homo sapiens
gcgacagagccactccgtctcaaaaaaaaaaaaagatgca

SEQ ID NO: 10686 - DNA, 40 bp, Homo sapiens
gcatctttttttttttttgagacggagtggctctgtcgcc

SEQ ID NO: 10687 - DNA, 40 bp, Homo sapiens
ggcgacagagccactccgtctcaaaaaaaaaaaaagatgc

SEQ ID NO: 10688 - DNA, 40 bp, Homo sapiens
catctttttttttttttgagacggagtggctctgtcgccc

SEQ ID NO: 10689 - DNA, 40 bp, Homo sapiens
gggcgacagagccactccgtctcaaaaaaaaaaaaagatg

SEQ ID NO: 10690 - DNA, 40 bp, Homo sapiens
atctttttttttttttgagacggagtggctctgtcgccca

SEQ ID NO: 10691 - DNA, 40 bp, Homo sapiens
tgggcgacagagccactccgtctcaaaaaaaaaaaaagat

SEQ ID NO: 10692 - DNA, 40 bp, Homo sapiens
tctttttttttttttgagacggagtggctctgtcgcccag

SEQ ID NO: 10693 - DNA, 40 bp, Homo sapiens
ctgggcgacagagccactccgtctcaaaaaaaaaaaaaga

SEQ ID NO: 10694 - DNA, 40 bp, Homo sapiens
ctttttttttttttgagacggagtggctctgtcgcccagg

SEQ ID NO: 10695 - DNA, 40 bp, Homo sapiens
cctgggcgacagagccactccgtctcaaaaaaaaaaaaag

SEQ ID NO: 10696 - DNA, 40 bp, Homo sapiens
tttttttttttttgagacggagtggctctgtcgcccaggc

SEQ ID NO: 10697 - DNA, 40 bp, Homo sapiens
gcctgggcgacagagccactccgtctcaaaaaaaaaaaaa

SEQ ID NO: 10698 - DNA, 40 bp, Homo sapiens
ttttttttttttgagacggagtggctctgtcgcccaggct

SEQ ID NO: 10699 - DNA, 40 bp, Homo sapiens
agcctgggcgacagagccactccgtctcaaaaaaaaaaaa

SEQ ID NO: 10700 - DNA, 40 bp, Homo sapiens
tttttttttttgagacggagtggctctgtcgcccaggctg

SEQ ID NO: 10701 - DNA, 40 bp, Homo sapiens
cagcctgggcgacagagccactccgtctcaaaaaaaaaaa

SEQ ID NO: 10702 - DNA, 40 bp, Homo sapiens
ttttttttttgagacggagtggctctgtcgcccaggctgg

SEQ ID NO: 10703 - DNA, 40 bp, Homo sapiens
ccagcctgggcgacagagccactccgtctcaaaaaaaaaa

SEQ ID NO: 10704 - DNA, 40 bp, Homo sapiens
tttttttttgagacggagtggctctgtcgcccaggctgga

SEQ ID NO: 10705 - DNA, 40 bp, Homo sapiens
tccagcctgggcgacagagccactccgtctcaaaaaaaaa

SEQ ID NO: 10706 - DNA, 40 bp, Homo sapiens
ttttttttgagacggagtggctctgtcgcccaggctggag

SEQ ID NO: 10707 - DNA, 40 bp, Homo sapiens
ctccagcctgggcgacagagccactccgtctcaaaaaaaa

SEQ ID NO: 10708 - DNA, 40 bp, Homo sapiens
tttttttgagacggagtggctctgtcgcccaggctggagt

SEQ ID NO: 10709 - DNA, 40 bp, Homo sapiens
actccagcctgggcgacagagccactccgtctcaaaaaaa

SEQ ID NO: 10710 - DNA, 40 bp, Homo sapiens
ttttttgagacggagtggctctgtcgcccaggctggagtg

SEQ ID NO: 10711 - DNA, 40 bp, Homo sapiens
cactccagcctgggcgacagagccactccgtctcaaaaaa

SEQ ID NO: 10712 - DNA, 40 bp, Homo sapiens
tttttgagacggagtggctctgtcgcccaggctggagtgc

SEQ ID NO: 10713 - DNA, 40 bp, Homo sapiens
gcactccagcctgggcgacagagccactccgtctcaaaaa

SEQ ID NO: 10714 - DNA, 40 bp, Homo sapiens
ttttgagacggagtggctctgtcgcccaggctggagtgca

SEQ ID NO: 10715 - DNA, 40 bp, Homo sapiens
tgcactccagcctgggcgacagagccactccgtctcaaaa

SEQ ID NO: 10716 - DNA, 40 bp, Homo sapiens
tttgagacggagtggctctgtcgcccaggctggagtgcag

SEQ ID NO: 10717 - DNA, 40 bp, Homo sapiens
ctgcactccagcctgggcgacagagccactccgtctcaaa

SEQ ID NO: 10718 - DNA, 40 bp, Homo sapiens
ttgagacggagtggctctgtcgcccaggctggagtgcagt

SEQ ID NO: 10719 - DNA, 40 bp, Homo sapiens
actgcactccagcctgggcgacagagccactccgtctcaa

SEQ ID NO: 10720 - DNA, 40 bp, Homo sapiens
tgagacggagtggctctgtcgcccaggctggagtgcagtg

SEQ ID NO: 10721 - DNA, 40 bp, Homo sapiens
cactgcactccagcctgggcgacagagccactccgtctca

SEQ ID NO: 10722 - DNA, 40 bp, Homo sapiens
gagacggagtggctctgtcgcccaggctggagtgcagtgg

SEQ ID NO: 10723 - DNA, 40 bp, Homo sapiens
ccactgcactccagcctgggcgacagagccactccgtctc

SEQ ID NO: 10724 - DNA, 40 bp, Homo sapiens
agacggagtggctctgtcgcccaggctggagtgcagtggc

SEQ ID NO: 10725 - DNA, 40 bp, Homo sapiens
gccactgcactccagcctgggcgacagagccactccgtct

SEQ ID NO: 10726 - DNA, 40 bp, Homo sapiens
gacggagtggctctgtcgcccaggctggagtgcagtggcg

SEQ ID NO: 10727 - DNA, 40 bp, Homo sapiens
cgccactgcactccagcctgggcgacagagccactccgtc

SEQ ID NO: 10728 - DNA, 40 bp, Homo sapiens
acggagtggctctgtcgcccaggctggagtgcagtggcgt

SEQ ID NO: 10729 - DNA, 40 bp, Homo sapiens
acgccactgcactccagcctgggcgacagagccactccgt

SEQ ID NO: 10730 - DNA, 40 bp, Homo sapiens
cggagtggctctgtcgcccaggctggagtgcagtggcgtg

SEQ ID NO: 10731 - DNA, 40 bp, Homo sapiens
cacgccactgcactccagcctgggcgacagagccactccg

SEQ ID NO: 10732 - DNA, 40 bp, Homo sapiens
ggagtggctctgtcgcccaggctggagtgcagtggcgtga

SEQ ID NO: 10733 - DNA, 40 bp, Homo sapiens
tcacgccactgcactccagcctgggcgacagagccactcc

SEQ ID NO: 10734 - DNA, 40 bp, Homo sapiens
gagtggctctgtcgcccaggctggagtgcagtggcgtgat

SEQ ID NO: 10735 - DNA, 40 bp, Homo sapiens
atcacgccactgcactccagcctgggcgacagagccactc

SEQ ID NO: 10736 - DNA, 40 bp, Homo sapiens
agtggctctgtcgcccaggctggagtgcagtggcgtgatc

SEQ ID NO: 10737 - DNA, 40 bp, Homo sapiens
gatcacgccactgcactccagcctgggcgacagagccact

SEQ ID NO: 10738 - DNA, 40 bp, Homo sapiens
gtggctctgtcgcccaggctggagtgcagtggcgtgatct

SEQ ID NO: 10739 - DNA, 40 bp, Homo sapiens
agatcacgccactgcactccagcctgggcgacagagccac

SEQ ID NO: 10740 - DNA, 40 bp, Homo sapiens
tggctctgtcgcccaggctggagtgcagtggcgtgatctc

SEQ ID NO: 10741 - DNA, 40 bp, Homo sapiens
gagatcacgccactgcactccagcctgggcgacagagcca

SEQ ID NO: 10742 - DNA, 40 bp, Homo sapiens
ggctctgtcgcccaggctggagtgcagtggcgtgatctcg

SEQ ID NO: 10743 - DNA, 40 bp, Homo sapiens
cgagatcacgccactgcactccagcctgggcgacagagcc

SEQ ID NO: 10744 - DNA, 40 bp, Homo sapiens
gctctgtcgcccaggctggagtgcagtggcgtgatctcgg

SEQ ID NO: 10745 - DNA, 40 bp, Homo sapiens
ccgagatcacgccactgcactccagcctgggcgacagagc

SEQ ID NO: 10746 - DNA, 40 bp, Homo sapiens
ctctgtcgcccaggctggagtgcagtggcgtgatctcggc

SEQ ID NO: 10747 - DNA, 40 bp, Homo sapiens
gccgagatcacgccactgcactccagcctgggcgacagag

SEQ ID NO: 10748 - DNA, 40 bp, Homo sapiens
tctgtcgcccaggctggagtgcagtggcgtgatctcggct

SEQ ID NO: 10749 - DNA, 40 bp, Homo sapiens
agccgagatcacgccactgcactccagcctgggcgacaga

SEQ ID NO: 10750 - DNA, 40 bp, Homo sapiens
ctgtcgcccaggctggagtgcagtggcgtgatctcggctc

SEQ ID NO: 10751 - DNA, 40 bp, Homo sapiens
gagccgagatcacgccactgcactccagcctgggcgacag

SEQ ID NO: 10752 - DNA, 40 bp, Homo sapiens
tgtcgcccaggctggagtgcagtggcgtgatctcggctca

SEQ ID NO: 10753 - DNA, 40 bp, Homo sapiens
tgagccgagatcacgccactgcactccagcctgggcgaca

SEQ ID NO: 10754 - DNA, 40 bp, Homo sapiens
gtcgcccaggctggagtgcagtggcgtgatctcggctcac

SEQ ID NO: 10755 - DNA, 40 bp, Homo sapiens
gtgagccgagatcacgccactgcactccagcctgggcgac

SEQ ID NO: 10756 - DNA, 40 bp, Homo sapiens
tcgcccaggctggagtgcagtggcgtgatctcggctcact

SEQ ID NO: 10757 - DNA, 40 bp, Homo sapiens
agtgagccgagatcacgccactgcactccagcctgggcga

SEQ ID NO: 10758 - DNA, 40 bp, Homo sapiens
cgcccaggctggagtgcagtggcgtgatctcggctcactg

SEQ ID NO: 10759 - DNA, 40 bp, Homo sapiens
cagtgagccgagatcacgccactgcactccagcctgggcg

SEQ ID NO: 10760 - DNA, 40 bp, Homo sapiens
gcccaggctggagtgcagtggcgtgatctcggctcactgc

SEQ ID NO: 10761 - DNA, 40 bp, Homo sapiens
gcagtgagccgagatcacgccactgcactccagcctgggc

SEQ ID NO: 10762 - DNA, 40 bp, Homo sapiens
cccaggctggagtgcagtggcgtgatctcggctcactgca

SEQ ID NO: 10763 - DNA, 40 bp, Homo sapiens
tgcagtgagccgagatcacgccactgcactccagcctggg

SEQ ID NO: 10764 - DNA, 40 bp, Homo sapiens
ccaggctggagtgcagtggcgtgatctcggctcactgcaa

SEQ ID NO: 10765 - DNA, 40 bp, Homo sapiens
ttgcagtgagccgagatcacgccactgcactccagcctgg

SEQ ID NO: 10766 - DNA, 40 bp, Homo sapiens
caggctggagtgcagtggcgtgatctcggctcactgcaag

SEQ ID NO: 10767 - DNA, 40 bp, Homo sapiens
cttgcagtgagccgagatcacgccactgcactccagcctg

SEQ ID NO: 10768 - DNA, 40 bp, Homo sapiens
aggctggagtgcagtggcgtgatctcggctcactgcaagc

SEQ ID NO: 10769 - DNA, 40 bp, Homo sapiens
gcttgcagtgagccgagatcacgccactgcactccagcct

SEQ ID NO: 10770 - DNA, 40 bp, Homo sapiens
ggctggagtgcagtggcgtgatctcggctcactgcaagct

SEQ ID NO: 10771 - DNA, 40 bp, Homo sapiens
agcttgcagtgagccgagatcacgccactgcactccagcc

SEQ ID NO: 10772 - DNA, 40 bp, Homo sapiens
gctggagtgcagtggcgtgatctcggctcactgcaagctc

SEQ ID NO: 10773 - DNA, 40 bp, Homo sapiens
gagcttgcagtgagccgagatcacgccactgcactccagc

SEQ ID NO: 10774 - DNA, 40 bp, Homo sapiens
ctggagtgcagtggcgtgatctcggctcactgcaagctcc

SEQ ID NO: 10775 - DNA, 40 bp, Homo sapiens
ggagcttgcagtgagccgagatcacgccactgcactccag

SEQ ID NO: 10776 - DNA, 40 bp, Homo sapiens
tggagtgcagtggcgtgatctcggctcactgcaagctccg

SEQ ID NO: 10777 - DNA, 40 bp, Homo sapiens
cggagcttgcagtgagccgagatcacgccactgcactcca

SEQ ID NO: 10778 - DNA, 40 bp, Homo sapiens
ggagtgcagtggcgtgatctcggctcactgcaagctccgc

SEQ ID NO: 10779 - DNA, 40 bp, Homo sapiens
gcggagcttgcagtgagccgagatcacgccactgcactcc

SEQ ID NO: 10780 - DNA, 40 bp, Homo sapiens
gagtgcagtggcgtgatctcggctcactgcaagctccgcc

SEQ ID NO: 10781 - DNA, 40 bp, Homo sapiens
ggcggagcttgcagtgagccgagatcacgccactgcactc

SEQ ID NO: 10782 - DNA, 40 bp, Homo sapiens
agtgcagtggcgtgatctcggctcactgcaagctccgcct

SEQ ID NO: 10783 - DNA, 40 bp, Homo sapiens
aggcggagcttgcagtgagccgagatcacgccactgcact

SEQ ID NO: 10784 - DNA, 40 bp, Homo sapiens
gtgcagtggcgtgatctcggctcactgcaagctccgcctc

SEQ ID NO: 10785 - DNA, 40 bp, Homo sapiens
gaggcggagcttgcagtgagccgagatcacgccactgcac

SEQ ID NO: 10786 - DNA, 40 bp, Homo sapiens
tgcagtggcgtgatctcggctcactgcaagctccgcctcc

SEQ ID NO: 10787 - DNA, 40 bp, Homo sapiens
ggaggcggagcttgcagtgagccgagatcacgccactgca

SEQ ID NO: 10788 - DNA, 40 bp, Homo sapiens
gcagtggcgtgatctcggctcactgcaagctccgcctcct

SEQ ID NO: 10789 - DNA, 40 bp, Homo sapiens
aggaggcggagcttgcagtgagccgagatcacgccactgc

SEQ ID NO: 10790 - DNA, 40 bp, Homo sapiens
cagtggcgtgatctcggctcactgcaagctccgcctcctg

SEQ ID NO: 10791 - DNA, 40 bp, Homo sapiens
caggaggcggagcttgcagtgagccgagatcacgccactg

SEQ ID NO: 10792 - DNA, 40 bp, Homo sapiens
agtggcgtgatctcggctcactgcaagctccgcctcctgg

SEQ ID NO: 10793 - DNA, 40 bp, Homo sapiens
ccaggaggcggagcttgcagtgagccgagatcacgccact

SEQ ID NO: 10794 - DNA, 40 bp, Homo sapiens
gtggcgtgatctcggctcactgcaagctccgcctcctggg

SEQ ID NO: 10795 - DNA, 40 bp, Homo sapiens
cccaggaggcggagcttgcagtgagccgagatcacgccac

SEQ ID NO: 10796 - DNA, 40 bp, Homo sapiens
tggcgtgatctcggctcactgcaagctccgcctcctgggt

SEQ ID NO: 10797 - DNA, 40 bp, Homo sapiens
acccaggaggcggagcttgcagtgagccgagatcacgcca

SEQ ID NO: 10798 - DNA, 40 bp, Homo sapiens
ggcgtgatctcggctcactgcaagctccgcctcctgggtt

SEQ ID NO: 10799 - DNA, 40 bp, Homo sapiens
aacccaggaggcggagcttgcagtgagccgagatcacgcc

SEQ ID NO: 10800 - DNA, 40 bp, Homo sapiens
gcgtgatctcggctcactgcaagctccgcctcctgggttc

SEQ ID NO: 10801 - DNA, 40 bp, Homo sapiens
gaacccaggaggcggagcttgcagtgagccgagatcacgc

SEQ ID NO: 10802 - DNA, 40 bp, Homo sapiens
cgtgatctcggctcactgcaagctccgcctcctgggttca

SEQ ID NO: 10803 - DNA, 40 bp, Homo sapiens
tgaacccaggaggcggagcttgcagtgagccgagatcacg

SEQ ID NO: 10804 - DNA, 40 bp, Homo sapiens
gtgatctcggctcactgcaagctccgcctcctgggttcac

SEQ ID NO: 10805 - DNA, 40 bp, Homo sapiens
gtgaacccaggaggcggagcttgcagtgagccgagatcac

SEQ ID NO: 10806 - DNA, 40 bp, Homo sapiens
tgatctcggctcactgcaagctccgcctcctgggttcacg

SEQ ID NO: 10807 - DNA, 40 bp, Homo sapiens
cgtgaacccaggaggcggagcttgcagtgagccgagatca

SEQ ID NO: 10808 - DNA, 40 bp, Homo sapiens
gatctcggctcactgcaagctccgcctcctgggttcacgc

SEQ ID NO: 10809 - DNA, 40 bp, Homo sapiens
gcgtgaacccaggaggcggagcttgcagtgagccgagatc

SEQ ID NO: 10810 - DNA, 40 bp, Homo sapiens
atctcggctcactgcaagctccgcctcctgggttcacgcc

SEQ ID NO: 10811 - DNA, 40 bp, Homo sapiens
ggcgtgaacccaggaggcggagcttgcagtgagccgagat

SEQ ID NO: 10812 - DNA, 40 bp, Homo sapiens
tctcggctcactgcaagctccgcctcctgggttcacgcca

SEQ ID NO: 10813 - DNA, 40 bp, Homo sapiens
tggcgtgaacccaggaggcggagcttgcagtgagccgaga

SEQ ID NO: 10814 - DNA, 40 bp, Homo sapiens
ctcggctcactgcaagctccgcctcctgggttcacgccat

SEQ ID NO: 10815 - DNA, 40 bp, Homo sapiens
atggcgtgaacccaggaggcggagcttgcagtgagccgag

SEQ ID NO: 10816 - DNA, 40 bp, Homo sapiens
tcggctcactgcaagctccgcctcctgggttcacgccatt

SEQ ID NO: 10817 - DNA, 40 bp, Homo sapiens
aatggcgtgaacccaggaggcggagcttgcagtgagccga

SEQ ID NO: 10818 - DNA, 40 bp, Homo sapiens
cggctcactgcaagctccgcctcctgggttcacgccattc

SEQ ID NO: 10819 - DNA, 40 bp, Homo sapiens
gaatggcgtgaacccaggaggcggagcttgcagtgagccg

SEQ ID NO: 10820 - DNA, 40 bp, Homo sapiens
ggctcactgcaagctccgcctcctgggttcacgccattct

SEQ ID NO: 10821 - DNA, 40 bp, Homo sapiens
agaatggcgtgaacccaggaggcggagcttgcagtgagcc

SEQ ID NO: 10822 - DNA, 40 bp, Homo sapiens
gctcactgcaagctccgcctcctgggttcacgccattctt

SEQ ID NO: 10823 - DNA, 40 bp, Homo sapiens
aagaatggcgtgaacccaggaggcggagcttgcagtgagc

SEQ ID NO: 10824 - DNA, 40 bp, Homo sapiens
ctcactgcaagctccgcctcctgggttcacgccattcttc

SEQ ID NO: 10825 - DNA, 40 bp, Homo sapiens
gaagaatggcgtgaacccaggaggcggagcttgcagtgag

SEQ ID NO: 10826 - DNA, 40 bp, Homo sapiens
tcactgcaagctccgcctcctgggttcacgccattcttct

SEQ ID NO: 10827 - DNA, 40 bp, Homo sapiens
agaagaatggcgtgaacccaggaggcggagcttgcagtga

SEQ ID NO: 10828 - DNA, 40 bp, Homo sapiens
cactgcaagctccgcctcctgggttcacgccattcttctg

SEQ ID NO: 10829 - DNA, 40 bp, Homo sapiens
cagaagaatggcgtgaacccaggaggcggagcttgcagtg

SEQ ID NO: 10830 - DNA, 40 bp, Homo sapiens
actgcaagctccgcctcctgggttcacgccattcttctgc

SEQ ID NO: 10831 - DNA, 40 bp, Homo sapiens
gcagaagaatggcgtgaacccaggaggcggagcttgcagt

SEQ ID NO: 10832 - DNA, 40 bp, Homo sapiens
ctgcaagctccgcctcctgggttcacgccattcttctgcc

SEQ ID NO: 10833 - DNA, 40 bp, Homo sapiens
ggcagaagaatggcgtgaacccaggaggcggagcttgcag

SEQ ID NO: 10834 - DNA, 40 bp, Homo sapiens
tgcaagctccgcctcctgggttcacgccattcttctgcct

SEQ ID NO: 10835 - DNA, 40 bp, Homo sapiens
aggcagaagaatggcgtgaacccaggaggcggagcttgca

SEQ ID NO: 10836 - DNA, 40 bp, Homo sapiens
gcaagctccgcctcctgggttcacgccattcttctgcctc

SEQ ID NO: 10837 - DNA, 40 bp, Homo sapiens
gaggcagaagaatggcgtgaacccaggaggcggagcttgc

SEQ ID NO: 10838 - DNA, 40 bp, Homo sapiens
caagctccgcctcctgggttcacgccattcttctgcctca

SEQ ID NO: 10839 - DNA, 40 bp, Homo sapiens
tgaggcagaagaatggcgtgaacccaggaggcggagcttg

SEQ ID NO: 10840 - DNA, 40 bp, Homo sapiens
aagctccgcctcctgggttcacgccattcttctgcctcag

SEQ ID NO: 10841 - DNA, 40 bp, Homo sapiens
ctgaggcagaagaatggcgtgaacccaggaggcggagctt

SEQ ID NO: 10842 - DNA, 40 bp, Homo sapiens
agctccgcctcctgggttcacgccattcttctgcctcagc

SEQ ID NO: 10843 - DNA, 40 bp, Homo sapiens
gctgaggcagaagaatggcgtgaacccaggaggcggagct

SEQ ID NO: 10844 - DNA, 40 bp, Homo sapiens
gctccgcctcctgggttcacgccattcttctgcctcagcc

SEQ ID NO: 10845 - DNA, 40 bp, Homo sapiens
ggctgaggcagaagaatggcgtgaacccaggaggcggagc

SEQ ID NO: 10846 - DNA, 40 bp, Homo sapiens
ctccgcctcctgggttcacgccattcttctgcctcagcct

SEQ ID NO: 10847 - DNA, 40 bp, Homo sapiens
aggctgaggcagaagaatggcgtgaacccaggaggcggag

SEQ ID NO: 10848 - DNA, 40 bp, Homo sapiens
tccgcctcctgggttcacgccattcttctgcctcagcctc

SEQ ID NO: 10849 - DNA, 40 bp, Homo sapiens
gaggctgaggcagaagaatggcgtgaacccaggaggcgga

SEQ ID NO: 10850 - DNA, 40 bp, Homo sapiens
ccgcctcctgggttcacgccattcttctgcctcagcctcc

SEQ ID NO: 10851 - DNA, 40 bp, Homo sapiens
ggaggctgaggcagaagaatggcgtgaacccaggaggcgg

SEQ ID NO: 10852 - DNA, 40 bp, Homo sapiens
cgcctcctgggttcacgccattcttctgcctcagcctccc

SEQ ID NO: 10853 - DNA, 40 bp, Homo sapiens
gggaggctgaggcagaagaatggcgtgaacccaggaggcg

SEQ ID NO: 10854 - DNA, 40 bp, Homo sapiens
gcctcctgggttcacgccattcttctgcctcagcctccca

SEQ ID NO: 10855 - DNA, 40 bp, Homo sapiens
tgggaggctgaggcagaagaatggcgtgaacccaggaggc

SEQ ID NO: 10856 - DNA, 40 bp, Homo sapiens
cctcctgggttcacgccattcttctgcctcagcctcccaa

SEQ ID NO: 10857 - DNA, 40 bp, Homo sapiens
ttgggaggctgaggcagaagaatggcgtgaacccaggagg

SEQ ID NO: 10858 - DNA, 40 bp, Homo sapiens
ctcctgggttcacgccattcttctgcctcagcctcccaag

SEQ ID NO: 10859 - DNA, 40 bp, Homo sapiens
cttgggaggctgaggcagaagaatggcgtgaacccaggag

SEQ ID NO: 10860 - DNA, 40 bp, Homo sapiens
tcctgggttcacgccattcttctgcctcagcctcccaagt

SEQ ID NO: 10861 - DNA, 40 bp, Homo sapiens
acttgggaggctgaggcagaagaatggcgtgaacccagga

SEQ ID NO: 10862 - DNA, 40 bp, Homo sapiens
cctgggttcacgccattcttctgcctcagcctcccaagta

SEQ ID NO: 10863 - DNA, 40 bp, Homo sapiens
tacttgggaggctgaggcagaagaatggcgtgaacccagg

SEQ ID NO: 10864 - DNA, 40 bp, Homo sapiens
ctgggttcacgccattcttctgcctcagcctcccaagtag

SEQ ID NO: 10865 - DNA, 40 bp, Homo sapiens
ctacttgggaggctgaggcagaagaatggcgtgaacccag

SEQ ID NO: 10866 - DNA, 40 bp, Homo sapiens
tgggttcacgccattcttctgcctcagcctcccaagtagc

SEQ ID NO: 10867 - DNA, 40 bp, Homo sapiens
gctacttgggaggctgaggcagaagaatggcgtgaaccca

SEQ ID NO: 10868 - DNA, 40 bp, Homo sapiens
gggttcacgccattcttctgcctcagcctcccaagtagct

SEQ ID NO: 10869 - DNA, 40 bp, Homo sapiens
agctacttgggaggctgaggcagaagaatggcgtgaaccc

SEQ ID NO: 10870 - DNA, 40 bp, Homo sapiens
ggttcacgccattcttctgcctcagcctcccaagtagctg

SEQ ID NO: 10871 - DNA, 40 bp, Homo sapiens
cagctacttgggaggctgaggcagaagaatggcgtgaacc

SEQ ID NO: 10872 - DNA, 40 bp, Homo sapiens
gttcacgccattcttctgcctcagcctcccaagtagctgg

SEQ ID NO: 10873 - DNA, 40 bp, Homo sapiens
ccagctacttgggaggctgaggcagaagaatggcgtgaac

SEQ ID NO: 10874 - DNA, 40 bp, Homo sapiens
ttcacgccattcttctgcctcagcctcccaagtagctggg

SEQ ID NO: 10875 - DNA, 40 bp, Homo sapiens
cccagctacttgggaggctgaggcagaagaatggcgtgaa

SEQ ID NO: 10876 - DNA, 40 bp, Homo sapiens
tcacgccattcttctgcctcagcctcccaagtagctggga

SEQ ID NO: 10877 - DNA, 40 bp, Homo sapiens
tcccagctacttgggaggctgaggcagaagaatggcgtga

SEQ ID NO: 10878 - DNA, 40 bp, Homo sapiens
cacgccattcttctgcctcagcctcccaagtagctgggac

SEQ ID NO: 10879 - DNA, 40 bp, Homo sapiens
gtcccagctacttgggaggctgaggcagaagaatggcgtg

SEQ ID NO: 10880 - DNA, 40 bp, Homo sapiens
acgccattcttctgcctcagcctcccaagtagctgggact

SEQ ID NO: 10881 - DNA, 40 bp, Homo sapiens
agtcccagctacttgggaggctgaggcagaagaatggcgt

SEQ ID NO: 10882 - DNA, 40 bp, Homo sapiens
cgccattcttctgcctcagcctcccaagtagctgggacta

SEQ ID NO: 10883 - DNA, 40 bp, Homo sapiens
tagtcccagctacttgggaggctgaggcagaagaatggcg

SEQ ID NO: 10884 - DNA, 40 bp, Homo sapiens
gccattcttctgcctcagcctcccaagtagctgggactac

SEQ ID NO: 10885 - DNA, 40 bp, Homo sapiens
gtagtcccagctacttgggaggctgaggcagaagaatggc

SEQ ID NO: 10886 - DNA, 40 bp, Homo sapiens
ccattcttctgcctcagcctcccaagtagctgggactaca

SEQ ID NO: 10887 - DNA, 40 bp, Homo sapiens
tgtagtcccagctacttgggaggctgaggcagaagaatgg

SEQ ID NO: 10888 - DNA, 40 bp, Homo sapiens
cattcttctgcctcagcctcccaagtagctgggactacag

SEQ ID NO: 10889 - DNA, 40 bp, Homo sapiens
ctgtagtcccagctacttgggaggctgaggcagaagaatg

SEQ ID NO: 10890 - DNA, 40 bp, Homo sapiens
attcttctgcctcagcctcccaagtagctgggactacagg

SEQ ID NO: 10891 - DNA, 40 bp, Homo sapiens
cctgtagtcccagctacttgggaggctgaggcagaagaat

SEQ ID NO: 10892 - DNA, 40 bp, Homo sapiens
ttcttctgcctcagcctcccaagtagctgggactacaggc

SEQ ID NO: 10893 - DNA, 40 bp, Homo sapiens
gcctgtagtcccagctacttgggaggctgaggcagaagaa

SEQ ID NO: 10894 - DNA, 40 bp, Homo sapiens
tcttctgcctcagcctcccaagtagctgggactacaggcg

SEQ ID NO: 10895 - DNA, 40 bp, Homo sapiens
cgcctgtagtcccagctacttgggaggctgaggcagaaga

SEQ ID NO: 10896 - DNA, 40 bp, Homo sapiens
cttctgcctcagcctcccaagtagctgggactacaggcgc

SEQ ID NO: 10897 - DNA, 40 bp, Homo sapiens
gcgcctgtagtcccagctacttgggaggctgaggcagaag

SEQ ID NO: 10898 - DNA, 40 bp, Homo sapiens
ttctgcctcagcctcccaagtagctgggactacaggcgcc

SEQ ID NO: 10899 - DNA, 40 bp, Homo sapiens
ggcgcctgtagtcccagctacttgggaggctgaggcagaa

SEQ ID NO: 10900 - DNA, 40 bp, Homo sapiens
tctgcctcagcctcccaagtagctgggactacaggcgccc

SEQ ID NO: 10901 - DNA, 40 bp, Homo sapiens
gggcgcctgtagtcccagctacttgggaggctgaggcaga

SEQ ID NO: 10902 - DNA, 40 bp, Homo sapiens
ctgcctcagcctcccaagtagctgggactacaggcgcccg

SEQ ID NO: 10903 - DNA, 40 bp, Homo sapiens
cgggcgcctgtagtcccagctacttgggaggctgaggcag

SEQ ID NO: 10904 - DNA, 40 bp, Homo sapiens
tgcctcagcctcccaagtagctgggactacaggcgcccgc

SEQ ID NO: 10905 - DNA, 40 bp, Homo sapiens
gcgggcgcctgtagtcccagctacttgggaggctgaggca

SEQ ID NO: 10906 - DNA, 40 bp, Homo sapiens
gcctcagcctcccaagtagctgggactacaggcgcccgcc

SEQ ID NO: 10907 - DNA, 40 bp, Homo sapiens
ggcgggcgcctgtagtcccagctacttgggaggctgaggc

SEQ ID NO: 10908 - DNA, 40 bp, Homo sapiens
cctcagcctcccaagtagctgggactacaggcgcccgcca

SEQ ID NO: 10909 - DNA, 40 bp, Homo sapiens
tggcgggcgcctgtagtcccagctacttgggaggctgagg

SEQ ID NO: 10910 - DNA, 40 bp, Homo sapiens
ctcagcctcccaagtagctgggactacaggcgcccgccac

SEQ ID NO: 10911 - DNA, 40 bp, Homo sapiens
gtggcgggcgcctgtagtcccagctacttgggaggctgag

SEQ ID NO: 10912 - DNA, 40 bp, Homo sapiens
tcagcctcccaagtagctgggactacaggcgcccgccacc

SEQ ID NO: 10913 - DNA, 40 bp, Homo sapiens
ggtggcgggcgcctgtagtcccagctacttgggaggctga

SEQ ID NO: 10914 - DNA, 40 bp, Homo sapiens
cagcctcccaagtagctgggactacaggcgcccgccacca

SEQ ID NO: 10915 - DNA, 40 bp, Homo sapiens
tggtggcgggcgcctgtagtcccagctacttgggaggctg

SEQ ID NO: 10916 - DNA, 40 bp, Homo sapiens
agcctcccaagtagctgggactacaggcgcccgccaccac

SEQ ID NO: 10917 - DNA, 40 bp, Homo sapiens
gtggtggcgggcgcctgtagtcccagctacttgggaggct

SEQ ID NO: 10918 - DNA, 40 bp, Homo sapiens
gcctcccaagtagctgggactacaggcgcccgccaccacg

SEQ ID NO: 10919 - DNA, 40 bp, Homo sapiens
cgtggtggcgggcgcctgtagtcccagctacttgggaggc

SEQ ID NO: 10920 - DNA, 40 bp, Homo sapiens
cctcccaagtagctgggactacaggcgcccgccaccacgc

SEQ ID NO: 10921 - DNA, 40 bp, Homo sapiens
gcgtggtggcgggcgcctgtagtcccagctacttgggagg

SEQ ID NO: 10922 - DNA, 40 bp, Homo sapiens
ctcccaagtagctgggactacaggcgcccgccaccacgcc

SEQ ID NO: 10923 - DNA, 40 bp, Homo sapiens
ggcgtggtggcgggcgcctgtagtcccagctacttgggag

SEQ ID NO: 10924 - DNA, 40 bp, Homo sapiens
tcccaagtagctgggactacaggcgcccgccaccacgccc

SEQ ID NO: 10925 - DNA, 40 bp, Homo sapiens
gggcgtggtggcgggcgcctgtagtcccagctacttggga

SEQ ID NO: 10926 - DNA, 40 bp, Homo sapiens
cccaagtagctgggactacaggcgcccgccaccacgcccg

SEQ ID NO: 10927 - DNA, 40 bp, Homo sapiens
cgggcgtggtggcgggcgcctgtagtcccagctacttggg

SEQ ID NO: 10928 - DNA, 40 bp, Homo sapiens
ccaagtagctgggactacaggcgcccgccaccacgcccgg

SEQ ID NO: 10929 - DNA, 40 bp, Homo sapiens
ccgggcgtggtggcgggcgcctgtagtcccagctacttgg

SEQ ID NO: 10930 - DNA, 40 bp, Homo sapiens
caagtagctgggactacaggcgcccgccaccacgcccggc

SEQ ID NO: 10931 - DNA, 40 bp, Homo sapiens
gccgggcgtggtggcgggcgcctgtagtcccagctacttg

SEQ ID NO: 10932 - DNA, 40 bp, Homo sapiens
aagtagctgggactacaggcgcccgccaccacgcccggct

SEQ ID NO: 10933 - DNA, 40 bp, Homo sapiens
agccgggcgtggtggcgggcgcctgtagtcccagctactt

SEQ ID NO: 10934 - DNA, 40 bp, Homo sapiens
agtagctgggactacaggcgcccgccaccacgcccggcta

SEQ ID NO: 10935 - DNA, 40 bp, Homo sapiens
tagccgggcgtggtggcgggcgcctgtagtcccagctact

SEQ ID NO: 10936 - DNA, 40 bp, Homo sapiens
gtagctgggactacaggcgcccgccaccacgcccggctaa

SEQ ID NO: 10937 - DNA, 40 bp, Homo sapiens
ttagccgggcgtggtggcgggcgcctgtagtcccagctac

SEQ ID NO: 10938 - DNA, 40 bp, Homo sapiens
tagctgggactacaggcgcccgccaccacgcccggctaat

SEQ ID NO: 10939 - DNA, 40 bp, Homo sapiens
attagccgggcgtggtggcgggcgcctgtagtcccagcta

SEQ ID NO: 10940 - DNA, 40 bp, Homo sapiens
agctgggactacaggcgcccgccaccacgcccggctaatt

SEQ ID NO: 10941 - DNA, 40 bp, Homo sapiens
aattagccgggcgtggtggcgggcgcctgtagtcccagct

SEQ ID NO: 10942 - DNA, 40 bp, Homo sapiens
gctgggactacaggcgcccgccaccacgcccggctaattt

SEQ ID NO: 10943 - DNA, 40 bp, Homo sapiens
aaattagccgggcgtggtggcgggcgcctgtagtcccagc

SEQ ID NO: 10944 - DNA, 40 bp, Homo sapiens
ctgggactacaggcgcccgccaccacgcccggctaatttt

SEQ ID NO: 10945 - DNA, 40 bp, Homo sapiens
aaaattagccgggcgtggtggcgggcgcctgtagtcccag

SEQ ID NO: 10946 - DNA, 40 bp, Homo sapiens
tgggactacaggcgcccgccaccacgcccggctaattttt

SEQ ID NO: 10947 - DNA, 40 bp, Homo sapiens
aaaaattagccgggcgtggtggcgggcgcctgtagtccca

SEQ ID NO: 10948 - DNA, 40 bp, Homo sapiens
gggactacaggcgcccgccaccacgcccggctaatttttt

SEQ ID NO: 10949 - DNA, 40 bp, Homo sapiens
aaaaaattagccgggcgtggtggcgggcgcctgtagtccc

SEQ ID NO: 10950 - DNA, 40 bp, Homo sapiens
ggactacaggcgcccgccaccacgcccggctaattttttt

SEQ ID NO: 10951 - DNA, 40 bp, Homo sapiens
aaaaaaattagccgggcgtggtggcgggcgcctgtagtcc

SEQ ID NO: 10952 - DNA, 40 bp, Homo sapiens
gactacaggcgcccgccaccacgcccggctaattttttta

SEQ ID NO: 10953 - DNA, 40 bp, Homo sapiens
taaaaaaattagccgggcgtggtggcgggcgcctgtagtc

SEQ ID NO: 10954 - DNA, 40 bp, Homo sapiens
actacaggcgcccgccaccacgcccggctaatttttttat

SEQ ID NO: 10955 - DNA, 40 bp, Homo sapiens
ataaaaaaattagccgggcgtggtggcgggcgcctgtagt

SEQ ID NO: 10956 - DNA, 40 bp, Homo sapiens
ctacaggcgcccgccaccacgcccggctaatttttttata

SEQ ID NO: 10957 - DNA, 40 bp, Homo sapiens
tataaaaaaattagccgggcgtggtggcgggcgcctgtag

SEQ ID NO: 10958 - DNA, 40 bp, Homo sapiens
tacaggcgcccgccaccacgcccggctaatttttttatat

SEQ ID NO: 10959 - DNA, 40 bp, Homo sapiens
atataaaaaaattagccgggcgtggtggcgggcgcctgta

SEQ ID NO: 10960 - DNA, 40 bp, Homo sapiens
acaggcgcccgccaccacgcccggctaatttttttatatt

SEQ ID NO: 10961 - DNA, 40 bp, Homo sapiens
aatataaaaaaattagccgggcgtggtggcgggcgcctgt

SEQ ID NO: 10962 - DNA, 40 bp, Homo sapiens
caggcgcccgccaccacgcccggctaatttttttatattt

SEQ ID NO: 10963 - DNA, 40 bp, Homo sapiens
aaatataaaaaaattagccgggcgtggtggcgggcgcctg

SEQ ID NO: 10964 - DNA, 40 bp, Homo sapiens
aggcgcccgccaccacgcccggctaatttttttatatttt

SEQ ID NO: 10965 - DNA, 40 bp, Homo sapiens
aaaatataaaaaaattagccgggcgtggtggcgggcgcct

SEQ ID NO: 10966 - DNA, 40 bp, Homo sapiens
ggcgcccgccaccacgcccggctaatttttttatattttt

SEQ ID NO: 10967 - DNA, 40 bp, Homo sapiens
aaaaatataaaaaaattagccgggcgtggtggcgggcgcc

SEQ ID NO: 10968 - DNA, 40 bp, Homo sapiens
gcgcccgccaccacgcccggctaatttttttatattttta

SEQ ID NO: 10969 - DNA, 40 bp, Homo sapiens
taaaaatataaaaaaattagccgggcgtggtggcgggcgc

SEQ ID NO: 10970 - DNA, 40 bp, Homo sapiens
cgcccgccaccacgcccggctaatttttttatatttttag

SEQ ID NO: 10971 - DNA, 40 bp, Homo sapiens
ctaaaaatataaaaaaattagccgggcgtggtggcgggcg

SEQ ID NO: 10972 - DNA, 40 bp, Homo sapiens
gcccgccaccacgcccggctaatttttttatatttttagt

SEQ ID NO: 10973 - DNA, 40 bp, Homo sapiens
actaaaaatataaaaaaattagccgggcgtggtggcgggc

SEQ ID NO: 10974 - DNA, 40 bp, Homo sapiens
cccgccaccacgcccggctaatttttttatatttttagta

SEQ ID NO: 10975 - DNA, 40 bp, Homo sapiens
tactaaaaatataaaaaaattagccgggcgtggtggcggg

SEQ ID NO: 10976 - DNA, 40 bp, Homo sapiens
ccgccaccacgcccggctaatttttttatatttttagtag

SEQ ID NO: 10977 - DNA, 40 bp, Homo sapiens
ctactaaaaatataaaaaaattagccgggcgtggtggcgg

SEQ ID NO: 10978 - DNA, 40 bp, Homo sapiens
cgccaccacgcccggctaatttttttatatttttagtaga

SEQ ID NO: 10979 - DNA, 40 bp, Homo sapiens
tctactaaaaatataaaaaaattagccgggcgtggtggcg

SEQ ID NO: 10980 - DNA, 40 bp, Homo sapiens
gccaccacgcccggctaatttttttatatttttagtagag

SEQ ID NO: 10981 - DNA, 40 bp, Homo sapiens
ctctactaaaaatataaaaaaattagccgggcgtggtggc

SEQ ID NO: 10982 - DNA, 40 bp, Homo sapiens
ccaccacgcccggctaatttttttatatttttagtagaga

SEQ ID NO: 10983 - DNA, 40 bp, Homo sapiens
tctctactaaaaatataaaaaaattagccgggcgtggtgg

SEQ ID NO: 10984 - DNA, 40 bp, Homo sapiens
caccacgcccggctaatttttttatatttttagtagagac

SEQ ID NO: 10985 - DNA, 40 bp, Homo sapiens
gtctctactaaaaatataaaaaaattagccgggcgtggtg

SEQ ID NO: 10986 - DNA, 40 bp, Homo sapiens
accacgcccggctaatttttttatatttttagtagagacg

SEQ ID NO: 10987 - DNA, 40 bp, Homo sapiens
cgtctctactaaaaatataaaaaaattagccgggcgtggt

SEQ ID NO: 10988 - DNA, 40 bp, Homo sapiens
ccacgcccggctaatttttttatatttttagtagagacgg

SEQ ID NO: 10989 - DNA, 40 bp, Homo sapiens
ccgtctctactaaaaatataaaaaaattagccgggcgtgg

SEQ ID NO: 10990 - DNA, 40 bp, Homo sapiens
cacgcccggctaatttttttatatttttagtagagacggg

SEQ ID NO: 10991 - DNA, 40 bp, Homo sapiens
cccgtctctactaaaaatataaaaaaattagccgggcgtg

SEQ ID NO: 10992 - DNA, 40 bp, Homo sapiens
acgcccggctaatttttttatatttttagtagagacgggg

SEQ ID NO: 10993 - DNA, 40 bp, Homo sapiens
ccccgtctctactaaaaatataaaaaaattagccgggcgt

SEQ ID NO: 10994 - DNA, 40 bp, Homo sapiens
cgcccggctaatttttttatatttttagtagagacggggt

SEQ ID NO: 10995 - DNA, 40 bp, Homo sapiens
accccgtctctactaaaaatataaaaaaattagccgggcg

SEQ ID NO: 10996 - DNA, 40 bp, Homo sapiens
gcccggctaatttttttatatttttagtagagacggggtt

SEQ ID NO: 10997 - DNA, 40 bp, Homo sapiens
aaccccgtctctactaaaaatataaaaaaattagccgggc

SEQ ID NO: 10998 - DNA, 40 bp, Homo sapiens
cccggctaatttttttatatttttagtagagacggggttt

SEQ ID NO: 10999 - DNA, 40 bp, Homo sapiens
aaaccccgtctctactaaaaatataaaaaaattagccggg

SEQ ID NO: 11000 - DNA, 40 bp, Homo sapiens
ccggctaatttttttatatttttagtagagacggggtttc

SEQ ID NO: 11001 - DNA, 40 bp, Homo sapiens
gaaaccccgtctctactaaaaatataaaaaaattagccgg

SEQ ID NO: 11002 - DNA, 40 bp, Homo sapiens
cggctaatttttttatatttttagtagagacggggtttca

SEQ ID NO: 11003 - DNA, 40 bp, Homo sapiens
tgaaaccccgtctctactaaaaatataaaaaaattagccg

SEQ ID NO: 11004 - DNA, 40 bp, Homo sapiens
ggctaatttttttatatttttagtagagacggggtttcac

SEQ ID NO: 11005 - DNA, 40 bp, Homo sapiens
gtgaaaccccgtctctactaaaaatataaaaaaattagcc

SEQ ID NO: 11006 - DNA, 40 bp, Homo sapiens
gctaatttttttatatttttagtagagacggggtttcacc

SEQ ID NO: 11007 - DNA, 40 bp, Homo sapiens
ggtgaaaccccgtctctactaaaaatataaaaaaattagc

SEQ ID NO: 11008 - DNA, 40 bp, Homo sapiens
ctaatttttttatatttttagtagagacggggtttcaccg

SEQ ID NO: 11009 - DNA, 40 bp, Homo sapiens
cggtgaaaccccgtctctactaaaaatataaaaaaattag

SEQ ID NO: 11010 - DNA, 40 bp, Homo sapiens
taatttttttatatttttagtagagacggggtttcaccgg

SEQ ID NO: 11011 - DNA, 40 bp, Homo sapiens
ccggtgaaaccccgtctctactaaaaatataaaaaaatta

SEQ ID NO: 11012 - DNA, 40 bp, Homo sapiens
aatttttttatatttttagtagagacggggtttcaccggg

SEQ ID NO: 11013 - DNA, 40 bp, Homo sapiens
cccggtgaaaccccgtctctactaaaaatataaaaaaatt

SEQ ID NO: 11014 - DNA, 40 bp, Homo sapiens
atttttttatatttttagtagagacggggtttcaccgggt

SEQ ID NO: 11015 - DNA, 40 bp, Homo sapiens
acccggtgaaaccccgtctctactaaaaatataaaaaaat

SEQ ID NO: 11016 - DNA, 40 bp, Homo sapiens
tttttttatatttttagtagagacggggtttcaccgggtt

SEQ ID NO: 11017 - DNA, 40 bp, Homo sapiens
aacccggtgaaaccccgtctctactaaaaatataaaaaaa

SEQ ID NO: 11018 - DNA, 40 bp, Homo sapiens
ttttttatatttttagtagagacggggtttcaccgggtta

SEQ ID NO: 11019 - DNA, 40 bp, Homo sapiens
taacccggtgaaaccccgtctctactaaaaatataaaaaa

SEQ ID NO: 11020 - DNA, 40 bp, Homo sapiens
tttttatatttttagtagagacggggtttcaccgggttag

SEQ ID NO: 11021 - DNA, 40 bp, Homo sapiens
ctaacccggtgaaaccccgtctctactaaaaatataaaaa

SEQ ID NO: 11022 - DNA, 40 bp, Homo sapiens
ttttatatttttagtagagacggggtttcaccgggttagc

SEQ ID NO: 11023 - DNA, 40 bp, Homo sapiens
gctaacccggtgaaaccccgtctctactaaaaatataaaa

SEQ ID NO: 11024 - DNA, 40 bp, Homo sapiens
tttatatttttagtagagacggggtttcaccgggttagcc

SEQ ID NO: 11025 - DNA, 40 bp, Homo sapiens
ggctaacccggtgaaaccccgtctctactaaaaatataaa

SEQ ID NO: 11026 - DNA, 40 bp, Homo sapiens
ttatatttttagtagagacggggtttcaccgggttagcca

SEQ ID NO: 11027 - DNA, 40 bp, Homo sapiens
tggctaacccggtgaaaccccgtctctactaaaaatataa

SEQ ID NO: 11028 - DNA, 40 bp, Homo sapiens
tatatttttagtagagacggggtttcaccgggttagccag

SEQ ID NO: 11029 - DNA, 40 bp, Homo sapiens
ctggctaacccggtgaaaccccgtctctactaaaaatata

SEQ ID NO: 11030 - DNA, 40 bp, Homo sapiens
atatttttagtagagacggggtttcaccgggttagccagg

SEQ ID NO: 11031 - DNA, 40 bp, Homo sapiens
cctggctaacccggtgaaaccccgtctctactaaaaatat

SEQ ID NO: 11032 - DNA, 40 bp, Homo sapiens
tatttttagtagagacggggtttcaccgggttagccagga

SEQ ID NO: 11033 - DNA, 40 bp, Homo sapiens
tcctggctaacccggtgaaaccccgtctctactaaaaata

SEQ ID NO: 11034 - DNA, 40 bp, Homo sapiens
atttttagtagagacggggtttcaccgggttagccaggat

SEQ ID NO: 11035 - DNA, 40 bp, Homo sapiens
atcctggctaacccggtgaaaccccgtctctactaaaaat

SEQ ID NO: 11036 - DNA, 40 bp, Homo sapiens
tttttagtagagacggggtttcaccgggttagccaggatg

SEQ ID NO: 11037 - DNA, 40 bp, Homo sapiens
catcctggctaacccggtgaaaccccgtctctactaaaaa

SEQ ID NO: 11038 - DNA, 40 bp, Homo sapiens
ttttagtagagacggggtttcaccgggttagccaggatgg

SEQ ID NO: 11039 - DNA, 40 bp, Homo sapiens
ccatcctggctaacccggtgaaaccccgtctctactaaaa

SEQ ID NO: 11040 - DNA, 40 bp, Homo sapiens
tttagtagagacggggtttcaccgggttagccaggatggt

SEQ ID NO: 11041 - DNA, 40 bp, Homo sapiens
accatcctggctaacccggtgaaaccccgtctctactaaa

SEQ ID NO: 11042 - DNA, 40 bp, Homo sapiens
ttagtagagacggggtttcaccgggttagccaggatggtc

SEQ ID NO: 11043 - DNA, 40 bp, Homo sapiens
gaccatcctggctaacccggtgaaaccccgtctctactaa

SEQ ID NO: 11044 - DNA, 40 bp, Homo sapiens
tagtagagacggggtttcaccgggttagccaggatggtct

SEQ ID NO: 11045 - DNA, 40 bp, Homo sapiens
agaccatcctggctaacccggtgaaaccccgtctctacta

SEQ ID NO: 11046 - DNA, 40 bp, Homo sapiens
agtagagacggggtttcaccgggttagccaggatggtctt

SEQ ID NO: 11047 - DNA, 40 bp, Homo sapiens
aagaccatcctggctaacccggtgaaaccccgtctctact

SEQ ID NO: 11048 - DNA, 40 bp, Homo sapiens
gtagagacggggtttcaccgggttagccaggatggtcttg

SEQ ID NO: 11049 - DNA, 40 bp, Homo sapiens
caagaccatcctggctaacccggtgaaaccccgtctctac

SEQ ID NO: 11050 - DNA, 40 bp, Homo sapiens
tagagacggggtttcaccgggttagccaggatggtcttga

SEQ ID NO: 11051 - DNA, 40 bp, Homo sapiens
tcaagaccatcctggctaacccggtgaaaccccgtctcta

SEQ ID NO: 11052 - DNA, 40 bp, Homo sapiens
agagacggggtttcaccgggttagccaggatggtcttgat

SEQ ID NO: 11053 - DNA, 40 bp, Homo sapiens
atcaagaccatcctggctaacccggtgaaaccccgtctct

SEQ ID NO: 11054 - DNA, 40 bp, Homo sapiens
gagacggggtttcaccgggttagccaggatggtcttgatc

SEQ ID NO: 11055 - DNA, 40 bp, Homo sapiens
gatcaagaccatcctggctaacccggtgaaaccccgtctc

SEQ ID NO: 11056 - DNA, 40 bp, Homo sapiens
agacggggtttcaccgggttagccaggatggtcttgatct

SEQ ID NO: 11057 - DNA, 40 bp, Homo sapiens
agatcaagaccatcctggctaacccggtgaaaccccgtct

SEQ ID NO: 11058 - DNA, 40 bp, Homo sapiens
gacggggtttcaccgggttagccaggatggtcttgatctc

SEQ ID NO: 11059 - DNA, 40 bp, Homo sapiens
gagatcaagaccatcctggctaacccggtgaaaccccgtc

SEQ ID NO: 11060 - DNA, 40 bp, Homo sapiens
acggggtttcaccgggttagccaggatggtcttgatctcc

SEQ ID NO: 11061 - DNA, 40 bp, Homo sapiens
ggagatcaagaccatcctggctaacccggtgaaaccccgt

SEQ ID NO: 11062 - DNA, 40 bp, Homo sapiens
cggggtttcaccgggttagccaggatggtcttgatctcct

SEQ ID NO: 11063 - DNA, 40 bp, Homo sapiens
aggagatcaagaccatcctggctaacccggtgaaaccccg

SEQ ID NO: 11064 - DNA, 40 bp, Homo sapiens
ggggtttcaccgggttagccaggatggtcttgatctcctg

SEQ ID NO: 11065 - DNA, 40 bp, Homo sapiens
caggagatcaagaccatcctggctaacccggtgaaacccc

SEQ ID NO: 11066 - DNA, 40 bp, Homo sapiens
gggtttcaccgggttagccaggatggtcttgatctcctga

SEQ ID NO: 11067 - DNA, 40 bp, Homo sapiens
tcaggagatcaagaccatcctggctaacccggtgaaaccc

SEQ ID NO: 11068 - DNA, 40 bp, Homo sapiens
ggtttcaccgggttagccaggatggtcttgatctcctgac

SEQ ID NO: 11069 - DNA, 40 bp, Homo sapiens
gtcaggagatcaagaccatcctggctaacccggtgaaacc

SEQ ID NO: 11070 - DNA, 40 bp, Homo sapiens
gtttcaccgggttagccaggatggtcttgatctcctgacc

SEQ ID NO: 11071 - DNA, 40 bp, Homo sapiens
ggtcaggagatcaagaccatcctggctaacccggtgaaac

SEQ ID NO: 11072 - DNA, 40 bp, Homo sapiens
tttcaccgggttagccaggatggtcttgatctcctgacct

SEQ ID NO: 11073 - DNA, 40 bp, Homo sapiens
aggtcaggagatcaagaccatcctggctaacccggtgaaa

SEQ ID NO: 11074 - DNA, 40 bp, Homo sapiens
ttcaccgggttagccaggatggtcttgatctcctgacctc

SEQ ID NO: 11075 - DNA, 40 bp, Homo sapiens
gaggtcaggagatcaagaccatcctggctaacccggtgaa

SEQ ID NO: 11076 - DNA, 40 bp, Homo sapiens
tcaccgggttagccaggatggtcttgatctcctgacctcg

SEQ ID NO: 11077 - DNA, 40 bp, Homo sapiens
cgaggtcaggagatcaagaccatcctggctaacccggtga

SEQ ID NO: 11078 - DNA, 40 bp, Homo sapiens
caccgggttagccaggatggtcttgatctcctgacctcgt

SEQ ID NO: 11079 - DNA, 40 bp, Homo sapiens
acgaggtcaggagatcaagaccatcctggctaacccggtg

SEQ ID NO: 11080 - DNA, 40 bp, Homo sapiens
accgggttagccaggatggtcttgatctcctgacctcgtg

SEQ ID NO: 11081 - DNA, 40 bp, Homo sapiens
cacgaggtcaggagatcaagaccatcctggctaacccggt

SEQ ID NO: 11082 - DNA, 40 bp, Homo sapiens
ccgggttagccaggatggtcttgatctcctgacctcgtga

SEQ ID NO: 11083 - DNA, 40 bp, Homo sapiens
tcacgaggtcaggagatcaagaccatcctggctaacccgg

SEQ ID NO: 11084 - DNA, 40 bp, Homo sapiens
cgggttagccaggatggtcttgatctcctgacctcgtgat

SEQ ID NO: 11085 - DNA, 40 bp, Homo sapiens
atcacgaggtcaggagatcaagaccatcctggctaacccg

SEQ ID NO: 11086 - DNA, 40 bp, Homo sapiens
gggttagccaggatggtcttgatctcctgacctcgtgatc

SEQ ID NO: 11087 - DNA, 40 bp, Homo sapiens
gatcacgaggtcaggagatcaagaccatcctggctaaccc

SEQ ID NO: 11088 - DNA, 40 bp, Homo sapiens
ggttagccaggatggtcttgatctcctgacctcgtgatcc

SEQ ID NO: 11089 - DNA, 40 bp, Homo sapiens
ggatcacgaggtcaggagatcaagaccatcctggctaacc

SEQ ID NO: 11090 - DNA, 40 bp, Homo sapiens
gttagccaggatggtcttgatctcctgacctcgtgatcca

SEQ ID NO: 11091 - DNA, 40 bp, Homo sapiens
tggatcacgaggtcaggagatcaagaccatcctggctaac

SEQ ID NO: 11092 - DNA, 40 bp, Homo sapiens
ttagccaggatggtcttgatctcctgacctcgtgatccac

SEQ ID NO: 11093 - DNA, 40 bp, Homo sapiens
gtggatcacgaggtcaggagatcaagaccatcctggctaa

SEQ ID NO: 11094 - DNA, 40 bp, Homo sapiens
tagccaggatggtcttgatctcctgacctcgtgatccacc

SEQ ID NO: 11095 - DNA, 40 bp, Homo sapiens
ggtggatcacgaggtcaggagatcaagaccatcctggcta

SEQ ID NO: 11096 - DNA, 40 bp, Homo sapiens
agccaggatggtcttgatctcctgacctcgtgatccaccc

SEQ ID NO: 11097 - DNA, 40 bp, Homo sapiens
gggtggatcacgaggtcaggagatcaagaccatcctggct

SEQ ID NO: 11098 - DNA, 40 bp, Homo sapiens
gccaggatggtcttgatctcctgacctcgtgatccaccct

SEQ ID NO: 11099 - DNA, 40 bp, Homo sapiens
agggtggatcacgaggtcaggagatcaagaccatcctggc

SEQ ID NO: 11100 - DNA, 40 bp, Homo sapiens
ccaggatggtcttgatctcctgacctcgtgatccaccctc

SEQ ID NO: 11101 - DNA, 40 bp, Homo sapiens
gagggtggatcacgaggtcaggagatcaagaccatcctgg

SEQ ID NO: 11102 - DNA, 40 bp, Homo sapiens
caggatggtcttgatctcctgacctcgtgatccaccctcc

SEQ ID NO: 11103 - DNA, 40 bp, Homo sapiens
ggagggtggatcacgaggtcaggagatcaagaccatcctg

SEQ ID NO: 11104 - DNA, 40 bp, Homo sapiens
aggatggtcttgatctcctgacctcgtgatccaccctcct

SEQ ID NO: 11105 - DNA, 40 bp, Homo sapiens
aggagggtggatcacgaggtcaggagatcaagaccatcct

SEQ ID NO: 11106 - DNA, 40 bp, Homo sapiens
ggatggtcttgatctcctgacctcgtgatccaccctcctc

SEQ ID NO: 11107 - DNA, 40 bp, Homo sapiens
gaggagggtggatcacgaggtcaggagatcaagaccatcc

SEQ ID NO: 11108 - DNA, 40 bp, Homo sapiens
gatggtcttgatctcctgacctcgtgatccaccctcctcg

SEQ ID NO: 11109 - DNA, 40 bp, Homo sapiens
cgaggagggtggatcacgaggtcaggagatcaagaccatc

SEQ ID NO: 11110 - DNA, 40 bp, Homo sapiens
atggtcttgatctcctgacctcgtgatccaccctcctcgg

SEQ ID NO: 11111 - DNA, 40 bp, Homo sapiens
ccgaggagggtggatcacgaggtcaggagatcaagaccat

SEQ ID NO: 11112 - DNA, 40 bp, Homo sapiens
tggtcttgatctcctgacctcgtgatccaccctcctcggc

SEQ ID NO: 11113 - DNA, 40 bp, Homo sapiens
gccgaggagggtggatcacgaggtcaggagatcaagacca

SEQ ID NO: 11114 - DNA, 40 bp, Homo sapiens
ggtcttgatctcctgacctcgtgatccaccctcctcggcc

SEQ ID NO: 11115 - DNA, 40 bp, Homo sapiens
ggccgaggagggtggatcacgaggtcaggagatcaagacc

SEQ ID NO: 11116 - DNA, 40 bp, Homo sapiens
gtcttgatctcctgacctcgtgatccaccctcctcggcct

SEQ ID NO: 11117 - DNA, 40 bp, Homo sapiens
aggccgaggagggtggatcacgaggtcaggagatcaagac

SEQ ID NO: 11118 - DNA, 40 bp, Homo sapiens
tcttgatctcctgacctcgtgatccaccctcctcggcctc

SEQ ID NO: 11119 - DNA, 40 bp, Homo sapiens
gaggccgaggagggtggatcacgaggtcaggagatcaaga

SEQ ID NO: 11120 - DNA, 40 bp, Homo sapiens
cttgatctcctgacctcgtgatccaccctcctcggcctcc

SEQ ID NO: 11121 - DNA, 40 bp, Homo sapiens
ggaggccgaggagggtggatcacgaggtcaggagatcaag

SEQ ID NO: 11122 - DNA, 40 bp, Homo sapiens
ttgatctcctgacctcgtgatccaccctcctcggcctccc

SEQ ID NO: 11123 - DNA, 40 bp, Homo sapiens
gggaggccgaggagggtggatcacgaggtcaggagatcaa

SEQ ID NO: 11124 - DNA, 40 bp, Homo sapiens
tgatctcctgacctcgtgatccaccctcctcggcctccca

SEQ ID NO: 11125 - DNA, 40 bp, Homo sapiens
tgggaggccgaggagggtggatcacgaggtcaggagatca

SEQ ID NO: 11126 - DNA, 40 bp, Homo sapiens
gatctcctgacctcgtgatccaccctcctcggcctcccaa

SEQ ID NO: 11127 - DNA, 40 bp, Homo sapiens
ttgggaggccgaggagggtggatcacgaggtcaggagatc

SEQ ID NO: 11128 - DNA, 40 bp, Homo sapiens
atctcctgacctcgtgatccaccctcctcggcctcccaaa

SEQ ID NO: 11129 - DNA, 40 bp, Homo sapiens
tttgggaggccgaggagggtggatcacgaggtcaggagat

SEQ ID NO: 11130 - DNA, 40 bp, Homo sapiens
tctcctgacctcgtgatccaccctcctcggcctcccaaag

SEQ ID NO: 11131 - DNA, 40 bp, Homo sapiens
ctttgggaggccgaggagggtggatcacgaggtcaggaga

SEQ ID NO: 11132 - DNA, 40 bp, Homo sapiens
ctcctgacctcgtgatccaccctcctcggcctcccaaagt

SEQ ID NO: 11133 - DNA, 40 bp, Homo sapiens
actttgggaggccgaggagggtggatcacgaggtcaggag

SEQ ID NO: 11134 - DNA, 40 bp, Homo sapiens
tcctgacctcgtgatccaccctcctcggcctcccaaagtg

SEQ ID NO: 11135 - DNA, 40 bp, Homo sapiens
cactttgggaggccgaggagggtggatcacgaggtcagga

SEQ ID NO: 11136 - DNA, 40 bp, Homo sapiens
cctgacctcgtgatccaccctcctcggcctcccaaagtgc

SEQ ID NO: 11137 - DNA, 40 bp, Homo sapiens
gcactttgggaggccgaggagggtggatcacgaggtcagg

SEQ ID NO: 11138 - DNA, 40 bp, Homo sapiens
ctgacctcgtgatccaccctcctcggcctcccaaagtgct

SEQ ID NO: 11139 - DNA, 40 bp, Homo sapiens
agcactttgggaggccgaggagggtggatcacgaggtcag

SEQ ID NO: 11140 - DNA, 40 bp, Homo sapiens
tgacctcgtgatccaccctcctcggcctcccaaagtgcta

SEQ ID NO: 11141 - DNA, 40 bp, Homo sapiens
tagcactttgggaggccgaggagggtggatcacgaggtca

SEQ ID NO: 11142 - DNA, 40 bp, Homo sapiens
gacctcgtgatccaccctcctcggcctcccaaagtgctag

SEQ ID NO: 11143 - DNA, 40 bp, Homo sapiens
ctagcactttgggaggccgaggagggtggatcacgaggtc

SEQ ID NO: 11144 - DNA, 40 bp, Homo sapiens
acctcgtgatccaccctcctcggcctcccaaagtgctagg

SEQ ID NO: 11145 - DNA, 40 bp, Homo sapiens
cctagcactttgggaggccgaggagggtggatcacgaggt

SEQ ID NO: 11146 - DNA, 40 bp, Homo sapiens
cctcgtgatccaccctcctcggcctcccaaagtgctagga

SEQ ID NO: 11147 - DNA, 40 bp, Homo sapiens
tcctagcactttgggaggccgaggagggtggatcacgagg

SEQ ID NO: 11148 - DNA, 40 bp, Homo sapiens
ctcgtgatccaccctcctcggcctcccaaagtgctaggat

SEQ ID NO: 11149 - DNA, 40 bp, Homo sapiens
atcctagcactttgggaggccgaggagggtggatcacgag

SEQ ID NO: 11150 - DNA, 40 bp, Homo sapiens
tcgtgatccaccctcctcggcctcccaaagtgctaggatt

SEQ ID NO: 11151 - DNA, 40 bp, Homo sapiens
aatcctagcactttgggaggccgaggagggtggatcacga

SEQ ID NO: 11152 - DNA, 40 bp, Homo sapiens
cgtgatccaccctcctcggcctcccaaagtgctaggatta

SEQ ID NO: 11153 - DNA, 40 bp, Homo sapiens
taatcctagcactttgggaggccgaggagggtggatcacg

SEQ ID NO: 11154 - DNA, 40 bp, Homo sapiens
gtgatccaccctcctcggcctcccaaagtgctaggattat

SEQ ID NO: 11155 - DNA, 40 bp, Homo sapiens
ataatcctagcactttgggaggccgaggagggtggatcac

SEQ ID NO: 11156 - DNA, 40 bp, Homo sapiens
tgatccaccctcctcggcctcccaaagtgctaggattata

SEQ ID NO: 11157 - DNA, 40 bp, Homo sapiens
tataatcctagcactttgggaggccgaggagggtggatca

SEQ ID NO: 11158 - DNA, 40 bp, Homo sapiens
gatccaccctcctcggcctcccaaagtgctaggattatag

SEQ ID NO: 11159 - DNA, 40 bp, Homo sapiens
ctataatcctagcactttgggaggccgaggagggtggatc

SEQ ID NO: 11160 - DNA, 40 bp, Homo sapiens
atccaccctcctcggcctcccaaagtgctaggattatagg

SEQ ID NO: 11161 - DNA, 40 bp, Homo sapiens
cctataatcctagcactttgggaggccgaggagggtggat

SEQ ID NO: 11162 - DNA, 40 bp, Homo sapiens
tccaccctcctcggcctcccaaagtgctaggattataggc

SEQ ID NO: 11163 - DNA, 40 bp, Homo sapiens
gcctataatcctagcactttgggaggccgaggagggtgga

SEQ ID NO: 11164 - DNA, 40 bp, Homo sapiens
ccaccctcctcggcctcccaaagtgctaggattataggcg

SEQ ID NO: 11165 - DNA, 40 bp, Homo sapiens
cgcctataatcctagcactttgggaggccgaggagggtgg

SEQ ID NO: 11166 - DNA, 40 bp, Homo sapiens
caccctcctcggcctcccaaagtgctaggattataggcgt

SEQ ID NO: 11167 - DNA, 40 bp, Homo sapiens
acgcctataatcctagcactttgggaggccgaggagggtg

SEQ ID NO: 11168 - DNA, 40 bp, Homo sapiens
accctcctcggcctcccaaagtgctaggattataggcgtg

SEQ ID NO: 11169 - DNA, 40 bp, Homo sapiens
cacgcctataatcctagcactttgggaggccgaggagggt

SEQ ID NO: 11170 - DNA, 40 bp, Homo sapiens
ccctcctcggcctcccaaagtgctaggattataggcgtga

SEQ ID NO: 11171 - DNA, 40 bp, Homo sapiens
tcacgcctataatcctagcactttgggaggccgaggaggg

SEQ ID NO: 11172 - DNA, 40 bp, Homo sapiens
cctcctcggcctcccaaagtgctaggattataggcgtgag

SEQ ID NO: 11173 - DNA, 40 bp, Homo sapiens
ctcacgcctataatcctagcactttgggaggccgaggagg

SEQ ID NO: 11174 - DNA, 40 bp, Homo sapiens
ctcctcggcctcccaaagtgctaggattataggcgtgagc

SEQ ID NO: 11175 - DNA, 40 bp, Homo sapiens
gctcacgcctataatcctagcactttgggaggccgaggag

SEQ ID NO: 11176 - DNA, 40 bp, Homo sapiens
tcctcggcctcccaaagtgctaggattataggcgtgagcc

SEQ ID NO: 11177 - DNA, 40 bp, Homo sapiens
ggctcacgcctataatcctagcactttgggaggccgagga

SEQ ID NO: 11178 - DNA, 40 bp, Homo sapiens
cctcggcctcccaaagtgctaggattataggcgtgagcca

SEQ ID NO: 11179 - DNA, 40 bp, Homo sapiens
tggctcacgcctataatcctagcactttgggaggccgagg

SEQ ID NO: 11180 - DNA, 40 bp, Homo sapiens
ctcggcctcccaaagtgctaggattataggcgtgagccac

SEQ ID NO: 11181 - DNA, 40 bp, Homo sapiens
gtggctcacgcctataatcctagcactttgggaggccgag

SEQ ID NO: 11182 - DNA, 40 bp, Homo sapiens
tcggcctcccaaagtgctaggattataggcgtgagccacc

SEQ ID NO: 11183 - DNA, 40 bp, Homo sapiens
ggtggctcacgcctataatcctagcactttgggaggccga

SEQ ID NO: 11184 - DNA, 40 bp, Homo sapiens
cggcctcccaaagtgctaggattataggcgtgagccaccg

SEQ ID NO: 11185 - DNA, 40 bp, Homo sapiens
cggtggctcacgcctataatcctagcactttgggaggccg

SEQ ID NO: 11186 - DNA, 40 bp, Homo sapiens
ggcctcccaaagtgctaggattataggcgtgagccaccgt

SEQ ID NO: 11187 - DNA, 40 bp, Homo sapiens
acggtggctcacgcctataatcctagcactttgggaggcc

SEQ ID NO: 11188 - DNA, 40 bp, Homo sapiens
gcctcccaaagtgctaggattataggcgtgagccaccgtg

SEQ ID NO: 11189 - DNA, 40 bp, Homo sapiens
cacggtggctcacgcctataatcctagcactttgggaggc

SEQ ID NO: 11190 - DNA, 40 bp, Homo sapiens
cctcccaaagtgctaggattataggcgtgagccaccgtgc

SEQ ID NO: 11191 - DNA, 40 bp, Homo sapiens
gcacggtggctcacgcctataatcctagcactttgggagg

SEQ ID NO: 11192 - DNA, 40 bp, Homo sapiens
ctcccaaagtgctaggattataggcgtgagccaccgtgcc

SEQ ID NO: 11193 - DNA, 40 bp, Homo sapiens
ggcacggtggctcacgcctataatcctagcactttgggag

SEQ ID NO: 11194 - DNA, 40 bp, Homo sapiens
tcccaaagtgctaggattataggcgtgagccaccgtgccc

SEQ ID NO: 11195 - DNA, 40 bp, Homo sapiens
gggcacggtggctcacgcctataatcctagcactttggga

SEQ ID NO: 11196 - DNA, 40 bp, Homo sapiens
cccaaagtgctaggattataggcgtgagccaccgtgcccg

SEQ ID NO: 11197 - DNA, 40 bp, Homo sapiens
cgggcacggtggctcacgcctataatcctagcactttggg

SEQ ID NO: 11198 - DNA, 40 bp, Homo sapiens
ccaaagtgctaggattataggcgtgagccaccgtgcccgg

SEQ ID NO: 11199 - DNA, 40 bp, Homo sapiens
ccgggcacggtggctcacgcctataatcctagcactttgg

SEQ ID NO: 11200 - DNA, 40 bp, Homo sapiens
caaagtgctaggattataggcgtgagccaccgtgcccggc

SEQ ID NO: 11201 - DNA, 40 bp, Homo sapiens
gccgggcacggtggctcacgcctataatcctagcactttg

SEQ ID NO: 11202 - DNA, 40 bp, Homo sapiens
aaagtgctaggattataggcgtgagccaccgtgcccggct

SEQ ID NO: 11203 - DNA, 40 bp, Homo sapiens
agccgggcacggtggctcacgcctataatcctagcacttt

SEQ ID NO: 11204 - DNA, 40 bp, Homo sapiens
aagtgctaggattataggcgtgagccaccgtgcccggctc

SEQ ID NO: 11205 - DNA, 40 bp, Homo sapiens
gagccgggcacggtggctcacgcctataatcctagcactt

SEQ ID NO: 11206 - DNA, 40 bp, Homo sapiens
agtgctaggattataggcgtgagccaccgtgcccggctca

SEQ ID NO: 11207 - DNA, 40 bp, Homo sapiens
tgagccgggcacggtggctcacgcctataatcctagcact

SEQ ID NO: 11208 - DNA, 40 bp, Homo sapiens
gtgctaggattataggcgtgagccaccgtgcccggctcac

SEQ ID NO: 11209 - DNA, 40 bp, Homo sapiens
gtgagccgggcacggtggctcacgcctataatcctagcac

SEQ ID NO: 11210 - DNA, 40 bp, Homo sapiens
tgctaggattataggcgtgagccaccgtgcccggctcact

SEQ ID NO: 11211 - DNA, 40 bp, Homo sapiens
agtgagccgggcacggtggctcacgcctataatcctagca

SEQ ID NO: 11212 - DNA, 40 bp, Homo sapiens
gctaggattataggcgtgagccaccgtgcccggctcactt

SEQ ID NO: 11213 - DNA, 40 bp, Homo sapiens
aagtgagccgggcacggtggctcacgcctataatcctagc

SEQ ID NO: 11214 - DNA, 40 bp, Homo sapiens
ctaggattataggcgtgagccaccgtgcccggctcacttg

SEQ ID NO: 11215 - DNA, 40 bp, Homo sapiens
caagtgagccgggcacggtggctcacgcctataatcctag

SEQ ID NO: 11216 - DNA, 40 bp, Homo sapiens
taggattataggcgtgagccaccgtgcccggctcacttgc

SEQ ID NO: 11217 - DNA, 40 bp, Homo sapiens
gcaagtgagccgggcacggtggctcacgcctataatccta

SEQ ID NO: 11218 - DNA, 40 bp, Homo sapiens
aggattataggcgtgagccaccgtgcccggctcacttgca

SEQ ID NO: 11219 - DNA, 40 bp, Homo sapiens
tgcaagtgagccgggcacggtggctcacgcctataatcct

SEQ ID NO: 11220 - DNA, 40 bp, Homo sapiens
ggattataggcgtgagccaccgtgcccggctcacttgcat

SEQ ID NO: 11221 - DNA, 40 bp, Homo sapiens
atgcaagtgagccgggcacggtggctcacgcctataatcc

SEQ ID NO: 11222 - DNA, 40 bp, Homo sapiens
gattataggcgtgagccaccgtgcccggctcacttgcatc

SEQ ID NO: 11223 - DNA, 40 bp, Homo sapiens
gatgcaagtgagccgggcacggtggctcacgcctataatc

SEQ ID NO: 11224 - DNA, 40 bp, Homo sapiens
attataggcgtgagccaccgtgcccggctcacttgcatct

SEQ ID NO: 11225 - DNA, 40 bp, Homo sapiens
agatgcaagtgagccgggcacggtggctcacgcctataat

SEQ ID NO: 11226 - DNA, 40 bp, Homo sapiens
ttataggcgtgagccaccgtgcccggctcacttgcatctc

SEQ ID NO: 11227 - DNA, 40 bp, Homo sapiens
gagatgcaagtgagccgggcacggtggctcacgcctataa

SEQ ID NO: 11228 - DNA, 40 bp, Homo sapiens
tataggcgtgagccaccgtgcccggctcacttgcatctct

SEQ ID NO: 11229 - DNA, 40 bp, Homo sapiens
agagatgcaagtgagccgggcacggtggctcacgcctata

SEQ ID NO: 11230 - DNA, 40 bp, Homo sapiens
ataggcgtgagccaccgtgcccggctcacttgcatctctt

SEQ ID NO: 11231 - DNA, 40 bp, Homo sapiens
aagagatgcaagtgagccgggcacggtggctcacgcctat

SEQ ID NO: 11232 - DNA, 40 bp, Homo sapiens
taggcgtgagccaccgtgcccggctcacttgcatctctta

SEQ ID NO: 11233 - DNA, 40 bp, Homo sapiens
taagagatgcaagtgagccgggcacggtggctcacgccta

SEQ ID NO: 11234 - DNA, 40 bp, Homo sapiens
aggcgtgagccaccgtgcccggctcacttgcatctcttaa

SEQ ID NO: 11235 - DNA, 40 bp, Homo sapiens
ttaagagatgcaagtgagccgggcacggtggctcacgcct

SEQ ID NO: 11236 - DNA, 40 bp, Homo sapiens
ggcgtgagccaccgtgcccggctcacttgcatctcttaac

SEQ ID NO: 11237 - DNA, 40 bp, Homo sapiens
gttaagagatgcaagtgagccgggcacggtggctcacgcc

SEQ ID NO: 11238 - DNA, 40 bp, Homo sapiens
gcgtgagccaccgtgcccggctcacttgcatctcttaaca

SEQ ID NO: 11239 - DNA, 40 bp, Homo sapiens
tgttaagagatgcaagtgagccgggcacggtggctcacgc

SEQ ID NO: 11240 - DNA, 40 bp, Homo sapiens
cgtgagccaccgtgcccggctcacttgcatctcttaacag

SEQ ID NO: 11241 - DNA, 40 bp, Homo sapiens
ctgttaagagatgcaagtgagccgggcacggtggctcacg

SEQ ID NO: 11242 - DNA, 40 bp, Homo sapiens
gtgagccaccgtgcccggctcacttgcatctcttaacagc

SEQ ID NO: 11243 - DNA, 40 bp, Homo sapiens
gctgttaagagatgcaagtgagccgggcacggtggctcac

SEQ ID NO: 11244 - DNA, 40 bp, Homo sapiens
tgagccaccgtgcccggctcacttgcatctcttaacagct

SEQ ID NO: 11245 - DNA, 40 bp, Homo sapiens
agctgttaagagatgcaagtgagccgggcacggtggctca

SEQ ID NO: 11246 - DNA, 40 bp, Homo sapiens
gagccaccgtgcccggctcacttgcatctcttaacagctg

SEQ ID NO: 11247 - DNA, 40 bp, Homo sapiens
cagctgttaagagatgcaagtgagccgggcacggtggctc

SEQ ID NO: 11248 - DNA, 40 bp, Homo sapiens
agccaccgtgcccggctcacttgcatctcttaacagctgt

SEQ ID NO: 11249 - DNA, 40 bp, Homo sapiens
acagctgttaagagatgcaagtgagccgggcacggtggct

SEQ ID NO: 11250 - DNA, 40 bp, Homo sapiens
gccaccgtgcccggctcacttgcatctcttaacagctgtt

SEQ ID NO: 11251 - DNA, 40 bp, Homo sapiens
aacagctgttaagagatgcaagtgagccgggcacggtggc

SEQ ID NO: 11252 - DNA, 40 bp, Homo sapiens
ccaccgtgcccggctcacttgcatctcttaacagctgttt

SEQ ID NO: 11253 - DNA, 40 bp, Homo sapiens
aaacagctgttaagagatgcaagtgagccgggcacggtgg

SEQ ID NO: 11254 - DNA, 40 bp, Homo sapiens
caccgtgcccggctcacttgcatctcttaacagctgtttt

SEQ ID NO: 11255 - DNA, 40 bp, Homo sapiens
aaaacagctgttaagagatgcaagtgagccgggcacggtg

SEQ ID NO: 11256 - DNA, 40 bp, Homo sapiens
accgtgcccggctcacttgcatctcttaacagctgttttc

SEQ ID NO: 11257 - DNA, 40 bp, Homo sapiens
gaaaacagctgttaagagatgcaagtgagccgggcacggt

SEQ ID NO: 11258 - DNA, 40 bp, Homo sapiens
ccgtgcccggctcacttgcatctcttaacagctgttttct

SEQ ID NO: 11259 - DNA, 40 bp, Homo sapiens
agaaaacagctgttaagagatgcaagtgagccgggcacgg

SEQ ID NO: 11260 - DNA, 40 bp, Homo sapiens
cgtgcccggctcacttgcatctcttaacagctgttttctt

SEQ ID NO: 11261 - DNA, 40 bp, Homo sapiens
aagaaaacagctgttaagagatgcaagtgagccgggcacg

SEQ ID NO: 11262 - DNA, 40 bp, Homo sapiens
gtgcccggctcacttgcatctcttaacagctgttttctta

SEQ ID NO: 11263 - DNA, 40 bp, Homo sapiens
taagaaaacagctgttaagagatgcaagtgagccgggcac

SEQ ID NO: 11264 - DNA, 40 bp, Homo sapiens
tgcccggctcacttgcatctcttaacagctgttttcttac

SEQ ID NO: 11265 - DNA, 40 bp, Homo sapiens
gtaagaaaacagctgttaagagatgcaagtgagccgggca

SEQ ID NO: 11266 - DNA, 40 bp, Homo sapiens
gcccggctcacttgcatctcttaacagctgttttcttact

SEQ ID NO: 11267 - DNA, 40 bp, Homo sapiens
agtaagaaaacagctgttaagagatgcaagtgagccgggc

SEQ ID NO: 11268 - DNA, 40 bp, Homo sapiens
cccggctcacttgcatctcttaacagctgttttcttacta

SEQ ID NO: 11269 - DNA, 40 bp, Homo sapiens
tagtaagaaaacagctgttaagagatgcaagtgagccggg

SEQ ID NO: 11270 - DNA, 40 bp, Homo sapiens
ccggctcacttgcatctcttaacagctgttttcttactaa

SEQ ID NO: 11271 - DNA, 40 bp, Homo sapiens
ttagtaagaaaacagctgttaagagatgcaagtgagccgg

SEQ ID NO: 11272 - DNA, 40 bp, Homo sapiens
cggctcacttgcatctcttaacagctgttttcttactaaa

SEQ ID NO: 11273 - DNA, 40 bp, Homo sapiens
tttagtaagaaaacagctgttaagagatgcaagtgagccg

SEQ ID NO: 11274 - DNA, 40 bp, Homo sapiens
ggctcacttgcatctcttaacagctgttttcttactaaaa

SEQ ID NO: 11275 - DNA, 40 bp, Homo sapiens
ttttagtaagaaaacagctgttaagagatgcaagtgagcc

SEQ ID NO: 11276 - DNA, 40 bp, Homo sapiens
gctcacttgcatctcttaacagctgttttcttactaaaaa

SEQ ID NO: 11277 - DNA, 40 bp, Homo sapiens
tttttagtaagaaaacagctgttaagagatgcaagtgagc

SEQ ID NO: 11278 - DNA, 40 bp, Homo sapiens
ctcacttgcatctcttaacagctgttttcttactaaaaac

SEQ ID NO: 11279 - DNA, 40 bp, Homo sapiens
gtttttagtaagaaaacagctgttaagagatgcaagtgag

SEQ ID NO: 11280 - DNA, 40 bp, Homo sapiens
tcacttgcatctcttaacagctgttttcttactaaaaaca

SEQ ID NO: 11281 - DNA, 40 bp, Homo sapiens
tgtttttagtaagaaaacagctgttaagagatgcaagtga

SEQ ID NO: 11282 - DNA, 40 bp, Homo sapiens
cacttgcatctcttaacagctgttttcttactaaaaacag

SEQ ID NO: 11283 - DNA, 40 bp, Homo sapiens
ctgtttttagtaagaaaacagctgttaagagatgcaagtg

SEQ ID NO: 11284 - DNA, 40 bp, Homo sapiens
acttgcatctcttaacagctgttttcttactaaaaacagt

SEQ ID NO: 11285 - DNA, 40 bp, Homo sapiens
actgtttttagtaagaaaacagctgttaagagatgcaagt

SEQ ID NO: 11286 - DNA, 40 bp, Homo sapiens
cttgcatctcttaacagctgttttcttactaaaaacagtg

SEQ ID NO: 11287 - DNA, 40 bp, Homo sapiens
cactgtttttagtaagaaaacagctgttaagagatgcaag

SEQ ID NO: 11288 - DNA, 40 bp, Homo sapiens
ttgcatctcttaacagctgttttcttactaaaaacagtgt

SEQ ID NO: 11289 - DNA, 40 bp, Homo sapiens
acactgtttttagtaagaaaacagctgttaagagatgcaa

SEQ ID NO: 11290 - DNA, 40 bp, Homo sapiens
tgcatctcttaacagctgttttcttactaaaaacagtgtt

SEQ ID NO: 11291 - DNA, 40 bp, Homo sapiens
aacactgtttttagtaagaaaacagctgttaagagatgca

SEQ ID NO: 11292 - DNA, 40 bp, Homo sapiens
gcatctcttaacagctgttttcttactaaaaacagtgttt

SEQ ID NO: 11293 - DNA, 40 bp, Homo sapiens
aaacactgtttttagtaagaaaacagctgttaagagatgc

SEQ ID NO: 11294 - DNA, 40 bp, Homo sapiens
catctcttaacagctgttttcttactaaaaacagtgttta

SEQ ID NO: 11295 - DNA, 40 bp, Homo sapiens
taaacactgtttttagtaagaaaacagctgttaagagatg

SEQ ID NO: 11296 - DNA, 40 bp, Homo sapiens
atctcttaacagctgttttcttactaaaaacagtgtttat

SEQ ID NO: 11297 - DNA, 40 bp, Homo sapiens
ataaacactgtttttagtaagaaaacagctgttaagagat

SEQ ID NO: 11298 - DNA, 40 bp, Homo sapiens
tctcttaacagctgttttcttactaaaaacagtgtttatc

SEQ ID NO: 11299 - DNA, 40 bp, Homo sapiens
gataaacactgtttttagtaagaaaacagctgttaagaga

SEQ ID NO: 11300 - DNA, 40 bp, Homo sapiens
ctcttaacagctgttttcttactaaaaacagtgtttatct

SEQ ID NO: 11301 - DNA, 40 bp, Homo sapiens
agataaacactgtttttagtaagaaaacagctgttaagag

SEQ ID NO: 11302 - DNA, 40 bp, Homo sapiens
tcttaacagctgttttcttactaaaaacagtgtttatctc

SEQ ID NO: 11303 - DNA, 40 bp, Homo sapiens
gagataaacactgtttttagtaagaaaacagctgttaaga

SEQ ID NO: 11304 - DNA, 40 bp, Homo sapiens
cttaacagctgttttcttactaaaaacagtgtttatctct

SEQ ID NO: 11305 - DNA, 40 bp, Homo sapiens
agagataaacactgtttttagtaagaaaacagctgttaag

SEQ ID NO: 11306 - DNA, 40 bp, Homo sapiens
ttaacagctgttttcttactaaaaacagtgtttatctcta

SEQ ID NO: 11307 - DNA, 40 bp, Homo sapiens
tagagataaacactgtttttagtaagaaaacagctgttaa

SEQ ID NO: 11308 - DNA, 40 bp, Homo sapiens
taacagctgttttcttactaaaaacagtgtttatctctaa

SEQ ID NO: 11309 - DNA, 40 bp, Homo sapiens
ttagagataaacactgtttttagtaagaaaacagctgtta

SEQ ID NO: 11310 - DNA, 40 bp, Homo sapiens
aacagctgttttcttactaaaaacagtgtttatctctaat

SEQ ID NO: 11311 - DNA, 40 bp, Homo sapiens
attagagataaacactgtttttagtaagaaaacagctgtt

SEQ ID NO: 11312 - DNA, 40 bp, Homo sapiens
acagctgttttcttactaaaaacagtgtttatctctaatc

SEQ ID NO: 11313 - DNA, 40 bp, Homo sapiens
gattagagataaacactgtttttagtaagaaaacagctgt

SEQ ID NO: 11314 - DNA, 40 bp, Homo sapiens
cagctgttttcttactaaaaacagtgtttatctctaatct

SEQ ID NO: 11315 - DNA, 40 bp, Homo sapiens
agattagagataaacactgtttttagtaagaaaacagctg

SEQ ID NO: 11316 - DNA, 40 bp, Homo sapiens
agctgttttcttactaaaaacagtgtttatctctaatctt

SEQ ID NO: 11317 - DNA, 40 bp, Homo sapiens
aagattagagataaacactgtttttagtaagaaaacagct

SEQ ID NO: 11318 - DNA, 40 bp, Homo sapiens
gctgttttcttactaaaaacagtgtttatctctaatcttt

SEQ ID NO: 11319 - DNA, 40 bp, Homo sapiens
aaagattagagataaacactgtttttagtaagaaaacagc

SEQ ID NO: 11320 - DNA, 40 bp, Homo sapiens
ctgttttcttactaaaaacagtgtttatctctaatctttt

SEQ ID NO: 11321 - DNA, 40 bp, Homo sapiens
aaaagattagagataaacactgtttttagtaagaaaacag

SEQ ID NO: 11322 - DNA, 40 bp, Homo sapiens
tgttttcttactaaaaacagtgtttatctctaatcttttt

SEQ ID NO: 11323 - DNA, 40 bp, Homo sapiens
aaaaagattagagataaacactgtttttagtaagaaaaca

SEQ ID NO: 11324 - DNA, 40 bp, Homo sapiens
gttttcttactaaaaacagtgtttatctctaatctttttg

SEQ ID NO: 11325 - DNA, 40 bp, Homo sapiens
caaaaagattagagataaacactgtttttagtaagaaaac

SEQ ID NO: 11326 - DNA, 40 bp, Homo sapiens
ttttcttactaaaaacagtgtttatctctaatctttttgt

SEQ ID NO: 11327 - DNA, 40 bp, Homo sapiens
acaaaaagattagagataaacactgtttttagtaagaaaa

SEQ ID NO: 11328 - DNA, 40 bp, Homo sapiens
tttcttactaaaaacagtgtttatctctaatctttttgtt

SEQ ID NO: 11329 - DNA, 40 bp, Homo sapiens
aacaaaaagattagagataaacactgtttttagtaagaaa

SEQ ID NO: 11330 - DNA, 40 bp, Homo sapiens
ttcttactaaaaacagtgtttatctctaatctttttgttt

SEQ ID NO: 11331 - DNA, 40 bp, Homo sapiens
aaacaaaaagattagagataaacactgtttttagtaagaa

SEQ ID NO: 11332 - DNA, 40 bp, Homo sapiens
tcttactaaaaacagtgtttatctctaatctttttgtttg

SEQ ID NO: 11333 - DNA, 40 bp, Homo sapiens
caaacaaaaagattagagataaacactgtttttagtaaga

SEQ ID NO: 11334 - DNA, 40 bp, Homo sapiens
cttactaaaaacagtgtttatctctaatctttttgtttgt

SEQ ID NO: 11335 - DNA, 40 bp, Homo sapiens
acaaacaaaaagattagagataaacactgtttttagtaag

SEQ ID NO: 11336 - DNA, 40 bp, Homo sapiens
ttactaaaaacagtgtttatctctaatctttttgtttgtt

SEQ ID NO: 11337 - DNA, 40 bp, Homo sapiens
aacaaacaaaaagattagagataaacactgtttttagtaa

SEQ ID NO: 11338 - DNA, 40 bp, Homo sapiens
tactaaaaacagtgtttatctctaatctttttgtttgttt

SEQ ID NO: 11339 - DNA, 40 bp, Homo sapiens
aaacaaacaaaaagattagagataaacactgtttttagta

SEQ ID NO: 11340 - DNA, 40 bp, Homo sapiens
actaaaaacagtgtttatctctaatctttttgtttgtttg

SEQ ID NO: 11341 - DNA, 40 bp, Homo sapiens
caaacaaacaaaaagattagagataaacactgtttttagt

SEQ ID NO: 11342 - DNA, 40 bp, Homo sapiens
ctaaaaacagtgtttatctctaatctttttgtttgtttgt

SEQ ID NO: 11343 - DNA, 40 bp, Homo sapiens
acaaacaaacaaaaagattagagataaacactgtttttag

SEQ ID NO: 11344 - DNA, 40 bp, Homo sapiens
taaaaacagtgtttatctctaatctttttgtttgtttgtt

SEQ ID NO: 11345 - DNA, 40 bp, Homo sapiens
aacaaacaaacaaaaagattagagataaacactgttttta

SEQ ID NO: 11346 - DNA, 40 bp, Homo sapiens
aaaaacagtgtttatctctaatctttttgtttgtttgttt

SEQ ID NO: 11347 - DNA, 40 bp, Homo sapiens
aaacaaacaaacaaaaagattagagataaacactgttttt

SEQ ID NO: 11348 - DNA, 40 bp, Homo sapiens
aaaacagtgtttatctctaatctttttgtttgtttgtttg

SEQ ID NO: 11349 - DNA, 40 bp, Homo sapiens
caaacaaacaaacaaaaagattagagataaacactgtttt

SEQ ID NO: 11350 - DNA, 40 bp, Homo sapiens
aaacagtgtttatctctaatctttttgtttgtttgtttgt

SEQ ID NO: 11351 - DNA, 40 bp, Homo sapiens
acaaacaaacaaacaaaaagattagagataaacactgttt

SEQ ID NO: 11352 - DNA, 40 bp, Homo sapiens
aacagtgtttatctctaatctttttgtttgtttgtttgtt

SEQ ID NO: 11353 - DNA, 40 bp, Homo sapiens
aacaaacaaacaaacaaaaagattagagataaacactgtt

SEQ ID NO: 11354 - DNA, 40 bp, Homo sapiens
acagtgtttatctctaatctttttgtttgtttgtttgttt

SEQ ID NO: 11355 - DNA, 40 bp, Homo sapiens
aaacaaacaaacaaacaaaaagattagagataaacactgt

SEQ ID NO: 11356 - DNA, 40 bp, Homo sapiens
cagtgtttatctctaatctttttgtttgtttgtttgtttt

SEQ ID NO: 11357 - DNA, 40 bp, Homo sapiens
aaaacaaacaaacaaacaaaaagattagagataaacactg

SEQ ID NO: 11358 - DNA, 40 bp, Homo sapiens
agtgtttatctctaatctttttgtttgtttgtttgttttg

SEQ ID NO: 11359 - DNA, 40 bp, Homo sapiens
caaaacaaacaaacaaacaaaaagattagagataaacact

SEQ ID NO: 11360 - DNA, 40 bp, Homo sapiens
gtgtttatctctaatctttttgtttgtttgtttgttttga

SEQ ID NO: 11361 - DNA, 40 bp, Homo sapiens
tcaaaacaaacaaacaaacaaaaagattagagataaacac

SEQ ID NO: 11362 - DNA, 40 bp, Homo sapiens
tgtttatctctaatctttttgtttgtttgtttgttttgag

SEQ ID NO: 11363 - DNA, 40 bp, Homo sapiens
ctcaaaacaaacaaacaaacaaaaagattagagataaaca

SEQ ID NO: 11364 - DNA, 40 bp, Homo sapiens
gtttatctctaatctttttgtttgtttgtttgttttgaga

SEQ ID NO: 11365 - DNA, 40 bp, Homo sapiens
tctcaaaacaaacaaacaaacaaaaagattagagataaac

SEQ ID NO: 11366 - DNA, 40 bp, Homo sapiens
tttatctctaatctttttgtttgtttgtttgttttgagat

SEQ ID NO: 11367 - DNA, 40 bp, Homo sapiens
atctcaaaacaaacaaacaaacaaaaagattagagataaa

SEQ ID NO: 11368 - DNA, 40 bp, Homo sapiens
ttatctctaatctttttgtttgtttgtttgttttgagatg

SEQ ID NO: 11369 - DNA, 40 bp, Homo sapiens
catctcaaaacaaacaaacaaacaaaaagattagagataa

SEQ ID NO: 11370 - DNA, 40 bp, Homo sapiens
tatctctaatctttttgtttgtttgtttgttttgagatgg

SEQ ID NO: 11371 - DNA, 40 bp, Homo sapiens
ccatctcaaaacaaacaaacaaacaaaaagattagagata

SEQ ID NO: 11372 - DNA, 40 bp, Homo sapiens
atctctaatctttttgtttgtttgtttgttttgagatgga

SEQ ID NO: 11373 - DNA, 40 bp, Homo sapiens
tccatctcaaaacaaacaaacaaacaaaaagattagagat

SEQ ID NO: 11374 - DNA, 40 bp, Homo sapiens
tctctaatctttttgtttgtttgtttgttttgagatggag

SEQ ID NO: 11375 - DNA, 40 bp, Homo sapiens
ctccatctcaaaacaaacaaacaaacaaaaagattagaga

SEQ ID NO: 11376 - DNA, 40 bp, Homo sapiens
ctctaatctttttgtttgtttgtttgttttgagatggagt

SEQ ID NO: 11377 - DNA, 40 bp, Homo sapiens
actccatctcaaaacaaacaaacaaacaaaaagattagag

SEQ ID NO: 11378 - DNA, 40 bp, Homo sapiens
tctaatctttttgtttgtttgtttgttttgagatggagtc

SEQ ID NO: 11379 - DNA, 40 bp, Homo sapiens
gactccatctcaaaacaaacaaacaaacaaaaagattaga

SEQ ID NO: 11380 - DNA, 40 bp, Homo sapiens
ctaatctttttgtttgtttgtttgttttgagatggagtct

SEQ ID NO: 11381 - DNA, 40 bp, Homo sapiens
agactccatctcaaaacaaacaaacaaacaaaaagattag

SEQ ID NO: 11382 - DNA, 40 bp, Homo sapiens
taatctttttgtttgtttgtttgttttgagatggagtctt

SEQ ID NO: 11383 - DNA, 40 bp, Homo sapiens
aagactccatctcaaaacaaacaaacaaacaaaaagatta

SEQ ID NO: 11384 - DNA, 40 bp, Homo sapiens
aatctttttgtttgtttgtttgttttgagatggagtctta

SEQ ID NO: 11385 - DNA, 40 bp, Homo sapiens
taagactccatctcaaaacaaacaaacaaacaaaaagatt

SEQ ID NO: 11386 - DNA, 40 bp, Homo sapiens
atctttttgtttgtttgtttgttttgagatggagtcttac

SEQ ID NO: 11387 - DNA, 40 bp, Homo sapiens
gtaagactccatctcaaaacaaacaaacaaacaaaaagat

SEQ ID NO: 11388 - DNA, 40 bp, Homo sapiens
tctttttgtttgtttgtttgttttgagatggagtcttact

SEQ ID NO: 11389 - DNA, 40 bp, Homo sapiens
agtaagactccatctcaaaacaaacaaacaaacaaaaaga

SEQ ID NO: 11390 - DNA, 40 bp, Homo sapiens
ctttttgtttgtttgtttgttttgagatggagtcttactc

SEQ ID NO: 11391 - DNA, 40 bp, Homo sapiens
gagtaagactccatctcaaaacaaacaaacaaacaaaaag

SEQ ID NO: 11392 - DNA, 40 bp, Homo sapiens
tttttgtttgtttgtttgttttgagatggagtcttactcc

SEQ ID NO: 11393 - DNA, 40 bp, Homo sapiens
ggagtaagactccatctcaaaacaaacaaacaaacaaaaa

SEQ ID NO: 11394 - DNA, 40 bp, Homo sapiens
ttttgtttgtttgtttgttttgagatggagtcttactccg

SEQ ID NO: 11395 - DNA, 40 bp, Homo sapiens
cggagtaagactccatctcaaaacaaacaaacaaacaaaa

SEQ ID NO: 11396 - DNA, 40 bp, Homo sapiens
tttgtttgtttgtttgttttgagatggagtcttactccgt

SEQ ID NO: 11397 - DNA, 40 bp, Homo sapiens
acggagtaagactccatctcaaaacaaacaaacaaacaaa

SEQ ID NO: 11398 - DNA, 40 bp, Homo sapiens
ttgtttgtttgtttgttttgagatggagtcttactccgtc

SEQ ID NO: 11399 - DNA, 40 bp, Homo sapiens
gacggagtaagactccatctcaaaacaaacaaacaaacaa

SEQ ID NO: 11400 - DNA, 40 bp, Homo sapiens
tgtttgtttgtttgttttgagatggagtcttactccgtca

SEQ ID NO: 11401 - DNA, 40 bp, Homo sapiens
tgacggagtaagactccatctcaaaacaaacaaacaaaca

SEQ ID NO: 11402 - DNA, 40 bp, Homo sapiens
gtttgtttgtttgttttgagatggagtcttactccgtcac

SEQ ID NO: 11403 - DNA, 40 bp, Homo sapiens
gtgacggagtaagactccatctcaaaacaaacaaacaaac

SEQ ID NO: 11404 - DNA, 40 bp, Homo sapiens
tttgtttgtttgttttgagatggagtcttactccgtcacc

SEQ ID NO: 11405 - DNA, 40 bp, Homo sapiens
ggtgacggagtaagactccatctcaaaacaaacaaacaaa

SEQ ID NO: 11406 - DNA, 40 bp, Homo sapiens
ttgtttgtttgttttgagatggagtcttactccgtcaccc

SEQ ID NO: 11407 - DNA, 40 bp, Homo sapiens
gggtgacggagtaagactccatctcaaaacaaacaaacaa

SEQ ID NO: 11408 - DNA, 40 bp, Homo sapiens
tgtttgtttgttttgagatggagtcttactccgtcaccca

SEQ ID NO: 11409 - DNA, 40 bp, Homo sapiens
tgggtgacggagtaagactccatctcaaaacaaacaaaca

SEQ ID NO: 11410 - DNA, 40 bp, Homo sapiens
gtttgtttgttttgagatggagtcttactccgtcacccaa

SEQ ID NO: 11411 - DNA, 40 bp, Homo sapiens
ttgggtgacggagtaagactccatctcaaaacaaacaaac

SEQ ID NO: 11412 - DNA, 40 bp, Homo sapiens
tttgtttgttttgagatggagtcttactccgtcacccaat

SEQ ID NO: 11413 - DNA, 40 bp, Homo sapiens
attgggtgacggagtaagactccatctcaaaacaaacaaa

SEQ ID NO: 11414 - DNA, 40 bp, Homo sapiens
ttgtttgttttgagatggagtcttactccgtcacccaatc

SEQ ID NO: 11415 - DNA, 40 bp, Homo sapiens
gattgggtgacggagtaagactccatctcaaaacaaacaa

SEQ ID NO: 11416 - DNA, 40 bp, Homo sapiens
tgtttgttttgagatggagtcttactccgtcacccaatct

SEQ ID NO: 11417 - DNA, 40 bp, Homo sapiens
agattgggtgacggagtaagactccatctcaaaacaaaca

SEQ ID NO: 11418 - DNA, 40 bp, Homo sapiens
gtttgttttgagatggagtcttactccgtcacccaatctg

SEQ ID NO: 11419 - DNA, 40 bp, Homo sapiens
cagattgggtgacggagtaagactccatctcaaaacaaac

SEQ ID NO: 11420 - DNA, 40 bp, Homo sapiens
tttgttttgagatggagtcttactccgtcacccaatctgg

SEQ ID NO: 11421 - DNA, 40 bp, Homo sapiens
ccagattgggtgacggagtaagactccatctcaaaacaaa

SEQ ID NO: 11422 - DNA, 40 bp, Homo sapiens
ttgttttgagatggagtcttactccgtcacccaatctgga

SEQ ID NO: 11423 - DNA, 40 bp, Homo sapiens
tccagattgggtgacggagtaagactccatctcaaaacaa

SEQ ID NO: 11424 - DNA, 40 bp, Homo sapiens
tgttttgagatggagtcttactccgtcacccaatctggag

SEQ ID NO: 11425 - DNA, 40 bp, Homo sapiens
ctccagattgggtgacggagtaagactccatctcaaaaca

SEQ ID NO: 11426 - DNA, 40 bp, Homo sapiens
gttttgagatggagtcttactccgtcacccaatctggagt

SEQ ID NO: 11427 - DNA, 40 bp, Homo sapiens
actccagattgggtgacggagtaagactccatctcaaaac

SEQ ID NO: 11428 - DNA, 40 bp, Homo sapiens
ttttgagatggagtcttactccgtcacccaatctggagtg

SEQ ID NO: 11429 - DNA, 40 bp, Homo sapiens
cactccagattgggtgacggagtaagactccatctcaaaa

SEQ ID NO: 11430 - DNA, 40 bp, Homo sapiens
tttgagatggagtcttactccgtcacccaatctggagtgc

SEQ ID NO: 11431 - DNA, 40 bp, Homo sapiens
gcactccagattgggtgacggagtaagactccatctcaaa

SEQ ID NO: 11432 - DNA, 40 bp, Homo sapiens
ttgagatggagtcttactccgtcacccaatctggagtgca

SEQ ID NO: 11433 - DNA, 40 bp, Homo sapiens
tgcactccagattgggtgacggagtaagactccatctcaa

SEQ ID NO: 11434 - DNA, 40 bp, Homo sapiens
tgagatggagtcttactccgtcacccaatctggagtgcag

SEQ ID NO: 11435 - DNA, 40 bp, Homo sapiens
ctgcactccagattgggtgacggagtaagactccatctca

SEQ ID NO: 11436 - DNA, 40 bp, Homo sapiens
gagatggagtcttactccgtcacccaatctggagtgcagt

SEQ ID NO: 11437 - DNA, 40 bp, Homo sapiens
actgcactccagattgggtgacggagtaagactccatctc

SEQ ID NO: 11438 - DNA, 40 bp, Homo sapiens
agatggagtcttactccgtcacccaatctggagtgcagtg

SEQ ID NO: 11439 - DNA, 40 bp, Homo sapiens
cactgcactccagattgggtgacggagtaagactccatct

SEQ ID NO: 11440 - DNA, 40 bp, Homo sapiens
gatggagtcttactccgtcacccaatctggagtgcagtgg

SEQ ID NO: 11441 - DNA, 40 bp, Homo sapiens
ccactgcactccagattgggtgacggagtaagactccatc

SEQ ID NO: 11442 - DNA, 40 bp, Homo sapiens
atggagtcttactccgtcacccaatctggagtgcagtggc

SEQ ID NO: 11443 - DNA, 40 bp, Homo sapiens
gccactgcactccagattgggtgacggagtaagactccat

SEQ ID NO: 11444 - DNA, 40 bp, Homo sapiens
tggagtcttactccgtcacccaatctggagtgcagtggcg

SEQ ID NO: 11445 - DNA, 40 bp, Homo sapiens
cgccactgcactccagattgggtgacggagtaagactcca

SEQ ID NO: 11446 - DNA, 40 bp, Homo sapiens
ggagtcttactccgtcacccaatctggagtgcagtggcgt

SEQ ID NO: 11447 - DNA, 40 bp, Homo sapiens
acgccactgcactccagattgggtgacggagtaagactcc

SEQ ID NO: 11448 - DNA, 40 bp, Homo sapiens
gagtcttactccgtcacccaatctggagtgcagtggcgtg

SEQ ID NO: 11449 - DNA, 40 bp, Homo sapiens
cacgccactgcactccagattgggtgacggagtaagactc

SEQ ID NO: 11450 - DNA, 40 bp, Homo sapiens
agtcttactccgtcacccaatctggagtgcagtggcgtga

SEQ ID NO: 11451 - DNA, 40 bp, Homo sapiens
tcacgccactgcactccagattgggtgacggagtaagact

SEQ ID NO: 11452 - DNA, 40 bp, Homo sapiens
gtcttactccgtcacccaatctggagtgcagtggcgtgat

SEQ ID NO: 11453 - DNA, 40 bp, Homo sapiens
atcacgccactgcactccagattgggtgacggagtaagac

SEQ ID NO: 11454 - DNA, 40 bp, Homo sapiens
tcttactccgtcacccaatctggagtgcagtggcgtgatc

SEQ ID NO: 11455 - DNA, 40 bp, Homo sapiens
gatcacgccactgcactccagattgggtgacggagtaaga

SEQ ID NO: 11456 - DNA, 40 bp, Homo sapiens
cttactccgtcacccaatctggagtgcagtggcgtgatct

SEQ ID NO: 11457 - DNA, 40 bp, Homo sapiens
agatcacgccactgcactccagattgggtgacggagtaag

SEQ ID NO: 11458 - DNA, 40 bp, Homo sapiens
ttactccgtcacccaatctggagtgcagtggcgtgatctg

SEQ ID NO: 11459 - DNA, 40 bp, Homo sapiens
cagatcacgccactgcactccagattgggtgacggagtaa

SEQ ID NO: 11460 - DNA, 40 bp, Homo sapiens
tactccgtcacccaatctggagtgcagtggcgtgatctgg

SEQ ID NO: 11461 - DNA, 40 bp, Homo sapiens
ccagatcacgccactgcactccagattgggtgacggagta

SEQ ID NO: 11462 - DNA, 40 bp, Homo sapiens
actccgtcacccaatctggagtgcagtggcgtgatctggg

SEQ ID NO: 11463 - DNA, 40 bp, Homo sapiens
cccagatcacgccactgcactccagattgggtgacggagt

SEQ ID NO: 11464 - DNA, 40 bp, Homo sapiens
ctccgtcacccaatctggagtgcagtggcgtgatctgggc

SEQ ID NO: 11465 - DNA, 40 bp, Homo sapiens
gcccagatcacgccactgcactccagattgggtgacggag

SEQ ID NO: 11466 - DNA, 40 bp, Homo sapiens
tccgtcacccaatctggagtgcagtggcgtgatctgggct

SEQ ID NO: 11467 - DNA, 40 bp, Homo sapiens
agcccagatcacgccactgcactccagattgggtgacgga

SEQ ID NO: 11468 - DNA, 40 bp, Homo sapiens
ccgtcacccaatctggagtgcagtggcgtgatctgggctc

SEQ ID NO: 11469 - DNA, 40 bp, Homo sapiens
gagcccagatcacgccactgcactccagattgggtgacgg

SEQ ID NO: 11470 - DNA, 40 bp, Homo sapiens
cgtcacccaatctggagtgcagtggcgtgatctgggctca

SEQ ID NO: 11471 - DNA, 40 bp, Homo sapiens
tgagcccagatcacgccactgcactccagattgggtgacg

SEQ ID NO: 11472 - DNA, 40 bp, Homo sapiens
gtcacccaatctggagtgcagtggcgtgatctgggctcac

SEQ ID NO: 11473 - DNA, 40 bp, Homo sapiens
gtgagcccagatcacgccactgcactccagattgggtgac

SEQ ID NO: 11474 - DNA, 40 bp, Homo sapiens
tcacccaatctggagtgcagtggcgtgatctgggctcact

SEQ ID NO: 11475 - DNA, 40 bp, Homo sapiens
agtgagcccagatcacgccactgcactccagattgggtga

SEQ ID NO: 11476 - DNA, 40 bp, Homo sapiens
cacccaatctggagtgcagtggcgtgatctgggctcactg

SEQ ID NO: 11477 - DNA, 40 bp, Homo sapiens
cagtgagcccagatcacgccactgcactccagattgggtg

SEQ ID NO: 11478 - DNA, 40 bp, Homo sapiens
acccaatctggagtgcagtggcgtgatctgggctcactgc

SEQ ID NO: 11479 - DNA, 40 bp, Homo sapiens
gcagtgagcccagatcacgccactgcactccagattgggt

SEQ ID NO: 11480 - DNA, 40 bp, Homo sapiens
cccaatctggagtgcagtggcgtgatctgggctcactgca

SEQ ID NO: 11481 - DNA, 40 bp, Homo sapiens
tgcagtgagcccagatcacgccactgcactccagattggg

SEQ ID NO: 11482 - DNA, 40 bp, Homo sapiens
ccaatctggagtgcagtggcgtgatctgggctcactgcaa

SEQ ID NO: 11483 - DNA, 40 bp, Homo sapiens
ttgcagtgagcccagatcacgccactgcactccagattgg

SEQ ID NO: 11484 - DNA, 40 bp, Homo sapiens
caatctggagtgcagtggcgtgatctgggctcactgcaac

SEQ ID NO: 11485 - DNA, 40 bp, Homo sapiens
gttgcagtgagcccagatcacgccactgcactccagattg

SEQ ID NO: 11486 - DNA, 40 bp, Homo sapiens
aatctggagtgcagtggcgtgatctgggctcactgcaacc

SEQ ID NO: 11487 - DNA, 40 bp, Homo sapiens
ggttgcagtgagcccagatcacgccactgcactccagatt

SEQ ID NO: 11488 - DNA, 40 bp, Homo sapiens
atctggagtgcagtggcgtgatctgggctcactgcaacct

SEQ ID NO: 11489 - DNA, 40 bp, Homo sapiens
aggttgcagtgagcccagatcacgccactgcactccagat

SEQ ID NO: 11490 - DNA, 40 bp, Homo sapiens
tctggagtgcagtggcgtgatctgggctcactgcaacctc

SEQ ID NO: 11491 - DNA, 40 bp, Homo sapiens
gaggttgcagtgagcccagatcacgccactgcactccaga

SEQ ID NO: 11492 - DNA, 40 bp, Homo sapiens
ctggagtgcagtggcgtgatctgggctcactgcaacctct

SEQ ID NO: 11493 - DNA, 40 bp, Homo sapiens
agaggttgcagtgagcccagatcacgccactgcactccag

SEQ ID NO: 11494 - DNA, 40 bp, Homo sapiens
tggagtgcagtggcgtgatctgggctcactgcaacctctg

SEQ ID NO: 11495 - DNA, 40 bp, Homo sapiens
cagaggttgcagtgagcccagatcacgccactgcactcca

SEQ ID NO: 11496 - DNA, 40 bp, Homo sapiens
ggagtgcagtggcgtgatctgggctcactgcaacctctgc

SEQ ID NO: 11497 - DNA, 40 bp, Homo sapiens
gcagaggttgcagtgagcccagatcacgccactgcactcc

SEQ ID NO: 11498 - DNA, 40 bp, Homo sapiens
gagtgcagtggcgtgatctgggctcactgcaacctctgcc

SEQ ID NO: 11499 - DNA, 40 bp, Homo sapiens
ggcagaggttgcagtgagcccagatcacgccactgcactc

SEQ ID NO: 11500 - DNA, 40 bp, Homo sapiens
agtgcagtggcgtgatctgggctcactgcaacctctgcct

SEQ ID NO: 11501 - DNA, 40 bp, Homo sapiens
aggcagaggttgcagtgagcccagatcacgccactgcact

SEQ ID NO: 11502 - DNA, 40 bp, Homo sapiens
gtgcagtggcgtgatctgggctcactgcaacctctgcctc

SEQ ID NO: 11503 - DNA, 40 bp, Homo sapiens
gaggcagaggttgcagtgagcccagatcacgccactgcac

SEQ ID NO: 11504 - DNA, 40 bp, Homo sapiens
tgcagtggcgtgatctgggctcactgcaacctctgcctcc

SEQ ID NO: 11505 - DNA, 40 bp, Homo sapiens
ggaggcagaggttgcagtgagcccagatcacgccactgca

SEQ ID NO: 11506 - DNA, 40 bp, Homo sapiens
gcagtggcgtgatctgggctcactgcaacctctgcctccc

SEQ ID NO: 11507 - DNA, 40 bp, Homo sapiens
gggaggcagaggttgcagtgagcccagatcacgccactgc

SEQ ID NO: 11508 - DNA, 40 bp, Homo sapiens
cagtggcgtgatctgggctcactgcaacctctgcctcccg

SEQ ID NO: 11509 - DNA, 40 bp, Homo sapiens
cgggaggcagaggttgcagtgagcccagatcacgccactg

SEQ ID NO: 11510 - DNA, 40 bp, Homo sapiens
agtggcgtgatctgggctcactgcaacctctgcctcccgg

SEQ ID NO: 11511 - DNA, 40 bp, Homo sapiens
ccgggaggcagaggttgcagtgagcccagatcacgccact

SEQ ID NO: 11512 - DNA, 40 bp, Homo sapiens
gtggcgtgatctgggctcactgcaacctctgcctcccggg

SEQ ID NO: 11513 - DNA, 40 bp, Homo sapiens
cccgggaggcagaggttgcagtgagcccagatcacgccac

SEQ ID NO: 11514 - DNA, 40 bp, Homo sapiens
tggcgtgatctgggctcactgcaacctctgcctcccgggt

SEQ ID NO: 11515 - DNA, 40 bp, Homo sapiens
acccgggaggcagaggttgcagtgagcccagatcacgcca

SEQ ID NO: 11516 - DNA, 40 bp, Homo sapiens
ggcgtgatctgggctcactgcaacctctgcctcccgggtt

SEQ ID NO: 11517 - DNA, 40 bp, Homo sapiens
aacccgggaggcagaggttgcagtgagcccagatcacgcc

SEQ ID NO: 11518 - DNA, 40 bp, Homo sapiens
gcgtgatctgggctcactgcaacctctgcctcccgggttc

SEQ ID NO: 11519 - DNA, 40 bp, Homo sapiens
gaacccgggaggcagaggttgcagtgagcccagatcacgc

SEQ ID NO: 11520 - DNA, 40 bp, Homo sapiens
cgtgatctgggctcactgcaacctctgcctcccgggttca

SEQ ID NO: 11521 - DNA, 40 bp, Homo sapiens
tgaacccgggaggcagaggttgcagtgagcccagatcacg

SEQ ID NO: 11522 - DNA, 40 bp, Homo sapiens
gtgatctgggctcactgcaacctctgcctcccgggttcaa

SEQ ID NO: 11523 - DNA, 40 bp, Homo sapiens
ttgaacccgggaggcagaggttgcagtgagcccagatcac

SEQ ID NO: 11524 - DNA, 40 bp, Homo sapiens
tgatctgggctcactgcaacctctgcctcccgggttcaag

SEQ ID NO: 11525 - DNA, 40 bp, Homo sapiens
cttgaacccgggaggcagaggttgcagtgagcccagatca

SEQ ID NO: 11526 - DNA, 40 bp, Homo sapiens
gatctgggctcactgcaacctctgcctcccgggttcaagt

SEQ ID NO: 11527 - DNA, 40 bp, Homo sapiens
acttgaacccgggaggcagaggttgcagtgagcccagatc

SEQ ID NO: 11528 - DNA, 40 bp, Homo sapiens
atctgggctcactgcaacctctgcctcccgggttcaagtg

SEQ ID NO: 11529 - DNA, 40 bp, Homo sapiens
cacttgaacccgggaggcagaggttgcagtgagcccagat

SEQ ID NO: 11530 - DNA, 40 bp, Homo sapiens
tctgggctcactgcaacctctgcctcccgggttcaagtga

SEQ ID NO: 11531 - DNA, 40 bp, Homo sapiens
tcacttgaacccgggaggcagaggttgcagtgagcccaga

SEQ ID NO: 11532 - DNA, 40 bp, Homo sapiens
ctgggctcactgcaacctctgcctcccgggttcaagtgat

SEQ ID NO: 11533 - DNA, 40 bp, Homo sapiens
atcacttgaacccgggaggcagaggttgcagtgagcccag

SEQ ID NO: 11534 - DNA, 40 bp, Homo sapiens
tgggctcactgcaacctctgcctcccgggttcaagtgatt

SEQ ID NO: 11535 - DNA, 40 bp, Homo sapiens
aatcacttgaacccgggaggcagaggttgcagtgagccca

SEQ ID NO: 11536 - DNA, 40 bp, Homo sapiens
gggctcactgcaacctctgcctcccgggttcaagtgattc

SEQ ID NO: 11537 - DNA, 40 bp, Homo sapiens
gaatcacttgaacccgggaggcagaggttgcagtgagccc

SEQ ID NO: 11538 - DNA, 40 bp, Homo sapiens
ggctcactgcaacctctgcctcccgggttcaagtgattct

SEQ ID NO: 11539 - DNA, 40 bp, Homo sapiens
agaatcacttgaacccgggaggcagaggttgcagtgagcc

SEQ ID NO: 11540 - DNA, 40 bp, Homo sapiens
gctcactgcaacctctgcctcccgggttcaagtgattctc

SEQ ID NO: 11541 - DNA, 40 bp, Homo sapiens
gagaatcacttgaacccgggaggcagaggttgcagtgagc

SEQ ID NO: 11542 - DNA, 40 bp, Homo sapiens
ctcactgcaacctctgcctcccgggttcaagtgattctcc

SEQ ID NO: 11543 - DNA, 40 bp, Homo sapiens
ggagaatcacttgaacccgggaggcagaggttgcagtgag

SEQ ID NO: 11544 - DNA, 40 bp, Homo sapiens
tcactgcaacctctgcctcccgggttcaagtgattctcct

SEQ ID NO: 11545 - DNA, 40 bp, Homo sapiens
aggagaatcacttgaacccgggaggcagaggttgcagtga

SEQ ID NO: 11546 - DNA, 40 bp, Homo sapiens
cactgcaacctctgcctcccgggttcaagtgattctcctt

SEQ ID NO: 11547 - DNA, 40 bp, Homo sapiens
aaggagaatcacttgaacccgggaggcagaggttgcagtg

SEQ ID NO: 11548 - DNA, 40 bp, Homo sapiens
actgcaacctctgcctcccgggttcaagtgattctccttc

SEQ ID NO: 11549 - DNA, 40 bp, Homo sapiens
gaaggagaatcacttgaacccgggaggcagaggttgcagt

SEQ ID NO: 11550 - DNA, 40 bp, Homo sapiens
ctgcaacctctgcctcccgggttcaagtgattctccttcc

SEQ ID NO: 11551 - DNA, 40 bp, Homo sapiens
ggaaggagaatcacttgaacccgggaggcagaggttgcag

SEQ ID NO: 11552 - DNA, 40 bp, Homo sapiens
tgcaacctctgcctcccgggttcaagtgattctccttcct

SEQ ID NO: 11553 - DNA, 40 bp, Homo sapiens
aggaaggagaatcacttgaacccgggaggcagaggttgca

SEQ ID NO: 11554 - DNA, 40 bp, Homo sapiens
gcaacctctgcctcccgggttcaagtgattctccttcctc

SEQ ID NO: 11555 - DNA, 40 bp, Homo sapiens
gaggaaggagaatcacttgaacccgggaggcagaggttgc

SEQ ID NO: 11556 - DNA, 40 bp, Homo sapiens
caacctctgcctcccgggttcaagtgattctccttcctca

SEQ ID NO: 11557 - DNA, 40 bp, Homo sapiens
tgaggaaggagaatcacttgaacccgggaggcagaggttg

SEQ ID NO: 11558 - DNA, 40 bp, Homo sapiens
aacctctgcctcccgggttcaagtgattctccttcctcag

SEQ ID NO: 11559 - DNA, 40 bp, Homo sapiens
ctgaggaaggagaatcacttgaacccgggaggcagaggtt

SEQ ID NO: 11560 - DNA, 40 bp, Homo sapiens
acctctgcctcccgggttcaagtgattctccttcctcagc

SEQ ID NO: 11561 - DNA, 40 bp, Homo sapiens
gctgaggaaggagaatcacttgaacccgggaggcagaggt

SEQ ID NO: 11562 - DNA, 40 bp, Homo sapiens
cctctgcctcccgggttcaagtgattctccttcctcagcc

SEQ ID NO: 11563 - DNA, 40 bp, Homo sapiens
ggctgaggaaggagaatcacttgaacccgggaggcagagg

SEQ ID NO: 11564 - DNA, 40 bp, Homo sapiens
ctctgcctcccgggttcaagtgattctccttcctcagcct

SEQ ID NO: 11565 - DNA, 40 bp, Homo sapiens
aggctgaggaaggagaatcacttgaacccgggaggcagag

SEQ ID NO: 11566 - DNA, 40 bp, Homo sapiens
tctgcctcccgggttcaagtgattctccttcctcagcctc

SEQ ID NO: 11567 - DNA, 40 bp, Homo sapiens
gaggctgaggaaggagaatcacttgaacccgggaggcaga

SEQ ID NO: 11568 - DNA, 40 bp, Homo sapiens
ctgcctcccgggttcaagtgattctccttcctcagcctcc

SEQ ID NO: 11569 - DNA, 40 bp, Homo sapiens
ggaggctgaggaaggagaatcacttgaacccgggaggcag

SEQ ID NO: 11570 - DNA, 40 bp, Homo sapiens
tgcctcccgggttcaagtgattctccttcctcagcctccc

SEQ ID NO: 11571 - DNA, 40 bp, Homo sapiens
gggaggctgaggaaggagaatcacttgaacccgggaggca

SEQ ID NO: 11572 - DNA, 40 bp, Homo sapiens
gcctcccgggttcaagtgattctccttcctcagcctcccc

SEQ ID NO: 11573 - DNA, 40 bp, Homo sapiens
ggggaggctgaggaaggagaatcacttgaacccgggaggc

SEQ ID NO: 11574 - DNA, 40 bp, Homo sapiens
cctcccgggttcaagtgattctccttcctcagcctcccca

SEQ ID NO: 11575 - DNA, 40 bp, Homo sapiens
tggggaggctgaggaaggagaatcacttgaacccgggagg

SEQ ID NO: 11576 - DNA, 40 bp, Homo sapiens
ctcccgggttcaagtgattctccttcctcagcctccccag

SEQ ID NO: 11577 - DNA, 40 bp, Homo sapiens
ctggggaggctgaggaaggagaatcacttgaacccgggag

SEQ ID NO: 11578 - DNA, 40 bp, Homo sapiens
tcccgggttcaagtgattctccttcctcagcctccccagt

SEQ ID NO: 11579 - DNA, 40 bp, Homo sapiens
actggggaggctgaggaaggagaatcacttgaacccggga

SEQ ID NO: 11580 - DNA, 40 bp, Homo sapiens
cccgggttcaagtgattctccttcctcagcctccccagta

SEQ ID NO: 11581 - DNA, 40 bp, Homo sapiens
tactggggaggctgaggaaggagaatcacttgaacccggg

SEQ ID NO: 11582 - DNA, 40 bp, Homo sapiens
ccgggttcaagtgattctccttcctcagcctccccagtag

SEQ ID NO: 11583 - DNA, 40 bp, Homo sapiens
ctactggggaggctgaggaaggagaatcacttgaacccgg

SEQ ID NO: 11584 - DNA, 40 bp, Homo sapiens
cgggttcaagtgattctccttcctcagcctccccagtagc

SEQ ID NO: 11585 - DNA, 40 bp, Homo sapiens
gctactggggaggctgaggaaggagaatcacttgaacccg

SEQ ID NO: 11586 - DNA, 40 bp, Homo sapiens
gggttcaagtgattctccttcctcagcctccccagtagct

SEQ ID NO: 11587 - DNA, 40 bp, Homo sapiens
agctactggggaggctgaggaaggagaatcacttgaaccc

SEQ ID NO: 11588 - DNA, 40 bp, Homo sapiens
ggttcaagtgattctccttcctcagcctccccagtagcta

SEQ ID NO: 11589 - DNA, 40 bp, Homo sapiens
tagctactggggaggctgaggaaggagaatcacttgaacc

SEQ ID NO: 11590 - DNA, 40 bp, Homo sapiens
gttcaagtgattctccttcctcagcctccccagtagctag

SEQ ID NO: 11591 - DNA, 40 bp, Homo sapiens
ctagctactggggaggctgaggaaggagaatcacttgaac

SEQ ID NO: 11592 - DNA, 40 bp, Homo sapiens
ttcaagtgattctccttcctcagcctccccagtagctagg

SEQ ID NO: 11593 - DNA, 40 bp, Homo sapiens
cctagctactggggaggctgaggaaggagaatcacttgaa

SEQ ID NO: 11594 - DNA, 40 bp, Homo sapiens
tcaagtgattctccttcctcagcctccccagtagctagga

SEQ ID NO: 11595 - DNA, 40 bp, Homo sapiens
tcctagctactggggaggctgaggaaggagaatcacttga

SEQ ID NO: 11596 - DNA, 40 bp, Homo sapiens
caagtgattctccttcctcagcctccccagtagctaggac

SEQ ID NO: 11597 - DNA, 40 bp, Homo sapiens
gtcctagctactggggaggctgaggaaggagaatcacttg

SEQ ID NO: 11598 - DNA, 40 bp, Homo sapiens
aagtgattctccttcctcagcctccccagtagctaggact

SEQ ID NO: 11599 - DNA, 40 bp, Homo sapiens
agtcctagctactggggaggctgaggaaggagaatcactt

SEQ ID NO: 11600 - DNA, 40 bp, Homo sapiens
agtgattctccttcctcagcctccccagtagctaggacta

SEQ ID NO: 11601 - DNA, 40 bp, Homo sapiens
tagtcctagctactggggaggctgaggaaggagaatcact

SEQ ID NO: 11602 - DNA, 40 bp, Homo sapiens
gtgattctccttcctcagcctccccagtagctaggactac

SEQ ID NO: 11603 - DNA, 40 bp, Homo sapiens
gtagtcctagctactggggaggctgaggaaggagaatcac

SEQ ID NO: 11604 - DNA, 40 bp, Homo sapiens
tgattctccttcctcagcctccccagtagctaggactaca

SEQ ID NO: 11605 - DNA, 40 bp, Homo sapiens
tgtagtcctagctactggggaggctgaggaaggagaatca

SEQ ID NO: 11606 - DNA, 40 bp, Homo sapiens
gattctccttcctcagcctccccagtagctaggactacag

SEQ ID NO: 11607 - DNA, 40 bp, Homo sapiens
ctgtagtcctagctactggggaggctgaggaaggagaatc

SEQ ID NO: 11608 - DNA, 40 bp, Homo sapiens
attctccttcctcagcctccccagtagctaggactacagg

SEQ ID NO: 11609 - DNA, 40 bp, Homo sapiens
cctgtagtcctagctactggggaggctgaggaaggagaat

SEQ ID NO: 11610 - DNA, 40 bp, Homo sapiens
ttctccttcctcagcctccccagtagctaggactacagga

SEQ ID NO: 11611 - DNA, 40 bp, Homo sapiens
tcctgtagtcctagctactggggaggctgaggaaggagaa

SEQ ID NO: 11612 - DNA, 40 bp, Homo sapiens
tctccttcctcagcctccccagtagctaggactacaggag

SEQ ID NO: 11613 - DNA, 40 bp, Homo sapiens
ctcctgtagtcctagctactggggaggctgaggaaggaga

SEQ ID NO: 11614 - DNA, 40 bp, Homo sapiens
ctccttcctcagcctccccagtagctaggactacaggaga

SEQ ID NO: 11615 - DNA, 40 bp, Homo sapiens
tctcctgtagtcctagctactggggaggctgaggaaggag

SEQ ID NO: 11616 - DNA, 40 bp, Homo sapiens
tccttcctcagcctccccagtagctaggactacaggagag

SEQ ID NO: 11617 - DNA, 40 bp, Homo sapiens
ctctcctgtagtcctagctactggggaggctgaggaagga

SEQ ID NO: 11618 - DNA, 40 bp, Homo sapiens
ccttcctcagcctccccagtagctaggactacaggagagc

SEQ ID NO: 11619 - DNA, 40 bp, Homo sapiens
gctctcctgtagtcctagctactggggaggctgaggaagg

SEQ ID NO: 11620 - DNA, 40 bp, Homo sapiens
cttcctcagcctccccagtagctaggactacaggagagcg

SEQ ID NO: 11621 - DNA, 40 bp, Homo sapiens
cgctctcctgtagtcctagctactggggaggctgaggaag

SEQ ID NO: 11622 - DNA, 40 bp, Homo sapiens
ttcctcagcctccccagtagctaggactacaggagagcgc

SEQ ID NO: 11623 - DNA, 40 bp, Homo sapiens
gcgctctcctgtagtcctagctactggggaggctgaggaa

SEQ ID NO: 11624 - DNA, 40 bp, Homo sapiens
tcctcagcctccccagtagctaggactacaggagagcgcc

SEQ ID NO: 11625 - DNA, 40 bp, Homo sapiens
ggcgctctcctgtagtcctagctactggggaggctgagga

SEQ ID NO: 11626 - DNA, 40 bp, Homo sapiens
cctcagcctccccagtagctaggactacaggagagcgcca

SEQ ID NO: 11627 - DNA, 40 bp, Homo sapiens
tggcgctctcctgtagtcctagctactggggaggctgagg

SEQ ID NO: 11628 - DNA, 40 bp, Homo sapiens
ctcagcctccccagtagctaggactacaggagagcgccac

SEQ ID NO: 11629 - DNA, 40 bp, Homo sapiens
gtggcgctctcctgtagtcctagctactggggaggctgag

SEQ ID NO: 11630 - DNA, 40 bp, Homo sapiens
tcagcctccccagtagctaggactacaggagagcgccacc

SEQ ID NO: 11631 - DNA, 40 bp, Homo sapiens
ggtggcgctctcctgtagtcctagctactggggaggctga

SEQ ID NO: 11632 - DNA, 40 bp, Homo sapiens
cagcctccccagtagctaggactacaggagagcgccacca

SEQ ID NO: 11633 - DNA, 40 bp, Homo sapiens
tggtggcgctctcctgtagtcctagctactggggaggctg

SEQ ID NO: 11634 - DNA, 40 bp, Homo sapiens
agcctccccagtagctaggactacaggagagcgccaccac

SEQ ID NO: 11635 - DNA, 40 bp, Homo sapiens
gtggtggcgctctcctgtagtcctagctactggggaggct

SEQ ID NO: 11636 - DNA, 40 bp, Homo sapiens
gcctccccagtagctaggactacaggagagcgccaccacg

SEQ ID NO: 11637 - DNA, 40 bp, Homo sapiens
cgtggtggcgctctcctgtagtcctagctactggggaggc

SEQ ID NO: 11638 - DNA, 40 bp, Homo sapiens
cctccccagtagctaggactacaggagagcgccaccacgc

SEQ ID NO: 11639 - DNA, 40 bp, Homo sapiens
gcgtggtggcgctctcctgtagtcctagctactggggagg

SEQ ID NO: 11640 - DNA, 40 bp, Homo sapiens
ctccccagtagctaggactacaggagagcgccaccacgcc

SEQ ID NO: 11641 - DNA, 40 bp, Homo sapiens
ggcgtggtggcgctctcctgtagtcctagctactggggag

SEQ ID NO: 11642 - DNA, 40 bp, Homo sapiens
tccccagtagctaggactacaggagagcgccaccacgcct

SEQ ID NO: 11643 - DNA, 40 bp, Homo sapiens
aggcgtggtggcgctctcctgtagtcctagctactgggga

SEQ ID NO: 11644 - DNA, 40 bp, Homo sapiens
ccccagtagctaggactacaggagagcgccaccacgcctg

SEQ ID NO: 11645 - DNA, 40 bp, Homo sapiens
caggcgtggtggcgctctcctgtagtcctagctactgggg

SEQ ID NO: 11646 - DNA, 40 bp, Homo sapiens
cccagtagctaggactacaggagagcgccaccacgcctga

SEQ ID NO: 11647 - DNA, 40 bp, Homo sapiens
tcaggcgtggtggcgctctcctgtagtcctagctactggg

SEQ ID NO: 11648 - DNA, 40 bp, Homo sapiens
ccagtagctaggactacaggagagcgccaccacgcctgat

SEQ ID NO: 11649 - DNA, 40 bp, Homo sapiens
atcaggcgtggtggcgctctcctgtagtcctagctactgg

SEQ ID NO: 11650 - DNA, 40 bp, Homo sapiens
cagtagctaggactacaggagagcgccaccacgcctgatt

SEQ ID NO: 11651 - DNA, 40 bp, Homo sapiens
aatcaggcgtggtggcgctctcctgtagtcctagctactg

SEQ ID NO: 11652 - DNA, 40 bp, Homo sapiens
agtagctaggactacaggagagcgccaccacgcctgatta

SEQ ID NO: 11653 - DNA, 40 bp, Homo sapiens
taatcaggcgtggtggcgctctcctgtagtcctagctact

SEQ ID NO: 11654 - DNA, 40 bp, Homo sapiens
gtagctaggactacaggagagcgccaccacgcctgattaa

SEQ ID NO: 11655 - DNA, 40 bp, Homo sapiens
ttaatcaggcgtggtggcgctctcctgtagtcctagctac

SEQ ID NO: 11656 - DNA, 40 bp, Homo sapiens
tagctaggactacaggagagcgccaccacgcctgattaat

SEQ ID NO: 11657 - DNA, 40 bp, Homo sapiens
attaatcaggcgtggtggcgctctcctgtagtcctagcta

SEQ ID NO: 11658 - DNA, 40 bp, Homo sapiens
agctaggactacaggagagcgccaccacgcctgattaatt

SEQ ID NO: 11659 - DNA, 40 bp, Homo sapiens
aattaatcaggcgtggtggcgctctcctgtagtcctagct

SEQ ID NO: 11660 - DNA, 40 bp, Homo sapiens
gctaggactacaggagagcgccaccacgcctgattaattt

SEQ ID NO: 11661 - DNA, 40 bp, Homo sapiens
aaattaatcaggcgtggtggcgctctcctgtagtcctagc

SEQ ID NO: 11662 - DNA, 40 bp, Homo sapiens
ctaggactacaggagagcgccaccacgcctgattaatttt

SEQ ID NO: 11663 - DNA, 40 bp, Homo sapiens
aaaattaatcaggcgtggtggcgctctcctgtagtcctag

SEQ ID NO: 11664 - DNA, 40 bp, Homo sapiens
taggactacaggagagcgccaccacgcctgattaattttt

SEQ ID NO: 11665 - DNA, 40 bp, Homo sapiens
aaaaattaatcaggcgtggtggcgctctcctgtagtccta

SEQ ID NO: 11666 - DNA, 40 bp, Homo sapiens
aggactacaggagagcgccaccacgcctgattaatttttg

SEQ ID NO: 11667 - DNA, 40 bp, Homo sapiens
caaaaattaatcaggcgtggtggcgctctcctgtagtcct

SEQ ID NO: 11668 - DNA, 40 bp, Homo sapiens
ggactacaggagagcgccaccacgcctgattaatttttgt

SEQ ID NO: 11669 - DNA, 40 bp, Homo sapiens
acaaaaattaatcaggcgtggtggcgctctcctgtagtcc

SEQ ID NO: 11670 - DNA, 40 bp, Homo sapiens
gactacaggagagcgccaccacgcctgattaatttttgta

SEQ ID NO: 11671 - DNA, 40 bp, Homo sapiens
tacaaaaattaatcaggcgtggtggcgctctcctgtagtc

SEQ ID NO: 11672 - DNA, 40 bp, Homo sapiens
actacaggagagcgccaccacgcctgattaatttttgtat

SEQ ID NO: 11673 - DNA, 40 bp, Homo sapiens
atacaaaaattaatcaggcgtggtggcgctctcctgtagt

SEQ ID NO: 11674 - DNA, 40 bp, Homo sapiens
ctacaggagagcgccaccacgcctgattaatttttgtatt

SEQ ID NO: 11675 - DNA, 40 bp, Homo sapiens
aatacaaaaattaatcaggcgtggtggcgctctcctgtag

SEQ ID NO: 11676 - DNA, 40 bp, Homo sapiens
tacaggagagcgccaccacgcctgattaatttttgtattt

SEQ ID NO: 11677 - DNA, 40 bp, Homo sapiens
aaatacaaaaattaatcaggcgtggtggcgctctcctgta

SEQ ID NO: 11678 - DNA, 40 bp, Homo sapiens
acaggagagcgccaccacgcctgattaatttttgtatttt

SEQ ID NO: 11679 - DNA, 40 bp, Homo sapiens
aaaatacaaaaattaatcaggcgtggtggcgctctcctgt

SEQ ID NO: 11680 - DNA, 40 bp, Homo sapiens
caggagagcgccaccacgcctgattaatttttgtattttt

SEQ ID NO: 11681 - DNA, 40 bp, Homo sapiens
aaaaatacaaaaattaatcaggcgtggtggcgctctcctg

SEQ ID NO: 11682 - DNA, 40 bp, Homo sapiens
aggagagcgccaccacgcctgattaatttttgtattttta

SEQ ID NO: 11683 - DNA, 40 bp, Homo sapiens
taaaaatacaaaaattaatcaggcgtggtggcgctctcct

SEQ ID NO: 11684 - DNA, 40 bp, Homo sapiens
ggagagcgccaccacgcctgattaatttttgtatttttag

SEQ ID NO: 11685 - DNA, 40 bp, Homo sapiens
ctaaaaatacaaaaattaatcaggcgtggtggcgctctcc

SEQ ID NO: 11686 - DNA, 40 bp, Homo sapiens
gagagcgccaccacgcctgattaatttttgtatttttagt

SEQ ID NO: 11687 - DNA, 40 bp, Homo sapiens
actaaaaatacaaaaattaatcaggcgtggtggcgctctc

SEQ ID NO: 11688 - DNA, 40 bp, Homo sapiens
agagcgccaccacgcctgattaatttttgtatttttagta

SEQ ID NO: 11689 - DNA, 40 bp, Homo sapiens
tactaaaaatacaaaaattaatcaggcgtggtggcgctct

SEQ ID NO: 11690 - DNA, 40 bp, Homo sapiens
gagcgccaccacgcctgattaatttttgtatttttagtag

SEQ ID NO: 11691 - DNA, 40 bp, Homo sapiens
ctactaaaaatacaaaaattaatcaggcgtggtggcgctc

SEQ ID NO: 11692 - DNA, 40 bp, Homo sapiens
agcgccaccacgcctgattaatttttgtatttttagtaga

SEQ ID NO: 11693 - DNA, 40 bp, Homo sapiens
tctactaaaaatacaaaaattaatcaggcgtggtggcgct

SEQ ID NO: 11694 - DNA, 40 bp, Homo sapiens
gcgccaccacgcctgattaatttttgtatttttagtagag

SEQ ID NO: 11695 - DNA, 40 bp, Homo sapiens
ctctactaaaaatacaaaaattaatcaggcgtggtggcgc

SEQ ID NO: 11696 - DNA, 40 bp, Homo sapiens
cgccaccacgcctgattaatttttgtatttttagtagaga

SEQ ID NO: 11697 - DNA, 40 bp, Homo sapiens
tctctactaaaaatacaaaaattaatcaggcgtggtggcg

SEQ ID NO: 11698 - DNA, 40 bp, Homo sapiens
gccaccacgcctgattaatttttgtatttttagtagagag

SEQ ID NO: 11699 - DNA, 40 bp, Homo sapiens
ctctctactaaaaatacaaaaattaatcaggcgtggtggc

SEQ ID NO: 11700 - DNA, 40 bp, Homo sapiens
ccaccacgcctgattaatttttgtatttttagtagagaga

SEQ ID NO: 11701 - DNA, 40 bp, Homo sapiens
tctctctactaaaaatacaaaaattaatcaggcgtggtgg

SEQ ID NO: 11702 - DNA, 40 bp, Homo sapiens
caccacgcctgattaatttttgtatttttagtagagagag

SEQ ID NO: 11703 - DNA, 40 bp, Homo sapiens
ctctctctactaaaaatacaaaaattaatcaggcgtggtg

SEQ ID NO: 11704 - DNA, 40 bp, Homo sapiens
accacgcctgattaatttttgtatttttagtagagagagg

SEQ ID NO: 11705 - DNA, 40 bp, Homo sapiens
cctctctctactaaaaatacaaaaattaatcaggcgtggt

SEQ ID NO: 11706 - DNA, 40 bp, Homo sapiens
ccacgcctgattaatttttgtatttttagtagagagaggg

SEQ ID NO: 11707 - DNA, 40 bp, Homo sapiens
ccctctctctactaaaaatacaaaaattaatcaggcgtgg

SEQ ID NO: 11708 - DNA, 40 bp, Homo sapiens
cacgcctgattaatttttgtatttttagtagagagagggt

SEQ ID NO: 11709 - DNA, 40 bp, Homo sapiens
accctctctctactaaaaatacaaaaattaatcaggcgtg

SEQ ID NO: 11710 - DNA, 40 bp, Homo sapiens
acgcctgattaatttttgtatttttagtagagagagggtt

SEQ ID NO: 11711 - DNA, 40 bp, Homo sapiens
aaccctctctctactaaaaatacaaaaattaatcaggcgt

SEQ ID NO: 11712 - DNA, 40 bp, Homo sapiens
cgcctgattaatttttgtatttttagtagagagagggttt

SEQ ID NO: 11713 - DNA, 40 bp, Homo sapiens
aaaccctctctctactaaaaatacaaaaattaatcaggcg

SEQ ID NO: 11714 - DNA, 40 bp, Homo sapiens
gcctgattaatttttgtatttttagtagagagagggtttc

SEQ ID NO: 11715 - DNA, 40 bp, Homo sapiens
gaaaccctctctctactaaaaatacaaaaattaatcaggc

SEQ ID NO: 11716 - DNA, 40 bp, Homo sapiens
cctgattaatttttgtatttttagtagagagagggtttca

SEQ ID NO: 11717 - DNA, 40 bp, Homo sapiens
tgaaaccctctctctactaaaaatacaaaaattaatcagg

SEQ ID NO: 11718 - DNA, 40 bp, Homo sapiens
ctgattaatttttgtatttttagtagagagagggtttcac

SEQ ID NO: 11719 - DNA, 40 bp, Homo sapiens
gtgaaaccctctctctactaaaaatacaaaaattaatcag

SEQ ID NO: 11720 - DNA, 40 bp, Homo sapiens
tgattaatttttgtatttttagtagagagagggtttcacc

SEQ ID NO: 11721 - DNA, 40 bp, Homo sapiens
ggtgaaaccctctctctactaaaaatacaaaaattaatca

SEQ ID NO: 11722 - DNA, 40 bp, Homo sapiens
gattaatttttgtatttttagtagagagagggtttcacca

SEQ ID NO: 11723 - DNA, 40 bp, Homo sapiens
tggtgaaaccctctctctactaaaaatacaaaaattaatc

SEQ ID NO: 11724 - DNA, 40 bp, Homo sapiens
attaatttttgtatttttagtagagagagggtttcaccat

SEQ ID NO: 11725 - DNA, 40 bp, Homo sapiens
atggtgaaaccctctctctactaaaaatacaaaaattaat

SEQ ID NO: 11726 - DNA, 40 bp, Homo sapiens
ttaatttttgtatttttagtagagagagggtttcaccata

SEQ ID NO: 11727 - DNA, 40 bp, Homo sapiens
tatggtgaaaccctctctctactaaaaatacaaaaattaa

SEQ ID NO: 11728 - DNA, 40 bp, Homo sapiens
taatttttgtatttttagtagagagagggtttcaccatat

SEQ ID NO: 11729 - DNA, 40 bp, Homo sapiens
atatggtgaaaccctctctctactaaaaatacaaaaatta

SEQ ID NO: 11730 - DNA, 40 bp, Homo sapiens
aatttttgtatttttagtagagagagggtttcaccatatt

SEQ ID NO: 11731 - DNA, 40 bp, Homo sapiens
aatatggtgaaaccctctctctactaaaaatacaaaaatt

SEQ ID NO: 11732 - DNA, 40 bp, Homo sapiens
atttttgtatttttagtagagagagggtttcaccatattg

SEQ ID NO: 11733 - DNA, 40 bp, Homo sapiens
caatatggtgaaaccctctctctactaaaaatacaaaaat

SEQ ID NO: 11734 - DNA, 40 bp, Homo sapiens
tttttgtatttttagtagagagagggtttcaccatattgg

SEQ ID NO: 11735 - DNA, 40 bp, Homo sapiens
ccaatatggtgaaaccctctctctactaaaaatacaaaaa

SEQ ID NO: 11736 - DNA, 40 bp, Homo sapiens
ttttgtatttttagtagagagagggtttcaccatattggc

SEQ ID NO: 11737 - DNA, 40 bp, Homo sapiens
gccaatatggtgaaaccctctctctactaaaaatacaaaa

SEQ ID NO: 11738 - DNA, 40 bp, Homo sapiens
tttgtatttttagtagagagagggtttcaccatattggcc

SEQ ID NO: 11739 - DNA, 40 bp, Homo sapiens
ggccaatatggtgaaaccctctctctactaaaaatacaaa

SEQ ID NO: 11740 - DNA, 40 bp, Homo sapiens
ttgtatttttagtagagagagggtttcaccatattggcca

SEQ ID NO: 11741 - DNA, 40 bp, Homo sapiens
tggccaatatggtgaaaccctctctctactaaaaatacaa

SEQ ID NO: 11742 - DNA, 40 bp, Homo sapiens
tgtatttttagtagagagagggtttcaccatattggccag

SEQ ID NO: 11743 - DNA, 40 bp, Homo sapiens
ctggccaatatggtgaaaccctctctctactaaaaataca

SEQ ID NO: 11744 - DNA, 40 bp, Homo sapiens
gtatttttagtagagagagggtttcaccatattggccagg

SEQ ID NO: 11745 - DNA, 40 bp, Homo sapiens
cctggccaatatggtgaaaccctctctctactaaaaatac

SEQ ID NO: 11746 - DNA, 40 bp, Homo sapiens
tatttttagtagagagagggtttcaccatattggccaggc

SEQ ID NO: 11747 - DNA, 40 bp, Homo sapiens
gcctggccaatatggtgaaaccctctctctactaaaaata

SEQ ID NO: 11748 - DNA, 40 bp, Homo sapiens
atttttagtagagagagggtttcaccatattggccaggct

SEQ ID NO: 11749 - DNA, 40 bp, Homo sapiens
agcctggccaatatggtgaaaccctctctctactaaaaat

SEQ ID NO: 11750 - DNA, 40 bp, Homo sapiens
tttttagtagagagagggtttcaccatattggccaggctg

SEQ ID NO: 11751 - DNA, 40 bp, Homo sapiens
cagcctggccaatatggtgaaaccctctctctactaaaaa

SEQ ID NO: 11752 - DNA, 40 bp, Homo sapiens
ttttagtagagagagggtttcaccatattggccaggctgg

SEQ ID NO: 11753 - DNA, 40 bp, Homo sapiens
ccagcctggccaatatggtgaaaccctctctctactaaaa

SEQ ID NO: 11754 - DNA, 40 bp, Homo sapiens
tttagtagagagagggtttcaccatattggccaggctggt

SEQ ID NO: 11755 - DNA, 40 bp, Homo sapiens
accagcctggccaatatggtgaaaccctctctctactaaa

SEQ ID NO: 11756 - DNA, 40 bp, Homo sapiens
ttagtagagagagggtttcaccatattggccaggctggtc

SEQ ID NO: 11757 - DNA, 40 bp, Homo sapiens
gaccagcctggccaatatggtgaaaccctctctctactaa

SEQ ID NO: 11758 - DNA, 40 bp, Homo sapiens
tagtagagagagggtttcaccatattggccaggctggtct

SEQ ID NO: 11759 - DNA, 40 bp, Homo sapiens
agaccagcctggccaatatggtgaaaccctctctctacta

SEQ ID NO: 11760 - DNA, 40 bp, Homo sapiens
agtagagagagggtttcaccatattggccaggctggtctt

SEQ ID NO: 11761 - DNA, 40 bp, Homo sapiens
aagaccagcctggccaatatggtgaaaccctctctctact

SEQ ID NO: 11762 - DNA, 40 bp, Homo sapiens
gtagagagagggtttcaccatattggccaggctggtcttg

SEQ ID NO: 11763 - DNA, 40 bp, Homo sapiens
caagaccagcctggccaatatggtgaaaccctctctctac

SEQ ID NO: 11764 - DNA, 40 bp, Homo sapiens
tagagagagggtttcaccatattggccaggctggtcttga

SEQ ID NO: 11765 - DNA, 40 bp, Homo sapiens
tcaagaccagcctggccaatatggtgaaaccctctctcta

SEQ ID NO: 11766 - DNA, 40 bp, Homo sapiens
agagagagggtttcaccatattggccaggctggtcttgaa

SEQ ID NO: 11767 - DNA, 40 bp, Homo sapiens
ttcaagaccagcctggccaatatggtgaaaccctctctct

SEQ ID NO: 11768 - DNA, 40 bp, Homo sapiens
gagagagggtttcaccatattggccaggctggtcttgaac

SEQ ID NO: 11769 - DNA, 40 bp, Homo sapiens
gttcaagaccagcctggccaatatggtgaaaccctctctc

SEQ ID NO: 11770 - DNA, 40 bp, Homo sapiens
agagagggtttcaccatattggccaggctggtcttgaact

SEQ ID NO: 11771 - DNA, 40 bp, Homo sapiens
agttcaagaccagcctggccaatatggtgaaaccctctct

SEQ ID NO: 11772 - DNA, 40 bp, Homo sapiens
gagagggtttcaccatattggccaggctggtcttgaactc

SEQ ID NO: 11773 - DNA, 40 bp, Homo sapiens
gagttcaagaccagcctggccaatatggtgaaaccctctc

SEQ ID NO: 11774 - DNA, 40 bp, Homo sapiens
agagggtttcaccatattggccaggctggtcttgaactcc

SEQ ID NO: 11775 - DNA, 40 bp, Homo sapiens
ggagttcaagaccagcctggccaatatggtgaaaccctct

SEQ ID NO: 11776 - DNA, 40 bp, Homo sapiens
gagggtttcaccatattggccaggctggtcttgaactcct

SEQ ID NO: 11777 - DNA, 40 bp, Homo sapiens
aggagttcaagaccagcctggccaatatggtgaaaccctc

SEQ ID NO: 11778 - DNA, 40 bp, Homo sapiens
agggtttcaccatattggccaggctggtcttgaactcctg

SEQ ID NO: 11779 - DNA, 40 bp, Homo sapiens
caggagttcaagaccagcctggccaatatggtgaaaccct

SEQ ID NO: 11780 - DNA, 40 bp, Homo sapiens
gggtttcaccatattggccaggctggtcttgaactcctgg

SEQ ID NO: 11781 - DNA, 40 bp, Homo sapiens
ccaggagttcaagaccagcctggccaatatggtgaaaccc

SEQ ID NO: 11782 - DNA, 40 bp, Homo sapiens
ggtttcaccatattggccaggctggtcttgaactcctggc

SEQ ID NO: 11783 - DNA, 40 bp, Homo sapiens
gccaggagttcaagaccagcctggccaatatggtgaaacc

SEQ ID NO: 11784 - DNA, 40 bp, Homo sapiens
gtttcaccatattggccaggctggtcttgaactcctggcc

SEQ ID NO: 11785 - DNA, 40 bp, Homo sapiens
ggccaggagttcaagaccagcctggccaatatggtgaaac

SEQ ID NO: 11786 - DNA, 40 bp, Homo sapiens
tttcaccatattggccaggctggtcttgaactcctggcct

SEQ ID NO: 11787 - DNA, 40 bp, Homo sapiens
aggccaggagttcaagaccagcctggccaatatggtgaaa

SEQ ID NO: 11788 - DNA, 40 bp, Homo sapiens
ttcaccatattggccaggctggtcttgaactcctggcctc

SEQ ID NO: 11789 - DNA, 40 bp, Homo sapiens
gaggccaggagttcaagaccagcctggccaatatggtgaa

SEQ ID NO: 11790 - DNA, 40 bp, Homo sapiens
tcaccatattggccaggctggtcttgaactcctggcctca

SEQ ID NO: 11791 - DNA, 40 bp, Homo sapiens
tgaggccaggagttcaagaccagcctggccaatatggtga

SEQ ID NO: 11792 - DNA, 40 bp, Homo sapiens
caccatattggccaggctggtcttgaactcctggcctcag

SEQ ID NO: 11793 - DNA, 40 bp, Homo sapiens
ctgaggccaggagttcaagaccagcctggccaatatggtg

SEQ ID NO: 11794 - DNA, 40 bp, Homo sapiens
accatattggccaggctggtcttgaactcctggcctcagg

SEQ ID NO: 11795 - DNA, 40 bp, Homo sapiens
cctgaggccaggagttcaagaccagcctggccaatatggt

SEQ ID NO: 11796 - DNA, 40 bp, Homo sapiens
ccatattggccaggctggtcttgaactcctggcctcaggt

SEQ ID NO: 11797 - DNA, 40 bp, Homo sapiens
acctgaggccaggagttcaagaccagcctggccaatatgg

SEQ ID NO: 11798 - DNA, 40 bp, Homo sapiens
catattggccaggctggtcttgaactcctggcctcaggtg

SEQ ID NO: 11799 - DNA, 40 bp, Homo sapiens
cacctgaggccaggagttcaagaccagcctggccaatatg

SEQ ID NO: 11800 - DNA, 40 bp, Homo sapiens
atattggccaggctggtcttgaactcctggcctcaggtga

SEQ ID NO: 11801 - DNA, 40 bp, Homo sapiens
tcacctgaggccaggagttcaagaccagcctggccaatat

SEQ ID NO: 11802 - DNA, 40 bp, Homo sapiens
tattggccaggctggtcttgaactcctggcctcaggtgat

SEQ ID NO: 11803 - DNA, 40 bp, Homo sapiens
atcacctgaggccaggagttcaagaccagcctggccaata

SEQ ID NO: 11804 - DNA, 40 bp, Homo sapiens
attggccaggctggtcttgaactcctggcctcaggtgatc

SEQ ID NO: 11805 - DNA, 40 bp, Homo sapiens
gatcacctgaggccaggagttcaagaccagcctggccaat

SEQ ID NO: 11806 - DNA, 40 bp, Homo sapiens
ttggccaggctggtcttgaactcctggcctcaggtgatcc

SEQ ID NO: 11807 - DNA, 40 bp, Homo sapiens
ggatcacctgaggccaggagttcaagaccagcctggccaa

SEQ ID NO: 11808 - DNA, 40 bp, Homo sapiens
tggccaggctggtcttgaactcctggcctcaggtgatcca

SEQ ID NO: 11809 - DNA, 40 bp, Homo sapiens
tggatcacctgaggccaggagttcaagaccagcctggcca

SEQ ID NO: 11810 - DNA, 40 bp, Homo sapiens
ggccaggctggtcttgaactcctggcctcaggtgatccac

SEQ ID NO: 11811 - DNA, 40 bp, Homo sapiens
gtggatcacctgaggccaggagttcaagaccagcctggcc

SEQ ID NO: 11812 - DNA, 40 bp, Homo sapiens
gccaggctggtcttgaactcctggcctcaggtgatccacc

SEQ ID NO: 11813 - DNA, 40 bp, Homo sapiens
ggtggatcacctgaggccaggagttcaagaccagcctggc

SEQ ID NO: 11814 - DNA, 40 bp, Homo sapiens
ccaggctggtcttgaactcctggcctcaggtgatccaccc

SEQ ID NO: 11815 - DNA, 40 bp, Homo sapiens
gggtggatcacctgaggccaggagttcaagaccagcctgg

SEQ ID NO: 11816 - DNA, 40 bp, Homo sapiens
caggctggtcttgaactcctggcctcaggtgatccacccg

SEQ ID NO: 11817 - DNA, 40 bp, Homo sapiens
cgggtggatcacctgaggccaggagttcaagaccagcctg

SEQ ID NO: 11818 - DNA, 40 bp, Homo sapiens
aggctggtcttgaactcctggcctcaggtgatccacccgc

SEQ ID NO: 11819 - DNA, 40 bp, Homo sapiens
gcgggtggatcacctgaggccaggagttcaagaccagcct

SEQ ID NO: 11820 - DNA, 40 bp, Homo sapiens
ggctggtcttgaactcctggcctcaggtgatccacccgcc

SEQ ID NO: 11821 - DNA, 40 bp, Homo sapiens
ggcgggtggatcacctgaggccaggagttcaagaccagcc

SEQ ID NO: 11822 - DNA, 40 bp, Homo sapiens
gctggtcttgaactcctggcctcaggtgatccacccgcct

SEQ ID NO: 11823 - DNA, 40 bp, Homo sapiens
aggcgggtggatcacctgaggccaggagttcaagaccagc

SEQ ID NO: 11824 - DNA, 40 bp, Homo sapiens
ctggtcttgaactcctggcctcaggtgatccacccgcctt

SEQ ID NO: 11825 - DNA, 40 bp, Homo sapiens
aaggcgggtggatcacctgaggccaggagttcaagaccag

SEQ ID NO: 11826 - DNA, 40 bp, Homo sapiens
tggtcttgaactcctggcctcaggtgatccacccgccttg

SEQ ID NO: 11827 - DNA, 40 bp, Homo sapiens
caaggcgggtggatcacctgaggccaggagttcaagacca

SEQ ID NO: 11828 - DNA, 40 bp, Homo sapiens
ggtcttgaactcctggcctcaggtgatccacccgccttgg

SEQ ID NO: 11829 - DNA, 40 bp, Homo sapiens
ccaaggcgggtggatcacctgaggccaggagttcaagacc

SEQ ID NO: 11830 - DNA, 40 bp, Homo sapiens
gtcttgaactcctggcctcaggtgatccacccgccttggc

SEQ ID NO: 11831 - DNA, 40 bp, Homo sapiens
gccaaggcgggtggatcacctgaggccaggagttcaagac

SEQ ID NO: 11832 - DNA, 40 bp, Homo sapiens
tcttgaactcctggcctcaggtgatccacccgccttggcc

SEQ ID NO: 11833 - DNA, 40 bp, Homo sapiens
ggccaaggcgggtggatcacctgaggccaggagttcaaga

SEQ ID NO: 11834 - DNA, 40 bp, Homo sapiens
cttgaactcctggcctcaggtgatccacccgccttggcct

SEQ ID NO: 11835 - DNA, 40 bp, Homo sapiens
aggccaaggcgggtggatcacctgaggccaggagttcaag

SEQ ID NO: 11836 - DNA, 40 bp, Homo sapiens
ttgaactcctggcctcaggtgatccacccgccttggcctc

SEQ ID NO: 11837 - DNA, 40 bp, Homo sapiens
gaggccaaggcgggtggatcacctgaggccaggagttcaa

SEQ ID NO: 11838 - DNA, 40 bp, Homo sapiens
tgaactcctggcctcaggtgatccacccgccttggcctct

SEQ ID NO: 11839 - DNA, 40 bp, Homo sapiens
agaggccaaggcgggtggatcacctgaggccaggagttca

SEQ ID NO: 11840 - DNA, 40 bp, Homo sapiens
gaactcctggcctcaggtgatccacccgccttggcctctg

SEQ ID NO: 11841 - DNA, 40 bp, Homo sapiens
cagaggccaaggcgggtggatcacctgaggccaggagttc

SEQ ID NO: 11842 - DNA, 40 bp, Homo sapiens
aactcctggcctcaggtgatccacccgccttggcctctga

SEQ ID NO: 11843 - DNA, 40 bp, Homo sapiens
tcagaggccaaggcgggtggatcacctgaggccaggagtt

SEQ ID NO: 11844 - DNA, 40 bp, Homo sapiens
actcctggcctcaggtgatccacccgccttggcctctgaa

SEQ ID NO: 11845 - DNA, 40 bp, Homo sapiens
ttcagaggccaaggcgggtggatcacctgaggccaggagt

SEQ ID NO: 11846 - DNA, 40 bp, Homo sapiens
ctcctggcctcaggtgatccacccgccttggcctctgaaa

SEQ ID NO: 11847 - DNA, 40 bp, Homo sapiens
tttcagaggccaaggcgggtggatcacctgaggccaggag

SEQ ID NO: 11848 - DNA, 40 bp, Homo sapiens
tcctggcctcaggtgatccacccgccttggcctctgaaag

SEQ ID NO: 11849 - DNA, 40 bp, Homo sapiens
ctttcagaggccaaggcgggtggatcacctgaggccagga

SEQ ID NO: 11850 - DNA, 40 bp, Homo sapiens
cctggcctcaggtgatccacccgccttggcctctgaaagt

SEQ ID NO: 11851 - DNA, 40 bp, Homo sapiens
actttcagaggccaaggcgggtggatcacctgaggccagg

SEQ ID NO: 11852 - DNA, 40 bp, Homo sapiens
ctggcctcaggtgatccacccgccttggcctctgaaagtg

SEQ ID NO: 11853 - DNA, 40 bp, Homo sapiens
cactttcagaggccaaggcgggtggatcacctgaggccag

SEQ ID NO: 11854 - DNA, 40 bp, Homo sapiens
tggcctcaggtgatccacccgccttggcctctgaaagtgc

SEQ ID NO: 11855 - DNA, 40 bp, Homo sapiens
gcactttcagaggccaaggcgggtggatcacctgaggcca

SEQ ID NO: 11856 - DNA, 40 bp, Homo sapiens
ggcctcaggtgatccacccgccttggcctctgaaagtgct

SEQ ID NO: 11857 - DNA, 40 bp, Homo sapiens
agcactttcagaggccaaggcgggtggatcacctgaggcc

SEQ ID NO: 11858 - DNA, 40 bp, Homo sapiens
gcctcaggtgatccacccgccttggcctctgaaagtgctg

SEQ ID NO: 11859 - DNA, 40 bp, Homo sapiens
cagcactttcagaggccaaggcgggtggatcacctgaggc

SEQ ID NO: 11860 - DNA, 40 bp, Homo sapiens
cctcaggtgatccacccgccttggcctctgaaagtgctgg

SEQ ID NO: 11861 - DNA, 40 bp, Homo sapiens
ccagcactttcagaggccaaggcgggtggatcacctgagg

SEQ ID NO: 11862 - DNA, 40 bp, Homo sapiens
ctcaggtgatccacccgccttggcctctgaaagtgctggg

SEQ ID NO: 11863 - DNA, 40 bp, Homo sapiens
cccagcactttcagaggccaaggcgggtggatcacctgag

SEQ ID NO: 11864 - DNA, 40 bp, Homo sapiens
tcaggtgatccacccgccttggcctctgaaagtgctggga

SEQ ID NO: 11865 - DNA, 40 bp, Homo sapiens
tcccagcactttcagaggccaaggcgggtggatcacctga

SEQ ID NO: 11866 - DNA, 40 bp, Homo sapiens
caggtgatccacccgccttggcctctgaaagtgctgggat

SEQ ID NO: 11867 - DNA, 40 bp, Homo sapiens
atcccagcactttcagaggccaaggcgggtggatcacctg

SEQ ID NO: 11868 - DNA, 40 bp, Homo sapiens
aggtgatccacccgccttggcctctgaaagtgctgggatt

SEQ ID NO: 11869 - DNA, 40 bp, Homo sapiens
aatcccagcactttcagaggccaaggcgggtggatcacct

SEQ ID NO: 11870 - DNA, 40 bp, Homo sapiens
ggtgatccacccgccttggcctctgaaagtgctgggatta

SEQ ID NO: 11871 - DNA, 40 bp, Homo sapiens
taatcccagcactttcagaggccaaggcgggtggatcacc

SEQ ID NO: 11872 - DNA, 40 bp, Homo sapiens
gtgatccacccgccttggcctctgaaagtgctgggattac

SEQ ID NO: 11873 - DNA, 40 bp, Homo sapiens
gtaatcccagcactttcagaggccaaggcgggtggatcac

SEQ ID NO: 11874 - DNA, 40 bp, Homo sapiens
tgatccacccgccttggcctctgaaagtgctgggattaca

SEQ ID NO: 11875 - DNA, 40 bp, Homo sapiens
tgtaatcccagcactttcagaggccaaggcgggtggatca

SEQ ID NO: 11876 - DNA, 40 bp, Homo sapiens
gatccacccgccttggcctctgaaagtgctgggattacag

SEQ ID NO: 11877 - DNA, 40 bp, Homo sapiens
ctgtaatcccagcactttcagaggccaaggcgggtggatc

SEQ ID NO: 11878 - DNA, 40 bp, Homo sapiens
atccacccgccttggcctctgaaagtgctgggattacagg

SEQ ID NO: 11879 - DNA, 40 bp, Homo sapiens
cctgtaatcccagcactttcagaggccaaggcgggtggat

SEQ ID NO: 11880 - DNA, 40 bp, Homo sapiens
tccacccgccttggcctctgaaagtgctgggattacaggc

SEQ ID NO: 11881 - DNA, 40 bp, Homo sapiens
gcctgtaatcccagcactttcagaggccaaggcgggtgga

SEQ ID NO: 11882 - DNA, 40 bp, Homo sapiens
ccacccgccttggcctctgaaagtgctgggattacaggca

SEQ ID NO: 11883 - DNA, 40 bp, Homo sapiens
tgcctgtaatcccagcactttcagaggccaaggcgggtgg

SEQ ID NO: 11884 - DNA, 40 bp, Homo sapiens
cacccgccttggcctctgaaagtgctgggattacaggcat

SEQ ID NO: 11885 - DNA, 40 bp, Homo sapiens
atgcctgtaatcccagcactttcagaggccaaggcgggtg

SEQ ID NO: 11886 - DNA, 40 bp, Homo sapiens
acccgccttggcctctgaaagtgctgggattacaggcatg

SEQ ID NO: 11887 - DNA, 40 bp, Homo sapiens
catgcctgtaatcccagcactttcagaggccaaggcgggt

SEQ ID NO: 11888 - DNA, 40 bp, Homo sapiens
cccgccttggcctctgaaagtgctgggattacaggcatga

SEQ ID NO: 11889 - DNA, 40 bp, Homo sapiens
tcatgcctgtaatcccagcactttcagaggccaaggcggg

SEQ ID NO: 11890 - DNA, 40 bp, Homo sapiens
ccgccttggcctctgaaagtgctgggattacaggcatgag

SEQ ID NO: 11891 - DNA, 40 bp, Homo sapiens
ctcatgcctgtaatcccagcactttcagaggccaaggcgg

SEQ ID NO: 11892 - DNA, 40 bp, Homo sapiens
cgccttggcctctgaaagtgctgggattacaggcatgagc

SEQ ID NO: 11893 - DNA, 40 bp, Homo sapiens
gctcatgcctgtaatcccagcactttcagaggccaaggcg

SEQ ID NO: 11894 - DNA, 40 bp, Homo sapiens
gccttggcctctgaaagtgctgggattacaggcatgagcc

SEQ ID NO: 11895 - DNA, 40 bp, Homo sapiens
ggctcatgcctgtaatcccagcactttcagaggccaaggc

SEQ ID NO: 11896 - DNA, 40 bp, Homo sapiens
ccttggcctctgaaagtgctgggattacaggcatgagccg

SEQ ID NO: 11897 - DNA, 40 bp, Homo sapiens
cggctcatgcctgtaatcccagcactttcagaggccaagg

SEQ ID NO: 11898 - DNA, 40 bp, Homo sapiens
cttggcctctgaaagtgctgggattacaggcatgagccgc

SEQ ID NO: 11899 - DNA, 40 bp, Homo sapiens
gcggctcatgcctgtaatcccagcactttcagaggccaag

SEQ ID NO: 11900 - DNA, 40 bp, Homo sapiens
ttggcctctgaaagtgctgggattacaggcatgagccgcc

SEQ ID NO: 11901 - DNA, 40 bp, Homo sapiens
ggcggctcatgcctgtaatcccagcactttcagaggccaa

SEQ ID NO: 11902 - DNA, 40 bp, Homo sapiens
tggcctctgaaagtgctgggattacaggcatgagccgccg

SEQ ID NO: 11903 - DNA, 40 bp, Homo sapiens
cggcggctcatgcctgtaatcccagcactttcagaggcca

SEQ ID NO: 11904 - DNA, 40 bp, Homo sapiens
ggcctctgaaagtgctgggattacaggcatgagccgccgc

SEQ ID NO: 11905 - DNA, 40 bp, Homo sapiens
gcggcggctcatgcctgtaatcccagcactttcagaggcc

SEQ ID NO: 11906 - DNA, 40 bp, Homo sapiens
gcctctgaaagtgctgggattacaggcatgagccgccgca

SEQ ID NO: 11907 - DNA, 40 bp, Homo sapiens
tgcggcggctcatgcctgtaatcccagcactttcagaggc

SEQ ID NO: 11908 - DNA, 40 bp, Homo sapiens
cctctgaaagtgctgggattacaggcatgagccgccgcac

SEQ ID NO: 11909 - DNA, 40 bp, Homo sapiens
gtgcggcggctcatgcctgtaatcccagcactttcagagg

SEQ ID NO: 11910 - DNA, 40 bp, Homo sapiens
ctctgaaagtgctgggattacaggcatgagccgccgcacc

SEQ ID NO: 11911 - DNA, 40 bp, Homo sapiens
ggtgcggcggctcatgcctgtaatcccagcactttcagag

SEQ ID NO: 11912 - DNA, 40 bp, Homo sapiens
tctgaaagtgctgggattacaggcatgagccgccgcaccc

SEQ ID NO: 11913 - DNA, 40 bp, Homo sapiens
gggtgcggcggctcatgcctgtaatcccagcactttcaga

SEQ ID NO: 11914 - DNA, 40 bp, Homo sapiens
ctgaaagtgctgggattacaggcatgagccgccgcacccg

SEQ ID NO: 11915 - DNA, 40 bp, Homo sapiens
cgggtgcggcggctcatgcctgtaatcccagcactttcag

SEQ ID NO: 11916 - DNA, 40 bp, Homo sapiens
tgaaagtgctgggattacaggcatgagccgccgcacccgg

SEQ ID NO: 11917 - DNA, 40 bp, Homo sapiens
ccgggtgcggcggctcatgcctgtaatcccagcactttca

SEQ ID NO: 11918 - DNA, 40 bp, Homo sapiens
gaaagtgctgggattacaggcatgagccgccgcacccggc

SEQ ID NO: 11919 - DNA, 40 bp, Homo sapiens
gccgggtgcggcggctcatgcctgtaatcccagcactttc

SEQ ID NO: 11920 - DNA, 40 bp, Homo sapiens
aaagtgctgggattacaggcatgagccgccgcacccggct

SEQ ID NO: 11921 - DNA, 40 bp, Homo sapiens
agccgggtgcggcggctcatgcctgtaatcccagcacttt

SEQ ID NO: 11922 - DNA, 40 bp, Homo sapiens
aagtgctgggattacaggcatgagccgccgcacccggctt

SEQ ID NO: 11923 - DNA, 40 bp, Homo sapiens
aagccgggtgcggcggctcatgcctgtaatcccagcactt

SEQ ID NO: 11924 - DNA, 40 bp, Homo sapiens
agtgctgggattacaggcatgagccgccgcacccggcttt

SEQ ID NO: 11925 - DNA, 40 bp, Homo sapiens
aaagccgggtgcggcggctcatgcctgtaatcccagcact

SEQ ID NO: 11926 - DNA, 40 bp, Homo sapiens
gtgctgggattacaggcatgagccgccgcacccggctttc

SEQ ID NO: 11927 - DNA, 40 bp, Homo sapiens
gaaagccgggtgcggcggctcatgcctgtaatcccagcac

SEQ ID NO: 11928 - DNA, 40 bp, Homo sapiens
tgctgggattacaggcatgagccgccgcacccggctttct

SEQ ID NO: 11929 - DNA, 40 bp, Homo sapiens
agaaagccgggtgcggcggctcatgcctgtaatcccagca

SEQ ID NO: 11930 - DNA, 40 bp, Homo sapiens
gctgggattacaggcatgagccgccgcacccggctttcta

SEQ ID NO: 11931 - DNA, 40 bp, Homo sapiens
tagaaagccgggtgcggcggctcatgcctgtaatcccagc

SEQ ID NO: 11932 - DNA, 40 bp, Homo sapiens
ctgggattacaggcatgagccgccgcacccggctttctaa

SEQ ID NO: 11933 - DNA, 40 bp, Homo sapiens
ttagaaagccgggtgcggcggctcatgcctgtaatcccag

SEQ ID NO: 11934 - DNA, 40 bp, Homo sapiens
tgggattacaggcatgagccgccgcacccggctttctaat

SEQ ID NO: 11935 - DNA, 40 bp, Homo sapiens
attagaaagccgggtgcggcggctcatgcctgtaatccca

SEQ ID NO: 11936 - DNA, 40 bp, Homo sapiens
gggattacaggcatgagccgccgcacccggctttctaatc

SEQ ID NO: 11937 - DNA, 40 bp, Homo sapiens
gattagaaagccgggtgcggcggctcatgcctgtaatccc

SEQ ID NO: 11938 - DNA, 40 bp, Homo sapiens
ggattacaggcatgagccgccgcacccggctttctaatct

SEQ ID NO: 11939 - DNA, 40 bp, Homo sapiens
agattagaaagccgggtgcggcggctcatgcctgtaatcc

SEQ ID NO: 11940 - DNA, 40 bp, Homo sapiens
gattacaggcatgagccgccgcacccggctttctaatctt

SEQ ID NO: 11941 - DNA, 40 bp, Homo sapiens
aagattagaaagccgggtgcggcggctcatgcctgtaatc

SEQ ID NO: 11942 - DNA, 40 bp, Homo sapiens
attacaggcatgagccgccgcacccggctttctaatcttt

SEQ ID NO: 11943 - DNA, 40 bp, Homo sapiens
aaagattagaaagccgggtgcggcggctcatgcctgtaat

SEQ ID NO: 11944 - DNA, 40 bp, Homo sapiens
ttacaggcatgagccgccgcacccggctttctaatcttta

SEQ ID NO: 11945 - DNA, 40 bp, Homo sapiens
taaagattagaaagccgggtgcggcggctcatgcctgtaa

SEQ ID NO: 11946 - DNA, 40 bp, Homo sapiens
tacaggcatgagccgccgcacccggctttctaatctttat

SEQ ID NO: 11947 - DNA, 40 bp, Homo sapiens
ataaagattagaaagccgggtgcggcggctcatgcctgta

SEQ ID NO: 11948 - DNA, 40 bp, Homo sapiens
acaggcatgagccgccgcacccggctttctaatctttatc

SEQ ID NO: 11949 - DNA, 40 bp, Homo sapiens
gataaagattagaaagccgggtgcggcggctcatgcctgt

SEQ ID NO: 11950 - DNA, 40 bp, Homo sapiens
caggcatgagccgccgcacccggctttctaatctttatct

SEQ ID NO: 11951 - DNA, 40 bp, Homo sapiens
agataaagattagaaagccgggtgcggcggctcatgcctg

SEQ ID NO: 11952 - DNA, 40 bp, Homo sapiens
aggcatgagccgccgcacccggctttctaatctttatctt

SEQ ID NO: 11953 - DNA, 40 bp, Homo sapiens
aagataaagattagaaagccgggtgcggcggctcatgcct

SEQ ID NO: 11954 - DNA, 40 bp, Homo sapiens
ggcatgagccgccgcacccggctttctaatctttatcttt

SEQ ID NO: 11955 - DNA, 40 bp, Homo sapiens
aaagataaagattagaaagccgggtgcggcggctcatgcc

SEQ ID NO: 11956 - DNA, 40 bp, Homo sapiens
gcatgagccgccgcacccggctttctaatctttatctttt

SEQ ID NO: 11957 - DNA, 40 bp, Homo sapiens
aaaagataaagattagaaagccgggtgcggcggctcatgc

SEQ ID NO: 11958 - DNA, 40 bp, Homo sapiens
catgagccgccgcacccggctttctaatctttatcttttt

SEQ ID NO: 11959 - DNA, 40 bp, Homo sapiens
aaaaagataaagattagaaagccgggtgcggcggctcatg

SEQ ID NO: 11960 - DNA, 40 bp, Homo sapiens
atgagccgccgcacccggctttctaatctttatctttttt

SEQ ID NO: 11961 - DNA, 40 bp, Homo sapiens
aaaaaagataaagattagaaagccgggtgcggcggctcat

SEQ ID NO: 11962 - DNA, 40 bp, Homo sapiens
tgagccgccgcacccggctttctaatctttatcttttttt

SEQ ID NO: 11963 - DNA, 40 bp, Homo sapiens
aaaaaaagataaagattagaaagccgggtgcggcggctca

SEQ ID NO: 11964 - DNA, 40 bp, Homo sapiens
gagccgccgcacccggctttctaatctttatctttttttg

SEQ ID NO: 11965 - DNA, 40 bp, Homo sapiens
caaaaaaagataaagattagaaagccgggtgcggcggctc

SEQ ID NO: 11966 - DNA, 40 bp, Homo sapiens
agccgccgcacccggctttctaatctttatctttttttgt

SEQ ID NO: 11967 - DNA, 40 bp, Homo sapiens
acaaaaaaagataaagattagaaagccgggtgcggcggct

SEQ ID NO: 11968 - DNA, 40 bp, Homo sapiens
gccgccgcacccggctttctaatctttatctttttttgtg

SEQ ID NO: 11969 - DNA, 40 bp, Homo sapiens
cacaaaaaaagataaagattagaaagccgggtgcggcggc

SEQ ID NO: 11970 - DNA, 40 bp, Homo sapiens
ccgccgcacccggctttctaatctttatctttttttgtgc

SEQ ID NO: 11971 - DNA, 40 bp, Homo sapiens
gcacaaaaaaagataaagattagaaagccgggtgcggcgg

SEQ ID NO: 11972 - DNA, 40 bp, Homo sapiens
cgccgcacccggctttctaatctttatctttttttgtgca

SEQ ID NO: 11973 - DNA, 40 bp, Homo sapiens
tgcacaaaaaaagataaagattagaaagccgggtgcggcg

SEQ ID NO: 11974 - DNA, 40 bp, Homo sapiens
gccgcacccggctttctaatctttatctttttttgtgcag

SEQ ID NO: 11975 - DNA, 40 bp, Homo sapiens
ctgcacaaaaaaagataaagattagaaagccgggtgcggc

SEQ ID NO: 11976 - DNA, 40 bp, Homo sapiens
ccgcacccggctttctaatctttatctttttttgtgcagc

SEQ ID NO: 11977 - DNA, 40 bp, Homo sapiens
gctgcacaaaaaaagataaagattagaaagccgggtgcgg

SEQ ID NO: 11978 - DNA, 40 bp, Homo sapiens
cgcacccggctttctaatctttatctttttttgtgcagcg

SEQ ID NO: 11979 - DNA, 40 bp, Homo sapiens
cgctgcacaaaaaaagataaagattagaaagccgggtgcg

SEQ ID NO: 11980 - DNA, 40 bp, Homo sapiens
gcacccggctttctaatctttatctttttttgtgcagcgg

SEQ ID NO: 11981 - DNA, 40 bp, Homo sapiens
ccgctgcacaaaaaaagataaagattagaaagccgggtgc

SEQ ID NO: 11982 - DNA, 40 bp, Homo sapiens
cacccggctttctaatctttatctttttttgtgcagcggt

SEQ ID NO: 11983 - DNA, 40 bp, Homo sapiens
accgctgcacaaaaaaagataaagattagaaagccgggtg

SEQ ID NO: 11984 - DNA, 40 bp, Homo sapiens
acccggctttctaatctttatctttttttgtgcagcggtg

SEQ ID NO: 11985 - DNA, 40 bp, Homo sapiens
caccgctgcacaaaaaaagataaagattagaaagccgggt

SEQ ID NO: 11986 - DNA, 40 bp, Homo sapiens
cccggctttctaatctttatctttttttgtgcagcggtga

SEQ ID NO: 11987 - DNA, 40 bp, Homo sapiens
tcaccgctgcacaaaaaaagataaagattagaaagccggg

SEQ ID NO: 11988 - DNA, 40 bp, Homo sapiens
ccggctttctaatctttatctttttttgtgcagcggtgat

SEQ ID NO: 11989 - DNA, 40 bp, Homo sapiens
atcaccgctgcacaaaaaaagataaagattagaaagccgg

SEQ ID NO: 11990 - DNA, 40 bp, Homo sapiens
cggctttctaatctttatctttttttgtgcagcggtgata

SEQ ID NO: 11991 - DNA, 40 bp, Homo sapiens
tatcaccgctgcacaaaaaaagataaagattagaaagccg

SEQ ID NO: 11992 - DNA, 40 bp, Homo sapiens
ggctttctaatctttatctttttttgtgcagcggtgatac

SEQ ID NO: 11993 - DNA, 40 bp, Homo sapiens
gtatcaccgctgcacaaaaaaagataaagattagaaagcc

SEQ ID NO: 11994 - DNA, 40 bp, Homo sapiens
gctttctaatctttatctttttttgtgcagcggtgataca

SEQ ID NO: 11995 - DNA, 40 bp, Homo sapiens
tgtatcaccgctgcacaaaaaaagataaagattagaaagc

SEQ ID NO: 11996 - DNA, 40 bp, Homo sapiens
ctttctaatctttatctttttttgtgcagcggtgatacag

SEQ ID NO: 11997 - DNA, 40 bp, Homo sapiens
ctgtatcaccgctgcacaaaaaaagataaagattagaaag

SEQ ID NO: 11998 - DNA, 40 bp, Homo sapiens
tttctaatctttatctttttttgtgcagcggtgatacagg

SEQ ID NO: 11999 - DNA, 40 bp, Homo sapiens
cctgtatcaccgctgcacaaaaaaagataaagattagaaa

SEQ ID NO: 12000 - DNA, 40 bp, Homo sapiens
ttctaatctttatctttttttgtgcagcggtgatacagga

SEQ ID NO: 12001 - DNA, 40 bp, Homo sapiens
tcctgtatcaccgctgcacaaaaaaagataaagattagaa

SEQ ID NO: 12002 - DNA, 40 bp, Homo sapiens
tctaatctttatctttttttgtgcagcggtgatacaggat

SEQ ID NO: 12003 - DNA, 40 bp, Homo sapiens
atcctgtatcaccgctgcacaaaaaaagataaagattaga

SEQ ID NO: 12004 - DNA, 40 bp, Homo sapiens
ctaatctttatctttttttgtgcagcggtgatacaggatt

SEQ ID NO: 12005 - DNA, 40 bp, Homo sapiens
aatcctgtatcaccgctgcacaaaaaaagataaagattag

SEQ ID NO: 12006 - DNA, 40 bp, Homo sapiens
taatctttatctttttttgtgcagcggtgatacaggatta

SEQ ID NO: 12007 - DNA, 40 bp, Homo sapiens
taatcctgtatcaccgctgcacaaaaaaagataaagatta

SEQ ID NO: 12008 - DNA, 40 bp, Homo sapiens
aatctttatctttttttgtgcagcggtgatacaggattat

SEQ ID NO: 12009 - DNA, 40 bp, Homo sapiens
ataatcctgtatcaccgctgcacaaaaaaagataaagatt

SEQ ID NO: 12010 - DNA, 40 bp, Homo sapiens
atctttatctttttttgtgcagcggtgatacaggattatg

SEQ ID NO: 12011 - DNA, 40 bp, Homo sapiens
cataatcctgtatcaccgctgcacaaaaaaagataaagat

SEQ ID NO: 12012 - DNA, 40 bp, Homo sapiens
tctttatctttttttgtgcagcggtgatacaggattatgt

SEQ ID NO: 12013 - DNA, 40 bp, Homo sapiens
acataatcctgtatcaccgctgcacaaaaaaagataaaga

SEQ ID NO: 12014 - DNA, 40 bp, Homo sapiens
ctttatctttttttgtgcagcggtgatacaggattatgta

SEQ ID NO: 12015 - DNA, 40 bp, Homo sapiens
tacataatcctgtatcaccgctgcacaaaaaaagataaag

SEQ ID NO: 12016 - DNA, 40 bp, Homo sapiens
tttatctttttttgtgcagcggtgatacaggattatgtat

SEQ ID NO: 12017 - DNA, 40 bp, Homo sapiens
atacataatcctgtatcaccgctgcacaaaaaaagataaa

SEQ ID NO: 12018 - DNA, 40 bp, Homo sapiens
ttatctttttttgtgcagcggtgatacaggattatgtatt

SEQ ID NO: 12019 - DNA, 40 bp, Homo sapiens
aatacataatcctgtatcaccgctgcacaaaaaaagataa

SEQ ID NO: 12020 - DNA, 40 bp, Homo sapiens
tatctttttttgtgcagcggtgatacaggattatgtattg

SEQ ID NO: 12021 - DNA, 40 bp, Homo sapiens
caatacataatcctgtatcaccgctgcacaaaaaaagata

SEQ ID NO: 12022 - DNA, 40 bp, Homo sapiens
atctttttttgtgcagcggtgatacaggattatgtattgt

SEQ ID NO: 12023 - DNA, 40 bp, Homo sapiens
acaatacataatcctgtatcaccgctgcacaaaaaaagat

SEQ ID NO: 12024 - DNA, 40 bp, Homo sapiens
tctttttttgtgcagcggtgatacaggattatgtattgta

SEQ ID NO: 12025 - DNA, 40 bp, Homo sapiens
tacaatacataatcctgtatcaccgctgcacaaaaaaaga

SEQ ID NO: 12026 - DNA, 40 bp, Homo sapiens
ctttttttgtgcagcggtgatacaggattatgtattgtac

SEQ ID NO: 12027 - DNA, 40 bp, Homo sapiens
gtacaatacataatcctgtatcaccgctgcacaaaaaaag

SEQ ID NO: 12028 - DNA, 40 bp, Homo sapiens
tttttttgtgcagcggtgatacaggattatgtattgtact

SEQ ID NO: 12029 - DNA, 40 bp, Homo sapiens
agtacaatacataatcctgtatcaccgctgcacaaaaaaa

SEQ ID NO: 12030 - DNA, 40 bp, Homo sapiens
ttttttgtgcagcggtgatacaggattatgtattgtactg

SEQ ID NO: 12031 - DNA, 40 bp, Homo sapiens
cagtacaatacataatcctgtatcaccgctgcacaaaaaa

SEQ ID NO: 12032 - DNA, 40 bp, Homo sapiens
tttttgtgcagcggtgatacaggattatgtattgtactga

SEQ ID NO: 12033 - DNA, 40 bp, Homo sapiens
tcagtacaatacataatcctgtatcaccgctgcacaaaaa

SEQ ID NO: 12034 - DNA, 40 bp, Homo sapiens
ttttgtgcagcggtgatacaggattatgtattgtactgaa

SEQ ID NO: 12035 - DNA, 40 bp, Homo sapiens
ttcagtacaatacataatcctgtatcaccgctgcacaaaa

SEQ ID NO: 12036 - DNA, 40 bp, Homo sapiens
tttgtgcagcggtgatacaggattatgtattgtactgaac

SEQ ID NO: 12037 - DNA, 40 bp, Homo sapiens
gttcagtacaatacataatcctgtatcaccgctgcacaaa

SEQ ID NO: 12038 - DNA, 40 bp, Homo sapiens
ttgtgcagcggtgatacaggattatgtattgtactgaaca

SEQ ID NO: 12039 - DNA, 40 bp, Homo sapiens
tgttcagtacaatacataatcctgtatcaccgctgcacaa

SEQ ID NO: 12040 - DNA, 40 bp, Homo sapiens
tgtgcagcggtgatacaggattatgtattgtactgaacag

SEQ ID NO: 12041 - DNA, 40 bp, Homo sapiens
ctgttcagtacaatacataatcctgtatcaccgctgcaca

SEQ ID NO: 12042 - DNA, 40 bp, Homo sapiens
gtgcagcggtgatacaggattatgtattgtactgaacagt

SEQ ID NO: 12043 - DNA, 40 bp, Homo sapiens
actgttcagtacaatacataatcctgtatcaccgctgcac

SEQ ID NO: 12044 - DNA, 40 bp, Homo sapiens
tgcagcggtgatacaggattatgtattgtactgaacagtt

SEQ ID NO: 12045 - DNA, 40 bp, Homo sapiens
aactgttcagtacaatacataatcctgtatcaccgctgca

SEQ ID NO: 12046 - DNA, 40 bp, Homo sapiens
gcagcggtgatacaggattatgtattgtactgaacagtta

SEQ ID NO: 12047 - DNA, 40 bp, Homo sapiens
taactgttcagtacaatacataatcctgtatcaccgctgc

SEQ ID NO: 12048 - DNA, 40 bp, Homo sapiens
cagcggtgatacaggattatgtattgtactgaacagttaa

SEQ ID NO: 12049 - DNA, 40 bp, Homo sapiens
ttaactgttcagtacaatacataatcctgtatcaccgctg

SEQ ID NO: 12050 - DNA, 40 bp, Homo sapiens
agcggtgatacaggattatgtattgtactgaacagttaat

SEQ ID NO: 12051 - DNA, 40 bp, Homo sapiens
attaactgttcagtacaatacataatcctgtatcaccgct

SEQ ID NO: 12052 - DNA, 40 bp, Homo sapiens
gcggtgatacaggattatgtattgtactgaacagttaatt

SEQ ID NO: 12053 - DNA, 40 bp, Homo sapiens
aattaactgttcagtacaatacataatcctgtatcaccgc

SEQ ID NO: 12054 - DNA, 40 bp, Homo sapiens
cggtgatacaggattatgtattgtactgaacagttaattc

SEQ ID NO: 12055 - DNA, 40 bp, Homo sapiens
gaattaactgttcagtacaatacataatcctgtatcaccg

SEQ ID NO: 12056 - DNA, 40 bp, Homo sapiens
ggtgatacaggattatgtattgtactgaacagttaattcg

SEQ ID NO: 12057 - DNA, 40 bp, Homo sapiens
cgaattaactgttcagtacaatacataatcctgtatcacc

SEQ ID NO: 12058 - DNA, 40 bp, Homo sapiens
gtgatacaggattatgtattgtactgaacagttaattcgg

SEQ ID NO: 12059 - DNA, 40 bp, Homo sapiens
ccgaattaactgttcagtacaatacataatcctgtatcac

SEQ ID NO: 12060 - DNA, 40 bp, Homo sapiens
tgatacaggattatgtattgtactgaacagttaattcgga

SEQ ID NO: 12061 - DNA, 40 bp, Homo sapiens
tccgaattaactgttcagtacaatacataatcctgtatca

SEQ ID NO: 12062 - DNA, 40 bp, Homo sapiens
gatacaggattatgtattgtactgaacagttaattcggag

SEQ ID NO: 12063 - DNA, 40 bp, Homo sapiens
ctccgaattaactgttcagtacaatacataatcctgtatc

SEQ ID NO: 12064 - DNA, 40 bp, Homo sapiens
atacaggattatgtattgtactgaacagttaattcggagt

SEQ ID NO: 12065 - DNA, 40 bp, Homo sapiens
actccgaattaactgttcagtacaatacataatcctgtat

SEQ ID NO: 12066 - DNA, 40 bp, Homo sapiens
tacaggattatgtattgtactgaacagttaattcggagtt

SEQ ID NO: 12067 - DNA, 40 bp, Homo sapiens
aactccgaattaactgttcagtacaatacataatcctgta

SEQ ID NO: 12068 - DNA, 40 bp, Homo sapiens
acaggattatgtattgtactgaacagttaattcggagttc

SEQ ID NO: 12069 - DNA, 40 bp, Homo sapiens
gaactccgaattaactgttcagtacaatacataatcctgt

SEQ ID NO: 12070 - DNA, 40 bp, Homo sapiens
caggattatgtattgtactgaacagttaattcggagttct

SEQ ID NO: 12071 - DNA, 40 bp, Homo sapiens
agaactccgaattaactgttcagtacaatacataatcctg

SEQ ID NO: 12072 - DNA, 40 bp, Homo sapiens
aggattatgtattgtactgaacagttaattcggagttctc

SEQ ID NO: 12073 - DNA, 40 bp, Homo sapiens
gagaactccgaattaactgttcagtacaatacataatcct

SEQ ID NO: 12074 - DNA, 40 bp, Homo sapiens
ggattatgtattgtactgaacagttaattcggagttctct

SEQ ID NO: 12075 - DNA, 40 bp, Homo sapiens
agagaactccgaattaactgttcagtacaatacataatcc

SEQ ID NO: 12076 - DNA, 40 bp, Homo sapiens
gattatgtattgtactgaacagttaattcggagttctctt

SEQ ID NO: 12077 - DNA, 40 bp, Homo sapiens
aagagaactccgaattaactgttcagtacaatacataatc

SEQ ID NO: 12078 - DNA, 40 bp, Homo sapiens
attatgtattgtactgaacagttaattcggagttctcttg

SEQ ID NO: 12079 - DNA, 40 bp, Homo sapiens
caagagaactccgaattaactgttcagtacaatacataat

SEQ ID NO: 12080 - DNA, 40 bp, Homo sapiens
ttatgtattgtactgaacagttaattcggagttctcttgg

SEQ ID NO: 12081 - DNA, 40 bp, Homo sapiens
ccaagagaactccgaattaactgttcagtacaatacataa

SEQ ID NO: 12082 - DNA, 40 bp, Homo sapiens
tatgtattgtactgaacagttaattcggagttctcttggt

SEQ ID NO: 12083 - DNA, 40 bp, Homo sapiens
accaagagaactccgaattaactgttcagtacaatacata

SEQ ID NO: 12084 - DNA, 40 bp, Homo sapiens
atgtattgtactgaacagttaattcggagttctcttggtt

SEQ ID NO: 12085 - DNA, 40 bp, Homo sapiens
aaccaagagaactccgaattaactgttcagtacaatacat

SEQ ID NO: 12086 - DNA, 40 bp, Homo sapiens
tgtattgtactgaacagttaattcggagttctcttggttt

SEQ ID NO: 12087 - DNA, 40 bp, Homo sapiens
aaaccaagagaactccgaattaactgttcagtacaataca

SEQ ID NO: 12088 - DNA, 40 bp, Homo sapiens
gtattgtactgaacagttaattcggagttctcttggtttt

SEQ ID NO: 12089 - DNA, 40 bp, Homo sapiens
aaaaccaagagaactccgaattaactgttcagtacaatac

SEQ ID NO: 12090 - DNA, 40 bp, Homo sapiens
tattgtactgaacagttaattcggagttctcttggttttt

SEQ ID NO: 12091 - DNA, 40 bp, Homo sapiens
aaaaaccaagagaactccgaattaactgttcagtacaata

SEQ ID NO: 12092 - DNA, 40 bp, Homo sapiens
attgtactgaacagttaattcggagttctcttggttttta

SEQ ID NO: 12093 - DNA, 40 bp, Homo sapiens
taaaaaccaagagaactccgaattaactgttcagtacaat

SEQ ID NO: 12094 - DNA, 40 bp, Homo sapiens
ttgtactgaacagttaattcggagttctcttggtttttag

SEQ ID NO: 12095 - DNA, 40 bp, Homo sapiens
ctaaaaaccaagagaactccgaattaactgttcagtacaa

SEQ ID NO: 12096 - DNA, 40 bp, Homo sapiens
tgtactgaacagttaattcggagttctcttggtttttagc

SEQ ID NO: 12097 - DNA, 40 bp, Homo sapiens
gctaaaaaccaagagaactccgaattaactgttcagtaca

SEQ ID NO: 12098 - DNA, 40 bp, Homo sapiens
gtactgaacagttaattcggagttctcttggtttttagct

SEQ ID NO: 12099 - DNA, 40 bp, Homo sapiens
agctaaaaaccaagagaactccgaattaactgttcagtac

SEQ ID NO: 12100 - DNA, 40 bp, Homo sapiens
tactgaacagttaattcggagttctcttggtttttagctt

SEQ ID NO: 12101 - DNA, 40 bp, Homo sapiens
aagctaaaaaccaagagaactccgaattaactgttcagta

SEQ ID NO: 12102 - DNA, 40 bp, Homo sapiens
actgaacagttaattcggagttctcttggtttttagcttt

SEQ ID NO: 12103 - DNA, 40 bp, Homo sapiens
aaagctaaaaaccaagagaactccgaattaactgttcagt

SEQ ID NO: 12104 - DNA, 40 bp, Homo sapiens
ctgaacagttaattcggagttctcttggtttttagcttta

SEQ ID NO: 12105 - DNA, 40 bp, Homo sapiens
taaagctaaaaaccaagagaactccgaattaactgttcag

SEQ ID NO: 12106 - DNA, 40 bp, Homo sapiens
tgaacagttaattcggagttctcttggtttttagctttat

SEQ ID NO: 12107 - DNA, 40 bp, Homo sapiens
ataaagctaaaaaccaagagaactccgaattaactgttca

SEQ ID NO: 12108 - DNA, 40 bp, Homo sapiens
gaacagttaattcggagttctcttggtttttagctttatt

SEQ ID NO: 12109 - DNA, 40 bp, Homo sapiens
aataaagctaaaaaccaagagaactccgaattaactgttc

SEQ ID NO: 12110 - DNA, 40 bp, Homo sapiens
aacagttaattcggagttctcttggtttttagctttattt

SEQ ID NO: 12111 - DNA, 40 bp, Homo sapiens
aaataaagctaaaaaccaagagaactccgaattaactgtt

SEQ ID NO: 12112 - DNA, 40 bp, Homo sapiens
acagttaattcggagttctcttggtttttagctttatttt

SEQ ID NO: 12113 - DNA, 40 bp, Homo sapiens
aaaataaagctaaaaaccaagagaactccgaattaactgt

SEQ ID NO: 12114 - DNA, 40 bp, Homo sapiens
cagttaattcggagttctcttggtttttagctttattttc

SEQ ID NO: 12115 - DNA, 40 bp, Homo sapiens
gaaaataaagctaaaaaccaagagaactccgaattaactg

SEQ ID NO: 12116 - DNA, 40 bp, Homo sapiens
agttaattcggagttctcttggtttttagctttattttcc

SEQ ID NO: 12117 - DNA, 40 bp, Homo sapiens
ggaaaataaagctaaaaaccaagagaactccgaattaact

SEQ ID NO: 12118 - DNA, 40 bp, Homo sapiens
gttaattcggagttctcttggtttttagctttattttccc

SEQ ID NO: 12119 - DNA, 40 bp, Homo sapiens
gggaaaataaagctaaaaaccaagagaactccgaattaac

SEQ ID NO: 12120 - DNA, 40 bp, Homo sapiens
ttaattcggagttctcttggtttttagctttattttcccc

SEQ ID NO: 12121 - DNA, 40 bp, Homo sapiens
ggggaaaataaagctaaaaaccaagagaactccgaattaa

SEQ ID NO: 12122 - DNA, 40 bp, Homo sapiens
taattcggagttctcttggtttttagctttattttcccca

SEQ ID NO: 12123 - DNA, 40 bp, Homo sapiens
tggggaaaataaagctaaaaaccaagagaactccgaatta

SEQ ID NO: 12124 - DNA, 40 bp, Homo sapiens
aattcggagttctcttggtttttagctttattttccccag

SEQ ID NO: 12125 - DNA, 40 bp, Homo sapiens
ctggggaaaataaagctaaaaaccaagagaactccgaatt

SEQ ID NO: 12126 - DNA, 40 bp, Homo sapiens
attcggagttctcttggtttttagctttattttccccaga

SEQ ID NO: 12127 - DNA, 40 bp, Homo sapiens
tctggggaaaataaagctaaaaaccaagagaactccgaat

SEQ ID NO: 12128 - DNA, 40 bp, Homo sapiens
ttcggagttctcttggtttttagctttattttccccagag

SEQ ID NO: 12129 - DNA, 40 bp, Homo sapiens
ctctggggaaaataaagctaaaaaccaagagaactccgaa

SEQ ID NO: 12130 - DNA, 40 bp, Homo sapiens
tcggagttctcttggtttttagctttattttccccagaga

SEQ ID NO: 12131 - DNA, 40 bp, Homo sapiens
tctctggggaaaataaagctaaaaaccaagagaactccga

SEQ ID NO: 12132 - DNA, 40 bp, Homo sapiens
cggagttctcttggtttttagctttattttccccagagat

SEQ ID NO: 12133 - DNA, 40 bp, Homo sapiens
atctctggggaaaataaagctaaaaaccaagagaactccg

SEQ ID NO: 12134 - DNA, 40 bp, Homo sapiens
ggagttctcttggtttttagctttattttccccagagatt

SEQ ID NO: 12135 - DNA, 40 bp, Homo sapiens
aatctctggggaaaataaagctaaaaaccaagagaactcc

SEQ ID NO: 12136 - DNA, 40 bp, Homo sapiens
gagttctcttggtttttagctttattttccccagagattt

SEQ ID NO: 12137 - DNA, 40 bp, Homo sapiens
aaatctctggggaaaataaagctaaaaaccaagagaactc

SEQ ID NO: 12138 - DNA, 40 bp, Homo sapiens
agttctcttggtttttagctttattttccccagagatttt

SEQ ID NO: 12139 - DNA, 40 bp, Homo sapiens
aaaatctctggggaaaataaagctaaaaaccaagagaact

SEQ ID NO: 12140 - DNA, 40 bp, Homo sapiens
gttctcttggtttttagctttattttccccagagattttt

SEQ ID NO: 12141 - DNA, 40 bp, Homo sapiens
aaaaatctctggggaaaataaagctaaaaaccaagagaac

SEQ ID NO: 12142 - DNA, 40 bp, Homo sapiens
ttctcttggtttttagctttattttccccagagatttttt

SEQ ID NO: 12143 - DNA, 40 bp, Homo sapiens
aaaaaatctctggggaaaataaagctaaaaaccaagagaa

SEQ ID NO: 12144 - DNA, 40 bp, Homo sapiens
tctcttggtttttagctttattttccccagagattttttt

SEQ ID NO: 12145 - DNA, 40 bp, Homo sapiens
aaaaaaatctctggggaaaataaagctaaaaaccaagaga

SEQ ID NO: 12146 - DNA, 40 bp, Homo sapiens
ctcttggtttttagctttattttccccagagatttttttt

SEQ ID NO: 12147 - DNA, 40 bp, Homo sapiens
aaaaaaaatctctggggaaaataaagctaaaaaccaagag

SEQ ID NO: 12148 - DNA, 40 bp, Homo sapiens
tcttggtttttagctttattttccccagagattttttttt

SEQ ID NO: 12149 - DNA, 40 bp, Homo sapiens
aaaaaaaaatctctggggaaaataaagctaaaaaccaaga

SEQ ID NO: 12150 - DNA, 40 bp, Homo sapiens
cttggtttttagctttattttccccagagatttttttttt

SEQ ID NO: 12151 - DNA, 40 bp, Homo sapiens
aaaaaaaaaatctctggggaaaataaagctaaaaaccaag

SEQ ID NO: 12152 - DNA, 40 bp, Homo sapiens
ttggtttttagctttattttccccagagattttttttttt

SEQ ID NO: 12153 - DNA, 40 bp, Homo sapiens
aaaaaaaaaaatctctggggaaaataaagctaaaaaccaa

SEQ ID NO: 12154 - DNA, 40 bp, Homo sapiens
tggtttttagctttattttccccagagatttttttttttt

SEQ ID NO: 12155 - DNA, 40 bp, Homo sapiens
aaaaaaaaaaaatctctggggaaaataaagctaaaaacca

SEQ ID NO: 12156 - DNA, 40 bp, Homo sapiens
ggtttttagctttattttccccagagattttttttttttt

SEQ ID NO: 12157 - DNA, 40 bp, Homo sapiens
aaaaaaaaaaaaatctctggggaaaataaagctaaaaacc

SEQ ID NO: 12158 - DNA, 40 bp, Homo sapiens
gtttttagctttattttccccagagatttttttttttttt

SEQ ID NO: 12159 - DNA, 40 bp, Homo sapiens
aaaaaaaaaaaaaatctctggggaaaataaagctaaaaac

SEQ ID NO: 12160 - DNA, 40 bp, Homo sapiens
tttttagctttattttccccagagattttttttttttttt

SEQ ID NO: 12161 - DNA, 40 bp, Homo sapiens
aaaaaaaaaaaaaaatctctggggaaaataaagctaaaaa

SEQ ID NO: 12162 - DNA, 40 bp, Homo sapiens
ttttagctttattttccccagagatttttttttttttttt

SEQ ID NO: 12163 - DNA, 40 bp, Homo sapiens
aaaaaaaaaaaaaaaatctctggggaaaataaagctaaaa

SEQ ID NO: 12164 - DNA, 40 bp, Homo sapiens
tttagctttattttccccagagattttttttttttttttt

SEQ ID NO: 12165 - DNA, 40 bp, Homo sapiens
aaaaaaaaaaaaaaaaatctctggggaaaataaagctaaa

SEQ ID NO: 12166 - DNA, 40 bp, Homo sapiens
ttagctttattttccccagagatttttttttttttttttt

SEQ ID NO: 12167 - DNA, 40 bp, Homo sapiens
aaaaaaaaaaaaaaaaaatctctggggaaaataaagctaa

SEQ ID NO: 12168 - DNA, 40 bp, Homo sapiens
tagctttattttccccagagattttttttttttttttttt

SEQ ID NO: 12169 - DNA, 40 bp, Homo sapiens
aaaaaaaaaaaaaaaaaaatctctggggaaaataaagcta

SEQ ID NO: 12170 - DNA, 40 bp, Homo sapiens
agctttattttccccagagatttttttttttttttttttt

SEQ ID NO: 12171 - DNA, 40 bp, Homo sapiens
aaaaaaaaaaaaaaaaaaaatctctggggaaaataaagct

SEQ ID NO: 12172 - DNA, 40 bp, Homo sapiens
gctttattttccccagagattttttttttttttttttttt

SEQ ID NO: 12173 - DNA, 40 bp, Homo sapiens
aaaaaaaaaaaaaaaaaaaaatctctggggaaaataaagc

SEQ ID NO: 12174 - DNA, 40 bp, Homo sapiens
ctttattttccccagagatttttttttttttttttttttt

SEQ ID NO: 12175 - DNA, 40 bp, Homo sapiens
aaaaaaaaaaaaaaaaaaaaaatctctggggaaaataaag

SEQ ID NO: 12176 - DNA, 40 bp, Homo sapiens
tttattttccccagagattttttttttttttttttttttt

SEQ ID NO: 12177 - DNA, 40 bp, Homo sapiens
aaaaaaaaaaaaaaaaaaaaaaatctctggggaaaataaa

SEQ ID NO: 12178 - DNA, 40 bp, Homo sapiens
ttattttccccagagatttttttttttttttttttttttg

SEQ ID NO: 12179 - DNA, 40 bp, Homo sapiens
caaaaaaaaaaaaaaaaaaaaaaatctctggggaaaataa

SEQ ID NO: 12180 - DNA, 40 bp, Homo sapiens
tattttccccagagatttttttttttttttttttttttga

SEQ ID NO: 12181 - DNA, 40 bp, Homo sapiens
tcaaaaaaaaaaaaaaaaaaaaaaatctctggggaaaata

SEQ ID NO: 12182 - DNA, 40 bp, Homo sapiens
attttccccagagatttttttttttttttttttttttgag

SEQ ID NO: 12183 - DNA, 40 bp, Homo sapiens
ctcaaaaaaaaaaaaaaaaaaaaaaatctctggggaaaat

SEQ ID NO: 12184 - DNA, 40 bp, Homo sapiens
ttttccccagagatttttttttttttttttttttttgaga

SEQ ID NO: 12185 - DNA, 40 bp, Homo sapiens
tctcaaaaaaaaaaaaaaaaaaaaaaatctctggggaaaa

SEQ ID NO: 12186 - DNA, 40 bp, Homo sapiens
tttccccagagatttttttttttttttttttttttgagac

SEQ ID NO: 12187 - DNA, 40 bp, Homo sapiens
gtctcaaaaaaaaaaaaaaaaaaaaaaatctctggggaaa

SEQ ID NO: 12188 - DNA, 40 bp, Homo sapiens
ttccccagagatttttttttttttttttttttttgagacg

SEQ ID NO: 12189 - DNA, 40 bp, Homo sapiens
cgtctcaaaaaaaaaaaaaaaaaaaaaaatctctggggaa

SEQ ID NO: 12190 - DNA, 40 bp, Homo sapiens
tccccagagatttttttttttttttttttttttgagacgg

SEQ ID NO: 12191 - DNA, 40 bp, Homo sapiens
ccgtctcaaaaaaaaaaaaaaaaaaaaaaatctctgggga

SEQ ID NO: 12192 - DNA, 40 bp, Homo sapiens
ccccagagatttttttttttttttttttttttgagacgga

SEQ ID NO: 12193 - DNA, 40 bp, Homo sapiens
tccgtctcaaaaaaaaaaaaaaaaaaaaaaatctctgggg

SEQ ID NO: 12194 - DNA, 40 bp, Homo sapiens
cccagagatttttttttttttttttttttttgagacggag

SEQ ID NO: 12195 - DNA, 40 bp, Homo sapiens
ctccgtctcaaaaaaaaaaaaaaaaaaaaaaatctctggg

SEQ ID NO: 12196 - DNA, 40 bp, Homo sapiens
ccagagatttttttttttttttttttttttgagacggagt

SEQ ID NO: 12197 - DNA, 40 bp, Homo sapiens
actccgtctcaaaaaaaaaaaaaaaaaaaaaaatctctgg

SEQ ID NO: 12198 - DNA, 40 bp, Homo sapiens
cagagatttttttttttttttttttttttgagacggagtc

SEQ ID NO: 12199 - DNA, 40 bp, Homo sapiens
gactccgtctcaaaaaaaaaaaaaaaaaaaaaaatctctg

SEQ ID NO: 12200 - DNA, 40 bp, Homo sapiens
agagatttttttttttttttttttttttgagacggagtct

SEQ ID NO: 12201 - DNA, 40 bp, Homo sapiens
agactccgtctcaaaaaaaaaaaaaaaaaaaaaaatctct

SEQ ID NO: 12202 - DNA, 40 bp, Homo sapiens
gagatttttttttttttttttttttttgagacggagtctt

SEQ ID NO: 12203 - DNA, 40 bp, Homo sapiens
aagactccgtctcaaaaaaaaaaaaaaaaaaaaaaatctc

SEQ ID NO: 12204 - DNA, 40 bp, Homo sapiens
agatttttttttttttttttttttttgagacggagtcttg

SEQ ID NO: 12205 - DNA, 40 bp, Homo sapiens
caagactccgtctcaaaaaaaaaaaaaaaaaaaaaaatct

SEQ ID NO: 12206 - DNA, 40 bp, Homo sapiens
gatttttttttttttttttttttttgagacggagtcttgc

SEQ ID NO: 12207 - DNA, 40 bp, Homo sapiens
gcaagactccgtctcaaaaaaaaaaaaaaaaaaaaaaatc

SEQ ID NO: 12208 - DNA, 40 bp, Homo sapiens
atttttttttttttttttttttttgagacggagtcttgct

SEQ ID NO: 12209 - DNA, 40 bp, Homo sapiens
agcaagactccgtctcaaaaaaaaaaaaaaaaaaaaaaat

SEQ ID NO: 12210 - DNA, 40 bp, Homo sapiens
tttttttttttttttttttttttgagacggagtcttgctc

SEQ ID NO: 12211 - DNA, 40 bp, Homo sapiens
gagcaagactccgtctcaaaaaaaaaaaaaaaaaaaaaaa

SEQ ID NO: 12212 - DNA, 40 bp, Homo sapiens
ttttttttttttttttttttttgagacggagtcttgctct

SEQ ID NO: 12213 - DNA, 40 bp, Homo sapiens
agagcaagactccgtctcaaaaaaaaaaaaaaaaaaaaaa

SEQ ID NO: 12214 - DNA, 40 bp, Homo sapiens
tttttttttttttttttttttgagacggagtcttgctcta

SEQ ID NO: 12215 - DNA, 40 bp, Homo sapiens
tagagcaagactccgtctcaaaaaaaaaaaaaaaaaaaaa

SEQ ID NO: 12216 - DNA, 40 bp, Homo sapiens
ttttttttttttttttttttgagacggagtcttgctctat

SEQ ID NO: 12217 - DNA, 40 bp, Homo sapiens
atagagcaagactccgtctcaaaaaaaaaaaaaaaaaaaa

SEQ ID NO: 12218 - DNA, 40 bp, Homo sapiens
tttttttttttttttttttgagacggagtcttgctctatc

SEQ ID NO: 12219 - DNA, 40 bp, Homo sapiens
gatagagcaagactccgtctcaaaaaaaaaaaaaaaaaaa

SEQ ID NO: 12220 - DNA, 40 bp, Homo sapiens
ttttttttttttttttttgagacggagtcttgctctatcg

SEQ ID NO: 12221 - DNA, 40 bp, Homo sapiens
cgatagagcaagactccgtctcaaaaaaaaaaaaaaaaaa

SEQ ID NO: 12222 - DNA, 40 bp, Homo sapiens
tttttttttttttttttgagacggagtcttgctctatcgc

SEQ ID NO: 12223 - DNA, 40 bp, Homo sapiens
gcgatagagcaagactccgtctcaaaaaaaaaaaaaaaaa

SEQ ID NO: 12224 - DNA, 40 bp, Homo sapiens
ttttttttttttttttgagacggagtcttgctctatcgcc

SEQ ID NO: 12225 - DNA, 40 bp, Homo sapiens
ggcgatagagcaagactccgtctcaaaaaaaaaaaaaaaa

SEQ ID NO: 12226 - DNA, 40 bp, Homo sapiens
tttttttttttttttgagacggagtcttgctctatcgcca

SEQ ID NO: 12227 - DNA, 40 bp, Homo sapiens
tggcgatagagcaagactccgtctcaaaaaaaaaaaaaaa

SEQ ID NO: 12228 - DNA, 40 bp, Homo sapiens
ttttttttttttttgagacggagtcttgctctatcgccag

SEQ ID NO: 12229 - DNA, 40 bp, Homo sapiens
ctggcgatagagcaagactccgtctcaaaaaaaaaaaaaa

SEQ ID NO: 12230 - DNA, 40 bp, Homo sapiens
tttttttttttttgagacggagtcttgctctatcgccagg

SEQ ID NO: 12231 - DNA, 40 bp, Homo sapiens
cctggcgatagagcaagactccgtctcaaaaaaaaaaaaa

SEQ ID NO: 12232 - DNA, 40 bp, Homo sapiens
ttttttttttttgagacggagtcttgctctatcgccaggc

SEQ ID NO: 12233 - DNA, 40 bp, Homo sapiens
gcctggcgatagagcaagactccgtctcaaaaaaaaaaaa

SEQ ID NO: 12234 - DNA, 40 bp, Homo sapiens
tttttttttttgagacggagtcttgctctatcgccaggct

SEQ ID NO: 12235 - DNA, 40 bp, Homo sapiens
agcctggcgatagagcaagactccgtctcaaaaaaaaaaa

SEQ ID NO: 12236 - DNA, 40 bp, Homo sapiens
ttttttttttgagacggagtcttgctctatcgccaggctg

SEQ ID NO: 12237 - DNA, 40 bp, Homo sapiens
cagcctggcgatagagcaagactccgtctcaaaaaaaaaa

SEQ ID NO: 12238 - DNA, 40 bp, Homo sapiens
tttttttttgagacggagtcttgctctatcgccaggctgg

SEQ ID NO: 12239 - DNA, 40 bp, Homo sapiens
ccagcctggcgatagagcaagactccgtctcaaaaaaaaa

SEQ ID NO: 12240 - DNA, 40 bp, Homo sapiens
ttttttttgagacggagtcttgctctatcgccaggctgga

SEQ ID NO: 12241 - DNA, 40 bp, Homo sapiens
tccagcctggcgatagagcaagactccgtctcaaaaaaaa

SEQ ID NO: 12242 - DNA, 40 bp, Homo sapiens
tttttttgagacggagtcttgctctatcgccaggctggag

SEQ ID NO: 12243 - DNA, 40 bp, Homo sapiens
ctccagcctggcgatagagcaagactccgtctcaaaaaaa

SEQ ID NO: 12244 - DNA, 40 bp, Homo sapiens
ttttttgagacggagtcttgctctatcgccaggctggagt

SEQ ID NO: 12245 - DNA, 40 bp, Homo sapiens
actccagcctggcgatagagcaagactccgtctcaaaaaa

SEQ ID NO: 12246 - DNA, 40 bp, Homo sapiens
tttttgagacggagtcttgctctatcgccaggctggagtg

SEQ ID NO: 12247 - DNA, 40 bp, Homo sapiens
cactccagcctggcgatagagcaagactccgtctcaaaaa

SEQ ID NO: 12248 - DNA, 40 bp, Homo sapiens
ttttgagacggagtcttgctctatcgccaggctggagtgc

SEQ ID NO: 12249 - DNA, 40 bp, Homo sapiens
gcactccagcctggcgatagagcaagactccgtctcaaaa

SEQ ID NO: 12250 - DNA, 40 bp, Homo sapiens
tttgagacggagtcttgctctatcgccaggctggagtgca

SEQ ID NO: 12251 - DNA, 40 bp, Homo sapiens
tgcactccagcctggcgatagagcaagactccgtctcaaa

SEQ ID NO: 12252 - DNA, 40 bp, Homo sapiens
ttgagacggagtcttgctctatcgccaggctggagtgcag

SEQ ID NO: 12253 - DNA, 40 bp, Homo sapiens
ctgcactccagcctggcgatagagcaagactccgtctcaa

SEQ ID NO: 12254 - DNA, 40 bp, Homo sapiens
tgagacggagtcttgctctatcgccaggctggagtgcagt

SEQ ID NO: 12255 - DNA, 40 bp, Homo sapiens
actgcactccagcctggcgatagagcaagactccgtctca

SEQ ID NO: 12256 - DNA, 40 bp, Homo sapiens
gagacggagtcttgctctatcgccaggctggagtgcagtg

SEQ ID NO: 12257 - DNA, 40 bp, Homo sapiens
cactgcactccagcctggcgatagagcaagactccgtctc

SEQ ID NO: 12258 - DNA, 40 bp, Homo sapiens
agacggagtcttgctctatcgccaggctggagtgcagtgg

SEQ ID NO: 12259 - DNA, 40 bp, Homo sapiens
ccactgcactccagcctggcgatagagcaagactccgtct

SEQ ID NO: 12260 - DNA, 40 bp, Homo sapiens
gacggagtcttgctctatcgccaggctggagtgcagtggc

SEQ ID NO: 12261 - DNA, 40 bp, Homo sapiens
gccactgcactccagcctggcgatagagcaagactccgtc

SEQ ID NO: 12262 - DNA, 40 bp, Homo sapiens
acggagtcttgctctatcgccaggctggagtgcagtggcg

SEQ ID NO: 12263 - DNA, 40 bp, Homo sapiens
cgccactgcactccagcctggcgatagagcaagactccgt

SEQ ID NO: 12264 - DNA, 40 bp, Homo sapiens
cggagtcttgctctatcgccaggctggagtgcagtggcgc

SEQ ID NO: 12265 - DNA, 40 bp, Homo sapiens
gcgccactgcactccagcctggcgatagagcaagactccg

SEQ ID NO: 12266 - DNA, 40 bp, Homo sapiens
ggagtcttgctctatcgccaggctggagtgcagtggcgcc

SEQ ID NO: 12267 - DNA, 40 bp, Homo sapiens
ggcgccactgcactccagcctggcgatagagcaagactcc

SEQ ID NO: 12268 - DNA, 40 bp, Homo sapiens
gagtcttgctctatcgccaggctggagtgcagtggcgcca

SEQ ID NO: 12269 - DNA, 40 bp, Homo sapiens
tggcgccactgcactccagcctggcgatagagcaagactc

SEQ ID NO: 12270 - DNA, 40 bp, Homo sapiens
agtcttgctctatcgccaggctggagtgcagtggcgccat

SEQ ID NO: 12271 - DNA, 40 bp, Homo sapiens
atggcgccactgcactccagcctggcgatagagcaagact

SEQ ID NO: 12272 - DNA, 40 bp, Homo sapiens
gtcttgctctatcgccaggctggagtgcagtggcgccatc

SEQ ID NO: 12273 - DNA, 40 bp, Homo sapiens
gatggcgccactgcactccagcctggcgatagagcaagac

SEQ ID NO: 12274 - DNA, 40 bp, Homo sapiens
tcttgctctatcgccaggctggagtgcagtggcgccatct

SEQ ID NO: 12275 - DNA, 40 bp, Homo sapiens
agatggcgccactgcactccagcctggcgatagagcaaga

SEQ ID NO: 12276 - DNA, 40 bp, Homo sapiens
cttgctctatcgccaggctggagtgcagtggcgccatctc

SEQ ID NO: 12277 - DNA, 40 bp, Homo sapiens
gagatggcgccactgcactccagcctggcgatagagcaag

SEQ ID NO: 12278 - DNA, 40 bp, Homo sapiens
ttgctctatcgccaggctggagtgcagtggcgccatctcg

SEQ ID NO: 12279 - DNA, 40 bp, Homo sapiens
cgagatggcgccactgcactccagcctggcgatagagcaa

SEQ ID NO: 12280 - DNA, 40 bp, Homo sapiens
tgctctatcgccaggctggagtgcagtggcgccatctcgg

SEQ ID NO: 12281 - DNA, 40 bp, Homo sapiens
ccgagatggcgccactgcactccagcctggcgatagagca

SEQ ID NO: 12282 - DNA, 40 bp, Homo sapiens
gctctatcgccaggctggagtgcagtggcgccatctcggc

SEQ ID NO: 12283 - DNA, 40 bp, Homo sapiens
gccgagatggcgccactgcactccagcctggcgatagagc

SEQ ID NO: 12284 - DNA, 40 bp, Homo sapiens
ctctatcgccaggctggagtgcagtggcgccatctcggct

SEQ ID NO: 12285 - DNA, 40 bp, Homo sapiens
agccgagatggcgccactgcactccagcctggcgatagag

SEQ ID NO: 12286 - DNA, 40 bp, Homo sapiens
tctatcgccaggctggagtgcagtggcgccatctcggctc

SEQ ID NO: 12287 - DNA, 40 bp, Homo sapiens
gagccgagatggcgccactgcactccagcctggcgataga

SEQ ID NO: 12288 - DNA, 40 bp, Homo sapiens
ctatcgccaggctggagtgcagtggcgccatctcggctca

SEQ ID NO: 12289 - DNA, 40 bp, Homo sapiens
tgagccgagatggcgccactgcactccagcctggcgatag

SEQ ID NO: 12290 - DNA, 40 bp, Homo sapiens
tatcgccaggctggagtgcagtggcgccatctcggctcat

SEQ ID NO: 12291 - DNA, 40 bp, Homo sapiens
atgagccgagatggcgccactgcactccagcctggcgata

SEQ ID NO: 12292 - DNA, 40 bp, Homo sapiens
atcgccaggctggagtgcagtggcgccatctcggctcatt

SEQ ID NO: 12293 - DNA, 40 bp, Homo sapiens
aatgagccgagatggcgccactgcactccagcctggcgat

SEQ ID NO: 12294 - DNA, 40 bp, Homo sapiens
tcgccaggctggagtgcagtggcgccatctcggctcattg

SEQ ID NO: 12295 - DNA, 40 bp, Homo sapiens
caatgagccgagatggcgccactgcactccagcctggcga

SEQ ID NO: 12296 - DNA, 40 bp, Homo sapiens
cgccaggctggagtgcagtggcgccatctcggctcattgc

SEQ ID NO: 12297 - DNA, 40 bp, Homo sapiens
gcaatgagccgagatggcgccactgcactccagcctggcg

SEQ ID NO: 12298 - DNA, 40 bp, Homo sapiens
gccaggctggagtgcagtggcgccatctcggctcattgca

SEQ ID NO: 12299 - DNA, 40 bp, Homo sapiens
tgcaatgagccgagatggcgccactgcactccagcctggc

SEQ ID NO: 12300 - DNA, 40 bp, Homo sapiens
ccaggctggagtgcagtggcgccatctcggctcattgcaa

SEQ ID NO: 12301 - DNA, 40 bp, Homo sapiens
ttgcaatgagccgagatggcgccactgcactccagcctgg

SEQ ID NO: 12302 - DNA, 40 bp, Homo sapiens
caggctggagtgcagtggcgccatctcggctcattgcaac

SEQ ID NO: 12303 - DNA, 40 bp, Homo sapiens
gttgcaatgagccgagatggcgccactgcactccagcctg

SEQ ID NO: 12304 - DNA, 40 bp, Homo sapiens
aggctggagtgcagtggcgccatctcggctcattgcaacc

SEQ ID NO: 12305 - DNA, 40 bp, Homo sapiens
ggttgcaatgagccgagatggcgccactgcactccagcct

SEQ ID NO: 12306 - DNA, 40 bp, Homo sapiens
ggctggagtgcagtggcgccatctcggctcattgcaacct

SEQ ID NO: 12307 - DNA, 40 bp, Homo sapiens
aggttgcaatgagccgagatggcgccactgcactccagcc

SEQ ID NO: 12308 - DNA, 40 bp, Homo sapiens
gctggagtgcagtggcgccatctcggctcattgcaacctc

SEQ ID NO: 12309 - DNA, 40 bp, Homo sapiens
gaggttgcaatgagccgagatggcgccactgcactccagc

SEQ ID NO: 12310 - DNA, 40 bp, Homo sapiens
ctggagtgcagtggcgccatctcggctcattgcaacctcg

SEQ ID NO: 12311 - DNA, 40 bp, Homo sapiens
cgaggttgcaatgagccgagatggcgccactgcactccag

SEQ ID NO: 12312 - DNA, 40 bp, Homo sapiens
tggagtgcagtggcgccatctcggctcattgcaacctcgg

SEQ ID NO: 12313 - DNA, 40 bp, Homo sapiens
ccgaggttgcaatgagccgagatggcgccactgcactcca

SEQ ID NO: 12314 - DNA, 40 bp, Homo sapiens
ggagtgcagtggcgccatctcggctcattgcaacctcgga

SEQ ID NO: 12315 - DNA, 40 bp, Homo sapiens
tccgaggttgcaatgagccgagatggcgccactgcactcc

SEQ ID NO: 12316 - DNA, 40 bp, Homo sapiens
gagtgcagtggcgccatctcggctcattgcaacctcggac

SEQ ID NO: 12317 - DNA, 40 bp, Homo sapiens
gtccgaggttgcaatgagccgagatggcgccactgcactc

SEQ ID NO: 12318 - DNA, 40 bp, Homo sapiens
agtgcagtggcgccatctcggctcattgcaacctcggact

SEQ ID NO: 12319 - DNA, 40 bp, Homo sapiens
agtccgaggttgcaatgagccgagatggcgccactgcact

SEQ ID NO: 12320 - DNA, 40 bp, Homo sapiens
gtgcagtggcgccatctcggctcattgcaacctcggactc

SEQ ID NO: 12321 - DNA, 40 bp, Homo sapiens
gagtccgaggttgcaatgagccgagatggcgccactgcac

SEQ ID NO: 12322 - DNA, 40 bp, Homo sapiens
tgcagtggcgccatctcggctcattgcaacctcggactcc

SEQ ID NO: 12323 - DNA, 40 bp, Homo sapiens
ggagtccgaggttgcaatgagccgagatggcgccactgca

SEQ ID NO: 12324 - DNA, 40 bp, Homo sapiens
gcagtggcgccatctcggctcattgcaacctcggactcct

SEQ ID NO: 12325 - DNA, 40 bp, Homo sapiens
aggagtccgaggttgcaatgagccgagatggcgccactgc

SEQ ID NO: 12326 - DNA, 40 bp, Homo sapiens
cagtggcgccatctcggctcattgcaacctcggactccta

SEQ ID NO: 12327 - DNA, 40 bp, Homo sapiens
taggagtccgaggttgcaatgagccgagatggcgccactg

SEQ ID NO: 12328 - DNA, 40 bp, Homo sapiens
agtggcgccatctcggctcattgcaacctcggactcctat

SEQ ID NO: 12329 - DNA, 40 bp, Homo sapiens
ataggagtccgaggttgcaatgagccgagatggcgccact

SEQ ID NO: 12330 - DNA, 40 bp, Homo sapiens
gtggcgccatctcggctcattgcaacctcggactcctatt

SEQ ID NO: 12331 - DNA, 40 bp, Homo sapiens
aataggagtccgaggttgcaatgagccgagatggcgccac

SEQ ID NO: 12332 - DNA, 40 bp, Homo sapiens
tggcgccatctcggctcattgcaacctcggactcctattt

SEQ ID NO: 12333 - DNA, 40 bp, Homo sapiens
aaataggagtccgaggttgcaatgagccgagatggcgcca

SEQ ID NO: 12334 - DNA, 40 bp, Homo sapiens
ggcgccatctcggctcattgcaacctcggactcctatttt

SEQ ID NO: 12335 - DNA, 40 bp, Homo sapiens
aaaataggagtccgaggttgcaatgagccgagatggcgcc

SEQ ID NO: 12336 - DNA, 40 bp, Homo sapiens
gcgccatctcggctcattgcaacctcggactcctattttc

SEQ ID NO: 12337 - DNA, 40 bp, Homo sapiens
gaaaataggagtccgaggttgcaatgagccgagatggcgc

SEQ ID NO: 12338 - DNA, 40 bp, Homo sapiens
cgccatctcggctcattgcaacctcggactcctattttcc

SEQ ID NO: 12339 - DNA, 40 bp, Homo sapiens
ggaaaataggagtccgaggttgcaatgagccgagatggcg

SEQ ID NO: 12340 - DNA, 40 bp, Homo sapiens
gccatctcggctcattgcaacctcggactcctattttccc

SEQ ID NO: 12341 - DNA, 40 bp, Homo sapiens
gggaaaataggagtccgaggttgcaatgagccgagatggc

SEQ ID NO: 12342 - DNA, 40 bp, Homo sapiens
ccatctcggctcattgcaacctcggactcctattttcccc

SEQ ID NO: 12343 - DNA, 40 bp, Homo sapiens
ggggaaaataggagtccgaggttgcaatgagccgagatgg

SEQ ID NO: 12344 - DNA, 40 bp, Homo sapiens
catctcggctcattgcaacctcggactcctattttcccca

SEQ ID NO: 12345 - DNA, 40 bp, Homo sapiens
tggggaaaataggagtccgaggttgcaatgagccgagatg

SEQ ID NO: 12346 - DNA, 40 bp, Homo sapiens
atctcggctcattgcaacctcggactcctattttccccag

SEQ ID NO: 12347 - DNA, 40 bp, Homo sapiens
ctggggaaaataggagtccgaggttgcaatgagccgagat

SEQ ID NO: 12348 - DNA, 40 bp, Homo sapiens
tctcggctcattgcaacctcggactcctattttccccaga

SEQ ID NO: 12349 - DNA, 40 bp, Homo sapiens
tctggggaaaataggagtccgaggttgcaatgagccgaga

SEQ ID NO: 12350 - DNA, 40 bp, Homo sapiens
ctcggctcattgcaacctcggactcctattttccccagag

SEQ ID NO: 12351 - DNA, 40 bp, Homo sapiens
ctctggggaaaataggagtccgaggttgcaatgagccgag

SEQ ID NO: 12352 - DNA, 40 bp, Homo sapiens
tcggctcattgcaacctcggactcctattttccccagaga

SEQ ID NO: 12353 - DNA, 40 bp, Homo sapiens
tctctggggaaaataggagtccgaggttgcaatgagccga

SEQ ID NO: 12354 - DNA, 40 bp, Homo sapiens
cggctcattgcaacctcggactcctattttccccagagat

SEQ ID NO: 12355 - DNA, 40 bp, Homo sapiens
atctctggggaaaataggagtccgaggttgcaatgagccg

SEQ ID NO: 12356 - DNA, 40 bp, Homo sapiens
ggctcattgcaacctcggactcctattttccccagagata

SEQ ID NO: 12357 - DNA, 40 bp, Homo sapiens
tatctctggggaaaataggagtccgaggttgcaatgagcc

SEQ ID NO: 12358 - DNA, 40 bp, Homo sapiens
gctcattgcaacctcggactcctattttccccagagatat

SEQ ID NO: 12359 - DNA, 40 bp, Homo sapiens
atatctctggggaaaataggagtccgaggttgcaatgagc

SEQ ID NO: 12360 - DNA, 40 bp, Homo sapiens
ctcattgcaacctcggactcctattttccccagagatatt

SEQ ID NO: 12361 - DNA, 40 bp, Homo sapiens
aatatctctggggaaaataggagtccgaggttgcaatgag

SEQ ID NO: 12362 - DNA, 40 bp, Homo sapiens
tcattgcaacctcggactcctattttccccagagatattt

SEQ ID NO: 12363 - DNA, 40 bp, Homo sapiens
aaatatctctggggaaaataggagtccgaggttgcaatga

SEQ ID NO: 12364 - DNA, 40 bp, Homo sapiens
cattgcaacctcggactcctattttccccagagatatttc

SEQ ID NO: 12365 - DNA, 40 bp, Homo sapiens
gaaatatctctggggaaaataggagtccgaggttgcaatg

SEQ ID NO: 12366 - DNA, 40 bp, Homo sapiens
attgcaacctcggactcctattttccccagagatatttca

SEQ ID NO: 12367 - DNA, 40 bp, Homo sapiens
tgaaatatctctggggaaaataggagtccgaggttgcaat

SEQ ID NO: 12368 - DNA, 40 bp, Homo sapiens
ttgcaacctcggactcctattttccccagagatatttcac

SEQ ID NO: 12369 - DNA, 40 bp, Homo sapiens
gtgaaatatctctggggaaaataggagtccgaggttgcaa

SEQ ID NO: 12370 - DNA, 40 bp, Homo sapiens
tgcaacctcggactcctattttccccagagatatttcaca

SEQ ID NO: 12371 - DNA, 40 bp, Homo sapiens
tgtgaaatatctctggggaaaataggagtccgaggttgca

SEQ ID NO: 12372 - DNA, 40 bp, Homo sapiens
gcaacctcggactcctattttccccagagatatttcacac

SEQ ID NO: 12373 - DNA, 40 bp, Homo sapiens
gtgtgaaatatctctggggaaaataggagtccgaggttgc

SEQ ID NO: 12374 - DNA, 40 bp, Homo sapiens
caacctcggactcctattttccccagagatatttcacaca

SEQ ID NO: 12375 - DNA, 40 bp, Homo sapiens
tgtgtgaaatatctctggggaaaataggagtccgaggttg

SEQ ID NO: 12376 - DNA, 40 bp, Homo sapiens
aacctcggactcctattttccccagagatatttcacacat

SEQ ID NO: 12377 - DNA, 40 bp, Homo sapiens
atgtgtgaaatatctctggggaaaataggagtccgaggtt

SEQ ID NO: 12378 - DNA, 40 bp, Homo sapiens
acctcggactcctattttccccagagatatttcacacatt

SEQ ID NO: 12379 - DNA, 40 bp, Homo sapiens
aatgtgtgaaatatctctggggaaaataggagtccgaggt

SEQ ID NO: 12380 - DNA, 40 bp, Homo sapiens
cctcggactcctattttccccagagatatttcacacatta

SEQ ID NO: 12381 - DNA, 40 bp, Homo sapiens
taatgtgtgaaatatctctggggaaaataggagtccgagg

SEQ ID NO: 12382 - DNA, 40 bp, Homo sapiens
ctcggactcctattttccccagagatatttcacacattaa

SEQ ID NO: 12383 - DNA, 40 bp, Homo sapiens
ttaatgtgtgaaatatctctggggaaaataggagtccgag

SEQ ID NO: 12384 - DNA, 40 bp, Homo sapiens
tcggactcctattttccccagagatatttcacacattaaa

SEQ ID NO: 12385 - DNA, 40 bp, Homo sapiens
tttaatgtgtgaaatatctctggggaaaataggagtccga

SEQ ID NO: 12386 - DNA, 40 bp, Homo sapiens
cggactcctattttccccagagatatttcacacattaaaa

SEQ ID NO: 12387 - DNA, 40 bp, Homo sapiens
ttttaatgtgtgaaatatctctggggaaaataggagtccg

SEQ ID NO: 12388 - DNA, 40 bp, Homo sapiens
ggactcctattttccccagagatatttcacacattaaaat

SEQ ID NO: 12389 - DNA, 40 bp, Homo sapiens
attttaatgtgtgaaatatctctggggaaaataggagtcc

SEQ ID NO: 12390 - DNA, 40 bp, Homo sapiens
gactcctattttccccagagatatttcacacattaaaatg

SEQ ID NO: 12391 - DNA, 40 bp, Homo sapiens
cattttaatgtgtgaaatatctctggggaaaataggagtc

SEQ ID NO: 12392 - DNA, 40 bp, Homo sapiens
actcctattttccccagagatatttcacacattaaaatgt

SEQ ID NO: 12393 - DNA, 40 bp, Homo sapiens
acattttaatgtgtgaaatatctctggggaaaataggagt

SEQ ID NO: 12394 - DNA, 40 bp, Homo sapiens
ctcctattttccccagagatatttcacacattaaaatgtc

SEQ ID NO: 12395 - DNA, 40 bp, Homo sapiens
gacattttaatgtgtgaaatatctctggggaaaataggag

SEQ ID NO: 12396 - DNA, 40 bp, Homo sapiens
tcctattttccccagagatatttcacacattaaaatgtcg

SEQ ID NO: 12397 - DNA, 40 bp, Homo sapiens
cgacattttaatgtgtgaaatatctctggggaaaatagga

SEQ ID NO: 12398 - DNA, 40 bp, Homo sapiens
cctattttccccagagatatttcacacattaaaatgtcgt

SEQ ID NO: 12399 - DNA, 40 bp, Homo sapiens
acgacattttaatgtgtgaaatatctctggggaaaatagg

SEQ ID NO: 12400 - DNA, 40 bp, Homo sapiens
ctattttccccagagatatttcacacattaaaatgtcgtc

SEQ ID NO: 12401 - DNA, 40 bp, Homo sapiens
gacgacattttaatgtgtgaaatatctctggggaaaatag

SEQ ID NO: 12402 - DNA, 40 bp, Homo sapiens
tattttccccagagatatttcacacattaaaatgtcgtca

SEQ ID NO: 12403 - DNA, 40 bp, Homo sapiens
tgacgacattttaatgtgtgaaatatctctggggaaaata

SEQ ID NO: 12404 - DNA, 40 bp, Homo sapiens
attttccccagagatatttcacacattaaaatgtcgtcaa

SEQ ID NO: 12405 - DNA, 40 bp, Homo sapiens
ttgacgacattttaatgtgtgaaatatctctggggaaaat

SEQ ID NO: 12406 - DNA, 40 bp, Homo sapiens
ttttccccagagatatttcacacattaaaatgtcgtcaaa

SEQ ID NO: 12407 - DNA, 40 bp, Homo sapiens
tttgacgacattttaatgtgtgaaatatctctggggaaaa

SEQ ID NO: 12408 - DNA, 40 bp, Homo sapiens
tttccccagagatatttcacacattaaaatgtcgtcaaat

SEQ ID NO: 12409 - DNA, 40 bp, Homo sapiens
atttgacgacattttaatgtgtgaaatatctctggggaaa

SEQ ID NO: 12410 - DNA, 40 bp, Homo sapiens
ttccccagagatatttcacacattaaaatgtcgtcaaata

SEQ ID NO: 12411 - DNA, 40 bp, Homo sapiens
tatttgacgacattttaatgtgtgaaatatctctggggaa

SEQ ID NO: 12412 - DNA, 40 bp, Homo sapiens
tccccagagatatttcacacattaaaatgtcgtcaaatat

SEQ ID NO: 12413 - DNA, 40 bp, Homo sapiens
atatttgacgacattttaatgtgtgaaatatctctgggga

SEQ ID NO: 12414 - DNA, 40 bp, Homo sapiens
ccccagagatatttcacacattaaaatgtcgtcaaatatt

SEQ ID NO: 12415 - DNA, 40 bp, Homo sapiens
aatatttgacgacattttaatgtgtgaaatatctctgggg

SEQ ID NO: 12416 - DNA, 40 bp, Homo sapiens
cccagagatatttcacacattaaaatgtcgtcaaatattg

SEQ ID NO: 12417 - DNA, 40 bp, Homo sapiens
caatatttgacgacattttaatgtgtgaaatatctctggg

SEQ ID NO: 12418 - DNA, 40 bp, Homo sapiens
ccagagatatttcacacattaaaatgtcgtcaaatattgt

SEQ ID NO: 12419 - DNA, 40 bp, Homo sapiens
acaatatttgacgacattttaatgtgtgaaatatctctgg

SEQ ID NO: 12420 - DNA, 40 bp, Homo sapiens
cagagatatttcacacattaaaatgtcgtcaaatattgtt

SEQ ID NO: 12421 - DNA, 40 bp, Homo sapiens
aacaatatttgacgacattttaatgtgtgaaatatctctg

SEQ ID NO: 12422 - DNA, 40 bp, Homo sapiens
agagatatttcacacattaaaatgtcgtcaaatattgttc

SEQ ID NO: 12423 - DNA, 40 bp, Homo sapiens
gaacaatatttgacgacattttaatgtgtgaaatatctct

SEQ ID NO: 12424 - DNA, 40 bp, Homo sapiens
gagatatttcacacattaaaatgtcgtcaaatattgttct

SEQ ID NO: 12425 - DNA, 40 bp, Homo sapiens
agaacaatatttgacgacattttaatgtgtgaaatatctc

SEQ ID NO: 12426 - DNA, 40 bp, Homo sapiens
agatatttcacacattaaaatgtcgtcaaatattgttctt

SEQ ID NO: 12427 - DNA, 40 bp, Homo sapiens
aagaacaatatttgacgacattttaatgtgtgaaatatct

SEQ ID NO: 12428 - DNA, 40 bp, Homo sapiens
gatatttcacacattaaaatgtcgtcaaatattgttcttc

SEQ ID NO: 12429 - DNA, 40 bp, Homo sapiens
gaagaacaatatttgacgacattttaatgtgtgaaatatc

SEQ ID NO: 12430 - DNA, 40 bp, Homo sapiens
atatttcacacattaaaatgtcgtcaaatattgttcttct

SEQ ID NO: 12431 - DNA, 40 bp, Homo sapiens
agaagaacaatatttgacgacattttaatgtgtgaaatat

SEQ ID NO: 12432 - DNA, 40 bp, Homo sapiens
tatttcacacattaaaatgtcgtcaaatattgttcttctt

SEQ ID NO: 12433 - DNA, 40 bp, Homo sapiens
aagaagaacaatatttgacgacattttaatgtgtgaaata

SEQ ID NO: 12434 - DNA, 40 bp, Homo sapiens
atttcacacattaaaatgtcgtcaaatattgttcttcttt

SEQ ID NO: 12435 - DNA, 40 bp, Homo sapiens
aaagaagaacaatatttgacgacattttaatgtgtgaaat

SEQ ID NO: 12436 - DNA, 40 bp, Homo sapiens
tttcacacattaaaatgtcgtcaaatattgttcttctttg

SEQ ID NO: 12437 - DNA, 40 bp, Homo sapiens
caaagaagaacaatatttgacgacattttaatgtgtgaaa

SEQ ID NO: 12438 - DNA, 40 bp, Homo sapiens
ttcacacattaaaatgtcgtcaaatattgttcttctttgc

SEQ ID NO: 12439 - DNA, 40 bp, Homo sapiens
gcaaagaagaacaatatttgacgacattttaatgtgtgaa

SEQ ID NO: 12440 - DNA, 40 bp, Homo sapiens
tcacacattaaaatgtcgtcaaatattgttcttctttgcc

SEQ ID NO: 12441 - DNA, 40 bp, Homo sapiens
ggcaaagaagaacaatatttgacgacattttaatgtgtga

SEQ ID NO: 12442 - DNA, 40 bp, Homo sapiens
cacacattaaaatgtcgtcaaatattgttcttctttgcct

SEQ ID NO: 12443 - DNA, 40 bp, Homo sapiens
aggcaaagaagaacaatatttgacgacattttaatgtgtg

SEQ ID NO: 12444 - DNA, 40 bp, Homo sapiens
acacattaaaatgtcgtcaaatattgttcttctttgcctc

SEQ ID NO: 12445 - DNA, 40 bp, Homo sapiens
gaggcaaagaagaacaatatttgacgacattttaatgtgt

SEQ ID NO: 12446 - DNA, 40 bp, Homo sapiens
cacattaaaatgtcgtcaaatattgttcttctttgcctca

SEQ ID NO: 12447 - DNA, 40 bp, Homo sapiens
tgaggcaaagaagaacaatatttgacgacattttaatgtg

SEQ ID NO: 12448 - DNA, 40 bp, Homo sapiens
acattaaaatgtcgtcaaatattgttcttctttgcctcag

SEQ ID NO: 12449 - DNA, 40 bp, Homo sapiens
ctgaggcaaagaagaacaatatttgacgacattttaatgt

SEQ ID NO: 12450 - DNA, 40 bp, Homo sapiens
cattaaaatgtcgtcaaatattgttcttctttgcctcagt

SEQ ID NO: 12451 - DNA, 40 bp, Homo sapiens
actgaggcaaagaagaacaatatttgacgacattttaatg

SEQ ID NO: 12452 - DNA, 40 bp, Homo sapiens
attaaaatgtcgtcaaatattgttcttctttgcctcagtg

SEQ ID NO: 12453 - DNA, 40 bp, Homo sapiens
cactgaggcaaagaagaacaatatttgacgacattttaat

SEQ ID NO: 12454 - DNA, 40 bp, Homo sapiens
ttaaaatgtcgtcaaatattgttcttctttgcctcagtgt

SEQ ID NO: 12455 - DNA, 40 bp, Homo sapiens
acactgaggcaaagaagaacaatatttgacgacattttaa

SEQ ID NO: 12456 - DNA, 40 bp, Homo sapiens
taaaatgtcgtcaaatattgttcttctttgcctcagtgtt

SEQ ID NO: 12457 - DNA, 40 bp, Homo sapiens
aacactgaggcaaagaagaacaatatttgacgacatttta

SEQ ID NO: 12458 - DNA, 40 bp, Homo sapiens
aaaatgtcgtcaaatattgttcttctttgcctcagtgttt

SEQ ID NO: 12459 - DNA, 40 bp, Homo sapiens
aaacactgaggcaaagaagaacaatatttgacgacatttt

SEQ ID NO: 12460 - DNA, 40 bp, Homo sapiens
aaatgtcgtcaaatattgttcttctttgcctcagtgttta

SEQ ID NO: 12461 - DNA, 40 bp, Homo sapiens
taaacactgaggcaaagaagaacaatatttgacgacattt

SEQ ID NO: 12462 - DNA, 40 bp, Homo sapiens
aatgtcgtcaaatattgttcttctttgcctcagtgtttaa

SEQ ID NO: 12463 - DNA, 40 bp, Homo sapiens
ttaaacactgaggcaaagaagaacaatatttgacgacatt

SEQ ID NO: 12464 - DNA, 40 bp, Homo sapiens
atgtcgtcaaatattgttcttctttgcctcagtgtttaaa

SEQ ID NO: 12465 - DNA, 40 bp, Homo sapiens
tttaaacactgaggcaaagaagaacaatatttgacgacat

SEQ ID NO: 12466 - DNA, 40 bp, Homo sapiens
tgtcgtcaaatattgttcttctttgcctcagtgtttaaat

SEQ ID NO: 12467 - DNA, 40 bp, Homo sapiens
atttaaacactgaggcaaagaagaacaatatttgacgaca

SEQ ID NO: 12468 - DNA, 40 bp, Homo sapiens
gtcgtcaaatattgttcttctttgcctcagtgtttaaatt

SEQ ID NO: 12469 - DNA, 40 bp, Homo sapiens
aatttaaacactgaggcaaagaagaacaatatttgacgac

SEQ ID NO: 12470 - DNA, 40 bp, Homo sapiens
tcgtcaaatattgttcttctttgcctcagtgtttaaattt

SEQ ID NO: 12471 - DNA, 40 bp, Homo sapiens
aaatttaaacactgaggcaaagaagaacaatatttgacga

SEQ ID NO: 12472 - DNA, 40 bp, Homo sapiens
cgtcaaatattgttcttctttgcctcagtgtttaaatttt

SEQ ID NO: 12473 - DNA, 40 bp, Homo sapiens
aaaatttaaacactgaggcaaagaagaacaatatttgacg

SEQ ID NO: 12474 - DNA, 40 bp, Homo sapiens
gtcaaatattgttcttctttgcctcagtgtttaaattttt

SEQ ID NO: 12475 - DNA, 40 bp, Homo sapiens
aaaaatttaaacactgaggcaaagaagaacaatatttgac

SEQ ID NO: 12476 - DNA, 40 bp, Homo sapiens
tcaaatattgttcttctttgcctcagtgtttaaattttta

SEQ ID NO: 12477 - DNA, 40 bp, Homo sapiens
taaaaatttaaacactgaggcaaagaagaacaatatttga

SEQ ID NO: 12478 - DNA, 40 bp, Homo sapiens
caaatattgttcttctttgcctcagtgtttaaatttttat

SEQ ID NO: 12479 - DNA, 40 bp, Homo sapiens
ataaaaatttaaacactgaggcaaagaagaacaatatttg

SEQ ID NO: 12480 - DNA, 40 bp, Homo sapiens
aaatattgttcttctttgcctcagtgtttaaatttttatt

SEQ ID NO: 12481 - DNA, 40 bp, Homo sapiens
aataaaaatttaaacactgaggcaaagaagaacaatattt

SEQ ID NO: 12482 - DNA, 40 bp, Homo sapiens
aatattgttcttctttgcctcagtgtttaaatttttattt

SEQ ID NO: 12483 - DNA, 40 bp, Homo sapiens
aaataaaaatttaaacactgaggcaaagaagaacaatatt

SEQ ID NO: 12484 - DNA, 40 bp, Homo sapiens
atattgttcttctttgcctcagtgtttaaatttttatttc

SEQ ID NO: 12485 - DNA, 40 bp, Homo sapiens
gaaataaaaatttaaacactgaggcaaagaagaacaatat

SEQ ID NO: 12486 - DNA, 40 bp, Homo sapiens
tattgttcttctttgcctcagtgtttaaatttttatttcc

SEQ ID NO: 12487 - DNA, 40 bp, Homo sapiens
ggaaataaaaatttaaacactgaggcaaagaagaacaata

SEQ ID NO: 12488 - DNA, 40 bp, Homo sapiens
attgttcttctttgcctcagtgtttaaatttttatttccc

SEQ ID NO: 12489 - DNA, 40 bp, Homo sapiens
gggaaataaaaatttaaacactgaggcaaagaagaacaat

SEQ ID NO: 12490 - DNA, 40 bp, Homo sapiens
ttgttcttctttgcctcagtgtttaaatttttatttcccc

SEQ ID NO: 12491 - DNA, 40 bp, Homo sapiens
ggggaaataaaaatttaaacactgaggcaaagaagaacaa

SEQ ID NO: 12492 - DNA, 40 bp, Homo sapiens
tgttcttctttgcctcagtgtttaaatttttatttcccca

SEQ ID NO: 12493 - DNA, 40 bp, Homo sapiens
tggggaaataaaaatttaaacactgaggcaaagaagaaca

SEQ ID NO: 12494 - DNA, 40 bp, Homo sapiens
gttcttctttgcctcagtgtttaaatttttatttccccat

SEQ ID NO: 12495 - DNA, 40 bp, Homo sapiens
atggggaaataaaaatttaaacactgaggcaaagaagaac

SEQ ID NO: 12496 - DNA, 40 bp, Homo sapiens
ttcttctttgcctcagtgtttaaatttttatttccccatg

SEQ ID NO: 12497 - DNA, 40 bp, Homo sapiens
catggggaaataaaaatttaaacactgaggcaaagaagaa

SEQ ID NO: 12498 - DNA, 40 bp, Homo sapiens
tcttctttgcctcagtgtttaaatttttatttccccatga

SEQ ID NO: 12499 - DNA, 40 bp, Homo sapiens
tcatggggaaataaaaatttaaacactgaggcaaagaaga

SEQ ID NO: 12500 - DNA, 40 bp, Homo sapiens
cttctttgcctcagtgtttaaatttttatttccccatgac

SEQ ID NO: 12501 - DNA, 40 bp, Homo sapiens
gtcatggggaaataaaaatttaaacactgaggcaaagaag

SEQ ID NO: 12502 - DNA, 40 bp, Homo sapiens
ttctttgcctcagtgtttaaatttttatttccccatgaca

SEQ ID NO: 12503 - DNA, 40 bp, Homo sapiens
tgtcatggggaaataaaaatttaaacactgaggcaaagaa

SEQ ID NO: 12504 - DNA, 40 bp, Homo sapiens
tctttgcctcagtgtttaaatttttatttccccatgacac

SEQ ID NO: 12505 - DNA, 40 bp, Homo sapiens
gtgtcatggggaaataaaaatttaaacactgaggcaaaga

SEQ ID NO: 12506 - DNA, 40 bp, Homo sapiens
ctttgcctcagtgtttaaatttttatttccccatgacaca

SEQ ID NO: 12507 - DNA, 40 bp, Homo sapiens
tgtgtcatggggaaataaaaatttaaacactgaggcaaag

SEQ ID NO: 12508 - DNA, 40 bp, Homo sapiens
tttgcctcagtgtttaaatttttatttccccatgacacaa

SEQ ID NO: 12509 - DNA, 40 bp, Homo sapiens
ttgtgtcatggggaaataaaaatttaaacactgaggcaaa

SEQ ID NO: 12510 - DNA, 40 bp, Homo sapiens
ttgcctcagtgtttaaatttttatttccccatgacacaat

SEQ ID NO: 12511 - DNA, 40 bp, Homo sapiens
attgtgtcatggggaaataaaaatttaaacactgaggcaa

SEQ ID NO: 12512 - DNA, 40 bp, Homo sapiens
tgcctcagtgtttaaatttttatttccccatgacacaatc

SEQ ID NO: 12513 - DNA, 40 bp, Homo sapiens
gattgtgtcatggggaaataaaaatttaaacactgaggca

SEQ ID NO: 12514 - DNA, 40 bp, Homo sapiens
gcctcagtgtttaaatttttatttccccatgacacaatcc

SEQ ID NO: 12515 - DNA, 40 bp, Homo sapiens
ggattgtgtcatggggaaataaaaatttaaacactgaggc

SEQ ID NO: 12516 - DNA, 40 bp, Homo sapiens
cctcagtgtttaaatttttatttccccatgacacaatcca

SEQ ID NO: 12517 - DNA, 40 bp, Homo sapiens
tggattgtgtcatggggaaataaaaatttaaacactgagg

SEQ ID NO: 12518 - DNA, 40 bp, Homo sapiens
ctcagtgtttaaatttttatttccccatgacacaatccag

SEQ ID NO: 12519 - DNA, 40 bp, Homo sapiens
ctggattgtgtcatggggaaataaaaatttaaacactgag

SEQ ID NO: 12520 - DNA, 40 bp, Homo sapiens
tcagtgtttaaatttttatttccccatgacacaatccagc

SEQ ID NO: 12521 - DNA, 40 bp, Homo sapiens
gctggattgtgtcatggggaaataaaaatttaaacactga

SEQ ID NO: 12522 - DNA, 40 bp, Homo sapiens
cagtgtttaaatttttatttccccatgacacaatccagct

SEQ ID NO: 12523 - DNA, 40 bp, Homo sapiens
agctggattgtgtcatggggaaataaaaatttaaacactg

SEQ ID NO: 12524 - DNA, 40 bp, Homo sapiens
agtgtttaaatttttatttccccatgacacaatccagctt

SEQ ID NO: 12525 - DNA, 40 bp, Homo sapiens
aagctggattgtgtcatggggaaataaaaatttaaacact

SEQ ID NO: 12526 - DNA, 40 bp, Homo sapiens
gtgtttaaatttttatttccccatgacacaatccagcttt

SEQ ID NO: 12527 - DNA, 40 bp, Homo sapiens
aaagctggattgtgtcatggggaaataaaaatttaaacac

SEQ ID NO: 12528 - DNA, 40 bp, Homo sapiens
tgtttaaatttttatttccccatgacacaatccagcttta

SEQ ID NO: 12529 - DNA, 40 bp, Homo sapiens
taaagctggattgtgtcatggggaaataaaaatttaaaca

SEQ ID NO: 12530 - DNA, 40 bp, Homo sapiens
gtttaaatttttatttccccatgacacaatccagctttat

SEQ ID NO: 12531 - DNA, 40 bp, Homo sapiens
ataaagctggattgtgtcatggggaaataaaaatttaaac

SEQ ID NO: 12532 - DNA, 40 bp, Homo sapiens
tttaaatttttatttccccatgacacaatccagctttatt

SEQ ID NO: 12533 - DNA, 40 bp, Homo sapiens
aataaagctggattgtgtcatggggaaataaaaatttaaa

SEQ ID NO: 12534 - DNA, 40 bp, Homo sapiens
ttaaatttttatttccccatgacacaatccagctttattt

SEQ ID NO: 12535 - DNA, 40 bp, Homo sapiens
aaataaagctggattgtgtcatggggaaataaaaatttaa

SEQ ID NO: 12536 - DNA, 40 bp, Homo sapiens
taaatttttatttccccatgacacaatccagctttatttg

SEQ ID NO: 12537 - DNA, 40 bp, Homo sapiens
caaataaagctggattgtgtcatggggaaataaaaattta

SEQ ID NO: 12538 - DNA, 40 bp, Homo sapiens
aaatttttatttccccatgacacaatccagctttatttga

SEQ ID NO: 12539 - DNA, 40 bp, Homo sapiens
tcaaataaagctggattgtgtcatggggaaataaaaattt

SEQ ID NO: 12540 - DNA, 40 bp, Homo sapiens
aatttttatttccccatgacacaatccagctttatttgac

SEQ ID NO: 12541 - DNA, 40 bp, Homo sapiens
gtcaaataaagctggattgtgtcatggggaaataaaaatt

SEQ ID NO: 12542 - DNA, 40 bp, Homo sapiens
atttttatttccccatgacacaatccagctttatttgaca

SEQ ID NO: 12543 - DNA, 40 bp, Homo sapiens
tgtcaaataaagctggattgtgtcatggggaaataaaaat

SEQ ID NO: 12544 - DNA, 40 bp, Homo sapiens
tttttatttccccatgacacaatccagctttatttgacac

SEQ ID NO: 12545 - DNA, 40 bp, Homo sapiens
gtgtcaaataaagctggattgtgtcatggggaaataaaaa

SEQ ID NO: 12546 - DNA, 40 bp, Homo sapiens
ttttatttccccatgacacaatccagctttatttgacact

SEQ ID NO: 12547 - DNA, 40 bp, Homo sapiens
agtgtcaaataaagctggattgtgtcatggggaaataaaa

SEQ ID NO: 12548 - DNA, 40 bp, Homo sapiens
tttatttccccatgacacaatccagctttatttgacactc

SEQ ID NO: 12549 - DNA, 40 bp, Homo sapiens
gagtgtcaaataaagctggattgtgtcatggggaaataaa

SEQ ID NO: 12550 - DNA, 40 bp, Homo sapiens
ttatttccccatgacacaatccagctttatttgacactca

SEQ ID NO: 12551 - DNA, 40 bp, Homo sapiens
tgagtgtcaaataaagctggattgtgtcatggggaaataa

SEQ ID NO: 12552 - DNA, 40 bp, Homo sapiens
tatttccccatgacacaatccagctttatttgacactcat

SEQ ID NO: 12553 - DNA, 40 bp, Homo sapiens
atgagtgtcaaataaagctggattgtgtcatggggaaata

SEQ ID NO: 12554 - DNA, 40 bp, Homo sapiens
atttccccatgacacaatccagctttatttgacactcatt

SEQ ID NO: 12555 - DNA, 40 bp, Homo sapiens
aatgagtgtcaaataaagctggattgtgtcatggggaaat

SEQ ID NO: 12556 - DNA, 40 bp, Homo sapiens
tttccccatgacacaatccagctttatttgacactcattc

SEQ ID NO: 12557 - DNA, 40 bp, Homo sapiens
gaatgagtgtcaaataaagctggattgtgtcatggggaaa

SEQ ID NO: 12558 - DNA, 40 bp, Homo sapiens
ttccccatgacacaatccagctttatttgacactcattct

SEQ ID NO: 12559 - DNA, 40 bp, Homo sapiens
agaatgagtgtcaaataaagctggattgtgtcatggggaa

SEQ ID NO: 12560 - DNA, 40 bp, Homo sapiens
tccccatgacacaatccagctttatttgacactcattctc

SEQ ID NO: 12561 - DNA, 40 bp, Homo sapiens
gagaatgagtgtcaaataaagctggattgtgtcatgggga

SEQ ID NO: 12562 - DNA, 40 bp, Homo sapiens
ccccatgacacaatccagctttatttgacactcattctct

SEQ ID NO: 12563 - DNA, 40 bp, Homo sapiens
agagaatgagtgtcaaataaagctggattgtgtcatgggg

SEQ ID NO: 12564 - DNA, 40 bp, Homo sapiens
cccatgacacaatccagctttatttgacactcattctctc

SEQ ID NO: 12565 - DNA, 40 bp, Homo sapiens
gagagaatgagtgtcaaataaagctggattgtgtcatggg

SEQ ID NO: 12566 - DNA, 40 bp, Homo sapiens
ccatgacacaatccagctttatttgacactcattctctca

SEQ ID NO: 12567 - DNA, 40 bp, Homo sapiens
tgagagaatgagtgtcaaataaagctggattgtgtcatgg

SEQ ID NO: 12568 - DNA, 40 bp, Homo sapiens
catgacacaatccagctttatttgacactcattctctcaa

SEQ ID NO: 12569 - DNA, 40 bp, Homo sapiens
ttgagagaatgagtgtcaaataaagctggattgtgtcatg

SEQ ID NO: 12570 - DNA, 40 bp, Homo sapiens
atgacacaatccagctttatttgacactcattctctcaac

SEQ ID NO: 12571 - DNA, 40 bp, Homo sapiens
gttgagagaatgagtgtcaaataaagctggattgtgtcat

SEQ ID NO: 12572 - DNA, 40 bp, Homo sapiens
tgacacaatccagctttatttgacactcattctctcaact

SEQ ID NO: 12573 - DNA, 40 bp, Homo sapiens
agttgagagaatgagtgtcaaataaagctggattgtgtca

SEQ ID NO: 12574 - DNA, 40 bp, Homo sapiens
gacacaatccagctttatttgacactcattctctcaactc

SEQ ID NO: 12575 - DNA, 40 bp, Homo sapiens
gagttgagagaatgagtgtcaaataaagctggattgtgtc

SEQ ID NO: 12576 - DNA, 40 bp, Homo sapiens
acacaatccagctttatttgacactcattctctcaactct

SEQ ID NO: 12577 - DNA, 40 bp, Homo sapiens
agagttgagagaatgagtgtcaaataaagctggattgtgt

SEQ ID NO: 12578 - DNA, 40 bp, Homo sapiens
cacaatccagctttatttgacactcattctctcaactctc

SEQ ID NO: 12579 - DNA, 40 bp, Homo sapiens
gagagttgagagaatgagtgtcaaataaagctggattgtg

SEQ ID NO: 12580 - DNA, 40 bp, Homo sapiens
acaatccagctttatttgacactcattctctcaactctca

SEQ ID NO: 12581 - DNA, 40 bp, Homo sapiens
tgagagttgagagaatgagtgtcaaataaagctggattgt

SEQ ID NO: 12582 - DNA, 40 bp, Homo sapiens
caatccagctttatttgacactcattctctcaactctcat

SEQ ID NO: 12583 - DNA, 40 bp, Homo sapiens
atgagagttgagagaatgagtgtcaaataaagctggattg

SEQ ID NO: 12584 - DNA, 40 bp, Homo sapiens
aatccagctttatttgacactcattctctcaactctcatc

SEQ ID NO: 12585 - DNA, 40 bp, Homo sapiens
gatgagagttgagagaatgagtgtcaaataaagctggatt

SEQ ID NO: 12586 - DNA, 40 bp, Homo sapiens
atccagctttatttgacactcattctctcaactctcatct

SEQ ID NO: 12587 - DNA, 40 bp, Homo sapiens
agatgagagttgagagaatgagtgtcaaataaagctggat

SEQ ID NO: 12588 - DNA, 40 bp, Homo sapiens
tccagctttatttgacactcattctctcaactctcatctg

SEQ ID NO: 12589 - DNA, 40 bp, Homo sapiens
cagatgagagttgagagaatgagtgtcaaataaagctgga

SEQ ID NO: 12590 - DNA, 40 bp, Homo sapiens
ccagctttatttgacactcattctctcaactctcatctga

SEQ ID NO: 12591 - DNA, 40 bp, Homo sapiens
tcagatgagagttgagagaatgagtgtcaaataaagctgg

SEQ ID NO: 12592 - DNA, 40 bp, Homo sapiens
cagctttatttgacactcattctctcaactctcatctgat

SEQ ID NO: 12593 - DNA, 40 bp, Homo sapiens
atcagatgagagttgagagaatgagtgtcaaataaagctg

SEQ ID NO: 12594 - DNA, 40 bp, Homo sapiens
agctttatttgacactcattctctcaactctcatctgatt

SEQ ID NO: 12595 - DNA, 40 bp, Homo sapiens
aatcagatgagagttgagagaatgagtgtcaaataaagct

SEQ ID NO: 12596 - DNA, 40 bp, Homo sapiens
gctttatttgacactcattctctcaactctcatctgattc

SEQ ID NO: 12597 - DNA, 40 bp, Homo sapiens
gaatcagatgagagttgagagaatgagtgtcaaataaagc

SEQ ID NO: 12598 - DNA, 40 bp, Homo sapiens
ctttatttgacactcattctctcaactctcatctgattct

SEQ ID NO: 12599 - DNA, 40 bp, Homo sapiens
agaatcagatgagagttgagagaatgagtgtcaaataaag

SEQ ID NO: 12600 - DNA, 40 bp, Homo sapiens
tttatttgacactcattctctcaactctcatctgattctt

SEQ ID NO: 12601 - DNA, 40 bp, Homo sapiens
aagaatcagatgagagttgagagaatgagtgtcaaataaa

SEQ ID NO: 12602 - DNA, 40 bp, Homo sapiens
ttatttgacactcattctctcaactctcatctgattctta

SEQ ID NO: 12603 - DNA, 40 bp, Homo sapiens
taagaatcagatgagagttgagagaatgagtgtcaaataa

SEQ ID NO: 12604 - DNA, 40 bp, Homo sapiens
tatttgacactcattctctcaactctcatctgattcttac

SEQ ID NO: 12605 - DNA, 40 bp, Homo sapiens
gtaagaatcagatgagagttgagagaatgagtgtcaaata

SEQ ID NO: 12606 - DNA, 40 bp, Homo sapiens
atttgacactcattctctcaactctcatctgattcttact

SEQ ID NO: 12607 - DNA, 40 bp, Homo sapiens
agtaagaatcagatgagagttgagagaatgagtgtcaaat

SEQ ID NO: 12608 - DNA, 40 bp, Homo sapiens
tttgacactcattctctcaactctcatctgattcttactg

SEQ ID NO: 12609 - DNA, 40 bp, Homo sapiens
cagtaagaatcagatgagagttgagagaatgagtgtcaaa

SEQ ID NO: 12610 - DNA, 40 bp, Homo sapiens
ttgacactcattctctcaactctcatctgattcttactgt

SEQ ID NO: 12611 - DNA, 40 bp, Homo sapiens
acagtaagaatcagatgagagttgagagaatgagtgtcaa

SEQ ID NO: 12612 - DNA, 40 bp, Homo sapiens
tgacactcattctctcaactctcatctgattcttactgtt

SEQ ID NO: 12613 - DNA, 40 bp, Homo sapiens
aacagtaagaatcagatgagagttgagagaatgagtgtca

SEQ ID NO: 12614 - DNA, 40 bp, Homo sapiens
gacactcattctctcaactctcatctgattcttactgtta

SEQ ID NO: 12615 - DNA, 40 bp, Homo sapiens
taacagtaagaatcagatgagagttgagagaatgagtgtc

SEQ ID NO: 12616 - DNA, 40 bp, Homo sapiens
acactcattctctcaactctcatctgattcttactgttaa

SEQ ID NO: 12617 - DNA, 40 bp, Homo sapiens
ttaacagtaagaatcagatgagagttgagagaatgagtgt

SEQ ID NO: 12618 - DNA, 40 bp, Homo sapiens
cactcattctctcaactctcatctgattcttactgttaat

SEQ ID NO: 12619 - DNA, 40 bp, Homo sapiens
attaacagtaagaatcagatgagagttgagagaatgagtg

SEQ ID NO: 12620 - DNA, 40 bp, Homo sapiens
actcattctctcaactctcatctgattcttactgttaata

SEQ ID NO: 12621 - DNA, 40 bp, Homo sapiens
tattaacagtaagaatcagatgagagttgagagaatgagt

SEQ ID NO: 12622 - DNA, 40 bp, Homo sapiens
ctcattctctcaactctcatctgattcttactgttaatat

SEQ ID NO: 12623 - DNA, 40 bp, Homo sapiens
atattaacagtaagaatcagatgagagttgagagaatgag

SEQ ID NO: 12624 - DNA, 40 bp, Homo sapiens
tcattctctcaactctcatctgattcttactgttaatatt

SEQ ID NO: 12625 - DNA, 40 bp, Homo sapiens
aatattaacagtaagaatcagatgagagttgagagaatga

SEQ ID NO: 12626 - DNA, 40 bp, Homo sapiens
cattctctcaactctcatctgattcttactgttaatattt

SEQ ID NO: 12627 - DNA, 40 bp, Homo sapiens
aaatattaacagtaagaatcagatgagagttgagagaatg

SEQ ID NO: 12628 - DNA, 40 bp, Homo sapiens
attctctcaactctcatctgattcttactgttaatattta

SEQ ID NO: 12629 - DNA, 40 bp, Homo sapiens
taaatattaacagtaagaatcagatgagagttgagagaat

SEQ ID NO: 12630 - DNA, 40 bp, Homo sapiens
ttctctcaactctcatctgattcttactgttaatatttat

SEQ ID NO: 12631 - DNA, 40 bp, Homo sapiens
ataaatattaacagtaagaatcagatgagagttgagagaa

SEQ ID NO: 12632 - DNA, 40 bp, Homo sapiens
tctctcaactctcatctgattcttactgttaatatttatc

SEQ ID NO: 12633 - DNA, 40 bp, Homo sapiens
gataaatattaacagtaagaatcagatgagagttgagaga

SEQ ID NO: 12634 - DNA, 40 bp, Homo sapiens
ctctcaactctcatctgattcttactgttaatatttatcc

SEQ ID NO: 12635 - DNA, 40 bp, Homo sapiens
ggataaatattaacagtaagaatcagatgagagttgagag

SEQ ID NO: 12636 - DNA, 40 bp, Homo sapiens
tctcaactctcatctgattcttactgttaatatttatcca

SEQ ID NO: 12637 - DNA, 40 bp, Homo sapiens
tggataaatattaacagtaagaatcagatgagagttgaga

SEQ ID NO: 12638 - DNA, 40 bp, Homo sapiens
ctcaactctcatctgattcttactgttaatatttatccaa

SEQ ID NO: 12639 - DNA, 40 bp, Homo sapiens
ttggataaatattaacagtaagaatcagatgagagttgag

SEQ ID NO: 12640 - DNA, 40 bp, Homo sapiens
tcaactctcatctgattcttactgttaatatttatccaag

SEQ ID NO: 12641 - DNA, 40 bp, Homo sapiens
cttggataaatattaacagtaagaatcagatgagagttga

SEQ ID NO: 12642 - DNA, 40 bp, Homo sapiens
caactctcatctgattcttactgttaatatttatccaaga

SEQ ID NO: 12643 - DNA, 40 bp, Homo sapiens
tcttggataaatattaacagtaagaatcagatgagagttg

SEQ ID NO: 12644 - DNA, 40 bp, Homo sapiens
aactctcatctgattcttactgttaatatttatccaagag

SEQ ID NO: 12645 - DNA, 40 bp, Homo sapiens
ctcttggataaatattaacagtaagaatcagatgagagtt

SEQ ID NO: 12646 - DNA, 40 bp, Homo sapiens
actctcatctgattcttactgttaatatttatccaagaga

SEQ ID NO: 12647 - DNA, 40 bp, Homo sapiens
tctcttggataaatattaacagtaagaatcagatgagagt

SEQ ID NO: 12648 - DNA, 40 bp, Homo sapiens
ctctcatctgattcttactgttaatatttatccaagagaa

SEQ ID NO: 12649 - DNA, 40 bp, Homo sapiens
ttctcttggataaatattaacagtaagaatcagatgagag

SEQ ID NO: 12650 - DNA, 40 bp, Homo sapiens
tctcatctgattcttactgttaatatttatccaagagaac

SEQ ID NO: 12651 - DNA, 40 bp, Homo sapiens
gttctcttggataaatattaacagtaagaatcagatgaga

SEQ ID NO: 12652 - DNA, 40 bp, Homo sapiens
ctcatctgattcttactgttaatatttatccaagagaact

SEQ ID NO: 12653 - DNA, 40 bp, Homo sapiens
agttctcttggataaatattaacagtaagaatcagatgag

SEQ ID NO: 12654 - DNA, 40 bp, Homo sapiens
tcatctgattcttactgttaatatttatccaagagaacta

SEQ ID NO: 12655 - DNA, 40 bp, Homo sapiens
tagttctcttggataaatattaacagtaagaatcagatga

SEQ ID NO: 12656 - DNA, 40 bp, Homo sapiens
catctgattcttactgttaatatttatccaagagaactac

SEQ ID NO: 12657 - DNA, 40 bp, Homo sapiens
gtagttctcttggataaatattaacagtaagaatcagatg

SEQ ID NO: 12658 - DNA, 40 bp, Homo sapiens
atctgattcttactgttaatatttatccaagagaactact

SEQ ID NO: 12659 - DNA, 40 bp, Homo sapiens
agtagttctcttggataaatattaacagtaagaatcagat

SEQ ID NO: 12660 - DNA, 40 bp, Homo sapiens
tctgattcttactgttaatatttatccaagagaactactg

SEQ ID NO: 12661 - DNA, 40 bp, Homo sapiens
cagtagttctcttggataaatattaacagtaagaatcaga

SEQ ID NO: 12662 - DNA, 40 bp, Homo sapiens
ctgattcttactgttaatatttatccaagagaactactgc

SEQ ID NO: 12663 - DNA, 40 bp, Homo sapiens
gcagtagttctcttggataaatattaacagtaagaatcag

SEQ ID NO: 12664 - DNA, 40 bp, Homo sapiens
tgattcttactgttaatatttatccaagagaactactgcc

SEQ ID NO: 12665 - DNA, 40 bp, Homo sapiens
ggcagtagttctcttggataaatattaacagtaagaatca

SEQ ID NO: 12666 - DNA, 40 bp, Homo sapiens
gattcttactgttaatatttatccaagagaactactgcca

SEQ ID NO: 12667 - DNA, 40 bp, Homo sapiens
tggcagtagttctcttggataaatattaacagtaagaatc

SEQ ID NO: 12668 - DNA, 40 bp, Homo sapiens
attcttactgttaatatttatccaagagaactactgccat

SEQ ID NO: 12669 - DNA, 40 bp, Homo sapiens
atggcagtagttctcttggataaatattaacagtaagaat

SEQ ID NO: 12670 - DNA, 40 bp, Homo sapiens
ttcttactgttaatatttatccaagagaactactgccatg

SEQ ID NO: 12671 - DNA, 40 bp, Homo sapiens
catggcagtagttctcttggataaatattaacagtaagaa

SEQ ID NO: 12672 - DNA, 40 bp, Homo sapiens
tcttactgttaatatttatccaagagaactactgccatga

SEQ ID NO: 12673 - DNA, 40 bp, Homo sapiens
tcatggcagtagttctcttggataaatattaacagtaaga

SEQ ID NO: 12674 - DNA, 40 bp, Homo sapiens
cttactgttaatatttatccaagagaactactgccatgat

SEQ ID NO: 12675 - DNA, 40 bp, Homo sapiens
atcatggcagtagttctcttggataaatattaacagtaag

SEQ ID NO: 12676 - DNA, 40 bp, Homo sapiens
ttactgttaatatttatccaagagaactactgccatgatg

SEQ ID NO: 12677 - DNA, 40 bp, Homo sapiens
catcatggcagtagttctcttggataaatattaacagtaa

SEQ ID NO: 12678 - DNA, 40 bp, Homo sapiens
tactgttaatatttatccaagagaactactgccatgatgc

SEQ ID NO: 12679 - DNA, 40 bp, Homo sapiens
gcatcatggcagtagttctcttggataaatattaacagta

SEQ ID NO: 12680 - DNA, 40 bp, Homo sapiens
actgttaatatttatccaagagaactactgccatgatgct

SEQ ID NO: 12681 - DNA, 40 bp, Homo sapiens
agcatcatggcagtagttctcttggataaatattaacagt

SEQ ID NO: 12682 - DNA, 40 bp, Homo sapiens
ctgttaatatttatccaagagaactactgccatgatgctt

SEQ ID NO: 12683 - DNA, 40 bp, Homo sapiens
aagcatcatggcagtagttctcttggataaatattaacag

SEQ ID NO: 12684 - DNA, 40 bp, Homo sapiens
tgttaatatttatccaagagaactactgccatgatgcttt

SEQ ID NO: 12685 - DNA, 40 bp, Homo sapiens
aaagcatcatggcagtagttctcttggataaatattaaca

SEQ ID NO: 12686 - DNA, 40 bp, Homo sapiens
gttaatatttatccaagagaactactgccatgatgcttta

SEQ ID NO: 12687 - DNA, 40 bp, Homo sapiens
taaagcatcatggcagtagttctcttggataaatattaac

SEQ ID NO: 12688 - DNA, 40 bp, Homo sapiens
ttaatatttatccaagagaactactgccatgatgctttaa

SEQ ID NO: 12689 - DNA, 40 bp, Homo sapiens
ttaaagcatcatggcagtagttctcttggataaatattaa

SEQ ID NO: 12690 - DNA, 40 bp, Homo sapiens
taatatttatccaagagaactactgccatgatgctttaaa

SEQ ID NO: 12691 - DNA, 40 bp, Homo sapiens
tttaaagcatcatggcagtagttctcttggataaatatta

SEQ ID NO: 12692 - DNA, 40 bp, Homo sapiens
aatatttatccaagagaactactgccatgatgctttaaaa

SEQ ID NO: 12693 - DNA, 40 bp, Homo sapiens
ttttaaagcatcatggcagtagttctcttggataaatatt

SEQ ID NO: 12694 - DNA, 40 bp, Homo sapiens
atatttatccaagagaactactgccatgatgctttaaaag

SEQ ID NO: 12695 - DNA, 40 bp, Homo sapiens
cttttaaagcatcatggcagtagttctcttggataaatat

SEQ ID NO: 12696 - DNA, 40 bp, Homo sapiens
tatttatccaagagaactactgccatgatgctttaaaagt

SEQ ID NO: 12697 - DNA, 40 bp, Homo sapiens
acttttaaagcatcatggcagtagttctcttggataaata

SEQ ID NO: 12698 - DNA, 40 bp, Homo sapiens
atttatccaagagaactactgccatgatgctttaaaagtt

SEQ ID NO: 12699 - DNA, 40 bp, Homo sapiens
aacttttaaagcatcatggcagtagttctcttggataaat

SEQ ID NO: 12700 - DNA, 40 bp, Homo sapiens
tttatccaagagaactactgccatgatgctttaaaagttt

SEQ ID NO: 12701 - DNA, 40 bp, Homo sapiens
aaacttttaaagcatcatggcagtagttctcttggataaa

SEQ ID NO: 12702 - DNA, 40 bp, Homo sapiens
ttatccaagagaactactgccatgatgctttaaaagtttt

SEQ ID NO: 12703 - DNA, 40 bp, Homo sapiens
aaaacttttaaagcatcatggcagtagttctcttggataa

SEQ ID NO: 12704 - DNA, 40 bp, Homo sapiens
tatccaagagaactactgccatgatgctttaaaagttttt

SEQ ID NO: 12705 - DNA, 40 bp, Homo sapiens
aaaaacttttaaagcatcatggcagtagttctcttggata

SEQ ID NO: 12706 - DNA, 40 bp, Homo sapiens
atccaagagaactactgccatgatgctttaaaagtttttc

SEQ ID NO: 12707 - DNA, 40 bp, Homo sapiens
gaaaaacttttaaagcatcatggcagtagttctcttggat

SEQ ID NO: 12708 - DNA, 40 bp, Homo sapiens
tccaagagaactactgccatgatgctttaaaagtttttct

SEQ ID NO: 12709 - DNA, 40 bp, Homo sapiens
agaaaaacttttaaagcatcatggcagtagttctcttgga

SEQ ID NO: 12710 - DNA, 40 bp, Homo sapiens
ccaagagaactactgccatgatgctttaaaagtttttctg

SEQ ID NO: 12711 - DNA, 40 bp, Homo sapiens
cagaaaaacttttaaagcatcatggcagtagttctcttgg

SEQ ID NO: 12712 - DNA, 40 bp, Homo sapiens
caagagaactactgccatgatgctttaaaagtttttctgt

SEQ ID NO: 12713 - DNA, 40 bp, Homo sapiens
acagaaaaacttttaaagcatcatggcagtagttctcttg

SEQ ID NO: 12714 - DNA, 40 bp, Homo sapiens
aagagaactactgccatgatgctttaaaagtttttctgta

SEQ ID NO: 12715 - DNA, 40 bp, Homo sapiens
tacagaaaaacttttaaagcatcatggcagtagttctctt

SEQ ID NO: 12716 - DNA, 40 bp, Homo sapiens
agagaactactgccatgatgctttaaaagtttttctgtag

SEQ ID NO: 12717 - DNA, 40 bp, Homo sapiens
ctacagaaaaacttttaaagcatcatggcagtagttctct

SEQ ID NO: 12718 - DNA, 40 bp, Homo sapiens
gagaactactgccatgatgctttaaaagtttttctgtagc

SEQ ID NO: 12719 - DNA, 40 bp, Homo sapiens
gctacagaaaaacttttaaagcatcatggcagtagttctc

SEQ ID NO: 12720 - DNA, 40 bp, Homo sapiens
agaactactgccatgatgctttaaaagtttttctgtagct

SEQ ID NO: 12721 - DNA, 40 bp, Homo sapiens
agctacagaaaaacttttaaagcatcatggcagtagttct

SEQ ID NO: 12722 - DNA, 40 bp, Homo sapiens
gaactactgccatgatgctttaaaagtttttctgtagctg

SEQ ID NO: 12723 - DNA, 40 bp, Homo sapiens
cagctacagaaaaacttttaaagcatcatggcagtagttc

SEQ ID NO: 12724 - DNA, 40 bp, Homo sapiens
aactactgccatgatgctttaaaagtttttctgtagctgt

SEQ ID NO: 12725 - DNA, 40 bp, Homo sapiens
acagctacagaaaaacttttaaagcatcatggcagtagtt

SEQ ID NO: 12726 - DNA, 40 bp, Homo sapiens
actactgccatgatgctttaaaagtttttctgtagctgtt

SEQ ID NO: 12727 - DNA, 40 bp, Homo sapiens
aacagctacagaaaaacttttaaagcatcatggcagtagt

SEQ ID NO: 12728 - DNA, 40 bp, Homo sapiens
ctactgccatgatgctttaaaagtttttctgtagctgttg

SEQ ID NO: 12729 - DNA, 40 bp, Homo sapiens
caacagctacagaaaaacttttaaagcatcatggcagtag

SEQ ID NO: 12730 - DNA, 40 bp, Homo sapiens
tactgccatgatgctttaaaagtttttctgtagctgttgc

SEQ ID NO: 12731 - DNA, 40 bp, Homo sapiens
gcaacagctacagaaaaacttttaaagcatcatggcagta

SEQ ID NO: 12732 - DNA, 40 bp, Homo sapiens
actgccatgatgctttaaaagtttttctgtagctgttgca

SEQ ID NO: 12733 - DNA, 40 bp, Homo sapiens
tgcaacagctacagaaaaacttttaaagcatcatggcagt

SEQ ID NO: 12734 - DNA, 40 bp, Homo sapiens
ctgccatgatgctttaaaagtttttctgtagctgttgcat

SEQ ID NO: 12735 - DNA, 40 bp, Homo sapiens
atgcaacagctacagaaaaacttttaaagcatcatggcag

SEQ ID NO: 12736 - DNA, 40 bp, Homo sapiens
tgccatgatgctttaaaagtttttctgtagctgttgcata

SEQ ID NO: 12737 - DNA, 40 bp, Homo sapiens
tatgcaacagctacagaaaaacttttaaagcatcatggca

SEQ ID NO: 12738 - DNA, 40 bp, Homo sapiens
gccatgatgctttaaaagtttttctgtagctgttgcatat

SEQ ID NO: 12739 - DNA, 40 bp, Homo sapiens
atatgcaacagctacagaaaaacttttaaagcatcatggc

SEQ ID NO: 12740 - DNA, 40 bp, Homo sapiens
ccatgatgctttaaaagtttttctgtagctgttgcatatt

SEQ ID NO: 12741 - DNA, 40 bp, Homo sapiens
aatatgcaacagctacagaaaaacttttaaagcatcatgg

SEQ ID NO: 12742 - DNA, 40 bp, Homo sapiens
catgatgctttaaaagtttttctgtagctgttgcatattg

SEQ ID NO: 12743 - DNA, 40 bp, Homo sapiens
caatatgcaacagctacagaaaaacttttaaagcatcatg

SEQ ID NO: 12744 - DNA, 40 bp, Homo sapiens
atgatgctttaaaagtttttctgtagctgttgcatattga

SEQ ID NO: 12745 - DNA, 40 bp, Homo sapiens
tcaatatgcaacagctacagaaaaacttttaaagcatcat

SEQ ID NO: 12746 - DNA, 40 bp, Homo sapiens
tgatgctttaaaagtttttctgtagctgttgcatattgac

SEQ ID NO: 12747 - DNA, 40 bp, Homo sapiens
gtcaatatgcaacagctacagaaaaacttttaaagcatca

SEQ ID NO: 12748 - DNA, 40 bp, Homo sapiens
gatgctttaaaagtttttctgtagctgttgcatattgact

SEQ ID NO: 12749 - DNA, 40 bp, Homo sapiens
agtcaatatgcaacagctacagaaaaacttttaaagcatc

SEQ ID NO: 12750 - DNA, 40 bp, Homo sapiens
atgctttaaaagtttttctgtagctgttgcatattgactt

SEQ ID NO: 12751 - DNA, 40 bp, Homo sapiens
aagtcaatatgcaacagctacagaaaaacttttaaagcat

SEQ ID NO: 12752 - DNA, 40 bp, Homo sapiens
tgctttaaaagtttttctgtagctgttgcatattgacttc

SEQ ID NO: 12753 - DNA, 40 bp, Homo sapiens
gaagtcaatatgcaacagctacagaaaaacttttaaagca

SEQ ID NO: 12754 - DNA, 40 bp, Homo sapiens
gctttaaaagtttttctgtagctgttgcatattgacttct

SEQ ID NO: 12755 - DNA, 40 bp, Homo sapiens
agaagtcaatatgcaacagctacagaaaaacttttaaagc

SEQ ID NO: 12756 - DNA, 40 bp, Homo sapiens
ctttaaaagtttttctgtagctgttgcatattgacttcta

SEQ ID NO: 12757 - DNA, 40 bp, Homo sapiens
tagaagtcaatatgcaacagctacagaaaaacttttaaag

SEQ ID NO: 12758 - DNA, 40 bp, Homo sapiens
tttaaaagtttttctgtagctgttgcatattgacttctaa

SEQ ID NO: 12759 - DNA, 40 bp, Homo sapiens
ttagaagtcaatatgcaacagctacagaaaaacttttaaa

SEQ ID NO: 12760 - DNA, 40 bp, Homo sapiens
ttaaaagtttttctgtagctgttgcatattgacttctaac

SEQ ID NO: 12761 - DNA, 40 bp, Homo sapiens
gttagaagtcaatatgcaacagctacagaaaaacttttaa

SEQ ID NO: 12762 - DNA, 40 bp, Homo sapiens
taaaagtttttctgtagctgttgcatattgacttctaaca

SEQ ID NO: 12763 - DNA, 40 bp, Homo sapiens
tgttagaagtcaatatgcaacagctacagaaaaactttta

SEQ ID NO: 12764 - DNA, 40 bp, Homo sapiens
aaaagtttttctgtagctgttgcatattgacttctaacac

SEQ ID NO: 12765 - DNA, 40 bp, Homo sapiens
gtgttagaagtcaatatgcaacagctacagaaaaactttt

SEQ ID NO: 12766 - DNA, 40 bp, Homo sapiens
aaagtttttctgtagctgttgcatattgacttctaacact

SEQ ID NO: 12767 - DNA, 40 bp, Homo sapiens
agtgttagaagtcaatatgcaacagctacagaaaaacttt

SEQ ID NO: 12768 - DNA, 40 bp, Homo sapiens
aagtttttctgtagctgttgcatattgacttctaacactt

SEQ ID NO: 12769 - DNA, 40 bp, Homo sapiens
aagtgttagaagtcaatatgcaacagctacagaaaaactt

SEQ ID NO: 12770 - DNA, 40 bp, Homo sapiens
agtttttctgtagctgttgcatattgacttctaacactta

SEQ ID NO: 12771 - DNA, 40 bp, Homo sapiens
taagtgttagaagtcaatatgcaacagctacagaaaaact

SEQ ID NO: 12772 - DNA, 40 bp, Homo sapiens
gtttttctgtagctgttgcatattgacttctaacacttag

SEQ ID NO: 12773 - DNA, 40 bp, Homo sapiens
ctaagtgttagaagtcaatatgcaacagctacagaaaaac

SEQ ID NO: 12774 - DNA, 40 bp, Homo sapiens
tttttctgtagctgttgcatattgacttctaacacttaga

SEQ ID NO: 12775 - DNA, 40 bp, Homo sapiens
tctaagtgttagaagtcaatatgcaacagctacagaaaaa

SEQ ID NO: 12776 - DNA, 40 bp, Homo sapiens
ttttctgtagctgttgcatattgacttctaacacttagag

SEQ ID NO: 12777 - DNA, 40 bp, Homo sapiens
ctctaagtgttagaagtcaatatgcaacagctacagaaaa

SEQ ID NO: 12778 - DNA, 40 bp, Homo sapiens
tttctgtagctgttgcatattgacttctaacacttagagg

SEQ ID NO: 12779 - DNA, 40 bp, Homo sapiens
cctctaagtgttagaagtcaatatgcaacagctacagaaa

SEQ ID NO: 12780 - DNA, 40 bp, Homo sapiens
ttctgtagctgttgcatattgacttctaacacttagaggt

SEQ ID NO: 12781 - DNA, 40 bp, Homo sapiens
acctctaagtgttagaagtcaatatgcaacagctacagaa

SEQ ID NO: 12782 - DNA, 40 bp, Homo sapiens
tctgtagctgttgcatattgacttctaacacttagaggtg

SEQ ID NO: 12783 - DNA, 40 bp, Homo sapiens
cacctctaagtgttagaagtcaatatgcaacagctacaga

SEQ ID NO: 12784 - DNA, 40 bp, Homo sapiens
ctgtagctgttgcatattgacttctaacacttagaggtgg

SEQ ID NO: 12785 - DNA, 40 bp, Homo sapiens
ccacctctaagtgttagaagtcaatatgcaacagctacag

SEQ ID NO: 12786 - DNA, 40 bp, Homo sapiens
tgtagctgttgcatattgacttctaacacttagaggtggg

SEQ ID NO: 12787 - DNA, 40 bp, Homo sapiens
cccacctctaagtgttagaagtcaatatgcaacagctaca

SEQ ID NO: 12788 - DNA, 40 bp, Homo sapiens
gtagctgttgcatattgacttctaacacttagaggtgggg

SEQ ID NO: 12789 - DNA, 40 bp, Homo sapiens
ccccacctctaagtgttagaagtcaatatgcaacagctac

SEQ ID NO: 12790 - DNA, 40 bp, Homo sapiens
tagctgttgcatattgacttctaacacttagaggtggggg

SEQ ID NO: 12791 - DNA, 40 bp, Homo sapiens
cccccacctctaagtgttagaagtcaatatgcaacagcta

SEQ ID NO: 12792 - DNA, 40 bp, Homo sapiens
agctgttgcatattgacttctaacacttagaggtgggggt

SEQ ID NO: 12793 - DNA, 40 bp, Homo sapiens
acccccacctctaagtgttagaagtcaatatgcaacagct

SEQ ID NO: 12794 - DNA, 40 bp, Homo sapiens
gctgttgcatattgacttctaacacttagaggtgggggtc

SEQ ID NO: 12795 - DNA, 40 bp, Homo sapiens
gacccccacctctaagtgttagaagtcaatatgcaacagc

SEQ ID NO: 12796 - DNA, 40 bp, Homo sapiens
ctgttgcatattgacttctaacacttagaggtgggggtcc

SEQ ID NO: 12797 - DNA, 40 bp, Homo sapiens
ggacccccacctctaagtgttagaagtcaatatgcaacag

SEQ ID NO: 12798 - DNA, 40 bp, Homo sapiens
tgttgcatattgacttctaacacttagaggtgggggtcca

SEQ ID NO: 12799 - DNA, 40 bp, Homo sapiens
tggacccccacctctaagtgttagaagtcaatatgcaaca

SEQ ID NO: 12800 - DNA, 40 bp, Homo sapiens
gttgcatattgacttctaacacttagaggtgggggtccac

SEQ ID NO: 12801 - DNA, 40 bp, Homo sapiens
gtggacccccacctctaagtgttagaagtcaatatgcaac

SEQ ID NO: 12802 - DNA, 40 bp, Homo sapiens
ttgcatattgacttctaacacttagaggtgggggtccact

SEQ ID NO: 12803 - DNA, 40 bp, Homo sapiens
agtggacccccacctctaagtgttagaagtcaatatgcaa

SEQ ID NO: 12804 - DNA, 40 bp, Homo sapiens
tgcatattgacttctaacacttagaggtgggggtccacta

SEQ ID NO: 12805 - DNA, 40 bp, Homo sapiens
tagtggacccccacctctaagtgttagaagtcaatatgca

SEQ ID NO: 12806 - DNA, 40 bp, Homo sapiens
gcatattgacttctaacacttagaggtgggggtccactag

SEQ ID NO: 12807 - DNA, 40 bp, Homo sapiens
ctagtggacccccacctctaagtgttagaagtcaatatgc

SEQ ID NO: 12808 - DNA, 40 bp, Homo sapiens
catattgacttctaacacttagaggtgggggtccactagg

SEQ ID NO: 12809 - DNA, 40 bp, Homo sapiens
cctagtggacccccacctctaagtgttagaagtcaatatg

SEQ ID NO: 12810 - DNA, 40 bp, Homo sapiens
atattgacttctaacacttagaggtgggggtccactagga

SEQ ID NO: 12811 - DNA, 40 bp, Homo sapiens
tcctagtggacccccacctctaagtgttagaagtcaatat

SEQ ID NO: 12812 - DNA, 40 bp, Homo sapiens
tattgacttctaacacttagaggtgggggtccactaggaa

SEQ ID NO: 12813 - DNA, 40 bp, Homo sapiens
ttcctagtggacccccacctctaagtgttagaagtcaata

SEQ ID NO: 12814 - DNA, 40 bp, Homo sapiens
attgacttctaacacttagaggtgggggtccactaggaaa

SEQ ID NO: 12815 - DNA, 40 bp, Homo sapiens
tttcctagtggacccccacctctaagtgttagaagtcaat

SEQ ID NO: 12816 - DNA, 40 bp, Homo sapiens
ttgacttctaacacttagaggtgggggtccactaggaaaa

SEQ ID NO: 12817 - DNA, 40 bp, Homo sapiens
ttttcctagtggacccccacctctaagtgttagaagtcaa

SEQ ID NO: 12818 - DNA, 40 bp, Homo sapiens
tgacttctaacacttagaggtgggggtccactaggaaaac

SEQ ID NO: 12819 - DNA, 40 bp, Homo sapiens
gttttcctagtggacccccacctctaagtgttagaagtca

SEQ ID NO: 12820 - DNA, 40 bp, Homo sapiens
gacttctaacacttagaggtgggggtccactaggaaaact

SEQ ID NO: 12821 - DNA, 40 bp, Homo sapiens
agttttcctagtggacccccacctctaagtgttagaagtc

SEQ ID NO: 12822 - DNA, 40 bp, Homo sapiens
acttctaacacttagaggtgggggtccactaggaaaactg

SEQ ID NO: 12823 - DNA, 40 bp, Homo sapiens
cagttttcctagtggacccccacctctaagtgttagaagt

SEQ ID NO: 12824 - DNA, 40 bp, Homo sapiens
cttctaacacttagaggtgggggtccactaggaaaactgt

SEQ ID NO: 12825 - DNA, 40 bp, Homo sapiens
acagttttcctagtggacccccacctctaagtgttagaag

SEQ ID NO: 12826 - DNA, 40 bp, Homo sapiens
ttctaacacttagaggtgggggtccactaggaaaactgta

SEQ ID NO: 12827 - DNA, 40 bp, Homo sapiens
tacagttttcctagtggacccccacctctaagtgttagaa

SEQ ID NO: 12828 - DNA, 40 bp, Homo sapiens
tctaacacttagaggtgggggtccactaggaaaactgtaa

SEQ ID NO: 12829 - DNA, 40 bp, Homo sapiens
ttacagttttcctagtggacccccacctctaagtgttaga

SEQ ID NO: 12830 - DNA, 40 bp, Homo sapiens
ctaacacttagaggtgggggtccactaggaaaactgtaac

SEQ ID NO: 12831 - DNA, 40 bp, Homo sapiens
gttacagttttcctagtggacccccacctctaagtgttag

SEQ ID NO: 12832 - DNA, 40 bp, Homo sapiens
taacacttagaggtgggggtccactaggaaaactgtaaca

SEQ ID NO: 12833 - DNA, 40 bp, Homo sapiens
tgttacagttttcctagtggacccccacctctaagtgtta

SEQ ID NO: 12834 - DNA, 40 bp, Homo sapiens
aacacttagaggtgggggtccactaggaaaactgtaacaa

SEQ ID NO: 12835 - DNA, 40 bp, Homo sapiens
ttgttacagttttcctagtggacccccacctctaagtgtt

SEQ ID NO: 12836 - DNA, 40 bp, Homo sapiens
acacttagaggtgggggtccactaggaaaactgtaacaat

SEQ ID NO: 12837 - DNA, 40 bp, Homo sapiens
attgttacagttttcctagtggacccccacctctaagtgt

SEQ ID NO: 12838 - DNA, 40 bp, Homo sapiens
cacttagaggtgggggtccactaggaaaactgtaacaata

SEQ ID NO: 12839 - DNA, 40 bp, Homo sapiens
tattgttacagttttcctagtggacccccacctctaagtg

SEQ ID NO: 12840 - DNA, 40 bp, Homo sapiens
acttagaggtgggggtccactaggaaaactgtaacaataa

SEQ ID NO: 12841 - DNA, 40 bp, Homo sapiens
ttattgttacagttttcctagtggacccccacctctaagt

SEQ ID NO: 12842 - DNA, 40 bp, Homo sapiens
cttagaggtgggggtccactaggaaaactgtaacaataag

SEQ ID NO: 12843 - DNA, 40 bp, Homo sapiens
cttattgttacagttttcctagtggacccccacctctaag

SEQ ID NO: 12844 - DNA, 40 bp, Homo sapiens
ttagaggtgggggtccactaggaaaactgtaacaataaga

SEQ ID NO: 12845 - DNA, 40 bp, Homo sapiens
tcttattgttacagttttcctagtggacccccacctctaa

SEQ ID NO: 12846 - DNA, 40 bp, Homo sapiens
tagaggtgggggtccactaggaaaactgtaacaataagag

SEQ ID NO: 12847 - DNA, 40 bp, Homo sapiens
ctcttattgttacagttttcctagtggacccccacctcta

SEQ ID NO: 12848 - DNA, 40 bp, Homo sapiens
agaggtgggggtccactaggaaaactgtaacaataagagt

SEQ ID NO: 12849 - DNA, 40 bp, Homo sapiens
actcttattgttacagttttcctagtggacccccacctct

SEQ ID NO: 12850 - DNA, 40 bp, Homo sapiens
gaggtgggggtccactaggaaaactgtaacaataagagtg

SEQ ID NO: 12851 - DNA, 40 bp, Homo sapiens
cactcttattgttacagttttcctagtggacccccacctc

SEQ ID NO: 12852 - DNA, 40 bp, Homo sapiens
aggtgggggtccactaggaaaactgtaacaataagagtgg

SEQ ID NO: 12853 - DNA, 40 bp, Homo sapiens
ccactcttattgttacagttttcctagtggacccccacct

SEQ ID NO: 12854 - DNA, 40 bp, Homo sapiens
ggtgggggtccactaggaaaactgtaacaataagagtgga

SEQ ID NO: 12855 - DNA, 40 bp, Homo sapiens
tccactcttattgttacagttttcctagtggacccccacc

SEQ ID NO: 12856 - DNA, 40 bp, Homo sapiens
gtgggggtccactaggaaaactgtaacaataagagtggag

SEQ ID NO: 12857 - DNA, 40 bp, Homo sapiens
ctccactcttattgttacagttttcctagtggacccccac

SEQ ID NO: 12858 - DNA, 40 bp, Homo sapiens
tgggggtccactaggaaaactgtaacaataagagtggaga

SEQ ID NO: 12859 - DNA, 40 bp, Homo sapiens
tctccactcttattgttacagttttcctagtggaccccca

SEQ ID NO: 12860 - DNA, 40 bp, Homo sapiens
gggggtccactaggaaaactgtaacaataagagtggagat

SEQ ID NO: 12861 - DNA, 40 bp, Homo sapiens
atctccactcttattgttacagttttcctagtggaccccc

SEQ ID NO: 12862 - DNA, 40 bp, Homo sapiens
ggggtccactaggaaaactgtaacaataagagtggagata

SEQ ID NO: 12863 - DNA, 40 bp, Homo sapiens
tatctccactcttattgttacagttttcctagtggacccc

SEQ ID NO: 12864 - DNA, 40 bp, Homo sapiens
gggtccactaggaaaactgtaacaataagagtggagatag

SEQ ID NO: 12865 - DNA, 40 bp, Homo sapiens
ctatctccactcttattgttacagttttcctagtggaccc

SEQ ID NO: 12866 - DNA, 40 bp, Homo sapiens
ggtccactaggaaaactgtaacaataagagtggagatagc

SEQ ID NO: 12867 - DNA, 40 bp, Homo sapiens
gctatctccactcttattgttacagttttcctagtggacc

SEQ ID NO: 12868 - DNA, 40 bp, Homo sapiens
gtccactaggaaaactgtaacaataagagtggagatagct

SEQ ID NO: 12869 - DNA, 40 bp, Homo sapiens
agctatctccactcttattgttacagttttcctagtggac

SEQ ID NO: 12870 - DNA, 40 bp, Homo sapiens
tccactaggaaaactgtaacaataagagtggagatagctg

SEQ ID NO: 12871 - DNA, 40 bp, Homo sapiens
cagctatctccactcttattgttacagttttcctagtgga

SEQ ID NO: 12872 - DNA, 40 bp, Homo sapiens
ccactaggaaaactgtaacaataagagtggagatagctgt

SEQ ID NO: 12873 - DNA, 40 bp, Homo sapiens
acagctatctccactcttattgttacagttttcctagtgg

SEQ ID NO: 12874 - DNA, 40 bp, Homo sapiens
cactaggaaaactgtaacaataagagtggagatagctgtc

SEQ ID NO: 12875 - DNA, 40 bp, Homo sapiens
gacagctatctccactcttattgttacagttttcctagtg

SEQ ID NO: 12876 - DNA, 40 bp, Homo sapiens
actaggaaaactgtaacaataagagtggagatagctgtca

SEQ ID NO: 12877 - DNA, 40 bp, Homo sapiens
tgacagctatctccactcttattgttacagttttcctagt

SEQ ID NO: 12878 - DNA, 40 bp, Homo sapiens
ctaggaaaactgtaacaataagagtggagatagctgtcag

SEQ ID NO: 12879 - DNA, 40 bp, Homo sapiens
ctgacagctatctccactcttattgttacagttttcctag

SEQ ID NO: 12880 - DNA, 40 bp, Homo sapiens
taggaaaactgtaacaataagagtggagatagctgtcagc

SEQ ID NO: 12881 - DNA, 40 bp, Homo sapiens
gctgacagctatctccactcttattgttacagttttccta

SEQ ID NO: 12882 - DNA, 40 bp, Homo sapiens
aggaaaactgtaacaataagagtggagatagctgtcagca

SEQ ID NO: 12883 - DNA, 40 bp, Homo sapiens
tgctgacagctatctccactcttattgttacagttttcct

SEQ ID NO: 12884 - DNA, 40 bp, Homo sapiens
ggaaaactgtaacaataagagtggagatagctgtcagcaa

SEQ ID NO: 12885 - DNA, 40 bp, Homo sapiens
ttgctgacagctatctccactcttattgttacagttttcc

SEQ ID NO: 12886 - DNA, 40 bp, Homo sapiens
gaaaactgtaacaataagagtggagatagctgtcagcaac

SEQ ID NO: 12887 - DNA, 40 bp, Homo sapiens
gttgctgacagctatctccactcttattgttacagttttc

SEQ ID NO: 12888 - DNA, 40 bp, Homo sapiens
aaaactgtaacaataagagtggagatagctgtcagcaact

SEQ ID NO: 12889 - DNA, 40 bp, Homo sapiens
agttgctgacagctatctccactcttattgttacagtttt

SEQ ID NO: 12890 - DNA, 40 bp, Homo sapiens
aaactgtaacaataagagtggagatagctgtcagcaactt

SEQ ID NO: 12891 - DNA, 40 bp, Homo sapiens
aagttgctgacagctatctccactcttattgttacagttt

SEQ ID NO: 12892 - DNA, 40 bp, Homo sapiens
aactgtaacaataagagtggagatagctgtcagcaacttt

SEQ ID NO: 12893 - DNA, 40 bp, Homo sapiens
aaagttgctgacagctatctccactcttattgttacagtt

SEQ ID NO: 12894 - DNA, 40 bp, Homo sapiens
actgtaacaataagagtggagatagctgtcagcaactttt

SEQ ID NO: 12895 - DNA, 40 bp, Homo sapiens
aaaagttgctgacagctatctccactcttattgttacagt

SEQ ID NO: 12896 - DNA, 40 bp, Homo sapiens
ctgtaacaataagagtggagatagctgtcagcaacttttg

SEQ ID NO: 12897 - DNA, 40 bp, Homo sapiens
caaaagttgctgacagctatctccactcttattgttacag

SEQ ID NO: 12898 - DNA, 40 bp, Homo sapiens
tgtaacaataagagtggagatagctgtcagcaacttttgt

SEQ ID NO: 12899 - DNA, 40 bp, Homo sapiens
acaaaagttgctgacagctatctccactcttattgttaca

SEQ ID NO: 12900 - DNA, 40 bp, Homo sapiens
gtaacaataagagtggagatagctgtcagcaacttttgtg

SEQ ID NO: 12901 - DNA, 40 bp, Homo sapiens
cacaaaagttgctgacagctatctccactcttattgttac

SEQ ID NO: 12902 - DNA, 40 bp, Homo sapiens
taacaataagagtggagatagctgtcagcaacttttgtga

SEQ ID NO: 12903 - DNA, 40 bp, Homo sapiens
tcacaaaagttgctgacagctatctccactcttattgtta

SEQ ID NO: 12904 - DNA, 40 bp, Homo sapiens
aacaataagagtggagatagctgtcagcaacttttgtgag

SEQ ID NO: 12905 - DNA, 40 bp, Homo sapiens
ctcacaaaagttgctgacagctatctccactcttattgtt

SEQ ID NO: 12906 - DNA, 40 bp, Homo sapiens
acaataagagtggagatagctgtcagcaacttttgtgagg

SEQ ID NO: 12907 - DNA, 40 bp, Homo sapiens
cctcacaaaagttgctgacagctatctccactcttattgt

SEQ ID NO: 12908 - DNA, 40 bp, Homo sapiens
caataagagtggagatagctgtcagcaacttttgtgaggg

SEQ ID NO: 12909 - DNA, 40 bp, Homo sapiens
ccctcacaaaagttgctgacagctatctccactcttattg

SEQ ID NO: 12910 - DNA, 40 bp, Homo sapiens
aataagagtggagatagctgtcagcaacttttgtgagggt

SEQ ID NO: 12911 - DNA, 40 bp, Homo sapiens
accctcacaaaagttgctgacagctatctccactcttatt

SEQ ID NO: 12912 - DNA, 40 bp, Homo sapiens
ataagagtggagatagctgtcagcaacttttgtgagggtg

SEQ ID NO: 12913 - DNA, 40 bp, Homo sapiens
caccctcacaaaagttgctgacagctatctccactcttat

SEQ ID NO: 12914 - DNA, 40 bp, Homo sapiens
taagagtggagatagctgtcagcaacttttgtgagggtgt

SEQ ID NO: 12915 - DNA, 40 bp, Homo sapiens
acaccctcacaaaagttgctgacagctatctccactctta

SEQ ID NO: 12916 - DNA, 40 bp, Homo sapiens
aagagtggagatagctgtcagcaacttttgtgagggtgtg

SEQ ID NO: 12917 - DNA, 40 bp, Homo sapiens
cacaccctcacaaaagttgctgacagctatctccactctt

SEQ ID NO: 12918 - DNA, 40 bp, Homo sapiens
agagtggagatagctgtcagcaacttttgtgagggtgtgc

SEQ ID NO: 12919 - DNA, 40 bp, Homo sapiens
gcacaccctcacaaaagttgctgacagctatctccactct

SEQ ID NO: 12920 - DNA, 40 bp, Homo sapiens
gagtggagatagctgtcagcaacttttgtgagggtgtgct

SEQ ID NO: 12921 - DNA, 40 bp, Homo sapiens
agcacaccctcacaaaagttgctgacagctatctccactc

SEQ ID NO: 12922 - DNA, 40 bp, Homo sapiens
agtggagatagctgtcagcaacttttgtgagggtgtgcta

SEQ ID NO: 12923 - DNA, 40 bp, Homo sapiens
tagcacaccctcacaaaagttgctgacagctatctccact

SEQ ID NO: 12924 - DNA, 40 bp, Homo sapiens
gtggagatagctgtcagcaacttttgtgagggtgtgctac

SEQ ID NO: 12925 - DNA, 40 bp, Homo sapiens
gtagcacaccctcacaaaagttgctgacagctatctccac

SEQ ID NO: 12926 - DNA, 40 bp, Homo sapiens
tggagatagctgtcagcaacttttgtgagggtgtgctaca

SEQ ID NO: 12927 - DNA, 40 bp, Homo sapiens
tgtagcacaccctcacaaaagttgctgacagctatctcca

SEQ ID NO: 12928 - DNA, 40 bp, Homo sapiens
ggagatagctgtcagcaacttttgtgagggtgtgctacag

SEQ ID NO: 12929 - DNA, 40 bp, Homo sapiens
ctgtagcacaccctcacaaaagttgctgacagctatctcc

SEQ ID NO: 12930 - DNA, 40 bp, Homo sapiens
gagatagctgtcagcaacttttgtgagggtgtgctacagg

SEQ ID NO: 12931 - DNA, 40 bp, Homo sapiens
cctgtagcacaccctcacaaaagttgctgacagctatctc

SEQ ID NO: 12932 - DNA, 40 bp, Homo sapiens
agatagctgtcagcaacttttgtgagggtgtgctacaggg

SEQ ID NO: 12933 - DNA, 40 bp, Homo sapiens
ccctgtagcacaccctcacaaaagttgctgacagctatct

SEQ ID NO: 12934 - DNA, 40 bp, Homo sapiens
gatagctgtcagcaacttttgtgagggtgtgctacagggt

SEQ ID NO: 12935 - DNA, 40 bp, Homo sapiens
accctgtagcacaccctcacaaaagttgctgacagctatc

SEQ ID NO: 12936 - DNA, 40 bp, Homo sapiens
atagctgtcagcaacttttgtgagggtgtgctacagggtg

SEQ ID NO: 12937 - DNA, 40 bp, Homo sapiens
caccctgtagcacaccctcacaaaagttgctgacagctat

SEQ ID NO: 12938 - DNA, 40 bp, Homo sapiens
tagctgtcagcaacttttgtgagggtgtgctacagggtgt

SEQ ID NO: 12939 - DNA, 40 bp, Homo sapiens
acaccctgtagcacaccctcacaaaagttgctgacagcta

SEQ ID NO: 12940 - DNA, 40 bp, Homo sapiens
agctgtcagcaacttttgtgagggtgtgctacagggtgta

SEQ ID NO: 12941 - DNA, 40 bp, Homo sapiens
tacaccctgtagcacaccctcacaaaagttgctgacagct

SEQ ID NO: 12942 - DNA, 40 bp, Homo sapiens
gctgtcagcaacttttgtgagggtgtgctacagggtgtag

SEQ ID NO: 12943 - DNA, 40 bp, Homo sapiens
ctacaccctgtagcacaccctcacaaaagttgctgacagc

SEQ ID NO: 12944 - DNA, 40 bp, Homo sapiens
ctgtcagcaacttttgtgagggtgtgctacagggtgtaga

SEQ ID NO: 12945 - DNA, 40 bp, Homo sapiens
tctacaccctgtagcacaccctcacaaaagttgctgacag

SEQ ID NO: 12946 - DNA, 40 bp, Homo sapiens
tgtcagcaacttttgtgagggtgtgctacagggtgtagag

SEQ ID NO: 12947 - DNA, 40 bp, Homo sapiens
ctctacaccctgtagcacaccctcacaaaagttgctgaca

SEQ ID NO: 12948 - DNA, 40 bp, Homo sapiens
gtcagcaacttttgtgagggtgtgctacagggtgtagagc

SEQ ID NO: 12949 - DNA, 40 bp, Homo sapiens
gctctacaccctgtagcacaccctcacaaaagttgctgac

SEQ ID NO: 12950 - DNA, 40 bp, Homo sapiens
tcagcaacttttgtgagggtgtgctacagggtgtagagca

SEQ ID NO: 12951 - DNA, 40 bp, Homo sapiens
tgctctacaccctgtagcacaccctcacaaaagttgctga

SEQ ID NO: 12952 - DNA, 40 bp, Homo sapiens
cagcaacttttgtgagggtgtgctacagggtgtagagcac

SEQ ID NO: 12953 - DNA, 40 bp, Homo sapiens
gtgctctacaccctgtagcacaccctcacaaaagttgctg

SEQ ID NO: 12954 - DNA, 40 bp, Homo sapiens
agcaacttttgtgagggtgtgctacagggtgtagagcact

SEQ ID NO: 12955 - DNA, 40 bp, Homo sapiens
agtgctctacaccctgtagcacaccctcacaaaagttgct

SEQ ID NO: 12956 - DNA, 40 bp, Homo sapiens
gcaacttttgtgagggtgtgctacagggtgtagagcactg

SEQ ID NO: 12957 - DNA, 40 bp, Homo sapiens
cagtgctctacaccctgtagcacaccctcacaaaagttgc

SEQ ID NO: 12958 - DNA, 40 bp, Homo sapiens
caacttttgtgagggtgtgctacagggtgtagagcactgt

SEQ ID NO: 12959 - DNA, 40 bp, Homo sapiens
acagtgctctacaccctgtagcacaccctcacaaaagttg

SEQ ID NO: 12960 - DNA, 40 bp, Homo sapiens
aacttttgtgagggtgtgctacagggtgtagagcactgtg

SEQ ID NO: 12961 - DNA, 40 bp, Homo sapiens
cacagtgctctacaccctgtagcacaccctcacaaaagtt

SEQ ID NO: 12962 - DNA, 40 bp, Homo sapiens
acttttgtgagggtgtgctacagggtgtagagcactgtga

SEQ ID NO: 12963 - DNA, 40 bp, Homo sapiens
tcacagtgctctacaccctgtagcacaccctcacaaaagt

SEQ ID NO: 12964 - DNA, 40 bp, Homo sapiens
cttttgtgagggtgtgctacagggtgtagagcactgtgaa

SEQ ID NO: 12965 - DNA, 40 bp, Homo sapiens
ttcacagtgctctacaccctgtagcacaccctcacaaaag

SEQ ID NO: 12966 - DNA, 40 bp, Homo sapiens
ttttgtgagggtgtgctacagggtgtagagcactgtgaag

SEQ ID NO: 12967 - DNA, 40 bp, Homo sapiens
cttcacagtgctctacaccctgtagcacaccctcacaaaa

SEQ ID NO: 12968 - DNA, 40 bp, Homo sapiens
tttgtgagggtgtgctacagggtgtagagcactgtgaagt

SEQ ID NO: 12969 - DNA, 40 bp, Homo sapiens
acttcacagtgctctacaccctgtagcacaccctcacaaa

SEQ ID NO: 12970 - DNA, 40 bp, Homo sapiens
ttgtgagggtgtgctacagggtgtagagcactgtgaagtc

SEQ ID NO: 12971 - DNA, 40 bp, Homo sapiens
gacttcacagtgctctacaccctgtagcacaccctcacaa

SEQ ID NO: 12972 - DNA, 40 bp, Homo sapiens
tgtgagggtgtgctacagggtgtagagcactgtgaagtct

SEQ ID NO: 12973 - DNA, 40 bp, Homo sapiens
agacttcacagtgctctacaccctgtagcacaccctcaca

SEQ ID NO: 12974 - DNA, 40 bp, Homo sapiens
gtgagggtgtgctacagggtgtagagcactgtgaagtctc

SEQ ID NO: 12975 - DNA, 40 bp, Homo sapiens
gagacttcacagtgctctacaccctgtagcacaccctcac

SEQ ID NO: 12976 - DNA, 40 bp, Homo sapiens
tgagggtgtgctacagggtgtagagcactgtgaagtctct

SEQ ID NO: 12977 - DNA, 40 bp, Homo sapiens
agagacttcacagtgctctacaccctgtagcacaccctca

SEQ ID NO: 12978 - DNA, 40 bp, Homo sapiens
gagggtgtgctacagggtgtagagcactgtgaagtctcta

SEQ ID NO: 12979 - DNA, 40 bp, Homo sapiens
tagagacttcacagtgctctacaccctgtagcacaccctc

SEQ ID NO: 12980 - DNA, 40 bp, Homo sapiens
agggtgtgctacagggtgtagagcactgtgaagtctctac

SEQ ID NO: 12981 - DNA, 40 bp, Homo sapiens
gtagagacttcacagtgctctacaccctgtagcacaccct

SEQ ID NO: 12982 - DNA, 40 bp, Homo sapiens
gggtgtgctacagggtgtagagcactgtgaagtctctaca

SEQ ID NO: 12983 - DNA, 40 bp, Homo sapiens
tgtagagacttcacagtgctctacaccctgtagcacaccc

SEQ ID NO: 12984 - DNA, 40 bp, Homo sapiens
ggtgtgctacagggtgtagagcactgtgaagtctctacat

SEQ ID NO: 12985 - DNA, 40 bp, Homo sapiens
atgtagagacttcacagtgctctacaccctgtagcacacc

SEQ ID NO: 12986 - DNA, 40 bp, Homo sapiens
gtgtgctacagggtgtagagcactgtgaagtctctacatg

SEQ ID NO: 12987 - DNA, 40 bp, Homo sapiens
catgtagagacttcacagtgctctacaccctgtagcacac

SEQ ID NO: 12988 - DNA, 40 bp, Homo sapiens
tgtgctacagggtgtagagcactgtgaagtctctacatga

SEQ ID NO: 12989 - DNA, 40 bp, Homo sapiens
tcatgtagagacttcacagtgctctacaccctgtagcaca

SEQ ID NO: 12990 - DNA, 40 bp, Homo sapiens
gtgctacagggtgtagagcactgtgaagtctctacatgag

SEQ ID NO: 12991 - DNA, 40 bp, Homo sapiens
ctcatgtagagacttcacagtgctctacaccctgtagcac

SEQ ID NO: 12992 - DNA, 40 bp, Homo sapiens
tgctacagggtgtagagcactgtgaagtctctacatgagt

SEQ ID NO: 12993 - DNA, 40 bp, Homo sapiens
actcatgtagagacttcacagtgctctacaccctgtagca

SEQ ID NO: 12994 - DNA, 40 bp, Homo sapiens
gctacagggtgtagagcactgtgaagtctctacatgagtg

SEQ ID NO: 12995 - DNA, 40 bp, Homo sapiens
cactcatgtagagacttcacagtgctctacaccctgtagc

SEQ ID NO: 12996 - DNA, 40 bp, Homo sapiens
ctacagggtgtagagcactgtgaagtctctacatgagtga

SEQ ID NO: 12997 - DNA, 40 bp, Homo sapiens
tcactcatgtagagacttcacagtgctctacaccctgtag

SEQ ID NO: 12998 - DNA, 40 bp, Homo sapiens
tacagggtgtagagcactgtgaagtctctacatgagtgaa

SEQ ID NO: 12999 - DNA, 40 bp, Homo sapiens
ttcactcatgtagagacttcacagtgctctacaccctgta

SEQ ID NO: 13000 - DNA, 40 bp, Homo sapiens
acagggtgtagagcactgtgaagtctctacatgagtgaag

SEQ ID NO: 13001 - DNA, 40 bp, Homo sapiens
cttcactcatgtagagacttcacagtgctctacaccctgt

SEQ ID NO: 13002 - DNA, 40 bp, Homo sapiens
cagggtgtagagcactgtgaagtctctacatgagtgaagt

SEQ ID NO: 13003 - DNA, 40 bp, Homo sapiens
acttcactcatgtagagacttcacagtgctctacaccctg

SEQ ID NO: 13004 - DNA, 40 bp, Homo sapiens
agggtgtagagcactgtgaagtctctacatgagtgaagtc

SEQ ID NO: 13005 - DNA, 40 bp, Homo sapiens
gacttcactcatgtagagacttcacagtgctctacaccct

SEQ ID NO: 13006 - DNA, 40 bp, Homo sapiens
gggtgtagagcactgtgaagtctctacatgagtgaagtca

SEQ ID NO: 13007 - DNA, 40 bp, Homo sapiens
tgacttcactcatgtagagacttcacagtgctctacaccc

SEQ ID NO: 13008 - DNA, 40 bp, Homo sapiens
ggtgtagagcactgtgaagtctctacatgagtgaagtcat

SEQ ID NO: 13009 - DNA, 40 bp, Homo sapiens
atgacttcactcatgtagagacttcacagtgctctacacc

SEQ ID NO: 13010 - DNA, 40 bp, Homo sapiens
gtgtagagcactgtgaagtctctacatgagtgaagtcatg

SEQ ID NO: 13011 - DNA, 40 bp, Homo sapiens
catgacttcactcatgtagagacttcacagtgctctacac

SEQ ID NO: 13012 - DNA, 40 bp, Homo sapiens
tgtagagcactgtgaagtctctacatgagtgaagtcatga

SEQ ID NO: 13013 - DNA, 40 bp, Homo sapiens
tcatgacttcactcatgtagagacttcacagtgctctaca

SEQ ID NO: 13014 - DNA, 40 bp, Homo sapiens
gtagagcactgtgaagtctctacatgagtgaagtcatgat

SEQ ID NO: 13015 - DNA, 40 bp, Homo sapiens
atcatgacttcactcatgtagagacttcacagtgctctac

SEQ ID NO: 13016 - DNA, 40 bp, Homo sapiens
tagagcactgtgaagtctctacatgagtgaagtcatgata

SEQ ID NO: 13017 - DNA, 40 bp, Homo sapiens
tatcatgacttcactcatgtagagacttcacagtgctcta

SEQ ID NO: 13018 - DNA, 40 bp, Homo sapiens
agagcactgtgaagtctctacatgagtgaagtcatgatat

SEQ ID NO: 13019 - DNA, 40 bp, Homo sapiens
atatcatgacttcactcatgtagagacttcacagtgctct

SEQ ID NO: 13020 - DNA, 40 bp, Homo sapiens
gagcactgtgaagtctctacatgagtgaagtcatgatatg

SEQ ID NO: 13021 - DNA, 40 bp, Homo sapiens
catatcatgacttcactcatgtagagacttcacagtgctc

SEQ ID NO: 13022 - DNA, 40 bp, Homo sapiens
agcactgtgaagtctctacatgagtgaagtcatgatatga

SEQ ID NO: 13023 - DNA, 40 bp, Homo sapiens
tcatatcatgacttcactcatgtagagacttcacagtgct

SEQ ID NO: 13024 - DNA, 40 bp, Homo sapiens
gcactgtgaagtctctacatgagtgaagtcatgatatgat

SEQ ID NO: 13025 - DNA, 40 bp, Homo sapiens
atcatatcatgacttcactcatgtagagacttcacagtgc

SEQ ID NO: 13026 - DNA, 40 bp, Homo sapiens
cactgtgaagtctctacatgagtgaagtcatgatatgatc

SEQ ID NO: 13027 - DNA, 40 bp, Homo sapiens
gatcatatcatgacttcactcatgtagagacttcacagtg

SEQ ID NO: 13028 - DNA, 40 bp, Homo sapiens
actgtgaagtctctacatgagtgaagtcatgatatgatcc

SEQ ID NO: 13029 - DNA, 40 bp, Homo sapiens
ggatcatatcatgacttcactcatgtagagacttcacagt

SEQ ID NO: 13030 - DNA, 40 bp, Homo sapiens
ctgtgaagtctctacatgagtgaagtcatgatatgatcct

SEQ ID NO: 13031 - DNA, 40 bp, Homo sapiens
aggatcatatcatgacttcactcatgtagagacttcacag

SEQ ID NO: 13032 - DNA, 40 bp, Homo sapiens
tgtgaagtctctacatgagtgaagtcatgatatgatcctt

SEQ ID NO: 13033 - DNA, 40 bp, Homo sapiens
aaggatcatatcatgacttcactcatgtagagacttcaca

SEQ ID NO: 13034 - DNA, 40 bp, Homo sapiens
gtgaagtctctacatgagtgaagtcatgatatgatccttt

SEQ ID NO: 13035 - DNA, 40 bp, Homo sapiens
aaaggatcatatcatgacttcactcatgtagagacttcac

SEQ ID NO: 13036 - DNA, 40 bp, Homo sapiens
tgaagtctctacatgagtgaagtcatgatatgatcctttg

SEQ ID NO: 13037 - DNA, 40 bp, Homo sapiens
caaaggatcatatcatgacttcactcatgtagagacttca

SEQ ID NO: 13038 - DNA, 40 bp, Homo sapiens
gaagtctctacatgagtgaagtcatgatatgatcctttga

SEQ ID NO: 13039 - DNA, 40 bp, Homo sapiens
tcaaaggatcatatcatgacttcactcatgtagagacttc

SEQ ID NO: 13040 - DNA, 40 bp, Homo sapiens
aagtctctacatgagtgaagtcatgatatgatcctttgag

SEQ ID NO: 13041 - DNA, 40 bp, Homo sapiens
ctcaaaggatcatatcatgacttcactcatgtagagactt

SEQ ID NO: 13042 - DNA, 40 bp, Homo sapiens
agtctctacatgagtgaagtcatgatatgatcctttgaga

SEQ ID NO: 13043 - DNA, 40 bp, Homo sapiens
tctcaaaggatcatatcatgacttcactcatgtagagact

SEQ ID NO: 13044 - DNA, 40 bp, Homo sapiens
gtctctacatgagtgaagtcatgatatgatcctttgagag

SEQ ID NO: 13045 - DNA, 40 bp, Homo sapiens
ctctcaaaggatcatatcatgacttcactcatgtagagac

SEQ ID NO: 13046 - DNA, 40 bp, Homo sapiens
tctctacatgagtgaagtcatgatatgatcctttgagagc

SEQ ID NO: 13047 - DNA, 40 bp, Homo sapiens
gctctcaaaggatcatatcatgacttcactcatgtagaga

SEQ ID NO: 13048 - DNA, 40 bp, Homo sapiens
ctctacatgagtgaagtcatgatatgatcctttgagagcc

SEQ ID NO: 13049 - DNA, 40 bp, Homo sapiens
ggctctcaaaggatcatatcatgacttcactcatgtagag

SEQ ID NO: 13050 - DNA, 40 bp, Homo sapiens
tctacatgagtgaagtcatgatatgatcctttgagagcct

SEQ ID NO: 13051 - DNA, 40 bp, Homo sapiens
aggctctcaaaggatcatatcatgacttcactcatgtaga

SEQ ID NO: 13052 - DNA, 40 bp, Homo sapiens
ctacatgagtgaagtcatgatatgatcctttgagagcctt

SEQ ID NO: 13053 - DNA, 40 bp, Homo sapiens
aaggctctcaaaggatcatatcatgacttcactcatgtag

SEQ ID NO: 13054 - DNA, 40 bp, Homo sapiens
tacatgagtgaagtcatgatatgatcctttgagagccttt

SEQ ID NO: 13055 - DNA, 40 bp, Homo sapiens
aaaggctctcaaaggatcatatcatgacttcactcatgta

SEQ ID NO: 13056 - DNA, 40 bp, Homo sapiens
acatgagtgaagtcatgatatgatcctttgagagccttta

SEQ ID NO: 13057 - DNA, 40 bp, Homo sapiens
taaaggctctcaaaggatcatatcatgacttcactcatgt

SEQ ID NO: 13058 - DNA, 40 bp, Homo sapiens
catgagtgaagtcatgatatgatcctttgagagcctttag

SEQ ID NO: 13059 - DNA, 40 bp, Homo sapiens
ctaaaggctctcaaaggatcatatcatgacttcactcatg

SEQ ID NO: 13060 - DNA, 40 bp, Homo sapiens
atgagtgaagtcatgatatgatcctttgagagcctttagc

SEQ ID NO: 13061 - DNA, 40 bp, Homo sapiens
gctaaaggctctcaaaggatcatatcatgacttcactcat

SEQ ID NO: 13062 - DNA, 40 bp, Homo sapiens
tgagtgaagtcatgatatgatcctttgagagcctttagcc

SEQ ID NO: 13063 - DNA, 40 bp, Homo sapiens
ggctaaaggctctcaaaggatcatatcatgacttcactca

SEQ ID NO: 13064 - DNA, 40 bp, Homo sapiens
gagtgaagtcatgatatgatcctttgagagcctttagccg

SEQ ID NO: 13065 - DNA, 40 bp, Homo sapiens
cggctaaaggctctcaaaggatcatatcatgacttcactc

SEQ ID NO: 13066 - DNA, 40 bp, Homo sapiens
agtgaagtcatgatatgatcctttgagagcctttagccgc

SEQ ID NO: 13067 - DNA, 40 bp, Homo sapiens
gcggctaaaggctctcaaaggatcatatcatgacttcact

SEQ ID NO: 13068 - DNA, 40 bp, Homo sapiens
gtgaagtcatgatatgatcctttgagagcctttagccgcc

SEQ ID NO: 13069 - DNA, 40 bp, Homo sapiens
ggcggctaaaggctctcaaaggatcatatcatgacttcac

SEQ ID NO: 13070 - DNA, 40 bp, Homo sapiens
tgaagtcatgatatgatcctttgagagcctttagccgccg

SEQ ID NO: 13071 - DNA, 40 bp, Homo sapiens
cggcggctaaaggctctcaaaggatcatatcatgacttca

SEQ ID NO: 13072 - DNA, 40 bp, Homo sapiens
gaagtcatgatatgatcctttgagagcctttagccgccgc

SEQ ID NO: 13073 - DNA, 40 bp, Homo sapiens
gcggcggctaaaggctctcaaaggatcatatcatgacttc

SEQ ID NO: 13074 - DNA, 40 bp, Homo sapiens
aagtcatgatatgatcctttgagagcctttagccgccgca

SEQ ID NO: 13075 - DNA, 40 bp, Homo sapiens
tgcggcggctaaaggctctcaaaggatcatatcatgactt

SEQ ID NO: 13076 - DNA, 40 bp, Homo sapiens
agtcatgatatgatcctttgagagcctttagccgccgcag

SEQ ID NO: 13077 - DNA, 40 bp, Homo sapiens
ctgcggcggctaaaggctctcaaaggatcatatcatgact

SEQ ID NO: 13078 - DNA, 40 bp, Homo sapiens
gtcatgatatgatcctttgagagcctttagccgccgcaga

SEQ ID NO: 13079 - DNA, 40 bp, Homo sapiens
tctgcggcggctaaaggctctcaaaggatcatatcatgac

SEQ ID NO: 13080 - DNA, 40 bp, Homo sapiens
tcatgatatgatcctttgagagcctttagccgccgcagaa

SEQ ID NO: 13081 - DNA, 40 bp, Homo sapiens
ttctgcggcggctaaaggctctcaaaggatcatatcatga

SEQ ID NO: 13082 - DNA, 40 bp, Homo sapiens
catgatatgatcctttgagagcctttagccgccgcagaac

SEQ ID NO: 13083 - DNA, 40 bp, Homo sapiens
gttctgcggcggctaaaggctctcaaaggatcatatcatg

SEQ ID NO: 13084 - DNA, 40 bp, Homo sapiens
atgatatgatcctttgagagcctttagccgccgcagaaca

SEQ ID NO: 13085 - DNA, 40 bp, Homo sapiens
tgttctgcggcggctaaaggctctcaaaggatcatatcat

SEQ ID NO: 13086 - DNA, 40 bp, Homo sapiens
tgatatgatcctttgagagcctttagccgccgcagaacag

SEQ ID NO: 13087 - DNA, 40 bp, Homo sapiens
ctgttctgcggcggctaaaggctctcaaaggatcatatca

SEQ ID NO: 13088 - DNA, 40 bp, Homo sapiens
gatatgatcctttgagagcctttagccgccgcagaacagc

SEQ ID NO: 13089 - DNA, 40 bp, Homo sapiens
gctgttctgcggcggctaaaggctctcaaaggatcatatc

SEQ ID NO: 13090 - DNA, 40 bp, Homo sapiens
atatgatcctttgagagcctttagccgccgcagaacagca

SEQ ID NO: 13091 - DNA, 40 bp, Homo sapiens
tgctgttctgcggcggctaaaggctctcaaaggatcatat

SEQ ID NO: 13092 - DNA, 40 bp, Homo sapiens
tatgatcctttgagagcctttagccgccgcagaacagcag

SEQ ID NO: 13093 - DNA, 40 bp, Homo sapiens
ctgctgttctgcggcggctaaaggctctcaaaggatcata

SEQ ID NO: 13094 - DNA, 40 bp, Homo sapiens
atgatcctttgagagcctttagccgccgcagaacagcagt

SEQ ID NO: 13095 - DNA, 40 bp, Homo sapiens
actgctgttctgcggcggctaaaggctctcaaaggatcat

SEQ ID NO: 13096 - DNA, 40 bp, Homo sapiens
tgatcctttgagagcctttagccgccgcagaacagcagtc

SEQ ID NO: 13097 - DNA, 40 bp, Homo sapiens
gactgctgttctgcggcggctaaaggctctcaaaggatca

SEQ ID NO: 13098 - DNA, 40 bp, Homo sapiens
gatcctttgagagcctttagccgccgcagaacagcagtct

SEQ ID NO: 13099 - DNA, 40 bp, Homo sapiens
agactgctgttctgcggcggctaaaggctctcaaaggatc

SEQ ID NO: 13100 - DNA, 40 bp, Homo sapiens
atcctttgagagcctttagccgccgcagaacagcagtctg

SEQ ID NO: 13101 - DNA, 40 bp, Homo sapiens
cagactgctgttctgcggcggctaaaggctctcaaaggat

SEQ ID NO: 13102 - DNA, 40 bp, Homo sapiens
tcctttgagagcctttagccgccgcagaacagcagtctgg

SEQ ID NO: 13103 - DNA, 40 bp, Homo sapiens
ccagactgctgttctgcggcggctaaaggctctcaaagga

SEQ ID NO: 13104 - DNA, 40 bp, Homo sapiens
cctttgagagcctttagccgccgcagaacagcagtctggc

SEQ ID NO: 13105 - DNA, 40 bp, Homo sapiens
gccagactgctgttctgcggcggctaaaggctctcaaagg

SEQ ID NO: 13106 - DNA, 40 bp, Homo sapiens
ctttgagagcctttagccgccgcagaacagcagtctggct

SEQ ID NO: 13107 - DNA, 40 bp, Homo sapiens
agccagactgctgttctgcggcggctaaaggctctcaaag

SEQ ID NO: 13108 - DNA, 40 bp, Homo sapiens
tttgagagcctttagccgccgcagaacagcagtctggcta

SEQ ID NO: 13109 - DNA, 40 bp, Homo sapiens
tagccagactgctgttctgcggcggctaaaggctctcaaa

SEQ ID NO: 13110 - DNA, 40 bp, Homo sapiens
ttgagagcctttagccgccgcagaacagcagtctggctat

SEQ ID NO: 13111 - DNA, 40 bp, Homo sapiens
atagccagactgctgttctgcggcggctaaaggctctcaa

SEQ ID NO: 13112 - DNA, 40 bp, Homo sapiens
tgagagcctttagccgccgcagaacagcagtctggctatt

SEQ ID NO: 13113 - DNA, 40 bp, Homo sapiens
aatagccagactgctgttctgcggcggctaaaggctctca

SEQ ID NO: 13114 - DNA, 40 bp, Homo sapiens
gagagcctttagccgccgcagaacagcagtctggctattt

SEQ ID NO: 13115 - DNA, 40 bp, Homo sapiens
aaatagccagactgctgttctgcggcggctaaaggctctc

SEQ ID NO: 13116 - DNA, 40 bp, Homo sapiens
agagcctttagccgccgcagaacagcagtctggctattta

SEQ ID NO: 13117 - DNA, 40 bp, Homo sapiens
taaatagccagactgctgttctgcggcggctaaaggctct

SEQ ID NO: 13118 - DNA, 40 bp, Homo sapiens
gagcctttagccgccgcagaacagcagtctggctatttag

SEQ ID NO: 13119 - DNA, 40 bp, Homo sapiens
ctaaatagccagactgctgttctgcggcggctaaaggctc

SEQ ID NO: 13120 - DNA, 40 bp, Homo sapiens
agcctttagccgccgcagaacagcagtctggctatttaga

SEQ ID NO: 13121 - DNA, 40 bp, Homo sapiens
tctaaatagccagactgctgttctgcggcggctaaaggct

SEQ ID NO: 13122 - DNA, 40 bp, Homo sapiens
gcctttagccgccgcagaacagcagtctggctatttagat

SEQ ID NO: 13123 - DNA, 40 bp, Homo sapiens
atctaaatagccagactgctgttctgcggcggctaaaggc

SEQ ID NO: 13124 - DNA, 40 bp, Homo sapiens
cctttagccgccgcagaacagcagtctggctatttagata

SEQ ID NO: 13125 - DNA, 40 bp, Homo sapiens
tatctaaatagccagactgctgttctgcggcggctaaagg

SEQ ID NO: 13126 - DNA, 40 bp, Homo sapiens
ctttagccgccgcagaacagcagtctggctatttagatag

SEQ ID NO: 13127 - DNA, 40 bp, Homo sapiens
ctatctaaatagccagactgctgttctgcggcggctaaag

SEQ ID NO: 13128 - DNA, 40 bp, Homo sapiens
tttagccgccgcagaacagcagtctggctatttagataga

SEQ ID NO: 13129 - DNA, 40 bp, Homo sapiens
tctatctaaatagccagactgctgttctgcggcggctaaa

SEQ ID NO: 13130 - DNA, 40 bp, Homo sapiens
ttagccgccgcagaacagcagtctggctatttagatagaa

SEQ ID NO: 13131 - DNA, 40 bp, Homo sapiens
ttctatctaaatagccagactgctgttctgcggcggctaa

SEQ ID NO: 13132 - DNA, 40 bp, Homo sapiens
tagccgccgcagaacagcagtctggctatttagatagaac

SEQ ID NO: 13133 - DNA, 40 bp, Homo sapiens
gttctatctaaatagccagactgctgttctgcggcggcta

SEQ ID NO: 13134 - DNA, 40 bp, Homo sapiens
agccgccgcagaacagcagtctggctatttagatagaaca

SEQ ID NO: 13135 - DNA, 40 bp, Homo sapiens
tgttctatctaaatagccagactgctgttctgcggcggct

SEQ ID NO: 13136 - DNA, 40 bp, Homo sapiens
gccgccgcagaacagcagtctggctatttagatagaacaa

SEQ ID NO: 13137 - DNA, 40 bp, Homo sapiens
ttgttctatctaaatagccagactgctgttctgcggcggc

SEQ ID NO: 13138 - DNA, 40 bp, Homo sapiens
ccgccgcagaacagcagtctggctatttagatagaacaac

SEQ ID NO: 13139 - DNA, 40 bp, Homo sapiens
gttgttctatctaaatagccagactgctgttctgcggcgg

SEQ ID NO: 13140 - DNA, 40 bp, Homo sapiens
cgccgcagaacagcagtctggctatttagatagaacaact

SEQ ID NO: 13141 - DNA, 40 bp, Homo sapiens
agttgttctatctaaatagccagactgctgttctgcggcg

SEQ ID NO: 13142 - DNA, 40 bp, Homo sapiens
gccgcagaacagcagtctggctatttagatagaacaactt

SEQ ID NO: 13143 - DNA, 40 bp, Homo sapiens
aagttgttctatctaaatagccagactgctgttctgcggc

SEQ ID NO: 13144 - DNA, 40 bp, Homo sapiens
ccgcagaacagcagtctggctatttagatagaacaacttg

SEQ ID NO: 13145 - DNA, 40 bp, Homo sapiens
caagttgttctatctaaatagccagactgctgttctgcgg

SEQ ID NO: 13146 - DNA, 40 bp, Homo sapiens
cgcagaacagcagtctggctatttagatagaacaacttga

SEQ ID NO: 13147 - DNA, 40 bp, Homo sapiens
tcaagttgttctatctaaatagccagactgctgttctgcg

SEQ ID NO: 13148 - DNA, 40 bp, Homo sapiens
gcagaacagcagtctggctatttagatagaacaacttgat

SEQ ID NO: 13149 - DNA, 40 bp, Homo sapiens
atcaagttgttctatctaaatagccagactgctgttctgc

SEQ ID NO: 13150 - DNA, 40 bp, Homo sapiens
cagaacagcagtctggctatttagatagaacaacttgatt

SEQ ID NO: 13151 - DNA, 40 bp, Homo sapiens
aatcaagttgttctatctaaatagccagactgctgttctg

SEQ ID NO: 13152 - DNA, 40 bp, Homo sapiens
agaacagcagtctggctatttagatagaacaacttgattt

SEQ ID NO: 13153 - DNA, 40 bp, Homo sapiens
aaatcaagttgttctatctaaatagccagactgctgttct

SEQ ID NO: 13154 - DNA, 40 bp, Homo sapiens
gaacagcagtctggctatttagatagaacaacttgatttt

SEQ ID NO: 13155 - DNA, 40 bp, Homo sapiens
aaaatcaagttgttctatctaaatagccagactgctgttc

SEQ ID NO: 13156 - DNA, 40 bp, Homo sapiens
aacagcagtctggctatttagatagaacaacttgatttta

SEQ ID NO: 13157 - DNA, 40 bp, Homo sapiens
taaaatcaagttgttctatctaaatagccagactgctgtt

SEQ ID NO: 13158 - DNA, 40 bp, Homo sapiens
acagcagtctggctatttagatagaacaacttgattttaa

SEQ ID NO: 13159 - DNA, 40 bp, Homo sapiens
ttaaaatcaagttgttctatctaaatagccagactgctgt

SEQ ID NO: 13160 - DNA, 40 bp, Homo sapiens
cagcagtctggctatttagatagaacaacttgattttaag

SEQ ID NO: 13161 - DNA, 40 bp, Homo sapiens
cttaaaatcaagttgttctatctaaatagccagactgctg

SEQ ID NO: 13162 - DNA, 40 bp, Homo sapiens
agcagtctggctatttagatagaacaacttgattttaaga

SEQ ID NO: 13163 - DNA, 40 bp, Homo sapiens
tcttaaaatcaagttgttctatctaaatagccagactgct

SEQ ID NO: 13164 - DNA, 40 bp, Homo sapiens
gcagtctggctatttagatagaacaacttgattttaagat

SEQ ID NO: 13165 - DNA, 40 bp, Homo sapiens
atcttaaaatcaagttgttctatctaaatagccagactgc

SEQ ID NO: 13166 - DNA, 40 bp, Homo sapiens
cagtctggctatttagatagaacaacttgattttaagata

SEQ ID NO: 13167 - DNA, 40 bp, Homo sapiens
tatcttaaaatcaagttgttctatctaaatagccagactg

SEQ ID NO: 13168 - DNA, 40 bp, Homo sapiens
agtctggctatttagatagaacaacttgattttaagataa

SEQ ID NO: 13169 - DNA, 40 bp, Homo sapiens
ttatcttaaaatcaagttgttctatctaaatagccagact

SEQ ID NO: 13170 - DNA, 40 bp, Homo sapiens
gtctggctatttagatagaacaacttgattttaagataaa

SEQ ID NO: 13171 - DNA, 40 bp, Homo sapiens
tttatcttaaaatcaagttgttctatctaaatagccagac

SEQ ID NO: 13172 - DNA, 40 bp, Homo sapiens
tctggctatttagatagaacaacttgattttaagataaaa

SEQ ID NO: 13173 - DNA, 40 bp, Homo sapiens
ttttatcttaaaatcaagttgttctatctaaatagccaga

SEQ ID NO: 13174 - DNA, 40 bp, Homo sapiens
ctggctatttagatagaacaacttgattttaagataaaag

SEQ ID NO: 13175 - DNA, 40 bp, Homo sapiens
cttttatcttaaaatcaagttgttctatctaaatagccag

SEQ ID NO: 13176 - DNA, 40 bp, Homo sapiens
tggctatttagatagaacaacttgattttaagataaaaga

SEQ ID NO: 13177 - DNA, 40 bp, Homo sapiens
tcttttatcttaaaatcaagttgttctatctaaatagcca

SEQ ID NO: 13178 - DNA, 40 bp, Homo sapiens
ggctatttagatagaacaacttgattttaagataaaagaa

SEQ ID NO: 13179 - DNA, 40 bp, Homo sapiens
ttcttttatcttaaaatcaagttgttctatctaaatagcc

SEQ ID NO: 13180 - DNA, 40 bp, Homo sapiens
gctatttagatagaacaacttgattttaagataaaagaac

SEQ ID NO: 13181 - DNA, 40 bp, Homo sapiens
gttcttttatcttaaaatcaagttgttctatctaaatagc

SEQ ID NO: 13182 - DNA, 40 bp, Homo sapiens
ctatttagatagaacaacttgattttaagataaaagaact

SEQ ID NO: 13183 - DNA, 40 bp, Homo sapiens
agttcttttatcttaaaatcaagttgttctatctaaatag

SEQ ID NO: 13184 - DNA, 40 bp, Homo sapiens
tatttagatagaacaacttgattttaagataaaagaactg

SEQ ID NO: 13185 - DNA, 40 bp, Homo sapiens
cagttcttttatcttaaaatcaagttgttctatctaaata

SEQ ID NO: 13186 - DNA, 40 bp, Homo sapiens
atttagatagaacaacttgattttaagataaaagaactgt

SEQ ID NO: 13187 - DNA, 40 bp, Homo sapiens
acagttcttttatcttaaaatcaagttgttctatctaaat

SEQ ID NO: 13188 - DNA, 40 bp, Homo sapiens
tttagatagaacaacttgattttaagataaaagaactgtc

SEQ ID NO: 13189 - DNA, 40 bp, Homo sapiens
gacagttcttttatcttaaaatcaagttgttctatctaaa

SEQ ID NO: 13190 - DNA, 40 bp, Homo sapiens
ttagatagaacaacttgattttaagataaaagaactgtct

SEQ ID NO: 13191 - DNA, 40 bp, Homo sapiens
agacagttcttttatcttaaaatcaagttgttctatctaa

SEQ ID NO: 13192 - DNA, 40 bp, Homo sapiens
tagatagaacaacttgattttaagataaaagaactgtcta

SEQ ID NO: 13193 - DNA, 40 bp, Homo sapiens
tagacagttcttttatcttaaaatcaagttgttctatcta

SEQ ID NO: 13194 - DNA, 40 bp, Homo sapiens
agatagaacaacttgattttaagataaaagaactgtctat

SEQ ID NO: 13195 - DNA, 40 bp, Homo sapiens
atagacagttcttttatcttaaaatcaagttgttctatct

SEQ ID NO: 13196 - DNA, 40 bp, Homo sapiens
gatagaacaacttgattttaagataaaagaactgtctatg

SEQ ID NO: 13197 - DNA, 40 bp, Homo sapiens
catagacagttcttttatcttaaaatcaagttgttctatc

SEQ ID NO: 13198 - DNA, 40 bp, Homo sapiens
atagaacaacttgattttaagataaaagaactgtctatgt

SEQ ID NO: 13199 - DNA, 40 bp, Homo sapiens
acatagacagttcttttatcttaaaatcaagttgttctat

SEQ ID NO: 13200 - DNA, 40 bp, Homo sapiens
tagaacaacttgattttaagataaaagaactgtctatgta

SEQ ID NO: 13201 - DNA, 40 bp, Homo sapiens
tacatagacagttcttttatcttaaaatcaagttgttcta

SEQ ID NO: 13202 - DNA, 40 bp, Homo sapiens
agaacaacttgattttaagataaaagaactgtctatgtag

SEQ ID NO: 13203 - DNA, 40 bp, Homo sapiens
ctacatagacagttcttttatcttaaaatcaagttgttct

SEQ ID NO: 13204 - DNA, 40 bp, Homo sapiens
gaacaacttgattttaagataaaagaactgtctatgtagc

SEQ ID NO: 13205 - DNA, 40 bp, Homo sapiens
gctacatagacagttcttttatcttaaaatcaagttgttc

SEQ ID NO: 13206 - DNA, 40 bp, Homo sapiens
aacaacttgattttaagataaaagaactgtctatgtagca

SEQ ID NO: 13207 - DNA, 40 bp, Homo sapiens
tgctacatagacagttcttttatcttaaaatcaagttgtt

SEQ ID NO: 13208 - DNA, 40 bp, Homo sapiens
acaacttgattttaagataaaagaactgtctatgtagcat

SEQ ID NO: 13209 - DNA, 40 bp, Homo sapiens
atgctacatagacagttcttttatcttaaaatcaagttgt

SEQ ID NO: 13210 - DNA, 40 bp, Homo sapiens
caacttgattttaagataaaagaactgtctatgtagcatt

SEQ ID NO: 13211 - DNA, 40 bp, Homo sapiens
aatgctacatagacagttcttttatcttaaaatcaagttg

SEQ ID NO: 13212 - DNA, 40 bp, Homo sapiens
aacttgattttaagataaaagaactgtctatgtagcattt

SEQ ID NO: 13213 - DNA, 40 bp, Homo sapiens
aaatgctacatagacagttcttttatcttaaaatcaagtt

SEQ ID NO: 13214 - DNA, 40 bp, Homo sapiens
acttgattttaagataaaagaactgtctatgtagcattta

SEQ ID NO: 13215 - DNA, 40 bp, Homo sapiens
taaatgctacatagacagttcttttatcttaaaatcaagt

SEQ ID NO: 13216 - DNA, 40 bp, Homo sapiens
cttgattttaagataaaagaactgtctatgtagcatttat

SEQ ID NO: 13217 - DNA, 40 bp, Homo sapiens
ataaatgctacatagacagttcttttatcttaaaatcaag

SEQ ID NO: 13218 - DNA, 40 bp, Homo sapiens
ttgattttaagataaaagaactgtctatgtagcatttatg

SEQ ID NO: 13219 - DNA, 40 bp, Homo sapiens
cataaatgctacatagacagttcttttatcttaaaatcaa

SEQ ID NO: 13220 - DNA, 40 bp, Homo sapiens
tgattttaagataaaagaactgtctatgtagcatttatgc

SEQ ID NO: 13221 - DNA, 40 bp, Homo sapiens
gcataaatgctacatagacagttcttttatcttaaaatca

SEQ ID NO: 13222 - DNA, 40 bp, Homo sapiens
gattttaagataaaagaactgtctatgtagcatttatgca

SEQ ID NO: 13223 - DNA, 40 bp, Homo sapiens
tgcataaatgctacatagacagttcttttatcttaaaatc

SEQ ID NO: 13224 - DNA, 40 bp, Homo sapiens
attttaagataaaagaactgtctatgtagcatttatgcat

SEQ ID NO: 13225 - DNA, 40 bp, Homo sapiens
atgcataaatgctacatagacagttcttttatcttaaaat

SEQ ID NO: 13226 - DNA, 40 bp, Homo sapiens
ttttaagataaaagaactgtctatgtagcatttatgcatt

SEQ ID NO: 13227 - DNA, 40 bp, Homo sapiens
aatgcataaatgctacatagacagttcttttatcttaaaa

SEQ ID NO: 13228 - DNA, 40 bp, Homo sapiens
tttaagataaaagaactgtctatgtagcatttatgcattt

SEQ ID NO: 13229 - DNA, 40 bp, Homo sapiens
aaatgcataaatgctacatagacagttcttttatcttaaa

SEQ ID NO: 13230 - DNA, 40 bp, Homo sapiens
ttaagataaaagaactgtctatgtagcatttatgcatttt

SEQ ID NO: 13231 - DNA, 40 bp, Homo sapiens
aaaatgcataaatgctacatagacagttcttttatcttaa

SEQ ID NO: 13232 - DNA, 40 bp, Homo sapiens
taagataaaagaactgtctatgtagcatttatgcattttt

SEQ ID NO: 13233 - DNA, 40 bp, Homo sapiens
aaaaatgcataaatgctacatagacagttcttttatctta

SEQ ID NO: 13234 - DNA, 40 bp, Homo sapiens
aagataaaagaactgtctatgtagcatttatgcatttttc

SEQ ID NO: 13235 - DNA, 40 bp, Homo sapiens
gaaaaatgcataaatgctacatagacagttcttttatctt

SEQ ID NO: 13236 - DNA, 40 bp, Homo sapiens
agataaaagaactgtctatgtagcatttatgcatttttct

SEQ ID NO: 13237 - DNA, 40 bp, Homo sapiens
agaaaaatgcataaatgctacatagacagttcttttatct

SEQ ID NO: 13238 - DNA, 40 bp, Homo sapiens
gataaaagaactgtctatgtagcatttatgcatttttctt

SEQ ID NO: 13239 - DNA, 40 bp, Homo sapiens
aagaaaaatgcataaatgctacatagacagttcttttatc

SEQ ID NO: 13240 - DNA, 40 bp, Homo sapiens
ataaaagaactgtctatgtagcatttatgcatttttctta

SEQ ID NO: 13241 - DNA, 40 bp, Homo sapiens
taagaaaaatgcataaatgctacatagacagttcttttat

SEQ ID NO: 13242 - DNA, 40 bp, Homo sapiens
taaaagaactgtctatgtagcatttatgcatttttcttaa

SEQ ID NO: 13243 - DNA, 40 bp, Homo sapiens
ttaagaaaaatgcataaatgctacatagacagttctttta

SEQ ID NO: 13244 - DNA, 40 bp, Homo sapiens
aaaagaactgtctatgtagcatttatgcatttttcttaag

SEQ ID NO: 13245 - DNA, 40 bp, Homo sapiens
cttaagaaaaatgcataaatgctacatagacagttctttt

SEQ ID NO: 13246 - DNA, 40 bp, Homo sapiens
aaagaactgtctatgtagcatttatgcatttttcttaagc

SEQ ID NO: 13247 - DNA, 40 bp, Homo sapiens
gcttaagaaaaatgcataaatgctacatagacagttcttt

SEQ ID NO: 13248 - DNA, 40 bp, Homo sapiens
aagaactgtctatgtagcatttatgcatttttcttaagcg

SEQ ID NO: 13249 - DNA, 40 bp, Homo sapiens
cgcttaagaaaaatgcataaatgctacatagacagttctt

SEQ ID NO: 13250 - DNA, 40 bp, Homo sapiens
agaactgtctatgtagcatttatgcatttttcttaagcgt

SEQ ID NO: 13251 - DNA, 40 bp, Homo sapiens
acgcttaagaaaaatgcataaatgctacatagacagttct

SEQ ID NO: 13252 - DNA, 40 bp, Homo sapiens
gaactgtctatgtagcatttatgcatttttcttaagcgtc

SEQ ID NO: 13253 - DNA, 40 bp, Homo sapiens
gacgcttaagaaaaatgcataaatgctacatagacagttc

SEQ ID NO: 13254 - DNA, 40 bp, Homo sapiens
aactgtctatgtagcatttatgcatttttcttaagcgtcg

SEQ ID NO: 13255 - DNA, 40 bp, Homo sapiens
cgacgcttaagaaaaatgcataaatgctacatagacagtt

SEQ ID NO: 13256 - DNA, 40 bp, Homo sapiens
actgtctatgtagcatttatgcatttttcttaagcgtcga

SEQ ID NO: 13257 - DNA, 40 bp, Homo sapiens
tcgacgcttaagaaaaatgcataaatgctacatagacagt

SEQ ID NO: 13258 - DNA, 40 bp, Homo sapiens
ctgtctatgtagcatttatgcatttttcttaagcgtcgat

SEQ ID NO: 13259 - DNA, 40 bp, Homo sapiens
atcgacgcttaagaaaaatgcataaatgctacatagacag

SEQ ID NO: 13260 - DNA, 40 bp, Homo sapiens
tgtctatgtagcatttatgcatttttcttaagcgtcgatg

SEQ ID NO: 13261 - DNA, 40 bp, Homo sapiens
catcgacgcttaagaaaaatgcataaatgctacatagaca

SEQ ID NO: 13262 - DNA, 40 bp, Homo sapiens
gtctatgtagcatttatgcatttttcttaagcgtcgatgg

SEQ ID NO: 13263 - DNA, 40 bp, Homo sapiens
ccatcgacgcttaagaaaaatgcataaatgctacatagac

SEQ ID NO: 13264 - DNA, 40 bp, Homo sapiens
tctatgtagcatttatgcatttttcttaagcgtcgatgga

SEQ ID NO: 13265 - DNA, 40 bp, Homo sapiens
tccatcgacgcttaagaaaaatgcataaatgctacataga

SEQ ID NO: 13266 - DNA, 40 bp, Homo sapiens
ctatgtagcatttatgcatttttcttaagcgtcgatggag

SEQ ID NO: 13267 - DNA, 40 bp, Homo sapiens
ctccatcgacgcttaagaaaaatgcataaatgctacatag

SEQ ID NO: 13268 - DNA, 40 bp, Homo sapiens
tatgtagcatttatgcatttttcttaagcgtcgatggagg

SEQ ID NO: 13269 - DNA, 40 bp, Homo sapiens
cctccatcgacgcttaagaaaaatgcataaatgctacata

SEQ ID NO: 13270 - DNA, 40 bp, Homo sapiens
atgtagcatttatgcatttttcttaagcgtcgatggagga

SEQ ID NO: 13271 - DNA, 40 bp, Homo sapiens
tcctccatcgacgcttaagaaaaatgcataaatgctacat

SEQ ID NO: 13272 - DNA, 40 bp, Homo sapiens
tgtagcatttatgcatttttcttaagcgtcgatggaggag

SEQ ID NO: 13273 - DNA, 40 bp, Homo sapiens
ctcctccatcgacgcttaagaaaaatgcataaatgctaca

SEQ ID NO: 13274 - DNA, 40 bp, Homo sapiens
gtagcatttatgcatttttcttaagcgtcgatggaggagt

SEQ ID NO: 13275 - DNA, 40 bp, Homo sapiens
actcctccatcgacgcttaagaaaaatgcataaatgctac

SEQ ID NO: 13276 - DNA, 40 bp, Homo sapiens
tagcatttatgcatttttcttaagcgtcgatggaggagtt

SEQ ID NO: 13277 - DNA, 40 bp, Homo sapiens
aactcctccatcgacgcttaagaaaaatgcataaatgcta

SEQ ID NO: 13278 - DNA, 40 bp, Homo sapiens
agcatttatgcatttttcttaagcgtcgatggaggagttt

SEQ ID NO: 13279 - DNA, 40 bp, Homo sapiens
aaactcctccatcgacgcttaagaaaaatgcataaatgct

SEQ ID NO: 13280 - DNA, 40 bp, Homo sapiens
gcatttatgcatttttcttaagcgtcgatggaggagtttg

SEQ ID NO: 13281 - DNA, 40 bp, Homo sapiens
caaactcctccatcgacgcttaagaaaaatgcataaatgc

SEQ ID NO: 13282 - DNA, 40 bp, Homo sapiens
catttatgcatttttcttaagcgtcgatggaggagtttgt

SEQ ID NO: 13283 - DNA, 40 bp, Homo sapiens
acaaactcctccatcgacgcttaagaaaaatgcataaatg

SEQ ID NO: 13284 - DNA, 40 bp, Homo sapiens
atttatgcatttttcttaagcgtcgatggaggagtttgta

SEQ ID NO: 13285 - DNA, 40 bp, Homo sapiens
tacaaactcctccatcgacgcttaagaaaaatgcataaat

SEQ ID NO: 13286 - DNA, 40 bp, Homo sapiens
tttatgcatttttcttaagcgtcgatggaggagtttgtaa

SEQ ID NO: 13287 - DNA, 40 bp, Homo sapiens
ttacaaactcctccatcgacgcttaagaaaaatgcataaa

SEQ ID NO: 13288 - DNA, 40 bp, Homo sapiens
ttatgcatttttcttaagcgtcgatggaggagtttgtaaa

SEQ ID NO: 13289 - DNA, 40 bp, Homo sapiens
tttacaaactcctccatcgacgcttaagaaaaatgcataa

SEQ ID NO: 13290 - DNA, 40 bp, Homo sapiens
tatgcatttttcttaagcgtcgatggaggagtttgtaaat

SEQ ID NO: 13291 - DNA, 40 bp, Homo sapiens
atttacaaactcctccatcgacgcttaagaaaaatgcata

SEQ ID NO: 13292 - DNA, 40 bp, Homo sapiens
atgcatttttcttaagcgtcgatggaggagtttgtaaatg

SEQ ID NO: 13293 - DNA, 40 bp, Homo sapiens
catttacaaactcctccatcgacgcttaagaaaaatgcat

SEQ ID NO: 13294 - DNA, 40 bp, Homo sapiens
tgcatttttcttaagcgtcgatggaggagtttgtaaatga

SEQ ID NO: 13295 - DNA, 40 bp, Homo sapiens
tcatttacaaactcctccatcgacgcttaagaaaaatgca

SEQ ID NO: 13296 - DNA, 40 bp, Homo sapiens
gcatttttcttaagcgtcgatggaggagtttgtaaatgaa

SEQ ID NO: 13297 - DNA, 40 bp, Homo sapiens
ttcatttacaaactcctccatcgacgcttaagaaaaatgc

SEQ ID NO: 13298 - DNA, 40 bp, Homo sapiens
catttttcttaagcgtcgatggaggagtttgtaaatgaag

SEQ ID NO: 13299 - DNA, 40 bp, Homo sapiens
cttcatttacaaactcctccatcgacgcttaagaaaaatg

SEQ ID NO: 13300 - DNA, 40 bp, Homo sapiens
atttttcttaagcgtcgatggaggagtttgtaaatgaagt

SEQ ID NO: 13301 - DNA, 40 bp, Homo sapiens
acttcatttacaaactcctccatcgacgcttaagaaaaat

SEQ ID NO: 13302 - DNA, 40 bp, Homo sapiens
tttttcttaagcgtcgatggaggagtttgtaaatgaagta

SEQ ID NO: 13303 - DNA, 40 bp, Homo sapiens
tacttcatttacaaactcctccatcgacgcttaagaaaaa

SEQ ID NO: 13304 - DNA, 40 bp, Homo sapiens
ttttcttaagcgtcgatggaggagtttgtaaatgaagtac

SEQ ID NO: 13305 - DNA, 40 bp, Homo sapiens
gtacttcatttacaaactcctccatcgacgcttaagaaaa

SEQ ID NO: 13306 - DNA, 40 bp, Homo sapiens
tttcttaagcgtcgatggaggagtttgtaaatgaagtaca

SEQ ID NO: 13307 - DNA, 40 bp, Homo sapiens
tgtacttcatttacaaactcctccatcgacgcttaagaaa

SEQ ID NO: 13308 - DNA, 40 bp, Homo sapiens
ttcttaagcgtcgatggaggagtttgtaaatgaagtacag

SEQ ID NO: 13309 - DNA, 40 bp, Homo sapiens
ctgtacttcatttacaaactcctccatcgacgcttaagaa

SEQ ID NO: 13310 - DNA, 40 bp, Homo sapiens
tcttaagcgtcgatggaggagtttgtaaatgaagtacagt

SEQ ID NO: 13311 - DNA, 40 bp, Homo sapiens
actgtacttcatttacaaactcctccatcgacgcttaaga

SEQ ID NO: 13312 - DNA, 40 bp, Homo sapiens
cttaagcgtcgatggaggagtttgtaaatgaagtacagtt

SEQ ID NO: 13313 - DNA, 40 bp, Homo sapiens
aactgtacttcatttacaaactcctccatcgacgcttaag

SEQ ID NO: 13314 - DNA, 40 bp, Homo sapiens
ttaagcgtcgatggaggagtttgtaaatgaagtacagttc

SEQ ID NO: 13315 - DNA, 40 bp, Homo sapiens
gaactgtacttcatttacaaactcctccatcgacgcttaa

SEQ ID NO: 13316 - DNA, 40 bp, Homo sapiens
taagcgtcgatggaggagtttgtaaatgaagtacagttca

SEQ ID NO: 13317 - DNA, 40 bp, Homo sapiens
tgaactgtacttcatttacaaactcctccatcgacgctta

SEQ ID NO: 13318 - DNA, 40 bp, Homo sapiens
aagcgtcgatggaggagtttgtaaatgaagtacagttcat

SEQ ID NO: 13319 - DNA, 40 bp, Homo sapiens
atgaactgtacttcatttacaaactcctccatcgacgctt

SEQ ID NO: 13320 - DNA, 40 bp, Homo sapiens
agcgtcgatggaggagtttgtaaatgaagtacagttcatt

SEQ ID NO: 13321 - DNA, 40 bp, Homo sapiens
aatgaactgtacttcatttacaaactcctccatcgacgct

SEQ ID NO: 13322 - DNA, 40 bp, Homo sapiens
gcgtcgatggaggagtttgtaaatgaagtacagttcatta

SEQ ID NO: 13323 - DNA, 40 bp, Homo sapiens
taatgaactgtacttcatttacaaactcctccatcgacgc

SEQ ID NO: 13324 - DNA, 40 bp, Homo sapiens
cgtcgatggaggagtttgtaaatgaagtacagttcattac

SEQ ID NO: 13325 - DNA, 40 bp, Homo sapiens
gtaatgaactgtacttcatttacaaactcctccatcgacg

SEQ ID NO: 13326 - DNA, 40 bp, Homo sapiens
gtcgatggaggagtttgtaaatgaagtacagttcattacg

SEQ ID NO: 13327 - DNA, 40 bp, Homo sapiens
cgtaatgaactgtacttcatttacaaactcctccatcgac

SEQ ID NO: 13328 - DNA, 40 bp, Homo sapiens
tcgatggaggagtttgtaaatgaagtacagttcattacga

SEQ ID NO: 13329 - DNA, 40 bp, Homo sapiens
tcgtaatgaactgtacttcatttacaaactcctccatcga

SEQ ID NO: 13330 - DNA, 40 bp, Homo sapiens
cgatggaggagtttgtaaatgaagtacagttcattacgat

SEQ ID NO: 13331 - DNA, 40 bp, Homo sapiens
atcgtaatgaactgtacttcatttacaaactcctccatcg

SEQ ID NO: 13332 - DNA, 40 bp, Homo sapiens
gatggaggagtttgtaaatgaagtacagttcattacgata

SEQ ID NO: 13333 - DNA, 40 bp, Homo sapiens
tatcgtaatgaactgtacttcatttacaaactcctccatc

SEQ ID NO: 13334 - DNA, 40 bp, Homo sapiens
atggaggagtttgtaaatgaagtacagttcattacgatac

SEQ ID NO: 13335 - DNA, 40 bp, Homo sapiens
gtatcgtaatgaactgtacttcatttacaaactcctccat

SEQ ID NO: 13336 - DNA, 40 bp, Homo sapiens
tggaggagtttgtaaatgaagtacagttcattacgataca

SEQ ID NO: 13337 - DNA, 40 bp, Homo sapiens
tgtatcgtaatgaactgtacttcatttacaaactcctcca

SEQ ID NO: 13338 - DNA, 40 bp, Homo sapiens
ggaggagtttgtaaatgaagtacagttcattacgatacac

SEQ ID NO: 13339 - DNA, 40 bp, Homo sapiens
gtgtatcgtaatgaactgtacttcatttacaaactcctcc

SEQ ID NO: 13340 - DNA, 40 bp, Homo sapiens
gaggagtttgtaaatgaagtacagttcattacgatacacg

SEQ ID NO: 13341 - DNA, 40 bp, Homo sapiens
cgtgtatcgtaatgaactgtacttcatttacaaactcctc

SEQ ID NO: 13342 - DNA, 40 bp, Homo sapiens
aggagtttgtaaatgaagtacagttcattacgatacacgt

SEQ ID NO: 13343 - DNA, 40 bp, Homo sapiens
acgtgtatcgtaatgaactgtacttcatttacaaactcct

SEQ ID NO: 13344 - DNA, 40 bp, Homo sapiens
ggagtttgtaaatgaagtacagttcattacgatacacgtc

SEQ ID NO: 13345 - DNA, 40 bp, Homo sapiens
gacgtgtatcgtaatgaactgtacttcatttacaaactcc

SEQ ID NO: 13346 - DNA, 40 bp, Homo sapiens
gagtttgtaaatgaagtacagttcattacgatacacgtct

SEQ ID NO: 13347 - DNA, 40 bp, Homo sapiens
agacgtgtatcgtaatgaactgtacttcatttacaaactc

SEQ ID NO: 13348 - DNA, 40 bp, Homo sapiens
agtttgtaaatgaagtacagttcattacgatacacgtctg

SEQ ID NO: 13349 - DNA, 40 bp, Homo sapiens
cagacgtgtatcgtaatgaactgtacttcatttacaaact

SEQ ID NO: 13350 - DNA, 40 bp, Homo sapiens
gtttgtaaatgaagtacagttcattacgatacacgtctgc

SEQ ID NO: 13351 - DNA, 40 bp, Homo sapiens
gcagacgtgtatcgtaatgaactgtacttcatttacaaac

SEQ ID NO: 13352 - DNA, 40 bp, Homo sapiens
tttgtaaatgaagtacagttcattacgatacacgtctgca

SEQ ID NO: 13353 - DNA, 40 bp, Homo sapiens
tgcagacgtgtatcgtaatgaactgtacttcatttacaaa

SEQ ID NO: 13354 - DNA, 40 bp, Homo sapiens
ttgtaaatgaagtacagttcattacgatacacgtctgcag

SEQ ID NO: 13355 - DNA, 40 bp, Homo sapiens
ctgcagacgtgtatcgtaatgaactgtacttcatttacaa

SEQ ID NO: 13356 - DNA, 40 bp, Homo sapiens
tgtaaatgaagtacagttcattacgatacacgtctgcagt

SEQ ID NO: 13357 - DNA, 40 bp, Homo sapiens
actgcagacgtgtatcgtaatgaactgtacttcatttaca

SEQ ID NO: 13358 - DNA, 40 bp, Homo sapiens
gtaaatgaagtacagttcattacgatacacgtctgcagtc

SEQ ID NO: 13359 - DNA, 40 bp, Homo sapiens
gactgcagacgtgtatcgtaatgaactgtacttcatttac

SEQ ID NO: 13360 - DNA, 40 bp, Homo sapiens
taaatgaagtacagttcattacgatacacgtctgcagtca

SEQ ID NO: 13361 - DNA, 40 bp, Homo sapiens
tgactgcagacgtgtatcgtaatgaactgtacttcattta

SEQ ID NO: 13362 - DNA, 40 bp, Homo sapiens
aaatgaagtacagttcattacgatacacgtctgcagtcaa

SEQ ID NO: 13363 - DNA, 40 bp, Homo sapiens
ttgactgcagacgtgtatcgtaatgaactgtacttcattt

SEQ ID NO: 13364 - DNA, 40 bp, Homo sapiens
aatgaagtacagttcattacgatacacgtctgcagtcaac

SEQ ID NO: 13365 - DNA, 40 bp, Homo sapiens
gttgactgcagacgtgtatcgtaatgaactgtacttcatt

SEQ ID NO: 13366 - DNA, 40 bp, Homo sapiens
atgaagtacagttcattacgatacacgtctgcagtcaact

SEQ ID NO: 13367 - DNA, 40 bp, Homo sapiens
agttgactgcagacgtgtatcgtaatgaactgtacttcat

SEQ ID NO: 13368 - DNA, 40 bp, Homo sapiens
tgaagtacagttcattacgatacacgtctgcagtcaactg

SEQ ID NO: 13369 - DNA, 40 bp, Homo sapiens
cagttgactgcagacgtgtatcgtaatgaactgtacttca

SEQ ID NO: 13370 - DNA, 40 bp, Homo sapiens
gaagtacagttcattacgatacacgtctgcagtcaactgg

SEQ ID NO: 13371 - DNA, 40 bp, Homo sapiens
ccagttgactgcagacgtgtatcgtaatgaactgtacttc

SEQ ID NO: 13372 - DNA, 40 bp, Homo sapiens
aagtacagttcattacgatacacgtctgcagtcaactgga

SEQ ID NO: 13373 - DNA, 40 bp, Homo sapiens
tccagttgactgcagacgtgtatcgtaatgaactgtactt

SEQ ID NO: 13374 - DNA, 40 bp, Homo sapiens
agtacagttcattacgatacacgtctgcagtcaactggaa

SEQ ID NO: 13375 - DNA, 40 bp, Homo sapiens
ttccagttgactgcagacgtgtatcgtaatgaactgtact

SEQ ID NO: 13376 - DNA, 40 bp, Homo sapiens
gtacagttcattacgatacacgtctgcagtcaactggaat

SEQ ID NO: 13377 - DNA, 40 bp, Homo sapiens
attccagttgactgcagacgtgtatcgtaatgaactgtac

SEQ ID NO: 13378 - DNA, 40 bp, Homo sapiens
tacagttcattacgatacacgtctgcagtcaactggaatt

SEQ ID NO: 13379 - DNA, 40 bp, Homo sapiens
aattccagttgactgcagacgtgtatcgtaatgaactgta

SEQ ID NO: 13380 - DNA, 40 bp, Homo sapiens
acagttcattacgatacacgtctgcagtcaactggaattt

SEQ ID NO: 13381 - DNA, 40 bp, Homo sapiens
aaattccagttgactgcagacgtgtatcgtaatgaactgt

SEQ ID NO: 13382 - DNA, 40 bp, Homo sapiens
cagttcattacgatacacgtctgcagtcaactggaatttt

SEQ ID NO: 13383 - DNA, 40 bp, Homo sapiens
aaaattccagttgactgcagacgtgtatcgtaatgaactg

SEQ ID NO: 13384 - DNA, 40 bp, Homo sapiens
agttcattacgatacacgtctgcagtcaactggaattttc

SEQ ID NO: 13385 - DNA, 40 bp, Homo sapiens
gaaaattccagttgactgcagacgtgtatcgtaatgaact

SEQ ID NO: 13386 - DNA, 40 bp, Homo sapiens
gttcattacgatacacgtctgcagtcaactggaattttca

SEQ ID NO: 13387 - DNA, 40 bp, Homo sapiens
tgaaaattccagttgactgcagacgtgtatcgtaatgaac

SEQ ID NO: 13388 - DNA, 40 bp, Homo sapiens
ttcattacgatacacgtctgcagtcaactggaattttcat

SEQ ID NO: 13389 - DNA, 40 bp, Homo sapiens
atgaaaattccagttgactgcagacgtgtatcgtaatgaa

SEQ ID NO: 13390 - DNA, 40 bp, Homo sapiens
tcattacgatacacgtctgcagtcaactggaattttcatg

SEQ ID NO: 13391 - DNA, 40 bp, Homo sapiens
catgaaaattccagttgactgcagacgtgtatcgtaatga

SEQ ID NO: 13392 - DNA, 40 bp, Homo sapiens
cattacgatacacgtctgcagtcaactggaattttcatga

SEQ ID NO: 13393 - DNA, 40 bp, Homo sapiens
tcatgaaaattccagttgactgcagacgtgtatcgtaatg

SEQ ID NO: 13394 - DNA, 40 bp, Homo sapiens
attacgatacacgtctgcagtcaactggaattttcatgat

SEQ ID NO: 13395 - DNA, 40 bp, Homo sapiens
atcatgaaaattccagttgactgcagacgtgtatcgtaat

SEQ ID NO: 13396 - DNA, 40 bp, Homo sapiens
ttacgatacacgtctgcagtcaactggaattttcatgatt

SEQ ID NO: 13397 - DNA, 40 bp, Homo sapiens
aatcatgaaaattccagttgactgcagacgtgtatcgtaa

SEQ ID NO: 13398 - DNA, 40 bp, Homo sapiens
tacgatacacgtctgcagtcaactggaattttcatgattg

SEQ ID NO: 13399 - DNA, 40 bp, Homo sapiens
caatcatgaaaattccagttgactgcagacgtgtatcgta

SEQ ID NO: 13400 - DNA, 40 bp, Homo sapiens
acgatacacgtctgcagtcaactggaattttcatgattga

SEQ ID NO: 13401 - DNA, 40 bp, Homo sapiens
tcaatcatgaaaattccagttgactgcagacgtgtatcgt

SEQ ID NO: 13402 - DNA, 40 bp, Homo sapiens
cgatacacgtctgcagtcaactggaattttcatgattgaa

SEQ ID NO: 13403 - DNA, 40 bp, Homo sapiens
ttcaatcatgaaaattccagttgactgcagacgtgtatcg

SEQ ID NO: 13404 - DNA, 40 bp, Homo sapiens
gatacacgtctgcagtcaactggaattttcatgattgaat

SEQ ID NO: 13405 - DNA, 40 bp, Homo sapiens
attcaatcatgaaaattccagttgactgcagacgtgtatc

SEQ ID NO: 13406 - DNA, 40 bp, Homo sapiens
atacacgtctgcagtcaactggaattttcatgattgaatt

SEQ ID NO: 13407 - DNA, 40 bp, Homo sapiens
aattcaatcatgaaaattccagttgactgcagacgtgtat

SEQ ID NO: 13408 - DNA, 40 bp, Homo sapiens
tacacgtctgcagtcaactggaattttcatgattgaattt

SEQ ID NO: 13409 - DNA, 40 bp, Homo sapiens
aaattcaatcatgaaaattccagttgactgcagacgtgta

SEQ ID NO: 13410 - DNA, 40 bp, Homo sapiens
acacgtctgcagtcaactggaattttcatgattgaatttt

SEQ ID NO: 13411 - DNA, 40 bp, Homo sapiens
aaaattcaatcatgaaaattccagttgactgcagacgtgt

SEQ ID NO: 13412 - DNA, 40 bp, Homo sapiens
cacgtctgcagtcaactggaattttcatgattgaattttg

SEQ ID NO: 13413 - DNA, 40 bp, Homo sapiens
caaaattcaatcatgaaaattccagttgactgcagacgtg

SEQ ID NO: 13414 - DNA, 40 bp, Homo sapiens
acgtctgcagtcaactggaattttcatgattgaattttgt

SEQ ID NO: 13415 - DNA, 40 bp, Homo sapiens
acaaaattcaatcatgaaaattccagttgactgcagacgt

SEQ ID NO: 13416 - DNA, 40 bp, Homo sapiens
cgtctgcagtcaactggaattttcatgattgaattttgta

SEQ ID NO: 13417 - DNA, 40 bp, Homo sapiens
tacaaaattcaatcatgaaaattccagttgactgcagacg

SEQ ID NO: 13418 - DNA, 40 bp, Homo sapiens
gtctgcagtcaactggaattttcatgattgaattttgtaa

SEQ ID NO: 13419 - DNA, 40 bp, Homo sapiens
ttacaaaattcaatcatgaaaattccagttgactgcagac

SEQ ID NO: 13420 - DNA, 40 bp, Homo sapiens
tctgcagtcaactggaattttcatgattgaattttgtaag

SEQ ID NO: 13421 - DNA, 40 bp, Homo sapiens
cttacaaaattcaatcatgaaaattccagttgactgcaga

SEQ ID NO: 13422 - DNA, 40 bp, Homo sapiens
ctgcagtcaactggaattttcatgattgaattttgtaagg

SEQ ID NO: 13423 - DNA, 40 bp, Homo sapiens
ccttacaaaattcaatcatgaaaattccagttgactgcag

SEQ ID NO: 13424 - DNA, 40 bp, Homo sapiens
tgcagtcaactggaattttcatgattgaattttgtaaggt

SEQ ID NO: 13425 - DNA, 40 bp, Homo sapiens
accttacaaaattcaatcatgaaaattccagttgactgca

SEQ ID NO: 13426 - DNA, 40 bp, Homo sapiens
gcagtcaactggaattttcatgattgaattttgtaaggta

SEQ ID NO: 13427 - DNA, 40 bp, Homo sapiens
taccttacaaaattcaatcatgaaaattccagttgactgc

SEQ ID NO: 13428 - DNA, 40 bp, Homo sapiens
cagtcaactggaattttcatgattgaattttgtaaggtat

SEQ ID NO: 13429 - DNA, 40 bp, Homo sapiens
ataccttacaaaattcaatcatgaaaattccagttgactg

SEQ ID NO: 13430 - DNA, 40 bp, Homo sapiens
agtcaactggaattttcatgattgaattttgtaaggtatt

SEQ ID NO: 13431 - DNA, 40 bp, Homo sapiens
aataccttacaaaattcaatcatgaaaattccagttgact

SEQ ID NO: 13432 - DNA, 40 bp, Homo sapiens
gtcaactggaattttcatgattgaattttgtaaggtattt

SEQ ID NO: 13433 - DNA, 40 bp, Homo sapiens
aaataccttacaaaattcaatcatgaaaattccagttgac

SEQ ID NO: 13434 - DNA, 40 bp, Homo sapiens
tcaactggaattttcatgattgaattttgtaaggtatttt

SEQ ID NO: 13435 - DNA, 40 bp, Homo sapiens
aaaataccttacaaaattcaatcatgaaaattccagttga

SEQ ID NO: 13436 - DNA, 40 bp, Homo sapiens
caactggaattttcatgattgaattttgtaaggtattttg

SEQ ID NO: 13437 - DNA, 40 bp, Homo sapiens
caaaataccttacaaaattcaatcatgaaaattccagttg

SEQ ID NO: 13438 - DNA, 40 bp, Homo sapiens
aactggaattttcatgattgaattttgtaaggtattttga

SEQ ID NO: 13439 - DNA, 40 bp, Homo sapiens
tcaaaataccttacaaaattcaatcatgaaaattccagtt

SEQ ID NO: 13440 - DNA, 40 bp, Homo sapiens
actggaattttcatgattgaattttgtaaggtattttgaa

SEQ ID NO: 13441 - DNA, 40 bp, Homo sapiens
ttcaaaataccttacaaaattcaatcatgaaaattccagt

SEQ ID NO: 13442 - DNA, 40 bp, Homo sapiens
ctggaattttcatgattgaattttgtaaggtattttgaaa

SEQ ID NO: 13443 - DNA, 40 bp, Homo sapiens
tttcaaaataccttacaaaattcaatcatgaaaattccag

SEQ ID NO: 13444 - DNA, 40 bp, Homo sapiens
tggaattttcatgattgaattttgtaaggtattttgaaat

SEQ ID NO: 13445 - DNA, 40 bp, Homo sapiens
atttcaaaataccttacaaaattcaatcatgaaaattcca

SEQ ID NO: 13446 - DNA, 40 bp, Homo sapiens
ggaattttcatgattgaattttgtaaggtattttgaaata

SEQ ID NO: 13447 - DNA, 40 bp, Homo sapiens
tatttcaaaataccttacaaaattcaatcatgaaaattcc

SEQ ID NO: 13448 - DNA, 40 bp, Homo sapiens
gaattttcatgattgaattttgtaaggtattttgaaataa

SEQ ID NO: 13449 - DNA, 40 bp, Homo sapiens
ttatttcaaaataccttacaaaattcaatcatgaaaattc

SEQ ID NO: 13450 - DNA, 40 bp, Homo sapiens
aattttcatgattgaattttgtaaggtattttgaaataat

SEQ ID NO: 13451 - DNA, 40 bp, Homo sapiens
attatttcaaaataccttacaaaattcaatcatgaaaatt

SEQ ID NO: 13452 - DNA, 40 bp, Homo sapiens
attttcatgattgaattttgtaaggtattttgaaataatt

SEQ ID NO: 13453 - DNA, 40 bp, Homo sapiens
aattatttcaaaataccttacaaaattcaatcatgaaaat

SEQ ID NO: 13454 - DNA, 40 bp, Homo sapiens
ttttcatgattgaattttgtaaggtattttgaaataattt

SEQ ID NO: 13455 - DNA, 40 bp, Homo sapiens
aaattatttcaaaataccttacaaaattcaatcatgaaaa

SEQ ID NO: 13456 - DNA, 40 bp, Homo sapiens
tttcatgattgaattttgtaaggtattttgaaataatttt

SEQ ID NO: 13457 - DNA, 40 bp, Homo sapiens
aaaattatttcaaaataccttacaaaattcaatcatgaaa

SEQ ID NO: 13458 - DNA, 40 bp, Homo sapiens
ttcatgattgaattttgtaaggtattttgaaataattttt

SEQ ID NO: 13459 - DNA, 40 bp, Homo sapiens
aaaaattatttcaaaataccttacaaaattcaatcatgaa

SEQ ID NO: 13460 - DNA, 40 bp, Homo sapiens
tcatgattgaattttgtaaggtattttgaaataatttttc

SEQ ID NO: 13461 - DNA, 40 bp, Homo sapiens
gaaaaattatttcaaaataccttacaaaattcaatcatga

SEQ ID NO: 13462 - DNA, 40 bp, Homo sapiens
catgattgaattttgtaaggtattttgaaataatttttca

SEQ ID NO: 13463 - DNA, 40 bp, Homo sapiens
tgaaaaattatttcaaaataccttacaaaattcaatcatg

SEQ ID NO: 13464 - DNA, 40 bp, Homo sapiens
atgattgaattttgtaaggtattttgaaataatttttcat

SEQ ID NO: 13465 - DNA, 40 bp, Homo sapiens
atgaaaaattatttcaaaataccttacaaaattcaatcat

SEQ ID NO: 13466 - DNA, 40 bp, Homo sapiens
tgattgaattttgtaaggtattttgaaataatttttcata

SEQ ID NO: 13467 - DNA, 40 bp, Homo sapiens
tatgaaaaattatttcaaaataccttacaaaattcaatca

SEQ ID NO: 13468 - DNA, 40 bp, Homo sapiens
gattgaattttgtaaggtattttgaaataatttttcatat

SEQ ID NO: 13469 - DNA, 40 bp, Homo sapiens
atatgaaaaattatttcaaaataccttacaaaattcaatc

SEQ ID NO: 13470 - DNA, 40 bp, Homo sapiens
attgaattttgtaaggtattttgaaataatttttcatata

SEQ ID NO: 13471 - DNA, 40 bp, Homo sapiens
tatatgaaaaattatttcaaaataccttacaaaattcaat

SEQ ID NO: 13472 - DNA, 40 bp, Homo sapiens
ttgaattttgtaaggtattttgaaataatttttcatataa

SEQ ID NO: 13473 - DNA, 40 bp, Homo sapiens
ttatatgaaaaattatttcaaaataccttacaaaattcaa

SEQ ID NO: 13474 - DNA, 40 bp, Homo sapiens
tgaattttgtaaggtattttgaaataatttttcatataaa

SEQ ID NO: 13475 - DNA, 40 bp, Homo sapiens
tttatatgaaaaattatttcaaaataccttacaaaattca

SEQ ID NO: 13476 - DNA, 40 bp, Homo sapiens
gaattttgtaaggtattttgaaataatttttcatataaag

SEQ ID NO: 13477 - DNA, 40 bp, Homo sapiens
ctttatatgaaaaattatttcaaaataccttacaaaattc

SEQ ID NO: 13478 - DNA, 40 bp, Homo sapiens
aattttgtaaggtattttgaaataatttttcatataaagg

SEQ ID NO: 13479 - DNA, 40 bp, Homo sapiens
cctttatatgaaaaattatttcaaaataccttacaaaatt

SEQ ID NO: 13480 - DNA, 40 bp, Homo sapiens
attttgtaaggtattttgaaataatttttcatataaaggt

SEQ ID NO: 13481 - DNA, 40 bp, Homo sapiens
acctttatatgaaaaattatttcaaaataccttacaaaat

SEQ ID NO: 13482 - DNA, 40 bp, Homo sapiens
ttttgtaaggtattttgaaataatttttcatataaaggtg

SEQ ID NO: 13483 - DNA, 40 bp, Homo sapiens
cacctttatatgaaaaattatttcaaaataccttacaaaa

SEQ ID NO: 13484 - DNA, 40 bp, Homo sapiens
tttgtaaggtattttgaaataatttttcatataaaggtga

SEQ ID NO: 13485 - DNA, 40 bp, Homo sapiens
tcacctttatatgaaaaattatttcaaaataccttacaaa

SEQ ID NO: 13486 - DNA, 40 bp, Homo sapiens
ttgtaaggtattttgaaataatttttcatataaaggtgag

SEQ ID NO: 13487 - DNA, 40 bp, Homo sapiens
ctcacctttatatgaaaaattatttcaaaataccttacaa

SEQ ID NO: 13488 - DNA, 40 bp, Homo sapiens
tgtaaggtattttgaaataatttttcatataaaggtgagt

SEQ ID NO: 13489 - DNA, 40 bp, Homo sapiens
actcacctttatatgaaaaattatttcaaaataccttaca

SEQ ID NO: 13490 - DNA, 40 bp, Homo sapiens
gtaaggtattttgaaataatttttcatataaaggtgagtt

SEQ ID NO: 13491 - DNA, 40 bp, Homo sapiens
aactcacctttatatgaaaaattatttcaaaataccttac

SEQ ID NO: 13492 - DNA, 40 bp, Homo sapiens
taaggtattttgaaataatttttcatataaaggtgagttt

SEQ ID NO: 13493 - DNA, 40 bp, Homo sapiens
aaactcacctttatatgaaaaattatttcaaaatacctta

SEQ ID NO: 13494 - DNA, 40 bp, Homo sapiens
aaggtattttgaaataatttttcatataaaggtgagtttg

SEQ ID NO: 13495 - DNA, 40 bp, Homo sapiens
caaactcacctttatatgaaaaattatttcaaaatacctt

SEQ ID NO: 13496 - DNA, 40 bp, Homo sapiens
aggtattttgaaataatttttcatataaaggtgagtttgt

SEQ ID NO: 13497 - DNA, 40 bp, Homo sapiens
acaaactcacctttatatgaaaaattatttcaaaatacct

SEQ ID NO: 13498 - DNA, 40 bp, Homo sapiens
ggtattttgaaataatttttcatataaaggtgagtttgta

SEQ ID NO: 13499 - DNA, 40 bp, Homo sapiens
tacaaactcacctttatatgaaaaattatttcaaaatacc

SEQ ID NO: 13500 - DNA, 40 bp, Homo sapiens
gtattttgaaataatttttcatataaaggtgagtttgtat

SEQ ID NO: 13501 - DNA, 40 bp, Homo sapiens
atacaaactcacctttatatgaaaaattatttcaaaatac

SEQ ID NO: 13502 - DNA, 40 bp, Homo sapiens
tattttgaaataatttttcatataaaggtgagtttgtatt

SEQ ID NO: 13503 - DNA, 40 bp, Homo sapiens
aatacaaactcacctttatatgaaaaattatttcaaaata

SEQ ID NO: 13504 - DNA, 40 bp, Homo sapiens
attttgaaataatttttcatataaaggtgagtttgtatta

SEQ ID NO: 13505 - DNA, 40 bp, Homo sapiens
taatacaaactcacctttatatgaaaaattatttcaaaat

SEQ ID NO: 13506 - DNA, 40 bp, Homo sapiens
ttttgaaataatttttcatataaaggtgagtttgtattaa

SEQ ID NO: 13507 - DNA, 40 bp, Homo sapiens
ttaatacaaactcacctttatatgaaaaattatttcaaaa

SEQ ID NO: 13508 - DNA, 40 bp, Homo sapiens
tttgaaataatttttcatataaaggtgagtttgtattaaa

SEQ ID NO: 13509 - DNA, 40 bp, Homo sapiens
tttaatacaaactcacctttatatgaaaaattatttcaaa

SEQ ID NO: 13510 - DNA, 40 bp, Homo sapiens
ttgaaataatttttcatataaaggtgagtttgtattaaaa

SEQ ID NO: 13511 - DNA, 40 bp, Homo sapiens
ttttaatacaaactcacctttatatgaaaaattatttcaa

SEQ ID NO: 13512 - DNA, 40 bp, Homo sapiens
tgaaataatttttcatataaaggtgagtttgtattaaaag

SEQ ID NO: 13513 - DNA, 40 bp, Homo sapiens
cttttaatacaaactcacctttatatgaaaaattatttca

SEQ ID NO: 13514 - DNA, 40 bp, Homo sapiens
gaaataatttttcatataaaggtgagtttgtattaaaagg

SEQ ID NO: 13515 - DNA, 40 bp, Homo sapiens
ccttttaatacaaactcacctttatatgaaaaattatttc

SEQ ID NO: 13516 - DNA, 40 bp, Homo sapiens
aaataatttttcatataaaggtgagtttgtattaaaaggt

SEQ ID NO: 13517 - DNA, 40 bp, Homo sapiens
accttttaatacaaactcacctttatatgaaaaattattt

SEQ ID NO: 13518 - DNA, 40 bp, Homo sapiens
aataatttttcatataaaggtgagtttgtattaaaaggta

SEQ ID NO: 13519 - DNA, 40 bp, Homo sapiens
taccttttaatacaaactcacctttatatgaaaaattatt

SEQ ID NO: 13520 - DNA, 40 bp, Homo sapiens
ataatttttcatataaaggtgagtttgtattaaaaggtac

SEQ ID NO: 13521 - DNA, 40 bp, Homo sapiens
gtaccttttaatacaaactcacctttatatgaaaaattat

SEQ ID NO: 13522 - DNA, 40 bp, Homo sapiens
taatttttcatataaaggtgagtttgtattaaaaggtact

SEQ ID NO: 13523 - DNA, 40 bp, Homo sapiens
agtaccttttaatacaaactcacctttatatgaaaaatta

SEQ ID NO: 13524 - DNA, 40 bp, Homo sapiens
aatttttcatataaaggtgagtttgtattaaaaggtactg

SEQ ID NO: 13525 - DNA, 40 bp, Homo sapiens
cagtaccttttaatacaaactcacctttatatgaaaaatt

SEQ ID NO: 13526 - DNA, 40 bp, Homo sapiens
atttttcatataaaggtgagtttgtattaaaaggtactgg

SEQ ID NO: 13527 - DNA, 40 bp, Homo sapiens
ccagtaccttttaatacaaactcacctttatatgaaaaat

SEQ ID NO: 13528 - DNA, 40 bp, Homo sapiens
tttttcatataaaggtgagtttgtattaaaaggtactggt

SEQ ID NO: 13529 - DNA, 40 bp, Homo sapiens
accagtaccttttaatacaaactcacctttatatgaaaaa

SEQ ID NO: 13530 - DNA, 40 bp, Homo sapiens
ttttcatataaaggtgagtttgtattaaaaggtactggtg

SEQ ID NO: 13531 - DNA, 40 bp, Homo sapiens
caccagtaccttttaatacaaactcacctttatatgaaaa

SEQ ID NO: 13532 - DNA, 40 bp, Homo sapiens
tttcatataaaggtgagtttgtattaaaaggtactggtgg

SEQ ID NO: 13533 - DNA, 40 bp, Homo sapiens
ccaccagtaccttttaatacaaactcacctttatatgaaa

SEQ ID NO: 13534 - DNA, 40 bp, Homo sapiens
ttcatataaaggtgagtttgtattaaaaggtactggtgga

SEQ ID NO: 13535 - DNA, 40 bp, Homo sapiens
tccaccagtaccttttaatacaaactcacctttatatgaa

SEQ ID NO: 13536 - DNA, 40 bp, Homo sapiens
tcatataaaggtgagtttgtattaaaaggtactggtggag

SEQ ID NO: 13537 - DNA, 40 bp, Homo sapiens
ctccaccagtaccttttaatacaaactcacctttatatga

SEQ ID NO: 13538 - DNA, 40 bp, Homo sapiens
catataaaggtgagtttgtattaaaaggtactggtggagt

SEQ ID NO: 13539 - DNA, 40 bp, Homo sapiens
actccaccagtaccttttaatacaaactcacctttatatg

SEQ ID NO: 13540 - DNA, 40 bp, Homo sapiens
atataaaggtgagtttgtattaaaaggtactggtggagta

SEQ ID NO: 13541 - DNA, 40 bp, Homo sapiens
tactccaccagtaccttttaatacaaactcacctttatat

SEQ ID NO: 13542 - DNA, 40 bp, Homo sapiens
tataaaggtgagtttgtattaaaaggtactggtggagtat

SEQ ID NO: 13543 - DNA, 40 bp, Homo sapiens
atactccaccagtaccttttaatacaaactcacctttata

SEQ ID NO: 13544 - DNA, 40 bp, Homo sapiens
ataaaggtgagtttgtattaaaaggtactggtggagtatt

SEQ ID NO: 13545 - DNA, 40 bp, Homo sapiens
aatactccaccagtaccttttaatacaaactcacctttat

SEQ ID NO: 13546 - DNA, 40 bp, Homo sapiens
taaaggtgagtttgtattaaaaggtactggtggagtattt

SEQ ID NO: 13547 - DNA, 40 bp, Homo sapiens
aaatactccaccagtaccttttaatacaaactcaccttta

SEQ ID NO: 13548 - DNA, 40 bp, Homo sapiens
aaaggtgagtttgtattaaaaggtactggtggagtatttg

SEQ ID NO: 13549 - DNA, 40 bp, Homo sapiens
caaatactccaccagtaccttttaatacaaactcaccttt

SEQ ID NO: 13550 - DNA, 40 bp, Homo sapiens
aaggtgagtttgtattaaaaggtactggtggagtatttga

SEQ ID NO: 13551 - DNA, 40 bp, Homo sapiens
tcaaatactccaccagtaccttttaatacaaactcacctt

SEQ ID NO: 13552 - DNA, 40 bp, Homo sapiens
aggtgagtttgtattaaaaggtactggtggagtatttgat

SEQ ID NO: 13553 - DNA, 40 bp, Homo sapiens
atcaaatactccaccagtaccttttaatacaaactcacct

SEQ ID NO: 13554 - DNA, 40 bp, Homo sapiens
ggtgagtttgtattaaaaggtactggtggagtatttgata

SEQ ID NO: 13555 - DNA, 40 bp, Homo sapiens
tatcaaatactccaccagtaccttttaatacaaactcacc

SEQ ID NO: 13556 - DNA, 40 bp, Homo sapiens
gtgagtttgtattaaaaggtactggtggagtatttgatag

SEQ ID NO: 13557 - DNA, 40 bp, Homo sapiens
ctatcaaatactccaccagtaccttttaatacaaactcac

SEQ ID NO: 13558 - DNA, 40 bp, Homo sapiens
tgagtttgtattaaaaggtactggtggagtatttgatagt

SEQ ID NO: 13559 - DNA, 40 bp, Homo sapiens
actatcaaatactccaccagtaccttttaatacaaactca

SEQ ID NO: 13560 - DNA, 40 bp, Homo sapiens
gagtttgtattaaaaggtactggtggagtatttgatagtg

SEQ ID NO: 13561 - DNA, 40 bp, Homo sapiens
cactatcaaatactccaccagtaccttttaatacaaactc

SEQ ID NO: 13562 - DNA, 40 bp, Homo sapiens
agtttgtattaaaaggtactggtggagtatttgatagtgt

SEQ ID NO: 13563 - DNA, 40 bp, Homo sapiens
acactatcaaatactccaccagtaccttttaatacaaact

SEQ ID NO: 13564 - DNA, 40 bp, Homo sapiens
gtttgtattaaaaggtactggtggagtatttgatagtgta

SEQ ID NO: 13565 - DNA, 40 bp, Homo sapiens
tacactatcaaatactccaccagtaccttttaatacaaac

SEQ ID NO: 13566 - DNA, 40 bp, Homo sapiens
tttgtattaaaaggtactggtggagtatttgatagtgtat

SEQ ID NO: 13567 - DNA, 40 bp, Homo sapiens
atacactatcaaatactccaccagtaccttttaatacaaa

SEQ ID NO: 13568 - DNA, 40 bp, Homo sapiens
ttgtattaaaaggtactggtggagtatttgatagtgtatt

SEQ ID NO: 13569 - DNA, 40 bp, Homo sapiens
aatacactatcaaatactccaccagtaccttttaatacaa

SEQ ID NO: 13570 - DNA, 40 bp, Homo sapiens
tgtattaaaaggtactggtggagtatttgatagtgtatta

SEQ ID NO: 13571 - DNA, 40 bp, Homo sapiens
taatacactatcaaatactccaccagtaccttttaataca

SEQ ID NO: 13572 - DNA, 40 bp, Homo sapiens
gtattaaaaggtactggtggagtatttgatagtgtattaa

SEQ ID NO: 13573 - DNA, 40 bp, Homo sapiens
ttaatacactatcaaatactccaccagtaccttttaatac

SEQ ID NO: 13574 - DNA, 40 bp, Homo sapiens
tattaaaaggtactggtggagtatttgatagtgtattaac

SEQ ID NO: 13575 - DNA, 40 bp, Homo sapiens
gttaatacactatcaaatactccaccagtaccttttaata

SEQ ID NO: 13576 - DNA, 40 bp, Homo sapiens
attaaaaggtactggtggagtatttgatagtgtattaacc

SEQ ID NO: 13577 - DNA, 40 bp, Homo sapiens
ggttaatacactatcaaatactccaccagtaccttttaat

SEQ ID NO: 13578 - DNA, 40 bp, Homo sapiens
ttaaaaggtactggtggagtatttgatagtgtattaacct

SEQ ID NO: 13579 - DNA, 40 bp, Homo sapiens
aggttaatacactatcaaatactccaccagtaccttttaa

SEQ ID NO: 13580 - DNA, 40 bp, Homo sapiens
taaaaggtactggtggagtatttgatagtgtattaacctt

SEQ ID NO: 13581 - DNA, 40 bp, Homo sapiens
aaggttaatacactatcaaatactccaccagtacctttta

SEQ ID NO: 13582 - DNA, 40 bp, Homo sapiens
aaaaggtactggtggagtatttgatagtgtattaacctta

SEQ ID NO: 13583 - DNA, 40 bp, Homo sapiens
taaggttaatacactatcaaatactccaccagtacctttt

SEQ ID NO: 13584 - DNA, 40 bp, Homo sapiens
aaaggtactggtggagtatttgatagtgtattaaccttat

SEQ ID NO: 13585 - DNA, 40 bp, Homo sapiens
ataaggttaatacactatcaaatactccaccagtaccttt

SEQ ID NO: 13586 - DNA, 40 bp, Homo sapiens
aaggtactggtggagtatttgatagtgtattaaccttatg

SEQ ID NO: 13587 - DNA, 40 bp, Homo sapiens
cataaggttaatacactatcaaatactccaccagtacctt

SEQ ID NO: 13588 - DNA, 40 bp, Homo sapiens
aggtactggtggagtatttgatagtgtattaaccttatgt

SEQ ID NO: 13589 - DNA, 40 bp, Homo sapiens
acataaggttaatacactatcaaatactccaccagtacct

SEQ ID NO: 13590 - DNA, 40 bp, Homo sapiens
ggtactggtggagtatttgatagtgtattaaccttatgtg

SEQ ID NO: 13591 - DNA, 40 bp, Homo sapiens
cacataaggttaatacactatcaaatactccaccagtacc

SEQ ID NO: 13592 - DNA, 40 bp, Homo sapiens
gtactggtggagtatttgatagtgtattaaccttatgtgt

SEQ ID NO: 13593 - DNA, 40 bp, Homo sapiens
acacataaggttaatacactatcaaatactccaccagtac

SEQ ID NO: 13594 - DNA, 40 bp, Homo sapiens
tactggtggagtatttgatagtgtattaaccttatgtgtg

SEQ ID NO: 13595 - DNA, 40 bp, Homo sapiens
cacacataaggttaatacactatcaaatactccaccagta

SEQ ID NO: 13596 - DNA, 40 bp, Homo sapiens
actggtggagtatttgatagtgtattaaccttatgtgtga

SEQ ID NO: 13597 - DNA, 40 bp, Homo sapiens
tcacacataaggttaatacactatcaaatactccaccagt

SEQ ID NO: 13598 - DNA, 40 bp, Homo sapiens
ctggtggagtatttgatagtgtattaaccttatgtgtgac

SEQ ID NO: 13599 - DNA, 40 bp, Homo sapiens
gtcacacataaggttaatacactatcaaatactccaccag

SEQ ID NO: 13600 - DNA, 40 bp, Homo sapiens
tggtggagtatttgatagtgtattaaccttatgtgtgaca

SEQ ID NO: 13601 - DNA, 40 bp, Homo sapiens
tgtcacacataaggttaatacactatcaaatactccacca

SEQ ID NO: 13602 - DNA, 40 bp, Homo sapiens
ggtggagtatttgatagtgtattaaccttatgtgtgacat

SEQ ID NO: 13603 - DNA, 40 bp, Homo sapiens
atgtcacacataaggttaatacactatcaaatactccacc

SEQ ID NO: 13604 - DNA, 40 bp, Homo sapiens
gtggagtatttgatagtgtattaaccttatgtgtgacatg

SEQ ID NO: 13605 - DNA, 40 bp, Homo sapiens
catgtcacacataaggttaatacactatcaaatactccac

SEQ ID NO: 13606 - DNA, 40 bp, Homo sapiens
tggagtatttgatagtgtattaaccttatgtgtgacatgt

SEQ ID NO: 13607 - DNA, 40 bp, Homo sapiens
acatgtcacacataaggttaatacactatcaaatactcca

SEQ ID NO: 13608 - DNA, 40 bp, Homo sapiens
ggagtatttgatagtgtattaaccttatgtgtgacatgtt

SEQ ID NO: 13609 - DNA, 40 bp, Homo sapiens
aacatgtcacacataaggttaatacactatcaaatactcc

SEQ ID NO: 13610 - DNA, 40 bp, Homo sapiens
gagtatttgatagtgtattaaccttatgtgtgacatgttc

SEQ ID NO: 13611 - DNA, 40 bp, Homo sapiens
gaacatgtcacacataaggttaatacactatcaaatactc

SEQ ID NO: 13612 - DNA, 40 bp, Homo sapiens
agtatttgatagtgtattaaccttatgtgtgacatgttct

SEQ ID NO: 13613 - DNA, 40 bp, Homo sapiens
agaacatgtcacacataaggttaatacactatcaaatact

SEQ ID NO: 13614 - DNA, 40 bp, Homo sapiens
gtatttgatagtgtattaaccttatgtgtgacatgttcta

SEQ ID NO: 13615 - DNA, 40 bp, Homo sapiens
tagaacatgtcacacataaggttaatacactatcaaatac

SEQ ID NO: 13616 - DNA, 40 bp, Homo sapiens
tatttgatagtgtattaaccttatgtgtgacatgttctaa

SEQ ID NO: 13617 - DNA, 40 bp, Homo sapiens
ttagaacatgtcacacataaggttaatacactatcaaata

SEQ ID NO: 13618 - DNA, 40 bp, Homo sapiens
atttgatagtgtattaaccttatgtgtgacatgttctaat

SEQ ID NO: 13619 - DNA, 40 bp, Homo sapiens
attagaacatgtcacacataaggttaatacactatcaaat

SEQ ID NO: 13620 - DNA, 40 bp, Homo sapiens
tttgatagtgtattaaccttatgtgtgacatgttctaata

SEQ ID NO: 13621 - DNA, 40 bp, Homo sapiens
tattagaacatgtcacacataaggttaatacactatcaaa

SEQ ID NO: 13622 - DNA, 40 bp, Homo sapiens
ttgatagtgtattaaccttatgtgtgacatgttctaatat

SEQ ID NO: 13623 - DNA, 40 bp, Homo sapiens
atattagaacatgtcacacataaggttaatacactatcaa

SEQ ID NO: 13624 - DNA, 40 bp, Homo sapiens
tgatagtgtattaaccttatgtgtgacatgttctaatata

SEQ ID NO: 13625 - DNA, 40 bp, Homo sapiens
tatattagaacatgtcacacataaggttaatacactatca

SEQ ID NO: 13626 - DNA, 40 bp, Homo sapiens
gatagtgtattaaccttatgtgtgacatgttctaatatag

SEQ ID NO: 13627 - DNA, 40 bp, Homo sapiens
ctatattagaacatgtcacacataaggttaatacactatc

SEQ ID NO: 13628 - DNA, 40 bp, Homo sapiens
atagtgtattaaccttatgtgtgacatgttctaatatagt

SEQ ID NO: 13629 - DNA, 40 bp, Homo sapiens
actatattagaacatgtcacacataaggttaatacactat

SEQ ID NO: 13630 - DNA, 40 bp, Homo sapiens
tagtgtattaaccttatgtgtgacatgttctaatatagtc

SEQ ID NO: 13631 - DNA, 40 bp, Homo sapiens
gactatattagaacatgtcacacataaggttaatacacta

SEQ ID NO: 13632 - DNA, 40 bp, Homo sapiens
agtgtattaaccttatgtgtgacatgttctaatatagtca

SEQ ID NO: 13633 - DNA, 40 bp, Homo sapiens
tgactatattagaacatgtcacacataaggttaatacact

SEQ ID NO: 13634 - DNA, 40 bp, Homo sapiens
gtgtattaaccttatgtgtgacatgttctaatatagtcac

SEQ ID NO: 13635 - DNA, 40 bp, Homo sapiens
gtgactatattagaacatgtcacacataaggttaatacac

SEQ ID NO: 13636 - DNA, 40 bp, Homo sapiens
tgtattaaccttatgtgtgacatgttctaatatagtcaca

SEQ ID NO: 13637 - DNA, 40 bp, Homo sapiens
tgtgactatattagaacatgtcacacataaggttaataca

SEQ ID NO: 13638 - DNA, 40 bp, Homo sapiens
gtattaaccttatgtgtgacatgttctaatatagtcacat

SEQ ID NO: 13639 - DNA, 40 bp, Homo sapiens
atgtgactatattagaacatgtcacacataaggttaatac

SEQ ID NO: 13640 - DNA, 40 bp, Homo sapiens
tattaaccttatgtgtgacatgttctaatatagtcacatt

SEQ ID NO: 13641 - DNA, 40 bp, Homo sapiens
aatgtgactatattagaacatgtcacacataaggttaata

SEQ ID NO: 13642 - DNA, 40 bp, Homo sapiens
attaaccttatgtgtgacatgttctaatatagtcacattt

SEQ ID NO: 13643 - DNA, 40 bp, Homo sapiens
aaatgtgactatattagaacatgtcacacataaggttaat

SEQ ID NO: 13644 - DNA, 40 bp, Homo sapiens
ttaaccttatgtgtgacatgttctaatatagtcacatttt

SEQ ID NO: 13645 - DNA, 40 bp, Homo sapiens
aaaatgtgactatattagaacatgtcacacataaggttaa

SEQ ID NO: 13646 - DNA, 40 bp, Homo sapiens
taaccttatgtgtgacatgttctaatatagtcacattttc

SEQ ID NO: 13647 - DNA, 40 bp, Homo sapiens
gaaaatgtgactatattagaacatgtcacacataaggtta

SEQ ID NO: 13648 - DNA, 40 bp, Homo sapiens
aaccttatgtgtgacatgttctaatatagtcacattttca

SEQ ID NO: 13649 - DNA, 40 bp, Homo sapiens
tgaaaatgtgactatattagaacatgtcacacataaggtt

SEQ ID NO: 13650 - DNA, 40 bp, Homo sapiens
accttatgtgtgacatgttctaatatagtcacattttcat

SEQ ID NO: 13651 - DNA, 40 bp, Homo sapiens
atgaaaatgtgactatattagaacatgtcacacataaggt

SEQ ID NO: 13652 - DNA, 40 bp, Homo sapiens
ccttatgtgtgacatgttctaatatagtcacattttcatt

SEQ ID NO: 13653 - DNA, 40 bp, Homo sapiens
aatgaaaatgtgactatattagaacatgtcacacataagg

SEQ ID NO: 13654 - DNA, 40 bp, Homo sapiens
cttatgtgtgacatgttctaatatagtcacattttcatta

SEQ ID NO: 13655 - DNA, 40 bp, Homo sapiens
taatgaaaatgtgactatattagaacatgtcacacataag

SEQ ID NO: 13656 - DNA, 40 bp, Homo sapiens
ttatgtgtgacatgttctaatatagtcacattttcattat

SEQ ID NO: 13657 - DNA, 40 bp, Homo sapiens
ataatgaaaatgtgactatattagaacatgtcacacataa

SEQ ID NO: 13658 - DNA, 40 bp, Homo sapiens
tatgtgtgacatgttctaatatagtcacattttcattatt

SEQ ID NO: 13659 - DNA, 40 bp, Homo sapiens
aataatgaaaatgtgactatattagaacatgtcacacata

SEQ ID NO: 13660 - DNA, 40 bp, Homo sapiens
atgtgtgacatgttctaatatagtcacattttcattattt

SEQ ID NO: 13661 - DNA, 40 bp, Homo sapiens
aaataatgaaaatgtgactatattagaacatgtcacacat

SEQ ID NO: 13662 - DNA, 40 bp, Homo sapiens
tgtgtgacatgttctaatatagtcacattttcattatttt

SEQ ID NO: 13663 - DNA, 40 bp, Homo sapiens
aaaataatgaaaatgtgactatattagaacatgtcacaca

SEQ ID NO: 13664 - DNA, 40 bp, Homo sapiens
gtgtgacatgttctaatatagtcacattttcattattttt

SEQ ID NO: 13665 - DNA, 40 bp, Homo sapiens
aaaaataatgaaaatgtgactatattagaacatgtcacac

SEQ ID NO: 13666 - DNA, 40 bp, Homo sapiens
tgtgacatgttctaatatagtcacattttcattattttta

SEQ ID NO: 13667 - DNA, 40 bp, Homo sapiens
taaaaataatgaaaatgtgactatattagaacatgtcaca

SEQ ID NO: 13668 - DNA, 40 bp, Homo sapiens
gtgacatgttctaatatagtcacattttcattatttttat

SEQ ID NO: 13669 - DNA, 40 bp, Homo sapiens
ataaaaataatgaaaatgtgactatattagaacatgtcac

SEQ ID NO: 13670 - DNA, 40 bp, Homo sapiens
tgacatgttctaatatagtcacattttcattatttttatt

SEQ ID NO: 13671 - DNA, 40 bp, Homo sapiens
aataaaaataatgaaaatgtgactatattagaacatgtca

SEQ ID NO: 13672 - DNA, 40 bp, Homo sapiens
gacatgttctaatatagtcacattttcattatttttatta

SEQ ID NO: 13673 - DNA, 40 bp, Homo sapiens
taataaaaataatgaaaatgtgactatattagaacatgtc

SEQ ID NO: 13674 - DNA, 40 bp, Homo sapiens
acatgttctaatatagtcacattttcattatttttattat

SEQ ID NO: 13675 - DNA, 40 bp, Homo sapiens
ataataaaaataatgaaaatgtgactatattagaacatgt

SEQ ID NO: 13676 - DNA, 40 bp, Homo sapiens
catgttctaatatagtcacattttcattatttttattata

SEQ ID NO: 13677 - DNA, 40 bp, Homo sapiens
tataataaaaataatgaaaatgtgactatattagaacatg

SEQ ID NO: 13678 - DNA, 40 bp, Homo sapiens
atgttctaatatagtcacattttcattatttttattataa

SEQ ID NO: 13679 - DNA, 40 bp, Homo sapiens
ttataataaaaataatgaaaatgtgactatattagaacat

SEQ ID NO: 13680 - DNA, 40 bp, Homo sapiens
tgttctaatatagtcacattttcattatttttattataag

SEQ ID NO: 13681 - DNA, 40 bp, Homo sapiens
cttataataaaaataatgaaaatgtgactatattagaaca

SEQ ID NO: 13682 - DNA, 40 bp, Homo sapiens
gttctaatatagtcacattttcattatttttattataagg

SEQ ID NO: 13683 - DNA, 40 bp, Homo sapiens
ccttataataaaaataatgaaaatgtgactatattagaac

SEQ ID NO: 13684 - DNA, 40 bp, Homo sapiens
ttctaatatagtcacattttcattatttttattataaggc

SEQ ID NO: 13685 - DNA, 40 bp, Homo sapiens
gccttataataaaaataatgaaaatgtgactatattagaa

SEQ ID NO: 13686 - DNA, 40 bp, Homo sapiens
tctaatatagtcacattttcattatttttattataaggcc

SEQ ID NO: 13687 - DNA, 40 bp, Homo sapiens
ggccttataataaaaataatgaaaatgtgactatattaga

SEQ ID NO: 13688 - DNA, 40 bp, Homo sapiens
ctaatatagtcacattttcattatttttattataaggcct

SEQ ID NO: 13689 - DNA, 40 bp, Homo sapiens
aggccttataataaaaataatgaaaatgtgactatattag

SEQ ID NO: 13690 - DNA, 40 bp, Homo sapiens
taatatagtcacattttcattatttttattataaggcctg

SEQ ID NO: 13691 - DNA, 40 bp, Homo sapiens
caggccttataataaaaataatgaaaatgtgactatatta

SEQ ID NO: 13692 - DNA, 40 bp, Homo sapiens
aatatagtcacattttcattatttttattataaggcctgc

SEQ ID NO: 13693 - DNA, 40 bp, Homo sapiens
gcaggccttataataaaaataatgaaaatgtgactatatt

SEQ ID NO: 13694 - DNA, 40 bp, Homo sapiens
atatagtcacattttcattatttttattataaggcctgct

SEQ ID NO: 13695 - DNA, 40 bp, Homo sapiens
agcaggccttataataaaaataatgaaaatgtgactatat

SEQ ID NO: 13696 - DNA, 40 bp, Homo sapiens
tatagtcacattttcattatttttattataaggcctgctg

SEQ ID NO: 13697 - DNA, 40 bp, Homo sapiens
cagcaggccttataataaaaataatgaaaatgtgactata

SEQ ID NO: 13698 - DNA, 40 bp, Homo sapiens
atagtcacattttcattatttttattataaggcctgctga

SEQ ID NO: 13699 - DNA, 40 bp, Homo sapiens
tcagcaggccttataataaaaataatgaaaatgtgactat

SEQ ID NO: 13700 - DNA, 40 bp, Homo sapiens
tagtcacattttcattatttttattataaggcctgctgaa

SEQ ID NO: 13701 - DNA, 40 bp, Homo sapiens
ttcagcaggccttataataaaaataatgaaaatgtgacta

SEQ ID NO: 13702 - DNA, 40 bp, Homo sapiens
agtcacattttcattatttttattataaggcctgctgaaa

SEQ ID NO: 13703 - DNA, 40 bp, Homo sapiens
tttcagcaggccttataataaaaataatgaaaatgtgact

SEQ ID NO: 13704 - DNA, 40 bp, Homo sapiens
gtcacattttcattatttttattataaggcctgctgaaaa

SEQ ID NO: 13705 - DNA, 40 bp, Homo sapiens
ttttcagcaggccttataataaaaataatgaaaatgtgac

SEQ ID NO: 13706 - DNA, 40 bp, Homo sapiens
tcacattttcattatttttattataaggcctgctgaaaat

SEQ ID NO: 13707 - DNA, 40 bp, Homo sapiens
attttcagcaggccttataataaaaataatgaaaatgtga

SEQ ID NO: 13708 - DNA, 40 bp, Homo sapiens
cacattttcattatttttattataaggcctgctgaaaatg

SEQ ID NO: 13709 - DNA, 40 bp, Homo sapiens
cattttcagcaggccttataataaaaataatgaaaatgtg

SEQ ID NO: 13710 - DNA, 40 bp, Homo sapiens
acattttcattatttttattataaggcctgctgaaaatga

SEQ ID NO: 13711 - DNA, 40 bp, Homo sapiens
tcattttcagcaggccttataataaaaataatgaaaatgt

SEQ ID NO: 13712 - DNA, 40 bp, Homo sapiens
cattttcattatttttattataaggcctgctgaaaatgac

SEQ ID NO: 13713 - DNA, 40 bp, Homo sapiens
gtcattttcagcaggccttataataaaaataatgaaaatg

SEQ ID NO: 13714 - DNA, 40 bp, Homo sapiens
attttcattatttttattataaggcctgctgaaaatgact

SEQ ID NO: 13715 - DNA, 40 bp, Homo sapiens
agtcattttcagcaggccttataataaaaataatgaaaat

SEQ ID NO: 13716 - DNA, 40 bp, Homo sapiens
ttttcattatttttattataaggcctgctgaaaatgactg

SEQ ID NO: 13717 - DNA, 40 bp, Homo sapiens
cagtcattttcagcaggccttataataaaaataatgaaaa

SEQ ID NO: 13718 - DNA, 40 bp, Homo sapiens
tttcattatttttattataaggcctgctgaaaatgactga

SEQ ID NO: 13719 - DNA, 40 bp, Homo sapiens
tcagtcattttcagcaggccttataataaaaataatgaaa

SEQ ID NO: 13720 - DNA, 40 bp, Homo sapiens
ttcattatttttattataaggcctgctgaaaatgactgaa

SEQ ID NO: 13721 - DNA, 40 bp, Homo sapiens
ttcagtcattttcagcaggccttataataaaaataatgaa

SEQ ID NO: 13722 - DNA, 40 bp, Homo sapiens
tcattatttttattataaggcctgctgaaaatgactgaat

SEQ ID NO: 13723 - DNA, 40 bp, Homo sapiens
attcagtcattttcagcaggccttataataaaaataatga

SEQ ID NO: 13724 - DNA, 40 bp, Homo sapiens
cattatttttattataaggcctgctgaaaatgactgaata

SEQ ID NO: 13725 - DNA, 40 bp, Homo sapiens
tattcagtcattttcagcaggccttataataaaaataatg

SEQ ID NO: 13726 - DNA, 40 bp, Homo sapiens
attatttttattataaggcctgctgaaaatgactgaatat

SEQ ID NO: 13727 - DNA, 40 bp, Homo sapiens
atattcagtcattttcagcaggccttataataaaaataat

SEQ ID NO: 13728 - DNA, 40 bp, Homo sapiens
ttatttttattataaggcctgctgaaaatgactgaatata

SEQ ID NO: 13729 - DNA, 40 bp, Homo sapiens
tatattcagtcattttcagcaggccttataataaaaataa

SEQ ID NO: 13730 - DNA, 40 bp, Homo sapiens
tatttttattataaggcctgctgaaaatgactgaatataa

SEQ ID NO: 13731 - DNA, 40 bp, Homo sapiens
ttatattcagtcattttcagcaggccttataataaaaata

SEQ ID NO: 13732 - DNA, 40 bp, Homo sapiens
atttttattataaggcctgctgaaaatgactgaatataaa

SEQ ID NO: 13733 - DNA, 40 bp, Homo sapiens
tttatattcagtcattttcagcaggccttataataaaaat

SEQ ID NO: 13734 - DNA, 40 bp, Homo sapiens
tttttattataaggcctgctgaaaatgactgaatataaac

SEQ ID NO: 13735 - DNA, 40 bp, Homo sapiens
gtttatattcagtcattttcagcaggccttataataaaaa

SEQ ID NO: 13736 - DNA, 40 bp, Homo sapiens
ttttattataaggcctgctgaaaatgactgaatataaact

SEQ ID NO: 13737 - DNA, 40 bp, Homo sapiens
agtttatattcagtcattttcagcaggccttataataaaa

SEQ ID NO: 13738 - DNA, 40 bp, Homo sapiens
tttattataaggcctgctgaaaatgactgaatataaactt

SEQ ID NO: 13739 - DNA, 40 bp, Homo sapiens
aagtttatattcagtcattttcagcaggccttataataaa

SEQ ID NO: 13740 - DNA, 40 bp, Homo sapiens
ttattataaggcctgctgaaaatgactgaatataaacttg

SEQ ID NO: 13741 - DNA, 40 bp, Homo sapiens
caagtttatattcagtcattttcagcaggccttataataa

SEQ ID NO: 13742 - DNA, 40 bp, Homo sapiens
tattataaggcctgctgaaaatgactgaatataaacttgt

SEQ ID NO: 13743 - DNA, 40 bp, Homo sapiens
acaagtttatattcagtcattttcagcaggccttataata

SEQ ID NO: 13744 - DNA, 40 bp, Homo sapiens
attataaggcctgctgaaaatgactgaatataaacttgtg

SEQ ID NO: 13745 - DNA, 40 bp, Homo sapiens
cacaagtttatattcagtcattttcagcaggccttataat

SEQ ID NO: 13746 - DNA, 40 bp, Homo sapiens
ttataaggcctgctgaaaatgactgaatataaacttgtgg

SEQ ID NO: 13747 - DNA, 40 bp, Homo sapiens
ccacaagtttatattcagtcattttcagcaggccttataa

SEQ ID NO: 13748 - DNA, 40 bp, Homo sapiens
tataaggcctgctgaaaatgactgaatataaacttgtggt

SEQ ID NO: 13749 - DNA, 40 bp, Homo sapiens
accacaagtttatattcagtcattttcagcaggccttata

SEQ ID NO: 13750 - DNA, 40 bp, Homo sapiens
ataaggcctgctgaaaatgactgaatataaacttgtggta

SEQ ID NO: 13751 - DNA, 40 bp, Homo sapiens
taccacaagtttatattcagtcattttcagcaggccttat

SEQ ID NO: 13752 - DNA, 40 bp, Homo sapiens
taaggcctgctgaaaatgactgaatataaacttgtggtag

SEQ ID NO: 13753 - DNA, 40 bp, Homo sapiens
ctaccacaagtttatattcagtcattttcagcaggcctta

SEQ ID NO: 13754 - DNA, 40 bp, Homo sapiens
aaggcctgctgaaaatgactgaatataaacttgtggtagt

SEQ ID NO: 13755 - DNA, 40 bp, Homo sapiens
actaccacaagtttatattcagtcattttcagcaggcctt

SEQ ID NO: 13756 - DNA, 40 bp, Homo sapiens
aggcctgctgaaaatgactgaatataaacttgtggtagtt

SEQ ID NO: 13757 - DNA, 40 bp, Homo sapiens
aactaccacaagtttatattcagtcattttcagcaggcct

SEQ ID NO: 13758 - DNA, 40 bp, Homo sapiens
ggcctgctgaaaatgactgaatataaacttgtggtagttg

SEQ ID NO: 13759 - DNA, 40 bp, Homo sapiens
caactaccacaagtttatattcagtcattttcagcaggcc

SEQ ID NO: 13760 - DNA, 40 bp, Homo sapiens
gcctgctgaaaatgactgaatataaacttgtggtagttgg

SEQ ID NO: 13761 - DNA, 40 bp, Homo sapiens
ccaactaccacaagtttatattcagtcattttcagcaggc

SEQ ID NO: 13762 - DNA, 40 bp, Homo sapiens
cctgctgaaaatgactgaatataaacttgtggtagttgga

SEQ ID NO: 13763 - DNA, 40 bp, Homo sapiens
tccaactaccacaagtttatattcagtcattttcagcagg

SEQ ID NO: 13764 - DNA, 40 bp, Homo sapiens
ctgctgaaaatgactgaatataaacttgtggtagttggag

SEQ ID NO: 13765 - DNA, 40 bp, Homo sapiens
ctccaactaccacaagtttatattcagtcattttcagcag

SEQ ID NO: 13766 - DNA, 40 bp, Homo sapiens
tgctgaaaatgactgaatataaacttgtggtagttggagc

SEQ ID NO: 13767 - DNA, 40 bp, Homo sapiens
gctccaactaccacaagtttatattcagtcattttcagca

SEQ ID NO: 13768 - DNA, 40 bp, Homo sapiens
gctgaaaatgactgaatataaacttgtggtagttggagct

SEQ ID NO: 13769 - DNA, 40 bp, Homo sapiens
agctccaactaccacaagtttatattcagtcattttcagc

SEQ ID NO: 13770 - DNA, 40 bp, Homo sapiens
ctgaaaatgactgaatataaacttgtggtagttggagctg

SEQ ID NO: 13771 - DNA, 40 bp, Homo sapiens
cagctccaactaccacaagtttatattcagtcattttcag

SEQ ID NO: 13772 - DNA, 40 bp, Homo sapiens
tgaaaatgactgaatataaacttgtggtagttggagctgg

SEQ ID NO: 13773 - DNA, 40 bp, Homo sapiens
ccagctccaactaccacaagtttatattcagtcattttca

SEQ ID NO: 13774 - DNA, 40 bp, Homo sapiens
gaaaatgactgaatataaacttgtggtagttggagctggt

SEQ ID NO: 13775 - DNA, 40 bp, Homo sapiens
accagctccaactaccacaagtttatattcagtcattttc

SEQ ID NO: 13776 - DNA, 40 bp, Homo sapiens
aaaatgactgaatataaacttgtggtagttggagctggtg

SEQ ID NO: 13777 - DNA, 40 bp, Homo sapiens
caccagctccaactaccacaagtttatattcagtcatttt

SEQ ID NO: 13778 - DNA, 40 bp, Homo sapiens
aaatgactgaatataaacttgtggtagttggagctggtgg

SEQ ID NO: 13779 - DNA, 40 bp, Homo sapiens
ccaccagctccaactaccacaagtttatattcagtcattt

SEQ ID NO: 13780 - DNA, 40 bp, Homo sapiens
aatgactgaatataaacttgtggtagttggagctggtggc

SEQ ID NO: 13781 - DNA, 40 bp, Homo sapiens
gccaccagctccaactaccacaagtttatattcagtcatt

SEQ ID NO: 13782 - DNA, 40 bp, Homo sapiens
atgactgaatataaacttgtggtagttggagctggtggcg

SEQ ID NO: 13783 - DNA, 40 bp, Homo sapiens
cgccaccagctccaactaccacaagtttatattcagtcat

SEQ ID NO: 13784 - DNA, 40 bp, Homo sapiens
tgactgaatataaacttgtggtagttggagctggtggcgt

SEQ ID NO: 13785 - DNA, 40 bp, Homo sapiens
acgccaccagctccaactaccacaagtttatattcagtca

SEQ ID NO: 13786 - DNA, 40 bp, Homo sapiens
gactgaatataaacttgtggtagttggagctggtggcgta

SEQ ID NO: 13787 - DNA, 40 bp, Homo sapiens
tacgccaccagctccaactaccacaagtttatattcagtc

SEQ ID NO: 13788 - DNA, 40 bp, Homo sapiens
actgaatataaacttgtggtagttggagctggtggcgtag

SEQ ID NO: 13789 - DNA, 40 bp, Homo sapiens
ctacgccaccagctccaactaccacaagtttatattcagt

SEQ ID NO: 13790 - DNA, 40 bp, Homo sapiens
ctgaatataaacttgtggtagttggagctggtggcgtagg

SEQ ID NO: 13791 - DNA, 40 bp, Homo sapiens
cctacgccaccagctccaactaccacaagtttatattcag

SEQ ID NO: 13792 - DNA, 40 bp, Homo sapiens
tgaatataaacttgtggtagttggagctggtggcgtaggc

SEQ ID NO: 13793 - DNA, 40 bp, Homo sapiens
gcctacgccaccagctccaactaccacaagtttatattca

SEQ ID NO: 13794 - DNA, 40 bp, Homo sapiens
gaatataaacttgtggtagttggagctggtggcgtaggca

SEQ ID NO: 13795 - DNA, 40 bp, Homo sapiens
tgcctacgccaccagctccaactaccacaagtttatattc

SEQ ID NO: 13796 - DNA, 40 bp, Homo sapiens
aatataaacttgtggtagttggagctggtggcgtaggcaa

SEQ ID NO: 13797 - DNA, 40 bp, Homo sapiens
ttgcctacgccaccagctccaactaccacaagtttatatt

SEQ ID NO: 13798 - DNA, 40 bp, Homo sapiens
atataaacttgtggtagttggagctggtggcgtaggcaag

SEQ ID NO: 13799 - DNA, 40 bp, Homo sapiens
cttgcctacgccaccagctccaactaccacaagtttatat

SEQ ID NO: 13800 - DNA, 40 bp, Homo sapiens
tataaacttgtggtagttggagctggtggcgtaggcaaga

SEQ ID NO: 13801 - DNA, 40 bp, Homo sapiens
tcttgcctacgccaccagctccaactaccacaagtttata

SEQ ID NO: 13802 - DNA, 40 bp, Homo sapiens
ataaacttgtggtagttggagctggtggcgtaggcaagag

SEQ ID NO: 13803 - DNA, 40 bp, Homo sapiens
ctcttgcctacgccaccagctccaactaccacaagtttat

SEQ ID NO: 13804 - DNA, 40 bp, Homo sapiens
taaacttgtggtagttggagctggtggcgtaggcaagagt

SEQ ID NO: 13805 - DNA, 40 bp, Homo sapiens
actcttgcctacgccaccagctccaactaccacaagttta

SEQ ID NO: 13806 - DNA, 40 bp, Homo sapiens
aaacttgtggtagttggagctggtggcgtaggcaagagtg

SEQ ID NO: 13807 - DNA, 40 bp, Homo sapiens
cactcttgcctacgccaccagctccaactaccacaagttt

SEQ ID NO: 13808 - DNA, 40 bp, Homo sapiens
aacttgtggtagttggagctggtggcgtaggcaagagtgc

SEQ ID NO: 13809 - DNA, 40 bp, Homo sapiens
gcactcttgcctacgccaccagctccaactaccacaagtt

SEQ ID NO: 13810 - DNA, 40 bp, Homo sapiens
acttgtggtagttggagctggtggcgtaggcaagagtgcc

SEQ ID NO: 13811 - DNA, 40 bp, Homo sapiens
ggcactcttgcctacgccaccagctccaactaccacaagt

SEQ ID NO: 13812 - DNA, 40 bp, Homo sapiens
cttgtggtagttggagctggtggcgtaggcaagagtgcct

SEQ ID NO: 13813 - DNA, 40 bp, Homo sapiens
aggcactcttgcctacgccaccagctccaactaccacaag

SEQ ID NO: 13814 - DNA, 40 bp, Homo sapiens
ttgtggtagttggagctggtggcgtaggcaagagtgcctt

SEQ ID NO: 13815 - DNA, 40 bp, Homo sapiens
aaggcactcttgcctacgccaccagctccaactaccacaa

SEQ ID NO: 13816 - DNA, 40 bp, Homo sapiens
tgtggtagttggagctggtggcgtaggcaagagtgccttg

SEQ ID NO: 13817 - DNA, 40 bp, Homo sapiens
caaggcactcttgcctacgccaccagctccaactaccaca

SEQ ID NO: 13818 - DNA, 40 bp, Homo sapiens
gtggtagttggagctggtggcgtaggcaagagtgccttga

SEQ ID NO: 13819 - DNA, 40 bp, Homo sapiens
tcaaggcactcttgcctacgccaccagctccaactaccac

SEQ ID NO: 13820 - DNA, 40 bp, Homo sapiens
tggtagttggagctggtggcgtaggcaagagtgccttgac

SEQ ID NO: 13821 - DNA, 40 bp, Homo sapiens
gtcaaggcactcttgcctacgccaccagctccaactacca

SEQ ID NO: 13822 - DNA, 40 bp, Homo sapiens
ggtagttggagctggtggcgtaggcaagagtgccttgacg

SEQ ID NO: 13823 - DNA, 40 bp, Homo sapiens
cgtcaaggcactcttgcctacgccaccagctccaactacc

SEQ ID NO: 13824 - DNA, 40 bp, Homo sapiens
gtagttggagctggtggcgtaggcaagagtgccttgacga

SEQ ID NO: 13825 - DNA, 40 bp, Homo sapiens
tcgtcaaggcactcttgcctacgccaccagctccaactac

SEQ ID NO: 13826 - DNA, 40 bp, Homo sapiens
tagttggagctggtggcgtaggcaagagtgccttgacgat

SEQ ID NO: 13827 - DNA, 40 bp, Homo sapiens
atcgtcaaggcactcttgcctacgccaccagctccaacta

SEQ ID NO: 13828 - DNA, 40 bp, Homo sapiens
agttggagctggtggcgtaggcaagagtgccttgacgata

SEQ ID NO: 13829 - DNA, 40 bp, Homo sapiens
tatcgtcaaggcactcttgcctacgccaccagctccaact

SEQ ID NO: 13830 - DNA, 40 bp, Homo sapiens
gttggagctggtggcgtaggcaagagtgccttgacgatac

SEQ ID NO: 13831 - DNA, 40 bp, Homo sapiens
gtatcgtcaaggcactcttgcctacgccaccagctccaac

SEQ ID NO: 13832 - DNA, 40 bp, Homo sapiens
ttggagctggtggcgtaggcaagagtgccttgacgataca

SEQ ID NO: 13833 - DNA, 40 bp, Homo sapiens
tgtatcgtcaaggcactcttgcctacgccaccagctccaa

SEQ ID NO: 13834 - DNA, 40 bp, Homo sapiens
tggagctggtggcgtaggcaagagtgccttgacgatacag

SEQ ID NO: 13835 - DNA, 40 bp, Homo sapiens
ctgtatcgtcaaggcactcttgcctacgccaccagctcca

SEQ ID NO: 13836 - DNA, 40 bp, Homo sapiens
ggagctggtggcgtaggcaagagtgccttgacgatacagc

SEQ ID NO: 13837 - DNA, 40 bp, Homo sapiens
gctgtatcgtcaaggcactcttgcctacgccaccagctcc

SEQ ID NO: 13838 - DNA, 40 bp, Homo sapiens
gagctggtggcgtaggcaagagtgccttgacgatacagct

SEQ ID NO: 13839 - DNA, 40 bp, Homo sapiens
agctgtatcgtcaaggcactcttgcctacgccaccagctc

SEQ ID NO: 13840 - DNA, 40 bp, Homo sapiens
agctggtggcgtaggcaagagtgccttgacgatacagcta

SEQ ID NO: 13841 - DNA, 40 bp, Homo sapiens
tagctgtatcgtcaaggcactcttgcctacgccaccagct

SEQ ID NO: 13842 - DNA, 40 bp, Homo sapiens
gctggtggcgtaggcaagagtgccttgacgatacagctaa

SEQ ID NO: 13843 - DNA, 40 bp, Homo sapiens
ttagctgtatcgtcaaggcactcttgcctacgccaccagc

SEQ ID NO: 13844 - DNA, 40 bp, Homo sapiens
ctggtggcgtaggcaagagtgccttgacgatacagctaat

SEQ ID NO: 13845 - DNA, 40 bp, Homo sapiens
attagctgtatcgtcaaggcactcttgcctacgccaccag

SEQ ID NO: 13846 - DNA, 40 bp, Homo sapiens
tggtggcgtaggcaagagtgccttgacgatacagctaatt

SEQ ID NO: 13847 - DNA, 40 bp, Homo sapiens
aattagctgtatcgtcaaggcactcttgcctacgccacca

SEQ ID NO: 13848 - DNA, 40 bp, Homo sapiens
ggtggcgtaggcaagagtgccttgacgatacagctaattc

SEQ ID NO: 13849 - DNA, 40 bp, Homo sapiens
gaattagctgtatcgtcaaggcactcttgcctacgccacc

SEQ ID NO: 13850 - DNA, 40 bp, Homo sapiens
gtggcgtaggcaagagtgccttgacgatacagctaattca

SEQ ID NO: 13851 - DNA, 40 bp, Homo sapiens
tgaattagctgtatcgtcaaggcactcttgcctacgccac

SEQ ID NO: 13852 - DNA, 40 bp, Homo sapiens
tggcgtaggcaagagtgccttgacgatacagctaattcag

SEQ ID NO: 13853 - DNA, 40 bp, Homo sapiens
ctgaattagctgtatcgtcaaggcactcttgcctacgcca

SEQ ID NO: 13854 - DNA, 40 bp, Homo sapiens
ggcgtaggcaagagtgccttgacgatacagctaattcaga

SEQ ID NO: 13855 - DNA, 40 bp, Homo sapiens
tctgaattagctgtatcgtcaaggcactcttgcctacgcc

SEQ ID NO: 13856 - DNA, 40 bp, Homo sapiens
gcgtaggcaagagtgccttgacgatacagctaattcagaa

SEQ ID NO: 13857 - DNA, 40 bp, Homo sapiens
ttctgaattagctgtatcgtcaaggcactcttgcctacgc

SEQ ID NO: 13858 - DNA, 40 bp, Homo sapiens
cgtaggcaagagtgccttgacgatacagctaattcagaat

SEQ ID NO: 13859 - DNA, 40 bp, Homo sapiens
attctgaattagctgtatcgtcaaggcactcttgcctacg

SEQ ID NO: 13860 - DNA, 40 bp, Homo sapiens
gtaggcaagagtgccttgacgatacagctaattcagaatc

SEQ ID NO: 13861 - DNA, 40 bp, Homo sapiens
gattctgaattagctgtatcgtcaaggcactcttgcctac

SEQ ID NO: 13862 - DNA, 40 bp, Homo sapiens
taggcaagagtgccttgacgatacagctaattcagaatca

SEQ ID NO: 13863 - DNA, 40 bp, Homo sapiens
tgattctgaattagctgtatcgtcaaggcactcttgccta

SEQ ID NO: 13864 - DNA, 40 bp, Homo sapiens
aggcaagagtgccttgacgatacagctaattcagaatcat

SEQ ID NO: 13865 - DNA, 40 bp, Homo sapiens
atgattctgaattagctgtatcgtcaaggcactcttgcct

SEQ ID NO: 13866 - DNA, 40 bp, Homo sapiens
ggcaagagtgccttgacgatacagctaattcagaatcatt

SEQ ID NO: 13867 - DNA, 40 bp, Homo sapiens
aatgattctgaattagctgtatcgtcaaggcactcttgcc

SEQ ID NO: 13868 - DNA, 40 bp, Homo sapiens
gcaagagtgccttgacgatacagctaattcagaatcattt

SEQ ID NO: 13869 - DNA, 40 bp, Homo sapiens
aaatgattctgaattagctgtatcgtcaaggcactcttgc

SEQ ID NO: 13870 - DNA, 40 bp, Homo sapiens
caagagtgccttgacgatacagctaattcagaatcatttt

SEQ ID NO: 13871 - DNA, 40 bp, Homo sapiens
aaaatgattctgaattagctgtatcgtcaaggcactcttg

SEQ ID NO: 13872 - DNA, 40 bp, Homo sapiens
aagagtgccttgacgatacagctaattcagaatcattttg

SEQ ID NO: 13873 - DNA, 40 bp, Homo sapiens
caaaatgattctgaattagctgtatcgtcaaggcactctt

SEQ ID NO: 13874 - DNA, 40 bp, Homo sapiens
agagtgccttgacgatacagctaattcagaatcattttgt

SEQ ID NO: 13875 - DNA, 40 bp, Homo sapiens
acaaaatgattctgaattagctgtatcgtcaaggcactct

SEQ ID NO: 13876 - DNA, 40 bp, Homo sapiens
gagtgccttgacgatacagctaattcagaatcattttgtg

SEQ ID NO: 13877 - DNA, 40 bp, Homo sapiens
cacaaaatgattctgaattagctgtatcgtcaaggcactc

SEQ ID NO: 13878 - DNA, 40 bp, Homo sapiens
agtgccttgacgatacagctaattcagaatcattttgtgg

SEQ ID NO: 13879 - DNA, 40 bp, Homo sapiens
ccacaaaatgattctgaattagctgtatcgtcaaggcact

SEQ ID NO: 13880 - DNA, 40 bp, Homo sapiens
gtgccttgacgatacagctaattcagaatcattttgtgga

SEQ ID NO: 13881 - DNA, 40 bp, Homo sapiens
tccacaaaatgattctgaattagctgtatcgtcaaggcac

SEQ ID NO: 13882 - DNA, 40 bp, Homo sapiens
tgccttgacgatacagctaattcagaatcattttgtggac

SEQ ID NO: 13883 - DNA, 40 bp, Homo sapiens
gtccacaaaatgattctgaattagctgtatcgtcaaggca

SEQ ID NO: 13884 - DNA, 40 bp, Homo sapiens
gccttgacgatacagctaattcagaatcattttgtggacg

SEQ ID NO: 13885 - DNA, 40 bp, Homo sapiens
cgtccacaaaatgattctgaattagctgtatcgtcaaggc

SEQ ID NO: 13886 - DNA, 40 bp, Homo sapiens
ccttgacgatacagctaattcagaatcattttgtggacga

SEQ ID NO: 13887 - DNA, 40 bp, Homo sapiens
tcgtccacaaaatgattctgaattagctgtatcgtcaagg

SEQ ID NO: 13888 - DNA, 40 bp, Homo sapiens
cttgacgatacagctaattcagaatcattttgtggacgaa

SEQ ID NO: 13889 - DNA, 40 bp, Homo sapiens
ttcgtccacaaaatgattctgaattagctgtatcgtcaag

SEQ ID NO: 13890 - DNA, 40 bp, Homo sapiens
ttgacgatacagctaattcagaatcattttgtggacgaat

SEQ ID NO: 13891 - DNA, 40 bp, Homo sapiens
attcgtccacaaaatgattctgaattagctgtatcgtcaa

SEQ ID NO: 13892 - DNA, 40 bp, Homo sapiens
tgacgatacagctaattcagaatcattttgtggacgaata

SEQ ID NO: 13893 - DNA, 40 bp, Homo sapiens
tattcgtccacaaaatgattctgaattagctgtatcgtca

SEQ ID NO: 13894 - DNA, 40 bp, Homo sapiens
gacgatacagctaattcagaatcattttgtggacgaatat

SEQ ID NO: 13895 - DNA, 40 bp, Homo sapiens
atattcgtccacaaaatgattctgaattagctgtatcgtc

SEQ ID NO: 13896 - DNA, 40 bp, Homo sapiens
acgatacagctaattcagaatcattttgtggacgaatatg

SEQ ID NO: 13897 - DNA, 40 bp, Homo sapiens
catattcgtccacaaaatgattctgaattagctgtatcgt

SEQ ID NO: 13898 - DNA, 40 bp, Homo sapiens
cgatacagctaattcagaatcattttgtggacgaatatga

SEQ ID NO: 13899 - DNA, 40 bp, Homo sapiens
tcatattcgtccacaaaatgattctgaattagctgtatcg

SEQ ID NO: 13900 - DNA, 40 bp, Homo sapiens
gatacagctaattcagaatcattttgtggacgaatatgat

SEQ ID NO: 13901 - DNA, 40 bp, Homo sapiens
atcatattcgtccacaaaatgattctgaattagctgtatc

SEQ ID NO: 13902 - DNA, 40 bp, Homo sapiens
atacagctaattcagaatcattttgtggacgaatatgatc

SEQ ID NO: 13903 - DNA, 40 bp, Homo sapiens
gatcatattcgtccacaaaatgattctgaattagctgtat

SEQ ID NO: 13904 - DNA, 40 bp, Homo sapiens
tacagctaattcagaatcattttgtggacgaatatgatcc

SEQ ID NO: 13905 - DNA, 40 bp, Homo sapiens
ggatcatattcgtccacaaaatgattctgaattagctgta

SEQ ID NO: 13906 - DNA, 40 bp, Homo sapiens
acagctaattcagaatcattttgtggacgaatatgatcca

SEQ ID NO: 13907 - DNA, 40 bp, Homo sapiens
tggatcatattcgtccacaaaatgattctgaattagctgt

SEQ ID NO: 13908 - DNA, 40 bp, Homo sapiens
cagctaattcagaatcattttgtggacgaatatgatccaa

SEQ ID NO: 13909 - DNA, 40 bp, Homo sapiens
ttggatcatattcgtccacaaaatgattctgaattagctg

SEQ ID NO: 13910 - DNA, 40 bp, Homo sapiens
agctaattcagaatcattttgtggacgaatatgatccaac

SEQ ID NO: 13911 - DNA, 40 bp, Homo sapiens
gttggatcatattcgtccacaaaatgattctgaattagct

SEQ ID NO: 13912 - DNA, 40 bp, Homo sapiens
gctaattcagaatcattttgtggacgaatatgatccaaca

SEQ ID NO: 13913 - DNA, 40 bp, Homo sapiens
tgttggatcatattcgtccacaaaatgattctgaattagc

SEQ ID NO: 13914 - DNA, 40 bp, Homo sapiens
ctaattcagaatcattttgtggacgaatatgatccaacaa

SEQ ID NO: 13915 - DNA, 40 bp, Homo sapiens
ttgttggatcatattcgtccacaaaatgattctgaattag

SEQ ID NO: 13916 - DNA, 40 bp, Homo sapiens
taattcagaatcattttgtggacgaatatgatccaacaat

SEQ ID NO: 13917 - DNA, 40 bp, Homo sapiens
attgttggatcatattcgtccacaaaatgattctgaatta

SEQ ID NO: 13918 - DNA, 40 bp, Homo sapiens
aattcagaatcattttgtggacgaatatgatccaacaata

SEQ ID NO: 13919 - DNA, 40 bp, Homo sapiens
tattgttggatcatattcgtccacaaaatgattctgaatt

SEQ ID NO: 13920 - DNA, 40 bp, Homo sapiens
attcagaatcattttgtggacgaatatgatccaacaatag

SEQ ID NO: 13921 - DNA, 40 bp, Homo sapiens
ctattgttggatcatattcgtccacaaaatgattctgaat

SEQ ID NO: 13922 - DNA, 40 bp, Homo sapiens
ttcagaatcattttgtggacgaatatgatccaacaataga

SEQ ID NO: 13923 - DNA, 40 bp, Homo sapiens
tctattgttggatcatattcgtccacaaaatgattctgaa

SEQ ID NO: 13924 - DNA, 40 bp, Homo sapiens
tcagaatcattttgtggacgaatatgatccaacaatagag

SEQ ID NO: 13925 - DNA, 40 bp, Homo sapiens
ctctattgttggatcatattcgtccacaaaatgattctga

SEQ ID NO: 13926 - DNA, 40 bp, Homo sapiens
cagaatcattttgtggacgaatatgatccaacaatagagg

SEQ ID NO: 13927 - DNA, 40 bp, Homo sapiens
cctctattgttggatcatattcgtccacaaaatgattctg

SEQ ID NO: 13928 - DNA, 40 bp, Homo sapiens
agaatcattttgtggacgaatatgatccaacaatagaggt

SEQ ID NO: 13929 - DNA, 40 bp, Homo sapiens
acctctattgttggatcatattcgtccacaaaatgattct

SEQ ID NO: 13930 - DNA, 40 bp, Homo sapiens
gaatcattttgtggacgaatatgatccaacaatagaggta

SEQ ID NO: 13931 - DNA, 40 bp, Homo sapiens
tacctctattgttggatcatattcgtccacaaaatgattc

SEQ ID NO: 13932 - DNA, 40 bp, Homo sapiens
aatcattttgtggacgaatatgatccaacaatagaggtaa

SEQ ID NO: 13933 - DNA, 40 bp, Homo sapiens
ttacctctattgttggatcatattcgtccacaaaatgatt

SEQ ID NO: 13934 - DNA, 40 bp, Homo sapiens
atcattttgtggacgaatatgatccaacaatagaggtaaa

SEQ ID NO: 13935 - DNA, 40 bp, Homo sapiens
tttacctctattgttggatcatattcgtccacaaaatgat

SEQ ID NO: 13936 - DNA, 40 bp, Homo sapiens
tcattttgtggacgaatatgatccaacaatagaggtaaat

SEQ ID NO: 13937 - DNA, 40 bp, Homo sapiens
atttacctctattgttggatcatattcgtccacaaaatga

SEQ ID NO: 13938 - DNA, 40 bp, Homo sapiens
cattttgtggacgaatatgatccaacaatagaggtaaatc

SEQ ID NO: 13939 - DNA, 40 bp, Homo sapiens
gatttacctctattgttggatcatattcgtccacaaaatg

SEQ ID NO: 13940 - DNA, 40 bp, Homo sapiens
attttgtggacgaatatgatccaacaatagaggtaaatct

SEQ ID NO: 13941 - DNA, 40 bp, Homo sapiens
agatttacctctattgttggatcatattcgtccacaaaat

SEQ ID NO: 13942 - DNA, 40 bp, Homo sapiens
ttttgtggacgaatatgatccaacaatagaggtaaatctt

SEQ ID NO: 13943 - DNA, 40 bp, Homo sapiens
aagatttacctctattgttggatcatattcgtccacaaaa

SEQ ID NO: 13944 - DNA, 40 bp, Homo sapiens
tttgtggacgaatatgatccaacaatagaggtaaatcttg

SEQ ID NO: 13945 - DNA, 40 bp, Homo sapiens
caagatttacctctattgttggatcatattcgtccacaaa

SEQ ID NO: 13946 - DNA, 40 bp, Homo sapiens
ttgtggacgaatatgatccaacaatagaggtaaatcttgt

SEQ ID NO: 13947 - DNA, 40 bp, Homo sapiens
acaagatttacctctattgttggatcatattcgtccacaa

SEQ ID NO: 13948 - DNA, 40 bp, Homo sapiens
tgtggacgaatatgatccaacaatagaggtaaatcttgtt

SEQ ID NO: 13949 - DNA, 40 bp, Homo sapiens
aacaagatttacctctattgttggatcatattcgtccaca

SEQ ID NO: 13950 - DNA, 40 bp, Homo sapiens
gtggacgaatatgatccaacaatagaggtaaatcttgttt

SEQ ID NO: 13951 - DNA, 40 bp, Homo sapiens
aaacaagatttacctctattgttggatcatattcgtccac

SEQ ID NO: 13952 - DNA, 40 bp, Homo sapiens
tggacgaatatgatccaacaatagaggtaaatcttgtttt

SEQ ID NO: 13953 - DNA, 40 bp, Homo sapiens
aaaacaagatttacctctattgttggatcatattcgtcca

SEQ ID NO: 13954 - DNA, 40 bp, Homo sapiens
ggacgaatatgatccaacaatagaggtaaatcttgtttta

SEQ ID NO: 13955 - DNA, 40 bp, Homo sapiens
taaaacaagatttacctctattgttggatcatattcgtcc

SEQ ID NO: 13956 - DNA, 40 bp, Homo sapiens
gacgaatatgatccaacaatagaggtaaatcttgttttaa

SEQ ID NO: 13957 - DNA, 40 bp, Homo sapiens
ttaaaacaagatttacctctattgttggatcatattcgtc

SEQ ID NO: 13958 - DNA, 40 bp, Homo sapiens
acgaatatgatccaacaatagaggtaaatcttgttttaat

SEQ ID NO: 13959 - DNA, 40 bp, Homo sapiens
attaaaacaagatttacctctattgttggatcatattcgt

SEQ ID NO: 13960 - DNA, 40 bp, Homo sapiens
cgaatatgatccaacaatagaggtaaatcttgttttaata

SEQ ID NO: 13961 - DNA, 40 bp, Homo sapiens
tattaaaacaagatttacctctattgttggatcatattcg

SEQ ID NO: 13962 - DNA, 40 bp, Homo sapiens
gaatatgatccaacaatagaggtaaatcttgttttaatat

SEQ ID NO: 13963 - DNA, 40 bp, Homo sapiens
atattaaaacaagatttacctctattgttggatcatattc

SEQ ID NO: 13964 - DNA, 40 bp, Homo sapiens
aatatgatccaacaatagaggtaaatcttgttttaatatg

SEQ ID NO: 13965 - DNA, 40 bp, Homo sapiens
catattaaaacaagatttacctctattgttggatcatatt

SEQ ID NO: 13966 - DNA, 40 bp, Homo sapiens
atatgatccaacaatagaggtaaatcttgttttaatatgc

SEQ ID NO: 13967 - DNA, 40 bp, Homo sapiens
gcatattaaaacaagatttacctctattgttggatcatat

SEQ ID NO: 13968 - DNA, 40 bp, Homo sapiens
tatgatccaacaatagaggtaaatcttgttttaatatgca

SEQ ID NO: 13969 - DNA, 40 bp, Homo sapiens
tgcatattaaaacaagatttacctctattgttggatcata

SEQ ID NO: 13970 - DNA, 40 bp, Homo sapiens
atgatccaacaatagaggtaaatcttgttttaatatgcat

SEQ ID NO: 13971 - DNA, 40 bp, Homo sapiens
atgcatattaaaacaagatttacctctattgttggatcat

SEQ ID NO: 13972 - DNA, 40 bp, Homo sapiens
tgatccaacaatagaggtaaatcttgttttaatatgcata

SEQ ID NO: 13973 - DNA, 40 bp, Homo sapiens
tatgcatattaaaacaagatttacctctattgttggatca

SEQ ID NO: 13974 - DNA, 40 bp, Homo sapiens
gatccaacaatagaggtaaatcttgttttaatatgcatat

SEQ ID NO: 13975 - DNA, 40 bp, Homo sapiens
atatgcatattaaaacaagatttacctctattgttggatc

SEQ ID NO: 13976 - DNA, 40 bp, Homo sapiens
atccaacaatagaggtaaatcttgttttaatatgcatatt

SEQ ID NO: 13977 - DNA, 40 bp, Homo sapiens
aatatgcatattaaaacaagatttacctctattgttggat

SEQ ID NO: 13978 - DNA, 40 bp, Homo sapiens
tccaacaatagaggtaaatcttgttttaatatgcatatta

SEQ ID NO: 13979 - DNA, 40 bp, Homo sapiens
taatatgcatattaaaacaagatttacctctattgttgga

SEQ ID NO: 13980 - DNA, 40 bp, Homo sapiens
ccaacaatagaggtaaatcttgttttaatatgcatattac

SEQ ID NO: 13981 - DNA, 40 bp, Homo sapiens
gtaatatgcatattaaaacaagatttacctctattgttgg

SEQ ID NO: 13982 - DNA, 40 bp, Homo sapiens
caacaatagaggtaaatcttgttttaatatgcatattact

SEQ ID NO: 13983 - DNA, 40 bp, Homo sapiens
agtaatatgcatattaaaacaagatttacctctattgttg

SEQ ID NO: 13984 - DNA, 40 bp, Homo sapiens
aacaatagaggtaaatcttgttttaatatgcatattactg

SEQ ID NO: 13985 - DNA, 40 bp, Homo sapiens
cagtaatatgcatattaaaacaagatttacctctattgtt

SEQ ID NO: 13986 - DNA, 40 bp, Homo sapiens
acaatagaggtaaatcttgttttaatatgcatattactgg

SEQ ID NO: 13987 - DNA, 40 bp, Homo sapiens
ccagtaatatgcatattaaaacaagatttacctctattgt

SEQ ID NO: 13988 - DNA, 40 bp, Homo sapiens
caatagaggtaaatcttgttttaatatgcatattactggt

SEQ ID NO: 13989 - DNA, 40 bp, Homo sapiens
accagtaatatgcatattaaaacaagatttacctctattg

SEQ ID NO: 13990 - DNA, 40 bp, Homo sapiens
aatagaggtaaatcttgttttaatatgcatattactggtg

SEQ ID NO: 13991 - DNA, 40 bp, Homo sapiens
caccagtaatatgcatattaaaacaagatttacctctatt

SEQ ID NO: 13992 - DNA, 40 bp, Homo sapiens
atagaggtaaatcttgttttaatatgcatattactggtgc

SEQ ID NO: 13993 - DNA, 40 bp, Homo sapiens
gcaccagtaatatgcatattaaaacaagatttacctctat

SEQ ID NO: 13994 - DNA, 40 bp, Homo sapiens
tagaggtaaatcttgttttaatatgcatattactggtgca

SEQ ID NO: 13995 - DNA, 40 bp, Homo sapiens
tgcaccagtaatatgcatattaaaacaagatttacctcta

SEQ ID NO: 13996 - DNA, 40 bp, Homo sapiens
agaggtaaatcttgttttaatatgcatattactggtgcag

SEQ ID NO: 13997 - DNA, 40 bp, Homo sapiens
ctgcaccagtaatatgcatattaaaacaagatttacctct

SEQ ID NO: 13998 - DNA, 40 bp, Homo sapiens
gaggtaaatcttgttttaatatgcatattactggtgcagg

SEQ ID NO: 13999 - DNA, 40 bp, Homo sapiens
cctgcaccagtaatatgcatattaaaacaagatttacctc

SEQ ID NO: 14000 - DNA, 40 bp, Homo sapiens
aggtaaatcttgttttaatatgcatattactggtgcagga

SEQ ID NO: 14001 - DNA, 40 bp, Homo sapiens
tcctgcaccagtaatatgcatattaaaacaagatttacct

SEQ ID NO: 14002 - DNA, 40 bp, Homo sapiens
ggtaaatcttgttttaatatgcatattactggtgcaggac

SEQ ID NO: 14003 - DNA, 40 bp, Homo sapiens
gtcctgcaccagtaatatgcatattaaaacaagatttacc

SEQ ID NO: 14004 - DNA, 40 bp, Homo sapiens
gtaaatcttgttttaatatgcatattactggtgcaggacc

SEQ ID NO: 14005 - DNA, 40 bp, Homo sapiens
ggtcctgcaccagtaatatgcatattaaaacaagatttac

SEQ ID NO: 14006 - DNA, 40 bp, Homo sapiens
taaatcttgttttaatatgcatattactggtgcaggacca

SEQ ID NO: 14007 - DNA, 40 bp, Homo sapiens
tggtcctgcaccagtaatatgcatattaaaacaagattta

SEQ ID NO: 14008 - DNA, 40 bp, Homo sapiens
aaatcttgttttaatatgcatattactggtgcaggaccat

SEQ ID NO: 14009 - DNA, 40 bp, Homo sapiens
atggtcctgcaccagtaatatgcatattaaaacaagattt

SEQ ID NO: 14010 - DNA, 40 bp, Homo sapiens
aatcttgttttaatatgcatattactggtgcaggaccatt

SEQ ID NO: 14011 - DNA, 40 bp, Homo sapiens
aatggtcctgcaccagtaatatgcatattaaaacaagatt

SEQ ID NO: 14012 - DNA, 40 bp, Homo sapiens
atcttgttttaatatgcatattactggtgcaggaccattc

SEQ ID NO: 14013 - DNA, 40 bp, Homo sapiens
gaatggtcctgcaccagtaatatgcatattaaaacaagat

SEQ ID NO: 14014 - DNA, 40 bp, Homo sapiens
tcttgttttaatatgcatattactggtgcaggaccattct

SEQ ID NO: 14015 - DNA, 40 bp, Homo sapiens
agaatggtcctgcaccagtaatatgcatattaaaacaaga

SEQ ID NO: 14016 - DNA, 40 bp, Homo sapiens
cttgttttaatatgcatattactggtgcaggaccattctt

SEQ ID NO: 14017 - DNA, 40 bp, Homo sapiens
aagaatggtcctgcaccagtaatatgcatattaaaacaag

SEQ ID NO: 14018 - DNA, 40 bp, Homo sapiens
ttgttttaatatgcatattactggtgcaggaccattcttt

SEQ ID NO: 14019 - DNA, 40 bp, Homo sapiens
aaagaatggtcctgcaccagtaatatgcatattaaaacaa

SEQ ID NO: 14020 - DNA, 40 bp, Homo sapiens
tgttttaatatgcatattactggtgcaggaccattctttg

SEQ ID NO: 14021 - DNA, 40 bp, Homo sapiens
caaagaatggtcctgcaccagtaatatgcatattaaaaca

SEQ ID NO: 14022 - DNA, 40 bp, Homo sapiens
gttttaatatgcatattactggtgcaggaccattctttga

SEQ ID NO: 14023 - DNA, 40 bp, Homo sapiens
tcaaagaatggtcctgcaccagtaatatgcatattaaaac

SEQ ID NO: 14024 - DNA, 40 bp, Homo sapiens
ttttaatatgcatattactggtgcaggaccattctttgat

SEQ ID NO: 14025 - DNA, 40 bp, Homo sapiens
atcaaagaatggtcctgcaccagtaatatgcatattaaaa

SEQ ID NO: 14026 - DNA, 40 bp, Homo sapiens
tttaatatgcatattactggtgcaggaccattctttgata

SEQ ID NO: 14027 - DNA, 40 bp, Homo sapiens
tatcaaagaatggtcctgcaccagtaatatgcatattaaa

SEQ ID NO: 14028 - DNA, 40 bp, Homo sapiens
ttaatatgcatattactggtgcaggaccattctttgatac

SEQ ID NO: 14029 - DNA, 40 bp, Homo sapiens
gtatcaaagaatggtcctgcaccagtaatatgcatattaa

SEQ ID NO: 14030 - DNA, 40 bp, Homo sapiens
taatatgcatattactggtgcaggaccattctttgataca

SEQ ID NO: 14031 - DNA, 40 bp, Homo sapiens
tgtatcaaagaatggtcctgcaccagtaatatgcatatta

SEQ ID NO: 14032 - DNA, 40 bp, Homo sapiens
aatatgcatattactggtgcaggaccattctttgatacag

SEQ ID NO: 14033 - DNA, 40 bp, Homo sapiens
ctgtatcaaagaatggtcctgcaccagtaatatgcatatt

SEQ ID NO: 14034 - DNA, 40 bp, Homo sapiens
atatgcatattactggtgcaggaccattctttgatacaga

SEQ ID NO: 14035 - DNA, 40 bp, Homo sapiens
tctgtatcaaagaatggtcctgcaccagtaatatgcatat

SEQ ID NO: 14036 - DNA, 40 bp, Homo sapiens
tatgcatattactggtgcaggaccattctttgatacagat

SEQ ID NO: 14037 - DNA, 40 bp, Homo sapiens
atctgtatcaaagaatggtcctgcaccagtaatatgcata

SEQ ID NO: 14038 - DNA, 40 bp, Homo sapiens
atgcatattactggtgcaggaccattctttgatacagata

SEQ ID NO: 14039 - DNA, 40 bp, Homo sapiens
tatctgtatcaaagaatggtcctgcaccagtaatatgcat

SEQ ID NO: 14040 - DNA, 40 bp, Homo sapiens
tgcatattactggtgcaggaccattctttgatacagataa

SEQ ID NO: 14041 - DNA, 40 bp, Homo sapiens
ttatctgtatcaaagaatggtcctgcaccagtaatatgca

SEQ ID NO: 14042 - DNA, 40 bp, Homo sapiens
gcatattactggtgcaggaccattctttgatacagataaa

SEQ ID NO: 14043 - DNA, 40 bp, Homo sapiens
tttatctgtatcaaagaatggtcctgcaccagtaatatgc

SEQ ID NO: 14044 - DNA, 40 bp, Homo sapiens
catattactggtgcaggaccattctttgatacagataaag

SEQ ID NO: 14045 - DNA, 40 bp, Homo sapiens
ctttatctgtatcaaagaatggtcctgcaccagtaatatg

SEQ ID NO: 14046 - DNA, 40 bp, Homo sapiens
atattactggtgcaggaccattctttgatacagataaagg

SEQ ID NO: 14047 - DNA, 40 bp, Homo sapiens
cctttatctgtatcaaagaatggtcctgcaccagtaatat

SEQ ID NO: 14048 - DNA, 40 bp, Homo sapiens
tattactggtgcaggaccattctttgatacagataaaggt

SEQ ID NO: 14049 - DNA, 40 bp, Homo sapiens
acctttatctgtatcaaagaatggtcctgcaccagtaata

SEQ ID NO: 14050 - DNA, 40 bp, Homo sapiens
attactggtgcaggaccattctttgatacagataaaggtt

SEQ ID NO: 14051 - DNA, 40 bp, Homo sapiens
aacctttatctgtatcaaagaatggtcctgcaccagtaat

SEQ ID NO: 14052 - DNA, 40 bp, Homo sapiens
ttactggtgcaggaccattctttgatacagataaaggttt

SEQ ID NO: 14053 - DNA, 40 bp, Homo sapiens
aaacctttatctgtatcaaagaatggtcctgcaccagtaa

SEQ ID NO: 14054 - DNA, 40 bp, Homo sapiens
tactggtgcaggaccattctttgatacagataaaggtttc

SEQ ID NO: 14055 - DNA, 40 bp, Homo sapiens
gaaacctttatctgtatcaaagaatggtcctgcaccagta

SEQ ID NO: 14056 - DNA, 40 bp, Homo sapiens
actggtgcaggaccattctttgatacagataaaggtttct

SEQ ID NO: 14057 - DNA, 40 bp, Homo sapiens
agaaacctttatctgtatcaaagaatggtcctgcaccagt

SEQ ID NO: 14058 - DNA, 40 bp, Homo sapiens
ctggtgcaggaccattctttgatacagataaaggtttctc

SEQ ID NO: 14059 - DNA, 40 bp, Homo sapiens
gagaaacctttatctgtatcaaagaatggtcctgcaccag

SEQ ID NO: 14060 - DNA, 40 bp, Homo sapiens
tggtgcaggaccattctttgatacagataaaggtttctct

SEQ ID NO: 14061 - DNA, 40 bp, Homo sapiens
agagaaacctttatctgtatcaaagaatggtcctgcacca

SEQ ID NO: 14062 - DNA, 40 bp, Homo sapiens
ggtgcaggaccattctttgatacagataaaggtttctctg

SEQ ID NO: 14063 - DNA, 40 bp, Homo sapiens
cagagaaacctttatctgtatcaaagaatggtcctgcacc

SEQ ID NO: 14064 - DNA, 40 bp, Homo sapiens
gtgcaggaccattctttgatacagataaaggtttctctga

SEQ ID NO: 14065 - DNA, 40 bp, Homo sapiens
tcagagaaacctttatctgtatcaaagaatggtcctgcac

SEQ ID NO: 14066 - DNA, 40 bp, Homo sapiens
tgcaggaccattctttgatacagataaaggtttctctgac

SEQ ID NO: 14067 - DNA, 40 bp, Homo sapiens
gtcagagaaacctttatctgtatcaaagaatggtcctgca

SEQ ID NO: 14068 - DNA, 40 bp, Homo sapiens
gcaggaccattctttgatacagataaaggtttctctgacc

SEQ ID NO: 14069 - DNA, 40 bp, Homo sapiens
ggtcagagaaacctttatctgtatcaaagaatggtcctgc

SEQ ID NO: 14070 - DNA, 40 bp, Homo sapiens
caggaccattctttgatacagataaaggtttctctgacca

SEQ ID NO: 14071 - DNA, 40 bp, Homo sapiens
tggtcagagaaacctttatctgtatcaaagaatggtcctg

SEQ ID NO: 14072 - DNA, 40 bp, Homo sapiens
aggaccattctttgatacagataaaggtttctctgaccat

SEQ ID NO: 14073 - DNA, 40 bp, Homo sapiens
atggtcagagaaacctttatctgtatcaaagaatggtcct

SEQ ID NO: 14074 - DNA, 40 bp, Homo sapiens
ggaccattctttgatacagataaaggtttctctgaccatt

SEQ ID NO: 14075 - DNA, 40 bp, Homo sapiens
aatggtcagagaaacctttatctgtatcaaagaatggtcc

SEQ ID NO: 14076 - DNA, 40 bp, Homo sapiens
gaccattctttgatacagataaaggtttctctgaccattt

SEQ ID NO: 14077 - DNA, 40 bp, Homo sapiens
aaatggtcagagaaacctttatctgtatcaaagaatggtc

SEQ ID NO: 14078 - DNA, 40 bp, Homo sapiens
accattctttgatacagataaaggtttctctgaccatttt

SEQ ID NO: 14079 - DNA, 40 bp, Homo sapiens
aaaatggtcagagaaacctttatctgtatcaaagaatggt

SEQ ID NO: 14080 - DNA, 40 bp, Homo sapiens
ccattctttgatacagataaaggtttctctgaccattttc

SEQ ID NO: 14081 - DNA, 40 bp, Homo sapiens
gaaaatggtcagagaaacctttatctgtatcaaagaatgg

SEQ ID NO: 14082 - DNA, 40 bp, Homo sapiens
cattctttgatacagataaaggtttctctgaccattttca

SEQ ID NO: 14083 - DNA, 40 bp, Homo sapiens
tgaaaatggtcagagaaacctttatctgtatcaaagaatg

SEQ ID NO: 14084 - DNA, 40 bp, Homo sapiens
attctttgatacagataaaggtttctctgaccattttcat

SEQ ID NO: 14085 - DNA, 40 bp, Homo sapiens
atgaaaatggtcagagaaacctttatctgtatcaaagaat

SEQ ID NO: 14086 - DNA, 40 bp, Homo sapiens
ttctttgatacagataaaggtttctctgaccattttcatg

SEQ ID NO: 14087 - DNA, 40 bp, Homo sapiens
catgaaaatggtcagagaaacctttatctgtatcaaagaa

SEQ ID NO: 14088 - DNA, 40 bp, Homo sapiens
tctttgatacagataaaggtttctctgaccattttcatga

SEQ ID NO: 14089 - DNA, 40 bp, Homo sapiens
tcatgaaaatggtcagagaaacctttatctgtatcaaaga

SEQ ID NO: 14090 - DNA, 40 bp, Homo sapiens
ctttgatacagataaaggtttctctgaccattttcatgag

SEQ ID NO: 14091 - DNA, 40 bp, Homo sapiens
ctcatgaaaatggtcagagaaacctttatctgtatcaaag

SEQ ID NO: 14092 - DNA, 40 bp, Homo sapiens
tttgatacagataaaggtttctctgaccattttcatgagt

SEQ ID NO: 14093 - DNA, 40 bp, Homo sapiens
actcatgaaaatggtcagagaaacctttatctgtatcaaa

SEQ ID NO: 14094 - DNA, 40 bp, Homo sapiens
ttgatacagataaaggtttctctgaccattttcatgagta

SEQ ID NO: 14095 - DNA, 40 bp, Homo sapiens
tactcatgaaaatggtcagagaaacctttatctgtatcaa

SEQ ID NO: 14096 - DNA, 40 bp, Homo sapiens
tgatacagataaaggtttctctgaccattttcatgagtac

SEQ ID NO: 14097 - DNA, 40 bp, Homo sapiens
gtactcatgaaaatggtcagagaaacctttatctgtatca

SEQ ID NO: 14098 - DNA, 40 bp, Homo sapiens
gatacagataaaggtttctctgaccattttcatgagtact

SEQ ID NO: 14099 - DNA, 40 bp, Homo sapiens
agtactcatgaaaatggtcagagaaacctttatctgtatc

SEQ ID NO: 14100 - DNA, 40 bp, Homo sapiens
atacagataaaggtttctctgaccattttcatgagtactt

SEQ ID NO: 14101 - DNA, 40 bp, Homo sapiens
aagtactcatgaaaatggtcagagaaacctttatctgtat

SEQ ID NO: 14102 - DNA, 40 bp, Homo sapiens
tacagataaaggtttctctgaccattttcatgagtactta

SEQ ID NO: 14103 - DNA, 40 bp, Homo sapiens
taagtactcatgaaaatggtcagagaaacctttatctgta

SEQ ID NO: 14104 - DNA, 40 bp, Homo sapiens
acagataaaggtttctctgaccattttcatgagtacttat

SEQ ID NO: 14105 - DNA, 40 bp, Homo sapiens
ataagtactcatgaaaatggtcagagaaacctttatctgt

SEQ ID NO: 14106 - DNA, 40 bp, Homo sapiens
cagataaaggtttctctgaccattttcatgagtacttatt

SEQ ID NO: 14107 - DNA, 40 bp, Homo sapiens
aataagtactcatgaaaatggtcagagaaacctttatctg

SEQ ID NO: 14108 - DNA, 40 bp, Homo sapiens
agataaaggtttctctgaccattttcatgagtacttatta

SEQ ID NO: 14109 - DNA, 40 bp, Homo sapiens
taataagtactcatgaaaatggtcagagaaacctttatct

SEQ ID NO: 14110 - DNA, 40 bp, Homo sapiens
gataaaggtttctctgaccattttcatgagtacttattac

SEQ ID NO: 14111 - DNA, 40 bp, Homo sapiens
gtaataagtactcatgaaaatggtcagagaaacctttatc

SEQ ID NO: 14112 - DNA, 40 bp, Homo sapiens
ataaaggtttctctgaccattttcatgagtacttattaca

SEQ ID NO: 14113 - DNA, 40 bp, Homo sapiens
tgtaataagtactcatgaaaatggtcagagaaacctttat

SEQ ID NO: 14114 - DNA, 40 bp, Homo sapiens
taaaggtttctctgaccattttcatgagtacttattacaa

SEQ ID NO: 14115 - DNA, 40 bp, Homo sapiens
ttgtaataagtactcatgaaaatggtcagagaaaccttta

SEQ ID NO: 14116 - DNA, 40 bp, Homo sapiens
aaaggtttctctgaccattttcatgagtacttattacaag

SEQ ID NO: 14117 - DNA, 40 bp, Homo sapiens
cttgtaataagtactcatgaaaatggtcagagaaaccttt

SEQ ID NO: 14118 - DNA, 40 bp, Homo sapiens
aaggtttctctgaccattttcatgagtacttattacaaga

SEQ ID NO: 14119 - DNA, 40 bp, Homo sapiens
tcttgtaataagtactcatgaaaatggtcagagaaacctt

SEQ ID NO: 14120 - DNA, 40 bp, Homo sapiens
aggtttctctgaccattttcatgagtacttattacaagat

SEQ ID NO: 14121 - DNA, 40 bp, Homo sapiens
atcttgtaataagtactcatgaaaatggtcagagaaacct

SEQ ID NO: 14122 - DNA, 40 bp, Homo sapiens
ggtttctctgaccattttcatgagtacttattacaagata

SEQ ID NO: 14123 - DNA, 40 bp, Homo sapiens
tatcttgtaataagtactcatgaaaatggtcagagaaacc

SEQ ID NO: 14124 - DNA, 40 bp, Homo sapiens
gtttctctgaccattttcatgagtacttattacaagataa

SEQ ID NO: 14125 - DNA, 40 bp, Homo sapiens
ttatcttgtaataagtactcatgaaaatggtcagagaaac

SEQ ID NO: 14126 - DNA, 40 bp, Homo sapiens
tttctctgaccattttcatgagtacttattacaagataat

SEQ ID NO: 14127 - DNA, 40 bp, Homo sapiens
attatcttgtaataagtactcatgaaaatggtcagagaaa

SEQ ID NO: 14128 - DNA, 40 bp, Homo sapiens
ttctctgaccattttcatgagtacttattacaagataatt

SEQ ID NO: 14129 - DNA, 40 bp, Homo sapiens
aattatcttgtaataagtactcatgaaaatggtcagagaa

SEQ ID NO: 14130 - DNA, 40 bp, Homo sapiens
tctctgaccattttcatgagtacttattacaagataatta

SEQ ID NO: 14131 - DNA, 40 bp, Homo sapiens
taattatcttgtaataagtactcatgaaaatggtcagaga

SEQ ID NO: 14132 - DNA, 40 bp, Homo sapiens
ctctgaccattttcatgagtacttattacaagataattat

SEQ ID NO: 14133 - DNA, 40 bp, Homo sapiens
ataattatcttgtaataagtactcatgaaaatggtcagag

SEQ ID NO: 14134 - DNA, 40 bp, Homo sapiens
tctgaccattttcatgagtacttattacaagataattatg

SEQ ID NO: 14135 - DNA, 40 bp, Homo sapiens
cataattatcttgtaataagtactcatgaaaatggtcaga

SEQ ID NO: 14136 - DNA, 40 bp, Homo sapiens
ctgaccattttcatgagtacttattacaagataattatgc

SEQ ID NO: 14137 - DNA, 40 bp, Homo sapiens
gcataattatcttgtaataagtactcatgaaaatggtcag

SEQ ID NO: 14138 - DNA, 40 bp, Homo sapiens
tgaccattttcatgagtacttattacaagataattatgct

SEQ ID NO: 14139 - DNA, 40 bp, Homo sapiens
agcataattatcttgtaataagtactcatgaaaatggtca

SEQ ID NO: 14140 - DNA, 40 bp, Homo sapiens
gaccattttcatgagtacttattacaagataattatgctg

SEQ ID NO: 14141 - DNA, 40 bp, Homo sapiens
cagcataattatcttgtaataagtactcatgaaaatggtc

SEQ ID NO: 14142 - DNA, 40 bp, Homo sapiens
accattttcatgagtacttattacaagataattatgctga

SEQ ID NO: 14143 - DNA, 40 bp, Homo sapiens
tcagcataattatcttgtaataagtactcatgaaaatggt

SEQ ID NO: 14144 - DNA, 40 bp, Homo sapiens
ccattttcatgagtacttattacaagataattatgctgaa

SEQ ID NO: 14145 - DNA, 40 bp, Homo sapiens
ttcagcataattatcttgtaataagtactcatgaaaatgg

SEQ ID NO: 14146 - DNA, 40 bp, Homo sapiens
cattttcatgagtacttattacaagataattatgctgaaa

SEQ ID NO: 14147 - DNA, 40 bp, Homo sapiens
tttcagcataattatcttgtaataagtactcatgaaaatg

SEQ ID NO: 14148 - DNA, 40 bp, Homo sapiens
attttcatgagtacttattacaagataattatgctgaaag

SEQ ID NO: 14149 - DNA, 40 bp, Homo sapiens
ctttcagcataattatcttgtaataagtactcatgaaaat

SEQ ID NO: 14150 - DNA, 40 bp, Homo sapiens
ttttcatgagtacttattacaagataattatgctgaaagt

SEQ ID NO: 14151 - DNA, 40 bp, Homo sapiens
actttcagcataattatcttgtaataagtactcatgaaaa

SEQ ID NO: 14152 - DNA, 40 bp, Homo sapiens
tttcatgagtacttattacaagataattatgctgaaagtt

SEQ ID NO: 14153 - DNA, 40 bp, Homo sapiens
aactttcagcataattatcttgtaataagtactcatgaaa

SEQ ID NO: 14154 - DNA, 40 bp, Homo sapiens
ttcatgagtacttattacaagataattatgctgaaagtta

SEQ ID NO: 14155 - DNA, 40 bp, Homo sapiens
taactttcagcataattatcttgtaataagtactcatgaa

SEQ ID NO: 14156 - DNA, 40 bp, Homo sapiens
tcatgagtacttattacaagataattatgctgaaagttaa

SEQ ID NO: 14157 - DNA, 40 bp, Homo sapiens
ttaactttcagcataattatcttgtaataagtactcatga

SEQ ID NO: 14158 - DNA, 40 bp, Homo sapiens
catgagtacttattacaagataattatgctgaaagttaag

SEQ ID NO: 14159 - DNA, 40 bp, Homo sapiens
cttaactttcagcataattatcttgtaataagtactcatg

SEQ ID NO: 14160 - DNA, 40 bp, Homo sapiens
atgagtacttattacaagataattatgctgaaagttaagt

SEQ ID NO: 14161 - DNA, 40 bp, Homo sapiens
acttaactttcagcataattatcttgtaataagtactcat

SEQ ID NO: 14162 - DNA, 40 bp, Homo sapiens
tgagtacttattacaagataattatgctgaaagttaagtt

SEQ ID NO: 14163 - DNA, 40 bp, Homo sapiens
aacttaactttcagcataattatcttgtaataagtactca

SEQ ID NO: 14164 - DNA, 40 bp, Homo sapiens
gagtacttattacaagataattatgctgaaagttaagtta

SEQ ID NO: 14165 - DNA, 40 bp, Homo sapiens
taacttaactttcagcataattatcttgtaataagtactc

SEQ ID NO: 14166 - DNA, 40 bp, Homo sapiens
agtacttattacaagataattatgctgaaagttaagttat

SEQ ID NO: 14167 - DNA, 40 bp, Homo sapiens
ataacttaactttcagcataattatcttgtaataagtact

SEQ ID NO: 14168 - DNA, 40 bp, Homo sapiens
gtacttattacaagataattatgctgaaagttaagttatc

SEQ ID NO: 14169 - DNA, 40 bp, Homo sapiens
gataacttaactttcagcataattatcttgtaataagtac

SEQ ID NO: 14170 - DNA, 40 bp, Homo sapiens
tacttattacaagataattatgctgaaagttaagttatct

SEQ ID NO: 14171 - DNA, 40 bp, Homo sapiens
agataacttaactttcagcataattatcttgtaataagta

SEQ ID NO: 14172 - DNA, 40 bp, Homo sapiens
acttattacaagataattatgctgaaagttaagttatctg

SEQ ID NO: 14173 - DNA, 40 bp, Homo sapiens
cagataacttaactttcagcataattatcttgtaataagt

SEQ ID NO: 14174 - DNA, 40 bp, Homo sapiens
cttattacaagataattatgctgaaagttaagttatctga

SEQ ID NO: 14175 - DNA, 40 bp, Homo sapiens
tcagataacttaactttcagcataattatcttgtaataag

SEQ ID NO: 14176 - DNA, 40 bp, Homo sapiens
ttattacaagataattatgctgaaagttaagttatctgaa

SEQ ID NO: 14177 - DNA, 40 bp, Homo sapiens
ttcagataacttaactttcagcataattatcttgtaataa

SEQ ID NO: 14178 - DNA, 40 bp, Homo sapiens
tattacaagataattatgctgaaagttaagttatctgaaa

SEQ ID NO: 14179 - DNA, 40 bp, Homo sapiens
tttcagataacttaactttcagcataattatcttgtaata

SEQ ID NO: 14180 - DNA, 40 bp, Homo sapiens
attacaagataattatgctgaaagttaagttatctgaaat

SEQ ID NO: 14181 - DNA, 40 bp, Homo sapiens
atttcagataacttaactttcagcataattatcttgtaat

SEQ ID NO: 14182 - DNA, 40 bp, Homo sapiens
ttacaagataattatgctgaaagttaagttatctgaaatg

SEQ ID NO: 14183 - DNA, 40 bp, Homo sapiens
catttcagataacttaactttcagcataattatcttgtaa

SEQ ID NO: 14184 - DNA, 40 bp, Homo sapiens
tacaagataattatgctgaaagttaagttatctgaaatgt

SEQ ID NO: 14185 - DNA, 40 bp, Homo sapiens
acatttcagataacttaactttcagcataattatcttgta

SEQ ID NO: 14186 - DNA, 40 bp, Homo sapiens
acaagataattatgctgaaagttaagttatctgaaatgta

SEQ ID NO: 14187 - DNA, 40 bp, Homo sapiens
tacatttcagataacttaactttcagcataattatcttgt

SEQ ID NO: 14188 - DNA, 40 bp, Homo sapiens
caagataattatgctgaaagttaagttatctgaaatgtac

SEQ ID NO: 14189 - DNA, 40 bp, Homo sapiens
gtacatttcagataacttaactttcagcataattatcttg

SEQ ID NO: 14190 - DNA, 40 bp, Homo sapiens
aagataattatgctgaaagttaagttatctgaaatgtacc

SEQ ID NO: 14191 - DNA, 40 bp, Homo sapiens
ggtacatttcagataacttaactttcagcataattatctt

SEQ ID NO: 14192 - DNA, 40 bp, Homo sapiens
agataattatgctgaaagttaagttatctgaaatgtacct

SEQ ID NO: 14193 - DNA, 40 bp, Homo sapiens
aggtacatttcagataacttaactttcagcataattatct

SEQ ID NO: 14194 - DNA, 40 bp, Homo sapiens
gataattatgctgaaagttaagttatctgaaatgtacctt

SEQ ID NO: 14195 - DNA, 40 bp, Homo sapiens
aaggtacatttcagataacttaactttcagcataattatc

SEQ ID NO: 14196 - DNA, 40 bp, Homo sapiens
ataattatgctgaaagttaagttatctgaaatgtaccttg

SEQ ID NO: 14197 - DNA, 40 bp, Homo sapiens
caaggtacatttcagataacttaactttcagcataattat

SEQ ID NO: 14198 - DNA, 40 bp, Homo sapiens
taattatgctgaaagttaagttatctgaaatgtaccttgg

SEQ ID NO: 14199 - DNA, 40 bp, Homo sapiens
ccaaggtacatttcagataacttaactttcagcataatta

SEQ ID NO: 14200 - DNA, 40 bp, Homo sapiens
aattatgctgaaagttaagttatctgaaatgtaccttggg

SEQ ID NO: 14201 - DNA, 40 bp, Homo sapiens
cccaaggtacatttcagataacttaactttcagcataatt

SEQ ID NO: 14202 - DNA, 40 bp, Homo sapiens
attatgctgaaagttaagttatctgaaatgtaccttgggt

SEQ ID NO: 14203 - DNA, 40 bp, Homo sapiens
acccaaggtacatttcagataacttaactttcagcataat

SEQ ID NO: 14204 - DNA, 40 bp, Homo sapiens
ttatgctgaaagttaagttatctgaaatgtaccttgggtt

SEQ ID NO: 14205 - DNA, 40 bp, Homo sapiens
aacccaaggtacatttcagataacttaactttcagcataa

SEQ ID NO: 14206 - DNA, 40 bp, Homo sapiens
tatgctgaaagttaagttatctgaaatgtaccttgggttt

SEQ ID NO: 14207 - DNA, 40 bp, Homo sapiens
aaacccaaggtacatttcagataacttaactttcagcata

SEQ ID NO: 14208 - DNA, 40 bp, Homo sapiens
atgctgaaagttaagttatctgaaatgtaccttgggtttc

SEQ ID NO: 14209 - DNA, 40 bp, Homo sapiens
gaaacccaaggtacatttcagataacttaactttcagcat

SEQ ID NO: 14210 - DNA, 40 bp, Homo sapiens
tgctgaaagttaagttatctgaaatgtaccttgggtttca

SEQ ID NO: 14211 - DNA, 40 bp, Homo sapiens
tgaaacccaaggtacatttcagataacttaactttcagca

SEQ ID NO: 14212 - DNA, 40 bp, Homo sapiens
gctgaaagttaagttatctgaaatgtaccttgggtttcaa

SEQ ID NO: 14213 - DNA, 40 bp, Homo sapiens
ttgaaacccaaggtacatttcagataacttaactttcagc

SEQ ID NO: 14214 - DNA, 40 bp, Homo sapiens
ctgaaagttaagttatctgaaatgtaccttgggtttcaag

SEQ ID NO: 14215 - DNA, 40 bp, Homo sapiens
cttgaaacccaaggtacatttcagataacttaactttcag

SEQ ID NO: 14216 - DNA, 40 bp, Homo sapiens
tgaaagttaagttatctgaaatgtaccttgggtttcaagt

SEQ ID NO: 14217 - DNA, 40 bp, Homo sapiens
acttgaaacccaaggtacatttcagataacttaactttca

SEQ ID NO: 14218 - DNA, 40 bp, Homo sapiens
gaaagttaagttatctgaaatgtaccttgggtttcaagtt

SEQ ID NO: 14219 - DNA, 40 bp, Homo sapiens
aacttgaaacccaaggtacatttcagataacttaactttc

SEQ ID NO: 14220 - DNA, 40 bp, Homo sapiens
aaagttaagttatctgaaatgtaccttgggtttcaagtta

SEQ ID NO: 14221 - DNA, 40 bp, Homo sapiens
taacttgaaacccaaggtacatttcagataacttaacttt

SEQ ID NO: 14222 - DNA, 40 bp, Homo sapiens
aagttaagttatctgaaatgtaccttgggtttcaagttat

SEQ ID NO: 14223 - DNA, 40 bp, Homo sapiens
ataacttgaaacccaaggtacatttcagataacttaactt

SEQ ID NO: 14224 - DNA, 40 bp, Homo sapiens
agttaagttatctgaaatgtaccttgggtttcaagttata

SEQ ID NO: 14225 - DNA, 40 bp, Homo sapiens
tataacttgaaacccaaggtacatttcagataacttaact

SEQ ID NO: 14226 - DNA, 40 bp, Homo sapiens
gttaagttatctgaaatgtaccttgggtttcaagttatat

SEQ ID NO: 14227 - DNA, 40 bp, Homo sapiens
atataacttgaaacccaaggtacatttcagataacttaac

SEQ ID NO: 14228 - DNA, 40 bp, Homo sapiens
ttaagttatctgaaatgtaccttgggtttcaagttatatg

SEQ ID NO: 14229 - DNA, 40 bp, Homo sapiens
catataacttgaaacccaaggtacatttcagataacttaa

SEQ ID NO: 14230 - DNA, 40 bp, Homo sapiens
taagttatctgaaatgtaccttgggtttcaagttatatgt

SEQ ID NO: 14231 - DNA, 40 bp, Homo sapiens
acatataacttgaaacccaaggtacatttcagataactta

SEQ ID NO: 14232 - DNA, 40 bp, Homo sapiens
aagttatctgaaatgtaccttgggtttcaagttatatgta

SEQ ID NO: 14233 - DNA, 40 bp, Homo sapiens
tacatataacttgaaacccaaggtacatttcagataactt

SEQ ID NO: 14234 - DNA, 40 bp, Homo sapiens
agttatctgaaatgtaccttgggtttcaagttatatgtaa

SEQ ID NO: 14235 - DNA, 40 bp, Homo sapiens
ttacatataacttgaaacccaaggtacatttcagataact

SEQ ID NO: 14236 - DNA, 40 bp, Homo sapiens
gttatctgaaatgtaccttgggtttcaagttatatgtaac

SEQ ID NO: 14237 - DNA, 40 bp, Homo sapiens
gttacatataacttgaaacccaaggtacatttcagataac

SEQ ID NO: 14238 - DNA, 40 bp, Homo sapiens
ttatctgaaatgtaccttgggtttcaagttatatgtaacc

SEQ ID NO: 14239 - DNA, 40 bp, Homo sapiens
ggttacatataacttgaaacccaaggtacatttcagataa

SEQ ID NO: 14240 - DNA, 40 bp, Homo sapiens
tatctgaaatgtaccttgggtttcaagttatatgtaacca

SEQ ID NO: 14241 - DNA, 40 bp, Homo sapiens
tggttacatataacttgaaacccaaggtacatttcagata

SEQ ID NO: 14242 - DNA, 40 bp, Homo sapiens
atctgaaatgtaccttgggtttcaagttatatgtaaccat

SEQ ID NO: 14243 - DNA, 40 bp, Homo sapiens
atggttacatataacttgaaacccaaggtacatttcagat

SEQ ID NO: 14244 - DNA, 40 bp, Homo sapiens
tctgaaatgtaccttgggtttcaagttatatgtaaccatt

SEQ ID NO: 14245 - DNA, 40 bp, Homo sapiens
aatggttacatataacttgaaacccaaggtacatttcaga

SEQ ID NO: 14246 - DNA, 40 bp, Homo sapiens
ctgaaatgtaccttgggtttcaagttatatgtaaccatta

SEQ ID NO: 14247 - DNA, 40 bp, Homo sapiens
taatggttacatataacttgaaacccaaggtacatttcag

SEQ ID NO: 14248 - DNA, 40 bp, Homo sapiens
tgaaatgtaccttgggtttcaagttatatgtaaccattaa

SEQ ID NO: 14249 - DNA, 40 bp, Homo sapiens
ttaatggttacatataacttgaaacccaaggtacatttca

SEQ ID NO: 14250 - DNA, 40 bp, Homo sapiens
gaaatgtaccttgggtttcaagttatatgtaaccattaat

SEQ ID NO: 14251 - DNA, 40 bp, Homo sapiens
attaatggttacatataacttgaaacccaaggtacatttc

SEQ ID NO: 14252 - DNA, 40 bp, Homo sapiens
aaatgtaccttgggtttcaagttatatgtaaccattaata

SEQ ID NO: 14253 - DNA, 40 bp, Homo sapiens
tattaatggttacatataacttgaaacccaaggtacattt

SEQ ID NO: 14254 - DNA, 40 bp, Homo sapiens
aatgtaccttgggtttcaagttatatgtaaccattaatat

SEQ ID NO: 14255 - DNA, 40 bp, Homo sapiens
atattaatggttacatataacttgaaacccaaggtacatt

SEQ ID NO: 14256 - DNA, 40 bp, Homo sapiens
atgtaccttgggtttcaagttatatgtaaccattaatatg

SEQ ID NO: 14257 - DNA, 40 bp, Homo sapiens
catattaatggttacatataacttgaaacccaaggtacat

SEQ ID NO: 14258 - DNA, 40 bp, Homo sapiens
tgtaccttgggtttcaagttatatgtaaccattaatatgg

SEQ ID NO: 14259 - DNA, 40 bp, Homo sapiens
ccatattaatggttacatataacttgaaacccaaggtaca

SEQ ID NO: 14260 - DNA, 40 bp, Homo sapiens
gtaccttgggtttcaagttatatgtaaccattaatatggg

SEQ ID NO: 14261 - DNA, 40 bp, Homo sapiens
cccatattaatggttacatataacttgaaacccaaggtac

SEQ ID NO: 14262 - DNA, 40 bp, Homo sapiens
taccttgggtttcaagttatatgtaaccattaatatggga

SEQ ID NO: 14263 - DNA, 40 bp, Homo sapiens
tcccatattaatggttacatataacttgaaacccaaggta

SEQ ID NO: 14264 - DNA, 40 bp, Homo sapiens
accttgggtttcaagttatatgtaaccattaatatgggaa

SEQ ID NO: 14265 - DNA, 40 bp, Homo sapiens
ttcccatattaatggttacatataacttgaaacccaaggt

SEQ ID NO: 14266 - DNA, 40 bp, Homo sapiens
ccttgggtttcaagttatatgtaaccattaatatgggaac

SEQ ID NO: 14267 - DNA, 40 bp, Homo sapiens
gttcccatattaatggttacatataacttgaaacccaagg

SEQ ID NO: 14268 - DNA, 40 bp, Homo sapiens
cttgggtttcaagttatatgtaaccattaatatgggaact

SEQ ID NO: 14269 - DNA, 40 bp, Homo sapiens
agttcccatattaatggttacatataacttgaaacccaag

SEQ ID NO: 14270 - DNA, 40 bp, Homo sapiens
ttgggtttcaagttatatgtaaccattaatatgggaactt

SEQ ID NO: 14271 - DNA, 40 bp, Homo sapiens
aagttcccatattaatggttacatataacttgaaacccaa

SEQ ID NO: 14272 - DNA, 40 bp, Homo sapiens
tgggtttcaagttatatgtaaccattaatatgggaacttt

SEQ ID NO: 14273 - DNA, 40 bp, Homo sapiens
aaagttcccatattaatggttacatataacttgaaaccca

SEQ ID NO: 14274 - DNA, 40 bp, Homo sapiens
gggtttcaagttatatgtaaccattaatatgggaacttta

SEQ ID NO: 14275 - DNA, 40 bp, Homo sapiens
taaagttcccatattaatggttacatataacttgaaaccc

SEQ ID NO: 14276 - DNA, 40 bp, Homo sapiens
ggtttcaagttatatgtaaccattaatatgggaactttac

SEQ ID NO: 14277 - DNA, 40 bp, Homo sapiens
gtaaagttcccatattaatggttacatataacttgaaacc

SEQ ID NO: 14278 - DNA, 40 bp, Homo sapiens
gtttcaagttatatgtaaccattaatatgggaactttact

SEQ ID NO: 14279 - DNA, 40 bp, Homo sapiens
agtaaagttcccatattaatggttacatataacttgaaac

SEQ ID NO: 14280 - DNA, 40 bp, Homo sapiens
tttcaagttatatgtaaccattaatatgggaactttactt

SEQ ID NO: 14281 - DNA, 40 bp, Homo sapiens
aagtaaagttcccatattaatggttacatataacttgaaa

SEQ ID NO: 14282 - DNA, 40 bp, Homo sapiens
ttcaagttatatgtaaccattaatatgggaactttacttt

SEQ ID NO: 14283 - DNA, 40 bp, Homo sapiens
aaagtaaagttcccatattaatggttacatataacttgaa

SEQ ID NO: 14284 - DNA, 40 bp, Homo sapiens
tcaagttatatgtaaccattaatatgggaactttactttc

SEQ ID NO: 14285 - DNA, 40 bp, Homo sapiens
gaaagtaaagttcccatattaatggttacatataacttga

SEQ ID NO: 14286 - DNA, 40 bp, Homo sapiens
caagttatatgtaaccattaatatgggaactttactttcc

SEQ ID NO: 14287 - DNA, 40 bp, Homo sapiens
ggaaagtaaagttcccatattaatggttacatataacttg

SEQ ID NO: 14288 - DNA, 40 bp, Homo sapiens
aagttatatgtaaccattaatatgggaactttactttcct

SEQ ID NO: 14289 - DNA, 40 bp, Homo sapiens
aggaaagtaaagttcccatattaatggttacatataactt

SEQ ID NO: 14290 - DNA, 40 bp, Homo sapiens
agttatatgtaaccattaatatgggaactttactttcctt

SEQ ID NO: 14291 - DNA, 40 bp, Homo sapiens
aaggaaagtaaagttcccatattaatggttacatataact

SEQ ID NO: 14292 - DNA, 40 bp, Homo sapiens
gttatatgtaaccattaatatgggaactttactttccttg

SEQ ID NO: 14293 - DNA, 40 bp, Homo sapiens
caaggaaagtaaagttcccatattaatggttacatataac

SEQ ID NO: 14294 - DNA, 40 bp, Homo sapiens
ttatatgtaaccattaatatgggaactttactttccttgg

SEQ ID NO: 14295 - DNA, 40 bp, Homo sapiens
ccaaggaaagtaaagttcccatattaatggttacatataa

SEQ ID NO: 14296 - DNA, 40 bp, Homo sapiens
tatatgtaaccattaatatgggaactttactttccttggg

SEQ ID NO: 14297 - DNA, 40 bp, Homo sapiens
cccaaggaaagtaaagttcccatattaatggttacatata

SEQ ID NO: 14298 - DNA, 40 bp, Homo sapiens
atatgtaaccattaatatgggaactttactttccttggga

SEQ ID NO: 14299 - DNA, 40 bp, Homo sapiens
tcccaaggaaagtaaagttcccatattaatggttacatat

SEQ ID NO: 14300 - DNA, 40 bp, Homo sapiens
tatgtaaccattaatatgggaactttactttccttgggag

SEQ ID NO: 14301 - DNA, 40 bp, Homo sapiens
ctcccaaggaaagtaaagttcccatattaatggttacata

SEQ ID NO: 14302 - DNA, 40 bp, Homo sapiens
atgtaaccattaatatgggaactttactttccttgggagt

SEQ ID NO: 14303 - DNA, 40 bp, Homo sapiens
actcccaaggaaagtaaagttcccatattaatggttacat

SEQ ID NO: 14304 - DNA, 40 bp, Homo sapiens
tgtaaccattaatatgggaactttactttccttgggagta

SEQ ID NO: 14305 - DNA, 40 bp, Homo sapiens
tactcccaaggaaagtaaagttcccatattaatggttaca

SEQ ID NO: 14306 - DNA, 40 bp, Homo sapiens
gtaaccattaatatgggaactttactttccttgggagtat

SEQ ID NO: 14307 - DNA, 40 bp, Homo sapiens
atactcccaaggaaagtaaagttcccatattaatggttac

SEQ ID NO: 14308 - DNA, 40 bp, Homo sapiens
taaccattaatatgggaactttactttccttgggagtatg

SEQ ID NO: 14309 - DNA, 40 bp, Homo sapiens
catactcccaaggaaagtaaagttcccatattaatggtta

SEQ ID NO: 14310 - DNA, 40 bp, Homo sapiens
aaccattaatatgggaactttactttccttgggagtatgt

SEQ ID NO: 14311 - DNA, 40 bp, Homo sapiens
acatactcccaaggaaagtaaagttcccatattaatggtt

SEQ ID NO: 14312 - DNA, 40 bp, Homo sapiens
accattaatatgggaactttactttccttgggagtatgtc

SEQ ID NO: 14313 - DNA, 40 bp, Homo sapiens
gacatactcccaaggaaagtaaagttcccatattaatggt

SEQ ID NO: 14314 - DNA, 40 bp, Homo sapiens
ccattaatatgggaactttactttccttgggagtatgtca

SEQ ID NO: 14315 - DNA, 40 bp, Homo sapiens
tgacatactcccaaggaaagtaaagttcccatattaatgg

SEQ ID NO: 14316 - DNA, 40 bp, Homo sapiens
cattaatatgggaactttactttccttgggagtatgtcag

SEQ ID NO: 14317 - DNA, 40 bp, Homo sapiens
ctgacatactcccaaggaaagtaaagttcccatattaatg

SEQ ID NO: 14318 - DNA, 40 bp, Homo sapiens
attaatatgggaactttactttccttgggagtatgtcagg

SEQ ID NO: 14319 - DNA, 40 bp, Homo sapiens
cctgacatactcccaaggaaagtaaagttcccatattaat

SEQ ID NO: 14320 - DNA, 40 bp, Homo sapiens
ttaatatgggaactttactttccttgggagtatgtcaggg

SEQ ID NO: 14321 - DNA, 40 bp, Homo sapiens
ccctgacatactcccaaggaaagtaaagttcccatattaa

SEQ ID NO: 14322 - DNA, 40 bp, Homo sapiens
taatatgggaactttactttccttgggagtatgtcagggt

SEQ ID NO: 14323 - DNA, 40 bp, Homo sapiens
accctgacatactcccaaggaaagtaaagttcccatatta

SEQ ID NO: 14324 - DNA, 40 bp, Homo sapiens
aatatgggaactttactttccttgggagtatgtcagggtc

SEQ ID NO: 14325 - DNA, 40 bp, Homo sapiens
gaccctgacatactcccaaggaaagtaaagttcccatatt

SEQ ID NO: 14326 - DNA, 40 bp, Homo sapiens
atatgggaactttactttccttgggagtatgtcagggtcc

SEQ ID NO: 14327 - DNA, 40 bp, Homo sapiens
ggaccctgacatactcccaaggaaagtaaagttcccatat

SEQ ID NO: 14328 - DNA, 40 bp, Homo sapiens
tatgggaactttactttccttgggagtatgtcagggtcca

SEQ ID NO: 14329 - DNA, 40 bp, Homo sapiens
tggaccctgacatactcccaaggaaagtaaagttcccata

SEQ ID NO: 14330 - DNA, 40 bp, Homo sapiens
atgggaactttactttccttgggagtatgtcagggtccat

SEQ ID NO: 14331 - DNA, 40 bp, Homo sapiens
atggaccctgacatactcccaaggaaagtaaagttcccat

SEQ ID NO: 14332 - DNA, 40 bp, Homo sapiens
tgggaactttactttccttgggagtatgtcagggtccatg

SEQ ID NO: 14333 - DNA, 40 bp, Homo sapiens
catggaccctgacatactcccaaggaaagtaaagttccca

SEQ ID NO: 14334 - DNA, 40 bp, Homo sapiens
gggaactttactttccttgggagtatgtcagggtccatga

SEQ ID NO: 14335 - DNA, 40 bp, Homo sapiens
tcatggaccctgacatactcccaaggaaagtaaagttccc

SEQ ID NO: 14336 - DNA, 40 bp, Homo sapiens
ggaactttactttccttgggagtatgtcagggtccatgat

SEQ ID NO: 14337 - DNA, 40 bp, Homo sapiens
atcatggaccctgacatactcccaaggaaagtaaagttcc

SEQ ID NO: 14338 - DNA, 40 bp, Homo sapiens
gaactttactttccttgggagtatgtcagggtccatgatg

SEQ ID NO: 14339 - DNA, 40 bp, Homo sapiens
catcatggaccctgacatactcccaaggaaagtaaagttc

SEQ ID NO: 14340 - DNA, 40 bp, Homo sapiens
aactttactttccttgggagtatgtcagggtccatgatgt

SEQ ID NO: 14341 - DNA, 40 bp, Homo sapiens
acatcatggaccctgacatactcccaaggaaagtaaagtt

SEQ ID NO: 14342 - DNA, 40 bp, Homo sapiens
actttactttccttgggagtatgtcagggtccatgatgtt

SEQ ID NO: 14343 - DNA, 40 bp, Homo sapiens
aacatcatggaccctgacatactcccaaggaaagtaaagt

SEQ ID NO: 14344 - DNA, 40 bp, Homo sapiens
ctttactttccttgggagtatgtcagggtccatgatgttc

SEQ ID NO: 14345 - DNA, 40 bp, Homo sapiens
gaacatcatggaccctgacatactcccaaggaaagtaaag

SEQ ID NO: 14346 - DNA, 40 bp, Homo sapiens
tttactttccttgggagtatgtcagggtccatgatgttca

SEQ ID NO: 14347 - DNA, 40 bp, Homo sapiens
tgaacatcatggaccctgacatactcccaaggaaagtaaa

SEQ ID NO: 14348 - DNA, 40 bp, Homo sapiens
ttactttccttgggagtatgtcagggtccatgatgttcac

SEQ ID NO: 14349 - DNA, 40 bp, Homo sapiens
gtgaacatcatggaccctgacatactcccaaggaaagtaa

SEQ ID NO: 14350 - DNA, 40 bp, Homo sapiens
tactttccttgggagtatgtcagggtccatgatgttcact

SEQ ID NO: 14351 - DNA, 40 bp, Homo sapiens
agtgaacatcatggaccctgacatactcccaaggaaagta

SEQ ID NO: 14352 - DNA, 40 bp, Homo sapiens
actttccttgggagtatgtcagggtccatgatgttcactc

SEQ ID NO: 14353 - DNA, 40 bp, Homo sapiens
gagtgaacatcatggaccctgacatactcccaaggaaagt

SEQ ID NO: 14354 - DNA, 40 bp, Homo sapiens
ctttccttgggagtatgtcagggtccatgatgttcactct

SEQ ID NO: 14355 - DNA, 40 bp, Homo sapiens
agagtgaacatcatggaccctgacatactcccaaggaaag

SEQ ID NO: 14356 - DNA, 40 bp, Homo sapiens
tttccttgggagtatgtcagggtccatgatgttcactctc

SEQ ID NO: 14357 - DNA, 40 bp, Homo sapiens
gagagtgaacatcatggaccctgacatactcccaaggaaa

SEQ ID NO: 14358 - DNA, 40 bp, Homo sapiens
ttccttgggagtatgtcagggtccatgatgttcactctct

SEQ ID NO: 14359 - DNA, 40 bp, Homo sapiens
agagagtgaacatcatggaccctgacatactcccaaggaa

SEQ ID NO: 14360 - DNA, 40 bp, Homo sapiens
tccttgggagtatgtcagggtccatgatgttcactctctg

SEQ ID NO: 14361 - DNA, 40 bp, Homo sapiens
cagagagtgaacatcatggaccctgacatactcccaagga

SEQ ID NO: 14362 - DNA, 40 bp, Homo sapiens
ccttgggagtatgtcagggtccatgatgttcactctctgt

SEQ ID NO: 14363 - DNA, 40 bp, Homo sapiens
acagagagtgaacatcatggaccctgacatactcccaagg

SEQ ID NO: 14364 - DNA, 40 bp, Homo sapiens
cttgggagtatgtcagggtccatgatgttcactctctgtg

SEQ ID NO: 14365 - DNA, 40 bp, Homo sapiens
cacagagagtgaacatcatggaccctgacatactcccaag

SEQ ID NO: 14366 - DNA, 40 bp, Homo sapiens
ttgggagtatgtcagggtccatgatgttcactctctgtgc

SEQ ID NO: 14367 - DNA, 40 bp, Homo sapiens
gcacagagagtgaacatcatggaccctgacatactcccaa

SEQ ID NO: 14368 - DNA, 40 bp, Homo sapiens
tgggagtatgtcagggtccatgatgttcactctctgtgca

SEQ ID NO: 14369 - DNA, 40 bp, Homo sapiens
tgcacagagagtgaacatcatggaccctgacatactccca

SEQ ID NO: 14370 - DNA, 40 bp, Homo sapiens
gggagtatgtcagggtccatgatgttcactctctgtgcat

SEQ ID NO: 14371 - DNA, 40 bp, Homo sapiens
atgcacagagagtgaacatcatggaccctgacatactccc

SEQ ID NO: 14372 - DNA, 40 bp, Homo sapiens
ggagtatgtcagggtccatgatgttcactctctgtgcatt

SEQ ID NO: 14373 - DNA, 40 bp, Homo sapiens
aatgcacagagagtgaacatcatggaccctgacatactcc

SEQ ID NO: 14374 - DNA, 40 bp, Homo sapiens
gagtatgtcagggtccatgatgttcactctctgtgcattt

SEQ ID NO: 14375 - DNA, 40 bp, Homo sapiens
aaatgcacagagagtgaacatcatggaccctgacatactc

SEQ ID NO: 14376 - DNA, 40 bp, Homo sapiens
agtatgtcagggtccatgatgttcactctctgtgcatttt

SEQ ID NO: 14377 - DNA, 40 bp, Homo sapiens
aaaatgcacagagagtgaacatcatggaccctgacatact

SEQ ID NO: 14378 - DNA, 40 bp, Homo sapiens
gtatgtcagggtccatgatgttcactctctgtgcattttg

SEQ ID NO: 14379 - DNA, 40 bp, Homo sapiens
caaaatgcacagagagtgaacatcatggaccctgacatac

SEQ ID NO: 14380 - DNA, 40 bp, Homo sapiens
tatgtcagggtccatgatgttcactctctgtgcattttga

SEQ ID NO: 14381 - DNA, 40 bp, Homo sapiens
tcaaaatgcacagagagtgaacatcatggaccctgacata

SEQ ID NO: 14382 - DNA, 40 bp, Homo sapiens
atgtcagggtccatgatgttcactctctgtgcattttgat

SEQ ID NO: 14383 - DNA, 40 bp, Homo sapiens
atcaaaatgcacagagagtgaacatcatggaccctgacat

SEQ ID NO: 14384 - DNA, 40 bp, Homo sapiens
tgtcagggtccatgatgttcactctctgtgcattttgatt

SEQ ID NO: 14385 - DNA, 40 bp, Homo sapiens
aatcaaaatgcacagagagtgaacatcatggaccctgaca

SEQ ID NO: 14386 - DNA, 40 bp, Homo sapiens
gtcagggtccatgatgttcactctctgtgcattttgattg

SEQ ID NO: 14387 - DNA, 40 bp, Homo sapiens
caatcaaaatgcacagagagtgaacatcatggaccctgac

SEQ ID NO: 14388 - DNA, 40 bp, Homo sapiens
tcagggtccatgatgttcactctctgtgcattttgattgg

SEQ ID NO: 14389 - DNA, 40 bp, Homo sapiens
ccaatcaaaatgcacagagagtgaacatcatggaccctga

SEQ ID NO: 14390 - DNA, 40 bp, Homo sapiens
cagggtccatgatgttcactctctgtgcattttgattgga

SEQ ID NO: 14391 - DNA, 40 bp, Homo sapiens
tccaatcaaaatgcacagagagtgaacatcatggaccctg

SEQ ID NO: 14392 - DNA, 40 bp, Homo sapiens
agggtccatgatgttcactctctgtgcattttgattggaa

SEQ ID NO: 14393 - DNA, 40 bp, Homo sapiens
ttccaatcaaaatgcacagagagtgaacatcatggaccct

SEQ ID NO: 14394 - DNA, 40 bp, Homo sapiens
gggtccatgatgttcactctctgtgcattttgattggaag

SEQ ID NO: 14395 - DNA, 40 bp, Homo sapiens
cttccaatcaaaatgcacagagagtgaacatcatggaccc

SEQ ID NO: 14396 - DNA, 40 bp, Homo sapiens
ggtccatgatgttcactctctgtgcattttgattggaagt

SEQ ID NO: 14397 - DNA, 40 bp, Homo sapiens
acttccaatcaaaatgcacagagagtgaacatcatggacc

SEQ ID NO: 14398 - DNA, 40 bp, Homo sapiens
gtccatgatgttcactctctgtgcattttgattggaagtg

SEQ ID NO: 14399 - DNA, 40 bp, Homo sapiens
cacttccaatcaaaatgcacagagagtgaacatcatggac

SEQ ID NO: 14400 - DNA, 40 bp, Homo sapiens
tccatgatgttcactctctgtgcattttgattggaagtgt

SEQ ID NO: 14401 - DNA, 40 bp, Homo sapiens
acacttccaatcaaaatgcacagagagtgaacatcatgga

SEQ ID NO: 14402 - DNA, 40 bp, Homo sapiens
ccatgatgttcactctctgtgcattttgattggaagtgta

SEQ ID NO: 14403 - DNA, 40 bp, Homo sapiens
tacacttccaatcaaaatgcacagagagtgaacatcatgg

SEQ ID NO: 14404 - DNA, 40 bp, Homo sapiens
catgatgttcactctctgtgcattttgattggaagtgtat

SEQ ID NO: 14405 - DNA, 40 bp, Homo sapiens
atacacttccaatcaaaatgcacagagagtgaacatcatg

SEQ ID NO: 14406 - DNA, 40 bp, Homo sapiens
atgatgttcactctctgtgcattttgattggaagtgtatt

SEQ ID NO: 14407 - DNA, 40 bp, Homo sapiens
aatacacttccaatcaaaatgcacagagagtgaacatcat

SEQ ID NO: 14408 - DNA, 40 bp, Homo sapiens
tgatgttcactctctgtgcattttgattggaagtgtattt

SEQ ID NO: 14409 - DNA, 40 bp, Homo sapiens
aaatacacttccaatcaaaatgcacagagagtgaacatca

SEQ ID NO: 14410 - DNA, 40 bp, Homo sapiens
gatgttcactctctgtgcattttgattggaagtgtatttc

SEQ ID NO: 14411 - DNA, 40 bp, Homo sapiens
gaaatacacttccaatcaaaatgcacagagagtgaacatc

SEQ ID NO: 14412 - DNA, 40 bp, Homo sapiens
atgttcactctctgtgcattttgattggaagtgtatttca

SEQ ID NO: 14413 - DNA, 40 bp, Homo sapiens
tgaaatacacttccaatcaaaatgcacagagagtgaacat

SEQ ID NO: 14414 - DNA, 40 bp, Homo sapiens
tgttcactctctgtgcattttgattggaagtgtatttcag

SEQ ID NO: 14415 - DNA, 40 bp, Homo sapiens
ctgaaatacacttccaatcaaaatgcacagagagtgaaca

SEQ ID NO: 14416 - DNA, 40 bp, Homo sapiens
gttcactctctgtgcattttgattggaagtgtatttcaga

SEQ ID NO: 14417 - DNA, 40 bp, Homo sapiens
tctgaaatacacttccaatcaaaatgcacagagagtgaac

SEQ ID NO: 14418 - DNA, 40 bp, Homo sapiens
ttcactctctgtgcattttgattggaagtgtatttcagag

SEQ ID NO: 14419 - DNA, 40 bp, Homo sapiens
ctctgaaatacacttccaatcaaaatgcacagagagtgaa

SEQ ID NO: 14420 - DNA, 40 bp, Homo sapiens
tcactctctgtgcattttgattggaagtgtatttcagagt

SEQ ID NO: 14421 - DNA, 40 bp, Homo sapiens
actctgaaatacacttccaatcaaaatgcacagagagtga

SEQ ID NO: 14422 - DNA, 40 bp, Homo sapiens
cactctctgtgcattttgattggaagtgtatttcagagtt

SEQ ID NO: 14423 - DNA, 40 bp, Homo sapiens
aactctgaaatacacttccaatcaaaatgcacagagagtg

SEQ ID NO: 14424 - DNA, 40 bp, Homo sapiens
actctctgtgcattttgattggaagtgtatttcagagttt

SEQ ID NO: 14425 - DNA, 40 bp, Homo sapiens
aaactctgaaatacacttccaatcaaaatgcacagagagt

SEQ ID NO: 14426 - DNA, 40 bp, Homo sapiens
ctctctgtgcattttgattggaagtgtatttcagagtttc

SEQ ID NO: 14427 - DNA, 40 bp, Homo sapiens
gaaactctgaaatacacttccaatcaaaatgcacagagag

SEQ ID NO: 14428 - DNA, 40 bp, Homo sapiens
tctctgtgcattttgattggaagtgtatttcagagtttcg

SEQ ID NO: 14429 - DNA, 40 bp, Homo sapiens
cgaaactctgaaatacacttccaatcaaaatgcacagaga

SEQ ID NO: 14430 - DNA, 40 bp, Homo sapiens
ctctgtgcattttgattggaagtgtatttcagagtttcgt

SEQ ID NO: 14431 - DNA, 40 bp, Homo sapiens
acgaaactctgaaatacacttccaatcaaaatgcacagag

SEQ ID NO: 14432 - DNA, 40 bp, Homo sapiens
tctgtgcattttgattggaagtgtatttcagagtttcgtg

SEQ ID NO: 14433 - DNA, 40 bp, Homo sapiens
cacgaaactctgaaatacacttccaatcaaaatgcacaga

SEQ ID NO: 14434 - DNA, 40 bp, Homo sapiens
ctgtgcattttgattggaagtgtatttcagagtttcgtga

SEQ ID NO: 14435 - DNA, 40 bp, Homo sapiens
tcacgaaactctgaaatacacttccaatcaaaatgcacag

SEQ ID NO: 14436 - DNA, 40 bp, Homo sapiens
tgtgcattttgattggaagtgtatttcagagtttcgtgag

SEQ ID NO: 14437 - DNA, 40 bp, Homo sapiens
ctcacgaaactctgaaatacacttccaatcaaaatgcaca

SEQ ID NO: 14438 - DNA, 40 bp, Homo sapiens
gtgcattttgattggaagtgtatttcagagtttcgtgaga

SEQ ID NO: 14439 - DNA, 40 bp, Homo sapiens
tctcacgaaactctgaaatacacttccaatcaaaatgcac

SEQ ID NO: 14440 - DNA, 40 bp, Homo sapiens
tgcattttgattggaagtgtatttcagagtttcgtgagag

SEQ ID NO: 14441 - DNA, 40 bp, Homo sapiens
ctctcacgaaactctgaaatacacttccaatcaaaatgca

SEQ ID NO: 14442 - DNA, 40 bp, Homo sapiens
gcattttgattggaagtgtatttcagagtttcgtgagagg

SEQ ID NO: 14443 - DNA, 40 bp, Homo sapiens
cctctcacgaaactctgaaatacacttccaatcaaaatgc

SEQ ID NO: 14444 - DNA, 40 bp, Homo sapiens
cattttgattggaagtgtatttcagagtttcgtgagaggg

SEQ ID NO: 14445 - DNA, 40 bp, Homo sapiens
ccctctcacgaaactctgaaatacacttccaatcaaaatg

SEQ ID NO: 14446 - DNA, 40 bp, Homo sapiens
attttgattggaagtgtatttcagagtttcgtgagagggt

SEQ ID NO: 14447 - DNA, 40 bp, Homo sapiens
accctctcacgaaactctgaaatacacttccaatcaaaat

SEQ ID NO: 14448 - DNA, 40 bp, Homo sapiens
ttttgattggaagtgtatttcagagtttcgtgagagggta

SEQ ID NO: 14449 - DNA, 40 bp, Homo sapiens
taccctctcacgaaactctgaaatacacttccaatcaaaa

SEQ ID NO: 14450 - DNA, 40 bp, Homo sapiens
tttgattggaagtgtatttcagagtttcgtgagagggtag

SEQ ID NO: 14451 - DNA, 40 bp, Homo sapiens
ctaccctctcacgaaactctgaaatacacttccaatcaaa

SEQ ID NO: 14452 - DNA, 40 bp, Homo sapiens
ttgattggaagtgtatttcagagtttcgtgagagggtaga

SEQ ID NO: 14453 - DNA, 40 bp, Homo sapiens
tctaccctctcacgaaactctgaaatacacttccaatcaa

SEQ ID NO: 14454 - DNA, 40 bp, Homo sapiens
tgattggaagtgtatttcagagtttcgtgagagggtagaa

SEQ ID NO: 14455 - DNA, 40 bp, Homo sapiens
ttctaccctctcacgaaactctgaaatacacttccaatca

SEQ ID NO: 14456 - DNA, 40 bp, Homo sapiens
gattggaagtgtatttcagagtttcgtgagagggtagaaa

SEQ ID NO: 14457 - DNA, 40 bp, Homo sapiens
tttctaccctctcacgaaactctgaaatacacttccaatc

SEQ ID NO: 14458 - DNA, 40 bp, Homo sapiens
attggaagtgtatttcagagtttcgtgagagggtagaaat

SEQ ID NO: 14459 - DNA, 40 bp, Homo sapiens
atttctaccctctcacgaaactctgaaatacacttccaat

SEQ ID NO: 14460 - DNA, 40 bp, Homo sapiens
ttggaagtgtatttcagagtttcgtgagagggtagaaatt

SEQ ID NO: 14461 - DNA, 40 bp, Homo sapiens
aatttctaccctctcacgaaactctgaaatacacttccaa

SEQ ID NO: 14462 - DNA, 40 bp, Homo sapiens
tggaagtgtatttcagagtttcgtgagagggtagaaattt

SEQ ID NO: 14463 - DNA, 40 bp, Homo sapiens
aaatttctaccctctcacgaaactctgaaatacacttcca

SEQ ID NO: 14464 - DNA, 40 bp, Homo sapiens
ggaagtgtatttcagagtttcgtgagagggtagaaatttg

SEQ ID NO: 14465 - DNA, 40 bp, Homo sapiens
caaatttctaccctctcacgaaactctgaaatacacttcc

SEQ ID NO: 14466 - DNA, 40 bp, Homo sapiens
gaagtgtatttcagagtttcgtgagagggtagaaatttgt

SEQ ID NO: 14467 - DNA, 40 bp, Homo sapiens
acaaatttctaccctctcacgaaactctgaaatacacttc

SEQ ID NO: 14468 - DNA, 40 bp, Homo sapiens
aagtgtatttcagagtttcgtgagagggtagaaatttgta

SEQ ID NO: 14469 - DNA, 40 bp, Homo sapiens
tacaaatttctaccctctcacgaaactctgaaatacactt

SEQ ID NO: 14470 - DNA, 40 bp, Homo sapiens
agtgtatttcagagtttcgtgagagggtagaaatttgtat

SEQ ID NO: 14471 - DNA, 40 bp, Homo sapiens
atacaaatttctaccctctcacgaaactctgaaatacact

SEQ ID NO: 14472 - DNA, 40 bp, Homo sapiens
gtgtatttcagagtttcgtgagagggtagaaatttgtatc

SEQ ID NO: 14473 - DNA, 40 bp, Homo sapiens
gatacaaatttctaccctctcacgaaactctgaaatacac

SEQ ID NO: 14474 - DNA, 40 bp, Homo sapiens
tgtatttcagagtttcgtgagagggtagaaatttgtatcc

SEQ ID NO: 14475 - DNA, 40 bp, Homo sapiens
ggatacaaatttctaccctctcacgaaactctgaaataca

SEQ ID NO: 14476 - DNA, 40 bp, Homo sapiens
gtatttcagagtttcgtgagagggtagaaatttgtatcct

SEQ ID NO: 14477 - DNA, 40 bp, Homo sapiens
aggatacaaatttctaccctctcacgaaactctgaaatac

SEQ ID NO: 14478 - DNA, 40 bp, Homo sapiens
tatttcagagtttcgtgagagggtagaaatttgtatccta

SEQ ID NO: 14479 - DNA, 40 bp, Homo sapiens
taggatacaaatttctaccctctcacgaaactctgaaata

SEQ ID NO: 14480 - DNA, 40 bp, Homo sapiens
atttcagagtttcgtgagagggtagaaatttgtatcctat

SEQ ID NO: 14481 - DNA, 40 bp, Homo sapiens
ataggatacaaatttctaccctctcacgaaactctgaaat

SEQ ID NO: 14482 - DNA, 40 bp, Homo sapiens
tttcagagtttcgtgagagggtagaaatttgtatcctatc

SEQ ID NO: 14483 - DNA, 40 bp, Homo sapiens
gataggatacaaatttctaccctctcacgaaactctgaaa

SEQ ID NO: 14484 - DNA, 40 bp, Homo sapiens
ttcagagtttcgtgagagggtagaaatttgtatcctatct

SEQ ID NO: 14485 - DNA, 40 bp, Homo sapiens
agataggatacaaatttctaccctctcacgaaactctgaa

SEQ ID NO: 14486 - DNA, 40 bp, Homo sapiens
tcagagtttcgtgagagggtagaaatttgtatcctatctg

SEQ ID NO: 14487 - DNA, 40 bp, Homo sapiens
cagataggatacaaatttctaccctctcacgaaactctga

SEQ ID NO: 14488 - DNA, 40 bp, Homo sapiens
cagagtttcgtgagagggtagaaatttgtatcctatctgg

SEQ ID NO: 14489 - DNA, 40 bp, Homo sapiens
ccagataggatacaaatttctaccctctcacgaaactctg

SEQ ID NO: 14490 - DNA, 40 bp, Homo sapiens
agagtttcgtgagagggtagaaatttgtatcctatctgga

SEQ ID NO: 14491 - DNA, 40 bp, Homo sapiens
tccagataggatacaaatttctaccctctcacgaaactct

SEQ ID NO: 14492 - DNA, 40 bp, Homo sapiens
gagtttcgtgagagggtagaaatttgtatcctatctggac

SEQ ID NO: 14493 - DNA, 40 bp, Homo sapiens
gtccagataggatacaaatttctaccctctcacgaaactc

SEQ ID NO: 14494 - DNA, 40 bp, Homo sapiens
agtttcgtgagagggtagaaatttgtatcctatctggacc

SEQ ID NO: 14495 - DNA, 40 bp, Homo sapiens
ggtccagataggatacaaatttctaccctctcacgaaact

SEQ ID NO: 14496 - DNA, 40 bp, Homo sapiens
gtttcgtgagagggtagaaatttgtatcctatctggacct

SEQ ID NO: 14497 - DNA, 40 bp, Homo sapiens
aggtccagataggatacaaatttctaccctctcacgaaac

SEQ ID NO: 14498 - DNA, 40 bp, Homo sapiens
tttcgtgagagggtagaaatttgtatcctatctggaccta

SEQ ID NO: 14499 - DNA, 40 bp, Homo sapiens
taggtccagataggatacaaatttctaccctctcacgaaa

SEQ ID NO: 14500 - DNA, 40 bp, Homo sapiens
ttcgtgagagggtagaaatttgtatcctatctggacctaa

SEQ ID NO: 14501 - DNA, 40 bp, Homo sapiens
ttaggtccagataggatacaaatttctaccctctcacgaa

SEQ ID NO: 14502 - DNA, 40 bp, Homo sapiens
tcgtgagagggtagaaatttgtatcctatctggacctaaa

SEQ ID NO: 14503 - DNA, 40 bp, Homo sapiens
tttaggtccagataggatacaaatttctaccctctcacga

SEQ ID NO: 14504 - DNA, 40 bp, Homo sapiens
cgtgagagggtagaaatttgtatcctatctggacctaaaa

SEQ ID NO: 14505 - DNA, 40 bp, Homo sapiens
ttttaggtccagataggatacaaatttctaccctctcacg

SEQ ID NO: 14506 - DNA, 40 bp, Homo sapiens
gtgagagggtagaaatttgtatcctatctggacctaaaag

SEQ ID NO: 14507 - DNA, 40 bp, Homo sapiens
cttttaggtccagataggatacaaatttctaccctctcac

SEQ ID NO: 14508 - DNA, 40 bp, Homo sapiens
tgagagggtagaaatttgtatcctatctggacctaaaaga

SEQ ID NO: 14509 - DNA, 40 bp, Homo sapiens
tcttttaggtccagataggatacaaatttctaccctctca

SEQ ID NO: 14510 - DNA, 40 bp, Homo sapiens
gagagggtagaaatttgtatcctatctggacctaaaagac

SEQ ID NO: 14511 - DNA, 40 bp, Homo sapiens
gtcttttaggtccagataggatacaaatttctaccctctc

SEQ ID NO: 14512 - DNA, 40 bp, Homo sapiens
agagggtagaaatttgtatcctatctggacctaaaagaca

SEQ ID NO: 14513 - DNA, 40 bp, Homo sapiens
tgtcttttaggtccagataggatacaaatttctaccctct

SEQ ID NO: 14514 - DNA, 40 bp, Homo sapiens
gagggtagaaatttgtatcctatctggacctaaaagacaa

SEQ ID NO: 14515 - DNA, 40 bp, Homo sapiens
ttgtcttttaggtccagataggatacaaatttctaccctc

SEQ ID NO: 14516 - DNA, 40 bp, Homo sapiens
agggtagaaatttgtatcctatctggacctaaaagacaat

SEQ ID NO: 14517 - DNA, 40 bp, Homo sapiens
attgtcttttaggtccagataggatacaaatttctaccct

SEQ ID NO: 14518 - DNA, 40 bp, Homo sapiens
gggtagaaatttgtatcctatctggacctaaaagacaatc

SEQ ID NO: 14519 - DNA, 40 bp, Homo sapiens
gattgtcttttaggtccagataggatacaaatttctaccc

SEQ ID NO: 14520 - DNA, 40 bp, Homo sapiens
ggtagaaatttgtatcctatctggacctaaaagacaatct

SEQ ID NO: 14521 - DNA, 40 bp, Homo sapiens
agattgtcttttaggtccagataggatacaaatttctacc

SEQ ID NO: 14522 - DNA, 40 bp, Homo sapiens
gtagaaatttgtatcctatctggacctaaaagacaatctt

SEQ ID NO: 14523 - DNA, 40 bp, Homo sapiens
aagattgtcttttaggtccagataggatacaaatttctac

SEQ ID NO: 14524 - DNA, 40 bp, Homo sapiens
tagaaatttgtatcctatctggacctaaaagacaatcttt

SEQ ID NO: 14525 - DNA, 40 bp, Homo sapiens
aaagattgtcttttaggtccagataggatacaaatttcta

SEQ ID NO: 14526 - DNA, 40 bp, Homo sapiens
agaaatttgtatcctatctggacctaaaagacaatctttt

SEQ ID NO: 14527 - DNA, 40 bp, Homo sapiens
aaaagattgtcttttaggtccagataggatacaaatttct

SEQ ID NO: 14528 - DNA, 40 bp, Homo sapiens
gaaatttgtatcctatctggacctaaaagacaatcttttt

SEQ ID NO: 14529 - DNA, 40 bp, Homo sapiens
aaaaagattgtcttttaggtccagataggatacaaatttc

SEQ ID NO: 14530 - DNA, 40 bp, Homo sapiens
aaatttgtatcctatctggacctaaaagacaatcttttta

SEQ ID NO: 14531 - DNA, 40 bp, Homo sapiens
taaaaagattgtcttttaggtccagataggatacaaattt

SEQ ID NO: 14532 - DNA, 40 bp, Homo sapiens
aatttgtatcctatctggacctaaaagacaatctttttat

SEQ ID NO: 14533 - DNA, 40 bp, Homo sapiens
ataaaaagattgtcttttaggtccagataggatacaaatt

SEQ ID NO: 14534 - DNA, 40 bp, Homo sapiens
atttgtatcctatctggacctaaaagacaatctttttatt

SEQ ID NO: 14535 - DNA, 40 bp, Homo sapiens
aataaaaagattgtcttttaggtccagataggatacaaat

SEQ ID NO: 14536 - DNA, 40 bp, Homo sapiens
tttgtatcctatctggacctaaaagacaatctttttattg

SEQ ID NO: 14537 - DNA, 40 bp, Homo sapiens
caataaaaagattgtcttttaggtccagataggatacaaa

SEQ ID NO: 14538 - DNA, 40 bp, Homo sapiens
ttgtatcctatctggacctaaaagacaatctttttattgt

SEQ ID NO: 14539 - DNA, 40 bp, Homo sapiens
acaataaaaagattgtcttttaggtccagataggatacaa

SEQ ID NO: 14540 - DNA, 40 bp, Homo sapiens
tgtatcctatctggacctaaaagacaatctttttattgta

SEQ ID NO: 14541 - DNA, 40 bp, Homo sapiens
tacaataaaaagattgtcttttaggtccagataggataca

SEQ ID NO: 14542 - DNA, 40 bp, Homo sapiens
gtatcctatctggacctaaaagacaatctttttattgtaa

SEQ ID NO: 14543 - DNA, 40 bp, Homo sapiens
ttacaataaaaagattgtcttttaggtccagataggatac

SEQ ID NO: 14544 - DNA, 40 bp, Homo sapiens
tatcctatctggacctaaaagacaatctttttattgtaac

SEQ ID NO: 14545 - DNA, 40 bp, Homo sapiens
gttacaataaaaagattgtcttttaggtccagataggata

SEQ ID NO: 14546 - DNA, 40 bp, Homo sapiens
atcctatctggacctaaaagacaatctttttattgtaact

SEQ ID NO: 14547 - DNA, 40 bp, Homo sapiens
agttacaataaaaagattgtcttttaggtccagataggat

SEQ ID NO: 14548 - DNA, 40 bp, Homo sapiens
tcctatctggacctaaaagacaatctttttattgtaactt

SEQ ID NO: 14549 - DNA, 40 bp, Homo sapiens
aagttacaataaaaagattgtcttttaggtccagatagga

SEQ ID NO: 14550 - DNA, 40 bp, Homo sapiens
cctatctggacctaaaagacaatctttttattgtaacttt

SEQ ID NO: 14551 - DNA, 40 bp, Homo sapiens
aaagttacaataaaaagattgtcttttaggtccagatagg

SEQ ID NO: 14552 - DNA, 40 bp, Homo sapiens
ctatctggacctaaaagacaatctttttattgtaactttt

SEQ ID NO: 14553 - DNA, 40 bp, Homo sapiens
aaaagttacaataaaaagattgtcttttaggtccagatag

SEQ ID NO: 14554 - DNA, 40 bp, Homo sapiens
tatctggacctaaaagacaatctttttattgtaactttta

SEQ ID NO: 14555 - DNA, 40 bp, Homo sapiens
taaaagttacaataaaaagattgtcttttaggtccagata

SEQ ID NO: 14556 - DNA, 40 bp, Homo sapiens
atctggacctaaaagacaatctttttattgtaacttttat

SEQ ID NO: 14557 - DNA, 40 bp, Homo sapiens
ataaaagttacaataaaaagattgtcttttaggtccagat

SEQ ID NO: 14558 - DNA, 40 bp, Homo sapiens
tctggacctaaaagacaatctttttattgtaacttttatt

SEQ ID NO: 14559 - DNA, 40 bp, Homo sapiens
aataaaagttacaataaaaagattgtcttttaggtccaga

SEQ ID NO: 14560 - DNA, 40 bp, Homo sapiens
ctggacctaaaagacaatctttttattgtaacttttattt

SEQ ID NO: 14561 - DNA, 40 bp, Homo sapiens
aaataaaagttacaataaaaagattgtcttttaggtccag

SEQ ID NO: 14562 - DNA, 40 bp, Homo sapiens
tggacctaaaagacaatctttttattgtaacttttatttt

SEQ ID NO: 14563 - DNA, 40 bp, Homo sapiens
aaaataaaagttacaataaaaagattgtcttttaggtcca

SEQ ID NO: 14564 - DNA, 40 bp, Homo sapiens
ggacctaaaagacaatctttttattgtaacttttattttt

SEQ ID NO: 14565 - DNA, 40 bp, Homo sapiens
aaaaataaaagttacaataaaaagattgtcttttaggtcc

SEQ ID NO: 14566 - DNA, 40 bp, Homo sapiens
gacctaaaagacaatctttttattgtaacttttattttta

SEQ ID NO: 14567 - DNA, 40 bp, Homo sapiens
taaaaataaaagttacaataaaaagattgtcttttaggtc

SEQ ID NO: 14568 - DNA, 40 bp, Homo sapiens
acctaaaagacaatctttttattgtaacttttatttttat

SEQ ID NO: 14569 - DNA, 40 bp, Homo sapiens
ataaaaataaaagttacaataaaaagattgtcttttaggt

SEQ ID NO: 14570 - DNA, 40 bp, Homo sapiens
cctaaaagacaatctttttattgtaacttttatttttatg

SEQ ID NO: 14571 - DNA, 40 bp, Homo sapiens
cataaaaataaaagttacaataaaaagattgtcttttagg

SEQ ID NO: 14572 - DNA, 40 bp, Homo sapiens
ctaaaagacaatctttttattgtaacttttatttttatgg

SEQ ID NO: 14573 - DNA, 40 bp, Homo sapiens
ccataaaaataaaagttacaataaaaagattgtcttttag

SEQ ID NO: 14574 - DNA, 40 bp, Homo sapiens
taaaagacaatctttttattgtaacttttatttttatggg

SEQ ID NO: 14575 - DNA, 40 bp, Homo sapiens
cccataaaaataaaagttacaataaaaagattgtctttta

SEQ ID NO: 14576 - DNA, 40 bp, Homo sapiens
aaaagacaatctttttattgtaacttttatttttatgggt

SEQ ID NO: 14577 - DNA, 40 bp, Homo sapiens
acccataaaaataaaagttacaataaaaagattgtctttt

SEQ ID NO: 14578 - DNA, 40 bp, Homo sapiens
aaagacaatctttttattgtaacttttatttttatgggtt

SEQ ID NO: 14579 - DNA, 40 bp, Homo sapiens
aacccataaaaataaaagttacaataaaaagattgtcttt

SEQ ID NO: 14580 - DNA, 40 bp, Homo sapiens
aagacaatctttttattgtaacttttatttttatgggttt

SEQ ID NO: 14581 - DNA, 40 bp, Homo sapiens
aaacccataaaaataaaagttacaataaaaagattgtctt

SEQ ID NO: 14582 - DNA, 40 bp, Homo sapiens
agacaatctttttattgtaacttttatttttatgggtttc

SEQ ID NO: 14583 - DNA, 40 bp, Homo sapiens
gaaacccataaaaataaaagttacaataaaaagattgtct

SEQ ID NO: 14584 - DNA, 40 bp, Homo sapiens
gacaatctttttattgtaacttttatttttatgggtttct

SEQ ID NO: 14585 - DNA, 40 bp, Homo sapiens
agaaacccataaaaataaaagttacaataaaaagattgtc

SEQ ID NO: 14586 - DNA, 40 bp, Homo sapiens
acaatctttttattgtaacttttatttttatgggtttctt

SEQ ID NO: 14587 - DNA, 40 bp, Homo sapiens
aagaaacccataaaaataaaagttacaataaaaagattgt

SEQ ID NO: 14588 - DNA, 40 bp, Homo sapiens
caatctttttattgtaacttttatttttatgggtttcttg

SEQ ID NO: 14589 - DNA, 40 bp, Homo sapiens
caagaaacccataaaaataaaagttacaataaaaagattg

SEQ ID NO: 14590 - DNA, 40 bp, Homo sapiens
aatctttttattgtaacttttatttttatgggtttcttgg

SEQ ID NO: 14591 - DNA, 40 bp, Homo sapiens
ccaagaaacccataaaaataaaagttacaataaaaagatt

SEQ ID NO: 14592 - DNA, 40 bp, Homo sapiens
atctttttattgtaacttttatttttatgggtttcttggt

SEQ ID NO: 14593 - DNA, 40 bp, Homo sapiens
accaagaaacccataaaaataaaagttacaataaaaagat

SEQ ID NO: 14594 - DNA, 40 bp, Homo sapiens
tctttttattgtaacttttatttttatgggtttcttggta

SEQ ID NO: 14595 - DNA, 40 bp, Homo sapiens
taccaagaaacccataaaaataaaagttacaataaaaaga

SEQ ID NO: 14596 - DNA, 40 bp, Homo sapiens
ctttttattgtaacttttatttttatgggtttcttggtat

SEQ ID NO: 14597 - DNA, 40 bp, Homo sapiens
ataccaagaaacccataaaaataaaagttacaataaaaag

SEQ ID NO: 14598 - DNA, 40 bp, Homo sapiens
tttttattgtaacttttatttttatgggtttcttggtatt

SEQ ID NO: 14599 - DNA, 40 bp, Homo sapiens
aataccaagaaacccataaaaataaaagttacaataaaaa

SEQ ID NO: 14600 - DNA, 40 bp, Homo sapiens
ttttattgtaacttttatttttatgggtttcttggtattg

SEQ ID NO: 14601 - DNA, 40 bp, Homo sapiens
caataccaagaaacccataaaaataaaagttacaataaaa

SEQ ID NO: 14602 - DNA, 40 bp, Homo sapiens
tttattgtaacttttatttttatgggtttcttggtattgt

SEQ ID NO: 14603 - DNA, 40 bp, Homo sapiens
acaataccaagaaacccataaaaataaaagttacaataaa

SEQ ID NO: 14604 - DNA, 40 bp, Homo sapiens
ttattgtaacttttatttttatgggtttcttggtattgtg

SEQ ID NO: 14605 - DNA, 40 bp, Homo sapiens
cacaataccaagaaacccataaaaataaaagttacaataa

SEQ ID NO: 14606 - DNA, 40 bp, Homo sapiens
tattgtaacttttatttttatgggtttcttggtattgtga

SEQ ID NO: 14607 - DNA, 40 bp, Homo sapiens
tcacaataccaagaaacccataaaaataaaagttacaata

SEQ ID NO: 14608 - DNA, 40 bp, Homo sapiens
attgtaacttttatttttatgggtttcttggtattgtgac

SEQ ID NO: 14609 - DNA, 40 bp, Homo sapiens
gtcacaataccaagaaacccataaaaataaaagttacaat

SEQ ID NO: 14610 - DNA, 40 bp, Homo sapiens
ttgtaacttttatttttatgggtttcttggtattgtgaca

SEQ ID NO: 14611 - DNA, 40 bp, Homo sapiens
tgtcacaataccaagaaacccataaaaataaaagttacaa

SEQ ID NO: 14612 - DNA, 40 bp, Homo sapiens
tgtaacttttatttttatgggtttcttggtattgtgacat

SEQ ID NO: 14613 - DNA, 40 bp, Homo sapiens
atgtcacaataccaagaaacccataaaaataaaagttaca

SEQ ID NO: 14614 - DNA, 40 bp, Homo sapiens
gtaacttttatttttatgggtttcttggtattgtgacatc

SEQ ID NO: 14615 - DNA, 40 bp, Homo sapiens
gatgtcacaataccaagaaacccataaaaataaaagttac

SEQ ID NO: 14616 - DNA, 40 bp, Homo sapiens
taacttttatttttatgggtttcttggtattgtgacatca

SEQ ID NO: 14617 - DNA, 40 bp, Homo sapiens
tgatgtcacaataccaagaaacccataaaaataaaagtta

SEQ ID NO: 14618 - DNA, 40 bp, Homo sapiens
aacttttatttttatgggtttcttggtattgtgacatcat

SEQ ID NO: 14619 - DNA, 40 bp, Homo sapiens
atgatgtcacaataccaagaaacccataaaaataaaagtt

SEQ ID NO: 14620 - DNA, 40 bp, Homo sapiens
acttttatttttatgggtttcttggtattgtgacatcata

SEQ ID NO: 14621 - DNA, 40 bp, Homo sapiens
tatgatgtcacaataccaagaaacccataaaaataaaagt

SEQ ID NO: 14622 - DNA, 40 bp, Homo sapiens
cttttatttttatgggtttcttggtattgtgacatcatat

SEQ ID NO: 14623 - DNA, 40 bp, Homo sapiens
atatgatgtcacaataccaagaaacccataaaaataaaag

SEQ ID NO: 14624 - DNA, 40 bp, Homo sapiens
ttttatttttatgggtttcttggtattgtgacatcatatg

SEQ ID NO: 14625 - DNA, 40 bp, Homo sapiens
catatgatgtcacaataccaagaaacccataaaaataaaa

SEQ ID NO: 14626 - DNA, 40 bp, Homo sapiens
tttatttttatgggtttcttggtattgtgacatcatatgt

SEQ ID NO: 14627 - DNA, 40 bp, Homo sapiens
acatatgatgtcacaataccaagaaacccataaaaataaa

SEQ ID NO: 14628 - DNA, 40 bp, Homo sapiens
ttatttttatgggtttcttggtattgtgacatcatatgta

SEQ ID NO: 14629 - DNA, 40 bp, Homo sapiens
tacatatgatgtcacaataccaagaaacccataaaaataa

SEQ ID NO: 14630 - DNA, 40 bp, Homo sapiens
tatttttatgggtttcttggtattgtgacatcatatgtaa

SEQ ID NO: 14631 - DNA, 40 bp, Homo sapiens
ttacatatgatgtcacaataccaagaaacccataaaaata

SEQ ID NO: 14632 - DNA, 40 bp, Homo sapiens
atttttatgggtttcttggtattgtgacatcatatgtaaa

SEQ ID NO: 14633 - DNA, 40 bp, Homo sapiens
tttacatatgatgtcacaataccaagaaacccataaaaat

SEQ ID NO: 14634 - DNA, 40 bp, Homo sapiens
tttttatgggtttcttggtattgtgacatcatatgtaaag

SEQ ID NO: 14635 - DNA, 40 bp, Homo sapiens
ctttacatatgatgtcacaataccaagaaacccataaaaa

SEQ ID NO: 14636 - DNA, 40 bp, Homo sapiens
ttttatgggtttcttggtattgtgacatcatatgtaaagg

SEQ ID NO: 14637 - DNA, 40 bp, Homo sapiens
cctttacatatgatgtcacaataccaagaaacccataaaa

SEQ ID NO: 14638 - DNA, 40 bp, Homo sapiens
tttatgggtttcttggtattgtgacatcatatgtaaaggt

SEQ ID NO: 14639 - DNA, 40 bp, Homo sapiens
acctttacatatgatgtcacaataccaagaaacccataaa

SEQ ID NO: 14640 - DNA, 40 bp, Homo sapiens
ttatgggtttcttggtattgtgacatcatatgtaaaggtt

SEQ ID NO: 14641 - DNA, 40 bp, Homo sapiens
aacctttacatatgatgtcacaataccaagaaacccataa

SEQ ID NO: 14642 - DNA, 40 bp, Homo sapiens
tatgggtttcttggtattgtgacatcatatgtaaaggtta

SEQ ID NO: 14643 - DNA, 40 bp, Homo sapiens
taacctttacatatgatgtcacaataccaagaaacccata

SEQ ID NO: 14644 - DNA, 40 bp, Homo sapiens
atgggtttcttggtattgtgacatcatatgtaaaggttag

SEQ ID NO: 14645 - DNA, 40 bp, Homo sapiens
ctaacctttacatatgatgtcacaataccaagaaacccat

SEQ ID NO: 14646 - DNA, 40 bp, Homo sapiens
tgggtttcttggtattgtgacatcatatgtaaaggttaga

SEQ ID NO: 14647 - DNA, 40 bp, Homo sapiens
tctaacctttacatatgatgtcacaataccaagaaaccca

SEQ ID NO: 14648 - DNA, 40 bp, Homo sapiens
gggtttcttggtattgtgacatcatatgtaaaggttagat

SEQ ID NO: 14649 - DNA, 40 bp, Homo sapiens
atctaacctttacatatgatgtcacaataccaagaaaccc

SEQ ID NO: 14650 - DNA, 40 bp, Homo sapiens
ggtttcttggtattgtgacatcatatgtaaaggttagatt

SEQ ID NO: 14651 - DNA, 40 bp, Homo sapiens
aatctaacctttacatatgatgtcacaataccaagaaacc

SEQ ID NO: 14652 - DNA, 40 bp, Homo sapiens
gtttcttggtattgtgacatcatatgtaaaggttagattt

SEQ ID NO: 14653 - DNA, 40 bp, Homo sapiens
aaatctaacctttacatatgatgtcacaataccaagaaac

SEQ ID NO: 14654 - DNA, 40 bp, Homo sapiens
tttcttggtattgtgacatcatatgtaaaggttagattta

SEQ ID NO: 14655 - DNA, 40 bp, Homo sapiens
taaatctaacctttacatatgatgtcacaataccaagaaa

SEQ ID NO: 14656 - DNA, 40 bp, Homo sapiens
ttcttggtattgtgacatcatatgtaaaggttagatttaa

SEQ ID NO: 14657 - DNA, 40 bp, Homo sapiens
ttaaatctaacctttacatatgatgtcacaataccaagaa

SEQ ID NO: 14658 - DNA, 40 bp, Homo sapiens
tcttggtattgtgacatcatatgtaaaggttagatttaat

SEQ ID NO: 14659 - DNA, 40 bp, Homo sapiens
attaaatctaacctttacatatgatgtcacaataccaaga

SEQ ID NO: 14660 - DNA, 40 bp, Homo sapiens
cttggtattgtgacatcatatgtaaaggttagatttaatt

SEQ ID NO: 14661 - DNA, 40 bp, Homo sapiens
aattaaatctaacctttacatatgatgtcacaataccaag

SEQ ID NO: 14662 - DNA, 40 bp, Homo sapiens
ttggtattgtgacatcatatgtaaaggttagatttaattg

SEQ ID NO: 14663 - DNA, 40 bp, Homo sapiens
caattaaatctaacctttacatatgatgtcacaataccaa

SEQ ID NO: 14664 - DNA, 40 bp, Homo sapiens
tggtattgtgacatcatatgtaaaggttagatttaattgt

SEQ ID NO: 14665 - DNA, 40 bp, Homo sapiens
acaattaaatctaacctttacatatgatgtcacaatacca

SEQ ID NO: 14666 - DNA, 40 bp, Homo sapiens
ggtattgtgacatcatatgtaaaggttagatttaattgta

SEQ ID NO: 14667 - DNA, 40 bp, Homo sapiens
tacaattaaatctaacctttacatatgatgtcacaatacc

SEQ ID NO: 14668 - DNA, 40 bp, Homo sapiens
gtattgtgacatcatatgtaaaggttagatttaattgtac

SEQ ID NO: 14669 - DNA, 40 bp, Homo sapiens
gtacaattaaatctaacctttacatatgatgtcacaatac

SEQ ID NO: 14670 - DNA, 40 bp, Homo sapiens
tattgtgacatcatatgtaaaggttagatttaattgtact

SEQ ID NO: 14671 - DNA, 40 bp, Homo sapiens
agtacaattaaatctaacctttacatatgatgtcacaata

SEQ ID NO: 14672 - DNA, 40 bp, Homo sapiens
attgtgacatcatatgtaaaggttagatttaattgtacta

SEQ ID NO: 14673 - DNA, 40 bp, Homo sapiens
tagtacaattaaatctaacctttacatatgatgtcacaat

SEQ ID NO: 14674 - DNA, 40 bp, Homo sapiens
ttgtgacatcatatgtaaaggttagatttaattgtactag

SEQ ID NO: 14675 - DNA, 40 bp, Homo sapiens
ctagtacaattaaatctaacctttacatatgatgtcacaa

SEQ ID NO: 14676 - DNA, 40 bp, Homo sapiens
tgtgacatcatatgtaaaggttagatttaattgtactagt

SEQ ID NO: 14677 - DNA, 40 bp, Homo sapiens
actagtacaattaaatctaacctttacatatgatgtcaca

SEQ ID NO: 14678 - DNA, 40 bp, Homo sapiens
gtgacatcatatgtaaaggttagatttaattgtactagtg

SEQ ID NO: 14679 - DNA, 40 bp, Homo sapiens
cactagtacaattaaatctaacctttacatatgatgtcac

SEQ ID NO: 14680 - DNA, 40 bp, Homo sapiens
tgacatcatatgtaaaggttagatttaattgtactagtga

SEQ ID NO: 14681 - DNA, 40 bp, Homo sapiens
tcactagtacaattaaatctaacctttacatatgatgtca

SEQ ID NO: 14682 - DNA, 40 bp, Homo sapiens
gacatcatatgtaaaggttagatttaattgtactagtgaa

SEQ ID NO: 14683 - DNA, 40 bp, Homo sapiens
ttcactagtacaattaaatctaacctttacatatgatgtc

SEQ ID NO: 14684 - DNA, 40 bp, Homo sapiens
acatcatatgtaaaggttagatttaattgtactagtgaaa

SEQ ID NO: 14685 - DNA, 40 bp, Homo sapiens
tttcactagtacaattaaatctaacctttacatatgatgt

SEQ ID NO: 14686 - DNA, 40 bp, Homo sapiens
catcatatgtaaaggttagatttaattgtactagtgaaat

SEQ ID NO: 14687 - DNA, 40 bp, Homo sapiens
atttcactagtacaattaaatctaacctttacatatgatg

SEQ ID NO: 14688 - DNA, 40 bp, Homo sapiens
atcatatgtaaaggttagatttaattgtactagtgaaata

SEQ ID NO: 14689 - DNA, 40 bp, Homo sapiens
tatttcactagtacaattaaatctaacctttacatatgat

SEQ ID NO: 14690 - DNA, 40 bp, Homo sapiens
tcatatgtaaaggttagatttaattgtactagtgaaatat

SEQ ID NO: 14691 - DNA, 40 bp, Homo sapiens
atatttcactagtacaattaaatctaacctttacatatga

SEQ ID NO: 14692 - DNA, 40 bp, Homo sapiens
catatgtaaaggttagatttaattgtactagtgaaatata

SEQ ID NO: 14693 - DNA, 40 bp, Homo sapiens
tatatttcactagtacaattaaatctaacctttacatatg

SEQ ID NO: 14694 - DNA, 40 bp, Homo sapiens
atatgtaaaggttagatttaattgtactagtgaaatataa

SEQ ID NO: 14695 - DNA, 40 bp, Homo sapiens
ttatatttcactagtacaattaaatctaacctttacatat

SEQ ID NO: 14696 - DNA, 40 bp, Homo sapiens
tatgtaaaggttagatttaattgtactagtgaaatataat

SEQ ID NO: 14697 - DNA, 40 bp, Homo sapiens
attatatttcactagtacaattaaatctaacctttacata

SEQ ID NO: 14698 - DNA, 40 bp, Homo sapiens
atgtaaaggttagatttaattgtactagtgaaatataatt

SEQ ID NO: 14699 - DNA, 40 bp, Homo sapiens
aattatatttcactagtacaattaaatctaacctttacat

SEQ ID NO: 14700 - DNA, 40 bp, Homo sapiens
tgtaaaggttagatttaattgtactagtgaaatataattg

SEQ ID NO: 14701 - DNA, 40 bp, Homo sapiens
caattatatttcactagtacaattaaatctaacctttaca

SEQ ID NO: 14702 - DNA, 40 bp, Homo sapiens
gtaaaggttagatttaattgtactagtgaaatataattgt

SEQ ID NO: 14703 - DNA, 40 bp, Homo sapiens
acaattatatttcactagtacaattaaatctaacctttac

SEQ ID NO: 14704 - DNA, 40 bp, Homo sapiens
taaaggttagatttaattgtactagtgaaatataattgtt

SEQ ID NO: 14705 - DNA, 40 bp, Homo sapiens
aacaattatatttcactagtacaattaaatctaaccttta

SEQ ID NO: 14706 - DNA, 40 bp, Homo sapiens
aaaggttagatttaattgtactagtgaaatataattgttt

SEQ ID NO: 14707 - DNA, 40 bp, Homo sapiens
aaacaattatatttcactagtacaattaaatctaaccttt

SEQ ID NO: 14708 - DNA, 40 bp, Homo sapiens
aaggttagatttaattgtactagtgaaatataattgtttg

SEQ ID NO: 14709 - DNA, 40 bp, Homo sapiens
caaacaattatatttcactagtacaattaaatctaacctt

SEQ ID NO: 14710 - DNA, 40 bp, Homo sapiens
aggttagatttaattgtactagtgaaatataattgtttga

SEQ ID NO: 14711 - DNA, 40 bp, Homo sapiens
tcaaacaattatatttcactagtacaattaaatctaacct

SEQ ID NO: 14712 - DNA, 40 bp, Homo sapiens
ggttagatttaattgtactagtgaaatataattgtttgat

SEQ ID NO: 14713 - DNA, 40 bp, Homo sapiens
atcaaacaattatatttcactagtacaattaaatctaacc

SEQ ID NO: 14714 - DNA, 40 bp, Homo sapiens
gttagatttaattgtactagtgaaatataattgtttgatg

SEQ ID NO: 14715 - DNA, 40 bp, Homo sapiens
catcaaacaattatatttcactagtacaattaaatctaac

SEQ ID NO: 14716 - DNA, 40 bp, Homo sapiens
ttagatttaattgtactagtgaaatataattgtttgatgg

SEQ ID NO: 14717 - DNA, 40 bp, Homo sapiens
ccatcaaacaattatatttcactagtacaattaaatctaa

SEQ ID NO: 14718 - DNA, 40 bp, Homo sapiens
tagatttaattgtactagtgaaatataattgtttgatggt

SEQ ID NO: 14719 - DNA, 40 bp, Homo sapiens
accatcaaacaattatatttcactagtacaattaaatcta

SEQ ID NO: 14720 - DNA, 40 bp, Homo sapiens
agatttaattgtactagtgaaatataattgtttgatggtt

SEQ ID NO: 14721 - DNA, 40 bp, Homo sapiens
aaccatcaaacaattatatttcactagtacaattaaatct

SEQ ID NO: 14722 - DNA, 40 bp, Homo sapiens
gatttaattgtactagtgaaatataattgtttgatggttg

SEQ ID NO: 14723 - DNA, 40 bp, Homo sapiens
caaccatcaaacaattatatttcactagtacaattaaatc

SEQ ID NO: 14724 - DNA, 40 bp, Homo sapiens
atttaattgtactagtgaaatataattgtttgatggttga

SEQ ID NO: 14725 - DNA, 40 bp, Homo sapiens
tcaaccatcaaacaattatatttcactagtacaattaaat

SEQ ID NO: 14726 - DNA, 40 bp, Homo sapiens
tttaattgtactagtgaaatataattgtttgatggttgat

SEQ ID NO: 14727 - DNA, 40 bp, Homo sapiens
atcaaccatcaaacaattatatttcactagtacaattaaa

SEQ ID NO: 14728 - DNA, 40 bp, Homo sapiens
ttaattgtactagtgaaatataattgtttgatggttgatt

SEQ ID NO: 14729 - DNA, 40 bp, Homo sapiens
aatcaaccatcaaacaattatatttcactagtacaattaa

SEQ ID NO: 14730 - DNA, 40 bp, Homo sapiens
taattgtactagtgaaatataattgtttgatggttgattt

SEQ ID NO: 14731 - DNA, 40 bp, Homo sapiens
aaatcaaccatcaaacaattatatttcactagtacaatta

SEQ ID NO: 14732 - DNA, 40 bp, Homo sapiens
aattgtactagtgaaatataattgtttgatggttgatttt

SEQ ID NO: 14733 - DNA, 40 bp, Homo sapiens
aaaatcaaccatcaaacaattatatttcactagtacaatt

SEQ ID NO: 14734 - DNA, 40 bp, Homo sapiens
attgtactagtgaaatataattgtttgatggttgattttt

SEQ ID NO: 14735 - DNA, 40 bp, Homo sapiens
aaaaatcaaccatcaaacaattatatttcactagtacaat

SEQ ID NO: 14736 - DNA, 40 bp, Homo sapiens
ttgtactagtgaaatataattgtttgatggttgatttttt

SEQ ID NO: 14737 - DNA, 40 bp, Homo sapiens
aaaaaatcaaccatcaaacaattatatttcactagtacaa

SEQ ID NO: 14738 - DNA, 40 bp, Homo sapiens
tgtactagtgaaatataattgtttgatggttgattttttt

SEQ ID NO: 14739 - DNA, 40 bp, Homo sapiens
aaaaaaatcaaccatcaaacaattatatttcactagtaca

SEQ ID NO: 14740 - DNA, 40 bp, Homo sapiens
gtactagtgaaatataattgtttgatggttgattttttta

SEQ ID NO: 14741 - DNA, 40 bp, Homo sapiens
taaaaaaatcaaccatcaaacaattatatttcactagtac

SEQ ID NO: 14742 - DNA, 40 bp, Homo sapiens
tactagtgaaatataattgtttgatggttgatttttttaa

SEQ ID NO: 14743 - DNA, 40 bp, Homo sapiens
ttaaaaaaatcaaccatcaaacaattatatttcactagta

SEQ ID NO: 14744 - DNA, 40 bp, Homo sapiens
actagtgaaatataattgtttgatggttgatttttttaaa

SEQ ID NO: 14745 - DNA, 40 bp, Homo sapiens
tttaaaaaaatcaaccatcaaacaattatatttcactagt

SEQ ID NO: 14746 - DNA, 40 bp, Homo sapiens
ctagtgaaatataattgtttgatggttgatttttttaaac

SEQ ID NO: 14747 - DNA, 40 bp, Homo sapiens
gtttaaaaaaatcaaccatcaaacaattatatttcactag

SEQ ID NO: 14748 - DNA, 40 bp, Homo sapiens
tagtgaaatataattgtttgatggttgatttttttaaact

SEQ ID NO: 14749 - DNA, 40 bp, Homo sapiens
agtttaaaaaaatcaaccatcaaacaattatatttcacta

SEQ ID NO: 14750 - DNA, 40 bp, Homo sapiens
agtgaaatataattgtttgatggttgatttttttaaactt

SEQ ID NO: 14751 - DNA, 40 bp, Homo sapiens
aagtttaaaaaaatcaaccatcaaacaattatatttcact

SEQ ID NO: 14752 - DNA, 40 bp, Homo sapiens
gtgaaatataattgtttgatggttgatttttttaaacttc

SEQ ID NO: 14753 - DNA, 40 bp, Homo sapiens
gaagtttaaaaaaatcaaccatcaaacaattatatttcac

SEQ ID NO: 14754 - DNA, 40 bp, Homo sapiens
tgaaatataattgtttgatggttgatttttttaaacttca

SEQ ID NO: 14755 - DNA, 40 bp, Homo sapiens
tgaagtttaaaaaaatcaaccatcaaacaattatatttca

SEQ ID NO: 14756 - DNA, 40 bp, Homo sapiens
gaaatataattgtttgatggttgatttttttaaacttcat

SEQ ID NO: 14757 - DNA, 40 bp, Homo sapiens
atgaagtttaaaaaaatcaaccatcaaacaattatatttc

SEQ ID NO: 14758 - DNA, 40 bp, Homo sapiens
aaatataattgtttgatggttgatttttttaaacttcatc

SEQ ID NO: 14759 - DNA, 40 bp, Homo sapiens
gatgaagtttaaaaaaatcaaccatcaaacaattatattt

SEQ ID NO: 14760 - DNA, 40 bp, Homo sapiens
aatataattgtttgatggttgatttttttaaacttcatca

SEQ ID NO: 14761 - DNA, 40 bp, Homo sapiens
tgatgaagtttaaaaaaatcaaccatcaaacaattatatt

SEQ ID NO: 14762 - DNA, 40 bp, Homo sapiens
atataattgtttgatggttgatttttttaaacttcatcag

SEQ ID NO: 14763 - DNA, 40 bp, Homo sapiens
ctgatgaagtttaaaaaaatcaaccatcaaacaattatat

SEQ ID NO: 14764 - DNA, 40 bp, Homo sapiens
tataattgtttgatggttgatttttttaaacttcatcagc

SEQ ID NO: 14765 - DNA, 40 bp, Homo sapiens
gctgatgaagtttaaaaaaatcaaccatcaaacaattata

SEQ ID NO: 14766 - DNA, 40 bp, Homo sapiens
ataattgtttgatggttgatttttttaaacttcatcagca

SEQ ID NO: 14767 - DNA, 40 bp, Homo sapiens
tgctgatgaagtttaaaaaaatcaaccatcaaacaattat

SEQ ID NO: 14768 - DNA, 40 bp, Homo sapiens
taattgtttgatggttgatttttttaaacttcatcagcag

SEQ ID NO: 14769 - DNA, 40 bp, Homo sapiens
ctgctgatgaagtttaaaaaaatcaaccatcaaacaatta

SEQ ID NO: 14770 - DNA, 40 bp, Homo sapiens
aattgtttgatggttgatttttttaaacttcatcagcagt

SEQ ID NO: 14771 - DNA, 40 bp, Homo sapiens
actgctgatgaagtttaaaaaaatcaaccatcaaacaatt

SEQ ID NO: 14772 - DNA, 40 bp, Homo sapiens
attgtttgatggttgatttttttaaacttcatcagcagta

SEQ ID NO: 14773 - DNA, 40 bp, Homo sapiens
tactgctgatgaagtttaaaaaaatcaaccatcaaacaat

SEQ ID NO: 14774 - DNA, 40 bp, Homo sapiens
ttgtttgatggttgatttttttaaacttcatcagcagtat

SEQ ID NO: 14775 - DNA, 40 bp, Homo sapiens
atactgctgatgaagtttaaaaaaatcaaccatcaaacaa

SEQ ID NO: 14776 - DNA, 40 bp, Homo sapiens
tgtttgatggttgatttttttaaacttcatcagcagtatt

SEQ ID NO: 14777 - DNA, 40 bp, Homo sapiens
aatactgctgatgaagtttaaaaaaatcaaccatcaaaca

SEQ ID NO: 14778 - DNA, 40 bp, Homo sapiens
gtttgatggttgatttttttaaacttcatcagcagtattt

SEQ ID NO: 14779 - DNA, 40 bp, Homo sapiens
aaatactgctgatgaagtttaaaaaaatcaaccatcaaac

SEQ ID NO: 14780 - DNA, 40 bp, Homo sapiens
tttgatggttgatttttttaaacttcatcagcagtatttt

SEQ ID NO: 14781 - DNA, 40 bp, Homo sapiens
aaaatactgctgatgaagtttaaaaaaatcaaccatcaaa

SEQ ID NO: 14782 - DNA, 40 bp, Homo sapiens
ttgatggttgatttttttaaacttcatcagcagtattttc

SEQ ID NO: 14783 - DNA, 40 bp, Homo sapiens
gaaaatactgctgatgaagtttaaaaaaatcaaccatcaa

SEQ ID NO: 14784 - DNA, 40 bp, Homo sapiens
tgatggttgatttttttaaacttcatcagcagtattttcc

SEQ ID NO: 14785 - DNA, 40 bp, Homo sapiens
ggaaaatactgctgatgaagtttaaaaaaatcaaccatca

SEQ ID NO: 14786 - DNA, 40 bp, Homo sapiens
gatggttgatttttttaaacttcatcagcagtattttcct

SEQ ID NO: 14787 - DNA, 40 bp, Homo sapiens
aggaaaatactgctgatgaagtttaaaaaaatcaaccatc

SEQ ID NO: 14788 - DNA, 40 bp, Homo sapiens
atggttgatttttttaaacttcatcagcagtattttccta

SEQ ID NO: 14789 - DNA, 40 bp, Homo sapiens
taggaaaatactgctgatgaagtttaaaaaaatcaaccat

SEQ ID NO: 14790 - DNA, 40 bp, Homo sapiens
tggttgatttttttaaacttcatcagcagtattttcctat

SEQ ID NO: 14791 - DNA, 40 bp, Homo sapiens
ataggaaaatactgctgatgaagtttaaaaaaatcaacca

SEQ ID NO: 14792 - DNA, 40 bp, Homo sapiens
ggttgatttttttaaacttcatcagcagtattttcctatc

SEQ ID NO: 14793 - DNA, 40 bp, Homo sapiens
gataggaaaatactgctgatgaagtttaaaaaaatcaacc

SEQ ID NO: 14794 - DNA, 40 bp, Homo sapiens
gttgatttttttaaacttcatcagcagtattttcctatct

SEQ ID NO: 14795 - DNA, 40 bp, Homo sapiens
agataggaaaatactgctgatgaagtttaaaaaaatcaac

SEQ ID NO: 14796 - DNA, 40 bp, Homo sapiens
ttgatttttttaaacttcatcagcagtattttcctatctt

SEQ ID NO: 14797 - DNA, 40 bp, Homo sapiens
aagataggaaaatactgctgatgaagtttaaaaaaatcaa

SEQ ID NO: 14798 - DNA, 40 bp, Homo sapiens
tgatttttttaaacttcatcagcagtattttcctatcttc

SEQ ID NO: 14799 - DNA, 40 bp, Homo sapiens
gaagataggaaaatactgctgatgaagtttaaaaaaatca

SEQ ID NO: 14800 - DNA, 40 bp, Homo sapiens
gatttttttaaacttcatcagcagtattttcctatcttct

SEQ ID NO: 14801 - DNA, 40 bp, Homo sapiens
agaagataggaaaatactgctgatgaagtttaaaaaaatc

SEQ ID NO: 14802 - DNA, 40 bp, Homo sapiens
atttttttaaacttcatcagcagtattttcctatcttctt

SEQ ID NO: 14803 - DNA, 40 bp, Homo sapiens
aagaagataggaaaatactgctgatgaagtttaaaaaaat

SEQ ID NO: 14804 - DNA, 40 bp, Homo sapiens
tttttttaaacttcatcagcagtattttcctatcttcttc

SEQ ID NO: 14805 - DNA, 40 bp, Homo sapiens
gaagaagataggaaaatactgctgatgaagtttaaaaaaa

SEQ ID NO: 14806 - DNA, 40 bp, Homo sapiens
ttttttaaacttcatcagcagtattttcctatcttcttct

SEQ ID NO: 14807 - DNA, 40 bp, Homo sapiens
agaagaagataggaaaatactgctgatgaagtttaaaaaa

SEQ ID NO: 14808 - DNA, 40 bp, Homo sapiens
tttttaaacttcatcagcagtattttcctatcttcttctc

SEQ ID NO: 14809 - DNA, 40 bp, Homo sapiens
gagaagaagataggaaaatactgctgatgaagtttaaaaa

SEQ ID NO: 14810 - DNA, 40 bp, Homo sapiens
ttttaaacttcatcagcagtattttcctatcttcttctca

SEQ ID NO: 14811 - DNA, 40 bp, Homo sapiens
tgagaagaagataggaaaatactgctgatgaagtttaaaa

SEQ ID NO: 14812 - DNA, 40 bp, Homo sapiens
tttaaacttcatcagcagtattttcctatcttcttctcaa

SEQ ID NO: 14813 - DNA, 40 bp, Homo sapiens
ttgagaagaagataggaaaatactgctgatgaagtttaaa

SEQ ID NO: 14814 - DNA, 40 bp, Homo sapiens
ttaaacttcatcagcagtattttcctatcttcttctcaac

SEQ ID NO: 14815 - DNA, 40 bp, Homo sapiens
gttgagaagaagataggaaaatactgctgatgaagtttaa

SEQ ID NO: 14816 - DNA, 40 bp, Homo sapiens
taaacttcatcagcagtattttcctatcttcttctcaaca

SEQ ID NO: 14817 - DNA, 40 bp, Homo sapiens
tgttgagaagaagataggaaaatactgctgatgaagttta

SEQ ID NO: 14818 - DNA, 40 bp, Homo sapiens
aaacttcatcagcagtattttcctatcttcttctcaacat

SEQ ID NO: 14819 - DNA, 40 bp, Homo sapiens
atgttgagaagaagataggaaaatactgctgatgaagttt

SEQ ID NO: 14820 - DNA, 40 bp, Homo sapiens
aacttcatcagcagtattttcctatcttcttctcaacatt

SEQ ID NO: 14821 - DNA, 40 bp, Homo sapiens
aatgttgagaagaagataggaaaatactgctgatgaagtt

SEQ ID NO: 14822 - DNA, 40 bp, Homo sapiens
acttcatcagcagtattttcctatcttcttctcaacatta

SEQ ID NO: 14823 - DNA, 40 bp, Homo sapiens
taatgttgagaagaagataggaaaatactgctgatgaagt

SEQ ID NO: 14824 - DNA, 40 bp, Homo sapiens
cttcatcagcagtattttcctatcttcttctcaacattag

SEQ ID NO: 14825 - DNA, 40 bp, Homo sapiens
ctaatgttgagaagaagataggaaaatactgctgatgaag

SEQ ID NO: 14826 - DNA, 40 bp, Homo sapiens
ttcatcagcagtattttcctatcttcttctcaacattaga

SEQ ID NO: 14827 - DNA, 40 bp, Homo sapiens
tctaatgttgagaagaagataggaaaatactgctgatgaa

SEQ ID NO: 14828 - DNA, 40 bp, Homo sapiens
tcatcagcagtattttcctatcttcttctcaacattagag

SEQ ID NO: 14829 - DNA, 40 bp, Homo sapiens
ctctaatgttgagaagaagataggaaaatactgctgatga

SEQ ID NO: 14830 - DNA, 40 bp, Homo sapiens
catcagcagtattttcctatcttcttctcaacattagaga

SEQ ID NO: 14831 - DNA, 40 bp, Homo sapiens
tctctaatgttgagaagaagataggaaaatactgctgatg

SEQ ID NO: 14832 - DNA, 40 bp, Homo sapiens
atcagcagtattttcctatcttcttctcaacattagagaa

SEQ ID NO: 14833 - DNA, 40 bp, Homo sapiens
ttctctaatgttgagaagaagataggaaaatactgctgat

SEQ ID NO: 14834 - DNA, 40 bp, Homo sapiens
tcagcagtattttcctatcttcttctcaacattagagaac

SEQ ID NO: 14835 - DNA, 40 bp, Homo sapiens
gttctctaatgttgagaagaagataggaaaatactgctga

SEQ ID NO: 14836 - DNA, 40 bp, Homo sapiens
cagcagtattttcctatcttcttctcaacattagagaacc

SEQ ID NO: 14837 - DNA, 40 bp, Homo sapiens
ggttctctaatgttgagaagaagataggaaaatactgctg

SEQ ID NO: 14838 - DNA, 40 bp, Homo sapiens
agcagtattttcctatcttcttctcaacattagagaacct

SEQ ID NO: 14839 - DNA, 40 bp, Homo sapiens
aggttctctaatgttgagaagaagataggaaaatactgct

SEQ ID NO: 14840 - DNA, 40 bp, Homo sapiens
gcagtattttcctatcttcttctcaacattagagaaccta

SEQ ID NO: 14841 - DNA, 40 bp, Homo sapiens
taggttctctaatgttgagaagaagataggaaaatactgc

SEQ ID NO: 14842 - DNA, 40 bp, Homo sapiens
cagtattttcctatcttcttctcaacattagagaacctac

SEQ ID NO: 14843 - DNA, 40 bp, Homo sapiens
gtaggttctctaatgttgagaagaagataggaaaatactg

SEQ ID NO: 14844 - DNA, 40 bp, Homo sapiens
agtattttcctatcttcttctcaacattagagaacctaca

SEQ ID NO: 14845 - DNA, 40 bp, Homo sapiens
tgtaggttctctaatgttgagaagaagataggaaaatact

SEQ ID NO: 14846 - DNA, 40 bp, Homo sapiens
gtattttcctatcttcttctcaacattagagaacctacaa

SEQ ID NO: 14847 - DNA, 40 bp, Homo sapiens
ttgtaggttctctaatgttgagaagaagataggaaaatac

SEQ ID NO: 14848 - DNA, 40 bp, Homo sapiens
tattttcctatcttcttctcaacattagagaacctacaac

SEQ ID NO: 14849 - DNA, 40 bp, Homo sapiens
gttgtaggttctctaatgttgagaagaagataggaaaata

SEQ ID NO: 14850 - DNA, 40 bp, Homo sapiens
attttcctatcttcttctcaacattagagaacctacaact

SEQ ID NO: 14851 - DNA, 40 bp, Homo sapiens
agttgtaggttctctaatgttgagaagaagataggaaaat

SEQ ID NO: 14852 - DNA, 40 bp, Homo sapiens
ttttcctatcttcttctcaacattagagaacctacaacta

SEQ ID NO: 14853 - DNA, 40 bp, Homo sapiens
tagttgtaggttctctaatgttgagaagaagataggaaaa

SEQ ID NO: 14854 - DNA, 40 bp, Homo sapiens
tttcctatcttcttctcaacattagagaacctacaactac

SEQ ID NO: 14855 - DNA, 40 bp, Homo sapiens
gtagttgtaggttctctaatgttgagaagaagataggaaa

SEQ ID NO: 14856 - DNA, 40 bp, Homo sapiens
ttcctatcttcttctcaacattagagaacctacaactacc

SEQ ID NO: 14857 - DNA, 40 bp, Homo sapiens
ggtagttgtaggttctctaatgttgagaagaagataggaa

SEQ ID NO: 14858 - DNA, 40 bp, Homo sapiens
tcctatcttcttctcaacattagagaacctacaactaccg

SEQ ID NO: 14859 - DNA, 40 bp, Homo sapiens
cggtagttgtaggttctctaatgttgagaagaagatagga

SEQ ID NO: 14860 - DNA, 40 bp, Homo sapiens
cctatcttcttctcaacattagagaacctacaactaccgg

SEQ ID NO: 14861 - DNA, 40 bp, Homo sapiens
ccggtagttgtaggttctctaatgttgagaagaagatagg

SEQ ID NO: 14862 - DNA, 40 bp, Homo sapiens
ctatcttcttctcaacattagagaacctacaactaccgga

SEQ ID NO: 14863 - DNA, 40 bp, Homo sapiens
tccggtagttgtaggttctctaatgttgagaagaagatag

SEQ ID NO: 14864 - DNA, 40 bp, Homo sapiens
tatcttcttctcaacattagagaacctacaactaccggat

SEQ ID NO: 14865 - DNA, 40 bp, Homo sapiens
atccggtagttgtaggttctctaatgttgagaagaagata

SEQ ID NO: 14866 - DNA, 40 bp, Homo sapiens
atcttcttctcaacattagagaacctacaactaccggata

SEQ ID NO: 14867 - DNA, 40 bp, Homo sapiens
tatccggtagttgtaggttctctaatgttgagaagaagat

SEQ ID NO: 14868 - DNA, 40 bp, Homo sapiens
tcttcttctcaacattagagaacctacaactaccggataa

SEQ ID NO: 14869 - DNA, 40 bp, Homo sapiens
ttatccggtagttgtaggttctctaatgttgagaagaaga

SEQ ID NO: 14870 - DNA, 40 bp, Homo sapiens
cttcttctcaacattagagaacctacaactaccggataaa

SEQ ID NO: 14871 - DNA, 40 bp, Homo sapiens
tttatccggtagttgtaggttctctaatgttgagaagaag

SEQ ID NO: 14872 - DNA, 40 bp, Homo sapiens
ttcttctcaacattagagaacctacaactaccggataaat

SEQ ID NO: 14873 - DNA, 40 bp, Homo sapiens
atttatccggtagttgtaggttctctaatgttgagaagaa

SEQ ID NO: 14874 - DNA, 40 bp, Homo sapiens
tcttctcaacattagagaacctacaactaccggataaatt

SEQ ID NO: 14875 - DNA, 40 bp, Homo sapiens
aatttatccggtagttgtaggttctctaatgttgagaaga

SEQ ID NO: 14876 - DNA, 40 bp, Homo sapiens
cttctcaacattagagaacctacaactaccggataaattt

SEQ ID NO: 14877 - DNA, 40 bp, Homo sapiens
aaatttatccggtagttgtaggttctctaatgttgagaag

SEQ ID NO: 14878 - DNA, 40 bp, Homo sapiens
ttctcaacattagagaacctacaactaccggataaatttt

SEQ ID NO: 14879 - DNA, 40 bp, Homo sapiens
aaaatttatccggtagttgtaggttctctaatgttgagaa

SEQ ID NO: 14880 - DNA, 40 bp, Homo sapiens
tctcaacattagagaacctacaactaccggataaatttta

SEQ ID NO: 14881 - DNA, 40 bp, Homo sapiens
taaaatttatccggtagttgtaggttctctaatgttgaga

SEQ ID NO: 14882 - DNA, 40 bp, Homo sapiens
ctcaacattagagaacctacaactaccggataaattttac

SEQ ID NO: 14883 - DNA, 40 bp, Homo sapiens
gtaaaatttatccggtagttgtaggttctctaatgttgag

SEQ ID NO: 14884 - DNA, 40 bp, Homo sapiens
tcaacattagagaacctacaactaccggataaattttaca

SEQ ID NO: 14885 - DNA, 40 bp, Homo sapiens
tgtaaaatttatccggtagttgtaggttctctaatgttga

SEQ ID NO: 14886 - DNA, 40 bp, Homo sapiens
caacattagagaacctacaactaccggataaattttacaa

SEQ ID NO: 14887 - DNA, 40 bp, Homo sapiens
ttgtaaaatttatccggtagttgtaggttctctaatgttg

SEQ ID NO: 14888 - DNA, 40 bp, Homo sapiens
aacattagagaacctacaactaccggataaattttacaaa

SEQ ID NO: 14889 - DNA, 40 bp, Homo sapiens
tttgtaaaatttatccggtagttgtaggttctctaatgtt

SEQ ID NO: 14890 - DNA, 40 bp, Homo sapiens
acattagagaacctacaactaccggataaattttacaaaa

SEQ ID NO: 14891 - DNA, 40 bp, Homo sapiens
ttttgtaaaatttatccggtagttgtaggttctctaatgt

SEQ ID NO: 14892 - DNA, 40 bp, Homo sapiens
cattagagaacctacaactaccggataaattttacaaaat

SEQ ID NO: 14893 - DNA, 40 bp, Homo sapiens
attttgtaaaatttatccggtagttgtaggttctctaatg

SEQ ID NO: 14894 - DNA, 40 bp, Homo sapiens
attagagaacctacaactaccggataaattttacaaaatg

SEQ ID NO: 14895 - DNA, 40 bp, Homo sapiens
cattttgtaaaatttatccggtagttgtaggttctctaat

SEQ ID NO: 14896 - DNA, 40 bp, Homo sapiens
ttagagaacctacaactaccggataaattttacaaaatga

SEQ ID NO: 14897 - DNA, 40 bp, Homo sapiens
tcattttgtaaaatttatccggtagttgtaggttctctaa

SEQ ID NO: 14898 - DNA, 40 bp, Homo sapiens
tagagaacctacaactaccggataaattttacaaaatgaa

SEQ ID NO: 14899 - DNA, 40 bp, Homo sapiens
ttcattttgtaaaatttatccggtagttgtaggttctcta

SEQ ID NO: 14900 - DNA, 40 bp, Homo sapiens
agagaacctacaactaccggataaattttacaaaatgaat

SEQ ID NO: 14901 - DNA, 40 bp, Homo sapiens
attcattttgtaaaatttatccggtagttgtaggttctct

SEQ ID NO: 14902 - DNA, 40 bp, Homo sapiens
gagaacctacaactaccggataaattttacaaaatgaatt

SEQ ID NO: 14903 - DNA, 40 bp, Homo sapiens
aattcattttgtaaaatttatccggtagttgtaggttctc

SEQ ID NO: 14904 - DNA, 40 bp, Homo sapiens
agaacctacaactaccggataaattttacaaaatgaatta

SEQ ID NO: 14905 - DNA, 40 bp, Homo sapiens
taattcattttgtaaaatttatccggtagttgtaggttct

SEQ ID NO: 14906 - DNA, 40 bp, Homo sapiens
gaacctacaactaccggataaattttacaaaatgaattat

SEQ ID NO: 14907 - DNA, 40 bp, Homo sapiens
ataattcattttgtaaaatttatccggtagttgtaggttc

SEQ ID NO: 14908 - DNA, 40 bp, Homo sapiens
aacctacaactaccggataaattttacaaaatgaattatt

SEQ ID NO: 14909 - DNA, 40 bp, Homo sapiens
aataattcattttgtaaaatttatccggtagttgtaggtt

SEQ ID NO: 14910 - DNA, 40 bp, Homo sapiens
acctacaactaccggataaattttacaaaatgaattattt

SEQ ID NO: 14911 - DNA, 40 bp, Homo sapiens
aaataattcattttgtaaaatttatccggtagttgtaggt

SEQ ID NO: 14912 - DNA, 40 bp, Homo sapiens
cctacaactaccggataaattttacaaaatgaattatttg

SEQ ID NO: 14913 - DNA, 40 bp, Homo sapiens
caaataattcattttgtaaaatttatccggtagttgtagg

SEQ ID NO: 14914 - DNA, 40 bp, Homo sapiens
ctacaactaccggataaattttacaaaatgaattatttgc

SEQ ID NO: 14915 - DNA, 40 bp, Homo sapiens
gcaaataattcattttgtaaaatttatccggtagttgtag

SEQ ID NO: 14916 - DNA, 40 bp, Homo sapiens
tacaactaccggataaattttacaaaatgaattatttgcc

SEQ ID NO: 14917 - DNA, 40 bp, Homo sapiens
ggcaaataattcattttgtaaaatttatccggtagttgta

SEQ ID NO: 14918 - DNA, 40 bp, Homo sapiens
acaactaccggataaattttacaaaatgaattatttgcct

SEQ ID NO: 14919 - DNA, 40 bp, Homo sapiens
aggcaaataattcattttgtaaaatttatccggtagttgt

SEQ ID NO: 14920 - DNA, 40 bp, Homo sapiens
caactaccggataaattttacaaaatgaattatttgccta

SEQ ID NO: 14921 - DNA, 40 bp, Homo sapiens
taggcaaataattcattttgtaaaatttatccggtagttg

SEQ ID NO: 14922 - DNA, 40 bp, Homo sapiens
aactaccggataaattttacaaaatgaattatttgcctaa

SEQ ID NO: 14923 - DNA, 40 bp, Homo sapiens
ttaggcaaataattcattttgtaaaatttatccggtagtt

SEQ ID NO: 14924 - DNA, 40 bp, Homo sapiens
actaccggataaattttacaaaatgaattatttgcctaag

SEQ ID NO: 14925 - DNA, 40 bp, Homo sapiens
cttaggcaaataattcattttgtaaaatttatccggtagt

SEQ ID NO: 14926 - DNA, 40 bp, Homo sapiens
ctaccggataaattttacaaaatgaattatttgcctaagg

SEQ ID NO: 14927 - DNA, 40 bp, Homo sapiens
ccttaggcaaataattcattttgtaaaatttatccggtag

SEQ ID NO: 14928 - DNA, 40 bp, Homo sapiens
taccggataaattttacaaaatgaattatttgcctaaggt

SEQ ID NO: 14929 - DNA, 40 bp, Homo sapiens
accttaggcaaataattcattttgtaaaatttatccggta

SEQ ID NO: 14930 - DNA, 40 bp, Homo sapiens
accggataaattttacaaaatgaattatttgcctaaggtg

SEQ ID NO: 14931 - DNA, 40 bp, Homo sapiens
caccttaggcaaataattcattttgtaaaatttatccggt

SEQ ID NO: 14932 - DNA, 40 bp, Homo sapiens
ccggataaattttacaaaatgaattatttgcctaaggtgt

SEQ ID NO: 14933 - DNA, 40 bp, Homo sapiens
acaccttaggcaaataattcattttgtaaaatttatccgg

SEQ ID NO: 14934 - DNA, 40 bp, Homo sapiens
cggataaattttacaaaatgaattatttgcctaaggtgtg

SEQ ID NO: 14935 - DNA, 40 bp, Homo sapiens
cacaccttaggcaaataattcattttgtaaaatttatccg

SEQ ID NO: 14936 - DNA, 40 bp, Homo sapiens
ggataaattttacaaaatgaattatttgcctaaggtgtgg

SEQ ID NO: 14937 - DNA, 40 bp, Homo sapiens
ccacaccttaggcaaataattcattttgtaaaatttatcc

SEQ ID NO: 14938 - DNA, 40 bp, Homo sapiens
gataaattttacaaaatgaattatttgcctaaggtgtggt

SEQ ID NO: 14939 - DNA, 40 bp, Homo sapiens
accacaccttaggcaaataattcattttgtaaaatttatc

SEQ ID NO: 14940 - DNA, 40 bp, Homo sapiens
ataaattttacaaaatgaattatttgcctaaggtgtggtt

SEQ ID NO: 14941 - DNA, 40 bp, Homo sapiens
aaccacaccttaggcaaataattcattttgtaaaatttat

SEQ ID NO: 14942 - DNA, 40 bp, Homo sapiens
taaattttacaaaatgaattatttgcctaaggtgtggttt

SEQ ID NO: 14943 - DNA, 40 bp, Homo sapiens
aaaccacaccttaggcaaataattcattttgtaaaattta

SEQ ID NO: 14944 - DNA, 40 bp, Homo sapiens
aaattttacaaaatgaattatttgcctaaggtgtggttta

SEQ ID NO: 14945 - DNA, 40 bp, Homo sapiens
taaaccacaccttaggcaaataattcattttgtaaaattt

SEQ ID NO: 14946 - DNA, 40 bp, Homo sapiens
aattttacaaaatgaattatttgcctaaggtgtggtttat

SEQ ID NO: 14947 - DNA, 40 bp, Homo sapiens
ataaaccacaccttaggcaaataattcattttgtaaaatt

SEQ ID NO: 14948 - DNA, 40 bp, Homo sapiens
attttacaaaatgaattatttgcctaaggtgtggtttata

SEQ ID NO: 14949 - DNA, 40 bp, Homo sapiens
tataaaccacaccttaggcaaataattcattttgtaaaat

SEQ ID NO: 14950 - DNA, 40 bp, Homo sapiens
ttttacaaaatgaattatttgcctaaggtgtggtttatat

SEQ ID NO: 14951 - DNA, 40 bp, Homo sapiens
atataaaccacaccttaggcaaataattcattttgtaaaa

SEQ ID NO: 14952 - DNA, 40 bp, Homo sapiens
tttacaaaatgaattatttgcctaaggtgtggtttatata

SEQ ID NO: 14953 - DNA, 40 bp, Homo sapiens
tatataaaccacaccttaggcaaataattcattttgtaaa

SEQ ID NO: 14954 - DNA, 40 bp, Homo sapiens
ttacaaaatgaattatttgcctaaggtgtggtttatataa

SEQ ID NO: 14955 - DNA, 40 bp, Homo sapiens
ttatataaaccacaccttaggcaaataattcattttgtaa

SEQ ID NO: 14956 - DNA, 40 bp, Homo sapiens
tacaaaatgaattatttgcctaaggtgtggtttatataaa

SEQ ID NO: 14957 - DNA, 40 bp, Homo sapiens
tttatataaaccacaccttaggcaaataattcattttgta

SEQ ID NO: 14958 - DNA, 40 bp, Homo sapiens
acaaaatgaattatttgcctaaggtgtggtttatataaag

SEQ ID NO: 14959 - DNA, 40 bp, Homo sapiens
ctttatataaaccacaccttaggcaaataattcattttgt

SEQ ID NO: 14960 - DNA, 40 bp, Homo sapiens
caaaatgaattatttgcctaaggtgtggtttatataaagg

SEQ ID NO: 14961 - DNA, 40 bp, Homo sapiens
cctttatataaaccacaccttaggcaaataattcattttg

SEQ ID NO: 14962 - DNA, 40 bp, Homo sapiens
aaaatgaattatttgcctaaggtgtggtttatataaaggt

SEQ ID NO: 14963 - DNA, 40 bp, Homo sapiens
acctttatataaaccacaccttaggcaaataattcatttt

SEQ ID NO: 14964 - DNA, 40 bp, Homo sapiens
aaatgaattatttgcctaaggtgtggtttatataaaggta

SEQ ID NO: 14965 - DNA, 40 bp, Homo sapiens
tacctttatataaaccacaccttaggcaaataattcattt

SEQ ID NO: 14966 - DNA, 40 bp, Homo sapiens
aatgaattatttgcctaaggtgtggtttatataaaggtac

SEQ ID NO: 14967 - DNA, 40 bp, Homo sapiens
gtacctttatataaaccacaccttaggcaaataattcatt

SEQ ID NO: 14968 - DNA, 40 bp, Homo sapiens
atgaattatttgcctaaggtgtggtttatataaaggtact

SEQ ID NO: 14969 - DNA, 40 bp, Homo sapiens
agtacctttatataaaccacaccttaggcaaataattcat

SEQ ID NO: 14970 - DNA, 40 bp, Homo sapiens
tgaattatttgcctaaggtgtggtttatataaaggtacta

SEQ ID NO: 14971 - DNA, 40 bp, Homo sapiens
tagtacctttatataaaccacaccttaggcaaataattca

SEQ ID NO: 14972 - DNA, 40 bp, Homo sapiens
gaattatttgcctaaggtgtggtttatataaaggtactat

SEQ ID NO: 14973 - DNA, 40 bp, Homo sapiens
atagtacctttatataaaccacaccttaggcaaataattc

SEQ ID NO: 14974 - DNA, 40 bp, Homo sapiens
aattatttgcctaaggtgtggtttatataaaggtactatt

SEQ ID NO: 14975 - DNA, 40 bp, Homo sapiens
aatagtacctttatataaaccacaccttaggcaaataatt

SEQ ID NO: 14976 - DNA, 40 bp, Homo sapiens
attatttgcctaaggtgtggtttatataaaggtactatta

SEQ ID NO: 14977 - DNA, 40 bp, Homo sapiens
taatagtacctttatataaaccacaccttaggcaaataat

SEQ ID NO: 14978 - DNA, 40 bp, Homo sapiens
ttatttgcctaaggtgtggtttatataaaggtactattac

SEQ ID NO: 14979 - DNA, 40 bp, Homo sapiens
gtaatagtacctttatataaaccacaccttaggcaaataa

SEQ ID NO: 14980 - DNA, 40 bp, Homo sapiens
tatttgcctaaggtgtggtttatataaaggtactattacc

SEQ ID NO: 14981 - DNA, 40 bp, Homo sapiens
ggtaatagtacctttatataaaccacaccttaggcaaata

SEQ ID NO: 14982 - DNA, 40 bp, Homo sapiens
atttgcctaaggtgtggtttatataaaggtactattacca

SEQ ID NO: 14983 - DNA, 40 bp, Homo sapiens
tggtaatagtacctttatataaaccacaccttaggcaaat

SEQ ID NO: 14984 - DNA, 40 bp, Homo sapiens
tttgcctaaggtgtggtttatataaaggtactattaccaa

SEQ ID NO: 14985 - DNA, 40 bp, Homo sapiens
ttggtaatagtacctttatataaaccacaccttaggcaaa

SEQ ID NO: 14986 - DNA, 40 bp, Homo sapiens
ttgcctaaggtgtggtttatataaaggtactattaccaac

SEQ ID NO: 14987 - DNA, 40 bp, Homo sapiens
gttggtaatagtacctttatataaaccacaccttaggcaa

SEQ ID NO: 14988 - DNA, 40 bp, Homo sapiens
tgcctaaggtgtggtttatataaaggtactattaccaact

SEQ ID NO: 14989 - DNA, 40 bp, Homo sapiens
agttggtaatagtacctttatataaaccacaccttaggca

SEQ ID NO: 14990 - DNA, 40 bp, Homo sapiens
gcctaaggtgtggtttatataaaggtactattaccaactt

SEQ ID NO: 14991 - DNA, 40 bp, Homo sapiens
aagttggtaatagtacctttatataaaccacaccttaggc

SEQ ID NO: 14992 - DNA, 40 bp, Homo sapiens
cctaaggtgtggtttatataaaggtactattaccaacttt

SEQ ID NO: 14993 - DNA, 40 bp, Homo sapiens
aaagttggtaatagtacctttatataaaccacaccttagg

SEQ ID NO: 14994 - DNA, 40 bp, Homo sapiens
ctaaggtgtggtttatataaaggtactattaccaacttta

SEQ ID NO: 14995 - DNA, 40 bp, Homo sapiens
taaagttggtaatagtacctttatataaaccacaccttag

SEQ ID NO: 14996 - DNA, 40 bp, Homo sapiens
taaggtgtggtttatataaaggtactattaccaactttac

SEQ ID NO: 14997 - DNA, 40 bp, Homo sapiens
gtaaagttggtaatagtacctttatataaaccacacctta

SEQ ID NO: 14998 - DNA, 40 bp, Homo sapiens
aaggtgtggtttatataaaggtactattaccaactttacc

SEQ ID NO: 14999 - DNA, 40 bp, Homo sapiens
ggtaaagttggtaatagtacctttatataaaccacacctt

SEQ ID NO: 15000 - DNA, 40 bp, Homo sapiens
aggtgtggtttatataaaggtactattaccaactttacct

SEQ ID NO: 15001 - DNA, 40 bp, Homo sapiens
aggtaaagttggtaatagtacctttatataaaccacacct

SEQ ID NO: 15002 - DNA, 40 bp, Homo sapiens
ggtgtggtttatataaaggtactattaccaactttacctt

SEQ ID NO: 15003 - DNA, 40 bp, Homo sapiens
aaggtaaagttggtaatagtacctttatataaaccacacc

SEQ ID NO: 15004 - DNA, 40 bp, Homo sapiens
gtgtggtttatataaaggtactattaccaactttaccttt

SEQ ID NO: 15005 - DNA, 40 bp, Homo sapiens
aaaggtaaagttggtaatagtacctttatataaaccacac

SEQ ID NO: 15006 - DNA, 40 bp, Homo sapiens
tgtggtttatataaaggtactattaccaactttacctttg

SEQ ID NO: 15007 - DNA, 40 bp, Homo sapiens
caaaggtaaagttggtaatagtacctttatataaaccaca

SEQ ID NO: 15008 - DNA, 40 bp, Homo sapiens
gtggtttatataaaggtactattaccaactttacctttgc

SEQ ID NO: 15009 - DNA, 40 bp, Homo sapiens
gcaaaggtaaagttggtaatagtacctttatataaaccac

SEQ ID NO: 15010 - DNA, 40 bp, Homo sapiens
tggtttatataaaggtactattaccaactttacctttgct

SEQ ID NO: 15011 - DNA, 40 bp, Homo sapiens
agcaaaggtaaagttggtaatagtacctttatataaacca

SEQ ID NO: 15012 - DNA, 40 bp, Homo sapiens
ggtttatataaaggtactattaccaactttacctttgctt

SEQ ID NO: 15013 - DNA, 40 bp, Homo sapiens
aagcaaaggtaaagttggtaatagtacctttatataaacc

SEQ ID NO: 15014 - DNA, 40 bp, Homo sapiens
gtttatataaaggtactattaccaactttacctttgcttt

SEQ ID NO: 15015 - DNA, 40 bp, Homo sapiens
aaagcaaaggtaaagttggtaatagtacctttatataaac

SEQ ID NO: 15016 - DNA, 40 bp, Homo sapiens
tttatataaaggtactattaccaactttacctttgctttg

SEQ ID NO: 15017 - DNA, 40 bp, Homo sapiens
caaagcaaaggtaaagttggtaatagtacctttatataaa

SEQ ID NO: 15018 - DNA, 40 bp, Homo sapiens
ttatataaaggtactattaccaactttacctttgctttgt

SEQ ID NO: 15019 - DNA, 40 bp, Homo sapiens
acaaagcaaaggtaaagttggtaatagtacctttatataa

SEQ ID NO: 15020 - DNA, 40 bp, Homo sapiens
tatataaaggtactattaccaactttacctttgctttgtt

SEQ ID NO: 15021 - DNA, 40 bp, Homo sapiens
aacaaagcaaaggtaaagttggtaatagtacctttatata

SEQ ID NO: 15022 - DNA, 40 bp, Homo sapiens
atataaaggtactattaccaactttacctttgctttgttg

SEQ ID NO: 15023 - DNA, 40 bp, Homo sapiens
caacaaagcaaaggtaaagttggtaatagtacctttatat

SEQ ID NO: 15024 - DNA, 40 bp, Homo sapiens
tataaaggtactattaccaactttacctttgctttgttgt

SEQ ID NO: 15025 - DNA, 40 bp, Homo sapiens
acaacaaagcaaaggtaaagttggtaatagtacctttata

SEQ ID NO: 15026 - DNA, 40 bp, Homo sapiens
ataaaggtactattaccaactttacctttgctttgttgtc

SEQ ID NO: 15027 - DNA, 40 bp, Homo sapiens
gacaacaaagcaaaggtaaagttggtaatagtacctttat

SEQ ID NO: 15028 - DNA, 40 bp, Homo sapiens
taaaggtactattaccaactttacctttgctttgttgtca

SEQ ID NO: 15029 - DNA, 40 bp, Homo sapiens
tgacaacaaagcaaaggtaaagttggtaatagtaccttta

SEQ ID NO: 15030 - DNA, 40 bp, Homo sapiens
aaaggtactattaccaactttacctttgctttgttgtcat

SEQ ID NO: 15031 - DNA, 40 bp, Homo sapiens
atgacaacaaagcaaaggtaaagttggtaatagtaccttt

SEQ ID NO: 15032 - DNA, 40 bp, Homo sapiens
aaggtactattaccaactttacctttgctttgttgtcatt

SEQ ID NO: 15033 - DNA, 40 bp, Homo sapiens
aatgacaacaaagcaaaggtaaagttggtaatagtacctt

SEQ ID NO: 15034 - DNA, 40 bp, Homo sapiens
aggtactattaccaactttacctttgctttgttgtcattt

SEQ ID NO: 15035 - DNA, 40 bp, Homo sapiens
aaatgacaacaaagcaaaggtaaagttggtaatagtacct

SEQ ID NO: 15036 - DNA, 40 bp, Homo sapiens
ggtactattaccaactttacctttgctttgttgtcatttt

SEQ ID NO: 15037 - DNA, 40 bp, Homo sapiens
aaaatgacaacaaagcaaaggtaaagttggtaatagtacc

SEQ ID NO: 15038 - DNA, 40 bp, Homo sapiens
gtactattaccaactttacctttgctttgttgtcattttt

SEQ ID NO: 15039 - DNA, 40 bp, Homo sapiens
aaaaatgacaacaaagcaaaggtaaagttggtaatagtac

SEQ ID NO: 15040 - DNA, 40 bp, Homo sapiens
tactattaccaactttacctttgctttgttgtcattttta

SEQ ID NO: 15041 - DNA, 40 bp, Homo sapiens
taaaaatgacaacaaagcaaaggtaaagttggtaatagta

SEQ ID NO: 15042 - DNA, 40 bp, Homo sapiens
actattaccaactttacctttgctttgttgtcatttttaa

SEQ ID NO: 15043 - DNA, 40 bp, Homo sapiens
ttaaaaatgacaacaaagcaaaggtaaagttggtaatagt

SEQ ID NO: 15044 - DNA, 40 bp, Homo sapiens
ctattaccaactttacctttgctttgttgtcatttttaaa

SEQ ID NO: 15045 - DNA, 40 bp, Homo sapiens
tttaaaaatgacaacaaagcaaaggtaaagttggtaatag

SEQ ID NO: 15046 - DNA, 40 bp, Homo sapiens
tattaccaactttacctttgctttgttgtcatttttaaat

SEQ ID NO: 15047 - DNA, 40 bp, Homo sapiens
atttaaaaatgacaacaaagcaaaggtaaagttggtaata

SEQ ID NO: 15048 - DNA, 40 bp, Homo sapiens
attaccaactttacctttgctttgttgtcatttttaaatt

SEQ ID NO: 15049 - DNA, 40 bp, Homo sapiens
aatttaaaaatgacaacaaagcaaaggtaaagttggtaat

SEQ ID NO: 15050 - DNA, 40 bp, Homo sapiens
ttaccaactttacctttgctttgttgtcatttttaaattt

SEQ ID NO: 15051 - DNA, 40 bp, Homo sapiens
aaatttaaaaatgacaacaaagcaaaggtaaagttggtaa

SEQ ID NO: 15052 - DNA, 40 bp, Homo sapiens
taccaactttacctttgctttgttgtcatttttaaattta

SEQ ID NO: 15053 - DNA, 40 bp, Homo sapiens
taaatttaaaaatgacaacaaagcaaaggtaaagttggta

SEQ ID NO: 15054 - DNA, 40 bp, Homo sapiens
accaactttacctttgctttgttgtcatttttaaatttac

SEQ ID NO: 15055 - DNA, 40 bp, Homo sapiens
gtaaatttaaaaatgacaacaaagcaaaggtaaagttggt

SEQ ID NO: 15056 - DNA, 40 bp, Homo sapiens
ccaactttacctttgctttgttgtcatttttaaatttact

SEQ ID NO: 15057 - DNA, 40 bp, Homo sapiens
agtaaatttaaaaatgacaacaaagcaaaggtaaagttgg

SEQ ID NO: 15058 - DNA, 40 bp, Homo sapiens
caactttacctttgctttgttgtcatttttaaatttactc

SEQ ID NO: 15059 - DNA, 40 bp, Homo sapiens
gagtaaatttaaaaatgacaacaaagcaaaggtaaagttg

SEQ ID NO: 15060 - DNA, 40 bp, Homo sapiens
aactttacctttgctttgttgtcatttttaaatttactca

SEQ ID NO: 15061 - DNA, 40 bp, Homo sapiens
tgagtaaatttaaaaatgacaacaaagcaaaggtaaagtt

SEQ ID NO: 15062 - DNA, 40 bp, Homo sapiens
actttacctttgctttgttgtcatttttaaatttactcaa

SEQ ID NO: 15063 - DNA, 40 bp, Homo sapiens
ttgagtaaatttaaaaatgacaacaaagcaaaggtaaagt

SEQ ID NO: 15064 - DNA, 40 bp, Homo sapiens
ctttacctttgctttgttgtcatttttaaatttactcaag

SEQ ID NO: 15065 - DNA, 40 bp, Homo sapiens
cttgagtaaatttaaaaatgacaacaaagcaaaggtaaag

SEQ ID NO: 15066 - DNA, 40 bp, Homo sapiens
tttacctttgctttgttgtcatttttaaatttactcaagg

SEQ ID NO: 15067 - DNA, 40 bp, Homo sapiens
ccttgagtaaatttaaaaatgacaacaaagcaaaggtaaa

SEQ ID NO: 15068 - DNA, 40 bp, Homo sapiens
ttacctttgctttgttgtcatttttaaatttactcaagga

SEQ ID NO: 15069 - DNA, 40 bp, Homo sapiens
tccttgagtaaatttaaaaatgacaacaaagcaaaggtaa

SEQ ID NO: 15070 - DNA, 40 bp, Homo sapiens
tacctttgctttgttgtcatttttaaatttactcaaggaa

SEQ ID NO: 15071 - DNA, 40 bp, Homo sapiens
ttccttgagtaaatttaaaaatgacaacaaagcaaaggta

SEQ ID NO: 15072 - DNA, 40 bp, Homo sapiens
acctttgctttgttgtcatttttaaatttactcaaggaaa

SEQ ID NO: 15073 - DNA, 40 bp, Homo sapiens
tttccttgagtaaatttaaaaatgacaacaaagcaaaggt

SEQ ID NO: 15074 - DNA, 40 bp, Homo sapiens
cctttgctttgttgtcatttttaaatttactcaaggaaat

SEQ ID NO: 15075 - DNA, 40 bp, Homo sapiens
atttccttgagtaaatttaaaaatgacaacaaagcaaagg

SEQ ID NO: 15076 - DNA, 40 bp, Homo sapiens
ctttgctttgttgtcatttttaaatttactcaaggaaata

SEQ ID NO: 15077 - DNA, 40 bp, Homo sapiens
tatttccttgagtaaatttaaaaatgacaacaaagcaaag

SEQ ID NO: 15078 - DNA, 40 bp, Homo sapiens
tttgctttgttgtcatttttaaatttactcaaggaaatac

SEQ ID NO: 15079 - DNA, 40 bp, Homo sapiens
gtatttccttgagtaaatttaaaaatgacaacaaagcaaa

SEQ ID NO: 15080 - DNA, 40 bp, Homo sapiens
ttgctttgttgtcatttttaaatttactcaaggaaatact

SEQ ID NO: 15081 - DNA, 40 bp, Homo sapiens
agtatttccttgagtaaatttaaaaatgacaacaaagcaa

SEQ ID NO: 15082 - DNA, 40 bp, Homo sapiens
tgctttgttgtcatttttaaatttactcaaggaaatacta

SEQ ID NO: 15083 - DNA, 40 bp, Homo sapiens
tagtatttccttgagtaaatttaaaaatgacaacaaagca

SEQ ID NO: 15084 - DNA, 40 bp, Homo sapiens
gctttgttgtcatttttaaatttactcaaggaaatactag

SEQ ID NO: 15085 - DNA, 40 bp, Homo sapiens
ctagtatttccttgagtaaatttaaaaatgacaacaaagc

SEQ ID NO: 15086 - DNA, 40 bp, Homo sapiens
ctttgttgtcatttttaaatttactcaaggaaatactagg

SEQ ID NO: 15087 - DNA, 40 bp, Homo sapiens
cctagtatttccttgagtaaatttaaaaatgacaacaaag

SEQ ID NO: 15088 - DNA, 40 bp, Homo sapiens
tttgttgtcatttttaaatttactcaaggaaatactagga

SEQ ID NO: 15089 - DNA, 40 bp, Homo sapiens
tcctagtatttccttgagtaaatttaaaaatgacaacaaa

SEQ ID NO: 15090 - DNA, 40 bp, Homo sapiens
ttgttgtcatttttaaatttactcaaggaaatactaggat

SEQ ID NO: 15091 - DNA, 40 bp, Homo sapiens
atcctagtatttccttgagtaaatttaaaaatgacaacaa

SEQ ID NO: 15092 - DNA, 40 bp, Homo sapiens
tgttgtcatttttaaatttactcaaggaaatactaggatt

SEQ ID NO: 15093 - DNA, 40 bp, Homo sapiens
aatcctagtatttccttgagtaaatttaaaaatgacaaca

SEQ ID NO: 15094 - DNA, 40 bp, Homo sapiens
gttgtcatttttaaatttactcaaggaaatactaggattt

SEQ ID NO: 15095 - DNA, 40 bp, Homo sapiens
aaatcctagtatttccttgagtaaatttaaaaatgacaac

SEQ ID NO: 15096 - DNA, 40 bp, Homo sapiens
ttgtcatttttaaatttactcaaggaaatactaggattta

SEQ ID NO: 15097 - DNA, 40 bp, Homo sapiens
taaatcctagtatttccttgagtaaatttaaaaatgacaa

SEQ ID NO: 15098 - DNA, 40 bp, Homo sapiens
tgtcatttttaaatttactcaaggaaatactaggatttaa

SEQ ID NO: 15099 - DNA, 40 bp, Homo sapiens
ttaaatcctagtatttccttgagtaaatttaaaaatgaca

SEQ ID NO: 15100 - DNA, 40 bp, Homo sapiens
gtcatttttaaatttactcaaggaaatactaggatttaaa

SEQ ID NO: 15101 - DNA, 40 bp, Homo sapiens
tttaaatcctagtatttccttgagtaaatttaaaaatgac

SEQ ID NO: 15102 - DNA, 40 bp, Homo sapiens
tcatttttaaatttactcaaggaaatactaggatttaaaa

SEQ ID NO: 15103 - DNA, 40 bp, Homo sapiens
ttttaaatcctagtatttccttgagtaaatttaaaaatga

SEQ ID NO: 15104 - DNA, 40 bp, Homo sapiens
catttttaaatttactcaaggaaatactaggatttaaaaa

SEQ ID NO: 15105 - DNA, 40 bp, Homo sapiens
tttttaaatcctagtatttccttgagtaaatttaaaaatg

SEQ ID NO: 15106 - DNA, 40 bp, Homo sapiens
atttttaaatttactcaaggaaatactaggatttaaaaaa

SEQ ID NO: 15107 - DNA, 40 bp, Homo sapiens
ttttttaaatcctagtatttccttgagtaaatttaaaaat

SEQ ID NO: 15108 - DNA, 40 bp, Homo sapiens
tttttaaatttactcaaggaaatactaggatttaaaaaaa

SEQ ID NO: 15109 - DNA, 40 bp, Homo sapiens
tttttttaaatcctagtatttccttgagtaaatttaaaaa

SEQ ID NO: 15110 - DNA, 40 bp, Homo sapiens
ttttaaatttactcaaggaaatactaggatttaaaaaaaa

SEQ ID NO: 15111 - DNA, 40 bp, Homo sapiens
ttttttttaaatcctagtatttccttgagtaaatttaaaa

SEQ ID NO: 15112 - DNA, 40 bp, Homo sapiens
tttaaatttactcaaggaaatactaggatttaaaaaaaaa

SEQ ID NO: 15113 - DNA, 40 bp, Homo sapiens
tttttttttaaatcctagtatttccttgagtaaatttaaa

SEQ ID NO: 15114 - DNA, 40 bp, Homo sapiens
ttaaatttactcaaggaaatactaggatttaaaaaaaaat

SEQ ID NO: 15115 - DNA, 40 bp, Homo sapiens
atttttttttaaatcctagtatttccttgagtaaatttaa

SEQ ID NO: 15116 - DNA, 40 bp, Homo sapiens
taaatttactcaaggaaatactaggatttaaaaaaaaatt

SEQ ID NO: 15117 - DNA, 40 bp, Homo sapiens
aatttttttttaaatcctagtatttccttgagtaaattta

SEQ ID NO: 15118 - DNA, 40 bp, Homo sapiens
aaatttactcaaggaaatactaggatttaaaaaaaaattc

SEQ ID NO: 15119 - DNA, 40 bp, Homo sapiens
gaatttttttttaaatcctagtatttccttgagtaaattt

SEQ ID NO: 15120 - DNA, 40 bp, Homo sapiens
aatttactcaaggaaatactaggatttaaaaaaaaattcc

SEQ ID NO: 15121 - DNA, 40 bp, Homo sapiens
ggaatttttttttaaatcctagtatttccttgagtaaatt

SEQ ID NO: 15122 - DNA, 40 bp, Homo sapiens
atttactcaaggaaatactaggatttaaaaaaaaattcct

SEQ ID NO: 15123 - DNA, 40 bp, Homo sapiens
aggaatttttttttaaatcctagtatttccttgagtaaat

SEQ ID NO: 15124 - DNA, 40 bp, Homo sapiens
tttactcaaggaaatactaggatttaaaaaaaaattcctt

SEQ ID NO: 15125 - DNA, 40 bp, Homo sapiens
aaggaatttttttttaaatcctagtatttccttgagtaaa

SEQ ID NO: 15126 - DNA, 40 bp, Homo sapiens
ttactcaaggaaatactaggatttaaaaaaaaattccttg

SEQ ID NO: 15127 - DNA, 40 bp, Homo sapiens
caaggaatttttttttaaatcctagtatttccttgagtaa

SEQ ID NO: 15128 - DNA, 40 bp, Homo sapiens
tactcaaggaaatactaggatttaaaaaaaaattccttga

SEQ ID NO: 15129 - DNA, 40 bp, Homo sapiens
tcaaggaatttttttttaaatcctagtatttccttgagta

SEQ ID NO: 15130 - DNA, 40 bp, Homo sapiens
actcaaggaaatactaggatttaaaaaaaaattccttgag

SEQ ID NO: 15131 - DNA, 40 bp, Homo sapiens
ctcaaggaatttttttttaaatcctagtatttccttgagt

SEQ ID NO: 15132 - DNA, 40 bp, Homo sapiens
ctcaaggaaatactaggatttaaaaaaaaattccttgagt

SEQ ID NO: 15133 - DNA, 40 bp, Homo sapiens
actcaaggaatttttttttaaatcctagtatttccttgag

SEQ ID NO: 15134 - DNA, 40 bp, Homo sapiens
tcaaggaaatactaggatttaaaaaaaaattccttgagta

SEQ ID NO: 15135 - DNA, 40 bp, Homo sapiens
tactcaaggaatttttttttaaatcctagtatttccttga

SEQ ID NO: 15136 - DNA, 40 bp, Homo sapiens
caaggaaatactaggatttaaaaaaaaattccttgagtaa

SEQ ID NO: 15137 - DNA, 40 bp, Homo sapiens
ttactcaaggaatttttttttaaatcctagtatttccttg

SEQ ID NO: 15138 - DNA, 40 bp, Homo sapiens
aaggaaatactaggatttaaaaaaaaattccttgagtaaa

SEQ ID NO: 15139 - DNA, 40 bp, Homo sapiens
tttactcaaggaatttttttttaaatcctagtatttcctt

SEQ ID NO: 15140 - DNA, 40 bp, Homo sapiens
aggaaatactaggatttaaaaaaaaattccttgagtaaat

SEQ ID NO: 15141 - DNA, 40 bp, Homo sapiens
atttactcaaggaatttttttttaaatcctagtatttcct

SEQ ID NO: 15142 - DNA, 40 bp, Homo sapiens
ggaaatactaggatttaaaaaaaaattccttgagtaaatt

SEQ ID NO: 15143 - DNA, 40 bp, Homo sapiens
aatttactcaaggaatttttttttaaatcctagtatttcc

SEQ ID NO: 15144 - DNA, 40 bp, Homo sapiens
gaaatactaggatttaaaaaaaaattccttgagtaaattt

SEQ ID NO: 15145 - DNA, 40 bp, Homo sapiens
aaatttactcaaggaatttttttttaaatcctagtatttc

SEQ ID NO: 15146 - DNA, 40 bp, Homo sapiens
aaatactaggatttaaaaaaaaattccttgagtaaattta

SEQ ID NO: 15147 - DNA, 40 bp, Homo sapiens
taaatttactcaaggaatttttttttaaatcctagtattt

SEQ ID NO: 15148 - DNA, 40 bp, Homo sapiens
aatactaggatttaaaaaaaaattccttgagtaaatttaa

SEQ ID NO: 15149 - DNA, 40 bp, Homo sapiens
ttaaatttactcaaggaatttttttttaaatcctagtatt

SEQ ID NO: 15150 - DNA, 40 bp, Homo sapiens
atactaggatttaaaaaaaaattccttgagtaaatttaaa

SEQ ID NO: 15151 - DNA, 40 bp, Homo sapiens
tttaaatttactcaaggaatttttttttaaatcctagtat

SEQ ID NO: 15152 - DNA, 40 bp, Homo sapiens
tactaggatttaaaaaaaaattccttgagtaaatttaaat

SEQ ID NO: 15153 - DNA, 40 bp, Homo sapiens
atttaaatttactcaaggaatttttttttaaatcctagta

SEQ ID NO: 15154 - DNA, 40 bp, Homo sapiens
actaggatttaaaaaaaaattccttgagtaaatttaaatt

SEQ ID NO: 15155 - DNA, 40 bp, Homo sapiens
aatttaaatttactcaaggaatttttttttaaatcctagt

SEQ ID NO: 15156 - DNA, 40 bp, Homo sapiens
ctaggatttaaaaaaaaattccttgagtaaatttaaattg

SEQ ID NO: 15157 - DNA, 40 bp, Homo sapiens
caatttaaatttactcaaggaatttttttttaaatcctag

SEQ ID NO: 15158 - DNA, 40 bp, Homo sapiens
taggatttaaaaaaaaattccttgagtaaatttaaattgt

SEQ ID NO: 15159 - DNA, 40 bp, Homo sapiens
acaatttaaatttactcaaggaatttttttttaaatccta

SEQ ID NO: 15160 - DNA, 40 bp, Homo sapiens
aggatttaaaaaaaaattccttgagtaaatttaaattgtt

SEQ ID NO: 15161 - DNA, 40 bp, Homo sapiens
aacaatttaaatttactcaaggaatttttttttaaatcct

SEQ ID NO: 15162 - DNA, 40 bp, Homo sapiens
ggatttaaaaaaaaattccttgagtaaatttaaattgtta

SEQ ID NO: 15163 - DNA, 40 bp, Homo sapiens
taacaatttaaatttactcaaggaatttttttttaaatcc

SEQ ID NO: 15164 - DNA, 40 bp, Homo sapiens
gatttaaaaaaaaattccttgagtaaatttaaattgttat

SEQ ID NO: 15165 - DNA, 40 bp, Homo sapiens
ataacaatttaaatttactcaaggaatttttttttaaatc

SEQ ID NO: 15166 - DNA, 40 bp, Homo sapiens
atttaaaaaaaaattccttgagtaaatttaaattgttatc

SEQ ID NO: 15167 - DNA, 40 bp, Homo sapiens
gataacaatttaaatttactcaaggaatttttttttaaat

SEQ ID NO: 15168 - DNA, 40 bp, Homo sapiens
tttaaaaaaaaattccttgagtaaatttaaattgttatca

SEQ ID NO: 15169 - DNA, 40 bp, Homo sapiens
tgataacaatttaaatttactcaaggaatttttttttaaa

SEQ ID NO: 15170 - DNA, 40 bp, Homo sapiens
ttaaaaaaaaattccttgagtaaatttaaattgttatcat

SEQ ID NO: 15171 - DNA, 40 bp, Homo sapiens
atgataacaatttaaatttactcaaggaatttttttttaa

SEQ ID NO: 15172 - DNA, 40 bp, Homo sapiens
taaaaaaaaattccttgagtaaatttaaattgttatcatg

SEQ ID NO: 15173 - DNA, 40 bp, Homo sapiens
catgataacaatttaaatttactcaaggaattttttttta

SEQ ID NO: 15174 - DNA, 40 bp, Homo sapiens
aaaaaaaaattccttgagtaaatttaaattgttatcatgt

SEQ ID NO: 15175 - DNA, 40 bp, Homo sapiens
acatgataacaatttaaatttactcaaggaattttttttt

SEQ ID NO: 15176 - DNA, 40 bp, Homo sapiens
aaaaaaaattccttgagtaaatttaaattgttatcatgtt

SEQ ID NO: 15177 - DNA, 40 bp, Homo sapiens
aacatgataacaatttaaatttactcaaggaatttttttt

SEQ ID NO: 15178 - DNA, 40 bp, Homo sapiens
aaaaaaattccttgagtaaatttaaattgttatcatgttt

SEQ ID NO: 15179 - DNA, 40 bp, Homo sapiens
aaacatgataacaatttaaatttactcaaggaattttttt

SEQ ID NO: 15180 - DNA, 40 bp, Homo sapiens
aaaaaattccttgagtaaatttaaattgttatcatgtttt

SEQ ID NO: 15181 - DNA, 40 bp, Homo sapiens
aaaacatgataacaatttaaatttactcaaggaatttttt

SEQ ID NO: 15182 - DNA, 40 bp, Homo sapiens
aaaaattccttgagtaaatttaaattgttatcatgttttt

SEQ ID NO: 15183 - DNA, 40 bp, Homo sapiens
aaaaacatgataacaatttaaatttactcaaggaattttt

SEQ ID NO: 15184 - DNA, 40 bp, Homo sapiens
aaaattccttgagtaaatttaaattgttatcatgtttttg

SEQ ID NO: 15185 - DNA, 40 bp, Homo sapiens
caaaaacatgataacaatttaaatttactcaaggaatttt

SEQ ID NO: 15186 - DNA, 40 bp, Homo sapiens
aaattccttgagtaaatttaaattgttatcatgtttttga

SEQ ID NO: 15187 - DNA, 40 bp, Homo sapiens
tcaaaaacatgataacaatttaaatttactcaaggaattt

SEQ ID NO: 15188 - DNA, 40 bp, Homo sapiens
aattccttgagtaaatttaaattgttatcatgtttttgag

SEQ ID NO: 15189 - DNA, 40 bp, Homo sapiens
ctcaaaaacatgataacaatttaaatttactcaaggaatt

SEQ ID NO: 15190 - DNA, 40 bp, Homo sapiens
attccttgagtaaatttaaattgttatcatgtttttgagg

SEQ ID NO: 15191 - DNA, 40 bp, Homo sapiens
cctcaaaaacatgataacaatttaaatttactcaaggaat

SEQ ID NO: 15192 - DNA, 40 bp, Homo sapiens
ttccttgagtaaatttaaattgttatcatgtttttgagga

SEQ ID NO: 15193 - DNA, 40 bp, Homo sapiens
tcctcaaaaacatgataacaatttaaatttactcaaggaa

SEQ ID NO: 15194 - DNA, 40 bp, Homo sapiens
tccttgagtaaatttaaattgttatcatgtttttgaggat

SEQ ID NO: 15195 - DNA, 40 bp, Homo sapiens
atcctcaaaaacatgataacaatttaaatttactcaagga

SEQ ID NO: 15196 - DNA, 40 bp, Homo sapiens
ccttgagtaaatttaaattgttatcatgtttttgaggatt

SEQ ID NO: 15197 - DNA, 40 bp, Homo sapiens
aatcctcaaaaacatgataacaatttaaatttactcaagg

SEQ ID NO: 15198 - DNA, 40 bp, Homo sapiens
cttgagtaaatttaaattgttatcatgtttttgaggatta

SEQ ID NO: 15199 - DNA, 40 bp, Homo sapiens
taatcctcaaaaacatgataacaatttaaatttactcaag

SEQ ID NO: 15200 - DNA, 40 bp, Homo sapiens
ttgagtaaatttaaattgttatcatgtttttgaggattat

SEQ ID NO: 15201 - DNA, 40 bp, Homo sapiens
ataatcctcaaaaacatgataacaatttaaatttactcaa

SEQ ID NO: 15202 - DNA, 40 bp, Homo sapiens
tgagtaaatttaaattgttatcatgtttttgaggattatt

SEQ ID NO: 15203 - DNA, 40 bp, Homo sapiens
aataatcctcaaaaacatgataacaatttaaatttactca

SEQ ID NO: 15204 - DNA, 40 bp, Homo sapiens
gagtaaatttaaattgttatcatgtttttgaggattattt

SEQ ID NO: 15205 - DNA, 40 bp, Homo sapiens
aaataatcctcaaaaacatgataacaatttaaatttactc

SEQ ID NO: 15206 - DNA, 40 bp, Homo sapiens
agtaaatttaaattgttatcatgtttttgaggattatttt

SEQ ID NO: 15207 - DNA, 40 bp, Homo sapiens
aaaataatcctcaaaaacatgataacaatttaaatttact

SEQ ID NO: 15208 - DNA, 40 bp, Homo sapiens
gtaaatttaaattgttatcatgtttttgaggattattttc

SEQ ID NO: 15209 - DNA, 40 bp, Homo sapiens
gaaaataatcctcaaaaacatgataacaatttaaatttac

SEQ ID NO: 15210 - DNA, 40 bp, Homo sapiens
taaatttaaattgttatcatgtttttgaggattattttca

SEQ ID NO: 15211 - DNA, 40 bp, Homo sapiens
tgaaaataatcctcaaaaacatgataacaatttaaattta

SEQ ID NO: 15212 - DNA, 40 bp, Homo sapiens
aaatttaaattgttatcatgtttttgaggattattttcag

SEQ ID NO: 15213 - DNA, 40 bp, Homo sapiens
ctgaaaataatcctcaaaaacatgataacaatttaaattt

SEQ ID NO: 15214 - DNA, 40 bp, Homo sapiens
aatttaaattgttatcatgtttttgaggattattttcaga

SEQ ID NO: 15215 - DNA, 40 bp, Homo sapiens
tctgaaaataatcctcaaaaacatgataacaatttaaatt

SEQ ID NO: 15216 - DNA, 40 bp, Homo sapiens
atttaaattgttatcatgtttttgaggattattttcagat

SEQ ID NO: 15217 - DNA, 40 bp, Homo sapiens
atctgaaaataatcctcaaaaacatgataacaatttaaat

SEQ ID NO: 15218 - DNA, 40 bp, Homo sapiens
tttaaattgttatcatgtttttgaggattattttcagatt

SEQ ID NO: 15219 - DNA, 40 bp, Homo sapiens
aatctgaaaataatcctcaaaaacatgataacaatttaaa

SEQ ID NO: 15220 - DNA, 40 bp, Homo sapiens
ttaaattgttatcatgtttttgaggattattttcagattt

SEQ ID NO: 15221 - DNA, 40 bp, Homo sapiens
aaatctgaaaataatcctcaaaaacatgataacaatttaa

SEQ ID NO: 15222 - DNA, 40 bp, Homo sapiens
taaattgttatcatgtttttgaggattattttcagatttt

SEQ ID NO: 15223 - DNA, 40 bp, Homo sapiens
aaaatctgaaaataatcctcaaaaacatgataacaattta

SEQ ID NO: 15224 - DNA, 40 bp, Homo sapiens
aaattgttatcatgtttttgaggattattttcagattttt

SEQ ID NO: 15225 - DNA, 40 bp, Homo sapiens
aaaaatctgaaaataatcctcaaaaacatgataacaattt

SEQ ID NO: 15226 - DNA, 40 bp, Homo sapiens
aattgttatcatgtttttgaggattattttcagatttttt

SEQ ID NO: 15227 - DNA, 40 bp, Homo sapiens
aaaaaatctgaaaataatcctcaaaaacatgataacaatt

SEQ ID NO: 15228 - DNA, 40 bp, Homo sapiens
attgttatcatgtttttgaggattattttcagattttttt

SEQ ID NO: 15229 - DNA, 40 bp, Homo sapiens
aaaaaaatctgaaaataatcctcaaaaacatgataacaat

SEQ ID NO: 15230 - DNA, 40 bp, Homo sapiens
ttgttatcatgtttttgaggattattttcagattttttta

SEQ ID NO: 15231 - DNA, 40 bp, Homo sapiens
taaaaaaatctgaaaataatcctcaaaaacatgataacaa

SEQ ID NO: 15232 - DNA, 40 bp, Homo sapiens
tgttatcatgtttttgaggattattttcagatttttttag

SEQ ID NO: 15233 - DNA, 40 bp, Homo sapiens
ctaaaaaaatctgaaaataatcctcaaaaacatgataaca

SEQ ID NO: 15234 - DNA, 40 bp, Homo sapiens
gttatcatgtttttgaggattattttcagatttttttagt

SEQ ID NO: 15235 - DNA, 40 bp, Homo sapiens
actaaaaaaatctgaaaataatcctcaaaaacatgataac

SEQ ID NO: 15236 - DNA, 40 bp, Homo sapiens
ttatcatgtttttgaggattattttcagatttttttagtt

SEQ ID NO: 15237 - DNA, 40 bp, Homo sapiens
aactaaaaaaatctgaaaataatcctcaaaaacatgataa

SEQ ID NO: 15238 - DNA, 40 bp, Homo sapiens
tatcatgtttttgaggattattttcagatttttttagttt

SEQ ID NO: 15239 - DNA, 40 bp, Homo sapiens
aaactaaaaaaatctgaaaataatcctcaaaaacatgata

SEQ ID NO: 15240 - DNA, 40 bp, Homo sapiens
atcatgtttttgaggattattttcagatttttttagttta

SEQ ID NO: 15241 - DNA, 40 bp, Homo sapiens
taaactaaaaaaatctgaaaataatcctcaaaaacatgat

SEQ ID NO: 15242 - DNA, 40 bp, Homo sapiens
tcatgtttttgaggattattttcagatttttttagtttaa

SEQ ID NO: 15243 - DNA, 40 bp, Homo sapiens
ttaaactaaaaaaatctgaaaataatcctcaaaaacatga

SEQ ID NO: 15244 - DNA, 40 bp, Homo sapiens
catgtttttgaggattattttcagatttttttagtttaat

SEQ ID NO: 15245 - DNA, 40 bp, Homo sapiens
attaaactaaaaaaatctgaaaataatcctcaaaaacatg

SEQ ID NO: 15246 - DNA, 40 bp, Homo sapiens
atgtttttgaggattattttcagatttttttagtttaatg

SEQ ID NO: 15247 - DNA, 40 bp, Homo sapiens
cattaaactaaaaaaatctgaaaataatcctcaaaaacat

SEQ ID NO: 15248 - DNA, 40 bp, Homo sapiens
tgtttttgaggattattttcagatttttttagtttaatga

SEQ ID NO: 15249 - DNA, 40 bp, Homo sapiens
tcattaaactaaaaaaatctgaaaataatcctcaaaaaca

SEQ ID NO: 15250 - DNA, 40 bp, Homo sapiens
gtttttgaggattattttcagatttttttagtttaatgaa

SEQ ID NO: 15251 - DNA, 40 bp, Homo sapiens
ttcattaaactaaaaaaatctgaaaataatcctcaaaaac

SEQ ID NO: 15252 - DNA, 40 bp, Homo sapiens
tttttgaggattattttcagatttttttagtttaatgaaa

SEQ ID NO: 15253 - DNA, 40 bp, Homo sapiens
tttcattaaactaaaaaaatctgaaaataatcctcaaaaa

SEQ ID NO: 15254 - DNA, 40 bp, Homo sapiens
ttttgaggattattttcagatttttttagtttaatgaaaa

SEQ ID NO: 15255 - DNA, 40 bp, Homo sapiens
ttttcattaaactaaaaaaatctgaaaataatcctcaaaa

SEQ ID NO: 15256 - DNA, 40 bp, Homo sapiens
tttgaggattattttcagatttttttagtttaatgaaaat

SEQ ID NO: 15257 - DNA, 40 bp, Homo sapiens
attttcattaaactaaaaaaatctgaaaataatcctcaaa

SEQ ID NO: 15258 - DNA, 40 bp, Homo sapiens
ttgaggattattttcagatttttttagtttaatgaaaatt

SEQ ID NO: 15259 - DNA, 40 bp, Homo sapiens
aattttcattaaactaaaaaaatctgaaaataatcctcaa

SEQ ID NO: 15260 - DNA, 40 bp, Homo sapiens
tgaggattattttcagatttttttagtttaatgaaaattt

SEQ ID NO: 15261 - DNA, 40 bp, Homo sapiens
aaattttcattaaactaaaaaaatctgaaaataatcctca

SEQ ID NO: 15262 - DNA, 40 bp, Homo sapiens
gaggattattttcagatttttttagtttaatgaaaattta

SEQ ID NO: 15263 - DNA, 40 bp, Homo sapiens
taaattttcattaaactaaaaaaatctgaaaataatcctc

SEQ ID NO: 15264 - DNA, 40 bp, Homo sapiens
aggattattttcagatttttttagtttaatgaaaatttac

SEQ ID NO: 15265 - DNA, 40 bp, Homo sapiens
gtaaattttcattaaactaaaaaaatctgaaaataatcct

SEQ ID NO: 15266 - DNA, 40 bp, Homo sapiens
ggattattttcagatttttttagtttaatgaaaatttacc

SEQ ID NO: 15267 - DNA, 40 bp, Homo sapiens
ggtaaattttcattaaactaaaaaaatctgaaaataatcc

SEQ ID NO: 15268 - DNA, 40 bp, Homo sapiens
gattattttcagatttttttagtttaatgaaaatttacca

SEQ ID NO: 15269 - DNA, 40 bp, Homo sapiens
tggtaaattttcattaaactaaaaaaatctgaaaataatc

SEQ ID NO: 15270 - DNA, 40 bp, Homo sapiens
attattttcagatttttttagtttaatgaaaatttaccaa

SEQ ID NO: 15271 - DNA, 40 bp, Homo sapiens
ttggtaaattttcattaaactaaaaaaatctgaaaataat

SEQ ID NO: 15272 - DNA, 40 bp, Homo sapiens
ttattttcagatttttttagtttaatgaaaatttaccaaa

SEQ ID NO: 15273 - DNA, 40 bp, Homo sapiens
tttggtaaattttcattaaactaaaaaaatctgaaaataa

SEQ ID NO: 15274 - DNA, 40 bp, Homo sapiens
tattttcagatttttttagtttaatgaaaatttaccaaag

SEQ ID NO: 15275 - DNA, 40 bp, Homo sapiens
ctttggtaaattttcattaaactaaaaaaatctgaaaata

SEQ ID NO: 15276 - DNA, 40 bp, Homo sapiens
attttcagatttttttagtttaatgaaaatttaccaaagt

SEQ ID NO: 15277 - DNA, 40 bp, Homo sapiens
actttggtaaattttcattaaactaaaaaaatctgaaaat

SEQ ID NO: 15278 - DNA, 40 bp, Homo sapiens
ttttcagatttttttagtttaatgaaaatttaccaaagta

SEQ ID NO: 15279 - DNA, 40 bp, Homo sapiens
tactttggtaaattttcattaaactaaaaaaatctgaaaa

SEQ ID NO: 15280 - DNA, 40 bp, Homo sapiens
tttcagatttttttagtttaatgaaaatttaccaaagtaa

SEQ ID NO: 15281 - DNA, 40 bp, Homo sapiens
ttactttggtaaattttcattaaactaaaaaaatctgaaa

SEQ ID NO: 15282 - DNA, 40 bp, Homo sapiens
ttcagatttttttagtttaatgaaaatttaccaaagtaaa

SEQ ID NO: 15283 - DNA, 40 bp, Homo sapiens
tttactttggtaaattttcattaaactaaaaaaatctgaa

SEQ ID NO: 15284 - DNA, 40 bp, Homo sapiens
tcagatttttttagtttaatgaaaatttaccaaagtaaag

SEQ ID NO: 15285 - DNA, 40 bp, Homo sapiens
ctttactttggtaaattttcattaaactaaaaaaatctga

SEQ ID NO: 15286 - DNA, 40 bp, Homo sapiens
cagatttttttagtttaatgaaaatttaccaaagtaaaga

SEQ ID NO: 15287 - DNA, 40 bp, Homo sapiens
tctttactttggtaaattttcattaaactaaaaaaatctg

SEQ ID NO: 15288 - DNA, 40 bp, Homo sapiens
agatttttttagtttaatgaaaatttaccaaagtaaagac

SEQ ID NO: 15289 - DNA, 40 bp, Homo sapiens
gtctttactttggtaaattttcattaaactaaaaaaatct

SEQ ID NO: 15290 - DNA, 40 bp, Homo sapiens
gatttttttagtttaatgaaaatttaccaaagtaaagacc

SEQ ID NO: 15291 - DNA, 40 bp, Homo sapiens
ggtctttactttggtaaattttcattaaactaaaaaaatc

SEQ ID NO: 15292 - DNA, 40 bp, Homo sapiens
atttttttagtttaatgaaaatttaccaaagtaaagacca

SEQ ID NO: 15293 - DNA, 40 bp, Homo sapiens
tggtctttactttggtaaattttcattaaactaaaaaaat

SEQ ID NO: 15294 - DNA, 40 bp, Homo sapiens
tttttttagtttaatgaaaatttaccaaagtaaagaccag

SEQ ID NO: 15295 - DNA, 40 bp, Homo sapiens
ctggtctttactttggtaaattttcattaaactaaaaaaa

SEQ ID NO: 15296 - DNA, 40 bp, Homo sapiens
ttttttagtttaatgaaaatttaccaaagtaaagaccagc

SEQ ID NO: 15297 - DNA, 40 bp, Homo sapiens
gctggtctttactttggtaaattttcattaaactaaaaaa

SEQ ID NO: 15298 - DNA, 40 bp, Homo sapiens
tttttagtttaatgaaaatttaccaaagtaaagaccagca

SEQ ID NO: 15299 - DNA, 40 bp, Homo sapiens
tgctggtctttactttggtaaattttcattaaactaaaaa

SEQ ID NO: 15300 - DNA, 40 bp, Homo sapiens
ttttagtttaatgaaaatttaccaaagtaaagaccagcag

SEQ ID NO: 15301 - DNA, 40 bp, Homo sapiens
ctgctggtctttactttggtaaattttcattaaactaaaa

SEQ ID NO: 15302 - DNA, 40 bp, Homo sapiens
tttagtttaatgaaaatttaccaaagtaaagaccagcagc

SEQ ID NO: 15303 - DNA, 40 bp, Homo sapiens
gctgctggtctttactttggtaaattttcattaaactaaa

SEQ ID NO: 15304 - DNA, 40 bp, Homo sapiens
ttagtttaatgaaaatttaccaaagtaaagaccagcagca

SEQ ID NO: 15305 - DNA, 40 bp, Homo sapiens
tgctgctggtctttactttggtaaattttcattaaactaa

SEQ ID NO: 15306 - DNA, 40 bp, Homo sapiens
tagtttaatgaaaatttaccaaagtaaagaccagcagcag

SEQ ID NO: 15307 - DNA, 40 bp, Homo sapiens
ctgctgctggtctttactttggtaaattttcattaaacta

SEQ ID NO: 15308 - DNA, 40 bp, Homo sapiens
agtttaatgaaaatttaccaaagtaaagaccagcagcaga

SEQ ID NO: 15309 - DNA, 40 bp, Homo sapiens
tctgctgctggtctttactttggtaaattttcattaaact

SEQ ID NO: 15310 - DNA, 40 bp, Homo sapiens
gtttaatgaaaatttaccaaagtaaagaccagcagcagaa

SEQ ID NO: 15311 - DNA, 40 bp, Homo sapiens
ttctgctgctggtctttactttggtaaattttcattaaac

SEQ ID NO: 15312 - DNA, 40 bp, Homo sapiens
tttaatgaaaatttaccaaagtaaagaccagcagcagaat

SEQ ID NO: 15313 - DNA, 40 bp, Homo sapiens
attctgctgctggtctttactttggtaaattttcattaaa

SEQ ID NO: 15314 - DNA, 40 bp, Homo sapiens
ttaatgaaaatttaccaaagtaaagaccagcagcagaatg

SEQ ID NO: 15315 - DNA, 40 bp, Homo sapiens
cattctgctgctggtctttactttggtaaattttcattaa

SEQ ID NO: 15316 - DNA, 40 bp, Homo sapiens
taatgaaaatttaccaaagtaaagaccagcagcagaatga

SEQ ID NO: 15317 - DNA, 40 bp, Homo sapiens
tcattctgctgctggtctttactttggtaaattttcatta

SEQ ID NO: 15318 - DNA, 40 bp, Homo sapiens
aatgaaaatttaccaaagtaaagaccagcagcagaatgat

SEQ ID NO: 15319 - DNA, 40 bp, Homo sapiens
atcattctgctgctggtctttactttggtaaattttcatt

SEQ ID NO: 15320 - DNA, 40 bp, Homo sapiens
atgaaaatttaccaaagtaaagaccagcagcagaatgata

SEQ ID NO: 15321 - DNA, 40 bp, Homo sapiens
tatcattctgctgctggtctttactttggtaaattttcat

SEQ ID NO: 15322 - DNA, 40 bp, Homo sapiens
tgaaaatttaccaaagtaaagaccagcagcagaatgataa

SEQ ID NO: 15323 - DNA, 40 bp, Homo sapiens
ttatcattctgctgctggtctttactttggtaaattttca

SEQ ID NO: 15324 - DNA, 40 bp, Homo sapiens
gaaaatttaccaaagtaaagaccagcagcagaatgataag

SEQ ID NO: 15325 - DNA, 40 bp, Homo sapiens
cttatcattctgctgctggtctttactttggtaaattttc

SEQ ID NO: 15326 - DNA, 40 bp, Homo sapiens
aaaatttaccaaagtaaagaccagcagcagaatgataagt

SEQ ID NO: 15327 - DNA, 40 bp, Homo sapiens
acttatcattctgctgctggtctttactttggtaaatttt

SEQ ID NO: 15328 - DNA, 40 bp, Homo sapiens
aaatttaccaaagtaaagaccagcagcagaatgataagta

SEQ ID NO: 15329 - DNA, 40 bp, Homo sapiens
tacttatcattctgctgctggtctttactttggtaaattt

SEQ ID NO: 15330 - DNA, 40 bp, Homo sapiens
aatttaccaaagtaaagaccagcagcagaatgataagtaa

SEQ ID NO: 15331 - DNA, 40 bp, Homo sapiens
ttacttatcattctgctgctggtctttactttggtaaatt

SEQ ID NO: 15332 - DNA, 40 bp, Homo sapiens
atttaccaaagtaaagaccagcagcagaatgataagtaaa

SEQ ID NO: 15333 - DNA, 40 bp, Homo sapiens
tttacttatcattctgctgctggtctttactttggtaaat

SEQ ID NO: 15334 - DNA, 40 bp, Homo sapiens
tttaccaaagtaaagaccagcagcagaatgataagtaaag

SEQ ID NO: 15335 - DNA, 40 bp, Homo sapiens
ctttacttatcattctgctgctggtctttactttggtaaa

SEQ ID NO: 15336 - DNA, 40 bp, Homo sapiens
ttaccaaagtaaagaccagcagcagaatgataagtaaaga

SEQ ID NO: 15337 - DNA, 40 bp, Homo sapiens
tctttacttatcattctgctgctggtctttactttggtaa

SEQ ID NO: 15338 - DNA, 40 bp, Homo sapiens
taccaaagtaaagaccagcagcagaatgataagtaaagac

SEQ ID NO: 15339 - DNA, 40 bp, Homo sapiens
gtctttacttatcattctgctgctggtctttactttggta

SEQ ID NO: 15340 - DNA, 40 bp, Homo sapiens
accaaagtaaagaccagcagcagaatgataagtaaagacc

SEQ ID NO: 15341 - DNA, 40 bp, Homo sapiens
ggtctttacttatcattctgctgctggtctttactttggt

SEQ ID NO: 15342 - DNA, 40 bp, Homo sapiens
ccaaagtaaagaccagcagcagaatgataagtaaagacct

SEQ ID NO: 15343 - DNA, 40 bp, Homo sapiens
aggtctttacttatcattctgctgctggtctttactttgg

SEQ ID NO: 15344 - DNA, 40 bp, Homo sapiens
caaagtaaagaccagcagcagaatgataagtaaagacctg

SEQ ID NO: 15345 - DNA, 40 bp, Homo sapiens
caggtctttacttatcattctgctgctggtctttactttg

SEQ ID NO: 15346 - DNA, 40 bp, Homo sapiens
aaagtaaagaccagcagcagaatgataagtaaagacctgt

SEQ ID NO: 15347 - DNA, 40 bp, Homo sapiens
acaggtctttacttatcattctgctgctggtctttacttt

SEQ ID NO: 15348 - DNA, 40 bp, Homo sapiens
aagtaaagaccagcagcagaatgataagtaaagacctgta

SEQ ID NO: 15349 - DNA, 40 bp, Homo sapiens
tacaggtctttacttatcattctgctgctggtctttactt

SEQ ID NO: 15350 - DNA, 40 bp, Homo sapiens
agtaaagaccagcagcagaatgataagtaaagacctgtaa

SEQ ID NO: 15351 - DNA, 40 bp, Homo sapiens
ttacaggtctttacttatcattctgctgctggtctttact

SEQ ID NO: 15352 - DNA, 40 bp, Homo sapiens
gtaaagaccagcagcagaatgataagtaaagacctgtaag

SEQ ID NO: 15353 - DNA, 40 bp, Homo sapiens
cttacaggtctttacttatcattctgctgctggtctttac

SEQ ID NO: 15354 - DNA, 40 bp, Homo sapiens
taaagaccagcagcagaatgataagtaaagacctgtaaga

SEQ ID NO: 15355 - DNA, 40 bp, Homo sapiens
tcttacaggtctttacttatcattctgctgctggtcttta

SEQ ID NO: 15356 - DNA, 40 bp, Homo sapiens
aaagaccagcagcagaatgataagtaaagacctgtaagac

SEQ ID NO: 15357 - DNA, 40 bp, Homo sapiens
gtcttacaggtctttacttatcattctgctgctggtcttt

SEQ ID NO: 15358 - DNA, 40 bp, Homo sapiens
aagaccagcagcagaatgataagtaaagacctgtaagaca

SEQ ID NO: 15359 - DNA, 40 bp, Homo sapiens
tgtcttacaggtctttacttatcattctgctgctggtctt

SEQ ID NO: 15360 - DNA, 40 bp, Homo sapiens
agaccagcagcagaatgataagtaaagacctgtaagacac

SEQ ID NO: 15361 - DNA, 40 bp, Homo sapiens
gtgtcttacaggtctttacttatcattctgctgctggtct

SEQ ID NO: 15362 - DNA, 40 bp, Homo sapiens
gaccagcagcagaatgataagtaaagacctgtaagacacc

SEQ ID NO: 15363 - DNA, 40 bp, Homo sapiens
ggtgtcttacaggtctttacttatcattctgctgctggtc

SEQ ID NO: 15364 - DNA, 40 bp, Homo sapiens
accagcagcagaatgataagtaaagacctgtaagacacct

SEQ ID NO: 15365 - DNA, 40 bp, Homo sapiens
aggtgtcttacaggtctttacttatcattctgctgctggt

SEQ ID NO: 15366 - DNA, 40 bp, Homo sapiens
ccagcagcagaatgataagtaaagacctgtaagacacctt

SEQ ID NO: 15367 - DNA, 40 bp, Homo sapiens
aaggtgtcttacaggtctttacttatcattctgctgctgg

SEQ ID NO: 15368 - DNA, 40 bp, Homo sapiens
cagcagcagaatgataagtaaagacctgtaagacaccttg

SEQ ID NO: 15369 - DNA, 40 bp, Homo sapiens
caaggtgtcttacaggtctttacttatcattctgctgctg

SEQ ID NO: 15370 - DNA, 40 bp, Homo sapiens
agcagcagaatgataagtaaagacctgtaagacaccttga

SEQ ID NO: 15371 - DNA, 40 bp, Homo sapiens
tcaaggtgtcttacaggtctttacttatcattctgctgct

SEQ ID NO: 15372 - DNA, 40 bp, Homo sapiens
gcagcagaatgataagtaaagacctgtaagacaccttgaa

SEQ ID NO: 15373 - DNA, 40 bp, Homo sapiens
ttcaaggtgtcttacaggtctttacttatcattctgctgc

SEQ ID NO: 15374 - DNA, 40 bp, Homo sapiens
cagcagaatgataagtaaagacctgtaagacaccttgaag

SEQ ID NO: 15375 - DNA, 40 bp, Homo sapiens
cttcaaggtgtcttacaggtctttacttatcattctgctg

SEQ ID NO: 15376 - DNA, 40 bp, Homo sapiens
agcagaatgataagtaaagacctgtaagacaccttgaagg

SEQ ID NO: 15377 - DNA, 40 bp, Homo sapiens
ccttcaaggtgtcttacaggtctttacttatcattctgct

SEQ ID NO: 15378 - DNA, 40 bp, Homo sapiens
gcagaatgataagtaaagacctgtaagacaccttgaaggt

SEQ ID NO: 15379 - DNA, 40 bp, Homo sapiens
accttcaaggtgtcttacaggtctttacttatcattctgc

SEQ ID NO: 15380 - DNA, 40 bp, Homo sapiens
cagaatgataagtaaagacctgtaagacaccttgaaggtc

SEQ ID NO: 15381 - DNA, 40 bp, Homo sapiens
gaccttcaaggtgtcttacaggtctttacttatcattctg

SEQ ID NO: 15382 - DNA, 40 bp, Homo sapiens
agaatgataagtaaagacctgtaagacaccttgaaggtca

SEQ ID NO: 15383 - DNA, 40 bp, Homo sapiens
tgaccttcaaggtgtcttacaggtctttacttatcattct

SEQ ID NO: 15384 - DNA, 40 bp, Homo sapiens
gaatgataagtaaagacctgtaagacaccttgaaggtcat

SEQ ID NO: 15385 - DNA, 40 bp, Homo sapiens
atgaccttcaaggtgtcttacaggtctttacttatcattc

SEQ ID NO: 15386 - DNA, 40 bp, Homo sapiens
aatgataagtaaagacctgtaagacaccttgaaggtcatg

SEQ ID NO: 15387 - DNA, 40 bp, Homo sapiens
catgaccttcaaggtgtcttacaggtctttacttatcatt

SEQ ID NO: 15388 - DNA, 40 bp, Homo sapiens
atgataagtaaagacctgtaagacaccttgaaggtcatgg

SEQ ID NO: 15389 - DNA, 40 bp, Homo sapiens
ccatgaccttcaaggtgtcttacaggtctttacttatcat

SEQ ID NO: 15390 - DNA, 40 bp, Homo sapiens
tgataagtaaagacctgtaagacaccttgaaggtcatgga

SEQ ID NO: 15391 - DNA, 40 bp, Homo sapiens
tccatgaccttcaaggtgtcttacaggtctttacttatca

SEQ ID NO: 15392 - DNA, 40 bp, Homo sapiens
gataagtaaagacctgtaagacaccttgaaggtcatggag

SEQ ID NO: 15393 - DNA, 40 bp, Homo sapiens
ctccatgaccttcaaggtgtcttacaggtctttacttatc

SEQ ID NO: 15394 - DNA, 40 bp, Homo sapiens
ataagtaaagacctgtaagacaccttgaaggtcatggagt

SEQ ID NO: 15395 - DNA, 40 bp, Homo sapiens
actccatgaccttcaaggtgtcttacaggtctttacttat

SEQ ID NO: 15396 - DNA, 40 bp, Homo sapiens
taagtaaagacctgtaagacaccttgaaggtcatggagta

SEQ ID NO: 15397 - DNA, 40 bp, Homo sapiens
tactccatgaccttcaaggtgtcttacaggtctttactta

SEQ ID NO: 15398 - DNA, 40 bp, Homo sapiens
aagtaaagacctgtaagacaccttgaaggtcatggagtag

SEQ ID NO: 15399 - DNA, 40 bp, Homo sapiens
ctactccatgaccttcaaggtgtcttacaggtctttactt

SEQ ID NO: 15400 - DNA, 40 bp, Homo sapiens
agtaaagacctgtaagacaccttgaaggtcatggagtaga

SEQ ID NO: 15401 - DNA, 40 bp, Homo sapiens
tctactccatgaccttcaaggtgtcttacaggtctttact

SEQ ID NO: 15402 - DNA, 40 bp, Homo sapiens
gtaaagacctgtaagacaccttgaaggtcatggagtagaa

SEQ ID NO: 15403 - DNA, 40 bp, Homo sapiens
ttctactccatgaccttcaaggtgtcttacaggtctttac

SEQ ID NO: 15404 - DNA, 40 bp, Homo sapiens
taaagacctgtaagacaccttgaaggtcatggagtagaac

SEQ ID NO: 15405 - DNA, 40 bp, Homo sapiens
gttctactccatgaccttcaaggtgtcttacaggtcttta

SEQ ID NO: 15406 - DNA, 40 bp, Homo sapiens
aaagacctgtaagacaccttgaaggtcatggagtagaact

SEQ ID NO: 15407 - DNA, 40 bp, Homo sapiens
agttctactccatgaccttcaaggtgtcttacaggtcttt

SEQ ID NO: 15408 - DNA, 40 bp, Homo sapiens
aagacctgtaagacaccttgaaggtcatggagtagaactt

SEQ ID NO: 15409 - DNA, 40 bp, Homo sapiens
aagttctactccatgaccttcaaggtgtcttacaggtctt

SEQ ID NO: 15410 - DNA, 40 bp, Homo sapiens
agacctgtaagacaccttgaaggtcatggagtagaacttc

SEQ ID NO: 15411 - DNA, 40 bp, Homo sapiens
gaagttctactccatgaccttcaaggtgtcttacaggtct

SEQ ID NO: 15412 - DNA, 40 bp, Homo sapiens
gacctgtaagacaccttgaaggtcatggagtagaacttcc

SEQ ID NO: 15413 - DNA, 40 bp, Homo sapiens
ggaagttctactccatgaccttcaaggtgtcttacaggtc

SEQ ID NO: 15414 - DNA, 40 bp, Homo sapiens
acctgtaagacaccttgaaggtcatggagtagaacttcca

SEQ ID NO: 15415 - DNA, 40 bp, Homo sapiens
tggaagttctactccatgaccttcaaggtgtcttacaggt

SEQ ID NO: 15416 - DNA, 40 bp, Homo sapiens
cctgtaagacaccttgaaggtcatggagtagaacttccat

SEQ ID NO: 15417 - DNA, 40 bp, Homo sapiens
atggaagttctactccatgaccttcaaggtgtcttacagg

SEQ ID NO: 15418 - DNA, 40 bp, Homo sapiens
ctgtaagacaccttgaaggtcatggagtagaacttccatc

SEQ ID NO: 15419 - DNA, 40 bp, Homo sapiens
gatggaagttctactccatgaccttcaaggtgtcttacag

SEQ ID NO: 15420 - DNA, 40 bp, Homo sapiens
tgtaagacaccttgaaggtcatggagtagaacttccatcc

SEQ ID NO: 15421 - DNA, 40 bp, Homo sapiens
ggatggaagttctactccatgaccttcaaggtgtcttaca

SEQ ID NO: 15422 - DNA, 40 bp, Homo sapiens
gtaagacaccttgaaggtcatggagtagaacttccatccc

SEQ ID NO: 15423 - DNA, 40 bp, Homo sapiens
gggatggaagttctactccatgaccttcaaggtgtcttac

SEQ ID NO: 15424 - DNA, 40 bp, Homo sapiens
taagacaccttgaaggtcatggagtagaacttccatccca

SEQ ID NO: 15425 - DNA, 40 bp, Homo sapiens
tgggatggaagttctactccatgaccttcaaggtgtctta

SEQ ID NO: 15426 - DNA, 40 bp, Homo sapiens
aagacaccttgaaggtcatggagtagaacttccatcccaa

SEQ ID NO: 15427 - DNA, 40 bp, Homo sapiens
ttgggatggaagttctactccatgaccttcaaggtgtctt

SEQ ID NO: 15428 - DNA, 40 bp, Homo sapiens
agacaccttgaaggtcatggagtagaacttccatcccaag

SEQ ID NO: 15429 - DNA, 40 bp, Homo sapiens
cttgggatggaagttctactccatgaccttcaaggtgtct

SEQ ID NO: 15430 - DNA, 40 bp, Homo sapiens
gacaccttgaaggtcatggagtagaacttccatcccaagc

SEQ ID NO: 15431 - DNA, 40 bp, Homo sapiens
gcttgggatggaagttctactccatgaccttcaaggtgtc

SEQ ID NO: 15432 - DNA, 40 bp, Homo sapiens
acaccttgaaggtcatggagtagaacttccatcccaagca

SEQ ID NO: 15433 - DNA, 40 bp, Homo sapiens
tgcttgggatggaagttctactccatgaccttcaaggtgt

SEQ ID NO: 15434 - DNA, 40 bp, Homo sapiens
caccttgaaggtcatggagtagaacttccatcccaagcag

SEQ ID NO: 15435 - DNA, 40 bp, Homo sapiens
ctgcttgggatggaagttctactccatgaccttcaaggtg

SEQ ID NO: 15436 - DNA, 40 bp, Homo sapiens
accttgaaggtcatggagtagaacttccatcccaagcaga

SEQ ID NO: 15437 - DNA, 40 bp, Homo sapiens
tctgcttgggatggaagttctactccatgaccttcaaggt

SEQ ID NO: 15438 - DNA, 40 bp, Homo sapiens
ccttgaaggtcatggagtagaacttccatcccaagcagat

SEQ ID NO: 15439 - DNA, 40 bp, Homo sapiens
atctgcttgggatggaagttctactccatgaccttcaagg

SEQ ID NO: 15440 - DNA, 40 bp, Homo sapiens
cttgaaggtcatggagtagaacttccatcccaagcagatg

SEQ ID NO: 15441 - DNA, 40 bp, Homo sapiens
catctgcttgggatggaagttctactccatgaccttcaag

SEQ ID NO: 15442 - DNA, 40 bp, Homo sapiens
ttgaaggtcatggagtagaacttccatcccaagcagatga

SEQ ID NO: 15443 - DNA, 40 bp, Homo sapiens
tcatctgcttgggatggaagttctactccatgaccttcaa

SEQ ID NO: 15444 - DNA, 40 bp, Homo sapiens
tgaaggtcatggagtagaacttccatcccaagcagatgag

SEQ ID NO: 15445 - DNA, 40 bp, Homo sapiens
ctcatctgcttgggatggaagttctactccatgaccttca

SEQ ID NO: 15446 - DNA, 40 bp, Homo sapiens
gaaggtcatggagtagaacttccatcccaagcagatgagg

SEQ ID NO: 15447 - DNA, 40 bp, Homo sapiens
cctcatctgcttgggatggaagttctactccatgaccttc

SEQ ID NO: 15448 - DNA, 40 bp, Homo sapiens
aaggtcatggagtagaacttccatcccaagcagatgagga

SEQ ID NO: 15449 - DNA, 40 bp, Homo sapiens
tcctcatctgcttgggatggaagttctactccatgacctt

SEQ ID NO: 15450 - DNA, 40 bp, Homo sapiens
aggtcatggagtagaacttccatcccaagcagatgaggat

SEQ ID NO: 15451 - DNA, 40 bp, Homo sapiens
atcctcatctgcttgggatggaagttctactccatgacct

SEQ ID NO: 15452 - DNA, 40 bp, Homo sapiens
ggtcatggagtagaacttccatcccaagcagatgaggatt

SEQ ID NO: 15453 - DNA, 40 bp, Homo sapiens
aatcctcatctgcttgggatggaagttctactccatgacc

SEQ ID NO: 15454 - DNA, 40 bp, Homo sapiens
gtcatggagtagaacttccatcccaagcagatgaggattt

SEQ ID NO: 15455 - DNA, 40 bp, Homo sapiens
aaatcctcatctgcttgggatggaagttctactccatgac

SEQ ID NO: 15456 - DNA, 40 bp, Homo sapiens
tcatggagtagaacttccatcccaagcagatgaggattta

SEQ ID NO: 15457 - DNA, 40 bp, Homo sapiens
taaatcctcatctgcttgggatggaagttctactccatga

SEQ ID NO: 15458 - DNA, 40 bp, Homo sapiens
catggagtagaacttccatcccaagcagatgaggatttat

SEQ ID NO: 15459 - DNA, 40 bp, Homo sapiens
ataaatcctcatctgcttgggatggaagttctactccatg

SEQ ID NO: 15460 - DNA, 40 bp, Homo sapiens
atggagtagaacttccatcccaagcagatgaggatttatt

SEQ ID NO: 15461 - DNA, 40 bp, Homo sapiens
aataaatcctcatctgcttgggatggaagttctactccat

SEQ ID NO: 15462 - DNA, 40 bp, Homo sapiens
tggagtagaacttccatcccaagcagatgaggatttattt

SEQ ID NO: 15463 - DNA, 40 bp, Homo sapiens
aaataaatcctcatctgcttgggatggaagttctactcca

SEQ ID NO: 15464 - DNA, 40 bp, Homo sapiens
ggagtagaacttccatcccaagcagatgaggatttattta

SEQ ID NO: 15465 - DNA, 40 bp, Homo sapiens
taaataaatcctcatctgcttgggatggaagttctactcc

SEQ ID NO: 15466 - DNA, 40 bp, Homo sapiens
gagtagaacttccatcccaagcagatgaggatttatttaa

SEQ ID NO: 15467 - DNA, 40 bp, Homo sapiens
ttaaataaatcctcatctgcttgggatggaagttctactc

SEQ ID NO: 15468 - DNA, 40 bp, Homo sapiens
agtagaacttccatcccaagcagatgaggatttatttaat

SEQ ID NO: 15469 - DNA, 40 bp, Homo sapiens
attaaataaatcctcatctgcttgggatggaagttctact

SEQ ID NO: 15470 - DNA, 40 bp, Homo sapiens
gtagaacttccatcccaagcagatgaggatttatttaatc

SEQ ID NO: 15471 - DNA, 40 bp, Homo sapiens
gattaaataaatcctcatctgcttgggatggaagttctac

SEQ ID NO: 15472 - DNA, 40 bp, Homo sapiens
tagaacttccatcccaagcagatgaggatttatttaatct

SEQ ID NO: 15473 - DNA, 40 bp, Homo sapiens
agattaaataaatcctcatctgcttgggatggaagttcta

SEQ ID NO: 15474 - DNA, 40 bp, Homo sapiens
agaacttccatcccaagcagatgaggatttatttaatctc

SEQ ID NO: 15475 - DNA, 40 bp, Homo sapiens
gagattaaataaatcctcatctgcttgggatggaagttct

SEQ ID NO: 15476 - DNA, 40 bp, Homo sapiens
gaacttccatcccaagcagatgaggatttatttaatctca

SEQ ID NO: 15477 - DNA, 40 bp, Homo sapiens
tgagattaaataaatcctcatctgcttgggatggaagttc

SEQ ID NO: 15478 - DNA, 40 bp, Homo sapiens
aacttccatcccaagcagatgaggatttatttaatctcaa

SEQ ID NO: 15479 - DNA, 40 bp, Homo sapiens
ttgagattaaataaatcctcatctgcttgggatggaagtt

SEQ ID NO: 15480 - DNA, 40 bp, Homo sapiens
acttccatcccaagcagatgaggatttatttaatctcaaa

SEQ ID NO: 15481 - DNA, 40 bp, Homo sapiens
tttgagattaaataaatcctcatctgcttgggatggaagt

SEQ ID NO: 15482 - DNA, 40 bp, Homo sapiens
cttccatcccaagcagatgaggatttatttaatctcaaag

SEQ ID NO: 15483 - DNA, 40 bp, Homo sapiens
ctttgagattaaataaatcctcatctgcttgggatggaag

SEQ ID NO: 15484 - DNA, 40 bp, Homo sapiens
ttccatcccaagcagatgaggatttatttaatctcaaaga

SEQ ID NO: 15485 - DNA, 40 bp, Homo sapiens
tctttgagattaaataaatcctcatctgcttgggatggaa

SEQ ID NO: 15486 - DNA, 40 bp, Homo sapiens
tccatcccaagcagatgaggatttatttaatctcaaagac

SEQ ID NO: 15487 - DNA, 40 bp, Homo sapiens
gtctttgagattaaataaatcctcatctgcttgggatgga

SEQ ID NO: 15488 - DNA, 40 bp, Homo sapiens
ccatcccaagcagatgaggatttatttaatctcaaagacc

SEQ ID NO: 15489 - DNA, 40 bp, Homo sapiens
ggtctttgagattaaataaatcctcatctgcttgggatgg

SEQ ID NO: 15490 - DNA, 40 bp, Homo sapiens
catcccaagcagatgaggatttatttaatctcaaagacct

SEQ ID NO: 15491 - DNA, 40 bp, Homo sapiens
aggtctttgagattaaataaatcctcatctgcttgggatg

SEQ ID NO: 15492 - DNA, 40 bp, Homo sapiens
atcccaagcagatgaggatttatttaatctcaaagacctc

SEQ ID NO: 15493 - DNA, 40 bp, Homo sapiens
gaggtctttgagattaaataaatcctcatctgcttgggat

SEQ ID NO: 15494 - DNA, 40 bp, Homo sapiens
tcccaagcagatgaggatttatttaatctcaaagacctcc

SEQ ID NO: 15495 - DNA, 40 bp, Homo sapiens
ggaggtctttgagattaaataaatcctcatctgcttggga

SEQ ID NO: 15496 - DNA, 40 bp, Homo sapiens
cccaagcagatgaggatttatttaatctcaaagacctcca

SEQ ID NO: 15497 - DNA, 40 bp, Homo sapiens
tggaggtctttgagattaaataaatcctcatctgcttggg

SEQ ID NO: 15498 - DNA, 40 bp, Homo sapiens
ccaagcagatgaggatttatttaatctcaaagacctccag

SEQ ID NO: 15499 - DNA, 40 bp, Homo sapiens
ctggaggtctttgagattaaataaatcctcatctgcttgg

SEQ ID NO: 15500 - DNA, 40 bp, Homo sapiens
caagcagatgaggatttatttaatctcaaagacctccagg

SEQ ID NO: 15501 - DNA, 40 bp, Homo sapiens
cctggaggtctttgagattaaataaatcctcatctgcttg

SEQ ID NO: 15502 - DNA, 40 bp, Homo sapiens
aagcagatgaggatttatttaatctcaaagacctccagga

SEQ ID NO: 15503 - DNA, 40 bp, Homo sapiens
tcctggaggtctttgagattaaataaatcctcatctgctt

SEQ ID NO: 15504 - DNA, 40 bp, Homo sapiens
agcagatgaggatttatttaatctcaaagacctccaggag

SEQ ID NO: 15505 - DNA, 40 bp, Homo sapiens
ctcctggaggtctttgagattaaataaatcctcatctgct

SEQ ID NO: 15506 - DNA, 40 bp, Homo sapiens
gcagatgaggatttatttaatctcaaagacctccaggagg

SEQ ID NO: 15507 - DNA, 40 bp, Homo sapiens
cctcctggaggtctttgagattaaataaatcctcatctgc

SEQ ID NO: 15508 - DNA, 40 bp, Homo sapiens
cagatgaggatttatttaatctcaaagacctccaggaggg

SEQ ID NO: 15509 - DNA, 40 bp, Homo sapiens
ccctcctggaggtctttgagattaaataaatcctcatctg

SEQ ID NO: 15510 - DNA, 40 bp, Homo sapiens
agatgaggatttatttaatctcaaagacctccaggagggg

SEQ ID NO: 15511 - DNA, 40 bp, Homo sapiens
cccctcctggaggtctttgagattaaataaatcctcatct

SEQ ID NO: 15512 - DNA, 40 bp, Homo sapiens
gatgaggatttatttaatctcaaagacctccaggagggga

SEQ ID NO: 15513 - DNA, 40 bp, Homo sapiens
tcccctcctggaggtctttgagattaaataaatcctcatc

SEQ ID NO: 15514 - DNA, 40 bp, Homo sapiens
atgaggatttatttaatctcaaagacctccaggaggggac

SEQ ID NO: 15515 - DNA, 40 bp, Homo sapiens
gtcccctcctggaggtctttgagattaaataaatcctcat

SEQ ID NO: 15516 - DNA, 40 bp, Homo sapiens
tgaggatttatttaatctcaaagacctccaggaggggaca

SEQ ID NO: 15517 - DNA, 40 bp, Homo sapiens
tgtcccctcctggaggtctttgagattaaataaatcctca

SEQ ID NO: 15518 - DNA, 40 bp, Homo sapiens
gaggatttatttaatctcaaagacctccaggaggggacat

SEQ ID NO: 15519 - DNA, 40 bp, Homo sapiens
atgtcccctcctggaggtctttgagattaaataaatcctc

SEQ ID NO: 15520 - DNA, 40 bp, Homo sapiens
aggatttatttaatctcaaagacctccaggaggggacatt

SEQ ID NO: 15521 - DNA, 40 bp, Homo sapiens
aatgtcccctcctggaggtctttgagattaaataaatcct

SEQ ID NO: 15522 - DNA, 40 bp, Homo sapiens
ggatttatttaatctcaaagacctccaggaggggacattc

SEQ ID NO: 15523 - DNA, 40 bp, Homo sapiens
gaatgtcccctcctggaggtctttgagattaaataaatcc

SEQ ID NO: 15524 - DNA, 40 bp, Homo sapiens
gatttatttaatctcaaagacctccaggaggggacattcc

SEQ ID NO: 15525 - DNA, 40 bp, Homo sapiens
ggaatgtcccctcctggaggtctttgagattaaataaatc

SEQ ID NO: 15526 - DNA, 40 bp, Homo sapiens
atttatttaatctcaaagacctccaggaggggacattccc

SEQ ID NO: 15527 - DNA, 40 bp, Homo sapiens
gggaatgtcccctcctggaggtctttgagattaaataaat

SEQ ID NO: 15528 - DNA, 40 bp, Homo sapiens
tttatttaatctcaaagacctccaggaggggacattcccc

SEQ ID NO: 15529 - DNA, 40 bp, Homo sapiens
ggggaatgtcccctcctggaggtctttgagattaaataaa

SEQ ID NO: 15530 - DNA, 40 bp, Homo sapiens
ttatttaatctcaaagacctccaggaggggacattcccca

SEQ ID NO: 15531 - DNA, 40 bp, Homo sapiens
tggggaatgtcccctcctggaggtctttgagattaaataa

SEQ ID NO: 15532 - DNA, 40 bp, Homo sapiens
tatttaatctcaaagacctccaggaggggacattccccaa

SEQ ID NO: 15533 - DNA, 40 bp, Homo sapiens
ttggggaatgtcccctcctggaggtctttgagattaaata

SEQ ID NO: 15534 - DNA, 40 bp, Homo sapiens
atttaatctcaaagacctccaggaggggacattccccaac

SEQ ID NO: 15535 - DNA, 40 bp, Homo sapiens
gttggggaatgtcccctcctggaggtctttgagattaaat

SEQ ID NO: 15536 - DNA, 40 bp, Homo sapiens
tttaatctcaaagacctccaggaggggacattccccaact

SEQ ID NO: 15537 - DNA, 40 bp, Homo sapiens
agttggggaatgtcccctcctggaggtctttgagattaaa

SEQ ID NO: 15538 - DNA, 40 bp, Homo sapiens
ttaatctcaaagacctccaggaggggacattccccaactg

SEQ ID NO: 15539 - DNA, 40 bp, Homo sapiens
cagttggggaatgtcccctcctggaggtctttgagattaa

SEQ ID NO: 15540 - DNA, 40 bp, Homo sapiens
taatctcaaagacctccaggaggggacattccccaactgt

SEQ ID NO: 15541 - DNA, 40 bp, Homo sapiens
acagttggggaatgtcccctcctggaggtctttgagatta

SEQ ID NO: 15542 - DNA, 40 bp, Homo sapiens
aatctcaaagacctccaggaggggacattccccaactgtc

SEQ ID NO: 15543 - DNA, 40 bp, Homo sapiens
gacagttggggaatgtcccctcctggaggtctttgagatt

SEQ ID NO: 15544 - DNA, 40 bp, Homo sapiens
atctcaaagacctccaggaggggacattccccaactgtcc

SEQ ID NO: 15545 - DNA, 40 bp, Homo sapiens
ggacagttggggaatgtcccctcctggaggtctttgagat

SEQ ID NO: 15546 - DNA, 40 bp, Homo sapiens
tctcaaagacctccaggaggggacattccccaactgtcct

SEQ ID NO: 15547 - DNA, 40 bp, Homo sapiens
aggacagttggggaatgtcccctcctggaggtctttgaga

SEQ ID NO: 15548 - DNA, 40 bp, Homo sapiens
ctcaaagacctccaggaggggacattccccaactgtcctt

SEQ ID NO: 15549 - DNA, 40 bp, Homo sapiens
aaggacagttggggaatgtcccctcctggaggtctttgag

SEQ ID NO: 15550 - DNA, 40 bp, Homo sapiens
tcaaagacctccaggaggggacattccccaactgtccttg

SEQ ID NO: 15551 - DNA, 40 bp, Homo sapiens
caaggacagttggggaatgtcccctcctggaggtctttga

SEQ ID NO: 15552 - DNA, 40 bp, Homo sapiens
caaagacctccaggaggggacattccccaactgtccttgt

SEQ ID NO: 15553 - DNA, 40 bp, Homo sapiens
acaaggacagttggggaatgtcccctcctggaggtctttg

SEQ ID NO: 15554 - DNA, 40 bp, Homo sapiens
aaagacctccaggaggggacattccccaactgtccttgtt

SEQ ID NO: 15555 - DNA, 40 bp, Homo sapiens
aacaaggacagttggggaatgtcccctcctggaggtcttt

SEQ ID NO: 15556 - DNA, 40 bp, Homo sapiens
aagacctccaggaggggacattccccaactgtccttgtta

SEQ ID NO: 15557 - DNA, 40 bp, Homo sapiens
taacaaggacagttggggaatgtcccctcctggaggtctt

SEQ ID NO: 15558 - DNA, 40 bp, Homo sapiens
agacctccaggaggggacattccccaactgtccttgttaa

SEQ ID NO: 15559 - DNA, 40 bp, Homo sapiens
ttaacaaggacagttggggaatgtcccctcctggaggtct

SEQ ID NO: 15560 - DNA, 40 bp, Homo sapiens
gacctccaggaggggacattccccaactgtccttgttaac

SEQ ID NO: 15561 - DNA, 40 bp, Homo sapiens
gttaacaaggacagttggggaatgtcccctcctggaggtc

SEQ ID NO: 15562 - DNA, 40 bp, Homo sapiens
acctccaggaggggacattccccaactgtccttgttaact

SEQ ID NO: 15563 - DNA, 40 bp, Homo sapiens
agttaacaaggacagttggggaatgtcccctcctggaggt

SEQ ID NO: 15564 - DNA, 40 bp, Homo sapiens
cctccaggaggggacattccccaactgtccttgttaactc

SEQ ID NO: 15565 - DNA, 40 bp, Homo sapiens
gagttaacaaggacagttggggaatgtcccctcctggagg

SEQ ID NO: 15566 - DNA, 40 bp, Homo sapiens
ctccaggaggggacattccccaactgtccttgttaactca

SEQ ID NO: 15567 - DNA, 40 bp, Homo sapiens
tgagttaacaaggacagttggggaatgtcccctcctggag

SEQ ID NO: 15568 - DNA, 40 bp, Homo sapiens
tccaggaggggacattccccaactgtccttgttaactcat

SEQ ID NO: 15569 - DNA, 40 bp, Homo sapiens
atgagttaacaaggacagttggggaatgtcccctcctgga

SEQ ID NO: 15570 - DNA, 40 bp, Homo sapiens
ccaggaggggacattccccaactgtccttgttaactcatt

SEQ ID NO: 15571 - DNA, 40 bp, Homo sapiens
aatgagttaacaaggacagttggggaatgtcccctcctgg

SEQ ID NO: 15572 - DNA, 40 bp, Homo sapiens
caggaggggacattccccaactgtccttgttaactcattt

SEQ ID NO: 15573 - DNA, 40 bp, Homo sapiens
aaatgagttaacaaggacagttggggaatgtcccctcctg

SEQ ID NO: 15574 - DNA, 40 bp, Homo sapiens
aggaggggacattccccaactgtccttgttaactcatttt

SEQ ID NO: 15575 - DNA, 40 bp, Homo sapiens
aaaatgagttaacaaggacagttggggaatgtcccctcct

SEQ ID NO: 15576 - DNA, 40 bp, Homo sapiens
ggaggggacattccccaactgtccttgttaactcattttc

SEQ ID NO: 15577 - DNA, 40 bp, Homo sapiens
gaaaatgagttaacaaggacagttggggaatgtcccctcc

SEQ ID NO: 15578 - DNA, 40 bp, Homo sapiens
gaggggacattccccaactgtccttgttaactcattttca

SEQ ID NO: 15579 - DNA, 40 bp, Homo sapiens
tgaaaatgagttaacaaggacagttggggaatgtcccctc

SEQ ID NO: 15580 - DNA, 40 bp, Homo sapiens
aggggacattccccaactgtccttgttaactcattttcag

SEQ ID NO: 15581 - DNA, 40 bp, Homo sapiens
ctgaaaatgagttaacaaggacagttggggaatgtcccct

SEQ ID NO: 15582 - DNA, 40 bp, Homo sapiens
ggggacattccccaactgtccttgttaactcattttcaga

SEQ ID NO: 15583 - DNA, 40 bp, Homo sapiens
tctgaaaatgagttaacaaggacagttggggaatgtcccc

SEQ ID NO: 15584 - DNA, 40 bp, Homo sapiens
gggacattccccaactgtccttgttaactcattttcagaa

SEQ ID NO: 15585 - DNA, 40 bp, Homo sapiens
ttctgaaaatgagttaacaaggacagttggggaatgtccc

SEQ ID NO: 15586 - DNA, 40 bp, Homo sapiens
ggacattccccaactgtccttgttaactcattttcagaac

SEQ ID NO: 15587 - DNA, 40 bp, Homo sapiens
gttctgaaaatgagttaacaaggacagttggggaatgtcc

SEQ ID NO: 15588 - DNA, 40 bp, Homo sapiens
gacattccccaactgtccttgttaactcattttcagaaca

SEQ ID NO: 15589 - DNA, 40 bp, Homo sapiens
tgttctgaaaatgagttaacaaggacagttggggaatgtc

SEQ ID NO: 15590 - DNA, 40 bp, Homo sapiens
acattccccaactgtccttgttaactcattttcagaacat

SEQ ID NO: 15591 - DNA, 40 bp, Homo sapiens
atgttctgaaaatgagttaacaaggacagttggggaatgt

SEQ ID NO: 15592 - DNA, 40 bp, Homo sapiens
cattccccaactgtccttgttaactcattttcagaacata

SEQ ID NO: 15593 - DNA, 40 bp, Homo sapiens
tatgttctgaaaatgagttaacaaggacagttggggaatg

SEQ ID NO: 15594 - DNA, 40 bp, Homo sapiens
attccccaactgtccttgttaactcattttcagaacatat

SEQ ID NO: 15595 - DNA, 40 bp, Homo sapiens
atatgttctgaaaatgagttaacaaggacagttggggaat

SEQ ID NO: 15596 - DNA, 40 bp, Homo sapiens
ttccccaactgtccttgttaactcattttcagaacatatt

SEQ ID NO: 15597 - DNA, 40 bp, Homo sapiens
aatatgttctgaaaatgagttaacaaggacagttggggaa

SEQ ID NO: 15598 - DNA, 40 bp, Homo sapiens
tccccaactgtccttgttaactcattttcagaacatattt

SEQ ID NO: 15599 - DNA, 40 bp, Homo sapiens
aaatatgttctgaaaatgagttaacaaggacagttgggga

SEQ ID NO: 15600 - DNA, 40 bp, Homo sapiens
ccccaactgtccttgttaactcattttcagaacatattta

SEQ ID NO: 15601 - DNA, 40 bp, Homo sapiens
taaatatgttctgaaaatgagttaacaaggacagttgggg

SEQ ID NO: 15602 - DNA, 40 bp, Homo sapiens
cccaactgtccttgttaactcattttcagaacatatttat

SEQ ID NO: 15603 - DNA, 40 bp, Homo sapiens
ataaatatgttctgaaaatgagttaacaaggacagttggg

SEQ ID NO: 15604 - DNA, 40 bp, Homo sapiens
ccaactgtccttgttaactcattttcagaacatatttatt

SEQ ID NO: 15605 - DNA, 40 bp, Homo sapiens
aataaatatgttctgaaaatgagttaacaaggacagttgg

SEQ ID NO: 15606 - DNA, 40 bp, Homo sapiens
caactgtccttgttaactcattttcagaacatatttatta

SEQ ID NO: 15607 - DNA, 40 bp, Homo sapiens
taataaatatgttctgaaaatgagttaacaaggacagttg

SEQ ID NO: 15608 - DNA, 40 bp, Homo sapiens
aactgtccttgttaactcattttcagaacatatttattag

SEQ ID NO: 15609 - DNA, 40 bp, Homo sapiens
ctaataaatatgttctgaaaatgagttaacaaggacagtt

SEQ ID NO: 15610 - DNA, 40 bp, Homo sapiens
actgtccttgttaactcattttcagaacatatttattagc

SEQ ID NO: 15611 - DNA, 40 bp, Homo sapiens
gctaataaatatgttctgaaaatgagttaacaaggacagt

SEQ ID NO: 15612 - DNA, 40 bp, Homo sapiens
ctgtccttgttaactcattttcagaacatatttattagca

SEQ ID NO: 15613 - DNA, 40 bp, Homo sapiens
tgctaataaatatgttctgaaaatgagttaacaaggacag

SEQ ID NO: 15614 - DNA, 40 bp, Homo sapiens
tgtccttgttaactcattttcagaacatatttattagcat

SEQ ID NO: 15615 - DNA, 40 bp, Homo sapiens
atgctaataaatatgttctgaaaatgagttaacaaggaca

SEQ ID NO: 15616 - DNA, 40 bp, Homo sapiens
gtccttgttaactcattttcagaacatatttattagcata

SEQ ID NO: 15617 - DNA, 40 bp, Homo sapiens
tatgctaataaatatgttctgaaaatgagttaacaaggac

SEQ ID NO: 15618 - DNA, 40 bp, Homo sapiens
tccttgttaactcattttcagaacatatttattagcatat

SEQ ID NO: 15619 - DNA, 40 bp, Homo sapiens
atatgctaataaatatgttctgaaaatgagttaacaagga

SEQ ID NO: 15620 - DNA, 40 bp, Homo sapiens
ccttgttaactcattttcagaacatatttattagcatatt

SEQ ID NO: 15621 - DNA, 40 bp, Homo sapiens
aatatgctaataaatatgttctgaaaatgagttaacaagg

SEQ ID NO: 15622 - DNA, 40 bp, Homo sapiens
cttgttaactcattttcagaacatatttattagcatattt

SEQ ID NO: 15623 - DNA, 40 bp, Homo sapiens
aaatatgctaataaatatgttctgaaaatgagttaacaag

SEQ ID NO: 15624 - DNA, 40 bp, Homo sapiens
ttgttaactcattttcagaacatatttattagcatatttt

SEQ ID NO: 15625 - DNA, 40 bp, Homo sapiens
aaaatatgctaataaatatgttctgaaaatgagttaacaa

SEQ ID NO: 15626 - DNA, 40 bp, Homo sapiens
tgttaactcattttcagaacatatttattagcatatttta

SEQ ID NO: 15627 - DNA, 40 bp, Homo sapiens
taaaatatgctaataaatatgttctgaaaatgagttaaca

SEQ ID NO: 15628 - DNA, 40 bp, Homo sapiens
gttaactcattttcagaacatatttattagcatattttac

SEQ ID NO: 15629 - DNA, 40 bp, Homo sapiens
gtaaaatatgctaataaatatgttctgaaaatgagttaac

SEQ ID NO: 15630 - DNA, 40 bp, Homo sapiens
ttaactcattttcagaacatatttattagcatattttaca

SEQ ID NO: 15631 - DNA, 40 bp, Homo sapiens
tgtaaaatatgctaataaatatgttctgaaaatgagttaa

SEQ ID NO: 15632 - DNA, 40 bp, Homo sapiens
taactcattttcagaacatatttattagcatattttacat

SEQ ID NO: 15633 - DNA, 40 bp, Homo sapiens
atgtaaaatatgctaataaatatgttctgaaaatgagtta

SEQ ID NO: 15634 - DNA, 40 bp, Homo sapiens
aactcattttcagaacatatttattagcatattttacatg

SEQ ID NO: 15635 - DNA, 40 bp, Homo sapiens
catgtaaaatatgctaataaatatgttctgaaaatgagtt

SEQ ID NO: 15636 - DNA, 40 bp, Homo sapiens
actcattttcagaacatatttattagcatattttacatgt

SEQ ID NO: 15637 - DNA, 40 bp, Homo sapiens
acatgtaaaatatgctaataaatatgttctgaaaatgagt

SEQ ID NO: 15638 - DNA, 40 bp, Homo sapiens
ctcattttcagaacatatttattagcatattttacatgta

SEQ ID NO: 15639 - DNA, 40 bp, Homo sapiens
tacatgtaaaatatgctaataaatatgttctgaaaatgag

SEQ ID NO: 15640 - DNA, 40 bp, Homo sapiens
tcattttcagaacatatttattagcatattttacatgtaa

SEQ ID NO: 15641 - DNA, 40 bp, Homo sapiens
ttacatgtaaaatatgctaataaatatgttctgaaaatga

SEQ ID NO: 15642 - DNA, 40 bp, Homo sapiens
cattttcagaacatatttattagcatattttacatgtaat

SEQ ID NO: 15643 - DNA, 40 bp, Homo sapiens
attacatgtaaaatatgctaataaatatgttctgaaaatg

SEQ ID NO: 15644 - DNA, 40 bp, Homo sapiens
attttcagaacatatttattagcatattttacatgtaatt

SEQ ID NO: 15645 - DNA, 40 bp, Homo sapiens
aattacatgtaaaatatgctaataaatatgttctgaaaat

SEQ ID NO: 15646 - DNA, 40 bp, Homo sapiens
ttttcagaacatatttattagcatattttacatgtaattt

SEQ ID NO: 15647 - DNA, 40 bp, Homo sapiens
aaattacatgtaaaatatgctaataaatatgttctgaaaa

SEQ ID NO: 15648 - DNA, 40 bp, Homo sapiens
tttcagaacatatttattagcatattttacatgtaatttg

SEQ ID NO: 15649 - DNA, 40 bp, Homo sapiens
caaattacatgtaaaatatgctaataaatatgttctgaaa

SEQ ID NO: 15650 - DNA, 40 bp, Homo sapiens
ttcagaacatatttattagcatattttacatgtaatttgg

SEQ ID NO: 15651 - DNA, 40 bp, Homo sapiens
ccaaattacatgtaaaatatgctaataaatatgttctgaa

SEQ ID NO: 15652 - DNA, 40 bp, Homo sapiens
tcagaacatatttattagcatattttacatgtaatttgga

SEQ ID NO: 15653 - DNA, 40 bp, Homo sapiens
tccaaattacatgtaaaatatgctaataaatatgttctga

SEQ ID NO: 15654 - DNA, 40 bp, Homo sapiens
cagaacatatttattagcatattttacatgtaatttggat

SEQ ID NO: 15655 - DNA, 40 bp, Homo sapiens
atccaaattacatgtaaaatatgctaataaatatgttctg

SEQ ID NO: 15656 - DNA, 40 bp, Homo sapiens
agaacatatttattagcatattttacatgtaatttggatc

SEQ ID NO: 15657 - DNA, 40 bp, Homo sapiens
gatccaaattacatgtaaaatatgctaataaatatgttct

SEQ ID NO: 15658 - DNA, 40 bp, Homo sapiens
gaacatatttattagcatattttacatgtaatttggatct

SEQ ID NO: 15659 - DNA, 40 bp, Homo sapiens
agatccaaattacatgtaaaatatgctaataaatatgttc

SEQ ID NO: 15660 - DNA, 40 bp, Homo sapiens
aacatatttattagcatattttacatgtaatttggatctt

SEQ ID NO: 15661 - DNA, 40 bp, Homo sapiens
aagatccaaattacatgtaaaatatgctaataaatatgtt

SEQ ID NO: 15662 - DNA, 40 bp, Homo sapiens
acatatttattagcatattttacatgtaatttggatcttc

SEQ ID NO: 15663 - DNA, 40 bp, Homo sapiens
gaagatccaaattacatgtaaaatatgctaataaatatgt

SEQ ID NO: 15664 - DNA, 40 bp, Homo sapiens
catatttattagcatattttacatgtaatttggatcttca

SEQ ID NO: 15665 - DNA, 40 bp, Homo sapiens
tgaagatccaaattacatgtaaaatatgctaataaatatg

SEQ ID NO: 15666 - DNA, 40 bp, Homo sapiens
atatttattagcatattttacatgtaatttggatcttcat

SEQ ID NO: 15667 - DNA, 40 bp, Homo sapiens
atgaagatccaaattacatgtaaaatatgctaataaatat

SEQ ID NO: 15668 - DNA, 40 bp, Homo sapiens
tatttattagcatattttacatgtaatttggatcttcatg

SEQ ID NO: 15669 - DNA, 40 bp, Homo sapiens
catgaagatccaaattacatgtaaaatatgctaataaata

SEQ ID NO: 15670 - DNA, 40 bp, Homo sapiens
atttattagcatattttacatgtaatttggatcttcatgt

SEQ ID NO: 15671 - DNA, 40 bp, Homo sapiens
acatgaagatccaaattacatgtaaaatatgctaataaat

SEQ ID NO: 15672 - DNA, 40 bp, Homo sapiens
tttattagcatattttacatgtaatttggatcttcatgtt

SEQ ID NO: 15673 - DNA, 40 bp, Homo sapiens
aacatgaagatccaaattacatgtaaaatatgctaataaa

SEQ ID NO: 15674 - DNA, 40 bp, Homo sapiens
ttattagcatattttacatgtaatttggatcttcatgtta

SEQ ID NO: 15675 - DNA, 40 bp, Homo sapiens
taacatgaagatccaaattacatgtaaaatatgctaataa

SEQ ID NO: 15676 - DNA, 40 bp, Homo sapiens
tattagcatattttacatgtaatttggatcttcatgttaa

SEQ ID NO: 15677 - DNA, 40 bp, Homo sapiens
ttaacatgaagatccaaattacatgtaaaatatgctaata

SEQ ID NO: 15678 - DNA, 40 bp, Homo sapiens
attagcatattttacatgtaatttggatcttcatgttaaa

SEQ ID NO: 15679 - DNA, 40 bp, Homo sapiens
tttaacatgaagatccaaattacatgtaaaatatgctaat

SEQ ID NO: 15680 - DNA, 40 bp, Homo sapiens
ttagcatattttacatgtaatttggatcttcatgttaaat

SEQ ID NO: 15681 - DNA, 40 bp, Homo sapiens
atttaacatgaagatccaaattacatgtaaaatatgctaa

SEQ ID NO: 15682 - DNA, 40 bp, Homo sapiens
tagcatattttacatgtaatttggatcttcatgttaaatt

SEQ ID NO: 15683 - DNA, 40 bp, Homo sapiens
aatttaacatgaagatccaaattacatgtaaaatatgcta

SEQ ID NO: 15684 - DNA, 40 bp, Homo sapiens
agcatattttacatgtaatttggatcttcatgttaaattt

SEQ ID NO: 15685 - DNA, 40 bp, Homo sapiens
aaatttaacatgaagatccaaattacatgtaaaatatgct

SEQ ID NO: 15686 - DNA, 40 bp, Homo sapiens
gcatattttacatgtaatttggatcttcatgttaaattta

SEQ ID NO: 15687 - DNA, 40 bp, Homo sapiens
taaatttaacatgaagatccaaattacatgtaaaatatgc

SEQ ID NO: 15688 - DNA, 40 bp, Homo sapiens
catattttacatgtaatttggatcttcatgttaaatttaa

SEQ ID NO: 15689 - DNA, 40 bp, Homo sapiens
ttaaatttaacatgaagatccaaattacatgtaaaatatg

SEQ ID NO: 15690 - DNA, 40 bp, Homo sapiens
atattttacatgtaatttggatcttcatgttaaatttaac

SEQ ID NO: 15691 - DNA, 40 bp, Homo sapiens
gttaaatttaacatgaagatccaaattacatgtaaaatat

SEQ ID NO: 15692 - DNA, 40 bp, Homo sapiens
tattttacatgtaatttggatcttcatgttaaatttaaca

SEQ ID NO: 15693 - DNA, 40 bp, Homo sapiens
tgttaaatttaacatgaagatccaaattacatgtaaaata

SEQ ID NO: 15694 - DNA, 40 bp, Homo sapiens
attttacatgtaatttggatcttcatgttaaatttaacat

SEQ ID NO: 15695 - DNA, 40 bp, Homo sapiens
atgttaaatttaacatgaagatccaaattacatgtaaaat

SEQ ID NO: 15696 - DNA, 40 bp, Homo sapiens
ttttacatgtaatttggatcttcatgttaaatttaacatc

SEQ ID NO: 15697 - DNA, 40 bp, Homo sapiens
gatgttaaatttaacatgaagatccaaattacatgtaaaa

SEQ ID NO: 15698 - DNA, 40 bp, Homo sapiens
tttacatgtaatttggatcttcatgttaaatttaacatca

SEQ ID NO: 15699 - DNA, 40 bp, Homo sapiens
tgatgttaaatttaacatgaagatccaaattacatgtaaa

SEQ ID NO: 15700 - DNA, 40 bp, Homo sapiens
ttacatgtaatttggatcttcatgttaaatttaacatcag

SEQ ID NO: 15701 - DNA, 40 bp, Homo sapiens
ctgatgttaaatttaacatgaagatccaaattacatgtaa

SEQ ID NO: 15702 - DNA, 40 bp, Homo sapiens
tacatgtaatttggatcttcatgttaaatttaacatcagt

SEQ ID NO: 15703 - DNA, 40 bp, Homo sapiens
actgatgttaaatttaacatgaagatccaaattacatgta

SEQ ID NO: 15704 - DNA, 40 bp, Homo sapiens
acatgtaatttggatcttcatgttaaatttaacatcagtg

SEQ ID NO: 15705 - DNA, 40 bp, Homo sapiens
cactgatgttaaatttaacatgaagatccaaattacatgt

SEQ ID NO: 15706 - DNA, 40 bp, Homo sapiens
catgtaatttggatcttcatgttaaatttaacatcagtgg

SEQ ID NO: 15707 - DNA, 40 bp, Homo sapiens
ccactgatgttaaatttaacatgaagatccaaattacatg

SEQ ID NO: 15708 - DNA, 40 bp, Homo sapiens
atgtaatttggatcttcatgttaaatttaacatcagtgga

SEQ ID NO: 15709 - DNA, 40 bp, Homo sapiens
tccactgatgttaaatttaacatgaagatccaaattacat

SEQ ID NO: 15710 - DNA, 40 bp, Homo sapiens
tgtaatttggatcttcatgttaaatttaacatcagtggag

SEQ ID NO: 15711 - DNA, 40 bp, Homo sapiens
ctccactgatgttaaatttaacatgaagatccaaattaca

SEQ ID NO: 15712 - DNA, 40 bp, Homo sapiens
gtaatttggatcttcatgttaaatttaacatcagtggaga

SEQ ID NO: 15713 - DNA, 40 bp, Homo sapiens
tctccactgatgttaaatttaacatgaagatccaaattac

SEQ ID NO: 15714 - DNA, 40 bp, Homo sapiens
taatttggatcttcatgttaaatttaacatcagtggagat

SEQ ID NO: 15715 - DNA, 40 bp, Homo sapiens
atctccactgatgttaaatttaacatgaagatccaaatta

SEQ ID NO: 15716 - DNA, 40 bp, Homo sapiens
aatttggatcttcatgttaaatttaacatcagtggagatg

SEQ ID NO: 15717 - DNA, 40 bp, Homo sapiens
catctccactgatgttaaatttaacatgaagatccaaatt

SEQ ID NO: 15718 - DNA, 40 bp, Homo sapiens
atttggatcttcatgttaaatttaacatcagtggagatgg

SEQ ID NO: 15719 - DNA, 40 bp, Homo sapiens
ccatctccactgatgttaaatttaacatgaagatccaaat

SEQ ID NO: 15720 - DNA, 40 bp, Homo sapiens
tttggatcttcatgttaaatttaacatcagtggagatgga

SEQ ID NO: 15721 - DNA, 40 bp, Homo sapiens
tccatctccactgatgttaaatttaacatgaagatccaaa

SEQ ID NO: 15722 - DNA, 40 bp, Homo sapiens
ttggatcttcatgttaaatttaacatcagtggagatggaa

SEQ ID NO: 15723 - DNA, 40 bp, Homo sapiens
ttccatctccactgatgttaaatttaacatgaagatccaa

SEQ ID NO: 15724 - DNA, 40 bp, Homo sapiens
tggatcttcatgttaaatttaacatcagtggagatggaaa

SEQ ID NO: 15725 - DNA, 40 bp, Homo sapiens
tttccatctccactgatgttaaatttaacatgaagatcca

SEQ ID NO: 15726 - DNA, 40 bp, Homo sapiens
ggatcttcatgttaaatttaacatcagtggagatggaaaa

SEQ ID NO: 15727 - DNA, 40 bp, Homo sapiens
ttttccatctccactgatgttaaatttaacatgaagatcc

SEQ ID NO: 15728 - DNA, 40 bp, Homo sapiens
gatcttcatgttaaatttaacatcagtggagatggaaaat

SEQ ID NO: 15729 - DNA, 40 bp, Homo sapiens
attttccatctccactgatgttaaatttaacatgaagatc

SEQ ID NO: 15730 - DNA, 40 bp, Homo sapiens
atcttcatgttaaatttaacatcagtggagatggaaaata

SEQ ID NO: 15731 - DNA, 40 bp, Homo sapiens
tattttccatctccactgatgttaaatttaacatgaagat

SEQ ID NO: 15732 - DNA, 40 bp, Homo sapiens
tcttcatgttaaatttaacatcagtggagatggaaaataa

SEQ ID NO: 15733 - DNA, 40 bp, Homo sapiens
ttattttccatctccactgatgttaaatttaacatgaaga

SEQ ID NO: 15734 - DNA, 40 bp, Homo sapiens
cttcatgttaaatttaacatcagtggagatggaaaataag

SEQ ID NO: 15735 - DNA, 40 bp, Homo sapiens
cttattttccatctccactgatgttaaatttaacatgaag

SEQ ID NO: 15736 - DNA, 40 bp, Homo sapiens
ttcatgttaaatttaacatcagtggagatggaaaataagc

SEQ ID NO: 15737 - DNA, 40 bp, Homo sapiens
gcttattttccatctccactgatgttaaatttaacatgaa

SEQ ID NO: 15738 - DNA, 40 bp, Homo sapiens
tcatgttaaatttaacatcagtggagatggaaaataagca

SEQ ID NO: 15739 - DNA, 40 bp, Homo sapiens
tgcttattttccatctccactgatgttaaatttaacatga

SEQ ID NO: 15740 - DNA, 40 bp, Homo sapiens
catgttaaatttaacatcagtggagatggaaaataagcat

SEQ ID NO: 15741 - DNA, 40 bp, Homo sapiens
atgcttattttccatctccactgatgttaaatttaacatg

SEQ ID NO: 15742 - DNA, 40 bp, Homo sapiens
atgttaaatttaacatcagtggagatggaaaataagcata

SEQ ID NO: 15743 - DNA, 40 bp, Homo sapiens
tatgcttattttccatctccactgatgttaaatttaacat

SEQ ID NO: 15744 - DNA, 40 bp, Homo sapiens
tgttaaatttaacatcagtggagatggaaaataagcatat

SEQ ID NO: 15745 - DNA, 40 bp, Homo sapiens
atatgcttattttccatctccactgatgttaaatttaaca

SEQ ID NO: 15746 - DNA, 40 bp, Homo sapiens
gttaaatttaacatcagtggagatggaaaataagcatatc

SEQ ID NO: 15747 - DNA, 40 bp, Homo sapiens
gatatgcttattttccatctccactgatgttaaatttaac

SEQ ID NO: 15748 - DNA, 40 bp, Homo sapiens
ttaaatttaacatcagtggagatggaaaataagcatatcg

SEQ ID NO: 15749 - DNA, 40 bp, Homo sapiens
cgatatgcttattttccatctccactgatgttaaatttaa

SEQ ID NO: 15750 - DNA, 40 bp, Homo sapiens
taaatttaacatcagtggagatggaaaataagcatatcgc

SEQ ID NO: 15751 - DNA, 40 bp, Homo sapiens
gcgatatgcttattttccatctccactgatgttaaattta

SEQ ID NO: 15752 - DNA, 40 bp, Homo sapiens
aaatttaacatcagtggagatggaaaataagcatatcgcc

SEQ ID NO: 15753 - DNA, 40 bp, Homo sapiens
ggcgatatgcttattttccatctccactgatgttaaattt

SEQ ID NO: 15754 - DNA, 40 bp, Homo sapiens
aatttaacatcagtggagatggaaaataagcatatcgcct

SEQ ID NO: 15755 - DNA, 40 bp, Homo sapiens
aggcgatatgcttattttccatctccactgatgttaaatt

SEQ ID NO: 15756 - DNA, 40 bp, Homo sapiens
atttaacatcagtggagatggaaaataagcatatcgcctt

SEQ ID NO: 15757 - DNA, 40 bp, Homo sapiens
aaggcgatatgcttattttccatctccactgatgttaaat

SEQ ID NO: 15758 - DNA, 40 bp, Homo sapiens
tttaacatcagtggagatggaaaataagcatatcgccttg

SEQ ID NO: 15759 - DNA, 40 bp, Homo sapiens
caaggcgatatgcttattttccatctccactgatgttaaa

SEQ ID NO: 15760 - DNA, 40 bp, Homo sapiens
ttaacatcagtggagatggaaaataagcatatcgccttgt

SEQ ID NO: 15761 - DNA, 40 bp, Homo sapiens
acaaggcgatatgcttattttccatctccactgatgttaa

SEQ ID NO: 15762 - DNA, 40 bp, Homo sapiens
taacatcagtggagatggaaaataagcatatcgccttgtc

SEQ ID NO: 15763 - DNA, 40 bp, Homo sapiens
gacaaggcgatatgcttattttccatctccactgatgtta

SEQ ID NO: 15764 - DNA, 40 bp, Homo sapiens
aacatcagtggagatggaaaataagcatatcgccttgtct

SEQ ID NO: 15765 - DNA, 40 bp, Homo sapiens
agacaaggcgatatgcttattttccatctccactgatgtt

SEQ ID NO: 15766 - DNA, 40 bp, Homo sapiens
acatcagtggagatggaaaataagcatatcgccttgtctt

SEQ ID NO: 15767 - DNA, 40 bp, Homo sapiens
aagacaaggcgatatgcttattttccatctccactgatgt

SEQ ID NO: 15768 - DNA, 40 bp, Homo sapiens
catcagtggagatggaaaataagcatatcgccttgtcttt

SEQ ID NO: 15769 - DNA, 40 bp, Homo sapiens
aaagacaaggcgatatgcttattttccatctccactgatg

SEQ ID NO: 15770 - DNA, 40 bp, Homo sapiens
atcagtggagatggaaaataagcatatcgccttgtctttg

SEQ ID NO: 15771 - DNA, 40 bp, Homo sapiens
caaagacaaggcgatatgcttattttccatctccactgat

SEQ ID NO: 15772 - DNA, 40 bp, Homo sapiens
tcagtggagatggaaaataagcatatcgccttgtctttga

SEQ ID NO: 15773 - DNA, 40 bp, Homo sapiens
tcaaagacaaggcgatatgcttattttccatctccactga

SEQ ID NO: 15774 - DNA, 40 bp, Homo sapiens
cagtggagatggaaaataagcatatcgccttgtctttgaa

SEQ ID NO: 15775 - DNA, 40 bp, Homo sapiens
ttcaaagacaaggcgatatgcttattttccatctccactg

SEQ ID NO: 15776 - DNA, 40 bp, Homo sapiens
agtggagatggaaaataagcatatcgccttgtctttgaaa

SEQ ID NO: 15777 - DNA, 40 bp, Homo sapiens
tttcaaagacaaggcgatatgcttattttccatctccact

SEQ ID NO: 15778 - DNA, 40 bp, Homo sapiens
gtggagatggaaaataagcatatcgccttgtctttgaaat

SEQ ID NO: 15779 - DNA, 40 bp, Homo sapiens
atttcaaagacaaggcgatatgcttattttccatctccac

SEQ ID NO: 15780 - DNA, 40 bp, Homo sapiens
tggagatggaaaataagcatatcgccttgtctttgaaata

SEQ ID NO: 15781 - DNA, 40 bp, Homo sapiens
tatttcaaagacaaggcgatatgcttattttccatctcca

SEQ ID NO: 15782 - DNA, 40 bp, Homo sapiens
ggagatggaaaataagcatatcgccttgtctttgaaatag

SEQ ID NO: 15783 - DNA, 40 bp, Homo sapiens
ctatttcaaagacaaggcgatatgcttattttccatctcc

SEQ ID NO: 15784 - DNA, 40 bp, Homo sapiens
gagatggaaaataagcatatcgccttgtctttgaaatagc

SEQ ID NO: 15785 - DNA, 40 bp, Homo sapiens
gctatttcaaagacaaggcgatatgcttattttccatctc

SEQ ID NO: 15786 - DNA, 40 bp, Homo sapiens
agatggaaaataagcatatcgccttgtctttgaaatagcc

SEQ ID NO: 15787 - DNA, 40 bp, Homo sapiens
ggctatttcaaagacaaggcgatatgcttattttccatct

SEQ ID NO: 15788 - DNA, 40 bp, Homo sapiens
gatggaaaataagcatatcgccttgtctttgaaatagccc

SEQ ID NO: 15789 - DNA, 40 bp, Homo sapiens
gggctatttcaaagacaaggcgatatgcttattttccatc

SEQ ID NO: 15790 - DNA, 40 bp, Homo sapiens
atggaaaataagcatatcgccttgtctttgaaatagccct

SEQ ID NO: 15791 - DNA, 40 bp, Homo sapiens
agggctatttcaaagacaaggcgatatgcttattttccat

SEQ ID NO: 15792 - DNA, 40 bp, Homo sapiens
tggaaaataagcatatcgccttgtctttgaaatagcccta

SEQ ID NO: 15793 - DNA, 40 bp, Homo sapiens
tagggctatttcaaagacaaggcgatatgcttattttcca

SEQ ID NO: 15794 - DNA, 40 bp, Homo sapiens
ggaaaataagcatatcgccttgtctttgaaatagccctat

SEQ ID NO: 15795 - DNA, 40 bp, Homo sapiens
atagggctatttcaaagacaaggcgatatgcttattttcc

SEQ ID NO: 15796 - DNA, 40 bp, Homo sapiens
gaaaataagcatatcgccttgtctttgaaatagccctata

SEQ ID NO: 15797 - DNA, 40 bp, Homo sapiens
tatagggctatttcaaagacaaggcgatatgcttattttc

SEQ ID NO: 15798 - DNA, 40 bp, Homo sapiens
aaaataagcatatcgccttgtctttgaaatagccctatat

SEQ ID NO: 15799 - DNA, 40 bp, Homo sapiens
atatagggctatttcaaagacaaggcgatatgcttatttt

SEQ ID NO: 15800 - DNA, 40 bp, Homo sapiens
aaataagcatatcgccttgtctttgaaatagccctatatt

SEQ ID NO: 15801 - DNA, 40 bp, Homo sapiens
aatatagggctatttcaaagacaaggcgatatgcttattt

SEQ ID NO: 15802 - DNA, 40 bp, Homo sapiens
aataagcatatcgccttgtctttgaaatagccctatattg

SEQ ID NO: 15803 - DNA, 40 bp, Homo sapiens
caatatagggctatttcaaagacaaggcgatatgcttatt

SEQ ID NO: 15804 - DNA, 40 bp, Homo sapiens
ataagcatatcgccttgtctttgaaatagccctatattgt

SEQ ID NO: 15805 - DNA, 40 bp, Homo sapiens
acaatatagggctatttcaaagacaaggcgatatgcttat

SEQ ID NO: 15806 - DNA, 40 bp, Homo sapiens
taagcatatcgccttgtctttgaaatagccctatattgtt

SEQ ID NO: 15807 - DNA, 40 bp, Homo sapiens
aacaatatagggctatttcaaagacaaggcgatatgctta

SEQ ID NO: 15808 - DNA, 40 bp, Homo sapiens
aagcatatcgccttgtctttgaaatagccctatattgtta

SEQ ID NO: 15809 - DNA, 40 bp, Homo sapiens
taacaatatagggctatttcaaagacaaggcgatatgctt

SEQ ID NO: 15810 - DNA, 40 bp, Homo sapiens
agcatatcgccttgtctttgaaatagccctatattgttag

SEQ ID NO: 15811 - DNA, 40 bp, Homo sapiens
ctaacaatatagggctatttcaaagacaaggcgatatgct

SEQ ID NO: 15812 - DNA, 40 bp, Homo sapiens
gcatatcgccttgtctttgaaatagccctatattgttaga

SEQ ID NO: 15813 - DNA, 40 bp, Homo sapiens
tctaacaatatagggctatttcaaagacaaggcgatatgc

SEQ ID NO: 15814 - DNA, 40 bp, Homo sapiens
catatcgccttgtctttgaaatagccctatattgttagat

SEQ ID NO: 15815 - DNA, 40 bp, Homo sapiens
atctaacaatatagggctatttcaaagacaaggcgatatg

SEQ ID NO: 15816 - DNA, 40 bp, Homo sapiens
atatcgccttgtctttgaaatagccctatattgttagatt

SEQ ID NO: 15817 - DNA, 40 bp, Homo sapiens
aatctaacaatatagggctatttcaaagacaaggcgatat

SEQ ID NO: 15818 - DNA, 40 bp, Homo sapiens
tatcgccttgtctttgaaatagccctatattgttagattg

SEQ ID NO: 15819 - DNA, 40 bp, Homo sapiens
caatctaacaatatagggctatttcaaagacaaggcgata

SEQ ID NO: 15820 - DNA, 40 bp, Homo sapiens
atcgccttgtctttgaaatagccctatattgttagattgt

SEQ ID NO: 15821 - DNA, 40 bp, Homo sapiens
acaatctaacaatatagggctatttcaaagacaaggcgat

SEQ ID NO: 15822 - DNA, 40 bp, Homo sapiens
tcgccttgtctttgaaatagccctatattgttagattgtt

SEQ ID NO: 15823 - DNA, 40 bp, Homo sapiens
aacaatctaacaatatagggctatttcaaagacaaggcga

SEQ ID NO: 15824 - DNA, 40 bp, Homo sapiens
cgccttgtctttgaaatagccctatattgttagattgttt

SEQ ID NO: 15825 - DNA, 40 bp, Homo sapiens
aaacaatctaacaatatagggctatttcaaagacaaggcg

SEQ ID NO: 15826 - DNA, 40 bp, Homo sapiens
gccttgtctttgaaatagccctatattgttagattgtttc

SEQ ID NO: 15827 - DNA, 40 bp, Homo sapiens
gaaacaatctaacaatatagggctatttcaaagacaaggc

SEQ ID NO: 15828 - DNA, 40 bp, Homo sapiens
ccttgtctttgaaatagccctatattgttagattgtttct

SEQ ID NO: 15829 - DNA, 40 bp, Homo sapiens
agaaacaatctaacaatatagggctatttcaaagacaagg

SEQ ID NO: 15830 - DNA, 40 bp, Homo sapiens
cttgtctttgaaatagccctatattgttagattgtttctt

SEQ ID NO: 15831 - DNA, 40 bp, Homo sapiens
aagaaacaatctaacaatatagggctatttcaaagacaag

SEQ ID NO: 15832 - DNA, 40 bp, Homo sapiens
ttgtctttgaaatagccctatattgttagattgtttctta

SEQ ID NO: 15833 - DNA, 40 bp, Homo sapiens
taagaaacaatctaacaatatagggctatttcaaagacaa

SEQ ID NO: 15834 - DNA, 40 bp, Homo sapiens
tgtctttgaaatagccctatattgttagattgtttcttag

SEQ ID NO: 15835 - DNA, 40 bp, Homo sapiens
ctaagaaacaatctaacaatatagggctatttcaaagaca

SEQ ID NO: 15836 - DNA, 40 bp, Homo sapiens
gtctttgaaatagccctatattgttagattgtttcttagg

SEQ ID NO: 15837 - DNA, 40 bp, Homo sapiens
cctaagaaacaatctaacaatatagggctatttcaaagac

SEQ ID NO: 15838 - DNA, 40 bp, Homo sapiens
tctttgaaatagccctatattgttagattgtttcttaggc

SEQ ID NO: 15839 - DNA, 40 bp, Homo sapiens
gcctaagaaacaatctaacaatatagggctatttcaaaga

SEQ ID NO: 15840 - DNA, 40 bp, Homo sapiens
ctttgaaatagccctatattgttagattgtttcttaggct

SEQ ID NO: 15841 - DNA, 40 bp, Homo sapiens
agcctaagaaacaatctaacaatatagggctatttcaaag

SEQ ID NO: 15842 - DNA, 40 bp, Homo sapiens
tttgaaatagccctatattgttagattgtttcttaggctt

SEQ ID NO: 15843 - DNA, 40 bp, Homo sapiens
aagcctaagaaacaatctaacaatatagggctatttcaaa

SEQ ID NO: 15844 - DNA, 40 bp, Homo sapiens
ttgaaatagccctatattgttagattgtttcttaggcttc

SEQ ID NO: 15845 - DNA, 40 bp, Homo sapiens
gaagcctaagaaacaatctaacaatatagggctatttcaa

SEQ ID NO: 15846 - DNA, 40 bp, Homo sapiens
tgaaatagccctatattgttagattgtttcttaggcttct

SEQ ID NO: 15847 - DNA, 40 bp, Homo sapiens
agaagcctaagaaacaatctaacaatatagggctatttca

SEQ ID NO: 15848 - DNA, 40 bp, Homo sapiens
gaaatagccctatattgttagattgtttcttaggcttctt

SEQ ID NO: 15849 - DNA, 40 bp, Homo sapiens
aagaagcctaagaaacaatctaacaatatagggctatttc

SEQ ID NO: 15850 - DNA, 40 bp, Homo sapiens
aaatagccctatattgttagattgtttcttaggcttcttt

SEQ ID NO: 15851 - DNA, 40 bp, Homo sapiens
aaagaagcctaagaaacaatctaacaatatagggctattt

SEQ ID NO: 15852 - DNA, 40 bp, Homo sapiens
aatagccctatattgttagattgtttcttaggcttcttta

SEQ ID NO: 15853 - DNA, 40 bp, Homo sapiens
taaagaagcctaagaaacaatctaacaatatagggctatt

SEQ ID NO: 15854 - DNA, 40 bp, Homo sapiens
atagccctatattgttagattgtttcttaggcttctttac

SEQ ID NO: 15855 - DNA, 40 bp, Homo sapiens
gtaaagaagcctaagaaacaatctaacaatatagggctat

SEQ ID NO: 15856 - DNA, 40 bp, Homo sapiens
tagccctatattgttagattgtttcttaggcttctttacc

SEQ ID NO: 15857 - DNA, 40 bp, Homo sapiens
ggtaaagaagcctaagaaacaatctaacaatatagggcta

SEQ ID NO: 15858 - DNA, 40 bp, Homo sapiens
agccctatattgttagattgtttcttaggcttctttaccc

SEQ ID NO: 15859 - DNA, 40 bp, Homo sapiens
gggtaaagaagcctaagaaacaatctaacaatatagggct

SEQ ID NO: 15860 - DNA, 40 bp, Homo sapiens
gccctatattgttagattgtttcttaggcttctttaccct

SEQ ID NO: 15861 - DNA, 40 bp, Homo sapiens
agggtaaagaagcctaagaaacaatctaacaatatagggc

SEQ ID NO: 15862 - DNA, 40 bp, Homo sapiens
ccctatattgttagattgtttcttaggcttctttaccctg

SEQ ID NO: 15863 - DNA, 40 bp, Homo sapiens
cagggtaaagaagcctaagaaacaatctaacaatataggg

SEQ ID NO: 15864 - DNA, 40 bp, Homo sapiens
cctatattgttagattgtttcttaggcttctttaccctgg

SEQ ID NO: 15865 - DNA, 40 bp, Homo sapiens
ccagggtaaagaagcctaagaaacaatctaacaatatagg

SEQ ID NO: 15866 - DNA, 40 bp, Homo sapiens
ctatattgttagattgtttcttaggcttctttaccctggg

SEQ ID NO: 15867 - DNA, 40 bp, Homo sapiens
cccagggtaaagaagcctaagaaacaatctaacaatatag

SEQ ID NO: 15868 - DNA, 40 bp, Homo sapiens
tatattgttagattgtttcttaggcttctttaccctgggt

SEQ ID NO: 15869 - DNA, 40 bp, Homo sapiens
acccagggtaaagaagcctaagaaacaatctaacaatata

SEQ ID NO: 15870 - DNA, 40 bp, Homo sapiens
atattgttagattgtttcttaggcttctttaccctgggtt

SEQ ID NO: 15871 - DNA, 40 bp, Homo sapiens
aacccagggtaaagaagcctaagaaacaatctaacaatat

SEQ ID NO: 15872 - DNA, 40 bp, Homo sapiens
tattgttagattgtttcttaggcttctttaccctgggtta

SEQ ID NO: 15873 - DNA, 40 bp, Homo sapiens
taacccagggtaaagaagcctaagaaacaatctaacaata

SEQ ID NO: 15874 - DNA, 40 bp, Homo sapiens
attgttagattgtttcttaggcttctttaccctgggttaa

SEQ ID NO: 15875 - DNA, 40 bp, Homo sapiens
ttaacccagggtaaagaagcctaagaaacaatctaacaat

SEQ ID NO: 15876 - DNA, 40 bp, Homo sapiens
ttgttagattgtttcttaggcttctttaccctgggttaag

SEQ ID NO: 15877 - DNA, 40 bp, Homo sapiens
cttaacccagggtaaagaagcctaagaaacaatctaacaa

SEQ ID NO: 15878 - DNA, 40 bp, Homo sapiens
tgttagattgtttcttaggcttctttaccctgggttaagc

SEQ ID NO: 15879 - DNA, 40 bp, Homo sapiens
gcttaacccagggtaaagaagcctaagaaacaatctaaca

SEQ ID NO: 15880 - DNA, 40 bp, Homo sapiens
gttagattgtttcttaggcttctttaccctgggttaagca

SEQ ID NO: 15881 - DNA, 40 bp, Homo sapiens
tgcttaacccagggtaaagaagcctaagaaacaatctaac

SEQ ID NO: 15882 - DNA, 40 bp, Homo sapiens
ttagattgtttcttaggcttctttaccctgggttaagcag

SEQ ID NO: 15883 - DNA, 40 bp, Homo sapiens
ctgcttaacccagggtaaagaagcctaagaaacaatctaa

SEQ ID NO: 15884 - DNA, 40 bp, Homo sapiens
tagattgtttcttaggcttctttaccctgggttaagcagt

SEQ ID NO: 15885 - DNA, 40 bp, Homo sapiens
actgcttaacccagggtaaagaagcctaagaaacaatcta

SEQ ID NO: 15886 - DNA, 40 bp, Homo sapiens
agattgtttcttaggcttctttaccctgggttaagcagtc

SEQ ID NO: 15887 - DNA, 40 bp, Homo sapiens
gactgcttaacccagggtaaagaagcctaagaaacaatct

SEQ ID NO: 15888 - DNA, 40 bp, Homo sapiens
gattgtttcttaggcttctttaccctgggttaagcagtcc

SEQ ID NO: 15889 - DNA, 40 bp, Homo sapiens
ggactgcttaacccagggtaaagaagcctaagaaacaatc

SEQ ID NO: 15890 - DNA, 40 bp, Homo sapiens
attgtttcttaggcttctttaccctgggttaagcagtcct

SEQ ID NO: 15891 - DNA, 40 bp, Homo sapiens
aggactgcttaacccagggtaaagaagcctaagaaacaat

SEQ ID NO: 15892 - DNA, 40 bp, Homo sapiens
ttgtttcttaggcttctttaccctgggttaagcagtccta

SEQ ID NO: 15893 - DNA, 40 bp, Homo sapiens
taggactgcttaacccagggtaaagaagcctaagaaacaa

SEQ ID NO: 15894 - DNA, 40 bp, Homo sapiens
tgtttcttaggcttctttaccctgggttaagcagtcctaa

SEQ ID NO: 15895 - DNA, 40 bp, Homo sapiens
ttaggactgcttaacccagggtaaagaagcctaagaaaca

SEQ ID NO: 15896 - DNA, 40 bp, Homo sapiens
gtttcttaggcttctttaccctgggttaagcagtcctaat

SEQ ID NO: 15897 - DNA, 40 bp, Homo sapiens
attaggactgcttaacccagggtaaagaagcctaagaaac

SEQ ID NO: 15898 - DNA, 40 bp, Homo sapiens
tttcttaggcttctttaccctgggttaagcagtcctaata

SEQ ID NO: 15899 - DNA, 40 bp, Homo sapiens
tattaggactgcttaacccagggtaaagaagcctaagaaa

SEQ ID NO: 15900 - DNA, 40 bp, Homo sapiens
ttcttaggcttctttaccctgggttaagcagtcctaatac

SEQ ID NO: 15901 - DNA, 40 bp, Homo sapiens
gtattaggactgcttaacccagggtaaagaagcctaagaa

SEQ ID NO: 15902 - DNA, 40 bp, Homo sapiens
tcttaggcttctttaccctgggttaagcagtcctaatact

SEQ ID NO: 15903 - DNA, 40 bp, Homo sapiens
agtattaggactgcttaacccagggtaaagaagcctaaga

SEQ ID NO: 15904 - DNA, 40 bp, Homo sapiens
cttaggcttctttaccctgggttaagcagtcctaatactt

SEQ ID NO: 15905 - DNA, 40 bp, Homo sapiens
aagtattaggactgcttaacccagggtaaagaagcctaag

SEQ ID NO: 15906 - DNA, 40 bp, Homo sapiens
ttaggcttctttaccctgggttaagcagtcctaatacttt

SEQ ID NO: 15907 - DNA, 40 bp, Homo sapiens
aaagtattaggactgcttaacccagggtaaagaagcctaa

SEQ ID NO: 15908 - DNA, 40 bp, Homo sapiens
taggcttctttaccctgggttaagcagtcctaatacttta

SEQ ID NO: 15909 - DNA, 40 bp, Homo sapiens
taaagtattaggactgcttaacccagggtaaagaagccta

SEQ ID NO: 15910 - DNA, 40 bp, Homo sapiens
aggcttctttaccctgggttaagcagtcctaatactttag

SEQ ID NO: 15911 - DNA, 40 bp, Homo sapiens
ctaaagtattaggactgcttaacccagggtaaagaagcct

SEQ ID NO: 15912 - DNA, 40 bp, Homo sapiens
ggcttctttaccctgggttaagcagtcctaatactttagc

SEQ ID NO: 15913 - DNA, 40 bp, Homo sapiens
gctaaagtattaggactgcttaacccagggtaaagaagcc

SEQ ID NO: 15914 - DNA, 40 bp, Homo sapiens
gcttctttaccctgggttaagcagtcctaatactttagca

SEQ ID NO: 15915 - DNA, 40 bp, Homo sapiens
tgctaaagtattaggactgcttaacccagggtaaagaagc

SEQ ID NO: 15916 - DNA, 40 bp, Homo sapiens
cttctttaccctgggttaagcagtcctaatactttagcat

SEQ ID NO: 15917 - DNA, 40 bp, Homo sapiens
atgctaaagtattaggactgcttaacccagggtaaagaag

SEQ ID NO: 15918 - DNA, 40 bp, Homo sapiens
ttctttaccctgggttaagcagtcctaatactttagcatt

SEQ ID NO: 15919 - DNA, 40 bp, Homo sapiens
aatgctaaagtattaggactgcttaacccagggtaaagaa

SEQ ID NO: 15920 - DNA, 40 bp, Homo sapiens
tctttaccctgggttaagcagtcctaatactttagcattt

SEQ ID NO: 15921 - DNA, 40 bp, Homo sapiens
aaatgctaaagtattaggactgcttaacccagggtaaaga

SEQ ID NO: 15922 - DNA, 40 bp, Homo sapiens
ctttaccctgggttaagcagtcctaatactttagcattta

SEQ ID NO: 15923 - DNA, 40 bp, Homo sapiens
taaatgctaaagtattaggactgcttaacccagggtaaag

SEQ ID NO: 15924 - DNA, 40 bp, Homo sapiens
tttaccctgggttaagcagtcctaatactttagcatttat

SEQ ID NO: 15925 - DNA, 40 bp, Homo sapiens
ataaatgctaaagtattaggactgcttaacccagggtaaa

SEQ ID NO: 15926 - DNA, 40 bp, Homo sapiens
ttaccctgggttaagcagtcctaatactttagcatttatt

SEQ ID NO: 15927 - DNA, 40 bp, Homo sapiens
aataaatgctaaagtattaggactgcttaacccagggtaa

SEQ ID NO: 15928 - DNA, 40 bp, Homo sapiens
taccctgggttaagcagtcctaatactttagcatttattc

SEQ ID NO: 15929 - DNA, 40 bp, Homo sapiens
gaataaatgctaaagtattaggactgcttaacccagggta

SEQ ID NO: 15930 - DNA, 40 bp, Homo sapiens
accctgggttaagcagtcctaatactttagcatttattct

SEQ ID NO: 15931 - DNA, 40 bp, Homo sapiens
agaataaatgctaaagtattaggactgcttaacccagggt

SEQ ID NO: 15932 - DNA, 40 bp, Homo sapiens
ccctgggttaagcagtcctaatactttagcatttattcta

SEQ ID NO: 15933 - DNA, 40 bp, Homo sapiens
tagaataaatgctaaagtattaggactgcttaacccaggg

SEQ ID NO: 15934 - DNA, 40 bp, Homo sapiens
cctgggttaagcagtcctaatactttagcatttattctac

SEQ ID NO: 15935 - DNA, 40 bp, Homo sapiens
gtagaataaatgctaaagtattaggactgcttaacccagg

SEQ ID NO: 15936 - DNA, 40 bp, Homo sapiens
ctgggttaagcagtcctaatactttagcatttattctaca

SEQ ID NO: 15937 - DNA, 40 bp, Homo sapiens
tgtagaataaatgctaaagtattaggactgcttaacccag

SEQ ID NO: 15938 - DNA, 40 bp, Homo sapiens
tgggttaagcagtcctaatactttagcatttattctacat

SEQ ID NO: 15939 - DNA, 40 bp, Homo sapiens
atgtagaataaatgctaaagtattaggactgcttaaccca

SEQ ID NO: 15940 - DNA, 40 bp, Homo sapiens
gggttaagcagtcctaatactttagcatttattctacatc

SEQ ID NO: 15941 - DNA, 40 bp, Homo sapiens
gatgtagaataaatgctaaagtattaggactgcttaaccc

SEQ ID NO: 15942 - DNA, 40 bp, Homo sapiens
ggttaagcagtcctaatactttagcatttattctacatct

SEQ ID NO: 15943 - DNA, 40 bp, Homo sapiens
agatgtagaataaatgctaaagtattaggactgcttaacc

SEQ ID NO: 15944 - DNA, 40 bp, Homo sapiens
gttaagcagtcctaatactttagcatttattctacatcta

SEQ ID NO: 15945 - DNA, 40 bp, Homo sapiens
tagatgtagaataaatgctaaagtattaggactgcttaac

SEQ ID NO: 15946 - DNA, 40 bp, Homo sapiens
ttaagcagtcctaatactttagcatttattctacatctag

SEQ ID NO: 15947 - DNA, 40 bp, Homo sapiens
ctagatgtagaataaatgctaaagtattaggactgcttaa

SEQ ID NO: 15948 - DNA, 40 bp, Homo sapiens
taagcagtcctaatactttagcatttattctacatctagt

SEQ ID NO: 15949 - DNA, 40 bp, Homo sapiens
actagatgtagaataaatgctaaagtattaggactgctta

SEQ ID NO: 15950 - DNA, 40 bp, Homo sapiens
aagcagtcctaatactttagcatttattctacatctagtg

SEQ ID NO: 15951 - DNA, 40 bp, Homo sapiens
cactagatgtagaataaatgctaaagtattaggactgctt

SEQ ID NO: 15952 - DNA, 40 bp, Homo sapiens
agcagtcctaatactttagcatttattctacatctagtgt

SEQ ID NO: 15953 - DNA, 40 bp, Homo sapiens
acactagatgtagaataaatgctaaagtattaggactgct

SEQ ID NO: 15954 - DNA, 40 bp, Homo sapiens
gcagtcctaatactttagcatttattctacatctagtgta

SEQ ID NO: 15955 - DNA, 40 bp, Homo sapiens
tacactagatgtagaataaatgctaaagtattaggactgc

SEQ ID NO: 15956 - DNA, 40 bp, Homo sapiens
cagtcctaatactttagcatttattctacatctagtgtac

SEQ ID NO: 15957 - DNA, 40 bp, Homo sapiens
gtacactagatgtagaataaatgctaaagtattaggactg

SEQ ID NO: 15958 - DNA, 40 bp, Homo sapiens
agtcctaatactttagcatttattctacatctagtgtact

SEQ ID NO: 15959 - DNA, 40 bp, Homo sapiens
agtacactagatgtagaataaatgctaaagtattaggact

SEQ ID NO: 15960 - DNA, 40 bp, Homo sapiens
gtcctaatactttagcatttattctacatctagtgtacta

SEQ ID NO: 15961 - DNA, 40 bp, Homo sapiens
tagtacactagatgtagaataaatgctaaagtattaggac

SEQ ID NO: 15962 - DNA, 40 bp, Homo sapiens
tcctaatactttagcatttattctacatctagtgtactaa

SEQ ID NO: 15963 - DNA, 40 bp, Homo sapiens
ttagtacactagatgtagaataaatgctaaagtattagga

SEQ ID NO: 15964 - DNA, 40 bp, Homo sapiens
cctaatactttagcatttattctacatctagtgtactaat

SEQ ID NO: 15965 - DNA, 40 bp, Homo sapiens
attagtacactagatgtagaataaatgctaaagtattagg

SEQ ID NO: 15966 - DNA, 40 bp, Homo sapiens
ctaatactttagcatttattctacatctagtgtactaatt

SEQ ID NO: 15967 - DNA, 40 bp, Homo sapiens
aattagtacactagatgtagaataaatgctaaagtattag

SEQ ID NO: 15968 - DNA, 40 bp, Homo sapiens
taatactttagcatttattctacatctagtgtactaattt

SEQ ID NO: 15969 - DNA, 40 bp, Homo sapiens
aaattagtacactagatgtagaataaatgctaaagtatta

SEQ ID NO: 15970 - DNA, 40 bp, Homo sapiens
aatactttagcatttattctacatctagtgtactaattta

SEQ ID NO: 15971 - DNA, 40 bp, Homo sapiens
taaattagtacactagatgtagaataaatgctaaagtatt

SEQ ID NO: 15972 - DNA, 40 bp, Homo sapiens
atactttagcatttattctacatctagtgtactaatttaa

SEQ ID NO: 15973 - DNA, 40 bp, Homo sapiens
ttaaattagtacactagatgtagaataaatgctaaagtat

SEQ ID NO: 15974 - DNA, 40 bp, Homo sapiens
tactttagcatttattctacatctagtgtactaatttaaa

SEQ ID NO: 15975 - DNA, 40 bp, Homo sapiens
tttaaattagtacactagatgtagaataaatgctaaagta

SEQ ID NO: 15976 - DNA, 40 bp, Homo sapiens
actttagcatttattctacatctagtgtactaatttaaaa

SEQ ID NO: 15977 - DNA, 40 bp, Homo sapiens
ttttaaattagtacactagatgtagaataaatgctaaagt

SEQ ID NO: 15978 - DNA, 40 bp, Homo sapiens
ctttagcatttattctacatctagtgtactaatttaaaaa

SEQ ID NO: 15979 - DNA, 40 bp, Homo sapiens
tttttaaattagtacactagatgtagaataaatgctaaag

SEQ ID NO: 15980 - DNA, 40 bp, Homo sapiens
tttagcatttattctacatctagtgtactaatttaaaaaa

SEQ ID NO: 15981 - DNA, 40 bp, Homo sapiens
ttttttaaattagtacactagatgtagaataaatgctaaa

SEQ ID NO: 15982 - DNA, 40 bp, Homo sapiens
ttagcatttattctacatctagtgtactaatttaaaaaaa

SEQ ID NO: 15983 - DNA, 40 bp, Homo sapiens
tttttttaaattagtacactagatgtagaataaatgctaa

SEQ ID NO: 15984 - DNA, 40 bp, Homo sapiens
tagcatttattctacatctagtgtactaatttaaaaaaat

SEQ ID NO: 15985 - DNA, 40 bp, Homo sapiens
atttttttaaattagtacactagatgtagaataaatgcta

SEQ ID NO: 15986 - DNA, 40 bp, Homo sapiens
agcatttattctacatctagtgtactaatttaaaaaaatc

SEQ ID NO: 15987 - DNA, 40 bp, Homo sapiens
gatttttttaaattagtacactagatgtagaataaatgct

SEQ ID NO: 15988 - DNA, 40 bp, Homo sapiens
gcatttattctacatctagtgtactaatttaaaaaaatca

SEQ ID NO: 15989 - DNA, 40 bp, Homo sapiens
tgatttttttaaattagtacactagatgtagaataaatgc

SEQ ID NO: 15990 - DNA, 40 bp, Homo sapiens
catttattctacatctagtgtactaatttaaaaaaatcag

SEQ ID NO: 15991 - DNA, 40 bp, Homo sapiens
ctgatttttttaaattagtacactagatgtagaataaatg

SEQ ID NO: 15992 - DNA, 40 bp, Homo sapiens
atttattctacatctagtgtactaatttaaaaaaatcagt

SEQ ID NO: 15993 - DNA, 40 bp, Homo sapiens
actgatttttttaaattagtacactagatgtagaataaat

SEQ ID NO: 15994 - DNA, 40 bp, Homo sapiens
tttattctacatctagtgtactaatttaaaaaaatcagtt

SEQ ID NO: 15995 - DNA, 40 bp, Homo sapiens
aactgatttttttaaattagtacactagatgtagaataaa

SEQ ID NO: 15996 - DNA, 40 bp, Homo sapiens
ttattctacatctagtgtactaatttaaaaaaatcagttc

SEQ ID NO: 15997 - DNA, 40 bp, Homo sapiens
gaactgatttttttaaattagtacactagatgtagaataa

SEQ ID NO: 15998 - DNA, 40 bp, Homo sapiens
tattctacatctagtgtactaatttaaaaaaatcagttct

SEQ ID NO: 15999 - DNA, 40 bp, Homo sapiens
agaactgatttttttaaattagtacactagatgtagaata

SEQ ID NO: 16000 - DNA, 40 bp, Homo sapiens
attctacatctagtgtactaatttaaaaaaatcagttctg

SEQ ID NO: 16001 - DNA, 40 bp, Homo sapiens
cagaactgatttttttaaattagtacactagatgtagaat

SEQ ID NO: 16002 - DNA, 40 bp, Homo sapiens
ttctacatctagtgtactaatttaaaaaaatcagttctga

SEQ ID NO: 16003 - DNA, 40 bp, Homo sapiens
tcagaactgatttttttaaattagtacactagatgtagaa

SEQ ID NO: 16004 - DNA, 40 bp, Homo sapiens
tctacatctagtgtactaatttaaaaaaatcagttctgaa

SEQ ID NO: 16005 - DNA, 40 bp, Homo sapiens
ttcagaactgatttttttaaattagtacactagatgtaga

SEQ ID NO: 16006 - DNA, 40 bp, Homo sapiens
ctacatctagtgtactaatttaaaaaaatcagttctgaaa

SEQ ID NO: 16007 - DNA, 40 bp, Homo sapiens
tttcagaactgatttttttaaattagtacactagatgtag

SEQ ID NO: 16008 - DNA, 40 bp, Homo sapiens
tacatctagtgtactaatttaaaaaaatcagttctgaaaa

SEQ ID NO: 16009 - DNA, 40 bp, Homo sapiens
ttttcagaactgatttttttaaattagtacactagatgta

SEQ ID NO: 16010 - DNA, 40 bp, Homo sapiens
acatctagtgtactaatttaaaaaaatcagttctgaaaaa

SEQ ID NO: 16011 - DNA, 40 bp, Homo sapiens
tttttcagaactgatttttttaaattagtacactagatgt

SEQ ID NO: 16012 - DNA, 40 bp, Homo sapiens
catctagtgtactaatttaaaaaaatcagttctgaaaaat

SEQ ID NO: 16013 - DNA, 40 bp, Homo sapiens
atttttcagaactgatttttttaaattagtacactagatg

SEQ ID NO: 16014 - DNA, 40 bp, Homo sapiens
atctagtgtactaatttaaaaaaatcagttctgaaaaatt

SEQ ID NO: 16015 - DNA, 40 bp, Homo sapiens
aatttttcagaactgatttttttaaattagtacactagat

SEQ ID NO: 16016 - DNA, 40 bp, Homo sapiens
tctagtgtactaatttaaaaaaatcagttctgaaaaattt

SEQ ID NO: 16017 - DNA, 40 bp, Homo sapiens
aaatttttcagaactgatttttttaaattagtacactaga

SEQ ID NO: 16018 - DNA, 40 bp, Homo sapiens
ctagtgtactaatttaaaaaaatcagttctgaaaaatttc

SEQ ID NO: 16019 - DNA, 40 bp, Homo sapiens
gaaatttttcagaactgatttttttaaattagtacactag

SEQ ID NO: 16020 - DNA, 40 bp, Homo sapiens
tagtgtactaatttaaaaaaatcagttctgaaaaatttct

SEQ ID NO: 16021 - DNA, 40 bp, Homo sapiens
agaaatttttcagaactgatttttttaaattagtacacta

SEQ ID NO: 16022 - DNA, 40 bp, Homo sapiens
agtgtactaatttaaaaaaatcagttctgaaaaatttcta

SEQ ID NO: 16023 - DNA, 40 bp, Homo sapiens
tagaaatttttcagaactgatttttttaaattagtacact

SEQ ID NO: 16024 - DNA, 40 bp, Homo sapiens
gtgtactaatttaaaaaaatcagttctgaaaaatttctaa

SEQ ID NO: 16025 - DNA, 40 bp, Homo sapiens
ttagaaatttttcagaactgatttttttaaattagtacac

SEQ ID NO: 16026 - DNA, 40 bp, Homo sapiens
tgtactaatttaaaaaaatcagttctgaaaaatttctaag

SEQ ID NO: 16027 - DNA, 40 bp, Homo sapiens
cttagaaatttttcagaactgatttttttaaattagtaca

SEQ ID NO: 16028 - DNA, 40 bp, Homo sapiens
gtactaatttaaaaaaatcagttctgaaaaatttctaaga

SEQ ID NO: 16029 - DNA, 40 bp, Homo sapiens
tcttagaaatttttcagaactgatttttttaaattagtac

SEQ ID NO: 16030 - DNA, 40 bp, Homo sapiens
tactaatttaaaaaaatcagttctgaaaaatttctaagaa

SEQ ID NO: 16031 - DNA, 40 bp, Homo sapiens
ttcttagaaatttttcagaactgatttttttaaattagta

SEQ ID NO: 16032 - DNA, 40 bp, Homo sapiens
actaatttaaaaaaatcagttctgaaaaatttctaagaac

SEQ ID NO: 16033 - DNA, 40 bp, Homo sapiens
gttcttagaaatttttcagaactgatttttttaaattagt

SEQ ID NO: 16034 - DNA, 40 bp, Homo sapiens
ctaatttaaaaaaatcagttctgaaaaatttctaagaact

SEQ ID NO: 16035 - DNA, 40 bp, Homo sapiens
agttcttagaaatttttcagaactgatttttttaaattag

SEQ ID NO: 16036 - DNA, 40 bp, Homo sapiens
taatttaaaaaaatcagttctgaaaaatttctaagaactt

SEQ ID NO: 16037 - DNA, 40 bp, Homo sapiens
aagttcttagaaatttttcagaactgatttttttaaatta

SEQ ID NO: 16038 - DNA, 40 bp, Homo sapiens
aatttaaaaaaatcagttctgaaaaatttctaagaacttt

SEQ ID NO: 16039 - DNA, 40 bp, Homo sapiens
aaagttcttagaaatttttcagaactgatttttttaaatt

SEQ ID NO: 16040 - DNA, 40 bp, Homo sapiens
atttaaaaaaatcagttctgaaaaatttctaagaactttc

SEQ ID NO: 16041 - DNA, 40 bp, Homo sapiens
gaaagttcttagaaatttttcagaactgatttttttaaat

SEQ ID NO: 16042 - DNA, 40 bp, Homo sapiens
tttaaaaaaatcagttctgaaaaatttctaagaactttct

SEQ ID NO: 16043 - DNA, 40 bp, Homo sapiens
agaaagttcttagaaatttttcagaactgatttttttaaa

SEQ ID NO: 16044 - DNA, 40 bp, Homo sapiens
ttaaaaaaatcagttctgaaaaatttctaagaactttctt

SEQ ID NO: 16045 - DNA, 40 bp, Homo sapiens
aagaaagttcttagaaatttttcagaactgatttttttaa

SEQ ID NO: 16046 - DNA, 40 bp, Homo sapiens
taaaaaaatcagttctgaaaaatttctaagaactttcttc

SEQ ID NO: 16047 - DNA, 40 bp, Homo sapiens
gaagaaagttcttagaaatttttcagaactgattttttta

SEQ ID NO: 16048 - DNA, 40 bp, Homo sapiens
aaaaaaatcagttctgaaaaatttctaagaactttcttca

SEQ ID NO: 16049 - DNA, 40 bp, Homo sapiens
tgaagaaagttcttagaaatttttcagaactgattttttt

SEQ ID NO: 16050 - DNA, 40 bp, Homo sapiens
aaaaaatcagttctgaaaaatttctaagaactttcttcaa

SEQ ID NO: 16051 - DNA, 40 bp, Homo sapiens
ttgaagaaagttcttagaaatttttcagaactgatttttt

SEQ ID NO: 16052 - DNA, 40 bp, Homo sapiens
aaaaatcagttctgaaaaatttctaagaactttcttcaag

SEQ ID NO: 16053 - DNA, 40 bp, Homo sapiens
cttgaagaaagttcttagaaatttttcagaactgattttt

SEQ ID NO: 16054 - DNA, 40 bp, Homo sapiens
aaaatcagttctgaaaaatttctaagaactttcttcaagt

SEQ ID NO: 16055 - DNA, 40 bp, Homo sapiens
acttgaagaaagttcttagaaatttttcagaactgatttt

SEQ ID NO: 16056 - DNA, 40 bp, Homo sapiens
aaatcagttctgaaaaatttctaagaactttcttcaagtt

SEQ ID NO: 16057 - DNA, 40 bp, Homo sapiens
aacttgaagaaagttcttagaaatttttcagaactgattt

SEQ ID NO: 16058 - DNA, 40 bp, Homo sapiens
aatcagttctgaaaaatttctaagaactttcttcaagttc

SEQ ID NO: 16059 - DNA, 40 bp, Homo sapiens
gaacttgaagaaagttcttagaaatttttcagaactgatt

SEQ ID NO: 16060 - DNA, 40 bp, Homo sapiens
atcagttctgaaaaatttctaagaactttcttcaagttcc

SEQ ID NO: 16061 - DNA, 40 bp, Homo sapiens
ggaacttgaagaaagttcttagaaatttttcagaactgat

SEQ ID NO: 16062 - DNA, 40 bp, Homo sapiens
tcagttctgaaaaatttctaagaactttcttcaagttcca

SEQ ID NO: 16063 - DNA, 40 bp, Homo sapiens
tggaacttgaagaaagttcttagaaatttttcagaactga

SEQ ID NO: 16064 - DNA, 40 bp, Homo sapiens
cagttctgaaaaatttctaagaactttcttcaagttccaa

SEQ ID NO: 16065 - DNA, 40 bp, Homo sapiens
ttggaacttgaagaaagttcttagaaatttttcagaactg

SEQ ID NO: 16066 - DNA, 40 bp, Homo sapiens
agttctgaaaaatttctaagaactttcttcaagttccaag

SEQ ID NO: 16067 - DNA, 40 bp, Homo sapiens
cttggaacttgaagaaagttcttagaaatttttcagaact

SEQ ID NO: 16068 - DNA, 40 bp, Homo sapiens
gttctgaaaaatttctaagaactttcttcaagttccaagc

SEQ ID NO: 16069 - DNA, 40 bp, Homo sapiens
gcttggaacttgaagaaagttcttagaaatttttcagaac

SEQ ID NO: 16070 - DNA, 40 bp, Homo sapiens
ttctgaaaaatttctaagaactttcttcaagttccaagct

SEQ ID NO: 16071 - DNA, 40 bp, Homo sapiens
agcttggaacttgaagaaagttcttagaaatttttcagaa

SEQ ID NO: 16072 - DNA, 40 bp, Homo sapiens
tctgaaaaatttctaagaactttcttcaagttccaagctg

SEQ ID NO: 16073 - DNA, 40 bp, Homo sapiens
cagcttggaacttgaagaaagttcttagaaatttttcaga

SEQ ID NO: 16074 - DNA, 40 bp, Homo sapiens
ctgaaaaatttctaagaactttcttcaagttccaagctgt

SEQ ID NO: 16075 - DNA, 40 bp, Homo sapiens
acagcttggaacttgaagaaagttcttagaaatttttcag

SEQ ID NO: 16076 - DNA, 40 bp, Homo sapiens
tgaaaaatttctaagaactttcttcaagttccaagctgtg

SEQ ID NO: 16077 - DNA, 40 bp, Homo sapiens
cacagcttggaacttgaagaaagttcttagaaatttttca

SEQ ID NO: 16078 - DNA, 40 bp, Homo sapiens
gaaaaatttctaagaactttcttcaagttccaagctgtga

SEQ ID NO: 16079 - DNA, 40 bp, Homo sapiens
tcacagcttggaacttgaagaaagttcttagaaatttttc

SEQ ID NO: 16080 - DNA, 40 bp, Homo sapiens
aaaaatttctaagaactttcttcaagttccaagctgtgaa

SEQ ID NO: 16081 - DNA, 40 bp, Homo sapiens
ttcacagcttggaacttgaagaaagttcttagaaattttt

SEQ ID NO: 16082 - DNA, 40 bp, Homo sapiens
aaaatttctaagaactttcttcaagttccaagctgtgaaa

SEQ ID NO: 16083 - DNA, 40 bp, Homo sapiens
tttcacagcttggaacttgaagaaagttcttagaaatttt

SEQ ID NO: 16084 - DNA, 40 bp, Homo sapiens
aaatttctaagaactttcttcaagttccaagctgtgaaat

SEQ ID NO: 16085 - DNA, 40 bp, Homo sapiens
atttcacagcttggaacttgaagaaagttcttagaaattt

SEQ ID NO: 16086 - DNA, 40 bp, Homo sapiens
aatttctaagaactttcttcaagttccaagctgtgaaatc

SEQ ID NO: 16087 - DNA, 40 bp, Homo sapiens
gatttcacagcttggaacttgaagaaagttcttagaaatt

SEQ ID NO: 16088 - DNA, 40 bp, Homo sapiens
atttctaagaactttcttcaagttccaagctgtgaaatct

SEQ ID NO: 16089 - DNA, 40 bp, Homo sapiens
agatttcacagcttggaacttgaagaaagttcttagaaat

SEQ ID NO: 16090 - DNA, 40 bp, Homo sapiens
tttctaagaactttcttcaagttccaagctgtgaaatcta

SEQ ID NO: 16091 - DNA, 40 bp, Homo sapiens
tagatttcacagcttggaacttgaagaaagttcttagaaa

SEQ ID NO: 16092 - DNA, 40 bp, Homo sapiens
ttctaagaactttcttcaagttccaagctgtgaaatctag

SEQ ID NO: 16093 - DNA, 40 bp, Homo sapiens
ctagatttcacagcttggaacttgaagaaagttcttagaa

SEQ ID NO: 16094 - DNA, 40 bp, Homo sapiens
tctaagaactttcttcaagttccaagctgtgaaatctaga

SEQ ID NO: 16095 - DNA, 40 bp, Homo sapiens
tctagatttcacagcttggaacttgaagaaagttcttaga

SEQ ID NO: 16096 - DNA, 40 bp, Homo sapiens
ctaagaactttcttcaagttccaagctgtgaaatctagaa

SEQ ID NO: 16097 - DNA, 40 bp, Homo sapiens
ttctagatttcacagcttggaacttgaagaaagttcttag

SEQ ID NO: 16098 - DNA, 40 bp, Homo sapiens
taagaactttcttcaagttccaagctgtgaaatctagaac

SEQ ID NO: 16099 - DNA, 40 bp, Homo sapiens
gttctagatttcacagcttggaacttgaagaaagttctta

SEQ ID NO: 16100 - DNA, 40 bp, Homo sapiens
aagaactttcttcaagttccaagctgtgaaatctagaaca

SEQ ID NO: 16101 - DNA, 40 bp, Homo sapiens
tgttctagatttcacagcttggaacttgaagaaagttctt

SEQ ID NO: 16102 - DNA, 40 bp, Homo sapiens
agaactttcttcaagttccaagctgtgaaatctagaacag

SEQ ID NO: 16103 - DNA, 40 bp, Homo sapiens
ctgttctagatttcacagcttggaacttgaagaaagttct

SEQ ID NO: 16104 - DNA, 40 bp, Homo sapiens
gaactttcttcaagttccaagctgtgaaatctagaacagg

SEQ ID NO: 16105 - DNA, 40 bp, Homo sapiens
cctgttctagatttcacagcttggaacttgaagaaagttc

SEQ ID NO: 16106 - DNA, 40 bp, Homo sapiens
aactttcttcaagttccaagctgtgaaatctagaacaggt

SEQ ID NO: 16107 - DNA, 40 bp, Homo sapiens
acctgttctagatttcacagcttggaacttgaagaaagtt

SEQ ID NO: 16108 - DNA, 40 bp, Homo sapiens
actttcttcaagttccaagctgtgaaatctagaacaggtc

SEQ ID NO: 16109 - DNA, 40 bp, Homo sapiens
gacctgttctagatttcacagcttggaacttgaagaaagt

SEQ ID NO: 16110 - DNA, 40 bp, Homo sapiens
ctttcttcaagttccaagctgtgaaatctagaacaggtca

SEQ ID NO: 16111 - DNA, 40 bp, Homo sapiens
tgacctgttctagatttcacagcttggaacttgaagaaag

SEQ ID NO: 16112 - DNA, 40 bp, Homo sapiens
tttcttcaagttccaagctgtgaaatctagaacaggtcaa

SEQ ID NO: 16113 - DNA, 40 bp, Homo sapiens
ttgacctgttctagatttcacagcttggaacttgaagaaa

SEQ ID NO: 16114 - DNA, 40 bp, Homo sapiens
ttcttcaagttccaagctgtgaaatctagaacaggtcaaa

SEQ ID NO: 16115 - DNA, 40 bp, Homo sapiens
tttgacctgttctagatttcacagcttggaacttgaagaa

SEQ ID NO: 16116 - DNA, 40 bp, Homo sapiens
tcttcaagttccaagctgtgaaatctagaacaggtcaaag

SEQ ID NO: 16117 - DNA, 40 bp, Homo sapiens
ctttgacctgttctagatttcacagcttggaacttgaaga

SEQ ID NO: 16118 - DNA, 40 bp, Homo sapiens
cttcaagttccaagctgtgaaatctagaacaggtcaaagt

SEQ ID NO: 16119 - DNA, 40 bp, Homo sapiens
actttgacctgttctagatttcacagcttggaacttgaag

SEQ ID NO: 16120 - DNA, 40 bp, Homo sapiens
ttcaagttccaagctgtgaaatctagaacaggtcaaagtg

SEQ ID NO: 16121 - DNA, 40 bp, Homo sapiens
cactttgacctgttctagatttcacagcttggaacttgaa

SEQ ID NO: 16122 - DNA, 40 bp, Homo sapiens
tcaagttccaagctgtgaaatctagaacaggtcaaagtgc

SEQ ID NO: 16123 - DNA, 40 bp, Homo sapiens
gcactttgacctgttctagatttcacagcttggaacttga

SEQ ID NO: 16124 - DNA, 40 bp, Homo sapiens
caagttccaagctgtgaaatctagaacaggtcaaagtgcc

SEQ ID NO: 16125 - DNA, 40 bp, Homo sapiens
ggcactttgacctgttctagatttcacagcttggaacttg

SEQ ID NO: 16126 - DNA, 40 bp, Homo sapiens
aagttccaagctgtgaaatctagaacaggtcaaagtgcct

SEQ ID NO: 16127 - DNA, 40 bp, Homo sapiens
aggcactttgacctgttctagatttcacagcttggaactt

SEQ ID NO: 16128 - DNA, 40 bp, Homo sapiens
agttccaagctgtgaaatctagaacaggtcaaagtgcctt

SEQ ID NO: 16129 - DNA, 40 bp, Homo sapiens
aaggcactttgacctgttctagatttcacagcttggaact

SEQ ID NO: 16130 - DNA, 40 bp, Homo sapiens
gttccaagctgtgaaatctagaacaggtcaaagtgcctta

SEQ ID NO: 16131 - DNA, 40 bp, Homo sapiens
taaggcactttgacctgttctagatttcacagcttggaac

SEQ ID NO: 16132 - DNA, 40 bp, Homo sapiens
ttccaagctgtgaaatctagaacaggtcaaagtgccttat

SEQ ID NO: 16133 - DNA, 40 bp, Homo sapiens
ataaggcactttgacctgttctagatttcacagcttggaa

SEQ ID NO: 16134 - DNA, 40 bp, Homo sapiens
tccaagctgtgaaatctagaacaggtcaaagtgccttatt

SEQ ID NO: 16135 - DNA, 40 bp, Homo sapiens
aataaggcactttgacctgttctagatttcacagcttgga

SEQ ID NO: 16136 - DNA, 40 bp, Homo sapiens
ccaagctgtgaaatctagaacaggtcaaagtgccttatta

SEQ ID NO: 16137 - DNA, 40 bp, Homo sapiens
taataaggcactttgacctgttctagatttcacagcttgg

SEQ ID NO: 16138 - DNA, 40 bp, Homo sapiens
caagctgtgaaatctagaacaggtcaaagtgccttattaa

SEQ ID NO: 16139 - DNA, 40 bp, Homo sapiens
ttaataaggcactttgacctgttctagatttcacagcttg

SEQ ID NO: 16140 - DNA, 40 bp, Homo sapiens
aagctgtgaaatctagaacaggtcaaagtgccttattaac

SEQ ID NO: 16141 - DNA, 40 bp, Homo sapiens
gttaataaggcactttgacctgttctagatttcacagctt

SEQ ID NO: 16142 - DNA, 40 bp, Homo sapiens
agctgtgaaatctagaacaggtcaaagtgccttattaacg

SEQ ID NO: 16143 - DNA, 40 bp, Homo sapiens
cgttaataaggcactttgacctgttctagatttcacagct

SEQ ID NO: 16144 - DNA, 40 bp, Homo sapiens
gctgtgaaatctagaacaggtcaaagtgccttattaacgt

SEQ ID NO: 16145 - DNA, 40 bp, Homo sapiens
acgttaataaggcactttgacctgttctagatttcacagc

SEQ ID NO: 16146 - DNA, 40 bp, Homo sapiens
ctgtgaaatctagaacaggtcaaagtgccttattaacgta

SEQ ID NO: 16147 - DNA, 40 bp, Homo sapiens
tacgttaataaggcactttgacctgttctagatttcacag

SEQ ID NO: 16148 - DNA, 40 bp, Homo sapiens
tgtgaaatctagaacaggtcaaagtgccttattaacgtac

SEQ ID NO: 16149 - DNA, 40 bp, Homo sapiens
gtacgttaataaggcactttgacctgttctagatttcaca

SEQ ID NO: 16150 - DNA, 40 bp, Homo sapiens
gtgaaatctagaacaggtcaaagtgccttattaacgtact

SEQ ID NO: 16151 - DNA, 40 bp, Homo sapiens
agtacgttaataaggcactttgacctgttctagatttcac

SEQ ID NO: 16152 - DNA, 40 bp, Homo sapiens
tgaaatctagaacaggtcaaagtgccttattaacgtactg

SEQ ID NO: 16153 - DNA, 40 bp, Homo sapiens
cagtacgttaataaggcactttgacctgttctagatttca

SEQ ID NO: 16154 - DNA, 40 bp, Homo sapiens
gaaatctagaacaggtcaaagtgccttattaacgtactgt

SEQ ID NO: 16155 - DNA, 40 bp, Homo sapiens
acagtacgttaataaggcactttgacctgttctagatttc

SEQ ID NO: 16156 - DNA, 40 bp, Homo sapiens
aaatctagaacaggtcaaagtgccttattaacgtactgta

SEQ ID NO: 16157 - DNA, 40 bp, Homo sapiens
tacagtacgttaataaggcactttgacctgttctagattt

SEQ ID NO: 16158 - DNA, 40 bp, Homo sapiens
aatctagaacaggtcaaagtgccttattaacgtactgtac

SEQ ID NO: 16159 - DNA, 40 bp, Homo sapiens
gtacagtacgttaataaggcactttgacctgttctagatt

SEQ ID NO: 16160 - DNA, 40 bp, Homo sapiens
atctagaacaggtcaaagtgccttattaacgtactgtact

SEQ ID NO: 16161 - DNA, 40 bp, Homo sapiens
agtacagtacgttaataaggcactttgacctgttctagat

SEQ ID NO: 16162 - DNA, 40 bp, Homo sapiens
tctagaacaggtcaaagtgccttattaacgtactgtactg

SEQ ID NO: 16163 - DNA, 40 bp, Homo sapiens
cagtacagtacgttaataaggcactttgacctgttctaga

SEQ ID NO: 16164 - DNA, 40 bp, Homo sapiens
ctagaacaggtcaaagtgccttattaacgtactgtactgt

SEQ ID NO: 16165 - DNA, 40 bp, Homo sapiens
acagtacagtacgttaataaggcactttgacctgttctag

SEQ ID NO: 16166 - DNA, 40 bp, Homo sapiens
tagaacaggtcaaagtgccttattaacgtactgtactgtg

SEQ ID NO: 16167 - DNA, 40 bp, Homo sapiens
cacagtacagtacgttaataaggcactttgacctgttcta

SEQ ID NO: 16168 - DNA, 40 bp, Homo sapiens
agaacaggtcaaagtgccttattaacgtactgtactgtgt

SEQ ID NO: 16169 - DNA, 40 bp, Homo sapiens
acacagtacagtacgttaataaggcactttgacctgttct

SEQ ID NO: 16170 - DNA, 40 bp, Homo sapiens
gaacaggtcaaagtgccttattaacgtactgtactgtgta

SEQ ID NO: 16171 - DNA, 40 bp, Homo sapiens
tacacagtacagtacgttaataaggcactttgacctgttc

SEQ ID NO: 16172 - DNA, 40 bp, Homo sapiens
aacaggtcaaagtgccttattaacgtactgtactgtgtag

SEQ ID NO: 16173 - DNA, 40 bp, Homo sapiens
ctacacagtacagtacgttaataaggcactttgacctgtt

SEQ ID NO: 16174 - DNA, 40 bp, Homo sapiens
acaggtcaaagtgccttattaacgtactgtactgtgtagt

SEQ ID NO: 16175 - DNA, 40 bp, Homo sapiens
actacacagtacagtacgttaataaggcactttgacctgt

SEQ ID NO: 16176 - DNA, 40 bp, Homo sapiens
caggtcaaagtgccttattaacgtactgtactgtgtagtg

SEQ ID NO: 16177 - DNA, 40 bp, Homo sapiens
cactacacagtacagtacgttaataaggcactttgacctg

SEQ ID NO: 16178 - DNA, 40 bp, Homo sapiens
aggtcaaagtgccttattaacgtactgtactgtgtagtgt

SEQ ID NO: 16179 - DNA, 40 bp, Homo sapiens
acactacacagtacagtacgttaataaggcactttgacct

SEQ ID NO: 16180 - DNA, 40 bp, Homo sapiens
ggtcaaagtgccttattaacgtactgtactgtgtagtgtc

SEQ ID NO: 16181 - DNA, 40 bp, Homo sapiens
gacactacacagtacagtacgttaataaggcactttgacc

SEQ ID NO: 16182 - DNA, 40 bp, Homo sapiens
gtcaaagtgccttattaacgtactgtactgtgtagtgtct

SEQ ID NO: 16183 - DNA, 40 bp, Homo sapiens
agacactacacagtacagtacgttaataaggcactttgac

SEQ ID NO: 16184 - DNA, 40 bp, Homo sapiens
tcaaagtgccttattaacgtactgtactgtgtagtgtctt

SEQ ID NO: 16185 - DNA, 40 bp, Homo sapiens
aagacactacacagtacagtacgttaataaggcactttga

SEQ ID NO: 16186 - DNA, 40 bp, Homo sapiens
caaagtgccttattaacgtactgtactgtgtagtgtcttg

SEQ ID NO: 16187 - DNA, 40 bp, Homo sapiens
caagacactacacagtacagtacgttaataaggcactttg

SEQ ID NO: 16188 - DNA, 40 bp, Homo sapiens
aaagtgccttattaacgtactgtactgtgtagtgtcttga

SEQ ID NO: 16189 - DNA, 40 bp, Homo sapiens
tcaagacactacacagtacagtacgttaataaggcacttt

SEQ ID NO: 16190 - DNA, 40 bp, Homo sapiens
aagtgccttattaacgtactgtactgtgtagtgtcttgaa

SEQ ID NO: 16191 - DNA, 40 bp, Homo sapiens
ttcaagacactacacagtacagtacgttaataaggcactt

SEQ ID NO: 16192 - DNA, 40 bp, Homo sapiens
agtgccttattaacgtactgtactgtgtagtgtcttgaag

SEQ ID NO: 16193 - DNA, 40 bp, Homo sapiens
cttcaagacactacacagtacagtacgttaataaggcact

SEQ ID NO: 16194 - DNA, 40 bp, Homo sapiens
gtgccttattaacgtactgtactgtgtagtgtcttgaaga

SEQ ID NO: 16195 - DNA, 40 bp, Homo sapiens
tcttcaagacactacacagtacagtacgttaataaggcac

SEQ ID NO: 16196 - DNA, 40 bp, Homo sapiens
tgccttattaacgtactgtactgtgtagtgtcttgaagag

SEQ ID NO: 16197 - DNA, 40 bp, Homo sapiens
ctcttcaagacactacacagtacagtacgttaataaggca

SEQ ID NO: 16198 - DNA, 40 bp, Homo sapiens
gccttattaacgtactgtactgtgtagtgtcttgaagaga

SEQ ID NO: 16199 - DNA, 40 bp, Homo sapiens
tctcttcaagacactacacagtacagtacgttaataaggc

SEQ ID NO: 16200 - DNA, 40 bp, Homo sapiens
ccttattaacgtactgtactgtgtagtgtcttgaagagac

SEQ ID NO: 16201 - DNA, 40 bp, Homo sapiens
gtctcttcaagacactacacagtacagtacgttaataagg

SEQ ID NO: 16202 - DNA, 40 bp, Homo sapiens
cttattaacgtactgtactgtgtagtgtcttgaagagaca

SEQ ID NO: 16203 - DNA, 40 bp, Homo sapiens
tgtctcttcaagacactacacagtacagtacgttaataag

SEQ ID NO: 16204 - DNA, 40 bp, Homo sapiens
ttattaacgtactgtactgtgtagtgtcttgaagagacac

SEQ ID NO: 16205 - DNA, 40 bp, Homo sapiens
gtgtctcttcaagacactacacagtacagtacgttaataa

SEQ ID NO: 16206 - DNA, 40 bp, Homo sapiens
tattaacgtactgtactgtgtagtgtcttgaagagacact

SEQ ID NO: 16207 - DNA, 40 bp, Homo sapiens
agtgtctcttcaagacactacacagtacagtacgttaata

SEQ ID NO: 16208 - DNA, 40 bp, Homo sapiens
attaacgtactgtactgtgtagtgtcttgaagagacactt

SEQ ID NO: 16209 - DNA, 40 bp, Homo sapiens
aagtgtctcttcaagacactacacagtacagtacgttaat

SEQ ID NO: 16210 - DNA, 40 bp, Homo sapiens
ttaacgtactgtactgtgtagtgtcttgaagagacacttt

SEQ ID NO: 16211 - DNA, 40 bp, Homo sapiens
aaagtgtctcttcaagacactacacagtacagtacgttaa

SEQ ID NO: 16212 - DNA, 40 bp, Homo sapiens
taacgtactgtactgtgtagtgtcttgaagagacactttg

SEQ ID NO: 16213 - DNA, 40 bp, Homo sapiens
caaagtgtctcttcaagacactacacagtacagtacgtta

SEQ ID NO: 16214 - DNA, 40 bp, Homo sapiens
aacgtactgtactgtgtagtgtcttgaagagacactttgc

SEQ ID NO: 16215 - DNA, 40 bp, Homo sapiens
gcaaagtgtctcttcaagacactacacagtacagtacgtt

SEQ ID NO: 16216 - DNA, 40 bp, Homo sapiens
acgtactgtactgtgtagtgtcttgaagagacactttgcg

SEQ ID NO: 16217 - DNA, 40 bp, Homo sapiens
cgcaaagtgtctcttcaagacactacacagtacagtacgt

SEQ ID NO: 16218 - DNA, 40 bp, Homo sapiens
cgtactgtactgtgtagtgtcttgaagagacactttgcgc

SEQ ID NO: 16219 - DNA, 40 bp, Homo sapiens
gcgcaaagtgtctcttcaagacactacacagtacagtacg

SEQ ID NO: 16220 - DNA, 40 bp, Homo sapiens
gtactgtactgtgtagtgtcttgaagagacactttgcgct

SEQ ID NO: 16221 - DNA, 40 bp, Homo sapiens
agcgcaaagtgtctcttcaagacactacacagtacagtac

SEQ ID NO: 16222 - DNA, 40 bp, Homo sapiens
tactgtactgtgtagtgtcttgaagagacactttgcgctg

SEQ ID NO: 16223 - DNA, 40 bp, Homo sapiens
cagcgcaaagtgtctcttcaagacactacacagtacagta

SEQ ID NO: 16224 - DNA, 40 bp, Homo sapiens
actgtactgtgtagtgtcttgaagagacactttgcgctga

SEQ ID NO: 16225 - DNA, 40 bp, Homo sapiens
tcagcgcaaagtgtctcttcaagacactacacagtacagt

SEQ ID NO: 16226 - DNA, 40 bp, Homo sapiens
ctgtactgtgtagtgtcttgaagagacactttgcgctgag

SEQ ID NO: 16227 - DNA, 40 bp, Homo sapiens
ctcagcgcaaagtgtctcttcaagacactacacagtacag

SEQ ID NO: 16228 - DNA, 40 bp, Homo sapiens
tgtactgtgtagtgtcttgaagagacactttgcgctgagg

SEQ ID NO: 16229 - DNA, 40 bp, Homo sapiens
cctcagcgcaaagtgtctcttcaagacactacacagtaca

SEQ ID NO: 16230 - DNA, 40 bp, Homo sapiens
gtactgtgtagtgtcttgaagagacactttgcgctgaggc

SEQ ID NO: 16231 - DNA, 40 bp, Homo sapiens
gcctcagcgcaaagtgtctcttcaagacactacacagtac

SEQ ID NO: 16232 - DNA, 40 bp, Homo sapiens
tactgtgtagtgtcttgaagagacactttgcgctgaggca

SEQ ID NO: 16233 - DNA, 40 bp, Homo sapiens
tgcctcagcgcaaagtgtctcttcaagacactacacagta

SEQ ID NO: 16234 - DNA, 40 bp, Homo sapiens
actgtgtagtgtcttgaagagacactttgcgctgaggcaa

SEQ ID NO: 16235 - DNA, 40 bp, Homo sapiens
ttgcctcagcgcaaagtgtctcttcaagacactacacagt

SEQ ID NO: 16236 - DNA, 40 bp, Homo sapiens
ctgtgtagtgtcttgaagagacactttgcgctgaggcaag

SEQ ID NO: 16237 - DNA, 40 bp, Homo sapiens
cttgcctcagcgcaaagtgtctcttcaagacactacacag

SEQ ID NO: 16238 - DNA, 40 bp, Homo sapiens
tgtgtagtgtcttgaagagacactttgcgctgaggcaagt

SEQ ID NO: 16239 - DNA, 40 bp, Homo sapiens
acttgcctcagcgcaaagtgtctcttcaagacactacaca

SEQ ID NO: 16240 - DNA, 40 bp, Homo sapiens
gtgtagtgtcttgaagagacactttgcgctgaggcaagtt

SEQ ID NO: 16241 - DNA, 40 bp, Homo sapiens
aacttgcctcagcgcaaagtgtctcttcaagacactacac

SEQ ID NO: 16242 - DNA, 40 bp, Homo sapiens
tgtagtgtcttgaagagacactttgcgctgaggcaagttc

SEQ ID NO: 16243 - DNA, 40 bp, Homo sapiens
gaacttgcctcagcgcaaagtgtctcttcaagacactaca

SEQ ID NO: 16244 - DNA, 40 bp, Homo sapiens
gtagtgtcttgaagagacactttgcgctgaggcaagttct

SEQ ID NO: 16245 - DNA, 40 bp, Homo sapiens
agaacttgcctcagcgcaaagtgtctcttcaagacactac

SEQ ID NO: 16246 - DNA, 40 bp, Homo sapiens
tagtgtcttgaagagacactttgcgctgaggcaagttctg

SEQ ID NO: 16247 - DNA, 40 bp, Homo sapiens
cagaacttgcctcagcgcaaagtgtctcttcaagacacta

SEQ ID NO: 16248 - DNA, 40 bp, Homo sapiens
agtgtcttgaagagacactttgcgctgaggcaagttctga

SEQ ID NO: 16249 - DNA, 40 bp, Homo sapiens
tcagaacttgcctcagcgcaaagtgtctcttcaagacact

SEQ ID NO: 16250 - DNA, 40 bp, Homo sapiens
gtgtcttgaagagacactttgcgctgaggcaagttctgag

SEQ ID NO: 16251 - DNA, 40 bp, Homo sapiens
ctcagaacttgcctcagcgcaaagtgtctcttcaagacac

SEQ ID NO: 16252 - DNA, 40 bp, Homo sapiens
tgtcttgaagagacactttgcgctgaggcaagttctgagg

SEQ ID NO: 16253 - DNA, 40 bp, Homo sapiens
cctcagaacttgcctcagcgcaaagtgtctcttcaagaca

SEQ ID NO: 16254 - DNA, 40 bp, Homo sapiens
gtcttgaagagacactttgcgctgaggcaagttctgaggg

SEQ ID NO: 16255 - DNA, 40 bp, Homo sapiens
ccctcagaacttgcctcagcgcaaagtgtctcttcaagac

SEQ ID NO: 16256 - DNA, 40 bp, Homo sapiens
tcttgaagagacactttgcgctgaggcaagttctgagggc

SEQ ID NO: 16257 - DNA, 40 bp, Homo sapiens
gccctcagaacttgcctcagcgcaaagtgtctcttcaaga

SEQ ID NO: 16258 - DNA, 40 bp, Homo sapiens
cttgaagagacactttgcgctgaggcaagttctgagggca

SEQ ID NO: 16259 - DNA, 40 bp, Homo sapiens
tgccctcagaacttgcctcagcgcaaagtgtctcttcaag

SEQ ID NO: 16260 - DNA, 40 bp, Homo sapiens
ttgaagagacactttgcgctgaggcaagttctgagggcat

SEQ ID NO: 16261 - DNA, 40 bp, Homo sapiens
atgccctcagaacttgcctcagcgcaaagtgtctcttcaa

SEQ ID NO: 16262 - DNA, 40 bp, Homo sapiens
tgaagagacactttgcgctgaggcaagttctgagggcatt

SEQ ID NO: 16263 - DNA, 40 bp, Homo sapiens
aatgccctcagaacttgcctcagcgcaaagtgtctcttca

SEQ ID NO: 16264 - DNA, 40 bp, Homo sapiens
gaagagacactttgcgctgaggcaagttctgagggcattg

SEQ ID NO: 16265 - DNA, 40 bp, Homo sapiens
caatgccctcagaacttgcctcagcgcaaagtgtctcttc

SEQ ID NO: 16266 - DNA, 40 bp, Homo sapiens
aagagacactttgcgctgaggcaagttctgagggcattgg

SEQ ID NO: 16267 - DNA, 40 bp, Homo sapiens
ccaatgccctcagaacttgcctcagcgcaaagtgtctctt

SEQ ID NO: 16268 - DNA, 40 bp, Homo sapiens
agagacactttgcgctgaggcaagttctgagggcattggg

SEQ ID NO: 16269 - DNA, 40 bp, Homo sapiens
cccaatgccctcagaacttgcctcagcgcaaagtgtctct

SEQ ID NO: 16270 - DNA, 40 bp, Homo sapiens
gagacactttgcgctgaggcaagttctgagggcattgggt

SEQ ID NO: 16271 - DNA, 40 bp, Homo sapiens
acccaatgccctcagaacttgcctcagcgcaaagtgtctc

SEQ ID NO: 16272 - DNA, 40 bp, Homo sapiens
agacactttgcgctgaggcaagttctgagggcattgggtg

SEQ ID NO: 16273 - DNA, 40 bp, Homo sapiens
cacccaatgccctcagaacttgcctcagcgcaaagtgtct

SEQ ID NO: 16274 - DNA, 40 bp, Homo sapiens
gacactttgcgctgaggcaagttctgagggcattgggtgg

SEQ ID NO: 16275 - DNA, 40 bp, Homo sapiens
ccacccaatgccctcagaacttgcctcagcgcaaagtgtc

SEQ ID NO: 16276 - DNA, 40 bp, Homo sapiens
acactttgcgctgaggcaagttctgagggcattgggtggc

SEQ ID NO: 16277 - DNA, 40 bp, Homo sapiens
gccacccaatgccctcagaacttgcctcagcgcaaagtgt

SEQ ID NO: 16278 - DNA, 40 bp, Homo sapiens
cactttgcgctgaggcaagttctgagggcattgggtggcc

SEQ ID NO: 16279 - DNA, 40 bp, Homo sapiens
ggccacccaatgccctcagaacttgcctcagcgcaaagtg

SEQ ID NO: 16280 - DNA, 40 bp, Homo sapiens
actttgcgctgaggcaagttctgagggcattgggtggcct

SEQ ID NO: 16281 - DNA, 40 bp, Homo sapiens
aggccacccaatgccctcagaacttgcctcagcgcaaagt

SEQ ID NO: 16282 - DNA, 40 bp, Homo sapiens
ctttgcgctgaggcaagttctgagggcattgggtggcctt

SEQ ID NO: 16283 - DNA, 40 bp, Homo sapiens
aaggccacccaatgccctcagaacttgcctcagcgcaaag

SEQ ID NO: 16284 - DNA, 40 bp, Homo sapiens
tttgcgctgaggcaagttctgagggcattgggtggccttg

SEQ ID NO: 16285 - DNA, 40 bp, Homo sapiens
caaggccacccaatgccctcagaacttgcctcagcgcaaa

SEQ ID NO: 16286 - DNA, 40 bp, Homo sapiens
ttgcgctgaggcaagttctgagggcattgggtggccttgg

SEQ ID NO: 16287 - DNA, 40 bp, Homo sapiens
ccaaggccacccaatgccctcagaacttgcctcagcgcaa

SEQ ID NO: 16288 - DNA, 40 bp, Homo sapiens
tgcgctgaggcaagttctgagggcattgggtggccttggg

SEQ ID NO: 16289 - DNA, 40 bp, Homo sapiens
cccaaggccacccaatgccctcagaacttgcctcagcgca

SEQ ID NO: 16290 - DNA, 40 bp, Homo sapiens
gcgctgaggcaagttctgagggcattgggtggccttggga

SEQ ID NO: 16291 - DNA, 40 bp, Homo sapiens
tcccaaggccacccaatgccctcagaacttgcctcagcgc

SEQ ID NO: 16292 - DNA, 40 bp, Homo sapiens
cgctgaggcaagttctgagggcattgggtggccttgggaa

SEQ ID NO: 16293 - DNA, 40 bp, Homo sapiens
ttcccaaggccacccaatgccctcagaacttgcctcagcg

SEQ ID NO: 16294 - DNA, 40 bp, Homo sapiens
gctgaggcaagttctgagggcattgggtggccttgggaag

SEQ ID NO: 16295 - DNA, 40 bp, Homo sapiens
cttcccaaggccacccaatgccctcagaacttgcctcagc

SEQ ID NO: 16296 - DNA, 40 bp, Homo sapiens
ctgaggcaagttctgagggcattgggtggccttgggaaga

SEQ ID NO: 16297 - DNA, 40 bp, Homo sapiens
tcttcccaaggccacccaatgccctcagaacttgcctcag

SEQ ID NO: 16298 - DNA, 40 bp, Homo sapiens
tgaggcaagttctgagggcattgggtggccttgggaagat

SEQ ID NO: 16299 - DNA, 40 bp, Homo sapiens
atcttcccaaggccacccaatgccctcagaacttgcctca

SEQ ID NO: 16300 - DNA, 40 bp, Homo sapiens
gaggcaagttctgagggcattgggtggccttgggaagata

SEQ ID NO: 16301 - DNA, 40 bp, Homo sapiens
tatcttcccaaggccacccaatgccctcagaacttgcctc

SEQ ID NO: 16302 - DNA, 40 bp, Homo sapiens
aggcaagttctgagggcattgggtggccttgggaagatat

SEQ ID NO: 16303 - DNA, 40 bp, Homo sapiens
atatcttcccaaggccacccaatgccctcagaacttgcct

SEQ ID NO: 16304 - DNA, 40 bp, Homo sapiens
ggcaagttctgagggcattgggtggccttgggaagatatt

SEQ ID NO: 16305 - DNA, 40 bp, Homo sapiens
aatatcttcccaaggccacccaatgccctcagaacttgcc

SEQ ID NO: 16306 - DNA, 40 bp, Homo sapiens
gcaagttctgagggcattgggtggccttgggaagatattt

SEQ ID NO: 16307 - DNA, 40 bp, Homo sapiens
aaatatcttcccaaggccacccaatgccctcagaacttgc

SEQ ID NO: 16308 - DNA, 40 bp, Homo sapiens
caagttctgagggcattgggtggccttgggaagatattta

SEQ ID NO: 16309 - DNA, 40 bp, Homo sapiens
taaatatcttcccaaggccacccaatgccctcagaacttg

SEQ ID NO: 16310 - DNA, 40 bp, Homo sapiens
aagttctgagggcattgggtggccttgggaagatatttat

SEQ ID NO: 16311 - DNA, 40 bp, Homo sapiens
ataaatatcttcccaaggccacccaatgccctcagaactt

SEQ ID NO: 16312 - DNA, 40 bp, Homo sapiens
agttctgagggcattgggtggccttgggaagatatttatg

SEQ ID NO: 16313 - DNA, 40 bp, Homo sapiens
cataaatatcttcccaaggccacccaatgccctcagaact

SEQ ID NO: 16314 - DNA, 40 bp, Homo sapiens
gttctgagggcattgggtggccttgggaagatatttatgc

SEQ ID NO: 16315 - DNA, 40 bp, Homo sapiens
gcataaatatcttcccaaggccacccaatgccctcagaac

SEQ ID NO: 16316 - DNA, 40 bp, Homo sapiens
ttctgagggcattgggtggccttgggaagatatttatgca

SEQ ID NO: 16317 - DNA, 40 bp, Homo sapiens
tgcataaatatcttcccaaggccacccaatgccctcagaa

SEQ ID NO: 16318 - DNA, 40 bp, Homo sapiens
tctgagggcattgggtggccttgggaagatatttatgcag

SEQ ID NO: 16319 - DNA, 40 bp, Homo sapiens
ctgcataaatatcttcccaaggccacccaatgccctcaga

SEQ ID NO: 16320 - DNA, 40 bp, Homo sapiens
ctgagggcattgggtggccttgggaagatatttatgcagt

SEQ ID NO: 16321 - DNA, 40 bp, Homo sapiens
actgcataaatatcttcccaaggccacccaatgccctcag

SEQ ID NO: 16322 - DNA, 40 bp, Homo sapiens
tgagggcattgggtggccttgggaagatatttatgcagtt

SEQ ID NO: 16323 - DNA, 40 bp, Homo sapiens
aactgcataaatatcttcccaaggccacccaatgccctca

SEQ ID NO: 16324 - DNA, 40 bp, Homo sapiens
gagggcattgggtggccttgggaagatatttatgcagttt

SEQ ID NO: 16325 - DNA, 40 bp, Homo sapiens
aaactgcataaatatcttcccaaggccacccaatgccctc

SEQ ID NO: 16326 - DNA, 40 bp, Homo sapiens
agggcattgggtggccttgggaagatatttatgcagttta

SEQ ID NO: 16327 - DNA, 40 bp, Homo sapiens
taaactgcataaatatcttcccaaggccacccaatgccct

SEQ ID NO: 16328 - DNA, 40 bp, Homo sapiens
gggcattgggtggccttgggaagatatttatgcagtttag

SEQ ID NO: 16329 - DNA, 40 bp, Homo sapiens
ctaaactgcataaatatcttcccaaggccacccaatgccc

SEQ ID NO: 16330 - DNA, 40 bp, Homo sapiens
ggcattgggtggccttgggaagatatttatgcagtttaga

SEQ ID NO: 16331 - DNA, 40 bp, Homo sapiens
tctaaactgcataaatatcttcccaaggccacccaatgcc

SEQ ID NO: 16332 - DNA, 40 bp, Homo sapiens
gcattgggtggccttgggaagatatttatgcagtttagaa

SEQ ID NO: 16333 - DNA, 40 bp, Homo sapiens
ttctaaactgcataaatatcttcccaaggccacccaatgc

SEQ ID NO: 16334 - DNA, 40 bp, Homo sapiens
cattgggtggccttgggaagatatttatgcagtttagaac

SEQ ID NO: 16335 - DNA, 40 bp, Homo sapiens
gttctaaactgcataaatatcttcccaaggccacccaatg

SEQ ID NO: 16336 - DNA, 40 bp, Homo sapiens
attgggtggccttgggaagatatttatgcagtttagaacc

SEQ ID NO: 16337 - DNA, 40 bp, Homo sapiens
ggttctaaactgcataaatatcttcccaaggccacccaat

SEQ ID NO: 16338 - DNA, 40 bp, Homo sapiens
ttgggtggccttgggaagatatttatgcagtttagaacct

SEQ ID NO: 16339 - DNA, 40 bp, Homo sapiens
aggttctaaactgcataaatatcttcccaaggccacccaa

SEQ ID NO: 16340 - DNA, 40 bp, Homo sapiens
tgggtggccttgggaagatatttatgcagtttagaacctg

SEQ ID NO: 16341 - DNA, 40 bp, Homo sapiens
caggttctaaactgcataaatatcttcccaaggccaccca

SEQ ID NO: 16342 - DNA, 40 bp, Homo sapiens
gggtggccttgggaagatatttatgcagtttagaacctgg

SEQ ID NO: 16343 - DNA, 40 bp, Homo sapiens
ccaggttctaaactgcataaatatcttcccaaggccaccc

SEQ ID NO: 16344 - DNA, 40 bp, Homo sapiens
ggtggccttgggaagatatttatgcagtttagaacctgga

SEQ ID NO: 16345 - DNA, 40 bp, Homo sapiens
tccaggttctaaactgcataaatatcttcccaaggccacc

SEQ ID NO: 16346 - DNA, 40 bp, Homo sapiens
gtggccttgggaagatatttatgcagtttagaacctggag

SEQ ID NO: 16347 - DNA, 40 bp, Homo sapiens
ctccaggttctaaactgcataaatatcttcccaaggccac

SEQ ID NO: 16348 - DNA, 40 bp, Homo sapiens
tggccttgggaagatatttatgcagtttagaacctggaga

SEQ ID NO: 16349 - DNA, 40 bp, Homo sapiens
tctccaggttctaaactgcataaatatcttcccaaggcca

SEQ ID NO: 16350 - DNA, 40 bp, Homo sapiens
ggccttgggaagatatttatgcagtttagaacctggagaa

SEQ ID NO: 16351 - DNA, 40 bp, Homo sapiens
ttctccaggttctaaactgcataaatatcttcccaaggcc

SEQ ID NO: 16352 - DNA, 40 bp, Homo sapiens
gccttgggaagatatttatgcagtttagaacctggagaat

SEQ ID NO: 16353 - DNA, 40 bp, Homo sapiens
attctccaggttctaaactgcataaatatcttcccaaggc

SEQ ID NO: 16354 - DNA, 40 bp, Homo sapiens
ccttgggaagatatttatgcagtttagaacctggagaatt

SEQ ID NO: 16355 - DNA, 40 bp, Homo sapiens
aattctccaggttctaaactgcataaatatcttcccaagg

SEQ ID NO: 16356 - DNA, 40 bp, Homo sapiens
cttgggaagatatttatgcagtttagaacctggagaattg

SEQ ID NO: 16357 - DNA, 40 bp, Homo sapiens
caattctccaggttctaaactgcataaatatcttcccaag

SEQ ID NO: 16358 - DNA, 40 bp, Homo sapiens
ttgggaagatatttatgcagtttagaacctggagaattga

SEQ ID NO: 16359 - DNA, 40 bp, Homo sapiens
tcaattctccaggttctaaactgcataaatatcttcccaa

SEQ ID NO: 16360 - DNA, 40 bp, Homo sapiens
tgggaagatatttatgcagtttagaacctggagaattgat

SEQ ID NO: 16361 - DNA, 40 bp, Homo sapiens
atcaattctccaggttctaaactgcataaatatcttccca

SEQ ID NO: 16362 - DNA, 40 bp, Homo sapiens
gggaagatatttatgcagtttagaacctggagaattgatt

SEQ ID NO: 16363 - DNA, 40 bp, Homo sapiens
aatcaattctccaggttctaaactgcataaatatcttccc

SEQ ID NO: 16364 - DNA, 40 bp, Homo sapiens
ggaagatatttatgcagtttagaacctggagaattgatta

SEQ ID NO: 16365 - DNA, 40 bp, Homo sapiens
taatcaattctccaggttctaaactgcataaatatcttcc

SEQ ID NO: 16366 - DNA, 40 bp, Homo sapiens
gaagatatttatgcagtttagaacctggagaattgattag

SEQ ID NO: 16367 - DNA, 40 bp, Homo sapiens
ctaatcaattctccaggttctaaactgcataaatatcttc

SEQ ID NO: 16368 - DNA, 40 bp, Homo sapiens
aagatatttatgcagtttagaacctggagaattgattaga

SEQ ID NO: 16369 - DNA, 40 bp, Homo sapiens
tctaatcaattctccaggttctaaactgcataaatatctt

SEQ ID NO: 16370 - DNA, 40 bp, Homo sapiens
agatatttatgcagtttagaacctggagaattgattagat

SEQ ID NO: 16371 - DNA, 40 bp, Homo sapiens
atctaatcaattctccaggttctaaactgcataaatatct

SEQ ID NO: 16372 - DNA, 40 bp, Homo sapiens
gatatttatgcagtttagaacctggagaattgattagata

SEQ ID NO: 16373 - DNA, 40 bp, Homo sapiens
tatctaatcaattctccaggttctaaactgcataaatatc

SEQ ID NO: 16374 - DNA, 40 bp, Homo sapiens
atatttatgcagtttagaacctggagaattgattagataa

SEQ ID NO: 16375 - DNA, 40 bp, Homo sapiens
ttatctaatcaattctccaggttctaaactgcataaatat

SEQ ID NO: 16376 - DNA, 40 bp, Homo sapiens
tatttatgcagtttagaacctggagaattgattagataac

SEQ ID NO: 16377 - DNA, 40 bp, Homo sapiens
gttatctaatcaattctccaggttctaaactgcataaata

SEQ ID NO: 16378 - DNA, 40 bp, Homo sapiens
atttatgcagtttagaacctggagaattgattagataact

SEQ ID NO: 16379 - DNA, 40 bp, Homo sapiens
agttatctaatcaattctccaggttctaaactgcataaat

SEQ ID NO: 16380 - DNA, 40 bp, Homo sapiens
tttatgcagtttagaacctggagaattgattagataacta

SEQ ID NO: 16381 - DNA, 40 bp, Homo sapiens
tagttatctaatcaattctccaggttctaaactgcataaa

SEQ ID NO: 16382 - DNA, 40 bp, Homo sapiens
ttatgcagtttagaacctggagaattgattagataactaa

SEQ ID NO: 16383 - DNA, 40 bp, Homo sapiens
ttagttatctaatcaattctccaggttctaaactgcataa

SEQ ID NO: 16384 - DNA, 40 bp, Homo sapiens
tatgcagtttagaacctggagaattgattagataactaat

SEQ ID NO: 16385 - DNA, 40 bp, Homo sapiens
attagttatctaatcaattctccaggttctaaactgcata

SEQ ID NO: 16386 - DNA, 40 bp, Homo sapiens
atgcagtttagaacctggagaattgattagataactaatc

SEQ ID NO: 16387 - DNA, 40 bp, Homo sapiens
gattagttatctaatcaattctccaggttctaaactgcat

SEQ ID NO: 16388 - DNA, 40 bp, Homo sapiens
tgcagtttagaacctggagaattgattagataactaatca

SEQ ID NO: 16389 - DNA, 40 bp, Homo sapiens
tgattagttatctaatcaattctccaggttctaaactgca

SEQ ID NO: 16390 - DNA, 40 bp, Homo sapiens
gcagtttagaacctggagaattgattagataactaatcat

SEQ ID NO: 16391 - DNA, 40 bp, Homo sapiens
atgattagttatctaatcaattctccaggttctaaactgc

SEQ ID NO: 16392 - DNA, 40 bp, Homo sapiens
cagtttagaacctggagaattgattagataactaatcata

SEQ ID NO: 16393 - DNA, 40 bp, Homo sapiens
tatgattagttatctaatcaattctccaggttctaaactg

SEQ ID NO: 16394 - DNA, 40 bp, Homo sapiens
agtttagaacctggagaattgattagataactaatcataa

SEQ ID NO: 16395 - DNA, 40 bp, Homo sapiens
ttatgattagttatctaatcaattctccaggttctaaact

SEQ ID NO: 16396 - DNA, 40 bp, Homo sapiens
gtttagaacctggagaattgattagataactaatcataag

SEQ ID NO: 16397 - DNA, 40 bp, Homo sapiens
cttatgattagttatctaatcaattctccaggttctaaac

SEQ ID NO: 16398 - DNA, 40 bp, Homo sapiens
tttagaacctggagaattgattagataactaatcataagg

SEQ ID NO: 16399 - DNA, 40 bp, Homo sapiens
ccttatgattagttatctaatcaattctccaggttctaaa

SEQ ID NO: 16400 - DNA, 40 bp, Homo sapiens
ttagaacctggagaattgattagataactaatcataagga

SEQ ID NO: 16401 - DNA, 40 bp, Homo sapiens
tccttatgattagttatctaatcaattctccaggttctaa

SEQ ID NO: 16402 - DNA, 40 bp, Homo sapiens
tagaacctggagaattgattagataactaatcataaggaa

SEQ ID NO: 16403 - DNA, 40 bp, Homo sapiens
ttccttatgattagttatctaatcaattctccaggttcta

SEQ ID NO: 16404 - DNA, 40 bp, Homo sapiens
agaacctggagaattgattagataactaatcataaggaaa

SEQ ID NO: 16405 - DNA, 40 bp, Homo sapiens
tttccttatgattagttatctaatcaattctccaggttct

SEQ ID NO: 16406 - DNA, 40 bp, Homo sapiens
gaacctggagaattgattagataactaatcataaggaaac

SEQ ID NO: 16407 - DNA, 40 bp, Homo sapiens
gtttccttatgattagttatctaatcaattctccaggttc

SEQ ID NO: 16408 - DNA, 40 bp, Homo sapiens
aacctggagaattgattagataactaatcataaggaaacg

SEQ ID NO: 16409 - DNA, 40 bp, Homo sapiens
cgtttccttatgattagttatctaatcaattctccaggtt

SEQ ID NO: 16410 - DNA, 40 bp, Homo sapiens
acctggagaattgattagataactaatcataaggaaacgt

SEQ ID NO: 16411 - DNA, 40 bp, Homo sapiens
acgtttccttatgattagttatctaatcaattctccaggt

SEQ ID NO: 16412 - DNA, 40 bp, Homo sapiens
cctggagaattgattagataactaatcataaggaaacgtc

SEQ ID NO: 16413 - DNA, 40 bp, Homo sapiens
gacgtttccttatgattagttatctaatcaattctccagg

SEQ ID NO: 16414 - DNA, 40 bp, Homo sapiens
ctggagaattgattagataactaatcataaggaaacgtca

SEQ ID NO: 16415 - DNA, 40 bp, Homo sapiens
tgacgtttccttatgattagttatctaatcaattctccag

SEQ ID NO: 16416 - DNA, 40 bp, Homo sapiens
tggagaattgattagataactaatcataaggaaacgtcac

SEQ ID NO: 16417 - DNA, 40 bp, Homo sapiens
gtgacgtttccttatgattagttatctaatcaattctcca

SEQ ID NO: 16418 - DNA, 40 bp, Homo sapiens
ggagaattgattagataactaatcataaggaaacgtcaca

SEQ ID NO: 16419 - DNA, 40 bp, Homo sapiens
tgtgacgtttccttatgattagttatctaatcaattctcc

SEQ ID NO: 16420 - DNA, 40 bp, Homo sapiens
gagaattgattagataactaatcataaggaaacgtcacat

SEQ ID NO: 16421 - DNA, 40 bp, Homo sapiens
atgtgacgtttccttatgattagttatctaatcaattctc

SEQ ID NO: 16422 - DNA, 40 bp, Homo sapiens
agaattgattagataactaatcataaggaaacgtcacata

SEQ ID NO: 16423 - DNA, 40 bp, Homo sapiens
tatgtgacgtttccttatgattagttatctaatcaattct

SEQ ID NO: 16424 - DNA, 40 bp, Homo sapiens
gaattgattagataactaatcataaggaaacgtcacatat

SEQ ID NO: 16425 - DNA, 40 bp, Homo sapiens
atatgtgacgtttccttatgattagttatctaatcaattc

SEQ ID NO: 16426 - DNA, 40 bp, Homo sapiens
aattgattagataactaatcataaggaaacgtcacatatt

SEQ ID NO: 16427 - DNA, 40 bp, Homo sapiens
aatatgtgacgtttccttatgattagttatctaatcaatt

SEQ ID NO: 16428 - DNA, 40 bp, Homo sapiens
attgattagataactaatcataaggaaacgtcacatattt

SEQ ID NO: 16429 - DNA, 40 bp, Homo sapiens
aaatatgtgacgtttccttatgattagttatctaatcaat

SEQ ID NO: 16430 - DNA, 40 bp, Homo sapiens
ttgattagataactaatcataaggaaacgtcacatatttt

SEQ ID NO: 16431 - DNA, 40 bp, Homo sapiens
aaaatatgtgacgtttccttatgattagttatctaatcaa

SEQ ID NO: 16432 - DNA, 40 bp, Homo sapiens
tgattagataactaatcataaggaaacgtcacatattttt

SEQ ID NO: 16433 - DNA, 40 bp, Homo sapiens
aaaaatatgtgacgtttccttatgattagttatctaatca

SEQ ID NO: 16434 - DNA, 40 bp, Homo sapiens
gattagataactaatcataaggaaacgtcacatatttttg

SEQ ID NO: 16435 - DNA, 40 bp, Homo sapiens
caaaaatatgtgacgtttccttatgattagttatctaatc

SEQ ID NO: 16436 - DNA, 40 bp, Homo sapiens
attagataactaatcataaggaaacgtcacatatttttgg

SEQ ID NO: 16437 - DNA, 40 bp, Homo sapiens
ccaaaaatatgtgacgtttccttatgattagttatctaat

SEQ ID NO: 16438 - DNA, 40 bp, Homo sapiens
ttagataactaatcataaggaaacgtcacatatttttggt

SEQ ID NO: 16439 - DNA, 40 bp, Homo sapiens
accaaaaatatgtgacgtttccttatgattagttatctaa

SEQ ID NO: 16440 - DNA, 40 bp, Homo sapiens
tagataactaatcataaggaaacgtcacatatttttggta

SEQ ID NO: 16441 - DNA, 40 bp, Homo sapiens
taccaaaaatatgtgacgtttccttatgattagttatcta

SEQ ID NO: 16442 - DNA, 40 bp, Homo sapiens
agataactaatcataaggaaacgtcacatatttttggtac

SEQ ID NO: 16443 - DNA, 40 bp, Homo sapiens
gtaccaaaaatatgtgacgtttccttatgattagttatct

SEQ ID NO: 16444 - DNA, 40 bp, Homo sapiens
gataactaatcataaggaaacgtcacatatttttggtact

SEQ ID NO: 16445 - DNA, 40 bp, Homo sapiens
agtaccaaaaatatgtgacgtttccttatgattagttatc

SEQ ID NO: 16446 - DNA, 40 bp, Homo sapiens
ataactaatcataaggaaacgtcacatatttttggtacta

SEQ ID NO: 16447 - DNA, 40 bp, Homo sapiens
tagtaccaaaaatatgtgacgtttccttatgattagttat

SEQ ID NO: 16448 - DNA, 40 bp, Homo sapiens
taactaatcataaggaaacgtcacatatttttggtactat

SEQ ID NO: 16449 - DNA, 40 bp, Homo sapiens
atagtaccaaaaatatgtgacgtttccttatgattagtta

SEQ ID NO: 16450 - DNA, 40 bp, Homo sapiens
aactaatcataaggaaacgtcacatatttttggtactata

SEQ ID NO: 16451 - DNA, 40 bp, Homo sapiens
tatagtaccaaaaatatgtgacgtttccttatgattagtt

SEQ ID NO: 16452 - DNA, 40 bp, Homo sapiens
actaatcataaggaaacgtcacatatttttggtactataa

SEQ ID NO: 16453 - DNA, 40 bp, Homo sapiens
ttatagtaccaaaaatatgtgacgtttccttatgattagt

SEQ ID NO: 16454 - DNA, 40 bp, Homo sapiens
ctaatcataaggaaacgtcacatatttttggtactataaa

SEQ ID NO: 16455 - DNA, 40 bp, Homo sapiens
tttatagtaccaaaaatatgtgacgtttccttatgattag

SEQ ID NO: 16456 - DNA, 40 bp, Homo sapiens
taatcataaggaaacgtcacatatttttggtactataaaa

SEQ ID NO: 16457 - DNA, 40 bp, Homo sapiens
ttttatagtaccaaaaatatgtgacgtttccttatgatta

SEQ ID NO: 16458 - DNA, 40 bp, Homo sapiens
aatcataaggaaacgtcacatatttttggtactataaaaa

SEQ ID NO: 16459 - DNA, 40 bp, Homo sapiens
tttttatagtaccaaaaatatgtgacgtttccttatgatt

SEQ ID NO: 16460 - DNA, 40 bp, Homo sapiens
atcataaggaaacgtcacatatttttggtactataaaaaa

SEQ ID NO: 16461 - DNA, 40 bp, Homo sapiens
ttttttatagtaccaaaaatatgtgacgtttccttatgat

SEQ ID NO: 16462 - DNA, 40 bp, Homo sapiens
tcataaggaaacgtcacatatttttggtactataaaaaag

SEQ ID NO: 16463 - DNA, 40 bp, Homo sapiens
cttttttatagtaccaaaaatatgtgacgtttccttatga

SEQ ID NO: 16464 - DNA, 40 bp, Homo sapiens
cataaggaaacgtcacatatttttggtactataaaaaagt

SEQ ID NO: 16465 - DNA, 40 bp, Homo sapiens
acttttttatagtaccaaaaatatgtgacgtttccttatg

SEQ ID NO: 16466 - DNA, 40 bp, Homo sapiens
ataaggaaacgtcacatatttttggtactataaaaaagtg

SEQ ID NO: 16467 - DNA, 40 bp, Homo sapiens
cacttttttatagtaccaaaaatatgtgacgtttccttat

SEQ ID NO: 16468 - DNA, 40 bp, Homo sapiens
taaggaaacgtcacatatttttggtactataaaaaagtgg

SEQ ID NO: 16469 - DNA, 40 bp, Homo sapiens
ccacttttttatagtaccaaaaatatgtgacgtttcctta

SEQ ID NO: 16470 - DNA, 40 bp, Homo sapiens
aaggaaacgtcacatatttttggtactataaaaaagtgga

SEQ ID NO: 16471 - DNA, 40 bp, Homo sapiens
tccacttttttatagtaccaaaaatatgtgacgtttcctt

SEQ ID NO: 16472 - DNA, 40 bp, Homo sapiens
aggaaacgtcacatatttttggtactataaaaaagtggag

SEQ ID NO: 16473 - DNA, 40 bp, Homo sapiens
ctccacttttttatagtaccaaaaatatgtgacgtttcct

SEQ ID NO: 16474 - DNA, 40 bp, Homo sapiens
ggaaacgtcacatatttttggtactataaaaaagtggaga

SEQ ID NO: 16475 - DNA, 40 bp, Homo sapiens
tctccacttttttatagtaccaaaaatatgtgacgtttcc

SEQ ID NO: 16476 - DNA, 40 bp, Homo sapiens
gaaacgtcacatatttttggtactataaaaaagtggagaa

SEQ ID NO: 16477 - DNA, 40 bp, Homo sapiens
ttctccacttttttatagtaccaaaaatatgtgacgtttc

SEQ ID NO: 16478 - DNA, 40 bp, Homo sapiens
aaacgtcacatatttttggtactataaaaaagtggagaaa

SEQ ID NO: 16479 - DNA, 40 bp, Homo sapiens
tttctccacttttttatagtaccaaaaatatgtgacgttt

SEQ ID NO: 16480 - DNA, 40 bp, Homo sapiens
aacgtcacatatttttggtactataaaaaagtggagaaat

SEQ ID NO: 16481 - DNA, 40 bp, Homo sapiens
atttctccacttttttatagtaccaaaaatatgtgacgtt

SEQ ID NO: 16482 - DNA, 40 bp, Homo sapiens
acgtcacatatttttggtactataaaaaagtggagaaata

SEQ ID NO: 16483 - DNA, 40 bp, Homo sapiens
tatttctccacttttttatagtaccaaaaatatgtgacgt

SEQ ID NO: 16484 - DNA, 40 bp, Homo sapiens
cgtcacatatttttggtactataaaaaagtggagaaataa

SEQ ID NO: 16485 - DNA, 40 bp, Homo sapiens
ttatttctccacttttttatagtaccaaaaatatgtgacg

SEQ ID NO: 16486 - DNA, 40 bp, Homo sapiens
gtcacatatttttggtactataaaaaagtggagaaataat

SEQ ID NO: 16487 - DNA, 40 bp, Homo sapiens
attatttctccacttttttatagtaccaaaaatatgtgac

SEQ ID NO: 16488 - DNA, 40 bp, Homo sapiens
tcacatatttttggtactataaaaaagtggagaaataatg

SEQ ID NO: 16489 - DNA, 40 bp, Homo sapiens
cattatttctccacttttttatagtaccaaaaatatgtga

SEQ ID NO: 16490 - DNA, 40 bp, Homo sapiens
cacatatttttggtactataaaaaagtggagaaataatgc

SEQ ID NO: 16491 - DNA, 40 bp, Homo sapiens
gcattatttctccacttttttatagtaccaaaaatatgtg

SEQ ID NO: 16492 - DNA, 40 bp, Homo sapiens
acatatttttggtactataaaaaagtggagaaataatgcc

SEQ ID NO: 16493 - DNA, 40 bp, Homo sapiens
ggcattatttctccacttttttatagtaccaaaaatatgt

SEQ ID NO: 16494 - DNA, 40 bp, Homo sapiens
catatttttggtactataaaaaagtggagaaataatgcct

SEQ ID NO: 16495 - DNA, 40 bp, Homo sapiens
aggcattatttctccacttttttatagtaccaaaaatatg

SEQ ID NO: 16496 - DNA, 40 bp, Homo sapiens
atatttttggtactataaaaaagtggagaaataatgccta

SEQ ID NO: 16497 - DNA, 40 bp, Homo sapiens
taggcattatttctccacttttttatagtaccaaaaatat

SEQ ID NO: 16498 - DNA, 40 bp, Homo sapiens
tatttttggtactataaaaaagtggagaaataatgcctat

SEQ ID NO: 16499 - DNA, 40 bp, Homo sapiens
ataggcattatttctccacttttttatagtaccaaaaata

SEQ ID NO: 16500 - DNA, 40 bp, Homo sapiens
atttttggtactataaaaaagtggagaaataatgcctatt

SEQ ID NO: 16501 - DNA, 40 bp, Homo sapiens
aataggcattatttctccacttttttatagtaccaaaaat

SEQ ID NO: 16502 - DNA, 40 bp, Homo sapiens
tttttggtactataaaaaagtggagaaataatgcctattt

SEQ ID NO: 16503 - DNA, 40 bp, Homo sapiens
aaataggcattatttctccacttttttatagtaccaaaaa

SEQ ID NO: 16504 - DNA, 40 bp, Homo sapiens
ttttggtactataaaaaagtggagaaataatgcctatttg

SEQ ID NO: 16505 - DNA, 40 bp, Homo sapiens
caaataggcattatttctccacttttttatagtaccaaaa

SEQ ID NO: 16506 - DNA, 40 bp, Homo sapiens
tttggtactataaaaaagtggagaaataatgcctatttgc

SEQ ID NO: 16507 - DNA, 40 bp, Homo sapiens
gcaaataggcattatttctccacttttttatagtaccaaa

SEQ ID NO: 16508 - DNA, 40 bp, Homo sapiens
ttggtactataaaaaagtggagaaataatgcctatttgca

SEQ ID NO: 16509 - DNA, 40 bp, Homo sapiens
tgcaaataggcattatttctccacttttttatagtaccaa

SEQ ID NO: 16510 - DNA, 40 bp, Homo sapiens
tggtactataaaaaagtggagaaataatgcctatttgcaa

SEQ ID NO: 16511 - DNA, 40 bp, Homo sapiens
ttgcaaataggcattatttctccacttttttatagtacca

SEQ ID NO: 16512 - DNA, 40 bp, Homo sapiens
ggtactataaaaaagtggagaaataatgcctatttgcaaa

SEQ ID NO: 16513 - DNA, 40 bp, Homo sapiens
tttgcaaataggcattatttctccacttttttatagtacc

SEQ ID NO: 16514 - DNA, 40 bp, Homo sapiens
gtactataaaaaagtggagaaataatgcctatttgcaaag

SEQ ID NO: 16515 - DNA, 40 bp, Homo sapiens
ctttgcaaataggcattatttctccacttttttatagtac

SEQ ID NO: 16516 - DNA, 40 bp, Homo sapiens
tactataaaaaagtggagaaataatgcctatttgcaaaga

SEQ ID NO: 16517 - DNA, 40 bp, Homo sapiens
tctttgcaaataggcattatttctccacttttttatagta

SEQ ID NO: 16518 - DNA, 40 bp, Homo sapiens
actataaaaaagtggagaaataatgcctatttgcaaagat

SEQ ID NO: 16519 - DNA, 40 bp, Homo sapiens
atctttgcaaataggcattatttctccacttttttatagt

SEQ ID NO: 16520 - DNA, 40 bp, Homo sapiens
ctataaaaaagtggagaaataatgcctatttgcaaagatt

SEQ ID NO: 16521 - DNA, 40 bp, Homo sapiens
aatctttgcaaataggcattatttctccacttttttatag

SEQ ID NO: 16522 - DNA, 40 bp, Homo sapiens
tataaaaaagtggagaaataatgcctatttgcaaagattt

SEQ ID NO: 16523 - DNA, 40 bp, Homo sapiens
aaatctttgcaaataggcattatttctccacttttttata

SEQ ID NO: 16524 - DNA, 40 bp, Homo sapiens
ataaaaaagtggagaaataatgcctatttgcaaagatttg

SEQ ID NO: 16525 - DNA, 40 bp, Homo sapiens
caaatctttgcaaataggcattatttctccacttttttat

SEQ ID NO: 16526 - DNA, 40 bp, Homo sapiens
taaaaaagtggagaaataatgcctatttgcaaagatttga

SEQ ID NO: 16527 - DNA, 40 bp, Homo sapiens
tcaaatctttgcaaataggcattatttctccactttttta

SEQ ID NO: 16528 - DNA, 40 bp, Homo sapiens
aaaaaagtggagaaataatgcctatttgcaaagatttgat

SEQ ID NO: 16529 - DNA, 40 bp, Homo sapiens
atcaaatctttgcaaataggcattatttctccactttttt

SEQ ID NO: 16530 - DNA, 40 bp, Homo sapiens
aaaaagtggagaaataatgcctatttgcaaagatttgatt

SEQ ID NO: 16531 - DNA, 40 bp, Homo sapiens
aatcaaatctttgcaaataggcattatttctccacttttt

SEQ ID NO: 16532 - DNA, 40 bp, Homo sapiens
aaaagtggagaaataatgcctatttgcaaagatttgattt

SEQ ID NO: 16533 - DNA, 40 bp, Homo sapiens
aaatcaaatctttgcaaataggcattatttctccactttt

SEQ ID NO: 16534 - DNA, 40 bp, Homo sapiens
aaagtggagaaataatgcctatttgcaaagatttgattta

SEQ ID NO: 16535 - DNA, 40 bp, Homo sapiens
taaatcaaatctttgcaaataggcattatttctccacttt

SEQ ID NO: 16536 - DNA, 40 bp, Homo sapiens
aagtggagaaataatgcctatttgcaaagatttgatttaa

SEQ ID NO: 16537 - DNA, 40 bp, Homo sapiens
ttaaatcaaatctttgcaaataggcattatttctccactt

SEQ ID NO: 16538 - DNA, 40 bp, Homo sapiens
agtggagaaataatgcctatttgcaaagatttgatttaaa

SEQ ID NO: 16539 - DNA, 40 bp, Homo sapiens
tttaaatcaaatctttgcaaataggcattatttctccact

SEQ ID NO: 16540 - DNA, 40 bp, Homo sapiens
gtggagaaataatgcctatttgcaaagatttgatttaaac

SEQ ID NO: 16541 - DNA, 40 bp, Homo sapiens
gtttaaatcaaatctttgcaaataggcattatttctccac

SEQ ID NO: 16542 - DNA, 40 bp, Homo sapiens
tggagaaataatgcctatttgcaaagatttgatttaaaca

SEQ ID NO: 16543 - DNA, 40 bp, Homo sapiens
tgtttaaatcaaatctttgcaaataggcattatttctcca

SEQ ID NO: 16544 - DNA, 40 bp, Homo sapiens
ggagaaataatgcctatttgcaaagatttgatttaaacat

SEQ ID NO: 16545 - DNA, 40 bp, Homo sapiens
atgtttaaatcaaatctttgcaaataggcattatttctcc

SEQ ID NO: 16546 - DNA, 40 bp, Homo sapiens
gagaaataatgcctatttgcaaagatttgatttaaacata

SEQ ID NO: 16547 - DNA, 40 bp, Homo sapiens
tatgtttaaatcaaatctttgcaaataggcattatttctc

SEQ ID NO: 16548 - DNA, 40 bp, Homo sapiens
agaaataatgcctatttgcaaagatttgatttaaacatag

SEQ ID NO: 16549 - DNA, 40 bp, Homo sapiens
ctatgtttaaatcaaatctttgcaaataggcattatttct

SEQ ID NO: 16550 - DNA, 40 bp, Homo sapiens
gaaataatgcctatttgcaaagatttgatttaaacataga

SEQ ID NO: 16551 - DNA, 40 bp, Homo sapiens
tctatgtttaaatcaaatctttgcaaataggcattatttc

SEQ ID NO: 16552 - DNA, 40 bp, Homo sapiens
aaataatgcctatttgcaaagatttgatttaaacatagaa

SEQ ID NO: 16553 - DNA, 40 bp, Homo sapiens
ttctatgtttaaatcaaatctttgcaaataggcattattt

SEQ ID NO: 16554 - DNA, 40 bp, Homo sapiens
aataatgcctatttgcaaagatttgatttaaacatagaaa

SEQ ID NO: 16555 - DNA, 40 bp, Homo sapiens
tttctatgtttaaatcaaatctttgcaaataggcattatt

SEQ ID NO: 16556 - DNA, 40 bp, Homo sapiens
ataatgcctatttgcaaagatttgatttaaacatagaaac

SEQ ID NO: 16557 - DNA, 40 bp, Homo sapiens
gtttctatgtttaaatcaaatctttgcaaataggcattat

SEQ ID NO: 16558 - DNA, 40 bp, Homo sapiens
taatgcctatttgcaaagatttgatttaaacatagaaaca

SEQ ID NO: 16559 - DNA, 40 bp, Homo sapiens
tgtttctatgtttaaatcaaatctttgcaaataggcatta

SEQ ID NO: 16560 - DNA, 40 bp, Homo sapiens
aatgcctatttgcaaagatttgatttaaacatagaaacaa

SEQ ID NO: 16561 - DNA, 40 bp, Homo sapiens
ttgtttctatgtttaaatcaaatctttgcaaataggcatt

SEQ ID NO: 16562 - DNA, 40 bp, Homo sapiens
atgcctatttgcaaagatttgatttaaacatagaaacaac

SEQ ID NO: 16563 - DNA, 40 bp, Homo sapiens
gttgtttctatgtttaaatcaaatctttgcaaataggcat

SEQ ID NO: 16564 - DNA, 40 bp, Homo sapiens
tgcctatttgcaaagatttgatttaaacatagaaacaact

SEQ ID NO: 16565 - DNA, 40 bp, Homo sapiens
agttgtttctatgtttaaatcaaatctttgcaaataggca

SEQ ID NO: 16566 - DNA, 40 bp, Homo sapiens
gcctatttgcaaagatttgatttaaacatagaaacaactt

SEQ ID NO: 16567 - DNA, 40 bp, Homo sapiens
aagttgtttctatgtttaaatcaaatctttgcaaataggc

SEQ ID NO: 16568 - DNA, 40 bp, Homo sapiens
cctatttgcaaagatttgatttaaacatagaaacaacttt

SEQ ID NO: 16569 - DNA, 40 bp, Homo sapiens
aaagttgtttctatgtttaaatcaaatctttgcaaatagg

SEQ ID NO: 16570 - DNA, 40 bp, Homo sapiens
ctatttgcaaagatttgatttaaacatagaaacaacttta

SEQ ID NO: 16571 - DNA, 40 bp, Homo sapiens
taaagttgtttctatgtttaaatcaaatctttgcaaatag

SEQ ID NO: 16572 - DNA, 40 bp, Homo sapiens
tatttgcaaagatttgatttaaacatagaaacaactttat

SEQ ID NO: 16573 - DNA, 40 bp, Homo sapiens
ataaagttgtttctatgtttaaatcaaatctttgcaaata

SEQ ID NO: 16574 - DNA, 40 bp, Homo sapiens
atttgcaaagatttgatttaaacatagaaacaactttatt

SEQ ID NO: 16575 - DNA, 40 bp, Homo sapiens
aataaagttgtttctatgtttaaatcaaatctttgcaaat

SEQ ID NO: 16576 - DNA, 40 bp, Homo sapiens
tttgcaaagatttgatttaaacatagaaacaactttattt

SEQ ID NO: 16577 - DNA, 40 bp, Homo sapiens
aaataaagttgtttctatgtttaaatcaaatctttgcaaa

SEQ ID NO: 16578 - DNA, 40 bp, Homo sapiens
ttgcaaagatttgatttaaacatagaaacaactttatttg

SEQ ID NO: 16579 - DNA, 40 bp, Homo sapiens
caaataaagttgtttctatgtttaaatcaaatctttgcaa

SEQ ID NO: 16580 - DNA, 40 bp, Homo sapiens
tgcaaagatttgatttaaacatagaaacaactttatttgg

SEQ ID NO: 16581 - DNA, 40 bp, Homo sapiens
ccaaataaagttgtttctatgtttaaatcaaatctttgca

SEQ ID NO: 16582 - DNA, 40 bp, Homo sapiens
gcaaagatttgatttaaacatagaaacaactttatttggc

SEQ ID NO: 16583 - DNA, 40 bp, Homo sapiens
gccaaataaagttgtttctatgtttaaatcaaatctttgc

SEQ ID NO: 16584 - DNA, 40 bp, Homo sapiens
caaagatttgatttaaacatagaaacaactttatttggct

SEQ ID NO: 16585 - DNA, 40 bp, Homo sapiens
agccaaataaagttgtttctatgtttaaatcaaatctttg

SEQ ID NO: 16586 - DNA, 40 bp, Homo sapiens
aaagatttgatttaaacatagaaacaactttatttggctt

SEQ ID NO: 16587 - DNA, 40 bp, Homo sapiens
aagccaaataaagttgtttctatgtttaaatcaaatcttt

SEQ ID NO: 16588 - DNA, 40 bp, Homo sapiens
aagatttgatttaaacatagaaacaactttatttggcttc

SEQ ID NO: 16589 - DNA, 40 bp, Homo sapiens
gaagccaaataaagttgtttctatgtttaaatcaaatctt

SEQ ID NO: 16590 - DNA, 40 bp, Homo sapiens
agatttgatttaaacatagaaacaactttatttggcttcc

SEQ ID NO: 16591 - DNA, 40 bp, Homo sapiens
ggaagccaaataaagttgtttctatgtttaaatcaaatct

SEQ ID NO: 16592 - DNA, 40 bp, Homo sapiens
gatttgatttaaacatagaaacaactttatttggcttcca

SEQ ID NO: 16593 - DNA, 40 bp, Homo sapiens
tggaagccaaataaagttgtttctatgtttaaatcaaatc

SEQ ID NO: 16594 - DNA, 40 bp, Homo sapiens
atttgatttaaacatagaaacaactttatttggcttccaa

SEQ ID NO: 16595 - DNA, 40 bp, Homo sapiens
ttggaagccaaataaagttgtttctatgtttaaatcaaat

SEQ ID NO: 16596 - DNA, 40 bp, Homo sapiens
tttgatttaaacatagaaacaactttatttggcttccaat

SEQ ID NO: 16597 - DNA, 40 bp, Homo sapiens
attggaagccaaataaagttgtttctatgtttaaatcaaa

SEQ ID NO: 16598 - DNA, 40 bp, Homo sapiens
ttgatttaaacatagaaacaactttatttggcttccaatt

SEQ ID NO: 16599 - DNA, 40 bp, Homo sapiens
aattggaagccaaataaagttgtttctatgtttaaatcaa

SEQ ID NO: 16600 - DNA, 40 bp, Homo sapiens
tgatttaaacatagaaacaactttatttggcttccaattt

SEQ ID NO: 16601 - DNA, 40 bp, Homo sapiens
aaattggaagccaaataaagttgtttctatgtttaaatca

SEQ ID NO: 16602 - DNA, 40 bp, Homo sapiens
gatttaaacatagaaacaactttatttggcttccaatttt

SEQ ID NO: 16603 - DNA, 40 bp, Homo sapiens
aaaattggaagccaaataaagttgtttctatgtttaaatc

SEQ ID NO: 16604 - DNA, 40 bp, Homo sapiens
atttaaacatagaaacaactttatttggcttccaatttta

SEQ ID NO: 16605 - DNA, 40 bp, Homo sapiens
taaaattggaagccaaataaagttgtttctatgtttaaat

SEQ ID NO: 16606 - DNA, 40 bp, Homo sapiens
tttaaacatagaaacaactttatttggcttccaattttaa

SEQ ID NO: 16607 - DNA, 40 bp, Homo sapiens
ttaaaattggaagccaaataaagttgtttctatgtttaaa

SEQ ID NO: 16608 - DNA, 40 bp, Homo sapiens
ttaaacatagaaacaactttatttggcttccaattttaag

SEQ ID NO: 16609 - DNA, 40 bp, Homo sapiens
cttaaaattggaagccaaataaagttgtttctatgtttaa

SEQ ID NO: 16610 - DNA, 40 bp, Homo sapiens
taaacatagaaacaactttatttggcttccaattttaaga

SEQ ID NO: 16611 - DNA, 40 bp, Homo sapiens
tcttaaaattggaagccaaataaagttgtttctatgttta

SEQ ID NO: 16612 - DNA, 40 bp, Homo sapiens
aaacatagaaacaactttatttggcttccaattttaagaa

SEQ ID NO: 16613 - DNA, 40 bp, Homo sapiens
ttcttaaaattggaagccaaataaagttgtttctatgttt

SEQ ID NO: 16614 - DNA, 40 bp, Homo sapiens
aacatagaaacaactttatttggcttccaattttaagaat

SEQ ID NO: 16615 - DNA, 40 bp, Homo sapiens
attcttaaaattggaagccaaataaagttgtttctatgtt

SEQ ID NO: 16616 - DNA, 40 bp, Homo sapiens
acatagaaacaactttatttggcttccaattttaagaatt

SEQ ID NO: 16617 - DNA, 40 bp, Homo sapiens
aattcttaaaattggaagccaaataaagttgtttctatgt

SEQ ID NO: 16618 - DNA, 40 bp, Homo sapiens
catagaaacaactttatttggcttccaattttaagaattt

SEQ ID NO: 16619 - DNA, 40 bp, Homo sapiens
aaattcttaaaattggaagccaaataaagttgtttctatg

SEQ ID NO: 16620 - DNA, 40 bp, Homo sapiens
atagaaacaactttatttggcttccaattttaagaattta

SEQ ID NO: 16621 - DNA, 40 bp, Homo sapiens
taaattcttaaaattggaagccaaataaagttgtttctat

SEQ ID NO: 16622 - DNA, 40 bp, Homo sapiens
tagaaacaactttatttggcttccaattttaagaatttac

SEQ ID NO: 16623 - DNA, 40 bp, Homo sapiens
gtaaattcttaaaattggaagccaaataaagttgtttcta

SEQ ID NO: 16624 - DNA, 40 bp, Homo sapiens
agaaacaactttatttggcttccaattttaagaatttaca

SEQ ID NO: 16625 - DNA, 40 bp, Homo sapiens
tgtaaattcttaaaattggaagccaaataaagttgtttct

SEQ ID NO: 16626 - DNA, 40 bp, Homo sapiens
gaaacaactttatttggcttccaattttaagaatttacag

SEQ ID NO: 16627 - DNA, 40 bp, Homo sapiens
ctgtaaattcttaaaattggaagccaaataaagttgtttc

SEQ ID NO: 16628 - DNA, 40 bp, Homo sapiens
aaacaactttatttggcttccaattttaagaatttacagc

SEQ ID NO: 16629 - DNA, 40 bp, Homo sapiens
gctgtaaattcttaaaattggaagccaaataaagttgttt

SEQ ID NO: 16630 - DNA, 40 bp, Homo sapiens
aacaactttatttggcttccaattttaagaatttacagca

SEQ ID NO: 16631 - DNA, 40 bp, Homo sapiens
tgctgtaaattcttaaaattggaagccaaataaagttgtt

SEQ ID NO: 16632 - DNA, 40 bp, Homo sapiens
acaactttatttggcttccaattttaagaatttacagcag

SEQ ID NO: 16633 - DNA, 40 bp, Homo sapiens
ctgctgtaaattcttaaaattggaagccaaataaagttgt

SEQ ID NO: 16634 - DNA, 40 bp, Homo sapiens
caactttatttggcttccaattttaagaatttacagcagt

SEQ ID NO: 16635 - DNA, 40 bp, Homo sapiens
actgctgtaaattcttaaaattggaagccaaataaagttg

SEQ ID NO: 16636 - DNA, 40 bp, Homo sapiens
aactttatttggcttccaattttaagaatttacagcagta

SEQ ID NO: 16637 - DNA, 40 bp, Homo sapiens
tactgctgtaaattcttaaaattggaagccaaataaagtt

SEQ ID NO: 16638 - DNA, 40 bp, Homo sapiens
actttatttggcttccaattttaagaatttacagcagtaa

SEQ ID NO: 16639 - DNA, 40 bp, Homo sapiens
ttactgctgtaaattcttaaaattggaagccaaataaagt

SEQ ID NO: 16640 - DNA, 40 bp, Homo sapiens
ctttatttggcttccaattttaagaatttacagcagtaaa

SEQ ID NO: 16641 - DNA, 40 bp, Homo sapiens
tttactgctgtaaattcttaaaattggaagccaaataaag

SEQ ID NO: 16642 - DNA, 40 bp, Homo sapiens
tttatttggcttccaattttaagaatttacagcagtaaag

SEQ ID NO: 16643 - DNA, 40 bp, Homo sapiens
ctttactgctgtaaattcttaaaattggaagccaaataaa

SEQ ID NO: 16644 - DNA, 40 bp, Homo sapiens
ttatttggcttccaattttaagaatttacagcagtaaagg

SEQ ID NO: 16645 - DNA, 40 bp, Homo sapiens
cctttactgctgtaaattcttaaaattggaagccaaataa

SEQ ID NO: 16646 - DNA, 40 bp, Homo sapiens
tatttggcttccaattttaagaatttacagcagtaaaggg

SEQ ID NO: 16647 - DNA, 40 bp, Homo sapiens
ccctttactgctgtaaattcttaaaattggaagccaaata

SEQ ID NO: 16648 - DNA, 40 bp, Homo sapiens
atttggcttccaattttaagaatttacagcagtaaagggg

SEQ ID NO: 16649 - DNA, 40 bp, Homo sapiens
cccctttactgctgtaaattcttaaaattggaagccaaat

SEQ ID NO: 16650 - DNA, 40 bp, Homo sapiens
tttggcttccaattttaagaatttacagcagtaaagggga

SEQ ID NO: 16651 - DNA, 40 bp, Homo sapiens
tcccctttactgctgtaaattcttaaaattggaagccaaa

SEQ ID NO: 16652 - DNA, 40 bp, Homo sapiens
ttggcttccaattttaagaatttacagcagtaaaggggaa

SEQ ID NO: 16653 - DNA, 40 bp, Homo sapiens
ttcccctttactgctgtaaattcttaaaattggaagccaa

SEQ ID NO: 16654 - DNA, 40 bp, Homo sapiens
tggcttccaattttaagaatttacagcagtaaaggggaac

SEQ ID NO: 16655 - DNA, 40 bp, Homo sapiens
gttcccctttactgctgtaaattcttaaaattggaagcca

SEQ ID NO: 16656 - DNA, 40 bp, Homo sapiens
ggcttccaattttaagaatttacagcagtaaaggggaaca

SEQ ID NO: 16657 - DNA, 40 bp, Homo sapiens
tgttcccctttactgctgtaaattcttaaaattggaagcc

SEQ ID NO: 16658 - DNA, 40 bp, Homo sapiens
gcttccaattttaagaatttacagcagtaaaggggaacag

SEQ ID NO: 16659 - DNA, 40 bp, Homo sapiens
ctgttcccctttactgctgtaaattcttaaaattggaagc

SEQ ID NO: 16660 - DNA, 40 bp, Homo sapiens
cttccaattttaagaatttacagcagtaaaggggaacagt

SEQ ID NO: 16661 - DNA, 40 bp, Homo sapiens
actgttcccctttactgctgtaaattcttaaaattggaag

SEQ ID NO: 16662 - DNA, 40 bp, Homo sapiens
ttccaattttaagaatttacagcagtaaaggggaacagtc

SEQ ID NO: 16663 - DNA, 40 bp, Homo sapiens
gactgttcccctttactgctgtaaattcttaaaattggaa

SEQ ID NO: 16664 - DNA, 40 bp, Homo sapiens
tccaattttaagaatttacagcagtaaaggggaacagtct

SEQ ID NO: 16665 - DNA, 40 bp, Homo sapiens
agactgttcccctttactgctgtaaattcttaaaattgga

SEQ ID NO: 16666 - DNA, 40 bp, Homo sapiens
ccaattttaagaatttacagcagtaaaggggaacagtcta

SEQ ID NO: 16667 - DNA, 40 bp, Homo sapiens
tagactgttcccctttactgctgtaaattcttaaaattgg

SEQ ID NO: 16668 - DNA, 40 bp, Homo sapiens
caattttaagaatttacagcagtaaaggggaacagtctaa

SEQ ID NO: 16669 - DNA, 40 bp, Homo sapiens
ttagactgttcccctttactgctgtaaattcttaaaattg

SEQ ID NO: 16670 - DNA, 40 bp, Homo sapiens
aattttaagaatttacagcagtaaaggggaacagtctaat

SEQ ID NO: 16671 - DNA, 40 bp, Homo sapiens
attagactgttcccctttactgctgtaaattcttaaaatt

SEQ ID NO: 16672 - DNA, 40 bp, Homo sapiens
attttaagaatttacagcagtaaaggggaacagtctaatt

SEQ ID NO: 16673 - DNA, 40 bp, Homo sapiens
aattagactgttcccctttactgctgtaaattcttaaaat

SEQ ID NO: 16674 - DNA, 40 bp, Homo sapiens
ttttaagaatttacagcagtaaaggggaacagtctaattg

SEQ ID NO: 16675 - DNA, 40 bp, Homo sapiens
caattagactgttcccctttactgctgtaaattcttaaaa

SEQ ID NO: 16676 - DNA, 40 bp, Homo sapiens
tttaagaatttacagcagtaaaggggaacagtctaattga

SEQ ID NO: 16677 - DNA, 40 bp, Homo sapiens
tcaattagactgttcccctttactgctgtaaattcttaaa

SEQ ID NO: 16678 - DNA, 40 bp, Homo sapiens
ttaagaatttacagcagtaaaggggaacagtctaattgaa

SEQ ID NO: 16679 - DNA, 40 bp, Homo sapiens
ttcaattagactgttcccctttactgctgtaaattcttaa

SEQ ID NO: 16680 - DNA, 40 bp, Homo sapiens
taagaatttacagcagtaaaggggaacagtctaattgaag

SEQ ID NO: 16681 - DNA, 40 bp, Homo sapiens
cttcaattagactgttcccctttactgctgtaaattctta

SEQ ID NO: 16682 - DNA, 40 bp, Homo sapiens
aagaatttacagcagtaaaggggaacagtctaattgaagt

SEQ ID NO: 16683 - DNA, 40 bp, Homo sapiens
acttcaattagactgttcccctttactgctgtaaattctt

SEQ ID NO: 16684 - DNA, 40 bp, Homo sapiens
agaatttacagcagtaaaggggaacagtctaattgaagta

SEQ ID NO: 16685 - DNA, 40 bp, Homo sapiens
tacttcaattagactgttcccctttactgctgtaaattct

SEQ ID NO: 16686 - DNA, 40 bp, Homo sapiens
gaatttacagcagtaaaggggaacagtctaattgaagtag

SEQ ID NO: 16687 - DNA, 40 bp, Homo sapiens
ctacttcaattagactgttcccctttactgctgtaaattc

SEQ ID NO: 16688 - DNA, 40 bp, Homo sapiens
aatttacagcagtaaaggggaacagtctaattgaagtaga

SEQ ID NO: 16689 - DNA, 40 bp, Homo sapiens
tctacttcaattagactgttcccctttactgctgtaaatt

SEQ ID NO: 16690 - DNA, 40 bp, Homo sapiens
atttacagcagtaaaggggaacagtctaattgaagtagac

SEQ ID NO: 16691 - DNA, 40 bp, Homo sapiens
gtctacttcaattagactgttcccctttactgctgtaaat

SEQ ID NO: 16692 - DNA, 40 bp, Homo sapiens
tttacagcagtaaaggggaacagtctaattgaagtagact

SEQ ID NO: 16693 - DNA, 40 bp, Homo sapiens
agtctacttcaattagactgttcccctttactgctgtaaa

SEQ ID NO: 16694 - DNA, 40 bp, Homo sapiens
ttacagcagtaaaggggaacagtctaattgaagtagactg

SEQ ID NO: 16695 - DNA, 40 bp, Homo sapiens
cagtctacttcaattagactgttcccctttactgctgtaa

SEQ ID NO: 16696 - DNA, 40 bp, Homo sapiens
tacagcagtaaaggggaacagtctaattgaagtagactgc

SEQ ID NO: 16697 - DNA, 40 bp, Homo sapiens
gcagtctacttcaattagactgttcccctttactgctgta

SEQ ID NO: 16698 - DNA, 40 bp, Homo sapiens
acagcagtaaaggggaacagtctaattgaagtagactgcc

SEQ ID NO: 16699 - DNA, 40 bp, Homo sapiens
ggcagtctacttcaattagactgttcccctttactgctgt

SEQ ID NO: 16700 - DNA, 40 bp, Homo sapiens
cagcagtaaaggggaacagtctaattgaagtagactgcct

SEQ ID NO: 16701 - DNA, 40 bp, Homo sapiens
aggcagtctacttcaattagactgttcccctttactgctg

SEQ ID NO: 16702 - DNA, 40 bp, Homo sapiens
agcagtaaaggggaacagtctaattgaagtagactgccta

SEQ ID NO: 16703 - DNA, 40 bp, Homo sapiens
taggcagtctacttcaattagactgttcccctttactgct

SEQ ID NO: 16704 - DNA, 40 bp, Homo sapiens
gcagtaaaggggaacagtctaattgaagtagactgcctat

SEQ ID NO: 16705 - DNA, 40 bp, Homo sapiens
ataggcagtctacttcaattagactgttcccctttactgc

SEQ ID NO: 16706 - DNA, 40 bp, Homo sapiens
cagtaaaggggaacagtctaattgaagtagactgcctatg

SEQ ID NO: 16707 - DNA, 40 bp, Homo sapiens
cataggcagtctacttcaattagactgttcccctttactg

SEQ ID NO: 16708 - DNA, 40 bp, Homo sapiens
agtaaaggggaacagtctaattgaagtagactgcctatgc

SEQ ID NO: 16709 - DNA, 40 bp, Homo sapiens
gcataggcagtctacttcaattagactgttcccctttact

SEQ ID NO: 16710 - DNA, 40 bp, Homo sapiens
gtaaaggggaacagtctaattgaagtagactgcctatgca

SEQ ID NO: 16711 - DNA, 40 bp, Homo sapiens
tgcataggcagtctacttcaattagactgttcccctttac

SEQ ID NO: 16712 - DNA, 40 bp, Homo sapiens
taaaggggaacagtctaattgaagtagactgcctatgcaa

SEQ ID NO: 16713 - DNA, 40 bp, Homo sapiens
ttgcataggcagtctacttcaattagactgttccccttta

SEQ ID NO: 16714 - DNA, 40 bp, Homo sapiens
aaaggggaacagtctaattgaagtagactgcctatgcaat

SEQ ID NO: 16715 - DNA, 40 bp, Homo sapiens
attgcataggcagtctacttcaattagactgttccccttt

SEQ ID NO: 16716 - DNA, 40 bp, Homo sapiens
aaggggaacagtctaattgaagtagactgcctatgcaata

SEQ ID NO: 16717 - DNA, 40 bp, Homo sapiens
tattgcataggcagtctacttcaattagactgttcccctt

SEQ ID NO: 16718 - DNA, 40 bp, Homo sapiens
aggggaacagtctaattgaagtagactgcctatgcaatag

SEQ ID NO: 16719 - DNA, 40 bp, Homo sapiens
ctattgcataggcagtctacttcaattagactgttcccct

SEQ ID NO: 16720 - DNA, 40 bp, Homo sapiens
ggggaacagtctaattgaagtagactgcctatgcaatagt

SEQ ID NO: 16721 - DNA, 40 bp, Homo sapiens
actattgcataggcagtctacttcaattagactgttcccc

SEQ ID NO: 16722 - DNA, 40 bp, Homo sapiens
gggaacagtctaattgaagtagactgcctatgcaatagtc

SEQ ID NO: 16723 - DNA, 40 bp, Homo sapiens
gactattgcataggcagtctacttcaattagactgttccc

SEQ ID NO: 16724 - DNA, 40 bp, Homo sapiens
ggaacagtctaattgaagtagactgcctatgcaatagtct

SEQ ID NO: 16725 - DNA, 40 bp, Homo sapiens
agactattgcataggcagtctacttcaattagactgttcc

SEQ ID NO: 16726 - DNA, 40 bp, Homo sapiens
gaacagtctaattgaagtagactgcctatgcaatagtctc

SEQ ID NO: 16727 - DNA, 40 bp, Homo sapiens
gagactattgcataggcagtctacttcaattagactgttc

SEQ ID NO: 16728 - DNA, 40 bp, Homo sapiens
aacagtctaattgaagtagactgcctatgcaatagtctct

SEQ ID NO: 16729 - DNA, 40 bp, Homo sapiens
agagactattgcataggcagtctacttcaattagactgtt

SEQ ID NO: 16730 - DNA, 40 bp, Homo sapiens
acagtctaattgaagtagactgcctatgcaatagtctctg

SEQ ID NO: 16731 - DNA, 40 bp, Homo sapiens
cagagactattgcataggcagtctacttcaattagactgt

SEQ ID NO: 16732 - DNA, 40 bp, Homo sapiens
cagtctaattgaagtagactgcctatgcaatagtctctgt

SEQ ID NO: 16733 - DNA, 40 bp, Homo sapiens
acagagactattgcataggcagtctacttcaattagactg

SEQ ID NO: 16734 - DNA, 40 bp, Homo sapiens
agtctaattgaagtagactgcctatgcaatagtctctgta

SEQ ID NO: 16735 - DNA, 40 bp, Homo sapiens
tacagagactattgcataggcagtctacttcaattagact

SEQ ID NO: 16736 - DNA, 40 bp, Homo sapiens
gtctaattgaagtagactgcctatgcaatagtctctgtat

SEQ ID NO: 16737 - DNA, 40 bp, Homo sapiens
atacagagactattgcataggcagtctacttcaattagac

SEQ ID NO: 16738 - DNA, 40 bp, Homo sapiens
tctaattgaagtagactgcctatgcaatagtctctgtata

SEQ ID NO: 16739 - DNA, 40 bp, Homo sapiens
tatacagagactattgcataggcagtctacttcaattaga

SEQ ID NO: 16740 - DNA, 40 bp, Homo sapiens
ctaattgaagtagactgcctatgcaatagtctctgtatat

SEQ ID NO: 16741 - DNA, 40 bp, Homo sapiens
atatacagagactattgcataggcagtctacttcaattag

SEQ ID NO: 16742 - DNA, 40 bp, Homo sapiens
taattgaagtagactgcctatgcaatagtctctgtatatt

SEQ ID NO: 16743 - DNA, 40 bp, Homo sapiens
aatatacagagactattgcataggcagtctacttcaatta

SEQ ID NO: 16744 - DNA, 40 bp, Homo sapiens
aattgaagtagactgcctatgcaatagtctctgtatattt

SEQ ID NO: 16745 - DNA, 40 bp, Homo sapiens
aaatatacagagactattgcataggcagtctacttcaatt

SEQ ID NO: 16746 - DNA, 40 bp, Homo sapiens
attgaagtagactgcctatgcaatagtctctgtatattta

SEQ ID NO: 16747 - DNA, 40 bp, Homo sapiens
taaatatacagagactattgcataggcagtctacttcaat

SEQ ID NO: 16748 - DNA, 40 bp, Homo sapiens
ttgaagtagactgcctatgcaatagtctctgtatatttac

SEQ ID NO: 16749 - DNA, 40 bp, Homo sapiens
gtaaatatacagagactattgcataggcagtctacttcaa

SEQ ID NO: 16750 - DNA, 40 bp, Homo sapiens
tgaagtagactgcctatgcaatagtctctgtatatttact

SEQ ID NO: 16751 - DNA, 40 bp, Homo sapiens
agtaaatatacagagactattgcataggcagtctacttca

SEQ ID NO: 16752 - DNA, 40 bp, Homo sapiens
gaagtagactgcctatgcaatagtctctgtatatttactt

SEQ ID NO: 16753 - DNA, 40 bp, Homo sapiens
aagtaaatatacagagactattgcataggcagtctacttc

SEQ ID NO: 16754 - DNA, 40 bp, Homo sapiens
aagtagactgcctatgcaatagtctctgtatatttacttt

SEQ ID NO: 16755 - DNA, 40 bp, Homo sapiens
aaagtaaatatacagagactattgcataggcagtctactt

SEQ ID NO: 16756 - DNA, 40 bp, Homo sapiens
agtagactgcctatgcaatagtctctgtatatttactttt

SEQ ID NO: 16757 - DNA, 40 bp, Homo sapiens
aaaagtaaatatacagagactattgcataggcagtctact

SEQ ID NO: 16758 - DNA, 40 bp, Homo sapiens
gtagactgcctatgcaatagtctctgtatatttacttttg

SEQ ID NO: 16759 - DNA, 40 bp, Homo sapiens
caaaagtaaatatacagagactattgcataggcagtctac

SEQ ID NO: 16760 - DNA, 40 bp, Homo sapiens
tagactgcctatgcaatagtctctgtatatttacttttga

SEQ ID NO: 16761 - DNA, 40 bp, Homo sapiens
tcaaaagtaaatatacagagactattgcataggcagtcta

SEQ ID NO: 16762 - DNA, 40 bp, Homo sapiens
agactgcctatgcaatagtctctgtatatttacttttgac

SEQ ID NO: 16763 - DNA, 40 bp, Homo sapiens
gtcaaaagtaaatatacagagactattgcataggcagtct

SEQ ID NO: 16764 - DNA, 40 bp, Homo sapiens
gactgcctatgcaatagtctctgtatatttacttttgaca

SEQ ID NO: 16765 - DNA, 40 bp, Homo sapiens
tgtcaaaagtaaatatacagagactattgcataggcagtc

SEQ ID NO: 16766 - DNA, 40 bp, Homo sapiens
actgcctatgcaatagtctctgtatatttacttttgacaa

SEQ ID NO: 16767 - DNA, 40 bp, Homo sapiens
ttgtcaaaagtaaatatacagagactattgcataggcagt

SEQ ID NO: 16768 - DNA, 40 bp, Homo sapiens
ctgcctatgcaatagtctctgtatatttacttttgacaag

SEQ ID NO: 16769 - DNA, 40 bp, Homo sapiens
cttgtcaaaagtaaatatacagagactattgcataggcag

SEQ ID NO: 16770 - DNA, 40 bp, Homo sapiens
tgcctatgcaatagtctctgtatatttacttttgacaagt

SEQ ID NO: 16771 - DNA, 40 bp, Homo sapiens
acttgtcaaaagtaaatatacagagactattgcataggca

SEQ ID NO: 16772 - DNA, 40 bp, Homo sapiens
gcctatgcaatagtctctgtatatttacttttgacaagtt

SEQ ID NO: 16773 - DNA, 40 bp, Homo sapiens
aacttgtcaaaagtaaatatacagagactattgcataggc

SEQ ID NO: 16774 - DNA, 40 bp, Homo sapiens
cctatgcaatagtctctgtatatttacttttgacaagtta

SEQ ID NO: 16775 - DNA, 40 bp, Homo sapiens
taacttgtcaaaagtaaatatacagagactattgcatagg

SEQ ID NO: 16776 - DNA, 40 bp, Homo sapiens
ctatgcaatagtctctgtatatttacttttgacaagttaa

SEQ ID NO: 16777 - DNA, 40 bp, Homo sapiens
ttaacttgtcaaaagtaaatatacagagactattgcatag

SEQ ID NO: 16778 - DNA, 40 bp, Homo sapiens
tatgcaatagtctctgtatatttacttttgacaagttaat

SEQ ID NO: 16779 - DNA, 40 bp, Homo sapiens
attaacttgtcaaaagtaaatatacagagactattgcata

SEQ ID NO: 16780 - DNA, 40 bp, Homo sapiens
atgcaatagtctctgtatatttacttttgacaagttaatt

SEQ ID NO: 16781 - DNA, 40 bp, Homo sapiens
aattaacttgtcaaaagtaaatatacagagactattgcat

SEQ ID NO: 16782 - DNA, 40 bp, Homo sapiens
tgcaatagtctctgtatatttacttttgacaagttaattc

SEQ ID NO: 16783 - DNA, 40 bp, Homo sapiens
gaattaacttgtcaaaagtaaatatacagagactattgca

SEQ ID NO: 16784 - DNA, 40 bp, Homo sapiens
gcaatagtctctgtatatttacttttgacaagttaattca

SEQ ID NO: 16785 - DNA, 40 bp, Homo sapiens
tgaattaacttgtcaaaagtaaatatacagagactattgc

SEQ ID NO: 16786 - DNA, 40 bp, Homo sapiens
caatagtctctgtatatttacttttgacaagttaattcaa

SEQ ID NO: 16787 - DNA, 40 bp, Homo sapiens
ttgaattaacttgtcaaaagtaaatatacagagactattg

SEQ ID NO: 16788 - DNA, 40 bp, Homo sapiens
aatagtctctgtatatttacttttgacaagttaattcaat

SEQ ID NO: 16789 - DNA, 40 bp, Homo sapiens
attgaattaacttgtcaaaagtaaatatacagagactatt

SEQ ID NO: 16790 - DNA, 40 bp, Homo sapiens
atagtctctgtatatttacttttgacaagttaattcaatg

SEQ ID NO: 16791 - DNA, 40 bp, Homo sapiens
cattgaattaacttgtcaaaagtaaatatacagagactat

SEQ ID NO: 16792 - DNA, 40 bp, Homo sapiens
tagtctctgtatatttacttttgacaagttaattcaatgt

SEQ ID NO: 16793 - DNA, 40 bp, Homo sapiens
acattgaattaacttgtcaaaagtaaatatacagagacta

SEQ ID NO: 16794 - DNA, 40 bp, Homo sapiens
agtctctgtatatttacttttgacaagttaattcaatgtg

SEQ ID NO: 16795 - DNA, 40 bp, Homo sapiens
cacattgaattaacttgtcaaaagtaaatatacagagact

SEQ ID NO: 16796 - DNA, 40 bp, Homo sapiens
gtctctgtatatttacttttgacaagttaattcaatgtgt

SEQ ID NO: 16797 - DNA, 40 bp, Homo sapiens
acacattgaattaacttgtcaaaagtaaatatacagagac

SEQ ID NO: 16798 - DNA, 40 bp, Homo sapiens
tctctgtatatttacttttgacaagttaattcaatgtgta

SEQ ID NO: 16799 - DNA, 40 bp, Homo sapiens
tacacattgaattaacttgtcaaaagtaaatatacagaga

SEQ ID NO: 16800 - DNA, 40 bp, Homo sapiens
ctctgtatatttacttttgacaagttaattcaatgtgtac

SEQ ID NO: 16801 - DNA, 40 bp, Homo sapiens
gtacacattgaattaacttgtcaaaagtaaatatacagag

SEQ ID NO: 16802 - DNA, 40 bp, Homo sapiens
tctgtatatttacttttgacaagttaattcaatgtgtact

SEQ ID NO: 16803 - DNA, 40 bp, Homo sapiens
agtacacattgaattaacttgtcaaaagtaaatatacaga

SEQ ID NO: 16804 - DNA, 40 bp, Homo sapiens
ctgtatatttacttttgacaagttaattcaatgtgtacta

SEQ ID NO: 16805 - DNA, 40 bp, Homo sapiens
tagtacacattgaattaacttgtcaaaagtaaatatacag

SEQ ID NO: 16806 - DNA, 40 bp, Homo sapiens
tgtatatttacttttgacaagttaattcaatgtgtactat

SEQ ID NO: 16807 - DNA, 40 bp, Homo sapiens
atagtacacattgaattaacttgtcaaaagtaaatataca

SEQ ID NO: 16808 - DNA, 40 bp, Homo sapiens
gtatatttacttttgacaagttaattcaatgtgtactata

SEQ ID NO: 16809 - DNA, 40 bp, Homo sapiens
tatagtacacattgaattaacttgtcaaaagtaaatatac

SEQ ID NO: 16810 - DNA, 40 bp, Homo sapiens
tatatttacttttgacaagttaattcaatgtgtactatag

SEQ ID NO: 16811 - DNA, 40 bp, Homo sapiens
ctatagtacacattgaattaacttgtcaaaagtaaatata

SEQ ID NO: 16812 - DNA, 40 bp, Homo sapiens
atatttacttttgacaagttaattcaatgtgtactatagt

SEQ ID NO: 16813 - DNA, 40 bp, Homo sapiens
actatagtacacattgaattaacttgtcaaaagtaaatat

SEQ ID NO: 16814 - DNA, 40 bp, Homo sapiens
tatttacttttgacaagttaattcaatgtgtactatagtt

SEQ ID NO: 16815 - DNA, 40 bp, Homo sapiens
aactatagtacacattgaattaacttgtcaaaagtaaata

SEQ ID NO: 16816 - DNA, 40 bp, Homo sapiens
atttacttttgacaagttaattcaatgtgtactatagttt

SEQ ID NO: 16817 - DNA, 40 bp, Homo sapiens
aaactatagtacacattgaattaacttgtcaaaagtaaat

SEQ ID NO: 16818 - DNA, 40 bp, Homo sapiens
tttacttttgacaagttaattcaatgtgtactatagtttt

SEQ ID NO: 16819 - DNA, 40 bp, Homo sapiens
aaaactatagtacacattgaattaacttgtcaaaagtaaa

SEQ ID NO: 16820 - DNA, 40 bp, Homo sapiens
ttacttttgacaagttaattcaatgtgtactatagttttg

SEQ ID NO: 16821 - DNA, 40 bp, Homo sapiens
caaaactatagtacacattgaattaacttgtcaaaagtaa

SEQ ID NO: 16822 - DNA, 40 bp, Homo sapiens
tacttttgacaagttaattcaatgtgtactatagttttgt

SEQ ID NO: 16823 - DNA, 40 bp, Homo sapiens
acaaaactatagtacacattgaattaacttgtcaaaagta

SEQ ID NO: 16824 - DNA, 40 bp, Homo sapiens
acttttgacaagttaattcaatgtgtactatagttttgtt

SEQ ID NO: 16825 - DNA, 40 bp, Homo sapiens
aacaaaactatagtacacattgaattaacttgtcaaaagt

SEQ ID NO: 16826 - DNA, 40 bp, Homo sapiens
cttttgacaagttaattcaatgtgtactatagttttgttt

SEQ ID NO: 16827 - DNA, 40 bp, Homo sapiens
aaacaaaactatagtacacattgaattaacttgtcaaaag

SEQ ID NO: 16828 - DNA, 40 bp, Homo sapiens
ttttgacaagttaattcaatgtgtactatagttttgtttc

SEQ ID NO: 16829 - DNA, 40 bp, Homo sapiens
gaaacaaaactatagtacacattgaattaacttgtcaaaa

SEQ ID NO: 16830 - DNA, 40 bp, Homo sapiens
tttgacaagttaattcaatgtgtactatagttttgtttct

SEQ ID NO: 16831 - DNA, 40 bp, Homo sapiens
agaaacaaaactatagtacacattgaattaacttgtcaaa

SEQ ID NO: 16832 - DNA, 40 bp, Homo sapiens
ttgacaagttaattcaatgtgtactatagttttgtttctt

SEQ ID NO: 16833 - DNA, 40 bp, Homo sapiens
aagaaacaaaactatagtacacattgaattaacttgtcaa

SEQ ID NO: 16834 - DNA, 40 bp, Homo sapiens
tgacaagttaattcaatgtgtactatagttttgtttcttt

SEQ ID NO: 16835 - DNA, 40 bp, Homo sapiens
aaagaaacaaaactatagtacacattgaattaacttgtca

SEQ ID NO: 16836 - DNA, 40 bp, Homo sapiens
gacaagttaattcaatgtgtactatagttttgtttctttg

SEQ ID NO: 16837 - DNA, 40 bp, Homo sapiens
caaagaaacaaaactatagtacacattgaattaacttgtc

SEQ ID NO: 16838 - DNA, 40 bp, Homo sapiens
acaagttaattcaatgtgtactatagttttgtttctttga

SEQ ID NO: 16839 - DNA, 40 bp, Homo sapiens
tcaaagaaacaaaactatagtacacattgaattaacttgt

SEQ ID NO: 16840 - DNA, 40 bp, Homo sapiens
caagttaattcaatgtgtactatagttttgtttctttgaa

SEQ ID NO: 16841 - DNA, 40 bp, Homo sapiens
ttcaaagaaacaaaactatagtacacattgaattaacttg

SEQ ID NO: 16842 - DNA, 40 bp, Homo sapiens
aagttaattcaatgtgtactatagttttgtttctttgaag

SEQ ID NO: 16843 - DNA, 40 bp, Homo sapiens
cttcaaagaaacaaaactatagtacacattgaattaactt

SEQ ID NO: 16844 - DNA, 40 bp, Homo sapiens
agttaattcaatgtgtactatagttttgtttctttgaaga

SEQ ID NO: 16845 - DNA, 40 bp, Homo sapiens
tcttcaaagaaacaaaactatagtacacattgaattaact

SEQ ID NO: 16846 - DNA, 40 bp, Homo sapiens
gttaattcaatgtgtactatagttttgtttctttgaagag

SEQ ID NO: 16847 - DNA, 40 bp, Homo sapiens
ctcttcaaagaaacaaaactatagtacacattgaattaac

SEQ ID NO: 16848 - DNA, 40 bp, Homo sapiens
ttaattcaatgtgtactatagttttgtttctttgaagagg

SEQ ID NO: 16849 - DNA, 40 bp, Homo sapiens
cctcttcaaagaaacaaaactatagtacacattgaattaa

SEQ ID NO: 16850 - DNA, 40 bp, Homo sapiens
taattcaatgtgtactatagttttgtttctttgaagaggt

SEQ ID NO: 16851 - DNA, 40 bp, Homo sapiens
acctcttcaaagaaacaaaactatagtacacattgaatta

SEQ ID NO: 16852 - DNA, 40 bp, Homo sapiens
aattcaatgtgtactatagttttgtttctttgaagaggtt

SEQ ID NO: 16853 - DNA, 40 bp, Homo sapiens
aacctcttcaaagaaacaaaactatagtacacattgaatt

SEQ ID NO: 16854 - DNA, 40 bp, Homo sapiens
attcaatgtgtactatagttttgtttctttgaagaggttt

SEQ ID NO: 16855 - DNA, 40 bp, Homo sapiens
aaacctcttcaaagaaacaaaactatagtacacattgaat

SEQ ID NO: 16856 - DNA, 40 bp, Homo sapiens
ttcaatgtgtactatagttttgtttctttgaagaggtttg

SEQ ID NO: 16857 - DNA, 40 bp, Homo sapiens
caaacctcttcaaagaaacaaaactatagtacacattgaa

SEQ ID NO: 16858 - DNA, 40 bp, Homo sapiens
tcaatgtgtactatagttttgtttctttgaagaggtttga

SEQ ID NO: 16859 - DNA, 40 bp, Homo sapiens
tcaaacctcttcaaagaaacaaaactatagtacacattga

SEQ ID NO: 16860 - DNA, 40 bp, Homo sapiens
caatgtgtactatagttttgtttctttgaagaggtttgaa

SEQ ID NO: 16861 - DNA, 40 bp, Homo sapiens
ttcaaacctcttcaaagaaacaaaactatagtacacattg

SEQ ID NO: 16862 - DNA, 40 bp, Homo sapiens
aatgtgtactatagttttgtttctttgaagaggtttgaat

SEQ ID NO: 16863 - DNA, 40 bp, Homo sapiens
attcaaacctcttcaaagaaacaaaactatagtacacatt

SEQ ID NO: 16864 - DNA, 40 bp, Homo sapiens
atgtgtactatagttttgtttctttgaagaggtttgaata

SEQ ID NO: 16865 - DNA, 40 bp, Homo sapiens
tattcaaacctcttcaaagaaacaaaactatagtacacat

SEQ ID NO: 16866 - DNA, 40 bp, Homo sapiens
tgtgtactatagttttgtttctttgaagaggtttgaatag

SEQ ID NO: 16867 - DNA, 40 bp, Homo sapiens
ctattcaaacctcttcaaagaaacaaaactatagtacaca

SEQ ID NO: 16868 - DNA, 40 bp, Homo sapiens
gtgtactatagttttgtttctttgaagaggtttgaatagt

SEQ ID NO: 16869 - DNA, 40 bp, Homo sapiens
actattcaaacctcttcaaagaaacaaaactatagtacac

SEQ ID NO: 16870 - DNA, 40 bp, Homo sapiens
tgtactatagttttgtttctttgaagaggtttgaatagtg

SEQ ID NO: 16871 - DNA, 40 bp, Homo sapiens
cactattcaaacctcttcaaagaaacaaaactatagtaca

SEQ ID NO: 16872 - DNA, 40 bp, Homo sapiens
gtactatagttttgtttctttgaagaggtttgaatagtgc

SEQ ID NO: 16873 - DNA, 40 bp, Homo sapiens
gcactattcaaacctcttcaaagaaacaaaactatagtac

SEQ ID NO: 16874 - DNA, 40 bp, Homo sapiens
tactatagttttgtttctttgaagaggtttgaatagtgca

SEQ ID NO: 16875 - DNA, 40 bp, Homo sapiens
tgcactattcaaacctcttcaaagaaacaaaactatagta

SEQ ID NO: 16876 - DNA, 40 bp, Homo sapiens
actatagttttgtttctttgaagaggtttgaatagtgcac

SEQ ID NO: 16877 - DNA, 40 bp, Homo sapiens
gtgcactattcaaacctcttcaaagaaacaaaactatagt

SEQ ID NO: 16878 - DNA, 40 bp, Homo sapiens
ctatagttttgtttctttgaagaggtttgaatagtgcacc

SEQ ID NO: 16879 - DNA, 40 bp, Homo sapiens
ggtgcactattcaaacctcttcaaagaaacaaaactatag

SEQ ID NO: 16880 - DNA, 40 bp, Homo sapiens
tatagttttgtttctttgaagaggtttgaatagtgcaccc

SEQ ID NO: 16881 - DNA, 40 bp, Homo sapiens
gggtgcactattcaaacctcttcaaagaaacaaaactata

SEQ ID NO: 16882 - DNA, 40 bp, Homo sapiens
atagttttgtttctttgaagaggtttgaatagtgcaccca

SEQ ID NO: 16883 - DNA, 40 bp, Homo sapiens
tgggtgcactattcaaacctcttcaaagaaacaaaactat

SEQ ID NO: 16884 - DNA, 40 bp, Homo sapiens
tagttttgtttctttgaagaggtttgaatagtgcacccat

SEQ ID NO: 16885 - DNA, 40 bp, Homo sapiens
atgggtgcactattcaaacctcttcaaagaaacaaaacta

SEQ ID NO: 16886 - DNA, 40 bp, Homo sapiens
agttttgtttctttgaagaggtttgaatagtgcacccatt

SEQ ID NO: 16887 - DNA, 40 bp, Homo sapiens
aatgggtgcactattcaaacctcttcaaagaaacaaaact

SEQ ID NO: 16888 - DNA, 40 bp, Homo sapiens
gttttgtttctttgaagaggtttgaatagtgcacccattt

SEQ ID NO: 16889 - DNA, 40 bp, Homo sapiens
aaatgggtgcactattcaaacctcttcaaagaaacaaaac

SEQ ID NO: 16890 - DNA, 40 bp, Homo sapiens
ttttgtttctttgaagaggtttgaatagtgcacccatttt

SEQ ID NO: 16891 - DNA, 40 bp, Homo sapiens
aaaatgggtgcactattcaaacctcttcaaagaaacaaaa

SEQ ID NO: 16892 - DNA, 40 bp, Homo sapiens
tttgtttctttgaagaggtttgaatagtgcacccatttta

SEQ ID NO: 16893 - DNA, 40 bp, Homo sapiens
taaaatgggtgcactattcaaacctcttcaaagaaacaaa

SEQ ID NO: 16894 - DNA, 40 bp, Homo sapiens
ttgtttctttgaagaggtttgaatagtgcacccattttaa

SEQ ID NO: 16895 - DNA, 40 bp, Homo sapiens
ttaaaatgggtgcactattcaaacctcttcaaagaaacaa

SEQ ID NO: 16896 - DNA, 40 bp, Homo sapiens
tgtttctttgaagaggtttgaatagtgcacccattttaat

SEQ ID NO: 16897 - DNA, 40 bp, Homo sapiens
attaaaatgggtgcactattcaaacctcttcaaagaaaca

SEQ ID NO: 16898 - DNA, 40 bp, Homo sapiens
gtttctttgaagaggtttgaatagtgcacccattttaatc

SEQ ID NO: 16899 - DNA, 40 bp, Homo sapiens
gattaaaatgggtgcactattcaaacctcttcaaagaaac

SEQ ID NO: 16900 - DNA, 40 bp, Homo sapiens
tttctttgaagaggtttgaatagtgcacccattttaatct

SEQ ID NO: 16901 - DNA, 40 bp, Homo sapiens
agattaaaatgggtgcactattcaaacctcttcaaagaaa

SEQ ID NO: 16902 - DNA, 40 bp, Homo sapiens
ttctttgaagaggtttgaatagtgcacccattttaatctg

SEQ ID NO: 16903 - DNA, 40 bp, Homo sapiens
cagattaaaatgggtgcactattcaaacctcttcaaagaa

SEQ ID NO: 16904 - DNA, 40 bp, Homo sapiens
tctttgaagaggtttgaatagtgcacccattttaatctgt

SEQ ID NO: 16905 - DNA, 40 bp, Homo sapiens
acagattaaaatgggtgcactattcaaacctcttcaaaga

SEQ ID NO: 16906 - DNA, 40 bp, Homo sapiens
ctttgaagaggtttgaatagtgcacccattttaatctgta

SEQ ID NO: 16907 - DNA, 40 bp, Homo sapiens
tacagattaaaatgggtgcactattcaaacctcttcaaag

SEQ ID NO: 16908 - DNA, 40 bp, Homo sapiens
tttgaagaggtttgaatagtgcacccattttaatctgtat

SEQ ID NO: 16909 - DNA, 40 bp, Homo sapiens
atacagattaaaatgggtgcactattcaaacctcttcaaa

SEQ ID NO: 16910 - DNA, 40 bp, Homo sapiens
ttgaagaggtttgaatagtgcacccattttaatctgtatt

SEQ ID NO: 16911 - DNA, 40 bp, Homo sapiens
aatacagattaaaatgggtgcactattcaaacctcttcaa

SEQ ID NO: 16912 - DNA, 40 bp, Homo sapiens
tgaagaggtttgaatagtgcacccattttaatctgtattg

SEQ ID NO: 16913 - DNA, 40 bp, Homo sapiens
caatacagattaaaatgggtgcactattcaaacctcttca

SEQ ID NO: 16914 - DNA, 40 bp, Homo sapiens
gaagaggtttgaatagtgcacccattttaatctgtattgc

SEQ ID NO: 16915 - DNA, 40 bp, Homo sapiens
gcaatacagattaaaatgggtgcactattcaaacctcttc

SEQ ID NO: 16916 - DNA, 40 bp, Homo sapiens
aagaggtttgaatagtgcacccattttaatctgtattgca

SEQ ID NO: 16917 - DNA, 40 bp, Homo sapiens
tgcaatacagattaaaatgggtgcactattcaaacctctt

SEQ ID NO: 16918 - DNA, 40 bp, Homo sapiens
agaggtttgaatagtgcacccattttaatctgtattgcaa

SEQ ID NO: 16919 - DNA, 40 bp, Homo sapiens
ttgcaatacagattaaaatgggtgcactattcaaacctct

SEQ ID NO: 16920 - DNA, 40 bp, Homo sapiens
gaggtttgaatagtgcacccattttaatctgtattgcaaa

SEQ ID NO: 16921 - DNA, 40 bp, Homo sapiens
tttgcaatacagattaaaatgggtgcactattcaaacctc

SEQ ID NO: 16922 - DNA, 40 bp, Homo sapiens
aggtttgaatagtgcacccattttaatctgtattgcaaat

SEQ ID NO: 16923 - DNA, 40 bp, Homo sapiens
atttgcaatacagattaaaatgggtgcactattcaaacct

SEQ ID NO: 16924 - DNA, 40 bp, Homo sapiens
ggtttgaatagtgcacccattttaatctgtattgcaaatt

SEQ ID NO: 16925 - DNA, 40 bp, Homo sapiens
aatttgcaatacagattaaaatgggtgcactattcaaacc

SEQ ID NO: 16926 - DNA, 40 bp, Homo sapiens
gtttgaatagtgcacccattttaatctgtattgcaaattc

SEQ ID NO: 16927 - DNA, 40 bp, Homo sapiens
gaatttgcaatacagattaaaatgggtgcactattcaaac

SEQ ID NO: 16928 - DNA, 40 bp, Homo sapiens
tttgaatagtgcacccattttaatctgtattgcaaattca

SEQ ID NO: 16929 - DNA, 40 bp, Homo sapiens
tgaatttgcaatacagattaaaatgggtgcactattcaaa

SEQ ID NO: 16930 - DNA, 40 bp, Homo sapiens
ttgaatagtgcacccattttaatctgtattgcaaattcag

SEQ ID NO: 16931 - DNA, 40 bp, Homo sapiens
ctgaatttgcaatacagattaaaatgggtgcactattcaa

SEQ ID NO: 16932 - DNA, 40 bp, Homo sapiens
tgaatagtgcacccattttaatctgtattgcaaattcagg

SEQ ID NO: 16933 - DNA, 40 bp, Homo sapiens
cctgaatttgcaatacagattaaaatgggtgcactattca

SEQ ID NO: 16934 - DNA, 40 bp, Homo sapiens
gaatagtgcacccattttaatctgtattgcaaattcaggg

SEQ ID NO: 16935 - DNA, 40 bp, Homo sapiens
ccctgaatttgcaatacagattaaaatgggtgcactattc

SEQ ID NO: 16936 - DNA, 40 bp, Homo sapiens
aatagtgcacccattttaatctgtattgcaaattcagggt

SEQ ID NO: 16937 - DNA, 40 bp, Homo sapiens
accctgaatttgcaatacagattaaaatgggtgcactatt

SEQ ID NO: 16938 - DNA, 40 bp, Homo sapiens
atagtgcacccattttaatctgtattgcaaattcagggtt

SEQ ID NO: 16939 - DNA, 40 bp, Homo sapiens
aaccctgaatttgcaatacagattaaaatgggtgcactat

SEQ ID NO: 16940 - DNA, 40 bp, Homo sapiens
tagtgcacccattttaatctgtattgcaaattcagggtta

SEQ ID NO: 16941 - DNA, 40 bp, Homo sapiens
taaccctgaatttgcaatacagattaaaatgggtgcacta

SEQ ID NO: 16942 - DNA, 40 bp, Homo sapiens
agtgcacccattttaatctgtattgcaaattcagggttac

SEQ ID NO: 16943 - DNA, 40 bp, Homo sapiens
gtaaccctgaatttgcaatacagattaaaatgggtgcact

SEQ ID NO: 16944 - DNA, 40 bp, Homo sapiens
gtgcacccattttaatctgtattgcaaattcagggttact

SEQ ID NO: 16945 - DNA, 40 bp, Homo sapiens
agtaaccctgaatttgcaatacagattaaaatgggtgcac

SEQ ID NO: 16946 - DNA, 40 bp, Homo sapiens
tgcacccattttaatctgtattgcaaattcagggttactt

SEQ ID NO: 16947 - DNA, 40 bp, Homo sapiens
aagtaaccctgaatttgcaatacagattaaaatgggtgca

SEQ ID NO: 16948 - DNA, 40 bp, Homo sapiens
gcacccattttaatctgtattgcaaattcagggttacttg

SEQ ID NO: 16949 - DNA, 40 bp, Homo sapiens
caagtaaccctgaatttgcaatacagattaaaatgggtgc

SEQ ID NO: 16950 - DNA, 40 bp, Homo sapiens
cacccattttaatctgtattgcaaattcagggttacttgg

SEQ ID NO: 16951 - DNA, 40 bp, Homo sapiens
ccaagtaaccctgaatttgcaatacagattaaaatgggtg

SEQ ID NO: 16952 - DNA, 40 bp, Homo sapiens
acccattttaatctgtattgcaaattcagggttacttggc

SEQ ID NO: 16953 - DNA, 40 bp, Homo sapiens
gccaagtaaccctgaatttgcaatacagattaaaatgggt

SEQ ID NO: 16954 - DNA, 40 bp, Homo sapiens
cccattttaatctgtattgcaaattcagggttacttggca

SEQ ID NO: 16955 - DNA, 40 bp, Homo sapiens
tgccaagtaaccctgaatttgcaatacagattaaaatggg

SEQ ID NO: 16956 - DNA, 40 bp, Homo sapiens
ccattttaatctgtattgcaaattcagggttacttggcag

SEQ ID NO: 16957 - DNA, 40 bp, Homo sapiens
ctgccaagtaaccctgaatttgcaatacagattaaaatgg

SEQ ID NO: 16958 - DNA, 40 bp, Homo sapiens
cattttaatctgtattgcaaattcagggttacttggcaga

SEQ ID NO: 16959 - DNA, 40 bp, Homo sapiens
tctgccaagtaaccctgaatttgcaatacagattaaaatg

SEQ ID NO: 16960 - DNA, 40 bp, Homo sapiens
attttaatctgtattgcaaattcagggttacttggcagac

SEQ ID NO: 16961 - DNA, 40 bp, Homo sapiens
gtctgccaagtaaccctgaatttgcaatacagattaaaat

SEQ ID NO: 16962 - DNA, 40 bp, Homo sapiens
ttttaatctgtattgcaaattcagggttacttggcagact

SEQ ID NO: 16963 - DNA, 40 bp, Homo sapiens
agtctgccaagtaaccctgaatttgcaatacagattaaaa

SEQ ID NO: 16964 - DNA, 40 bp, Homo sapiens
tttaatctgtattgcaaattcagggttacttggcagactc

SEQ ID NO: 16965 - DNA, 40 bp, Homo sapiens
gagtctgccaagtaaccctgaatttgcaatacagattaaa

SEQ ID NO: 16966 - DNA, 40 bp, Homo sapiens
ttaatctgtattgcaaattcagggttacttggcagactct

SEQ ID NO: 16967 - DNA, 40 bp, Homo sapiens
agagtctgccaagtaaccctgaatttgcaatacagattaa

SEQ ID NO: 16968 - DNA, 40 bp, Homo sapiens
taatctgtattgcaaattcagggttacttggcagactcta

SEQ ID NO: 16969 - DNA, 40 bp, Homo sapiens
tagagtctgccaagtaaccctgaatttgcaatacagatta

SEQ ID NO: 16970 - DNA, 40 bp, Homo sapiens
aatctgtattgcaaattcagggttacttggcagactctac

SEQ ID NO: 16971 - DNA, 40 bp, Homo sapiens
gtagagtctgccaagtaaccctgaatttgcaatacagatt

SEQ ID NO: 16972 - DNA, 40 bp, Homo sapiens
atctgtattgcaaattcagggttacttggcagactctact

SEQ ID NO: 16973 - DNA, 40 bp, Homo sapiens
agtagagtctgccaagtaaccctgaatttgcaatacagat

SEQ ID NO: 16974 - DNA, 40 bp, Homo sapiens
tctgtattgcaaattcagggttacttggcagactctacta

SEQ ID NO: 16975 - DNA, 40 bp, Homo sapiens
tagtagagtctgccaagtaaccctgaatttgcaatacaga

SEQ ID NO: 16976 - DNA, 40 bp, Homo sapiens
ctgtattgcaaattcagggttacttggcagactctactat

SEQ ID NO: 16977 - DNA, 40 bp, Homo sapiens
atagtagagtctgccaagtaaccctgaatttgcaatacag

SEQ ID NO: 16978 - DNA, 40 bp, Homo sapiens
tgtattgcaaattcagggttacttggcagactctactatt

SEQ ID NO: 16979 - DNA, 40 bp, Homo sapiens
aatagtagagtctgccaagtaaccctgaatttgcaataca

SEQ ID NO: 16980 - DNA, 40 bp, Homo sapiens
gtattgcaaattcagggttacttggcagactctactattt

SEQ ID NO: 16981 - DNA, 40 bp, Homo sapiens
aaatagtagagtctgccaagtaaccctgaatttgcaatac

SEQ ID NO: 16982 - DNA, 40 bp, Homo sapiens
tattgcaaattcagggttacttggcagactctactattta

SEQ ID NO: 16983 - DNA, 40 bp, Homo sapiens
taaatagtagagtctgccaagtaaccctgaatttgcaata

SEQ ID NO: 16984 - DNA, 40 bp, Homo sapiens
attgcaaattcagggttacttggcagactctactatttaa

SEQ ID NO: 16985 - DNA, 40 bp, Homo sapiens
ttaaatagtagagtctgccaagtaaccctgaatttgcaat

SEQ ID NO: 16986 - DNA, 40 bp, Homo sapiens
ttgcaaattcagggttacttggcagactctactatttaaa

SEQ ID NO: 16987 - DNA, 40 bp, Homo sapiens
tttaaatagtagagtctgccaagtaaccctgaatttgcaa

SEQ ID NO: 16988 - DNA, 40 bp, Homo sapiens
tgcaaattcagggttacttggcagactctactatttaaat

SEQ ID NO: 16989 - DNA, 40 bp, Homo sapiens
atttaaatagtagagtctgccaagtaaccctgaatttgca

SEQ ID NO: 16990 - DNA, 40 bp, Homo sapiens
gcaaattcagggttacttggcagactctactatttaaatc

SEQ ID NO: 16991 - DNA, 40 bp, Homo sapiens
gatttaaatagtagagtctgccaagtaaccctgaatttgc

SEQ ID NO: 16992 - DNA, 40 bp, Homo sapiens
caaattcagggttacttggcagactctactatttaaatca

SEQ ID NO: 16993 - DNA, 40 bp, Homo sapiens
tgatttaaatagtagagtctgccaagtaaccctgaatttg

SEQ ID NO: 16994 - DNA, 40 bp, Homo sapiens
aaattcagggttacttggcagactctactatttaaatcag

SEQ ID NO: 16995 - DNA, 40 bp, Homo sapiens
ctgatttaaatagtagagtctgccaagtaaccctgaattt

SEQ ID NO: 16996 - DNA, 40 bp, Homo sapiens
aattcagggttacttggcagactctactatttaaatcaga

SEQ ID NO: 16997 - DNA, 40 bp, Homo sapiens
tctgatttaaatagtagagtctgccaagtaaccctgaatt

SEQ ID NO: 16998 - DNA, 40 bp, Homo sapiens
attcagggttacttggcagactctactatttaaatcagat

SEQ ID NO: 16999 - DNA, 40 bp, Homo sapiens
atctgatttaaatagtagagtctgccaagtaaccctgaat

SEQ ID NO: 17000 - DNA, 40 bp, Homo sapiens
ttcagggttacttggcagactctactatttaaatcagatg

SEQ ID NO: 17001 - DNA, 40 bp, Homo sapiens
catctgatttaaatagtagagtctgccaagtaaccctgaa

SEQ ID NO: 17002 - DNA, 40 bp, Homo sapiens
tcagggttacttggcagactctactatttaaatcagatgt

SEQ ID NO: 17003 - DNA, 40 bp, Homo sapiens
acatctgatttaaatagtagagtctgccaagtaaccctga

SEQ ID NO: 17004 - DNA, 40 bp, Homo sapiens
cagggttacttggcagactctactatttaaatcagatgta

SEQ ID NO: 17005 - DNA, 40 bp, Homo sapiens
tacatctgatttaaatagtagagtctgccaagtaaccctg

SEQ ID NO: 17006 - DNA, 40 bp, Homo sapiens
agggttacttggcagactctactatttaaatcagatgtaa

SEQ ID NO: 17007 - DNA, 40 bp, Homo sapiens
ttacatctgatttaaatagtagagtctgccaagtaaccct

SEQ ID NO: 17008 - DNA, 40 bp, Homo sapiens
gggttacttggcagactctactatttaaatcagatgtaaa

SEQ ID NO: 17009 - DNA, 40 bp, Homo sapiens
tttacatctgatttaaatagtagagtctgccaagtaaccc

SEQ ID NO: 17010 - DNA, 40 bp, Homo sapiens
ggttacttggcagactctactatttaaatcagatgtaaaa

SEQ ID NO: 17011 - DNA, 40 bp, Homo sapiens
ttttacatctgatttaaatagtagagtctgccaagtaacc

SEQ ID NO: 17012 - DNA, 40 bp, Homo sapiens
gttacttggcagactctactatttaaatcagatgtaaaag

SEQ ID NO: 17013 - DNA, 40 bp, Homo sapiens
cttttacatctgatttaaatagtagagtctgccaagtaac

SEQ ID NO: 17014 - DNA, 40 bp, Homo sapiens
ttacttggcagactctactatttaaatcagatgtaaaagg

SEQ ID NO: 17015 - DNA, 40 bp, Homo sapiens
ccttttacatctgatttaaatagtagagtctgccaagtaa

SEQ ID NO: 17016 - DNA, 40 bp, Homo sapiens
tacttggcagactctactatttaaatcagatgtaaaagga

SEQ ID NO: 17017 - DNA, 40 bp, Homo sapiens
tccttttacatctgatttaaatagtagagtctgccaagta

SEQ ID NO: 17018 - DNA, 40 bp, Homo sapiens
acttggcagactctactatttaaatcagatgtaaaaggaa

SEQ ID NO: 17019 - DNA, 40 bp, Homo sapiens
ttccttttacatctgatttaaatagtagagtctgccaagt

SEQ ID NO: 17020 - DNA, 40 bp, Homo sapiens
cttggcagactctactatttaaatcagatgtaaaaggaag

SEQ ID NO: 17021 - DNA, 40 bp, Homo sapiens
cttccttttacatctgatttaaatagtagagtctgccaag

SEQ ID NO: 17022 - DNA, 40 bp, Homo sapiens
ttggcagactctactatttaaatcagatgtaaaaggaagt

SEQ ID NO: 17023 - DNA, 40 bp, Homo sapiens
acttccttttacatctgatttaaatagtagagtctgccaa

SEQ ID NO: 17024 - DNA, 40 bp, Homo sapiens
tggcagactctactatttaaatcagatgtaaaaggaagtt

SEQ ID NO: 17025 - DNA, 40 bp, Homo sapiens
aacttccttttacatctgatttaaatagtagagtctgcca

SEQ ID NO: 17026 - DNA, 40 bp, Homo sapiens
ggcagactctactatttaaatcagatgtaaaaggaagttt

SEQ ID NO: 17027 - DNA, 40 bp, Homo sapiens
aaacttccttttacatctgatttaaatagtagagtctgcc

SEQ ID NO: 17028 - DNA, 40 bp, Homo sapiens
gcagactctactatttaaatcagatgtaaaaggaagtttt

SEQ ID NO: 17029 - DNA, 40 bp, Homo sapiens
aaaacttccttttacatctgatttaaatagtagagtctgc

SEQ ID NO: 17030 - DNA, 40 bp, Homo sapiens
cagactctactatttaaatcagatgtaaaaggaagtttta

SEQ ID NO: 17031 - DNA, 40 bp, Homo sapiens
taaaacttccttttacatctgatttaaatagtagagtctg

SEQ ID NO: 17032 - DNA, 40 bp, Homo sapiens
agactctactatttaaatcagatgtaaaaggaagttttaa

SEQ ID NO: 17033 - DNA, 40 bp, Homo sapiens
ttaaaacttccttttacatctgatttaaatagtagagtct

SEQ ID NO: 17034 - DNA, 40 bp, Homo sapiens
gactctactatttaaatcagatgtaaaaggaagttttaat

SEQ ID NO: 17035 - DNA, 40 bp, Homo sapiens
attaaaacttccttttacatctgatttaaatagtagagtc

SEQ ID NO: 17036 - DNA, 40 bp, Homo sapiens
actctactatttaaatcagatgtaaaaggaagttttaata

SEQ ID NO: 17037 - DNA, 40 bp, Homo sapiens
tattaaaacttccttttacatctgatttaaatagtagagt

SEQ ID NO: 17038 - DNA, 40 bp, Homo sapiens
ctctactatttaaatcagatgtaaaaggaagttttaatat

SEQ ID NO: 17039 - DNA, 40 bp, Homo sapiens
atattaaaacttccttttacatctgatttaaatagtagag

SEQ ID NO: 17040 - DNA, 40 bp, Homo sapiens
tctactatttaaatcagatgtaaaaggaagttttaatata

SEQ ID NO: 17041 - DNA, 40 bp, Homo sapiens
tatattaaaacttccttttacatctgatttaaatagtaga

SEQ ID NO: 17042 - DNA, 40 bp, Homo sapiens
ctactatttaaatcagatgtaaaaggaagttttaatataa

SEQ ID NO: 17043 - DNA, 40 bp, Homo sapiens
ttatattaaaacttccttttacatctgatttaaatagtag

SEQ ID NO: 17044 - DNA, 40 bp, Homo sapiens
tactatttaaatcagatgtaaaaggaagttttaatataat

SEQ ID NO: 17045 - DNA, 40 bp, Homo sapiens
attatattaaaacttccttttacatctgatttaaatagta

SEQ ID NO: 17046 - DNA, 40 bp, Homo sapiens
actatttaaatcagatgtaaaaggaagttttaatataatt

SEQ ID NO: 17047 - DNA, 40 bp, Homo sapiens
aattatattaaaacttccttttacatctgatttaaatagt

SEQ ID NO: 17048 - DNA, 40 bp, Homo sapiens
ctatttaaatcagatgtaaaaggaagttttaatataattc

SEQ ID NO: 17049 - DNA, 40 bp, Homo sapiens
gaattatattaaaacttccttttacatctgatttaaatag

SEQ ID NO: 17050 - DNA, 40 bp, Homo sapiens
tatttaaatcagatgtaaaaggaagttttaatataattca

SEQ ID NO: 17051 - DNA, 40 bp, Homo sapiens
tgaattatattaaaacttccttttacatctgatttaaata

SEQ ID NO: 17052 - DNA, 40 bp, Homo sapiens
atttaaatcagatgtaaaaggaagttttaatataattcac

SEQ ID NO: 17053 - DNA, 40 bp, Homo sapiens
gtgaattatattaaaacttccttttacatctgatttaaat

SEQ ID NO: 17054 - DNA, 40 bp, Homo sapiens
tttaaatcagatgtaaaaggaagttttaatataattcact

SEQ ID NO: 17055 - DNA, 40 bp, Homo sapiens
agtgaattatattaaaacttccttttacatctgatttaaa

SEQ ID NO: 17056 - DNA, 40 bp, Homo sapiens
ttaaatcagatgtaaaaggaagttttaatataattcactt

SEQ ID NO: 17057 - DNA, 40 bp, Homo sapiens
aagtgaattatattaaaacttccttttacatctgatttaa

SEQ ID NO: 17058 - DNA, 40 bp, Homo sapiens
taaatcagatgtaaaaggaagttttaatataattcacttt

SEQ ID NO: 17059 - DNA, 40 bp, Homo sapiens
aaagtgaattatattaaaacttccttttacatctgattta

SEQ ID NO: 17060 - DNA, 40 bp, Homo sapiens
aaatcagatgtaaaaggaagttttaatataattcacttta

SEQ ID NO: 17061 - DNA, 40 bp, Homo sapiens
taaagtgaattatattaaaacttccttttacatctgattt

SEQ ID NO: 17062 - DNA, 40 bp, Homo sapiens
aatcagatgtaaaaggaagttttaatataattcactttat

SEQ ID NO: 17063 - DNA, 40 bp, Homo sapiens
ataaagtgaattatattaaaacttccttttacatctgatt

SEQ ID NO: 17064 - DNA, 40 bp, Homo sapiens
atcagatgtaaaaggaagttttaatataattcactttatg

SEQ ID NO: 17065 - DNA, 40 bp, Homo sapiens
cataaagtgaattatattaaaacttccttttacatctgat

SEQ ID NO: 17066 - DNA, 40 bp, Homo sapiens
tcagatgtaaaaggaagttttaatataattcactttatgc

SEQ ID NO: 17067 - DNA, 40 bp, Homo sapiens
gcataaagtgaattatattaaaacttccttttacatctga

SEQ ID NO: 17068 - DNA, 40 bp, Homo sapiens
cagatgtaaaaggaagttttaatataattcactttatgcc

SEQ ID NO: 17069 - DNA, 40 bp, Homo sapiens
ggcataaagtgaattatattaaaacttccttttacatctg

SEQ ID NO: 17070 - DNA, 40 bp, Homo sapiens
agatgtaaaaggaagttttaatataattcactttatgcct

SEQ ID NO: 17071 - DNA, 40 bp, Homo sapiens
aggcataaagtgaattatattaaaacttccttttacatct

SEQ ID NO: 17072 - DNA, 40 bp, Homo sapiens
gatgtaaaaggaagttttaatataattcactttatgcctg

SEQ ID NO: 17073 - DNA, 40 bp, Homo sapiens
caggcataaagtgaattatattaaaacttccttttacatc

SEQ ID NO: 17074 - DNA, 40 bp, Homo sapiens
atgtaaaaggaagttttaatataattcactttatgcctga

SEQ ID NO: 17075 - DNA, 40 bp, Homo sapiens
tcaggcataaagtgaattatattaaaacttccttttacat

SEQ ID NO: 17076 - DNA, 40 bp, Homo sapiens
tgtaaaaggaagttttaatataattcactttatgcctgaa

SEQ ID NO: 17077 - DNA, 40 bp, Homo sapiens
ttcaggcataaagtgaattatattaaaacttccttttaca

SEQ ID NO: 17078 - DNA, 40 bp, Homo sapiens
gtaaaaggaagttttaatataattcactttatgcctgaaa

SEQ ID NO: 17079 - DNA, 40 bp, Homo sapiens
tttcaggcataaagtgaattatattaaaacttccttttac

SEQ ID NO: 17080 - DNA, 40 bp, Homo sapiens
taaaaggaagttttaatataattcactttatgcctgaaag

SEQ ID NO: 17081 - DNA, 40 bp, Homo sapiens
ctttcaggcataaagtgaattatattaaaacttcctttta

SEQ ID NO: 17082 - DNA, 40 bp, Homo sapiens
aaaaggaagttttaatataattcactttatgcctgaaagt

SEQ ID NO: 17083 - DNA, 40 bp, Homo sapiens
actttcaggcataaagtgaattatattaaaacttcctttt

SEQ ID NO: 17084 - DNA, 40 bp, Homo sapiens
aaaggaagttttaatataattcactttatgcctgaaagtt

SEQ ID NO: 17085 - DNA, 40 bp, Homo sapiens
aactttcaggcataaagtgaattatattaaaacttccttt

SEQ ID NO: 17086 - DNA, 40 bp, Homo sapiens
aaggaagttttaatataattcactttatgcctgaaagttt

SEQ ID NO: 17087 - DNA, 40 bp, Homo sapiens
aaactttcaggcataaagtgaattatattaaaacttcctt

SEQ ID NO: 17088 - DNA, 40 bp, Homo sapiens
aggaagttttaatataattcactttatgcctgaaagtttt

SEQ ID NO: 17089 - DNA, 40 bp, Homo sapiens
aaaactttcaggcataaagtgaattatattaaaacttcct

SEQ ID NO: 17090 - DNA, 40 bp, Homo sapiens
ggaagttttaatataattcactttatgcctgaaagttttc

SEQ ID NO: 17091 - DNA, 40 bp, Homo sapiens
gaaaactttcaggcataaagtgaattatattaaaacttcc

SEQ ID NO: 17092 - DNA, 40 bp, Homo sapiens
gaagttttaatataattcactttatgcctgaaagttttcc

SEQ ID NO: 17093 - DNA, 40 bp, Homo sapiens
ggaaaactttcaggcataaagtgaattatattaaaacttc

SEQ ID NO: 17094 - DNA, 40 bp, Homo sapiens
aagttttaatataattcactttatgcctgaaagttttcct

SEQ ID NO: 17095 - DNA, 40 bp, Homo sapiens
aggaaaactttcaggcataaagtgaattatattaaaactt

SEQ ID NO: 17096 - DNA, 40 bp, Homo sapiens
agttttaatataattcactttatgcctgaaagttttcctg

SEQ ID NO: 17097 - DNA, 40 bp, Homo sapiens
caggaaaactttcaggcataaagtgaattatattaaaact

SEQ ID NO: 17098 - DNA, 40 bp, Homo sapiens
gttttaatataattcactttatgcctgaaagttttcctgg

SEQ ID NO: 17099 - DNA, 40 bp, Homo sapiens
ccaggaaaactttcaggcataaagtgaattatattaaaac

SEQ ID NO: 17100 - DNA, 40 bp, Homo sapiens
ttttaatataattcactttatgcctgaaagttttcctggg

SEQ ID NO: 17101 - DNA, 40 bp, Homo sapiens
cccaggaaaactttcaggcataaagtgaattatattaaaa

SEQ ID NO: 17102 - DNA, 40 bp, Homo sapiens
tttaatataattcactttatgcctgaaagttttcctggga

SEQ ID NO: 17103 - DNA, 40 bp, Homo sapiens
tcccaggaaaactttcaggcataaagtgaattatattaaa

SEQ ID NO: 17104 - DNA, 40 bp, Homo sapiens
ttaatataattcactttatgcctgaaagttttcctgggat

SEQ ID NO: 17105 - DNA, 40 bp, Homo sapiens
atcccaggaaaactttcaggcataaagtgaattatattaa

SEQ ID NO: 17106 - DNA, 40 bp, Homo sapiens
taatataattcactttatgcctgaaagttttcctgggatt

SEQ ID NO: 17107 - DNA, 40 bp, Homo sapiens
aatcccaggaaaactttcaggcataaagtgaattatatta

SEQ ID NO: 17108 - DNA, 40 bp, Homo sapiens
aatataattcactttatgcctgaaagttttcctgggattt

SEQ ID NO: 17109 - DNA, 40 bp, Homo sapiens
aaatcccaggaaaactttcaggcataaagtgaattatatt

SEQ ID NO: 17110 - DNA, 40 bp, Homo sapiens
atataattcactttatgcctgaaagttttcctgggatttt

SEQ ID NO: 17111 - DNA, 40 bp, Homo sapiens
aaaatcccaggaaaactttcaggcataaagtgaattatat

SEQ ID NO: 17112 - DNA, 40 bp, Homo sapiens
tataattcactttatgcctgaaagttttcctgggattttg

SEQ ID NO: 17113 - DNA, 40 bp, Homo sapiens
caaaatcccaggaaaactttcaggcataaagtgaattata

SEQ ID NO: 17114 - DNA, 40 bp, Homo sapiens
ataattcactttatgcctgaaagttttcctgggattttgg

SEQ ID NO: 17115 - DNA, 40 bp, Homo sapiens
ccaaaatcccaggaaaactttcaggcataaagtgaattat

SEQ ID NO: 17116 - DNA, 40 bp, Homo sapiens
taattcactttatgcctgaaagttttcctgggattttgga

SEQ ID NO: 17117 - DNA, 40 bp, Homo sapiens
tccaaaatcccaggaaaactttcaggcataaagtgaatta

SEQ ID NO: 17118 - DNA, 40 bp, Homo sapiens
aattcactttatgcctgaaagttttcctgggattttggaa

SEQ ID NO: 17119 - DNA, 40 bp, Homo sapiens
ttccaaaatcccaggaaaactttcaggcataaagtgaatt

SEQ ID NO: 17120 - DNA, 40 bp, Homo sapiens
attcactttatgcctgaaagttttcctgggattttggaag

SEQ ID NO: 17121 - DNA, 40 bp, Homo sapiens
cttccaaaatcccaggaaaactttcaggcataaagtgaat

SEQ ID NO: 17122 - DNA, 40 bp, Homo sapiens
ttcactttatgcctgaaagttttcctgggattttggaagg

SEQ ID NO: 17123 - DNA, 40 bp, Homo sapiens
ccttccaaaatcccaggaaaactttcaggcataaagtgaa

SEQ ID NO: 17124 - DNA, 40 bp, Homo sapiens
tcactttatgcctgaaagttttcctgggattttggaaggt

SEQ ID NO: 17125 - DNA, 40 bp, Homo sapiens
accttccaaaatcccaggaaaactttcaggcataaagtga

SEQ ID NO: 17126 - DNA, 40 bp, Homo sapiens
cactttatgcctgaaagttttcctgggattttggaaggtg

SEQ ID NO: 17127 - DNA, 40 bp, Homo sapiens
caccttccaaaatcccaggaaaactttcaggcataaagtg

SEQ ID NO: 17128 - DNA, 40 bp, Homo sapiens
actttatgcctgaaagttttcctgggattttggaaggtga

SEQ ID NO: 17129 - DNA, 40 bp, Homo sapiens
tcaccttccaaaatcccaggaaaactttcaggcataaagt

SEQ ID NO: 17130 - DNA, 40 bp, Homo sapiens
ctttatgcctgaaagttttcctgggattttggaaggtgat

SEQ ID NO: 17131 - DNA, 40 bp, Homo sapiens
atcaccttccaaaatcccaggaaaactttcaggcataaag

SEQ ID NO: 17132 - DNA, 40 bp, Homo sapiens
tttatgcctgaaagttttcctgggattttggaaggtgatt

SEQ ID NO: 17133 - DNA, 40 bp, Homo sapiens
aatcaccttccaaaatcccaggaaaactttcaggcataaa

SEQ ID NO: 17134 - DNA, 40 bp, Homo sapiens
ttatgcctgaaagttttcctgggattttggaaggtgattt

SEQ ID NO: 17135 - DNA, 40 bp, Homo sapiens
aaatcaccttccaaaatcccaggaaaactttcaggcataa

SEQ ID NO: 17136 - DNA, 40 bp, Homo sapiens
tatgcctgaaagttttcctgggattttggaaggtgatttt

SEQ ID NO: 17137 - DNA, 40 bp, Homo sapiens
aaaatcaccttccaaaatcccaggaaaactttcaggcata

SEQ ID NO: 17138 - DNA, 40 bp, Homo sapiens
atgcctgaaagttttcctgggattttggaaggtgatttta

SEQ ID NO: 17139 - DNA, 40 bp, Homo sapiens
taaaatcaccttccaaaatcccaggaaaactttcaggcat

SEQ ID NO: 17140 - DNA, 40 bp, Homo sapiens
tgcctgaaagttttcctgggattttggaaggtgattttac

SEQ ID NO: 17141 - DNA, 40 bp, Homo sapiens
gtaaaatcaccttccaaaatcccaggaaaactttcaggca

SEQ ID NO: 17142 - DNA, 40 bp, Homo sapiens
gcctgaaagttttcctgggattttggaaggtgattttact

SEQ ID NO: 17143 - DNA, 40 bp, Homo sapiens
agtaaaatcaccttccaaaatcccaggaaaactttcaggc

SEQ ID NO: 17144 - DNA, 40 bp, Homo sapiens
cctgaaagttttcctgggattttggaaggtgattttactg

SEQ ID NO: 17145 - DNA, 40 bp, Homo sapiens
cagtaaaatcaccttccaaaatcccaggaaaactttcagg

SEQ ID NO: 17146 - DNA, 40 bp, Homo sapiens
ctgaaagttttcctgggattttggaaggtgattttactgg

SEQ ID NO: 17147 - DNA, 40 bp, Homo sapiens
ccagtaaaatcaccttccaaaatcccaggaaaactttcag

SEQ ID NO: 17148 - DNA, 40 bp, Homo sapiens
tgaaagttttcctgggattttggaaggtgattttactgga

SEQ ID NO: 17149 - DNA, 40 bp, Homo sapiens
tccagtaaaatcaccttccaaaatcccaggaaaactttca

SEQ ID NO: 17150 - DNA, 40 bp, Homo sapiens
gaaagttttcctgggattttggaaggtgattttactggaa

SEQ ID NO: 17151 - DNA, 40 bp, Homo sapiens
ttccagtaaaatcaccttccaaaatcccaggaaaactttc

SEQ ID NO: 17152 - DNA, 40 bp, Homo sapiens
aaagttttcctgggattttggaaggtgattttactggaaa

SEQ ID NO: 17153 - DNA, 40 bp, Homo sapiens
tttccagtaaaatcaccttccaaaatcccaggaaaacttt

SEQ ID NO: 17154 - DNA, 40 bp, Homo sapiens
aagttttcctgggattttggaaggtgattttactggaaat

SEQ ID NO: 17155 - DNA, 40 bp, Homo sapiens
atttccagtaaaatcaccttccaaaatcccaggaaaactt

SEQ ID NO: 17156 - DNA, 40 bp, Homo sapiens
agttttcctgggattttggaaggtgattttactggaaatg

SEQ ID NO: 17157 - DNA, 40 bp, Homo sapiens
catttccagtaaaatcaccttccaaaatcccaggaaaact

SEQ ID NO: 17158 - DNA, 40 bp, Homo sapiens
gttttcctgggattttggaaggtgattttactggaaatgc

SEQ ID NO: 17159 - DNA, 40 bp, Homo sapiens
gcatttccagtaaaatcaccttccaaaatcccaggaaaac

SEQ ID NO: 17160 - DNA, 40 bp, Homo sapiens
ttttcctgggattttggaaggtgattttactggaaatgct

SEQ ID NO: 17161 - DNA, 40 bp, Homo sapiens
agcatttccagtaaaatcaccttccaaaatcccaggaaaa

SEQ ID NO: 17162 - DNA, 40 bp, Homo sapiens
tttcctgggattttggaaggtgattttactggaaatgctg

SEQ ID NO: 17163 - DNA, 40 bp, Homo sapiens
cagcatttccagtaaaatcaccttccaaaatcccaggaaa

SEQ ID NO: 17164 - DNA, 40 bp, Homo sapiens
ttcctgggattttggaaggtgattttactggaaatgctgt

SEQ ID NO: 17165 - DNA, 40 bp, Homo sapiens
acagcatttccagtaaaatcaccttccaaaatcccaggaa

SEQ ID NO: 17166 - DNA, 40 bp, Homo sapiens
tcctgggattttggaaggtgattttactggaaatgctgtc

SEQ ID NO: 17167 - DNA, 40 bp, Homo sapiens
gacagcatttccagtaaaatcaccttccaaaatcccagga

SEQ ID NO: 17168 - DNA, 40 bp, Homo sapiens
cctgggattttggaaggtgattttactggaaatgctgtct

SEQ ID NO: 17169 - DNA, 40 bp, Homo sapiens
agacagcatttccagtaaaatcaccttccaaaatcccagg

SEQ ID NO: 17170 - DNA, 40 bp, Homo sapiens
ctgggattttggaaggtgattttactggaaatgctgtctg

SEQ ID NO: 17171 - DNA, 40 bp, Homo sapiens
cagacagcatttccagtaaaatcaccttccaaaatcccag

SEQ ID NO: 17172 - DNA, 40 bp, Homo sapiens
tgggattttggaaggtgattttactggaaatgctgtctgt

SEQ ID NO: 17173 - DNA, 40 bp, Homo sapiens
acagacagcatttccagtaaaatcaccttccaaaatccca

SEQ ID NO: 17174 - DNA, 40 bp, Homo sapiens
gggattttggaaggtgattttactggaaatgctgtctgtc

SEQ ID NO: 17175 - DNA, 40 bp, Homo sapiens
gacagacagcatttccagtaaaatcaccttccaaaatccc

SEQ ID NO: 17176 - DNA, 40 bp, Homo sapiens
ggattttggaaggtgattttactggaaatgctgtctgtct

SEQ ID NO: 17177 - DNA, 40 bp, Homo sapiens
agacagacagcatttccagtaaaatcaccttccaaaatcc

SEQ ID NO: 17178 - DNA, 40 bp, Homo sapiens
gattttggaaggtgattttactggaaatgctgtctgtctt

SEQ ID NO: 17179 - DNA, 40 bp, Homo sapiens
aagacagacagcatttccagtaaaatcaccttccaaaatc

SEQ ID NO: 17180 - DNA, 40 bp, Homo sapiens
attttggaaggtgattttactggaaatgctgtctgtcttc

SEQ ID NO: 17181 - DNA, 40 bp, Homo sapiens
gaagacagacagcatttccagtaaaatcaccttccaaaat

SEQ ID NO: 17182 - DNA, 40 bp, Homo sapiens
ttttggaaggtgattttactggaaatgctgtctgtcttcc

SEQ ID NO: 17183 - DNA, 40 bp, Homo sapiens
ggaagacagacagcatttccagtaaaatcaccttccaaaa

SEQ ID NO: 17184 - DNA, 40 bp, Homo sapiens
tttggaaggtgattttactggaaatgctgtctgtcttccc

SEQ ID NO: 17185 - DNA, 40 bp, Homo sapiens
gggaagacagacagcatttccagtaaaatcaccttccaaa

SEQ ID NO: 17186 - DNA, 40 bp, Homo sapiens
ttggaaggtgattttactggaaatgctgtctgtcttccct

SEQ ID NO: 17187 - DNA, 40 bp, Homo sapiens
agggaagacagacagcatttccagtaaaatcaccttccaa

SEQ ID NO: 17188 - DNA, 40 bp, Homo sapiens
tggaaggtgattttactggaaatgctgtctgtcttccctg

SEQ ID NO: 17189 - DNA, 40 bp, Homo sapiens
cagggaagacagacagcatttccagtaaaatcaccttcca

SEQ ID NO: 17190 - DNA, 40 bp, Homo sapiens
ggaaggtgattttactggaaatgctgtctgtcttccctga

SEQ ID NO: 17191 - DNA, 40 bp, Homo sapiens
tcagggaagacagacagcatttccagtaaaatcaccttcc

SEQ ID NO: 17192 - DNA, 40 bp, Homo sapiens
gaaggtgattttactggaaatgctgtctgtcttccctgaa

SEQ ID NO: 17193 - DNA, 40 bp, Homo sapiens
ttcagggaagacagacagcatttccagtaaaatcaccttc

SEQ ID NO: 17194 - DNA, 40 bp, Homo sapiens
aaggtgattttactggaaatgctgtctgtcttccctgaaa

SEQ ID NO: 17195 - DNA, 40 bp, Homo sapiens
tttcagggaagacagacagcatttccagtaaaatcacctt

SEQ ID NO: 17196 - DNA, 40 bp, Homo sapiens
aggtgattttactggaaatgctgtctgtcttccctgaaaa

SEQ ID NO: 17197 - DNA, 40 bp, Homo sapiens
ttttcagggaagacagacagcatttccagtaaaatcacct

SEQ ID NO: 17198 - DNA, 40 bp, Homo sapiens
ggtgattttactggaaatgctgtctgtcttccctgaaaat

SEQ ID NO: 17199 - DNA, 40 bp, Homo sapiens
attttcagggaagacagacagcatttccagtaaaatcacc

SEQ ID NO: 17200 - DNA, 40 bp, Homo sapiens
gtgattttactggaaatgctgtctgtcttccctgaaaatc

SEQ ID NO: 17201 - DNA, 40 bp, Homo sapiens
gattttcagggaagacagacagcatttccagtaaaatcac

SEQ ID NO: 17202 - DNA, 40 bp, Homo sapiens
tgattttactggaaatgctgtctgtcttccctgaaaatct

SEQ ID NO: 17203 - DNA, 40 bp, Homo sapiens
agattttcagggaagacagacagcatttccagtaaaatca

SEQ ID NO: 17204 - DNA, 40 bp, Homo sapiens
gattttactggaaatgctgtctgtcttccctgaaaatctg

SEQ ID NO: 17205 - DNA, 40 bp, Homo sapiens
cagattttcagggaagacagacagcatttccagtaaaatc

SEQ ID NO: 17206 - DNA, 40 bp, Homo sapiens
attttactggaaatgctgtctgtcttccctgaaaatctga

SEQ ID NO: 17207 - DNA, 40 bp, Homo sapiens
tcagattttcagggaagacagacagcatttccagtaaaat

SEQ ID NO: 17208 - DNA, 40 bp, Homo sapiens
ttttactggaaatgctgtctgtcttccctgaaaatctgag

SEQ ID NO: 17209 - DNA, 40 bp, Homo sapiens
ctcagattttcagggaagacagacagcatttccagtaaaa

SEQ ID NO: 17210 - DNA, 40 bp, Homo sapiens
tttactggaaatgctgtctgtcttccctgaaaatctgaga

SEQ ID NO: 17211 - DNA, 40 bp, Homo sapiens
tctcagattttcagggaagacagacagcatttccagtaaa

SEQ ID NO: 17212 - DNA, 40 bp, Homo sapiens
ttactggaaatgctgtctgtcttccctgaaaatctgagaa

SEQ ID NO: 17213 - DNA, 40 bp, Homo sapiens
ttctcagattttcagggaagacagacagcatttccagtaa

SEQ ID NO: 17214 - DNA, 40 bp, Homo sapiens
tactggaaatgctgtctgtcttccctgaaaatctgagaaa

SEQ ID NO: 17215 - DNA, 40 bp, Homo sapiens
tttctcagattttcagggaagacagacagcatttccagta

SEQ ID NO: 17216 - DNA, 40 bp, Homo sapiens
actggaaatgctgtctgtcttccctgaaaatctgagaaat

SEQ ID NO: 17217 - DNA, 40 bp, Homo sapiens
atttctcagattttcagggaagacagacagcatttccagt

SEQ ID NO: 17218 - DNA, 40 bp, Homo sapiens
ctggaaatgctgtctgtcttccctgaaaatctgagaaatt

SEQ ID NO: 17219 - DNA, 40 bp, Homo sapiens
aatttctcagattttcagggaagacagacagcatttccag

SEQ ID NO: 17220 - DNA, 40 bp, Homo sapiens
tggaaatgctgtctgtcttccctgaaaatctgagaaattc

SEQ ID NO: 17221 - DNA, 40 bp, Homo sapiens
gaatttctcagattttcagggaagacagacagcatttcca

SEQ ID NO: 17222 - DNA, 40 bp, Homo sapiens
ggaaatgctgtctgtcttccctgaaaatctgagaaattcc

SEQ ID NO: 17223 - DNA, 40 bp, Homo sapiens
ggaatttctcagattttcagggaagacagacagcatttcc

SEQ ID NO: 17224 - DNA, 40 bp, Homo sapiens
gaaatgctgtctgtcttccctgaaaatctgagaaattcca

SEQ ID NO: 17225 - DNA, 40 bp, Homo sapiens
tggaatttctcagattttcagggaagacagacagcatttc

SEQ ID NO: 17226 - DNA, 40 bp, Homo sapiens
aaatgctgtctgtcttccctgaaaatctgagaaattccat

SEQ ID NO: 17227 - DNA, 40 bp, Homo sapiens
atggaatttctcagattttcagggaagacagacagcattt

SEQ ID NO: 17228 - DNA, 40 bp, Homo sapiens
aatgctgtctgtcttccctgaaaatctgagaaattccatt

SEQ ID NO: 17229 - DNA, 40 bp, Homo sapiens
aatggaatttctcagattttcagggaagacagacagcatt

SEQ ID NO: 17230 - DNA, 40 bp, Homo sapiens
atgctgtctgtcttccctgaaaatctgagaaattccatta

SEQ ID NO: 17231 - DNA, 40 bp, Homo sapiens
taatggaatttctcagattttcagggaagacagacagcat

SEQ ID NO: 17232 - DNA, 40 bp, Homo sapiens
tgctgtctgtcttccctgaaaatctgagaaattccattac

SEQ ID NO: 17233 - DNA, 40 bp, Homo sapiens
gtaatggaatttctcagattttcagggaagacagacagca

SEQ ID NO: 17234 - DNA, 40 bp, Homo sapiens
gctgtctgtcttccctgaaaatctgagaaattccattaca

SEQ ID NO: 17235 - DNA, 40 bp, Homo sapiens
tgtaatggaatttctcagattttcagggaagacagacagc

SEQ ID NO: 17236 - DNA, 40 bp, Homo sapiens
ctgtctgtcttccctgaaaatctgagaaattccattacac

SEQ ID NO: 17237 - DNA, 40 bp, Homo sapiens
gtgtaatggaatttctcagattttcagggaagacagacag

SEQ ID NO: 17238 - DNA, 40 bp, Homo sapiens
tgtctgtcttccctgaaaatctgagaaattccattacact

SEQ ID NO: 17239 - DNA, 40 bp, Homo sapiens
agtgtaatggaatttctcagattttcagggaagacagaca

SEQ ID NO: 17240 - DNA, 40 bp, Homo sapiens
gtctgtcttccctgaaaatctgagaaattccattacactt

SEQ ID NO: 17241 - DNA, 40 bp, Homo sapiens
aagtgtaatggaatttctcagattttcagggaagacagac

SEQ ID NO: 17242 - DNA, 40 bp, Homo sapiens
tctgtcttccctgaaaatctgagaaattccattacacttt

SEQ ID NO: 17243 - DNA, 40 bp, Homo sapiens
aaagtgtaatggaatttctcagattttcagggaagacaga

SEQ ID NO: 17244 - DNA, 40 bp, Homo sapiens
ctgtcttccctgaaaatctgagaaattccattacactttg

SEQ ID NO: 17245 - DNA, 40 bp, Homo sapiens
caaagtgtaatggaatttctcagattttcagggaagacag

SEQ ID NO: 17246 - DNA, 40 bp, Homo sapiens
tgtcttccctgaaaatctgagaaattccattacactttgt

SEQ ID NO: 17247 - DNA, 40 bp, Homo sapiens
acaaagtgtaatggaatttctcagattttcagggaagaca

SEQ ID NO: 17248 - DNA, 40 bp, Homo sapiens
gtcttccctgaaaatctgagaaattccattacactttgtt

SEQ ID NO: 17249 - DNA, 40 bp, Homo sapiens
aacaaagtgtaatggaatttctcagattttcagggaagac

SEQ ID NO: 17250 - DNA, 40 bp, Homo sapiens
tcttccctgaaaatctgagaaattccattacactttgttt

SEQ ID NO: 17251 - DNA, 40 bp, Homo sapiens
aaacaaagtgtaatggaatttctcagattttcagggaaga

SEQ ID NO: 17252 - DNA, 40 bp, Homo sapiens
cttccctgaaaatctgagaaattccattacactttgtttc

SEQ ID NO: 17253 - DNA, 40 bp, Homo sapiens
gaaacaaagtgtaatggaatttctcagattttcagggaag

SEQ ID NO: 17254 - DNA, 40 bp, Homo sapiens
ttccctgaaaatctgagaaattccattacactttgtttcc

SEQ ID NO: 17255 - DNA, 40 bp, Homo sapiens
ggaaacaaagtgtaatggaatttctcagattttcagggaa

SEQ ID NO: 17256 - DNA, 40 bp, Homo sapiens
tccctgaaaatctgagaaattccattacactttgtttcca

SEQ ID NO: 17257 - DNA, 40 bp, Homo sapiens
tggaaacaaagtgtaatggaatttctcagattttcaggga

SEQ ID NO: 17258 - DNA, 40 bp, Homo sapiens
ccctgaaaatctgagaaattccattacactttgtttccaa

SEQ ID NO: 17259 - DNA, 40 bp, Homo sapiens
ttggaaacaaagtgtaatggaatttctcagattttcaggg

SEQ ID NO: 17260 - DNA, 40 bp, Homo sapiens
cctgaaaatctgagaaattccattacactttgtttccaat

SEQ ID NO: 17261 - DNA, 40 bp, Homo sapiens
attggaaacaaagtgtaatggaatttctcagattttcagg

SEQ ID NO: 17262 - DNA, 40 bp, Homo sapiens
ctgaaaatctgagaaattccattacactttgtttccaatc

SEQ ID NO: 17263 - DNA, 40 bp, Homo sapiens
gattggaaacaaagtgtaatggaatttctcagattttcag

SEQ ID NO: 17264 - DNA, 40 bp, Homo sapiens
tgaaaatctgagaaattccattacactttgtttccaatca

SEQ ID NO: 17265 - DNA, 40 bp, Homo sapiens
tgattggaaacaaagtgtaatggaatttctcagattttca

SEQ ID NO: 17266 - DNA, 40 bp, Homo sapiens
gaaaatctgagaaattccattacactttgtttccaatcag

SEQ ID NO: 17267 - DNA, 40 bp, Homo sapiens
ctgattggaaacaaagtgtaatggaatttctcagattttc

SEQ ID NO: 17268 - DNA, 40 bp, Homo sapiens
aaaatctgagaaattccattacactttgtttccaatcaga

SEQ ID NO: 17269 - DNA, 40 bp, Homo sapiens
tctgattggaaacaaagtgtaatggaatttctcagatttt

SEQ ID NO: 17270 - DNA, 40 bp, Homo sapiens
aaatctgagaaattccattacactttgtttccaatcagag

SEQ ID NO: 17271 - DNA, 40 bp, Homo sapiens
ctctgattggaaacaaagtgtaatggaatttctcagattt

SEQ ID NO: 17272 - DNA, 40 bp, Homo sapiens
aatctgagaaattccattacactttgtttccaatcagagg

SEQ ID NO: 17273 - DNA, 40 bp, Homo sapiens
cctctgattggaaacaaagtgtaatggaatttctcagatt

SEQ ID NO: 17274 - DNA, 40 bp, Homo sapiens
atctgagaaattccattacactttgtttccaatcagaggt

SEQ ID NO: 17275 - DNA, 40 bp, Homo sapiens
acctctgattggaaacaaagtgtaatggaatttctcagat

SEQ ID NO: 17276 - DNA, 40 bp, Homo sapiens
tctgagaaattccattacactttgtttccaatcagaggtc

SEQ ID NO: 17277 - DNA, 40 bp, Homo sapiens
gacctctgattggaaacaaagtgtaatggaatttctcaga

SEQ ID NO: 17278 - DNA, 40 bp, Homo sapiens
ctgagaaattccattacactttgtttccaatcagaggtca

SEQ ID NO: 17279 - DNA, 40 bp, Homo sapiens
tgacctctgattggaaacaaagtgtaatggaatttctcag

SEQ ID NO: 17280 - DNA, 40 bp, Homo sapiens
tgagaaattccattacactttgtttccaatcagaggtcat

SEQ ID NO: 17281 - DNA, 40 bp, Homo sapiens
atgacctctgattggaaacaaagtgtaatggaatttctca

SEQ ID NO: 17282 - DNA, 40 bp, Homo sapiens
gagaaattccattacactttgtttccaatcagaggtcatg

SEQ ID NO: 17283 - DNA, 40 bp, Homo sapiens
catgacctctgattggaaacaaagtgtaatggaatttctc

SEQ ID NO: 17284 - DNA, 40 bp, Homo sapiens
agaaattccattacactttgtttccaatcagaggtcatga

SEQ ID NO: 17285 - DNA, 40 bp, Homo sapiens
tcatgacctctgattggaaacaaagtgtaatggaatttct

SEQ ID NO: 17286 - DNA, 40 bp, Homo sapiens
gaaattccattacactttgtttccaatcagaggtcatgag

SEQ ID NO: 17287 - DNA, 40 bp, Homo sapiens
ctcatgacctctgattggaaacaaagtgtaatggaatttc

SEQ ID NO: 17288 - DNA, 40 bp, Homo sapiens
aaattccattacactttgtttccaatcagaggtcatgagt

SEQ ID NO: 17289 - DNA, 40 bp, Homo sapiens
actcatgacctctgattggaaacaaagtgtaatggaattt

SEQ ID NO: 17290 - DNA, 40 bp, Homo sapiens
aattccattacactttgtttccaatcagaggtcatgagtg

SEQ ID NO: 17291 - DNA, 40 bp, Homo sapiens
cactcatgacctctgattggaaacaaagtgtaatggaatt

SEQ ID NO: 17292 - DNA, 40 bp, Homo sapiens
attccattacactttgtttccaatcagaggtcatgagtgc

SEQ ID NO: 17293 - DNA, 40 bp, Homo sapiens
gcactcatgacctctgattggaaacaaagtgtaatggaat

SEQ ID NO: 17294 - DNA, 40 bp, Homo sapiens
ttccattacactttgtttccaatcagaggtcatgagtgct

SEQ ID NO: 17295 - DNA, 40 bp, Homo sapiens
agcactcatgacctctgattggaaacaaagtgtaatggaa

SEQ ID NO: 17296 - DNA, 40 bp, Homo sapiens
tccattacactttgtttccaatcagaggtcatgagtgcta

SEQ ID NO: 17297 - DNA, 40 bp, Homo sapiens
tagcactcatgacctctgattggaaacaaagtgtaatgga

SEQ ID NO: 17298 - DNA, 40 bp, Homo sapiens
ccattacactttgtttccaatcagaggtcatgagtgctat

SEQ ID NO: 17299 - DNA, 40 bp, Homo sapiens
atagcactcatgacctctgattggaaacaaagtgtaatgg

SEQ ID NO: 17300 - DNA, 40 bp, Homo sapiens
cattacactttgtttccaatcagaggtcatgagtgctata

SEQ ID NO: 17301 - DNA, 40 bp, Homo sapiens
tatagcactcatgacctctgattggaaacaaagtgtaatg

SEQ ID NO: 17302 - DNA, 40 bp, Homo sapiens
attacactttgtttccaatcagaggtcatgagtgctatat

SEQ ID NO: 17303 - DNA, 40 bp, Homo sapiens
atatagcactcatgacctctgattggaaacaaagtgtaat

SEQ ID NO: 17304 - DNA, 40 bp, Homo sapiens
ttacactttgtttccaatcagaggtcatgagtgctatatg

SEQ ID NO: 17305 - DNA, 40 bp, Homo sapiens
catatagcactcatgacctctgattggaaacaaagtgtaa

SEQ ID NO: 17306 - DNA, 40 bp, Homo sapiens
tacactttgtttccaatcagaggtcatgagtgctatatga

SEQ ID NO: 17307 - DNA, 40 bp, Homo sapiens
tcatatagcactcatgacctctgattggaaacaaagtgta

SEQ ID NO: 17308 - DNA, 40 bp, Homo sapiens
acactttgtttccaatcagaggtcatgagtgctatatgag

SEQ ID NO: 17309 - DNA, 40 bp, Homo sapiens
ctcatatagcactcatgacctctgattggaaacaaagtgt

SEQ ID NO: 17310 - DNA, 40 bp, Homo sapiens
cactttgtttccaatcagaggtcatgagtgctatatgagt

SEQ ID NO: 17311 - DNA, 40 bp, Homo sapiens
actcatatagcactcatgacctctgattggaaacaaagtg

SEQ ID NO: 17312 - DNA, 40 bp, Homo sapiens
actttgtttccaatcagaggtcatgagtgctatatgagta

SEQ ID NO: 17313 - DNA, 40 bp, Homo sapiens
tactcatatagcactcatgacctctgattggaaacaaagt

SEQ ID NO: 17314 - DNA, 40 bp, Homo sapiens
ctttgtttccaatcagaggtcatgagtgctatatgagtat

SEQ ID NO: 17315 - DNA, 40 bp, Homo sapiens
atactcatatagcactcatgacctctgattggaaacaaag

SEQ ID NO: 17316 - DNA, 40 bp, Homo sapiens
tttgtttccaatcagaggtcatgagtgctatatgagtata

SEQ ID NO: 17317 - DNA, 40 bp, Homo sapiens
tatactcatatagcactcatgacctctgattggaaacaaa

SEQ ID NO: 17318 - DNA, 40 bp, Homo sapiens
ttgtttccaatcagaggtcatgagtgctatatgagtatat

SEQ ID NO: 17319 - DNA, 40 bp, Homo sapiens
atatactcatatagcactcatgacctctgattggaaacaa

SEQ ID NO: 17320 - DNA, 40 bp, Homo sapiens
tgtttccaatcagaggtcatgagtgctatatgagtatata

SEQ ID NO: 17321 - DNA, 40 bp, Homo sapiens
tatatactcatatagcactcatgacctctgattggaaaca

SEQ ID NO: 17322 - DNA, 40 bp, Homo sapiens
gtttccaatcagaggtcatgagtgctatatgagtatatac

SEQ ID NO: 17323 - DNA, 40 bp, Homo sapiens
gtatatactcatatagcactcatgacctctgattggaaac

SEQ ID NO: 17324 - DNA, 40 bp, Homo sapiens
tttccaatcagaggtcatgagtgctatatgagtatataca

SEQ ID NO: 17325 - DNA, 40 bp, Homo sapiens
tgtatatactcatatagcactcatgacctctgattggaaa

SEQ ID NO: 17326 - DNA, 40 bp, Homo sapiens
ttccaatcagaggtcatgagtgctatatgagtatatacag

SEQ ID NO: 17327 - DNA, 40 bp, Homo sapiens
ctgtatatactcatatagcactcatgacctctgattggaa

SEQ ID NO: 17328 - DNA, 40 bp, Homo sapiens
tccaatcagaggtcatgagtgctatatgagtatatacagc

SEQ ID NO: 17329 - DNA, 40 bp, Homo sapiens
gctgtatatactcatatagcactcatgacctctgattgga

SEQ ID NO: 17330 - DNA, 40 bp, Homo sapiens
ccaatcagaggtcatgagtgctatatgagtatatacagca

SEQ ID NO: 17331 - DNA, 40 bp, Homo sapiens
tgctgtatatactcatatagcactcatgacctctgattgg

SEQ ID NO: 17332 - DNA, 40 bp, Homo sapiens
caatcagaggtcatgagtgctatatgagtatatacagcat

SEQ ID NO: 17333 - DNA, 40 bp, Homo sapiens
atgctgtatatactcatatagcactcatgacctctgattg

SEQ ID NO: 17334 - DNA, 40 bp, Homo sapiens
aatcagaggtcatgagtgctatatgagtatatacagcatg

SEQ ID NO: 17335 - DNA, 40 bp, Homo sapiens
catgctgtatatactcatatagcactcatgacctctgatt

SEQ ID NO: 17336 - DNA, 40 bp, Homo sapiens
atcagaggtcatgagtgctatatgagtatatacagcatga

SEQ ID NO: 17337 - DNA, 40 bp, Homo sapiens
tcatgctgtatatactcatatagcactcatgacctctgat

SEQ ID NO: 17338 - DNA, 40 bp, Homo sapiens
tcagaggtcatgagtgctatatgagtatatacagcatgac

SEQ ID NO: 17339 - DNA, 40 bp, Homo sapiens
gtcatgctgtatatactcatatagcactcatgacctctga

SEQ ID NO: 17340 - DNA, 40 bp, Homo sapiens
cagaggtcatgagtgctatatgagtatatacagcatgacg

SEQ ID NO: 17341 - DNA, 40 bp, Homo sapiens
cgtcatgctgtatatactcatatagcactcatgacctctg

SEQ ID NO: 17342 - DNA, 40 bp, Homo sapiens
agaggtcatgagtgctatatgagtatatacagcatgacgt

SEQ ID NO: 17343 - DNA, 40 bp, Homo sapiens
acgtcatgctgtatatactcatatagcactcatgacctct

SEQ ID NO: 17344 - DNA, 40 bp, Homo sapiens
gaggtcatgagtgctatatgagtatatacagcatgacgtc

SEQ ID NO: 17345 - DNA, 40 bp, Homo sapiens
gacgtcatgctgtatatactcatatagcactcatgacctc

SEQ ID NO: 17346 - DNA, 40 bp, Homo sapiens
aggtcatgagtgctatatgagtatatacagcatgacgtca

SEQ ID NO: 17347 - DNA, 40 bp, Homo sapiens
tgacgtcatgctgtatatactcatatagcactcatgacct

SEQ ID NO: 17348 - DNA, 40 bp, Homo sapiens
ggtcatgagtgctatatgagtatatacagcatgacgtcat

SEQ ID NO: 17349 - DNA, 40 bp, Homo sapiens
atgacgtcatgctgtatatactcatatagcactcatgacc

SEQ ID NO: 17350 - DNA, 40 bp, Homo sapiens
gtcatgagtgctatatgagtatatacagcatgacgtcatg

SEQ ID NO: 17351 - DNA, 40 bp, Homo sapiens
catgacgtcatgctgtatatactcatatagcactcatgac

SEQ ID NO: 17352 - DNA, 40 bp, Homo sapiens
tcatgagtgctatatgagtatatacagcatgacgtcatga

SEQ ID NO: 17353 - DNA, 40 bp, Homo sapiens
tcatgacgtcatgctgtatatactcatatagcactcatga

SEQ ID NO: 17354 - DNA, 40 bp, Homo sapiens
catgagtgctatatgagtatatacagcatgacgtcatgaa

SEQ ID NO: 17355 - DNA, 40 bp, Homo sapiens
ttcatgacgtcatgctgtatatactcatatagcactcatg

SEQ ID NO: 17356 - DNA, 40 bp, Homo sapiens
atgagtgctatatgagtatatacagcatgacgtcatgaat

SEQ ID NO: 17357 - DNA, 40 bp, Homo sapiens
attcatgacgtcatgctgtatatactcatatagcactcat

SEQ ID NO: 17358 - DNA, 40 bp, Homo sapiens
tgagtgctatatgagtatatacagcatgacgtcatgaatg

SEQ ID NO: 17359 - DNA, 40 bp, Homo sapiens
cattcatgacgtcatgctgtatatactcatatagcactca

SEQ ID NO: 17360 - DNA, 40 bp, Homo sapiens
gagtgctatatgagtatatacagcatgacgtcatgaatgt

SEQ ID NO: 17361 - DNA, 40 bp, Homo sapiens
acattcatgacgtcatgctgtatatactcatatagcactc

SEQ ID NO: 17362 - DNA, 40 bp, Homo sapiens
agtgctatatgagtatatacagcatgacgtcatgaatgtg

SEQ ID NO: 17363 - DNA, 40 bp, Homo sapiens
cacattcatgacgtcatgctgtatatactcatatagcact

SEQ ID NO: 17364 - DNA, 40 bp, Homo sapiens
gtgctatatgagtatatacagcatgacgtcatgaatgtga

SEQ ID NO: 17365 - DNA, 40 bp, Homo sapiens
tcacattcatgacgtcatgctgtatatactcatatagcac

SEQ ID NO: 17366 - DNA, 40 bp, Homo sapiens
tgctatatgagtatatacagcatgacgtcatgaatgtgat

SEQ ID NO: 17367 - DNA, 40 bp, Homo sapiens
atcacattcatgacgtcatgctgtatatactcatatagca

SEQ ID NO: 17368 - DNA, 40 bp, Homo sapiens
gctatatgagtatatacagcatgacgtcatgaatgtgata

SEQ ID NO: 17369 - DNA, 40 bp, Homo sapiens
tatcacattcatgacgtcatgctgtatatactcatatagc

SEQ ID NO: 17370 - DNA, 40 bp, Homo sapiens
ctatatgagtatatacagcatgacgtcatgaatgtgataa

SEQ ID NO: 17371 - DNA, 40 bp, Homo sapiens
ttatcacattcatgacgtcatgctgtatatactcatatag

SEQ ID NO: 17372 - DNA, 40 bp, Homo sapiens
tatatgagtatatacagcatgacgtcatgaatgtgataaa

SEQ ID NO: 17373 - DNA, 40 bp, Homo sapiens
tttatcacattcatgacgtcatgctgtatatactcatata

SEQ ID NO: 17374 - DNA, 40 bp, Homo sapiens
atatgagtatatacagcatgacgtcatgaatgtgataaag

SEQ ID NO: 17375 - DNA, 40 bp, Homo sapiens
ctttatcacattcatgacgtcatgctgtatatactcatat

SEQ ID NO: 17376 - DNA, 40 bp, Homo sapiens
tatgagtatatacagcatgacgtcatgaatgtgataaagt

SEQ ID NO: 17377 - DNA, 40 bp, Homo sapiens
actttatcacattcatgacgtcatgctgtatatactcata

SEQ ID NO: 17378 - DNA, 40 bp, Homo sapiens
atgagtatatacagcatgacgtcatgaatgtgataaagtg

SEQ ID NO: 17379 - DNA, 40 bp, Homo sapiens
cactttatcacattcatgacgtcatgctgtatatactcat

SEQ ID NO: 17380 - DNA, 40 bp, Homo sapiens
tgagtatatacagcatgacgtcatgaatgtgataaagtgg

SEQ ID NO: 17381 - DNA, 40 bp, Homo sapiens
ccactttatcacattcatgacgtcatgctgtatatactca

SEQ ID NO: 17382 - DNA, 40 bp, Homo sapiens
gagtatatacagcatgacgtcatgaatgtgataaagtggg

SEQ ID NO: 17383 - DNA, 40 bp, Homo sapiens
cccactttatcacattcatgacgtcatgctgtatatactc

SEQ ID NO: 17384 - DNA, 40 bp, Homo sapiens
agtatatacagcatgacgtcatgaatgtgataaagtgggt

SEQ ID NO: 17385 - DNA, 40 bp, Homo sapiens
acccactttatcacattcatgacgtcatgctgtatatact

SEQ ID NO: 17386 - DNA, 40 bp, Homo sapiens
gtatatacagcatgacgtcatgaatgtgataaagtgggtt

SEQ ID NO: 17387 - DNA, 40 bp, Homo sapiens
aacccactttatcacattcatgacgtcatgctgtatatac

SEQ ID NO: 17388 - DNA, 40 bp, Homo sapiens
tatatacagcatgacgtcatgaatgtgataaagtgggtta

SEQ ID NO: 17389 - DNA, 40 bp, Homo sapiens
taacccactttatcacattcatgacgtcatgctgtatata

SEQ ID NO: 17390 - DNA, 40 bp, Homo sapiens
atatacagcatgacgtcatgaatgtgataaagtgggttag

SEQ ID NO: 17391 - DNA, 40 bp, Homo sapiens
ctaacccactttatcacattcatgacgtcatgctgtatat

SEQ ID NO: 17392 - DNA, 40 bp, Homo sapiens
tatacagcatgacgtcatgaatgtgataaagtgggttagg

SEQ ID NO: 17393 - DNA, 40 bp, Homo sapiens
cctaacccactttatcacattcatgacgtcatgctgtata

SEQ ID NO: 17394 - DNA, 40 bp, Homo sapiens
atacagcatgacgtcatgaatgtgataaagtgggttagga

SEQ ID NO: 17395 - DNA, 40 bp, Homo sapiens
tcctaacccactttatcacattcatgacgtcatgctgtat

SEQ ID NO: 17396 - DNA, 40 bp, Homo sapiens
tacagcatgacgtcatgaatgtgataaagtgggttaggaa

SEQ ID NO: 17397 - DNA, 40 bp, Homo sapiens
ttcctaacccactttatcacattcatgacgtcatgctgta

SEQ ID NO: 17398 - DNA, 40 bp, Homo sapiens
acagcatgacgtcatgaatgtgataaagtgggttaggaaa

SEQ ID NO: 17399 - DNA, 40 bp, Homo sapiens
tttcctaacccactttatcacattcatgacgtcatgctgt

SEQ ID NO: 17400 - DNA, 40 bp, Homo sapiens
cagcatgacgtcatgaatgtgataaagtgggttaggaaac

SEQ ID NO: 17401 - DNA, 40 bp, Homo sapiens
gtttcctaacccactttatcacattcatgacgtcatgctg

SEQ ID NO: 17402 - DNA, 40 bp, Homo sapiens
agcatgacgtcatgaatgtgataaagtgggttaggaaacc

SEQ ID NO: 17403 - DNA, 40 bp, Homo sapiens
ggtttcctaacccactttatcacattcatgacgtcatgct

SEQ ID NO: 17404 - DNA, 40 bp, Homo sapiens
gcatgacgtcatgaatgtgataaagtgggttaggaaacct

SEQ ID NO: 17405 - DNA, 40 bp, Homo sapiens
aggtttcctaacccactttatcacattcatgacgtcatgc

SEQ ID NO: 17406 - DNA, 40 bp, Homo sapiens
catgacgtcatgaatgtgataaagtgggttaggaaacctt

SEQ ID NO: 17407 - DNA, 40 bp, Homo sapiens
aaggtttcctaacccactttatcacattcatgacgtcatg

SEQ ID NO: 17408 - DNA, 40 bp, Homo sapiens
atgacgtcatgaatgtgataaagtgggttaggaaaccttt

SEQ ID NO: 17409 - DNA, 40 bp, Homo sapiens
aaaggtttcctaacccactttatcacattcatgacgtcat

SEQ ID NO: 17410 - DNA, 40 bp, Homo sapiens
tgacgtcatgaatgtgataaagtgggttaggaaacctttt

SEQ ID NO: 17411 - DNA, 40 bp, Homo sapiens
aaaaggtttcctaacccactttatcacattcatgacgtca

SEQ ID NO: 17412 - DNA, 40 bp, Homo sapiens
gacgtcatgaatgtgataaagtgggttaggaaaccttttg

SEQ ID NO: 17413 - DNA, 40 bp, Homo sapiens
caaaaggtttcctaacccactttatcacattcatgacgtc

SEQ ID NO: 17414 - DNA, 40 bp, Homo sapiens
acgtcatgaatgtgataaagtgggttaggaaaccttttgc

SEQ ID NO: 17415 - DNA, 40 bp, Homo sapiens
gcaaaaggtttcctaacccactttatcacattcatgacgt

SEQ ID NO: 17416 - DNA, 40 bp, Homo sapiens
cgtcatgaatgtgataaagtgggttaggaaaccttttgct

SEQ ID NO: 17417 - DNA, 40 bp, Homo sapiens
agcaaaaggtttcctaacccactttatcacattcatgacg

SEQ ID NO: 17418 - DNA, 40 bp, Homo sapiens
gtcatgaatgtgataaagtgggttaggaaaccttttgcta

SEQ ID NO: 17419 - DNA, 40 bp, Homo sapiens
tagcaaaaggtttcctaacccactttatcacattcatgac

SEQ ID NO: 17420 - DNA, 40 bp, Homo sapiens
tcatgaatgtgataaagtgggttaggaaaccttttgctaa

SEQ ID NO: 17421 - DNA, 40 bp, Homo sapiens
ttagcaaaaggtttcctaacccactttatcacattcatga

SEQ ID NO: 17422 - DNA, 40 bp, Homo sapiens
catgaatgtgataaagtgggttaggaaaccttttgctaat

SEQ ID NO: 17423 - DNA, 40 bp, Homo sapiens
attagcaaaaggtttcctaacccactttatcacattcatg

SEQ ID NO: 17424 - DNA, 40 bp, Homo sapiens
atgaatgtgataaagtgggttaggaaaccttttgctaatg

SEQ ID NO: 17425 - DNA, 40 bp, Homo sapiens
cattagcaaaaggtttcctaacccactttatcacattcat

SEQ ID NO: 17426 - DNA, 40 bp, Homo sapiens
tgaatgtgataaagtgggttaggaaaccttttgctaatga

SEQ ID NO: 17427 - DNA, 40 bp, Homo sapiens
tcattagcaaaaggtttcctaacccactttatcacattca

SEQ ID NO: 17428 - DNA, 40 bp, Homo sapiens
gaatgtgataaagtgggttaggaaaccttttgctaatgat

SEQ ID NO: 17429 - DNA, 40 bp, Homo sapiens
atcattagcaaaaggtttcctaacccactttatcacattc

SEQ ID NO: 17430 - DNA, 40 bp, Homo sapiens
aatgtgataaagtgggttaggaaaccttttgctaatgatt

SEQ ID NO: 17431 - DNA, 40 bp, Homo sapiens
aatcattagcaaaaggtttcctaacccactttatcacatt

SEQ ID NO: 17432 - DNA, 40 bp, Homo sapiens
atgtgataaagtgggttaggaaaccttttgctaatgattg

SEQ ID NO: 17433 - DNA, 40 bp, Homo sapiens
caatcattagcaaaaggtttcctaacccactttatcacat

SEQ ID NO: 17434 - DNA, 40 bp, Homo sapiens
tgtgataaagtgggttaggaaaccttttgctaatgattgt

SEQ ID NO: 17435 - DNA, 40 bp, Homo sapiens
acaatcattagcaaaaggtttcctaacccactttatcaca

SEQ ID NO: 17436 - DNA, 40 bp, Homo sapiens
gtgataaagtgggttaggaaaccttttgctaatgattgtt

SEQ ID NO: 17437 - DNA, 40 bp, Homo sapiens
aacaatcattagcaaaaggtttcctaacccactttatcac

SEQ ID NO: 17438 - DNA, 40 bp, Homo sapiens
tgataaagtgggttaggaaaccttttgctaatgattgtta

SEQ ID NO: 17439 - DNA, 40 bp, Homo sapiens
taacaatcattagcaaaaggtttcctaacccactttatca

SEQ ID NO: 17440 - DNA, 40 bp, Homo sapiens
gataaagtgggttaggaaaccttttgctaatgattgttaa

SEQ ID NO: 17441 - DNA, 40 bp, Homo sapiens
ttaacaatcattagcaaaaggtttcctaacccactttatc

SEQ ID NO: 17442 - DNA, 40 bp, Homo sapiens
ataaagtgggttaggaaaccttttgctaatgattgttaaa

SEQ ID NO: 17443 - DNA, 40 bp, Homo sapiens
tttaacaatcattagcaaaaggtttcctaacccactttat

SEQ ID NO: 17444 - DNA, 40 bp, Homo sapiens
taaagtgggttaggaaaccttttgctaatgattgttaaaa

SEQ ID NO: 17445 - DNA, 40 bp, Homo sapiens
ttttaacaatcattagcaaaaggtttcctaacccacttta

SEQ ID NO: 17446 - DNA, 40 bp, Homo sapiens
aaagtgggttaggaaaccttttgctaatgattgttaaaat

SEQ ID NO: 17447 - DNA, 40 bp, Homo sapiens
attttaacaatcattagcaaaaggtttcctaacccacttt

SEQ ID NO: 17448 - DNA, 40 bp, Homo sapiens
aagtgggttaggaaaccttttgctaatgattgttaaaatg

SEQ ID NO: 17449 - DNA, 40 bp, Homo sapiens
cattttaacaatcattagcaaaaggtttcctaacccactt

SEQ ID NO: 17450 - DNA, 40 bp, Homo sapiens
agtgggttaggaaaccttttgctaatgattgttaaaatgc

SEQ ID NO: 17451 - DNA, 40 bp, Homo sapiens
gcattttaacaatcattagcaaaaggtttcctaacccact

SEQ ID NO: 17452 - DNA, 40 bp, Homo sapiens
gtgggttaggaaaccttttgctaatgattgttaaaatgca

SEQ ID NO: 17453 - DNA, 40 bp, Homo sapiens
tgcattttaacaatcattagcaaaaggtttcctaacccac

SEQ ID NO: 17454 - DNA, 40 bp, Homo sapiens
tgggttaggaaaccttttgctaatgattgttaaaatgcaa

SEQ ID NO: 17455 - DNA, 40 bp, Homo sapiens
ttgcattttaacaatcattagcaaaaggtttcctaaccca

SEQ ID NO: 17456 - DNA, 40 bp, Homo sapiens
gggttaggaaaccttttgctaatgattgttaaaatgcaat

SEQ ID NO: 17457 - DNA, 40 bp, Homo sapiens
attgcattttaacaatcattagcaaaaggtttcctaaccc

SEQ ID NO: 17458 - DNA, 40 bp, Homo sapiens
ggttaggaaaccttttgctaatgattgttaaaatgcaata

SEQ ID NO: 17459 - DNA, 40 bp, Homo sapiens
tattgcattttaacaatcattagcaaaaggtttcctaacc

SEQ ID NO: 17460 - DNA, 40 bp, Homo sapiens
gttaggaaaccttttgctaatgattgttaaaatgcaatat

SEQ ID NO: 17461 - DNA, 40 bp, Homo sapiens
atattgcattttaacaatcattagcaaaaggtttcctaac

SEQ ID NO: 17462 - DNA, 40 bp, Homo sapiens
ttaggaaaccttttgctaatgattgttaaaatgcaatata

SEQ ID NO: 17463 - DNA, 40 bp, Homo sapiens
tatattgcattttaacaatcattagcaaaaggtttcctaa

SEQ ID NO: 17464 - DNA, 40 bp, Homo sapiens
taggaaaccttttgctaatgattgttaaaatgcaatataa

SEQ ID NO: 17465 - DNA, 40 bp, Homo sapiens
ttatattgcattttaacaatcattagcaaaaggtttccta

SEQ ID NO: 17466 - DNA, 40 bp, Homo sapiens
aggaaaccttttgctaatgattgttaaaatgcaatataaa

SEQ ID NO: 17467 - DNA, 40 bp, Homo sapiens
tttatattgcattttaacaatcattagcaaaaggtttcct

SEQ ID NO: 17468 - DNA, 40 bp, Homo sapiens
ggaaaccttttgctaatgattgttaaaatgcaatataaat

SEQ ID NO: 17469 - DNA, 40 bp, Homo sapiens
atttatattgcattttaacaatcattagcaaaaggtttcc

SEQ ID NO: 17470 - DNA, 40 bp, Homo sapiens
gaaaccttttgctaatgattgttaaaatgcaatataaatg

SEQ ID NO: 17471 - DNA, 40 bp, Homo sapiens
catttatattgcattttaacaatcattagcaaaaggtttc

SEQ ID NO: 17472 - DNA, 40 bp, Homo sapiens
aaaccttttgctaatgattgttaaaatgcaatataaatgt

SEQ ID NO: 17473 - DNA, 40 bp, Homo sapiens
acatttatattgcattttaacaatcattagcaaaaggttt

SEQ ID NO: 17474 - DNA, 40 bp, Homo sapiens
aaccttttgctaatgattgttaaaatgcaatataaatgtt

SEQ ID NO: 17475 - DNA, 40 bp, Homo sapiens
aacatttatattgcattttaacaatcattagcaaaaggtt

SEQ ID NO: 17476 - DNA, 40 bp, Homo sapiens
accttttgctaatgattgttaaaatgcaatataaatgttg

SEQ ID NO: 17477 - DNA, 40 bp, Homo sapiens
caacatttatattgcattttaacaatcattagcaaaaggt

SEQ ID NO: 17478 - DNA, 40 bp, Homo sapiens
ccttttgctaatgattgttaaaatgcaatataaatgttga

SEQ ID NO: 17479 - DNA, 40 bp, Homo sapiens
tcaacatttatattgcattttaacaatcattagcaaaagg

SEQ ID NO: 17480 - DNA, 40 bp, Homo sapiens
cttttgctaatgattgttaaaatgcaatataaatgttgaa

SEQ ID NO: 17481 - DNA, 40 bp, Homo sapiens
ttcaacatttatattgcattttaacaatcattagcaaaag

SEQ ID NO: 17482 - DNA, 40 bp, Homo sapiens
ttttgctaatgattgttaaaatgcaatataaatgttgaag

SEQ ID NO: 17483 - DNA, 40 bp, Homo sapiens
cttcaacatttatattgcattttaacaatcattagcaaaa

SEQ ID NO: 17484 - DNA, 40 bp, Homo sapiens
tttgctaatgattgttaaaatgcaatataaatgttgaaga

SEQ ID NO: 17485 - DNA, 40 bp, Homo sapiens
tcttcaacatttatattgcattttaacaatcattagcaaa

SEQ ID NO: 17486 - DNA, 40 bp, Homo sapiens
ttgctaatgattgttaaaatgcaatataaatgttgaagaa

SEQ ID NO: 17487 - DNA, 40 bp, Homo sapiens
ttcttcaacatttatattgcattttaacaatcattagcaa

SEQ ID NO: 17488 - DNA, 40 bp, Homo sapiens
tgctaatgattgttaaaatgcaatataaatgttgaagaaa

SEQ ID NO: 17489 - DNA, 40 bp, Homo sapiens
tttcttcaacatttatattgcattttaacaatcattagca

SEQ ID NO: 17490 - DNA, 40 bp, Homo sapiens
gctaatgattgttaaaatgcaatataaatgttgaagaaat

SEQ ID NO: 17491 - DNA, 40 bp, Homo sapiens
atttcttcaacatttatattgcattttaacaatcattagc

SEQ ID NO: 17492 - DNA, 40 bp, Homo sapiens
ctaatgattgttaaaatgcaatataaatgttgaagaaata

SEQ ID NO: 17493 - DNA, 40 bp, Homo sapiens
tatttcttcaacatttatattgcattttaacaatcattag

SEQ ID NO: 17494 - DNA, 40 bp, Homo sapiens
taatgattgttaaaatgcaatataaatgttgaagaaataa

SEQ ID NO: 17495 - DNA, 40 bp, Homo sapiens
ttatttcttcaacatttatattgcattttaacaatcatta

SEQ ID NO: 17496 - DNA, 40 bp, Homo sapiens
aatgattgttaaaatgcaatataaatgttgaagaaataaa

SEQ ID NO: 17497 - DNA, 40 bp, Homo sapiens
tttatttcttcaacatttatattgcattttaacaatcatt

SEQ ID NO: 17498 - DNA, 40 bp, Homo sapiens
atgattgttaaaatgcaatataaatgttgaagaaataaag

SEQ ID NO: 17499 - DNA, 40 bp, Homo sapiens
ctttatttcttcaacatttatattgcattttaacaatcat

SEQ ID NO: 17500 - DNA, 40 bp, Homo sapiens
tgattgttaaaatgcaatataaatgttgaagaaataaagc

SEQ ID NO: 17501 - DNA, 40 bp, Homo sapiens
gctttatttcttcaacatttatattgcattttaacaatca

SEQ ID NO: 17502 - DNA, 40 bp, Homo sapiens
gattgttaaaatgcaatataaatgttgaagaaataaagct

SEQ ID NO: 17503 - DNA, 40 bp, Homo sapiens
agctttatttcttcaacatttatattgcattttaacaatc

SEQ ID NO: 17504 - DNA, 40 bp, Homo sapiens
attgttaaaatgcaatataaatgttgaagaaataaagcta

SEQ ID NO: 17505 - DNA, 40 bp, Homo sapiens
tagctttatttcttcaacatttatattgcattttaacaat

SEQ ID NO: 17506 - DNA, 40 bp, Homo sapiens
ttgttaaaatgcaatataaatgttgaagaaataaagctaa

SEQ ID NO: 17507 - DNA, 40 bp, Homo sapiens
ttagctttatttcttcaacatttatattgcattttaacaa

SEQ ID NO: 17508 - DNA, 40 bp, Homo sapiens
tgttaaaatgcaatataaatgttgaagaaataaagctaac

SEQ ID NO: 17509 - DNA, 40 bp, Homo sapiens
gttagctttatttcttcaacatttatattgcattttaaca

SEQ ID NO: 17510 - DNA, 40 bp, Homo sapiens
gttaaaatgcaatataaatgttgaagaaataaagctaaca

SEQ ID NO: 17511 - DNA, 40 bp, Homo sapiens
tgttagctttatttcttcaacatttatattgcattttaac

SEQ ID NO: 17512 - DNA, 40 bp, Homo sapiens
ttaaaatgcaatataaatgttgaagaaataaagctaacag

SEQ ID NO: 17513 - DNA, 40 bp, Homo sapiens
ctgttagctttatttcttcaacatttatattgcattttaa

SEQ ID NO: 17514 - DNA, 40 bp, Homo sapiens
taaaatgcaatataaatgttgaagaaataaagctaacagt

SEQ ID NO: 17515 - DNA, 40 bp, Homo sapiens
actgttagctttatttcttcaacatttatattgcatttta

SEQ ID NO: 17516 - DNA, 40 bp, Homo sapiens
aaaatgcaatataaatgttgaagaaataaagctaacagtt

SEQ ID NO: 17517 - DNA, 40 bp, Homo sapiens
aactgttagctttatttcttcaacatttatattgcatttt

SEQ ID NO: 17518 - DNA, 40 bp, Homo sapiens
aaatgcaatataaatgttgaagaaataaagctaacagtta

SEQ ID NO: 17519 - DNA, 40 bp, Homo sapiens
taactgttagctttatttcttcaacatttatattgcattt

SEQ ID NO: 17520 - DNA, 40 bp, Homo sapiens
aatgcaatataaatgttgaagaaataaagctaacagttaa

SEQ ID NO: 17521 - DNA, 40 bp, Homo sapiens
ttaactgttagctttatttcttcaacatttatattgcatt

SEQ ID NO: 17522 - DNA, 40 bp, Homo sapiens
atgcaatataaatgttgaagaaataaagctaacagttaag

SEQ ID NO: 17523 - DNA, 40 bp, Homo sapiens
cttaactgttagctttatttcttcaacatttatattgcat

SEQ ID NO: 17524 - DNA, 40 bp, Homo sapiens
tgcaatataaatgttgaagaaataaagctaacagttaagc

SEQ ID NO: 17525 - DNA, 40 bp, Homo sapiens
gcttaactgttagctttatttcttcaacatttatattgca

SEQ ID NO: 17526 - DNA, 40 bp, Homo sapiens
gcaatataaatgttgaagaaataaagctaacagttaagcc

SEQ ID NO: 17527 - DNA, 40 bp, Homo sapiens
ggcttaactgttagctttatttcttcaacatttatattgc

SEQ ID NO: 17528 - DNA, 40 bp, Homo sapiens
caatataaatgttgaagaaataaagctaacagttaagcct

SEQ ID NO: 17529 - DNA, 40 bp, Homo sapiens
aggcttaactgttagctttatttcttcaacatttatattg

SEQ ID NO: 17530 - DNA, 40 bp, Homo sapiens
aatataaatgttgaagaaataaagctaacagttaagcctt

SEQ ID NO: 17531 - DNA, 40 bp, Homo sapiens
aaggcttaactgttagctttatttcttcaacatttatatt

SEQ ID NO: 17532 - DNA, 40 bp, Homo sapiens
atataaatgttgaagaaataaagctaacagttaagccttt

SEQ ID NO: 17533 - DNA, 40 bp, Homo sapiens
aaaggcttaactgttagctttatttcttcaacatttatat

SEQ ID NO: 17534 - DNA, 40 bp, Homo sapiens
tataaatgttgaagaaataaagctaacagttaagccttta

SEQ ID NO: 17535 - DNA, 40 bp, Homo sapiens
taaaggcttaactgttagctttatttcttcaacatttata

SEQ ID NO: 17536 - DNA, 40 bp, Homo sapiens
ataaatgttgaagaaataaagctaacagttaagcctttat

SEQ ID NO: 17537 - DNA, 40 bp, Homo sapiens
ataaaggcttaactgttagctttatttcttcaacatttat

SEQ ID NO: 17538 - DNA, 40 bp, Homo sapiens
taaatgttgaagaaataaagctaacagttaagcctttatt

SEQ ID NO: 17539 - DNA, 40 bp, Homo sapiens
aataaaggcttaactgttagctttatttcttcaacattta

SEQ ID NO: 17540 - DNA, 40 bp, Homo sapiens
aaatgttgaagaaataaagctaacagttaagcctttattt

SEQ ID NO: 17541 - DNA, 40 bp, Homo sapiens
aaataaaggcttaactgttagctttatttcttcaacattt

SEQ ID NO: 17542 - DNA, 40 bp, Homo sapiens
aatgttgaagaaataaagctaacagttaagcctttatttg

SEQ ID NO: 17543 - DNA, 40 bp, Homo sapiens
caaataaaggcttaactgttagctttatttcttcaacatt

SEQ ID NO: 17544 - DNA, 40 bp, Homo sapiens
atgttgaagaaataaagctaacagttaagcctttatttgg

SEQ ID NO: 17545 - DNA, 40 bp, Homo sapiens
ccaaataaaggcttaactgttagctttatttcttcaacat

SEQ ID NO: 17546 - DNA, 40 bp, Homo sapiens
tgttgaagaaataaagctaacagttaagcctttatttggg

SEQ ID NO: 17547 - DNA, 40 bp, Homo sapiens
cccaaataaaggcttaactgttagctttatttcttcaaca

SEQ ID NO: 17548 - DNA, 40 bp, Homo sapiens
gttgaagaaataaagctaacagttaagcctttatttgggc

SEQ ID NO: 17549 - DNA, 40 bp, Homo sapiens
gcccaaataaaggcttaactgttagctttatttcttcaac

SEQ ID NO: 17550 - DNA, 40 bp, Homo sapiens
ttgaagaaataaagctaacagttaagcctttatttgggcg

SEQ ID NO: 17551 - DNA, 40 bp, Homo sapiens
cgcccaaataaaggcttaactgttagctttatttcttcaa

SEQ ID NO: 17552 - DNA, 40 bp, Homo sapiens
tgaagaaataaagctaacagttaagcctttatttgggcgg

SEQ ID NO: 17553 - DNA, 40 bp, Homo sapiens
ccgcccaaataaaggcttaactgttagctttatttcttca

SEQ ID NO: 17554 - DNA, 40 bp, Homo sapiens
gaagaaataaagctaacagttaagcctttatttgggcgga

SEQ ID NO: 17555 - DNA, 40 bp, Homo sapiens
tccgcccaaataaaggcttaactgttagctttatttcttc

SEQ ID NO: 17556 - DNA, 40 bp, Homo sapiens
aagaaataaagctaacagttaagcctttatttgggcggaa

SEQ ID NO: 17557 - DNA, 40 bp, Homo sapiens
ttccgcccaaataaaggcttaactgttagctttatttctt

SEQ ID NO: 17558 - DNA, 40 bp, Homo sapiens
agaaataaagctaacagttaagcctttatttgggcggaag

SEQ ID NO: 17559 - DNA, 40 bp, Homo sapiens
cttccgcccaaataaaggcttaactgttagctttatttct

SEQ ID NO: 17560 - DNA, 40 bp, Homo sapiens
gaaataaagctaacagttaagcctttatttgggcggaagg

SEQ ID NO: 17561 - DNA, 40 bp, Homo sapiens
ccttccgcccaaataaaggcttaactgttagctttatttc

SEQ ID NO: 17562 - DNA, 40 bp, Homo sapiens
aaataaagctaacagttaagcctttatttgggcggaaggc

SEQ ID NO: 17563 - DNA, 40 bp, Homo sapiens
gccttccgcccaaataaaggcttaactgttagctttattt

SEQ ID NO: 17564 - DNA, 40 bp, Homo sapiens
aataaagctaacagttaagcctttatttgggcggaaggct

SEQ ID NO: 17565 - DNA, 40 bp, Homo sapiens
agccttccgcccaaataaaggcttaactgttagctttatt

SEQ ID NO: 17566 - DNA, 40 bp, Homo sapiens
ataaagctaacagttaagcctttatttgggcggaaggctg

SEQ ID NO: 17567 - DNA, 40 bp, Homo sapiens
cagccttccgcccaaataaaggcttaactgttagctttat

SEQ ID NO: 17568 - DNA, 40 bp, Homo sapiens
taaagctaacagttaagcctttatttgggcggaaggctga

SEQ ID NO: 17569 - DNA, 40 bp, Homo sapiens
tcagccttccgcccaaataaaggcttaactgttagcttta

SEQ ID NO: 17570 - DNA, 40 bp, Homo sapiens
aaagctaacagttaagcctttatttgggcggaaggctgaa

SEQ ID NO: 17571 - DNA, 40 bp, Homo sapiens
ttcagccttccgcccaaataaaggcttaactgttagcttt

SEQ ID NO: 17572 - DNA, 40 bp, Homo sapiens
aagctaacagttaagcctttatttgggcggaaggctgaaa

SEQ ID NO: 17573 - DNA, 40 bp, Homo sapiens
tttcagccttccgcccaaataaaggcttaactgttagctt

SEQ ID NO: 17574 - DNA, 40 bp, Homo sapiens
agctaacagttaagcctttatttgggcggaaggctgaaaa

SEQ ID NO: 17575 - DNA, 40 bp, Homo sapiens
ttttcagccttccgcccaaataaaggcttaactgttagct

SEQ ID NO: 17576 - DNA, 40 bp, Homo sapiens
gctaacagttaagcctttatttgggcggaaggctgaaaaa

SEQ ID NO: 17577 - DNA, 40 bp, Homo sapiens
tttttcagccttccgcccaaataaaggcttaactgttagc

SEQ ID NO: 17578 - DNA, 40 bp, Homo sapiens
ctaacagttaagcctttatttgggcggaaggctgaaaaag

SEQ ID NO: 17579 - DNA, 40 bp, Homo sapiens
ctttttcagccttccgcccaaataaaggcttaactgttag

SEQ ID NO: 17580 - DNA, 40 bp, Homo sapiens
taacagttaagcctttatttgggcggaaggctgaaaaagt

SEQ ID NO: 17581 - DNA, 40 bp, Homo sapiens
actttttcagccttccgcccaaataaaggcttaactgtta

SEQ ID NO: 17582 - DNA, 40 bp, Homo sapiens
aacagttaagcctttatttgggcggaaggctgaaaaagtt

SEQ ID NO: 17583 - DNA, 40 bp, Homo sapiens
aactttttcagccttccgcccaaataaaggcttaactgtt

SEQ ID NO: 17584 - DNA, 40 bp, Homo sapiens
acagttaagcctttatttgggcggaaggctgaaaaagttt

SEQ ID NO: 17585 - DNA, 40 bp, Homo sapiens
aaactttttcagccttccgcccaaataaaggcttaactgt

SEQ ID NO: 17586 - DNA, 40 bp, Homo sapiens
cagttaagcctttatttgggcggaaggctgaaaaagttta

SEQ ID NO: 17587 - DNA, 40 bp, Homo sapiens
taaactttttcagccttccgcccaaataaaggcttaactg

SEQ ID NO: 17588 - DNA, 40 bp, Homo sapiens
agttaagcctttatttgggcggaaggctgaaaaagtttat

SEQ ID NO: 17589 - DNA, 40 bp, Homo sapiens
ataaactttttcagccttccgcccaaataaaggcttaact

SEQ ID NO: 17590 - DNA, 40 bp, Homo sapiens
gttaagcctttatttgggcggaaggctgaaaaagtttata

SEQ ID NO: 17591 - DNA, 40 bp, Homo sapiens
tataaactttttcagccttccgcccaaataaaggcttaac

SEQ ID NO: 17592 - DNA, 40 bp, Homo sapiens
ttaagcctttatttgggcggaaggctgaaaaagtttataa

SEQ ID NO: 17593 - DNA, 40 bp, Homo sapiens
ttataaactttttcagccttccgcccaaataaaggcttaa

SEQ ID NO: 17594 - DNA, 40 bp, Homo sapiens
taagcctttatttgggcggaaggctgaaaaagtttataaa

SEQ ID NO: 17595 - DNA, 40 bp, Homo sapiens
tttataaactttttcagccttccgcccaaataaaggctta

SEQ ID NO: 17596 - DNA, 40 bp, Homo sapiens
aagcctttatttgggcggaaggctgaaaaagtttataaac

SEQ ID NO: 17597 - DNA, 40 bp, Homo sapiens
gtttataaactttttcagccttccgcccaaataaaggctt

SEQ ID NO: 17598 - DNA, 40 bp, Homo sapiens
agcctttatttgggcggaaggctgaaaaagtttataaact

SEQ ID NO: 17599 - DNA, 40 bp, Homo sapiens
agtttataaactttttcagccttccgcccaaataaaggct

SEQ ID NO: 17600 - DNA, 40 bp, Homo sapiens
gcctttatttgggcggaaggctgaaaaagtttataaactt

SEQ ID NO: 17601 - DNA, 40 bp, Homo sapiens
aagtttataaactttttcagccttccgcccaaataaaggc

SEQ ID NO: 17602 - DNA, 40 bp, Homo sapiens
cctttatttgggcggaaggctgaaaaagtttataaactta

SEQ ID NO: 17603 - DNA, 40 bp, Homo sapiens
taagtttataaactttttcagccttccgcccaaataaagg

SEQ ID NO: 17604 - DNA, 40 bp, Homo sapiens
ctttatttgggcggaaggctgaaaaagtttataaacttaa

SEQ ID NO: 17605 - DNA, 40 bp, Homo sapiens
ttaagtttataaactttttcagccttccgcccaaataaag

SEQ ID NO: 17606 - DNA, 40 bp, Homo sapiens
tttatttgggcggaaggctgaaaaagtttataaacttaaa

SEQ ID NO: 17607 - DNA, 40 bp, Homo sapiens
tttaagtttataaactttttcagccttccgcccaaataaa

SEQ ID NO: 17608 - DNA, 40 bp, Homo sapiens
ttatttgggcggaaggctgaaaaagtttataaacttaaac

SEQ ID NO: 17609 - DNA, 40 bp, Homo sapiens
gtttaagtttataaactttttcagccttccgcccaaataa

SEQ ID NO: 17610 - DNA, 40 bp, Homo sapiens
tatttgggcggaaggctgaaaaagtttataaacttaaacc

SEQ ID NO: 17611 - DNA, 40 bp, Homo sapiens
ggtttaagtttataaactttttcagccttccgcccaaata

SEQ ID NO: 17612 - DNA, 40 bp, Homo sapiens
atttgggcggaaggctgaaaaagtttataaacttaaacct

SEQ ID NO: 17613 - DNA, 40 bp, Homo sapiens
aggtttaagtttataaactttttcagccttccgcccaaat

SEQ ID NO: 17614 - DNA, 40 bp, Homo sapiens
tttgggcggaaggctgaaaaagtttataaacttaaaccta

SEQ ID NO: 17615 - DNA, 40 bp, Homo sapiens
taggtttaagtttataaactttttcagccttccgcccaaa

SEQ ID NO: 17616 - DNA, 40 bp, Homo sapiens
ttgggcggaaggctgaaaaagtttataaacttaaacctat

SEQ ID NO: 17617 - DNA, 40 bp, Homo sapiens
ataggtttaagtttataaactttttcagccttccgcccaa

SEQ ID NO: 17618 - DNA, 40 bp, Homo sapiens
tgggcggaaggctgaaaaagtttataaacttaaacctata

SEQ ID NO: 17619 - DNA, 40 bp, Homo sapiens
tataggtttaagtttataaactttttcagccttccgccca

SEQ ID NO: 17620 - DNA, 40 bp, Homo sapiens
gggcggaaggctgaaaaagtttataaacttaaacctataa

SEQ ID NO: 17621 - DNA, 40 bp, Homo sapiens
ttataggtttaagtttataaactttttcagccttccgccc

SEQ ID NO: 17622 - DNA, 40 bp, Homo sapiens
ggcggaaggctgaaaaagtttataaacttaaacctataac

SEQ ID NO: 17623 - DNA, 40 bp, Homo sapiens
gttataggtttaagtttataaactttttcagccttccgcc

SEQ ID NO: 17624 - DNA, 40 bp, Homo sapiens
gcggaaggctgaaaaagtttataaacttaaacctataact

SEQ ID NO: 17625 - DNA, 40 bp, Homo sapiens
agttataggtttaagtttataaactttttcagccttccgc

SEQ ID NO: 17626 - DNA, 40 bp, Homo sapiens
cggaaggctgaaaaagtttataaacttaaacctataactc

SEQ ID NO: 17627 - DNA, 40 bp, Homo sapiens
gagttataggtttaagtttataaactttttcagccttccg

SEQ ID NO: 17628 - DNA, 40 bp, Homo sapiens
ggaaggctgaaaaagtttataaacttaaacctataactct

SEQ ID NO: 17629 - DNA, 40 bp, Homo sapiens
agagttataggtttaagtttataaactttttcagccttcc

SEQ ID NO: 17630 - DNA, 40 bp, Homo sapiens
gaaggctgaaaaagtttataaacttaaacctataactctg

SEQ ID NO: 17631 - DNA, 40 bp, Homo sapiens
cagagttataggtttaagtttataaactttttcagccttc

SEQ ID NO: 17632 - DNA, 40 bp, Homo sapiens
aaggctgaaaaagtttataaacttaaacctataactctgc

SEQ ID NO: 17633 - DNA, 40 bp, Homo sapiens
gcagagttataggtttaagtttataaactttttcagcctt

SEQ ID NO: 17634 - DNA, 40 bp, Homo sapiens
aggctgaaaaagtttataaacttaaacctataactctgct

SEQ ID NO: 17635 - DNA, 40 bp, Homo sapiens
agcagagttataggtttaagtttataaactttttcagcct

SEQ ID NO: 17636 - DNA, 40 bp, Homo sapiens
ggctgaaaaagtttataaacttaaacctataactctgctt

SEQ ID NO: 17637 - DNA, 40 bp, Homo sapiens
aagcagagttataggtttaagtttataaactttttcagcc

SEQ ID NO: 17638 - DNA, 40 bp, Homo sapiens
gctgaaaaagtttataaacttaaacctataactctgctta

SEQ ID NO: 17639 - DNA, 40 bp, Homo sapiens
taagcagagttataggtttaagtttataaactttttcagc

SEQ ID NO: 17640 - DNA, 40 bp, Homo sapiens
ctgaaaaagtttataaacttaaacctataactctgcttat

SEQ ID NO: 17641 - DNA, 40 bp, Homo sapiens
ataagcagagttataggtttaagtttataaactttttcag

SEQ ID NO: 17642 - DNA, 40 bp, Homo sapiens
tgaaaaagtttataaacttaaacctataactctgcttatg

SEQ ID NO: 17643 - DNA, 40 bp, Homo sapiens
cataagcagagttataggtttaagtttataaactttttca

SEQ ID NO: 17644 - DNA, 40 bp, Homo sapiens
gaaaaagtttataaacttaaacctataactctgcttatga

SEQ ID NO: 17645 - DNA, 40 bp, Homo sapiens
tcataagcagagttataggtttaagtttataaactttttc

SEQ ID NO: 17646 - DNA, 40 bp, Homo sapiens
aaaaagtttataaacttaaacctataactctgcttatgat

SEQ ID NO: 17647 - DNA, 40 bp, Homo sapiens
atcataagcagagttataggtttaagtttataaacttttt

SEQ ID NO: 17648 - DNA, 40 bp, Homo sapiens
aaaagtttataaacttaaacctataactctgcttatgatt

SEQ ID NO: 17649 - DNA, 40 bp, Homo sapiens
aatcataagcagagttataggtttaagtttataaactttt

SEQ ID NO: 17650 - DNA, 40 bp, Homo sapiens
aaagtttataaacttaaacctataactctgcttatgattt

SEQ ID NO: 17651 - DNA, 40 bp, Homo sapiens
aaatcataagcagagttataggtttaagtttataaacttt

SEQ ID NO: 17652 - DNA, 40 bp, Homo sapiens
aagtttataaacttaaacctataactctgcttatgatttc

SEQ ID NO: 17653 - DNA, 40 bp, Homo sapiens
gaaatcataagcagagttataggtttaagtttataaactt

SEQ ID NO: 17654 - DNA, 40 bp, Homo sapiens
agtttataaacttaaacctataactctgcttatgatttct

SEQ ID NO: 17655 - DNA, 40 bp, Homo sapiens
agaaatcataagcagagttataggtttaagtttataaact

SEQ ID NO: 17656 - DNA, 40 bp, Homo sapiens
gtttataaacttaaacctataactctgcttatgatttctg

SEQ ID NO: 17657 - DNA, 40 bp, Homo sapiens
cagaaatcataagcagagttataggtttaagtttataaac

SEQ ID NO: 17658 - DNA, 40 bp, Homo sapiens
tttataaacttaaacctataactctgcttatgatttctgc

SEQ ID NO: 17659 - DNA, 40 bp, Homo sapiens
gcagaaatcataagcagagttataggtttaagtttataaa

SEQ ID NO: 17660 - DNA, 40 bp, Homo sapiens
ttataaacttaaacctataactctgcttatgatttctgcc

SEQ ID NO: 17661 - DNA, 40 bp, Homo sapiens
ggcagaaatcataagcagagttataggtttaagtttataa

SEQ ID NO: 17662 - DNA, 40 bp, Homo sapiens
tataaacttaaacctataactctgcttatgatttctgcca

SEQ ID NO: 17663 - DNA, 40 bp, Homo sapiens
tggcagaaatcataagcagagttataggtttaagtttata

SEQ ID NO: 17664 - DNA, 40 bp, Homo sapiens
ataaacttaaacctataactctgcttatgatttctgccaa

SEQ ID NO: 17665 - DNA, 40 bp, Homo sapiens
ttggcagaaatcataagcagagttataggtttaagtttat

SEQ ID NO: 17666 - DNA, 40 bp, Homo sapiens
taaacttaaacctataactctgcttatgatttctgccaaa

SEQ ID NO: 17667 - DNA, 40 bp, Homo sapiens
tttggcagaaatcataagcagagttataggtttaagttta

SEQ ID NO: 17668 - DNA, 40 bp, Homo sapiens
aaacttaaacctataactctgcttatgatttctgccaaac

SEQ ID NO: 17669 - DNA, 40 bp, Homo sapiens
gtttggcagaaatcataagcagagttataggtttaagttt

SEQ ID NO: 17670 - DNA, 40 bp, Homo sapiens
aacttaaacctataactctgcttatgatttctgccaaacc

SEQ ID NO: 17671 - DNA, 40 bp, Homo sapiens
ggtttggcagaaatcataagcagagttataggtttaagtt

SEQ ID NO: 17672 - DNA, 40 bp, Homo sapiens
acttaaacctataactctgcttatgatttctgccaaacca

SEQ ID NO: 17673 - DNA, 40 bp, Homo sapiens
tggtttggcagaaatcataagcagagttataggtttaagt

SEQ ID NO: 17674 - DNA, 40 bp, Homo sapiens
cttaaacctataactctgcttatgatttctgccaaaccag

SEQ ID NO: 17675 - DNA, 40 bp, Homo sapiens
ctggtttggcagaaatcataagcagagttataggtttaag

SEQ ID NO: 17676 - DNA, 40 bp, Homo sapiens
ttaaacctataactctgcttatgatttctgccaaaccaga

SEQ ID NO: 17677 - DNA, 40 bp, Homo sapiens
tctggtttggcagaaatcataagcagagttataggtttaa

SEQ ID NO: 17678 - DNA, 40 bp, Homo sapiens
taaacctataactctgcttatgatttctgccaaaccagaa

SEQ ID NO: 17679 - DNA, 40 bp, Homo sapiens
ttctggtttggcagaaatcataagcagagttataggttta

SEQ ID NO: 17680 - DNA, 40 bp, Homo sapiens
aaacctataactctgcttatgatttctgccaaaccagaag

SEQ ID NO: 17681 - DNA, 40 bp, Homo sapiens
cttctggtttggcagaaatcataagcagagttataggttt

SEQ ID NO: 17682 - DNA, 40 bp, Homo sapiens
aacctataactctgcttatgatttctgccaaaccagaaga

SEQ ID NO: 17683 - DNA, 40 bp, Homo sapiens
tcttctggtttggcagaaatcataagcagagttataggtt

SEQ ID NO: 17684 - DNA, 40 bp, Homo sapiens
acctataactctgcttatgatttctgccaaaccagaagac

SEQ ID NO: 17685 - DNA, 40 bp, Homo sapiens
gtcttctggtttggcagaaatcataagcagagttataggt

SEQ ID NO: 17686 - DNA, 40 bp, Homo sapiens
cctataactctgcttatgatttctgccaaaccagaagact

SEQ ID NO: 17687 - DNA, 40 bp, Homo sapiens
agtcttctggtttggcagaaatcataagcagagttatagg

SEQ ID NO: 17688 - DNA, 40 bp, Homo sapiens
ctataactctgcttatgatttctgccaaaccagaagactt

SEQ ID NO: 17689 - DNA, 40 bp, Homo sapiens
aagtcttctggtttggcagaaatcataagcagagttatag

SEQ ID NO: 17690 - DNA, 40 bp, Homo sapiens
tataactctgcttatgatttctgccaaaccagaagacttg

SEQ ID NO: 17691 - DNA, 40 bp, Homo sapiens
caagtcttctggtttggcagaaatcataagcagagttata

SEQ ID NO: 17692 - DNA, 40 bp, Homo sapiens
ataactctgcttatgatttctgccaaaccagaagacttga

SEQ ID NO: 17693 - DNA, 40 bp, Homo sapiens
tcaagtcttctggtttggcagaaatcataagcagagttat

SEQ ID NO: 17694 - DNA, 40 bp, Homo sapiens
taactctgcttatgatttctgccaaaccagaagacttgac

SEQ ID NO: 17695 - DNA, 40 bp, Homo sapiens
gtcaagtcttctggtttggcagaaatcataagcagagtta

SEQ ID NO: 17696 - DNA, 40 bp, Homo sapiens
aactctgcttatgatttctgccaaaccagaagacttgact

SEQ ID NO: 17697 - DNA, 40 bp, Homo sapiens
agtcaagtcttctggtttggcagaaatcataagcagagtt

SEQ ID NO: 17698 - DNA, 40 bp, Homo sapiens
actctgcttatgatttctgccaaaccagaagacttgactc

SEQ ID NO: 17699 - DNA, 40 bp, Homo sapiens
gagtcaagtcttctggtttggcagaaatcataagcagagt

SEQ ID NO: 17700 - DNA, 40 bp, Homo sapiens
ctctgcttatgatttctgccaaaccagaagacttgactct

SEQ ID NO: 17701 - DNA, 40 bp, Homo sapiens
agagtcaagtcttctggtttggcagaaatcataagcagag

SEQ ID NO: 17702 - DNA, 40 bp, Homo sapiens
tctgcttatgatttctgccaaaccagaagacttgactctg

SEQ ID NO: 17703 - DNA, 40 bp, Homo sapiens
cagagtcaagtcttctggtttggcagaaatcataagcaga

SEQ ID NO: 17704 - DNA, 40 bp, Homo sapiens
ctgcttatgatttctgccaaaccagaagacttgactctgg

SEQ ID NO: 17705 - DNA, 40 bp, Homo sapiens
ccagagtcaagtcttctggtttggcagaaatcataagcag

SEQ ID NO: 17706 - DNA, 40 bp, Homo sapiens
tgcttatgatttctgccaaaccagaagacttgactctggg

SEQ ID NO: 17707 - DNA, 40 bp, Homo sapiens
cccagagtcaagtcttctggtttggcagaaatcataagca

SEQ ID NO: 17708 - DNA, 40 bp, Homo sapiens
gcttatgatttctgccaaaccagaagacttgactctggga

SEQ ID NO: 17709 - DNA, 40 bp, Homo sapiens
tcccagagtcaagtcttctggtttggcagaaatcataagc

SEQ ID NO: 17710 - DNA, 40 bp, Homo sapiens
cttatgatttctgccaaaccagaagacttgactctgggaa

SEQ ID NO: 17711 - DNA, 40 bp, Homo sapiens
ttcccagagtcaagtcttctggtttggcagaaatcataag

SEQ ID NO: 17712 - DNA, 40 bp, Homo sapiens
ttatgatttctgccaaaccagaagacttgactctgggaag

SEQ ID NO: 17713 - DNA, 40 bp, Homo sapiens
cttcccagagtcaagtcttctggtttggcagaaatcataa

SEQ ID NO: 17714 - DNA, 40 bp, Homo sapiens
tatgatttctgccaaaccagaagacttgactctgggaagc

SEQ ID NO: 17715 - DNA, 40 bp, Homo sapiens
gcttcccagagtcaagtcttctggtttggcagaaatcata

SEQ ID NO: 17716 - DNA, 40 bp, Homo sapiens
atgatttctgccaaaccagaagacttgactctgggaagca

SEQ ID NO: 17717 - DNA, 40 bp, Homo sapiens
tgcttcccagagtcaagtcttctggtttggcagaaatcat

SEQ ID NO: 17718 - DNA, 40 bp, Homo sapiens
tgatttctgccaaaccagaagacttgactctgggaagcat

SEQ ID NO: 17719 - DNA, 40 bp, Homo sapiens
atgcttcccagagtcaagtcttctggtttggcagaaatca

SEQ ID NO: 17720 - DNA, 40 bp, Homo sapiens
gatttctgccaaaccagaagacttgactctgggaagcatt

SEQ ID NO: 17721 - DNA, 40 bp, Homo sapiens
aatgcttcccagagtcaagtcttctggtttggcagaaatc

SEQ ID NO: 17722 - DNA, 40 bp, Homo sapiens
atttctgccaaaccagaagacttgactctgggaagcattg

SEQ ID NO: 17723 - DNA, 40 bp, Homo sapiens
caatgcttcccagagtcaagtcttctggtttggcagaaat

SEQ ID NO: 17724 - DNA, 40 bp, Homo sapiens
tttctgccaaaccagaagacttgactctgggaagcattgg

SEQ ID NO: 17725 - DNA, 40 bp, Homo sapiens
ccaatgcttcccagagtcaagtcttctggtttggcagaaa

SEQ ID NO: 17726 - DNA, 40 bp, Homo sapiens
ttctgccaaaccagaagacttgactctgggaagcattggt

SEQ ID NO: 17727 - DNA, 40 bp, Homo sapiens
accaatgcttcccagagtcaagtcttctggtttggcagaa

SEQ ID NO: 17728 - DNA, 40 bp, Homo sapiens
tctgccaaaccagaagacttgactctgggaagcattggtt

SEQ ID NO: 17729 - DNA, 40 bp, Homo sapiens
aaccaatgcttcccagagtcaagtcttctggtttggcaga

SEQ ID NO: 17730 - DNA, 40 bp, Homo sapiens
ctgccaaaccagaagacttgactctgggaagcattggtta

SEQ ID NO: 17731 - DNA, 40 bp, Homo sapiens
taaccaatgcttcccagagtcaagtcttctggtttggcag

SEQ ID NO: 17732 - DNA, 40 bp, Homo sapiens
tgccaaaccagaagacttgactctgggaagcattggttac

SEQ ID NO: 17733 - DNA, 40 bp, Homo sapiens
gtaaccaatgcttcccagagtcaagtcttctggtttggca

SEQ ID NO: 17734 - DNA, 40 bp, Homo sapiens
gccaaaccagaagacttgactctgggaagcattggttacc

SEQ ID NO: 17735 - DNA, 40 bp, Homo sapiens
ggtaaccaatgcttcccagagtcaagtcttctggtttggc

SEQ ID NO: 17736 - DNA, 40 bp, Homo sapiens
ccaaaccagaagacttgactctgggaagcattggttacct

SEQ ID NO: 17737 - DNA, 40 bp, Homo sapiens
aggtaaccaatgcttcccagagtcaagtcttctggtttgg

SEQ ID NO: 17738 - DNA, 40 bp, Homo sapiens
caaaccagaagacttgactctgggaagcattggttacctg

SEQ ID NO: 17739 - DNA, 40 bp, Homo sapiens
caggtaaccaatgcttcccagagtcaagtcttctggtttg

SEQ ID NO: 17740 - DNA, 40 bp, Homo sapiens
aaaccagaagacttgactctgggaagcattggttacctgt

SEQ ID NO: 17741 - DNA, 40 bp, Homo sapiens
acaggtaaccaatgcttcccagagtcaagtcttctggttt

SEQ ID NO: 17742 - DNA, 40 bp, Homo sapiens
aaccagaagacttgactctgggaagcattggttacctgtg

SEQ ID NO: 17743 - DNA, 40 bp, Homo sapiens
cacaggtaaccaatgcttcccagagtcaagtcttctggtt

SEQ ID NO: 17744 - DNA, 40 bp, Homo sapiens
accagaagacttgactctgggaagcattggttacctgtga

SEQ ID NO: 17745 - DNA, 40 bp, Homo sapiens
tcacaggtaaccaatgcttcccagagtcaagtcttctggt

SEQ ID NO: 17746 - DNA, 40 bp, Homo sapiens
ccagaagacttgactctgggaagcattggttacctgtgaa

SEQ ID NO: 17747 - DNA, 40 bp, Homo sapiens
ttcacaggtaaccaatgcttcccagagtcaagtcttctgg

SEQ ID NO: 17748 - DNA, 40 bp, Homo sapiens
cagaagacttgactctgggaagcattggttacctgtgaac

SEQ ID NO: 17749 - DNA, 40 bp, Homo sapiens
gttcacaggtaaccaatgcttcccagagtcaagtcttctg

SEQ ID NO: 17750 - DNA, 40 bp, Homo sapiens
agaagacttgactctgggaagcattggttacctgtgaact

SEQ ID NO: 17751 - DNA, 40 bp, Homo sapiens
agttcacaggtaaccaatgcttcccagagtcaagtcttct

SEQ ID NO: 17752 - DNA, 40 bp, Homo sapiens
gaagacttgactctgggaagcattggttacctgtgaactt

SEQ ID NO: 17753 - DNA, 40 bp, Homo sapiens
aagttcacaggtaaccaatgcttcccagagtcaagtcttc

SEQ ID NO: 17754 - DNA, 40 bp, Homo sapiens
aagacttgactctgggaagcattggttacctgtgaacttt

SEQ ID NO: 17755 - DNA, 40 bp, Homo sapiens
aaagttcacaggtaaccaatgcttcccagagtcaagtctt

SEQ ID NO: 17756 - DNA, 40 bp, Homo sapiens
agacttgactctgggaagcattggttacctgtgaactttg

SEQ ID NO: 17757 - DNA, 40 bp, Homo sapiens
caaagttcacaggtaaccaatgcttcccagagtcaagtct

SEQ ID NO: 17758 - DNA, 40 bp, Homo sapiens
gacttgactctgggaagcattggttacctgtgaactttga

SEQ ID NO: 17759 - DNA, 40 bp, Homo sapiens
tcaaagttcacaggtaaccaatgcttcccagagtcaagtc

SEQ ID NO: 17760 - DNA, 40 bp, Homo sapiens
acttgactctgggaagcattggttacctgtgaactttgaa

SEQ ID NO: 17761 - DNA, 40 bp, Homo sapiens
ttcaaagttcacaggtaaccaatgcttcccagagtcaagt

SEQ ID NO: 17762 - DNA, 40 bp, Homo sapiens
cttgactctgggaagcattggttacctgtgaactttgaaa

SEQ ID NO: 17763 - DNA, 40 bp, Homo sapiens
tttcaaagttcacaggtaaccaatgcttcccagagtcaag

SEQ ID NO: 17764 - DNA, 40 bp, Homo sapiens
ttgactctgggaagcattggttacctgtgaactttgaaac

SEQ ID NO: 17765 - DNA, 40 bp, Homo sapiens
gtttcaaagttcacaggtaaccaatgcttcccagagtcaa

SEQ ID NO: 17766 - DNA, 40 bp, Homo sapiens
tgactctgggaagcattggttacctgtgaactttgaaact

SEQ ID NO: 17767 - DNA, 40 bp, Homo sapiens
agtttcaaagttcacaggtaaccaatgcttcccagagtca

SEQ ID NO: 17768 - DNA, 40 bp, Homo sapiens
gactctgggaagcattggttacctgtgaactttgaaactg

SEQ ID NO: 17769 - DNA, 40 bp, Homo sapiens
cagtttcaaagttcacaggtaaccaatgcttcccagagtc

SEQ ID NO: 17770 - DNA, 40 bp, Homo sapiens
actctgggaagcattggttacctgtgaactttgaaactga

SEQ ID NO: 17771 - DNA, 40 bp, Homo sapiens
tcagtttcaaagttcacaggtaaccaatgcttcccagagt

SEQ ID NO: 17772 - DNA, 40 bp, Homo sapiens
ctctgggaagcattggttacctgtgaactttgaaactgac

SEQ ID NO: 17773 - DNA, 40 bp, Homo sapiens
gtcagtttcaaagttcacaggtaaccaatgcttcccagag

SEQ ID NO: 17774 - DNA, 40 bp, Homo sapiens
tctgggaagcattggttacctgtgaactttgaaactgacg

SEQ ID NO: 17775 - DNA, 40 bp, Homo sapiens
cgtcagtttcaaagttcacaggtaaccaatgcttcccaga

SEQ ID NO: 17776 - DNA, 40 bp, Homo sapiens
ctgggaagcattggttacctgtgaactttgaaactgacgg

SEQ ID NO: 17777 - DNA, 40 bp, Homo sapiens
ccgtcagtttcaaagttcacaggtaaccaatgcttcccag

SEQ ID NO: 17778 - DNA, 40 bp, Homo sapiens
tgggaagcattggttacctgtgaactttgaaactgacggt

SEQ ID NO: 17779 - DNA, 40 bp, Homo sapiens
accgtcagtttcaaagttcacaggtaaccaatgcttccca

SEQ ID NO: 17780 - DNA, 40 bp, Homo sapiens
gggaagcattggttacctgtgaactttgaaactgacggtc

SEQ ID NO: 17781 - DNA, 40 bp, Homo sapiens
gaccgtcagtttcaaagttcacaggtaaccaatgcttccc

SEQ ID NO: 17782 - DNA, 40 bp, Homo sapiens
ggaagcattggttacctgtgaactttgaaactgacggtcc

SEQ ID NO: 17783 - DNA, 40 bp, Homo sapiens
ggaccgtcagtttcaaagttcacaggtaaccaatgcttcc

SEQ ID NO: 17784 - DNA, 40 bp, Homo sapiens
gaagcattggttacctgtgaactttgaaactgacggtccc

SEQ ID NO: 17785 - DNA, 40 bp, Homo sapiens
gggaccgtcagtttcaaagttcacaggtaaccaatgcttc

SEQ ID NO: 17786 - DNA, 40 bp, Homo sapiens
aagcattggttacctgtgaactttgaaactgacggtccct

SEQ ID NO: 17787 - DNA, 40 bp, Homo sapiens
agggaccgtcagtttcaaagttcacaggtaaccaatgctt

SEQ ID NO: 17788 - DNA, 40 bp, Homo sapiens
agcattggttacctgtgaactttgaaactgacggtccctg

SEQ ID NO: 17789 - DNA, 40 bp, Homo sapiens
cagggaccgtcagtttcaaagttcacaggtaaccaatgct

SEQ ID NO: 17790 - DNA, 40 bp, Homo sapiens
gcattggttacctgtgaactttgaaactgacggtccctga

SEQ ID NO: 17791 - DNA, 40 bp, Homo sapiens
tcagggaccgtcagtttcaaagttcacaggtaaccaatgc

SEQ ID NO: 17792 - DNA, 40 bp, Homo sapiens
cattggttacctgtgaactttgaaactgacggtccctgac

SEQ ID NO: 17793 - DNA, 40 bp, Homo sapiens
gtcagggaccgtcagtttcaaagttcacaggtaaccaatg

SEQ ID NO: 17794 - DNA, 40 bp, Homo sapiens
attggttacctgtgaactttgaaactgacggtccctgacg

SEQ ID NO: 17795 - DNA, 40 bp, Homo sapiens
cgtcagggaccgtcagtttcaaagttcacaggtaaccaat

SEQ ID NO: 17796 - DNA, 40 bp, Homo sapiens
ttggttacctgtgaactttgaaactgacggtccctgacgt

SEQ ID NO: 17797 - DNA, 40 bp, Homo sapiens
acgtcagggaccgtcagtttcaaagttcacaggtaaccaa

SEQ ID NO: 17798 - DNA, 40 bp, Homo sapiens
tggttacctgtgaactttgaaactgacggtccctgacgta

SEQ ID NO: 17799 - DNA, 40 bp, Homo sapiens
tacgtcagggaccgtcagtttcaaagttcacaggtaacca

SEQ ID NO: 17800 - DNA, 40 bp, Homo sapiens
ggttacctgtgaactttgaaactgacggtccctgacgtag

SEQ ID NO: 17801 - DNA, 40 bp, Homo sapiens
ctacgtcagggaccgtcagtttcaaagttcacaggtaacc

SEQ ID NO: 17802 - DNA, 40 bp, Homo sapiens
gttacctgtgaactttgaaactgacggtccctgacgtagt

SEQ ID NO: 17803 - DNA, 40 bp, Homo sapiens
actacgtcagggaccgtcagtttcaaagttcacaggtaac

SEQ ID NO: 17804 - DNA, 40 bp, Homo sapiens
ttacctgtgaactttgaaactgacggtccctgacgtagtt

SEQ ID NO: 17805 - DNA, 40 bp, Homo sapiens
aactacgtcagggaccgtcagtttcaaagttcacaggtaa

SEQ ID NO: 17806 - DNA, 40 bp, Homo sapiens
tacctgtgaactttgaaactgacggtccctgacgtagttt

SEQ ID NO: 17807 - DNA, 40 bp, Homo sapiens
aaactacgtcagggaccgtcagtttcaaagttcacaggta

SEQ ID NO: 17808 - DNA, 40 bp, Homo sapiens
acctgtgaactttgaaactgacggtccctgacgtagttta

SEQ ID NO: 17809 - DNA, 40 bp, Homo sapiens
taaactacgtcagggaccgtcagtttcaaagttcacaggt

SEQ ID NO: 17810 - DNA, 40 bp, Homo sapiens
cctgtgaactttgaaactgacggtccctgacgtagtttag

SEQ ID NO: 17811 - DNA, 40 bp, Homo sapiens
ctaaactacgtcagggaccgtcagtttcaaagttcacagg

SEQ ID NO: 17812 - DNA, 40 bp, Homo sapiens
ctgtgaactttgaaactgacggtccctgacgtagtttagt

SEQ ID NO: 17813 - DNA, 40 bp, Homo sapiens
actaaactacgtcagggaccgtcagtttcaaagttcacag

SEQ ID NO: 17814 - DNA, 40 bp, Homo sapiens
tgtgaactttgaaactgacggtccctgacgtagtttagtc

SEQ ID NO: 17815 - DNA, 40 bp, Homo sapiens
gactaaactacgtcagggaccgtcagtttcaaagttcaca

SEQ ID NO: 17816 - DNA, 40 bp, Homo sapiens
gtgaactttgaaactgacggtccctgacgtagtttagtca

SEQ ID NO: 17817 - DNA, 40 bp, Homo sapiens
tgactaaactacgtcagggaccgtcagtttcaaagttcac

SEQ ID NO: 17818 - DNA, 40 bp, Homo sapiens
tgaactttgaaactgacggtccctgacgtagtttagtcac

SEQ ID NO: 17819 - DNA, 40 bp, Homo sapiens
gtgactaaactacgtcagggaccgtcagtttcaaagttca

SEQ ID NO: 17820 - DNA, 40 bp, Homo sapiens
gaactttgaaactgacggtccctgacgtagtttagtcacc

SEQ ID NO: 17821 - DNA, 40 bp, Homo sapiens
ggtgactaaactacgtcagggaccgtcagtttcaaagttc

SEQ ID NO: 17822 - DNA, 40 bp, Homo sapiens
aactttgaaactgacggtccctgacgtagtttagtcacct

SEQ ID NO: 17823 - DNA, 40 bp, Homo sapiens
aggtgactaaactacgtcagggaccgtcagtttcaaagtt

SEQ ID NO: 17824 - DNA, 40 bp, Homo sapiens
actttgaaactgacggtccctgacgtagtttagtcacctg

SEQ ID NO: 17825 - DNA, 40 bp, Homo sapiens
caggtgactaaactacgtcagggaccgtcagtttcaaagt

SEQ ID NO: 17826 - DNA, 40 bp, Homo sapiens
ctttgaaactgacggtccctgacgtagtttagtcacctgg

SEQ ID NO: 17827 - DNA, 40 bp, Homo sapiens
ccaggtgactaaactacgtcagggaccgtcagtttcaaag

SEQ ID NO: 17828 - DNA, 40 bp, Homo sapiens
tttgaaactgacggtccctgacgtagtttagtcacctggg

SEQ ID NO: 17829 - DNA, 40 bp, Homo sapiens
cccaggtgactaaactacgtcagggaccgtcagtttcaaa

SEQ ID NO: 17830 - DNA, 40 bp, Homo sapiens
ttgaaactgacggtccctgacgtagtttagtcacctggga

SEQ ID NO: 17831 - DNA, 40 bp, Homo sapiens
tcccaggtgactaaactacgtcagggaccgtcagtttcaa

SEQ ID NO: 17832 - DNA, 40 bp, Homo sapiens
tgaaactgacggtccctgacgtagtttagtcacctgggaa

SEQ ID NO: 17833 - DNA, 40 bp, Homo sapiens
ttcccaggtgactaaactacgtcagggaccgtcagtttca

SEQ ID NO: 17834 - DNA, 40 bp, Homo sapiens
gaaactgacggtccctgacgtagtttagtcacctgggaaa

SEQ ID NO: 17835 - DNA, 40 bp, Homo sapiens
tttcccaggtgactaaactacgtcagggaccgtcagtttc

SEQ ID NO: 17836 - DNA, 40 bp, Homo sapiens
aaactgacggtccctgacgtagtttagtcacctgggaaaa

SEQ ID NO: 17837 - DNA, 40 bp, Homo sapiens
ttttcccaggtgactaaactacgtcagggaccgtcagttt

SEQ ID NO: 17838 - DNA, 40 bp, Homo sapiens
aactgacggtccctgacgtagtttagtcacctgggaaaag

SEQ ID NO: 17839 - DNA, 40 bp, Homo sapiens
cttttcccaggtgactaaactacgtcagggaccgtcagtt

SEQ ID NO: 17840 - DNA, 40 bp, Homo sapiens
actgacggtccctgacgtagtttagtcacctgggaaaagg

SEQ ID NO: 17841 - DNA, 40 bp, Homo sapiens
ccttttcccaggtgactaaactacgtcagggaccgtcagt

SEQ ID NO: 17842 - DNA, 40 bp, Homo sapiens
ctgacggtccctgacgtagtttagtcacctgggaaaaggt

SEQ ID NO: 17843 - DNA, 40 bp, Homo sapiens
accttttcccaggtgactaaactacgtcagggaccgtcag

SEQ ID NO: 17844 - DNA, 40 bp, Homo sapiens
tgacggtccctgacgtagtttagtcacctgggaaaaggta

SEQ ID NO: 17845 - DNA, 40 bp, Homo sapiens
taccttttcccaggtgactaaactacgtcagggaccgtca

SEQ ID NO: 17846 - DNA, 40 bp, Homo sapiens
gacggtccctgacgtagtttagtcacctgggaaaaggtat

SEQ ID NO: 17847 - DNA, 40 bp, Homo sapiens
ataccttttcccaggtgactaaactacgtcagggaccgtc

SEQ ID NO: 17848 - DNA, 40 bp, Homo sapiens
acggtccctgacgtagtttagtcacctgggaaaaggtatc

SEQ ID NO: 17849 - DNA, 40 bp, Homo sapiens
gataccttttcccaggtgactaaactacgtcagggaccgt

SEQ ID NO: 17850 - DNA, 40 bp, Homo sapiens
cggtccctgacgtagtttagtcacctgggaaaaggtatct

SEQ ID NO: 17851 - DNA, 40 bp, Homo sapiens
agataccttttcccaggtgactaaactacgtcagggaccg

SEQ ID NO: 17852 - DNA, 40 bp, Homo sapiens
ggtccctgacgtagtttagtcacctgggaaaaggtatctg

SEQ ID NO: 17853 - DNA, 40 bp, Homo sapiens
cagataccttttcccaggtgactaaactacgtcagggacc

SEQ ID NO: 17854 - DNA, 40 bp, Homo sapiens
gtccctgacgtagtttagtcacctgggaaaaggtatctga

SEQ ID NO: 17855 - DNA, 40 bp, Homo sapiens
tcagataccttttcccaggtgactaaactacgtcagggac

SEQ ID NO: 17856 - DNA, 40 bp, Homo sapiens
tccctgacgtagtttagtcacctgggaaaaggtatctgag

SEQ ID NO: 17857 - DNA, 40 bp, Homo sapiens
ctcagataccttttcccaggtgactaaactacgtcaggga

SEQ ID NO: 17858 - DNA, 40 bp, Homo sapiens
ccctgacgtagtttagtcacctgggaaaaggtatctgaga

SEQ ID NO: 17859 - DNA, 40 bp, Homo sapiens
tctcagataccttttcccaggtgactaaactacgtcaggg

SEQ ID NO: 17860 - DNA, 40 bp, Homo sapiens
cctgacgtagtttagtcacctgggaaaaggtatctgagat

SEQ ID NO: 17861 - DNA, 40 bp, Homo sapiens
atctcagataccttttcccaggtgactaaactacgtcagg

SEQ ID NO: 17862 - DNA, 40 bp, Homo sapiens
ctgacgtagtttagtcacctgggaaaaggtatctgagatt

SEQ ID NO: 17863 - DNA, 40 bp, Homo sapiens
aatctcagataccttttcccaggtgactaaactacgtcag

SEQ ID NO: 17864 - DNA, 40 bp, Homo sapiens
tgacgtagtttagtcacctgggaaaaggtatctgagatta

SEQ ID NO: 17865 - DNA, 40 bp, Homo sapiens
taatctcagataccttttcccaggtgactaaactacgtca

SEQ ID NO: 17866 - DNA, 40 bp, Homo sapiens
gacgtagtttagtcacctgggaaaaggtatctgagattat

SEQ ID NO: 17867 - DNA, 40 bp, Homo sapiens
ataatctcagataccttttcccaggtgactaaactacgtc

SEQ ID NO: 17868 - DNA, 40 bp, Homo sapiens
acgtagtttagtcacctgggaaaaggtatctgagattatc

SEQ ID NO: 17869 - DNA, 40 bp, Homo sapiens
gataatctcagataccttttcccaggtgactaaactacgt

SEQ ID NO: 17870 - DNA, 40 bp, Homo sapiens
cgtagtttagtcacctgggaaaaggtatctgagattatct

SEQ ID NO: 17871 - DNA, 40 bp, Homo sapiens
agataatctcagataccttttcccaggtgactaaactacg

SEQ ID NO: 17872 - DNA, 40 bp, Homo sapiens
gtagtttagtcacctgggaaaaggtatctgagattatctc

SEQ ID NO: 17873 - DNA, 40 bp, Homo sapiens
gagataatctcagataccttttcccaggtgactaaactac

SEQ ID NO: 17874 - DNA, 40 bp, Homo sapiens
tagtttagtcacctgggaaaaggtatctgagattatctct

SEQ ID NO: 17875 - DNA, 40 bp, Homo sapiens
agagataatctcagataccttttcccaggtgactaaacta

SEQ ID NO: 17876 - DNA, 40 bp, Homo sapiens
agtttagtcacctgggaaaaggtatctgagattatctctt

SEQ ID NO: 17877 - DNA, 40 bp, Homo sapiens
aagagataatctcagataccttttcccaggtgactaaact

SEQ ID NO: 17878 - DNA, 40 bp, Homo sapiens
gtttagtcacctgggaaaaggtatctgagattatctctta

SEQ ID NO: 17879 - DNA, 40 bp, Homo sapiens
taagagataatctcagataccttttcccaggtgactaaac

SEQ ID NO: 17880 - DNA, 40 bp, Homo sapiens
tttagtcacctgggaaaaggtatctgagattatctcttat

SEQ ID NO: 17881 - DNA, 40 bp, Homo sapiens
ataagagataatctcagataccttttcccaggtgactaaa

SEQ ID NO: 17882 - DNA, 40 bp, Homo sapiens
ttagtcacctgggaaaaggtatctgagattatctcttatc

SEQ ID NO: 17883 - DNA, 40 bp, Homo sapiens
gataagagataatctcagataccttttcccaggtgactaa

SEQ ID NO: 17884 - DNA, 40 bp, Homo sapiens
tagtcacctgggaaaaggtatctgagattatctcttatct

SEQ ID NO: 17885 - DNA, 40 bp, Homo sapiens
agataagagataatctcagataccttttcccaggtgacta

SEQ ID NO: 17886 - DNA, 40 bp, Homo sapiens
agtcacctgggaaaaggtatctgagattatctcttatctc

SEQ ID NO: 17887 - DNA, 40 bp, Homo sapiens
gagataagagataatctcagataccttttcccaggtgact

SEQ ID NO: 17888 - DNA, 40 bp, Homo sapiens
gtcacctgggaaaaggtatctgagattatctcttatctcc

SEQ ID NO: 17889 - DNA, 40 bp, Homo sapiens
ggagataagagataatctcagataccttttcccaggtgac

SEQ ID NO: 17890 - DNA, 40 bp, Homo sapiens
tcacctgggaaaaggtatctgagattatctcttatctccc

SEQ ID NO: 17891 - DNA, 40 bp, Homo sapiens
gggagataagagataatctcagataccttttcccaggtga

SEQ ID NO: 17892 - DNA, 40 bp, Homo sapiens
cacctgggaaaaggtatctgagattatctcttatctccca

SEQ ID NO: 17893 - DNA, 40 bp, Homo sapiens
tgggagataagagataatctcagataccttttcccaggtg

SEQ ID NO: 17894 - DNA, 40 bp, Homo sapiens
acctgggaaaaggtatctgagattatctcttatctcccaa

SEQ ID NO: 17895 - DNA, 40 bp, Homo sapiens
ttgggagataagagataatctcagataccttttcccaggt

SEQ ID NO: 17896 - DNA, 40 bp, Homo sapiens
cctgggaaaaggtatctgagattatctcttatctcccaag

SEQ ID NO: 17897 - DNA, 40 bp, Homo sapiens
cttgggagataagagataatctcagataccttttcccagg

SEQ ID NO: 17898 - DNA, 40 bp, Homo sapiens
ctgggaaaaggtatctgagattatctcttatctcccaagt

SEQ ID NO: 17899 - DNA, 40 bp, Homo sapiens
acttgggagataagagataatctcagataccttttcccag

SEQ ID NO: 17900 - DNA, 40 bp, Homo sapiens
tgggaaaaggtatctgagattatctcttatctcccaagtt

SEQ ID NO: 17901 - DNA, 40 bp, Homo sapiens
aacttgggagataagagataatctcagataccttttccca

SEQ ID NO: 17902 - DNA, 40 bp, Homo sapiens
gggaaaaggtatctgagattatctcttatctcccaagtta

SEQ ID NO: 17903 - DNA, 40 bp, Homo sapiens
taacttgggagataagagataatctcagataccttttccc

SEQ ID NO: 17904 - DNA, 40 bp, Homo sapiens
ggaaaaggtatctgagattatctcttatctcccaagttac

SEQ ID NO: 17905 - DNA, 40 bp, Homo sapiens
gtaacttgggagataagagataatctcagataccttttcc

SEQ ID NO: 17906 - DNA, 40 bp, Homo sapiens
gaaaaggtatctgagattatctcttatctcccaagttaca

SEQ ID NO: 17907 - DNA, 40 bp, Homo sapiens
tgtaacttgggagataagagataatctcagataccttttc

SEQ ID NO: 17908 - DNA, 40 bp, Homo sapiens
aaaaggtatctgagattatctcttatctcccaagttacag

SEQ ID NO: 17909 - DNA, 40 bp, Homo sapiens
ctgtaacttgggagataagagataatctcagatacctttt

SEQ ID NO: 17910 - DNA, 40 bp, Homo sapiens
aaaggtatctgagattatctcttatctcccaagttacagt

SEQ ID NO: 17911 - DNA, 40 bp, Homo sapiens
actgtaacttgggagataagagataatctcagataccttt

SEQ ID NO: 17912 - DNA, 40 bp, Homo sapiens
aaggtatctgagattatctcttatctcccaagttacagtg

SEQ ID NO: 17913 - DNA, 40 bp, Homo sapiens
cactgtaacttgggagataagagataatctcagatacctt

SEQ ID NO: 17914 - DNA, 40 bp, Homo sapiens
aggtatctgagattatctcttatctcccaagttacagtga

SEQ ID NO: 17915 - DNA, 40 bp, Homo sapiens
tcactgtaacttgggagataagagataatctcagatacct

SEQ ID NO: 17916 - DNA, 40 bp, Homo sapiens
ggtatctgagattatctcttatctcccaagttacagtgag

SEQ ID NO: 17917 - DNA, 40 bp, Homo sapiens
ctcactgtaacttgggagataagagataatctcagatacc

SEQ ID NO: 17918 - DNA, 40 bp, Homo sapiens
gtatctgagattatctcttatctcccaagttacagtgagt

SEQ ID NO: 17919 - DNA, 40 bp, Homo sapiens
actcactgtaacttgggagataagagataatctcagatac

SEQ ID NO: 17920 - DNA, 40 bp, Homo sapiens
tatctgagattatctcttatctcccaagttacagtgagtc

SEQ ID NO: 17921 - DNA, 40 bp, Homo sapiens
gactcactgtaacttgggagataagagataatctcagata

SEQ ID NO: 17922 - DNA, 40 bp, Homo sapiens
atctgagattatctcttatctcccaagttacagtgagtct

SEQ ID NO: 17923 - DNA, 40 bp, Homo sapiens
agactcactgtaacttgggagataagagataatctcagat

SEQ ID NO: 17924 - DNA, 40 bp, Homo sapiens
tctgagattatctcttatctcccaagttacagtgagtctc

SEQ ID NO: 17925 - DNA, 40 bp, Homo sapiens
gagactcactgtaacttgggagataagagataatctcaga

SEQ ID NO: 17926 - DNA, 40 bp, Homo sapiens
ctgagattatctcttatctcccaagttacagtgagtctct

SEQ ID NO: 17927 - DNA, 40 bp, Homo sapiens
agagactcactgtaacttgggagataagagataatctcag

SEQ ID NO: 17928 - DNA, 40 bp, Homo sapiens
tgagattatctcttatctcccaagttacagtgagtctctg

SEQ ID NO: 17929 - DNA, 40 bp, Homo sapiens
cagagactcactgtaacttgggagataagagataatctca

SEQ ID NO: 17930 - DNA, 40 bp, Homo sapiens
gagattatctcttatctcccaagttacagtgagtctctga

SEQ ID NO: 17931 - DNA, 40 bp, Homo sapiens
tcagagactcactgtaacttgggagataagagataatctc

SEQ ID NO: 17932 - DNA, 40 bp, Homo sapiens
agattatctcttatctcccaagttacagtgagtctctgag

SEQ ID NO: 17933 - DNA, 40 bp, Homo sapiens
ctcagagactcactgtaacttgggagataagagataatct

SEQ ID NO: 17934 - DNA, 40 bp, Homo sapiens
gattatctcttatctcccaagttacagtgagtctctgagg

SEQ ID NO: 17935 - DNA, 40 bp, Homo sapiens
cctcagagactcactgtaacttgggagataagagataatc

SEQ ID NO: 17936 - DNA, 40 bp, Homo sapiens
attatctcttatctcccaagttacagtgagtctctgaggg

SEQ ID NO: 17937 - DNA, 40 bp, Homo sapiens
ccctcagagactcactgtaacttgggagataagagataat

SEQ ID NO: 17938 - DNA, 40 bp, Homo sapiens
ttatctcttatctcccaagttacagtgagtctctgaggga

SEQ ID NO: 17939 - DNA, 40 bp, Homo sapiens
tccctcagagactcactgtaacttgggagataagagataa

SEQ ID NO: 17940 - DNA, 40 bp, Homo sapiens
tatctcttatctcccaagttacagtgagtctctgagggaa

SEQ ID NO: 17941 - DNA, 40 bp, Homo sapiens
ttccctcagagactcactgtaacttgggagataagagata

SEQ ID NO: 17942 - DNA, 40 bp, Homo sapiens
atctcttatctcccaagttacagtgagtctctgagggaac

SEQ ID NO: 17943 - DNA, 40 bp, Homo sapiens
gttccctcagagactcactgtaacttgggagataagagat

SEQ ID NO: 17944 - DNA, 40 bp, Homo sapiens
tctcttatctcccaagttacagtgagtctctgagggaact

SEQ ID NO: 17945 - DNA, 40 bp, Homo sapiens
agttccctcagagactcactgtaacttgggagataagaga

SEQ ID NO: 17946 - DNA, 40 bp, Homo sapiens
ctcttatctcccaagttacagtgagtctctgagggaactg

SEQ ID NO: 17947 - DNA, 40 bp, Homo sapiens
cagttccctcagagactcactgtaacttgggagataagag

SEQ ID NO: 17948 - DNA, 40 bp, Homo sapiens
tcttatctcccaagttacagtgagtctctgagggaactga

SEQ ID NO: 17949 - DNA, 40 bp, Homo sapiens
tcagttccctcagagactcactgtaacttgggagataaga

SEQ ID NO: 17950 - DNA, 40 bp, Homo sapiens
cttatctcccaagttacagtgagtctctgagggaactgac

SEQ ID NO: 17951 - DNA, 40 bp, Homo sapiens
gtcagttccctcagagactcactgtaacttgggagataag

SEQ ID NO: 17952 - DNA, 40 bp, Homo sapiens
ttatctcccaagttacagtgagtctctgagggaactgaca

SEQ ID NO: 17953 - DNA, 40 bp, Homo sapiens
tgtcagttccctcagagactcactgtaacttgggagataa

SEQ ID NO: 17954 - DNA, 40 bp, Homo sapiens
tatctcccaagttacagtgagtctctgagggaactgacac

SEQ ID NO: 17955 - DNA, 40 bp, Homo sapiens
gtgtcagttccctcagagactcactgtaacttgggagata

SEQ ID NO: 17956 - DNA, 40 bp, Homo sapiens
atctcccaagttacagtgagtctctgagggaactgacaca

SEQ ID NO: 17957 - DNA, 40 bp, Homo sapiens
tgtgtcagttccctcagagactcactgtaacttgggagat

SEQ ID NO: 17958 - DNA, 40 bp, Homo sapiens
tctcccaagttacagtgagtctctgagggaactgacacat

SEQ ID NO: 17959 - DNA, 40 bp, Homo sapiens
atgtgtcagttccctcagagactcactgtaacttgggaga

SEQ ID NO: 17960 - DNA, 40 bp, Homo sapiens
ctcccaagttacagtgagtctctgagggaactgacacatt

SEQ ID NO: 17961 - DNA, 40 bp, Homo sapiens
aatgtgtcagttccctcagagactcactgtaacttgggag

SEQ ID NO: 17962 - DNA, 40 bp, Homo sapiens
tcccaagttacagtgagtctctgagggaactgacacatta

SEQ ID NO: 17963 - DNA, 40 bp, Homo sapiens
taatgtgtcagttccctcagagactcactgtaacttggga

SEQ ID NO: 17964 - DNA, 40 bp, Homo sapiens
cccaagttacagtgagtctctgagggaactgacacattac

SEQ ID NO: 17965 - DNA, 40 bp, Homo sapiens
gtaatgtgtcagttccctcagagactcactgtaacttggg

SEQ ID NO: 17966 - DNA, 40 bp, Homo sapiens
ccaagttacagtgagtctctgagggaactgacacattaca

SEQ ID NO: 17967 - DNA, 40 bp, Homo sapiens
tgtaatgtgtcagttccctcagagactcactgtaacttgg

SEQ ID NO: 17968 - DNA, 40 bp, Homo sapiens
caagttacagtgagtctctgagggaactgacacattacat

SEQ ID NO: 17969 - DNA, 40 bp, Homo sapiens
atgtaatgtgtcagttccctcagagactcactgtaacttg

SEQ ID NO: 17970 - DNA, 40 bp, Homo sapiens
aagttacagtgagtctctgagggaactgacacattacatt

SEQ ID NO: 17971 - DNA, 40 bp, Homo sapiens
aatgtaatgtgtcagttccctcagagactcactgtaactt

SEQ ID NO: 17972 - DNA, 40 bp, Homo sapiens
agttacagtgagtctctgagggaactgacacattacatta

SEQ ID NO: 17973 - DNA, 40 bp, Homo sapiens
taatgtaatgtgtcagttccctcagagactcactgtaact

SEQ ID NO: 17974 - DNA, 40 bp, Homo sapiens
gttacagtgagtctctgagggaactgacacattacattaa

SEQ ID NO: 17975 - DNA, 40 bp, Homo sapiens
ttaatgtaatgtgtcagttccctcagagactcactgtaac

SEQ ID NO: 17976 - DNA, 40 bp, Homo sapiens
ttacagtgagtctctgagggaactgacacattacattaag

SEQ ID NO: 17977 - DNA, 40 bp, Homo sapiens
cttaatgtaatgtgtcagttccctcagagactcactgtaa

SEQ ID NO: 17978 - DNA, 40 bp, Homo sapiens
tacagtgagtctctgagggaactgacacattacattaagt

SEQ ID NO: 17979 - DNA, 40 bp, Homo sapiens
acttaatgtaatgtgtcagttccctcagagactcactgta

SEQ ID NO: 17980 - DNA, 40 bp, Homo sapiens
acagtgagtctctgagggaactgacacattacattaagtt

SEQ ID NO: 17981 - DNA, 40 bp, Homo sapiens
aacttaatgtaatgtgtcagttccctcagagactcactgt

SEQ ID NO: 17982 - DNA, 40 bp, Homo sapiens
cagtgagtctctgagggaactgacacattacattaagttc

SEQ ID NO: 17983 - DNA, 40 bp, Homo sapiens
gaacttaatgtaatgtgtcagttccctcagagactcactg

SEQ ID NO: 17984 - DNA, 40 bp, Homo sapiens
agtgagtctctgagggaactgacacattacattaagttct

SEQ ID NO: 17985 - DNA, 40 bp, Homo sapiens
agaacttaatgtaatgtgtcagttccctcagagactcact

SEQ ID NO: 17986 - DNA, 40 bp, Homo sapiens
gtgagtctctgagggaactgacacattacattaagttctt

SEQ ID NO: 17987 - DNA, 40 bp, Homo sapiens
aagaacttaatgtaatgtgtcagttccctcagagactcac

SEQ ID NO: 17988 - DNA, 40 bp, Homo sapiens
tgagtctctgagggaactgacacattacattaagttcttg

SEQ ID NO: 17989 - DNA, 40 bp, Homo sapiens
caagaacttaatgtaatgtgtcagttccctcagagactca

SEQ ID NO: 17990 - DNA, 40 bp, Homo sapiens
gagtctctgagggaactgacacattacattaagttcttgg

SEQ ID NO: 17991 - DNA, 40 bp, Homo sapiens
ccaagaacttaatgtaatgtgtcagttccctcagagactc

SEQ ID NO: 17992 - DNA, 40 bp, Homo sapiens
agtctctgagggaactgacacattacattaagttcttggt

SEQ ID NO: 17993 - DNA, 40 bp, Homo sapiens
accaagaacttaatgtaatgtgtcagttccctcagagact

SEQ ID NO: 17994 - DNA, 40 bp, Homo sapiens
gtctctgagggaactgacacattacattaagttcttggtg

SEQ ID NO: 17995 - DNA, 40 bp, Homo sapiens
caccaagaacttaatgtaatgtgtcagttccctcagagac

SEQ ID NO: 17996 - DNA, 40 bp, Homo sapiens
tctctgagggaactgacacattacattaagttcttggtgt

SEQ ID NO: 17997 - DNA, 40 bp, Homo sapiens
acaccaagaacttaatgtaatgtgtcagttccctcagaga

SEQ ID NO: 17998 - DNA, 40 bp, Homo sapiens
ctctgagggaactgacacattacattaagttcttggtgta

SEQ ID NO: 17999 - DNA, 40 bp, Homo sapiens
tacaccaagaacttaatgtaatgtgtcagttccctcagag

SEQ ID NO: 18000 - DNA, 40 bp, Homo sapiens
tctgagggaactgacacattacattaagttcttggtgtag

SEQ ID NO: 18001 - DNA, 40 bp, Homo sapiens
ctacaccaagaacttaatgtaatgtgtcagttccctcaga

SEQ ID NO: 18002 - DNA, 40 bp, Homo sapiens
ctgagggaactgacacattacattaagttcttggtgtagt

SEQ ID NO: 18003 - DNA, 40 bp, Homo sapiens
actacaccaagaacttaatgtaatgtgtcagttccctcag

SEQ ID NO: 18004 - DNA, 40 bp, Homo sapiens
tgagggaactgacacattacattaagttcttggtgtagtt

SEQ ID NO: 18005 - DNA, 40 bp, Homo sapiens
aactacaccaagaacttaatgtaatgtgtcagttccctca

SEQ ID NO: 18006 - DNA, 40 bp, Homo sapiens
gagggaactgacacattacattaagttcttggtgtagtta

SEQ ID NO: 18007 - DNA, 40 bp, Homo sapiens
taactacaccaagaacttaatgtaatgtgtcagttccctc

SEQ ID NO: 18008 - DNA, 40 bp, Homo sapiens
agggaactgacacattacattaagttcttggtgtagttaa

SEQ ID NO: 18009 - DNA, 40 bp, Homo sapiens
ttaactacaccaagaacttaatgtaatgtgtcagttccct

SEQ ID NO: 18010 - DNA, 40 bp, Homo sapiens
gggaactgacacattacattaagttcttggtgtagttaaa

SEQ ID NO: 18011 - DNA, 40 bp, Homo sapiens
tttaactacaccaagaacttaatgtaatgtgtcagttccc

SEQ ID NO: 18012 - DNA, 40 bp, Homo sapiens
ggaactgacacattacattaagttcttggtgtagttaaac

SEQ ID NO: 18013 - DNA, 40 bp, Homo sapiens
gtttaactacaccaagaacttaatgtaatgtgtcagttcc

SEQ ID NO: 18014 - DNA, 40 bp, Homo sapiens
gaactgacacattacattaagttcttggtgtagttaaact

SEQ ID NO: 18015 - DNA, 40 bp, Homo sapiens
agtttaactacaccaagaacttaatgtaatgtgtcagttc

SEQ ID NO: 18016 - DNA, 40 bp, Homo sapiens
aactgacacattacattaagttcttggtgtagttaaactg

SEQ ID NO: 18017 - DNA, 40 bp, Homo sapiens
cagtttaactacaccaagaacttaatgtaatgtgtcagtt

SEQ ID NO: 18018 - DNA, 40 bp, Homo sapiens
actgacacattacattaagttcttggtgtagttaaactgt

SEQ ID NO: 18019 - DNA, 40 bp, Homo sapiens
acagtttaactacaccaagaacttaatgtaatgtgtcagt

SEQ ID NO: 18020 - DNA, 40 bp, Homo sapiens
ctgacacattacattaagttcttggtgtagttaaactgta

SEQ ID NO: 18021 - DNA, 40 bp, Homo sapiens
tacagtttaactacaccaagaacttaatgtaatgtgtcag

SEQ ID NO: 18022 - DNA, 40 bp, Homo sapiens
tgacacattacattaagttcttggtgtagttaaactgtaa

SEQ ID NO: 18023 - DNA, 40 bp, Homo sapiens
ttacagtttaactacaccaagaacttaatgtaatgtgtca

SEQ ID NO: 18024 - DNA, 40 bp, Homo sapiens
gacacattacattaagttcttggtgtagttaaactgtaag

SEQ ID NO: 18025 - DNA, 40 bp, Homo sapiens
cttacagtttaactacaccaagaacttaatgtaatgtgtc

SEQ ID NO: 18026 - DNA, 40 bp, Homo sapiens
acacattacattaagttcttggtgtagttaaactgtaaga

SEQ ID NO: 18027 - DNA, 40 bp, Homo sapiens
tcttacagtttaactacaccaagaacttaatgtaatgtgt

SEQ ID NO: 18028 - DNA, 40 bp, Homo sapiens
cacattacattaagttcttggtgtagttaaactgtaagaa

SEQ ID NO: 18029 - DNA, 40 bp, Homo sapiens
ttcttacagtttaactacaccaagaacttaatgtaatgtg

SEQ ID NO: 18030 - DNA, 40 bp, Homo sapiens
acattacattaagttcttggtgtagttaaactgtaagaaa

SEQ ID NO: 18031 - DNA, 40 bp, Homo sapiens
tttcttacagtttaactacaccaagaacttaatgtaatgt

SEQ ID NO: 18032 - DNA, 40 bp, Homo sapiens
cattacattaagttcttggtgtagttaaactgtaagaaag

SEQ ID NO: 18033 - DNA, 40 bp, Homo sapiens
ctttcttacagtttaactacaccaagaacttaatgtaatg

SEQ ID NO: 18034 - DNA, 40 bp, Homo sapiens
attacattaagttcttggtgtagttaaactgtaagaaagg

SEQ ID NO: 18035 - DNA, 40 bp, Homo sapiens
cctttcttacagtttaactacaccaagaacttaatgtaat

SEQ ID NO: 18036 - DNA, 40 bp, Homo sapiens
ttacattaagttcttggtgtagttaaactgtaagaaaggc

SEQ ID NO: 18037 - DNA, 40 bp, Homo sapiens
gcctttcttacagtttaactacaccaagaacttaatgtaa

SEQ ID NO: 18038 - DNA, 40 bp, Homo sapiens
tacattaagttcttggtgtagttaaactgtaagaaaggca

SEQ ID NO: 18039 - DNA, 40 bp, Homo sapiens
tgcctttcttacagtttaactacaccaagaacttaatgta

SEQ ID NO: 18040 - DNA, 40 bp, Homo sapiens
acattaagttcttggtgtagttaaactgtaagaaaggcag

SEQ ID NO: 18041 - DNA, 40 bp, Homo sapiens
ctgcctttcttacagtttaactacaccaagaacttaatgt

SEQ ID NO: 18042 - DNA, 40 bp, Homo sapiens
cattaagttcttggtgtagttaaactgtaagaaaggcagg

SEQ ID NO: 18043 - DNA, 40 bp, Homo sapiens
cctgcctttcttacagtttaactacaccaagaacttaatg

SEQ ID NO: 18044 - DNA, 40 bp, Homo sapiens
attaagttcttggtgtagttaaactgtaagaaaggcagga

SEQ ID NO: 18045 - DNA, 40 bp, Homo sapiens
tcctgcctttcttacagtttaactacaccaagaacttaat

SEQ ID NO: 18046 - DNA, 40 bp, Homo sapiens
ttaagttcttggtgtagttaaactgtaagaaaggcaggag

SEQ ID NO: 18047 - DNA, 40 bp, Homo sapiens
ctcctgcctttcttacagtttaactacaccaagaacttaa

SEQ ID NO: 18048 - DNA, 40 bp, Homo sapiens
taagttcttggtgtagttaaactgtaagaaaggcaggaga

SEQ ID NO: 18049 - DNA, 40 bp, Homo sapiens
tctcctgcctttcttacagtttaactacaccaagaactta

SEQ ID NO: 18050 - DNA, 40 bp, Homo sapiens
aagttcttggtgtagttaaactgtaagaaaggcaggagaa

SEQ ID NO: 18051 - DNA, 40 bp, Homo sapiens
ttctcctgcctttcttacagtttaactacaccaagaactt

SEQ ID NO: 18052 - DNA, 40 bp, Homo sapiens
agttcttggtgtagttaaactgtaagaaaggcaggagaac

SEQ ID NO: 18053 - DNA, 40 bp, Homo sapiens
gttctcctgcctttcttacagtttaactacaccaagaact

SEQ ID NO: 18054 - DNA, 40 bp, Homo sapiens
gttcttggtgtagttaaactgtaagaaaggcaggagaact

SEQ ID NO: 18055 - DNA, 40 bp, Homo sapiens
agttctcctgcctttcttacagtttaactacaccaagaac

SEQ ID NO: 18056 - DNA, 40 bp, Homo sapiens
ttcttggtgtagttaaactgtaagaaaggcaggagaactt

SEQ ID NO: 18057 - DNA, 40 bp, Homo sapiens
aagttctcctgcctttcttacagtttaactacaccaagaa

SEQ ID NO: 18058 - DNA, 40 bp, Homo sapiens
tcttggtgtagttaaactgtaagaaaggcaggagaactta

SEQ ID NO: 18059 - DNA, 40 bp, Homo sapiens
taagttctcctgcctttcttacagtttaactacaccaaga

SEQ ID NO: 18060 - DNA, 40 bp, Homo sapiens
cttggtgtagttaaactgtaagaaaggcaggagaacttag

SEQ ID NO: 18061 - DNA, 40 bp, Homo sapiens
ctaagttctcctgcctttcttacagtttaactacaccaag

SEQ ID NO: 18062 - DNA, 40 bp, Homo sapiens
ttggtgtagttaaactgtaagaaaggcaggagaacttagt

SEQ ID NO: 18063 - DNA, 40 bp, Homo sapiens
actaagttctcctgcctttcttacagtttaactacaccaa

SEQ ID NO: 18064 - DNA, 40 bp, Homo sapiens
tggtgtagttaaactgtaagaaaggcaggagaacttagta

SEQ ID NO: 18065 - DNA, 40 bp, Homo sapiens
tactaagttctcctgcctttcttacagtttaactacacca

SEQ ID NO: 18066 - DNA, 40 bp, Homo sapiens
ggtgtagttaaactgtaagaaaggcaggagaacttagtag

SEQ ID NO: 18067 - DNA, 40 bp, Homo sapiens
ctactaagttctcctgcctttcttacagtttaactacacc

SEQ ID NO: 18068 - DNA, 40 bp, Homo sapiens
gtgtagttaaactgtaagaaaggcaggagaacttagtagt

SEQ ID NO: 18069 - DNA, 40 bp, Homo sapiens
actactaagttctcctgcctttcttacagtttaactacac

SEQ ID NO: 18070 - DNA, 40 bp, Homo sapiens
tgtagttaaactgtaagaaaggcaggagaacttagtagtt

SEQ ID NO: 18071 - DNA, 40 bp, Homo sapiens
aactactaagttctcctgcctttcttacagtttaactaca

SEQ ID NO: 18072 - DNA, 40 bp, Homo sapiens
gtagttaaactgtaagaaaggcaggagaacttagtagtta

SEQ ID NO: 18073 - DNA, 40 bp, Homo sapiens
taactactaagttctcctgcctttcttacagtttaactac

SEQ ID NO: 18074 - DNA, 40 bp, Homo sapiens
tagttaaactgtaagaaaggcaggagaacttagtagttaa

SEQ ID NO: 18075 - DNA, 40 bp, Homo sapiens
ttaactactaagttctcctgcctttcttacagtttaacta

SEQ ID NO: 18076 - DNA, 40 bp, Homo sapiens
agttaaactgtaagaaaggcaggagaacttagtagttaaa

SEQ ID NO: 18077 - DNA, 40 bp, Homo sapiens
tttaactactaagttctcctgcctttcttacagtttaact

SEQ ID NO: 18078 - DNA, 40 bp, Homo sapiens
gttaaactgtaagaaaggcaggagaacttagtagttaaat

SEQ ID NO: 18079 - DNA, 40 bp, Homo sapiens
atttaactactaagttctcctgcctttcttacagtttaac

SEQ ID NO: 18080 - DNA, 40 bp, Homo sapiens
ttaaactgtaagaaaggcaggagaacttagtagttaaata

SEQ ID NO: 18081 - DNA, 40 bp, Homo sapiens
tatttaactactaagttctcctgcctttcttacagtttaa

SEQ ID NO: 18082 - DNA, 40 bp, Homo sapiens
taaactgtaagaaaggcaggagaacttagtagttaaatag

SEQ ID NO: 18083 - DNA, 40 bp, Homo sapiens
ctatttaactactaagttctcctgcctttcttacagttta

SEQ ID NO: 18084 - DNA, 40 bp, Homo sapiens
aaactgtaagaaaggcaggagaacttagtagttaaatagt

SEQ ID NO: 18085 - DNA, 40 bp, Homo sapiens
actatttaactactaagttctcctgcctttcttacagttt

SEQ ID NO: 18086 - DNA, 40 bp, Homo sapiens
aactgtaagaaaggcaggagaacttagtagttaaatagtt

SEQ ID NO: 18087 - DNA, 40 bp, Homo sapiens
aactatttaactactaagttctcctgcctttcttacagtt

SEQ ID NO: 18088 - DNA, 40 bp, Homo sapiens
actgtaagaaaggcaggagaacttagtagttaaatagttg

SEQ ID NO: 18089 - DNA, 40 bp, Homo sapiens
caactatttaactactaagttctcctgcctttcttacagt

SEQ ID NO: 18090 - DNA, 40 bp, Homo sapiens
ctgtaagaaaggcaggagaacttagtagttaaatagttgg

SEQ ID NO: 18091 - DNA, 40 bp, Homo sapiens
ccaactatttaactactaagttctcctgcctttcttacag

SEQ ID NO: 18092 - DNA, 40 bp, Homo sapiens
tgtaagaaaggcaggagaacttagtagttaaatagttggt

SEQ ID NO: 18093 - DNA, 40 bp, Homo sapiens
accaactatttaactactaagttctcctgcctttcttaca

SEQ ID NO: 18094 - DNA, 40 bp, Homo sapiens
gtaagaaaggcaggagaacttagtagttaaatagttggtt

SEQ ID NO: 18095 - DNA, 40 bp, Homo sapiens
aaccaactatttaactactaagttctcctgcctttcttac

SEQ ID NO: 18096 - DNA, 40 bp, Homo sapiens
taagaaaggcaggagaacttagtagttaaatagttggtta

SEQ ID NO: 18097 - DNA, 40 bp, Homo sapiens
taaccaactatttaactactaagttctcctgcctttctta

SEQ ID NO: 18098 - DNA, 40 bp, Homo sapiens
aagaaaggcaggagaacttagtagttaaatagttggttaa

SEQ ID NO: 18099 - DNA, 40 bp, Homo sapiens
ttaaccaactatttaactactaagttctcctgcctttctt

SEQ ID NO: 18100 - DNA, 40 bp, Homo sapiens
agaaaggcaggagaacttagtagttaaatagttggttaaa

SEQ ID NO: 18101 - DNA, 40 bp, Homo sapiens
tttaaccaactatttaactactaagttctcctgcctttct

SEQ ID NO: 18102 - DNA, 40 bp, Homo sapiens
gaaaggcaggagaacttagtagttaaatagttggttaaat

SEQ ID NO: 18103 - DNA, 40 bp, Homo sapiens
atttaaccaactatttaactactaagttctcctgcctttc

SEQ ID NO: 18104 - DNA, 40 bp, Homo sapiens
aaaggcaggagaacttagtagttaaatagttggttaaatg

SEQ ID NO: 18105 - DNA, 40 bp, Homo sapiens
catttaaccaactatttaactactaagttctcctgccttt

SEQ ID NO: 18106 - DNA, 40 bp, Homo sapiens
aaggcaggagaacttagtagttaaatagttggttaaatgg

SEQ ID NO: 18107 - DNA, 40 bp, Homo sapiens
ccatttaaccaactatttaactactaagttctcctgcctt

SEQ ID NO: 18108 - DNA, 40 bp, Homo sapiens
aggcaggagaacttagtagttaaatagttggttaaatgga

SEQ ID NO: 18109 - DNA, 40 bp, Homo sapiens
tccatttaaccaactatttaactactaagttctcctgcct

SEQ ID NO: 18110 - DNA, 40 bp, Homo sapiens
ggcaggagaacttagtagttaaatagttggttaaatggaa

SEQ ID NO: 18111 - DNA, 40 bp, Homo sapiens
ttccatttaaccaactatttaactactaagttctcctgcc

SEQ ID NO: 18112 - DNA, 40 bp, Homo sapiens
gcaggagaacttagtagttaaatagttggttaaatggaaa

SEQ ID NO: 18113 - DNA, 40 bp, Homo sapiens
tttccatttaaccaactatttaactactaagttctcctgc

SEQ ID NO: 18114 - DNA, 40 bp, Homo sapiens
caggagaacttagtagttaaatagttggttaaatggaaat

SEQ ID NO: 18115 - DNA, 40 bp, Homo sapiens
atttccatttaaccaactatttaactactaagttctcctg

SEQ ID NO: 18116 - DNA, 40 bp, Homo sapiens
aggagaacttagtagttaaatagttggttaaatggaaatg

SEQ ID NO: 18117 - DNA, 40 bp, Homo sapiens
catttccatttaaccaactatttaactactaagttctcct

SEQ ID NO: 18118 - DNA, 40 bp, Homo sapiens
ggagaacttagtagttaaatagttggttaaatggaaatgc

SEQ ID NO: 18119 - DNA, 40 bp, Homo sapiens
gcatttccatttaaccaactatttaactactaagttctcc

SEQ ID NO: 18120 - DNA, 40 bp, Homo sapiens
gagaacttagtagttaaatagttggttaaatggaaatgct

SEQ ID NO: 18121 - DNA, 40 bp, Homo sapiens
agcatttccatttaaccaactatttaactactaagttctc

SEQ ID NO: 18122 - DNA, 40 bp, Homo sapiens
agaacttagtagttaaatagttggttaaatggaaatgctg

SEQ ID NO: 18123 - DNA, 40 bp, Homo sapiens
cagcatttccatttaaccaactatttaactactaagttct

SEQ ID NO: 18124 - DNA, 40 bp, Homo sapiens
gaacttagtagttaaatagttggttaaatggaaatgctga

SEQ ID NO: 18125 - DNA, 40 bp, Homo sapiens
tcagcatttccatttaaccaactatttaactactaagttc

SEQ ID NO: 18126 - DNA, 40 bp, Homo sapiens
aacttagtagttaaatagttggttaaatggaaatgctgac

SEQ ID NO: 18127 - DNA, 40 bp, Homo sapiens
gtcagcatttccatttaaccaactatttaactactaagtt

SEQ ID NO: 18128 - DNA, 40 bp, Homo sapiens
acttagtagttaaatagttggttaaatggaaatgctgact

SEQ ID NO: 18129 - DNA, 40 bp, Homo sapiens
agtcagcatttccatttaaccaactatttaactactaagt

SEQ ID NO: 18130 - DNA, 40 bp, Homo sapiens
cttagtagttaaatagttggttaaatggaaatgctgactc

SEQ ID NO: 18131 - DNA, 40 bp, Homo sapiens
gagtcagcatttccatttaaccaactatttaactactaag

SEQ ID NO: 18132 - DNA, 40 bp, Homo sapiens
ttagtagttaaatagttggttaaatggaaatgctgactcc

SEQ ID NO: 18133 - DNA, 40 bp, Homo sapiens
ggagtcagcatttccatttaaccaactatttaactactaa

SEQ ID NO: 18134 - DNA, 40 bp, Homo sapiens
tagtagttaaatagttggttaaatggaaatgctgactcca

SEQ ID NO: 18135 - DNA, 40 bp, Homo sapiens
tggagtcagcatttccatttaaccaactatttaactacta

SEQ ID NO: 18136 - DNA, 40 bp, Homo sapiens
agtagttaaatagttggttaaatggaaatgctgactccat

SEQ ID NO: 18137 - DNA, 40 bp, Homo sapiens
atggagtcagcatttccatttaaccaactatttaactact

SEQ ID NO: 18138 - DNA, 40 bp, Homo sapiens
gtagttaaatagttggttaaatggaaatgctgactccatg

SEQ ID NO: 18139 - DNA, 40 bp, Homo sapiens
catggagtcagcatttccatttaaccaactatttaactac

SEQ ID NO: 18140 - DNA, 40 bp, Homo sapiens
tagttaaatagttggttaaatggaaatgctgactccatgt

SEQ ID NO: 18141 - DNA, 40 bp, Homo sapiens
acatggagtcagcatttccatttaaccaactatttaacta

SEQ ID NO: 18142 - DNA, 40 bp, Homo sapiens
agttaaatagttggttaaatggaaatgctgactccatgtt

SEQ ID NO: 18143 - DNA, 40 bp, Homo sapiens
aacatggagtcagcatttccatttaaccaactatttaact

SEQ ID NO: 18144 - DNA, 40 bp, Homo sapiens
gttaaatagttggttaaatggaaatgctgactccatgtta

SEQ ID NO: 18145 - DNA, 40 bp, Homo sapiens
taacatggagtcagcatttccatttaaccaactatttaac

SEQ ID NO: 18146 - DNA, 40 bp, Homo sapiens
ttaaatagttggttaaatggaaatgctgactccatgttat

SEQ ID NO: 18147 - DNA, 40 bp, Homo sapiens
ataacatggagtcagcatttccatttaaccaactatttaa

SEQ ID NO: 18148 - DNA, 40 bp, Homo sapiens
taaatagttggttaaatggaaatgctgactccatgttatt

SEQ ID NO: 18149 - DNA, 40 bp, Homo sapiens
aataacatggagtcagcatttccatttaaccaactattta

SEQ ID NO: 18150 - DNA, 40 bp, Homo sapiens
aaatagttggttaaatggaaatgctgactccatgttattg

SEQ ID NO: 18151 - DNA, 40 bp, Homo sapiens
caataacatggagtcagcatttccatttaaccaactattt

SEQ ID NO: 18152 - DNA, 40 bp, Homo sapiens
aatagttggttaaatggaaatgctgactccatgttattgt

SEQ ID NO: 18153 - DNA, 40 bp, Homo sapiens
acaataacatggagtcagcatttccatttaaccaactatt

SEQ ID NO: 18154 - DNA, 40 bp, Homo sapiens
atagttggttaaatggaaatgctgactccatgttattgta

SEQ ID NO: 18155 - DNA, 40 bp, Homo sapiens
tacaataacatggagtcagcatttccatttaaccaactat

SEQ ID NO: 18156 - DNA, 40 bp, Homo sapiens
tagttggttaaatggaaatgctgactccatgttattgtaa

SEQ ID NO: 18157 - DNA, 40 bp, Homo sapiens
ttacaataacatggagtcagcatttccatttaaccaacta

SEQ ID NO: 18158 - DNA, 40 bp, Homo sapiens
agttggttaaatggaaatgctgactccatgttattgtaaa

SEQ ID NO: 18159 - DNA, 40 bp, Homo sapiens
tttacaataacatggagtcagcatttccatttaaccaact

SEQ ID NO: 18160 - DNA, 40 bp, Homo sapiens
gttggttaaatggaaatgctgactccatgttattgtaaaa

SEQ ID NO: 18161 - DNA, 40 bp, Homo sapiens
ttttacaataacatggagtcagcatttccatttaaccaac

SEQ ID NO: 18162 - DNA, 40 bp, Homo sapiens
ttggttaaatggaaatgctgactccatgttattgtaaaaa

SEQ ID NO: 18163 - DNA, 40 bp, Homo sapiens
tttttacaataacatggagtcagcatttccatttaaccaa

SEQ ID NO: 18164 - DNA, 40 bp, Homo sapiens
tggttaaatggaaatgctgactccatgttattgtaaaaag

SEQ ID NO: 18165 - DNA, 40 bp, Homo sapiens
ctttttacaataacatggagtcagcatttccatttaacca

SEQ ID NO: 18166 - DNA, 40 bp, Homo sapiens
ggttaaatggaaatgctgactccatgttattgtaaaaagt

SEQ ID NO: 18167 - DNA, 40 bp, Homo sapiens
actttttacaataacatggagtcagcatttccatttaacc

SEQ ID NO: 18168 - DNA, 40 bp, Homo sapiens
gttaaatggaaatgctgactccatgttattgtaaaaagtt

SEQ ID NO: 18169 - DNA, 40 bp, Homo sapiens
aactttttacaataacatggagtcagcatttccatttaac

SEQ ID NO: 18170 - DNA, 40 bp, Homo sapiens
ttaaatggaaatgctgactccatgttattgtaaaaagtta

SEQ ID NO: 18171 - DNA, 40 bp, Homo sapiens
taactttttacaataacatggagtcagcatttccatttaa

SEQ ID NO: 18172 - DNA, 40 bp, Homo sapiens
taaatggaaatgctgactccatgttattgtaaaaagttaa

SEQ ID NO: 18173 - DNA, 40 bp, Homo sapiens
ttaactttttacaataacatggagtcagcatttccattta

SEQ ID NO: 18174 - DNA, 40 bp, Homo sapiens
aaatggaaatgctgactccatgttattgtaaaaagttaaa

SEQ ID NO: 18175 - DNA, 40 bp, Homo sapiens
tttaactttttacaataacatggagtcagcatttccattt

SEQ ID NO: 18176 - DNA, 40 bp, Homo sapiens
aatggaaatgctgactccatgttattgtaaaaagttaaaa

SEQ ID NO: 18177 - DNA, 40 bp, Homo sapiens
ttttaactttttacaataacatggagtcagcatttccatt

SEQ ID NO: 18178 - DNA, 40 bp, Homo sapiens
atggaaatgctgactccatgttattgtaaaaagttaaaaa

SEQ ID NO: 18179 - DNA, 40 bp, Homo sapiens
tttttaactttttacaataacatggagtcagcatttccat

SEQ ID NO: 18180 - DNA, 40 bp, Homo sapiens
tggaaatgctgactccatgttattgtaaaaagttaaaaat

SEQ ID NO: 18181 - DNA, 40 bp, Homo sapiens
atttttaactttttacaataacatggagtcagcatttcca

SEQ ID NO: 18182 - DNA, 40 bp, Homo sapiens
ggaaatgctgactccatgttattgtaaaaagttaaaaatt

SEQ ID NO: 18183 - DNA, 40 bp, Homo sapiens
aatttttaactttttacaataacatggagtcagcatttcc

SEQ ID NO: 18184 - DNA, 40 bp, Homo sapiens
gaaatgctgactccatgttattgtaaaaagttaaaaattt

SEQ ID NO: 18185 - DNA, 40 bp, Homo sapiens
aaatttttaactttttacaataacatggagtcagcatttc

SEQ ID NO: 18186 - DNA, 40 bp, Homo sapiens
aaatgctgactccatgttattgtaaaaagttaaaaattta

SEQ ID NO: 18187 - DNA, 40 bp, Homo sapiens
taaatttttaactttttacaataacatggagtcagcattt

SEQ ID NO: 18188 - DNA, 40 bp, Homo sapiens
aatgctgactccatgttattgtaaaaagttaaaaatttag

SEQ ID NO: 18189 - DNA, 40 bp, Homo sapiens
ctaaatttttaactttttacaataacatggagtcagcatt

SEQ ID NO: 18190 - DNA, 40 bp, Homo sapiens
atgctgactccatgttattgtaaaaagttaaaaatttagg

SEQ ID NO: 18191 - DNA, 40 bp, Homo sapiens
cctaaatttttaactttttacaataacatggagtcagcat

SEQ ID NO: 18192 - DNA, 40 bp, Homo sapiens
tgctgactccatgttattgtaaaaagttaaaaatttagga

SEQ ID NO: 18193 - DNA, 40 bp, Homo sapiens
tcctaaatttttaactttttacaataacatggagtcagca

SEQ ID NO: 18194 - DNA, 40 bp, Homo sapiens
gctgactccatgttattgtaaaaagttaaaaatttaggag

SEQ ID NO: 18195 - DNA, 40 bp, Homo sapiens
ctcctaaatttttaactttttacaataacatggagtcagc

SEQ ID NO: 18196 - DNA, 40 bp, Homo sapiens
ctgactccatgttattgtaaaaagttaaaaatttaggagg

SEQ ID NO: 18197 - DNA, 40 bp, Homo sapiens
cctcctaaatttttaactttttacaataacatggagtcag

SEQ ID NO: 18198 - DNA, 40 bp, Homo sapiens
tgactccatgttattgtaaaaagttaaaaatttaggagga

SEQ ID NO: 18199 - DNA, 40 bp, Homo sapiens
tcctcctaaatttttaactttttacaataacatggagtca

SEQ ID NO: 18200 - DNA, 40 bp, Homo sapiens
gactccatgttattgtaaaaagttaaaaatttaggaggat

SEQ ID NO: 18201 - DNA, 40 bp, Homo sapiens
atcctcctaaatttttaactttttacaataacatggagtc

SEQ ID NO: 18202 - DNA, 40 bp, Homo sapiens
actccatgttattgtaaaaagttaaaaatttaggaggata

SEQ ID NO: 18203 - DNA, 40 bp, Homo sapiens
tatcctcctaaatttttaactttttacaataacatggagt

SEQ ID NO: 18204 - DNA, 40 bp, Homo sapiens
ctccatgttattgtaaaaagttaaaaatttaggaggatat

SEQ ID NO: 18205 - DNA, 40 bp, Homo sapiens
atatcctcctaaatttttaactttttacaataacatggag

SEQ ID NO: 18206 - DNA, 40 bp, Homo sapiens
tccatgttattgtaaaaagttaaaaatttaggaggatatg

SEQ ID NO: 18207 - DNA, 40 bp, Homo sapiens
catatcctcctaaatttttaactttttacaataacatgga

SEQ ID NO: 18208 - DNA, 40 bp, Homo sapiens
ccatgttattgtaaaaagttaaaaatttaggaggatatgg

SEQ ID NO: 18209 - DNA, 40 bp, Homo sapiens
ccatatcctcctaaatttttaactttttacaataacatgg

SEQ ID NO: 18210 - DNA, 40 bp, Homo sapiens
catgttattgtaaaaagttaaaaatttaggaggatatggg

SEQ ID NO: 18211 - DNA, 40 bp, Homo sapiens
cccatatcctcctaaatttttaactttttacaataacatg

SEQ ID NO: 18212 - DNA, 40 bp, Homo sapiens
atgttattgtaaaaagttaaaaatttaggaggatatgggg

SEQ ID NO: 18213 - DNA, 40 bp, Homo sapiens
ccccatatcctcctaaatttttaactttttacaataacat

SEQ ID NO: 18214 - DNA, 40 bp, Homo sapiens
tgttattgtaaaaagttaaaaatttaggaggatatgggga

SEQ ID NO: 18215 - DNA, 40 bp, Homo sapiens
tccccatatcctcctaaatttttaactttttacaataaca

SEQ ID NO: 18216 - DNA, 40 bp, Homo sapiens
gttattgtaaaaagttaaaaatttaggaggatatggggat

SEQ ID NO: 18217 - DNA, 40 bp, Homo sapiens
atccccatatcctcctaaatttttaactttttacaataac

SEQ ID NO: 18218 - DNA, 40 bp, Homo sapiens
ttattgtaaaaagttaaaaatttaggaggatatggggatt

SEQ ID NO: 18219 - DNA, 40 bp, Homo sapiens
aatccccatatcctcctaaatttttaactttttacaataa

SEQ ID NO: 18220 - DNA, 40 bp, Homo sapiens
tattgtaaaaagttaaaaatttaggaggatatggggattt

SEQ ID NO: 18221 - DNA, 40 bp, Homo sapiens
aaatccccatatcctcctaaatttttaactttttacaata

SEQ ID NO: 18222 - DNA, 40 bp, Homo sapiens
attgtaaaaagttaaaaatttaggaggatatggggatttc

SEQ ID NO: 18223 - DNA, 40 bp, Homo sapiens
gaaatccccatatcctcctaaatttttaactttttacaat

SEQ ID NO: 18224 - DNA, 40 bp, Homo sapiens
ttgtaaaaagttaaaaatttaggaggatatggggatttca

SEQ ID NO: 18225 - DNA, 40 bp, Homo sapiens
tgaaatccccatatcctcctaaatttttaactttttacaa

SEQ ID NO: 18226 - DNA, 40 bp, Homo sapiens
tgtaaaaagttaaaaatttaggaggatatggggatttcac

SEQ ID NO: 18227 - DNA, 40 bp, Homo sapiens
gtgaaatccccatatcctcctaaatttttaactttttaca

SEQ ID NO: 18228 - DNA, 40 bp, Homo sapiens
gtaaaaagttaaaaatttaggaggatatggggatttcact

SEQ ID NO: 18229 - DNA, 40 bp, Homo sapiens
agtgaaatccccatatcctcctaaatttttaactttttac

SEQ ID NO: 18230 - DNA, 40 bp, Homo sapiens
taaaaagttaaaaatttaggaggatatggggatttcactg

SEQ ID NO: 18231 - DNA, 40 bp, Homo sapiens
cagtgaaatccccatatcctcctaaatttttaacttttta

SEQ ID NO: 18232 - DNA, 40 bp, Homo sapiens
aaaaagttaaaaatttaggaggatatggggatttcactgc

SEQ ID NO: 18233 - DNA, 40 bp, Homo sapiens
gcagtgaaatccccatatcctcctaaatttttaacttttt

SEQ ID NO: 18234 - DNA, 40 bp, Homo sapiens
aaaagttaaaaatttaggaggatatggggatttcactgcc

SEQ ID NO: 18235 - DNA, 40 bp, Homo sapiens
ggcagtgaaatccccatatcctcctaaatttttaactttt

SEQ ID NO: 18236 - DNA, 40 bp, Homo sapiens
aaagttaaaaatttaggaggatatggggatttcactgcca

SEQ ID NO: 18237 - DNA, 40 bp, Homo sapiens
tggcagtgaaatccccatatcctcctaaatttttaacttt

SEQ ID NO: 18238 - DNA, 40 bp, Homo sapiens
aagttaaaaatttaggaggatatggggatttcactgccat

SEQ ID NO: 18239 - DNA, 40 bp, Homo sapiens
atggcagtgaaatccccatatcctcctaaatttttaactt

SEQ ID NO: 18240 - DNA, 40 bp, Homo sapiens
agttaaaaatttaggaggatatggggatttcactgccatt

SEQ ID NO: 18241 - DNA, 40 bp, Homo sapiens
aatggcagtgaaatccccatatcctcctaaatttttaact

SEQ ID NO: 18242 - DNA, 40 bp, Homo sapiens
gttaaaaatttaggaggatatggggatttcactgccattg

SEQ ID NO: 18243 - DNA, 40 bp, Homo sapiens
caatggcagtgaaatccccatatcctcctaaatttttaac

SEQ ID NO: 18244 - DNA, 40 bp, Homo sapiens
ttaaaaatttaggaggatatggggatttcactgccattgc

SEQ ID NO: 18245 - DNA, 40 bp, Homo sapiens
gcaatggcagtgaaatccccatatcctcctaaatttttaa

SEQ ID NO: 18246 - DNA, 40 bp, Homo sapiens
taaaaatttaggaggatatggggatttcactgccattgca

SEQ ID NO: 18247 - DNA, 40 bp, Homo sapiens
tgcaatggcagtgaaatccccatatcctcctaaattttta

SEQ ID NO: 18248 - DNA, 40 bp, Homo sapiens
aaaaatttaggaggatatggggatttcactgccattgcag

SEQ ID NO: 18249 - DNA, 40 bp, Homo sapiens
ctgcaatggcagtgaaatccccatatcctcctaaattttt

SEQ ID NO: 18250 - DNA, 40 bp, Homo sapiens
aaaatttaggaggatatggggatttcactgccattgcagg

SEQ ID NO: 18251 - DNA, 40 bp, Homo sapiens
cctgcaatggcagtgaaatccccatatcctcctaaatttt

SEQ ID NO: 18252 - DNA, 40 bp, Homo sapiens
aaatttaggaggatatggggatttcactgccattgcaggt

SEQ ID NO: 18253 - DNA, 40 bp, Homo sapiens
acctgcaatggcagtgaaatccccatatcctcctaaattt

SEQ ID NO: 18254 - DNA, 40 bp, Homo sapiens
aatttaggaggatatggggatttcactgccattgcaggtt

SEQ ID NO: 18255 - DNA, 40 bp, Homo sapiens
aacctgcaatggcagtgaaatccccatatcctcctaaatt

SEQ ID NO: 18256 - DNA, 40 bp, Homo sapiens
atttaggaggatatggggatttcactgccattgcaggttt

SEQ ID NO: 18257 - DNA, 40 bp, Homo sapiens
aaacctgcaatggcagtgaaatccccatatcctcctaaat

SEQ ID NO: 18258 - DNA, 40 bp, Homo sapiens
tttaggaggatatggggatttcactgccattgcaggtttt

SEQ ID NO: 18259 - DNA, 40 bp, Homo sapiens
aaaacctgcaatggcagtgaaatccccatatcctcctaaa

SEQ ID NO: 18260 - DNA, 40 bp, Homo sapiens
ttaggaggatatggggatttcactgccattgcaggttttg

SEQ ID NO: 18261 - DNA, 40 bp, Homo sapiens
caaaacctgcaatggcagtgaaatccccatatcctcctaa

SEQ ID NO: 18262 - DNA, 40 bp, Homo sapiens
taggaggatatggggatttcactgccattgcaggttttga

SEQ ID NO: 18263 - DNA, 40 bp, Homo sapiens
tcaaaacctgcaatggcagtgaaatccccatatcctccta

SEQ ID NO: 18264 - DNA, 40 bp, Homo sapiens
aggaggatatggggatttcactgccattgcaggttttgat

SEQ ID NO: 18265 - DNA, 40 bp, Homo sapiens
atcaaaacctgcaatggcagtgaaatccccatatcctcct

SEQ ID NO: 18266 - DNA, 40 bp, Homo sapiens
ggaggatatggggatttcactgccattgcaggttttgatt

SEQ ID NO: 18267 - DNA, 40 bp, Homo sapiens
aatcaaaacctgcaatggcagtgaaatccccatatcctcc

SEQ ID NO: 18268 - DNA, 40 bp, Homo sapiens
gaggatatggggatttcactgccattgcaggttttgattg

SEQ ID NO: 18269 - DNA, 40 bp, Homo sapiens
caatcaaaacctgcaatggcagtgaaatccccatatcctc

SEQ ID NO: 18270 - DNA, 40 bp, Homo sapiens
aggatatggggatttcactgccattgcaggttttgattgg

SEQ ID NO: 18271 - DNA, 40 bp, Homo sapiens
ccaatcaaaacctgcaatggcagtgaaatccccatatcct

SEQ ID NO: 18272 - DNA, 40 bp, Homo sapiens
ggatatggggatttcactgccattgcaggttttgattggt

SEQ ID NO: 18273 - DNA, 40 bp, Homo sapiens
accaatcaaaacctgcaatggcagtgaaatccccatatcc

SEQ ID NO: 18274 - DNA, 40 bp, Homo sapiens
gatatggggatttcactgccattgcaggttttgattggta

SEQ ID NO: 18275 - DNA, 40 bp, Homo sapiens
taccaatcaaaacctgcaatggcagtgaaatccccatatc

SEQ ID NO: 18276 - DNA, 40 bp, Homo sapiens
atatggggatttcactgccattgcaggttttgattggtat

SEQ ID NO: 18277 - DNA, 40 bp, Homo sapiens
ataccaatcaaaacctgcaatggcagtgaaatccccatat

SEQ ID NO: 18278 - DNA, 40 bp, Homo sapiens
tatggggatttcactgccattgcaggttttgattggtatt

SEQ ID NO: 18279 - DNA, 40 bp, Homo sapiens
aataccaatcaaaacctgcaatggcagtgaaatccccata

SEQ ID NO: 18280 - DNA, 40 bp, Homo sapiens
atggggatttcactgccattgcaggttttgattggtattt

SEQ ID NO: 18281 - DNA, 40 bp, Homo sapiens
aaataccaatcaaaacctgcaatggcagtgaaatccccat

SEQ ID NO: 18282 - DNA, 40 bp, Homo sapiens
tggggatttcactgccattgcaggttttgattggtattta

SEQ ID NO: 18283 - DNA, 40 bp, Homo sapiens
taaataccaatcaaaacctgcaatggcagtgaaatcccca

SEQ ID NO: 18284 - DNA, 40 bp, Homo sapiens
ggggatttcactgccattgcaggttttgattggtatttac

SEQ ID NO: 18285 - DNA, 40 bp, Homo sapiens
gtaaataccaatcaaaacctgcaatggcagtgaaatcccc

SEQ ID NO: 18286 - DNA, 40 bp, Homo sapiens
gggatttcactgccattgcaggttttgattggtatttacc

SEQ ID NO: 18287 - DNA, 40 bp, Homo sapiens
ggtaaataccaatcaaaacctgcaatggcagtgaaatccc

SEQ ID NO: 18288 - DNA, 40 bp, Homo sapiens
ggatttcactgccattgcaggttttgattggtatttacca

SEQ ID NO: 18289 - DNA, 40 bp, Homo sapiens
tggtaaataccaatcaaaacctgcaatggcagtgaaatcc

SEQ ID NO: 18290 - DNA, 40 bp, Homo sapiens
gatttcactgccattgcaggttttgattggtatttaccaa

SEQ ID NO: 18291 - DNA, 40 bp, Homo sapiens
ttggtaaataccaatcaaaacctgcaatggcagtgaaatc

SEQ ID NO: 18292 - DNA, 40 bp, Homo sapiens
atttcactgccattgcaggttttgattggtatttaccaat

SEQ ID NO: 18293 - DNA, 40 bp, Homo sapiens
attggtaaataccaatcaaaacctgcaatggcagtgaaat

SEQ ID NO: 18294 - DNA, 40 bp, Homo sapiens
tttcactgccattgcaggttttgattggtatttaccaatc

SEQ ID NO: 18295 - DNA, 40 bp, Homo sapiens
gattggtaaataccaatcaaaacctgcaatggcagtgaaa

SEQ ID NO: 18296 - DNA, 40 bp, Homo sapiens
ttcactgccattgcaggttttgattggtatttaccaatcc

SEQ ID NO: 18297 - DNA, 40 bp, Homo sapiens
ggattggtaaataccaatcaaaacctgcaatggcagtgaa

SEQ ID NO: 18298 - DNA, 40 bp, Homo sapiens
tcactgccattgcaggttttgattggtatttaccaatccg

SEQ ID NO: 18299 - DNA, 40 bp, Homo sapiens
cggattggtaaataccaatcaaaacctgcaatggcagtga

SEQ ID NO: 18300 - DNA, 40 bp, Homo sapiens
cactgccattgcaggttttgattggtatttaccaatccgt

SEQ ID NO: 18301 - DNA, 40 bp, Homo sapiens
acggattggtaaataccaatcaaaacctgcaatggcagtg

SEQ ID NO: 18302 - DNA, 40 bp, Homo sapiens
actgccattgcaggttttgattggtatttaccaatccgtg

SEQ ID NO: 18303 - DNA, 40 bp, Homo sapiens
cacggattggtaaataccaatcaaaacctgcaatggcagt

SEQ ID NO: 18304 - DNA, 40 bp, Homo sapiens
ctgccattgcaggttttgattggtatttaccaatccgtgt

SEQ ID NO: 18305 - DNA, 40 bp, Homo sapiens
acacggattggtaaataccaatcaaaacctgcaatggcag

SEQ ID NO: 18306 - DNA, 40 bp, Homo sapiens
tgccattgcaggttttgattggtatttaccaatccgtgtg

SEQ ID NO: 18307 - DNA, 40 bp, Homo sapiens
cacacggattggtaaataccaatcaaaacctgcaatggca

SEQ ID NO: 18308 - DNA, 40 bp, Homo sapiens
gccattgcaggttttgattggtatttaccaatccgtgtgg

SEQ ID NO: 18309 - DNA, 40 bp, Homo sapiens
ccacacggattggtaaataccaatcaaaacctgcaatggc

SEQ ID NO: 18310 - DNA, 40 bp, Homo sapiens
ccattgcaggttttgattggtatttaccaatccgtgtggg

SEQ ID NO: 18311 - DNA, 40 bp, Homo sapiens
cccacacggattggtaaataccaatcaaaacctgcaatgg

SEQ ID NO: 18312 - DNA, 40 bp, Homo sapiens
cattgcaggttttgattggtatttaccaatccgtgtgggt

SEQ ID NO: 18313 - DNA, 40 bp, Homo sapiens
acccacacggattggtaaataccaatcaaaacctgcaatg

SEQ ID NO: 18314 - DNA, 40 bp, Homo sapiens
attgcaggttttgattggtatttaccaatccgtgtgggtc

SEQ ID NO: 18315 - DNA, 40 bp, Homo sapiens
gacccacacggattggtaaataccaatcaaaacctgcaat

SEQ ID NO: 18316 - DNA, 40 bp, Homo sapiens
ttgcaggttttgattggtatttaccaatccgtgtgggtca

SEQ ID NO: 18317 - DNA, 40 bp, Homo sapiens
tgacccacacggattggtaaataccaatcaaaacctgcaa

SEQ ID NO: 18318 - DNA, 40 bp, Homo sapiens
tgcaggttttgattggtatttaccaatccgtgtgggtcag

SEQ ID NO: 18319 - DNA, 40 bp, Homo sapiens
ctgacccacacggattggtaaataccaatcaaaacctgca

SEQ ID NO: 18320 - DNA, 40 bp, Homo sapiens
gcaggttttgattggtatttaccaatccgtgtgggtcaga

SEQ ID NO: 18321 - DNA, 40 bp, Homo sapiens
tctgacccacacggattggtaaataccaatcaaaacctgc

SEQ ID NO: 18322 - DNA, 40 bp, Homo sapiens
caggttttgattggtatttaccaatccgtgtgggtcagag

SEQ ID NO: 18323 - DNA, 40 bp, Homo sapiens
ctctgacccacacggattggtaaataccaatcaaaacctg

SEQ ID NO: 18324 - DNA, 40 bp, Homo sapiens
aggttttgattggtatttaccaatccgtgtgggtcagaga

SEQ ID NO: 18325 - DNA, 40 bp, Homo sapiens
tctctgacccacacggattggtaaataccaatcaaaacct

SEQ ID NO: 18326 - DNA, 40 bp, Homo sapiens
ggttttgattggtatttaccaatccgtgtgggtcagagag

SEQ ID NO: 18327 - DNA, 40 bp, Homo sapiens
ctctctgacccacacggattggtaaataccaatcaaaacc

SEQ ID NO: 18328 - DNA, 40 bp, Homo sapiens
gttttgattggtatttaccaatccgtgtgggtcagagaga

SEQ ID NO: 18329 - DNA, 40 bp, Homo sapiens
tctctctgacccacacggattggtaaataccaatcaaaac

SEQ ID NO: 18330 - DNA, 40 bp, Homo sapiens
ttttgattggtatttaccaatccgtgtgggtcagagagaa

SEQ ID NO: 18331 - DNA, 40 bp, Homo sapiens
ttctctctgacccacacggattggtaaataccaatcaaaa

SEQ ID NO: 18332 - DNA, 40 bp, Homo sapiens
tttgattggtatttaccaatccgtgtgggtcagagagaaa

SEQ ID NO: 18333 - DNA, 40 bp, Homo sapiens
tttctctctgacccacacggattggtaaataccaatcaaa

SEQ ID NO: 18334 - DNA, 40 bp, Homo sapiens
ttgattggtatttaccaatccgtgtgggtcagagagaaaa

SEQ ID NO: 18335 - DNA, 40 bp, Homo sapiens
ttttctctctgacccacacggattggtaaataccaatcaa

SEQ ID NO: 18336 - DNA, 40 bp, Homo sapiens
tgattggtatttaccaatccgtgtgggtcagagagaaaat

SEQ ID NO: 18337 - DNA, 40 bp, Homo sapiens
attttctctctgacccacacggattggtaaataccaatca

SEQ ID NO: 18338 - DNA, 40 bp, Homo sapiens
gattggtatttaccaatccgtgtgggtcagagagaaaatt

SEQ ID NO: 18339 - DNA, 40 bp, Homo sapiens
aattttctctctgacccacacggattggtaaataccaatc

SEQ ID NO: 18340 - DNA, 40 bp, Homo sapiens
attggtatttaccaatccgtgtgggtcagagagaaaatta

SEQ ID NO: 18341 - DNA, 40 bp, Homo sapiens
taattttctctctgacccacacggattggtaaataccaat

SEQ ID NO: 18342 - DNA, 40 bp, Homo sapiens
ttggtatttaccaatccgtgtgggtcagagagaaaattag

SEQ ID NO: 18343 - DNA, 40 bp, Homo sapiens
ctaattttctctctgacccacacggattggtaaataccaa

SEQ ID NO: 18344 - DNA, 40 bp, Homo sapiens
tggtatttaccaatccgtgtgggtcagagagaaaattaga

SEQ ID NO: 18345 - DNA, 40 bp, Homo sapiens
tctaattttctctctgacccacacggattggtaaatacca

SEQ ID NO: 18346 - DNA, 40 bp, Homo sapiens
ggtatttaccaatccgtgtgggtcagagagaaaattagaa

SEQ ID NO: 18347 - DNA, 40 bp, Homo sapiens
ttctaattttctctctgacccacacggattggtaaatacc

SEQ ID NO: 18348 - DNA, 40 bp, Homo sapiens
gtatttaccaatccgtgtgggtcagagagaaaattagaaa

SEQ ID NO: 18349 - DNA, 40 bp, Homo sapiens
tttctaattttctctctgacccacacggattggtaaatac

SEQ ID NO: 18350 - DNA, 40 bp, Homo sapiens
tatttaccaatccgtgtgggtcagagagaaaattagaaag

SEQ ID NO: 18351 - DNA, 40 bp, Homo sapiens
ctttctaattttctctctgacccacacggattggtaaata

SEQ ID NO: 18352 - DNA, 40 bp, Homo sapiens
atttaccaatccgtgtgggtcagagagaaaattagaaagg

SEQ ID NO: 18353 - DNA, 40 bp, Homo sapiens
cctttctaattttctctctgacccacacggattggtaaat

SEQ ID NO: 18354 - DNA, 40 bp, Homo sapiens
tttaccaatccgtgtgggtcagagagaaaattagaaagga

SEQ ID NO: 18355 - DNA, 40 bp, Homo sapiens
tcctttctaattttctctctgacccacacggattggtaaa

SEQ ID NO: 18356 - DNA, 40 bp, Homo sapiens
ttaccaatccgtgtgggtcagagagaaaattagaaaggat

SEQ ID NO: 18357 - DNA, 40 bp, Homo sapiens
atcctttctaattttctctctgacccacacggattggtaa

SEQ ID NO: 18358 - DNA, 40 bp, Homo sapiens
taccaatccgtgtgggtcagagagaaaattagaaaggata

SEQ ID NO: 18359 - DNA, 40 bp, Homo sapiens
tatcctttctaattttctctctgacccacacggattggta

SEQ ID NO: 18360 - DNA, 40 bp, Homo sapiens
accaatccgtgtgggtcagagagaaaattagaaaggatat

SEQ ID NO: 18361 - DNA, 40 bp, Homo sapiens
atatcctttctaattttctctctgacccacacggattggt

SEQ ID NO: 18362 - DNA, 40 bp, Homo sapiens
ccaatccgtgtgggtcagagagaaaattagaaaggatatg

SEQ ID NO: 18363 - DNA, 40 bp, Homo sapiens
catatcctttctaattttctctctgacccacacggattgg

SEQ ID NO: 18364 - DNA, 40 bp, Homo sapiens
caatccgtgtgggtcagagagaaaattagaaaggatatga

SEQ ID NO: 18365 - DNA, 40 bp, Homo sapiens
tcatatcctttctaattttctctctgacccacacggattg

SEQ ID NO: 18366 - DNA, 40 bp, Homo sapiens
aatccgtgtgggtcagagagaaaattagaaaggatatgac

SEQ ID NO: 18367 - DNA, 40 bp, Homo sapiens
gtcatatcctttctaattttctctctgacccacacggatt

SEQ ID NO: 18368 - DNA, 40 bp, Homo sapiens
atccgtgtgggtcagagagaaaattagaaaggatatgact

SEQ ID NO: 18369 - DNA, 40 bp, Homo sapiens
agtcatatcctttctaattttctctctgacccacacggat

SEQ ID NO: 18370 - DNA, 40 bp, Homo sapiens
tccgtgtgggtcagagagaaaattagaaaggatatgactg

SEQ ID NO: 18371 - DNA, 40 bp, Homo sapiens
cagtcatatcctttctaattttctctctgacccacacgga

SEQ ID NO: 18372 - DNA, 40 bp, Homo sapiens
ccgtgtgggtcagagagaaaattagaaaggatatgactgc

SEQ ID NO: 18373 - DNA, 40 bp, Homo sapiens
gcagtcatatcctttctaattttctctctgacccacacgg

SEQ ID NO: 18374 - DNA, 40 bp, Homo sapiens
cgtgtgggtcagagagaaaattagaaaggatatgactgca

SEQ ID NO: 18375 - DNA, 40 bp, Homo sapiens
tgcagtcatatcctttctaattttctctctgacccacacg

SEQ ID NO: 18376 - DNA, 40 bp, Homo sapiens
gtgtgggtcagagagaaaattagaaaggatatgactgcac

SEQ ID NO: 18377 - DNA, 40 bp, Homo sapiens
gtgcagtcatatcctttctaattttctctctgacccacac

SEQ ID NO: 18378 - DNA, 40 bp, Homo sapiens
tgtgggtcagagagaaaattagaaaggatatgactgcaca

SEQ ID NO: 18379 - DNA, 40 bp, Homo sapiens
tgtgcagtcatatcctttctaattttctctctgacccaca

SEQ ID NO: 18380 - DNA, 40 bp, Homo sapiens
gtgggtcagagagaaaattagaaaggatatgactgcacat

SEQ ID NO: 18381 - DNA, 40 bp, Homo sapiens
atgtgcagtcatatcctttctaattttctctctgacccac

SEQ ID NO: 18382 - DNA, 40 bp, Homo sapiens
tgggtcagagagaaaattagaaaggatatgactgcacatt

SEQ ID NO: 18383 - DNA, 40 bp, Homo sapiens
aatgtgcagtcatatcctttctaattttctctctgaccca

SEQ ID NO: 18384 - DNA, 40 bp, Homo sapiens
gggtcagagagaaaattagaaaggatatgactgcacattt

SEQ ID NO: 18385 - DNA, 40 bp, Homo sapiens
aaatgtgcagtcatatcctttctaattttctctctgaccc

SEQ ID NO: 18386 - DNA, 40 bp, Homo sapiens
ggtcagagagaaaattagaaaggatatgactgcacatttt

SEQ ID NO: 18387 - DNA, 40 bp, Homo sapiens
aaaatgtgcagtcatatcctttctaattttctctctgacc

SEQ ID NO: 18388 - DNA, 40 bp, Homo sapiens
gtcagagagaaaattagaaaggatatgactgcacattttg

SEQ ID NO: 18389 - DNA, 40 bp, Homo sapiens
caaaatgtgcagtcatatcctttctaattttctctctgac

SEQ ID NO: 18390 - DNA, 40 bp, Homo sapiens
tcagagagaaaattagaaaggatatgactgcacattttgg

SEQ ID NO: 18391 - DNA, 40 bp, Homo sapiens
ccaaaatgtgcagtcatatcctttctaattttctctctga

SEQ ID NO: 18392 - DNA, 40 bp, Homo sapiens
cagagagaaaattagaaaggatatgactgcacattttgga

SEQ ID NO: 18393 - DNA, 40 bp, Homo sapiens
tccaaaatgtgcagtcatatcctttctaattttctctctg

SEQ ID NO: 18394 - DNA, 40 bp, Homo sapiens
agagagaaaattagaaaggatatgactgcacattttggaa

SEQ ID NO: 18395 - DNA, 40 bp, Homo sapiens
ttccaaaatgtgcagtcatatcctttctaattttctctct

SEQ ID NO: 18396 - DNA, 40 bp, Homo sapiens
gagagaaaattagaaaggatatgactgcacattttggaat

SEQ ID NO: 18397 - DNA, 40 bp, Homo sapiens
attccaaaatgtgcagtcatatcctttctaattttctctc

SEQ ID NO: 18398 - DNA, 40 bp, Homo sapiens
agagaaaattagaaaggatatgactgcacattttggaatt

SEQ ID NO: 18399 - DNA, 40 bp, Homo sapiens
aattccaaaatgtgcagtcatatcctttctaattttctct

SEQ ID NO: 18400 - DNA, 40 bp, Homo sapiens
gagaaaattagaaaggatatgactgcacattttggaatta

SEQ ID NO: 18401 - DNA, 40 bp, Homo sapiens
taattccaaaatgtgcagtcatatcctttctaattttctc

SEQ ID NO: 18402 - DNA, 40 bp, Homo sapiens
agaaaattagaaaggatatgactgcacattttggaattat

SEQ ID NO: 18403 - DNA, 40 bp, Homo sapiens
ataattccaaaatgtgcagtcatatcctttctaattttct

SEQ ID NO: 18404 - DNA, 40 bp, Homo sapiens
gaaaattagaaaggatatgactgcacattttggaattatt

SEQ ID NO: 18405 - DNA, 40 bp, Homo sapiens
aataattccaaaatgtgcagtcatatcctttctaattttc

SEQ ID NO: 18406 - DNA, 40 bp, Homo sapiens
aaaattagaaaggatatgactgcacattttggaattatta

SEQ ID NO: 18407 - DNA, 40 bp, Homo sapiens
taataattccaaaatgtgcagtcatatcctttctaatttt

SEQ ID NO: 18408 - DNA, 40 bp, Homo sapiens
aaattagaaaggatatgactgcacattttggaattattag

SEQ ID NO: 18409 - DNA, 40 bp, Homo sapiens
ctaataattccaaaatgtgcagtcatatcctttctaattt

SEQ ID NO: 18410 - DNA, 40 bp, Homo sapiens
aattagaaaggatatgactgcacattttggaattattagc

SEQ ID NO: 18411 - DNA, 40 bp, Homo sapiens
gctaataattccaaaatgtgcagtcatatcctttctaatt

SEQ ID NO: 18412 - DNA, 40 bp, Homo sapiens
attagaaaggatatgactgcacattttggaattattagca

SEQ ID NO: 18413 - DNA, 40 bp, Homo sapiens
tgctaataattccaaaatgtgcagtcatatcctttctaat

SEQ ID NO: 18414 - DNA, 40 bp, Homo sapiens
ttagaaaggatatgactgcacattttggaattattagcag

SEQ ID NO: 18415 - DNA, 40 bp, Homo sapiens
ctgctaataattccaaaatgtgcagtcatatcctttctaa

SEQ ID NO: 18416 - DNA, 40 bp, Homo sapiens
tagaaaggatatgactgcacattttggaattattagcagt

SEQ ID NO: 18417 - DNA, 40 bp, Homo sapiens
actgctaataattccaaaatgtgcagtcatatcctttcta

SEQ ID NO: 18418 - DNA, 40 bp, Homo sapiens
agaaaggatatgactgcacattttggaattattagcagtt

SEQ ID NO: 18419 - DNA, 40 bp, Homo sapiens
aactgctaataattccaaaatgtgcagtcatatcctttct

SEQ ID NO: 18420 - DNA, 40 bp, Homo sapiens
gaaaggatatgactgcacattttggaattattagcagttt

SEQ ID NO: 18421 - DNA, 40 bp, Homo sapiens
aaactgctaataattccaaaatgtgcagtcatatcctttc

SEQ ID NO: 18422 - DNA, 40 bp, Homo sapiens
aaaggatatgactgcacattttggaattattagcagtttt

SEQ ID NO: 18423 - DNA, 40 bp, Homo sapiens
aaaactgctaataattccaaaatgtgcagtcatatccttt

SEQ ID NO: 18424 - DNA, 40 bp, Homo sapiens
aaggatatgactgcacattttggaattattagcagttttt

SEQ ID NO: 18425 - DNA, 40 bp, Homo sapiens
aaaaactgctaataattccaaaatgtgcagtcatatcctt

SEQ ID NO: 18426 - DNA, 40 bp, Homo sapiens
aggatatgactgcacattttggaattattagcagtttttc

SEQ ID NO: 18427 - DNA, 40 bp, Homo sapiens
gaaaaactgctaataattccaaaatgtgcagtcatatcct

SEQ ID NO: 18428 - DNA, 40 bp, Homo sapiens
ggatatgactgcacattttggaattattagcagtttttct

SEQ ID NO: 18429 - DNA, 40 bp, Homo sapiens
agaaaaactgctaataattccaaaatgtgcagtcatatcc

SEQ ID NO: 18430 - DNA, 40 bp, Homo sapiens
gatatgactgcacattttggaattattagcagtttttcta

SEQ ID NO: 18431 - DNA, 40 bp, Homo sapiens
tagaaaaactgctaataattccaaaatgtgcagtcatatc

SEQ ID NO: 18432 - DNA, 40 bp, Homo sapiens
atatgactgcacattttggaattattagcagtttttctac

SEQ ID NO: 18433 - DNA, 40 bp, Homo sapiens
gtagaaaaactgctaataattccaaaatgtgcagtcatat

SEQ ID NO: 18434 - DNA, 40 bp, Homo sapiens
tatgactgcacattttggaattattagcagtttttctaca

SEQ ID NO: 18435 - DNA, 40 bp, Homo sapiens
tgtagaaaaactgctaataattccaaaatgtgcagtcata

SEQ ID NO: 18436 - DNA, 40 bp, Homo sapiens
atgactgcacattttggaattattagcagtttttctacat

SEQ ID NO: 18437 - DNA, 40 bp, Homo sapiens
atgtagaaaaactgctaataattccaaaatgtgcagtcat

SEQ ID NO: 18438 - DNA, 40 bp, Homo sapiens
tgactgcacattttggaattattagcagtttttctacatt

SEQ ID NO: 18439 - DNA, 40 bp, Homo sapiens
aatgtagaaaaactgctaataattccaaaatgtgcagtca

SEQ ID NO: 18440 - DNA, 40 bp, Homo sapiens
gactgcacattttggaattattagcagtttttctacattt

SEQ ID NO: 18441 - DNA, 40 bp, Homo sapiens
aaatgtagaaaaactgctaataattccaaaatgtgcagtc

SEQ ID NO: 18442 - DNA, 40 bp, Homo sapiens
actgcacattttggaattattagcagtttttctacattta

SEQ ID NO: 18443 - DNA, 40 bp, Homo sapiens
taaatgtagaaaaactgctaataattccaaaatgtgcagt

SEQ ID NO: 18444 - DNA, 40 bp, Homo sapiens
ctgcacattttggaattattagcagtttttctacatttaa

SEQ ID NO: 18445 - DNA, 40 bp, Homo sapiens
ttaaatgtagaaaaactgctaataattccaaaatgtgcag

SEQ ID NO: 18446 - DNA, 40 bp, Homo sapiens
tgcacattttggaattattagcagtttttctacatttaaa

SEQ ID NO: 18447 - DNA, 40 bp, Homo sapiens
tttaaatgtagaaaaactgctaataattccaaaatgtgca

SEQ ID NO: 18448 - DNA, 40 bp, Homo sapiens
gcacattttggaattattagcagtttttctacatttaaaa

SEQ ID NO: 18449 - DNA, 40 bp, Homo sapiens
ttttaaatgtagaaaaactgctaataattccaaaatgtgc

SEQ ID NO: 18450 - DNA, 40 bp, Homo sapiens
cacattttggaattattagcagtttttctacatttaaaat

SEQ ID NO: 18451 - DNA, 40 bp, Homo sapiens
attttaaatgtagaaaaactgctaataattccaaaatgtg

SEQ ID NO: 18452 - DNA, 40 bp, Homo sapiens
acattttggaattattagcagtttttctacatttaaaatg

SEQ ID NO: 18453 - DNA, 40 bp, Homo sapiens
cattttaaatgtagaaaaactgctaataattccaaaatgt

SEQ ID NO: 18454 - DNA, 40 bp, Homo sapiens
cattttggaattattagcagtttttctacatttaaaatgg

SEQ ID NO: 18455 - DNA, 40 bp, Homo sapiens
ccattttaaatgtagaaaaactgctaataattccaaaatg

SEQ ID NO: 18456 - DNA, 40 bp, Homo sapiens
attttggaattattagcagtttttctacatttaaaatgga

SEQ ID NO: 18457 - DNA, 40 bp, Homo sapiens
tccattttaaatgtagaaaaactgctaataattccaaaat

SEQ ID NO: 18458 - DNA, 40 bp, Homo sapiens
ttttggaattattagcagtttttctacatttaaaatggaa

SEQ ID NO: 18459 - DNA, 40 bp, Homo sapiens
ttccattttaaatgtagaaaaactgctaataattccaaaa

SEQ ID NO: 18460 - DNA, 40 bp, Homo sapiens
tttggaattattagcagtttttctacatttaaaatggaaa

SEQ ID NO: 18461 - DNA, 40 bp, Homo sapiens
tttccattttaaatgtagaaaaactgctaataattccaaa

SEQ ID NO: 18462 - DNA, 40 bp, Homo sapiens
ttggaattattagcagtttttctacatttaaaatggaaat

SEQ ID NO: 18463 - DNA, 40 bp, Homo sapiens
atttccattttaaatgtagaaaaactgctaataattccaa

SEQ ID NO: 18464 - DNA, 40 bp, Homo sapiens
tggaattattagcagtttttctacatttaaaatggaaata

SEQ ID NO: 18465 - DNA, 40 bp, Homo sapiens
tatttccattttaaatgtagaaaaactgctaataattcca

SEQ ID NO: 18466 - DNA, 40 bp, Homo sapiens
ggaattattagcagtttttctacatttaaaatggaaataa

SEQ ID NO: 18467 - DNA, 40 bp, Homo sapiens
ttatttccattttaaatgtagaaaaactgctaataattcc

SEQ ID NO: 18468 - DNA, 40 bp, Homo sapiens
gaattattagcagtttttctacatttaaaatggaaataaa

SEQ ID NO: 18469 - DNA, 40 bp, Homo sapiens
tttatttccattttaaatgtagaaaaactgctaataattc

SEQ ID NO: 18470 - DNA, 40 bp, Homo sapiens
aattattagcagtttttctacatttaaaatggaaataaat

SEQ ID NO: 18471 - DNA, 40 bp, Homo sapiens
atttatttccattttaaatgtagaaaaactgctaataatt

SEQ ID NO: 18472 - DNA, 40 bp, Homo sapiens
attattagcagtttttctacatttaaaatggaaataaatt

SEQ ID NO: 18473 - DNA, 40 bp, Homo sapiens
aatttatttccattttaaatgtagaaaaactgctaataat

SEQ ID NO: 18474 - DNA, 40 bp, Homo sapiens
ttattagcagtttttctacatttaaaatggaaataaattt

SEQ ID NO: 18475 - DNA, 40 bp, Homo sapiens
aaatttatttccattttaaatgtagaaaaactgctaataa

SEQ ID NO: 18476 - DNA, 40 bp, Homo sapiens
tattagcagtttttctacatttaaaatggaaataaatttt

SEQ ID NO: 18477 - DNA, 40 bp, Homo sapiens
aaaatttatttccattttaaatgtagaaaaactgctaata

SEQ ID NO: 18478 - DNA, 40 bp, Homo sapiens
attagcagtttttctacatttaaaatggaaataaattttt

SEQ ID NO: 18479 - DNA, 40 bp, Homo sapiens
aaaaatttatttccattttaaatgtagaaaaactgctaat

SEQ ID NO: 18480 - DNA, 40 bp, Homo sapiens
ttagcagtttttctacatttaaaatggaaataaatttttt

SEQ ID NO: 18481 - DNA, 40 bp, Homo sapiens
aaaaaatttatttccattttaaatgtagaaaaactgctaa

SEQ ID NO: 18482 - DNA, 40 bp, Homo sapiens
tagcagtttttctacatttaaaatggaaataaatttttta

SEQ ID NO: 18483 - DNA, 40 bp, Homo sapiens
taaaaaatttatttccattttaaatgtagaaaaactgcta

SEQ ID NO: 18484 - DNA, 40 bp, Homo sapiens
agcagtttttctacatttaaaatggaaataaattttttaa

SEQ ID NO: 18485 - DNA, 40 bp, Homo sapiens
ttaaaaaatttatttccattttaaatgtagaaaaactgct

SEQ ID NO: 18486 - DNA, 40 bp, Homo sapiens
gcagtttttctacatttaaaatggaaataaattttttaaa

SEQ ID NO: 18487 - DNA, 40 bp, Homo sapiens
tttaaaaaatttatttccattttaaatgtagaaaaactgc

SEQ ID NO: 18488 - DNA, 40 bp, Homo sapiens
cagtttttctacatttaaaatggaaataaattttttaaaa

SEQ ID NO: 18489 - DNA, 40 bp, Homo sapiens
ttttaaaaaatttatttccattttaaatgtagaaaaactg

SEQ ID NO: 18490 - DNA, 40 bp, Homo sapiens
agtttttctacatttaaaatggaaataaattttttaaaaa

SEQ ID NO: 18491 - DNA, 40 bp, Homo sapiens
tttttaaaaaatttatttccattttaaatgtagaaaaact

SEQ ID NO: 18492 - DNA, 40 bp, Homo sapiens
gtttttctacatttaaaatggaaataaattttttaaaaat

SEQ ID NO: 18493 - DNA, 40 bp, Homo sapiens
atttttaaaaaatttatttccattttaaatgtagaaaaac

SEQ ID NO: 18494 - DNA, 40 bp, Homo sapiens
tttttctacatttaaaatggaaataaattttttaaaaatt

SEQ ID NO: 18495 - DNA, 40 bp, Homo sapiens
aatttttaaaaaatttatttccattttaaatgtagaaaaa

SEQ ID NO: 18496 - DNA, 40 bp, Homo sapiens
ttttctacatttaaaatggaaataaattttttaaaaattt

SEQ ID NO: 18497 - DNA, 40 bp, Homo sapiens
aaatttttaaaaaatttatttccattttaaatgtagaaaa

SEQ ID NO: 18498 - DNA, 40 bp, Homo sapiens
tttctacatttaaaatggaaataaattttttaaaaattta

SEQ ID NO: 18499 - DNA, 40 bp, Homo sapiens
taaatttttaaaaaatttatttccattttaaatgtagaaa

SEQ ID NO: 18500 - DNA, 40 bp, Homo sapiens
ttctacatttaaaatggaaataaattttttaaaaatttaa

SEQ ID NO: 18501 - DNA, 40 bp, Homo sapiens
ttaaatttttaaaaaatttatttccattttaaatgtagaa

SEQ ID NO: 18502 - DNA, 40 bp, Homo sapiens
tctacatttaaaatggaaataaattttttaaaaatttaaa

SEQ ID NO: 18503 - DNA, 40 bp, Homo sapiens
tttaaatttttaaaaaatttatttccattttaaatgtaga

SEQ ID NO: 18504 - DNA, 40 bp, Homo sapiens
ctacatttaaaatggaaataaattttttaaaaatttaaat

SEQ ID NO: 18505 - DNA, 40 bp, Homo sapiens
atttaaatttttaaaaaatttatttccattttaaatgtag

SEQ ID NO: 18506 - DNA, 40 bp, Homo sapiens
tacatttaaaatggaaataaattttttaaaaatttaaatc

SEQ ID NO: 18507 - DNA, 40 bp, Homo sapiens
gatttaaatttttaaaaaatttatttccattttaaatgta

SEQ ID NO: 18508 - DNA, 40 bp, Homo sapiens
acatttaaaatggaaataaattttttaaaaatttaaatca

SEQ ID NO: 18509 - DNA, 40 bp, Homo sapiens
tgatttaaatttttaaaaaatttatttccattttaaatgt

SEQ ID NO: 18510 - DNA, 40 bp, Homo sapiens
catttaaaatggaaataaattttttaaaaatttaaatcaa

SEQ ID NO: 18511 - DNA, 40 bp, Homo sapiens
ttgatttaaatttttaaaaaatttatttccattttaaatg

SEQ ID NO: 18512 - DNA, 40 bp, Homo sapiens
atttaaaatggaaataaattttttaaaaatttaaatcaag

SEQ ID NO: 18513 - DNA, 40 bp, Homo sapiens
cttgatttaaatttttaaaaaatttatttccattttaaat

SEQ ID NO: 18514 - DNA, 40 bp, Homo sapiens
tttaaaatggaaataaattttttaaaaatttaaatcaagt

SEQ ID NO: 18515 - DNA, 40 bp, Homo sapiens
acttgatttaaatttttaaaaaatttatttccattttaaa

SEQ ID NO: 18516 - DNA, 40 bp, Homo sapiens
ttaaaatggaaataaattttttaaaaatttaaatcaagta

SEQ ID NO: 18517 - DNA, 40 bp, Homo sapiens
tacttgatttaaatttttaaaaaatttatttccattttaa

SEQ ID NO: 18518 - DNA, 40 bp, Homo sapiens
taaaatggaaataaattttttaaaaatttaaatcaagtaa

SEQ ID NO: 18519 - DNA, 40 bp, Homo sapiens
ttacttgatttaaatttttaaaaaatttatttccatttta

SEQ ID NO: 18520 - DNA, 40 bp, Homo sapiens
aaaatggaaataaattttttaaaaatttaaatcaagtaat

SEQ ID NO: 18521 - DNA, 40 bp, Homo sapiens
attacttgatttaaatttttaaaaaatttatttccatttt

SEQ ID NO: 18522 - DNA, 40 bp, Homo sapiens
aaatggaaataaattttttaaaaatttaaatcaagtaata

SEQ ID NO: 18523 - DNA, 40 bp, Homo sapiens
tattacttgatttaaatttttaaaaaatttatttccattt

SEQ ID NO: 18524 - DNA, 40 bp, Homo sapiens
aatggaaataaattttttaaaaatttaaatcaagtaatac

SEQ ID NO: 18525 - DNA, 40 bp, Homo sapiens
gtattacttgatttaaatttttaaaaaatttatttccatt

SEQ ID NO: 18526 - DNA, 40 bp, Homo sapiens
atggaaataaattttttaaaaatttaaatcaagtaatact

SEQ ID NO: 18527 - DNA, 40 bp, Homo sapiens
agtattacttgatttaaatttttaaaaaatttatttccat

SEQ ID NO: 18528 - DNA, 40 bp, Homo sapiens
tggaaataaattttttaaaaatttaaatcaagtaatactg

SEQ ID NO: 18529 - DNA, 40 bp, Homo sapiens
cagtattacttgatttaaatttttaaaaaatttatttcca

SEQ ID NO: 18530 - DNA, 40 bp, Homo sapiens
ggaaataaattttttaaaaatttaaatcaagtaatactgt

SEQ ID NO: 18531 - DNA, 40 bp, Homo sapiens
acagtattacttgatttaaatttttaaaaaatttatttcc

SEQ ID NO: 18532 - DNA, 40 bp, Homo sapiens
gaaataaattttttaaaaatttaaatcaagtaatactgta

SEQ ID NO: 18533 - DNA, 40 bp, Homo sapiens
tacagtattacttgatttaaatttttaaaaaatttatttc

SEQ ID NO: 18534 - DNA, 40 bp, Homo sapiens
aaataaattttttaaaaatttaaatcaagtaatactgtat

SEQ ID NO: 18535 - DNA, 40 bp, Homo sapiens
atacagtattacttgatttaaatttttaaaaaatttattt

SEQ ID NO: 18536 - DNA, 40 bp, Homo sapiens
aataaattttttaaaaatttaaatcaagtaatactgtatt

SEQ ID NO: 18537 - DNA, 40 bp, Homo sapiens
aatacagtattacttgatttaaatttttaaaaaatttatt

SEQ ID NO: 18538 - DNA, 40 bp, Homo sapiens
ataaattttttaaaaatttaaatcaagtaatactgtattt

SEQ ID NO: 18539 - DNA, 40 bp, Homo sapiens
aaatacagtattacttgatttaaatttttaaaaaatttat

SEQ ID NO: 18540 - DNA, 40 bp, Homo sapiens
taaattttttaaaaatttaaatcaagtaatactgtatttt

SEQ ID NO: 18541 - DNA, 40 bp, Homo sapiens
aaaatacagtattacttgatttaaatttttaaaaaattta

SEQ ID NO: 18542 - DNA, 40 bp, Homo sapiens
aaattttttaaaaatttaaatcaagtaatactgtattttt

SEQ ID NO: 18543 - DNA, 40 bp, Homo sapiens
aaaaatacagtattacttgatttaaatttttaaaaaattt

SEQ ID NO: 18544 - DNA, 40 bp, Homo sapiens
aattttttaaaaatttaaatcaagtaatactgtatttttt

SEQ ID NO: 18545 - DNA, 40 bp, Homo sapiens
aaaaaatacagtattacttgatttaaatttttaaaaaatt

SEQ ID NO: 18546 - DNA, 40 bp, Homo sapiens
attttttaaaaatttaaatcaagtaatactgtattttttg

SEQ ID NO: 18547 - DNA, 40 bp, Homo sapiens
caaaaaatacagtattacttgatttaaatttttaaaaaat

SEQ ID NO: 18548 - DNA, 40 bp, Homo sapiens
ttttttaaaaatttaaatcaagtaatactgtattttttgg

SEQ ID NO: 18549 - DNA, 40 bp, Homo sapiens
ccaaaaaatacagtattacttgatttaaatttttaaaaaa

SEQ ID NO: 18550 - DNA, 40 bp, Homo sapiens
tttttaaaaatttaaatcaagtaatactgtattttttggt

SEQ ID NO: 18551 - DNA, 40 bp, Homo sapiens
accaaaaaatacagtattacttgatttaaatttttaaaaa

SEQ ID NO: 18552 - DNA, 40 bp, Homo sapiens
ttttaaaaatttaaatcaagtaatactgtattttttggtg

SEQ ID NO: 18553 - DNA, 40 bp, Homo sapiens
caccaaaaaatacagtattacttgatttaaatttttaaaa

SEQ ID NO: 18554 - DNA, 40 bp, Homo sapiens
tttaaaaatttaaatcaagtaatactgtattttttggtga

SEQ ID NO: 18555 - DNA, 40 bp, Homo sapiens
tcaccaaaaaatacagtattacttgatttaaatttttaaa

SEQ ID NO: 18556 - DNA, 40 bp, Homo sapiens
ttaaaaatttaaatcaagtaatactgtattttttggtgat

SEQ ID NO: 18557 - DNA, 40 bp, Homo sapiens
atcaccaaaaaatacagtattacttgatttaaatttttaa

SEQ ID NO: 18558 - DNA, 40 bp, Homo sapiens
taaaaatttaaatcaagtaatactgtattttttggtgatt

SEQ ID NO: 18559 - DNA, 40 bp, Homo sapiens
aatcaccaaaaaatacagtattacttgatttaaattttta

SEQ ID NO: 18560 - DNA, 40 bp, Homo sapiens
aaaaatttaaatcaagtaatactgtattttttggtgattt

SEQ ID NO: 18561 - DNA, 40 bp, Homo sapiens
aaatcaccaaaaaatacagtattacttgatttaaattttt

SEQ ID NO: 18562 - DNA, 40 bp, Homo sapiens
aaaatttaaatcaagtaatactgtattttttggtgattta

SEQ ID NO: 18563 - DNA, 40 bp, Homo sapiens
taaatcaccaaaaaatacagtattacttgatttaaatttt

SEQ ID NO: 18564 - DNA, 40 bp, Homo sapiens
aaatttaaatcaagtaatactgtattttttggtgatttag

SEQ ID NO: 18565 - DNA, 40 bp, Homo sapiens
ctaaatcaccaaaaaatacagtattacttgatttaaattt

SEQ ID NO: 18566 - DNA, 40 bp, Homo sapiens
aatttaaatcaagtaatactgtattttttggtgatttaga

SEQ ID NO: 18567 - DNA, 40 bp, Homo sapiens
tctaaatcaccaaaaaatacagtattacttgatttaaatt

SEQ ID NO: 18568 - DNA, 40 bp, Homo sapiens
atttaaatcaagtaatactgtattttttggtgatttagat

SEQ ID NO: 18569 - DNA, 40 bp, Homo sapiens
atctaaatcaccaaaaaatacagtattacttgatttaaat

SEQ ID NO: 18570 - DNA, 40 bp, Homo sapiens
tttaaatcaagtaatactgtattttttggtgatttagatt

SEQ ID NO: 18571 - DNA, 40 bp, Homo sapiens
aatctaaatcaccaaaaaatacagtattacttgatttaaa

SEQ ID NO: 18572 - DNA, 40 bp, Homo sapiens
ttaaatcaagtaatactgtattttttggtgatttagattt

SEQ ID NO: 18573 - DNA, 40 bp, Homo sapiens
aaatctaaatcaccaaaaaatacagtattacttgatttaa

SEQ ID NO: 18574 - DNA, 40 bp, Homo sapiens
taaatcaagtaatactgtattttttggtgatttagatttt

SEQ ID NO: 18575 - DNA, 40 bp, Homo sapiens
aaaatctaaatcaccaaaaaatacagtattacttgattta

SEQ ID NO: 18576 - DNA, 40 bp, Homo sapiens
aaatcaagtaatactgtattttttggtgatttagattttt

SEQ ID NO: 18577 - DNA, 40 bp, Homo sapiens
aaaaatctaaatcaccaaaaaatacagtattacttgattt

SEQ ID NO: 18578 - DNA, 40 bp, Homo sapiens
aatcaagtaatactgtattttttggtgatttagatttttc

SEQ ID NO: 18579 - DNA, 40 bp, Homo sapiens
gaaaaatctaaatcaccaaaaaatacagtattacttgatt

SEQ ID NO: 18580 - DNA, 40 bp, Homo sapiens
atcaagtaatactgtattttttggtgatttagatttttca

SEQ ID NO: 18581 - DNA, 40 bp, Homo sapiens
tgaaaaatctaaatcaccaaaaaatacagtattacttgat

SEQ ID NO: 18582 - DNA, 40 bp, Homo sapiens
tcaagtaatactgtattttttggtgatttagatttttcaa

SEQ ID NO: 18583 - DNA, 40 bp, Homo sapiens
ttgaaaaatctaaatcaccaaaaaatacagtattacttga

SEQ ID NO: 18584 - DNA, 40 bp, Homo sapiens
caagtaatactgtattttttggtgatttagatttttcaaa

SEQ ID NO: 18585 - DNA, 40 bp, Homo sapiens
tttgaaaaatctaaatcaccaaaaaatacagtattacttg

SEQ ID NO: 18586 - DNA, 40 bp, Homo sapiens
aagtaatactgtattttttggtgatttagatttttcaaaa

SEQ ID NO: 18587 - DNA, 40 bp, Homo sapiens
ttttgaaaaatctaaatcaccaaaaaatacagtattactt

SEQ ID NO: 18588 - DNA, 40 bp, Homo sapiens
agtaatactgtattttttggtgatttagatttttcaaaat

SEQ ID NO: 18589 - DNA, 40 bp, Homo sapiens
attttgaaaaatctaaatcaccaaaaaatacagtattact

SEQ ID NO: 18590 - DNA, 40 bp, Homo sapiens
gtaatactgtattttttggtgatttagatttttcaaaatt

SEQ ID NO: 18591 - DNA, 40 bp, Homo sapiens
aattttgaaaaatctaaatcaccaaaaaatacagtattac

SEQ ID NO: 18592 - DNA, 40 bp, Homo sapiens
taatactgtattttttggtgatttagatttttcaaaattt

SEQ ID NO: 18593 - DNA, 40 bp, Homo sapiens
aaattttgaaaaatctaaatcaccaaaaaatacagtatta

SEQ ID NO: 18594 - DNA, 40 bp, Homo sapiens
aatactgtattttttggtgatttagatttttcaaaattta

SEQ ID NO: 18595 - DNA, 40 bp, Homo sapiens
taaattttgaaaaatctaaatcaccaaaaaatacagtatt

SEQ ID NO: 18596 - DNA, 40 bp, Homo sapiens
atactgtattttttggtgatttagatttttcaaaatttac

SEQ ID NO: 18597 - DNA, 40 bp, Homo sapiens
gtaaattttgaaaaatctaaatcaccaaaaaatacagtat

SEQ ID NO: 18598 - DNA, 40 bp, Homo sapiens
tactgtattttttggtgatttagatttttcaaaatttaca

SEQ ID NO: 18599 - DNA, 40 bp, Homo sapiens
tgtaaattttgaaaaatctaaatcaccaaaaaatacagta

SEQ ID NO: 18600 - DNA, 40 bp, Homo sapiens
actgtattttttggtgatttagatttttcaaaatttacac

SEQ ID NO: 18601 - DNA, 40 bp, Homo sapiens
gtgtaaattttgaaaaatctaaatcaccaaaaaatacagt

SEQ ID NO: 18602 - DNA, 40 bp, Homo sapiens
ctgtattttttggtgatttagatttttcaaaatttacact

SEQ ID NO: 18603 - DNA, 40 bp, Homo sapiens
agtgtaaattttgaaaaatctaaatcaccaaaaaatacag

SEQ ID NO: 18604 - DNA, 40 bp, Homo sapiens
tgtattttttggtgatttagatttttcaaaatttacacta

SEQ ID NO: 18605 - DNA, 40 bp, Homo sapiens
tagtgtaaattttgaaaaatctaaatcaccaaaaaataca

SEQ ID NO: 18606 - DNA, 40 bp, Homo sapiens
gtattttttggtgatttagatttttcaaaatttacactaa

SEQ ID NO: 18607 - DNA, 40 bp, Homo sapiens
ttagtgtaaattttgaaaaatctaaatcaccaaaaaatac

SEQ ID NO: 18608 - DNA, 40 bp, Homo sapiens
tattttttggtgatttagatttttcaaaatttacactaag

SEQ ID NO: 18609 - DNA, 40 bp, Homo sapiens
cttagtgtaaattttgaaaaatctaaatcaccaaaaaata

SEQ ID NO: 18610 - DNA, 40 bp, Homo sapiens
attttttggtgatttagatttttcaaaatttacactaaga

SEQ ID NO: 18611 - DNA, 40 bp, Homo sapiens
tcttagtgtaaattttgaaaaatctaaatcaccaaaaaat

SEQ ID NO: 18612 - DNA, 40 bp, Homo sapiens
ttttttggtgatttagatttttcaaaatttacactaagag

SEQ ID NO: 18613 - DNA, 40 bp, Homo sapiens
ctcttagtgtaaattttgaaaaatctaaatcaccaaaaaa

SEQ ID NO: 18614 - DNA, 40 bp, Homo sapiens
tttttggtgatttagatttttcaaaatttacactaagaga

SEQ ID NO: 18615 - DNA, 40 bp, Homo sapiens
tctcttagtgtaaattttgaaaaatctaaatcaccaaaaa

SEQ ID NO: 18616 - DNA, 40 bp, Homo sapiens
ttttggtgatttagatttttcaaaatttacactaagagat

SEQ ID NO: 18617 - DNA, 40 bp, Homo sapiens
atctcttagtgtaaattttgaaaaatctaaatcaccaaaa

SEQ ID NO: 18618 - DNA, 40 bp, Homo sapiens
tttggtgatttagatttttcaaaatttacactaagagata

SEQ ID NO: 18619 - DNA, 40 bp, Homo sapiens
tatctcttagtgtaaattttgaaaaatctaaatcaccaaa

SEQ ID NO: 18620 - DNA, 40 bp, Homo sapiens
ttggtgatttagatttttcaaaatttacactaagagatag

SEQ ID NO: 18621 - DNA, 40 bp, Homo sapiens
ctatctcttagtgtaaattttgaaaaatctaaatcaccaa

SEQ ID NO: 18622 - DNA, 40 bp, Homo sapiens
tggtgatttagatttttcaaaatttacactaagagatagt

SEQ ID NO: 18623 - DNA, 40 bp, Homo sapiens
actatctcttagtgtaaattttgaaaaatctaaatcacca

SEQ ID NO: 18624 - DNA, 40 bp, Homo sapiens
ggtgatttagatttttcaaaatttacactaagagatagta

SEQ ID NO: 18625 - DNA, 40 bp, Homo sapiens
tactatctcttagtgtaaattttgaaaaatctaaatcacc

SEQ ID NO: 18626 - DNA, 40 bp, Homo sapiens
gtgatttagatttttcaaaatttacactaagagatagtaa

SEQ ID NO: 18627 - DNA, 40 bp, Homo sapiens
ttactatctcttagtgtaaattttgaaaaatctaaatcac

SEQ ID NO: 18628 - DNA, 40 bp, Homo sapiens
tgatttagatttttcaaaatttacactaagagatagtaag

SEQ ID NO: 18629 - DNA, 40 bp, Homo sapiens
cttactatctcttagtgtaaattttgaaaaatctaaatca

SEQ ID NO: 18630 - DNA, 40 bp, Homo sapiens
gatttagatttttcaaaatttacactaagagatagtaagg

SEQ ID NO: 18631 - DNA, 40 bp, Homo sapiens
ccttactatctcttagtgtaaattttgaaaaatctaaatc

SEQ ID NO: 18632 - DNA, 40 bp, Homo sapiens
atttagatttttcaaaatttacactaagagatagtaagga

SEQ ID NO: 18633 - DNA, 40 bp, Homo sapiens
tccttactatctcttagtgtaaattttgaaaaatctaaat

SEQ ID NO: 18634 - DNA, 40 bp, Homo sapiens
tttagatttttcaaaatttacactaagagatagtaaggag

SEQ ID NO: 18635 - DNA, 40 bp, Homo sapiens
ctccttactatctcttagtgtaaattttgaaaaatctaaa

SEQ ID NO: 18636 - DNA, 40 bp, Homo sapiens
ttagatttttcaaaatttacactaagagatagtaaggagg

SEQ ID NO: 18637 - DNA, 40 bp, Homo sapiens
cctccttactatctcttagtgtaaattttgaaaaatctaa

SEQ ID NO: 18638 - DNA, 40 bp, Homo sapiens
tagatttttcaaaatttacactaagagatagtaaggaggg

SEQ ID NO: 18639 - DNA, 40 bp, Homo sapiens
ccctccttactatctcttagtgtaaattttgaaaaatcta

SEQ ID NO: 18640 - DNA, 40 bp, Homo sapiens
agatttttcaaaatttacactaagagatagtaaggagggt

SEQ ID NO: 18641 - DNA, 40 bp, Homo sapiens
accctccttactatctcttagtgtaaattttgaaaaatct

SEQ ID NO: 18642 - DNA, 40 bp, Homo sapiens
gatttttcaaaatttacactaagagatagtaaggagggtg

SEQ ID NO: 18643 - DNA, 40 bp, Homo sapiens
caccctccttactatctcttagtgtaaattttgaaaaatc

SEQ ID NO: 18644 - DNA, 40 bp, Homo sapiens
atttttcaaaatttacactaagagatagtaaggagggtgg

SEQ ID NO: 18645 - DNA, 40 bp, Homo sapiens
ccaccctccttactatctcttagtgtaaattttgaaaaat

SEQ ID NO: 18646 - DNA, 40 bp, Homo sapiens
tttttcaaaatttacactaagagatagtaaggagggtggc

SEQ ID NO: 18647 - DNA, 40 bp, Homo sapiens
gccaccctccttactatctcttagtgtaaattttgaaaaa

SEQ ID NO: 18648 - DNA, 40 bp, Homo sapiens
ttttcaaaatttacactaagagatagtaaggagggtggct

SEQ ID NO: 18649 - DNA, 40 bp, Homo sapiens
agccaccctccttactatctcttagtgtaaattttgaaaa

SEQ ID NO: 18650 - DNA, 40 bp, Homo sapiens
tttcaaaatttacactaagagatagtaaggagggtggcta

SEQ ID NO: 18651 - DNA, 40 bp, Homo sapiens
tagccaccctccttactatctcttagtgtaaattttgaaa

SEQ ID NO: 18652 - DNA, 40 bp, Homo sapiens
ttcaaaatttacactaagagatagtaaggagggtggctat

SEQ ID NO: 18653 - DNA, 40 bp, Homo sapiens
atagccaccctccttactatctcttagtgtaaattttgaa

SEQ ID NO: 18654 - DNA, 40 bp, Homo sapiens
tcaaaatttacactaagagatagtaaggagggtggctatt

SEQ ID NO: 18655 - DNA, 40 bp, Homo sapiens
aatagccaccctccttactatctcttagtgtaaattttga

SEQ ID NO: 18656 - DNA, 40 bp, Homo sapiens
caaaatttacactaagagatagtaaggagggtggctattg

SEQ ID NO: 18657 - DNA, 40 bp, Homo sapiens
caatagccaccctccttactatctcttagtgtaaattttg

SEQ ID NO: 18658 - DNA, 40 bp, Homo sapiens
aaaatttacactaagagatagtaaggagggtggctattgt

SEQ ID NO: 18659 - DNA, 40 bp, Homo sapiens
acaatagccaccctccttactatctcttagtgtaaatttt

SEQ ID NO: 18660 - DNA, 40 bp, Homo sapiens
aaatttacactaagagatagtaaggagggtggctattgtt

SEQ ID NO: 18661 - DNA, 40 bp, Homo sapiens
aacaatagccaccctccttactatctcttagtgtaaattt

SEQ ID NO: 18662 - DNA, 40 bp, Homo sapiens
aatttacactaagagatagtaaggagggtggctattgttt

SEQ ID NO: 18663 - DNA, 40 bp, Homo sapiens
aaacaatagccaccctccttactatctcttagtgtaaatt

SEQ ID NO: 18664 - DNA, 40 bp, Homo sapiens
atttacactaagagatagtaaggagggtggctattgtttc

SEQ ID NO: 18665 - DNA, 40 bp, Homo sapiens
gaaacaatagccaccctccttactatctcttagtgtaaat

SEQ ID NO: 18666 - DNA, 40 bp, Homo sapiens
tttacactaagagatagtaaggagggtggctattgtttct

SEQ ID NO: 18667 - DNA, 40 bp, Homo sapiens
agaaacaatagccaccctccttactatctcttagtgtaaa

SEQ ID NO: 18668 - DNA, 40 bp, Homo sapiens
ttacactaagagatagtaaggagggtggctattgtttctt

SEQ ID NO: 18669 - DNA, 40 bp, Homo sapiens
aagaaacaatagccaccctccttactatctcttagtgtaa

SEQ ID NO: 18670 - DNA, 40 bp, Homo sapiens
tacactaagagatagtaaggagggtggctattgtttcttt

SEQ ID NO: 18671 - DNA, 40 bp, Homo sapiens
aaagaaacaatagccaccctccttactatctcttagtgta

SEQ ID NO: 18672 - DNA, 40 bp, Homo sapiens
acactaagagatagtaaggagggtggctattgtttctttc

SEQ ID NO: 18673 - DNA, 40 bp, Homo sapiens
gaaagaaacaatagccaccctccttactatctcttagtgt

SEQ ID NO: 18674 - DNA, 40 bp, Homo sapiens
cactaagagatagtaaggagggtggctattgtttctttca

SEQ ID NO: 18675 - DNA, 40 bp, Homo sapiens
tgaaagaaacaatagccaccctccttactatctcttagtg

SEQ ID NO: 18676 - DNA, 40 bp, Homo sapiens
actaagagatagtaaggagggtggctattgtttctttcaa

SEQ ID NO: 18677 - DNA, 40 bp, Homo sapiens
ttgaaagaaacaatagccaccctccttactatctcttagt

SEQ ID NO: 18678 - DNA, 40 bp, Homo sapiens
ctaagagatagtaaggagggtggctattgtttctttcaat

SEQ ID NO: 18679 - DNA, 40 bp, Homo sapiens
attgaaagaaacaatagccaccctccttactatctcttag

SEQ ID NO: 18680 - DNA, 40 bp, Homo sapiens
taagagatagtaaggagggtggctattgtttctttcaata

SEQ ID NO: 18681 - DNA, 40 bp, Homo sapiens
tattgaaagaaacaatagccaccctccttactatctctta

SEQ ID NO: 18682 - DNA, 40 bp, Homo sapiens
aagagatagtaaggagggtggctattgtttctttcaataa

SEQ ID NO: 18683 - DNA, 40 bp, Homo sapiens
ttattgaaagaaacaatagccaccctccttactatctctt

SEQ ID NO: 18684 - DNA, 40 bp, Homo sapiens
agagatagtaaggagggtggctattgtttctttcaataat

SEQ ID NO: 18685 - DNA, 40 bp, Homo sapiens
attattgaaagaaacaatagccaccctccttactatctct

SEQ ID NO: 18686 - DNA, 40 bp, Homo sapiens
gagatagtaaggagggtggctattgtttctttcaataatg

SEQ ID NO: 18687 - DNA, 40 bp, Homo sapiens
cattattgaaagaaacaatagccaccctccttactatctc

SEQ ID NO: 18688 - DNA, 40 bp, Homo sapiens
agatagtaaggagggtggctattgtttctttcaataatgt

SEQ ID NO: 18689 - DNA, 40 bp, Homo sapiens
acattattgaaagaaacaatagccaccctccttactatct

SEQ ID NO: 18690 - DNA, 40 bp, Homo sapiens
gatagtaaggagggtggctattgtttctttcaataatgtc

SEQ ID NO: 18691 - DNA, 40 bp, Homo sapiens
gacattattgaaagaaacaatagccaccctccttactatc

SEQ ID NO: 18692 - DNA, 40 bp, Homo sapiens
atagtaaggagggtggctattgtttctttcaataatgtct

SEQ ID NO: 18693 - DNA, 40 bp, Homo sapiens
agacattattgaaagaaacaatagccaccctccttactat

SEQ ID NO: 18694 - DNA, 40 bp, Homo sapiens
tagtaaggagggtggctattgtttctttcaataatgtctc

SEQ ID NO: 18695 - DNA, 40 bp, Homo sapiens
gagacattattgaaagaaacaatagccaccctccttacta

SEQ ID NO: 18696 - DNA, 40 bp, Homo sapiens
agtaaggagggtggctattgtttctttcaataatgtctct

SEQ ID NO: 18697 - DNA, 40 bp, Homo sapiens
agagacattattgaaagaaacaatagccaccctccttact

SEQ ID NO: 18698 - DNA, 40 bp, Homo sapiens
gtaaggagggtggctattgtttctttcaataatgtctctg

SEQ ID NO: 18699 - DNA, 40 bp, Homo sapiens
cagagacattattgaaagaaacaatagccaccctccttac

SEQ ID NO: 18700 - DNA, 40 bp, Homo sapiens
taaggagggtggctattgtttctttcaataatgtctctga

SEQ ID NO: 18701 - DNA, 40 bp, Homo sapiens
tcagagacattattgaaagaaacaatagccaccctcctta

SEQ ID NO: 18702 - DNA, 40 bp, Homo sapiens
aaggagggtggctattgtttctttcaataatgtctctgag

SEQ ID NO: 18703 - DNA, 40 bp, Homo sapiens
ctcagagacattattgaaagaaacaatagccaccctcctt

SEQ ID NO: 18704 - DNA, 40 bp, Homo sapiens
aggagggtggctattgtttctttcaataatgtctctgaga

SEQ ID NO: 18705 - DNA, 40 bp, Homo sapiens
tctcagagacattattgaaagaaacaatagccaccctcct

SEQ ID NO: 18706 - DNA, 40 bp, Homo sapiens
ggagggtggctattgtttctttcaataatgtctctgagag

SEQ ID NO: 18707 - DNA, 40 bp, Homo sapiens
ctctcagagacattattgaaagaaacaatagccaccctcc

SEQ ID NO: 18708 - DNA, 40 bp, Homo sapiens
gagggtggctattgtttctttcaataatgtctctgagagg

SEQ ID NO: 18709 - DNA, 40 bp, Homo sapiens
cctctcagagacattattgaaagaaacaatagccaccctc

SEQ ID NO: 18710 - DNA, 40 bp, Homo sapiens
agggtggctattgtttctttcaataatgtctctgagaggt

SEQ ID NO: 18711 - DNA, 40 bp, Homo sapiens
acctctcagagacattattgaaagaaacaatagccaccct

SEQ ID NO: 18712 - DNA, 40 bp, Homo sapiens
gggtggctattgtttctttcaataatgtctctgagaggtt

SEQ ID NO: 18713 - DNA, 40 bp, Homo sapiens
aacctctcagagacattattgaaagaaacaatagccaccc

SEQ ID NO: 18714 - DNA, 40 bp, Homo sapiens
ggtggctattgtttctttcaataatgtctctgagaggttg

SEQ ID NO: 18715 - DNA, 40 bp, Homo sapiens
caacctctcagagacattattgaaagaaacaatagccacc

SEQ ID NO: 18716 - DNA, 40 bp, Homo sapiens
gtggctattgtttctttcaataatgtctctgagaggttgt

SEQ ID NO: 18717 - DNA, 40 bp, Homo sapiens
acaacctctcagagacattattgaaagaaacaatagccac

SEQ ID NO: 18718 - DNA, 40 bp, Homo sapiens
tggctattgtttctttcaataatgtctctgagaggttgta

SEQ ID NO: 18719 - DNA, 40 bp, Homo sapiens
tacaacctctcagagacattattgaaagaaacaatagcca

SEQ ID NO: 18720 - DNA, 40 bp, Homo sapiens
ggctattgtttctttcaataatgtctctgagaggttgtaa

SEQ ID NO: 18721 - DNA, 40 bp, Homo sapiens
ttacaacctctcagagacattattgaaagaaacaatagcc

SEQ ID NO: 18722 - DNA, 40 bp, Homo sapiens
gctattgtttctttcaataatgtctctgagaggttgtaac

SEQ ID NO: 18723 - DNA, 40 bp, Homo sapiens
gttacaacctctcagagacattattgaaagaaacaatagc

SEQ ID NO: 18724 - DNA, 40 bp, Homo sapiens
ctattgtttctttcaataatgtctctgagaggttgtaact

SEQ ID NO: 18725 - DNA, 40 bp, Homo sapiens
agttacaacctctcagagacattattgaaagaaacaatag

SEQ ID NO: 18726 - DNA, 40 bp, Homo sapiens
tattgtttctttcaataatgtctctgagaggttgtaactc

SEQ ID NO: 18727 - DNA, 40 bp, Homo sapiens
gagttacaacctctcagagacattattgaaagaaacaata

SEQ ID NO: 18728 - DNA, 40 bp, Homo sapiens
attgtttctttcaataatgtctctgagaggttgtaactca

SEQ ID NO: 18729 - DNA, 40 bp, Homo sapiens
tgagttacaacctctcagagacattattgaaagaaacaat

SEQ ID NO: 18730 - DNA, 40 bp, Homo sapiens
ttgtttctttcaataatgtctctgagaggttgtaactcat

SEQ ID NO: 18731 - DNA, 40 bp, Homo sapiens
atgagttacaacctctcagagacattattgaaagaaacaa

SEQ ID NO: 18732 - DNA, 40 bp, Homo sapiens
tgtttctttcaataatgtctctgagaggttgtaactcatc

SEQ ID NO: 18733 - DNA, 40 bp, Homo sapiens
gatgagttacaacctctcagagacattattgaaagaaaca

SEQ ID NO: 18734 - DNA, 40 bp, Homo sapiens
gtttctttcaataatgtctctgagaggttgtaactcatct

SEQ ID NO: 18735 - DNA, 40 bp, Homo sapiens
agatgagttacaacctctcagagacattattgaaagaaac

SEQ ID NO: 18736 - DNA, 40 bp, Homo sapiens
tttctttcaataatgtctctgagaggttgtaactcatcta

SEQ ID NO: 18737 - DNA, 40 bp, Homo sapiens
tagatgagttacaacctctcagagacattattgaaagaaa

SEQ ID NO: 18738 - DNA, 40 bp, Homo sapiens
ttctttcaataatgtctctgagaggttgtaactcatctaa

SEQ ID NO: 18739 - DNA, 40 bp, Homo sapiens
ttagatgagttacaacctctcagagacattattgaaagaa

SEQ ID NO: 18740 - DNA, 40 bp, Homo sapiens
tctttcaataatgtctctgagaggttgtaactcatctaag

SEQ ID NO: 18741 - DNA, 40 bp, Homo sapiens
cttagatgagttacaacctctcagagacattattgaaaga

SEQ ID NO: 18742 - DNA, 40 bp, Homo sapiens
ctttcaataatgtctctgagaggttgtaactcatctaagg

SEQ ID NO: 18743 - DNA, 40 bp, Homo sapiens
ccttagatgagttacaacctctcagagacattattgaaag

SEQ ID NO: 18744 - DNA, 40 bp, Homo sapiens
tttcaataatgtctctgagaggttgtaactcatctaagga

SEQ ID NO: 18745 - DNA, 40 bp, Homo sapiens
tccttagatgagttacaacctctcagagacattattgaaa

SEQ ID NO: 18746 - DNA, 40 bp, Homo sapiens
ttcaataatgtctctgagaggttgtaactcatctaaggat

SEQ ID NO: 18747 - DNA, 40 bp, Homo sapiens
atccttagatgagttacaacctctcagagacattattgaa

SEQ ID NO: 18748 - DNA, 40 bp, Homo sapiens
tcaataatgtctctgagaggttgtaactcatctaaggata

SEQ ID NO: 18749 - DNA, 40 bp, Homo sapiens
tatccttagatgagttacaacctctcagagacattattga

SEQ ID NO: 18750 - DNA, 40 bp, Homo sapiens
caataatgtctctgagaggttgtaactcatctaaggatac

SEQ ID NO: 18751 - DNA, 40 bp, Homo sapiens
gtatccttagatgagttacaacctctcagagacattattg

SEQ ID NO: 18752 - DNA, 40 bp, Homo sapiens
aataatgtctctgagaggttgtaactcatctaaggatacg

SEQ ID NO: 18753 - DNA, 40 bp, Homo sapiens
cgtatccttagatgagttacaacctctcagagacattatt

SEQ ID NO: 18754 - DNA, 40 bp, Homo sapiens
ataatgtctctgagaggttgtaactcatctaaggatacgt

SEQ ID NO: 18755 - DNA, 40 bp, Homo sapiens
acgtatccttagatgagttacaacctctcagagacattat

SEQ ID NO: 18756 - DNA, 40 bp, Homo sapiens
taatgtctctgagaggttgtaactcatctaaggatacgta

SEQ ID NO: 18757 - DNA, 40 bp, Homo sapiens
tacgtatccttagatgagttacaacctctcagagacatta

SEQ ID NO: 18758 - DNA, 40 bp, Homo sapiens
aatgtctctgagaggttgtaactcatctaaggatacgtag

SEQ ID NO: 18759 - DNA, 40 bp, Homo sapiens
ctacgtatccttagatgagttacaacctctcagagacatt

SEQ ID NO: 18760 - DNA, 40 bp, Homo sapiens
atgtctctgagaggttgtaactcatctaaggatacgtagc

SEQ ID NO: 18761 - DNA, 40 bp, Homo sapiens
gctacgtatccttagatgagttacaacctctcagagacat

SEQ ID NO: 18762 - DNA, 40 bp, Homo sapiens
tgtctctgagaggttgtaactcatctaaggatacgtagct

SEQ ID NO: 18763 - DNA, 40 bp, Homo sapiens
agctacgtatccttagatgagttacaacctctcagagaca

SEQ ID NO: 18764 - DNA, 40 bp, Homo sapiens
gtctctgagaggttgtaactcatctaaggatacgtagcta

SEQ ID NO: 18765 - DNA, 40 bp, Homo sapiens
tagctacgtatccttagatgagttacaacctctcagagac

SEQ ID NO: 18766 - DNA, 40 bp, Homo sapiens
tctctgagaggttgtaactcatctaaggatacgtagctaa

SEQ ID NO: 18767 - DNA, 40 bp, Homo sapiens
ttagctacgtatccttagatgagttacaacctctcagaga

SEQ ID NO: 18768 - DNA, 40 bp, Homo sapiens
ctctgagaggttgtaactcatctaaggatacgtagctaat

SEQ ID NO: 18769 - DNA, 40 bp, Homo sapiens
attagctacgtatccttagatgagttacaacctctcagag

SEQ ID NO: 18770 - DNA, 40 bp, Homo sapiens
tctgagaggttgtaactcatctaaggatacgtagctaata

SEQ ID NO: 18771 - DNA, 40 bp, Homo sapiens
tattagctacgtatccttagatgagttacaacctctcaga

SEQ ID NO: 18772 - DNA, 40 bp, Homo sapiens
ctgagaggttgtaactcatctaaggatacgtagctaataa

SEQ ID NO: 18773 - DNA, 40 bp, Homo sapiens
ttattagctacgtatccttagatgagttacaacctctcag

SEQ ID NO: 18774 - DNA, 40 bp, Homo sapiens
tgagaggttgtaactcatctaaggatacgtagctaataag

SEQ ID NO: 18775 - DNA, 40 bp, Homo sapiens
cttattagctacgtatccttagatgagttacaacctctca

SEQ ID NO: 18776 - DNA, 40 bp, Homo sapiens
gagaggttgtaactcatctaaggatacgtagctaataagt

SEQ ID NO: 18777 - DNA, 40 bp, Homo sapiens
acttattagctacgtatccttagatgagttacaacctctc

SEQ ID NO: 18778 - DNA, 40 bp, Homo sapiens
agaggttgtaactcatctaaggatacgtagctaataagtg

SEQ ID NO: 18779 - DNA, 40 bp, Homo sapiens
cacttattagctacgtatccttagatgagttacaacctct

SEQ ID NO: 18780 - DNA, 40 bp, Homo sapiens
gaggttgtaactcatctaaggatacgtagctaataagtgg

SEQ ID NO: 18781 - DNA, 40 bp, Homo sapiens
ccacttattagctacgtatccttagatgagttacaacctc

SEQ ID NO: 18782 - DNA, 40 bp, Homo sapiens
aggttgtaactcatctaaggatacgtagctaataagtggt

SEQ ID NO: 18783 - DNA, 40 bp, Homo sapiens
accacttattagctacgtatccttagatgagttacaacct

SEQ ID NO: 18784 - DNA, 40 bp, Homo sapiens
ggttgtaactcatctaaggatacgtagctaataagtggta

SEQ ID NO: 18785 - DNA, 40 bp, Homo sapiens
taccacttattagctacgtatccttagatgagttacaacc

SEQ ID NO: 18786 - DNA, 40 bp, Homo sapiens
gttgtaactcatctaaggatacgtagctaataagtggtag

SEQ ID NO: 18787 - DNA, 40 bp, Homo sapiens
ctaccacttattagctacgtatccttagatgagttacaac

SEQ ID NO: 18788 - DNA, 40 bp, Homo sapiens
ttgtaactcatctaaggatacgtagctaataagtggtagg

SEQ ID NO: 18789 - DNA, 40 bp, Homo sapiens
cctaccacttattagctacgtatccttagatgagttacaa

SEQ ID NO: 18790 - DNA, 40 bp, Homo sapiens
tgtaactcatctaaggatacgtagctaataagtggtagga

SEQ ID NO: 18791 - DNA, 40 bp, Homo sapiens
tcctaccacttattagctacgtatccttagatgagttaca

SEQ ID NO: 18792 - DNA, 40 bp, Homo sapiens
gtaactcatctaaggatacgtagctaataagtggtaggat

SEQ ID NO: 18793 - DNA, 40 bp, Homo sapiens
atcctaccacttattagctacgtatccttagatgagttac

SEQ ID NO: 18794 - DNA, 40 bp, Homo sapiens
taactcatctaaggatacgtagctaataagtggtaggatt

SEQ ID NO: 18795 - DNA, 40 bp, Homo sapiens
aatcctaccacttattagctacgtatccttagatgagtta

SEQ ID NO: 18796 - DNA, 40 bp, Homo sapiens
aactcatctaaggatacgtagctaataagtggtaggattt

SEQ ID NO: 18797 - DNA, 40 bp, Homo sapiens
aaatcctaccacttattagctacgtatccttagatgagtt

SEQ ID NO: 18798 - DNA, 40 bp, Homo sapiens
actcatctaaggatacgtagctaataagtggtaggatttc

SEQ ID NO: 18799 - DNA, 40 bp, Homo sapiens
gaaatcctaccacttattagctacgtatccttagatgagt

SEQ ID NO: 18800 - DNA, 40 bp, Homo sapiens
ctcatctaaggatacgtagctaataagtggtaggatttca

SEQ ID NO: 18801 - DNA, 40 bp, Homo sapiens
tgaaatcctaccacttattagctacgtatccttagatgag

SEQ ID NO: 18802 - DNA, 40 bp, Homo sapiens
tcatctaaggatacgtagctaataagtggtaggatttcaa

SEQ ID NO: 18803 - DNA, 40 bp, Homo sapiens
ttgaaatcctaccacttattagctacgtatccttagatga

SEQ ID NO: 18804 - DNA, 40 bp, Homo sapiens
catctaaggatacgtagctaataagtggtaggatttcaat

SEQ ID NO: 18805 - DNA, 40 bp, Homo sapiens
attgaaatcctaccacttattagctacgtatccttagatg

SEQ ID NO: 18806 - DNA, 40 bp, Homo sapiens
atctaaggatacgtagctaataagtggtaggatttcaatt

SEQ ID NO: 18807 - DNA, 40 bp, Homo sapiens
aattgaaatcctaccacttattagctacgtatccttagat

SEQ ID NO: 18808 - DNA, 40 bp, Homo sapiens
tctaaggatacgtagctaataagtggtaggatttcaattt

SEQ ID NO: 18809 - DNA, 40 bp, Homo sapiens
aaattgaaatcctaccacttattagctacgtatccttaga

SEQ ID NO: 18810 - DNA, 40 bp, Homo sapiens
ctaaggatacgtagctaataagtggtaggatttcaattta

SEQ ID NO: 18811 - DNA, 40 bp, Homo sapiens
taaattgaaatcctaccacttattagctacgtatccttag

SEQ ID NO: 18812 - DNA, 40 bp, Homo sapiens
taaggatacgtagctaataagtggtaggatttcaatttaa

SEQ ID NO: 18813 - DNA, 40 bp, Homo sapiens
ttaaattgaaatcctaccacttattagctacgtatcctta

SEQ ID NO: 18814 - DNA, 40 bp, Homo sapiens
aaggatacgtagctaataagtggtaggatttcaatttaaa

SEQ ID NO: 18815 - DNA, 40 bp, Homo sapiens
tttaaattgaaatcctaccacttattagctacgtatcctt

SEQ ID NO: 18816 - DNA, 40 bp, Homo sapiens
aggatacgtagctaataagtggtaggatttcaatttaaat

SEQ ID NO: 18817 - DNA, 40 bp, Homo sapiens
atttaaattgaaatcctaccacttattagctacgtatcct

SEQ ID NO: 18818 - DNA, 40 bp, Homo sapiens
ggatacgtagctaataagtggtaggatttcaatttaaatt

SEQ ID NO: 18819 - DNA, 40 bp, Homo sapiens
aatttaaattgaaatcctaccacttattagctacgtatcc

SEQ ID NO: 18820 - DNA, 40 bp, Homo sapiens
gatacgtagctaataagtggtaggatttcaatttaaattc

SEQ ID NO: 18821 - DNA, 40 bp, Homo sapiens
gaatttaaattgaaatcctaccacttattagctacgtatc

SEQ ID NO: 18822 - DNA, 40 bp, Homo sapiens
atacgtagctaataagtggtaggatttcaatttaaattct

SEQ ID NO: 18823 - DNA, 40 bp, Homo sapiens
agaatttaaattgaaatcctaccacttattagctacgtat

SEQ ID NO: 18824 - DNA, 40 bp, Homo sapiens
tacgtagctaataagtggtaggatttcaatttaaattctc

SEQ ID NO: 18825 - DNA, 40 bp, Homo sapiens
gagaatttaaattgaaatcctaccacttattagctacgta

SEQ ID NO: 18826 - DNA, 40 bp, Homo sapiens
acgtagctaataagtggtaggatttcaatttaaattctct

SEQ ID NO: 18827 - DNA, 40 bp, Homo sapiens
agagaatttaaattgaaatcctaccacttattagctacgt

SEQ ID NO: 18828 - DNA, 40 bp, Homo sapiens
cgtagctaataagtggtaggatttcaatttaaattctctg

SEQ ID NO: 18829 - DNA, 40 bp, Homo sapiens
cagagaatttaaattgaaatcctaccacttattagctacg

SEQ ID NO: 18830 - DNA, 40 bp, Homo sapiens
gtagctaataagtggtaggatttcaatttaaattctctga

SEQ ID NO: 18831 - DNA, 40 bp, Homo sapiens
tcagagaatttaaattgaaatcctaccacttattagctac

SEQ ID NO: 18832 - DNA, 40 bp, Homo sapiens
tagctaataagtggtaggatttcaatttaaattctctgag

SEQ ID NO: 18833 - DNA, 40 bp, Homo sapiens
ctcagagaatttaaattgaaatcctaccacttattagcta

SEQ ID NO: 18834 - DNA, 40 bp, Homo sapiens
agctaataagtggtaggatttcaatttaaattctctgaga

SEQ ID NO: 18835 - DNA, 40 bp, Homo sapiens
tctcagagaatttaaattgaaatcctaccacttattagct

SEQ ID NO: 18836 - DNA, 40 bp, Homo sapiens
gctaataagtggtaggatttcaatttaaattctctgagac

SEQ ID NO: 18837 - DNA, 40 bp, Homo sapiens
gtctcagagaatttaaattgaaatcctaccacttattagc

SEQ ID NO: 18838 - DNA, 40 bp, Homo sapiens
ctaataagtggtaggatttcaatttaaattctctgagacc

SEQ ID NO: 18839 - DNA, 40 bp, Homo sapiens
ggtctcagagaatttaaattgaaatcctaccacttattag

SEQ ID NO: 18840 - DNA, 40 bp, Homo sapiens
taataagtggtaggatttcaatttaaattctctgagacca

SEQ ID NO: 18841 - DNA, 40 bp, Homo sapiens
tggtctcagagaatttaaattgaaatcctaccacttatta

SEQ ID NO: 18842 - DNA, 40 bp, Homo sapiens
aataagtggtaggatttcaatttaaattctctgagaccaa

SEQ ID NO: 18843 - DNA, 40 bp, Homo sapiens
ttggtctcagagaatttaaattgaaatcctaccacttatt

SEQ ID NO: 18844 - DNA, 40 bp, Homo sapiens
ataagtggtaggatttcaatttaaattctctgagaccaag

SEQ ID NO: 18845 - DNA, 40 bp, Homo sapiens
cttggtctcagagaatttaaattgaaatcctaccacttat

SEQ ID NO: 18846 - DNA, 40 bp, Homo sapiens
taagtggtaggatttcaatttaaattctctgagaccaagt

SEQ ID NO: 18847 - DNA, 40 bp, Homo sapiens
acttggtctcagagaatttaaattgaaatcctaccactta

SEQ ID NO: 18848 - DNA, 40 bp, Homo sapiens
aagtggtaggatttcaatttaaattctctgagaccaagtt

SEQ ID NO: 18849 - DNA, 40 bp, Homo sapiens
aacttggtctcagagaatttaaattgaaatcctaccactt

SEQ ID NO: 18850 - DNA, 40 bp, Homo sapiens
agtggtaggatttcaatttaaattctctgagaccaagtta

SEQ ID NO: 18851 - DNA, 40 bp, Homo sapiens
taacttggtctcagagaatttaaattgaaatcctaccact

SEQ ID NO: 18852 - DNA, 40 bp, Homo sapiens
gtggtaggatttcaatttaaattctctgagaccaagttaa

SEQ ID NO: 18853 - DNA, 40 bp, Homo sapiens
ttaacttggtctcagagaatttaaattgaaatcctaccac

SEQ ID NO: 18854 - DNA, 40 bp, Homo sapiens
tggtaggatttcaatttaaattctctgagaccaagttaag

SEQ ID NO: 18855 - DNA, 40 bp, Homo sapiens
cttaacttggtctcagagaatttaaattgaaatcctacca

SEQ ID NO: 18856 - DNA, 40 bp, Homo sapiens
ggtaggatttcaatttaaattctctgagaccaagttaagt

SEQ ID NO: 18857 - DNA, 40 bp, Homo sapiens
acttaacttggtctcagagaatttaaattgaaatcctacc

SEQ ID NO: 18858 - DNA, 40 bp, Homo sapiens
gtaggatttcaatttaaattctctgagaccaagttaagta

SEQ ID NO: 18859 - DNA, 40 bp, Homo sapiens
tacttaacttggtctcagagaatttaaattgaaatcctac

SEQ ID NO: 18860 - DNA, 40 bp, Homo sapiens
taggatttcaatttaaattctctgagaccaagttaagtag

SEQ ID NO: 18861 - DNA, 40 bp, Homo sapiens
ctacttaacttggtctcagagaatttaaattgaaatccta

SEQ ID NO: 18862 - DNA, 40 bp, Homo sapiens
aggatttcaatttaaattctctgagaccaagttaagtaga

SEQ ID NO: 18863 - DNA, 40 bp, Homo sapiens
tctacttaacttggtctcagagaatttaaattgaaatcct

SEQ ID NO: 18864 - DNA, 40 bp, Homo sapiens
ggatttcaatttaaattctctgagaccaagttaagtagaa

SEQ ID NO: 18865 - DNA, 40 bp, Homo sapiens
ttctacttaacttggtctcagagaatttaaattgaaatcc

SEQ ID NO: 18866 - DNA, 40 bp, Homo sapiens
gatttcaatttaaattctctgagaccaagttaagtagaat

SEQ ID NO: 18867 - DNA, 40 bp, Homo sapiens
attctacttaacttggtctcagagaatttaaattgaaatc

SEQ ID NO: 18868 - DNA, 40 bp, Homo sapiens
atttcaatttaaattctctgagaccaagttaagtagaatt

SEQ ID NO: 18869 - DNA, 40 bp, Homo sapiens
aattctacttaacttggtctcagagaatttaaattgaaat

SEQ ID NO: 18870 - DNA, 40 bp, Homo sapiens
tttcaatttaaattctctgagaccaagttaagtagaattt

SEQ ID NO: 18871 - DNA, 40 bp, Homo sapiens
aaattctacttaacttggtctcagagaatttaaattgaaa

SEQ ID NO: 18872 - DNA, 40 bp, Homo sapiens
ttcaatttaaattctctgagaccaagttaagtagaatttg

SEQ ID NO: 18873 - DNA, 40 bp, Homo sapiens
caaattctacttaacttggtctcagagaatttaaattgaa

SEQ ID NO: 18874 - DNA, 40 bp, Homo sapiens
tcaatttaaattctctgagaccaagttaagtagaatttgc

SEQ ID NO: 18875 - DNA, 40 bp, Homo sapiens
gcaaattctacttaacttggtctcagagaatttaaattga

SEQ ID NO: 18876 - DNA, 40 bp, Homo sapiens
caatttaaattctctgagaccaagttaagtagaatttgca

SEQ ID NO: 18877 - DNA, 40 bp, Homo sapiens
tgcaaattctacttaacttggtctcagagaatttaaattg

SEQ ID NO: 18878 - DNA, 40 bp, Homo sapiens
aatttaaattctctgagaccaagttaagtagaatttgcac

SEQ ID NO: 18879 - DNA, 40 bp, Homo sapiens
gtgcaaattctacttaacttggtctcagagaatttaaatt

SEQ ID NO: 18880 - DNA, 40 bp, Homo sapiens
atttaaattctctgagaccaagttaagtagaatttgcact

SEQ ID NO: 18881 - DNA, 40 bp, Homo sapiens
agtgcaaattctacttaacttggtctcagagaatttaaat

SEQ ID NO: 18882 - DNA, 40 bp, Homo sapiens
tttaaattctctgagaccaagttaagtagaatttgcactg

SEQ ID NO: 18883 - DNA, 40 bp, Homo sapiens
cagtgcaaattctacttaacttggtctcagagaatttaaa

SEQ ID NO: 18884 - DNA, 40 bp, Homo sapiens
ttaaattctctgagaccaagttaagtagaatttgcactgt

SEQ ID NO: 18885 - DNA, 40 bp, Homo sapiens
acagtgcaaattctacttaacttggtctcagagaatttaa

SEQ ID NO: 18886 - DNA, 40 bp, Homo sapiens
taaattctctgagaccaagttaagtagaatttgcactgta

SEQ ID NO: 18887 - DNA, 40 bp, Homo sapiens
tacagtgcaaattctacttaacttggtctcagagaattta

SEQ ID NO: 18888 - DNA, 40 bp, Homo sapiens
aaattctctgagaccaagttaagtagaatttgcactgtac

SEQ ID NO: 18889 - DNA, 40 bp, Homo sapiens
gtacagtgcaaattctacttaacttggtctcagagaattt

SEQ ID NO: 18890 - DNA, 40 bp, Homo sapiens
aattctctgagaccaagttaagtagaatttgcactgtact

SEQ ID NO: 18891 - DNA, 40 bp, Homo sapiens
agtacagtgcaaattctacttaacttggtctcagagaatt

SEQ ID NO: 18892 - DNA, 40 bp, Homo sapiens
attctctgagaccaagttaagtagaatttgcactgtactc

SEQ ID NO: 18893 - DNA, 40 bp, Homo sapiens
gagtacagtgcaaattctacttaacttggtctcagagaat

SEQ ID NO: 18894 - DNA, 40 bp, Homo sapiens
ttctctgagaccaagttaagtagaatttgcactgtactct

SEQ ID NO: 18895 - DNA, 40 bp, Homo sapiens
agagtacagtgcaaattctacttaacttggtctcagagaa

SEQ ID NO: 18896 - DNA, 40 bp, Homo sapiens
tctctgagaccaagttaagtagaatttgcactgtactctt

SEQ ID NO: 18897 - DNA, 40 bp, Homo sapiens
aagagtacagtgcaaattctacttaacttggtctcagaga

SEQ ID NO: 18898 - DNA, 40 bp, Homo sapiens
ctctgagaccaagttaagtagaatttgcactgtactcttg

SEQ ID NO: 18899 - DNA, 40 bp, Homo sapiens
caagagtacagtgcaaattctacttaacttggtctcagag

SEQ ID NO: 18900 - DNA, 40 bp, Homo sapiens
tctgagaccaagttaagtagaatttgcactgtactcttgt

SEQ ID NO: 18901 - DNA, 40 bp, Homo sapiens
acaagagtacagtgcaaattctacttaacttggtctcaga

SEQ ID NO: 18902 - DNA, 40 bp, Homo sapiens
ctgagaccaagttaagtagaatttgcactgtactcttgta

SEQ ID NO: 18903 - DNA, 40 bp, Homo sapiens
tacaagagtacagtgcaaattctacttaacttggtctcag

SEQ ID NO: 18904 - DNA, 40 bp, Homo sapiens
tgagaccaagttaagtagaatttgcactgtactcttgtat

SEQ ID NO: 18905 - DNA, 40 bp, Homo sapiens
atacaagagtacagtgcaaattctacttaacttggtctca

SEQ ID NO: 18906 - DNA, 40 bp, Homo sapiens
gagaccaagttaagtagaatttgcactgtactcttgtata

SEQ ID NO: 18907 - DNA, 40 bp, Homo sapiens
tatacaagagtacagtgcaaattctacttaacttggtctc

SEQ ID NO: 18908 - DNA, 40 bp, Homo sapiens
agaccaagttaagtagaatttgcactgtactcttgtataa

SEQ ID NO: 18909 - DNA, 40 bp, Homo sapiens
ttatacaagagtacagtgcaaattctacttaacttggtct

SEQ ID NO: 18910 - DNA, 40 bp, Homo sapiens
gaccaagttaagtagaatttgcactgtactcttgtataac

SEQ ID NO: 18911 - DNA, 40 bp, Homo sapiens
gttatacaagagtacagtgcaaattctacttaacttggtc

SEQ ID NO: 18912 - DNA, 40 bp, Homo sapiens
accaagttaagtagaatttgcactgtactcttgtataact

SEQ ID NO: 18913 - DNA, 40 bp, Homo sapiens
agttatacaagagtacagtgcaaattctacttaacttggt

SEQ ID NO: 18914 - DNA, 40 bp, Homo sapiens
ccaagttaagtagaatttgcactgtactcttgtataactt

SEQ ID NO: 18915 - DNA, 40 bp, Homo sapiens
aagttatacaagagtacagtgcaaattctacttaacttgg

SEQ ID NO: 18916 - DNA, 40 bp, Homo sapiens
caagttaagtagaatttgcactgtactcttgtataacttt

SEQ ID NO: 18917 - DNA, 40 bp, Homo sapiens
aaagttatacaagagtacagtgcaaattctacttaacttg

SEQ ID NO: 18918 - DNA, 40 bp, Homo sapiens
aagttaagtagaatttgcactgtactcttgtataactttt

SEQ ID NO: 18919 - DNA, 40 bp, Homo sapiens
aaaagttatacaagagtacagtgcaaattctacttaactt

SEQ ID NO: 18920 - DNA, 40 bp, Homo sapiens
agttaagtagaatttgcactgtactcttgtataacttttt

SEQ ID NO: 18921 - DNA, 40 bp, Homo sapiens
aaaaagttatacaagagtacagtgcaaattctacttaact

SEQ ID NO: 18922 - DNA, 40 bp, Homo sapiens
gttaagtagaatttgcactgtactcttgtataacttttta

SEQ ID NO: 18923 - DNA, 40 bp, Homo sapiens
taaaaagttatacaagagtacagtgcaaattctacttaac

SEQ ID NO: 18924 - DNA, 40 bp, Homo sapiens
ttaagtagaatttgcactgtactcttgtataactttttaa

SEQ ID NO: 18925 - DNA, 40 bp, Homo sapiens
ttaaaaagttatacaagagtacagtgcaaattctacttaa

SEQ ID NO: 18926 - DNA, 40 bp, Homo sapiens
taagtagaatttgcactgtactcttgtataactttttaaa

SEQ ID NO: 18927 - DNA, 40 bp, Homo sapiens
tttaaaaagttatacaagagtacagtgcaaattctactta

SEQ ID NO: 18928 - DNA, 40 bp, Homo sapiens
aagtagaatttgcactgtactcttgtataactttttaaaa

SEQ ID NO: 18929 - DNA, 40 bp, Homo sapiens
ttttaaaaagttatacaagagtacagtgcaaattctactt

SEQ ID NO: 18930 - DNA, 40 bp, Homo sapiens
agtagaatttgcactgtactcttgtataactttttaaaac

SEQ ID NO: 18931 - DNA, 40 bp, Homo sapiens
gttttaaaaagttatacaagagtacagtgcaaattctact

SEQ ID NO: 18932 - DNA, 40 bp, Homo sapiens
gtagaatttgcactgtactcttgtataactttttaaaact

SEQ ID NO: 18933 - DNA, 40 bp, Homo sapiens
agttttaaaaagttatacaagagtacagtgcaaattctac

SEQ ID NO: 18934 - DNA, 40 bp, Homo sapiens
tagaatttgcactgtactcttgtataactttttaaaactg

SEQ ID NO: 18935 - DNA, 40 bp, Homo sapiens
cagttttaaaaagttatacaagagtacagtgcaaattcta

SEQ ID NO: 18936 - DNA, 40 bp, Homo sapiens
agaatttgcactgtactcttgtataactttttaaaactga

SEQ ID NO: 18937 - DNA, 40 bp, Homo sapiens
tcagttttaaaaagttatacaagagtacagtgcaaattct

SEQ ID NO: 18938 - DNA, 40 bp, Homo sapiens
gaatttgcactgtactcttgtataactttttaaaactgaa

SEQ ID NO: 18939 - DNA, 40 bp, Homo sapiens
ttcagttttaaaaagttatacaagagtacagtgcaaattc

SEQ ID NO: 18940 - DNA, 40 bp, Homo sapiens
aatttgcactgtactcttgtataactttttaaaactgaaa

SEQ ID NO: 18941 - DNA, 40 bp, Homo sapiens
tttcagttttaaaaagttatacaagagtacagtgcaaatt

SEQ ID NO: 18942 - DNA, 40 bp, Homo sapiens
atttgcactgtactcttgtataactttttaaaactgaaaa

SEQ ID NO: 18943 - DNA, 40 bp, Homo sapiens
ttttcagttttaaaaagttatacaagagtacagtgcaaat

SEQ ID NO: 18944 - DNA, 40 bp, Homo sapiens
tttgcactgtactcttgtataactttttaaaactgaaaat

SEQ ID NO: 18945 - DNA, 40 bp, Homo sapiens
attttcagttttaaaaagttatacaagagtacagtgcaaa

SEQ ID NO: 18946 - DNA, 40 bp, Homo sapiens
ttgcactgtactcttgtataactttttaaaactgaaaatt

SEQ ID NO: 18947 - DNA, 40 bp, Homo sapiens
aattttcagttttaaaaagttatacaagagtacagtgcaa

SEQ ID NO: 18948 - DNA, 40 bp, Homo sapiens
tgcactgtactcttgtataactttttaaaactgaaaatta

SEQ ID NO: 18949 - DNA, 40 bp, Homo sapiens
taattttcagttttaaaaagttatacaagagtacagtgca

SEQ ID NO: 18950 - DNA, 40 bp, Homo sapiens
gcactgtactcttgtataactttttaaaactgaaaattag

SEQ ID NO: 18951 - DNA, 40 bp, Homo sapiens
ctaattttcagttttaaaaagttatacaagagtacagtgc

SEQ ID NO: 18952 - DNA, 40 bp, Homo sapiens
cactgtactcttgtataactttttaaaactgaaaattagc

SEQ ID NO: 18953 - DNA, 40 bp, Homo sapiens
gctaattttcagttttaaaaagttatacaagagtacagtg

SEQ ID NO: 18954 - DNA, 40 bp, Homo sapiens
actgtactcttgtataactttttaaaactgaaaattagct

SEQ ID NO: 18955 - DNA, 40 bp, Homo sapiens
agctaattttcagttttaaaaagttatacaagagtacagt

SEQ ID NO: 18956 - DNA, 40 bp, Homo sapiens
ctgtactcttgtataactttttaaaactgaaaattagcta

SEQ ID NO: 18957 - DNA, 40 bp, Homo sapiens
tagctaattttcagttttaaaaagttatacaagagtacag

SEQ ID NO: 18958 - DNA, 40 bp, Homo sapiens
tgtactcttgtataactttttaaaactgaaaattagctat

SEQ ID NO: 18959 - DNA, 40 bp, Homo sapiens
atagctaattttcagttttaaaaagttatacaagagtaca

SEQ ID NO: 18960 - DNA, 40 bp, Homo sapiens
gtactcttgtataactttttaaaactgaaaattagctatc

SEQ ID NO: 18961 - DNA, 40 bp, Homo sapiens
gatagctaattttcagttttaaaaagttatacaagagtac

SEQ ID NO: 18962 - DNA, 40 bp, Homo sapiens
tactcttgtataactttttaaaactgaaaattagctatct

SEQ ID NO: 18963 - DNA, 40 bp, Homo sapiens
agatagctaattttcagttttaaaaagttatacaagagta

SEQ ID NO: 18964 - DNA, 40 bp, Homo sapiens
actcttgtataactttttaaaactgaaaattagctatctt

SEQ ID NO: 18965 - DNA, 40 bp, Homo sapiens
aagatagctaattttcagttttaaaaagttatacaagagt

SEQ ID NO: 18966 - DNA, 40 bp, Homo sapiens
ctcttgtataactttttaaaactgaaaattagctatcttt

SEQ ID NO: 18967 - DNA, 40 bp, Homo sapiens
aaagatagctaattttcagttttaaaaagttatacaagag

SEQ ID NO: 18968 - DNA, 40 bp, Homo sapiens
tcttgtataactttttaaaactgaaaattagctatctttc

SEQ ID NO: 18969 - DNA, 40 bp, Homo sapiens
gaaagatagctaattttcagttttaaaaagttatacaaga

SEQ ID NO: 18970 - DNA, 40 bp, Homo sapiens
cttgtataactttttaaaactgaaaattagctatctttca

SEQ ID NO: 18971 - DNA, 40 bp, Homo sapiens
tgaaagatagctaattttcagttttaaaaagttatacaag

SEQ ID NO: 18972 - DNA, 40 bp, Homo sapiens
ttgtataactttttaaaactgaaaattagctatctttcaa

SEQ ID NO: 18973 - DNA, 40 bp, Homo sapiens
ttgaaagatagctaattttcagttttaaaaagttatacaa

SEQ ID NO: 18974 - DNA, 40 bp, Homo sapiens
tgtataactttttaaaactgaaaattagctatctttcaaa

SEQ ID NO: 18975 - DNA, 40 bp, Homo sapiens
tttgaaagatagctaattttcagttttaaaaagttataca

SEQ ID NO: 18976 - DNA, 40 bp, Homo sapiens
gtataactttttaaaactgaaaattagctatctttcaaat

SEQ ID NO: 18977 - DNA, 40 bp, Homo sapiens
atttgaaagatagctaattttcagttttaaaaagttatac

SEQ ID NO: 18978 - DNA, 40 bp, Homo sapiens
tataactttttaaaactgaaaattagctatctttcaaatt

SEQ ID NO: 18979 - DNA, 40 bp, Homo sapiens
aatttgaaagatagctaattttcagttttaaaaagttata

SEQ ID NO: 18980 - DNA, 40 bp, Homo sapiens
ataactttttaaaactgaaaattagctatctttcaaatta

SEQ ID NO: 18981 - DNA, 40 bp, Homo sapiens
taatttgaaagatagctaattttcagttttaaaaagttat

SEQ ID NO: 18982 - DNA, 40 bp, Homo sapiens
taactttttaaaactgaaaattagctatctttcaaattaa

SEQ ID NO: 18983 - DNA, 40 bp, Homo sapiens
ttaatttgaaagatagctaattttcagttttaaaaagtta

SEQ ID NO: 18984 - DNA, 40 bp, Homo sapiens
aactttttaaaactgaaaattagctatctttcaaattaag

SEQ ID NO: 18985 - DNA, 40 bp, Homo sapiens
cttaatttgaaagatagctaattttcagttttaaaaagtt

SEQ ID NO: 18986 - DNA, 40 bp, Homo sapiens
actttttaaaactgaaaattagctatctttcaaattaaga

SEQ ID NO: 18987 - DNA, 40 bp, Homo sapiens
tcttaatttgaaagatagctaattttcagttttaaaaagt

SEQ ID NO: 18988 - DNA, 40 bp, Homo sapiens
ctttttaaaactgaaaattagctatctttcaaattaagaa

SEQ ID NO: 18989 - DNA, 40 bp, Homo sapiens
ttcttaatttgaaagatagctaattttcagttttaaaaag

SEQ ID NO: 18990 - DNA, 40 bp, Homo sapiens
tttttaaaactgaaaattagctatctttcaaattaagaaa

SEQ ID NO: 18991 - DNA, 40 bp, Homo sapiens
tttcttaatttgaaagatagctaattttcagttttaaaaa

SEQ ID NO: 18992 - DNA, 40 bp, Homo sapiens
ttttaaaactgaaaattagctatctttcaaattaagaaaa

SEQ ID NO: 18993 - DNA, 40 bp, Homo sapiens
ttttcttaatttgaaagatagctaattttcagttttaaaa

SEQ ID NO: 18994 - DNA, 40 bp, Homo sapiens
tttaaaactgaaaattagctatctttcaaattaagaaaat

SEQ ID NO: 18995 - DNA, 40 bp, Homo sapiens
attttcttaatttgaaagatagctaattttcagttttaaa

SEQ ID NO: 18996 - DNA, 40 bp, Homo sapiens
ttaaaactgaaaattagctatctttcaaattaagaaaata

SEQ ID NO: 18997 - DNA, 40 bp, Homo sapiens
tattttcttaatttgaaagatagctaattttcagttttaa

SEQ ID NO: 18998 - DNA, 40 bp, Homo sapiens
taaaactgaaaattagctatctttcaaattaagaaaatat

SEQ ID NO: 18999 - DNA, 40 bp, Homo sapiens
atattttcttaatttgaaagatagctaattttcagtttta

SEQ ID NO: 19000 - DNA, 40 bp, Homo sapiens
aaaactgaaaattagctatctttcaaattaagaaaatatt

SEQ ID NO: 19001 - DNA, 40 bp, Homo sapiens
aatattttcttaatttgaaagatagctaattttcagtttt

SEQ ID NO: 19002 - DNA, 40 bp, Homo sapiens
aaactgaaaattagctatctttcaaattaagaaaatattt

SEQ ID NO: 19003 - DNA, 40 bp, Homo sapiens
aaatattttcttaatttgaaagatagctaattttcagttt

SEQ ID NO: 19004 - DNA, 40 bp, Homo sapiens
aactgaaaattagctatctttcaaattaagaaaatattta

SEQ ID NO: 19005 - DNA, 40 bp, Homo sapiens
taaatattttcttaatttgaaagatagctaattttcagtt

SEQ ID NO: 19006 - DNA, 40 bp, Homo sapiens
actgaaaattagctatctttcaaattaagaaaatatttac

SEQ ID NO: 19007 - DNA, 40 bp, Homo sapiens
gtaaatattttcttaatttgaaagatagctaattttcagt

SEQ ID NO: 19008 - DNA, 40 bp, Homo sapiens
ctgaaaattagctatctttcaaattaagaaaatatttact

SEQ ID NO: 19009 - DNA, 40 bp, Homo sapiens
agtaaatattttcttaatttgaaagatagctaattttcag

SEQ ID NO: 19010 - DNA, 40 bp, Homo sapiens
tgaaaattagctatctttcaaattaagaaaatatttacta

SEQ ID NO: 19011 - DNA, 40 bp, Homo sapiens
tagtaaatattttcttaatttgaaagatagctaattttca

SEQ ID NO: 19012 - DNA, 40 bp, Homo sapiens
gaaaattagctatctttcaaattaagaaaatatttactaa

SEQ ID NO: 19013 - DNA, 40 bp, Homo sapiens
ttagtaaatattttcttaatttgaaagatagctaattttc

SEQ ID NO: 19014 - DNA, 40 bp, Homo sapiens
aaaattagctatctttcaaattaagaaaatatttactaat

SEQ ID NO: 19015 - DNA, 40 bp, Homo sapiens
attagtaaatattttcttaatttgaaagatagctaatttt

SEQ ID NO: 19016 - DNA, 40 bp, Homo sapiens
aaattagctatctttcaaattaagaaaatatttactaatg

SEQ ID NO: 19017 - DNA, 40 bp, Homo sapiens
cattagtaaatattttcttaatttgaaagatagctaattt

SEQ ID NO: 19018 - DNA, 40 bp, Homo sapiens
aattagctatctttcaaattaagaaaatatttactaatgg

SEQ ID NO: 19019 - DNA, 40 bp, Homo sapiens
ccattagtaaatattttcttaatttgaaagatagctaatt

SEQ ID NO: 19020 - DNA, 40 bp, Homo sapiens
attagctatctttcaaattaagaaaatatttactaatgga

SEQ ID NO: 19021 - DNA, 40 bp, Homo sapiens
tccattagtaaatattttcttaatttgaaagatagctaat

SEQ ID NO: 19022 - DNA, 40 bp, Homo sapiens
ttagctatctttcaaattaagaaaatatttactaatggag

SEQ ID NO: 19023 - DNA, 40 bp, Homo sapiens
ctccattagtaaatattttcttaatttgaaagatagctaa

SEQ ID NO: 19024 - DNA, 40 bp, Homo sapiens
tagctatctttcaaattaagaaaatatttactaatggaga

SEQ ID NO: 19025 - DNA, 40 bp, Homo sapiens
tctccattagtaaatattttcttaatttgaaagatagcta

SEQ ID NO: 19026 - DNA, 40 bp, Homo sapiens
agctatctttcaaattaagaaaatatttactaatggagac

SEQ ID NO: 19027 - DNA, 40 bp, Homo sapiens
gtctccattagtaaatattttcttaatttgaaagatagct

SEQ ID NO: 19028 - DNA, 40 bp, Homo sapiens
gctatctttcaaattaagaaaatatttactaatggagact

SEQ ID NO: 19029 - DNA, 40 bp, Homo sapiens
agtctccattagtaaatattttcttaatttgaaagatagc

SEQ ID NO: 19030 - DNA, 40 bp, Homo sapiens
ctatctttcaaattaagaaaatatttactaatggagacta

SEQ ID NO: 19031 - DNA, 40 bp, Homo sapiens
tagtctccattagtaaatattttcttaatttgaaagatag

SEQ ID NO: 19032 - DNA, 40 bp, Homo sapiens
tatctttcaaattaagaaaatatttactaatggagactaa

SEQ ID NO: 19033 - DNA, 40 bp, Homo sapiens
ttagtctccattagtaaatattttcttaatttgaaagata

SEQ ID NO: 19034 - DNA, 40 bp, Homo sapiens
atctttcaaattaagaaaatatttactaatggagactaat

SEQ ID NO: 19035 - DNA, 40 bp, Homo sapiens
attagtctccattagtaaatattttcttaatttgaaagat

SEQ ID NO: 19036 - DNA, 40 bp, Homo sapiens
tctttcaaattaagaaaatatttactaatggagactaatt

SEQ ID NO: 19037 - DNA, 40 bp, Homo sapiens
aattagtctccattagtaaatattttcttaatttgaaaga

SEQ ID NO: 19038 - DNA, 40 bp, Homo sapiens
ctttcaaattaagaaaatatttactaatggagactaattc

SEQ ID NO: 19039 - DNA, 40 bp, Homo sapiens
gaattagtctccattagtaaatattttcttaatttgaaag

SEQ ID NO: 19040 - DNA, 40 bp, Homo sapiens
tttcaaattaagaaaatatttactaatggagactaattca

SEQ ID NO: 19041 - DNA, 40 bp, Homo sapiens
tgaattagtctccattagtaaatattttcttaatttgaaa

SEQ ID NO: 19042 - DNA, 40 bp, Homo sapiens
ttcaaattaagaaaatatttactaatggagactaattcag

SEQ ID NO: 19043 - DNA, 40 bp, Homo sapiens
ctgaattagtctccattagtaaatattttcttaatttgaa

SEQ ID NO: 19044 - DNA, 40 bp, Homo sapiens
tcaaattaagaaaatatttactaatggagactaattcaga

SEQ ID NO: 19045 - DNA, 40 bp, Homo sapiens
tctgaattagtctccattagtaaatattttcttaatttga

SEQ ID NO: 19046 - DNA, 40 bp, Homo sapiens
caaattaagaaaatatttactaatggagactaattcagat

SEQ ID NO: 19047 - DNA, 40 bp, Homo sapiens
atctgaattagtctccattagtaaatattttcttaatttg

SEQ ID NO: 19048 - DNA, 40 bp, Homo sapiens
aaattaagaaaatatttactaatggagactaattcagatt

SEQ ID NO: 19049 - DNA, 40 bp, Homo sapiens
aatctgaattagtctccattagtaaatattttcttaattt

SEQ ID NO: 19050 - DNA, 40 bp, Homo sapiens
aattaagaaaatatttactaatggagactaattcagattt

SEQ ID NO: 19051 - DNA, 40 bp, Homo sapiens
aaatctgaattagtctccattagtaaatattttcttaatt

SEQ ID NO: 19052 - DNA, 40 bp, Homo sapiens
attaagaaaatatttactaatggagactaattcagatttg

SEQ ID NO: 19053 - DNA, 40 bp, Homo sapiens
caaatctgaattagtctccattagtaaatattttcttaat

SEQ ID NO: 19054 - DNA, 40 bp, Homo sapiens
ttaagaaaatatttactaatggagactaattcagatttgt

SEQ ID NO: 19055 - DNA, 40 bp, Homo sapiens
acaaatctgaattagtctccattagtaaatattttcttaa

SEQ ID NO: 19056 - DNA, 40 bp, Homo sapiens
taagaaaatatttactaatggagactaattcagatttgta

SEQ ID NO: 19057 - DNA, 40 bp, Homo sapiens
tacaaatctgaattagtctccattagtaaatattttctta

SEQ ID NO: 19058 - DNA, 40 bp, Homo sapiens
aagaaaatatttactaatggagactaattcagatttgtaa

SEQ ID NO: 19059 - DNA, 40 bp, Homo sapiens
ttacaaatctgaattagtctccattagtaaatattttctt

SEQ ID NO: 19060 - DNA, 40 bp, Homo sapiens
agaaaatatttactaatggagactaattcagatttgtaag

SEQ ID NO: 19061 - DNA, 40 bp, Homo sapiens
cttacaaatctgaattagtctccattagtaaatattttct

SEQ ID NO: 19062 - DNA, 40 bp, Homo sapiens
gaaaatatttactaatggagactaattcagatttgtaagt

SEQ ID NO: 19063 - DNA, 40 bp, Homo sapiens
acttacaaatctgaattagtctccattagtaaatattttc

SEQ ID NO: 19064 - DNA, 40 bp, Homo sapiens
aaaatatttactaatggagactaattcagatttgtaagta

SEQ ID NO: 19065 - DNA, 40 bp, Homo sapiens
tacttacaaatctgaattagtctccattagtaaatatttt

SEQ ID NO: 19066 - DNA, 40 bp, Homo sapiens
aaatatttactaatggagactaattcagatttgtaagtat

SEQ ID NO: 19067 - DNA, 40 bp, Homo sapiens
atacttacaaatctgaattagtctccattagtaaatattt

SEQ ID NO: 19068 - DNA, 40 bp, Homo sapiens
aatatttactaatggagactaattcagatttgtaagtata

SEQ ID NO: 19069 - DNA, 40 bp, Homo sapiens
tatacttacaaatctgaattagtctccattagtaaatatt

SEQ ID NO: 19070 - DNA, 40 bp, Homo sapiens
atatttactaatggagactaattcagatttgtaagtatac

SEQ ID NO: 19071 - DNA, 40 bp, Homo sapiens
gtatacttacaaatctgaattagtctccattagtaaatat

SEQ ID NO: 19072 - DNA, 40 bp, Homo sapiens
tatttactaatggagactaattcagatttgtaagtatacc

SEQ ID NO: 19073 - DNA, 40 bp, Homo sapiens
ggtatacttacaaatctgaattagtctccattagtaaata

SEQ ID NO: 19074 - DNA, 40 bp, Homo sapiens
atttactaatggagactaattcagatttgtaagtatacca

SEQ ID NO: 19075 - DNA, 40 bp, Homo sapiens
tggtatacttacaaatctgaattagtctccattagtaaat

SEQ ID NO: 19076 - DNA, 40 bp, Homo sapiens
tttactaatggagactaattcagatttgtaagtataccaa

SEQ ID NO: 19077 - DNA, 40 bp, Homo sapiens
ttggtatacttacaaatctgaattagtctccattagtaaa

SEQ ID NO: 19078 - DNA, 40 bp, Homo sapiens
ttactaatggagactaattcagatttgtaagtataccaaa

SEQ ID NO: 19079 - DNA, 40 bp, Homo sapiens
tttggtatacttacaaatctgaattagtctccattagtaa

SEQ ID NO: 19080 - DNA, 40 bp, Homo sapiens
tactaatggagactaattcagatttgtaagtataccaaaa

SEQ ID NO: 19081 - DNA, 40 bp, Homo sapiens
ttttggtatacttacaaatctgaattagtctccattagta

SEQ ID NO: 19082 - DNA, 40 bp, Homo sapiens
actaatggagactaattcagatttgtaagtataccaaaat

SEQ ID NO: 19083 - DNA, 40 bp, Homo sapiens
attttggtatacttacaaatctgaattagtctccattagt

SEQ ID NO: 19084 - DNA, 40 bp, Homo sapiens
ctaatggagactaattcagatttgtaagtataccaaaatt

SEQ ID NO: 19085 - DNA, 40 bp, Homo sapiens
aattttggtatacttacaaatctgaattagtctccattag

SEQ ID NO: 19086 - DNA, 40 bp, Homo sapiens
taatggagactaattcagatttgtaagtataccaaaattt

SEQ ID NO: 19087 - DNA, 40 bp, Homo sapiens
aaattttggtatacttacaaatctgaattagtctccatta

SEQ ID NO: 19088 - DNA, 40 bp, Homo sapiens
aatggagactaattcagatttgtaagtataccaaaatttg

SEQ ID NO: 19089 - DNA, 40 bp, Homo sapiens
caaattttggtatacttacaaatctgaattagtctccatt

SEQ ID NO: 19090 - DNA, 40 bp, Homo sapiens
atggagactaattcagatttgtaagtataccaaaatttga

SEQ ID NO: 19091 - DNA, 40 bp, Homo sapiens
tcaaattttggtatacttacaaatctgaattagtctccat

SEQ ID NO: 19092 - DNA, 40 bp, Homo sapiens
tggagactaattcagatttgtaagtataccaaaatttgaa

SEQ ID NO: 19093 - DNA, 40 bp, Homo sapiens
ttcaaattttggtatacttacaaatctgaattagtctcca

SEQ ID NO: 19094 - DNA, 40 bp, Homo sapiens
ggagactaattcagatttgtaagtataccaaaatttgaac

SEQ ID NO: 19095 - DNA, 40 bp, Homo sapiens
gttcaaattttggtatacttacaaatctgaattagtctcc

SEQ ID NO: 19096 - DNA, 40 bp, Homo sapiens
gagactaattcagatttgtaagtataccaaaatttgaact

SEQ ID NO: 19097 - DNA, 40 bp, Homo sapiens
agttcaaattttggtatacttacaaatctgaattagtctc

SEQ ID NO: 19098 - DNA, 40 bp, Homo sapiens
agactaattcagatttgtaagtataccaaaatttgaactt

SEQ ID NO: 19099 - DNA, 40 bp, Homo sapiens
aagttcaaattttggtatacttacaaatctgaattagtct

SEQ ID NO: 19100 - DNA, 40 bp, Homo sapiens
gactaattcagatttgtaagtataccaaaatttgaactta

SEQ ID NO: 19101 - DNA, 40 bp, Homo sapiens
taagttcaaattttggtatacttacaaatctgaattagtc

SEQ ID NO: 19102 - DNA, 40 bp, Homo sapiens
actaattcagatttgtaagtataccaaaatttgaacttag

SEQ ID NO: 19103 - DNA, 40 bp, Homo sapiens
ctaagttcaaattttggtatacttacaaatctgaattagt

SEQ ID NO: 19104 - DNA, 40 bp, Homo sapiens
ctaattcagatttgtaagtataccaaaatttgaacttagc

SEQ ID NO: 19105 - DNA, 40 bp, Homo sapiens
gctaagttcaaattttggtatacttacaaatctgaattag

SEQ ID NO: 19106 - DNA, 40 bp, Homo sapiens
taattcagatttgtaagtataccaaaatttgaacttagcc

SEQ ID NO: 19107 - DNA, 40 bp, Homo sapiens
ggctaagttcaaattttggtatacttacaaatctgaatta

SEQ ID NO: 19108 - DNA, 40 bp, Homo sapiens
aattcagatttgtaagtataccaaaatttgaacttagcct

SEQ ID NO: 19109 - DNA, 40 bp, Homo sapiens
aggctaagttcaaattttggtatacttacaaatctgaatt

SEQ ID NO: 19110 - DNA, 40 bp, Homo sapiens
attcagatttgtaagtataccaaaatttgaacttagcctg

SEQ ID NO: 19111 - DNA, 40 bp, Homo sapiens
caggctaagttcaaattttggtatacttacaaatctgaat

SEQ ID NO: 19112 - DNA, 40 bp, Homo sapiens
ttcagatttgtaagtataccaaaatttgaacttagcctgc

SEQ ID NO: 19113 - DNA, 40 bp, Homo sapiens
gcaggctaagttcaaattttggtatacttacaaatctgaa

SEQ ID NO: 19114 - DNA, 40 bp, Homo sapiens
tcagatttgtaagtataccaaaatttgaacttagcctgct

SEQ ID NO: 19115 - DNA, 40 bp, Homo sapiens
agcaggctaagttcaaattttggtatacttacaaatctga

SEQ ID NO: 19116 - DNA, 40 bp, Homo sapiens
cagatttgtaagtataccaaaatttgaacttagcctgcta

SEQ ID NO: 19117 - DNA, 40 bp, Homo sapiens
tagcaggctaagttcaaattttggtatacttacaaatctg

SEQ ID NO: 19118 - DNA, 40 bp, Homo sapiens
agatttgtaagtataccaaaatttgaacttagcctgctat

SEQ ID NO: 19119 - DNA, 40 bp, Homo sapiens
atagcaggctaagttcaaattttggtatacttacaaatct

SEQ ID NO: 19120 - DNA, 40 bp, Homo sapiens
gatttgtaagtataccaaaatttgaacttagcctgctatc

SEQ ID NO: 19121 - DNA, 40 bp, Homo sapiens
gatagcaggctaagttcaaattttggtatacttacaaatc

SEQ ID NO: 19122 - DNA, 40 bp, Homo sapiens
atttgtaagtataccaaaatttgaacttagcctgctatct

SEQ ID NO: 19123 - DNA, 40 bp, Homo sapiens
agatagcaggctaagttcaaattttggtatacttacaaat

SEQ ID NO: 19124 - DNA, 40 bp, Homo sapiens
tttgtaagtataccaaaatttgaacttagcctgctatcta

SEQ ID NO: 19125 - DNA, 40 bp, Homo sapiens
tagatagcaggctaagttcaaattttggtatacttacaaa

SEQ ID NO: 19126 - DNA, 40 bp, Homo sapiens
ttgtaagtataccaaaatttgaacttagcctgctatctaa

SEQ ID NO: 19127 - DNA, 40 bp, Homo sapiens
ttagatagcaggctaagttcaaattttggtatacttacaa

SEQ ID NO: 19128 - DNA, 40 bp, Homo sapiens
tgtaagtataccaaaatttgaacttagcctgctatctaat

SEQ ID NO: 19129 - DNA, 40 bp, Homo sapiens
attagatagcaggctaagttcaaattttggtatacttaca

SEQ ID NO: 19130 - DNA, 40 bp, Homo sapiens
gtaagtataccaaaatttgaacttagcctgctatctaatg

SEQ ID NO: 19131 - DNA, 40 bp, Homo sapiens
cattagatagcaggctaagttcaaattttggtatacttac

SEQ ID NO: 19132 - DNA, 40 bp, Homo sapiens
taagtataccaaaatttgaacttagcctgctatctaatgg

SEQ ID NO: 19133 - DNA, 40 bp, Homo sapiens
ccattagatagcaggctaagttcaaattttggtatactta

SEQ ID NO: 19134 - DNA, 40 bp, Homo sapiens
aagtataccaaaatttgaacttagcctgctatctaatggc

SEQ ID NO: 19135 - DNA, 40 bp, Homo sapiens
gccattagatagcaggctaagttcaaattttggtatactt

SEQ ID NO: 19136 - DNA, 40 bp, Homo sapiens
agtataccaaaatttgaacttagcctgctatctaatggca

SEQ ID NO: 19137 - DNA, 40 bp, Homo sapiens
tgccattagatagcaggctaagttcaaattttggtatact

SEQ ID NO: 19138 - DNA, 40 bp, Homo sapiens
gtataccaaaatttgaacttagcctgctatctaatggcaa

SEQ ID NO: 19139 - DNA, 40 bp, Homo sapiens
ttgccattagatagcaggctaagttcaaattttggtatac

SEQ ID NO: 19140 - DNA, 40 bp, Homo sapiens
tataccaaaatttgaacttagcctgctatctaatggcaac

SEQ ID NO: 19141 - DNA, 40 bp, Homo sapiens
gttgccattagatagcaggctaagttcaaattttggtata

SEQ ID NO: 19142 - DNA, 40 bp, Homo sapiens
ataccaaaatttgaacttagcctgctatctaatggcaact

SEQ ID NO: 19143 - DNA, 40 bp, Homo sapiens
agttgccattagatagcaggctaagttcaaattttggtat

SEQ ID NO: 19144 - DNA, 40 bp, Homo sapiens
taccaaaatttgaacttagcctgctatctaatggcaactt

SEQ ID NO: 19145 - DNA, 40 bp, Homo sapiens
aagttgccattagatagcaggctaagttcaaattttggta

SEQ ID NO: 19146 - DNA, 40 bp, Homo sapiens
accaaaatttgaacttagcctgctatctaatggcaactta

SEQ ID NO: 19147 - DNA, 40 bp, Homo sapiens
taagttgccattagatagcaggctaagttcaaattttggt

SEQ ID NO: 19148 - DNA, 40 bp, Homo sapiens
ccaaaatttgaacttagcctgctatctaatggcaacttag

SEQ ID NO: 19149 - DNA, 40 bp, Homo sapiens
ctaagttgccattagatagcaggctaagttcaaattttgg

SEQ ID NO: 19150 - DNA, 40 bp, Homo sapiens
caaaatttgaacttagcctgctatctaatggcaacttagt

SEQ ID NO: 19151 - DNA, 40 bp, Homo sapiens
actaagttgccattagatagcaggctaagttcaaattttg

SEQ ID NO: 19152 - DNA, 40 bp, Homo sapiens
aaaatttgaacttagcctgctatctaatggcaacttagtg

SEQ ID NO: 19153 - DNA, 40 bp, Homo sapiens
cactaagttgccattagatagcaggctaagttcaaatttt

SEQ ID NO: 19154 - DNA, 40 bp, Homo sapiens
aaatttgaacttagcctgctatctaatggcaacttagtgg

SEQ ID NO: 19155 - DNA, 40 bp, Homo sapiens
ccactaagttgccattagatagcaggctaagttcaaattt

SEQ ID NO: 19156 - DNA, 40 bp, Homo sapiens
aatttgaacttagcctgctatctaatggcaacttagtggc

SEQ ID NO: 19157 - DNA, 40 bp, Homo sapiens
gccactaagttgccattagatagcaggctaagttcaaatt

SEQ ID NO: 19158 - DNA, 40 bp, Homo sapiens
atttgaacttagcctgctatctaatggcaacttagtggca

SEQ ID NO: 19159 - DNA, 40 bp, Homo sapiens
tgccactaagttgccattagatagcaggctaagttcaaat

SEQ ID NO: 19160 - DNA, 40 bp, Homo sapiens
tttgaacttagcctgctatctaatggcaacttagtggcag

SEQ ID NO: 19161 - DNA, 40 bp, Homo sapiens
ctgccactaagttgccattagatagcaggctaagttcaaa

SEQ ID NO: 19162 - DNA, 40 bp, Homo sapiens
ttgaacttagcctgctatctaatggcaacttagtggcaga

SEQ ID NO: 19163 - DNA, 40 bp, Homo sapiens
tctgccactaagttgccattagatagcaggctaagttcaa

SEQ ID NO: 19164 - DNA, 40 bp, Homo sapiens
tgaacttagcctgctatctaatggcaacttagtggcagag

SEQ ID NO: 19165 - DNA, 40 bp, Homo sapiens
ctctgccactaagttgccattagatagcaggctaagttca

SEQ ID NO: 19166 - DNA, 40 bp, Homo sapiens
gaacttagcctgctatctaatggcaacttagtggcagagg

SEQ ID NO: 19167 - DNA, 40 bp, Homo sapiens
cctctgccactaagttgccattagatagcaggctaagttc

SEQ ID NO: 19168 - DNA, 40 bp, Homo sapiens
aacttagcctgctatctaatggcaacttagtggcagaggt

SEQ ID NO: 19169 - DNA, 40 bp, Homo sapiens
acctctgccactaagttgccattagatagcaggctaagtt

SEQ ID NO: 19170 - DNA, 40 bp, Homo sapiens
acttagcctgctatctaatggcaacttagtggcagaggta

SEQ ID NO: 19171 - DNA, 40 bp, Homo sapiens
tacctctgccactaagttgccattagatagcaggctaagt

SEQ ID NO: 19172 - DNA, 40 bp, Homo sapiens
cttagcctgctatctaatggcaacttagtggcagaggtat

SEQ ID NO: 19173 - DNA, 40 bp, Homo sapiens
atacctctgccactaagttgccattagatagcaggctaag

SEQ ID NO: 19174 - DNA, 40 bp, Homo sapiens
ttagcctgctatctaatggcaacttagtggcagaggtatg

SEQ ID NO: 19175 - DNA, 40 bp, Homo sapiens
catacctctgccactaagttgccattagatagcaggctaa

SEQ ID NO: 19176 - DNA, 40 bp, Homo sapiens
tagcctgctatctaatggcaacttagtggcagaggtatga

SEQ ID NO: 19177 - DNA, 40 bp, Homo sapiens
tcatacctctgccactaagttgccattagatagcaggcta

SEQ ID NO: 19178 - DNA, 40 bp, Homo sapiens
agcctgctatctaatggcaacttagtggcagaggtatgat

SEQ ID NO: 19179 - DNA, 40 bp, Homo sapiens
atcatacctctgccactaagttgccattagatagcaggct

SEQ ID NO: 19180 - DNA, 40 bp, Homo sapiens
gcctgctatctaatggcaacttagtggcagaggtatgatg

SEQ ID NO: 19181 - DNA, 40 bp, Homo sapiens
catcatacctctgccactaagttgccattagatagcaggc

SEQ ID NO: 19182 - DNA, 40 bp, Homo sapiens
cctgctatctaatggcaacttagtggcagaggtatgatgt

SEQ ID NO: 19183 - DNA, 40 bp, Homo sapiens
acatcatacctctgccactaagttgccattagatagcagg

SEQ ID NO: 19184 - DNA, 40 bp, Homo sapiens
ctgctatctaatggcaacttagtggcagaggtatgatgta

SEQ ID NO: 19185 - DNA, 40 bp, Homo sapiens
tacatcatacctctgccactaagttgccattagatagcag

SEQ ID NO: 19186 - DNA, 40 bp, Homo sapiens
tgctatctaatggcaacttagtggcagaggtatgatgtaa

SEQ ID NO: 19187 - DNA, 40 bp, Homo sapiens
ttacatcatacctctgccactaagttgccattagatagca

SEQ ID NO: 19188 - DNA, 40 bp, Homo sapiens
gctatctaatggcaacttagtggcagaggtatgatgtaaa

SEQ ID NO: 19189 - DNA, 40 bp, Homo sapiens
tttacatcatacctctgccactaagttgccattagatagc

SEQ ID NO: 19190 - DNA, 40 bp, Homo sapiens
ctatctaatggcaacttagtggcagaggtatgatgtaaaa

SEQ ID NO: 19191 - DNA, 40 bp, Homo sapiens
ttttacatcatacctctgccactaagttgccattagatag

SEQ ID NO: 19192 - DNA, 40 bp, Homo sapiens
tatctaatggcaacttagtggcagaggtatgatgtaaaat

SEQ ID NO: 19193 - DNA, 40 bp, Homo sapiens
attttacatcatacctctgccactaagttgccattagata

SEQ ID NO: 19194 - DNA, 40 bp, Homo sapiens
atctaatggcaacttagtggcagaggtatgatgtaaaatc

SEQ ID NO: 19195 - DNA, 40 bp, Homo sapiens
gattttacatcatacctctgccactaagttgccattagat

SEQ ID NO: 19196 - DNA, 40 bp, Homo sapiens
tctaatggcaacttagtggcagaggtatgatgtaaaatca

SEQ ID NO: 19197 - DNA, 40 bp, Homo sapiens
tgattttacatcatacctctgccactaagttgccattaga

SEQ ID NO: 19198 - DNA, 40 bp, Homo sapiens
ctaatggcaacttagtggcagaggtatgatgtaaaatcat

SEQ ID NO: 19199 - DNA, 40 bp, Homo sapiens
atgattttacatcatacctctgccactaagttgccattag

SEQ ID NO: 19200 - DNA, 40 bp, Homo sapiens
taatggcaacttagtggcagaggtatgatgtaaaatcatt

SEQ ID NO: 19201 - DNA, 40 bp, Homo sapiens
aatgattttacatcatacctctgccactaagttgccatta

SEQ ID NO: 19202 - DNA, 40 bp, Homo sapiens
aatggcaacttagtggcagaggtatgatgtaaaatcattc

SEQ ID NO: 19203 - DNA, 40 bp, Homo sapiens
gaatgattttacatcatacctctgccactaagttgccatt

SEQ ID NO: 19204 - DNA, 40 bp, Homo sapiens
atggcaacttagtggcagaggtatgatgtaaaatcattca

SEQ ID NO: 19205 - DNA, 40 bp, Homo sapiens
tgaatgattttacatcatacctctgccactaagttgccat

SEQ ID NO: 19206 - DNA, 40 bp, Homo sapiens
tggcaacttagtggcagaggtatgatgtaaaatcattcag

SEQ ID NO: 19207 - DNA, 40 bp, Homo sapiens
ctgaatgattttacatcatacctctgccactaagttgcca

SEQ ID NO: 19208 - DNA, 40 bp, Homo sapiens
ggcaacttagtggcagaggtatgatgtaaaatcattcagg

SEQ ID NO: 19209 - DNA, 40 bp, Homo sapiens
cctgaatgattttacatcatacctctgccactaagttgcc

SEQ ID NO: 19210 - DNA, 40 bp, Homo sapiens
gcaacttagtggcagaggtatgatgtaaaatcattcaggt

SEQ ID NO: 19211 - DNA, 40 bp, Homo sapiens
acctgaatgattttacatcatacctctgccactaagttgc

SEQ ID NO: 19212 - DNA, 40 bp, Homo sapiens
caacttagtggcagaggtatgatgtaaaatcattcaggta

SEQ ID NO: 19213 - DNA, 40 bp, Homo sapiens
tacctgaatgattttacatcatacctctgccactaagttg

SEQ ID NO: 19214 - DNA, 40 bp, Homo sapiens
aacttagtggcagaggtatgatgtaaaatcattcaggtat

SEQ ID NO: 19215 - DNA, 40 bp, Homo sapiens
atacctgaatgattttacatcatacctctgccactaagtt

SEQ ID NO: 19216 - DNA, 40 bp, Homo sapiens
acttagtggcagaggtatgatgtaaaatcattcaggtatg

SEQ ID NO: 19217 - DNA, 40 bp, Homo sapiens
catacctgaatgattttacatcatacctctgccactaagt

SEQ ID NO: 19218 - DNA, 40 bp, Homo sapiens
cttagtggcagaggtatgatgtaaaatcattcaggtatga

SEQ ID NO: 19219 - DNA, 40 bp, Homo sapiens
tcatacctgaatgattttacatcatacctctgccactaag

SEQ ID NO: 19220 - DNA, 40 bp, Homo sapiens
ttagtggcagaggtatgatgtaaaatcattcaggtatgac

SEQ ID NO: 19221 - DNA, 40 bp, Homo sapiens
gtcatacctgaatgattttacatcatacctctgccactaa

SEQ ID NO: 19222 - DNA, 40 bp, Homo sapiens
tagtggcagaggtatgatgtaaaatcattcaggtatgaca

SEQ ID NO: 19223 - DNA, 40 bp, Homo sapiens
tgtcatacctgaatgattttacatcatacctctgccacta

SEQ ID NO: 19224 - DNA, 40 bp, Homo sapiens
agtggcagaggtatgatgtaaaatcattcaggtatgacac

SEQ ID NO: 19225 - DNA, 40 bp, Homo sapiens
gtgtcatacctgaatgattttacatcatacctctgccact

SEQ ID NO: 19226 - DNA, 40 bp, Homo sapiens
gtggcagaggtatgatgtaaaatcattcaggtatgacaca

SEQ ID NO: 19227 - DNA, 40 bp, Homo sapiens
tgtgtcatacctgaatgattttacatcatacctctgccac

SEQ ID NO: 19228 - DNA, 40 bp, Homo sapiens
tggcagaggtatgatgtaaaatcattcaggtatgacacat

SEQ ID NO: 19229 - DNA, 40 bp, Homo sapiens
atgtgtcatacctgaatgattttacatcatacctctgcca

SEQ ID NO: 19230 - DNA, 40 bp, Homo sapiens
ggcagaggtatgatgtaaaatcattcaggtatgacacata

SEQ ID NO: 19231 - DNA, 40 bp, Homo sapiens
tatgtgtcatacctgaatgattttacatcatacctctgcc

SEQ ID NO: 19232 - DNA, 40 bp, Homo sapiens
gcagaggtatgatgtaaaatcattcaggtatgacacatag

SEQ ID NO: 19233 - DNA, 40 bp, Homo sapiens
ctatgtgtcatacctgaatgattttacatcatacctctgc

SEQ ID NO: 19234 - DNA, 40 bp, Homo sapiens
cagaggtatgatgtaaaatcattcaggtatgacacataga

SEQ ID NO: 19235 - DNA, 40 bp, Homo sapiens
tctatgtgtcatacctgaatgattttacatcatacctctg

SEQ ID NO: 19236 - DNA, 40 bp, Homo sapiens
agaggtatgatgtaaaatcattcaggtatgacacatagat

SEQ ID NO: 19237 - DNA, 40 bp, Homo sapiens
atctatgtgtcatacctgaatgattttacatcatacctct

SEQ ID NO: 19238 - DNA, 40 bp, Homo sapiens
gaggtatgatgtaaaatcattcaggtatgacacatagatg

SEQ ID NO: 19239 - DNA, 40 bp, Homo sapiens
catctatgtgtcatacctgaatgattttacatcatacctc

SEQ ID NO: 19240 - DNA, 40 bp, Homo sapiens
aggtatgatgtaaaatcattcaggtatgacacatagatgg

SEQ ID NO: 19241 - DNA, 40 bp, Homo sapiens
ccatctatgtgtcatacctgaatgattttacatcatacct

SEQ ID NO: 19242 - DNA, 40 bp, Homo sapiens
ggtatgatgtaaaatcattcaggtatgacacatagatgga

SEQ ID NO: 19243 - DNA, 40 bp, Homo sapiens
tccatctatgtgtcatacctgaatgattttacatcatacc

SEQ ID NO: 19244 - DNA, 40 bp, Homo sapiens
gtatgatgtaaaatcattcaggtatgacacatagatggag

SEQ ID NO: 19245 - DNA, 40 bp, Homo sapiens
ctccatctatgtgtcatacctgaatgattttacatcatac

SEQ ID NO: 19246 - DNA, 40 bp, Homo sapiens
tatgatgtaaaatcattcaggtatgacacatagatggagt

SEQ ID NO: 19247 - DNA, 40 bp, Homo sapiens
actccatctatgtgtcatacctgaatgattttacatcata

SEQ ID NO: 19248 - DNA, 40 bp, Homo sapiens
atgatgtaaaatcattcaggtatgacacatagatggagta

SEQ ID NO: 19249 - DNA, 40 bp, Homo sapiens
tactccatctatgtgtcatacctgaatgattttacatcat

SEQ ID NO: 19250 - DNA, 40 bp, Homo sapiens
tgatgtaaaatcattcaggtatgacacatagatggagtat

SEQ ID NO: 19251 - DNA, 40 bp, Homo sapiens
atactccatctatgtgtcatacctgaatgattttacatca

SEQ ID NO: 19252 - DNA, 40 bp, Homo sapiens
gatgtaaaatcattcaggtatgacacatagatggagtatg

SEQ ID NO: 19253 - DNA, 40 bp, Homo sapiens
catactccatctatgtgtcatacctgaatgattttacatc

SEQ ID NO: 19254 - DNA, 40 bp, Homo sapiens
atgtaaaatcattcaggtatgacacatagatggagtatgt

SEQ ID NO: 19255 - DNA, 40 bp, Homo sapiens
acatactccatctatgtgtcatacctgaatgattttacat

SEQ ID NO: 19256 - DNA, 40 bp, Homo sapiens
tgtaaaatcattcaggtatgacacatagatggagtatgtt

SEQ ID NO: 19257 - DNA, 40 bp, Homo sapiens
aacatactccatctatgtgtcatacctgaatgattttaca

SEQ ID NO: 19258 - DNA, 40 bp, Homo sapiens
gtaaaatcattcaggtatgacacatagatggagtatgttt

SEQ ID NO: 19259 - DNA, 40 bp, Homo sapiens
aaacatactccatctatgtgtcatacctgaatgattttac

SEQ ID NO: 19260 - DNA, 40 bp, Homo sapiens
taaaatcattcaggtatgacacatagatggagtatgtttg

SEQ ID NO: 19261 - DNA, 40 bp, Homo sapiens
caaacatactccatctatgtgtcatacctgaatgatttta

SEQ ID NO: 19262 - DNA, 40 bp, Homo sapiens
aaaatcattcaggtatgacacatagatggagtatgtttgt

SEQ ID NO: 19263 - DNA, 40 bp, Homo sapiens
acaaacatactccatctatgtgtcatacctgaatgatttt

SEQ ID NO: 19264 - DNA, 40 bp, Homo sapiens
aaatcattcaggtatgacacatagatggagtatgtttgta

SEQ ID NO: 19265 - DNA, 40 bp, Homo sapiens
tacaaacatactccatctatgtgtcatacctgaatgattt

SEQ ID NO: 19266 - DNA, 40 bp, Homo sapiens
aatcattcaggtatgacacatagatggagtatgtttgtat

SEQ ID NO: 19267 - DNA, 40 bp, Homo sapiens
atacaaacatactccatctatgtgtcatacctgaatgatt

SEQ ID NO: 19268 - DNA, 40 bp, Homo sapiens
atcattcaggtatgacacatagatggagtatgtttgtatt

SEQ ID NO: 19269 - DNA, 40 bp, Homo sapiens
aatacaaacatactccatctatgtgtcatacctgaatgat

SEQ ID NO: 19270 - DNA, 40 bp, Homo sapiens
tcattcaggtatgacacatagatggagtatgtttgtattc

SEQ ID NO: 19271 - DNA, 40 bp, Homo sapiens
gaatacaaacatactccatctatgtgtcatacctgaatga

SEQ ID NO: 19272 - DNA, 40 bp, Homo sapiens
cattcaggtatgacacatagatggagtatgtttgtattcg

SEQ ID NO: 19273 - DNA, 40 bp, Homo sapiens
cgaatacaaacatactccatctatgtgtcatacctgaatg

SEQ ID NO: 19274 - DNA, 40 bp, Homo sapiens
attcaggtatgacacatagatggagtatgtttgtattcga

SEQ ID NO: 19275 - DNA, 40 bp, Homo sapiens
tcgaatacaaacatactccatctatgtgtcatacctgaat

SEQ ID NO: 19276 - DNA, 40 bp, Homo sapiens
ttcaggtatgacacatagatggagtatgtttgtattcgag

SEQ ID NO: 19277 - DNA, 40 bp, Homo sapiens
ctcgaatacaaacatactccatctatgtgtcatacctgaa

SEQ ID NO: 19278 - DNA, 40 bp, Homo sapiens
tcaggtatgacacatagatggagtatgtttgtattcgagg

SEQ ID NO: 19279 - DNA, 40 bp, Homo sapiens
cctcgaatacaaacatactccatctatgtgtcatacctga

SEQ ID NO: 19280 - DNA, 40 bp, Homo sapiens
caggtatgacacatagatggagtatgtttgtattcgaggc

SEQ ID NO: 19281 - DNA, 40 bp, Homo sapiens
gcctcgaatacaaacatactccatctatgtgtcatacctg

SEQ ID NO: 19282 - DNA, 40 bp, Homo sapiens
aggtatgacacatagatggagtatgtttgtattcgaggct

SEQ ID NO: 19283 - DNA, 40 bp, Homo sapiens
agcctcgaatacaaacatactccatctatgtgtcatacct

SEQ ID NO: 19284 - DNA, 40 bp, Homo sapiens
ggtatgacacatagatggagtatgtttgtattcgaggctg

SEQ ID NO: 19285 - DNA, 40 bp, Homo sapiens
cagcctcgaatacaaacatactccatctatgtgtcatacc

SEQ ID NO: 19286 - DNA, 40 bp, Homo sapiens
gtatgacacatagatggagtatgtttgtattcgaggctgt

SEQ ID NO: 19287 - DNA, 40 bp, Homo sapiens
acagcctcgaatacaaacatactccatctatgtgtcatac

SEQ ID NO: 19288 - DNA, 40 bp, Homo sapiens
tatgacacatagatggagtatgtttgtattcgaggctgtg

SEQ ID NO: 19289 - DNA, 40 bp, Homo sapiens
cacagcctcgaatacaaacatactccatctatgtgtcata

SEQ ID NO: 19290 - DNA, 40 bp, Homo sapiens
atgacacatagatggagtatgtttgtattcgaggctgtgc

SEQ ID NO: 19291 - DNA, 40 bp, Homo sapiens
gcacagcctcgaatacaaacatactccatctatgtgtcat

SEQ ID NO: 19292 - DNA, 40 bp, Homo sapiens
tgacacatagatggagtatgtttgtattcgaggctgtgca

SEQ ID NO: 19293 - DNA, 40 bp, Homo sapiens
tgcacagcctcgaatacaaacatactccatctatgtgtca

SEQ ID NO: 19294 - DNA, 40 bp, Homo sapiens
gacacatagatggagtatgtttgtattcgaggctgtgcac

SEQ ID NO: 19295 - DNA, 40 bp, Homo sapiens
gtgcacagcctcgaatacaaacatactccatctatgtgtc

SEQ ID NO: 19296 - DNA, 40 bp, Homo sapiens
acacatagatggagtatgtttgtattcgaggctgtgcaca

SEQ ID NO: 19297 - DNA, 40 bp, Homo sapiens
tgtgcacagcctcgaatacaaacatactccatctatgtgt

SEQ ID NO: 19298 - DNA, 40 bp, Homo sapiens
cacatagatggagtatgtttgtattcgaggctgtgcacat

SEQ ID NO: 19299 - DNA, 40 bp, Homo sapiens
atgtgcacagcctcgaatacaaacatactccatctatgtg

SEQ ID NO: 19300 - DNA, 40 bp, Homo sapiens
acatagatggagtatgtttgtattcgaggctgtgcacata

SEQ ID NO: 19301 - DNA, 40 bp, Homo sapiens
tatgtgcacagcctcgaatacaaacatactccatctatgt

SEQ ID NO: 19302 - DNA, 40 bp, Homo sapiens
catagatggagtatgtttgtattcgaggctgtgcacataa

SEQ ID NO: 19303 - DNA, 40 bp, Homo sapiens
ttatgtgcacagcctcgaatacaaacatactccatctatg

SEQ ID NO: 19304 - DNA, 40 bp, Homo sapiens
atagatggagtatgtttgtattcgaggctgtgcacataat

SEQ ID NO: 19305 - DNA, 40 bp, Homo sapiens
attatgtgcacagcctcgaatacaaacatactccatctat

SEQ ID NO: 19306 - DNA, 40 bp, Homo sapiens
tagatggagtatgtttgtattcgaggctgtgcacataatc

SEQ ID NO: 19307 - DNA, 40 bp, Homo sapiens
gattatgtgcacagcctcgaatacaaacatactccatcta

SEQ ID NO: 19308 - DNA, 40 bp, Homo sapiens
agatggagtatgtttgtattcgaggctgtgcacataatca

SEQ ID NO: 19309 - DNA, 40 bp, Homo sapiens
tgattatgtgcacagcctcgaatacaaacatactccatct

SEQ ID NO: 19310 - DNA, 40 bp, Homo sapiens
gatggagtatgtttgtattcgaggctgtgcacataatcac

SEQ ID NO: 19311 - DNA, 40 bp, Homo sapiens
gtgattatgtgcacagcctcgaatacaaacatactccatc

SEQ ID NO: 19312 - DNA, 40 bp, Homo sapiens
atggagtatgtttgtattcgaggctgtgcacataatcacc

SEQ ID NO: 19313 - DNA, 40 bp, Homo sapiens
ggtgattatgtgcacagcctcgaatacaaacatactccat

SEQ ID NO: 19314 - DNA, 40 bp, Homo sapiens
tggagtatgtttgtattcgaggctgtgcacataatcacct

SEQ ID NO: 19315 - DNA, 40 bp, Homo sapiens
aggtgattatgtgcacagcctcgaatacaaacatactcca

SEQ ID NO: 19316 - DNA, 40 bp, Homo sapiens
ggagtatgtttgtattcgaggctgtgcacataatcacctt

SEQ ID NO: 19317 - DNA, 40 bp, Homo sapiens
aaggtgattatgtgcacagcctcgaatacaaacatactcc

SEQ ID NO: 19318 - DNA, 40 bp, Homo sapiens
gagtatgtttgtattcgaggctgtgcacataatcaccttt

SEQ ID NO: 19319 - DNA, 40 bp, Homo sapiens
aaaggtgattatgtgcacagcctcgaatacaaacatactc

SEQ ID NO: 19320 - DNA, 40 bp, Homo sapiens
agtatgtttgtattcgaggctgtgcacataatcaccttta

SEQ ID NO: 19321 - DNA, 40 bp, Homo sapiens
taaaggtgattatgtgcacagcctcgaatacaaacatact

SEQ ID NO: 19322 - DNA, 40 bp, Homo sapiens
gtatgtttgtattcgaggctgtgcacataatcacctttac

SEQ ID NO: 19323 - DNA, 40 bp, Homo sapiens
gtaaaggtgattatgtgcacagcctcgaatacaaacatac

SEQ ID NO: 19324 - DNA, 40 bp, Homo sapiens
tatgtttgtattcgaggctgtgcacataatcacctttact

SEQ ID NO: 19325 - DNA, 40 bp, Homo sapiens
agtaaaggtgattatgtgcacagcctcgaatacaaacata

SEQ ID NO: 19326 - DNA, 40 bp, Homo sapiens
atgtttgtattcgaggctgtgcacataatcacctttactt

SEQ ID NO: 19327 - DNA, 40 bp, Homo sapiens
aagtaaaggtgattatgtgcacagcctcgaatacaaacat

SEQ ID NO: 19328 - DNA, 40 bp, Homo sapiens
tgtttgtattcgaggctgtgcacataatcacctttacttg

SEQ ID NO: 19329 - DNA, 40 bp, Homo sapiens
caagtaaaggtgattatgtgcacagcctcgaatacaaaca

SEQ ID NO: 19330 - DNA, 40 bp, Homo sapiens
gtttgtattcgaggctgtgcacataatcacctttacttgt

SEQ ID NO: 19331 - DNA, 40 bp, Homo sapiens
acaagtaaaggtgattatgtgcacagcctcgaatacaaac

SEQ ID NO: 19332 - DNA, 40 bp, Homo sapiens
tttgtattcgaggctgtgcacataatcacctttacttgta

SEQ ID NO: 19333 - DNA, 40 bp, Homo sapiens
tacaagtaaaggtgattatgtgcacagcctcgaatacaaa

SEQ ID NO: 19334 - DNA, 40 bp, Homo sapiens
ttgtattcgaggctgtgcacataatcacctttacttgtat

SEQ ID NO: 19335 - DNA, 40 bp, Homo sapiens
atacaagtaaaggtgattatgtgcacagcctcgaatacaa

SEQ ID NO: 19336 - DNA, 40 bp, Homo sapiens
tgtattcgaggctgtgcacataatcacctttacttgtatt

SEQ ID NO: 19337 - DNA, 40 bp, Homo sapiens
aatacaagtaaaggtgattatgtgcacagcctcgaataca

SEQ ID NO: 19338 - DNA, 40 bp, Homo sapiens
gtattcgaggctgtgcacataatcacctttacttgtattg

SEQ ID NO: 19339 - DNA, 40 bp, Homo sapiens
caatacaagtaaaggtgattatgtgcacagcctcgaatac

SEQ ID NO: 19340 - DNA, 40 bp, Homo sapiens
tattcgaggctgtgcacataatcacctttacttgtattgt

SEQ ID NO: 19341 - DNA, 40 bp, Homo sapiens
acaatacaagtaaaggtgattatgtgcacagcctcgaata

SEQ ID NO: 19342 - DNA, 40 bp, Homo sapiens
attcgaggctgtgcacataatcacctttacttgtattgtg

SEQ ID NO: 19343 - DNA, 40 bp, Homo sapiens
cacaatacaagtaaaggtgattatgtgcacagcctcgaat

SEQ ID NO: 19344 - DNA, 40 bp, Homo sapiens
ttcgaggctgtgcacataatcacctttacttgtattgtga

SEQ ID NO: 19345 - DNA, 40 bp, Homo sapiens
tcacaatacaagtaaaggtgattatgtgcacagcctcgaa

SEQ ID NO: 19346 - DNA, 40 bp, Homo sapiens
tcgaggctgtgcacataatcacctttacttgtattgtgaa

SEQ ID NO: 19347 - DNA, 40 bp, Homo sapiens
ttcacaatacaagtaaaggtgattatgtgcacagcctcga

SEQ ID NO: 19348 - DNA, 40 bp, Homo sapiens
cgaggctgtgcacataatcacctttacttgtattgtgaag

SEQ ID NO: 19349 - DNA, 40 bp, Homo sapiens
cttcacaatacaagtaaaggtgattatgtgcacagcctcg

SEQ ID NO: 19350 - DNA, 40 bp, Homo sapiens
gaggctgtgcacataatcacctttacttgtattgtgaagt

SEQ ID NO: 19351 - DNA, 40 bp, Homo sapiens
acttcacaatacaagtaaaggtgattatgtgcacagcctc

SEQ ID NO: 19352 - DNA, 40 bp, Homo sapiens
aggctgtgcacataatcacctttacttgtattgtgaagta

SEQ ID NO: 19353 - DNA, 40 bp, Homo sapiens
tacttcacaatacaagtaaaggtgattatgtgcacagcct

SEQ ID NO: 19354 - DNA, 40 bp, Homo sapiens
ggctgtgcacataatcacctttacttgtattgtgaagtat

SEQ ID NO: 19355 - DNA, 40 bp, Homo sapiens
atacttcacaatacaagtaaaggtgattatgtgcacagcc

SEQ ID NO: 19356 - DNA, 40 bp, Homo sapiens
gctgtgcacataatcacctttacttgtattgtgaagtata

SEQ ID NO: 19357 - DNA, 40 bp, Homo sapiens
tatacttcacaatacaagtaaaggtgattatgtgcacagc

SEQ ID NO: 19358 - DNA, 40 bp, Homo sapiens
ctgtgcacataatcacctttacttgtattgtgaagtatat

SEQ ID NO: 19359 - DNA, 40 bp, Homo sapiens
atatacttcacaatacaagtaaaggtgattatgtgcacag

SEQ ID NO: 19360 - DNA, 40 bp, Homo sapiens
tgtgcacataatcacctttacttgtattgtgaagtatata

SEQ ID NO: 19361 - DNA, 40 bp, Homo sapiens
tatatacttcacaatacaagtaaaggtgattatgtgcaca

SEQ ID NO: 19362 - DNA, 40 bp, Homo sapiens
gtgcacataatcacctttacttgtattgtgaagtatatat

SEQ ID NO: 19363 - DNA, 40 bp, Homo sapiens
atatatacttcacaatacaagtaaaggtgattatgtgcac

SEQ ID NO: 19364 - DNA, 40 bp, Homo sapiens
tgcacataatcacctttacttgtattgtgaagtatatatt

SEQ ID NO: 19365 - DNA, 40 bp, Homo sapiens
aatatatacttcacaatacaagtaaaggtgattatgtgca

SEQ ID NO: 19366 - DNA, 40 bp, Homo sapiens
gcacataatcacctttacttgtattgtgaagtatatattg

SEQ ID NO: 19367 - DNA, 40 bp, Homo sapiens
caatatatacttcacaatacaagtaaaggtgattatgtgc

SEQ ID NO: 19368 - DNA, 40 bp, Homo sapiens
cacataatcacctttacttgtattgtgaagtatatattgt

SEQ ID NO: 19369 - DNA, 40 bp, Homo sapiens
acaatatatacttcacaatacaagtaaaggtgattatgtg

SEQ ID NO: 19370 - DNA, 40 bp, Homo sapiens
acataatcacctttacttgtattgtgaagtatatattgtt

SEQ ID NO: 19371 - DNA, 40 bp, Homo sapiens
aacaatatatacttcacaatacaagtaaaggtgattatgt

SEQ ID NO: 19372 - DNA, 40 bp, Homo sapiens
cataatcacctttacttgtattgtgaagtatatattgtta

SEQ ID NO: 19373 - DNA, 40 bp, Homo sapiens
taacaatatatacttcacaatacaagtaaaggtgattatg

SEQ ID NO: 19374 - DNA, 40 bp, Homo sapiens
ataatcacctttacttgtattgtgaagtatatattgttat

SEQ ID NO: 19375 - DNA, 40 bp, Homo sapiens
ataacaatatatacttcacaatacaagtaaaggtgattat

SEQ ID NO: 19376 - DNA, 40 bp, Homo sapiens
taatcacctttacttgtattgtgaagtatatattgttatc

SEQ ID NO: 19377 - DNA, 40 bp, Homo sapiens
gataacaatatatacttcacaatacaagtaaaggtgatta

SEQ ID NO: 19378 - DNA, 40 bp, Homo sapiens
aatcacctttacttgtattgtgaagtatatattgttatct

SEQ ID NO: 19379 - DNA, 40 bp, Homo sapiens
agataacaatatatacttcacaatacaagtaaaggtgatt

SEQ ID NO: 19380 - DNA, 40 bp, Homo sapiens
atcacctttacttgtattgtgaagtatatattgttatctt

SEQ ID NO: 19381 - DNA, 40 bp, Homo sapiens
aagataacaatatatacttcacaatacaagtaaaggtgat

SEQ ID NO: 19382 - DNA, 40 bp, Homo sapiens
tcacctttacttgtattgtgaagtatatattgttatcttt

SEQ ID NO: 19383 - DNA, 40 bp, Homo sapiens
aaagataacaatatatacttcacaatacaagtaaaggtga

SEQ ID NO: 19384 - DNA, 40 bp, Homo sapiens
cacctttacttgtattgtgaagtatatattgttatctttt

SEQ ID NO: 19385 - DNA, 40 bp, Homo sapiens
aaaagataacaatatatacttcacaatacaagtaaaggtg

SEQ ID NO: 19386 - DNA, 40 bp, Homo sapiens
acctttacttgtattgtgaagtatatattgttatctttta

SEQ ID NO: 19387 - DNA, 40 bp, Homo sapiens
taaaagataacaatatatacttcacaatacaagtaaaggt

SEQ ID NO: 19388 - DNA, 40 bp, Homo sapiens
cctttacttgtattgtgaagtatatattgttatcttttat

SEQ ID NO: 19389 - DNA, 40 bp, Homo sapiens
ataaaagataacaatatatacttcacaatacaagtaaagg

SEQ ID NO: 19390 - DNA, 40 bp, Homo sapiens
ctttacttgtattgtgaagtatatattgttatcttttatg

SEQ ID NO: 19391 - DNA, 40 bp, Homo sapiens
cataaaagataacaatatatacttcacaatacaagtaaag

SEQ ID NO: 19392 - DNA, 40 bp, Homo sapiens
tttacttgtattgtgaagtatatattgttatcttttatga

SEQ ID NO: 19393 - DNA, 40 bp, Homo sapiens
tcataaaagataacaatatatacttcacaatacaagtaaa

SEQ ID NO: 19394 - DNA, 40 bp, Homo sapiens
ttacttgtattgtgaagtatatattgttatcttttatgaa

SEQ ID NO: 19395 - DNA, 40 bp, Homo sapiens
ttcataaaagataacaatatatacttcacaatacaagtaa

SEQ ID NO: 19396 - DNA, 40 bp, Homo sapiens
tacttgtattgtgaagtatatattgttatcttttatgaag

SEQ ID NO: 19397 - DNA, 40 bp, Homo sapiens
cttcataaaagataacaatatatacttcacaatacaagta

SEQ ID NO: 19398 - DNA, 40 bp, Homo sapiens
acttgtattgtgaagtatatattgttatcttttatgaagc

SEQ ID NO: 19399 - DNA, 40 bp, Homo sapiens
gcttcataaaagataacaatatatacttcacaatacaagt

SEQ ID NO: 19400 - DNA, 40 bp, Homo sapiens
cttgtattgtgaagtatatattgttatcttttatgaagcc

SEQ ID NO: 19401 - DNA, 40 bp, Homo sapiens
ggcttcataaaagataacaatatatacttcacaatacaag

SEQ ID NO: 19402 - DNA, 40 bp, Homo sapiens
ttgtattgtgaagtatatattgttatcttttatgaagccc

SEQ ID NO: 19403 - DNA, 40 bp, Homo sapiens
gggcttcataaaagataacaatatatacttcacaatacaa

SEQ ID NO: 19404 - DNA, 40 bp, Homo sapiens
tgtattgtgaagtatatattgttatcttttatgaagccca

SEQ ID NO: 19405 - DNA, 40 bp, Homo sapiens
tgggcttcataaaagataacaatatatacttcacaataca

SEQ ID NO: 19406 - DNA, 40 bp, Homo sapiens
gtattgtgaagtatatattgttatcttttatgaagcccac

SEQ ID NO: 19407 - DNA, 40 bp, Homo sapiens
gtgggcttcataaaagataacaatatatacttcacaatac

SEQ ID NO: 19408 - DNA, 40 bp, Homo sapiens
tattgtgaagtatatattgttatcttttatgaagcccact

SEQ ID NO: 19409 - DNA, 40 bp, Homo sapiens
agtgggcttcataaaagataacaatatatacttcacaata

SEQ ID NO: 19410 - DNA, 40 bp, Homo sapiens
attgtgaagtatatattgttatcttttatgaagcccacta

SEQ ID NO: 19411 - DNA, 40 bp, Homo sapiens
tagtgggcttcataaaagataacaatatatacttcacaat

SEQ ID NO: 19412 - DNA, 40 bp, Homo sapiens
ttgtgaagtatatattgttatcttttatgaagcccactaa

SEQ ID NO: 19413 - DNA, 40 bp, Homo sapiens
ttagtgggcttcataaaagataacaatatatacttcacaa

SEQ ID NO: 19414 - DNA, 40 bp, Homo sapiens
tgtgaagtatatattgttatcttttatgaagcccactaaa

SEQ ID NO: 19415 - DNA, 40 bp, Homo sapiens
tttagtgggcttcataaaagataacaatatatacttcaca

SEQ ID NO: 19416 - DNA, 40 bp, Homo sapiens
gtgaagtatatattgttatcttttatgaagcccactaaag

SEQ ID NO: 19417 - DNA, 40 bp, Homo sapiens
ctttagtgggcttcataaaagataacaatatatacttcac

SEQ ID NO: 19418 - DNA, 40 bp, Homo sapiens
tgaagtatatattgttatcttttatgaagcccactaaaga

SEQ ID NO: 19419 - DNA, 40 bp, Homo sapiens
tctttagtgggcttcataaaagataacaatatatacttca

SEQ ID NO: 19420 - DNA, 40 bp, Homo sapiens
gaagtatatattgttatcttttatgaagcccactaaagag

SEQ ID NO: 19421 - DNA, 40 bp, Homo sapiens
ctctttagtgggcttcataaaagataacaatatatacttc

SEQ ID NO: 19422 - DNA, 40 bp, Homo sapiens
aagtatatattgttatcttttatgaagcccactaaagaga

SEQ ID NO: 19423 - DNA, 40 bp, Homo sapiens
tctctttagtgggcttcataaaagataacaatatatactt

SEQ ID NO: 19424 - DNA, 40 bp, Homo sapiens
agtatatattgttatcttttatgaagcccactaaagagat

SEQ ID NO: 19425 - DNA, 40 bp, Homo sapiens
atctctttagtgggcttcataaaagataacaatatatact

SEQ ID NO: 19426 - DNA, 40 bp, Homo sapiens
gtatatattgttatcttttatgaagcccactaaagagata

SEQ ID NO: 19427 - DNA, 40 bp, Homo sapiens
tatctctttagtgggcttcataaaagataacaatatatac

SEQ ID NO: 19428 - DNA, 40 bp, Homo sapiens
tatatattgttatcttttatgaagcccactaaagagataa

SEQ ID NO: 19429 - DNA, 40 bp, Homo sapiens
ttatctctttagtgggcttcataaaagataacaatatata

SEQ ID NO: 19430 - DNA, 40 bp, Homo sapiens
atatattgttatcttttatgaagcccactaaagagataat

SEQ ID NO: 19431 - DNA, 40 bp, Homo sapiens
attatctctttagtgggcttcataaaagataacaatatat

SEQ ID NO: 19432 - DNA, 40 bp, Homo sapiens
tatattgttatcttttatgaagcccactaaagagataatg

SEQ ID NO: 19433 - DNA, 40 bp, Homo sapiens
cattatctctttagtgggcttcataaaagataacaatata

SEQ ID NO: 19434 - DNA, 40 bp, Homo sapiens
atattgttatcttttatgaagcccactaaagagataatga

SEQ ID NO: 19435 - DNA, 40 bp, Homo sapiens
tcattatctctttagtgggcttcataaaagataacaatat

SEQ ID NO: 19436 - DNA, 40 bp, Homo sapiens
tattgttatcttttatgaagcccactaaagagataatgaa

SEQ ID NO: 19437 - DNA, 40 bp, Homo sapiens
ttcattatctctttagtgggcttcataaaagataacaata

SEQ ID NO: 19438 - DNA, 40 bp, Homo sapiens
attgttatcttttatgaagcccactaaagagataatgaaa

SEQ ID NO: 19439 - DNA, 40 bp, Homo sapiens
tttcattatctctttagtgggcttcataaaagataacaat

SEQ ID NO: 19440 - DNA, 40 bp, Homo sapiens
ttgttatcttttatgaagcccactaaagagataatgaaat

SEQ ID NO: 19441 - DNA, 40 bp, Homo sapiens
atttcattatctctttagtgggcttcataaaagataacaa

SEQ ID NO: 19442 - DNA, 40 bp, Homo sapiens
tgttatcttttatgaagcccactaaagagataatgaaata

SEQ ID NO: 19443 - DNA, 40 bp, Homo sapiens
tatttcattatctctttagtgggcttcataaaagataaca

SEQ ID NO: 19444 - DNA, 40 bp, Homo sapiens
gttatcttttatgaagcccactaaagagataatgaaatac

SEQ ID NO: 19445 - DNA, 40 bp, Homo sapiens
gtatttcattatctctttagtgggcttcataaaagataac

SEQ ID NO: 19446 - DNA, 40 bp, Homo sapiens
ttatcttttatgaagcccactaaagagataatgaaatacc

SEQ ID NO: 19447 - DNA, 40 bp, Homo sapiens
ggtatttcattatctctttagtgggcttcataaaagataa

SEQ ID NO: 19448 - DNA, 40 bp, Homo sapiens
tatcttttatgaagcccactaaagagataatgaaatacct

SEQ ID NO: 19449 - DNA, 40 bp, Homo sapiens
aggtatttcattatctctttagtgggcttcataaaagata

SEQ ID NO: 19450 - DNA, 40 bp, Homo sapiens
atcttttatgaagcccactaaagagataatgaaatacctc

SEQ ID NO: 19451 - DNA, 40 bp, Homo sapiens
gaggtatttcattatctctttagtgggcttcataaaagat

SEQ ID NO: 19452 - DNA, 40 bp, Homo sapiens
tcttttatgaagcccactaaagagataatgaaatacctcg

SEQ ID NO: 19453 - DNA, 40 bp, Homo sapiens
cgaggtatttcattatctctttagtgggcttcataaaaga

SEQ ID NO: 19454 - DNA, 40 bp, Homo sapiens
cttttatgaagcccactaaagagataatgaaatacctcgt

SEQ ID NO: 19455 - DNA, 40 bp, Homo sapiens
acgaggtatttcattatctctttagtgggcttcataaaag

SEQ ID NO: 19456 - DNA, 40 bp, Homo sapiens
ttttatgaagcccactaaagagataatgaaatacctcgtt

SEQ ID NO: 19457 - DNA, 40 bp, Homo sapiens
aacgaggtatttcattatctctttagtgggcttcataaaa

SEQ ID NO: 19458 - DNA, 40 bp, Homo sapiens
tttatgaagcccactaaagagataatgaaatacctcgtta

SEQ ID NO: 19459 - DNA, 40 bp, Homo sapiens
taacgaggtatttcattatctctttagtgggcttcataaa

SEQ ID NO: 19460 - DNA, 40 bp, Homo sapiens
ttatgaagcccactaaagagataatgaaatacctcgttat

SEQ ID NO: 19461 - DNA, 40 bp, Homo sapiens
ataacgaggtatttcattatctctttagtgggcttcataa

SEQ ID NO: 19462 - DNA, 40 bp, Homo sapiens
tatgaagcccactaaagagataatgaaatacctcgttatt

SEQ ID NO: 19463 - DNA, 40 bp, Homo sapiens
aataacgaggtatttcattatctctttagtgggcttcata

SEQ ID NO: 19464 - DNA, 40 bp, Homo sapiens
atgaagcccactaaagagataatgaaatacctcgttatta

SEQ ID NO: 19465 - DNA, 40 bp, Homo sapiens
taataacgaggtatttcattatctctttagtgggcttcat

SEQ ID NO: 19466 - DNA, 40 bp, Homo sapiens
tgaagcccactaaagagataatgaaatacctcgttattag

SEQ ID NO: 19467 - DNA, 40 bp, Homo sapiens
ctaataacgaggtatttcattatctctttagtgggcttca

SEQ ID NO: 19468 - DNA, 40 bp, Homo sapiens
gaagcccactaaagagataatgaaatacctcgttattagg

SEQ ID NO: 19469 - DNA, 40 bp, Homo sapiens
cctaataacgaggtatttcattatctctttagtgggcttc

SEQ ID NO: 19470 - DNA, 40 bp, Homo sapiens
aagcccactaaagagataatgaaatacctcgttattaggg

SEQ ID NO: 19471 - DNA, 40 bp, Homo sapiens
ccctaataacgaggtatttcattatctctttagtgggctt

SEQ ID NO: 19472 - DNA, 40 bp, Homo sapiens
agcccactaaagagataatgaaatacctcgttattagggc

SEQ ID NO: 19473 - DNA, 40 bp, Homo sapiens
gccctaataacgaggtatttcattatctctttagtgggct

SEQ ID NO: 19474 - DNA, 40 bp, Homo sapiens
gcccactaaagagataatgaaatacctcgttattagggca

SEQ ID NO: 19475 - DNA, 40 bp, Homo sapiens
tgccctaataacgaggtatttcattatctctttagtgggc

SEQ ID NO: 19476 - DNA, 40 bp, Homo sapiens
cccactaaagagataatgaaatacctcgttattagggcaa

SEQ ID NO: 19477 - DNA, 40 bp, Homo sapiens
ttgccctaataacgaggtatttcattatctctttagtggg

SEQ ID NO: 19478 - DNA, 40 bp, Homo sapiens
ccactaaagagataatgaaatacctcgttattagggcaag

SEQ ID NO: 19479 - DNA, 40 bp, Homo sapiens
cttgccctaataacgaggtatttcattatctctttagtgg

SEQ ID NO: 19480 - DNA, 40 bp, Homo sapiens
cactaaagagataatgaaatacctcgttattagggcaaga

SEQ ID NO: 19481 - DNA, 40 bp, Homo sapiens
tcttgccctaataacgaggtatttcattatctctttagtg

SEQ ID NO: 19482 - DNA, 40 bp, Homo sapiens
actaaagagataatgaaatacctcgttattagggcaagat

SEQ ID NO: 19483 - DNA, 40 bp, Homo sapiens
atcttgccctaataacgaggtatttcattatctctttagt

SEQ ID NO: 19484 - DNA, 40 bp, Homo sapiens
ctaaagagataatgaaatacctcgttattagggcaagatt

SEQ ID NO: 19485 - DNA, 40 bp, Homo sapiens
aatcttgccctaataacgaggtatttcattatctctttag

SEQ ID NO: 19486 - DNA, 40 bp, Homo sapiens
taaagagataatgaaatacctcgttattagggcaagatta

SEQ ID NO: 19487 - DNA, 40 bp, Homo sapiens
taatcttgccctaataacgaggtatttcattatctcttta

SEQ ID NO: 19488 - DNA, 40 bp, Homo sapiens
aaagagataatgaaatacctcgttattagggcaagattat

SEQ ID NO: 19489 - DNA, 40 bp, Homo sapiens
ataatcttgccctaataacgaggtatttcattatctcttt

SEQ ID NO: 19490 - DNA, 40 bp, Homo sapiens
aagagataatgaaatacctcgttattagggcaagattatt

SEQ ID NO: 19491 - DNA, 40 bp, Homo sapiens
aataatcttgccctaataacgaggtatttcattatctctt

SEQ ID NO: 19492 - DNA, 40 bp, Homo sapiens
agagataatgaaatacctcgttattagggcaagattattg

SEQ ID NO: 19493 - DNA, 40 bp, Homo sapiens
caataatcttgccctaataacgaggtatttcattatctct

SEQ ID NO: 19494 - DNA, 40 bp, Homo sapiens
gagataatgaaatacctcgttattagggcaagattattga

SEQ ID NO: 19495 - DNA, 40 bp, Homo sapiens
tcaataatcttgccctaataacgaggtatttcattatctc

SEQ ID NO: 19496 - DNA, 40 bp, Homo sapiens
agataatgaaatacctcgttattagggcaagattattgaa

SEQ ID NO: 19497 - DNA, 40 bp, Homo sapiens
ttcaataatcttgccctaataacgaggtatttcattatct

SEQ ID NO: 19498 - DNA, 40 bp, Homo sapiens
gataatgaaatacctcgttattagggcaagattattgaaa

SEQ ID NO: 19499 - DNA, 40 bp, Homo sapiens
tttcaataatcttgccctaataacgaggtatttcattatc

SEQ ID NO: 19500 - DNA, 40 bp, Homo sapiens
ataatgaaatacctcgttattagggcaagattattgaaaa

SEQ ID NO: 19501 - DNA, 40 bp, Homo sapiens
ttttcaataatcttgccctaataacgaggtatttcattat

SEQ ID NO: 19502 - DNA, 40 bp, Homo sapiens
taatgaaatacctcgttattagggcaagattattgaaaac

SEQ ID NO: 19503 - DNA, 40 bp, Homo sapiens
gttttcaataatcttgccctaataacgaggtatttcatta

SEQ ID NO: 19504 - DNA, 40 bp, Homo sapiens
aatgaaatacctcgttattagggcaagattattgaaaact

SEQ ID NO: 19505 - DNA, 40 bp, Homo sapiens
agttttcaataatcttgccctaataacgaggtatttcatt

SEQ ID NO: 19506 - DNA, 40 bp, Homo sapiens
atgaaatacctcgttattagggcaagattattgaaaactc

SEQ ID NO: 19507 - DNA, 40 bp, Homo sapiens
gagttttcaataatcttgccctaataacgaggtatttcat

SEQ ID NO: 19508 - DNA, 40 bp, Homo sapiens
tgaaatacctcgttattagggcaagattattgaaaactca

SEQ ID NO: 19509 - DNA, 40 bp, Homo sapiens
tgagttttcaataatcttgccctaataacgaggtatttca

SEQ ID NO: 19510 - DNA, 40 bp, Homo sapiens
gaaatacctcgttattagggcaagattattgaaaactcaa

SEQ ID NO: 19511 - DNA, 40 bp, Homo sapiens
ttgagttttcaataatcttgccctaataacgaggtatttc

SEQ ID NO: 19512 - DNA, 40 bp, Homo sapiens
aaatacctcgttattagggcaagattattgaaaactcaaa

SEQ ID NO: 19513 - DNA, 40 bp, Homo sapiens
tttgagttttcaataatcttgccctaataacgaggtattt

SEQ ID NO: 19514 - DNA, 40 bp, Homo sapiens
aatacctcgttattagggcaagattattgaaaactcaaaa

SEQ ID NO: 19515 - DNA, 40 bp, Homo sapiens
ttttgagttttcaataatcttgccctaataacgaggtatt

SEQ ID NO: 19516 - DNA, 40 bp, Homo sapiens
atacctcgttattagggcaagattattgaaaactcaaaat

SEQ ID NO: 19517 - DNA, 40 bp, Homo sapiens
attttgagttttcaataatcttgccctaataacgaggtat

SEQ ID NO: 19518 - DNA, 40 bp, Homo sapiens
tacctcgttattagggcaagattattgaaaactcaaaata

SEQ ID NO: 19519 - DNA, 40 bp, Homo sapiens
tattttgagttttcaataatcttgccctaataacgaggta

SEQ ID NO: 19520 - DNA, 40 bp, Homo sapiens
acctcgttattagggcaagattattgaaaactcaaaatag

SEQ ID NO: 19521 - DNA, 40 bp, Homo sapiens
ctattttgagttttcaataatcttgccctaataacgaggt

SEQ ID NO: 19522 - DNA, 40 bp, Homo sapiens
cctcgttattagggcaagattattgaaaactcaaaatagc

SEQ ID NO: 19523 - DNA, 40 bp, Homo sapiens
gctattttgagttttcaataatcttgccctaataacgagg

SEQ ID NO: 19524 - DNA, 40 bp, Homo sapiens
ctcgttattagggcaagattattgaaaactcaaaatagcc

SEQ ID NO: 19525 - DNA, 40 bp, Homo sapiens
ggctattttgagttttcaataatcttgccctaataacgag

SEQ ID NO: 19526 - DNA, 40 bp, Homo sapiens
tcgttattagggcaagattattgaaaactcaaaatagccc

SEQ ID NO: 19527 - DNA, 40 bp, Homo sapiens
gggctattttgagttttcaataatcttgccctaataacga

SEQ ID NO: 19528 - DNA, 40 bp, Homo sapiens
cgttattagggcaagattattgaaaactcaaaatagcccc

SEQ ID NO: 19529 - DNA, 40 bp, Homo sapiens
ggggctattttgagttttcaataatcttgccctaataacg

SEQ ID NO: 19530 - DNA, 40 bp, Homo sapiens
gttattagggcaagattattgaaaactcaaaatagccccc

SEQ ID NO: 19531 - DNA, 40 bp, Homo sapiens
gggggctattttgagttttcaataatcttgccctaataac

SEQ ID NO: 19532 - DNA, 40 bp, Homo sapiens
ttattagggcaagattattgaaaactcaaaatagccccca

SEQ ID NO: 19533 - DNA, 40 bp, Homo sapiens
tgggggctattttgagttttcaataatcttgccctaataa

SEQ ID NO: 19534 - DNA, 40 bp, Homo sapiens
tattagggcaagattattgaaaactcaaaatagcccccaa

SEQ ID NO: 19535 - DNA, 40 bp, Homo sapiens
ttgggggctattttgagttttcaataatcttgccctaata

SEQ ID NO: 19536 - DNA, 40 bp, Homo sapiens
attagggcaagattattgaaaactcaaaatagcccccaaa

SEQ ID NO: 19537 - DNA, 40 bp, Homo sapiens
tttgggggctattttgagttttcaataatcttgccctaat

SEQ ID NO: 19538 - DNA, 40 bp, Homo sapiens
ttagggcaagattattgaaaactcaaaatagcccccaaac

SEQ ID NO: 19539 - DNA, 40 bp, Homo sapiens
gtttgggggctattttgagttttcaataatcttgccctaa

SEQ ID NO: 19540 - DNA, 40 bp, Homo sapiens
tagggcaagattattgaaaactcaaaatagcccccaaaca

SEQ ID NO: 19541 - DNA, 40 bp, Homo sapiens
tgtttgggggctattttgagttttcaataatcttgcccta

SEQ ID NO: 19542 - DNA, 40 bp, Homo sapiens
agggcaagattattgaaaactcaaaatagcccccaaacac

SEQ ID NO: 19543 - DNA, 40 bp, Homo sapiens
gtgtttgggggctattttgagttttcaataatcttgccct

SEQ ID NO: 19544 - DNA, 40 bp, Homo sapiens
gggcaagattattgaaaactcaaaatagcccccaaacaca

SEQ ID NO: 19545 - DNA, 40 bp, Homo sapiens
tgtgtttgggggctattttgagttttcaataatcttgccc

SEQ ID NO: 19546 - DNA, 40 bp, Homo sapiens
ggcaagattattgaaaactcaaaatagcccccaaacacaa

SEQ ID NO: 19547 - DNA, 40 bp, Homo sapiens
ttgtgtttgggggctattttgagttttcaataatcttgcc

SEQ ID NO: 19548 - DNA, 40 bp, Homo sapiens
gcaagattattgaaaactcaaaatagcccccaaacacaat

SEQ ID NO: 19549 - DNA, 40 bp, Homo sapiens
attgtgtttgggggctattttgagttttcaataatcttgc

SEQ ID NO: 19550 - DNA, 40 bp, Homo sapiens
caagattattgaaaactcaaaatagcccccaaacacaata

SEQ ID NO: 19551 - DNA, 40 bp, Homo sapiens
tattgtgtttgggggctattttgagttttcaataatcttg

SEQ ID NO: 19552 - DNA, 40 bp, Homo sapiens
aagattattgaaaactcaaaatagcccccaaacacaatac

SEQ ID NO: 19553 - DNA, 40 bp, Homo sapiens
gtattgtgtttgggggctattttgagttttcaataatctt

SEQ ID NO: 19554 - DNA, 40 bp, Homo sapiens
agattattgaaaactcaaaatagcccccaaacacaatact

SEQ ID NO: 19555 - DNA, 40 bp, Homo sapiens
agtattgtgtttgggggctattttgagttttcaataatct

SEQ ID NO: 19556 - DNA, 40 bp, Homo sapiens
gattattgaaaactcaaaatagcccccaaacacaatactt

SEQ ID NO: 19557 - DNA, 40 bp, Homo sapiens
aagtattgtgtttgggggctattttgagttttcaataatc

SEQ ID NO: 19558 - DNA, 40 bp, Homo sapiens
attattgaaaactcaaaatagcccccaaacacaatacttg

SEQ ID NO: 19559 - DNA, 40 bp, Homo sapiens
caagtattgtgtttgggggctattttgagttttcaataat

SEQ ID NO: 19560 - DNA, 40 bp, Homo sapiens
ttattgaaaactcaaaatagcccccaaacacaatacttgg

SEQ ID NO: 19561 - DNA, 40 bp, Homo sapiens
ccaagtattgtgtttgggggctattttgagttttcaataa

SEQ ID NO: 19562 - DNA, 40 bp, Homo sapiens
tattgaaaactcaaaatagcccccaaacacaatacttggc

SEQ ID NO: 19563 - DNA, 40 bp, Homo sapiens
gccaagtattgtgtttgggggctattttgagttttcaata

SEQ ID NO: 19564 - DNA, 40 bp, Homo sapiens
attgaaaactcaaaatagcccccaaacacaatacttggct

SEQ ID NO: 19565 - DNA, 40 bp, Homo sapiens
agccaagtattgtgtttgggggctattttgagttttcaat

SEQ ID NO: 19566 - DNA, 40 bp, Homo sapiens
ttgaaaactcaaaatagcccccaaacacaatacttggcta

SEQ ID NO: 19567 - DNA, 40 bp, Homo sapiens
tagccaagtattgtgtttgggggctattttgagttttcaa

SEQ ID NO: 19568 - DNA, 40 bp, Homo sapiens
tgaaaactcaaaatagcccccaaacacaatacttggctag

SEQ ID NO: 19569 - DNA, 40 bp, Homo sapiens
ctagccaagtattgtgtttgggggctattttgagttttca

SEQ ID NO: 19570 - DNA, 40 bp, Homo sapiens
gaaaactcaaaatagcccccaaacacaatacttggctaga

SEQ ID NO: 19571 - DNA, 40 bp, Homo sapiens
tctagccaagtattgtgtttgggggctattttgagttttc

SEQ ID NO: 19572 - DNA, 40 bp, Homo sapiens
aaaactcaaaatagcccccaaacacaatacttggctagaa

SEQ ID NO: 19573 - DNA, 40 bp, Homo sapiens
ttctagccaagtattgtgtttgggggctattttgagtttt

SEQ ID NO: 19574 - DNA, 40 bp, Homo sapiens
aaactcaaaatagcccccaaacacaatacttggctagaaa

SEQ ID NO: 19575 - DNA, 40 bp, Homo sapiens
tttctagccaagtattgtgtttgggggctattttgagttt

SEQ ID NO: 19576 - DNA, 40 bp, Homo sapiens
aactcaaaatagcccccaaacacaatacttggctagaaat

SEQ ID NO: 19577 - DNA, 40 bp, Homo sapiens
atttctagccaagtattgtgtttgggggctattttgagtt

SEQ ID NO: 19578 - DNA, 40 bp, Homo sapiens
actcaaaatagcccccaaacacaatacttggctagaaata

SEQ ID NO: 19579 - DNA, 40 bp, Homo sapiens
tatttctagccaagtattgtgtttgggggctattttgagt

SEQ ID NO: 19580 - DNA, 40 bp, Homo sapiens
ctcaaaatagcccccaaacacaatacttggctagaaatat

SEQ ID NO: 19581 - DNA, 40 bp, Homo sapiens
atatttctagccaagtattgtgtttgggggctattttgag

SEQ ID NO: 19582 - DNA, 40 bp, Homo sapiens
tcaaaatagcccccaaacacaatacttggctagaaatata

SEQ ID NO: 19583 - DNA, 40 bp, Homo sapiens
tatatttctagccaagtattgtgtttgggggctattttga

SEQ ID NO: 19584 - DNA, 40 bp, Homo sapiens
caaaatagcccccaaacacaatacttggctagaaatatat

SEQ ID NO: 19585 - DNA, 40 bp, Homo sapiens
atatatttctagccaagtattgtgtttgggggctattttg

SEQ ID NO: 19586 - DNA, 40 bp, Homo sapiens
aaaatagcccccaaacacaatacttggctagaaatatata

SEQ ID NO: 19587 - DNA, 40 bp, Homo sapiens
tatatatttctagccaagtattgtgtttgggggctatttt

SEQ ID NO: 19588 - DNA, 40 bp, Homo sapiens
aaatagcccccaaacacaatacttggctagaaatatatac

SEQ ID NO: 19589 - DNA, 40 bp, Homo sapiens
gtatatatttctagccaagtattgtgtttgggggctattt

SEQ ID NO: 19590 - DNA, 40 bp, Homo sapiens
aatagcccccaaacacaatacttggctagaaatatatacc

SEQ ID NO: 19591 - DNA, 40 bp, Homo sapiens
ggtatatatttctagccaagtattgtgtttgggggctatt

SEQ ID NO: 19592 - DNA, 40 bp, Homo sapiens
atagcccccaaacacaatacttggctagaaatatatacct

SEQ ID NO: 19593 - DNA, 40 bp, Homo sapiens
aggtatatatttctagccaagtattgtgtttgggggctat

SEQ ID NO: 19594 - DNA, 40 bp, Homo sapiens
tagcccccaaacacaatacttggctagaaatatatacctt

SEQ ID NO: 19595 - DNA, 40 bp, Homo sapiens
aaggtatatatttctagccaagtattgtgtttgggggcta

SEQ ID NO: 19596 - DNA, 40 bp, Homo sapiens
agcccccaaacacaatacttggctagaaatatataccttt

SEQ ID NO: 19597 - DNA, 40 bp, Homo sapiens
aaaggtatatatttctagccaagtattgtgtttgggggct

SEQ ID NO: 19598 - DNA, 40 bp, Homo sapiens
gcccccaaacacaatacttggctagaaatatataccttta

SEQ ID NO: 19599 - DNA, 40 bp, Homo sapiens
taaaggtatatatttctagccaagtattgtgtttgggggc

SEQ ID NO: 19600 - DNA, 40 bp, Homo sapiens
cccccaaacacaatacttggctagaaatatatacctttat

SEQ ID NO: 19601 - DNA, 40 bp, Homo sapiens
ataaaggtatatatttctagccaagtattgtgtttggggg

SEQ ID NO: 19602 - DNA, 40 bp, Homo sapiens
ccccaaacacaatacttggctagaaatatatacctttata

SEQ ID NO: 19603 - DNA, 40 bp, Homo sapiens
tataaaggtatatatttctagccaagtattgtgtttgggg

SEQ ID NO: 19604 - DNA, 40 bp, Homo sapiens
cccaaacacaatacttggctagaaatatatacctttatag

SEQ ID NO: 19605 - DNA, 40 bp, Homo sapiens
ctataaaggtatatatttctagccaagtattgtgtttggg

SEQ ID NO: 19606 - DNA, 40 bp, Homo sapiens
ccaaacacaatacttggctagaaatatatacctttatagt

SEQ ID NO: 19607 - DNA, 40 bp, Homo sapiens
actataaaggtatatatttctagccaagtattgtgtttgg

SEQ ID NO: 19608 - DNA, 40 bp, Homo sapiens
caaacacaatacttggctagaaatatatacctttatagtt

SEQ ID NO: 19609 - DNA, 40 bp, Homo sapiens
aactataaaggtatatatttctagccaagtattgtgtttg

SEQ ID NO: 19610 - DNA, 40 bp, Homo sapiens
aaacacaatacttggctagaaatatatacctttatagttc

SEQ ID NO: 19611 - DNA, 40 bp, Homo sapiens
gaactataaaggtatatatttctagccaagtattgtgttt

SEQ ID NO: 19612 - DNA, 40 bp, Homo sapiens
aacacaatacttggctagaaatatatacctttatagttca

SEQ ID NO: 19613 - DNA, 40 bp, Homo sapiens
tgaactataaaggtatatatttctagccaagtattgtgtt

SEQ ID NO: 19614 - DNA, 40 bp, Homo sapiens
acacaatacttggctagaaatatatacctttatagttcag

SEQ ID NO: 19615 - DNA, 40 bp, Homo sapiens
ctgaactataaaggtatatatttctagccaagtattgtgt

SEQ ID NO: 19616 - DNA, 40 bp, Homo sapiens
cacaatacttggctagaaatatatacctttatagttcaga

SEQ ID NO: 19617 - DNA, 40 bp, Homo sapiens
tctgaactataaaggtatatatttctagccaagtattgtg

SEQ ID NO: 19618 - DNA, 40 bp, Homo sapiens
acaatacttggctagaaatatatacctttatagttcagag

SEQ ID NO: 19619 - DNA, 40 bp, Homo sapiens
ctctgaactataaaggtatatatttctagccaagtattgt

SEQ ID NO: 19620 - DNA, 40 bp, Homo sapiens
caatacttggctagaaatatatacctttatagttcagaga

SEQ ID NO: 19621 - DNA, 40 bp, Homo sapiens
tctctgaactataaaggtatatatttctagccaagtattg

SEQ ID NO: 19622 - DNA, 40 bp, Homo sapiens
aatacttggctagaaatatatacctttatagttcagagat

SEQ ID NO: 19623 - DNA, 40 bp, Homo sapiens
atctctgaactataaaggtatatatttctagccaagtatt

SEQ ID NO: 19624 - DNA, 40 bp, Homo sapiens
atacttggctagaaatatatacctttatagttcagagatc

SEQ ID NO: 19625 - DNA, 40 bp, Homo sapiens
gatctctgaactataaaggtatatatttctagccaagtat

SEQ ID NO: 19626 - DNA, 40 bp, Homo sapiens
tacttggctagaaatatatacctttatagttcagagatca

SEQ ID NO: 19627 - DNA, 40 bp, Homo sapiens
tgatctctgaactataaaggtatatatttctagccaagta

SEQ ID NO: 19628 - DNA, 40 bp, Homo sapiens
acttggctagaaatatatacctttatagttcagagatcat

SEQ ID NO: 19629 - DNA, 40 bp, Homo sapiens
atgatctctgaactataaaggtatatatttctagccaagt

SEQ ID NO: 19630 - DNA, 40 bp, Homo sapiens
cttggctagaaatatatacctttatagttcagagatcatt

SEQ ID NO: 19631 - DNA, 40 bp, Homo sapiens
aatgatctctgaactataaaggtatatatttctagccaag

SEQ ID NO: 19632 - DNA, 40 bp, Homo sapiens
ttggctagaaatatatacctttatagttcagagatcattt

SEQ ID NO: 19633 - DNA, 40 bp, Homo sapiens
aaatgatctctgaactataaaggtatatatttctagccaa

SEQ ID NO: 19634 - DNA, 40 bp, Homo sapiens
tggctagaaatatatacctttatagttcagagatcattta

SEQ ID NO: 19635 - DNA, 40 bp, Homo sapiens
taaatgatctctgaactataaaggtatatatttctagcca

SEQ ID NO: 19636 - DNA, 40 bp, Homo sapiens
ggctagaaatatatacctttatagttcagagatcatttat

SEQ ID NO: 19637 - DNA, 40 bp, Homo sapiens
ataaatgatctctgaactataaaggtatatatttctagcc

SEQ ID NO: 19638 - DNA, 40 bp, Homo sapiens
gctagaaatatatacctttatagttcagagatcatttatt

SEQ ID NO: 19639 - DNA, 40 bp, Homo sapiens
aataaatgatctctgaactataaaggtatatatttctagc

SEQ ID NO: 19640 - DNA, 40 bp, Homo sapiens
ctagaaatatatacctttatagttcagagatcatttatta

SEQ ID NO: 19641 - DNA, 40 bp, Homo sapiens
taataaatgatctctgaactataaaggtatatatttctag

SEQ ID NO: 19642 - DNA, 40 bp, Homo sapiens
tagaaatatatacctttatagttcagagatcatttattat

SEQ ID NO: 19643 - DNA, 40 bp, Homo sapiens
ataataaatgatctctgaactataaaggtatatatttcta

SEQ ID NO: 19644 - DNA, 40 bp, Homo sapiens
agaaatatatacctttatagttcagagatcatttattatc

SEQ ID NO: 19645 - DNA, 40 bp, Homo sapiens
gataataaatgatctctgaactataaaggtatatatttct

SEQ ID NO: 19646 - DNA, 40 bp, Homo sapiens
gaaatatatacctttatagttcagagatcatttattatca

SEQ ID NO: 19647 - DNA, 40 bp, Homo sapiens
tgataataaatgatctctgaactataaaggtatatatttc

SEQ ID NO: 19648 - DNA, 40 bp, Homo sapiens
aaatatatacctttatagttcagagatcatttattatcaa

SEQ ID NO: 19649 - DNA, 40 bp, Homo sapiens
ttgataataaatgatctctgaactataaaggtatatattt

SEQ ID NO: 19650 - DNA, 40 bp, Homo sapiens
aatatatacctttatagttcagagatcatttattatcaaa

SEQ ID NO: 19651 - DNA, 40 bp, Homo sapiens
tttgataataaatgatctctgaactataaaggtatatatt

SEQ ID NO: 19652 - DNA, 40 bp, Homo sapiens
atatatacctttatagttcagagatcatttattatcaaaa

SEQ ID NO: 19653 - DNA, 40 bp, Homo sapiens
ttttgataataaatgatctctgaactataaaggtatatat

SEQ ID NO: 19654 - DNA, 40 bp, Homo sapiens
tatatacctttatagttcagagatcatttattatcaaaac

SEQ ID NO: 19655 - DNA, 40 bp, Homo sapiens
gttttgataataaatgatctctgaactataaaggtatata

SEQ ID NO: 19656 - DNA, 40 bp, Homo sapiens
atatacctttatagttcagagatcatttattatcaaaacc

SEQ ID NO: 19657 - DNA, 40 bp, Homo sapiens
ggttttgataataaatgatctctgaactataaaggtatat

SEQ ID NO: 19658 - DNA, 40 bp, Homo sapiens
tatacctttatagttcagagatcatttattatcaaaaccc

SEQ ID NO: 19659 - DNA, 40 bp, Homo sapiens
gggttttgataataaatgatctctgaactataaaggtata

SEQ ID NO: 19660 - DNA, 40 bp, Homo sapiens
atacctttatagttcagagatcatttattatcaaaaccct

SEQ ID NO: 19661 - DNA, 40 bp, Homo sapiens
agggttttgataataaatgatctctgaactataaaggtat

SEQ ID NO: 19662 - DNA, 40 bp, Homo sapiens
tacctttatagttcagagatcatttattatcaaaaccctg

SEQ ID NO: 19663 - DNA, 40 bp, Homo sapiens
cagggttttgataataaatgatctctgaactataaaggta

SEQ ID NO: 19664 - DNA, 40 bp, Homo sapiens
acctttatagttcagagatcatttattatcaaaaccctga

SEQ ID NO: 19665 - DNA, 40 bp, Homo sapiens
tcagggttttgataataaatgatctctgaactataaaggt

SEQ ID NO: 19666 - DNA, 40 bp, Homo sapiens
cctttatagttcagagatcatttattatcaaaaccctgaa

SEQ ID NO: 19667 - DNA, 40 bp, Homo sapiens
ttcagggttttgataataaatgatctctgaactataaagg

SEQ ID NO: 19668 - DNA, 40 bp, Homo sapiens
ctttatagttcagagatcatttattatcaaaaccctgaag

SEQ ID NO: 19669 - DNA, 40 bp, Homo sapiens
cttcagggttttgataataaatgatctctgaactataaag

SEQ ID NO: 19670 - DNA, 40 bp, Homo sapiens
tttatagttcagagatcatttattatcaaaaccctgaagt

SEQ ID NO: 19671 - DNA, 40 bp, Homo sapiens
acttcagggttttgataataaatgatctctgaactataaa

SEQ ID NO: 19672 - DNA, 40 bp, Homo sapiens
ttatagttcagagatcatttattatcaaaaccctgaagtt

SEQ ID NO: 19673 - DNA, 40 bp, Homo sapiens
aacttcagggttttgataataaatgatctctgaactataa

SEQ ID NO: 19674 - DNA, 40 bp, Homo sapiens
tatagttcagagatcatttattatcaaaaccctgaagttt

SEQ ID NO: 19675 - DNA, 40 bp, Homo sapiens
aaacttcagggttttgataataaatgatctctgaactata

SEQ ID NO: 19676 - DNA, 40 bp, Homo sapiens
atagttcagagatcatttattatcaaaaccctgaagtttt

SEQ ID NO: 19677 - DNA, 40 bp, Homo sapiens
aaaacttcagggttttgataataaatgatctctgaactat

SEQ ID NO: 19678 - DNA, 40 bp, Homo sapiens
tagttcagagatcatttattatcaaaaccctgaagttttt

SEQ ID NO: 19679 - DNA, 40 bp, Homo sapiens
aaaaacttcagggttttgataataaatgatctctgaacta

SEQ ID NO: 19680 - DNA, 40 bp, Homo sapiens
agttcagagatcatttattatcaaaaccctgaagtttttt

SEQ ID NO: 19681 - DNA, 40 bp, Homo sapiens
aaaaaacttcagggttttgataataaatgatctctgaact

SEQ ID NO: 19682 - DNA, 40 bp, Homo sapiens
gttcagagatcatttattatcaaaaccctgaagttttttt

SEQ ID NO: 19683 - DNA, 40 bp, Homo sapiens
aaaaaaacttcagggttttgataataaatgatctctgaac

SEQ ID NO: 19684 - DNA, 40 bp, Homo sapiens
ttcagagatcatttattatcaaaaccctgaagtttttttt

SEQ ID NO: 19685 - DNA, 40 bp, Homo sapiens
aaaaaaaacttcagggttttgataataaatgatctctgaa

SEQ ID NO: 19686 - DNA, 40 bp, Homo sapiens
tcagagatcatttattatcaaaaccctgaagttttttttc

SEQ ID NO: 19687 - DNA, 40 bp, Homo sapiens
gaaaaaaaacttcagggttttgataataaatgatctctga

SEQ ID NO: 19688 - DNA, 40 bp, Homo sapiens
cagagatcatttattatcaaaaccctgaagttttttttct

SEQ ID NO: 19689 - DNA, 40 bp, Homo sapiens
agaaaaaaaacttcagggttttgataataaatgatctctg

SEQ ID NO: 19690 - DNA, 40 bp, Homo sapiens
agagatcatttattatcaaaaccctgaagttttttttcta

SEQ ID NO: 19691 - DNA, 40 bp, Homo sapiens
tagaaaaaaaacttcagggttttgataataaatgatctct

SEQ ID NO: 19692 - DNA, 40 bp, Homo sapiens
gagatcatttattatcaaaaccctgaagttttttttctaa

SEQ ID NO: 19693 - DNA, 40 bp, Homo sapiens
ttagaaaaaaaacttcagggttttgataataaatgatctc

SEQ ID NO: 19694 - DNA, 40 bp, Homo sapiens
agatcatttattatcaaaaccctgaagttttttttctaag

SEQ ID NO: 19695 - DNA, 40 bp, Homo sapiens
cttagaaaaaaaacttcagggttttgataataaatgatct

SEQ ID NO: 19696 - DNA, 40 bp, Homo sapiens
gatcatttattatcaaaaccctgaagttttttttctaagg

SEQ ID NO: 19697 - DNA, 40 bp, Homo sapiens
ccttagaaaaaaaacttcagggttttgataataaatgatc

SEQ ID NO: 19698 - DNA, 40 bp, Homo sapiens
atcatttattatcaaaaccctgaagttttttttctaaggt

SEQ ID NO: 19699 - DNA, 40 bp, Homo sapiens
accttagaaaaaaaacttcagggttttgataataaatgat

SEQ ID NO: 19700 - DNA, 40 bp, Homo sapiens
tcatttattatcaaaaccctgaagttttttttctaaggta

SEQ ID NO: 19701 - DNA, 40 bp, Homo sapiens
taccttagaaaaaaaacttcagggttttgataataaatga

SEQ ID NO: 19702 - DNA, 40 bp, Homo sapiens
catttattatcaaaaccctgaagttttttttctaaggtaa

SEQ ID NO: 19703 - DNA, 40 bp, Homo sapiens
ttaccttagaaaaaaaacttcagggttttgataataaatg

SEQ ID NO: 19704 - DNA, 40 bp, Homo sapiens
atttattatcaaaaccctgaagttttttttctaaggtaaa

SEQ ID NO: 19705 - DNA, 40 bp, Homo sapiens
tttaccttagaaaaaaaacttcagggttttgataataaat

SEQ ID NO: 19706 - DNA, 40 bp, Homo sapiens
tttattatcaaaaccctgaagttttttttctaaggtaaaa

SEQ ID NO: 19707 - DNA, 40 bp, Homo sapiens
ttttaccttagaaaaaaaacttcagggttttgataataaa

SEQ ID NO: 19708 - DNA, 40 bp, Homo sapiens
ttattatcaaaaccctgaagttttttttctaaggtaaaat

SEQ ID NO: 19709 - DNA, 40 bp, Homo sapiens
attttaccttagaaaaaaaacttcagggttttgataataa

SEQ ID NO: 19710 - DNA, 40 bp, Homo sapiens
tattatcaaaaccctgaagttttttttctaaggtaaaatt

SEQ ID NO: 19711 - DNA, 40 bp, Homo sapiens
aattttaccttagaaaaaaaacttcagggttttgataata

SEQ ID NO: 19712 - DNA, 40 bp, Homo sapiens
attatcaaaaccctgaagttttttttctaaggtaaaattt

SEQ ID NO: 19713 - DNA, 40 bp, Homo sapiens
aaattttaccttagaaaaaaaacttcagggttttgataat

SEQ ID NO: 19714 - DNA, 40 bp, Homo sapiens
ttatcaaaaccctgaagttttttttctaaggtaaaatttg

SEQ ID NO: 19715 - DNA, 40 bp, Homo sapiens
caaattttaccttagaaaaaaaacttcagggttttgataa

SEQ ID NO: 19716 - DNA, 40 bp, Homo sapiens
tatcaaaaccctgaagttttttttctaaggtaaaatttgg

SEQ ID NO: 19717 - DNA, 40 bp, Homo sapiens
ccaaattttaccttagaaaaaaaacttcagggttttgata

SEQ ID NO: 19718 - DNA, 40 bp, Homo sapiens
atcaaaaccctgaagttttttttctaaggtaaaatttggt

SEQ ID NO: 19719 - DNA, 40 bp, Homo sapiens
accaaattttaccttagaaaaaaaacttcagggttttgat

SEQ ID NO: 19720 - DNA, 40 bp, Homo sapiens
tcaaaaccctgaagttttttttctaaggtaaaatttggtg

SEQ ID NO: 19721 - DNA, 40 bp, Homo sapiens
caccaaattttaccttagaaaaaaaacttcagggttttga

SEQ ID NO: 19722 - DNA, 40 bp, Homo sapiens
caaaaccctgaagttttttttctaaggtaaaatttggtgg

SEQ ID NO: 19723 - DNA, 40 bp, Homo sapiens
ccaccaaattttaccttagaaaaaaaacttcagggttttg

SEQ ID NO: 19724 - DNA, 40 bp, Homo sapiens
aaaaccctgaagttttttttctaaggtaaaatttggtgga

SEQ ID NO: 19725 - DNA, 40 bp, Homo sapiens
tccaccaaattttaccttagaaaaaaaacttcagggtttt

SEQ ID NO: 19726 - DNA, 40 bp, Homo sapiens
aaaccctgaagttttttttctaaggtaaaatttggtggaa

SEQ ID NO: 19727 - DNA, 40 bp, Homo sapiens
ttccaccaaattttaccttagaaaaaaaacttcagggttt

SEQ ID NO: 19728 - DNA, 40 bp, Homo sapiens
aaccctgaagttttttttctaaggtaaaatttggtggaag

SEQ ID NO: 19729 - DNA, 40 bp, Homo sapiens
cttccaccaaattttaccttagaaaaaaaacttcagggtt

SEQ ID NO: 19730 - DNA, 40 bp, Homo sapiens
accctgaagttttttttctaaggtaaaatttggtggaaga

SEQ ID NO: 19731 - DNA, 40 bp, Homo sapiens
tcttccaccaaattttaccttagaaaaaaaacttcagggt

SEQ ID NO: 19732 - DNA, 40 bp, Homo sapiens
ccctgaagttttttttctaaggtaaaatttggtggaagag

SEQ ID NO: 19733 - DNA, 40 bp, Homo sapiens
ctcttccaccaaattttaccttagaaaaaaaacttcaggg

SEQ ID NO: 19734 - DNA, 40 bp, Homo sapiens
cctgaagttttttttctaaggtaaaatttggtggaagagg

SEQ ID NO: 19735 - DNA, 40 bp, Homo sapiens
cctcttccaccaaattttaccttagaaaaaaaacttcagg

SEQ ID NO: 19736 - DNA, 40 bp, Homo sapiens
ctgaagttttttttctaaggtaaaatttggtggaagagga

SEQ ID NO: 19737 - DNA, 40 bp, Homo sapiens
tcctcttccaccaaattttaccttagaaaaaaaacttcag

SEQ ID NO: 19738 - DNA, 40 bp, Homo sapiens
tgaagttttttttctaaggtaaaatttggtggaagaggaa

SEQ ID NO: 19739 - DNA, 40 bp, Homo sapiens
ttcctcttccaccaaattttaccttagaaaaaaaacttca

SEQ ID NO: 19740 - DNA, 40 bp, Homo sapiens
gaagttttttttctaaggtaaaatttggtggaagaggaaa

SEQ ID NO: 19741 - DNA, 40 bp, Homo sapiens
tttcctcttccaccaaattttaccttagaaaaaaaacttc

SEQ ID NO: 19742 - DNA, 40 bp, Homo sapiens
aagttttttttctaaggtaaaatttggtggaagaggaaaa

SEQ ID NO: 19743 - DNA, 40 bp, Homo sapiens
ttttcctcttccaccaaattttaccttagaaaaaaaactt

SEQ ID NO: 19744 - DNA, 40 bp, Homo sapiens
agttttttttctaaggtaaaatttggtggaagaggaaaag

SEQ ID NO: 19745 - DNA, 40 bp, Homo sapiens
cttttcctcttccaccaaattttaccttagaaaaaaaact

SEQ ID NO: 19746 - DNA, 40 bp, Homo sapiens
gttttttttctaaggtaaaatttggtggaagaggaaaagt

SEQ ID NO: 19747 - DNA, 40 bp, Homo sapiens
acttttcctcttccaccaaattttaccttagaaaaaaaac

SEQ ID NO: 19748 - DNA, 40 bp, Homo sapiens
ttttttttctaaggtaaaatttggtggaagaggaaaagtc

SEQ ID NO: 19749 - DNA, 40 bp, Homo sapiens
gacttttcctcttccaccaaattttaccttagaaaaaaaa

SEQ ID NO: 19750 - DNA, 40 bp, Homo sapiens
tttttttctaaggtaaaatttggtggaagaggaaaagtct

SEQ ID NO: 19751 - DNA, 40 bp, Homo sapiens
agacttttcctcttccaccaaattttaccttagaaaaaaa

SEQ ID NO: 19752 - DNA, 40 bp, Homo sapiens
ttttttctaaggtaaaatttggtggaagaggaaaagtctc

SEQ ID NO: 19753 - DNA, 40 bp, Homo sapiens
gagacttttcctcttccaccaaattttaccttagaaaaaa

SEQ ID NO: 19754 - DNA, 40 bp, Homo sapiens
tttttctaaggtaaaatttggtggaagaggaaaagtctcg

SEQ ID NO: 19755 - DNA, 40 bp, Homo sapiens
cgagacttttcctcttccaccaaattttaccttagaaaaa

SEQ ID NO: 19756 - DNA, 40 bp, Homo sapiens
ttttctaaggtaaaatttggtggaagaggaaaagtctcgt

SEQ ID NO: 19757 - DNA, 40 bp, Homo sapiens
acgagacttttcctcttccaccaaattttaccttagaaaa

SEQ ID NO: 19758 - DNA, 40 bp, Homo sapiens
tttctaaggtaaaatttggtggaagaggaaaagtctcgtt

SEQ ID NO: 19759 - DNA, 40 bp, Homo sapiens
aacgagacttttcctcttccaccaaattttaccttagaaa

SEQ ID NO: 19760 - DNA, 40 bp, Homo sapiens
ttctaaggtaaaatttggtggaagaggaaaagtctcgttt

SEQ ID NO: 19761 - DNA, 40 bp, Homo sapiens
aaacgagacttttcctcttccaccaaattttaccttagaa

SEQ ID NO: 19762 - DNA, 40 bp, Homo sapiens
tctaaggtaaaatttggtggaagaggaaaagtctcgtttt

SEQ ID NO: 19763 - DNA, 40 bp, Homo sapiens
aaaacgagacttttcctcttccaccaaattttaccttaga

SEQ ID NO: 19764 - DNA, 40 bp, Homo sapiens
ctaaggtaaaatttggtggaagaggaaaagtctcgtttta

SEQ ID NO: 19765 - DNA, 40 bp, Homo sapiens
taaaacgagacttttcctcttccaccaaattttaccttag

SEQ ID NO: 19766 - DNA, 40 bp, Homo sapiens
taaggtaaaatttggtggaagaggaaaagtctcgttttaa

SEQ ID NO: 19767 - DNA, 40 bp, Homo sapiens
ttaaaacgagacttttcctcttccaccaaattttacctta

SEQ ID NO: 19768 - DNA, 40 bp, Homo sapiens
aaggtaaaatttggtggaagaggaaaagtctcgttttaaa

SEQ ID NO: 19769 - DNA, 40 bp, Homo sapiens
tttaaaacgagacttttcctcttccaccaaattttacctt

SEQ ID NO: 19770 - DNA, 40 bp, Homo sapiens
aggtaaaatttggtggaagaggaaaagtctcgttttaaaa

SEQ ID NO: 19771 - DNA, 40 bp, Homo sapiens
ttttaaaacgagacttttcctcttccaccaaattttacct

SEQ ID NO: 19772 - DNA, 40 bp, Homo sapiens
ggtaaaatttggtggaagaggaaaagtctcgttttaaaaa

SEQ ID NO: 19773 - DNA, 40 bp, Homo sapiens
tttttaaaacgagacttttcctcttccaccaaattttacc

SEQ ID NO: 19774 - DNA, 40 bp, Homo sapiens
gtaaaatttggtggaagaggaaaagtctcgttttaaaaaa

SEQ ID NO: 19775 - DNA, 40 bp, Homo sapiens
ttttttaaaacgagacttttcctcttccaccaaattttac

SEQ ID NO: 19776 - DNA, 40 bp, Homo sapiens
taaaatttggtggaagaggaaaagtctcgttttaaaaaaa

SEQ ID NO: 19777 - DNA, 40 bp, Homo sapiens
tttttttaaaacgagacttttcctcttccaccaaatttta

SEQ ID NO: 19778 - DNA, 40 bp, Homo sapiens
aaaatttggtggaagaggaaaagtctcgttttaaaaaaat

SEQ ID NO: 19779 - DNA, 40 bp, Homo sapiens
atttttttaaaacgagacttttcctcttccaccaaatttt

SEQ ID NO: 19780 - DNA, 40 bp, Homo sapiens
aaatttggtggaagaggaaaagtctcgttttaaaaaaatg

SEQ ID NO: 19781 - DNA, 40 bp, Homo sapiens
catttttttaaaacgagacttttcctcttccaccaaattt

SEQ ID NO: 19782 - DNA, 40 bp, Homo sapiens
aatttggtggaagaggaaaagtctcgttttaaaaaaatgt

SEQ ID NO: 19783 - DNA, 40 bp, Homo sapiens
acatttttttaaaacgagacttttcctcttccaccaaatt

SEQ ID NO: 19784 - DNA, 40 bp, Homo sapiens
atttggtggaagaggaaaagtctcgttttaaaaaaatgta

SEQ ID NO: 19785 - DNA, 40 bp, Homo sapiens
tacatttttttaaaacgagacttttcctcttccaccaaat

SEQ ID NO: 19786 - DNA, 40 bp, Homo sapiens
tttggtggaagaggaaaagtctcgttttaaaaaaatgtag

SEQ ID NO: 19787 - DNA, 40 bp, Homo sapiens
ctacatttttttaaaacgagacttttcctcttccaccaaa

SEQ ID NO: 19788 - DNA, 40 bp, Homo sapiens
ttggtggaagaggaaaagtctcgttttaaaaaaatgtagg

SEQ ID NO: 19789 - DNA, 40 bp, Homo sapiens
cctacatttttttaaaacgagacttttcctcttccaccaa

SEQ ID NO: 19790 - DNA, 40 bp, Homo sapiens
tggtggaagaggaaaagtctcgttttaaaaaaatgtaggt

SEQ ID NO: 19791 - DNA, 40 bp, Homo sapiens
acctacatttttttaaaacgagacttttcctcttccacca

SEQ ID NO: 19792 - DNA, 40 bp, Homo sapiens
ggtggaagaggaaaagtctcgttttaaaaaaatgtaggta

SEQ ID NO: 19793 - DNA, 40 bp, Homo sapiens
tacctacatttttttaaaacgagacttttcctcttccacc

SEQ ID NO: 19794 - DNA, 40 bp, Homo sapiens
gtggaagaggaaaagtctcgttttaaaaaaatgtaggtag

SEQ ID NO: 19795 - DNA, 40 bp, Homo sapiens
ctacctacatttttttaaaacgagacttttcctcttccac

SEQ ID NO: 19796 - DNA, 40 bp, Homo sapiens
tggaagaggaaaagtctcgttttaaaaaaatgtaggtagt

SEQ ID NO: 19797 - DNA, 40 bp, Homo sapiens
actacctacatttttttaaaacgagacttttcctcttcca

SEQ ID NO: 19798 - DNA, 40 bp, Homo sapiens
ggaagaggaaaagtctcgttttaaaaaaatgtaggtagtt

SEQ ID NO: 19799 - DNA, 40 bp, Homo sapiens
aactacctacatttttttaaaacgagacttttcctcttcc

SEQ ID NO: 19800 - DNA, 40 bp, Homo sapiens
gaagaggaaaagtctcgttttaaaaaaatgtaggtagtta

SEQ ID NO: 19801 - DNA, 40 bp, Homo sapiens
taactacctacatttttttaaaacgagacttttcctcttc

SEQ ID NO: 19802 - DNA, 40 bp, Homo sapiens
aagaggaaaagtctcgttttaaaaaaatgtaggtagttac

SEQ ID NO: 19803 - DNA, 40 bp, Homo sapiens
gtaactacctacatttttttaaaacgagacttttcctctt

SEQ ID NO: 19804 - DNA, 40 bp, Homo sapiens
agaggaaaagtctcgttttaaaaaaatgtaggtagttaca

SEQ ID NO: 19805 - DNA, 40 bp, Homo sapiens
tgtaactacctacatttttttaaaacgagacttttcctct

SEQ ID NO: 19806 - DNA, 40 bp, Homo sapiens
gaggaaaagtctcgttttaaaaaaatgtaggtagttacag

SEQ ID NO: 19807 - DNA, 40 bp, Homo sapiens
ctgtaactacctacatttttttaaaacgagacttttcctc

SEQ ID NO: 19808 - DNA, 40 bp, Homo sapiens
aggaaaagtctcgttttaaaaaaatgtaggtagttacaga

SEQ ID NO: 19809 - DNA, 40 bp, Homo sapiens
tctgtaactacctacatttttttaaaacgagacttttcct

SEQ ID NO: 19810 - DNA, 40 bp, Homo sapiens
ggaaaagtctcgttttaaaaaaatgtaggtagttacagag

SEQ ID NO: 19811 - DNA, 40 bp, Homo sapiens
ctctgtaactacctacatttttttaaaacgagacttttcc

SEQ ID NO: 19812 - DNA, 40 bp, Homo sapiens
gaaaagtctcgttttaaaaaaatgtaggtagttacagaga

SEQ ID NO: 19813 - DNA, 40 bp, Homo sapiens
tctctgtaactacctacatttttttaaaacgagacttttc

SEQ ID NO: 19814 - DNA, 40 bp, Homo sapiens
aaaagtctcgttttaaaaaaatgtaggtagttacagagat

SEQ ID NO: 19815 - DNA, 40 bp, Homo sapiens
atctctgtaactacctacatttttttaaaacgagactttt

SEQ ID NO: 19816 - DNA, 40 bp, Homo sapiens
aaagtctcgttttaaaaaaatgtaggtagttacagagatc

SEQ ID NO: 19817 - DNA, 40 bp, Homo sapiens
gatctctgtaactacctacatttttttaaaacgagacttt

SEQ ID NO: 19818 - DNA, 40 bp, Homo sapiens
aagtctcgttttaaaaaaatgtaggtagttacagagatca

SEQ ID NO: 19819 - DNA, 40 bp, Homo sapiens
tgatctctgtaactacctacatttttttaaaacgagactt

SEQ ID NO: 19820 - DNA, 40 bp, Homo sapiens
agtctcgttttaaaaaaatgtaggtagttacagagatcag

SEQ ID NO: 19821 - DNA, 40 bp, Homo sapiens
ctgatctctgtaactacctacatttttttaaaacgagact

SEQ ID NO: 19822 - DNA, 40 bp, Homo sapiens
gtctcgttttaaaaaaatgtaggtagttacagagatcaga

SEQ ID NO: 19823 - DNA, 40 bp, Homo sapiens
tctgatctctgtaactacctacatttttttaaaacgagac

SEQ ID NO: 19824 - DNA, 40 bp, Homo sapiens
tctcgttttaaaaaaatgtaggtagttacagagatcagaa

SEQ ID NO: 19825 - DNA, 40 bp, Homo sapiens
ttctgatctctgtaactacctacatttttttaaaacgaga

SEQ ID NO: 19826 - DNA, 40 bp, Homo sapiens
ctcgttttaaaaaaatgtaggtagttacagagatcagaat

SEQ ID NO: 19827 - DNA, 40 bp, Homo sapiens
attctgatctctgtaactacctacatttttttaaaacgag

SEQ ID NO: 19828 - DNA, 40 bp, Homo sapiens
tcgttttaaaaaaatgtaggtagttacagagatcagaatg

SEQ ID NO: 19829 - DNA, 40 bp, Homo sapiens
cattctgatctctgtaactacctacatttttttaaaacga

SEQ ID NO: 19830 - DNA, 40 bp, Homo sapiens
cgttttaaaaaaatgtaggtagttacagagatcagaatga

SEQ ID NO: 19831 - DNA, 40 bp, Homo sapiens
tcattctgatctctgtaactacctacatttttttaaaacg

SEQ ID NO: 19832 - DNA, 40 bp, Homo sapiens
gttttaaaaaaatgtaggtagttacagagatcagaatgat

SEQ ID NO: 19833 - DNA, 40 bp, Homo sapiens
atcattctgatctctgtaactacctacatttttttaaaac

SEQ ID NO: 19834 - DNA, 40 bp, Homo sapiens
ttttaaaaaaatgtaggtagttacagagatcagaatgatt

SEQ ID NO: 19835 - DNA, 40 bp, Homo sapiens
aatcattctgatctctgtaactacctacatttttttaaaa

SEQ ID NO: 19836 - DNA, 40 bp, Homo sapiens
tttaaaaaaatgtaggtagttacagagatcagaatgatta

SEQ ID NO: 19837 - DNA, 40 bp, Homo sapiens
taatcattctgatctctgtaactacctacatttttttaaa

SEQ ID NO: 19838 - DNA, 40 bp, Homo sapiens
ttaaaaaaatgtaggtagttacagagatcagaatgattag

SEQ ID NO: 19839 - DNA, 40 bp, Homo sapiens
ctaatcattctgatctctgtaactacctacatttttttaa

SEQ ID NO: 19840 - DNA, 40 bp, Homo sapiens
taaaaaaatgtaggtagttacagagatcagaatgattagt

SEQ ID NO: 19841 - DNA, 40 bp, Homo sapiens
actaatcattctgatctctgtaactacctacattttttta

SEQ ID NO: 19842 - DNA, 40 bp, Homo sapiens
aaaaaaatgtaggtagttacagagatcagaatgattagtt

SEQ ID NO: 19843 - DNA, 40 bp, Homo sapiens
aactaatcattctgatctctgtaactacctacattttttt

SEQ ID NO: 19844 - DNA, 40 bp, Homo sapiens
aaaaaatgtaggtagttacagagatcagaatgattagttg

SEQ ID NO: 19845 - DNA, 40 bp, Homo sapiens
caactaatcattctgatctctgtaactacctacatttttt

SEQ ID NO: 19846 - DNA, 40 bp, Homo sapiens
aaaaatgtaggtagttacagagatcagaatgattagttga

SEQ ID NO: 19847 - DNA, 40 bp, Homo sapiens
tcaactaatcattctgatctctgtaactacctacattttt

SEQ ID NO: 19848 - DNA, 40 bp, Homo sapiens
aaaatgtaggtagttacagagatcagaatgattagttgat

SEQ ID NO: 19849 - DNA, 40 bp, Homo sapiens
atcaactaatcattctgatctctgtaactacctacatttt

SEQ ID NO: 19850 - DNA, 40 bp, Homo sapiens
aaatgtaggtagttacagagatcagaatgattagttgatc

SEQ ID NO: 19851 - DNA, 40 bp, Homo sapiens
gatcaactaatcattctgatctctgtaactacctacattt

SEQ ID NO: 19852 - DNA, 40 bp, Homo sapiens
aatgtaggtagttacagagatcagaatgattagttgatca

SEQ ID NO: 19853 - DNA, 40 bp, Homo sapiens
tgatcaactaatcattctgatctctgtaactacctacatt

SEQ ID NO: 19854 - DNA, 40 bp, Homo sapiens
atgtaggtagttacagagatcagaatgattagttgatcac

SEQ ID NO: 19855 - DNA, 40 bp, Homo sapiens
gtgatcaactaatcattctgatctctgtaactacctacat

SEQ ID NO: 19856 - DNA, 40 bp, Homo sapiens
tgtaggtagttacagagatcagaatgattagttgatcact

SEQ ID NO: 19857 - DNA, 40 bp, Homo sapiens
agtgatcaactaatcattctgatctctgtaactacctaca

SEQ ID NO: 19858 - DNA, 40 bp, Homo sapiens
gtaggtagttacagagatcagaatgattagttgatcactt

SEQ ID NO: 19859 - DNA, 40 bp, Homo sapiens
aagtgatcaactaatcattctgatctctgtaactacctac

SEQ ID NO: 19860 - DNA, 40 bp, Homo sapiens
taggtagttacagagatcagaatgattagttgatcactta

SEQ ID NO: 19861 - DNA, 40 bp, Homo sapiens
taagtgatcaactaatcattctgatctctgtaactaccta

SEQ ID NO: 19862 - DNA, 40 bp, Homo sapiens
aggtagttacagagatcagaatgattagttgatcacttac

SEQ ID NO: 19863 - DNA, 40 bp, Homo sapiens
gtaagtgatcaactaatcattctgatctctgtaactacct

SEQ ID NO: 19864 - DNA, 40 bp, Homo sapiens
ggtagttacagagatcagaatgattagttgatcacttacc

SEQ ID NO: 19865 - DNA, 40 bp, Homo sapiens
ggtaagtgatcaactaatcattctgatctctgtaactacc

SEQ ID NO: 19866 - DNA, 40 bp, Homo sapiens
gtagttacagagatcagaatgattagttgatcacttacca

SEQ ID NO: 19867 - DNA, 40 bp, Homo sapiens
tggtaagtgatcaactaatcattctgatctctgtaactac

SEQ ID NO: 19868 - DNA, 40 bp, Homo sapiens
tagttacagagatcagaatgattagttgatcacttaccaa

SEQ ID NO: 19869 - DNA, 40 bp, Homo sapiens
ttggtaagtgatcaactaatcattctgatctctgtaacta

SEQ ID NO: 19870 - DNA, 40 bp, Homo sapiens
agttacagagatcagaatgattagttgatcacttaccaaa

SEQ ID NO: 19871 - DNA, 40 bp, Homo sapiens
tttggtaagtgatcaactaatcattctgatctctgtaact

SEQ ID NO: 19872 - DNA, 40 bp, Homo sapiens
gttacagagatcagaatgattagttgatcacttaccaaat

SEQ ID NO: 19873 - DNA, 40 bp, Homo sapiens
atttggtaagtgatcaactaatcattctgatctctgtaac

SEQ ID NO: 19874 - DNA, 40 bp, Homo sapiens
ttacagagatcagaatgattagttgatcacttaccaaata

SEQ ID NO: 19875 - DNA, 40 bp, Homo sapiens
tatttggtaagtgatcaactaatcattctgatctctgtaa

SEQ ID NO: 19876 - DNA, 40 bp, Homo sapiens
tacagagatcagaatgattagttgatcacttaccaaatat

SEQ ID NO: 19877 - DNA, 40 bp, Homo sapiens
atatttggtaagtgatcaactaatcattctgatctctgta

SEQ ID NO: 19878 - DNA, 40 bp, Homo sapiens
acagagatcagaatgattagttgatcacttaccaaatata

SEQ ID NO: 19879 - DNA, 40 bp, Homo sapiens
tatatttggtaagtgatcaactaatcattctgatctctgt

SEQ ID NO: 19880 - DNA, 40 bp, Homo sapiens
cagagatcagaatgattagttgatcacttaccaaatatat

SEQ ID NO: 19881 - DNA, 40 bp, Homo sapiens
atatatttggtaagtgatcaactaatcattctgatctctg

SEQ ID NO: 19882 - DNA, 40 bp, Homo sapiens
agagatcagaatgattagttgatcacttaccaaatatata

SEQ ID NO: 19883 - DNA, 40 bp, Homo sapiens
tatatatttggtaagtgatcaactaatcattctgatctct

SEQ ID NO: 19884 - DNA, 40 bp, Homo sapiens
gagatcagaatgattagttgatcacttaccaaatatatat

SEQ ID NO: 19885 - DNA, 40 bp, Homo sapiens
atatatatttggtaagtgatcaactaatcattctgatctc

SEQ ID NO: 19886 - DNA, 40 bp, Homo sapiens
agatcagaatgattagttgatcacttaccaaatatatatt

SEQ ID NO: 19887 - DNA, 40 bp, Homo sapiens
aatatatatttggtaagtgatcaactaatcattctgatct

SEQ ID NO: 19888 - DNA, 40 bp, Homo sapiens
gatcagaatgattagttgatcacttaccaaatatatatta

SEQ ID NO: 19889 - DNA, 40 bp, Homo sapiens
taatatatatttggtaagtgatcaactaatcattctgatc

SEQ ID NO: 19890 - DNA, 40 bp, Homo sapiens
atcagaatgattagttgatcacttaccaaatatatattaa

SEQ ID NO: 19891 - DNA, 40 bp, Homo sapiens
ttaatatatatttggtaagtgatcaactaatcattctgat

SEQ ID NO: 19892 - DNA, 40 bp, Homo sapiens
tcagaatgattagttgatcacttaccaaatatatattaag

SEQ ID NO: 19893 - DNA, 40 bp, Homo sapiens
cttaatatatatttggtaagtgatcaactaatcattctga

SEQ ID NO: 19894 - DNA, 40 bp, Homo sapiens
cagaatgattagttgatcacttaccaaatatatattaagt

SEQ ID NO: 19895 - DNA, 40 bp, Homo sapiens
acttaatatatatttggtaagtgatcaactaatcattctg

SEQ ID NO: 19896 - DNA, 40 bp, Homo sapiens
agaatgattagttgatcacttaccaaatatatattaagta

SEQ ID NO: 19897 - DNA, 40 bp, Homo sapiens
tacttaatatatatttggtaagtgatcaactaatcattct

SEQ ID NO: 19898 - DNA, 40 bp, Homo sapiens
gaatgattagttgatcacttaccaaatatatattaagtat

SEQ ID NO: 19899 - DNA, 40 bp, Homo sapiens
atacttaatatatatttggtaagtgatcaactaatcattc

SEQ ID NO: 19900 - DNA, 40 bp, Homo sapiens
aatgattagttgatcacttaccaaatatatattaagtatc

SEQ ID NO: 19901 - DNA, 40 bp, Homo sapiens
gatacttaatatatatttggtaagtgatcaactaatcatt

SEQ ID NO: 19902 - DNA, 40 bp, Homo sapiens
atgattagttgatcacttaccaaatatatattaagtatct

SEQ ID NO: 19903 - DNA, 40 bp, Homo sapiens
agatacttaatatatatttggtaagtgatcaactaatcat

SEQ ID NO: 19904 - DNA, 40 bp, Homo sapiens
tgattagttgatcacttaccaaatatatattaagtatcta

SEQ ID NO: 19905 - DNA, 40 bp, Homo sapiens
tagatacttaatatatatttggtaagtgatcaactaatca

SEQ ID NO: 19906 - DNA, 40 bp, Homo sapiens
gattagttgatcacttaccaaatatatattaagtatctac

SEQ ID NO: 19907 - DNA, 40 bp, Homo sapiens
gtagatacttaatatatatttggtaagtgatcaactaatc

SEQ ID NO: 19908 - DNA, 40 bp, Homo sapiens
attagttgatcacttaccaaatatatattaagtatctact

SEQ ID NO: 19909 - DNA, 40 bp, Homo sapiens
agtagatacttaatatatatttggtaagtgatcaactaat

SEQ ID NO: 19910 - DNA, 40 bp, Homo sapiens
ttagttgatcacttaccaaatatatattaagtatctactg

SEQ ID NO: 19911 - DNA, 40 bp, Homo sapiens
cagtagatacttaatatatatttggtaagtgatcaactaa

SEQ ID NO: 19912 - DNA, 40 bp, Homo sapiens
tagttgatcacttaccaaatatatattaagtatctactgt

SEQ ID NO: 19913 - DNA, 40 bp, Homo sapiens
acagtagatacttaatatatatttggtaagtgatcaacta

SEQ ID NO: 19914 - DNA, 40 bp, Homo sapiens
agttgatcacttaccaaatatatattaagtatctactgta

SEQ ID NO: 19915 - DNA, 40 bp, Homo sapiens
tacagtagatacttaatatatatttggtaagtgatcaact

SEQ ID NO: 19916 - DNA, 40 bp, Homo sapiens
gttgatcacttaccaaatatatattaagtatctactgtat

SEQ ID NO: 19917 - DNA, 40 bp, Homo sapiens
atacagtagatacttaatatatatttggtaagtgatcaac

SEQ ID NO: 19918 - DNA, 40 bp, Homo sapiens
ttgatcacttaccaaatatatattaagtatctactgtata

SEQ ID NO: 19919 - DNA, 40 bp, Homo sapiens
tatacagtagatacttaatatatatttggtaagtgatcaa

SEQ ID NO: 19920 - DNA, 40 bp, Homo sapiens
tgatcacttaccaaatatatattaagtatctactgtatat

SEQ ID NO: 19921 - DNA, 40 bp, Homo sapiens
atatacagtagatacttaatatatatttggtaagtgatca

SEQ ID NO: 19922 - DNA, 40 bp, Homo sapiens
gatcacttaccaaatatatattaagtatctactgtatata

SEQ ID NO: 19923 - DNA, 40 bp, Homo sapiens
tatatacagtagatacttaatatatatttggtaagtgatc

SEQ ID NO: 19924 - DNA, 40 bp, Homo sapiens
atcacttaccaaatatatattaagtatctactgtatataa

SEQ ID NO: 19925 - DNA, 40 bp, Homo sapiens
ttatatacagtagatacttaatatatatttggtaagtgat

SEQ ID NO: 19926 - DNA, 40 bp, Homo sapiens
tcacttaccaaatatatattaagtatctactgtatataat

SEQ ID NO: 19927 - DNA, 40 bp, Homo sapiens
attatatacagtagatacttaatatatatttggtaagtga

SEQ ID NO: 19928 - DNA, 40 bp, Homo sapiens
cacttaccaaatatatattaagtatctactgtatataata

SEQ ID NO: 19929 - DNA, 40 bp, Homo sapiens
tattatatacagtagatacttaatatatatttggtaagtg

SEQ ID NO: 19930 - DNA, 40 bp, Homo sapiens
acttaccaaatatatattaagtatctactgtatataatat

SEQ ID NO: 19931 - DNA, 40 bp, Homo sapiens
atattatatacagtagatacttaatatatatttggtaagt

SEQ ID NO: 19932 - DNA, 40 bp, Homo sapiens
cttaccaaatatatattaagtatctactgtatataatatg

SEQ ID NO: 19933 - DNA, 40 bp, Homo sapiens
catattatatacagtagatacttaatatatatttggtaag

SEQ ID NO: 19934 - DNA, 40 bp, Homo sapiens
ttaccaaatatatattaagtatctactgtatataatatgc

SEQ ID NO: 19935 - DNA, 40 bp, Homo sapiens
gcatattatatacagtagatacttaatatatatttggtaa

SEQ ID NO: 19936 - DNA, 40 bp, Homo sapiens
taccaaatatatattaagtatctactgtatataatatgct

SEQ ID NO: 19937 - DNA, 40 bp, Homo sapiens
agcatattatatacagtagatacttaatatatatttggta

SEQ ID NO: 19938 - DNA, 40 bp, Homo sapiens
accaaatatatattaagtatctactgtatataatatgcta

SEQ ID NO: 19939 - DNA, 40 bp, Homo sapiens
tagcatattatatacagtagatacttaatatatatttggt

SEQ ID NO: 19940 - DNA, 40 bp, Homo sapiens
ccaaatatatattaagtatctactgtatataatatgctag

SEQ ID NO: 19941 - DNA, 40 bp, Homo sapiens
ctagcatattatatacagtagatacttaatatatatttgg

SEQ ID NO: 19942 - DNA, 40 bp, Homo sapiens
caaatatatattaagtatctactgtatataatatgctagt

SEQ ID NO: 19943 - DNA, 40 bp, Homo sapiens
actagcatattatatacagtagatacttaatatatatttg

SEQ ID NO: 19944 - DNA, 40 bp, Homo sapiens
aaatatatattaagtatctactgtatataatatgctagta

SEQ ID NO: 19945 - DNA, 40 bp, Homo sapiens
tactagcatattatatacagtagatacttaatatatattt

SEQ ID NO: 19946 - DNA, 40 bp, Homo sapiens
aatatatattaagtatctactgtatataatatgctagtaa

SEQ ID NO: 19947 - DNA, 40 bp, Homo sapiens
ttactagcatattatatacagtagatacttaatatatatt

SEQ ID NO: 19948 - DNA, 40 bp, Homo sapiens
atatatattaagtatctactgtatataatatgctagtaag

SEQ ID NO: 19949 - DNA, 40 bp, Homo sapiens
cttactagcatattatatacagtagatacttaatatatat

SEQ ID NO: 19950 - DNA, 40 bp, Homo sapiens
tatatattaagtatctactgtatataatatgctagtaaga

SEQ ID NO: 19951 - DNA, 40 bp, Homo sapiens
tcttactagcatattatatacagtagatacttaatatata

SEQ ID NO: 19952 - DNA, 40 bp, Homo sapiens
atatattaagtatctactgtatataatatgctagtaagaa

SEQ ID NO: 19953 - DNA, 40 bp, Homo sapiens
ttcttactagcatattatatacagtagatacttaatatat

SEQ ID NO: 19954 - DNA, 40 bp, Homo sapiens
tatattaagtatctactgtatataatatgctagtaagaat

SEQ ID NO: 19955 - DNA, 40 bp, Homo sapiens
attcttactagcatattatatacagtagatacttaatata

SEQ ID NO: 19956 - DNA, 40 bp, Homo sapiens
atattaagtatctactgtatataatatgctagtaagaata

SEQ ID NO: 19957 - DNA, 40 bp, Homo sapiens
tattcttactagcatattatatacagtagatacttaatat

SEQ ID NO: 19958 - DNA, 40 bp, Homo sapiens
tattaagtatctactgtatataatatgctagtaagaataa

SEQ ID NO: 19959 - DNA, 40 bp, Homo sapiens
ttattcttactagcatattatatacagtagatacttaata

SEQ ID NO: 19960 - DNA, 40 bp, Homo sapiens
attaagtatctactgtatataatatgctagtaagaataaa

SEQ ID NO: 19961 - DNA, 40 bp, Homo sapiens
tttattcttactagcatattatatacagtagatacttaat

SEQ ID NO: 19962 - DNA, 40 bp, Homo sapiens
ttaagtatctactgtatataatatgctagtaagaataaat

SEQ ID NO: 19963 - DNA, 40 bp, Homo sapiens
atttattcttactagcatattatatacagtagatacttaa

SEQ ID NO: 19964 - DNA, 40 bp, Homo sapiens
taagtatctactgtatataatatgctagtaagaataaata

SEQ ID NO: 19965 - DNA, 40 bp, Homo sapiens
tatttattcttactagcatattatatacagtagatactta

SEQ ID NO: 19966 - DNA, 40 bp, Homo sapiens
aagtatctactgtatataatatgctagtaagaataaatat

SEQ ID NO: 19967 - DNA, 40 bp, Homo sapiens
atatttattcttactagcatattatatacagtagatactt

SEQ ID NO: 19968 - DNA, 40 bp, Homo sapiens
agtatctactgtatataatatgctagtaagaataaatata

SEQ ID NO: 19969 - DNA, 40 bp, Homo sapiens
tatatttattcttactagcatattatatacagtagatact

SEQ ID NO: 19970 - DNA, 40 bp, Homo sapiens
gtatctactgtatataatatgctagtaagaataaatatag

SEQ ID NO: 19971 - DNA, 40 bp, Homo sapiens
ctatatttattcttactagcatattatatacagtagatac

SEQ ID NO: 19972 - DNA, 40 bp, Homo sapiens
tatctactgtatataatatgctagtaagaataaatatagc

SEQ ID NO: 19973 - DNA, 40 bp, Homo sapiens
gctatatttattcttactagcatattatatacagtagata

SEQ ID NO: 19974 - DNA, 40 bp, Homo sapiens
atctactgtatataatatgctagtaagaataaatatagca

SEQ ID NO: 19975 - DNA, 40 bp, Homo sapiens
tgctatatttattcttactagcatattatatacagtagat

SEQ ID NO: 19976 - DNA, 40 bp, Homo sapiens
tctactgtatataatatgctagtaagaataaatatagcag

SEQ ID NO: 19977 - DNA, 40 bp, Homo sapiens
ctgctatatttattcttactagcatattatatacagtaga

SEQ ID NO: 19978 - DNA, 40 bp, Homo sapiens
ctactgtatataatatgctagtaagaataaatatagcagg

SEQ ID NO: 19979 - DNA, 40 bp, Homo sapiens
cctgctatatttattcttactagcatattatatacagtag

SEQ ID NO: 19980 - DNA, 40 bp, Homo sapiens
tactgtatataatatgctagtaagaataaatatagcagga

SEQ ID NO: 19981 - DNA, 40 bp, Homo sapiens
tcctgctatatttattcttactagcatattatatacagta

SEQ ID NO: 19982 - DNA, 40 bp, Homo sapiens
actgtatataatatgctagtaagaataaatatagcaggaa

SEQ ID NO: 19983 - DNA, 40 bp, Homo sapiens
ttcctgctatatttattcttactagcatattatatacagt

SEQ ID NO: 19984 - DNA, 40 bp, Homo sapiens
ctgtatataatatgctagtaagaataaatatagcaggaag

SEQ ID NO: 19985 - DNA, 40 bp, Homo sapiens
cttcctgctatatttattcttactagcatattatatacag

SEQ ID NO: 19986 - DNA, 40 bp, Homo sapiens
tgtatataatatgctagtaagaataaatatagcaggaagt

SEQ ID NO: 19987 - DNA, 40 bp, Homo sapiens
acttcctgctatatttattcttactagcatattatataca

SEQ ID NO: 19988 - DNA, 40 bp, Homo sapiens
gtatataatatgctagtaagaataaatatagcaggaagta

SEQ ID NO: 19989 - DNA, 40 bp, Homo sapiens
tacttcctgctatatttattcttactagcatattatatac

SEQ ID NO: 19990 - DNA, 40 bp, Homo sapiens
tatataatatgctagtaagaataaatatagcaggaagtat

SEQ ID NO: 19991 - DNA, 40 bp, Homo sapiens
atacttcctgctatatttattcttactagcatattatata

SEQ ID NO: 19992 - DNA, 40 bp, Homo sapiens
atataatatgctagtaagaataaatatagcaggaagtatt

SEQ ID NO: 19993 - DNA, 40 bp, Homo sapiens
aatacttcctgctatatttattcttactagcatattatat

SEQ ID NO: 19994 - DNA, 40 bp, Homo sapiens
tataatatgctagtaagaataaatatagcaggaagtattt

SEQ ID NO: 19995 - DNA, 40 bp, Homo sapiens
aaatacttcctgctatatttattcttactagcatattata

SEQ ID NO: 19996 - DNA, 40 bp, Homo sapiens
ataatatgctagtaagaataaatatagcaggaagtatttt

SEQ ID NO: 19997 - DNA, 40 bp, Homo sapiens
aaaatacttcctgctatatttattcttactagcatattat

SEQ ID NO: 19998 - DNA, 40 bp, Homo sapiens
taatatgctagtaagaataaatatagcaggaagtattttt

SEQ ID NO: 19999 - DNA, 40 bp, Homo sapiens
aaaaatacttcctgctatatttattcttactagcatatta

SEQ ID NO: 20000 - DNA, 40 bp, Homo sapiens
aatatgctagtaagaataaatatagcaggaagtatttttt

SEQ ID NO: 20001 - DNA, 40 bp, Homo sapiens
aaaaaatacttcctgctatatttattcttactagcatatt

SEQ ID NO: 20002 - DNA, 40 bp, Homo sapiens
atatgctagtaagaataaatatagcaggaagtattttttc

SEQ ID NO: 20003 - DNA, 40 bp, Homo sapiens
gaaaaaatacttcctgctatatttattcttactagcatat

SEQ ID NO: 20004 - DNA, 40 bp, Homo sapiens
tatgctagtaagaataaatatagcaggaagtattttttcc

SEQ ID NO: 20005 - DNA, 40 bp, Homo sapiens
ggaaaaaatacttcctgctatatttattcttactagcata

SEQ ID NO: 20006 - DNA, 40 bp, Homo sapiens
atgctagtaagaataaatatagcaggaagtattttttccc

SEQ ID NO: 20007 - DNA, 40 bp, Homo sapiens
gggaaaaaatacttcctgctatatttattcttactagcat

SEQ ID NO: 20008 - DNA, 40 bp, Homo sapiens
tgctagtaagaataaatatagcaggaagtattttttccca

SEQ ID NO: 20009 - DNA, 40 bp, Homo sapiens
tgggaaaaaatacttcctgctatatttattcttactagca

SEQ ID NO: 20010 - DNA, 40 bp, Homo sapiens
gctagtaagaataaatatagcaggaagtattttttcccag

SEQ ID NO: 20011 - DNA, 40 bp, Homo sapiens
ctgggaaaaaatacttcctgctatatttattcttactagc

SEQ ID NO: 20012 - DNA, 40 bp, Homo sapiens
ctagtaagaataaatatagcaggaagtattttttcccagg

SEQ ID NO: 20013 - DNA, 40 bp, Homo sapiens
cctgggaaaaaatacttcctgctatatttattcttactag

SEQ ID NO: 20014 - DNA, 40 bp, Homo sapiens
tagtaagaataaatatagcaggaagtattttttcccaggc

SEQ ID NO: 20015 - DNA, 40 bp, Homo sapiens
gcctgggaaaaaatacttcctgctatatttattcttacta

SEQ ID NO: 20016 - DNA, 40 bp, Homo sapiens
agtaagaataaatatagcaggaagtattttttcccaggct

SEQ ID NO: 20017 - DNA, 40 bp, Homo sapiens
agcctgggaaaaaatacttcctgctatatttattcttact

SEQ ID NO: 20018 - DNA, 40 bp, Homo sapiens
gtaagaataaatatagcaggaagtattttttcccaggctc

SEQ ID NO: 20019 - DNA, 40 bp, Homo sapiens
gagcctgggaaaaaatacttcctgctatatttattcttac

SEQ ID NO: 20020 - DNA, 40 bp, Homo sapiens
taagaataaatatagcaggaagtattttttcccaggctct

SEQ ID NO: 20021 - DNA, 40 bp, Homo sapiens
agagcctgggaaaaaatacttcctgctatatttattctta

SEQ ID NO: 20022 - DNA, 40 bp, Homo sapiens
aagaataaatatagcaggaagtattttttcccaggctcta

SEQ ID NO: 20023 - DNA, 40 bp, Homo sapiens
tagagcctgggaaaaaatacttcctgctatatttattctt

SEQ ID NO: 20024 - DNA, 40 bp, Homo sapiens
agaataaatatagcaggaagtattttttcccaggctctaa

SEQ ID NO: 20025 - DNA, 40 bp, Homo sapiens
ttagagcctgggaaaaaatacttcctgctatatttattct

SEQ ID NO: 20026 - DNA, 40 bp, Homo sapiens
gaataaatatagcaggaagtattttttcccaggctctaat

SEQ ID NO: 20027 - DNA, 40 bp, Homo sapiens
attagagcctgggaaaaaatacttcctgctatatttattc

SEQ ID NO: 20028 - DNA, 40 bp, Homo sapiens
aataaatatagcaggaagtattttttcccaggctctaatt

SEQ ID NO: 20029 - DNA, 40 bp, Homo sapiens
aattagagcctgggaaaaaatacttcctgctatatttatt

SEQ ID NO: 20030 - DNA, 40 bp, Homo sapiens
ataaatatagcaggaagtattttttcccaggctctaattg

SEQ ID NO: 20031 - DNA, 40 bp, Homo sapiens
caattagagcctgggaaaaaatacttcctgctatatttat

SEQ ID NO: 20032 - DNA, 40 bp, Homo sapiens
taaatatagcaggaagtattttttcccaggctctaattgt

SEQ ID NO: 20033 - DNA, 40 bp, Homo sapiens
acaattagagcctgggaaaaaatacttcctgctatattta

SEQ ID NO: 20034 - DNA, 40 bp, Homo sapiens
aaatatagcaggaagtattttttcccaggctctaattgtt

SEQ ID NO: 20035 - DNA, 40 bp, Homo sapiens
aacaattagagcctgggaaaaaatacttcctgctatattt

SEQ ID NO: 20036 - DNA, 40 bp, Homo sapiens
aatatagcaggaagtattttttcccaggctctaattgttt

SEQ ID NO: 20037 - DNA, 40 bp, Homo sapiens
aaacaattagagcctgggaaaaaatacttcctgctatatt

SEQ ID NO: 20038 - DNA, 40 bp, Homo sapiens
atatagcaggaagtattttttcccaggctctaattgtttg

SEQ ID NO: 20039 - DNA, 40 bp, Homo sapiens
caaacaattagagcctgggaaaaaatacttcctgctatat

SEQ ID NO: 20040 - DNA, 40 bp, Homo sapiens
tatagcaggaagtattttttcccaggctctaattgtttga

SEQ ID NO: 20041 - DNA, 40 bp, Homo sapiens
tcaaacaattagagcctgggaaaaaatacttcctgctata

SEQ ID NO: 20042 - DNA, 40 bp, Homo sapiens
atagcaggaagtattttttcccaggctctaattgtttgac

SEQ ID NO: 20043 - DNA, 40 bp, Homo sapiens
gtcaaacaattagagcctgggaaaaaatacttcctgctat

SEQ ID NO: 20044 - DNA, 40 bp, Homo sapiens
tagcaggaagtattttttcccaggctctaattgtttgaca

SEQ ID NO: 20045 - DNA, 40 bp, Homo sapiens
tgtcaaacaattagagcctgggaaaaaatacttcctgcta

SEQ ID NO: 20046 - DNA, 40 bp, Homo sapiens
agcaggaagtattttttcccaggctctaattgtttgacat

SEQ ID NO: 20047 - DNA, 40 bp, Homo sapiens
atgtcaaacaattagagcctgggaaaaaatacttcctgct

SEQ ID NO: 20048 - DNA, 40 bp, Homo sapiens
gcaggaagtattttttcccaggctctaattgtttgacatc

SEQ ID NO: 20049 - DNA, 40 bp, Homo sapiens
gatgtcaaacaattagagcctgggaaaaaatacttcctgc

SEQ ID NO: 20050 - DNA, 40 bp, Homo sapiens
caggaagtattttttcccaggctctaattgtttgacatca

SEQ ID NO: 20051 - DNA, 40 bp, Homo sapiens
tgatgtcaaacaattagagcctgggaaaaaatacttcctg

SEQ ID NO: 20052 - DNA, 40 bp, Homo sapiens
aggaagtattttttcccaggctctaattgtttgacatcag

SEQ ID NO: 20053 - DNA, 40 bp, Homo sapiens
ctgatgtcaaacaattagagcctgggaaaaaatacttcct

SEQ ID NO: 20054 - DNA, 40 bp, Homo sapiens
ggaagtattttttcccaggctctaattgtttgacatcagc

SEQ ID NO: 20055 - DNA, 40 bp, Homo sapiens
gctgatgtcaaacaattagagcctgggaaaaaatacttcc

SEQ ID NO: 20056 - DNA, 40 bp, Homo sapiens
gaagtattttttcccaggctctaattgtttgacatcagca

SEQ ID NO: 20057 - DNA, 40 bp, Homo sapiens
tgctgatgtcaaacaattagagcctgggaaaaaatacttc

SEQ ID NO: 20058 - DNA, 40 bp, Homo sapiens
aagtattttttcccaggctctaattgtttgacatcagcat

SEQ ID NO: 20059 - DNA, 40 bp, Homo sapiens
atgctgatgtcaaacaattagagcctgggaaaaaatactt

SEQ ID NO: 20060 - DNA, 40 bp, Homo sapiens
agtattttttcccaggctctaattgtttgacatcagcatg

SEQ ID NO: 20061 - DNA, 40 bp, Homo sapiens
catgctgatgtcaaacaattagagcctgggaaaaaatact

SEQ ID NO: 20062 - DNA, 40 bp, Homo sapiens
gtattttttcccaggctctaattgtttgacatcagcatgc

SEQ ID NO: 20063 - DNA, 40 bp, Homo sapiens
gcatgctgatgtcaaacaattagagcctgggaaaaaatac

SEQ ID NO: 20064 - DNA, 40 bp, Homo sapiens
tattttttcccaggctctaattgtttgacatcagcatgct

SEQ ID NO: 20065 - DNA, 40 bp, Homo sapiens
agcatgctgatgtcaaacaattagagcctgggaaaaaata

SEQ ID NO: 20066 - DNA, 40 bp, Homo sapiens
attttttcccaggctctaattgtttgacatcagcatgctt

SEQ ID NO: 20067 - DNA, 40 bp, Homo sapiens
aagcatgctgatgtcaaacaattagagcctgggaaaaaat

SEQ ID NO: 20068 - DNA, 40 bp, Homo sapiens
ttttttcccaggctctaattgtttgacatcagcatgcttt

SEQ ID NO: 20069 - DNA, 40 bp, Homo sapiens
aaagcatgctgatgtcaaacaattagagcctgggaaaaaa

SEQ ID NO: 20070 - DNA, 40 bp, Homo sapiens
tttttcccaggctctaattgtttgacatcagcatgctttt

SEQ ID NO: 20071 - DNA, 40 bp, Homo sapiens
aaaagcatgctgatgtcaaacaattagagcctgggaaaaa

SEQ ID NO: 20072 - DNA, 40 bp, Homo sapiens
ttttcccaggctctaattgtttgacatcagcatgctttta

SEQ ID NO: 20073 - DNA, 40 bp, Homo sapiens
taaaagcatgctgatgtcaaacaattagagcctgggaaaa

SEQ ID NO: 20074 - DNA, 40 bp, Homo sapiens
tttcccaggctctaattgtttgacatcagcatgcttttat

SEQ ID NO: 20075 - DNA, 40 bp, Homo sapiens
ataaaagcatgctgatgtcaaacaattagagcctgggaaa

SEQ ID NO: 20076 - DNA, 40 bp, Homo sapiens
ttcccaggctctaattgtttgacatcagcatgcttttatt

SEQ ID NO: 20077 - DNA, 40 bp, Homo sapiens
aataaaagcatgctgatgtcaaacaattagagcctgggaa

SEQ ID NO: 20078 - DNA, 40 bp, Homo sapiens
tcccaggctctaattgtttgacatcagcatgcttttattg

SEQ ID NO: 20079 - DNA, 40 bp, Homo sapiens
caataaaagcatgctgatgtcaaacaattagagcctggga

SEQ ID NO: 20080 - DNA, 40 bp, Homo sapiens
cccaggctctaattgtttgacatcagcatgcttttattgt

SEQ ID NO: 20081 - DNA, 40 bp, Homo sapiens
acaataaaagcatgctgatgtcaaacaattagagcctggg

SEQ ID NO: 20082 - DNA, 40 bp, Homo sapiens
ccaggctctaattgtttgacatcagcatgcttttattgtg

SEQ ID NO: 20083 - DNA, 40 bp, Homo sapiens
cacaataaaagcatgctgatgtcaaacaattagagcctgg

SEQ ID NO: 20084 - DNA, 40 bp, Homo sapiens
caggctctaattgtttgacatcagcatgcttttattgtgg

SEQ ID NO: 20085 - DNA, 40 bp, Homo sapiens
ccacaataaaagcatgctgatgtcaaacaattagagcctg

SEQ ID NO: 20086 - DNA, 40 bp, Homo sapiens
aggctctaattgtttgacatcagcatgcttttattgtggc

SEQ ID NO: 20087 - DNA, 40 bp, Homo sapiens
gccacaataaaagcatgctgatgtcaaacaattagagcct

SEQ ID NO: 20088 - DNA, 40 bp, Homo sapiens
ggctctaattgtttgacatcagcatgcttttattgtggca

SEQ ID NO: 20089 - DNA, 40 bp, Homo sapiens
tgccacaataaaagcatgctgatgtcaaacaattagagcc

SEQ ID NO: 20090 - DNA, 40 bp, Homo sapiens
gctctaattgtttgacatcagcatgcttttattgtggcac

SEQ ID NO: 20091 - DNA, 40 bp, Homo sapiens
gtgccacaataaaagcatgctgatgtcaaacaattagagc

SEQ ID NO: 20092 - DNA, 40 bp, Homo sapiens
ctctaattgtttgacatcagcatgcttttattgtggcact

SEQ ID NO: 20093 - DNA, 40 bp, Homo sapiens
agtgccacaataaaagcatgctgatgtcaaacaattagag

SEQ ID NO: 20094 - DNA, 40 bp, Homo sapiens
tctaattgtttgacatcagcatgcttttattgtggcactt

SEQ ID NO: 20095 - DNA, 40 bp, Homo sapiens
aagtgccacaataaaagcatgctgatgtcaaacaattaga

SEQ ID NO: 20096 - DNA, 40 bp, Homo sapiens
ctaattgtttgacatcagcatgcttttattgtggcactta

SEQ ID NO: 20097 - DNA, 40 bp, Homo sapiens
taagtgccacaataaaagcatgctgatgtcaaacaattag

SEQ ID NO: 20098 - DNA, 40 bp, Homo sapiens
taattgtttgacatcagcatgcttttattgtggcacttat

SEQ ID NO: 20099 - DNA, 40 bp, Homo sapiens
ataagtgccacaataaaagcatgctgatgtcaaacaatta

SEQ ID NO: 20100 - DNA, 40 bp, Homo sapiens
aattgtttgacatcagcatgcttttattgtggcacttata

SEQ ID NO: 20101 - DNA, 40 bp, Homo sapiens
tataagtgccacaataaaagcatgctgatgtcaaacaatt

SEQ ID NO: 20102 - DNA, 40 bp, Homo sapiens
attgtttgacatcagcatgcttttattgtggcacttataa

SEQ ID NO: 20103 - DNA, 40 bp, Homo sapiens
ttataagtgccacaataaaagcatgctgatgtcaaacaat

SEQ ID NO: 20104 - DNA, 40 bp, Homo sapiens
ttgtttgacatcagcatgcttttattgtggcacttataat

SEQ ID NO: 20105 - DNA, 40 bp, Homo sapiens
attataagtgccacaataaaagcatgctgatgtcaaacaa

SEQ ID NO: 20106 - DNA, 40 bp, Homo sapiens
tgtttgacatcagcatgcttttattgtggcacttataatt

SEQ ID NO: 20107 - DNA, 40 bp, Homo sapiens
aattataagtgccacaataaaagcatgctgatgtcaaaca

SEQ ID NO: 20108 - DNA, 40 bp, Homo sapiens
gtttgacatcagcatgcttttattgtggcacttataattc

SEQ ID NO: 20109 - DNA, 40 bp, Homo sapiens
gaattataagtgccacaataaaagcatgctgatgtcaaac

SEQ ID NO: 20110 - DNA, 40 bp, Homo sapiens
tttgacatcagcatgcttttattgtggcacttataattca

SEQ ID NO: 20111 - DNA, 40 bp, Homo sapiens
tgaattataagtgccacaataaaagcatgctgatgtcaaa

SEQ ID NO: 20112 - DNA, 40 bp, Homo sapiens
ttgacatcagcatgcttttattgtggcacttataattcag

SEQ ID NO: 20113 - DNA, 40 bp, Homo sapiens
ctgaattataagtgccacaataaaagcatgctgatgtcaa

SEQ ID NO: 20114 - DNA, 40 bp, Homo sapiens
tgacatcagcatgcttttattgtggcacttataattcagt

SEQ ID NO: 20115 - DNA, 40 bp, Homo sapiens
actgaattataagtgccacaataaaagcatgctgatgtca

SEQ ID NO: 20116 - DNA, 40 bp, Homo sapiens
gacatcagcatgcttttattgtggcacttataattcagtt

SEQ ID NO: 20117 - DNA, 40 bp, Homo sapiens
aactgaattataagtgccacaataaaagcatgctgatgtc

SEQ ID NO: 20118 - DNA, 40 bp, Homo sapiens
acatcagcatgcttttattgtggcacttataattcagttc

SEQ ID NO: 20119 - DNA, 40 bp, Homo sapiens
gaactgaattataagtgccacaataaaagcatgctgatgt

SEQ ID NO: 20120 - DNA, 40 bp, Homo sapiens
catcagcatgcttttattgtggcacttataattcagttca

SEQ ID NO: 20121 - DNA, 40 bp, Homo sapiens
tgaactgaattataagtgccacaataaaagcatgctgatg

SEQ ID NO: 20122 - DNA, 40 bp, Homo sapiens
atcagcatgcttttattgtggcacttataattcagttcaa

SEQ ID NO: 20123 - DNA, 40 bp, Homo sapiens
ttgaactgaattataagtgccacaataaaagcatgctgat

SEQ ID NO: 20124 - DNA, 40 bp, Homo sapiens
tcagcatgcttttattgtggcacttataattcagttcaag

SEQ ID NO: 20125 - DNA, 40 bp, Homo sapiens
cttgaactgaattataagtgccacaataaaagcatgctga

SEQ ID NO: 20126 - DNA, 40 bp, Homo sapiens
cagcatgcttttattgtggcacttataattcagttcaagt

SEQ ID NO: 20127 - DNA, 40 bp, Homo sapiens
acttgaactgaattataagtgccacaataaaagcatgctg

SEQ ID NO: 20128 - DNA, 40 bp, Homo sapiens
agcatgcttttattgtggcacttataattcagttcaagta

SEQ ID NO: 20129 - DNA, 40 bp, Homo sapiens
tacttgaactgaattataagtgccacaataaaagcatgct

SEQ ID NO: 20130 - DNA, 40 bp, Homo sapiens
gcatgcttttattgtggcacttataattcagttcaagtat

SEQ ID NO: 20131 - DNA, 40 bp, Homo sapiens
atacttgaactgaattataagtgccacaataaaagcatgc

SEQ ID NO: 20132 - DNA, 40 bp, Homo sapiens
catgcttttattgtggcacttataattcagttcaagtatt

SEQ ID NO: 20133 - DNA, 40 bp, Homo sapiens
aatacttgaactgaattataagtgccacaataaaagcatg

SEQ ID NO: 20134 - DNA, 40 bp, Homo sapiens
atgcttttattgtggcacttataattcagttcaagtatta

SEQ ID NO: 20135 - DNA, 40 bp, Homo sapiens
taatacttgaactgaattataagtgccacaataaaagcat

SEQ ID NO: 20136 - DNA, 40 bp, Homo sapiens
tgcttttattgtggcacttataattcagttcaagtattat

SEQ ID NO: 20137 - DNA, 40 bp, Homo sapiens
ataatacttgaactgaattataagtgccacaataaaagca

SEQ ID NO: 20138 - DNA, 40 bp, Homo sapiens
gcttttattgtggcacttataattcagttcaagtattatg

SEQ ID NO: 20139 - DNA, 40 bp, Homo sapiens
cataatacttgaactgaattataagtgccacaataaaagc

SEQ ID NO: 20140 - DNA, 40 bp, Homo sapiens
cttttattgtggcacttataattcagttcaagtattatgc

SEQ ID NO: 20141 - DNA, 40 bp, Homo sapiens
gcataatacttgaactgaattataagtgccacaataaaag

SEQ ID NO: 20142 - DNA, 40 bp, Homo sapiens
ttttattgtggcacttataattcagttcaagtattatgcc

SEQ ID NO: 20143 - DNA, 40 bp, Homo sapiens
ggcataatacttgaactgaattataagtgccacaataaaa

SEQ ID NO: 20144 - DNA, 40 bp, Homo sapiens
tttattgtggcacttataattcagttcaagtattatgccc

SEQ ID NO: 20145 - DNA, 40 bp, Homo sapiens
gggcataatacttgaactgaattataagtgccacaataaa

SEQ ID NO: 20146 - DNA, 40 bp, Homo sapiens
ttattgtggcacttataattcagttcaagtattatgcccc

SEQ ID NO: 20147 - DNA, 40 bp, Homo sapiens
ggggcataatacttgaactgaattataagtgccacaataa

SEQ ID NO: 20148 - DNA, 40 bp, Homo sapiens
tattgtggcacttataattcagttcaagtattatgcccct

SEQ ID NO: 20149 - DNA, 40 bp, Homo sapiens
aggggcataatacttgaactgaattataagtgccacaata

SEQ ID NO: 20150 - DNA, 40 bp, Homo sapiens
attgtggcacttataattcagttcaagtattatgcccctc

SEQ ID NO: 20151 - DNA, 40 bp, Homo sapiens
gaggggcataatacttgaactgaattataagtgccacaat

SEQ ID NO: 20152 - DNA, 40 bp, Homo sapiens
ttgtggcacttataattcagttcaagtattatgcccctct

SEQ ID NO: 20153 - DNA, 40 bp, Homo sapiens
agaggggcataatacttgaactgaattataagtgccacaa

SEQ ID NO: 20154 - DNA, 40 bp, Homo sapiens
tgtggcacttataattcagttcaagtattatgcccctctt

SEQ ID NO: 20155 - DNA, 40 bp, Homo sapiens
aagaggggcataatacttgaactgaattataagtgccaca

SEQ ID NO: 20156 - DNA, 40 bp, Homo sapiens
gtggcacttataattcagttcaagtattatgcccctcttt

SEQ ID NO: 20157 - DNA, 40 bp, Homo sapiens
aaagaggggcataatacttgaactgaattataagtgccac

SEQ ID NO: 20158 - DNA, 40 bp, Homo sapiens
tggcacttataattcagttcaagtattatgcccctctttg

SEQ ID NO: 20159 - DNA, 40 bp, Homo sapiens
caaagaggggcataatacttgaactgaattataagtgcca

SEQ ID NO: 20160 - DNA, 40 bp, Homo sapiens
ggcacttataattcagttcaagtattatgcccctctttga

SEQ ID NO: 20161 - DNA, 40 bp, Homo sapiens
tcaaagaggggcataatacttgaactgaattataagtgcc

SEQ ID NO: 20162 - DNA, 40 bp, Homo sapiens
gcacttataattcagttcaagtattatgcccctctttgat

SEQ ID NO: 20163 - DNA, 40 bp, Homo sapiens
atcaaagaggggcataatacttgaactgaattataagtgc

SEQ ID NO: 20164 - DNA, 40 bp, Homo sapiens
cacttataattcagttcaagtattatgcccctctttgatg

SEQ ID NO: 20165 - DNA, 40 bp, Homo sapiens
catcaaagaggggcataatacttgaactgaattataagtg

SEQ ID NO: 20166 - DNA, 40 bp, Homo sapiens
acttataattcagttcaagtattatgcccctctttgatgg

SEQ ID NO: 20167 - DNA, 40 bp, Homo sapiens
ccatcaaagaggggcataatacttgaactgaattataagt

SEQ ID NO: 20168 - DNA, 40 bp, Homo sapiens
cttataattcagttcaagtattatgcccctctttgatgga

SEQ ID NO: 20169 - DNA, 40 bp, Homo sapiens
tccatcaaagaggggcataatacttgaactgaattataag

SEQ ID NO: 20170 - DNA, 40 bp, Homo sapiens
ttataattcagttcaagtattatgcccctctttgatggaa

SEQ ID NO: 20171 - DNA, 40 bp, Homo sapiens
ttccatcaaagaggggcataatacttgaactgaattataa

SEQ ID NO: 20172 - DNA, 40 bp, Homo sapiens
tataattcagttcaagtattatgcccctctttgatggaac

SEQ ID NO: 20173 - DNA, 40 bp, Homo sapiens
gttccatcaaagaggggcataatacttgaactgaattata

SEQ ID NO: 20174 - DNA, 40 bp, Homo sapiens
ataattcagttcaagtattatgcccctctttgatggaaca

SEQ ID NO: 20175 - DNA, 40 bp, Homo sapiens
tgttccatcaaagaggggcataatacttgaactgaattat

SEQ ID NO: 20176 - DNA, 40 bp, Homo sapiens
taattcagttcaagtattatgcccctctttgatggaacag

SEQ ID NO: 20177 - DNA, 40 bp, Homo sapiens
ctgttccatcaaagaggggcataatacttgaactgaatta

SEQ ID NO: 20178 - DNA, 40 bp, Homo sapiens
aattcagttcaagtattatgcccctctttgatggaacagt

SEQ ID NO: 20179 - DNA, 40 bp, Homo sapiens
actgttccatcaaagaggggcataatacttgaactgaatt

SEQ ID NO: 20180 - DNA, 40 bp, Homo sapiens
attcagttcaagtattatgcccctctttgatggaacagtt

SEQ ID NO: 20181 - DNA, 40 bp, Homo sapiens
aactgttccatcaaagaggggcataatacttgaactgaat

SEQ ID NO: 20182 - DNA, 40 bp, Homo sapiens
ttcagttcaagtattatgcccctctttgatggaacagttt

SEQ ID NO: 20183 - DNA, 40 bp, Homo sapiens
aaactgttccatcaaagaggggcataatacttgaactgaa

SEQ ID NO: 20184 - DNA, 40 bp, Homo sapiens
tcagttcaagtattatgcccctctttgatggaacagtttc

SEQ ID NO: 20185 - DNA, 40 bp, Homo sapiens
gaaactgttccatcaaagaggggcataatacttgaactga

SEQ ID NO: 20186 - DNA, 40 bp, Homo sapiens
cagttcaagtattatgcccctctttgatggaacagtttcc

SEQ ID NO: 20187 - DNA, 40 bp, Homo sapiens
ggaaactgttccatcaaagaggggcataatacttgaactg

SEQ ID NO: 20188 - DNA, 40 bp, Homo sapiens
agttcaagtattatgcccctctttgatggaacagtttcct

SEQ ID NO: 20189 - DNA, 40 bp, Homo sapiens
aggaaactgttccatcaaagaggggcataatacttgaact

SEQ ID NO: 20190 - DNA, 40 bp, Homo sapiens
gttcaagtattatgcccctctttgatggaacagtttccta

SEQ ID NO: 20191 - DNA, 40 bp, Homo sapiens
taggaaactgttccatcaaagaggggcataatacttgaac

SEQ ID NO: 20192 - DNA, 40 bp, Homo sapiens
ttcaagtattatgcccctctttgatggaacagtttcctat

SEQ ID NO: 20193 - DNA, 40 bp, Homo sapiens
ataggaaactgttccatcaaagaggggcataatacttgaa

SEQ ID NO: 20194 - DNA, 40 bp, Homo sapiens
tcaagtattatgcccctctttgatggaacagtttcctatt

SEQ ID NO: 20195 - DNA, 40 bp, Homo sapiens
aataggaaactgttccatcaaagaggggcataatacttga

SEQ ID NO: 20196 - DNA, 40 bp, Homo sapiens
caagtattatgcccctctttgatggaacagtttcctattc

SEQ ID NO: 20197 - DNA, 40 bp, Homo sapiens
gaataggaaactgttccatcaaagaggggcataatacttg

SEQ ID NO: 20198 - DNA, 40 bp, Homo sapiens
aagtattatgcccctctttgatggaacagtttcctattca

SEQ ID NO: 20199 - DNA, 40 bp, Homo sapiens
tgaataggaaactgttccatcaaagaggggcataatactt

SEQ ID NO: 20200 - DNA, 40 bp, Homo sapiens
agtattatgcccctctttgatggaacagtttcctattcag

SEQ ID NO: 20201 - DNA, 40 bp, Homo sapiens
ctgaataggaaactgttccatcaaagaggggcataatact

SEQ ID NO: 20202 - DNA, 40 bp, Homo sapiens
gtattatgcccctctttgatggaacagtttcctattcagt

SEQ ID NO: 20203 - DNA, 40 bp, Homo sapiens
actgaataggaaactgttccatcaaagaggggcataatac

SEQ ID NO: 20204 - DNA, 40 bp, Homo sapiens
tattatgcccctctttgatggaacagtttcctattcagta

SEQ ID NO: 20205 - DNA, 40 bp, Homo sapiens
tactgaataggaaactgttccatcaaagaggggcataata

SEQ ID NO: 20206 - DNA, 40 bp, Homo sapiens
attatgcccctctttgatggaacagtttcctattcagtaa

SEQ ID NO: 20207 - DNA, 40 bp, Homo sapiens
ttactgaataggaaactgttccatcaaagaggggcataat

SEQ ID NO: 20208 - DNA, 40 bp, Homo sapiens
ttatgcccctctttgatggaacagtttcctattcagtaag

SEQ ID NO: 20209 - DNA, 40 bp, Homo sapiens
cttactgaataggaaactgttccatcaaagaggggcataa

SEQ ID NO: 20210 - DNA, 40 bp, Homo sapiens
tatgcccctctttgatggaacagtttcctattcagtaagg

SEQ ID NO: 20211 - DNA, 40 bp, Homo sapiens
ccttactgaataggaaactgttccatcaaagaggggcata

SEQ ID NO: 20212 - DNA, 40 bp, Homo sapiens
atgcccctctttgatggaacagtttcctattcagtaagga

SEQ ID NO: 20213 - DNA, 40 bp, Homo sapiens
tccttactgaataggaaactgttccatcaaagaggggcat

SEQ ID NO: 20214 - DNA, 40 bp, Homo sapiens
tgcccctctttgatggaacagtttcctattcagtaaggaa

SEQ ID NO: 20215 - DNA, 40 bp, Homo sapiens
ttccttactgaataggaaactgttccatcaaagaggggca

SEQ ID NO: 20216 - DNA, 40 bp, Homo sapiens
gcccctctttgatggaacagtttcctattcagtaaggaag

SEQ ID NO: 20217 - DNA, 40 bp, Homo sapiens
cttccttactgaataggaaactgttccatcaaagaggggc

SEQ ID NO: 20218 - DNA, 40 bp, Homo sapiens
cccctctttgatggaacagtttcctattcagtaaggaaga

SEQ ID NO: 20219 - DNA, 40 bp, Homo sapiens
tcttccttactgaataggaaactgttccatcaaagagggg

SEQ ID NO: 20220 - DNA, 40 bp, Homo sapiens
ccctctttgatggaacagtttcctattcagtaaggaagac

SEQ ID NO: 20221 - DNA, 40 bp, Homo sapiens
gtcttccttactgaataggaaactgttccatcaaagaggg

SEQ ID NO: 20222 - DNA, 40 bp, Homo sapiens
cctctttgatggaacagtttcctattcagtaaggaagacc

SEQ ID NO: 20223 - DNA, 40 bp, Homo sapiens
ggtcttccttactgaataggaaactgttccatcaaagagg

SEQ ID NO: 20224 - DNA, 40 bp, Homo sapiens
ctctttgatggaacagtttcctattcagtaaggaagacca

SEQ ID NO: 20225 - DNA, 40 bp, Homo sapiens
tggtcttccttactgaataggaaactgttccatcaaagag

SEQ ID NO: 20226 - DNA, 40 bp, Homo sapiens
tctttgatggaacagtttcctattcagtaaggaagaccag

SEQ ID NO: 20227 - DNA, 40 bp, Homo sapiens
ctggtcttccttactgaataggaaactgttccatcaaaga

SEQ ID NO: 20228 - DNA, 40 bp, Homo sapiens
ctttgatggaacagtttcctattcagtaaggaagaccaga

SEQ ID NO: 20229 - DNA, 40 bp, Homo sapiens
tctggtcttccttactgaataggaaactgttccatcaaag

SEQ ID NO: 20230 - DNA, 40 bp, Homo sapiens
tttgatggaacagtttcctattcagtaaggaagaccagat

SEQ ID NO: 20231 - DNA, 40 bp, Homo sapiens
atctggtcttccttactgaataggaaactgttccatcaaa

SEQ ID NO: 20232 - DNA, 40 bp, Homo sapiens
ttgatggaacagtttcctattcagtaaggaagaccagatt

SEQ ID NO: 20233 - DNA, 40 bp, Homo sapiens
aatctggtcttccttactgaataggaaactgttccatcaa

SEQ ID NO: 20234 - DNA, 40 bp, Homo sapiens
tgatggaacagtttcctattcagtaaggaagaccagatta

SEQ ID NO: 20235 - DNA, 40 bp, Homo sapiens
taatctggtcttccttactgaataggaaactgttccatca

SEQ ID NO: 20236 - DNA, 40 bp, Homo sapiens
gatggaacagtttcctattcagtaaggaagaccagattaa

SEQ ID NO: 20237 - DNA, 40 bp, Homo sapiens
ttaatctggtcttccttactgaataggaaactgttccatc

SEQ ID NO: 20238 - DNA, 40 bp, Homo sapiens
atggaacagtttcctattcagtaaggaagaccagattaat

SEQ ID NO: 20239 - DNA, 40 bp, Homo sapiens
attaatctggtcttccttactgaataggaaactgttccat

SEQ ID NO: 20240 - DNA, 40 bp, Homo sapiens
tggaacagtttcctattcagtaaggaagaccagattaatc

SEQ ID NO: 20241 - DNA, 40 bp, Homo sapiens
gattaatctggtcttccttactgaataggaaactgttcca

SEQ ID NO: 20242 - DNA, 40 bp, Homo sapiens
ggaacagtttcctattcagtaaggaagaccagattaatca

SEQ ID NO: 20243 - DNA, 40 bp, Homo sapiens
tgattaatctggtcttccttactgaataggaaactgttcc

SEQ ID NO: 20244 - DNA, 40 bp, Homo sapiens
gaacagtttcctattcagtaaggaagaccagattaatcat

SEQ ID NO: 20245 - DNA, 40 bp, Homo sapiens
atgattaatctggtcttccttactgaataggaaactgttc

SEQ ID NO: 20246 - DNA, 40 bp, Homo sapiens
aacagtttcctattcagtaaggaagaccagattaatcatt

SEQ ID NO: 20247 - DNA, 40 bp, Homo sapiens
aatgattaatctggtcttccttactgaataggaaactgtt

SEQ ID NO: 20248 - DNA, 40 bp, Homo sapiens
acagtttcctattcagtaaggaagaccagattaatcattg

SEQ ID NO: 20249 - DNA, 40 bp, Homo sapiens
caatgattaatctggtcttccttactgaataggaaactgt

SEQ ID NO: 20250 - DNA, 40 bp, Homo sapiens
cagtttcctattcagtaaggaagaccagattaatcattgg

SEQ ID NO: 20251 - DNA, 40 bp, Homo sapiens
ccaatgattaatctggtcttccttactgaataggaaactg

SEQ ID NO: 20252 - DNA, 40 bp, Homo sapiens
agtttcctattcagtaaggaagaccagattaatcattgga

SEQ ID NO: 20253 - DNA, 40 bp, Homo sapiens
tccaatgattaatctggtcttccttactgaataggaaact

SEQ ID NO: 20254 - DNA, 40 bp, Homo sapiens
gtttcctattcagtaaggaagaccagattaatcattggat

SEQ ID NO: 20255 - DNA, 40 bp, Homo sapiens
atccaatgattaatctggtcttccttactgaataggaaac

SEQ ID NO: 20256 - DNA, 40 bp, Homo sapiens
tttcctattcagtaaggaagaccagattaatcattggatt

SEQ ID NO: 20257 - DNA, 40 bp, Homo sapiens
aatccaatgattaatctggtcttccttactgaataggaaa

SEQ ID NO: 20258 - DNA, 40 bp, Homo sapiens
ttcctattcagtaaggaagaccagattaatcattggattg

SEQ ID NO: 20259 - DNA, 40 bp, Homo sapiens
caatccaatgattaatctggtcttccttactgaataggaa

SEQ ID NO: 20260 - DNA, 40 bp, Homo sapiens
tcctattcagtaaggaagaccagattaatcattggattgg

SEQ ID NO: 20261 - DNA, 40 bp, Homo sapiens
ccaatccaatgattaatctggtcttccttactgaatagga

SEQ ID NO: 20262 - DNA, 40 bp, Homo sapiens
cctattcagtaaggaagaccagattaatcattggattggt

SEQ ID NO: 20263 - DNA, 40 bp, Homo sapiens
accaatccaatgattaatctggtcttccttactgaatagg

SEQ ID NO: 20264 - DNA, 40 bp, Homo sapiens
ctattcagtaaggaagaccagattaatcattggattggtt

SEQ ID NO: 20265 - DNA, 40 bp, Homo sapiens
aaccaatccaatgattaatctggtcttccttactgaatag

SEQ ID NO: 20266 - DNA, 40 bp, Homo sapiens
tattcagtaaggaagaccagattaatcattggattggttt

SEQ ID NO: 20267 - DNA, 40 bp, Homo sapiens
aaaccaatccaatgattaatctggtcttccttactgaata

SEQ ID NO: 20268 - DNA, 40 bp, Homo sapiens
attcagtaaggaagaccagattaatcattggattggtttg

SEQ ID NO: 20269 - DNA, 40 bp, Homo sapiens
caaaccaatccaatgattaatctggtcttccttactgaat

SEQ ID NO: 20270 - DNA, 40 bp, Homo sapiens
ttcagtaaggaagaccagattaatcattggattggtttgt

SEQ ID NO: 20271 - DNA, 40 bp, Homo sapiens
acaaaccaatccaatgattaatctggtcttccttactgaa

SEQ ID NO: 20272 - DNA, 40 bp, Homo sapiens
tcagtaaggaagaccagattaatcattggattggtttgtt

SEQ ID NO: 20273 - DNA, 40 bp, Homo sapiens
aacaaaccaatccaatgattaatctggtcttccttactga

SEQ ID NO: 20274 - DNA, 40 bp, Homo sapiens
cagtaaggaagaccagattaatcattggattggtttgttt

SEQ ID NO: 20275 - DNA, 40 bp, Homo sapiens
aaacaaaccaatccaatgattaatctggtcttccttactg

SEQ ID NO: 20276 - DNA, 40 bp, Homo sapiens
agtaaggaagaccagattaatcattggattggtttgtttc

SEQ ID NO: 20277 - DNA, 40 bp, Homo sapiens
gaaacaaaccaatccaatgattaatctggtcttccttact

SEQ ID NO: 20278 - DNA, 40 bp, Homo sapiens
gtaaggaagaccagattaatcattggattggtttgtttca

SEQ ID NO: 20279 - DNA, 40 bp, Homo sapiens
tgaaacaaaccaatccaatgattaatctggtcttccttac

SEQ ID NO: 20280 - DNA, 40 bp, Homo sapiens
taaggaagaccagattaatcattggattggtttgtttcat

SEQ ID NO: 20281 - DNA, 40 bp, Homo sapiens
atgaaacaaaccaatccaatgattaatctggtcttcctta

SEQ ID NO: 20282 - DNA, 40 bp, Homo sapiens
aaggaagaccagattaatcattggattggtttgtttcatc

SEQ ID NO: 20283 - DNA, 40 bp, Homo sapiens
gatgaaacaaaccaatccaatgattaatctggtcttcctt

SEQ ID NO: 20284 - DNA, 40 bp, Homo sapiens
aggaagaccagattaatcattggattggtttgtttcatct

SEQ ID NO: 20285 - DNA, 40 bp, Homo sapiens
agatgaaacaaaccaatccaatgattaatctggtcttcct

SEQ ID NO: 20286 - DNA, 40 bp, Homo sapiens
ggaagaccagattaatcattggattggtttgtttcatctt

SEQ ID NO: 20287 - DNA, 40 bp, Homo sapiens
aagatgaaacaaaccaatccaatgattaatctggtcttcc

SEQ ID NO: 20288 - DNA, 40 bp, Homo sapiens
gaagaccagattaatcattggattggtttgtttcatcttt

SEQ ID NO: 20289 - DNA, 40 bp, Homo sapiens
aaagatgaaacaaaccaatccaatgattaatctggtcttc

SEQ ID NO: 20290 - DNA, 40 bp, Homo sapiens
aagaccagattaatcattggattggtttgtttcatcttta

SEQ ID NO: 20291 - DNA, 40 bp, Homo sapiens
taaagatgaaacaaaccaatccaatgattaatctggtctt

SEQ ID NO: 20292 - DNA, 40 bp, Homo sapiens
agaccagattaatcattggattggtttgtttcatctttag

SEQ ID NO: 20293 - DNA, 40 bp, Homo sapiens
ctaaagatgaaacaaaccaatccaatgattaatctggtct

SEQ ID NO: 20294 - DNA, 40 bp, Homo sapiens
gaccagattaatcattggattggtttgtttcatctttagt

SEQ ID NO: 20295 - DNA, 40 bp, Homo sapiens
actaaagatgaaacaaaccaatccaatgattaatctggtc

SEQ ID NO: 20296 - DNA, 40 bp, Homo sapiens
accagattaatcattggattggtttgtttcatctttagtg

SEQ ID NO: 20297 - DNA, 40 bp, Homo sapiens
cactaaagatgaaacaaaccaatccaatgattaatctggt

SEQ ID NO: 20298 - DNA, 40 bp, Homo sapiens
ccagattaatcattggattggtttgtttcatctttagtgt

SEQ ID NO: 20299 - DNA, 40 bp, Homo sapiens
acactaaagatgaaacaaaccaatccaatgattaatctgg

SEQ ID NO: 20300 - DNA, 40 bp, Homo sapiens
cagattaatcattggattggtttgtttcatctttagtgtt

SEQ ID NO: 20301 - DNA, 40 bp, Homo sapiens
aacactaaagatgaaacaaaccaatccaatgattaatctg

SEQ ID NO: 20302 - DNA, 40 bp, Homo sapiens
agattaatcattggattggtttgtttcatctttagtgttc

SEQ ID NO: 20303 - DNA, 40 bp, Homo sapiens
gaacactaaagatgaaacaaaccaatccaatgattaatct

SEQ ID NO: 20304 - DNA, 40 bp, Homo sapiens
gattaatcattggattggtttgtttcatctttagtgttct

SEQ ID NO: 20305 - DNA, 40 bp, Homo sapiens
agaacactaaagatgaaacaaaccaatccaatgattaatc

SEQ ID NO: 20306 - DNA, 40 bp, Homo sapiens
attaatcattggattggtttgtttcatctttagtgttctg

SEQ ID NO: 20307 - DNA, 40 bp, Homo sapiens
cagaacactaaagatgaaacaaaccaatccaatgattaat

SEQ ID NO: 20308 - DNA, 40 bp, Homo sapiens
ttaatcattggattggtttgtttcatctttagtgttctga

SEQ ID NO: 20309 - DNA, 40 bp, Homo sapiens
tcagaacactaaagatgaaacaaaccaatccaatgattaa

SEQ ID NO: 20310 - DNA, 40 bp, Homo sapiens
taatcattggattggtttgtttcatctttagtgttctgag

SEQ ID NO: 20311 - DNA, 40 bp, Homo sapiens
ctcagaacactaaagatgaaacaaaccaatccaatgatta

SEQ ID NO: 20312 - DNA, 40 bp, Homo sapiens
aatcattggattggtttgtttcatctttagtgttctgagc

SEQ ID NO: 20313 - DNA, 40 bp, Homo sapiens
gctcagaacactaaagatgaaacaaaccaatccaatgatt

SEQ ID NO: 20314 - DNA, 40 bp, Homo sapiens
atcattggattggtttgtttcatctttagtgttctgagct

SEQ ID NO: 20315 - DNA, 40 bp, Homo sapiens
agctcagaacactaaagatgaaacaaaccaatccaatgat

SEQ ID NO: 20316 - DNA, 40 bp, Homo sapiens
tcattggattggtttgtttcatctttagtgttctgagctg

SEQ ID NO: 20317 - DNA, 40 bp, Homo sapiens
cagctcagaacactaaagatgaaacaaaccaatccaatga

SEQ ID NO: 20318 - DNA, 40 bp, Homo sapiens
cattggattggtttgtttcatctttagtgttctgagctgt

SEQ ID NO: 20319 - DNA, 40 bp, Homo sapiens
acagctcagaacactaaagatgaaacaaaccaatccaatg

SEQ ID NO: 20320 - DNA, 40 bp, Homo sapiens
attggattggtttgtttcatctttagtgttctgagctgta

SEQ ID NO: 20321 - DNA, 40 bp, Homo sapiens
tacagctcagaacactaaagatgaaacaaaccaatccaat

SEQ ID NO: 20322 - DNA, 40 bp, Homo sapiens
ttggattggtttgtttcatctttagtgttctgagctgtag

SEQ ID NO: 20323 - DNA, 40 bp, Homo sapiens
ctacagctcagaacactaaagatgaaacaaaccaatccaa

SEQ ID NO: 20324 - DNA, 40 bp, Homo sapiens
tggattggtttgtttcatctttagtgttctgagctgtaga

SEQ ID NO: 20325 - DNA, 40 bp, Homo sapiens
tctacagctcagaacactaaagatgaaacaaaccaatcca

SEQ ID NO: 20326 - DNA, 40 bp, Homo sapiens
ggattggtttgtttcatctttagtgttctgagctgtagag

SEQ ID NO: 20327 - DNA, 40 bp, Homo sapiens
ctctacagctcagaacactaaagatgaaacaaaccaatcc

SEQ ID NO: 20328 - DNA, 40 bp, Homo sapiens
gattggtttgtttcatctttagtgttctgagctgtagagt

SEQ ID NO: 20329 - DNA, 40 bp, Homo sapiens
actctacagctcagaacactaaagatgaaacaaaccaatc

SEQ ID NO: 20330 - DNA, 40 bp, Homo sapiens
attggtttgtttcatctttagtgttctgagctgtagagta

SEQ ID NO: 20331 - DNA, 40 bp, Homo sapiens
tactctacagctcagaacactaaagatgaaacaaaccaat

SEQ ID NO: 20332 - DNA, 40 bp, Homo sapiens
ttggtttgtttcatctttagtgttctgagctgtagagtat

SEQ ID NO: 20333 - DNA, 40 bp, Homo sapiens
atactctacagctcagaacactaaagatgaaacaaaccaa

SEQ ID NO: 20334 - DNA, 40 bp, Homo sapiens
tggtttgtttcatctttagtgttctgagctgtagagtatt

SEQ ID NO: 20335 - DNA, 40 bp, Homo sapiens
aatactctacagctcagaacactaaagatgaaacaaacca

SEQ ID NO: 20336 - DNA, 40 bp, Homo sapiens
ggtttgtttcatctttagtgttctgagctgtagagtattt

SEQ ID NO: 20337 - DNA, 40 bp, Homo sapiens
aaatactctacagctcagaacactaaagatgaaacaaacc

SEQ ID NO: 20338 - DNA, 40 bp, Homo sapiens
gtttgtttcatctttagtgttctgagctgtagagtattta

SEQ ID NO: 20339 - DNA, 40 bp, Homo sapiens
taaatactctacagctcagaacactaaagatgaaacaaac

SEQ ID NO: 20340 - DNA, 40 bp, Homo sapiens
tttgtttcatctttagtgttctgagctgtagagtatttat

SEQ ID NO: 20341 - DNA, 40 bp, Homo sapiens
ataaatactctacagctcagaacactaaagatgaaacaaa

SEQ ID NO: 20342 - DNA, 40 bp, Homo sapiens
ttgtttcatctttagtgttctgagctgtagagtatttatt

SEQ ID NO: 20343 - DNA, 40 bp, Homo sapiens
aataaatactctacagctcagaacactaaagatgaaacaa

SEQ ID NO: 20344 - DNA, 40 bp, Homo sapiens
tgtttcatctttagtgttctgagctgtagagtatttattt

SEQ ID NO: 20345 - DNA, 40 bp, Homo sapiens
aaataaatactctacagctcagaacactaaagatgaaaca

SEQ ID NO: 20346 - DNA, 40 bp, Homo sapiens
gtttcatctttagtgttctgagctgtagagtatttattta

SEQ ID NO: 20347 - DNA, 40 bp, Homo sapiens
taaataaatactctacagctcagaacactaaagatgaaac

SEQ ID NO: 20348 - DNA, 40 bp, Homo sapiens
tttcatctttagtgttctgagctgtagagtatttatttac

SEQ ID NO: 20349 - DNA, 40 bp, Homo sapiens
gtaaataaatactctacagctcagaacactaaagatgaaa

SEQ ID NO: 20350 - DNA, 40 bp, Homo sapiens
ttcatctttagtgttctgagctgtagagtatttatttacc

SEQ ID NO: 20351 - DNA, 40 bp, Homo sapiens
ggtaaataaatactctacagctcagaacactaaagatgaa

SEQ ID NO: 20352 - DNA, 40 bp, Homo sapiens
tcatctttagtgttctgagctgtagagtatttatttacca

SEQ ID NO: 20353 - DNA, 40 bp, Homo sapiens
tggtaaataaatactctacagctcagaacactaaagatga

SEQ ID NO: 20354 - DNA, 40 bp, Homo sapiens
catctttagtgttctgagctgtagagtatttatttaccaa

SEQ ID NO: 20355 - DNA, 40 bp, Homo sapiens
ttggtaaataaatactctacagctcagaacactaaagatg

SEQ ID NO: 20356 - DNA, 40 bp, Homo sapiens
atctttagtgttctgagctgtagagtatttatttaccaag

SEQ ID NO: 20357 - DNA, 40 bp, Homo sapiens
cttggtaaataaatactctacagctcagaacactaaagat

SEQ ID NO: 20358 - DNA, 40 bp, Homo sapiens
tctttagtgttctgagctgtagagtatttatttaccaagg

SEQ ID NO: 20359 - DNA, 40 bp, Homo sapiens
ccttggtaaataaatactctacagctcagaacactaaaga

SEQ ID NO: 20360 - DNA, 40 bp, Homo sapiens
ctttagtgttctgagctgtagagtatttatttaccaaggt

SEQ ID NO: 20361 - DNA, 40 bp, Homo sapiens
accttggtaaataaatactctacagctcagaacactaaag

SEQ ID NO: 20362 - DNA, 40 bp, Homo sapiens
tttagtgttctgagctgtagagtatttatttaccaaggtt

SEQ ID NO: 20363 - DNA, 40 bp, Homo sapiens
aaccttggtaaataaatactctacagctcagaacactaaa

SEQ ID NO: 20364 - DNA, 40 bp, Homo sapiens
ttagtgttctgagctgtagagtatttatttaccaaggttt

SEQ ID NO: 20365 - DNA, 40 bp, Homo sapiens
aaaccttggtaaataaatactctacagctcagaacactaa

SEQ ID NO: 20366 - DNA, 40 bp, Homo sapiens
tagtgttctgagctgtagagtatttatttaccaaggttta

SEQ ID NO: 20367 - DNA, 40 bp, Homo sapiens
taaaccttggtaaataaatactctacagctcagaacacta

SEQ ID NO: 20368 - DNA, 40 bp, Homo sapiens
agtgttctgagctgtagagtatttatttaccaaggtttat

SEQ ID NO: 20369 - DNA, 40 bp, Homo sapiens
ataaaccttggtaaataaatactctacagctcagaacact

SEQ ID NO: 20370 - DNA, 40 bp, Homo sapiens
gtgttctgagctgtagagtatttatttaccaaggtttatt

SEQ ID NO: 20371 - DNA, 40 bp, Homo sapiens
aataaaccttggtaaataaatactctacagctcagaacac

SEQ ID NO: 20372 - DNA, 40 bp, Homo sapiens
tgttctgagctgtagagtatttatttaccaaggtttattt

SEQ ID NO: 20373 - DNA, 40 bp, Homo sapiens
aaataaaccttggtaaataaatactctacagctcagaaca

SEQ ID NO: 20374 - DNA, 40 bp, Homo sapiens
gttctgagctgtagagtatttatttaccaaggtttatttt

SEQ ID NO: 20375 - DNA, 40 bp, Homo sapiens
aaaataaaccttggtaaataaatactctacagctcagaac

SEQ ID NO: 20376 - DNA, 40 bp, Homo sapiens
ttctgagctgtagagtatttatttaccaaggtttatttta

SEQ ID NO: 20377 - DNA, 40 bp, Homo sapiens
taaaataaaccttggtaaataaatactctacagctcagaa

SEQ ID NO: 20378 - DNA, 40 bp, Homo sapiens
tctgagctgtagagtatttatttaccaaggtttattttaa

SEQ ID NO: 20379 - DNA, 40 bp, Homo sapiens
ttaaaataaaccttggtaaataaatactctacagctcaga

SEQ ID NO: 20380 - DNA, 40 bp, Homo sapiens
ctgagctgtagagtatttatttaccaaggtttattttaat

SEQ ID NO: 20381 - DNA, 40 bp, Homo sapiens
attaaaataaaccttggtaaataaatactctacagctcag

SEQ ID NO: 20382 - DNA, 40 bp, Homo sapiens
tgagctgtagagtatttatttaccaaggtttattttaatt

SEQ ID NO: 20383 - DNA, 40 bp, Homo sapiens
aattaaaataaaccttggtaaataaatactctacagctca

SEQ ID NO: 20384 - DNA, 40 bp, Homo sapiens
gagctgtagagtatttatttaccaaggtttattttaattt

SEQ ID NO: 20385 - DNA, 40 bp, Homo sapiens
aaattaaaataaaccttggtaaataaatactctacagctc

SEQ ID NO: 20386 - DNA, 40 bp, Homo sapiens
agctgtagagtatttatttaccaaggtttattttaatttt

SEQ ID NO: 20387 - DNA, 40 bp, Homo sapiens
aaaattaaaataaaccttggtaaataaatactctacagct

SEQ ID NO: 20388 - DNA, 40 bp, Homo sapiens
gctgtagagtatttatttaccaaggtttattttaattttt

SEQ ID NO: 20389 - DNA, 40 bp, Homo sapiens
aaaaattaaaataaaccttggtaaataaatactctacagc

SEQ ID NO: 20390 - DNA, 40 bp, Homo sapiens
ctgtagagtatttatttaccaaggtttattttaattttta

SEQ ID NO: 20391 - DNA, 40 bp, Homo sapiens
taaaaattaaaataaaccttggtaaataaatactctacag

SEQ ID NO: 20392 - DNA, 40 bp, Homo sapiens
tgtagagtatttatttaccaaggtttattttaatttttat

SEQ ID NO: 20393 - DNA, 40 bp, Homo sapiens
ataaaaattaaaataaaccttggtaaataaatactctaca

SEQ ID NO: 20394 - DNA, 40 bp, Homo sapiens
gtagagtatttatttaccaaggtttattttaatttttatt

SEQ ID NO: 20395 - DNA, 40 bp, Homo sapiens
aataaaaattaaaataaaccttggtaaataaatactctac

SEQ ID NO: 20396 - DNA, 40 bp, Homo sapiens
tagagtatttatttaccaaggtttattttaatttttattt

SEQ ID NO: 20397 - DNA, 40 bp, Homo sapiens
aaataaaaattaaaataaaccttggtaaataaatactcta

SEQ ID NO: 20398 - DNA, 40 bp, Homo sapiens
agagtatttatttaccaaggtttattttaatttttatttt

SEQ ID NO: 20399 - DNA, 40 bp, Homo sapiens
aaaataaaaattaaaataaaccttggtaaataaatactct

SEQ ID NO: 20400 - DNA, 40 bp, Homo sapiens
gagtatttatttaccaaggtttattttaatttttatttta

SEQ ID NO: 20401 - DNA, 40 bp, Homo sapiens
taaaataaaaattaaaataaaccttggtaaataaatactc

SEQ ID NO: 20402 - DNA, 40 bp, Homo sapiens
agtatttatttaccaaggtttattttaatttttattttat

SEQ ID NO: 20403 - DNA, 40 bp, Homo sapiens
ataaaataaaaattaaaataaaccttggtaaataaatact

SEQ ID NO: 20404 - DNA, 40 bp, Homo sapiens
gtatttatttaccaaggtttattttaatttttattttatt

SEQ ID NO: 20405 - DNA, 40 bp, Homo sapiens
aataaaataaaaattaaaataaaccttggtaaataaatac

SEQ ID NO: 20406 - DNA, 40 bp, Homo sapiens
tatttatttaccaaggtttattttaatttttattttattt

SEQ ID NO: 20407 - DNA, 40 bp, Homo sapiens
aaataaaataaaaattaaaataaaccttggtaaataaata

SEQ ID NO: 20408 - DNA, 40 bp, Homo sapiens
atttatttaccaaggtttattttaatttttattttatttt

SEQ ID NO: 20409 - DNA, 40 bp, Homo sapiens
aaaataaaataaaaattaaaataaaccttggtaaataaat

SEQ ID NO: 20410 - DNA, 40 bp, Homo sapiens
tttatttaccaaggtttattttaatttttattttattttt

SEQ ID NO: 20411 - DNA, 40 bp, Homo sapiens
aaaaataaaataaaaattaaaataaaccttggtaaataaa

SEQ ID NO: 20412 - DNA, 40 bp, Homo sapiens
ttatttaccaaggtttattttaatttttattttattttta

SEQ ID NO: 20413 - DNA, 40 bp, Homo sapiens
taaaaataaaataaaaattaaaataaaccttggtaaataa

SEQ ID NO: 20414 - DNA, 40 bp, Homo sapiens
tatttaccaaggtttattttaatttttattttatttttat

SEQ ID NO: 20415 - DNA, 40 bp, Homo sapiens
ataaaaataaaataaaaattaaaataaaccttggtaaata

SEQ ID NO: 20416 - DNA, 40 bp, Homo sapiens
atttaccaaggtttattttaatttttattttatttttatt

SEQ ID NO: 20417 - DNA, 40 bp, Homo sapiens
aataaaaataaaataaaaattaaaataaaccttggtaaat

SEQ ID NO: 20418 - DNA, 40 bp, Homo sapiens
tttaccaaggtttattttaatttttattttatttttattt

SEQ ID NO: 20419 - DNA, 40 bp, Homo sapiens
aaataaaaataaaataaaaattaaaataaaccttggtaaa

SEQ ID NO: 20420 - DNA, 40 bp, Homo sapiens
ttaccaaggtttattttaatttttattttatttttatttt

SEQ ID NO: 20421 - DNA, 40 bp, Homo sapiens
aaaataaaaataaaataaaaattaaaataaaccttggtaa

SEQ ID NO: 20422 - DNA, 40 bp, Homo sapiens
taccaaggtttattttaatttttattttatttttattttt

SEQ ID NO: 20423 - DNA, 40 bp, Homo sapiens
aaaaataaaaataaaataaaaattaaaataaaccttggta

SEQ ID NO: 20424 - DNA, 40 bp, Homo sapiens
accaaggtttattttaatttttattttatttttatttttc

SEQ ID NO: 20425 - DNA, 40 bp, Homo sapiens
gaaaaataaaaataaaataaaaattaaaataaaccttggt

SEQ ID NO: 20426 - DNA, 40 bp, Homo sapiens
ccaaggtttattttaatttttattttatttttatttttcc

SEQ ID NO: 20427 - DNA, 40 bp, Homo sapiens
ggaaaaataaaaataaaataaaaattaaaataaaccttgg

SEQ ID NO: 20428 - DNA, 40 bp, Homo sapiens
caaggtttattttaatttttattttatttttatttttcca

SEQ ID NO: 20429 - DNA, 40 bp, Homo sapiens
tggaaaaataaaaataaaataaaaattaaaataaaccttg

SEQ ID NO: 20430 - DNA, 40 bp, Homo sapiens
aaggtttattttaatttttattttatttttatttttccat

SEQ ID NO: 20431 - DNA, 40 bp, Homo sapiens
atggaaaaataaaaataaaataaaaattaaaataaacctt

SEQ ID NO: 20432 - DNA, 40 bp, Homo sapiens
aggtttattttaatttttattttatttttatttttccatg

SEQ ID NO: 20433 - DNA, 40 bp, Homo sapiens
catggaaaaataaaaataaaataaaaattaaaataaacct

SEQ ID NO: 20434 - DNA, 40 bp, Homo sapiens
ggtttattttaatttttattttatttttatttttccatgt

SEQ ID NO: 20435 - DNA, 40 bp, Homo sapiens
acatggaaaaataaaaataaaataaaaattaaaataaacc

SEQ ID NO: 20436 - DNA, 40 bp, Homo sapiens
gtttattttaatttttattttatttttatttttccatgtt

SEQ ID NO: 20437 - DNA, 40 bp, Homo sapiens
aacatggaaaaataaaaataaaataaaaattaaaataaac

SEQ ID NO: 20438 - DNA, 40 bp, Homo sapiens
tttattttaatttttattttatttttatttttccatgttc

SEQ ID NO: 20439 - DNA, 40 bp, Homo sapiens
gaacatggaaaaataaaaataaaataaaaattaaaataaa

SEQ ID NO: 20440 - DNA, 40 bp, Homo sapiens
ttattttaatttttattttatttttatttttccatgttca

SEQ ID NO: 20441 - DNA, 40 bp, Homo sapiens
tgaacatggaaaaataaaaataaaataaaaattaaaataa

SEQ ID NO: 20442 - DNA, 40 bp, Homo sapiens
tattttaatttttattttatttttatttttccatgttcat

SEQ ID NO: 20443 - DNA, 40 bp, Homo sapiens
atgaacatggaaaaataaaaataaaataaaaattaaaata

SEQ ID NO: 20444 - DNA, 40 bp, Homo sapiens
attttaatttttattttatttttatttttccatgttcatt

SEQ ID NO: 20445 - DNA, 40 bp, Homo sapiens
aatgaacatggaaaaataaaaataaaataaaaattaaaat

SEQ ID NO: 20446 - DNA, 40 bp, Homo sapiens
ttttaatttttattttatttttatttttccatgttcattg

SEQ ID NO: 20447 - DNA, 40 bp, Homo sapiens
caatgaacatggaaaaataaaaataaaataaaaattaaaa

SEQ ID NO: 20448 - DNA, 40 bp, Homo sapiens
tttaatttttattttatttttatttttccatgttcattgt

SEQ ID NO: 20449 - DNA, 40 bp, Homo sapiens
acaatgaacatggaaaaataaaaataaaataaaaattaaa

SEQ ID NO: 20450 - DNA, 40 bp, Homo sapiens
ttaatttttattttatttttatttttccatgttcattgta

SEQ ID NO: 20451 - DNA, 40 bp, Homo sapiens
tacaatgaacatggaaaaataaaaataaaataaaaattaa

SEQ ID NO: 20452 - DNA, 40 bp, Homo sapiens
taatttttattttatttttatttttccatgttcattgtag

SEQ ID NO: 20453 - DNA, 40 bp, Homo sapiens
ctacaatgaacatggaaaaataaaaataaaataaaaatta

SEQ ID NO: 20454 - DNA, 40 bp, Homo sapiens
aatttttattttatttttatttttccatgttcattgtaga

SEQ ID NO: 20455 - DNA, 40 bp, Homo sapiens
tctacaatgaacatggaaaaataaaaataaaataaaaatt

SEQ ID NO: 20456 - DNA, 40 bp, Homo sapiens
atttttattttatttttatttttccatgttcattgtagaa

SEQ ID NO: 20457 - DNA, 40 bp, Homo sapiens
ttctacaatgaacatggaaaaataaaaataaaataaaaat

SEQ ID NO: 20458 - DNA, 40 bp, Homo sapiens
tttttattttatttttatttttccatgttcattgtagaat

SEQ ID NO: 20459 - DNA, 40 bp, Homo sapiens
attctacaatgaacatggaaaaataaaaataaaataaaaa

SEQ ID NO: 20460 - DNA, 40 bp, Homo sapiens
ttttattttatttttatttttccatgttcattgtagaatt

SEQ ID NO: 20461 - DNA, 40 bp, Homo sapiens
aattctacaatgaacatggaaaaataaaaataaaataaaa

SEQ ID NO: 20462 - DNA, 40 bp, Homo sapiens
tttattttatttttatttttccatgttcattgtagaattc

SEQ ID NO: 20463 - DNA, 40 bp, Homo sapiens
gaattctacaatgaacatggaaaaataaaaataaaataaa

SEQ ID NO: 20464 - DNA, 40 bp, Homo sapiens
ttattttatttttatttttccatgttcattgtagaattca

SEQ ID NO: 20465 - DNA, 40 bp, Homo sapiens
tgaattctacaatgaacatggaaaaataaaaataaaataa

SEQ ID NO: 20466 - DNA, 40 bp, Homo sapiens
tattttatttttatttttccatgttcattgtagaattcat

SEQ ID NO: 20467 - DNA, 40 bp, Homo sapiens
atgaattctacaatgaacatggaaaaataaaaataaaata

SEQ ID NO: 20468 - DNA, 40 bp, Homo sapiens
attttatttttatttttccatgttcattgtagaattcatt

SEQ ID NO: 20469 - DNA, 40 bp, Homo sapiens
aatgaattctacaatgaacatggaaaaataaaaataaaat

SEQ ID NO: 20470 - DNA, 40 bp, Homo sapiens
ttttatttttatttttccatgttcattgtagaattcattt

SEQ ID NO: 20471 - DNA, 40 bp, Homo sapiens
aaatgaattctacaatgaacatggaaaaataaaaataaaa

SEQ ID NO: 20472 - DNA, 40 bp, Homo sapiens
tttatttttatttttccatgttcattgtagaattcatttt

SEQ ID NO: 20473 - DNA, 40 bp, Homo sapiens
aaaatgaattctacaatgaacatggaaaaataaaaataaa

SEQ ID NO: 20474 - DNA, 40 bp, Homo sapiens
ttatttttatttttccatgttcattgtagaattcatttta

SEQ ID NO: 20475 - DNA, 40 bp, Homo sapiens
taaaatgaattctacaatgaacatggaaaaataaaaataa

SEQ ID NO: 20476 - DNA, 40 bp, Homo sapiens
tatttttatttttccatgttcattgtagaattcattttac

SEQ ID NO: 20477 - DNA, 40 bp, Homo sapiens
gtaaaatgaattctacaatgaacatggaaaaataaaaata

SEQ ID NO: 20478 - DNA, 40 bp, Homo sapiens
atttttatttttccatgttcattgtagaattcattttacc

SEQ ID NO: 20479 - DNA, 40 bp, Homo sapiens
ggtaaaatgaattctacaatgaacatggaaaaataaaaat

SEQ ID NO: 20480 - DNA, 40 bp, Homo sapiens
tttttatttttccatgttcattgtagaattcattttacct

SEQ ID NO: 20481 - DNA, 40 bp, Homo sapiens
aggtaaaatgaattctacaatgaacatggaaaaataaaaa

SEQ ID NO: 20482 - DNA, 40 bp, Homo sapiens
ttttatttttccatgttcattgtagaattcattttaccta

SEQ ID NO: 20483 - DNA, 40 bp, Homo sapiens
taggtaaaatgaattctacaatgaacatggaaaaataaaa

SEQ ID NO: 20484 - DNA, 40 bp, Homo sapiens
tttatttttccatgttcattgtagaattcattttacctac

SEQ ID NO: 20485 - DNA, 40 bp, Homo sapiens
gtaggtaaaatgaattctacaatgaacatggaaaaataaa

SEQ ID NO: 20486 - DNA, 40 bp, Homo sapiens
ttatttttccatgttcattgtagaattcattttacctacg

SEQ ID NO: 20487 - DNA, 40 bp, Homo sapiens
cgtaggtaaaatgaattctacaatgaacatggaaaaataa

SEQ ID NO: 20488 - DNA, 40 bp, Homo sapiens
tatttttccatgttcattgtagaattcattttacctacga

SEQ ID NO: 20489 - DNA, 40 bp, Homo sapiens
tcgtaggtaaaatgaattctacaatgaacatggaaaaata

SEQ ID NO: 20490 - DNA, 40 bp, Homo sapiens
atttttccatgttcattgtagaattcattttacctacgaa

SEQ ID NO: 20491 - DNA, 40 bp, Homo sapiens
ttcgtaggtaaaatgaattctacaatgaacatggaaaaat

SEQ ID NO: 20492 - DNA, 40 bp, Homo sapiens
tttttccatgttcattgtagaattcattttacctacgaat

SEQ ID NO: 20493 - DNA, 40 bp, Homo sapiens
attcgtaggtaaaatgaattctacaatgaacatggaaaaa

SEQ ID NO: 20494 - DNA, 40 bp, Homo sapiens
ttttccatgttcattgtagaattcattttacctacgaatg

SEQ ID NO: 20495 - DNA, 40 bp, Homo sapiens
cattcgtaggtaaaatgaattctacaatgaacatggaaaa

SEQ ID NO: 20496 - DNA, 40 bp, Homo sapiens
tttccatgttcattgtagaattcattttacctacgaatga

SEQ ID NO: 20497 - DNA, 40 bp, Homo sapiens
tcattcgtaggtaaaatgaattctacaatgaacatggaaa

SEQ ID NO: 20498 - DNA, 40 bp, Homo sapiens
ttccatgttcattgtagaattcattttacctacgaatgaa

SEQ ID NO: 20499 - DNA, 40 bp, Homo sapiens
ttcattcgtaggtaaaatgaattctacaatgaacatggaa

SEQ ID NO: 20500 - DNA, 40 bp, Homo sapiens
tccatgttcattgtagaattcattttacctacgaatgaag

SEQ ID NO: 20501 - DNA, 40 bp, Homo sapiens
cttcattcgtaggtaaaatgaattctacaatgaacatgga

SEQ ID NO: 20502 - DNA, 40 bp, Homo sapiens
ccatgttcattgtagaattcattttacctacgaatgaagt

SEQ ID NO: 20503 - DNA, 40 bp, Homo sapiens
acttcattcgtaggtaaaatgaattctacaatgaacatgg

SEQ ID NO: 20504 - DNA, 40 bp, Homo sapiens
catgttcattgtagaattcattttacctacgaatgaagta

SEQ ID NO: 20505 - DNA, 40 bp, Homo sapiens
tacttcattcgtaggtaaaatgaattctacaatgaacatg

SEQ ID NO: 20506 - DNA, 40 bp, Homo sapiens
atgttcattgtagaattcattttacctacgaatgaagtat

SEQ ID NO: 20507 - DNA, 40 bp, Homo sapiens
atacttcattcgtaggtaaaatgaattctacaatgaacat

SEQ ID NO: 20508 - DNA, 40 bp, Homo sapiens
tgttcattgtagaattcattttacctacgaatgaagtatg

SEQ ID NO: 20509 - DNA, 40 bp, Homo sapiens
catacttcattcgtaggtaaaatgaattctacaatgaaca

SEQ ID NO: 20510 - DNA, 40 bp, Homo sapiens
gttcattgtagaattcattttacctacgaatgaagtatgt

SEQ ID NO: 20511 - DNA, 40 bp, Homo sapiens
acatacttcattcgtaggtaaaatgaattctacaatgaac

SEQ ID NO: 20512 - DNA, 40 bp, Homo sapiens
ttcattgtagaattcattttacctacgaatgaagtatgta

SEQ ID NO: 20513 - DNA, 40 bp, Homo sapiens
tacatacttcattcgtaggtaaaatgaattctacaatgaa

SEQ ID NO: 20514 - DNA, 40 bp, Homo sapiens
tcattgtagaattcattttacctacgaatgaagtatgtag

SEQ ID NO: 20515 - DNA, 40 bp, Homo sapiens
ctacatacttcattcgtaggtaaaatgaattctacaatga

SEQ ID NO: 20516 - DNA, 40 bp, Homo sapiens
cattgtagaattcattttacctacgaatgaagtatgtaga

SEQ ID NO: 20517 - DNA, 40 bp, Homo sapiens
tctacatacttcattcgtaggtaaaatgaattctacaatg

SEQ ID NO: 20518 - DNA, 40 bp, Homo sapiens
attgtagaattcattttacctacgaatgaagtatgtagat

SEQ ID NO: 20519 - DNA, 40 bp, Homo sapiens
atctacatacttcattcgtaggtaaaatgaattctacaat

SEQ ID NO: 20520 - DNA, 40 bp, Homo sapiens
ttgtagaattcattttacctacgaatgaagtatgtagatt

SEQ ID NO: 20521 - DNA, 40 bp, Homo sapiens
aatctacatacttcattcgtaggtaaaatgaattctacaa

SEQ ID NO: 20522 - DNA, 40 bp, Homo sapiens
tgtagaattcattttacctacgaatgaagtatgtagatta

SEQ ID NO: 20523 - DNA, 40 bp, Homo sapiens
taatctacatacttcattcgtaggtaaaatgaattctaca

SEQ ID NO: 20524 - DNA, 40 bp, Homo sapiens
gtagaattcattttacctacgaatgaagtatgtagattat

SEQ ID NO: 20525 - DNA, 40 bp, Homo sapiens
ataatctacatacttcattcgtaggtaaaatgaattctac

SEQ ID NO: 20526 - DNA, 40 bp, Homo sapiens
tagaattcattttacctacgaatgaagtatgtagattata

SEQ ID NO: 20527 - DNA, 40 bp, Homo sapiens
tataatctacatacttcattcgtaggtaaaatgaattcta

SEQ ID NO: 20528 - DNA, 40 bp, Homo sapiens
agaattcattttacctacgaatgaagtatgtagattatag

SEQ ID NO: 20529 - DNA, 40 bp, Homo sapiens
ctataatctacatacttcattcgtaggtaaaatgaattct

SEQ ID NO: 20530 - DNA, 40 bp, Homo sapiens
gaattcattttacctacgaatgaagtatgtagattataga

SEQ ID NO: 20531 - DNA, 40 bp, Homo sapiens
tctataatctacatacttcattcgtaggtaaaatgaattc

SEQ ID NO: 20532 - DNA, 40 bp, Homo sapiens
aattcattttacctacgaatgaagtatgtagattatagag

SEQ ID NO: 20533 - DNA, 40 bp, Homo sapiens
ctctataatctacatacttcattcgtaggtaaaatgaatt

SEQ ID NO: 20534 - DNA, 40 bp, Homo sapiens
attcattttacctacgaatgaagtatgtagattatagaga

SEQ ID NO: 20535 - DNA, 40 bp, Homo sapiens
tctctataatctacatacttcattcgtaggtaaaatgaat

SEQ ID NO: 20536 - DNA, 40 bp, Homo sapiens
ttcattttacctacgaatgaagtatgtagattatagagag

SEQ ID NO: 20537 - DNA, 40 bp, Homo sapiens
ctctctataatctacatacttcattcgtaggtaaaatgaa

SEQ ID NO: 20538 - DNA, 40 bp, Homo sapiens
tcattttacctacgaatgaagtatgtagattatagagaga

SEQ ID NO: 20539 - DNA, 40 bp, Homo sapiens
tctctctataatctacatacttcattcgtaggtaaaatga

SEQ ID NO: 20540 - DNA, 40 bp, Homo sapiens
cattttacctacgaatgaagtatgtagattatagagagaa

SEQ ID NO: 20541 - DNA, 40 bp, Homo sapiens
ttctctctataatctacatacttcattcgtaggtaaaatg

SEQ ID NO: 20542 - DNA, 40 bp, Homo sapiens
attttacctacgaatgaagtatgtagattatagagagaaa

SEQ ID NO: 20543 - DNA, 40 bp, Homo sapiens
tttctctctataatctacatacttcattcgtaggtaaaat

SEQ ID NO: 20544 - DNA, 40 bp, Homo sapiens
ttttacctacgaatgaagtatgtagattatagagagaaaa

SEQ ID NO: 20545 - DNA, 40 bp, Homo sapiens
ttttctctctataatctacatacttcattcgtaggtaaaa

SEQ ID NO: 20546 - DNA, 40 bp, Homo sapiens
tttacctacgaatgaagtatgtagattatagagagaaaat

SEQ ID NO: 20547 - DNA, 40 bp, Homo sapiens
attttctctctataatctacatacttcattcgtaggtaaa

SEQ ID NO: 20548 - DNA, 40 bp, Homo sapiens
ttacctacgaatgaagtatgtagattatagagagaaaatt

SEQ ID NO: 20549 - DNA, 40 bp, Homo sapiens
aattttctctctataatctacatacttcattcgtaggtaa

SEQ ID NO: 20550 - DNA, 40 bp, Homo sapiens
tacctacgaatgaagtatgtagattatagagagaaaattt

SEQ ID NO: 20551 - DNA, 40 bp, Homo sapiens
aaattttctctctataatctacatacttcattcgtaggta

SEQ ID NO: 20552 - DNA, 40 bp, Homo sapiens
acctacgaatgaagtatgtagattatagagagaaaatttg

SEQ ID NO: 20553 - DNA, 40 bp, Homo sapiens
caaattttctctctataatctacatacttcattcgtaggt

SEQ ID NO: 20554 - DNA, 40 bp, Homo sapiens
cctacgaatgaagtatgtagattatagagagaaaatttgt

SEQ ID NO: 20555 - DNA, 40 bp, Homo sapiens
acaaattttctctctataatctacatacttcattcgtagg

SEQ ID NO: 20556 - DNA, 40 bp, Homo sapiens
ctacgaatgaagtatgtagattatagagagaaaatttgta

SEQ ID NO: 20557 - DNA, 40 bp, Homo sapiens
tacaaattttctctctataatctacatacttcattcgtag

SEQ ID NO: 20558 - DNA, 40 bp, Homo sapiens
tacgaatgaagtatgtagattatagagagaaaatttgtaa

SEQ ID NO: 20559 - DNA, 40 bp, Homo sapiens
ttacaaattttctctctataatctacatacttcattcgta

SEQ ID NO: 20560 - DNA, 40 bp, Homo sapiens
acgaatgaagtatgtagattatagagagaaaatttgtaaa

SEQ ID NO: 20561 - DNA, 40 bp, Homo sapiens
tttacaaattttctctctataatctacatacttcattcgt

SEQ ID NO: 20562 - DNA, 40 bp, Homo sapiens
cgaatgaagtatgtagattatagagagaaaatttgtaaaa

SEQ ID NO: 20563 - DNA, 40 bp, Homo sapiens
ttttacaaattttctctctataatctacatacttcattcg

SEQ ID NO: 20564 - DNA, 40 bp, Homo sapiens
gaatgaagtatgtagattatagagagaaaatttgtaaaat

SEQ ID NO: 20565 - DNA, 40 bp, Homo sapiens
attttacaaattttctctctataatctacatacttcattc

SEQ ID NO: 20566 - DNA, 40 bp, Homo sapiens
aatgaagtatgtagattatagagagaaaatttgtaaaatt

SEQ ID NO: 20567 - DNA, 40 bp, Homo sapiens
aattttacaaattttctctctataatctacatacttcatt

SEQ ID NO: 20568 - DNA, 40 bp, Homo sapiens
atgaagtatgtagattatagagagaaaatttgtaaaatta

SEQ ID NO: 20569 - DNA, 40 bp, Homo sapiens
taattttacaaattttctctctataatctacatacttcat

SEQ ID NO: 20570 - DNA, 40 bp, Homo sapiens
tgaagtatgtagattatagagagaaaatttgtaaaattaa

SEQ ID NO: 20571 - DNA, 40 bp, Homo sapiens
ttaattttacaaattttctctctataatctacatacttca

SEQ ID NO: 20572 - DNA, 40 bp, Homo sapiens
gaagtatgtagattatagagagaaaatttgtaaaattaaa

SEQ ID NO: 20573 - DNA, 40 bp, Homo sapiens
tttaattttacaaattttctctctataatctacatacttc

SEQ ID NO: 20574 - DNA, 40 bp, Homo sapiens
aagtatgtagattatagagagaaaatttgtaaaattaaac

SEQ ID NO: 20575 - DNA, 40 bp, Homo sapiens
gtttaattttacaaattttctctctataatctacatactt

SEQ ID NO: 20576 - DNA, 40 bp, Homo sapiens
agtatgtagattatagagagaaaatttgtaaaattaaact

SEQ ID NO: 20577 - DNA, 40 bp, Homo sapiens
agtttaattttacaaattttctctctataatctacatact

SEQ ID NO: 20578 - DNA, 40 bp, Homo sapiens
gtatgtagattatagagagaaaatttgtaaaattaaactg

SEQ ID NO: 20579 - DNA, 40 bp, Homo sapiens
cagtttaattttacaaattttctctctataatctacatac

SEQ ID NO: 20580 - DNA, 40 bp, Homo sapiens
tatgtagattatagagagaaaatttgtaaaattaaactga

SEQ ID NO: 20581 - DNA, 40 bp, Homo sapiens
tcagtttaattttacaaattttctctctataatctacata

SEQ ID NO: 20582 - DNA, 40 bp, Homo sapiens
atgtagattatagagagaaaatttgtaaaattaaactgat

SEQ ID NO: 20583 - DNA, 40 bp, Homo sapiens
atcagtttaattttacaaattttctctctataatctacat

SEQ ID NO: 20584 - DNA, 40 bp, Homo sapiens
tgtagattatagagagaaaatttgtaaaattaaactgata

SEQ ID NO: 20585 - DNA, 40 bp, Homo sapiens
tatcagtttaattttacaaattttctctctataatctaca

SEQ ID NO: 20586 - DNA, 40 bp, Homo sapiens
gtagattatagagagaaaatttgtaaaattaaactgatac

SEQ ID NO: 20587 - DNA, 40 bp, Homo sapiens
gtatcagtttaattttacaaattttctctctataatctac

SEQ ID NO: 20588 - DNA, 40 bp, Homo sapiens
tagattatagagagaaaatttgtaaaattaaactgatact

SEQ ID NO: 20589 - DNA, 40 bp, Homo sapiens
agtatcagtttaattttacaaattttctctctataatcta

SEQ ID NO: 20590 - DNA, 40 bp, Homo sapiens
agattatagagagaaaatttgtaaaattaaactgatactg

SEQ ID NO: 20591 - DNA, 40 bp, Homo sapiens
cagtatcagtttaattttacaaattttctctctataatct

SEQ ID NO: 20592 - DNA, 40 bp, Homo sapiens
gattatagagagaaaatttgtaaaattaaactgatactga

SEQ ID NO: 20593 - DNA, 40 bp, Homo sapiens
tcagtatcagtttaattttacaaattttctctctataatc

SEQ ID NO: 20594 - DNA, 40 bp, Homo sapiens
attatagagagaaaatttgtaaaattaaactgatactgaa

SEQ ID NO: 20595 - DNA, 40 bp, Homo sapiens
ttcagtatcagtttaattttacaaattttctctctataat

SEQ ID NO: 20596 - DNA, 40 bp, Homo sapiens
ttatagagagaaaatttgtaaaattaaactgatactgaag

SEQ ID NO: 20597 - DNA, 40 bp, Homo sapiens
cttcagtatcagtttaattttacaaattttctctctataa

SEQ ID NO: 20598 - DNA, 40 bp, Homo sapiens
tatagagagaaaatttgtaaaattaaactgatactgaaga

SEQ ID NO: 20599 - DNA, 40 bp, Homo sapiens
tcttcagtatcagtttaattttacaaattttctctctata

SEQ ID NO: 20600 - DNA, 40 bp, Homo sapiens
atagagagaaaatttgtaaaattaaactgatactgaagac

SEQ ID NO: 20601 - DNA, 40 bp, Homo sapiens
gtcttcagtatcagtttaattttacaaattttctctctat

SEQ ID NO: 20602 - DNA, 40 bp, Homo sapiens
tagagagaaaatttgtaaaattaaactgatactgaagact

SEQ ID NO: 20603 - DNA, 40 bp, Homo sapiens
agtcttcagtatcagtttaattttacaaattttctctcta

SEQ ID NO: 20604 - DNA, 40 bp, Homo sapiens
agagagaaaatttgtaaaattaaactgatactgaagactg

SEQ ID NO: 20605 - DNA, 40 bp, Homo sapiens
cagtcttcagtatcagtttaattttacaaattttctctct

SEQ ID NO: 20606 - DNA, 40 bp, Homo sapiens
gagagaaaatttgtaaaattaaactgatactgaagactgg

SEQ ID NO: 20607 - DNA, 40 bp, Homo sapiens
ccagtcttcagtatcagtttaattttacaaattttctctc

SEQ ID NO: 20608 - DNA, 40 bp, Homo sapiens
agagaaaatttgtaaaattaaactgatactgaagactggt

SEQ ID NO: 20609 - DNA, 40 bp, Homo sapiens
accagtcttcagtatcagtttaattttacaaattttctct

SEQ ID NO: 20610 - DNA, 40 bp, Homo sapiens
gagaaaatttgtaaaattaaactgatactgaagactggta

SEQ ID NO: 20611 - DNA, 40 bp, Homo sapiens
taccagtcttcagtatcagtttaattttacaaattttctc

SEQ ID NO: 20612 - DNA, 40 bp, Homo sapiens
agaaaatttgtaaaattaaactgatactgaagactggtat

SEQ ID NO: 20613 - DNA, 40 bp, Homo sapiens
ataccagtcttcagtatcagtttaattttacaaattttct

SEQ ID NO: 20614 - DNA, 40 bp, Homo sapiens
gaaaatttgtaaaattaaactgatactgaagactggtata

SEQ ID NO: 20615 - DNA, 40 bp, Homo sapiens
tataccagtcttcagtatcagtttaattttacaaattttc

SEQ ID NO: 20616 - DNA, 40 bp, Homo sapiens
aaaatttgtaaaattaaactgatactgaagactggtataa

SEQ ID NO: 20617 - DNA, 40 bp, Homo sapiens
ttataccagtcttcagtatcagtttaattttacaaatttt

SEQ ID NO: 20618 - DNA, 40 bp, Homo sapiens
aaatttgtaaaattaaactgatactgaagactggtataag

SEQ ID NO: 20619 - DNA, 40 bp, Homo sapiens
cttataccagtcttcagtatcagtttaattttacaaattt

SEQ ID NO: 20620 - DNA, 40 bp, Homo sapiens
aatttgtaaaattaaactgatactgaagactggtataaga

SEQ ID NO: 20621 - DNA, 40 bp, Homo sapiens
tcttataccagtcttcagtatcagtttaattttacaaatt

SEQ ID NO: 20622 - DNA, 40 bp, Homo sapiens
atttgtaaaattaaactgatactgaagactggtataagaa

SEQ ID NO: 20623 - DNA, 40 bp, Homo sapiens
ttcttataccagtcttcagtatcagtttaattttacaaat

SEQ ID NO: 20624 - DNA, 40 bp, Homo sapiens
tttgtaaaattaaactgatactgaagactggtataagaaa

SEQ ID NO: 20625 - DNA, 40 bp, Homo sapiens
tttcttataccagtcttcagtatcagtttaattttacaaa

SEQ ID NO: 20626 - DNA, 40 bp, Homo sapiens
ttgtaaaattaaactgatactgaagactggtataagaaaa

SEQ ID NO: 20627 - DNA, 40 bp, Homo sapiens
ttttcttataccagtcttcagtatcagtttaattttacaa

SEQ ID NO: 20628 - DNA, 40 bp, Homo sapiens
tgtaaaattaaactgatactgaagactggtataagaaaag

SEQ ID NO: 20629 - DNA, 40 bp, Homo sapiens
cttttcttataccagtcttcagtatcagtttaattttaca

SEQ ID NO: 20630 - DNA, 40 bp, Homo sapiens
gtaaaattaaactgatactgaagactggtataagaaaagc

SEQ ID NO: 20631 - DNA, 40 bp, Homo sapiens
gcttttcttataccagtcttcagtatcagtttaattttac

SEQ ID NO: 20632 - DNA, 40 bp, Homo sapiens
taaaattaaactgatactgaagactggtataagaaaagcc

SEQ ID NO: 20633 - DNA, 40 bp, Homo sapiens
ggcttttcttataccagtcttcagtatcagtttaatttta

SEQ ID NO: 20634 - DNA, 40 bp, Homo sapiens
aaaattaaactgatactgaagactggtataagaaaagcct

SEQ ID NO: 20635 - DNA, 40 bp, Homo sapiens
aggcttttcttataccagtcttcagtatcagtttaatttt

SEQ ID NO: 20636 - DNA, 40 bp, Homo sapiens
aaattaaactgatactgaagactggtataagaaaagcctt

SEQ ID NO: 20637 - DNA, 40 bp, Homo sapiens
aaggcttttcttataccagtcttcagtatcagtttaattt

SEQ ID NO: 20638 - DNA, 40 bp, Homo sapiens
aattaaactgatactgaagactggtataagaaaagcctta

SEQ ID NO: 20639 - DNA, 40 bp, Homo sapiens
taaggcttttcttataccagtcttcagtatcagtttaatt

SEQ ID NO: 20640 - DNA, 40 bp, Homo sapiens
attaaactgatactgaagactggtataagaaaagccttat

SEQ ID NO: 20641 - DNA, 40 bp, Homo sapiens
ataaggcttttcttataccagtcttcagtatcagtttaat

SEQ ID NO: 20642 - DNA, 40 bp, Homo sapiens
ttaaactgatactgaagactggtataagaaaagccttatg

SEQ ID NO: 20643 - DNA, 40 bp, Homo sapiens
cataaggcttttcttataccagtcttcagtatcagtttaa

SEQ ID NO: 20644 - DNA, 40 bp, Homo sapiens
taaactgatactgaagactggtataagaaaagccttatgt

SEQ ID NO: 20645 - DNA, 40 bp, Homo sapiens
acataaggcttttcttataccagtcttcagtatcagttta

SEQ ID NO: 20646 - DNA, 40 bp, Homo sapiens
aaactgatactgaagactggtataagaaaagccttatgta

SEQ ID NO: 20647 - DNA, 40 bp, Homo sapiens
tacataaggcttttcttataccagtcttcagtatcagttt

SEQ ID NO: 20648 - DNA, 40 bp, Homo sapiens
aactgatactgaagactggtataagaaaagccttatgtaa

SEQ ID NO: 20649 - DNA, 40 bp, Homo sapiens
ttacataaggcttttcttataccagtcttcagtatcagtt

SEQ ID NO: 20650 - DNA, 40 bp, Homo sapiens
actgatactgaagactggtataagaaaagccttatgtaat

SEQ ID NO: 20651 - DNA, 40 bp, Homo sapiens
attacataaggcttttcttataccagtcttcagtatcagt

SEQ ID NO: 20652 - DNA, 40 bp, Homo sapiens
ctgatactgaagactggtataagaaaagccttatgtaatt

SEQ ID NO: 20653 - DNA, 40 bp, Homo sapiens
aattacataaggcttttcttataccagtcttcagtatcag

SEQ ID NO: 20654 - DNA, 40 bp, Homo sapiens
tgatactgaagactggtataagaaaagccttatgtaattt

SEQ ID NO: 20655 - DNA, 40 bp, Homo sapiens
aaattacataaggcttttcttataccagtcttcagtatca

SEQ ID NO: 20656 - DNA, 40 bp, Homo sapiens
gatactgaagactggtataagaaaagccttatgtaatttg

SEQ ID NO: 20657 - DNA, 40 bp, Homo sapiens
caaattacataaggcttttcttataccagtcttcagtatc

SEQ ID NO: 20658 - DNA, 40 bp, Homo sapiens
atactgaagactggtataagaaaagccttatgtaatttgt

SEQ ID NO: 20659 - DNA, 40 bp, Homo sapiens
acaaattacataaggcttttcttataccagtcttcagtat

SEQ ID NO: 20660 - DNA, 40 bp, Homo sapiens
tactgaagactggtataagaaaagccttatgtaatttgta

SEQ ID NO: 20661 - DNA, 40 bp, Homo sapiens
tacaaattacataaggcttttcttataccagtcttcagta

SEQ ID NO: 20662 - DNA, 40 bp, Homo sapiens
actgaagactggtataagaaaagccttatgtaatttgtaa

SEQ ID NO: 20663 - DNA, 40 bp, Homo sapiens
ttacaaattacataaggcttttcttataccagtcttcagt

SEQ ID NO: 20664 - DNA, 40 bp, Homo sapiens
ctgaagactggtataagaaaagccttatgtaatttgtaag

SEQ ID NO: 20665 - DNA, 40 bp, Homo sapiens
cttacaaattacataaggcttttcttataccagtcttcag

SEQ ID NO: 20666 - DNA, 40 bp, Homo sapiens
tgaagactggtataagaaaagccttatgtaatttgtaagc

SEQ ID NO: 20667 - DNA, 40 bp, Homo sapiens
gcttacaaattacataaggcttttcttataccagtcttca

SEQ ID NO: 20668 - DNA, 40 bp, Homo sapiens
gaagactggtataagaaaagccttatgtaatttgtaagct

SEQ ID NO: 20669 - DNA, 40 bp, Homo sapiens
agcttacaaattacataaggcttttcttataccagtcttc

SEQ ID NO: 20670 - DNA, 40 bp, Homo sapiens
aagactggtataagaaaagccttatgtaatttgtaagctg

SEQ ID NO: 20671 - DNA, 40 bp, Homo sapiens
cagcttacaaattacataaggcttttcttataccagtctt

SEQ ID NO: 20672 - DNA, 40 bp, Homo sapiens
agactggtataagaaaagccttatgtaatttgtaagctgc

SEQ ID NO: 20673 - DNA, 40 bp, Homo sapiens
gcagcttacaaattacataaggcttttcttataccagtct

SEQ ID NO: 20674 - DNA, 40 bp, Homo sapiens
gactggtataagaaaagccttatgtaatttgtaagctgct

SEQ ID NO: 20675 - DNA, 40 bp, Homo sapiens
agcagcttacaaattacataaggcttttcttataccagtc

SEQ ID NO: 20676 - DNA, 40 bp, Homo sapiens
actggtataagaaaagccttatgtaatttgtaagctgcta

SEQ ID NO: 20677 - DNA, 40 bp, Homo sapiens
tagcagcttacaaattacataaggcttttcttataccagt

SEQ ID NO: 20678 - DNA, 40 bp, Homo sapiens
ctggtataagaaaagccttatgtaatttgtaagctgctat

SEQ ID NO: 20679 - DNA, 40 bp, Homo sapiens
atagcagcttacaaattacataaggcttttcttataccag

SEQ ID NO: 20680 - DNA, 40 bp, Homo sapiens
tggtataagaaaagccttatgtaatttgtaagctgctatt

SEQ ID NO: 20681 - DNA, 40 bp, Homo sapiens
aatagcagcttacaaattacataaggcttttcttatacca

SEQ ID NO: 20682 - DNA, 40 bp, Homo sapiens
ggtataagaaaagccttatgtaatttgtaagctgctattc

SEQ ID NO: 20683 - DNA, 40 bp, Homo sapiens
gaatagcagcttacaaattacataaggcttttcttatacc

SEQ ID NO: 20684 - DNA, 40 bp, Homo sapiens
gtataagaaaagccttatgtaatttgtaagctgctattct

SEQ ID NO: 20685 - DNA, 40 bp, Homo sapiens
agaatagcagcttacaaattacataaggcttttcttatac

SEQ ID NO: 20686 - DNA, 40 bp, Homo sapiens
tataagaaaagccttatgtaatttgtaagctgctattctt

SEQ ID NO: 20687 - DNA, 40 bp, Homo sapiens
aagaatagcagcttacaaattacataaggcttttcttata

SEQ ID NO: 20688 - DNA, 40 bp, Homo sapiens
ataagaaaagccttatgtaatttgtaagctgctattcttc

SEQ ID NO: 20689 - DNA, 40 bp, Homo sapiens
gaagaatagcagcttacaaattacataaggcttttcttat

SEQ ID NO: 20690 - DNA, 40 bp, Homo sapiens
taagaaaagccttatgtaatttgtaagctgctattcttct

SEQ ID NO: 20691 - DNA, 40 bp, Homo sapiens
agaagaatagcagcttacaaattacataaggcttttctta

SEQ ID NO: 20692 - DNA, 40 bp, Homo sapiens
aagaaaagccttatgtaatttgtaagctgctattcttctg

SEQ ID NO: 20693 - DNA, 40 bp, Homo sapiens
cagaagaatagcagcttacaaattacataaggcttttctt

SEQ ID NO: 20694 - DNA, 40 bp, Homo sapiens
agaaaagccttatgtaatttgtaagctgctattcttctga

SEQ ID NO: 20695 - DNA, 40 bp, Homo sapiens
tcagaagaatagcagcttacaaattacataaggcttttct

SEQ ID NO: 20696 - DNA, 40 bp, Homo sapiens
gaaaagccttatgtaatttgtaagctgctattcttctgag

SEQ ID NO: 20697 - DNA, 40 bp, Homo sapiens
ctcagaagaatagcagcttacaaattacataaggcttttc

SEQ ID NO: 20698 - DNA, 40 bp, Homo sapiens
aaaagccttatgtaatttgtaagctgctattcttctgagt

SEQ ID NO: 20699 - DNA, 40 bp, Homo sapiens
actcagaagaatagcagcttacaaattacataaggctttt

SEQ ID NO: 20700 - DNA, 40 bp, Homo sapiens
aaagccttatgtaatttgtaagctgctattcttctgagtt

SEQ ID NO: 20701 - DNA, 40 bp, Homo sapiens
aactcagaagaatagcagcttacaaattacataaggcttt

SEQ ID NO: 20702 - DNA, 40 bp, Homo sapiens
aagccttatgtaatttgtaagctgctattcttctgagttt

SEQ ID NO: 20703 - DNA, 40 bp, Homo sapiens
aaactcagaagaatagcagcttacaaattacataaggctt

SEQ ID NO: 20704 - DNA, 40 bp, Homo sapiens
agccttatgtaatttgtaagctgctattcttctgagttta

SEQ ID NO: 20705 - DNA, 40 bp, Homo sapiens
taaactcagaagaatagcagcttacaaattacataaggct

SEQ ID NO: 20706 - DNA, 40 bp, Homo sapiens
gccttatgtaatttgtaagctgctattcttctgagtttat

SEQ ID NO: 20707 - DNA, 40 bp, Homo sapiens
ataaactcagaagaatagcagcttacaaattacataaggc

SEQ ID NO: 20708 - DNA, 40 bp, Homo sapiens
ccttatgtaatttgtaagctgctattcttctgagtttata

SEQ ID NO: 20709 - DNA, 40 bp, Homo sapiens
tataaactcagaagaatagcagcttacaaattacataagg

SEQ ID NO: 20710 - DNA, 40 bp, Homo sapiens
cttatgtaatttgtaagctgctattcttctgagtttatac

SEQ ID NO: 20711 - DNA, 40 bp, Homo sapiens
gtataaactcagaagaatagcagcttacaaattacataag

SEQ ID NO: 20712 - DNA, 40 bp, Homo sapiens
ttatgtaatttgtaagctgctattcttctgagtttataca

SEQ ID NO: 20713 - DNA, 40 bp, Homo sapiens
tgtataaactcagaagaatagcagcttacaaattacataa

SEQ ID NO: 20714 - DNA, 40 bp, Homo sapiens
tatgtaatttgtaagctgctattcttctgagtttatacat

SEQ ID NO: 20715 - DNA, 40 bp, Homo sapiens
atgtataaactcagaagaatagcagcttacaaattacata

SEQ ID NO: 20716 - DNA, 40 bp, Homo sapiens
atgtaatttgtaagctgctattcttctgagtttatacata

SEQ ID NO: 20717 - DNA, 40 bp, Homo sapiens
tatgtataaactcagaagaatagcagcttacaaattacat

SEQ ID NO: 20718 - DNA, 40 bp, Homo sapiens
tgtaatttgtaagctgctattcttctgagtttatacatat

SEQ ID NO: 20719 - DNA, 40 bp, Homo sapiens
atatgtataaactcagaagaatagcagcttacaaattaca

SEQ ID NO: 20720 - DNA, 40 bp, Homo sapiens
gtaatttgtaagctgctattcttctgagtttatacatata

SEQ ID NO: 20721 - DNA, 40 bp, Homo sapiens
tatatgtataaactcagaagaatagcagcttacaaattac

SEQ ID NO: 20722 - DNA, 40 bp, Homo sapiens
taatttgtaagctgctattcttctgagtttatacatatat

SEQ ID NO: 20723 - DNA, 40 bp, Homo sapiens
atatatgtataaactcagaagaatagcagcttacaaatta

SEQ ID NO: 20724 - DNA, 40 bp, Homo sapiens
aatttgtaagctgctattcttctgagtttatacatatatc

SEQ ID NO: 20725 - DNA, 40 bp, Homo sapiens
gatatatgtataaactcagaagaatagcagcttacaaatt

SEQ ID NO: 20726 - DNA, 40 bp, Homo sapiens
atttgtaagctgctattcttctgagtttatacatatatct

SEQ ID NO: 20727 - DNA, 40 bp, Homo sapiens
agatatatgtataaactcagaagaatagcagcttacaaat

SEQ ID NO: 20728 - DNA, 40 bp, Homo sapiens
tttgtaagctgctattcttctgagtttatacatatatctt

SEQ ID NO: 20729 - DNA, 40 bp, Homo sapiens
aagatatatgtataaactcagaagaatagcagcttacaaa

SEQ ID NO: 20730 - DNA, 40 bp, Homo sapiens
ttgtaagctgctattcttctgagtttatacatatatcttt

SEQ ID NO: 20731 - DNA, 40 bp, Homo sapiens
aaagatatatgtataaactcagaagaatagcagcttacaa

SEQ ID NO: 20732 - DNA, 40 bp, Homo sapiens
tgtaagctgctattcttctgagtttatacatatatcttta

SEQ ID NO: 20733 - DNA, 40 bp, Homo sapiens
taaagatatatgtataaactcagaagaatagcagcttaca

SEQ ID NO: 20734 - DNA, 40 bp, Homo sapiens
gtaagctgctattcttctgagtttatacatatatctttag

SEQ ID NO: 20735 - DNA, 40 bp, Homo sapiens
ctaaagatatatgtataaactcagaagaatagcagcttac

SEQ ID NO: 20736 - DNA, 40 bp, Homo sapiens
taagctgctattcttctgagtttatacatatatctttagt

SEQ ID NO: 20737 - DNA, 40 bp, Homo sapiens
actaaagatatatgtataaactcagaagaatagcagctta

SEQ ID NO: 20738 - DNA, 40 bp, Homo sapiens
aagctgctattcttctgagtttatacatatatctttagta

SEQ ID NO: 20739 - DNA, 40 bp, Homo sapiens
tactaaagatatatgtataaactcagaagaatagcagctt

SEQ ID NO: 20740 - DNA, 40 bp, Homo sapiens
agctgctattcttctgagtttatacatatatctttagtaa

SEQ ID NO: 20741 - DNA, 40 bp, Homo sapiens
ttactaaagatatatgtataaactcagaagaatagcagct

SEQ ID NO: 20742 - DNA, 40 bp, Homo sapiens
gctgctattcttctgagtttatacatatatctttagtaat

SEQ ID NO: 20743 - DNA, 40 bp, Homo sapiens
attactaaagatatatgtataaactcagaagaatagcagc

SEQ ID NO: 20744 - DNA, 40 bp, Homo sapiens
ctgctattcttctgagtttatacatatatctttagtaatc

SEQ ID NO: 20745 - DNA, 40 bp, Homo sapiens
gattactaaagatatatgtataaactcagaagaatagcag

SEQ ID NO: 20746 - DNA, 40 bp, Homo sapiens
tgctattcttctgagtttatacatatatctttagtaatca

SEQ ID NO: 20747 - DNA, 40 bp, Homo sapiens
tgattactaaagatatatgtataaactcagaagaatagca

SEQ ID NO: 20748 - DNA, 40 bp, Homo sapiens
gctattcttctgagtttatacatatatctttagtaatcaa

SEQ ID NO: 20749 - DNA, 40 bp, Homo sapiens
ttgattactaaagatatatgtataaactcagaagaatagc

SEQ ID NO: 20750 - DNA, 40 bp, Homo sapiens
ctattcttctgagtttatacatatatctttagtaatcaat

SEQ ID NO: 20751 - DNA, 40 bp, Homo sapiens
attgattactaaagatatatgtataaactcagaagaatag

SEQ ID NO: 20752 - DNA, 40 bp, Homo sapiens
tattcttctgagtttatacatatatctttagtaatcaatg

SEQ ID NO: 20753 - DNA, 40 bp, Homo sapiens
cattgattactaaagatatatgtataaactcagaagaata

SEQ ID NO: 20754 - DNA, 40 bp, Homo sapiens
attcttctgagtttatacatatatctttagtaatcaatga

SEQ ID NO: 20755 - DNA, 40 bp, Homo sapiens
tcattgattactaaagatatatgtataaactcagaagaat

SEQ ID NO: 20756 - DNA, 40 bp, Homo sapiens
ttcttctgagtttatacatatatctttagtaatcaatgag

SEQ ID NO: 20757 - DNA, 40 bp, Homo sapiens
ctcattgattactaaagatatatgtataaactcagaagaa

SEQ ID NO: 20758 - DNA, 40 bp, Homo sapiens
tcttctgagtttatacatatatctttagtaatcaatgagg

SEQ ID NO: 20759 - DNA, 40 bp, Homo sapiens
cctcattgattactaaagatatatgtataaactcagaaga

SEQ ID NO: 20760 - DNA, 40 bp, Homo sapiens
cttctgagtttatacatatatctttagtaatcaatgaggg

SEQ ID NO: 20761 - DNA, 40 bp, Homo sapiens
ccctcattgattactaaagatatatgtataaactcagaag

SEQ ID NO: 20762 - DNA, 40 bp, Homo sapiens
ttctgagtttatacatatatctttagtaatcaatgaggga

SEQ ID NO: 20763 - DNA, 40 bp, Homo sapiens
tccctcattgattactaaagatatatgtataaactcagaa

SEQ ID NO: 20764 - DNA, 40 bp, Homo sapiens
tctgagtttatacatatatctttagtaatcaatgagggat

SEQ ID NO: 20765 - DNA, 40 bp, Homo sapiens
atccctcattgattactaaagatatatgtataaactcaga

SEQ ID NO: 20766 - DNA, 40 bp, Homo sapiens
ctgagtttatacatatatctttagtaatcaatgagggatg

SEQ ID NO: 20767 - DNA, 40 bp, Homo sapiens
catccctcattgattactaaagatatatgtataaactcag

SEQ ID NO: 20768 - DNA, 40 bp, Homo sapiens
tgagtttatacatatatctttagtaatcaatgagggatgg

SEQ ID NO: 20769 - DNA, 40 bp, Homo sapiens
ccatccctcattgattactaaagatatatgtataaactca

SEQ ID NO: 20770 - DNA, 40 bp, Homo sapiens
gagtttatacatatatctttagtaatcaatgagggatggt

SEQ ID NO: 20771 - DNA, 40 bp, Homo sapiens
accatccctcattgattactaaagatatatgtataaactc

SEQ ID NO: 20772 - DNA, 40 bp, Homo sapiens
agtttatacatatatctttagtaatcaatgagggatggtt

SEQ ID NO: 20773 - DNA, 40 bp, Homo sapiens
aaccatccctcattgattactaaagatatatgtataaact

SEQ ID NO: 20774 - DNA, 40 bp, Homo sapiens
gtttatacatatatctttagtaatcaatgagggatggttg

SEQ ID NO: 20775 - DNA, 40 bp, Homo sapiens
caaccatccctcattgattactaaagatatatgtataaac

SEQ ID NO: 20776 - DNA, 40 bp, Homo sapiens
tttatacatatatctttagtaatcaatgagggatggttgg

SEQ ID NO: 20777 - DNA, 40 bp, Homo sapiens
ccaaccatccctcattgattactaaagatatatgtataaa

SEQ ID NO: 20778 - DNA, 40 bp, Homo sapiens
ttatacatatatctttagtaatcaatgagggatggttggg

SEQ ID NO: 20779 - DNA, 40 bp, Homo sapiens
cccaaccatccctcattgattactaaagatatatgtataa

SEQ ID NO: 20780 - DNA, 40 bp, Homo sapiens
tatacatatatctttagtaatcaatgagggatggttgggt

SEQ ID NO: 20781 - DNA, 40 bp, Homo sapiens
acccaaccatccctcattgattactaaagatatatgtata

SEQ ID NO: 20782 - DNA, 40 bp, Homo sapiens
atacatatatctttagtaatcaatgagggatggttgggtg

SEQ ID NO: 20783 - DNA, 40 bp, Homo sapiens
cacccaaccatccctcattgattactaaagatatatgtat

SEQ ID NO: 20784 - DNA, 40 bp, Homo sapiens
tacatatatctttagtaatcaatgagggatggttgggtga

SEQ ID NO: 20785 - DNA, 40 bp, Homo sapiens
tcacccaaccatccctcattgattactaaagatatatgta

SEQ ID NO: 20786 - DNA, 40 bp, Homo sapiens
acatatatctttagtaatcaatgagggatggttgggtgac

SEQ ID NO: 20787 - DNA, 40 bp, Homo sapiens
gtcacccaaccatccctcattgattactaaagatatatgt

SEQ ID NO: 20788 - DNA, 40 bp, Homo sapiens
catatatctttagtaatcaatgagggatggttgggtgact

SEQ ID NO: 20789 - DNA, 40 bp, Homo sapiens
agtcacccaaccatccctcattgattactaaagatatatg

SEQ ID NO: 20790 - DNA, 40 bp, Homo sapiens
atatatctttagtaatcaatgagggatggttgggtgactg

SEQ ID NO: 20791 - DNA, 40 bp, Homo sapiens
cagtcacccaaccatccctcattgattactaaagatatat

SEQ ID NO: 20792 - DNA, 40 bp, Homo sapiens
tatatctttagtaatcaatgagggatggttgggtgactgc

SEQ ID NO: 20793 - DNA, 40 bp, Homo sapiens
gcagtcacccaaccatccctcattgattactaaagatata

SEQ ID NO: 20794 - DNA, 40 bp, Homo sapiens
atatctttagtaatcaatgagggatggttgggtgactgcc

SEQ ID NO: 20795 - DNA, 40 bp, Homo sapiens
ggcagtcacccaaccatccctcattgattactaaagatat

SEQ ID NO: 20796 - DNA, 40 bp, Homo sapiens
tatctttagtaatcaatgagggatggttgggtgactgccc

SEQ ID NO: 20797 - DNA, 40 bp, Homo sapiens
gggcagtcacccaaccatccctcattgattactaaagata

SEQ ID NO: 20798 - DNA, 40 bp, Homo sapiens
atctttagtaatcaatgagggatggttgggtgactgccct

SEQ ID NO: 20799 - DNA, 40 bp, Homo sapiens
agggcagtcacccaaccatccctcattgattactaaagat

SEQ ID NO: 20800 - DNA, 40 bp, Homo sapiens
tctttagtaatcaatgagggatggttgggtgactgccctc

SEQ ID NO: 20801 - DNA, 40 bp, Homo sapiens
gagggcagtcacccaaccatccctcattgattactaaaga

SEQ ID NO: 20802 - DNA, 40 bp, Homo sapiens
ctttagtaatcaatgagggatggttgggtgactgccctcc

SEQ ID NO: 20803 - DNA, 40 bp, Homo sapiens
ggagggcagtcacccaaccatccctcattgattactaaag

SEQ ID NO: 20804 - DNA, 40 bp, Homo sapiens
tttagtaatcaatgagggatggttgggtgactgccctcca

SEQ ID NO: 20805 - DNA, 40 bp, Homo sapiens
tggagggcagtcacccaaccatccctcattgattactaaa

SEQ ID NO: 20806 - DNA, 40 bp, Homo sapiens
ttagtaatcaatgagggatggttgggtgactgccctccag

SEQ ID NO: 20807 - DNA, 40 bp, Homo sapiens
ctggagggcagtcacccaaccatccctcattgattactaa

SEQ ID NO: 20808 - DNA, 40 bp, Homo sapiens
tagtaatcaatgagggatggttgggtgactgccctccagg

SEQ ID NO: 20809 - DNA, 40 bp, Homo sapiens
cctggagggcagtcacccaaccatccctcattgattacta

SEQ ID NO: 20810 - DNA, 40 bp, Homo sapiens
agtaatcaatgagggatggttgggtgactgccctccaggg

SEQ ID NO: 20811 - DNA, 40 bp, Homo sapiens
ccctggagggcagtcacccaaccatccctcattgattact

SEQ ID NO: 20812 - DNA, 40 bp, Homo sapiens
gtaatcaatgagggatggttgggtgactgccctccagggg

SEQ ID NO: 20813 - DNA, 40 bp, Homo sapiens
cccctggagggcagtcacccaaccatccctcattgattac

SEQ ID NO: 20814 - DNA, 40 bp, Homo sapiens
taatcaatgagggatggttgggtgactgccctccagggga

SEQ ID NO: 20815 - DNA, 40 bp, Homo sapiens
tcccctggagggcagtcacccaaccatccctcattgatta

SEQ ID NO: 20816 - DNA, 40 bp, Homo sapiens
aatcaatgagggatggttgggtgactgccctccaggggac

SEQ ID NO: 20817 - DNA, 40 bp, Homo sapiens
gtcccctggagggcagtcacccaaccatccctcattgatt

SEQ ID NO: 20818 - DNA, 40 bp, Homo sapiens
atcaatgagggatggttgggtgactgccctccaggggaca

SEQ ID NO: 20819 - DNA, 40 bp, Homo sapiens
tgtcccctggagggcagtcacccaaccatccctcattgat

SEQ ID NO: 20820 - DNA, 40 bp, Homo sapiens
tcaatgagggatggttgggtgactgccctccaggggacat

SEQ ID NO: 20821 - DNA, 40 bp, Homo sapiens
atgtcccctggagggcagtcacccaaccatccctcattga

SEQ ID NO: 20822 - DNA, 40 bp, Homo sapiens
caatgagggatggttgggtgactgccctccaggggacatt

SEQ ID NO: 20823 - DNA, 40 bp, Homo sapiens
aatgtcccctggagggcagtcacccaaccatccctcattg

SEQ ID NO: 20824 - DNA, 40 bp, Homo sapiens
aatgagggatggttgggtgactgccctccaggggacattt

SEQ ID NO: 20825 - DNA, 40 bp, Homo sapiens
aaatgtcccctggagggcagtcacccaaccatccctcatt

SEQ ID NO: 20826 - DNA, 40 bp, Homo sapiens
atgagggatggttgggtgactgccctccaggggacatttg

SEQ ID NO: 20827 - DNA, 40 bp, Homo sapiens
caaatgtcccctggagggcagtcacccaaccatccctcat

SEQ ID NO: 20828 - DNA, 40 bp, Homo sapiens
tgagggatggttgggtgactgccctccaggggacatttgg

SEQ ID NO: 20829 - DNA, 40 bp, Homo sapiens
ccaaatgtcccctggagggcagtcacccaaccatccctca

SEQ ID NO: 20830 - DNA, 40 bp, Homo sapiens
gagggatggttgggtgactgccctccaggggacatttggc

SEQ ID NO: 20831 - DNA, 40 bp, Homo sapiens
gccaaatgtcccctggagggcagtcacccaaccatccctc

SEQ ID NO: 20832 - DNA, 40 bp, Homo sapiens
agggatggttgggtgactgccctccaggggacatttggca

SEQ ID NO: 20833 - DNA, 40 bp, Homo sapiens
tgccaaatgtcccctggagggcagtcacccaaccatccct

SEQ ID NO: 20834 - DNA, 40 bp, Homo sapiens
gggatggttgggtgactgccctccaggggacatttggcaa

SEQ ID NO: 20835 - DNA, 40 bp, Homo sapiens
ttgccaaatgtcccctggagggcagtcacccaaccatccc

SEQ ID NO: 20836 - DNA, 40 bp, Homo sapiens
ggatggttgggtgactgccctccaggggacatttggcaac

SEQ ID NO: 20837 - DNA, 40 bp, Homo sapiens
gttgccaaatgtcccctggagggcagtcacccaaccatcc

SEQ ID NO: 20838 - DNA, 40 bp, Homo sapiens
gatggttgggtgactgccctccaggggacatttggcaaca

SEQ ID NO: 20839 - DNA, 40 bp, Homo sapiens
tgttgccaaatgtcccctggagggcagtcacccaaccatc

SEQ ID NO: 20840 - DNA, 40 bp, Homo sapiens
atggttgggtgactgccctccaggggacatttggcaacat

SEQ ID NO: 20841 - DNA, 40 bp, Homo sapiens
atgttgccaaatgtcccctggagggcagtcacccaaccat

SEQ ID NO: 20842 - DNA, 40 bp, Homo sapiens
tggttgggtgactgccctccaggggacatttggcaacatc

SEQ ID NO: 20843 - DNA, 40 bp, Homo sapiens
gatgttgccaaatgtcccctggagggcagtcacccaacca

SEQ ID NO: 20844 - DNA, 40 bp, Homo sapiens
ggttgggtgactgccctccaggggacatttggcaacatct

SEQ ID NO: 20845 - DNA, 40 bp, Homo sapiens
agatgttgccaaatgtcccctggagggcagtcacccaacc

SEQ ID NO: 20846 - DNA, 40 bp, Homo sapiens
gttgggtgactgccctccaggggacatttggcaacatctg

SEQ ID NO: 20847 - DNA, 40 bp, Homo sapiens
cagatgttgccaaatgtcccctggagggcagtcacccaac

SEQ ID NO: 20848 - DNA, 40 bp, Homo sapiens
ttgggtgactgccctccaggggacatttggcaacatctgg

SEQ ID NO: 20849 - DNA, 40 bp, Homo sapiens
ccagatgttgccaaatgtcccctggagggcagtcacccaa

SEQ ID NO: 20850 - DNA, 40 bp, Homo sapiens
tgggtgactgccctccaggggacatttggcaacatctgga

SEQ ID NO: 20851 - DNA, 40 bp, Homo sapiens
tccagatgttgccaaatgtcccctggagggcagtcaccca

SEQ ID NO: 20852 - DNA, 40 bp, Homo sapiens
gggtgactgccctccaggggacatttggcaacatctggag

SEQ ID NO: 20853 - DNA, 40 bp, Homo sapiens
ctccagatgttgccaaatgtcccctggagggcagtcaccc

SEQ ID NO: 20854 - DNA, 40 bp, Homo sapiens
ggtgactgccctccaggggacatttggcaacatctggaga

SEQ ID NO: 20855 - DNA, 40 bp, Homo sapiens
tctccagatgttgccaaatgtcccctggagggcagtcacc

SEQ ID NO: 20856 - DNA, 40 bp, Homo sapiens
gtgactgccctccaggggacatttggcaacatctggagat

SEQ ID NO: 20857 - DNA, 40 bp, Homo sapiens
atctccagatgttgccaaatgtcccctggagggcagtcac

SEQ ID NO: 20858 - DNA, 40 bp, Homo sapiens
tgactgccctccaggggacatttggcaacatctggagatg

SEQ ID NO: 20859 - DNA, 40 bp, Homo sapiens
catctccagatgttgccaaatgtcccctggagggcagtca

SEQ ID NO: 20860 - DNA, 40 bp, Homo sapiens
gactgccctccaggggacatttggcaacatctggagatgt

SEQ ID NO: 20861 - DNA, 40 bp, Homo sapiens
acatctccagatgttgccaaatgtcccctggagggcagtc

SEQ ID NO: 20862 - DNA, 40 bp, Homo sapiens
actgccctccaggggacatttggcaacatctggagatgtt

SEQ ID NO: 20863 - DNA, 40 bp, Homo sapiens
aacatctccagatgttgccaaatgtcccctggagggcagt

SEQ ID NO: 20864 - DNA, 40 bp, Homo sapiens
ctgccctccaggggacatttggcaacatctggagatgttt

SEQ ID NO: 20865 - DNA, 40 bp, Homo sapiens
aaacatctccagatgttgccaaatgtcccctggagggcag

SEQ ID NO: 20866 - DNA, 40 bp, Homo sapiens
tgccctccaggggacatttggcaacatctggagatgtttt

SEQ ID NO: 20867 - DNA, 40 bp, Homo sapiens
aaaacatctccagatgttgccaaatgtcccctggagggca

SEQ ID NO: 20868 - DNA, 40 bp, Homo sapiens
gccctccaggggacatttggcaacatctggagatgttttt

SEQ ID NO: 20869 - DNA, 40 bp, Homo sapiens
aaaaacatctccagatgttgccaaatgtcccctggagggc

SEQ ID NO: 20870 - DNA, 40 bp, Homo sapiens
ccctccaggggacatttggcaacatctggagatgtttttg

SEQ ID NO: 20871 - DNA, 40 bp, Homo sapiens
caaaaacatctccagatgttgccaaatgtcccctggaggg

SEQ ID NO: 20872 - DNA, 40 bp, Homo sapiens
cctccaggggacatttggcaacatctggagatgtttttgg

SEQ ID NO: 20873 - DNA, 40 bp, Homo sapiens
ccaaaaacatctccagatgttgccaaatgtcccctggagg

SEQ ID NO: 20874 - DNA, 40 bp, Homo sapiens
ctccaggggacatttggcaacatctggagatgtttttggt

SEQ ID NO: 20875 - DNA, 40 bp, Homo sapiens
accaaaaacatctccagatgttgccaaatgtcccctggag

SEQ ID NO: 20876 - DNA, 40 bp, Homo sapiens
tccaggggacatttggcaacatctggagatgtttttggtt

SEQ ID NO: 20877 - DNA, 40 bp, Homo sapiens
aaccaaaaacatctccagatgttgccaaatgtcccctgga

SEQ ID NO: 20878 - DNA, 40 bp, Homo sapiens
ccaggggacatttggcaacatctggagatgtttttggttg

SEQ ID NO: 20879 - DNA, 40 bp, Homo sapiens
caaccaaaaacatctccagatgttgccaaatgtcccctgg

SEQ ID NO: 20880 - DNA, 40 bp, Homo sapiens
caggggacatttggcaacatctggagatgtttttggttgc

SEQ ID NO: 20881 - DNA, 40 bp, Homo sapiens
gcaaccaaaaacatctccagatgttgccaaatgtcccctg

SEQ ID NO: 20882 - DNA, 40 bp, Homo sapiens
aggggacatttggcaacatctggagatgtttttggttgcc

SEQ ID NO: 20883 - DNA, 40 bp, Homo sapiens
ggcaaccaaaaacatctccagatgttgccaaatgtcccct

SEQ ID NO: 20884 - DNA, 40 bp, Homo sapiens
ggggacatttggcaacatctggagatgtttttggttgcca

SEQ ID NO: 20885 - DNA, 40 bp, Homo sapiens
tggcaaccaaaaacatctccagatgttgccaaatgtcccc

SEQ ID NO: 20886 - DNA, 40 bp, Homo sapiens
gggacatttggcaacatctggagatgtttttggttgccac

SEQ ID NO: 20887 - DNA, 40 bp, Homo sapiens
gtggcaaccaaaaacatctccagatgttgccaaatgtccc

SEQ ID NO: 20888 - DNA, 40 bp, Homo sapiens
ggacatttggcaacatctggagatgtttttggttgccaca

SEQ ID NO: 20889 - DNA, 40 bp, Homo sapiens
tgtggcaaccaaaaacatctccagatgttgccaaatgtcc

SEQ ID NO: 20890 - DNA, 40 bp, Homo sapiens
gacatttggcaacatctggagatgtttttggttgccacaa

SEQ ID NO: 20891 - DNA, 40 bp, Homo sapiens
ttgtggcaaccaaaaacatctccagatgttgccaaatgtc

SEQ ID NO: 20892 - DNA, 40 bp, Homo sapiens
acatttggcaacatctggagatgtttttggttgccacaac

SEQ ID NO: 20893 - DNA, 40 bp, Homo sapiens
gttgtggcaaccaaaaacatctccagatgttgccaaatgt

SEQ ID NO: 20894 - DNA, 40 bp, Homo sapiens
catttggcaacatctggagatgtttttggttgccacaact

SEQ ID NO: 20895 - DNA, 40 bp, Homo sapiens
agttgtggcaaccaaaaacatctccagatgttgccaaatg

SEQ ID NO: 20896 - DNA, 40 bp, Homo sapiens
atttggcaacatctggagatgtttttggttgccacaactt

SEQ ID NO: 20897 - DNA, 40 bp, Homo sapiens
aagttgtggcaaccaaaaacatctccagatgttgccaaat

SEQ ID NO: 20898 - DNA, 40 bp, Homo sapiens
tttggcaacatctggagatgtttttggttgccacaacttg

SEQ ID NO: 20899 - DNA, 40 bp, Homo sapiens
caagttgtggcaaccaaaaacatctccagatgttgccaaa

SEQ ID NO: 20900 - DNA, 40 bp, Homo sapiens
ttggcaacatctggagatgtttttggttgccacaacttgg

SEQ ID NO: 20901 - DNA, 40 bp, Homo sapiens
ccaagttgtggcaaccaaaaacatctccagatgttgccaa

SEQ ID NO: 20902 - DNA, 40 bp, Homo sapiens
tggcaacatctggagatgtttttggttgccacaacttggg

SEQ ID NO: 20903 - DNA, 40 bp, Homo sapiens
cccaagttgtggcaaccaaaaacatctccagatgttgcca

SEQ ID NO: 20904 - DNA, 40 bp, Homo sapiens
ggcaacatctggagatgtttttggttgccacaacttgggg

SEQ ID NO: 20905 - DNA, 40 bp, Homo sapiens
ccccaagttgtggcaaccaaaaacatctccagatgttgcc

SEQ ID NO: 20906 - DNA, 40 bp, Homo sapiens
gcaacatctggagatgtttttggttgccacaacttgggga

SEQ ID NO: 20907 - DNA, 40 bp, Homo sapiens
tccccaagttgtggcaaccaaaaacatctccagatgttgc

SEQ ID NO: 20908 - DNA, 40 bp, Homo sapiens
caacatctggagatgtttttggttgccacaacttggggag

SEQ ID NO: 20909 - DNA, 40 bp, Homo sapiens
ctccccaagttgtggcaaccaaaaacatctccagatgttg

SEQ ID NO: 20910 - DNA, 40 bp, Homo sapiens
aacatctggagatgtttttggttgccacaacttggggaga

SEQ ID NO: 20911 - DNA, 40 bp, Homo sapiens
tctccccaagttgtggcaaccaaaaacatctccagatgtt

SEQ ID NO: 20912 - DNA, 40 bp, Homo sapiens
acatctggagatgtttttggttgccacaacttggggagag

SEQ ID NO: 20913 - DNA, 40 bp, Homo sapiens
ctctccccaagttgtggcaaccaaaaacatctccagatgt

SEQ ID NO: 20914 - DNA, 40 bp, Homo sapiens
catctggagatgtttttggttgccacaacttggggagaga

SEQ ID NO: 20915 - DNA, 40 bp, Homo sapiens
tctctccccaagttgtggcaaccaaaaacatctccagatg

SEQ ID NO: 20916 - DNA, 40 bp, Homo sapiens
atctggagatgtttttggttgccacaacttggggagagag

SEQ ID NO: 20917 - DNA, 40 bp, Homo sapiens
ctctctccccaagttgtggcaaccaaaaacatctccagat

SEQ ID NO: 20918 - DNA, 40 bp, Homo sapiens
tctggagatgtttttggttgccacaacttggggagagagt

SEQ ID NO: 20919 - DNA, 40 bp, Homo sapiens
actctctccccaagttgtggcaaccaaaaacatctccaga

SEQ ID NO: 20920 - DNA, 40 bp, Homo sapiens
ctggagatgtttttggttgccacaacttggggagagagta

SEQ ID NO: 20921 - DNA, 40 bp, Homo sapiens
tactctctccccaagttgtggcaaccaaaaacatctccag

SEQ ID NO: 20922 - DNA, 40 bp, Homo sapiens
tggagatgtttttggttgccacaacttggggagagagtac

SEQ ID NO: 20923 - DNA, 40 bp, Homo sapiens
gtactctctccccaagttgtggcaaccaaaaacatctcca

SEQ ID NO: 20924 - DNA, 40 bp, Homo sapiens
ggagatgtttttggttgccacaacttggggagagagtact

SEQ ID NO: 20925 - DNA, 40 bp, Homo sapiens
agtactctctccccaagttgtggcaaccaaaaacatctcc

SEQ ID NO: 20926 - DNA, 40 bp, Homo sapiens
gagatgtttttggttgccacaacttggggagagagtactg

SEQ ID NO: 20927 - DNA, 40 bp, Homo sapiens
cagtactctctccccaagttgtggcaaccaaaaacatctc

SEQ ID NO: 20928 - DNA, 40 bp, Homo sapiens
agatgtttttggttgccacaacttggggagagagtactgc

SEQ ID NO: 20929 - DNA, 40 bp, Homo sapiens
gcagtactctctccccaagttgtggcaaccaaaaacatct

SEQ ID NO: 20930 - DNA, 40 bp, Homo sapiens
gatgtttttggttgccacaacttggggagagagtactgct

SEQ ID NO: 20931 - DNA, 40 bp, Homo sapiens
agcagtactctctccccaagttgtggcaaccaaaaacatc

SEQ ID NO: 20932 - DNA, 40 bp, Homo sapiens
atgtttttggttgccacaacttggggagagagtactgcta

SEQ ID NO: 20933 - DNA, 40 bp, Homo sapiens
tagcagtactctctccccaagttgtggcaaccaaaaacat

SEQ ID NO: 20934 - DNA, 40 bp, Homo sapiens
tgtttttggttgccacaacttggggagagagtactgctac

SEQ ID NO: 20935 - DNA, 40 bp, Homo sapiens
gtagcagtactctctccccaagttgtggcaaccaaaaaca

SEQ ID NO: 20936 - DNA, 40 bp, Homo sapiens
gtttttggttgccacaacttggggagagagtactgctact

SEQ ID NO: 20937 - DNA, 40 bp, Homo sapiens
agtagcagtactctctccccaagttgtggcaaccaaaaac

SEQ ID NO: 20938 - DNA, 40 bp, Homo sapiens
tttttggttgccacaacttggggagagagtactgctactg

SEQ ID NO: 20939 - DNA, 40 bp, Homo sapiens
cagtagcagtactctctccccaagttgtggcaaccaaaaa

SEQ ID NO: 20940 - DNA, 40 bp, Homo sapiens
ttttggttgccacaacttggggagagagtactgctactgg

SEQ ID NO: 20941 - DNA, 40 bp, Homo sapiens
ccagtagcagtactctctccccaagttgtggcaaccaaaa

SEQ ID NO: 20942 - DNA, 40 bp, Homo sapiens
tttggttgccacaacttggggagagagtactgctactggc

SEQ ID NO: 20943 - DNA, 40 bp, Homo sapiens
gccagtagcagtactctctccccaagttgtggcaaccaaa

SEQ ID NO: 20944 - DNA, 40 bp, Homo sapiens
ttggttgccacaacttggggagagagtactgctactggca

SEQ ID NO: 20945 - DNA, 40 bp, Homo sapiens
tgccagtagcagtactctctccccaagttgtggcaaccaa

SEQ ID NO: 20946 - DNA, 40 bp, Homo sapiens
tggttgccacaacttggggagagagtactgctactggcat

SEQ ID NO: 20947 - DNA, 40 bp, Homo sapiens
atgccagtagcagtactctctccccaagttgtggcaacca

SEQ ID NO: 20948 - DNA, 40 bp, Homo sapiens
ggttgccacaacttggggagagagtactgctactggcatc

SEQ ID NO: 20949 - DNA, 40 bp, Homo sapiens
gatgccagtagcagtactctctccccaagttgtggcaacc

SEQ ID NO: 20950 - DNA, 40 bp, Homo sapiens
gttgccacaacttggggagagagtactgctactggcatct

SEQ ID NO: 20951 - DNA, 40 bp, Homo sapiens
agatgccagtagcagtactctctccccaagttgtggcaac

SEQ ID NO: 20952 - DNA, 40 bp, Homo sapiens
ttgccacaacttggggagagagtactgctactggcatcta

SEQ ID NO: 20953 - DNA, 40 bp, Homo sapiens
tagatgccagtagcagtactctctccccaagttgtggcaa

SEQ ID NO: 20954 - DNA, 40 bp, Homo sapiens
tgccacaacttggggagagagtactgctactggcatctat

SEQ ID NO: 20955 - DNA, 40 bp, Homo sapiens
atagatgccagtagcagtactctctccccaagttgtggca

SEQ ID NO: 20956 - DNA, 40 bp, Homo sapiens
gccacaacttggggagagagtactgctactggcatctatt

SEQ ID NO: 20957 - DNA, 40 bp, Homo sapiens
aatagatgccagtagcagtactctctccccaagttgtggc

SEQ ID NO: 20958 - DNA, 40 bp, Homo sapiens
ccacaacttggggagagagtactgctactggcatctattg

SEQ ID NO: 20959 - DNA, 40 bp, Homo sapiens
caatagatgccagtagcagtactctctccccaagttgtgg

SEQ ID NO: 20960 - DNA, 40 bp, Homo sapiens
cacaacttggggagagagtactgctactggcatctattga

SEQ ID NO: 20961 - DNA, 40 bp, Homo sapiens
tcaatagatgccagtagcagtactctctccccaagttgtg

SEQ ID NO: 20962 - DNA, 40 bp, Homo sapiens
acaacttggggagagagtactgctactggcatctattgag

SEQ ID NO: 20963 - DNA, 40 bp, Homo sapiens
ctcaatagatgccagtagcagtactctctccccaagttgt

SEQ ID NO: 20964 - DNA, 40 bp, Homo sapiens
caacttggggagagagtactgctactggcatctattgagt

SEQ ID NO: 20965 - DNA, 40 bp, Homo sapiens
actcaatagatgccagtagcagtactctctccccaagttg

SEQ ID NO: 20966 - DNA, 40 bp, Homo sapiens
aacttggggagagagtactgctactggcatctattgagta

SEQ ID NO: 20967 - DNA, 40 bp, Homo sapiens
tactcaatagatgccagtagcagtactctctccccaagtt

SEQ ID NO: 20968 - DNA, 40 bp, Homo sapiens
acttggggagagagtactgctactggcatctattgagtag

SEQ ID NO: 20969 - DNA, 40 bp, Homo sapiens
ctactcaatagatgccagtagcagtactctctccccaagt

SEQ ID NO: 20970 - DNA, 40 bp, Homo sapiens
cttggggagagagtactgctactggcatctattgagtaga

SEQ ID NO: 20971 - DNA, 40 bp, Homo sapiens
tctactcaatagatgccagtagcagtactctctccccaag

SEQ ID NO: 20972 - DNA, 40 bp, Homo sapiens
ttggggagagagtactgctactggcatctattgagtagat

SEQ ID NO: 20973 - DNA, 40 bp, Homo sapiens
atctactcaatagatgccagtagcagtactctctccccaa

SEQ ID NO: 20974 - DNA, 40 bp, Homo sapiens
tggggagagagtactgctactggcatctattgagtagatg

SEQ ID NO: 20975 - DNA, 40 bp, Homo sapiens
catctactcaatagatgccagtagcagtactctctcccca

SEQ ID NO: 20976 - DNA, 40 bp, Homo sapiens
ggggagagagtactgctactggcatctattgagtagatgc

SEQ ID NO: 20977 - DNA, 40 bp, Homo sapiens
gcatctactcaatagatgccagtagcagtactctctcccc

SEQ ID NO: 20978 - DNA, 40 bp, Homo sapiens
gggagagagtactgctactggcatctattgagtagatgct

SEQ ID NO: 20979 - DNA, 40 bp, Homo sapiens
agcatctactcaatagatgccagtagcagtactctctccc

SEQ ID NO: 20980 - DNA, 40 bp, Homo sapiens
ggagagagtactgctactggcatctattgagtagatgcta

SEQ ID NO: 20981 - DNA, 40 bp, Homo sapiens
tagcatctactcaatagatgccagtagcagtactctctcc

SEQ ID NO: 20982 - DNA, 40 bp, Homo sapiens
gagagagtactgctactggcatctattgagtagatgctat

SEQ ID NO: 20983 - DNA, 40 bp, Homo sapiens
atagcatctactcaatagatgccagtagcagtactctctc

SEQ ID NO: 20984 - DNA, 40 bp, Homo sapiens
agagagtactgctactggcatctattgagtagatgctatt

SEQ ID NO: 20985 - DNA, 40 bp, Homo sapiens
aatagcatctactcaatagatgccagtagcagtactctct

SEQ ID NO: 20986 - DNA, 40 bp, Homo sapiens
gagagtactgctactggcatctattgagtagatgctatta

SEQ ID NO: 20987 - DNA, 40 bp, Homo sapiens
taatagcatctactcaatagatgccagtagcagtactctc

SEQ ID NO: 20988 - DNA, 40 bp, Homo sapiens
agagtactgctactggcatctattgagtagatgctattac

SEQ ID NO: 20989 - DNA, 40 bp, Homo sapiens
gtaatagcatctactcaatagatgccagtagcagtactct

SEQ ID NO: 20990 - DNA, 40 bp, Homo sapiens
gagtactgctactggcatctattgagtagatgctattact

SEQ ID NO: 20991 - DNA, 40 bp, Homo sapiens
agtaatagcatctactcaatagatgccagtagcagtactc

SEQ ID NO: 20992 - DNA, 40 bp, Homo sapiens
agtactgctactggcatctattgagtagatgctattactt

SEQ ID NO: 20993 - DNA, 40 bp, Homo sapiens
aagtaatagcatctactcaatagatgccagtagcagtact

SEQ ID NO: 20994 - DNA, 40 bp, Homo sapiens
gtactgctactggcatctattgagtagatgctattacttt

SEQ ID NO: 20995 - DNA, 40 bp, Homo sapiens
aaagtaatagcatctactcaatagatgccagtagcagtac

SEQ ID NO: 20996 - DNA, 40 bp, Homo sapiens
tactgctactggcatctattgagtagatgctattacttta

SEQ ID NO: 20997 - DNA, 40 bp, Homo sapiens
taaagtaatagcatctactcaatagatgccagtagcagta

SEQ ID NO: 20998 - DNA, 40 bp, Homo sapiens
actgctactggcatctattgagtagatgctattactttaa

SEQ ID NO: 20999 - DNA, 40 bp, Homo sapiens
ttaaagtaatagcatctactcaatagatgccagtagcagt

SEQ ID NO: 21000 - DNA, 40 bp, Homo sapiens
ctgctactggcatctattgagtagatgctattactttaaa

SEQ ID NO: 21001 - DNA, 40 bp, Homo sapiens
tttaaagtaatagcatctactcaatagatgccagtagcag

SEQ ID NO: 21002 - DNA, 40 bp, Homo sapiens
tgctactggcatctattgagtagatgctattactttaaat

SEQ ID NO: 21003 - DNA, 40 bp, Homo sapiens
atttaaagtaatagcatctactcaatagatgccagtagca

SEQ ID NO: 21004 - DNA, 40 bp, Homo sapiens
gctactggcatctattgagtagatgctattactttaaatg

SEQ ID NO: 21005 - DNA, 40 bp, Homo sapiens
catttaaagtaatagcatctactcaatagatgccagtagc

SEQ ID NO: 21006 - DNA, 40 bp, Homo sapiens
ctactggcatctattgagtagatgctattactttaaatgg

SEQ ID NO: 21007 - DNA, 40 bp, Homo sapiens
ccatttaaagtaatagcatctactcaatagatgccagtag

SEQ ID NO: 21008 - DNA, 40 bp, Homo sapiens
tactggcatctattgagtagatgctattactttaaatggc

SEQ ID NO: 21009 - DNA, 40 bp, Homo sapiens
gccatttaaagtaatagcatctactcaatagatgccagta

SEQ ID NO: 21010 - DNA, 40 bp, Homo sapiens
actggcatctattgagtagatgctattactttaaatggca

SEQ ID NO: 21011 - DNA, 40 bp, Homo sapiens
tgccatttaaagtaatagcatctactcaatagatgccagt

SEQ ID NO: 21012 - DNA, 40 bp, Homo sapiens
ctggcatctattgagtagatgctattactttaaatggcaa

SEQ ID NO: 21013 - DNA, 40 bp, Homo sapiens
ttgccatttaaagtaatagcatctactcaatagatgccag

SEQ ID NO: 21014 - DNA, 40 bp, Homo sapiens
tggcatctattgagtagatgctattactttaaatggcaaa

SEQ ID NO: 21015 - DNA, 40 bp, Homo sapiens
tttgccatttaaagtaatagcatctactcaatagatgcca

SEQ ID NO: 21016 - DNA, 40 bp, Homo sapiens
ggcatctattgagtagatgctattactttaaatggcaaag

SEQ ID NO: 21017 - DNA, 40 bp, Homo sapiens
ctttgccatttaaagtaatagcatctactcaatagatgcc

SEQ ID NO: 21018 - DNA, 40 bp, Homo sapiens
gcatctattgagtagatgctattactttaaatggcaaagc

SEQ ID NO: 21019 - DNA, 40 bp, Homo sapiens
gctttgccatttaaagtaatagcatctactcaatagatgc

SEQ ID NO: 21020 - DNA, 40 bp, Homo sapiens
catctattgagtagatgctattactttaaatggcaaagct

SEQ ID NO: 21021 - DNA, 40 bp, Homo sapiens
agctttgccatttaaagtaatagcatctactcaatagatg

SEQ ID NO: 21022 - DNA, 40 bp, Homo sapiens
atctattgagtagatgctattactttaaatggcaaagctg

SEQ ID NO: 21023 - DNA, 40 bp, Homo sapiens
cagctttgccatttaaagtaatagcatctactcaatagat

SEQ ID NO: 21024 - DNA, 40 bp, Homo sapiens
tctattgagtagatgctattactttaaatggcaaagctgc

SEQ ID NO: 21025 - DNA, 40 bp, Homo sapiens
gcagctttgccatttaaagtaatagcatctactcaataga

SEQ ID NO: 21026 - DNA, 40 bp, Homo sapiens
ctattgagtagatgctattactttaaatggcaaagctgca

SEQ ID NO: 21027 - DNA, 40 bp, Homo sapiens
tgcagctttgccatttaaagtaatagcatctactcaatag

SEQ ID NO: 21028 - DNA, 40 bp, Homo sapiens
tattgagtagatgctattactttaaatggcaaagctgcag

SEQ ID NO: 21029 - DNA, 40 bp, Homo sapiens
ctgcagctttgccatttaaagtaatagcatctactcaata

SEQ ID NO: 21030 - DNA, 40 bp, Homo sapiens
attgagtagatgctattactttaaatggcaaagctgcagt

SEQ ID NO: 21031 - DNA, 40 bp, Homo sapiens
actgcagctttgccatttaaagtaatagcatctactcaat

SEQ ID NO: 21032 - DNA, 40 bp, Homo sapiens
ttgagtagatgctattactttaaatggcaaagctgcagtt

SEQ ID NO: 21033 - DNA, 40 bp, Homo sapiens
aactgcagctttgccatttaaagtaatagcatctactcaa

SEQ ID NO: 21034 - DNA, 40 bp, Homo sapiens
tgagtagatgctattactttaaatggcaaagctgcagtta

SEQ ID NO: 21035 - DNA, 40 bp, Homo sapiens
taactgcagctttgccatttaaagtaatagcatctactca

SEQ ID NO: 21036 - DNA, 40 bp, Homo sapiens
gagtagatgctattactttaaatggcaaagctgcagttac

SEQ ID NO: 21037 - DNA, 40 bp, Homo sapiens
gtaactgcagctttgccatttaaagtaatagcatctactc

SEQ ID NO: 21038 - DNA, 40 bp, Homo sapiens
agtagatgctattactttaaatggcaaagctgcagttacc

SEQ ID NO: 21039 - DNA, 40 bp, Homo sapiens
ggtaactgcagctttgccatttaaagtaatagcatctact

SEQ ID NO: 21040 - DNA, 40 bp, Homo sapiens
gtagatgctattactttaaatggcaaagctgcagttacct

SEQ ID NO: 21041 - DNA, 40 bp, Homo sapiens
aggtaactgcagctttgccatttaaagtaatagcatctac

SEQ ID NO: 21042 - DNA, 40 bp, Homo sapiens
tagatgctattactttaaatggcaaagctgcagttacctt

SEQ ID NO: 21043 - DNA, 40 bp, Homo sapiens
aaggtaactgcagctttgccatttaaagtaatagcatcta

SEQ ID NO: 21044 - DNA, 40 bp, Homo sapiens
agatgctattactttaaatggcaaagctgcagttaccttt

SEQ ID NO: 21045 - DNA, 40 bp, Homo sapiens
aaaggtaactgcagctttgccatttaaagtaatagcatct

SEQ ID NO: 21046 - DNA, 40 bp, Homo sapiens
gatgctattactttaaatggcaaagctgcagttacctttg

SEQ ID NO: 21047 - DNA, 40 bp, Homo sapiens
caaaggtaactgcagctttgccatttaaagtaatagcatc

SEQ ID NO: 21048 - DNA, 40 bp, Homo sapiens
atgctattactttaaatggcaaagctgcagttacctttgc

SEQ ID NO: 21049 - DNA, 40 bp, Homo sapiens
gcaaaggtaactgcagctttgccatttaaagtaatagcat

SEQ ID NO: 21050 - DNA, 40 bp, Homo sapiens
tgctattactttaaatggcaaagctgcagttacctttgca

SEQ ID NO: 21051 - DNA, 40 bp, Homo sapiens
tgcaaaggtaactgcagctttgccatttaaagtaatagca

SEQ ID NO: 21052 - DNA, 40 bp, Homo sapiens
gctattactttaaatggcaaagctgcagttacctttgcac

SEQ ID NO: 21053 - DNA, 40 bp, Homo sapiens
gtgcaaaggtaactgcagctttgccatttaaagtaatagc

SEQ ID NO: 21054 - DNA, 40 bp, Homo sapiens
ctattactttaaatggcaaagctgcagttacctttgcacc

SEQ ID NO: 21055 - DNA, 40 bp, Homo sapiens
ggtgcaaaggtaactgcagctttgccatttaaagtaatag

SEQ ID NO: 21056 - DNA, 40 bp, Homo sapiens
tattactttaaatggcaaagctgcagttacctttgcacca

SEQ ID NO: 21057 - DNA, 40 bp, Homo sapiens
tggtgcaaaggtaactgcagctttgccatttaaagtaata

SEQ ID NO: 21058 - DNA, 40 bp, Homo sapiens
attactttaaatggcaaagctgcagttacctttgcaccaa

SEQ ID NO: 21059 - DNA, 40 bp, Homo sapiens
ttggtgcaaaggtaactgcagctttgccatttaaagtaat

SEQ ID NO: 21060 - DNA, 40 bp, Homo sapiens
ttactttaaatggcaaagctgcagttacctttgcaccaac

SEQ ID NO: 21061 - DNA, 40 bp, Homo sapiens
gttggtgcaaaggtaactgcagctttgccatttaaagtaa

SEQ ID NO: 21062 - DNA, 40 bp, Homo sapiens
tactttaaatggcaaagctgcagttacctttgcaccaacc

SEQ ID NO: 21063 - DNA, 40 bp, Homo sapiens
ggttggtgcaaaggtaactgcagctttgccatttaaagta

SEQ ID NO: 21064 - DNA, 40 bp, Homo sapiens
actttaaatggcaaagctgcagttacctttgcaccaacct

SEQ ID NO: 21065 - DNA, 40 bp, Homo sapiens
aggttggtgcaaaggtaactgcagctttgccatttaaagt

SEQ ID NO: 21066 - DNA, 40 bp, Homo sapiens
ctttaaatggcaaagctgcagttacctttgcaccaaccta

SEQ ID NO: 21067 - DNA, 40 bp, Homo sapiens
taggttggtgcaaaggtaactgcagctttgccatttaaag

SEQ ID NO: 21068 - DNA, 40 bp, Homo sapiens
tttaaatggcaaagctgcagttacctttgcaccaacctaa

SEQ ID NO: 21069 - DNA, 40 bp, Homo sapiens
ttaggttggtgcaaaggtaactgcagctttgccatttaaa

SEQ ID NO: 21070 - DNA, 40 bp, Homo sapiens
ttaaatggcaaagctgcagttacctttgcaccaacctaat

SEQ ID NO: 21071 - DNA, 40 bp, Homo sapiens
attaggttggtgcaaaggtaactgcagctttgccatttaa

SEQ ID NO: 21072 - DNA, 40 bp, Homo sapiens
taaatggcaaagctgcagttacctttgcaccaacctaata

SEQ ID NO: 21073 - DNA, 40 bp, Homo sapiens
tattaggttggtgcaaaggtaactgcagctttgccattta

SEQ ID NO: 21074 - DNA, 40 bp, Homo sapiens
aaatggcaaagctgcagttacctttgcaccaacctaatat

SEQ ID NO: 21075 - DNA, 40 bp, Homo sapiens
atattaggttggtgcaaaggtaactgcagctttgccattt

SEQ ID NO: 21076 - DNA, 40 bp, Homo sapiens
aatggcaaagctgcagttacctttgcaccaacctaatatt

SEQ ID NO: 21077 - DNA, 40 bp, Homo sapiens
aatattaggttggtgcaaaggtaactgcagctttgccatt

SEQ ID NO: 21078 - DNA, 40 bp, Homo sapiens
atggcaaagctgcagttacctttgcaccaacctaatatta

SEQ ID NO: 21079 - DNA, 40 bp, Homo sapiens
taatattaggttggtgcaaaggtaactgcagctttgccat

SEQ ID NO: 21080 - DNA, 40 bp, Homo sapiens
tggcaaagctgcagttacctttgcaccaacctaatattaa

SEQ ID NO: 21081 - DNA, 40 bp, Homo sapiens
ttaatattaggttggtgcaaaggtaactgcagctttgcca

SEQ ID NO: 21082 - DNA, 40 bp, Homo sapiens
ggcaaagctgcagttacctttgcaccaacctaatattaaa

SEQ ID NO: 21083 - DNA, 40 bp, Homo sapiens
tttaatattaggttggtgcaaaggtaactgcagctttgcc

SEQ ID NO: 21084 - DNA, 40 bp, Homo sapiens
gcaaagctgcagttacctttgcaccaacctaatattaaac

SEQ ID NO: 21085 - DNA, 40 bp, Homo sapiens
gtttaatattaggttggtgcaaaggtaactgcagctttgc

SEQ ID NO: 21086 - DNA, 40 bp, Homo sapiens
caaagctgcagttacctttgcaccaacctaatattaaact

SEQ ID NO: 21087 - DNA, 40 bp, Homo sapiens
agtttaatattaggttggtgcaaaggtaactgcagctttg

SEQ ID NO: 21088 - DNA, 40 bp, Homo sapiens
aaagctgcagttacctttgcaccaacctaatattaaactt

SEQ ID NO: 21089 - DNA, 40 bp, Homo sapiens
aagtttaatattaggttggtgcaaaggtaactgcagcttt

SEQ ID NO: 21090 - DNA, 40 bp, Homo sapiens
aagctgcagttacctttgcaccaacctaatattaaacttc

SEQ ID NO: 21091 - DNA, 40 bp, Homo sapiens
gaagtttaatattaggttggtgcaaaggtaactgcagctt

SEQ ID NO: 21092 - DNA, 40 bp, Homo sapiens
agctgcagttacctttgcaccaacctaatattaaacttcc

SEQ ID NO: 21093 - DNA, 40 bp, Homo sapiens
ggaagtttaatattaggttggtgcaaaggtaactgcagct

SEQ ID NO: 21094 - DNA, 40 bp, Homo sapiens
gctgcagttacctttgcaccaacctaatattaaacttcct

SEQ ID NO: 21095 - DNA, 40 bp, Homo sapiens
aggaagtttaatattaggttggtgcaaaggtaactgcagc

SEQ ID NO: 21096 - DNA, 40 bp, Homo sapiens
ctgcagttacctttgcaccaacctaatattaaacttcctg

SEQ ID NO: 21097 - DNA, 40 bp, Homo sapiens
caggaagtttaatattaggttggtgcaaaggtaactgcag

SEQ ID NO: 21098 - DNA, 40 bp, Homo sapiens
tgcagttacctttgcaccaacctaatattaaacttcctgc

SEQ ID NO: 21099 - DNA, 40 bp, Homo sapiens
gcaggaagtttaatattaggttggtgcaaaggtaactgca

SEQ ID NO: 21100 - DNA, 40 bp, Homo sapiens
gcagttacctttgcaccaacctaatattaaacttcctgca

SEQ ID NO: 21101 - DNA, 40 bp, Homo sapiens
tgcaggaagtttaatattaggttggtgcaaaggtaactgc

SEQ ID NO: 21102 - DNA, 40 bp, Homo sapiens
cagttacctttgcaccaacctaatattaaacttcctgcag

SEQ ID NO: 21103 - DNA, 40 bp, Homo sapiens
ctgcaggaagtttaatattaggttggtgcaaaggtaactg

SEQ ID NO: 21104 - DNA, 40 bp, Homo sapiens
agttacctttgcaccaacctaatattaaacttcctgcagt

SEQ ID NO: 21105 - DNA, 40 bp, Homo sapiens
actgcaggaagtttaatattaggttggtgcaaaggtaact

SEQ ID NO: 21106 - DNA, 40 bp, Homo sapiens
gttacctttgcaccaacctaatattaaacttcctgcagtg

SEQ ID NO: 21107 - DNA, 40 bp, Homo sapiens
cactgcaggaagtttaatattaggttggtgcaaaggtaac

SEQ ID NO: 21108 - DNA, 40 bp, Homo sapiens
ttacctttgcaccaacctaatattaaacttcctgcagtgc

SEQ ID NO: 21109 - DNA, 40 bp, Homo sapiens
gcactgcaggaagtttaatattaggttggtgcaaaggtaa

SEQ ID NO: 21110 - DNA, 40 bp, Homo sapiens
tacctttgcaccaacctaatattaaacttcctgcagtgca

SEQ ID NO: 21111 - DNA, 40 bp, Homo sapiens
tgcactgcaggaagtttaatattaggttggtgcaaaggta

SEQ ID NO: 21112 - DNA, 40 bp, Homo sapiens
acctttgcaccaacctaatattaaacttcctgcagtgcac

SEQ ID NO: 21113 - DNA, 40 bp, Homo sapiens
gtgcactgcaggaagtttaatattaggttggtgcaaaggt

SEQ ID NO: 21114 - DNA, 40 bp, Homo sapiens
cctttgcaccaacctaatattaaacttcctgcagtgcacg

SEQ ID NO: 21115 - DNA, 40 bp, Homo sapiens
cgtgcactgcaggaagtttaatattaggttggtgcaaagg

SEQ ID NO: 21116 - DNA, 40 bp, Homo sapiens
ctttgcaccaacctaatattaaacttcctgcagtgcacgg

SEQ ID NO: 21117 - DNA, 40 bp, Homo sapiens
ccgtgcactgcaggaagtttaatattaggttggtgcaaag

SEQ ID NO: 21118 - DNA, 40 bp, Homo sapiens
tttgcaccaacctaatattaaacttcctgcagtgcacggg

SEQ ID NO: 21119 - DNA, 40 bp, Homo sapiens
cccgtgcactgcaggaagtttaatattaggttggtgcaaa

SEQ ID NO: 21120 - DNA, 40 bp, Homo sapiens
ttgcaccaacctaatattaaacttcctgcagtgcacggga

SEQ ID NO: 21121 - DNA, 40 bp, Homo sapiens
tcccgtgcactgcaggaagtttaatattaggttggtgcaa

SEQ ID NO: 21122 - DNA, 40 bp, Homo sapiens
tgcaccaacctaatattaaacttcctgcagtgcacgggaa

SEQ ID NO: 21123 - DNA, 40 bp, Homo sapiens
ttcccgtgcactgcaggaagtttaatattaggttggtgca

SEQ ID NO: 21124 - DNA, 40 bp, Homo sapiens
gcaccaacctaatattaaacttcctgcagtgcacgggaaa

SEQ ID NO: 21125 - DNA, 40 bp, Homo sapiens
tttcccgtgcactgcaggaagtttaatattaggttggtgc

SEQ ID NO: 21126 - DNA, 40 bp, Homo sapiens
caccaacctaatattaaacttcctgcagtgcacgggaaag

SEQ ID NO: 21127 - DNA, 40 bp, Homo sapiens
ctttcccgtgcactgcaggaagtttaatattaggttggtg

SEQ ID NO: 21128 - DNA, 40 bp, Homo sapiens
accaacctaatattaaacttcctgcagtgcacgggaaagc

SEQ ID NO: 21129 - DNA, 40 bp, Homo sapiens
gctttcccgtgcactgcaggaagtttaatattaggttggt

SEQ ID NO: 21130 - DNA, 40 bp, Homo sapiens
ccaacctaatattaaacttcctgcagtgcacgggaaagcc

SEQ ID NO: 21131 - DNA, 40 bp, Homo sapiens
ggctttcccgtgcactgcaggaagtttaatattaggttgg

SEQ ID NO: 21132 - DNA, 40 bp, Homo sapiens
caacctaatattaaacttcctgcagtgcacgggaaagccc

SEQ ID NO: 21133 - DNA, 40 bp, Homo sapiens
gggctttcccgtgcactgcaggaagtttaatattaggttg

SEQ ID NO: 21134 - DNA, 40 bp, Homo sapiens
aacctaatattaaacttcctgcagtgcacgggaaagcccc

SEQ ID NO: 21135 - DNA, 40 bp, Homo sapiens
ggggctttcccgtgcactgcaggaagtttaatattaggtt

SEQ ID NO: 21136 - DNA, 40 bp, Homo sapiens
acctaatattaaacttcctgcagtgcacgggaaagccccc

SEQ ID NO: 21137 - DNA, 40 bp, Homo sapiens
gggggctttcccgtgcactgcaggaagtttaatattaggt

SEQ ID NO: 21138 - DNA, 40 bp, Homo sapiens
cctaatattaaacttcctgcagtgcacgggaaagccccca

SEQ ID NO: 21139 - DNA, 40 bp, Homo sapiens
tgggggctttcccgtgcactgcaggaagtttaatattagg

SEQ ID NO: 21140 - DNA, 40 bp, Homo sapiens
ctaatattaaacttcctgcagtgcacgggaaagcccccac

SEQ ID NO: 21141 - DNA, 40 bp, Homo sapiens
gtgggggctttcccgtgcactgcaggaagtttaatattag

SEQ ID NO: 21142 - DNA, 40 bp, Homo sapiens
taatattaaacttcctgcagtgcacgggaaagcccccaca

SEQ ID NO: 21143 - DNA, 40 bp, Homo sapiens
tgtgggggctttcccgtgcactgcaggaagtttaatatta

SEQ ID NO: 21144 - DNA, 40 bp, Homo sapiens
aatattaaacttcctgcagtgcacgggaaagcccccacaa

SEQ ID NO: 21145 - DNA, 40 bp, Homo sapiens
ttgtgggggctttcccgtgcactgcaggaagtttaatatt

SEQ ID NO: 21146 - DNA, 40 bp, Homo sapiens
atattaaacttcctgcagtgcacgggaaagcccccacaac

SEQ ID NO: 21147 - DNA, 40 bp, Homo sapiens
gttgtgggggctttcccgtgcactgcaggaagtttaatat

SEQ ID NO: 21148 - DNA, 40 bp, Homo sapiens
tattaaacttcctgcagtgcacgggaaagcccccacaaca

SEQ ID NO: 21149 - DNA, 40 bp, Homo sapiens
tgttgtgggggctttcccgtgcactgcaggaagtttaata

SEQ ID NO: 21150 - DNA, 40 bp, Homo sapiens
attaaacttcctgcagtgcacgggaaagcccccacaacag

SEQ ID NO: 21151 - DNA, 40 bp, Homo sapiens
ctgttgtgggggctttcccgtgcactgcaggaagtttaat

SEQ ID NO: 21152 - DNA, 40 bp, Homo sapiens
ttaaacttcctgcagtgcacgggaaagcccccacaacagg

SEQ ID NO: 21153 - DNA, 40 bp, Homo sapiens
cctgttgtgggggctttcccgtgcactgcaggaagtttaa

SEQ ID NO: 21154 - DNA, 40 bp, Homo sapiens
taaacttcctgcagtgcacgggaaagcccccacaacaggg

SEQ ID NO: 21155 - DNA, 40 bp, Homo sapiens
ccctgttgtgggggctttcccgtgcactgcaggaagttta

SEQ ID NO: 21156 - DNA, 40 bp, Homo sapiens
aaacttcctgcagtgcacgggaaagcccccacaacagggt

SEQ ID NO: 21157 - DNA, 40 bp, Homo sapiens
accctgttgtgggggctttcccgtgcactgcaggaagttt

SEQ ID NO: 21158 - DNA, 40 bp, Homo sapiens
aacttcctgcagtgcacgggaaagcccccacaacagggtt

SEQ ID NO: 21159 - DNA, 40 bp, Homo sapiens
aaccctgttgtgggggctttcccgtgcactgcaggaagtt

SEQ ID NO: 21160 - DNA, 40 bp, Homo sapiens
acttcctgcagtgcacgggaaagcccccacaacagggtta

SEQ ID NO: 21161 - DNA, 40 bp, Homo sapiens
taaccctgttgtgggggctttcccgtgcactgcaggaagt

SEQ ID NO: 21162 - DNA, 40 bp, Homo sapiens
cttcctgcagtgcacgggaaagcccccacaacagggttat

SEQ ID NO: 21163 - DNA, 40 bp, Homo sapiens
ataaccctgttgtgggggctttcccgtgcactgcaggaag

SEQ ID NO: 21164 - DNA, 40 bp, Homo sapiens
ttcctgcagtgcacgggaaagcccccacaacagggttatc

SEQ ID NO: 21165 - DNA, 40 bp, Homo sapiens
gataaccctgttgtgggggctttcccgtgcactgcaggaa

SEQ ID NO: 21166 - DNA, 40 bp, Homo sapiens
tcctgcagtgcacgggaaagcccccacaacagggttatct

SEQ ID NO: 21167 - DNA, 40 bp, Homo sapiens
agataaccctgttgtgggggctttcccgtgcactgcagga

SEQ ID NO: 21168 - DNA, 40 bp, Homo sapiens
cctgcagtgcacgggaaagcccccacaacagggttatctg

SEQ ID NO: 21169 - DNA, 40 bp, Homo sapiens
cagataaccctgttgtgggggctttcccgtgcactgcagg

SEQ ID NO: 21170 - DNA, 40 bp, Homo sapiens
ctgcagtgcacgggaaagcccccacaacagggttatctga

SEQ ID NO: 21171 - DNA, 40 bp, Homo sapiens
tcagataaccctgttgtgggggctttcccgtgcactgcag

SEQ ID NO: 21172 - DNA, 40 bp, Homo sapiens
tgcagtgcacgggaaagcccccacaacagggttatctgac

SEQ ID NO: 21173 - DNA, 40 bp, Homo sapiens
gtcagataaccctgttgtgggggctttcccgtgcactgca

SEQ ID NO: 21174 - DNA, 40 bp, Homo sapiens
gcagtgcacgggaaagcccccacaacagggttatctgacc

SEQ ID NO: 21175 - DNA, 40 bp, Homo sapiens
ggtcagataaccctgttgtgggggctttcccgtgcactgc

SEQ ID NO: 21176 - DNA, 40 bp, Homo sapiens
cagtgcacgggaaagcccccacaacagggttatctgaccc

SEQ ID NO: 21177 - DNA, 40 bp, Homo sapiens
gggtcagataaccctgttgtgggggctttcccgtgcactg

SEQ ID NO: 21178 - DNA, 40 bp, Homo sapiens
agtgcacgggaaagcccccacaacagggttatctgacccc

SEQ ID NO: 21179 - DNA, 40 bp, Homo sapiens
ggggtcagataaccctgttgtgggggctttcccgtgcact

SEQ ID NO: 21180 - DNA, 40 bp, Homo sapiens
gtgcacgggaaagcccccacaacagggttatctgacccca

SEQ ID NO: 21181 - DNA, 40 bp, Homo sapiens
tggggtcagataaccctgttgtgggggctttcccgtgcac

SEQ ID NO: 21182 - DNA, 40 bp, Homo sapiens
tgcacgggaaagcccccacaacagggttatctgaccccaa

SEQ ID NO: 21183 - DNA, 40 bp, Homo sapiens
ttggggtcagataaccctgttgtgggggctttcccgtgca

SEQ ID NO: 21184 - DNA, 40 bp, Homo sapiens
gcacgggaaagcccccacaacagggttatctgaccccaaa

SEQ ID NO: 21185 - DNA, 40 bp, Homo sapiens
tttggggtcagataaccctgttgtgggggctttcccgtgc

SEQ ID NO: 21186 - DNA, 40 bp, Homo sapiens
cacgggaaagcccccacaacagggttatctgaccccaaac

SEQ ID NO: 21187 - DNA, 40 bp, Homo sapiens
gtttggggtcagataaccctgttgtgggggctttcccgtg

SEQ ID NO: 21188 - DNA, 40 bp, Homo sapiens
acgggaaagcccccacaacagggttatctgaccccaaacc

SEQ ID NO: 21189 - DNA, 40 bp, Homo sapiens
ggtttggggtcagataaccctgttgtgggggctttcccgt

SEQ ID NO: 21190 - DNA, 40 bp, Homo sapiens
cgggaaagcccccacaacagggttatctgaccccaaacct

SEQ ID NO: 21191 - DNA, 40 bp, Homo sapiens
aggtttggggtcagataaccctgttgtgggggctttcccg

SEQ ID NO: 21192 - DNA, 40 bp, Homo sapiens
gggaaagcccccacaacagggttatctgaccccaaacctc

SEQ ID NO: 21193 - DNA, 40 bp, Homo sapiens
gaggtttggggtcagataaccctgttgtgggggctttccc

SEQ ID NO: 21194 - DNA, 40 bp, Homo sapiens
ggaaagcccccacaacagggttatctgaccccaaacctca

SEQ ID NO: 21195 - DNA, 40 bp, Homo sapiens
tgaggtttggggtcagataaccctgttgtgggggctttcc

SEQ ID NO: 21196 - DNA, 40 bp, Homo sapiens
gaaagcccccacaacagggttatctgaccccaaacctcaa

SEQ ID NO: 21197 - DNA, 40 bp, Homo sapiens
ttgaggtttggggtcagataaccctgttgtgggggctttc

SEQ ID NO: 21198 - DNA, 40 bp, Homo sapiens
aaagcccccacaacagggttatctgaccccaaacctcaat

SEQ ID NO: 21199 - DNA, 40 bp, Homo sapiens
attgaggtttggggtcagataaccctgttgtgggggcttt

SEQ ID NO: 21200 - DNA, 40 bp, Homo sapiens
aagcccccacaacagggttatctgaccccaaacctcaatg

SEQ ID NO: 21201 - DNA, 40 bp, Homo sapiens
cattgaggtttggggtcagataaccctgttgtgggggctt

SEQ ID NO: 21202 - DNA, 40 bp, Homo sapiens
agcccccacaacagggttatctgaccccaaacctcaatgg

SEQ ID NO: 21203 - DNA, 40 bp, Homo sapiens
ccattgaggtttggggtcagataaccctgttgtgggggct

SEQ ID NO: 21204 - DNA, 40 bp, Homo sapiens
gcccccacaacagggttatctgaccccaaacctcaatggt

SEQ ID NO: 21205 - DNA, 40 bp, Homo sapiens
accattgaggtttggggtcagataaccctgttgtgggggc

SEQ ID NO: 21206 - DNA, 40 bp, Homo sapiens
cccccacaacagggttatctgaccccaaacctcaatggtg

SEQ ID NO: 21207 - DNA, 40 bp, Homo sapiens
caccattgaggtttggggtcagataaccctgttgtggggg

SEQ ID NO: 21208 - DNA, 40 bp, Homo sapiens
ccccacaacagggttatctgaccccaaacctcaatggtgt

SEQ ID NO: 21209 - DNA, 40 bp, Homo sapiens
acaccattgaggtttggggtcagataaccctgttgtgggg

SEQ ID NO: 21210 - DNA, 40 bp, Homo sapiens
cccacaacagggttatctgaccccaaacctcaatggtgtt

SEQ ID NO: 21211 - DNA, 40 bp, Homo sapiens
aacaccattgaggtttggggtcagataaccctgttgtggg

SEQ ID NO: 21212 - DNA, 40 bp, Homo sapiens
ccacaacagggttatctgaccccaaacctcaatggtgtta

SEQ ID NO: 21213 - DNA, 40 bp, Homo sapiens
taacaccattgaggtttggggtcagataaccctgttgtgg

SEQ ID NO: 21214 - DNA, 40 bp, Homo sapiens
cacaacagggttatctgaccccaaacctcaatggtgttaa

SEQ ID NO: 21215 - DNA, 40 bp, Homo sapiens
ttaacaccattgaggtttggggtcagataaccctgttgtg

SEQ ID NO: 21216 - DNA, 40 bp, Homo sapiens
acaacagggttatctgaccccaaacctcaatggtgttaag

SEQ ID NO: 21217 - DNA, 40 bp, Homo sapiens
cttaacaccattgaggtttggggtcagataaccctgttgt

SEQ ID NO: 21218 - DNA, 40 bp, Homo sapiens
caacagggttatctgaccccaaacctcaatggtgttaaga

SEQ ID NO: 21219 - DNA, 40 bp, Homo sapiens
tcttaacaccattgaggtttggggtcagataaccctgttg

SEQ ID NO: 21220 - DNA, 40 bp, Homo sapiens
aacagggttatctgaccccaaacctcaatggtgttaagat

SEQ ID NO: 21221 - DNA, 40 bp, Homo sapiens
atcttaacaccattgaggtttggggtcagataaccctgtt

SEQ ID NO: 21222 - DNA, 40 bp, Homo sapiens
acagggttatctgaccccaaacctcaatggtgttaagatc

SEQ ID NO: 21223 - DNA, 40 bp, Homo sapiens
gatcttaacaccattgaggtttggggtcagataaccctgt

SEQ ID NO: 21224 - DNA, 40 bp, Homo sapiens
cagggttatctgaccccaaacctcaatggtgttaagatcc

SEQ ID NO: 21225 - DNA, 40 bp, Homo sapiens
ggatcttaacaccattgaggtttggggtcagataaccctg

SEQ ID NO: 21226 - DNA, 40 bp, Homo sapiens
agggttatctgaccccaaacctcaatggtgttaagatcca

SEQ ID NO: 21227 - DNA, 40 bp, Homo sapiens
tggatcttaacaccattgaggtttggggtcagataaccct

SEQ ID NO: 21228 - DNA, 40 bp, Homo sapiens
gggttatctgaccccaaacctcaatggtgttaagatccaa

SEQ ID NO: 21229 - DNA, 40 bp, Homo sapiens
ttggatcttaacaccattgaggtttggggtcagataaccc

SEQ ID NO: 21230 - DNA, 40 bp, Homo sapiens
ggttatctgaccccaaacctcaatggtgttaagatccaaa

SEQ ID NO: 21231 - DNA, 40 bp, Homo sapiens
tttggatcttaacaccattgaggtttggggtcagataacc

SEQ ID NO: 21232 - DNA, 40 bp, Homo sapiens
gttatctgaccccaaacctcaatggtgttaagatccaaac

SEQ ID NO: 21233 - DNA, 40 bp, Homo sapiens
gtttggatcttaacaccattgaggtttggggtcagataac

SEQ ID NO: 21234 - DNA, 40 bp, Homo sapiens
ttatctgaccccaaacctcaatggtgttaagatccaaacc

SEQ ID NO: 21235 - DNA, 40 bp, Homo sapiens
ggtttggatcttaacaccattgaggtttggggtcagataa

SEQ ID NO: 21236 - DNA, 40 bp, Homo sapiens
tatctgaccccaaacctcaatggtgttaagatccaaacct

SEQ ID NO: 21237 - DNA, 40 bp, Homo sapiens
aggtttggatcttaacaccattgaggtttggggtcagata

SEQ ID NO: 21238 - DNA, 40 bp, Homo sapiens
atctgaccccaaacctcaatggtgttaagatccaaacctt

SEQ ID NO: 21239 - DNA, 40 bp, Homo sapiens
aaggtttggatcttaacaccattgaggtttggggtcagat

SEQ ID NO: 21240 - DNA, 40 bp, Homo sapiens
tctgaccccaaacctcaatggtgttaagatccaaaccttg

SEQ ID NO: 21241 - DNA, 40 bp, Homo sapiens
caaggtttggatcttaacaccattgaggtttggggtcaga

SEQ ID NO: 21242 - DNA, 40 bp, Homo sapiens
ctgaccccaaacctcaatggtgttaagatccaaaccttga

SEQ ID NO: 21243 - DNA, 40 bp, Homo sapiens
tcaaggtttggatcttaacaccattgaggtttggggtcag

SEQ ID NO: 21244 - DNA, 40 bp, Homo sapiens
tgaccccaaacctcaatggtgttaagatccaaaccttgat

SEQ ID NO: 21245 - DNA, 40 bp, Homo sapiens
atcaaggtttggatcttaacaccattgaggtttggggtca

SEQ ID NO: 21246 - DNA, 40 bp, Homo sapiens
gaccccaaacctcaatggtgttaagatccaaaccttgata

SEQ ID NO: 21247 - DNA, 40 bp, Homo sapiens
tatcaaggtttggatcttaacaccattgaggtttggggtc

SEQ ID NO: 21248 - DNA, 40 bp, Homo sapiens
accccaaacctcaatggtgttaagatccaaaccttgatat

SEQ ID NO: 21249 - DNA, 40 bp, Homo sapiens
atatcaaggtttggatcttaacaccattgaggtttggggt

SEQ ID NO: 21250 - DNA, 40 bp, Homo sapiens
ccccaaacctcaatggtgttaagatccaaaccttgatatg

SEQ ID NO: 21251 - DNA, 40 bp, Homo sapiens
catatcaaggtttggatcttaacaccattgaggtttgggg

SEQ ID NO: 21252 - DNA, 40 bp, Homo sapiens
cccaaacctcaatggtgttaagatccaaaccttgatatgt

SEQ ID NO: 21253 - DNA, 40 bp, Homo sapiens
acatatcaaggtttggatcttaacaccattgaggtttggg

SEQ ID NO: 21254 - DNA, 40 bp, Homo sapiens
ccaaacctcaatggtgttaagatccaaaccttgatatgtt

SEQ ID NO: 21255 - DNA, 40 bp, Homo sapiens
aacatatcaaggtttggatcttaacaccattgaggtttgg

SEQ ID NO: 21256 - DNA, 40 bp, Homo sapiens
caaacctcaatggtgttaagatccaaaccttgatatgtta

SEQ ID NO: 21257 - DNA, 40 bp, Homo sapiens
taacatatcaaggtttggatcttaacaccattgaggtttg

SEQ ID NO: 21258 - DNA, 40 bp, Homo sapiens
aaacctcaatggtgttaagatccaaaccttgatatgttaa

SEQ ID NO: 21259 - DNA, 40 bp, Homo sapiens
ttaacatatcaaggtttggatcttaacaccattgaggttt

SEQ ID NO: 21260 - DNA, 40 bp, Homo sapiens
aacctcaatggtgttaagatccaaaccttgatatgttaac

SEQ ID NO: 21261 - DNA, 40 bp, Homo sapiens
gttaacatatcaaggtttggatcttaacaccattgaggtt

SEQ ID NO: 21262 - DNA, 40 bp, Homo sapiens
acctcaatggtgttaagatccaaaccttgatatgttaacc

SEQ ID NO: 21263 - DNA, 40 bp, Homo sapiens
ggttaacatatcaaggtttggatcttaacaccattgaggt

SEQ ID NO: 21264 - DNA, 40 bp, Homo sapiens
cctcaatggtgttaagatccaaaccttgatatgttaacct

SEQ ID NO: 21265 - DNA, 40 bp, Homo sapiens
aggttaacatatcaaggtttggatcttaacaccattgagg

SEQ ID NO: 21266 - DNA, 40 bp, Homo sapiens
ctcaatggtgttaagatccaaaccttgatatgttaacctg

SEQ ID NO: 21267 - DNA, 40 bp, Homo sapiens
caggttaacatatcaaggtttggatcttaacaccattgag

SEQ ID NO: 21268 - DNA, 40 bp, Homo sapiens
tcaatggtgttaagatccaaaccttgatatgttaacctgt

SEQ ID NO: 21269 - DNA, 40 bp, Homo sapiens
acaggttaacatatcaaggtttggatcttaacaccattga

SEQ ID NO: 21270 - DNA, 40 bp, Homo sapiens
caatggtgttaagatccaaaccttgatatgttaacctgta

SEQ ID NO: 21271 - DNA, 40 bp, Homo sapiens
tacaggttaacatatcaaggtttggatcttaacaccattg

SEQ ID NO: 21272 - DNA, 40 bp, Homo sapiens
aatggtgttaagatccaaaccttgatatgttaacctgtag

SEQ ID NO: 21273 - DNA, 40 bp, Homo sapiens
ctacaggttaacatatcaaggtttggatcttaacaccatt

SEQ ID NO: 21274 - DNA, 40 bp, Homo sapiens
atggtgttaagatccaaaccttgatatgttaacctgtagc

SEQ ID NO: 21275 - DNA, 40 bp, Homo sapiens
gctacaggttaacatatcaaggtttggatcttaacaccat

SEQ ID NO: 21276 - DNA, 40 bp, Homo sapiens
tggtgttaagatccaaaccttgatatgttaacctgtagct

SEQ ID NO: 21277 - DNA, 40 bp, Homo sapiens
agctacaggttaacatatcaaggtttggatcttaacacca

SEQ ID NO: 21278 - DNA, 40 bp, Homo sapiens
ggtgttaagatccaaaccttgatatgttaacctgtagctt

SEQ ID NO: 21279 - DNA, 40 bp, Homo sapiens
aagctacaggttaacatatcaaggtttggatcttaacacc

SEQ ID NO: 21280 - DNA, 40 bp, Homo sapiens
gtgttaagatccaaaccttgatatgttaacctgtagcttt

SEQ ID NO: 21281 - DNA, 40 bp, Homo sapiens
aaagctacaggttaacatatcaaggtttggatcttaacac

SEQ ID NO: 21282 - DNA, 40 bp, Homo sapiens
tgttaagatccaaaccttgatatgttaacctgtagcttta

SEQ ID NO: 21283 - DNA, 40 bp, Homo sapiens
taaagctacaggttaacatatcaaggtttggatcttaaca

SEQ ID NO: 21284 - DNA, 40 bp, Homo sapiens
gttaagatccaaaccttgatatgttaacctgtagctttaa

SEQ ID NO: 21285 - DNA, 40 bp, Homo sapiens
ttaaagctacaggttaacatatcaaggtttggatcttaac

SEQ ID NO: 21286 - DNA, 40 bp, Homo sapiens
ttaagatccaaaccttgatatgttaacctgtagctttaaa

SEQ ID NO: 21287 - DNA, 40 bp, Homo sapiens
tttaaagctacaggttaacatatcaaggtttggatcttaa

SEQ ID NO: 21288 - DNA, 40 bp, Homo sapiens
taagatccaaaccttgatatgttaacctgtagctttaaac

SEQ ID NO: 21289 - DNA, 40 bp, Homo sapiens
gtttaaagctacaggttaacatatcaaggtttggatctta

SEQ ID NO: 21290 - DNA, 40 bp, Homo sapiens
aagatccaaaccttgatatgttaacctgtagctttaaaca

SEQ ID NO: 21291 - DNA, 40 bp, Homo sapiens
tgtttaaagctacaggttaacatatcaaggtttggatctt

SEQ ID NO: 21292 - DNA, 40 bp, Homo sapiens
agatccaaaccttgatatgttaacctgtagctttaaacat

SEQ ID NO: 21293 - DNA, 40 bp, Homo sapiens
atgtttaaagctacaggttaacatatcaaggtttggatct

SEQ ID NO: 21294 - DNA, 40 bp, Homo sapiens
gatccaaaccttgatatgttaacctgtagctttaaacatc

SEQ ID NO: 21295 - DNA, 40 bp, Homo sapiens
gatgtttaaagctacaggttaacatatcaaggtttggatc

SEQ ID NO: 21296 - DNA, 40 bp, Homo sapiens
atccaaaccttgatatgttaacctgtagctttaaacatcc

SEQ ID NO: 21297 - DNA, 40 bp, Homo sapiens
ggatgtttaaagctacaggttaacatatcaaggtttggat

SEQ ID NO: 21298 - DNA, 40 bp, Homo sapiens
tccaaaccttgatatgttaacctgtagctttaaacatcct

SEQ ID NO: 21299 - DNA, 40 bp, Homo sapiens
aggatgtttaaagctacaggttaacatatcaaggtttgga

SEQ ID NO: 21300 - DNA, 40 bp, Homo sapiens
ccaaaccttgatatgttaacctgtagctttaaacatcctt

SEQ ID NO: 21301 - DNA, 40 bp, Homo sapiens
aaggatgtttaaagctacaggttaacatatcaaggtttgg

SEQ ID NO: 21302 - DNA, 40 bp, Homo sapiens
caaaccttgatatgttaacctgtagctttaaacatccttt

SEQ ID NO: 21303 - DNA, 40 bp, Homo sapiens
aaaggatgtttaaagctacaggttaacatatcaaggtttg

SEQ ID NO: 21304 - DNA, 40 bp, Homo sapiens
aaaccttgatatgttaacctgtagctttaaacatccttta

SEQ ID NO: 21305 - DNA, 40 bp, Homo sapiens
taaaggatgtttaaagctacaggttaacatatcaaggttt

SEQ ID NO: 21306 - DNA, 40 bp, Homo sapiens
aaccttgatatgttaacctgtagctttaaacatcctttaa

SEQ ID NO: 21307 - DNA, 40 bp, Homo sapiens
ttaaaggatgtttaaagctacaggttaacatatcaaggtt

SEQ ID NO: 21308 - DNA, 40 bp, Homo sapiens
accttgatatgttaacctgtagctttaaacatcctttaaa

SEQ ID NO: 21309 - DNA, 40 bp, Homo sapiens
tttaaaggatgtttaaagctacaggttaacatatcaaggt

SEQ ID NO: 21310 - DNA, 40 bp, Homo sapiens
ccttgatatgttaacctgtagctttaaacatcctttaaat

SEQ ID NO: 21311 - DNA, 40 bp, Homo sapiens
atttaaaggatgtttaaagctacaggttaacatatcaagg

SEQ ID NO: 21312 - DNA, 40 bp, Homo sapiens
cttgatatgttaacctgtagctttaaacatcctttaaatt

SEQ ID NO: 21313 - DNA, 40 bp, Homo sapiens
aatttaaaggatgtttaaagctacaggttaacatatcaag

SEQ ID NO: 21314 - DNA, 40 bp, Homo sapiens
ttgatatgttaacctgtagctttaaacatcctttaaattg

SEQ ID NO: 21315 - DNA, 40 bp, Homo sapiens
caatttaaaggatgtttaaagctacaggttaacatatcaa

SEQ ID NO: 21316 - DNA, 40 bp, Homo sapiens
tgatatgttaacctgtagctttaaacatcctttaaattgt

SEQ ID NO: 21317 - DNA, 40 bp, Homo sapiens
acaatttaaaggatgtttaaagctacaggttaacatatca

SEQ ID NO: 21318 - DNA, 40 bp, Homo sapiens
gatatgttaacctgtagctttaaacatcctttaaattgtc

SEQ ID NO: 21319 - DNA, 40 bp, Homo sapiens
gacaatttaaaggatgtttaaagctacaggttaacatatc

SEQ ID NO: 21320 - DNA, 40 bp, Homo sapiens
atatgttaacctgtagctttaaacatcctttaaattgtca

SEQ ID NO: 21321 - DNA, 40 bp, Homo sapiens
tgacaatttaaaggatgtttaaagctacaggttaacatat

SEQ ID NO: 21322 - DNA, 40 bp, Homo sapiens
tatgttaacctgtagctttaaacatcctttaaattgtcaa

SEQ ID NO: 21323 - DNA, 40 bp, Homo sapiens
ttgacaatttaaaggatgtttaaagctacaggttaacata

SEQ ID NO: 21324 - DNA, 40 bp, Homo sapiens
atgttaacctgtagctttaaacatcctttaaattgtcaaa

SEQ ID NO: 21325 - DNA, 40 bp, Homo sapiens
tttgacaatttaaaggatgtttaaagctacaggttaacat

SEQ ID NO: 21326 - DNA, 40 bp, Homo sapiens
tgttaacctgtagctttaaacatcctttaaattgtcaaat

SEQ ID NO: 21327 - DNA, 40 bp, Homo sapiens
atttgacaatttaaaggatgtttaaagctacaggttaaca

SEQ ID NO: 21328 - DNA, 40 bp, Homo sapiens
gttaacctgtagctttaaacatcctttaaattgtcaaatt

SEQ ID NO: 21329 - DNA, 40 bp, Homo sapiens
aatttgacaatttaaaggatgtttaaagctacaggttaac

SEQ ID NO: 21330 - DNA, 40 bp, Homo sapiens
ttaacctgtagctttaaacatcctttaaattgtcaaattc

SEQ ID NO: 21331 - DNA, 40 bp, Homo sapiens
gaatttgacaatttaaaggatgtttaaagctacaggttaa

SEQ ID NO: 21332 - DNA, 40 bp, Homo sapiens
taacctgtagctttaaacatcctttaaattgtcaaattca

SEQ ID NO: 21333 - DNA, 40 bp, Homo sapiens
tgaatttgacaatttaaaggatgtttaaagctacaggtta

SEQ ID NO: 21334 - DNA, 40 bp, Homo sapiens
aacctgtagctttaaacatcctttaaattgtcaaattcat

SEQ ID NO: 21335 - DNA, 40 bp, Homo sapiens
atgaatttgacaatttaaaggatgtttaaagctacaggtt

SEQ ID NO: 21336 - DNA, 40 bp, Homo sapiens
acctgtagctttaaacatcctttaaattgtcaaattcatg

SEQ ID NO: 21337 - DNA, 40 bp, Homo sapiens
catgaatttgacaatttaaaggatgtttaaagctacaggt

SEQ ID NO: 21338 - DNA, 40 bp, Homo sapiens
cctgtagctttaaacatcctttaaattgtcaaattcatgt

SEQ ID NO: 21339 - DNA, 40 bp, Homo sapiens
acatgaatttgacaatttaaaggatgtttaaagctacagg

SEQ ID NO: 21340 - DNA, 40 bp, Homo sapiens
ctgtagctttaaacatcctttaaattgtcaaattcatgtc

SEQ ID NO: 21341 - DNA, 40 bp, Homo sapiens
gacatgaatttgacaatttaaaggatgtttaaagctacag

SEQ ID NO: 21342 - DNA, 40 bp, Homo sapiens
tgtagctttaaacatcctttaaattgtcaaattcatgtcc

SEQ ID NO: 21343 - DNA, 40 bp, Homo sapiens
ggacatgaatttgacaatttaaaggatgtttaaagctaca

SEQ ID NO: 21344 - DNA, 40 bp, Homo sapiens
gtagctttaaacatcctttaaattgtcaaattcatgtccc

SEQ ID NO: 21345 - DNA, 40 bp, Homo sapiens
gggacatgaatttgacaatttaaaggatgtttaaagctac

SEQ ID NO: 21346 - DNA, 40 bp, Homo sapiens
tagctttaaacatcctttaaattgtcaaattcatgtccct

SEQ ID NO: 21347 - DNA, 40 bp, Homo sapiens
agggacatgaatttgacaatttaaaggatgtttaaagcta

SEQ ID NO: 21348 - DNA, 40 bp, Homo sapiens
agctttaaacatcctttaaattgtcaaattcatgtccctg

SEQ ID NO: 21349 - DNA, 40 bp, Homo sapiens
cagggacatgaatttgacaatttaaaggatgtttaaagct

SEQ ID NO: 21350 - DNA, 40 bp, Homo sapiens
gctttaaacatcctttaaattgtcaaattcatgtccctga

SEQ ID NO: 21351 - DNA, 40 bp, Homo sapiens
tcagggacatgaatttgacaatttaaaggatgtttaaagc

SEQ ID NO: 21352 - DNA, 40 bp, Homo sapiens
ctttaaacatcctttaaattgtcaaattcatgtccctgac

SEQ ID NO: 21353 - DNA, 40 bp, Homo sapiens
gtcagggacatgaatttgacaatttaaaggatgtttaaag

SEQ ID NO: 21354 - DNA, 40 bp, Homo sapiens
tttaaacatcctttaaattgtcaaattcatgtccctgaca

SEQ ID NO: 21355 - DNA, 40 bp, Homo sapiens
tgtcagggacatgaatttgacaatttaaaggatgtttaaa

SEQ ID NO: 21356 - DNA, 40 bp, Homo sapiens
ttaaacatcctttaaattgtcaaattcatgtccctgacat

SEQ ID NO: 21357 - DNA, 40 bp, Homo sapiens
atgtcagggacatgaatttgacaatttaaaggatgtttaa

SEQ ID NO: 21358 - DNA, 40 bp, Homo sapiens
taaacatcctttaaattgtcaaattcatgtccctgacata

SEQ ID NO: 21359 - DNA, 40 bp, Homo sapiens
tatgtcagggacatgaatttgacaatttaaaggatgttta

SEQ ID NO: 21360 - DNA, 40 bp, Homo sapiens
aaacatcctttaaattgtcaaattcatgtccctgacataa

SEQ ID NO: 21361 - DNA, 40 bp, Homo sapiens
ttatgtcagggacatgaatttgacaatttaaaggatgttt

SEQ ID NO: 21362 - DNA, 40 bp, Homo sapiens
aacatcctttaaattgtcaaattcatgtccctgacataag

SEQ ID NO: 21363 - DNA, 40 bp, Homo sapiens
cttatgtcagggacatgaatttgacaatttaaaggatgtt

SEQ ID NO: 21364 - DNA, 40 bp, Homo sapiens
acatcctttaaattgtcaaattcatgtccctgacataagg

SEQ ID NO: 21365 - DNA, 40 bp, Homo sapiens
ccttatgtcagggacatgaatttgacaatttaaaggatgt

SEQ ID NO: 21366 - DNA, 40 bp, Homo sapiens
catcctttaaattgtcaaattcatgtccctgacataaggt

SEQ ID NO: 21367 - DNA, 40 bp, Homo sapiens
accttatgtcagggacatgaatttgacaatttaaaggatg

SEQ ID NO: 21368 - DNA, 40 bp, Homo sapiens
atcctttaaattgtcaaattcatgtccctgacataaggtt

SEQ ID NO: 21369 - DNA, 40 bp, Homo sapiens
aaccttatgtcagggacatgaatttgacaatttaaaggat

SEQ ID NO: 21370 - DNA, 40 bp, Homo sapiens
tcctttaaattgtcaaattcatgtccctgacataaggttt

SEQ ID NO: 21371 - DNA, 40 bp, Homo sapiens
aaaccttatgtcagggacatgaatttgacaatttaaagga

SEQ ID NO: 21372 - DNA, 40 bp, Homo sapiens
cctttaaattgtcaaattcatgtccctgacataaggttta

SEQ ID NO: 21373 - DNA, 40 bp, Homo sapiens
taaaccttatgtcagggacatgaatttgacaatttaaagg

SEQ ID NO: 21374 - DNA, 40 bp, Homo sapiens
ctttaaattgtcaaattcatgtccctgacataaggtttat

SEQ ID NO: 21375 - DNA, 40 bp, Homo sapiens
ataaaccttatgtcagggacatgaatttgacaatttaaag

SEQ ID NO: 21376 - DNA, 40 bp, Homo sapiens
tttaaattgtcaaattcatgtccctgacataaggtttatg

SEQ ID NO: 21377 - DNA, 40 bp, Homo sapiens
cataaaccttatgtcagggacatgaatttgacaatttaaa

SEQ ID NO: 21378 - DNA, 40 bp, Homo sapiens
ttaaattgtcaaattcatgtccctgacataaggtttatgt

SEQ ID NO: 21379 - DNA, 40 bp, Homo sapiens
acataaaccttatgtcagggacatgaatttgacaatttaa

SEQ ID NO: 21380 - DNA, 40 bp, Homo sapiens
taaattgtcaaattcatgtccctgacataaggtttatgtt

SEQ ID NO: 21381 - DNA, 40 bp, Homo sapiens
aacataaaccttatgtcagggacatgaatttgacaattta

SEQ ID NO: 21382 - DNA, 40 bp, Homo sapiens
aaattgtcaaattcatgtccctgacataaggtttatgtta

SEQ ID NO: 21383 - DNA, 40 bp, Homo sapiens
taacataaaccttatgtcagggacatgaatttgacaattt

SEQ ID NO: 21384 - DNA, 40 bp, Homo sapiens
aattgtcaaattcatgtccctgacataaggtttatgttag

SEQ ID NO: 21385 - DNA, 40 bp, Homo sapiens
ctaacataaaccttatgtcagggacatgaatttgacaatt

SEQ ID NO: 21386 - DNA, 40 bp, Homo sapiens
attgtcaaattcatgtccctgacataaggtttatgttaga

SEQ ID NO: 21387 - DNA, 40 bp, Homo sapiens
tctaacataaaccttatgtcagggacatgaatttgacaat

SEQ ID NO: 21388 - DNA, 40 bp, Homo sapiens
ttgtcaaattcatgtccctgacataaggtttatgttagat

SEQ ID NO: 21389 - DNA, 40 bp, Homo sapiens
atctaacataaaccttatgtcagggacatgaatttgacaa

SEQ ID NO: 21390 - DNA, 40 bp, Homo sapiens
tgtcaaattcatgtccctgacataaggtttatgttagatt

SEQ ID NO: 21391 - DNA, 40 bp, Homo sapiens
aatctaacataaaccttatgtcagggacatgaatttgaca

SEQ ID NO: 21392 - DNA, 40 bp, Homo sapiens
gtcaaattcatgtccctgacataaggtttatgttagattt

SEQ ID NO: 21393 - DNA, 40 bp, Homo sapiens
aaatctaacataaaccttatgtcagggacatgaatttgac

SEQ ID NO: 21394 - DNA, 40 bp, Homo sapiens
tcaaattcatgtccctgacataaggtttatgttagatttt

SEQ ID NO: 21395 - DNA, 40 bp, Homo sapiens
aaaatctaacataaaccttatgtcagggacatgaatttga

SEQ ID NO: 21396 - DNA, 40 bp, Homo sapiens
caaattcatgtccctgacataaggtttatgttagattttc

SEQ ID NO: 21397 - DNA, 40 bp, Homo sapiens
gaaaatctaacataaaccttatgtcagggacatgaatttg

SEQ ID NO: 21398 - DNA, 40 bp, Homo sapiens
aaattcatgtccctgacataaggtttatgttagattttca

SEQ ID NO: 21399 - DNA, 40 bp, Homo sapiens
tgaaaatctaacataaaccttatgtcagggacatgaattt

SEQ ID NO: 21400 - DNA, 40 bp, Homo sapiens
aattcatgtccctgacataaggtttatgttagattttcaa

SEQ ID NO: 21401 - DNA, 40 bp, Homo sapiens
ttgaaaatctaacataaaccttatgtcagggacatgaatt

SEQ ID NO: 21402 - DNA, 40 bp, Homo sapiens
attcatgtccctgacataaggtttatgttagattttcaag

SEQ ID NO: 21403 - DNA, 40 bp, Homo sapiens
cttgaaaatctaacataaaccttatgtcagggacatgaat

SEQ ID NO: 21404 - DNA, 40 bp, Homo sapiens
ttcatgtccctgacataaggtttatgttagattttcaagt

SEQ ID NO: 21405 - DNA, 40 bp, Homo sapiens
acttgaaaatctaacataaaccttatgtcagggacatgaa

SEQ ID NO: 21406 - DNA, 40 bp, Homo sapiens
tcatgtccctgacataaggtttatgttagattttcaagta

SEQ ID NO: 21407 - DNA, 40 bp, Homo sapiens
tacttgaaaatctaacataaaccttatgtcagggacatga

SEQ ID NO: 21408 - DNA, 40 bp, Homo sapiens
catgtccctgacataaggtttatgttagattttcaagtat

SEQ ID NO: 21409 - DNA, 40 bp, Homo sapiens
atacttgaaaatctaacataaaccttatgtcagggacatg

SEQ ID NO: 21410 - DNA, 40 bp, Homo sapiens
atgtccctgacataaggtttatgttagattttcaagtata

SEQ ID NO: 21411 - DNA, 40 bp, Homo sapiens
tatacttgaaaatctaacataaaccttatgtcagggacat

SEQ ID NO: 21412 - DNA, 40 bp, Homo sapiens
tgtccctgacataaggtttatgttagattttcaagtataa

SEQ ID NO: 21413 - DNA, 40 bp, Homo sapiens
ttatacttgaaaatctaacataaaccttatgtcagggaca

SEQ ID NO: 21414 - DNA, 40 bp, Homo sapiens
gtccctgacataaggtttatgttagattttcaagtataac

SEQ ID NO: 21415 - DNA, 40 bp, Homo sapiens
gttatacttgaaaatctaacataaaccttatgtcagggac

SEQ ID NO: 21416 - DNA, 40 bp, Homo sapiens
tccctgacataaggtttatgttagattttcaagtataaca

SEQ ID NO: 21417 - DNA, 40 bp, Homo sapiens
tgttatacttgaaaatctaacataaaccttatgtcaggga

SEQ ID NO: 21418 - DNA, 40 bp, Homo sapiens
ccctgacataaggtttatgttagattttcaagtataacaa

SEQ ID NO: 21419 - DNA, 40 bp, Homo sapiens
ttgttatacttgaaaatctaacataaaccttatgtcaggg

SEQ ID NO: 21420 - DNA, 40 bp, Homo sapiens
cctgacataaggtttatgttagattttcaagtataacaaa

SEQ ID NO: 21421 - DNA, 40 bp, Homo sapiens
tttgttatacttgaaaatctaacataaaccttatgtcagg

SEQ ID NO: 21422 - DNA, 40 bp, Homo sapiens
ctgacataaggtttatgttagattttcaagtataacaaag

SEQ ID NO: 21423 - DNA, 40 bp, Homo sapiens
ctttgttatacttgaaaatctaacataaaccttatgtcag

SEQ ID NO: 21424 - DNA, 40 bp, Homo sapiens
tgacataaggtttatgttagattttcaagtataacaaaga

SEQ ID NO: 21425 - DNA, 40 bp, Homo sapiens
tctttgttatacttgaaaatctaacataaaccttatgtca

SEQ ID NO: 21426 - DNA, 40 bp, Homo sapiens
gacataaggtttatgttagattttcaagtataacaaagat

SEQ ID NO: 21427 - DNA, 40 bp, Homo sapiens
atctttgttatacttgaaaatctaacataaaccttatgtc

SEQ ID NO: 21428 - DNA, 40 bp, Homo sapiens
acataaggtttatgttagattttcaagtataacaaagatt

SEQ ID NO: 21429 - DNA, 40 bp, Homo sapiens
aatctttgttatacttgaaaatctaacataaaccttatgt

SEQ ID NO: 21430 - DNA, 40 bp, Homo sapiens
cataaggtttatgttagattttcaagtataacaaagattt

SEQ ID NO: 21431 - DNA, 40 bp, Homo sapiens
aaatctttgttatacttgaaaatctaacataaaccttatg

SEQ ID NO: 21432 - DNA, 40 bp, Homo sapiens
ataaggtttatgttagattttcaagtataacaaagattta

SEQ ID NO: 21433 - DNA, 40 bp, Homo sapiens
taaatctttgttatacttgaaaatctaacataaaccttat

SEQ ID NO: 21434 - DNA, 40 bp, Homo sapiens
taaggtttatgttagattttcaagtataacaaagatttaa

SEQ ID NO: 21435 - DNA, 40 bp, Homo sapiens
ttaaatctttgttatacttgaaaatctaacataaacctta

SEQ ID NO: 21436 - DNA, 40 bp, Homo sapiens
aaggtttatgttagattttcaagtataacaaagatttaaa

SEQ ID NO: 21437 - DNA, 40 bp, Homo sapiens
tttaaatctttgttatacttgaaaatctaacataaacctt

SEQ ID NO: 21438 - DNA, 40 bp, Homo sapiens
aggtttatgttagattttcaagtataacaaagatttaaac

SEQ ID NO: 21439 - DNA, 40 bp, Homo sapiens
gtttaaatctttgttatacttgaaaatctaacataaacct

SEQ ID NO: 21440 - DNA, 40 bp, Homo sapiens
ggtttatgttagattttcaagtataacaaagatttaaact

SEQ ID NO: 21441 - DNA, 40 bp, Homo sapiens
agtttaaatctttgttatacttgaaaatctaacataaacc

SEQ ID NO: 21442 - DNA, 40 bp, Homo sapiens
gtttatgttagattttcaagtataacaaagatttaaactt

SEQ ID NO: 21443 - DNA, 40 bp, Homo sapiens
aagtttaaatctttgttatacttgaaaatctaacataaac

SEQ ID NO: 21444 - DNA, 40 bp, Homo sapiens
tttatgttagattttcaagtataacaaagatttaaacttt

SEQ ID NO: 21445 - DNA, 40 bp, Homo sapiens
aaagtttaaatctttgttatacttgaaaatctaacataaa

SEQ ID NO: 21446 - DNA, 40 bp, Homo sapiens
ttatgttagattttcaagtataacaaagatttaaacttta

SEQ ID NO: 21447 - DNA, 40 bp, Homo sapiens
taaagtttaaatctttgttatacttgaaaatctaacataa

SEQ ID NO: 21448 - DNA, 40 bp, Homo sapiens
tatgttagattttcaagtataacaaagatttaaactttaa

SEQ ID NO: 21449 - DNA, 40 bp, Homo sapiens
ttaaagtttaaatctttgttatacttgaaaatctaacata

SEQ ID NO: 21450 - DNA, 40 bp, Homo sapiens
atgttagattttcaagtataacaaagatttaaactttaac

SEQ ID NO: 21451 - DNA, 40 bp, Homo sapiens
gttaaagtttaaatctttgttatacttgaaaatctaacat

SEQ ID NO: 21452 - DNA, 40 bp, Homo sapiens
tgttagattttcaagtataacaaagatttaaactttaact

SEQ ID NO: 21453 - DNA, 40 bp, Homo sapiens
agttaaagtttaaatctttgttatacttgaaaatctaaca

SEQ ID NO: 21454 - DNA, 40 bp, Homo sapiens
gttagattttcaagtataacaaagatttaaactttaactt

SEQ ID NO: 21455 - DNA, 40 bp, Homo sapiens
aagttaaagtttaaatctttgttatacttgaaaatctaac

SEQ ID NO: 21456 - DNA, 40 bp, Homo sapiens
ttagattttcaagtataacaaagatttaaactttaacttt

SEQ ID NO: 21457 - DNA, 40 bp, Homo sapiens
aaagttaaagtttaaatctttgttatacttgaaaatctaa

SEQ ID NO: 21458 - DNA, 40 bp, Homo sapiens
tagattttcaagtataacaaagatttaaactttaactttt

SEQ ID NO: 21459 - DNA, 40 bp, Homo sapiens
aaaagttaaagtttaaatctttgttatacttgaaaatcta

SEQ ID NO: 21460 - DNA, 40 bp, Homo sapiens
agattttcaagtataacaaagatttaaactttaacttttg

SEQ ID NO: 21461 - DNA, 40 bp, Homo sapiens
caaaagttaaagtttaaatctttgttatacttgaaaatct

SEQ ID NO: 21462 - DNA, 40 bp, Homo sapiens
gattttcaagtataacaaagatttaaactttaacttttgt

SEQ ID NO: 21463 - DNA, 40 bp, Homo sapiens
acaaaagttaaagtttaaatctttgttatacttgaaaatc

SEQ ID NO: 21464 - DNA, 40 bp, Homo sapiens
attttcaagtataacaaagatttaaactttaacttttgta

SEQ ID NO: 21465 - DNA, 40 bp, Homo sapiens
tacaaaagttaaagtttaaatctttgttatacttgaaaat

SEQ ID NO: 21466 - DNA, 40 bp, Homo sapiens
ttttcaagtataacaaagatttaaactttaacttttgtac

SEQ ID NO: 21467 - DNA, 40 bp, Homo sapiens
gtacaaaagttaaagtttaaatctttgttatacttgaaaa

SEQ ID NO: 21468 - DNA, 40 bp, Homo sapiens
tttcaagtataacaaagatttaaactttaacttttgtacg

SEQ ID NO: 21469 - DNA, 40 bp, Homo sapiens
cgtacaaaagttaaagtttaaatctttgttatacttgaaa

SEQ ID NO: 21470 - DNA, 40 bp, Homo sapiens
ttcaagtataacaaagatttaaactttaacttttgtacgt

SEQ ID NO: 21471 - DNA, 40 bp, Homo sapiens
acgtacaaaagttaaagtttaaatctttgttatacttgaa

SEQ ID NO: 21472 - DNA, 40 bp, Homo sapiens
tcaagtataacaaagatttaaactttaacttttgtacgtt

SEQ ID NO: 21473 - DNA, 40 bp, Homo sapiens
aacgtacaaaagttaaagtttaaatctttgttatacttga

SEQ ID NO: 21474 - DNA, 40 bp, Homo sapiens
caagtataacaaagatttaaactttaacttttgtacgtta

SEQ ID NO: 21475 - DNA, 40 bp, Homo sapiens
taacgtacaaaagttaaagtttaaatctttgttatacttg

SEQ ID NO: 21476 - DNA, 40 bp, Homo sapiens
aagtataacaaagatttaaactttaacttttgtacgttaa

SEQ ID NO: 21477 - DNA, 40 bp, Homo sapiens
ttaacgtacaaaagttaaagtttaaatctttgttatactt

SEQ ID NO: 21478 - DNA, 40 bp, Homo sapiens
agtataacaaagatttaaactttaacttttgtacgttaat

SEQ ID NO: 21479 - DNA, 40 bp, Homo sapiens
attaacgtacaaaagttaaagtttaaatctttgttatact

SEQ ID NO: 21480 - DNA, 40 bp, Homo sapiens
gtataacaaagatttaaactttaacttttgtacgttaatg

SEQ ID NO: 21481 - DNA, 40 bp, Homo sapiens
cattaacgtacaaaagttaaagtttaaatctttgttatac

SEQ ID NO: 21482 - DNA, 40 bp, Homo sapiens
tataacaaagatttaaactttaacttttgtacgttaatga

SEQ ID NO: 21483 - DNA, 40 bp, Homo sapiens
tcattaacgtacaaaagttaaagtttaaatctttgttata

SEQ ID NO: 21484 - DNA, 40 bp, Homo sapiens
ataacaaagatttaaactttaacttttgtacgttaatgat

SEQ ID NO: 21485 - DNA, 40 bp, Homo sapiens
atcattaacgtacaaaagttaaagtttaaatctttgttat

SEQ ID NO: 21486 - DNA, 40 bp, Homo sapiens
taacaaagatttaaactttaacttttgtacgttaatgata

SEQ ID NO: 21487 - DNA, 40 bp, Homo sapiens
tatcattaacgtacaaaagttaaagtttaaatctttgtta

SEQ ID NO: 21488 - DNA, 40 bp, Homo sapiens
aacaaagatttaaactttaacttttgtacgttaatgatat

SEQ ID NO: 21489 - DNA, 40 bp, Homo sapiens
atatcattaacgtacaaaagttaaagtttaaatctttgtt

SEQ ID NO: 21490 - DNA, 40 bp, Homo sapiens
acaaagatttaaactttaacttttgtacgttaatgatatg

SEQ ID NO: 21491 - DNA, 40 bp, Homo sapiens
catatcattaacgtacaaaagttaaagtttaaatctttgt

SEQ ID NO: 21492 - DNA, 40 bp, Homo sapiens
caaagatttaaactttaacttttgtacgttaatgatatgt

SEQ ID NO: 21493 - DNA, 40 bp, Homo sapiens
acatatcattaacgtacaaaagttaaagtttaaatctttg

SEQ ID NO: 21494 - DNA, 40 bp, Homo sapiens
aaagatttaaactttaacttttgtacgttaatgatatgtt

SEQ ID NO: 21495 - DNA, 40 bp, Homo sapiens
aacatatcattaacgtacaaaagttaaagtttaaatcttt

SEQ ID NO: 21496 - DNA, 40 bp, Homo sapiens
aagatttaaactttaacttttgtacgttaatgatatgtta

SEQ ID NO: 21497 - DNA, 40 bp, Homo sapiens
taacatatcattaacgtacaaaagttaaagtttaaatctt

SEQ ID NO: 21498 - DNA, 40 bp, Homo sapiens
agatttaaactttaacttttgtacgttaatgatatgttag

SEQ ID NO: 21499 - DNA, 40 bp, Homo sapiens
ctaacatatcattaacgtacaaaagttaaagtttaaatct

SEQ ID NO: 21500 - DNA, 40 bp, Homo sapiens
gatttaaactttaacttttgtacgttaatgatatgttagc

SEQ ID NO: 21501 - DNA, 40 bp, Homo sapiens
gctaacatatcattaacgtacaaaagttaaagtttaaatc

SEQ ID NO: 21502 - DNA, 40 bp, Homo sapiens
atttaaactttaacttttgtacgttaatgatatgttagct

SEQ ID NO: 21503 - DNA, 40 bp, Homo sapiens
agctaacatatcattaacgtacaaaagttaaagtttaaat

SEQ ID NO: 21504 - DNA, 40 bp, Homo sapiens
tttaaactttaacttttgtacgttaatgatatgttagctt

SEQ ID NO: 21505 - DNA, 40 bp, Homo sapiens
aagctaacatatcattaacgtacaaaagttaaagtttaaa

SEQ ID NO: 21506 - DNA, 40 bp, Homo sapiens
ttaaactttaacttttgtacgttaatgatatgttagctta

SEQ ID NO: 21507 - DNA, 40 bp, Homo sapiens
taagctaacatatcattaacgtacaaaagttaaagtttaa

SEQ ID NO: 21508 - DNA, 40 bp, Homo sapiens
taaactttaacttttgtacgttaatgatatgttagcttac

SEQ ID NO: 21509 - DNA, 40 bp, Homo sapiens
gtaagctaacatatcattaacgtacaaaagttaaagttta

SEQ ID NO: 21510 - DNA, 40 bp, Homo sapiens
aaactttaacttttgtacgttaatgatatgttagcttact

SEQ ID NO: 21511 - DNA, 40 bp, Homo sapiens
agtaagctaacatatcattaacgtacaaaagttaaagttt

SEQ ID NO: 21512 - DNA, 40 bp, Homo sapiens
aactttaacttttgtacgttaatgatatgttagcttactc

SEQ ID NO: 21513 - DNA, 40 bp, Homo sapiens
gagtaagctaacatatcattaacgtacaaaagttaaagtt

SEQ ID NO: 21514 - DNA, 40 bp, Homo sapiens
actttaacttttgtacgttaatgatatgttagcttactcc

SEQ ID NO: 21515 - DNA, 40 bp, Homo sapiens
ggagtaagctaacatatcattaacgtacaaaagttaaagt

SEQ ID NO: 21516 - DNA, 40 bp, Homo sapiens
ctttaacttttgtacgttaatgatatgttagcttactcca

SEQ ID NO: 21517 - DNA, 40 bp, Homo sapiens
tggagtaagctaacatatcattaacgtacaaaagttaaag

SEQ ID NO: 21518 - DNA, 40 bp, Homo sapiens
tttaacttttgtacgttaatgatatgttagcttactccag

SEQ ID NO: 21519 - DNA, 40 bp, Homo sapiens
ctggagtaagctaacatatcattaacgtacaaaagttaaa

SEQ ID NO: 21520 - DNA, 40 bp, Homo sapiens
ttaacttttgtacgttaatgatatgttagcttactccagt

SEQ ID NO: 21521 - DNA, 40 bp, Homo sapiens
actggagtaagctaacatatcattaacgtacaaaagttaa

SEQ ID NO: 21522 - DNA, 40 bp, Homo sapiens
taacttttgtacgttaatgatatgttagcttactccagtc

SEQ ID NO: 21523 - DNA, 40 bp, Homo sapiens
gactggagtaagctaacatatcattaacgtacaaaagtta

SEQ ID NO: 21524 - DNA, 40 bp, Homo sapiens
aacttttgtacgttaatgatatgttagcttactccagtct

SEQ ID NO: 21525 - DNA, 40 bp, Homo sapiens
agactggagtaagctaacatatcattaacgtacaaaagtt

SEQ ID NO: 21526 - DNA, 40 bp, Homo sapiens
acttttgtacgttaatgatatgttagcttactccagtctt

SEQ ID NO: 21527 - DNA, 40 bp, Homo sapiens
aagactggagtaagctaacatatcattaacgtacaaaagt

SEQ ID NO: 21528 - DNA, 40 bp, Homo sapiens
cttttgtacgttaatgatatgttagcttactccagtcttc

SEQ ID NO: 21529 - DNA, 40 bp, Homo sapiens
gaagactggagtaagctaacatatcattaacgtacaaaag

SEQ ID NO: 21530 - DNA, 40 bp, Homo sapiens
ttttgtacgttaatgatatgttagcttactccagtcttct

SEQ ID NO: 21531 - DNA, 40 bp, Homo sapiens
agaagactggagtaagctaacatatcattaacgtacaaaa

SEQ ID NO: 21532 - DNA, 40 bp, Homo sapiens
tttgtacgttaatgatatgttagcttactccagtcttcta

SEQ ID NO: 21533 - DNA, 40 bp, Homo sapiens
tagaagactggagtaagctaacatatcattaacgtacaaa

SEQ ID NO: 21534 - DNA, 40 bp, Homo sapiens
ttgtacgttaatgatatgttagcttactccagtcttctat

SEQ ID NO: 21535 - DNA, 40 bp, Homo sapiens
atagaagactggagtaagctaacatatcattaacgtacaa

SEQ ID NO: 21536 - DNA, 40 bp, Homo sapiens
tgtacgttaatgatatgttagcttactccagtcttctatt

SEQ ID NO: 21537 - DNA, 40 bp, Homo sapiens
aatagaagactggagtaagctaacatatcattaacgtaca

SEQ ID NO: 21538 - DNA, 40 bp, Homo sapiens
gtacgttaatgatatgttagcttactccagtcttctatta

SEQ ID NO: 21539 - DNA, 40 bp, Homo sapiens
taatagaagactggagtaagctaacatatcattaacgtac

SEQ ID NO: 21540 - DNA, 40 bp, Homo sapiens
tacgttaatgatatgttagcttactccagtcttctattaa

SEQ ID NO: 21541 - DNA, 40 bp, Homo sapiens
ttaatagaagactggagtaagctaacatatcattaacgta

SEQ ID NO: 21542 - DNA, 40 bp, Homo sapiens
acgttaatgatatgttagcttactccagtcttctattaaa

SEQ ID NO: 21543 - DNA, 40 bp, Homo sapiens
tttaatagaagactggagtaagctaacatatcattaacgt

SEQ ID NO: 21544 - DNA, 40 bp, Homo sapiens
cgttaatgatatgttagcttactccagtcttctattaaaa

SEQ ID NO: 21545 - DNA, 40 bp, Homo sapiens
ttttaatagaagactggagtaagctaacatatcattaacg

SEQ ID NO: 21546 - DNA, 40 bp, Homo sapiens
gttaatgatatgttagcttactccagtcttctattaaaac

SEQ ID NO: 21547 - DNA, 40 bp, Homo sapiens
gttttaatagaagactggagtaagctaacatatcattaac

SEQ ID NO: 21548 - DNA, 40 bp, Homo sapiens
ttaatgatatgttagcttactccagtcttctattaaaaca

SEQ ID NO: 21549 - DNA, 40 bp, Homo sapiens
tgttttaatagaagactggagtaagctaacatatcattaa

SEQ ID NO: 21550 - DNA, 40 bp, Homo sapiens
taatgatatgttagcttactccagtcttctattaaaacat

SEQ ID NO: 21551 - DNA, 40 bp, Homo sapiens
atgttttaatagaagactggagtaagctaacatatcatta

SEQ ID NO: 21552 - DNA, 40 bp, Homo sapiens
aatgatatgttagcttactccagtcttctattaaaacatt

SEQ ID NO: 21553 - DNA, 40 bp, Homo sapiens
aatgttttaatagaagactggagtaagctaacatatcatt

SEQ ID NO: 21554 - DNA, 40 bp, Homo sapiens
atgatatgttagcttactccagtcttctattaaaacattc

SEQ ID NO: 21555 - DNA, 40 bp, Homo sapiens
gaatgttttaatagaagactggagtaagctaacatatcat

SEQ ID NO: 21556 - DNA, 40 bp, Homo sapiens
tgatatgttagcttactccagtcttctattaaaacattct

SEQ ID NO: 21557 - DNA, 40 bp, Homo sapiens
agaatgttttaatagaagactggagtaagctaacatatca

SEQ ID NO: 21558 - DNA, 40 bp, Homo sapiens
gatatgttagcttactccagtcttctattaaaacattctg

SEQ ID NO: 21559 - DNA, 40 bp, Homo sapiens
cagaatgttttaatagaagactggagtaagctaacatatc

SEQ ID NO: 21560 - DNA, 40 bp, Homo sapiens
atatgttagcttactccagtcttctattaaaacattctgt

SEQ ID NO: 21561 - DNA, 40 bp, Homo sapiens
acagaatgttttaatagaagactggagtaagctaacatat

SEQ ID NO: 21562 - DNA, 40 bp, Homo sapiens
tatgttagcttactccagtcttctattaaaacattctgtt

SEQ ID NO: 21563 - DNA, 40 bp, Homo sapiens
aacagaatgttttaatagaagactggagtaagctaacata

SEQ ID NO: 21564 - DNA, 40 bp, Homo sapiens
atgttagcttactccagtcttctattaaaacattctgttt

SEQ ID NO: 21565 - DNA, 40 bp, Homo sapiens
aaacagaatgttttaatagaagactggagtaagctaacat

SEQ ID NO: 21566 - DNA, 40 bp, Homo sapiens
tgttagcttactccagtcttctattaaaacattctgtttt

SEQ ID NO: 21567 - DNA, 40 bp, Homo sapiens
aaaacagaatgttttaatagaagactggagtaagctaaca

SEQ ID NO: 21568 - DNA, 40 bp, Homo sapiens
gttagcttactccagtcttctattaaaacattctgttttt

SEQ ID NO: 21569 - DNA, 40 bp, Homo sapiens
aaaaacagaatgttttaatagaagactggagtaagctaac

SEQ ID NO: 21570 - DNA, 40 bp, Homo sapiens
ttagcttactccagtcttctattaaaacattctgttttta

SEQ ID NO: 21571 - DNA, 40 bp, Homo sapiens
taaaaacagaatgttttaatagaagactggagtaagctaa

SEQ ID NO: 21572 - DNA, 40 bp, Homo sapiens
tagcttactccagtcttctattaaaacattctgtttttaa

SEQ ID NO: 21573 - DNA, 40 bp, Homo sapiens
ttaaaaacagaatgttttaatagaagactggagtaagcta

SEQ ID NO: 21574 - DNA, 40 bp, Homo sapiens
agcttactccagtcttctattaaaacattctgtttttaaa

SEQ ID NO: 21575 - DNA, 40 bp, Homo sapiens
tttaaaaacagaatgttttaatagaagactggagtaagct

SEQ ID NO: 21576 - DNA, 40 bp, Homo sapiens
gcttactccagtcttctattaaaacattctgtttttaaaa

SEQ ID NO: 21577 - DNA, 40 bp, Homo sapiens
ttttaaaaacagaatgttttaatagaagactggagtaagc

SEQ ID NO: 21578 - DNA, 40 bp, Homo sapiens
cttactccagtcttctattaaaacattctgtttttaaaat

SEQ ID NO: 21579 - DNA, 40 bp, Homo sapiens
attttaaaaacagaatgttttaatagaagactggagtaag

SEQ ID NO: 21580 - DNA, 40 bp, Homo sapiens
ttactccagtcttctattaaaacattctgtttttaaaatc

SEQ ID NO: 21581 - DNA, 40 bp, Homo sapiens
gattttaaaaacagaatgttttaatagaagactggagtaa

SEQ ID NO: 21582 - DNA, 40 bp, Homo sapiens
tactccagtcttctattaaaacattctgtttttaaaatca

SEQ ID NO: 21583 - DNA, 40 bp, Homo sapiens
tgattttaaaaacagaatgttttaatagaagactggagta

SEQ ID NO: 21584 - DNA, 40 bp, Homo sapiens
actccagtcttctattaaaacattctgtttttaaaatcag

SEQ ID NO: 21585 - DNA, 40 bp, Homo sapiens
ctgattttaaaaacagaatgttttaatagaagactggagt

SEQ ID NO: 21586 - DNA, 40 bp, Homo sapiens
ctccagtcttctattaaaacattctgtttttaaaatcaga

SEQ ID NO: 21587 - DNA, 40 bp, Homo sapiens
tctgattttaaaaacagaatgttttaatagaagactggag

SEQ ID NO: 21588 - DNA, 40 bp, Homo sapiens
tccagtcttctattaaaacattctgtttttaaaatcagag

SEQ ID NO: 21589 - DNA, 40 bp, Homo sapiens
ctctgattttaaaaacagaatgttttaatagaagactgga

SEQ ID NO: 21590 - DNA, 40 bp, Homo sapiens
ccagtcttctattaaaacattctgtttttaaaatcagaga

SEQ ID NO: 21591 - DNA, 40 bp, Homo sapiens
tctctgattttaaaaacagaatgttttaatagaagactgg

SEQ ID NO: 21592 - DNA, 40 bp, Homo sapiens
cagtcttctattaaaacattctgtttttaaaatcagagac

SEQ ID NO: 21593 - DNA, 40 bp, Homo sapiens
gtctctgattttaaaaacagaatgttttaatagaagactg

SEQ ID NO: 21594 - DNA, 40 bp, Homo sapiens
agtcttctattaaaacattctgtttttaaaatcagagaca

SEQ ID NO: 21595 - DNA, 40 bp, Homo sapiens
tgtctctgattttaaaaacagaatgttttaatagaagact

SEQ ID NO: 21596 - DNA, 40 bp, Homo sapiens
gtcttctattaaaacattctgtttttaaaatcagagacac

SEQ ID NO: 21597 - DNA, 40 bp, Homo sapiens
gtgtctctgattttaaaaacagaatgttttaatagaagac

SEQ ID NO: 21598 - DNA, 40 bp, Homo sapiens
tcttctattaaaacattctgtttttaaaatcagagacaca

SEQ ID NO: 21599 - DNA, 40 bp, Homo sapiens
tgtgtctctgattttaaaaacagaatgttttaatagaaga

SEQ ID NO: 21600 - DNA, 40 bp, Homo sapiens
cttctattaaaacattctgtttttaaaatcagagacacac

SEQ ID NO: 21601 - DNA, 40 bp, Homo sapiens
gtgtgtctctgattttaaaaacagaatgttttaatagaag

SEQ ID NO: 21602 - DNA, 40 bp, Homo sapiens
ttctattaaaacattctgtttttaaaatcagagacacaca

SEQ ID NO: 21603 - DNA, 40 bp, Homo sapiens
tgtgtgtctctgattttaaaaacagaatgttttaatagaa

SEQ ID NO: 21604 - DNA, 40 bp, Homo sapiens
tctattaaaacattctgtttttaaaatcagagacacacag

SEQ ID NO: 21605 - DNA, 40 bp, Homo sapiens
ctgtgtgtctctgattttaaaaacagaatgttttaataga

SEQ ID NO: 21606 - DNA, 40 bp, Homo sapiens
ctattaaaacattctgtttttaaaatcagagacacacagc

SEQ ID NO: 21607 - DNA, 40 bp, Homo sapiens
gctgtgtgtctctgattttaaaaacagaatgttttaatag

SEQ ID NO: 21608 - DNA, 40 bp, Homo sapiens
tattaaaacattctgtttttaaaatcagagacacacagca

SEQ ID NO: 21609 - DNA, 40 bp, Homo sapiens
tgctgtgtgtctctgattttaaaaacagaatgttttaata

SEQ ID NO: 21610 - DNA, 40 bp, Homo sapiens
attaaaacattctgtttttaaaatcagagacacacagcaa

SEQ ID NO: 21611 - DNA, 40 bp, Homo sapiens
ttgctgtgtgtctctgattttaaaaacagaatgttttaat

SEQ ID NO: 21612 - DNA, 40 bp, Homo sapiens
ttaaaacattctgtttttaaaatcagagacacacagcaat

SEQ ID NO: 21613 - DNA, 40 bp, Homo sapiens
attgctgtgtgtctctgattttaaaaacagaatgttttaa

SEQ ID NO: 21614 - DNA, 40 bp, Homo sapiens
taaaacattctgtttttaaaatcagagacacacagcaatt

SEQ ID NO: 21615 - DNA, 40 bp, Homo sapiens
aattgctgtgtgtctctgattttaaaaacagaatgtttta

SEQ ID NO: 21616 - DNA, 40 bp, Homo sapiens
aaaacattctgtttttaaaatcagagacacacagcaattt

SEQ ID NO: 21617 - DNA, 40 bp, Homo sapiens
aaattgctgtgtgtctctgattttaaaaacagaatgtttt

SEQ ID NO: 21618 - DNA, 40 bp, Homo sapiens
aaacattctgtttttaaaatcagagacacacagcaatttt

SEQ ID NO: 21619 - DNA, 40 bp, Homo sapiens
aaaattgctgtgtgtctctgattttaaaaacagaatgttt

SEQ ID NO: 21620 - DNA, 40 bp, Homo sapiens
aacattctgtttttaaaatcagagacacacagcaatttta

SEQ ID NO: 21621 - DNA, 40 bp, Homo sapiens
taaaattgctgtgtgtctctgattttaaaaacagaatgtt

SEQ ID NO: 21622 - DNA, 40 bp, Homo sapiens
acattctgtttttaaaatcagagacacacagcaattttat

SEQ ID NO: 21623 - DNA, 40 bp, Homo sapiens
ataaaattgctgtgtgtctctgattttaaaaacagaatgt

SEQ ID NO: 21624 - DNA, 40 bp, Homo sapiens
cattctgtttttaaaatcagagacacacagcaattttata

SEQ ID NO: 21625 - DNA, 40 bp, Homo sapiens
tataaaattgctgtgtgtctctgattttaaaaacagaatg

SEQ ID NO: 21626 - DNA, 40 bp, Homo sapiens
attctgtttttaaaatcagagacacacagcaattttataa

SEQ ID NO: 21627 - DNA, 40 bp, Homo sapiens
ttataaaattgctgtgtgtctctgattttaaaaacagaat

SEQ ID NO: 21628 - DNA, 40 bp, Homo sapiens
ttctgtttttaaaatcagagacacacagcaattttataaa

SEQ ID NO: 21629 - DNA, 40 bp, Homo sapiens
tttataaaattgctgtgtgtctctgattttaaaaacagaa

SEQ ID NO: 21630 - DNA, 40 bp, Homo sapiens
tctgtttttaaaatcagagacacacagcaattttataaat

SEQ ID NO: 21631 - DNA, 40 bp, Homo sapiens
atttataaaattgctgtgtgtctctgattttaaaaacaga

SEQ ID NO: 21632 - DNA, 40 bp, Homo sapiens
ctgtttttaaaatcagagacacacagcaattttataaatc

SEQ ID NO: 21633 - DNA, 40 bp, Homo sapiens
gatttataaaattgctgtgtgtctctgattttaaaaacag

SEQ ID NO: 21634 - DNA, 40 bp, Homo sapiens
tgtttttaaaatcagagacacacagcaattttataaatca

SEQ ID NO: 21635 - DNA, 40 bp, Homo sapiens
tgatttataaaattgctgtgtgtctctgattttaaaaaca

SEQ ID NO: 21636 - DNA, 40 bp, Homo sapiens
gtttttaaaatcagagacacacagcaattttataaatcat

SEQ ID NO: 21637 - DNA, 40 bp, Homo sapiens
atgatttataaaattgctgtgtgtctctgattttaaaaac

SEQ ID NO: 21638 - DNA, 40 bp, Homo sapiens
tttttaaaatcagagacacacagcaattttataaatcatt

SEQ ID NO: 21639 - DNA, 40 bp, Homo sapiens
aatgatttataaaattgctgtgtgtctctgattttaaaaa

SEQ ID NO: 21640 - DNA, 40 bp, Homo sapiens
ttttaaaatcagagacacacagcaattttataaatcattt

SEQ ID NO: 21641 - DNA, 40 bp, Homo sapiens
aaatgatttataaaattgctgtgtgtctctgattttaaaa

SEQ ID NO: 21642 - DNA, 40 bp, Homo sapiens
tttaaaatcagagacacacagcaattttataaatcatttc

SEQ ID NO: 21643 - DNA, 40 bp, Homo sapiens
gaaatgatttataaaattgctgtgtgtctctgattttaaa

SEQ ID NO: 21644 - DNA, 40 bp, Homo sapiens
ttaaaatcagagacacacagcaattttataaatcatttct

SEQ ID NO: 21645 - DNA, 40 bp, Homo sapiens
agaaatgatttataaaattgctgtgtgtctctgattttaa

SEQ ID NO: 21646 - DNA, 40 bp, Homo sapiens
taaaatcagagacacacagcaattttataaatcatttctc

SEQ ID NO: 21647 - DNA, 40 bp, Homo sapiens
gagaaatgatttataaaattgctgtgtgtctctgatttta

SEQ ID NO: 21648 - DNA, 40 bp, Homo sapiens
aaaatcagagacacacagcaattttataaatcatttctct

SEQ ID NO: 21649 - DNA, 40 bp, Homo sapiens
agagaaatgatttataaaattgctgtgtgtctctgatttt

SEQ ID NO: 21650 - DNA, 40 bp, Homo sapiens
aaatcagagacacacagcaattttataaatcatttctctt

SEQ ID NO: 21651 - DNA, 40 bp, Homo sapiens
aagagaaatgatttataaaattgctgtgtgtctctgattt

SEQ ID NO: 21652 - DNA, 40 bp, Homo sapiens
aatcagagacacacagcaattttataaatcatttctcttc

SEQ ID NO: 21653 - DNA, 40 bp, Homo sapiens
gaagagaaatgatttataaaattgctgtgtgtctctgatt

SEQ ID NO: 21654 - DNA, 40 bp, Homo sapiens
atcagagacacacagcaattttataaatcatttctcttca

SEQ ID NO: 21655 - DNA, 40 bp, Homo sapiens
tgaagagaaatgatttataaaattgctgtgtgtctctgat

SEQ ID NO: 21656 - DNA, 40 bp, Homo sapiens
tcagagacacacagcaattttataaatcatttctcttcaa

SEQ ID NO: 21657 - DNA, 40 bp, Homo sapiens
ttgaagagaaatgatttataaaattgctgtgtgtctctga

SEQ ID NO: 21658 - DNA, 40 bp, Homo sapiens
cagagacacacagcaattttataaatcatttctcttcaag

SEQ ID NO: 21659 - DNA, 40 bp, Homo sapiens
cttgaagagaaatgatttataaaattgctgtgtgtctctg

SEQ ID NO: 21660 - DNA, 40 bp, Homo sapiens
agagacacacagcaattttataaatcatttctcttcaagg

SEQ ID NO: 21661 - DNA, 40 bp, Homo sapiens
ccttgaagagaaatgatttataaaattgctgtgtgtctct

SEQ ID NO: 21662 - DNA, 40 bp, Homo sapiens
gagacacacagcaattttataaatcatttctcttcaaggc

SEQ ID NO: 21663 - DNA, 40 bp, Homo sapiens
gccttgaagagaaatgatttataaaattgctgtgtgtctc

SEQ ID NO: 21664 - DNA, 40 bp, Homo sapiens
agacacacagcaattttataaatcatttctcttcaaggct

SEQ ID NO: 21665 - DNA, 40 bp, Homo sapiens
agccttgaagagaaatgatttataaaattgctgtgtgtct

SEQ ID NO: 21666 - DNA, 40 bp, Homo sapiens
gacacacagcaattttataaatcatttctcttcaaggctg

SEQ ID NO: 21667 - DNA, 40 bp, Homo sapiens
cagccttgaagagaaatgatttataaaattgctgtgtgtc

SEQ ID NO: 21668 - DNA, 40 bp, Homo sapiens
acacacagcaattttataaatcatttctcttcaaggctgt

SEQ ID NO: 21669 - DNA, 40 bp, Homo sapiens
acagccttgaagagaaatgatttataaaattgctgtgtgt

SEQ ID NO: 21670 - DNA, 40 bp, Homo sapiens
cacacagcaattttataaatcatttctcttcaaggctgtg

SEQ ID NO: 21671 - DNA, 40 bp, Homo sapiens
cacagccttgaagagaaatgatttataaaattgctgtgtg

SEQ ID NO: 21672 - DNA, 40 bp, Homo sapiens
acacagcaattttataaatcatttctcttcaaggctgtga

SEQ ID NO: 21673 - DNA, 40 bp, Homo sapiens
tcacagccttgaagagaaatgatttataaaattgctgtgt

SEQ ID NO: 21674 - DNA, 40 bp, Homo sapiens
cacagcaattttataaatcatttctcttcaaggctgtgaa

SEQ ID NO: 21675 - DNA, 40 bp, Homo sapiens
ttcacagccttgaagagaaatgatttataaaattgctgtg

SEQ ID NO: 21676 - DNA, 40 bp, Homo sapiens
acagcaattttataaatcatttctcttcaaggctgtgaag

SEQ ID NO: 21677 - DNA, 40 bp, Homo sapiens
cttcacagccttgaagagaaatgatttataaaattgctgt

SEQ ID NO: 21678 - DNA, 40 bp, Homo sapiens
cagcaattttataaatcatttctcttcaaggctgtgaagc

SEQ ID NO: 21679 - DNA, 40 bp, Homo sapiens
gcttcacagccttgaagagaaatgatttataaaattgctg

SEQ ID NO: 21680 - DNA, 40 bp, Homo sapiens
agcaattttataaatcatttctcttcaaggctgtgaagct

SEQ ID NO: 21681 - DNA, 40 bp, Homo sapiens
agcttcacagccttgaagagaaatgatttataaaattgct

SEQ ID NO: 21682 - DNA, 40 bp, Homo sapiens
gcaattttataaatcatttctcttcaaggctgtgaagctc

SEQ ID NO: 21683 - DNA, 40 bp, Homo sapiens
gagcttcacagccttgaagagaaatgatttataaaattgc

SEQ ID NO: 21684 - DNA, 40 bp, Homo sapiens
caattttataaatcatttctcttcaaggctgtgaagctct

SEQ ID NO: 21685 - DNA, 40 bp, Homo sapiens
agagcttcacagccttgaagagaaatgatttataaaattg

SEQ ID NO: 21686 - DNA, 40 bp, Homo sapiens
aattttataaatcatttctcttcaaggctgtgaagctctc

SEQ ID NO: 21687 - DNA, 40 bp, Homo sapiens
gagagcttcacagccttgaagagaaatgatttataaaatt

SEQ ID NO: 21688 - DNA, 40 bp, Homo sapiens
attttataaatcatttctcttcaaggctgtgaagctctcc

SEQ ID NO: 21689 - DNA, 40 bp, Homo sapiens
ggagagcttcacagccttgaagagaaatgatttataaaat

SEQ ID NO: 21690 - DNA, 40 bp, Homo sapiens
ttttataaatcatttctcttcaaggctgtgaagctctccc

SEQ ID NO: 21691 - DNA, 40 bp, Homo sapiens
gggagagcttcacagccttgaagagaaatgatttataaaa

SEQ ID NO: 21692 - DNA, 40 bp, Homo sapiens
tttataaatcatttctcttcaaggctgtgaagctctcccc

SEQ ID NO: 21693 - DNA, 40 bp, Homo sapiens
ggggagagcttcacagccttgaagagaaatgatttataaa

SEQ ID NO: 21694 - DNA, 40 bp, Homo sapiens
ttataaatcatttctcttcaaggctgtgaagctctcccca

SEQ ID NO: 21695 - DNA, 40 bp, Homo sapiens
tggggagagcttcacagccttgaagagaaatgatttataa

SEQ ID NO: 21696 - DNA, 40 bp, Homo sapiens
tataaatcatttctcttcaaggctgtgaagctctccccac

SEQ ID NO: 21697 - DNA, 40 bp, Homo sapiens
gtggggagagcttcacagccttgaagagaaatgatttata

SEQ ID NO: 21698 - DNA, 40 bp, Homo sapiens
ataaatcatttctcttcaaggctgtgaagctctccccact

SEQ ID NO: 21699 - DNA, 40 bp, Homo sapiens
agtggggagagcttcacagccttgaagagaaatgatttat

SEQ ID NO: 21700 - DNA, 40 bp, Homo sapiens
taaatcatttctcttcaaggctgtgaagctctccccactt

SEQ ID NO: 21701 - DNA, 40 bp, Homo sapiens
aagtggggagagcttcacagccttgaagagaaatgattta

SEQ ID NO: 21702 - DNA, 40 bp, Homo sapiens
aaatcatttctcttcaaggctgtgaagctctccccacttt

SEQ ID NO: 21703 - DNA, 40 bp, Homo sapiens
aaagtggggagagcttcacagccttgaagagaaatgattt

SEQ ID NO: 21704 - DNA, 40 bp, Homo sapiens
aatcatttctcttcaaggctgtgaagctctccccactttt

SEQ ID NO: 21705 - DNA, 40 bp, Homo sapiens
aaaagtggggagagcttcacagccttgaagagaaatgatt

SEQ ID NO: 21706 - DNA, 40 bp, Homo sapiens
atcatttctcttcaaggctgtgaagctctccccacttttg

SEQ ID NO: 21707 - DNA, 40 bp, Homo sapiens
caaaagtggggagagcttcacagccttgaagagaaatgat

SEQ ID NO: 21708 - DNA, 40 bp, Homo sapiens
tcatttctcttcaaggctgtgaagctctccccacttttgt

SEQ ID NO: 21709 - DNA, 40 bp, Homo sapiens
acaaaagtggggagagcttcacagccttgaagagaaatga

SEQ ID NO: 21710 - DNA, 40 bp, Homo sapiens
catttctcttcaaggctgtgaagctctccccacttttgtg

SEQ ID NO: 21711 - DNA, 40 bp, Homo sapiens
cacaaaagtggggagagcttcacagccttgaagagaaatg

SEQ ID NO: 21712 - DNA, 40 bp, Homo sapiens
atttctcttcaaggctgtgaagctctccccacttttgtga

SEQ ID NO: 21713 - DNA, 40 bp, Homo sapiens
tcacaaaagtggggagagcttcacagccttgaagagaaat

SEQ ID NO: 21714 - DNA, 40 bp, Homo sapiens
tttctcttcaaggctgtgaagctctccccacttttgtgag

SEQ ID NO: 21715 - DNA, 40 bp, Homo sapiens
ctcacaaaagtggggagagcttcacagccttgaagagaaa

SEQ ID NO: 21716 - DNA, 40 bp, Homo sapiens
ttctcttcaaggctgtgaagctctccccacttttgtgagt

SEQ ID NO: 21717 - DNA, 40 bp, Homo sapiens
actcacaaaagtggggagagcttcacagccttgaagagaa

SEQ ID NO: 21718 - DNA, 40 bp, Homo sapiens
tctcttcaaggctgtgaagctctccccacttttgtgagtg

SEQ ID NO: 21719 - DNA, 40 bp, Homo sapiens
cactcacaaaagtggggagagcttcacagccttgaagaga

SEQ ID NO: 21720 - DNA, 40 bp, Homo sapiens
ctcttcaaggctgtgaagctctccccacttttgtgagtgc

SEQ ID NO: 21721 - DNA, 40 bp, Homo sapiens
gcactcacaaaagtggggagagcttcacagccttgaagag

SEQ ID NO: 21722 - DNA, 40 bp, Homo sapiens
tcttcaaggctgtgaagctctccccacttttgtgagtgcc

SEQ ID NO: 21723 - DNA, 40 bp, Homo sapiens
ggcactcacaaaagtggggagagcttcacagccttgaaga

SEQ ID NO: 21724 - DNA, 40 bp, Homo sapiens
cttcaaggctgtgaagctctccccacttttgtgagtgccc

SEQ ID NO: 21725 - DNA, 40 bp, Homo sapiens
gggcactcacaaaagtggggagagcttcacagccttgaag

SEQ ID NO: 21726 - DNA, 40 bp, Homo sapiens
ttcaaggctgtgaagctctccccacttttgtgagtgccct

SEQ ID NO: 21727 - DNA, 40 bp, Homo sapiens
agggcactcacaaaagtggggagagcttcacagccttgaa

SEQ ID NO: 21728 - DNA, 40 bp, Homo sapiens
tcaaggctgtgaagctctccccacttttgtgagtgccctc

SEQ ID NO: 21729 - DNA, 40 bp, Homo sapiens
gagggcactcacaaaagtggggagagcttcacagccttga

SEQ ID NO: 21730 - DNA, 40 bp, Homo sapiens
caaggctgtgaagctctccccacttttgtgagtgccctct

SEQ ID NO: 21731 - DNA, 40 bp, Homo sapiens
agagggcactcacaaaagtggggagagcttcacagccttg

SEQ ID NO: 21732 - DNA, 40 bp, Homo sapiens
aaggctgtgaagctctccccacttttgtgagtgccctcta

SEQ ID NO: 21733 - DNA, 40 bp, Homo sapiens
tagagggcactcacaaaagtggggagagcttcacagcctt

SEQ ID NO: 21734 - DNA, 40 bp, Homo sapiens
aggctgtgaagctctccccacttttgtgagtgccctctac

SEQ ID NO: 21735 - DNA, 40 bp, Homo sapiens
gtagagggcactcacaaaagtggggagagcttcacagcct

SEQ ID NO: 21736 - DNA, 40 bp, Homo sapiens
ggctgtgaagctctccccacttttgtgagtgccctctact

SEQ ID NO: 21737 - DNA, 40 bp, Homo sapiens
agtagagggcactcacaaaagtggggagagcttcacagcc

SEQ ID NO: 21738 - DNA, 40 bp, Homo sapiens
gctgtgaagctctccccacttttgtgagtgccctctactg

SEQ ID NO: 21739 - DNA, 40 bp, Homo sapiens
cagtagagggcactcacaaaagtggggagagcttcacagc

SEQ ID NO: 21740 - DNA, 40 bp, Homo sapiens
ctgtgaagctctccccacttttgtgagtgccctctactgg

SEQ ID NO: 21741 - DNA, 40 bp, Homo sapiens
ccagtagagggcactcacaaaagtggggagagcttcacag

SEQ ID NO: 21742 - DNA, 40 bp, Homo sapiens
tgtgaagctctccccacttttgtgagtgccctctactggt

SEQ ID NO: 21743 - DNA, 40 bp, Homo sapiens
accagtagagggcactcacaaaagtggggagagcttcaca

SEQ ID NO: 21744 - DNA, 40 bp, Homo sapiens
gtgaagctctccccacttttgtgagtgccctctactggtc

SEQ ID NO: 21745 - DNA, 40 bp, Homo sapiens
gaccagtagagggcactcacaaaagtggggagagcttcac

SEQ ID NO: 21746 - DNA, 40 bp, Homo sapiens
tgaagctctccccacttttgtgagtgccctctactggtca

SEQ ID NO: 21747 - DNA, 40 bp, Homo sapiens
tgaccagtagagggcactcacaaaagtggggagagcttca

SEQ ID NO: 21748 - DNA, 40 bp, Homo sapiens
gaagctctccccacttttgtgagtgccctctactggtcaa

SEQ ID NO: 21749 - DNA, 40 bp, Homo sapiens
ttgaccagtagagggcactcacaaaagtggggagagcttc

SEQ ID NO: 21750 - DNA, 40 bp, Homo sapiens
aagctctccccacttttgtgagtgccctctactggtcaaa

SEQ ID NO: 21751 - DNA, 40 bp, Homo sapiens
tttgaccagtagagggcactcacaaaagtggggagagctt

SEQ ID NO: 21752 - DNA, 40 bp, Homo sapiens
agctctccccacttttgtgagtgccctctactggtcaaat

SEQ ID NO: 21753 - DNA, 40 bp, Homo sapiens
atttgaccagtagagggcactcacaaaagtggggagagct

SEQ ID NO: 21754 - DNA, 40 bp, Homo sapiens
gctctccccacttttgtgagtgccctctactggtcaaatt

SEQ ID NO: 21755 - DNA, 40 bp, Homo sapiens
aatttgaccagtagagggcactcacaaaagtggggagagc

SEQ ID NO: 21756 - DNA, 40 bp, Homo sapiens
ctctccccacttttgtgagtgccctctactggtcaaatta

SEQ ID NO: 21757 - DNA, 40 bp, Homo sapiens
taatttgaccagtagagggcactcacaaaagtggggagag

SEQ ID NO: 21758 - DNA, 40 bp, Homo sapiens
tctccccacttttgtgagtgccctctactggtcaaattat

SEQ ID NO: 21759 - DNA, 40 bp, Homo sapiens
ataatttgaccagtagagggcactcacaaaagtggggaga

SEQ ID NO: 21760 - DNA, 40 bp, Homo sapiens
ctccccacttttgtgagtgccctctactggtcaaattatt

SEQ ID NO: 21761 - DNA, 40 bp, Homo sapiens
aataatttgaccagtagagggcactcacaaaagtggggag

SEQ ID NO: 21762 - DNA, 40 bp, Homo sapiens
tccccacttttgtgagtgccctctactggtcaaattattt

SEQ ID NO: 21763 - DNA, 40 bp, Homo sapiens
aaataatttgaccagtagagggcactcacaaaagtgggga

SEQ ID NO: 21764 - DNA, 40 bp, Homo sapiens
ccccacttttgtgagtgccctctactggtcaaattatttg

SEQ ID NO: 21765 - DNA, 40 bp, Homo sapiens
caaataatttgaccagtagagggcactcacaaaagtgggg

SEQ ID NO: 21766 - DNA, 40 bp, Homo sapiens
cccacttttgtgagtgccctctactggtcaaattatttgc

SEQ ID NO: 21767 - DNA, 40 bp, Homo sapiens
gcaaataatttgaccagtagagggcactcacaaaagtggg

SEQ ID NO: 21768 - DNA, 40 bp, Homo sapiens
ccacttttgtgagtgccctctactggtcaaattatttgct

SEQ ID NO: 21769 - DNA, 40 bp, Homo sapiens
agcaaataatttgaccagtagagggcactcacaaaagtgg

SEQ ID NO: 21770 - DNA, 40 bp, Homo sapiens
cacttttgtgagtgccctctactggtcaaattatttgctt

SEQ ID NO: 21771 - DNA, 40 bp, Homo sapiens
aagcaaataatttgaccagtagagggcactcacaaaagtg

SEQ ID NO: 21772 - DNA, 40 bp, Homo sapiens
acttttgtgagtgccctctactggtcaaattatttgcttt

SEQ ID NO: 21773 - DNA, 40 bp, Homo sapiens
aaagcaaataatttgaccagtagagggcactcacaaaagt

SEQ ID NO: 21774 - DNA, 40 bp, Homo sapiens
cttttgtgagtgccctctactggtcaaattatttgcttta

SEQ ID NO: 21775 - DNA, 40 bp, Homo sapiens
taaagcaaataatttgaccagtagagggcactcacaaaag

SEQ ID NO: 21776 - DNA, 40 bp, Homo sapiens
ttttgtgagtgccctctactggtcaaattatttgctttat

SEQ ID NO: 21777 - DNA, 40 bp, Homo sapiens
ataaagcaaataatttgaccagtagagggcactcacaaaa

SEQ ID NO: 21778 - DNA, 40 bp, Homo sapiens
tttgtgagtgccctctactggtcaaattatttgctttata

SEQ ID NO: 21779 - DNA, 40 bp, Homo sapiens
tataaagcaaataatttgaccagtagagggcactcacaaa

SEQ ID NO: 21780 - DNA, 40 bp, Homo sapiens
ttgtgagtgccctctactggtcaaattatttgctttataa

SEQ ID NO: 21781 - DNA, 40 bp, Homo sapiens
ttataaagcaaataatttgaccagtagagggcactcacaa

SEQ ID NO: 21782 - DNA, 40 bp, Homo sapiens
tgtgagtgccctctactggtcaaattatttgctttataac

SEQ ID NO: 21783 - DNA, 40 bp, Homo sapiens
gttataaagcaaataatttgaccagtagagggcactcaca

SEQ ID NO: 21784 - DNA, 40 bp, Homo sapiens
gtgagtgccctctactggtcaaattatttgctttataaca

SEQ ID NO: 21785 - DNA, 40 bp, Homo sapiens
tgttataaagcaaataatttgaccagtagagggcactcac

SEQ ID NO: 21786 - DNA, 40 bp, Homo sapiens
tgagtgccctctactggtcaaattatttgctttataacaa

SEQ ID NO: 21787 - DNA, 40 bp, Homo sapiens
ttgttataaagcaaataatttgaccagtagagggcactca

SEQ ID NO: 21788 - DNA, 40 bp, Homo sapiens
gagtgccctctactggtcaaattatttgctttataacaag

SEQ ID NO: 21789 - DNA, 40 bp, Homo sapiens
cttgttataaagcaaataatttgaccagtagagggcactc

SEQ ID NO: 21790 - DNA, 40 bp, Homo sapiens
agtgccctctactggtcaaattatttgctttataacaagt

SEQ ID NO: 21791 - DNA, 40 bp, Homo sapiens
acttgttataaagcaaataatttgaccagtagagggcact

SEQ ID NO: 21792 - DNA, 40 bp, Homo sapiens
gtgccctctactggtcaaattatttgctttataacaagta

SEQ ID NO: 21793 - DNA, 40 bp, Homo sapiens
tacttgttataaagcaaataatttgaccagtagagggcac

SEQ ID NO: 21794 - DNA, 40 bp, Homo sapiens
tgccctctactggtcaaattatttgctttataacaagtaa

SEQ ID NO: 21795 - DNA, 40 bp, Homo sapiens
ttacttgttataaagcaaataatttgaccagtagagggca

SEQ ID NO: 21796 - DNA, 40 bp, Homo sapiens
gccctctactggtcaaattatttgctttataacaagtaac

SEQ ID NO: 21797 - DNA, 40 bp, Homo sapiens
gttacttgttataaagcaaataatttgaccagtagagggc

SEQ ID NO: 21798 - DNA, 40 bp, Homo sapiens
ccctctactggtcaaattatttgctttataacaagtaaca

SEQ ID NO: 21799 - DNA, 40 bp, Homo sapiens
tgttacttgttataaagcaaataatttgaccagtagaggg

SEQ ID NO: 21800 - DNA, 40 bp, Homo sapiens
cctctactggtcaaattatttgctttataacaagtaacag

SEQ ID NO: 21801 - DNA, 40 bp, Homo sapiens
ctgttacttgttataaagcaaataatttgaccagtagagg

SEQ ID NO: 21802 - DNA, 40 bp, Homo sapiens
ctctactggtcaaattatttgctttataacaagtaacagt

SEQ ID NO: 21803 - DNA, 40 bp, Homo sapiens
actgttacttgttataaagcaaataatttgaccagtagag

SEQ ID NO: 21804 - DNA, 40 bp, Homo sapiens
tctactggtcaaattatttgctttataacaagtaacagtg

SEQ ID NO: 21805 - DNA, 40 bp, Homo sapiens
cactgttacttgttataaagcaaataatttgaccagtaga

SEQ ID NO: 21806 - DNA, 40 bp, Homo sapiens
ctactggtcaaattatttgctttataacaagtaacagtga

SEQ ID NO: 21807 - DNA, 40 bp, Homo sapiens
tcactgttacttgttataaagcaaataatttgaccagtag

SEQ ID NO: 21808 - DNA, 40 bp, Homo sapiens
tactggtcaaattatttgctttataacaagtaacagtgaa

SEQ ID NO: 21809 - DNA, 40 bp, Homo sapiens
ttcactgttacttgttataaagcaaataatttgaccagta

SEQ ID NO: 21810 - DNA, 40 bp, Homo sapiens
actggtcaaattatttgctttataacaagtaacagtgaaa

SEQ ID NO: 21811 - DNA, 40 bp, Homo sapiens
tttcactgttacttgttataaagcaaataatttgaccagt

SEQ ID NO: 21812 - DNA, 40 bp, Homo sapiens
ctggtcaaattatttgctttataacaagtaacagtgaaat

SEQ ID NO: 21813 - DNA, 40 bp, Homo sapiens
atttcactgttacttgttataaagcaaataatttgaccag

SEQ ID NO: 21814 - DNA, 40 bp, Homo sapiens
tggtcaaattatttgctttataacaagtaacagtgaaatc

SEQ ID NO: 21815 - DNA, 40 bp, Homo sapiens
gatttcactgttacttgttataaagcaaataatttgacca

SEQ ID NO: 21816 - DNA, 40 bp, Homo sapiens
ggtcaaattatttgctttataacaagtaacagtgaaatcc

SEQ ID NO: 21817 - DNA, 40 bp, Homo sapiens
ggatttcactgttacttgttataaagcaaataatttgacc

SEQ ID NO: 21818 - DNA, 40 bp, Homo sapiens
gtcaaattatttgctttataacaagtaacagtgaaatcct

SEQ ID NO: 21819 - DNA, 40 bp, Homo sapiens
aggatttcactgttacttgttataaagcaaataatttgac

SEQ ID NO: 21820 - DNA, 40 bp, Homo sapiens
tcaaattatttgctttataacaagtaacagtgaaatccta

SEQ ID NO: 21821 - DNA, 40 bp, Homo sapiens
taggatttcactgttacttgttataaagcaaataatttga

SEQ ID NO: 21822 - DNA, 40 bp, Homo sapiens
caaattatttgctttataacaagtaacagtgaaatcctaa

SEQ ID NO: 21823 - DNA, 40 bp, Homo sapiens
ttaggatttcactgttacttgttataaagcaaataatttg

SEQ ID NO: 21824 - DNA, 40 bp, Homo sapiens
aaattatttgctttataacaagtaacagtgaaatcctaag

SEQ ID NO: 21825 - DNA, 40 bp, Homo sapiens
cttaggatttcactgttacttgttataaagcaaataattt

SEQ ID NO: 21826 - DNA, 40 bp, Homo sapiens
aattatttgctttataacaagtaacagtgaaatcctaagt

SEQ ID NO: 21827 - DNA, 40 bp, Homo sapiens
acttaggatttcactgttacttgttataaagcaaataatt

SEQ ID NO: 21828 - DNA, 40 bp, Homo sapiens
attatttgctttataacaagtaacagtgaaatcctaagtt

SEQ ID NO: 21829 - DNA, 40 bp, Homo sapiens
aacttaggatttcactgttacttgttataaagcaaataat

SEQ ID NO: 21830 - DNA, 40 bp, Homo sapiens
ttatttgctttataacaagtaacagtgaaatcctaagttt

SEQ ID NO: 21831 - DNA, 40 bp, Homo sapiens
aaacttaggatttcactgttacttgttataaagcaaataa

SEQ ID NO: 21832 - DNA, 40 bp, Homo sapiens
tatttgctttataacaagtaacagtgaaatcctaagtttg

SEQ ID NO: 21833 - DNA, 40 bp, Homo sapiens
caaacttaggatttcactgttacttgttataaagcaaata

SEQ ID NO: 21834 - DNA, 40 bp, Homo sapiens
atttgctttataacaagtaacagtgaaatcctaagtttgt

SEQ ID NO: 21835 - DNA, 40 bp, Homo sapiens
acaaacttaggatttcactgttacttgttataaagcaaat

SEQ ID NO: 21836 - DNA, 40 bp, Homo sapiens
tttgctttataacaagtaacagtgaaatcctaagtttgtg

SEQ ID NO: 21837 - DNA, 40 bp, Homo sapiens
cacaaacttaggatttcactgttacttgttataaagcaaa

SEQ ID NO: 21838 - DNA, 40 bp, Homo sapiens
ttgctttataacaagtaacagtgaaatcctaagtttgtgt

SEQ ID NO: 21839 - DNA, 40 bp, Homo sapiens
acacaaacttaggatttcactgttacttgttataaagcaa

SEQ ID NO: 21840 - DNA, 40 bp, Homo sapiens
tgctttataacaagtaacagtgaaatcctaagtttgtgta

SEQ ID NO: 21841 - DNA, 40 bp, Homo sapiens
tacacaaacttaggatttcactgttacttgttataaagca

SEQ ID NO: 21842 - DNA, 40 bp, Homo sapiens
gctttataacaagtaacagtgaaatcctaagtttgtgtag

SEQ ID NO: 21843 - DNA, 40 bp, Homo sapiens
ctacacaaacttaggatttcactgttacttgttataaagc

SEQ ID NO: 21844 - DNA, 40 bp, Homo sapiens
ctttataacaagtaacagtgaaatcctaagtttgtgtagt

SEQ ID NO: 21845 - DNA, 40 bp, Homo sapiens
actacacaaacttaggatttcactgttacttgttataaag

SEQ ID NO: 21846 - DNA, 40 bp, Homo sapiens
tttataacaagtaacagtgaaatcctaagtttgtgtagtt

SEQ ID NO: 21847 - DNA, 40 bp, Homo sapiens
aactacacaaacttaggatttcactgttacttgttataaa

SEQ ID NO: 21848 - DNA, 40 bp, Homo sapiens
ttataacaagtaacagtgaaatcctaagtttgtgtagttt

SEQ ID NO: 21849 - DNA, 40 bp, Homo sapiens
aaactacacaaacttaggatttcactgttacttgttataa

SEQ ID NO: 21850 - DNA, 40 bp, Homo sapiens
tataacaagtaacagtgaaatcctaagtttgtgtagtttc

SEQ ID NO: 21851 - DNA, 40 bp, Homo sapiens
gaaactacacaaacttaggatttcactgttacttgttata

SEQ ID NO: 21852 - DNA, 40 bp, Homo sapiens
ataacaagtaacagtgaaatcctaagtttgtgtagtttcg

SEQ ID NO: 21853 - DNA, 40 bp, Homo sapiens
cgaaactacacaaacttaggatttcactgttacttgttat

SEQ ID NO: 21854 - DNA, 40 bp, Homo sapiens
taacaagtaacagtgaaatcctaagtttgtgtagtttcgc

SEQ ID NO: 21855 - DNA, 40 bp, Homo sapiens
gcgaaactacacaaacttaggatttcactgttacttgtta

SEQ ID NO: 21856 - DNA, 40 bp, Homo sapiens
aacaagtaacagtgaaatcctaagtttgtgtagtttcgct

SEQ ID NO: 21857 - DNA, 40 bp, Homo sapiens
agcgaaactacacaaacttaggatttcactgttacttgtt

SEQ ID NO: 21858 - DNA, 40 bp, Homo sapiens
acaagtaacagtgaaatcctaagtttgtgtagtttcgctg

SEQ ID NO: 21859 - DNA, 40 bp, Homo sapiens
cagcgaaactacacaaacttaggatttcactgttacttgt

SEQ ID NO: 21860 - DNA, 40 bp, Homo sapiens
caagtaacagtgaaatcctaagtttgtgtagtttcgctgt

SEQ ID NO: 21861 - DNA, 40 bp, Homo sapiens
acagcgaaactacacaaacttaggatttcactgttacttg

SEQ ID NO: 21862 - DNA, 40 bp, Homo sapiens
aagtaacagtgaaatcctaagtttgtgtagtttcgctgtt

SEQ ID NO: 21863 - DNA, 40 bp, Homo sapiens
aacagcgaaactacacaaacttaggatttcactgttactt

SEQ ID NO: 21864 - DNA, 40 bp, Homo sapiens
agtaacagtgaaatcctaagtttgtgtagtttcgctgttt

SEQ ID NO: 21865 - DNA, 40 bp, Homo sapiens
aaacagcgaaactacacaaacttaggatttcactgttact

SEQ ID NO: 21866 - DNA, 40 bp, Homo sapiens
gtaacagtgaaatcctaagtttgtgtagtttcgctgttta

SEQ ID NO: 21867 - DNA, 40 bp, Homo sapiens
taaacagcgaaactacacaaacttaggatttcactgttac

SEQ ID NO: 21868 - DNA, 40 bp, Homo sapiens
taacagtgaaatcctaagtttgtgtagtttcgctgtttaa

SEQ ID NO: 21869 - DNA, 40 bp, Homo sapiens
ttaaacagcgaaactacacaaacttaggatttcactgtta

SEQ ID NO: 21870 - DNA, 40 bp, Homo sapiens
aacagtgaaatcctaagtttgtgtagtttcgctgtttaaa

SEQ ID NO: 21871 - DNA, 40 bp, Homo sapiens
tttaaacagcgaaactacacaaacttaggatttcactgtt

SEQ ID NO: 21872 - DNA, 40 bp, Homo sapiens
acagtgaaatcctaagtttgtgtagtttcgctgtttaaat

SEQ ID NO: 21873 - DNA, 40 bp, Homo sapiens
atttaaacagcgaaactacacaaacttaggatttcactgt

SEQ ID NO: 21874 - DNA, 40 bp, Homo sapiens
cagtgaaatcctaagtttgtgtagtttcgctgtttaaatt

SEQ ID NO: 21875 - DNA, 40 bp, Homo sapiens
aatttaaacagcgaaactacacaaacttaggatttcactg

SEQ ID NO: 21876 - DNA, 40 bp, Homo sapiens
agtgaaatcctaagtttgtgtagtttcgctgtttaaatta

SEQ ID NO: 21877 - DNA, 40 bp, Homo sapiens
taatttaaacagcgaaactacacaaacttaggatttcact

SEQ ID NO: 21878 - DNA, 40 bp, Homo sapiens
gtgaaatcctaagtttgtgtagtttcgctgtttaaattat

SEQ ID NO: 21879 - DNA, 40 bp, Homo sapiens
ataatttaaacagcgaaactacacaaacttaggatttcac

SEQ ID NO: 21880 - DNA, 40 bp, Homo sapiens
tgaaatcctaagtttgtgtagtttcgctgtttaaattatg

SEQ ID NO: 21881 - DNA, 40 bp, Homo sapiens
cataatttaaacagcgaaactacacaaacttaggatttca

SEQ ID NO: 21882 - DNA, 40 bp, Homo sapiens
gaaatcctaagtttgtgtagtttcgctgtttaaattatgg

SEQ ID NO: 21883 - DNA, 40 bp, Homo sapiens
ccataatttaaacagcgaaactacacaaacttaggatttc

SEQ ID NO: 21884 - DNA, 40 bp, Homo sapiens
aaatcctaagtttgtgtagtttcgctgtttaaattatggg

SEQ ID NO: 21885 - DNA, 40 bp, Homo sapiens
cccataatttaaacagcgaaactacacaaacttaggattt

SEQ ID NO: 21886 - DNA, 40 bp, Homo sapiens
aatcctaagtttgtgtagtttcgctgtttaaattatgggt

SEQ ID NO: 21887 - DNA, 40 bp, Homo sapiens
acccataatttaaacagcgaaactacacaaacttaggatt

SEQ ID NO: 21888 - DNA, 40 bp, Homo sapiens
atcctaagtttgtgtagtttcgctgtttaaattatgggtg

SEQ ID NO: 21889 - DNA, 40 bp, Homo sapiens
cacccataatttaaacagcgaaactacacaaacttaggat

SEQ ID NO: 21890 - DNA, 40 bp, Homo sapiens
tcctaagtttgtgtagtttcgctgtttaaattatgggtgg

SEQ ID NO: 21891 - DNA, 40 bp, Homo sapiens
ccacccataatttaaacagcgaaactacacaaacttagga

SEQ ID NO: 21892 - DNA, 40 bp, Homo sapiens
cctaagtttgtgtagtttcgctgtttaaattatgggtggc

SEQ ID NO: 21893 - DNA, 40 bp, Homo sapiens
gccacccataatttaaacagcgaaactacacaaacttagg

SEQ ID NO: 21894 - DNA, 40 bp, Homo sapiens
ctaagtttgtgtagtttcgctgtttaaattatgggtggca

SEQ ID NO: 21895 - DNA, 40 bp, Homo sapiens
tgccacccataatttaaacagcgaaactacacaaacttag

SEQ ID NO: 21896 - DNA, 40 bp, Homo sapiens
taagtttgtgtagtttcgctgtttaaattatgggtggcat

SEQ ID NO: 21897 - DNA, 40 bp, Homo sapiens
atgccacccataatttaaacagcgaaactacacaaactta

SEQ ID NO: 21898 - DNA, 40 bp, Homo sapiens
aagtttgtgtagtttcgctgtttaaattatgggtggcatc

SEQ ID NO: 21899 - DNA, 40 bp, Homo sapiens
gatgccacccataatttaaacagcgaaactacacaaactt

SEQ ID NO: 21900 - DNA, 40 bp, Homo sapiens
agtttgtgtagtttcgctgtttaaattatgggtggcatca

SEQ ID NO: 21901 - DNA, 40 bp, Homo sapiens
tgatgccacccataatttaaacagcgaaactacacaaact

SEQ ID NO: 21902 - DNA, 40 bp, Homo sapiens
gtttgtgtagtttcgctgtttaaattatgggtggcatcaa

SEQ ID NO: 21903 - DNA, 40 bp, Homo sapiens
ttgatgccacccataatttaaacagcgaaactacacaaac

SEQ ID NO: 21904 - DNA, 40 bp, Homo sapiens
tttgtgtagtttcgctgtttaaattatgggtggcatcaat

SEQ ID NO: 21905 - DNA, 40 bp, Homo sapiens
attgatgccacccataatttaaacagcgaaactacacaaa

SEQ ID NO: 21906 - DNA, 40 bp, Homo sapiens
ttgtgtagtttcgctgtttaaattatgggtggcatcaatt

SEQ ID NO: 21907 - DNA, 40 bp, Homo sapiens
aattgatgccacccataatttaaacagcgaaactacacaa

SEQ ID NO: 21908 - DNA, 40 bp, Homo sapiens
tgtgtagtttcgctgtttaaattatgggtggcatcaattt

SEQ ID NO: 21909 - DNA, 40 bp, Homo sapiens
aaattgatgccacccataatttaaacagcgaaactacaca

SEQ ID NO: 21910 - DNA, 40 bp, Homo sapiens
gtgtagtttcgctgtttaaattatgggtggcatcaattta

SEQ ID NO: 21911 - DNA, 40 bp, Homo sapiens
taaattgatgccacccataatttaaacagcgaaactacac

SEQ ID NO: 21912 - DNA, 40 bp, Homo sapiens
tgtagtttcgctgtttaaattatgggtggcatcaatttat

SEQ ID NO: 21913 - DNA, 40 bp, Homo sapiens
ataaattgatgccacccataatttaaacagcgaaactaca

SEQ ID NO: 21914 - DNA, 40 bp, Homo sapiens
gtagtttcgctgtttaaattatgggtggcatcaatttata

SEQ ID NO: 21915 - DNA, 40 bp, Homo sapiens
tataaattgatgccacccataatttaaacagcgaaactac

SEQ ID NO: 21916 - DNA, 40 bp, Homo sapiens
tagtttcgctgtttaaattatgggtggcatcaatttataa

SEQ ID NO: 21917 - DNA, 40 bp, Homo sapiens
ttataaattgatgccacccataatttaaacagcgaaacta

SEQ ID NO: 21918 - DNA, 40 bp, Homo sapiens
agtttcgctgtttaaattatgggtggcatcaatttataaa

SEQ ID NO: 21919 - DNA, 40 bp, Homo sapiens
tttataaattgatgccacccataatttaaacagcgaaact

SEQ ID NO: 21920 - DNA, 40 bp, Homo sapiens
gtttcgctgtttaaattatgggtggcatcaatttataaat

SEQ ID NO: 21921 - DNA, 40 bp, Homo sapiens
atttataaattgatgccacccataatttaaacagcgaaac

SEQ ID NO: 21922 - DNA, 40 bp, Homo sapiens
tttcgctgtttaaattatgggtggcatcaatttataaata

SEQ ID NO: 21923 - DNA, 40 bp, Homo sapiens
tatttataaattgatgccacccataatttaaacagcgaaa

SEQ ID NO: 21924 - DNA, 40 bp, Homo sapiens
ttcgctgtttaaattatgggtggcatcaatttataaatat

SEQ ID NO: 21925 - DNA, 40 bp, Homo sapiens
atatttataaattgatgccacccataatttaaacagcgaa

SEQ ID NO: 21926 - DNA, 40 bp, Homo sapiens
tcgctgtttaaattatgggtggcatcaatttataaatata

SEQ ID NO: 21927 - DNA, 40 bp, Homo sapiens
tatatttataaattgatgccacccataatttaaacagcga

SEQ ID NO: 21928 - DNA, 40 bp, Homo sapiens
cgctgtttaaattatgggtggcatcaatttataaatatat

SEQ ID NO: 21929 - DNA, 40 bp, Homo sapiens
atatatttataaattgatgccacccataatttaaacagcg

SEQ ID NO: 21930 - DNA, 40 bp, Homo sapiens
gctgtttaaattatgggtggcatcaatttataaatatatt

SEQ ID NO: 21931 - DNA, 40 bp, Homo sapiens
aatatatttataaattgatgccacccataatttaaacagc

SEQ ID NO: 21932 - DNA, 40 bp, Homo sapiens
ctgtttaaattatgggtggcatcaatttataaatatattc

SEQ ID NO: 21933 - DNA, 40 bp, Homo sapiens
gaatatatttataaattgatgccacccataatttaaacag

SEQ ID NO: 21934 - DNA, 40 bp, Homo sapiens
tgtttaaattatgggtggcatcaatttataaatatattcg

SEQ ID NO: 21935 - DNA, 40 bp, Homo sapiens
cgaatatatttataaattgatgccacccataatttaaaca

SEQ ID NO: 21936 - DNA, 40 bp, Homo sapiens
gtttaaattatgggtggcatcaatttataaatatattcgt

SEQ ID NO: 21937 - DNA, 40 bp, Homo sapiens
acgaatatatttataaattgatgccacccataatttaaac

SEQ ID NO: 21938 - DNA, 40 bp, Homo sapiens
tttaaattatgggtggcatcaatttataaatatattcgtt

SEQ ID NO: 21939 - DNA, 40 bp, Homo sapiens
aacgaatatatttataaattgatgccacccataatttaaa

SEQ ID NO: 21940 - DNA, 40 bp, Homo sapiens
ttaaattatgggtggcatcaatttataaatatattcgttt

SEQ ID NO: 21941 - DNA, 40 bp, Homo sapiens
aaacgaatatatttataaattgatgccacccataatttaa

SEQ ID NO: 21942 - DNA, 40 bp, Homo sapiens
taaattatgggtggcatcaatttataaatatattcgtttt

SEQ ID NO: 21943 - DNA, 40 bp, Homo sapiens
aaaacgaatatatttataaattgatgccacccataattta

SEQ ID NO: 21944 - DNA, 40 bp, Homo sapiens
aaattatgggtggcatcaatttataaatatattcgtttta

SEQ ID NO: 21945 - DNA, 40 bp, Homo sapiens
taaaacgaatatatttataaattgatgccacccataattt

SEQ ID NO: 21946 - DNA, 40 bp, Homo sapiens
aattatgggtggcatcaatttataaatatattcgttttat

SEQ ID NO: 21947 - DNA, 40 bp, Homo sapiens
ataaaacgaatatatttataaattgatgccacccataatt

SEQ ID NO: 21948 - DNA, 40 bp, Homo sapiens
attatgggtggcatcaatttataaatatattcgttttatt

SEQ ID NO: 21949 - DNA, 40 bp, Homo sapiens
aataaaacgaatatatttataaattgatgccacccataat

SEQ ID NO: 21950 - DNA, 40 bp, Homo sapiens
ttatgggtggcatcaatttataaatatattcgttttattt

SEQ ID NO: 21951 - DNA, 40 bp, Homo sapiens
aaataaaacgaatatatttataaattgatgccacccataa

SEQ ID NO: 21952 - DNA, 40 bp, Homo sapiens
tatgggtggcatcaatttataaatatattcgttttattta

SEQ ID NO: 21953 - DNA, 40 bp, Homo sapiens
taaataaaacgaatatatttataaattgatgccacccata

SEQ ID NO: 21954 - DNA, 40 bp, Homo sapiens
atgggtggcatcaatttataaatatattcgttttatttaa

SEQ ID NO: 21955 - DNA, 40 bp, Homo sapiens
ttaaataaaacgaatatatttataaattgatgccacccat

SEQ ID NO: 21956 - DNA, 40 bp, Homo sapiens
tgggtggcatcaatttataaatatattcgttttatttaaa

SEQ ID NO: 21957 - DNA, 40 bp, Homo sapiens
tttaaataaaacgaatatatttataaattgatgccaccca

SEQ ID NO: 21958 - DNA, 40 bp, Homo sapiens
gggtggcatcaatttataaatatattcgttttatttaaaa

SEQ ID NO: 21959 - DNA, 40 bp, Homo sapiens
ttttaaataaaacgaatatatttataaattgatgccaccc

SEQ ID NO: 21960 - DNA, 40 bp, Homo sapiens
ggtggcatcaatttataaatatattcgttttatttaaaag

SEQ ID NO: 21961 - DNA, 40 bp, Homo sapiens
cttttaaataaaacgaatatatttataaattgatgccacc

SEQ ID NO: 21962 - DNA, 40 bp, Homo sapiens
gtggcatcaatttataaatatattcgttttatttaaaagt

SEQ ID NO: 21963 - DNA, 40 bp, Homo sapiens
acttttaaataaaacgaatatatttataaattgatgccac

SEQ ID NO: 21964 - DNA, 40 bp, Homo sapiens
tggcatcaatttataaatatattcgttttatttaaaagtc

SEQ ID NO: 21965 - DNA, 40 bp, Homo sapiens
gacttttaaataaaacgaatatatttataaattgatgcca

SEQ ID NO: 21966 - DNA, 40 bp, Homo sapiens
ggcatcaatttataaatatattcgttttatttaaaagtct

SEQ ID NO: 21967 - DNA, 40 bp, Homo sapiens
agacttttaaataaaacgaatatatttataaattgatgcc

SEQ ID NO: 21968 - DNA, 40 bp, Homo sapiens
gcatcaatttataaatatattcgttttatttaaaagtctt

SEQ ID NO: 21969 - DNA, 40 bp, Homo sapiens
aagacttttaaataaaacgaatatatttataaattgatgc

SEQ ID NO: 21970 - DNA, 40 bp, Homo sapiens
catcaatttataaatatattcgttttatttaaaagtctta

SEQ ID NO: 21971 - DNA, 40 bp, Homo sapiens
taagacttttaaataaaacgaatatatttataaattgatg

SEQ ID NO: 21972 - DNA, 40 bp, Homo sapiens
atcaatttataaatatattcgttttatttaaaagtcttat

SEQ ID NO: 21973 - DNA, 40 bp, Homo sapiens
ataagacttttaaataaaacgaatatatttataaattgat

SEQ ID NO: 21974 - DNA, 40 bp, Homo sapiens
tcaatttataaatatattcgttttatttaaaagtcttata

SEQ ID NO: 21975 - DNA, 40 bp, Homo sapiens
tataagacttttaaataaaacgaatatatttataaattga

SEQ ID NO: 21976 - DNA, 40 bp, Homo sapiens
caatttataaatatattcgttttatttaaaagtcttatat

SEQ ID NO: 21977 - DNA, 40 bp, Homo sapiens
atataagacttttaaataaaacgaatatatttataaattg

SEQ ID NO: 21978 - DNA, 40 bp, Homo sapiens
aatttataaatatattcgttttatttaaaagtcttatatg

SEQ ID NO: 21979 - DNA, 40 bp, Homo sapiens
catataagacttttaaataaaacgaatatatttataaatt

SEQ ID NO: 21980 - DNA, 40 bp, Homo sapiens
atttataaatatattcgttttatttaaaagtcttatatga

SEQ ID NO: 21981 - DNA, 40 bp, Homo sapiens
tcatataagacttttaaataaaacgaatatatttataaat

SEQ ID NO: 21982 - DNA, 40 bp, Homo sapiens
tttataaatatattcgttttatttaaaagtcttatatgat

SEQ ID NO: 21983 - DNA, 40 bp, Homo sapiens
atcatataagacttttaaataaaacgaatatatttataaa

SEQ ID NO: 21984 - DNA, 40 bp, Homo sapiens
ttataaatatattcgttttatttaaaagtcttatatgatt

SEQ ID NO: 21985 - DNA, 40 bp, Homo sapiens
aatcatataagacttttaaataaaacgaatatatttataa

SEQ ID NO: 21986 - DNA, 40 bp, Homo sapiens
tataaatatattcgttttatttaaaagtcttatatgattg

SEQ ID NO: 21987 - DNA, 40 bp, Homo sapiens
caatcatataagacttttaaataaaacgaatatatttata

SEQ ID NO: 21988 - DNA, 40 bp, Homo sapiens
ataaatatattcgttttatttaaaagtcttatatgattga

SEQ ID NO: 21989 - DNA, 40 bp, Homo sapiens
tcaatcatataagacttttaaataaaacgaatatatttat

SEQ ID NO: 21990 - DNA, 40 bp, Homo sapiens
taaatatattcgttttatttaaaagtcttatatgattgat

SEQ ID NO: 21991 - DNA, 40 bp, Homo sapiens
atcaatcatataagacttttaaataaaacgaatatattta

SEQ ID NO: 21992 - DNA, 40 bp, Homo sapiens
aaatatattcgttttatttaaaagtcttatatgattgatt

SEQ ID NO: 21993 - DNA, 40 bp, Homo sapiens
aatcaatcatataagacttttaaataaaacgaatatattt

SEQ ID NO: 21994 - DNA, 40 bp, Homo sapiens
aatatattcgttttatttaaaagtcttatatgattgattt

SEQ ID NO: 21995 - DNA, 40 bp, Homo sapiens
aaatcaatcatataagacttttaaataaaacgaatatatt

SEQ ID NO: 21996 - DNA, 40 bp, Homo sapiens
atatattcgttttatttaaaagtcttatatgattgatttc

SEQ ID NO: 21997 - DNA, 40 bp, Homo sapiens
gaaatcaatcatataagacttttaaataaaacgaatatat

SEQ ID NO: 21998 - DNA, 40 bp, Homo sapiens
tatattcgttttatttaaaagtcttatatgattgatttcg

SEQ ID NO: 21999 - DNA, 40 bp, Homo sapiens
cgaaatcaatcatataagacttttaaataaaacgaatata

SEQ ID NO: 22000 - DNA, 40 bp, Homo sapiens
atattcgttttatttaaaagtcttatatgattgatttcgt

SEQ ID NO: 22001 - DNA, 40 bp, Homo sapiens
acgaaatcaatcatataagacttttaaataaaacgaatat

SEQ ID NO: 22002 - DNA, 40 bp, Homo sapiens
tattcgttttatttaaaagtcttatatgattgatttcgta

SEQ ID NO: 22003 - DNA, 40 bp, Homo sapiens
tacgaaatcaatcatataagacttttaaataaaacgaata

SEQ ID NO: 22004 - DNA, 40 bp, Homo sapiens
attcgttttatttaaaagtcttatatgattgatttcgtat

SEQ ID NO: 22005 - DNA, 40 bp, Homo sapiens
atacgaaatcaatcatataagacttttaaataaaacgaat

SEQ ID NO: 22006 - DNA, 40 bp, Homo sapiens
ttcgttttatttaaaagtcttatatgattgatttcgtatc

SEQ ID NO: 22007 - DNA, 40 bp, Homo sapiens
gatacgaaatcaatcatataagacttttaaataaaacgaa

SEQ ID NO: 22008 - DNA, 40 bp, Homo sapiens
tcgttttatttaaaagtcttatatgattgatttcgtatca

SEQ ID NO: 22009 - DNA, 40 bp, Homo sapiens
tgatacgaaatcaatcatataagacttttaaataaaacga

SEQ ID NO: 22010 - DNA, 40 bp, Homo sapiens
cgttttatttaaaagtcttatatgattgatttcgtatcat

SEQ ID NO: 22011 - DNA, 40 bp, Homo sapiens
atgatacgaaatcaatcatataagacttttaaataaaacg

SEQ ID NO: 22012 - DNA, 40 bp, Homo sapiens
gttttatttaaaagtcttatatgattgatttcgtatcatt

SEQ ID NO: 22013 - DNA, 40 bp, Homo sapiens
aatgatacgaaatcaatcatataagacttttaaataaaac

SEQ ID NO: 22014 - DNA, 40 bp, Homo sapiens
ttttatttaaaagtcttatatgattgatttcgtatcattt

SEQ ID NO: 22015 - DNA, 40 bp, Homo sapiens
aaatgatacgaaatcaatcatataagacttttaaataaaa

SEQ ID NO: 22016 - DNA, 40 bp, Homo sapiens
tttatttaaaagtcttatatgattgatttcgtatcatttt

SEQ ID NO: 22017 - DNA, 40 bp, Homo sapiens
aaaatgatacgaaatcaatcatataagacttttaaataaa

SEQ ID NO: 22018 - DNA, 40 bp, Homo sapiens
ttatttaaaagtcttatatgattgatttcgtatcattttt

SEQ ID NO: 22019 - DNA, 40 bp, Homo sapiens
aaaaatgatacgaaatcaatcatataagacttttaaataa

SEQ ID NO: 22020 - DNA, 40 bp, Homo sapiens
tatttaaaagtcttatatgattgatttcgtatcatttttg

SEQ ID NO: 22021 - DNA, 40 bp, Homo sapiens
caaaaatgatacgaaatcaatcatataagacttttaaata

SEQ ID NO: 22022 - DNA, 40 bp, Homo sapiens
atttaaaagtcttatatgattgatttcgtatcatttttgc

SEQ ID NO: 22023 - DNA, 40 bp, Homo sapiens
gcaaaaatgatacgaaatcaatcatataagacttttaaat

SEQ ID NO: 22024 - DNA, 40 bp, Homo sapiens
tttaaaagtcttatatgattgatttcgtatcatttttgct

SEQ ID NO: 22025 - DNA, 40 bp, Homo sapiens
agcaaaaatgatacgaaatcaatcatataagacttttaaa

SEQ ID NO: 22026 - DNA, 40 bp, Homo sapiens
ttaaaagtcttatatgattgatttcgtatcatttttgctc

SEQ ID NO: 22027 - DNA, 40 bp, Homo sapiens
gagcaaaaatgatacgaaatcaatcatataagacttttaa

SEQ ID NO: 22028 - DNA, 40 bp, Homo sapiens
taaaagtcttatatgattgatttcgtatcatttttgctct

SEQ ID NO: 22029 - DNA, 40 bp, Homo sapiens
agagcaaaaatgatacgaaatcaatcatataagactttta

SEQ ID NO: 22030 - DNA, 40 bp, Homo sapiens
aaaagtcttatatgattgatttcgtatcatttttgctctc

SEQ ID NO: 22031 - DNA, 40 bp, Homo sapiens
gagagcaaaaatgatacgaaatcaatcatataagactttt

SEQ ID NO: 22032 - DNA, 40 bp, Homo sapiens
aaagtcttatatgattgatttcgtatcatttttgctctct

SEQ ID NO: 22033 - DNA, 40 bp, Homo sapiens
agagagcaaaaatgatacgaaatcaatcatataagacttt

SEQ ID NO: 22034 - DNA, 40 bp, Homo sapiens
aagtcttatatgattgatttcgtatcatttttgctctctg

SEQ ID NO: 22035 - DNA, 40 bp, Homo sapiens
cagagagcaaaaatgatacgaaatcaatcatataagactt

SEQ ID NO: 22036 - DNA, 40 bp, Homo sapiens
agtcttatatgattgatttcgtatcatttttgctctctgc

SEQ ID NO: 22037 - DNA, 40 bp, Homo sapiens
gcagagagcaaaaatgatacgaaatcaatcatataagact

SEQ ID NO: 22038 - DNA, 40 bp, Homo sapiens
gtcttatatgattgatttcgtatcatttttgctctctgct

SEQ ID NO: 22039 - DNA, 40 bp, Homo sapiens
agcagagagcaaaaatgatacgaaatcaatcatataagac

SEQ ID NO: 22040 - DNA, 40 bp, Homo sapiens
tcttatatgattgatttcgtatcatttttgctctctgcta

SEQ ID NO: 22041 - DNA, 40 bp, Homo sapiens
tagcagagagcaaaaatgatacgaaatcaatcatataaga

SEQ ID NO: 22042 - DNA, 40 bp, Homo sapiens
cttatatgattgatttcgtatcatttttgctctctgctaa

SEQ ID NO: 22043 - DNA, 40 bp, Homo sapiens
ttagcagagagcaaaaatgatacgaaatcaatcatataag

SEQ ID NO: 22044 - DNA, 40 bp, Homo sapiens
ttatatgattgatttcgtatcatttttgctctctgctaat

SEQ ID NO: 22045 - DNA, 40 bp, Homo sapiens
attagcagagagcaaaaatgatacgaaatcaatcatataa

SEQ ID NO: 22046 - DNA, 40 bp, Homo sapiens
tatatgattgatttcgtatcatttttgctctctgctaata

SEQ ID NO: 22047 - DNA, 40 bp, Homo sapiens
tattagcagagagcaaaaatgatacgaaatcaatcatata

SEQ ID NO: 22048 - DNA, 40 bp, Homo sapiens
atatgattgatttcgtatcatttttgctctctgctaatat

SEQ ID NO: 22049 - DNA, 40 bp, Homo sapiens
atattagcagagagcaaaaatgatacgaaatcaatcatat

SEQ ID NO: 22050 - DNA, 40 bp, Homo sapiens
tatgattgatttcgtatcatttttgctctctgctaatatt

SEQ ID NO: 22051 - DNA, 40 bp, Homo sapiens
aatattagcagagagcaaaaatgatacgaaatcaatcata

SEQ ID NO: 22052 - DNA, 40 bp, Homo sapiens
atgattgatttcgtatcatttttgctctctgctaatatta

SEQ ID NO: 22053 - DNA, 40 bp, Homo sapiens
taatattagcagagagcaaaaatgatacgaaatcaatcat

SEQ ID NO: 22054 - DNA, 40 bp, Homo sapiens
tgattgatttcgtatcatttttgctctctgctaatattaa

SEQ ID NO: 22055 - DNA, 40 bp, Homo sapiens
ttaatattagcagagagcaaaaatgatacgaaatcaatca

SEQ ID NO: 22056 - DNA, 40 bp, Homo sapiens
gattgatttcgtatcatttttgctctctgctaatattaat

SEQ ID NO: 22057 - DNA, 40 bp, Homo sapiens
attaatattagcagagagcaaaaatgatacgaaatcaatc

SEQ ID NO: 22058 - DNA, 40 bp, Homo sapiens
attgatttcgtatcatttttgctctctgctaatattaata

SEQ ID NO: 22059 - DNA, 40 bp, Homo sapiens
tattaatattagcagagagcaaaaatgatacgaaatcaat

SEQ ID NO: 22060 - DNA, 40 bp, Homo sapiens
ttgatttcgtatcatttttgctctctgctaatattaatat

SEQ ID NO: 22061 - DNA, 40 bp, Homo sapiens
atattaatattagcagagagcaaaaatgatacgaaatcaa

SEQ ID NO: 22062 - DNA, 40 bp, Homo sapiens
tgatttcgtatcatttttgctctctgctaatattaatata

SEQ ID NO: 22063 - DNA, 40 bp, Homo sapiens
tatattaatattagcagagagcaaaaatgatacgaaatca

SEQ ID NO: 22064 - DNA, 40 bp, Homo sapiens
gatttcgtatcatttttgctctctgctaatattaatataa

SEQ ID NO: 22065 - DNA, 40 bp, Homo sapiens
ttatattaatattagcagagagcaaaaatgatacgaaatc

SEQ ID NO: 22066 - DNA, 40 bp, Homo sapiens
atttcgtatcatttttgctctctgctaatattaatataaa

SEQ ID NO: 22067 - DNA, 40 bp, Homo sapiens
tttatattaatattagcagagagcaaaaatgatacgaaat

SEQ ID NO: 22068 - DNA, 40 bp, Homo sapiens
tttcgtatcatttttgctctctgctaatattaatataaag

SEQ ID NO: 22069 - DNA, 40 bp, Homo sapiens
ctttatattaatattagcagagagcaaaaatgatacgaaa

SEQ ID NO: 22070 - DNA, 40 bp, Homo sapiens
ttcgtatcatttttgctctctgctaatattaatataaaga

SEQ ID NO: 22071 - DNA, 40 bp, Homo sapiens
tctttatattaatattagcagagagcaaaaatgatacgaa

SEQ ID NO: 22072 - DNA, 40 bp, Homo sapiens
tcgtatcatttttgctctctgctaatattaatataaagat

SEQ ID NO: 22073 - DNA, 40 bp, Homo sapiens
atctttatattaatattagcagagagcaaaaatgatacga

SEQ ID NO: 22074 - DNA, 40 bp, Homo sapiens
cgtatcatttttgctctctgctaatattaatataaagatt

SEQ ID NO: 22075 - DNA, 40 bp, Homo sapiens
aatctttatattaatattagcagagagcaaaaatgatacg

SEQ ID NO: 22076 - DNA, 40 bp, Homo sapiens
gtatcatttttgctctctgctaatattaatataaagatta

SEQ ID NO: 22077 - DNA, 40 bp, Homo sapiens
taatctttatattaatattagcagagagcaaaaatgatac

SEQ ID NO: 22078 - DNA, 40 bp, Homo sapiens
tatcatttttgctctctgctaatattaatataaagattac

SEQ ID NO: 22079 - DNA, 40 bp, Homo sapiens
gtaatctttatattaatattagcagagagcaaaaatgata

SEQ ID NO: 22080 - DNA, 40 bp, Homo sapiens
atcatttttgctctctgctaatattaatataaagattact

SEQ ID NO: 22081 - DNA, 40 bp, Homo sapiens
agtaatctttatattaatattagcagagagcaaaaatgat

SEQ ID NO: 22082 - DNA, 40 bp, Homo sapiens
tcatttttgctctctgctaatattaatataaagattactg

SEQ ID NO: 22083 - DNA, 40 bp, Homo sapiens
cagtaatctttatattaatattagcagagagcaaaaatga

SEQ ID NO: 22084 - DNA, 40 bp, Homo sapiens
catttttgctctctgctaatattaatataaagattactgt

SEQ ID NO: 22085 - DNA, 40 bp, Homo sapiens
acagtaatctttatattaatattagcagagagcaaaaatg

SEQ ID NO: 22086 - DNA, 40 bp, Homo sapiens
atttttgctctctgctaatattaatataaagattactgtc

SEQ ID NO: 22087 - DNA, 40 bp, Homo sapiens
gacagtaatctttatattaatattagcagagagcaaaaat

SEQ ID NO: 22088 - DNA, 40 bp, Homo sapiens
tttttgctctctgctaatattaatataaagattactgtct

SEQ ID NO: 22089 - DNA, 40 bp, Homo sapiens
agacagtaatctttatattaatattagcagagagcaaaaa

SEQ ID NO: 22090 - DNA, 40 bp, Homo sapiens
ttttgctctctgctaatattaatataaagattactgtctg

SEQ ID NO: 22091 - DNA, 40 bp, Homo sapiens
cagacagtaatctttatattaatattagcagagagcaaaa

SEQ ID NO: 22092 - DNA, 40 bp, Homo sapiens
tttgctctctgctaatattaatataaagattactgtctgt

SEQ ID NO: 22093 - DNA, 40 bp, Homo sapiens
acagacagtaatctttatattaatattagcagagagcaaa

SEQ ID NO: 22094 - DNA, 40 bp, Homo sapiens
ttgctctctgctaatattaatataaagattactgtctgta

SEQ ID NO: 22095 - DNA, 40 bp, Homo sapiens
tacagacagtaatctttatattaatattagcagagagcaa

SEQ ID NO: 22096 - DNA, 40 bp, Homo sapiens
tgctctctgctaatattaatataaagattactgtctgtat

SEQ ID NO: 22097 - DNA, 40 bp, Homo sapiens
atacagacagtaatctttatattaatattagcagagagca

SEQ ID NO: 22098 - DNA, 40 bp, Homo sapiens
gctctctgctaatattaatataaagattactgtctgtatt

SEQ ID NO: 22099 - DNA, 40 bp, Homo sapiens
aatacagacagtaatctttatattaatattagcagagagc

SEQ ID NO: 22100 - DNA, 40 bp, Homo sapiens
ctctctgctaatattaatataaagattactgtctgtatta

SEQ ID NO: 22101 - DNA, 40 bp, Homo sapiens
taatacagacagtaatctttatattaatattagcagagag

SEQ ID NO: 22102 - DNA, 40 bp, Homo sapiens
tctctgctaatattaatataaagattactgtctgtattag

SEQ ID NO: 22103 - DNA, 40 bp, Homo sapiens
ctaatacagacagtaatctttatattaatattagcagaga

SEQ ID NO: 22104 - DNA, 40 bp, Homo sapiens
ctctgctaatattaatataaagattactgtctgtattagt

SEQ ID NO: 22105 - DNA, 40 bp, Homo sapiens
actaatacagacagtaatctttatattaatattagcagag

SEQ ID NO: 22106 - DNA, 40 bp, Homo sapiens
tctgctaatattaatataaagattactgtctgtattagtt

SEQ ID NO: 22107 - DNA, 40 bp, Homo sapiens
aactaatacagacagtaatctttatattaatattagcaga

SEQ ID NO: 22108 - DNA, 40 bp, Homo sapiens
ctgctaatattaatataaagattactgtctgtattagtta

SEQ ID NO: 22109 - DNA, 40 bp, Homo sapiens
taactaatacagacagtaatctttatattaatattagcag

SEQ ID NO: 22110 - DNA, 40 bp, Homo sapiens
tgctaatattaatataaagattactgtctgtattagttag

SEQ ID NO: 22111 - DNA, 40 bp, Homo sapiens
ctaactaatacagacagtaatctttatattaatattagca

SEQ ID NO: 22112 - DNA, 40 bp, Homo sapiens
gctaatattaatataaagattactgtctgtattagttagg

SEQ ID NO: 22113 - DNA, 40 bp, Homo sapiens
cctaactaatacagacagtaatctttatattaatattagc

SEQ ID NO: 22114 - DNA, 40 bp, Homo sapiens
ctaatattaatataaagattactgtctgtattagttaggc

SEQ ID NO: 22115 - DNA, 40 bp, Homo sapiens
gcctaactaatacagacagtaatctttatattaatattag

SEQ ID NO: 22116 - DNA, 40 bp, Homo sapiens
taatattaatataaagattactgtctgtattagttaggcc

SEQ ID NO: 22117 - DNA, 40 bp, Homo sapiens
ggcctaactaatacagacagtaatctttatattaatatta

SEQ ID NO: 22118 - DNA, 40 bp, Homo sapiens
aatattaatataaagattactgtctgtattagttaggcct

SEQ ID NO: 22119 - DNA, 40 bp, Homo sapiens
aggcctaactaatacagacagtaatctttatattaatatt

SEQ ID NO: 22120 - DNA, 40 bp, Homo sapiens
atattaatataaagattactgtctgtattagttaggccta

SEQ ID NO: 22121 - DNA, 40 bp, Homo sapiens
taggcctaactaatacagacagtaatctttatattaatat

SEQ ID NO: 22122 - DNA, 40 bp, Homo sapiens
tattaatataaagattactgtctgtattagttaggcctaa

SEQ ID NO: 22123 - DNA, 40 bp, Homo sapiens
ttaggcctaactaatacagacagtaatctttatattaata

SEQ ID NO: 22124 - DNA, 40 bp, Homo sapiens
attaatataaagattactgtctgtattagttaggcctaac

SEQ ID NO: 22125 - DNA, 40 bp, Homo sapiens
gttaggcctaactaatacagacagtaatctttatattaat

SEQ ID NO: 22126 - DNA, 40 bp, Homo sapiens
ttaatataaagattactgtctgtattagttaggcctaact

SEQ ID NO: 22127 - DNA, 40 bp, Homo sapiens
agttaggcctaactaatacagacagtaatctttatattaa

SEQ ID NO: 22128 - DNA, 40 bp, Homo sapiens
taatataaagattactgtctgtattagttaggcctaacta

SEQ ID NO: 22129 - DNA, 40 bp, Homo sapiens
tagttaggcctaactaatacagacagtaatctttatatta

SEQ ID NO: 22130 - DNA, 40 bp, Homo sapiens
aatataaagattactgtctgtattagttaggcctaactaa

SEQ ID NO: 22131 - DNA, 40 bp, Homo sapiens
ttagttaggcctaactaatacagacagtaatctttatatt

SEQ ID NO: 22132 - DNA, 40 bp, Homo sapiens
atataaagattactgtctgtattagttaggcctaactaag

SEQ ID NO: 22133 - DNA, 40 bp, Homo sapiens
cttagttaggcctaactaatacagacagtaatctttatat

SEQ ID NO: 22134 - DNA, 40 bp, Homo sapiens
tataaagattactgtctgtattagttaggcctaactaagt

SEQ ID NO: 22135 - DNA, 40 bp, Homo sapiens
acttagttaggcctaactaatacagacagtaatctttata

SEQ ID NO: 22136 - DNA, 40 bp, Homo sapiens
ataaagattactgtctgtattagttaggcctaactaagta

SEQ ID NO: 22137 - DNA, 40 bp, Homo sapiens
tacttagttaggcctaactaatacagacagtaatctttat

SEQ ID NO: 22138 - DNA, 40 bp, Homo sapiens
taaagattactgtctgtattagttaggcctaactaagtag

SEQ ID NO: 22139 - DNA, 40 bp, Homo sapiens
ctacttagttaggcctaactaatacagacagtaatcttta

SEQ ID NO: 22140 - DNA, 40 bp, Homo sapiens
aaagattactgtctgtattagttaggcctaactaagtagg

SEQ ID NO: 22141 - DNA, 40 bp, Homo sapiens
cctacttagttaggcctaactaatacagacagtaatcttt

SEQ ID NO: 22142 - DNA, 40 bp, Homo sapiens
aagattactgtctgtattagttaggcctaactaagtaggt

SEQ ID NO: 22143 - DNA, 40 bp, Homo sapiens
acctacttagttaggcctaactaatacagacagtaatctt

SEQ ID NO: 22144 - DNA, 40 bp, Homo sapiens
agattactgtctgtattagttaggcctaactaagtaggtg

SEQ ID NO: 22145 - DNA, 40 bp, Homo sapiens
cacctacttagttaggcctaactaatacagacagtaatct

SEQ ID NO: 22146 - DNA, 40 bp, Homo sapiens
gattactgtctgtattagttaggcctaactaagtaggtga

SEQ ID NO: 22147 - DNA, 40 bp, Homo sapiens
tcacctacttagttaggcctaactaatacagacagtaatc

SEQ ID NO: 22148 - DNA, 40 bp, Homo sapiens
attactgtctgtattagttaggcctaactaagtaggtgag

SEQ ID NO: 22149 - DNA, 40 bp, Homo sapiens
ctcacctacttagttaggcctaactaatacagacagtaat

SEQ ID NO: 22150 - DNA, 40 bp, Homo sapiens
ttactgtctgtattagttaggcctaactaagtaggtgagt

SEQ ID NO: 22151 - DNA, 40 bp, Homo sapiens
actcacctacttagttaggcctaactaatacagacagtaa

SEQ ID NO: 22152 - DNA, 40 bp, Homo sapiens
tactgtctgtattagttaggcctaactaagtaggtgagta

SEQ ID NO: 22153 - DNA, 40 bp, Homo sapiens
tactcacctacttagttaggcctaactaatacagacagta

SEQ ID NO: 22154 - DNA, 40 bp, Homo sapiens
actgtctgtattagttaggcctaactaagtaggtgagtat

SEQ ID NO: 22155 - DNA, 40 bp, Homo sapiens
atactcacctacttagttaggcctaactaatacagacagt

SEQ ID NO: 22156 - DNA, 40 bp, Homo sapiens
ctgtctgtattagttaggcctaactaagtaggtgagtata

SEQ ID NO: 22157 - DNA, 40 bp, Homo sapiens
tatactcacctacttagttaggcctaactaatacagacag

SEQ ID NO: 22158 - DNA, 40 bp, Homo sapiens
tgtctgtattagttaggcctaactaagtaggtgagtatag

SEQ ID NO: 22159 - DNA, 40 bp, Homo sapiens
ctatactcacctacttagttaggcctaactaatacagaca

SEQ ID NO: 22160 - DNA, 40 bp, Homo sapiens
gtctgtattagttaggcctaactaagtaggtgagtatagt

SEQ ID NO: 22161 - DNA, 40 bp, Homo sapiens
actatactcacctacttagttaggcctaactaatacagac

SEQ ID NO: 22162 - DNA, 40 bp, Homo sapiens
tctgtattagttaggcctaactaagtaggtgagtatagtg

SEQ ID NO: 22163 - DNA, 40 bp, Homo sapiens
cactatactcacctacttagttaggcctaactaatacaga

SEQ ID NO: 22164 - DNA, 40 bp, Homo sapiens
ctgtattagttaggcctaactaagtaggtgagtatagtga

SEQ ID NO: 22165 - DNA, 40 bp, Homo sapiens
tcactatactcacctacttagttaggcctaactaatacag

SEQ ID NO: 22166 - DNA, 40 bp, Homo sapiens
tgtattagttaggcctaactaagtaggtgagtatagtgaa

SEQ ID NO: 22167 - DNA, 40 bp, Homo sapiens
ttcactatactcacctacttagttaggcctaactaataca

SEQ ID NO: 22168 - DNA, 40 bp, Homo sapiens
gtattagttaggcctaactaagtaggtgagtatagtgaac

SEQ ID NO: 22169 - DNA, 40 bp, Homo sapiens
gttcactatactcacctacttagttaggcctaactaatac

SEQ ID NO: 22170 - DNA, 40 bp, Homo sapiens
tattagttaggcctaactaagtaggtgagtatagtgaact

SEQ ID NO: 22171 - DNA, 40 bp, Homo sapiens
agttcactatactcacctacttagttaggcctaactaata

SEQ ID NO: 22172 - DNA, 40 bp, Homo sapiens
attagttaggcctaactaagtaggtgagtatagtgaacta

SEQ ID NO: 22173 - DNA, 40 bp, Homo sapiens
tagttcactatactcacctacttagttaggcctaactaat

SEQ ID NO: 22174 - DNA, 40 bp, Homo sapiens
ttagttaggcctaactaagtaggtgagtatagtgaactaa

SEQ ID NO: 22175 - DNA, 40 bp, Homo sapiens
ttagttcactatactcacctacttagttaggcctaactaa

SEQ ID NO: 22176 - DNA, 40 bp, Homo sapiens
tagttaggcctaactaagtaggtgagtatagtgaactaag

SEQ ID NO: 22177 - DNA, 40 bp, Homo sapiens
cttagttcactatactcacctacttagttaggcctaacta

SEQ ID NO: 22178 - DNA, 40 bp, Homo sapiens
agttaggcctaactaagtaggtgagtatagtgaactaaga

SEQ ID NO: 22179 - DNA, 40 bp, Homo sapiens
tcttagttcactatactcacctacttagttaggcctaact

SEQ ID NO: 22180 - DNA, 40 bp, Homo sapiens
gttaggcctaactaagtaggtgagtatagtgaactaagaa

SEQ ID NO: 22181 - DNA, 40 bp, Homo sapiens
ttcttagttcactatactcacctacttagttaggcctaac

SEQ ID NO: 22182 - DNA, 40 bp, Homo sapiens
ttaggcctaactaagtaggtgagtatagtgaactaagaaa

SEQ ID NO: 22183 - DNA, 40 bp, Homo sapiens
tttcttagttcactatactcacctacttagttaggcctaa

SEQ ID NO: 22184 - DNA, 40 bp, Homo sapiens
taggcctaactaagtaggtgagtatagtgaactaagaaag

SEQ ID NO: 22185 - DNA, 40 bp, Homo sapiens
ctttcttagttcactatactcacctacttagttaggccta

SEQ ID NO: 22186 - DNA, 40 bp, Homo sapiens
aggcctaactaagtaggtgagtatagtgaactaagaaagg

SEQ ID NO: 22187 - DNA, 40 bp, Homo sapiens
cctttcttagttcactatactcacctacttagttaggcct

SEQ ID NO: 22188 - DNA, 40 bp, Homo sapiens
ggcctaactaagtaggtgagtatagtgaactaagaaagga

SEQ ID NO: 22189 - DNA, 40 bp, Homo sapiens
tcctttcttagttcactatactcacctacttagttaggcc

SEQ ID NO: 22190 - DNA, 40 bp, Homo sapiens
gcctaactaagtaggtgagtatagtgaactaagaaaggaa

SEQ ID NO: 22191 - DNA, 40 bp, Homo sapiens
ttcctttcttagttcactatactcacctacttagttaggc

SEQ ID NO: 22192 - DNA, 40 bp, Homo sapiens
cctaactaagtaggtgagtatagtgaactaagaaaggaaa

SEQ ID NO: 22193 - DNA, 40 bp, Homo sapiens
tttcctttcttagttcactatactcacctacttagttagg

SEQ ID NO: 22194 - DNA, 40 bp, Homo sapiens
ctaactaagtaggtgagtatagtgaactaagaaaggaaac

SEQ ID NO: 22195 - DNA, 40 bp, Homo sapiens
gtttcctttcttagttcactatactcacctacttagttag

SEQ ID NO: 22196 - DNA, 40 bp, Homo sapiens
taactaagtaggtgagtatagtgaactaagaaaggaaacg

SEQ ID NO: 22197 - DNA, 40 bp, Homo sapiens
cgtttcctttcttagttcactatactcacctacttagtta

SEQ ID NO: 22198 - DNA, 40 bp, Homo sapiens
aactaagtaggtgagtatagtgaactaagaaaggaaacga

SEQ ID NO: 22199 - DNA, 40 bp, Homo sapiens
tcgtttcctttcttagttcactatactcacctacttagtt

SEQ ID NO: 22200 - DNA, 40 bp, Homo sapiens
actaagtaggtgagtatagtgaactaagaaaggaaacgag

SEQ ID NO: 22201 - DNA, 40 bp, Homo sapiens
ctcgtttcctttcttagttcactatactcacctacttagt

SEQ ID NO: 22202 - DNA, 40 bp, Homo sapiens
ctaagtaggtgagtatagtgaactaagaaaggaaacgagg

SEQ ID NO: 22203 - DNA, 40 bp, Homo sapiens
cctcgtttcctttcttagttcactatactcacctacttag

SEQ ID NO: 22204 - DNA, 40 bp, Homo sapiens
taagtaggtgagtatagtgaactaagaaaggaaacgaggc

SEQ ID NO: 22205 - DNA, 40 bp, Homo sapiens
gcctcgtttcctttcttagttcactatactcacctactta

SEQ ID NO: 22206 - DNA, 40 bp, Homo sapiens
aagtaggtgagtatagtgaactaagaaaggaaacgaggca

SEQ ID NO: 22207 - DNA, 40 bp, Homo sapiens
tgcctcgtttcctttcttagttcactatactcacctactt

SEQ ID NO: 22208 - DNA, 40 bp, Homo sapiens
agtaggtgagtatagtgaactaagaaaggaaacgaggcag

SEQ ID NO: 22209 - DNA, 40 bp, Homo sapiens
ctgcctcgtttcctttcttagttcactatactcacctact

SEQ ID NO: 22210 - DNA, 40 bp, Homo sapiens
gtaggtgagtatagtgaactaagaaaggaaacgaggcagt

SEQ ID NO: 22211 - DNA, 40 bp, Homo sapiens
actgcctcgtttcctttcttagttcactatactcacctac

SEQ ID NO: 22212 - DNA, 40 bp, Homo sapiens
taggtgagtatagtgaactaagaaaggaaacgaggcagta

SEQ ID NO: 22213 - DNA, 40 bp, Homo sapiens
tactgcctcgtttcctttcttagttcactatactcaccta

SEQ ID NO: 22214 - DNA, 40 bp, Homo sapiens
aggtgagtatagtgaactaagaaaggaaacgaggcagtat

SEQ ID NO: 22215 - DNA, 40 bp, Homo sapiens
atactgcctcgtttcctttcttagttcactatactcacct

SEQ ID NO: 22216 - DNA, 40 bp, Homo sapiens
ggtgagtatagtgaactaagaaaggaaacgaggcagtata

SEQ ID NO: 22217 - DNA, 40 bp, Homo sapiens
tatactgcctcgtttcctttcttagttcactatactcacc

SEQ ID NO: 22218 - DNA, 40 bp, Homo sapiens
gtgagtatagtgaactaagaaaggaaacgaggcagtatat

SEQ ID NO: 22219 - DNA, 40 bp, Homo sapiens
atatactgcctcgtttcctttcttagttcactatactcac

SEQ ID NO: 22220 - DNA, 40 bp, Homo sapiens
tgagtatagtgaactaagaaaggaaacgaggcagtatata

SEQ ID NO: 22221 - DNA, 40 bp, Homo sapiens
tatatactgcctcgtttcctttcttagttcactatactca

SEQ ID NO: 22222 - DNA, 40 bp, Homo sapiens
gagtatagtgaactaagaaaggaaacgaggcagtatataa

SEQ ID NO: 22223 - DNA, 40 bp, Homo sapiens
ttatatactgcctcgtttcctttcttagttcactatactc

SEQ ID NO: 22224 - DNA, 40 bp, Homo sapiens
agtatagtgaactaagaaaggaaacgaggcagtatataag

SEQ ID NO: 22225 - DNA, 40 bp, Homo sapiens
cttatatactgcctcgtttcctttcttagttcactatact

SEQ ID NO: 22226 - DNA, 40 bp, Homo sapiens
gtatagtgaactaagaaaggaaacgaggcagtatataaga

SEQ ID NO: 22227 - DNA, 40 bp, Homo sapiens
tcttatatactgcctcgtttcctttcttagttcactatac

SEQ ID NO: 22228 - DNA, 40 bp, Homo sapiens
tatagtgaactaagaaaggaaacgaggcagtatataagaa

SEQ ID NO: 22229 - DNA, 40 bp, Homo sapiens
ttcttatatactgcctcgtttcctttcttagttcactata

SEQ ID NO: 22230 - DNA, 40 bp, Homo sapiens
atagtgaactaagaaaggaaacgaggcagtatataagaaa

SEQ ID NO: 22231 - DNA, 40 bp, Homo sapiens
tttcttatatactgcctcgtttcctttcttagttcactat

SEQ ID NO: 22232 - DNA, 40 bp, Homo sapiens
tagtgaactaagaaaggaaacgaggcagtatataagaaaa

SEQ ID NO: 22233 - DNA, 40 bp, Homo sapiens
ttttcttatatactgcctcgtttcctttcttagttcacta

SEQ ID NO: 22234 - DNA, 40 bp, Homo sapiens
agtgaactaagaaaggaaacgaggcagtatataagaaaat

SEQ ID NO: 22235 - DNA, 40 bp, Homo sapiens
attttcttatatactgcctcgtttcctttcttagttcact

SEQ ID NO: 22236 - DNA, 40 bp, Homo sapiens
gtgaactaagaaaggaaacgaggcagtatataagaaaata

SEQ ID NO: 22237 - DNA, 40 bp, Homo sapiens
tattttcttatatactgcctcgtttcctttcttagttcac

SEQ ID NO: 22238 - DNA, 40 bp, Homo sapiens
tgaactaagaaaggaaacgaggcagtatataagaaaatag

SEQ ID NO: 22239 - DNA, 40 bp, Homo sapiens
ctattttcttatatactgcctcgtttcctttcttagttca

SEQ ID NO: 22240 - DNA, 40 bp, Homo sapiens
gaactaagaaaggaaacgaggcagtatataagaaaatagg

SEQ ID NO: 22241 - DNA, 40 bp, Homo sapiens
cctattttcttatatactgcctcgtttcctttcttagttc

SEQ ID NO: 22242 - DNA, 40 bp, Homo sapiens
aactaagaaaggaaacgaggcagtatataagaaaataggg

SEQ ID NO: 22243 - DNA, 40 bp, Homo sapiens
ccctattttcttatatactgcctcgtttcctttcttagtt

SEQ ID NO: 22244 - DNA, 40 bp, Homo sapiens
actaagaaaggaaacgaggcagtatataagaaaatagggt

SEQ ID NO: 22245 - DNA, 40 bp, Homo sapiens
accctattttcttatatactgcctcgtttcctttcttagt

SEQ ID NO: 22246 - DNA, 40 bp, Homo sapiens
ctaagaaaggaaacgaggcagtatataagaaaatagggtg

SEQ ID NO: 22247 - DNA, 40 bp, Homo sapiens
caccctattttcttatatactgcctcgtttcctttcttag

SEQ ID NO: 22248 - DNA, 40 bp, Homo sapiens
taagaaaggaaacgaggcagtatataagaaaatagggtgg

SEQ ID NO: 22249 - DNA, 40 bp, Homo sapiens
ccaccctattttcttatatactgcctcgtttcctttctta

SEQ ID NO: 22250 - DNA, 40 bp, Homo sapiens
aagaaaggaaacgaggcagtatataagaaaatagggtggt

SEQ ID NO: 22251 - DNA, 40 bp, Homo sapiens
accaccctattttcttatatactgcctcgtttcctttctt

SEQ ID NO: 22252 - DNA, 40 bp, Homo sapiens
agaaaggaaacgaggcagtatataagaaaatagggtggtt

SEQ ID NO: 22253 - DNA, 40 bp, Homo sapiens
aaccaccctattttcttatatactgcctcgtttcctttct

SEQ ID NO: 22254 - DNA, 40 bp, Homo sapiens
gaaaggaaacgaggcagtatataagaaaatagggtggttc

SEQ ID NO: 22255 - DNA, 40 bp, Homo sapiens
gaaccaccctattttcttatatactgcctcgtttcctttc

SEQ ID NO: 22256 - DNA, 40 bp, Homo sapiens
aaaggaaacgaggcagtatataagaaaatagggtggttca

SEQ ID NO: 22257 - DNA, 40 bp, Homo sapiens
tgaaccaccctattttcttatatactgcctcgtttccttt

SEQ ID NO: 22258 - DNA, 40 bp, Homo sapiens
aaggaaacgaggcagtatataagaaaatagggtggttcag

SEQ ID NO: 22259 - DNA, 40 bp, Homo sapiens
ctgaaccaccctattttcttatatactgcctcgtttcctt

SEQ ID NO: 22260 - DNA, 40 bp, Homo sapiens
aggaaacgaggcagtatataagaaaatagggtggttcagt

SEQ ID NO: 22261 - DNA, 40 bp, Homo sapiens
actgaaccaccctattttcttatatactgcctcgtttcct

SEQ ID NO: 22262 - DNA, 40 bp, Homo sapiens
ggaaacgaggcagtatataagaaaatagggtggttcagtt

SEQ ID NO: 22263 - DNA, 40 bp, Homo sapiens
aactgaaccaccctattttcttatatactgcctcgtttcc

SEQ ID NO: 22264 - DNA, 40 bp, Homo sapiens
gaaacgaggcagtatataagaaaatagggtggttcagttg

SEQ ID NO: 22265 - DNA, 40 bp, Homo sapiens
caactgaaccaccctattttcttatatactgcctcgtttc

SEQ ID NO: 22266 - DNA, 40 bp, Homo sapiens
aaacgaggcagtatataagaaaatagggtggttcagttgt

SEQ ID NO: 22267 - DNA, 40 bp, Homo sapiens
acaactgaaccaccctattttcttatatactgcctcgttt

SEQ ID NO: 22268 - DNA, 40 bp, Homo sapiens
aacgaggcagtatataagaaaatagggtggttcagttgtt

SEQ ID NO: 22269 - DNA, 40 bp, Homo sapiens
aacaactgaaccaccctattttcttatatactgcctcgtt

SEQ ID NO: 22270 - DNA, 40 bp, Homo sapiens
acgaggcagtatataagaaaatagggtggttcagttgtta

SEQ ID NO: 22271 - DNA, 40 bp, Homo sapiens
taacaactgaaccaccctattttcttatatactgcctcgt

SEQ ID NO: 22272 - DNA, 40 bp, Homo sapiens
cgaggcagtatataagaaaatagggtggttcagttgttaa

SEQ ID NO: 22273 - DNA, 40 bp, Homo sapiens
ttaacaactgaaccaccctattttcttatatactgcctcg

SEQ ID NO: 22274 - DNA, 40 bp, Homo sapiens
gaggcagtatataagaaaatagggtggttcagttgttaac

SEQ ID NO: 22275 - DNA, 40 bp, Homo sapiens
gttaacaactgaaccaccctattttcttatatactgcctc

SEQ ID NO: 22276 - DNA, 40 bp, Homo sapiens
aggcagtatataagaaaatagggtggttcagttgttaaca

SEQ ID NO: 22277 - DNA, 40 bp, Homo sapiens
tgttaacaactgaaccaccctattttcttatatactgcct

SEQ ID NO: 22278 - DNA, 40 bp, Homo sapiens
ggcagtatataagaaaatagggtggttcagttgttaacac

SEQ ID NO: 22279 - DNA, 40 bp, Homo sapiens
gtgttaacaactgaaccaccctattttcttatatactgcc

SEQ ID NO: 22280 - DNA, 40 bp, Homo sapiens
gcagtatataagaaaatagggtggttcagttgttaacact

SEQ ID NO: 22281 - DNA, 40 bp, Homo sapiens
agtgttaacaactgaaccaccctattttcttatatactgc

SEQ ID NO: 22282 - DNA, 40 bp, Homo sapiens
cagtatataagaaaatagggtggttcagttgttaacactt

SEQ ID NO: 22283 - DNA, 40 bp, Homo sapiens
aagtgttaacaactgaaccaccctattttcttatatactg

SEQ ID NO: 22284 - DNA, 40 bp, Homo sapiens
agtatataagaaaatagggtggttcagttgttaacactta

SEQ ID NO: 22285 - DNA, 40 bp, Homo sapiens
taagtgttaacaactgaaccaccctattttcttatatact

SEQ ID NO: 22286 - DNA, 40 bp, Homo sapiens
gtatataagaaaatagggtggttcagttgttaacacttac

SEQ ID NO: 22287 - DNA, 40 bp, Homo sapiens
gtaagtgttaacaactgaaccaccctattttcttatatac

SEQ ID NO: 22288 - DNA, 40 bp, Homo sapiens
tatataagaaaatagggtggttcagttgttaacacttact

SEQ ID NO: 22289 - DNA, 40 bp, Homo sapiens
agtaagtgttaacaactgaaccaccctattttcttatata

SEQ ID NO: 22290 - DNA, 40 bp, Homo sapiens
atataagaaaatagggtggttcagttgttaacacttactg

SEQ ID NO: 22291 - DNA, 40 bp, Homo sapiens
cagtaagtgttaacaactgaaccaccctattttcttatat

SEQ ID NO: 22292 - DNA, 40 bp, Homo sapiens
tataagaaaatagggtggttcagttgttaacacttactga

SEQ ID NO: 22293 - DNA, 40 bp, Homo sapiens
tcagtaagtgttaacaactgaaccaccctattttcttata

SEQ ID NO: 22294 - DNA, 40 bp, Homo sapiens
ataagaaaatagggtggttcagttgttaacacttactgag

SEQ ID NO: 22295 - DNA, 40 bp, Homo sapiens
ctcagtaagtgttaacaactgaaccaccctattttcttat

SEQ ID NO: 22296 - DNA, 40 bp, Homo sapiens
taagaaaatagggtggttcagttgttaacacttactgagc

SEQ ID NO: 22297 - DNA, 40 bp, Homo sapiens
gctcagtaagtgttaacaactgaaccaccctattttctta

SEQ ID NO: 22298 - DNA, 40 bp, Homo sapiens
aagaaaatagggtggttcagttgttaacacttactgagct

SEQ ID NO: 22299 - DNA, 40 bp, Homo sapiens
agctcagtaagtgttaacaactgaaccaccctattttctt

SEQ ID NO: 22300 - DNA, 40 bp, Homo sapiens
agaaaatagggtggttcagttgttaacacttactgagctt

SEQ ID NO: 22301 - DNA, 40 bp, Homo sapiens
aagctcagtaagtgttaacaactgaaccaccctattttct

SEQ ID NO: 22302 - DNA, 40 bp, Homo sapiens
gaaaatagggtggttcagttgttaacacttactgagctta

SEQ ID NO: 22303 - DNA, 40 bp, Homo sapiens
taagctcagtaagtgttaacaactgaaccaccctattttc

SEQ ID NO: 22304 - DNA, 40 bp, Homo sapiens
aaaatagggtggttcagttgttaacacttactgagcttac

SEQ ID NO: 22305 - DNA, 40 bp, Homo sapiens
gtaagctcagtaagtgttaacaactgaaccaccctatttt

SEQ ID NO: 22306 - DNA, 40 bp, Homo sapiens
aaatagggtggttcagttgttaacacttactgagcttact

SEQ ID NO: 22307 - DNA, 40 bp, Homo sapiens
agtaagctcagtaagtgttaacaactgaaccaccctattt

SEQ ID NO: 22308 - DNA, 40 bp, Homo sapiens
aatagggtggttcagttgttaacacttactgagcttactt

SEQ ID NO: 22309 - DNA, 40 bp, Homo sapiens
aagtaagctcagtaagtgttaacaactgaaccaccctatt

SEQ ID NO: 22310 - DNA, 40 bp, Homo sapiens
atagggtggttcagttgttaacacttactgagcttacttt

SEQ ID NO: 22311 - DNA, 40 bp, Homo sapiens
aaagtaagctcagtaagtgttaacaactgaaccaccctat

SEQ ID NO: 22312 - DNA, 40 bp, Homo sapiens
tagggtggttcagttgttaacacttactgagcttactttg

SEQ ID NO: 22313 - DNA, 40 bp, Homo sapiens
caaagtaagctcagtaagtgttaacaactgaaccacccta

SEQ ID NO: 22314 - DNA, 40 bp, Homo sapiens
agggtggttcagttgttaacacttactgagcttactttgt

SEQ ID NO: 22315 - DNA, 40 bp, Homo sapiens
acaaagtaagctcagtaagtgttaacaactgaaccaccct

SEQ ID NO: 22316 - DNA, 40 bp, Homo sapiens
gggtggttcagttgttaacacttactgagcttactttgtt

SEQ ID NO: 22317 - DNA, 40 bp, Homo sapiens
aacaaagtaagctcagtaagtgttaacaactgaaccaccc

SEQ ID NO: 22318 - DNA, 40 bp, Homo sapiens
ggtggttcagttgttaacacttactgagcttactttgttg

SEQ ID NO: 22319 - DNA, 40 bp, Homo sapiens
caacaaagtaagctcagtaagtgttaacaactgaaccacc

SEQ ID NO: 22320 - DNA, 40 bp, Homo sapiens
gtggttcagttgttaacacttactgagcttactttgttga

SEQ ID NO: 22321 - DNA, 40 bp, Homo sapiens
tcaacaaagtaagctcagtaagtgttaacaactgaaccac

SEQ ID NO: 22322 - DNA, 40 bp, Homo sapiens
tggttcagttgttaacacttactgagcttactttgttgaa

SEQ ID NO: 22323 - DNA, 40 bp, Homo sapiens
ttcaacaaagtaagctcagtaagtgttaacaactgaacca

SEQ ID NO: 22324 - DNA, 40 bp, Homo sapiens
ggttcagttgttaacacttactgagcttactttgttgaag

SEQ ID NO: 22325 - DNA, 40 bp, Homo sapiens
cttcaacaaagtaagctcagtaagtgttaacaactgaacc

SEQ ID NO: 22326 - DNA, 40 bp, Homo sapiens
gttcagttgttaacacttactgagcttactttgttgaagg

SEQ ID NO: 22327 - DNA, 40 bp, Homo sapiens
ccttcaacaaagtaagctcagtaagtgttaacaactgaac

SEQ ID NO: 22328 - DNA, 40 bp, Homo sapiens
ttcagttgttaacacttactgagcttactttgttgaaggg

SEQ ID NO: 22329 - DNA, 40 bp, Homo sapiens
cccttcaacaaagtaagctcagtaagtgttaacaactgaa

SEQ ID NO: 22330 - DNA, 40 bp, Homo sapiens
tcagttgttaacacttactgagcttactttgttgaaggga

SEQ ID NO: 22331 - DNA, 40 bp, Homo sapiens
tcccttcaacaaagtaagctcagtaagtgttaacaactga

SEQ ID NO: 22332 - DNA, 40 bp, Homo sapiens
cagttgttaacacttactgagcttactttgttgaagggac

SEQ ID NO: 22333 - DNA, 40 bp, Homo sapiens
gtcccttcaacaaagtaagctcagtaagtgttaacaactg

SEQ ID NO: 22334 - DNA, 40 bp, Homo sapiens
agttgttaacacttactgagcttactttgttgaagggact

SEQ ID NO: 22335 - DNA, 40 bp, Homo sapiens
agtcccttcaacaaagtaagctcagtaagtgttaacaact

SEQ ID NO: 22336 - DNA, 40 bp, Homo sapiens
gttgttaacacttactgagcttactttgttgaagggacta

SEQ ID NO: 22337 - DNA, 40 bp, Homo sapiens
tagtcccttcaacaaagtaagctcagtaagtgttaacaac

SEQ ID NO: 22338 - DNA, 40 bp, Homo sapiens
ttgttaacacttactgagcttactttgttgaagggactaa

SEQ ID NO: 22339 - DNA, 40 bp, Homo sapiens
ttagtcccttcaacaaagtaagctcagtaagtgttaacaa

SEQ ID NO: 22340 - DNA, 40 bp, Homo sapiens
tgttaacacttactgagcttactttgttgaagggactaaa

SEQ ID NO: 22341 - DNA, 40 bp, Homo sapiens
tttagtcccttcaacaaagtaagctcagtaagtgttaaca

SEQ ID NO: 22342 - DNA, 40 bp, Homo sapiens
gttaacacttactgagcttactttgttgaagggactaaaa

SEQ ID NO: 22343 - DNA, 40 bp, Homo sapiens
ttttagtcccttcaacaaagtaagctcagtaagtgttaac

SEQ ID NO: 22344 - DNA, 40 bp, Homo sapiens
ttaacacttactgagcttactttgttgaagggactaaaag

SEQ ID NO: 22345 - DNA, 40 bp, Homo sapiens
cttttagtcccttcaacaaagtaagctcagtaagtgttaa

SEQ ID NO: 22346 - DNA, 40 bp, Homo sapiens
taacacttactgagcttactttgttgaagggactaaaagg

SEQ ID NO: 22347 - DNA, 40 bp, Homo sapiens
ccttttagtcccttcaacaaagtaagctcagtaagtgtta

SEQ ID NO: 22348 - DNA, 40 bp, Homo sapiens
aacacttactgagcttactttgttgaagggactaaaaggc

SEQ ID NO: 22349 - DNA, 40 bp, Homo sapiens
gccttttagtcccttcaacaaagtaagctcagtaagtgtt

SEQ ID NO: 22350 - DNA, 40 bp, Homo sapiens
acacttactgagcttactttgttgaagggactaaaaggca

SEQ ID NO: 22351 - DNA, 40 bp, Homo sapiens
tgccttttagtcccttcaacaaagtaagctcagtaagtgt

SEQ ID NO: 22352 - DNA, 40 bp, Homo sapiens
cacttactgagcttactttgttgaagggactaaaaggcag

SEQ ID NO: 22353 - DNA, 40 bp, Homo sapiens
ctgccttttagtcccttcaacaaagtaagctcagtaagtg

SEQ ID NO: 22354 - DNA, 40 bp, Homo sapiens
acttactgagcttactttgttgaagggactaaaaggcagc

SEQ ID NO: 22355 - DNA, 40 bp, Homo sapiens
gctgccttttagtcccttcaacaaagtaagctcagtaagt

SEQ ID NO: 22356 - DNA, 40 bp, Homo sapiens
cttactgagcttactttgttgaagggactaaaaggcagca

SEQ ID NO: 22357 - DNA, 40 bp, Homo sapiens
tgctgccttttagtcccttcaacaaagtaagctcagtaag

SEQ ID NO: 22358 - DNA, 40 bp, Homo sapiens
ttactgagcttactttgttgaagggactaaaaggcagcag

SEQ ID NO: 22359 - DNA, 40 bp, Homo sapiens
ctgctgccttttagtcccttcaacaaagtaagctcagtaa

SEQ ID NO: 22360 - DNA, 40 bp, Homo sapiens
tactgagcttactttgttgaagggactaaaaggcagcagt

SEQ ID NO: 22361 - DNA, 40 bp, Homo sapiens
actgctgccttttagtcccttcaacaaagtaagctcagta

SEQ ID NO: 22362 - DNA, 40 bp, Homo sapiens
actgagcttactttgttgaagggactaaaaggcagcagtg

SEQ ID NO: 22363 - DNA, 40 bp, Homo sapiens
cactgctgccttttagtcccttcaacaaagtaagctcagt

SEQ ID NO: 22364 - DNA, 40 bp, Homo sapiens
ctgagcttactttgttgaagggactaaaaggcagcagtgt

SEQ ID NO: 22365 - DNA, 40 bp, Homo sapiens
acactgctgccttttagtcccttcaacaaagtaagctcag

SEQ ID NO: 22366 - DNA, 40 bp, Homo sapiens
tgagcttactttgttgaagggactaaaaggcagcagtgtg

SEQ ID NO: 22367 - DNA, 40 bp, Homo sapiens
cacactgctgccttttagtcccttcaacaaagtaagctca

SEQ ID NO: 22368 - DNA, 40 bp, Homo sapiens
gagcttactttgttgaagggactaaaaggcagcagtgtgg

SEQ ID NO: 22369 - DNA, 40 bp, Homo sapiens
ccacactgctgccttttagtcccttcaacaaagtaagctc

SEQ ID NO: 22370 - DNA, 40 bp, Homo sapiens
agcttactttgttgaagggactaaaaggcagcagtgtggc

SEQ ID NO: 22371 - DNA, 40 bp, Homo sapiens
gccacactgctgccttttagtcccttcaacaaagtaagct

SEQ ID NO: 22372 - DNA, 40 bp, Homo sapiens
gcttactttgttgaagggactaaaaggcagcagtgtggct

SEQ ID NO: 22373 - DNA, 40 bp, Homo sapiens
agccacactgctgccttttagtcccttcaacaaagtaagc

SEQ ID NO: 22374 - DNA, 40 bp, Homo sapiens
cttactttgttgaagggactaaaaggcagcagtgtggctc

SEQ ID NO: 22375 - DNA, 40 bp, Homo sapiens
gagccacactgctgccttttagtcccttcaacaaagtaag

SEQ ID NO: 22376 - DNA, 40 bp, Homo sapiens
ttactttgttgaagggactaaaaggcagcagtgtggctct

SEQ ID NO: 22377 - DNA, 40 bp, Homo sapiens
agagccacactgctgccttttagtcccttcaacaaagtaa

SEQ ID NO: 22378 - DNA, 40 bp, Homo sapiens
tactttgttgaagggactaaaaggcagcagtgtggctctc

SEQ ID NO: 22379 - DNA, 40 bp, Homo sapiens
gagagccacactgctgccttttagtcccttcaacaaagta

SEQ ID NO: 22380 - DNA, 40 bp, Homo sapiens
actttgttgaagggactaaaaggcagcagtgtggctctct

SEQ ID NO: 22381 - DNA, 40 bp, Homo sapiens
agagagccacactgctgccttttagtcccttcaacaaagt

SEQ ID NO: 22382 - DNA, 40 bp, Homo sapiens
ctttgttgaagggactaaaaggcagcagtgtggctctctg

SEQ ID NO: 22383 - DNA, 40 bp, Homo sapiens
cagagagccacactgctgccttttagtcccttcaacaaag

SEQ ID NO: 22384 - DNA, 40 bp, Homo sapiens
tttgttgaagggactaaaaggcagcagtgtggctctctga

SEQ ID NO: 22385 - DNA, 40 bp, Homo sapiens
tcagagagccacactgctgccttttagtcccttcaacaaa

SEQ ID NO: 22386 - DNA, 40 bp, Homo sapiens
ttgttgaagggactaaaaggcagcagtgtggctctctgag

SEQ ID NO: 22387 - DNA, 40 bp, Homo sapiens
ctcagagagccacactgctgccttttagtcccttcaacaa

SEQ ID NO: 22388 - DNA, 40 bp, Homo sapiens
tgttgaagggactaaaaggcagcagtgtggctctctgagc

SEQ ID NO: 22389 - DNA, 40 bp, Homo sapiens
gctcagagagccacactgctgccttttagtcccttcaaca

SEQ ID NO: 22390 - DNA, 40 bp, Homo sapiens
gttgaagggactaaaaggcagcagtgtggctctctgagct

SEQ ID NO: 22391 - DNA, 40 bp, Homo sapiens
agctcagagagccacactgctgccttttagtcccttcaac

SEQ ID NO: 22392 - DNA, 40 bp, Homo sapiens
ttgaagggactaaaaggcagcagtgtggctctctgagctt

SEQ ID NO: 22393 - DNA, 40 bp, Homo sapiens
aagctcagagagccacactgctgccttttagtcccttcaa

SEQ ID NO: 22394 - DNA, 40 bp, Homo sapiens
tgaagggactaaaaggcagcagtgtggctctctgagcttc

SEQ ID NO: 22395 - DNA, 40 bp, Homo sapiens
gaagctcagagagccacactgctgccttttagtcccttca

SEQ ID NO: 22396 - DNA, 40 bp, Homo sapiens
gaagggactaaaaggcagcagtgtggctctctgagcttct

SEQ ID NO: 22397 - DNA, 40 bp, Homo sapiens
agaagctcagagagccacactgctgccttttagtcccttc

SEQ ID NO: 22398 - DNA, 40 bp, Homo sapiens
aagggactaaaaggcagcagtgtggctctctgagcttctt

SEQ ID NO: 22399 - DNA, 40 bp, Homo sapiens
aagaagctcagagagccacactgctgccttttagtccctt

SEQ ID NO: 22400 - DNA, 40 bp, Homo sapiens
agggactaaaaggcagcagtgtggctctctgagcttcttt

SEQ ID NO: 22401 - DNA, 40 bp, Homo sapiens
aaagaagctcagagagccacactgctgccttttagtccct

SEQ ID NO: 22402 - DNA, 40 bp, Homo sapiens
gggactaaaaggcagcagtgtggctctctgagcttctttg

SEQ ID NO: 22403 - DNA, 40 bp, Homo sapiens
caaagaagctcagagagccacactgctgccttttagtccc

SEQ ID NO: 22404 - DNA, 40 bp, Homo sapiens
ggactaaaaggcagcagtgtggctctctgagcttctttgc

SEQ ID NO: 22405 - DNA, 40 bp, Homo sapiens
gcaaagaagctcagagagccacactgctgccttttagtcc

SEQ ID NO: 22406 - DNA, 40 bp, Homo sapiens
gactaaaaggcagcagtgtggctctctgagcttctttgca

SEQ ID NO: 22407 - DNA, 40 bp, Homo sapiens
tgcaaagaagctcagagagccacactgctgccttttagtc

SEQ ID NO: 22408 - DNA, 40 bp, Homo sapiens
actaaaaggcagcagtgtggctctctgagcttctttgcat

SEQ ID NO: 22409 - DNA, 40 bp, Homo sapiens
atgcaaagaagctcagagagccacactgctgccttttagt

SEQ ID NO: 22410 - DNA, 40 bp, Homo sapiens
ctaaaaggcagcagtgtggctctctgagcttctttgcatg

SEQ ID NO: 22411 - DNA, 40 bp, Homo sapiens
catgcaaagaagctcagagagccacactgctgccttttag

SEQ ID NO: 22412 - DNA, 40 bp, Homo sapiens
taaaaggcagcagtgtggctctctgagcttctttgcatgc

SEQ ID NO: 22413 - DNA, 40 bp, Homo sapiens
gcatgcaaagaagctcagagagccacactgctgcctttta

SEQ ID NO: 22414 - DNA, 40 bp, Homo sapiens
aaaaggcagcagtgtggctctctgagcttctttgcatgca

SEQ ID NO: 22415 - DNA, 40 bp, Homo sapiens
tgcatgcaaagaagctcagagagccacactgctgcctttt

SEQ ID NO: 22416 - DNA, 40 bp, Homo sapiens
aaaggcagcagtgtggctctctgagcttctttgcatgcac

SEQ ID NO: 22417 - DNA, 40 bp, Homo sapiens
gtgcatgcaaagaagctcagagagccacactgctgccttt

SEQ ID NO: 22418 - DNA, 40 bp, Homo sapiens
aaggcagcagtgtggctctctgagcttctttgcatgcact

SEQ ID NO: 22419 - DNA, 40 bp, Homo sapiens
agtgcatgcaaagaagctcagagagccacactgctgcctt

SEQ ID NO: 22420 - DNA, 40 bp, Homo sapiens
aggcagcagtgtggctctctgagcttctttgcatgcactc

SEQ ID NO: 22421 - DNA, 40 bp, Homo sapiens
gagtgcatgcaaagaagctcagagagccacactgctgcct

SEQ ID NO: 22422 - DNA, 40 bp, Homo sapiens
ggcagcagtgtggctctctgagcttctttgcatgcactca

SEQ ID NO: 22423 - DNA, 40 bp, Homo sapiens
tgagtgcatgcaaagaagctcagagagccacactgctgcc

SEQ ID NO: 22424 - DNA, 40 bp, Homo sapiens
gcagcagtgtggctctctgagcttctttgcatgcactcag

SEQ ID NO: 22425 - DNA, 40 bp, Homo sapiens
ctgagtgcatgcaaagaagctcagagagccacactgctgc

SEQ ID NO: 22426 - DNA, 40 bp, Homo sapiens
cagcagtgtggctctctgagcttctttgcatgcactcagg

SEQ ID NO: 22427 - DNA, 40 bp, Homo sapiens
cctgagtgcatgcaaagaagctcagagagccacactgctg

SEQ ID NO: 22428 - DNA, 40 bp, Homo sapiens
agcagtgtggctctctgagcttctttgcatgcactcagga

SEQ ID NO: 22429 - DNA, 40 bp, Homo sapiens
tcctgagtgcatgcaaagaagctcagagagccacactgct

SEQ ID NO: 22430 - DNA, 40 bp, Homo sapiens
gcagtgtggctctctgagcttctttgcatgcactcaggag

SEQ ID NO: 22431 - DNA, 40 bp, Homo sapiens
ctcctgagtgcatgcaaagaagctcagagagccacactgc

SEQ ID NO: 22432 - DNA, 40 bp, Homo sapiens
cagtgtggctctctgagcttctttgcatgcactcaggagc

SEQ ID NO: 22433 - DNA, 40 bp, Homo sapiens
gctcctgagtgcatgcaaagaagctcagagagccacactg

SEQ ID NO: 22434 - DNA, 40 bp, Homo sapiens
agtgtggctctctgagcttctttgcatgcactcaggagct

SEQ ID NO: 22435 - DNA, 40 bp, Homo sapiens
agctcctgagtgcatgcaaagaagctcagagagccacact

SEQ ID NO: 22436 - DNA, 40 bp, Homo sapiens
gtgtggctctctgagcttctttgcatgcactcaggagctg

SEQ ID NO: 22437 - DNA, 40 bp, Homo sapiens
cagctcctgagtgcatgcaaagaagctcagagagccacac

SEQ ID NO: 22438 - DNA, 40 bp, Homo sapiens
tgtggctctctgagcttctttgcatgcactcaggagctgc

SEQ ID NO: 22439 - DNA, 40 bp, Homo sapiens
gcagctcctgagtgcatgcaaagaagctcagagagccaca

SEQ ID NO: 22440 - DNA, 40 bp, Homo sapiens
gtggctctctgagcttctttgcatgcactcaggagctgct

SEQ ID NO: 22441 - DNA, 40 bp, Homo sapiens
agcagctcctgagtgcatgcaaagaagctcagagagccac

SEQ ID NO: 22442 - DNA, 40 bp, Homo sapiens
tggctctctgagcttctttgcatgcactcaggagctgctt

SEQ ID NO: 22443 - DNA, 40 bp, Homo sapiens
aagcagctcctgagtgcatgcaaagaagctcagagagcca

SEQ ID NO: 22444 - DNA, 40 bp, Homo sapiens
ggctctctgagcttctttgcatgcactcaggagctgctta

SEQ ID NO: 22445 - DNA, 40 bp, Homo sapiens
taagcagctcctgagtgcatgcaaagaagctcagagagcc

SEQ ID NO: 22446 - DNA, 40 bp, Homo sapiens
gctctctgagcttctttgcatgcactcaggagctgcttaa

SEQ ID NO: 22447 - DNA, 40 bp, Homo sapiens
ttaagcagctcctgagtgcatgcaaagaagctcagagagc

SEQ ID NO: 22448 - DNA, 40 bp, Homo sapiens
ctctctgagcttctttgcatgcactcaggagctgcttaat

SEQ ID NO: 22449 - DNA, 40 bp, Homo sapiens
attaagcagctcctgagtgcatgcaaagaagctcagagag

SEQ ID NO: 22450 - DNA, 40 bp, Homo sapiens
tctctgagcttctttgcatgcactcaggagctgcttaatg

SEQ ID NO: 22451 - DNA, 40 bp, Homo sapiens
cattaagcagctcctgagtgcatgcaaagaagctcagaga

SEQ ID NO: 22452 - DNA, 40 bp, Homo sapiens
ctctgagcttctttgcatgcactcaggagctgcttaatgg

SEQ ID NO: 22453 - DNA, 40 bp, Homo sapiens
ccattaagcagctcctgagtgcatgcaaagaagctcagag

SEQ ID NO: 22454 - DNA, 40 bp, Homo sapiens
tctgagcttctttgcatgcactcaggagctgcttaatgga

SEQ ID NO: 22455 - DNA, 40 bp, Homo sapiens
tccattaagcagctcctgagtgcatgcaaagaagctcaga

SEQ ID NO: 22456 - DNA, 40 bp, Homo sapiens
ctgagcttctttgcatgcactcaggagctgcttaatggag

SEQ ID NO: 22457 - DNA, 40 bp, Homo sapiens
ctccattaagcagctcctgagtgcatgcaaagaagctcag

SEQ ID NO: 22458 - DNA, 40 bp, Homo sapiens
tgagcttctttgcatgcactcaggagctgcttaatggagt

SEQ ID NO: 22459 - DNA, 40 bp, Homo sapiens
actccattaagcagctcctgagtgcatgcaaagaagctca

SEQ ID NO: 22460 - DNA, 40 bp, Homo sapiens
gagcttctttgcatgcactcaggagctgcttaatggagtc

SEQ ID NO: 22461 - DNA, 40 bp, Homo sapiens
gactccattaagcagctcctgagtgcatgcaaagaagctc

SEQ ID NO: 22462 - DNA, 40 bp, Homo sapiens
agcttctttgcatgcactcaggagctgcttaatggagtcc

SEQ ID NO: 22463 - DNA, 40 bp, Homo sapiens
ggactccattaagcagctcctgagtgcatgcaaagaagct

SEQ ID NO: 22464 - DNA, 40 bp, Homo sapiens
gcttctttgcatgcactcaggagctgcttaatggagtcca

SEQ ID NO: 22465 - DNA, 40 bp, Homo sapiens
tggactccattaagcagctcctgagtgcatgcaaagaagc

SEQ ID NO: 22466 - DNA, 40 bp, Homo sapiens
cttctttgcatgcactcaggagctgcttaatggagtccaa

SEQ ID NO: 22467 - DNA, 40 bp, Homo sapiens
ttggactccattaagcagctcctgagtgcatgcaaagaag

SEQ ID NO: 22468 - DNA, 40 bp, Homo sapiens
ttctttgcatgcactcaggagctgcttaatggagtccaag

SEQ ID NO: 22469 - DNA, 40 bp, Homo sapiens
cttggactccattaagcagctcctgagtgcatgcaaagaa

SEQ ID NO: 22470 - DNA, 40 bp, Homo sapiens
tctttgcatgcactcaggagctgcttaatggagtccaagg

SEQ ID NO: 22471 - DNA, 40 bp, Homo sapiens
ccttggactccattaagcagctcctgagtgcatgcaaaga

SEQ ID NO: 22472 - DNA, 40 bp, Homo sapiens
ctttgcatgcactcaggagctgcttaatggagtccaaggc

SEQ ID NO: 22473 - DNA, 40 bp, Homo sapiens
gccttggactccattaagcagctcctgagtgcatgcaaag

SEQ ID NO: 22474 - DNA, 40 bp, Homo sapiens
tttgcatgcactcaggagctgcttaatggagtccaaggct

SEQ ID NO: 22475 - DNA, 40 bp, Homo sapiens
agccttggactccattaagcagctcctgagtgcatgcaaa

SEQ ID NO: 22476 - DNA, 40 bp, Homo sapiens
ttgcatgcactcaggagctgcttaatggagtccaaggctt

SEQ ID NO: 22477 - DNA, 40 bp, Homo sapiens
aagccttggactccattaagcagctcctgagtgcatgcaa

SEQ ID NO: 22478 - DNA, 40 bp, Homo sapiens
tgcatgcactcaggagctgcttaatggagtccaaggcttg

SEQ ID NO: 22479 - DNA, 40 bp, Homo sapiens
caagccttggactccattaagcagctcctgagtgcatgca

SEQ ID NO: 22480 - DNA, 40 bp, Homo sapiens
gcatgcactcaggagctgcttaatggagtccaaggcttgg

SEQ ID NO: 22481 - DNA, 40 bp, Homo sapiens
ccaagccttggactccattaagcagctcctgagtgcatgc

SEQ ID NO: 22482 - DNA, 40 bp, Homo sapiens
catgcactcaggagctgcttaatggagtccaaggcttggt

SEQ ID NO: 22483 - DNA, 40 bp, Homo sapiens
accaagccttggactccattaagcagctcctgagtgcatg

SEQ ID NO: 22484 - DNA, 40 bp, Homo sapiens
atgcactcaggagctgcttaatggagtccaaggcttggtg

SEQ ID NO: 22485 - DNA, 40 bp, Homo sapiens
caccaagccttggactccattaagcagctcctgagtgcat

SEQ ID NO: 22486 - DNA, 40 bp, Homo sapiens
tgcactcaggagctgcttaatggagtccaaggcttggtgg

SEQ ID NO: 22487 - DNA, 40 bp, Homo sapiens
ccaccaagccttggactccattaagcagctcctgagtgca

SEQ ID NO: 22488 - DNA, 40 bp, Homo sapiens
gcactcaggagctgcttaatggagtccaaggcttggtggt

SEQ ID NO: 22489 - DNA, 40 bp, Homo sapiens
accaccaagccttggactccattaagcagctcctgagtgc

SEQ ID NO: 22490 - DNA, 40 bp, Homo sapiens
cactcaggagctgcttaatggagtccaaggcttggtggtg

SEQ ID NO: 22491 - DNA, 40 bp, Homo sapiens
caccaccaagccttggactccattaagcagctcctgagtg

SEQ ID NO: 22492 - DNA, 40 bp, Homo sapiens
actcaggagctgcttaatggagtccaaggcttggtggtgt

SEQ ID NO: 22493 - DNA, 40 bp, Homo sapiens
acaccaccaagccttggactccattaagcagctcctgagt

SEQ ID NO: 22494 - DNA, 40 bp, Homo sapiens
ctcaggagctgcttaatggagtccaaggcttggtggtgtg

SEQ ID NO: 22495 - DNA, 40 bp, Homo sapiens
cacaccaccaagccttggactccattaagcagctcctgag

SEQ ID NO: 22496 - DNA, 40 bp, Homo sapiens
tcaggagctgcttaatggagtccaaggcttggtggtgtgt

SEQ ID NO: 22497 - DNA, 40 bp, Homo sapiens
acacaccaccaagccttggactccattaagcagctcctga

SEQ ID NO: 22498 - DNA, 40 bp, Homo sapiens
caggagctgcttaatggagtccaaggcttggtggtgtgtt

SEQ ID NO: 22499 - DNA, 40 bp, Homo sapiens
aacacaccaccaagccttggactccattaagcagctcctg

SEQ ID NO: 22500 - DNA, 40 bp, Homo sapiens
aggagctgcttaatggagtccaaggcttggtggtgtgtta

SEQ ID NO: 22501 - DNA, 40 bp, Homo sapiens
taacacaccaccaagccttggactccattaagcagctcct

SEQ ID NO: 22502 - DNA, 40 bp, Homo sapiens
ggagctgcttaatggagtccaaggcttggtggtgtgttac

SEQ ID NO: 22503 - DNA, 40 bp, Homo sapiens
gtaacacaccaccaagccttggactccattaagcagctcc

SEQ ID NO: 22504 - DNA, 40 bp, Homo sapiens
gagctgcttaatggagtccaaggcttggtggtgtgttaca

SEQ ID NO: 22505 - DNA, 40 bp, Homo sapiens
tgtaacacaccaccaagccttggactccattaagcagctc

SEQ ID NO: 22506 - DNA, 40 bp, Homo sapiens
agctgcttaatggagtccaaggcttggtggtgtgttacag

SEQ ID NO: 22507 - DNA, 40 bp, Homo sapiens
ctgtaacacaccaccaagccttggactccattaagcagct

SEQ ID NO: 22508 - DNA, 40 bp, Homo sapiens
gctgcttaatggagtccaaggcttggtggtgtgttacagg

SEQ ID NO: 22509 - DNA, 40 bp, Homo sapiens
cctgtaacacaccaccaagccttggactccattaagcagc

SEQ ID NO: 22510 - DNA, 40 bp, Homo sapiens
ctgcttaatggagtccaaggcttggtggtgtgttacaggg

SEQ ID NO: 22511 - DNA, 40 bp, Homo sapiens
ccctgtaacacaccaccaagccttggactccattaagcag

SEQ ID NO: 22512 - DNA, 40 bp, Homo sapiens
tgcttaatggagtccaaggcttggtggtgtgttacagggg

SEQ ID NO: 22513 - DNA, 40 bp, Homo sapiens
cccctgtaacacaccaccaagccttggactccattaagca

SEQ ID NO: 22514 - DNA, 40 bp, Homo sapiens
gcttaatggagtccaaggcttggtggtgtgttacagggga

SEQ ID NO: 22515 - DNA, 40 bp, Homo sapiens
tcccctgtaacacaccaccaagccttggactccattaagc

SEQ ID NO: 22516 - DNA, 40 bp, Homo sapiens
cttaatggagtccaaggcttggtggtgtgttacaggggat

SEQ ID NO: 22517 - DNA, 40 bp, Homo sapiens
atcccctgtaacacaccaccaagccttggactccattaag

SEQ ID NO: 22518 - DNA, 40 bp, Homo sapiens
ttaatggagtccaaggcttggtggtgtgttacaggggatg

SEQ ID NO: 22519 - DNA, 40 bp, Homo sapiens
catcccctgtaacacaccaccaagccttggactccattaa

SEQ ID NO: 22520 - DNA, 40 bp, Homo sapiens
taatggagtccaaggcttggtggtgtgttacaggggatga

SEQ ID NO: 22521 - DNA, 40 bp, Homo sapiens
tcatcccctgtaacacaccaccaagccttggactccatta

SEQ ID NO: 22522 - DNA, 40 bp, Homo sapiens
aatggagtccaaggcttggtggtgtgttacaggggatgat

SEQ ID NO: 22523 - DNA, 40 bp, Homo sapiens
atcatcccctgtaacacaccaccaagccttggactccatt

SEQ ID NO: 22524 - DNA, 40 bp, Homo sapiens
atggagtccaaggcttggtggtgtgttacaggggatgata

SEQ ID NO: 22525 - DNA, 40 bp, Homo sapiens
tatcatcccctgtaacacaccaccaagccttggactccat

SEQ ID NO: 22526 - DNA, 40 bp, Homo sapiens
tggagtccaaggcttggtggtgtgttacaggggatgatag

SEQ ID NO: 22527 - DNA, 40 bp, Homo sapiens
ctatcatcccctgtaacacaccaccaagccttggactcca

SEQ ID NO: 22528 - DNA, 40 bp, Homo sapiens
ggagtccaaggcttggtggtgtgttacaggggatgatagg

SEQ ID NO: 22529 - DNA, 40 bp, Homo sapiens
cctatcatcccctgtaacacaccaccaagccttggactcc

SEQ ID NO: 22530 - DNA, 40 bp, Homo sapiens
gagtccaaggcttggtggtgtgttacaggggatgatagga

SEQ ID NO: 22531 - DNA, 40 bp, Homo sapiens
tcctatcatcccctgtaacacaccaccaagccttggactc

SEQ ID NO: 22532 - DNA, 40 bp, Homo sapiens
agtccaaggcttggtggtgtgttacaggggatgataggag

SEQ ID NO: 22533 - DNA, 40 bp, Homo sapiens
ctcctatcatcccctgtaacacaccaccaagccttggact

SEQ ID NO: 22534 - DNA, 40 bp, Homo sapiens
gtccaaggcttggtggtgtgttacaggggatgataggagg

SEQ ID NO: 22535 - DNA, 40 bp, Homo sapiens
cctcctatcatcccctgtaacacaccaccaagccttggac

SEQ ID NO: 22536 - DNA, 40 bp, Homo sapiens
tccaaggcttggtggtgtgttacaggggatgataggaggg

SEQ ID NO: 22537 - DNA, 40 bp, Homo sapiens
ccctcctatcatcccctgtaacacaccaccaagccttgga

SEQ ID NO: 22538 - DNA, 40 bp, Homo sapiens
ccaaggcttggtggtgtgttacaggggatgataggagggt

SEQ ID NO: 22539 - DNA, 40 bp, Homo sapiens
accctcctatcatcccctgtaacacaccaccaagccttgg

SEQ ID NO: 22540 - DNA, 40 bp, Homo sapiens
caaggcttggtggtgtgttacaggggatgataggagggtc

SEQ ID NO: 22541 - DNA, 40 bp, Homo sapiens
gaccctcctatcatcccctgtaacacaccaccaagccttg

SEQ ID NO: 22542 - DNA, 40 bp, Homo sapiens
aaggcttggtggtgtgttacaggggatgataggagggtcc

SEQ ID NO: 22543 - DNA, 40 bp, Homo sapiens
ggaccctcctatcatcccctgtaacacaccaccaagcctt

SEQ ID NO: 22544 - DNA, 40 bp, Homo sapiens
aggcttggtggtgtgttacaggggatgataggagggtcct

SEQ ID NO: 22545 - DNA, 40 bp, Homo sapiens
aggaccctcctatcatcccctgtaacacaccaccaagcct

SEQ ID NO: 22546 - DNA, 40 bp, Homo sapiens
ggcttggtggtgtgttacaggggatgataggagggtccta

SEQ ID NO: 22547 - DNA, 40 bp, Homo sapiens
taggaccctcctatcatcccctgtaacacaccaccaagcc

SEQ ID NO: 22548 - DNA, 40 bp, Homo sapiens
gcttggtggtgtgttacaggggatgataggagggtcctat

SEQ ID NO: 22549 - DNA, 40 bp, Homo sapiens
ataggaccctcctatcatcccctgtaacacaccaccaagc

SEQ ID NO: 22550 - DNA, 40 bp, Homo sapiens
cttggtggtgtgttacaggggatgataggagggtcctatt

SEQ ID NO: 22551 - DNA, 40 bp, Homo sapiens
aataggaccctcctatcatcccctgtaacacaccaccaag

SEQ ID NO: 22552 - DNA, 40 bp, Homo sapiens
ttggtggtgtgttacaggggatgataggagggtcctattc

SEQ ID NO: 22553 - DNA, 40 bp, Homo sapiens
gaataggaccctcctatcatcccctgtaacacaccaccaa

SEQ ID NO: 22554 - DNA, 40 bp, Homo sapiens
tggtggtgtgttacaggggatgataggagggtcctattca

SEQ ID NO: 22555 - DNA, 40 bp, Homo sapiens
tgaataggaccctcctatcatcccctgtaacacaccacca

SEQ ID NO: 22556 - DNA, 40 bp, Homo sapiens
ggtggtgtgttacaggggatgataggagggtcctattcag

SEQ ID NO: 22557 - DNA, 40 bp, Homo sapiens
ctgaataggaccctcctatcatcccctgtaacacaccacc

SEQ ID NO: 22558 - DNA, 40 bp, Homo sapiens
gtggtgtgttacaggggatgataggagggtcctattcaga

SEQ ID NO: 22559 - DNA, 40 bp, Homo sapiens
tctgaataggaccctcctatcatcccctgtaacacaccac

SEQ ID NO: 22560 - DNA, 40 bp, Homo sapiens
tggtgtgttacaggggatgataggagggtcctattcagaa

SEQ ID NO: 22561 - DNA, 40 bp, Homo sapiens
ttctgaataggaccctcctatcatcccctgtaacacacca

SEQ ID NO: 22562 - DNA, 40 bp, Homo sapiens
ggtgtgttacaggggatgataggagggtcctattcagaag

SEQ ID NO: 22563 - DNA, 40 bp, Homo sapiens
cttctgaataggaccctcctatcatcccctgtaacacacc

SEQ ID NO: 22564 - DNA, 40 bp, Homo sapiens
gtgtgttacaggggatgataggagggtcctattcagaagt

SEQ ID NO: 22565 - DNA, 40 bp, Homo sapiens
acttctgaataggaccctcctatcatcccctgtaacacac

SEQ ID NO: 22566 - DNA, 40 bp, Homo sapiens
tgtgttacaggggatgataggagggtcctattcagaagtg

SEQ ID NO: 22567 - DNA, 40 bp, Homo sapiens
cacttctgaataggaccctcctatcatcccctgtaacaca

SEQ ID NO: 22568 - DNA, 40 bp, Homo sapiens
gtgttacaggggatgataggagggtcctattcagaagtgg

SEQ ID NO: 22569 - DNA, 40 bp, Homo sapiens
ccacttctgaataggaccctcctatcatcccctgtaacac

SEQ ID NO: 22570 - DNA, 40 bp, Homo sapiens
tgttacaggggatgataggagggtcctattcagaagtggc

SEQ ID NO: 22571 - DNA, 40 bp, Homo sapiens
gccacttctgaataggaccctcctatcatcccctgtaaca

SEQ ID NO: 22572 - DNA, 40 bp, Homo sapiens
gttacaggggatgataggagggtcctattcagaagtggca

SEQ ID NO: 22573 - DNA, 40 bp, Homo sapiens
tgccacttctgaataggaccctcctatcatcccctgtaac

SEQ ID NO: 22574 - DNA, 40 bp, Homo sapiens
ttacaggggatgataggagggtcctattcagaagtggcaa

SEQ ID NO: 22575 - DNA, 40 bp, Homo sapiens
ttgccacttctgaataggaccctcctatcatcccctgtaa

SEQ ID NO: 22576 - DNA, 40 bp, Homo sapiens
tacaggggatgataggagggtcctattcagaagtggcaaa

SEQ ID NO: 22577 - DNA, 40 bp, Homo sapiens
tttgccacttctgaataggaccctcctatcatcccctgta

SEQ ID NO: 22578 - DNA, 40 bp, Homo sapiens
acaggggatgataggagggtcctattcagaagtggcaaat

SEQ ID NO: 22579 - DNA, 40 bp, Homo sapiens
atttgccacttctgaataggaccctcctatcatcccctgt

SEQ ID NO: 22580 - DNA, 40 bp, Homo sapiens
caggggatgataggagggtcctattcagaagtggcaaatt

SEQ ID NO: 22581 - DNA, 40 bp, Homo sapiens
aatttgccacttctgaataggaccctcctatcatcccctg

SEQ ID NO: 22582 - DNA, 40 bp, Homo sapiens
aggggatgataggagggtcctattcagaagtggcaaattg

SEQ ID NO: 22583 - DNA, 40 bp, Homo sapiens
caatttgccacttctgaataggaccctcctatcatcccct

SEQ ID NO: 22584 - DNA, 40 bp, Homo sapiens
ggggatgataggagggtcctattcagaagtggcaaattgt

SEQ ID NO: 22585 - DNA, 40 bp, Homo sapiens
acaatttgccacttctgaataggaccctcctatcatcccc

SEQ ID NO: 22586 - DNA, 40 bp, Homo sapiens
gggatgataggagggtcctattcagaagtggcaaattgtg

SEQ ID NO: 22587 - DNA, 40 bp, Homo sapiens
cacaatttgccacttctgaataggaccctcctatcatccc

SEQ ID NO: 22588 - DNA, 40 bp, Homo sapiens
ggatgataggagggtcctattcagaagtggcaaattgtga

SEQ ID NO: 22589 - DNA, 40 bp, Homo sapiens
tcacaatttgccacttctgaataggaccctcctatcatcc

SEQ ID NO: 22590 - DNA, 40 bp, Homo sapiens
gatgataggagggtcctattcagaagtggcaaattgtgaa

SEQ ID NO: 22591 - DNA, 40 bp, Homo sapiens
ttcacaatttgccacttctgaataggaccctcctatcatc

SEQ ID NO: 22592 - DNA, 40 bp, Homo sapiens
atgataggagggtcctattcagaagtggcaaattgtgaaa

SEQ ID NO: 22593 - DNA, 40 bp, Homo sapiens
tttcacaatttgccacttctgaataggaccctcctatcat

SEQ ID NO: 22594 - DNA, 40 bp, Homo sapiens
tgataggagggtcctattcagaagtggcaaattgtgaaag

SEQ ID NO: 22595 - DNA, 40 bp, Homo sapiens
ctttcacaatttgccacttctgaataggaccctcctatca

SEQ ID NO: 22596 - DNA, 40 bp, Homo sapiens
gataggagggtcctattcagaagtggcaaattgtgaaagt

SEQ ID NO: 22597 - DNA, 40 bp, Homo sapiens
actttcacaatttgccacttctgaataggaccctcctatc

SEQ ID NO: 22598 - DNA, 40 bp, Homo sapiens
ataggagggtcctattcagaagtggcaaattgtgaaagtg

SEQ ID NO: 22599 - DNA, 40 bp, Homo sapiens
cactttcacaatttgccacttctgaataggaccctcctat

SEQ ID NO: 22600 - DNA, 40 bp, Homo sapiens
taggagggtcctattcagaagtggcaaattgtgaaagtgc

SEQ ID NO: 22601 - DNA, 40 bp, Homo sapiens
gcactttcacaatttgccacttctgaataggaccctccta

SEQ ID NO: 22602 - DNA, 40 bp, Homo sapiens
aggagggtcctattcagaagtggcaaattgtgaaagtgca

SEQ ID NO: 22603 - DNA, 40 bp, Homo sapiens
tgcactttcacaatttgccacttctgaataggaccctcct

SEQ ID NO: 22604 - DNA, 40 bp, Homo sapiens
ggagggtcctattcagaagtggcaaattgtgaaagtgcac

SEQ ID NO: 22605 - DNA, 40 bp, Homo sapiens
gtgcactttcacaatttgccacttctgaataggaccctcc

SEQ ID NO: 22606 - DNA, 40 bp, Homo sapiens
gagggtcctattcagaagtggcaaattgtgaaagtgcaca

SEQ ID NO: 22607 - DNA, 40 bp, Homo sapiens
tgtgcactttcacaatttgccacttctgaataggaccctc

SEQ ID NO: 22608 - DNA, 40 bp, Homo sapiens
agggtcctattcagaagtggcaaattgtgaaagtgcacat

SEQ ID NO: 22609 - DNA, 40 bp, Homo sapiens
atgtgcactttcacaatttgccacttctgaataggaccct

SEQ ID NO: 22610 - DNA, 40 bp, Homo sapiens
gggtcctattcagaagtggcaaattgtgaaagtgcacatt

SEQ ID NO: 22611 - DNA, 40 bp, Homo sapiens
aatgtgcactttcacaatttgccacttctgaataggaccc

SEQ ID NO: 22612 - DNA, 40 bp, Homo sapiens
ggtcctattcagaagtggcaaattgtgaaagtgcacattt

SEQ ID NO: 22613 - DNA, 40 bp, Homo sapiens
aaatgtgcactttcacaatttgccacttctgaataggacc

SEQ ID NO: 22614 - DNA, 40 bp, Homo sapiens
gtcctattcagaagtggcaaattgtgaaagtgcacatttt

SEQ ID NO: 22615 - DNA, 40 bp, Homo sapiens
aaaatgtgcactttcacaatttgccacttctgaataggac

SEQ ID NO: 22616 - DNA, 40 bp, Homo sapiens
tcctattcagaagtggcaaattgtgaaagtgcacattttg

SEQ ID NO: 22617 - DNA, 40 bp, Homo sapiens
caaaatgtgcactttcacaatttgccacttctgaatagga

SEQ ID NO: 22618 - DNA, 40 bp, Homo sapiens
cctattcagaagtggcaaattgtgaaagtgcacattttgt

SEQ ID NO: 22619 - DNA, 40 bp, Homo sapiens
acaaaatgtgcactttcacaatttgccacttctgaatagg

SEQ ID NO: 22620 - DNA, 40 bp, Homo sapiens
ctattcagaagtggcaaattgtgaaagtgcacattttgta

SEQ ID NO: 22621 - DNA, 40 bp, Homo sapiens
tacaaaatgtgcactttcacaatttgccacttctgaatag

SEQ ID NO: 22622 - DNA, 40 bp, Homo sapiens
tattcagaagtggcaaattgtgaaagtgcacattttgtag

SEQ ID NO: 22623 - DNA, 40 bp, Homo sapiens
ctacaaaatgtgcactttcacaatttgccacttctgaata

SEQ ID NO: 22624 - DNA, 40 bp, Homo sapiens
attcagaagtggcaaattgtgaaagtgcacattttgtaga

SEQ ID NO: 22625 - DNA, 40 bp, Homo sapiens
tctacaaaatgtgcactttcacaatttgccacttctgaat

SEQ ID NO: 22626 - DNA, 40 bp, Homo sapiens
ttcagaagtggcaaattgtgaaagtgcacattttgtagag

SEQ ID NO: 22627 - DNA, 40 bp, Homo sapiens
ctctacaaaatgtgcactttcacaatttgccacttctgaa

SEQ ID NO: 22628 - DNA, 40 bp, Homo sapiens
tcagaagtggcaaattgtgaaagtgcacattttgtagagt

SEQ ID NO: 22629 - DNA, 40 bp, Homo sapiens
actctacaaaatgtgcactttcacaatttgccacttctga

SEQ ID NO: 22630 - DNA, 40 bp, Homo sapiens
cagaagtggcaaattgtgaaagtgcacattttgtagagtt

SEQ ID NO: 22631 - DNA, 40 bp, Homo sapiens
aactctacaaaatgtgcactttcacaatttgccacttctg

SEQ ID NO: 22632 - DNA, 40 bp, Homo sapiens
agaagtggcaaattgtgaaagtgcacattttgtagagttt

SEQ ID NO: 22633 - DNA, 40 bp, Homo sapiens
aaactctacaaaatgtgcactttcacaatttgccacttct

SEQ ID NO: 22634 - DNA, 40 bp, Homo sapiens
gaagtggcaaattgtgaaagtgcacattttgtagagtttt

SEQ ID NO: 22635 - DNA, 40 bp, Homo sapiens
aaaactctacaaaatgtgcactttcacaatttgccacttc

SEQ ID NO: 22636 - DNA, 40 bp, Homo sapiens
aagtggcaaattgtgaaagtgcacattttgtagagtttta

SEQ ID NO: 22637 - DNA, 40 bp, Homo sapiens
taaaactctacaaaatgtgcactttcacaatttgccactt

SEQ ID NO: 22638 - DNA, 40 bp, Homo sapiens
agtggcaaattgtgaaagtgcacattttgtagagttttat

SEQ ID NO: 22639 - DNA, 40 bp, Homo sapiens
ataaaactctacaaaatgtgcactttcacaatttgccact

SEQ ID NO: 22640 - DNA, 40 bp, Homo sapiens
gtggcaaattgtgaaagtgcacattttgtagagttttata

SEQ ID NO: 22641 - DNA, 40 bp, Homo sapiens
tataaaactctacaaaatgtgcactttcacaatttgccac

SEQ ID NO: 22642 - DNA, 40 bp, Homo sapiens
tggcaaattgtgaaagtgcacattttgtagagttttatag

SEQ ID NO: 22643 - DNA, 40 bp, Homo sapiens
ctataaaactctacaaaatgtgcactttcacaatttgcca

SEQ ID NO: 22644 - DNA, 40 bp, Homo sapiens
ggcaaattgtgaaagtgcacattttgtagagttttatagg

SEQ ID NO: 22645 - DNA, 40 bp, Homo sapiens
cctataaaactctacaaaatgtgcactttcacaatttgcc

SEQ ID NO: 22646 - DNA, 40 bp, Homo sapiens
gcaaattgtgaaagtgcacattttgtagagttttatagga

SEQ ID NO: 22647 - DNA, 40 bp, Homo sapiens
tcctataaaactctacaaaatgtgcactttcacaatttgc

SEQ ID NO: 22648 - DNA, 40 bp, Homo sapiens
caaattgtgaaagtgcacattttgtagagttttataggac

SEQ ID NO: 22649 - DNA, 40 bp, Homo sapiens
gtcctataaaactctacaaaatgtgcactttcacaatttg

SEQ ID NO: 22650 - DNA, 40 bp, Homo sapiens
aaattgtgaaagtgcacattttgtagagttttataggact

SEQ ID NO: 22651 - DNA, 40 bp, Homo sapiens
agtcctataaaactctacaaaatgtgcactttcacaattt

SEQ ID NO: 22652 - DNA, 40 bp, Homo sapiens
aattgtgaaagtgcacattttgtagagttttataggactg

SEQ ID NO: 22653 - DNA, 40 bp, Homo sapiens
cagtcctataaaactctacaaaatgtgcactttcacaatt

SEQ ID NO: 22654 - DNA, 40 bp, Homo sapiens
attgtgaaagtgcacattttgtagagttttataggactgt

SEQ ID NO: 22655 - DNA, 40 bp, Homo sapiens
acagtcctataaaactctacaaaatgtgcactttcacaat

SEQ ID NO: 22656 - DNA, 40 bp, Homo sapiens
ttgtgaaagtgcacattttgtagagttttataggactgta

SEQ ID NO: 22657 - DNA, 40 bp, Homo sapiens
tacagtcctataaaactctacaaaatgtgcactttcacaa

SEQ ID NO: 22658 - DNA, 40 bp, Homo sapiens
tgtgaaagtgcacattttgtagagttttataggactgtag

SEQ ID NO: 22659 - DNA, 40 bp, Homo sapiens
ctacagtcctataaaactctacaaaatgtgcactttcaca

SEQ ID NO: 22660 - DNA, 40 bp, Homo sapiens
gtgaaagtgcacattttgtagagttttataggactgtaga

SEQ ID NO: 22661 - DNA, 40 bp, Homo sapiens
tctacagtcctataaaactctacaaaatgtgcactttcac

SEQ ID NO: 22662 - DNA, 40 bp, Homo sapiens
tgaaagtgcacattttgtagagttttataggactgtagaa

SEQ ID NO: 22663 - DNA, 40 bp, Homo sapiens
ttctacagtcctataaaactctacaaaatgtgcactttca

SEQ ID NO: 22664 - DNA, 40 bp, Homo sapiens
gaaagtgcacattttgtagagttttataggactgtagaat

SEQ ID NO: 22665 - DNA, 40 bp, Homo sapiens
attctacagtcctataaaactctacaaaatgtgcactttc

SEQ ID NO: 22666 - DNA, 40 bp, Homo sapiens
aaagtgcacattttgtagagttttataggactgtagaata

SEQ ID NO: 22667 - DNA, 40 bp, Homo sapiens
tattctacagtcctataaaactctacaaaatgtgcacttt

SEQ ID NO: 22668 - DNA, 40 bp, Homo sapiens
aagtgcacattttgtagagttttataggactgtagaatag

SEQ ID NO: 22669 - DNA, 40 bp, Homo sapiens
ctattctacagtcctataaaactctacaaaatgtgcactt

SEQ ID NO: 22670 - DNA, 40 bp, Homo sapiens
agtgcacattttgtagagttttataggactgtagaatagt

SEQ ID NO: 22671 - DNA, 40 bp, Homo sapiens
actattctacagtcctataaaactctacaaaatgtgcact

SEQ ID NO: 22672 - DNA, 40 bp, Homo sapiens
gtgcacattttgtagagttttataggactgtagaatagtt

SEQ ID NO: 22673 - DNA, 40 bp, Homo sapiens
aactattctacagtcctataaaactctacaaaatgtgcac

SEQ ID NO: 22674 - DNA, 40 bp, Homo sapiens
tgcacattttgtagagttttataggactgtagaatagttg

SEQ ID NO: 22675 - DNA, 40 bp, Homo sapiens
caactattctacagtcctataaaactctacaaaatgtgca

SEQ ID NO: 22676 - DNA, 40 bp, Homo sapiens
gcacattttgtagagttttataggactgtagaatagttgt

SEQ ID NO: 22677 - DNA, 40 bp, Homo sapiens
acaactattctacagtcctataaaactctacaaaatgtgc

SEQ ID NO: 22678 - DNA, 40 bp, Homo sapiens
cacattttgtagagttttataggactgtagaatagttgtg

SEQ ID NO: 22679 - DNA, 40 bp, Homo sapiens
cacaactattctacagtcctataaaactctacaaaatgtg

SEQ ID NO: 22680 - DNA, 40 bp, Homo sapiens
acattttgtagagttttataggactgtagaatagttgtga

SEQ ID NO: 22681 - DNA, 40 bp, Homo sapiens
tcacaactattctacagtcctataaaactctacaaaatgt

SEQ ID NO: 22682 - DNA, 40 bp, Homo sapiens
cattttgtagagttttataggactgtagaatagttgtgag

SEQ ID NO: 22683 - DNA, 40 bp, Homo sapiens
ctcacaactattctacagtcctataaaactctacaaaatg

SEQ ID NO: 22684 - DNA, 40 bp, Homo sapiens
attttgtagagttttataggactgtagaatagttgtgagc

SEQ ID NO: 22685 - DNA, 40 bp, Homo sapiens
gctcacaactattctacagtcctataaaactctacaaaat

SEQ ID NO: 22686 - DNA, 40 bp, Homo sapiens
ttttgtagagttttataggactgtagaatagttgtgagca

SEQ ID NO: 22687 - DNA, 40 bp, Homo sapiens
tgctcacaactattctacagtcctataaaactctacaaaa

SEQ ID NO: 22688 - DNA, 40 bp, Homo sapiens
tttgtagagttttataggactgtagaatagttgtgagcac

SEQ ID NO: 22689 - DNA, 40 bp, Homo sapiens
gtgctcacaactattctacagtcctataaaactctacaaa

SEQ ID NO: 22690 - DNA, 40 bp, Homo sapiens
ttgtagagttttataggactgtagaatagttgtgagcacc

SEQ ID NO: 22691 - DNA, 40 bp, Homo sapiens
ggtgctcacaactattctacagtcctataaaactctacaa

SEQ ID NO: 22692 - DNA, 40 bp, Homo sapiens
tgtagagttttataggactgtagaatagttgtgagcacct

SEQ ID NO: 22693 - DNA, 40 bp, Homo sapiens
aggtgctcacaactattctacagtcctataaaactctaca

SEQ ID NO: 22694 - DNA, 40 bp, Homo sapiens
gtagagttttataggactgtagaatagttgtgagcacctg

SEQ ID NO: 22695 - DNA, 40 bp, Homo sapiens
caggtgctcacaactattctacagtcctataaaactctac

SEQ ID NO: 22696 - DNA, 40 bp, Homo sapiens
tagagttttataggactgtagaatagttgtgagcacctga

SEQ ID NO: 22697 - DNA, 40 bp, Homo sapiens
tcaggtgctcacaactattctacagtcctataaaactcta

SEQ ID NO: 22698 - DNA, 40 bp, Homo sapiens
agagttttataggactgtagaatagttgtgagcacctgat

SEQ ID NO: 22699 - DNA, 40 bp, Homo sapiens
atcaggtgctcacaactattctacagtcctataaaactct

SEQ ID NO: 22700 - DNA, 40 bp, Homo sapiens
gagttttataggactgtagaatagttgtgagcacctgatt

SEQ ID NO: 22701 - DNA, 40 bp, Homo sapiens
aatcaggtgctcacaactattctacagtcctataaaactc

SEQ ID NO: 22702 - DNA, 40 bp, Homo sapiens
agttttataggactgtagaatagttgtgagcacctgattt

SEQ ID NO: 22703 - DNA, 40 bp, Homo sapiens
aaatcaggtgctcacaactattctacagtcctataaaact

SEQ ID NO: 22704 - DNA, 40 bp, Homo sapiens
gttttataggactgtagaatagttgtgagcacctgatttt

SEQ ID NO: 22705 - DNA, 40 bp, Homo sapiens
aaaatcaggtgctcacaactattctacagtcctataaaac

SEQ ID NO: 22706 - DNA, 40 bp, Homo sapiens
ttttataggactgtagaatagttgtgagcacctgattttt

SEQ ID NO: 22707 - DNA, 40 bp, Homo sapiens
aaaaatcaggtgctcacaactattctacagtcctataaaa

SEQ ID NO: 22708 - DNA, 40 bp, Homo sapiens
tttataggactgtagaatagttgtgagcacctgattttta

SEQ ID NO: 22709 - DNA, 40 bp, Homo sapiens
taaaaatcaggtgctcacaactattctacagtcctataaa

SEQ ID NO: 22710 - DNA, 40 bp, Homo sapiens
ttataggactgtagaatagttgtgagcacctgatttttag

SEQ ID NO: 22711 - DNA, 40 bp, Homo sapiens
ctaaaaatcaggtgctcacaactattctacagtcctataa

SEQ ID NO: 22712 - DNA, 40 bp, Homo sapiens
tataggactgtagaatagttgtgagcacctgatttttaga

SEQ ID NO: 22713 - DNA, 40 bp, Homo sapiens
tctaaaaatcaggtgctcacaactattctacagtcctata

SEQ ID NO: 22714 - DNA, 40 bp, Homo sapiens
ataggactgtagaatagttgtgagcacctgatttttagaa

SEQ ID NO: 22715 - DNA, 40 bp, Homo sapiens
ttctaaaaatcaggtgctcacaactattctacagtcctat

SEQ ID NO: 22716 - DNA, 40 bp, Homo sapiens
taggactgtagaatagttgtgagcacctgatttttagaat

SEQ ID NO: 22717 - DNA, 40 bp, Homo sapiens
attctaaaaatcaggtgctcacaactattctacagtccta

SEQ ID NO: 22718 - DNA, 40 bp, Homo sapiens
aggactgtagaatagttgtgagcacctgatttttagaata

SEQ ID NO: 22719 - DNA, 40 bp, Homo sapiens
tattctaaaaatcaggtgctcacaactattctacagtcct

SEQ ID NO: 22720 - DNA, 40 bp, Homo sapiens
ggactgtagaatagttgtgagcacctgatttttagaataa

SEQ ID NO: 22721 - DNA, 40 bp, Homo sapiens
ttattctaaaaatcaggtgctcacaactattctacagtcc

SEQ ID NO: 22722 - DNA, 40 bp, Homo sapiens
gactgtagaatagttgtgagcacctgatttttagaataaa

SEQ ID NO: 22723 - DNA, 40 bp, Homo sapiens
tttattctaaaaatcaggtgctcacaactattctacagtc

SEQ ID NO: 22724 - DNA, 40 bp, Homo sapiens
actgtagaatagttgtgagcacctgatttttagaataaac

SEQ ID NO: 22725 - DNA, 40 bp, Homo sapiens
gtttattctaaaaatcaggtgctcacaactattctacagt

SEQ ID NO: 22726 - DNA, 40 bp, Homo sapiens
ctgtagaatagttgtgagcacctgatttttagaataaaca

SEQ ID NO: 22727 - DNA, 40 bp, Homo sapiens
tgtttattctaaaaatcaggtgctcacaactattctacag

SEQ ID NO: 22728 - DNA, 40 bp, Homo sapiens
tgtagaatagttgtgagcacctgatttttagaataaacag

SEQ ID NO: 22729 - DNA, 40 bp, Homo sapiens
ctgtttattctaaaaatcaggtgctcacaactattctaca

SEQ ID NO: 22730 - DNA, 40 bp, Homo sapiens
gtagaatagttgtgagcacctgatttttagaataaacaga

SEQ ID NO: 22731 - DNA, 40 bp, Homo sapiens
tctgtttattctaaaaatcaggtgctcacaactattctac

SEQ ID NO: 22732 - DNA, 40 bp, Homo sapiens
tagaatagttgtgagcacctgatttttagaataaacagaa

SEQ ID NO: 22733 - DNA, 40 bp, Homo sapiens
ttctgtttattctaaaaatcaggtgctcacaactattcta

SEQ ID NO: 22734 - DNA, 40 bp, Homo sapiens
agaatagttgtgagcacctgatttttagaataaacagaaa

SEQ ID NO: 22735 - DNA, 40 bp, Homo sapiens
tttctgtttattctaaaaatcaggtgctcacaactattct

SEQ ID NO: 22736 - DNA, 40 bp, Homo sapiens
gaatagttgtgagcacctgatttttagaataaacagaaaa

SEQ ID NO: 22737 - DNA, 40 bp, Homo sapiens
ttttctgtttattctaaaaatcaggtgctcacaactattc

SEQ ID NO: 22738 - DNA, 40 bp, Homo sapiens
aatagttgtgagcacctgatttttagaataaacagaaaac

SEQ ID NO: 22739 - DNA, 40 bp, Homo sapiens
gttttctgtttattctaaaaatcaggtgctcacaactatt

SEQ ID NO: 22740 - DNA, 40 bp, Homo sapiens
atagttgtgagcacctgatttttagaataaacagaaaact

SEQ ID NO: 22741 - DNA, 40 bp, Homo sapiens
agttttctgtttattctaaaaatcaggtgctcacaactat

SEQ ID NO: 22742 - DNA, 40 bp, Homo sapiens
tagttgtgagcacctgatttttagaataaacagaaaactc

SEQ ID NO: 22743 - DNA, 40 bp, Homo sapiens
gagttttctgtttattctaaaaatcaggtgctcacaacta

SEQ ID NO: 22744 - DNA, 40 bp, Homo sapiens
agttgtgagcacctgatttttagaataaacagaaaactca

SEQ ID NO: 22745 - DNA, 40 bp, Homo sapiens
tgagttttctgtttattctaaaaatcaggtgctcacaact

SEQ ID NO: 22746 - DNA, 40 bp, Homo sapiens
gttgtgagcacctgatttttagaataaacagaaaactcag

SEQ ID NO: 22747 - DNA, 40 bp, Homo sapiens
ctgagttttctgtttattctaaaaatcaggtgctcacaac

SEQ ID NO: 22748 - DNA, 40 bp, Homo sapiens
ttgtgagcacctgatttttagaataaacagaaaactcagg

SEQ ID NO: 22749 - DNA, 40 bp, Homo sapiens
cctgagttttctgtttattctaaaaatcaggtgctcacaa

SEQ ID NO: 22750 - DNA, 40 bp, Homo sapiens
tgtgagcacctgatttttagaataaacagaaaactcaggt

SEQ ID NO: 22751 - DNA, 40 bp, Homo sapiens
acctgagttttctgtttattctaaaaatcaggtgctcaca

SEQ ID NO: 22752 - DNA, 40 bp, Homo sapiens
gtgagcacctgatttttagaataaacagaaaactcaggta

SEQ ID NO: 22753 - DNA, 40 bp, Homo sapiens
tacctgagttttctgtttattctaaaaatcaggtgctcac

SEQ ID NO: 22754 - DNA, 40 bp, Homo sapiens
tgagcacctgatttttagaataaacagaaaactcaggtac

SEQ ID NO: 22755 - DNA, 40 bp, Homo sapiens
gtacctgagttttctgtttattctaaaaatcaggtgctca

SEQ ID NO: 22756 - DNA, 40 bp, Homo sapiens
gagcacctgatttttagaataaacagaaaactcaggtact

SEQ ID NO: 22757 - DNA, 40 bp, Homo sapiens
agtacctgagttttctgtttattctaaaaatcaggtgctc

SEQ ID NO: 22758 - DNA, 40 bp, Homo sapiens
agcacctgatttttagaataaacagaaaactcaggtactg

SEQ ID NO: 22759 - DNA, 40 bp, Homo sapiens
cagtacctgagttttctgtttattctaaaaatcaggtgct

SEQ ID NO: 22760 - DNA, 40 bp, Homo sapiens
gcacctgatttttagaataaacagaaaactcaggtactgt

SEQ ID NO: 22761 - DNA, 40 bp, Homo sapiens
acagtacctgagttttctgtttattctaaaaatcaggtgc

SEQ ID NO: 22762 - DNA, 40 bp, Homo sapiens
cacctgatttttagaataaacagaaaactcaggtactgta

SEQ ID NO: 22763 - DNA, 40 bp, Homo sapiens
tacagtacctgagttttctgtttattctaaaaatcaggtg

SEQ ID NO: 22764 - DNA, 40 bp, Homo sapiens
acctgatttttagaataaacagaaaactcaggtactgtat

SEQ ID NO: 22765 - DNA, 40 bp, Homo sapiens
atacagtacctgagttttctgtttattctaaaaatcaggt

SEQ ID NO: 22766 - DNA, 40 bp, Homo sapiens
cctgatttttagaataaacagaaaactcaggtactgtatt

SEQ ID NO: 22767 - DNA, 40 bp, Homo sapiens
aatacagtacctgagttttctgtttattctaaaaatcagg

SEQ ID NO: 22768 - DNA, 40 bp, Homo sapiens
ctgatttttagaataaacagaaaactcaggtactgtattt

SEQ ID NO: 22769 - DNA, 40 bp, Homo sapiens
aaatacagtacctgagttttctgtttattctaaaaatcag

SEQ ID NO: 22770 - DNA, 40 bp, Homo sapiens
tgatttttagaataaacagaaaactcaggtactgtattta

SEQ ID NO: 22771 - DNA, 40 bp, Homo sapiens
taaatacagtacctgagttttctgtttattctaaaaatca

SEQ ID NO: 22772 - DNA, 40 bp, Homo sapiens
gatttttagaataaacagaaaactcaggtactgtatttag

SEQ ID NO: 22773 - DNA, 40 bp, Homo sapiens
ctaaatacagtacctgagttttctgtttattctaaaaatc

SEQ ID NO: 22774 - DNA, 40 bp, Homo sapiens
atttttagaataaacagaaaactcaggtactgtatttagg

SEQ ID NO: 22775 - DNA, 40 bp, Homo sapiens
cctaaatacagtacctgagttttctgtttattctaaaaat

SEQ ID NO: 22776 - DNA, 40 bp, Homo sapiens
tttttagaataaacagaaaactcaggtactgtatttaggt

SEQ ID NO: 22777 - DNA, 40 bp, Homo sapiens
acctaaatacagtacctgagttttctgtttattctaaaaa

SEQ ID NO: 22778 - DNA, 40 bp, Homo sapiens
ttttagaataaacagaaaactcaggtactgtatttaggtc

SEQ ID NO: 22779 - DNA, 40 bp, Homo sapiens
gacctaaatacagtacctgagttttctgtttattctaaaa

SEQ ID NO: 22780 - DNA, 40 bp, Homo sapiens
tttagaataaacagaaaactcaggtactgtatttaggtca

SEQ ID NO: 22781 - DNA, 40 bp, Homo sapiens
tgacctaaatacagtacctgagttttctgtttattctaaa

SEQ ID NO: 22782 - DNA, 40 bp, Homo sapiens
ttagaataaacagaaaactcaggtactgtatttaggtcaa

SEQ ID NO: 22783 - DNA, 40 bp, Homo sapiens
ttgacctaaatacagtacctgagttttctgtttattctaa

SEQ ID NO: 22784 - DNA, 40 bp, Homo sapiens
tagaataaacagaaaactcaggtactgtatttaggtcaaa

SEQ ID NO: 22785 - DNA, 40 bp, Homo sapiens
tttgacctaaatacagtacctgagttttctgtttattcta

SEQ ID NO: 22786 - DNA, 40 bp, Homo sapiens
agaataaacagaaaactcaggtactgtatttaggtcaaat

SEQ ID NO: 22787 - DNA, 40 bp, Homo sapiens
atttgacctaaatacagtacctgagttttctgtttattct

SEQ ID NO: 22788 - DNA, 40 bp, Homo sapiens
gaataaacagaaaactcaggtactgtatttaggtcaaatt

SEQ ID NO: 22789 - DNA, 40 bp, Homo sapiens
aatttgacctaaatacagtacctgagttttctgtttattc

SEQ ID NO: 22790 - DNA, 40 bp, Homo sapiens
aataaacagaaaactcaggtactgtatttaggtcaaatta

SEQ ID NO: 22791 - DNA, 40 bp, Homo sapiens
taatttgacctaaatacagtacctgagttttctgtttatt

SEQ ID NO: 22792 - DNA, 40 bp, Homo sapiens
ataaacagaaaactcaggtactgtatttaggtcaaattaa

SEQ ID NO: 22793 - DNA, 40 bp, Homo sapiens
ttaatttgacctaaatacagtacctgagttttctgtttat

SEQ ID NO: 22794 - DNA, 40 bp, Homo sapiens
taaacagaaaactcaggtactgtatttaggtcaaattaag

SEQ ID NO: 22795 - DNA, 40 bp, Homo sapiens
cttaatttgacctaaatacagtacctgagttttctgttta

SEQ ID NO: 22796 - DNA, 40 bp, Homo sapiens
aaacagaaaactcaggtactgtatttaggtcaaattaaga

SEQ ID NO: 22797 - DNA, 40 bp, Homo sapiens
tcttaatttgacctaaatacagtacctgagttttctgttt

SEQ ID NO: 22798 - DNA, 40 bp, Homo sapiens
aacagaaaactcaggtactgtatttaggtcaaattaagaa

SEQ ID NO: 22799 - DNA, 40 bp, Homo sapiens
ttcttaatttgacctaaatacagtacctgagttttctgtt

SEQ ID NO: 22800 - DNA, 40 bp, Homo sapiens
acagaaaactcaggtactgtatttaggtcaaattaagaat

SEQ ID NO: 22801 - DNA, 40 bp, Homo sapiens
attcttaatttgacctaaatacagtacctgagttttctgt

SEQ ID NO: 22802 - DNA, 40 bp, Homo sapiens
cagaaaactcaggtactgtatttaggtcaaattaagaata

SEQ ID NO: 22803 - DNA, 40 bp, Homo sapiens
tattcttaatttgacctaaatacagtacctgagttttctg

SEQ ID NO: 22804 - DNA, 40 bp, Homo sapiens
agaaaactcaggtactgtatttaggtcaaattaagaataa

SEQ ID NO: 22805 - DNA, 40 bp, Homo sapiens
ttattcttaatttgacctaaatacagtacctgagttttct

SEQ ID NO: 22806 - DNA, 40 bp, Homo sapiens
gaaaactcaggtactgtatttaggtcaaattaagaataag

SEQ ID NO: 22807 - DNA, 40 bp, Homo sapiens
cttattcttaatttgacctaaatacagtacctgagttttc

SEQ ID NO: 22808 - DNA, 40 bp, Homo sapiens
aaaactcaggtactgtatttaggtcaaattaagaataagt

SEQ ID NO: 22809 - DNA, 40 bp, Homo sapiens
acttattcttaatttgacctaaatacagtacctgagtttt

SEQ ID NO: 22810 - DNA, 40 bp, Homo sapiens
aaactcaggtactgtatttaggtcaaattaagaataagta

SEQ ID NO: 22811 - DNA, 40 bp, Homo sapiens
tacttattcttaatttgacctaaatacagtacctgagttt

SEQ ID NO: 22812 - DNA, 40 bp, Homo sapiens
aactcaggtactgtatttaggtcaaattaagaataagtat

SEQ ID NO: 22813 - DNA, 40 bp, Homo sapiens
atacttattcttaatttgacctaaatacagtacctgagtt

SEQ ID NO: 22814 - DNA, 40 bp, Homo sapiens
actcaggtactgtatttaggtcaaattaagaataagtatt

SEQ ID NO: 22815 - DNA, 40 bp, Homo sapiens
aatacttattcttaatttgacctaaatacagtacctgagt

SEQ ID NO: 22816 - DNA, 40 bp, Homo sapiens
ctcaggtactgtatttaggtcaaattaagaataagtattt

SEQ ID NO: 22817 - DNA, 40 bp, Homo sapiens
aaatacttattcttaatttgacctaaatacagtacctgag

SEQ ID NO: 22818 - DNA, 40 bp, Homo sapiens
tcaggtactgtatttaggtcaaattaagaataagtattta

SEQ ID NO: 22819 - DNA, 40 bp, Homo sapiens
taaatacttattcttaatttgacctaaatacagtacctga

SEQ ID NO: 22820 - DNA, 40 bp, Homo sapiens
caggtactgtatttaggtcaaattaagaataagtatttat

SEQ ID NO: 22821 - DNA, 40 bp, Homo sapiens
ataaatacttattcttaatttgacctaaatacagtacctg

SEQ ID NO: 22822 - DNA, 40 bp, Homo sapiens
aggtactgtatttaggtcaaattaagaataagtatttatt

SEQ ID NO: 22823 - DNA, 40 bp, Homo sapiens
aataaatacttattcttaatttgacctaaatacagtacct

SEQ ID NO: 22824 - DNA, 40 bp, Homo sapiens
ggtactgtatttaggtcaaattaagaataagtatttatta

SEQ ID NO: 22825 - DNA, 40 bp, Homo sapiens
taataaatacttattcttaatttgacctaaatacagtacc

SEQ ID NO: 22826 - DNA, 40 bp, Homo sapiens
gtactgtatttaggtcaaattaagaataagtatttattaa

SEQ ID NO: 22827 - DNA, 40 bp, Homo sapiens
ttaataaatacttattcttaatttgacctaaatacagtac

SEQ ID NO: 22828 - DNA, 40 bp, Homo sapiens
tactgtatttaggtcaaattaagaataagtatttattaag

SEQ ID NO: 22829 - DNA, 40 bp, Homo sapiens
cttaataaatacttattcttaatttgacctaaatacagta

SEQ ID NO: 22830 - DNA, 40 bp, Homo sapiens
actgtatttaggtcaaattaagaataagtatttattaaga

SEQ ID NO: 22831 - DNA, 40 bp, Homo sapiens
tcttaataaatacttattcttaatttgacctaaatacagt

SEQ ID NO: 22832 - DNA, 40 bp, Homo sapiens
ctgtatttaggtcaaattaagaataagtatttattaagac

SEQ ID NO: 22833 - DNA, 40 bp, Homo sapiens
gtcttaataaatacttattcttaatttgacctaaatacag

SEQ ID NO: 22834 - DNA, 40 bp, Homo sapiens
tgtatttaggtcaaattaagaataagtatttattaagacc

SEQ ID NO: 22835 - DNA, 40 bp, Homo sapiens
ggtcttaataaatacttattcttaatttgacctaaataca

SEQ ID NO: 22836 - DNA, 40 bp, Homo sapiens
gtatttaggtcaaattaagaataagtatttattaagacct

SEQ ID NO: 22837 - DNA, 40 bp, Homo sapiens
aggtcttaataaatacttattcttaatttgacctaaatac

SEQ ID NO: 22838 - DNA, 40 bp, Homo sapiens
tatttaggtcaaattaagaataagtatttattaagacctg

SEQ ID NO: 22839 - DNA, 40 bp, Homo sapiens
caggtcttaataaatacttattcttaatttgacctaaata

SEQ ID NO: 22840 - DNA, 40 bp, Homo sapiens
atttaggtcaaattaagaataagtatttattaagacctga

SEQ ID NO: 22841 - DNA, 40 bp, Homo sapiens
tcaggtcttaataaatacttattcttaatttgacctaaat

SEQ ID NO: 22842 - DNA, 40 bp, Homo sapiens
tttaggtcaaattaagaataagtatttattaagacctgaa

SEQ ID NO: 22843 - DNA, 40 bp, Homo sapiens
ttcaggtcttaataaatacttattcttaatttgacctaaa

SEQ ID NO: 22844 - DNA, 40 bp, Homo sapiens
ttaggtcaaattaagaataagtatttattaagacctgaat

SEQ ID NO: 22845 - DNA, 40 bp, Homo sapiens
attcaggtcttaataaatacttattcttaatttgacctaa

SEQ ID NO: 22846 - DNA, 40 bp, Homo sapiens
taggtcaaattaagaataagtatttattaagacctgaata

SEQ ID NO: 22847 - DNA, 40 bp, Homo sapiens
tattcaggtcttaataaatacttattcttaatttgaccta

SEQ ID NO: 22848 - DNA, 40 bp, Homo sapiens
aggtcaaattaagaataagtatttattaagacctgaatat

SEQ ID NO: 22849 - DNA, 40 bp, Homo sapiens
atattcaggtcttaataaatacttattcttaatttgacct

SEQ ID NO: 22850 - DNA, 40 bp, Homo sapiens
ggtcaaattaagaataagtatttattaagacctgaatata

SEQ ID NO: 22851 - DNA, 40 bp, Homo sapiens
tatattcaggtcttaataaatacttattcttaatttgacc

SEQ ID NO: 22852 - DNA, 40 bp, Homo sapiens
gtcaaattaagaataagtatttattaagacctgaatataa

SEQ ID NO: 22853 - DNA, 40 bp, Homo sapiens
ttatattcaggtcttaataaatacttattcttaatttgac

SEQ ID NO: 22854 - DNA, 40 bp, Homo sapiens
tcaaattaagaataagtatttattaagacctgaatataaa

SEQ ID NO: 22855 - DNA, 40 bp, Homo sapiens
tttatattcaggtcttaataaatacttattcttaatttga

SEQ ID NO: 22856 - DNA, 40 bp, Homo sapiens
caaattaagaataagtatttattaagacctgaatataaaa

SEQ ID NO: 22857 - DNA, 40 bp, Homo sapiens
ttttatattcaggtcttaataaatacttattcttaatttg

SEQ ID NO: 22858 - DNA, 40 bp, Homo sapiens
aaattaagaataagtatttattaagacctgaatataaaac

SEQ ID NO: 22859 - DNA, 40 bp, Homo sapiens
gttttatattcaggtcttaataaatacttattcttaattt

SEQ ID NO: 22860 - DNA, 40 bp, Homo sapiens
aattaagaataagtatttattaagacctgaatataaaact

SEQ ID NO: 22861 - DNA, 40 bp, Homo sapiens
agttttatattcaggtcttaataaatacttattcttaatt

SEQ ID NO: 22862 - DNA, 40 bp, Homo sapiens
attaagaataagtatttattaagacctgaatataaaactt

SEQ ID NO: 22863 - DNA, 40 bp, Homo sapiens
aagttttatattcaggtcttaataaatacttattcttaat

SEQ ID NO: 22864 - DNA, 40 bp, Homo sapiens
ttaagaataagtatttattaagacctgaatataaaacttt

SEQ ID NO: 22865 - DNA, 40 bp, Homo sapiens
aaagttttatattcaggtcttaataaatacttattcttaa

SEQ ID NO: 22866 - DNA, 40 bp, Homo sapiens
taagaataagtatttattaagacctgaatataaaacttta

SEQ ID NO: 22867 - DNA, 40 bp, Homo sapiens
taaagttttatattcaggtcttaataaatacttattctta

SEQ ID NO: 22868 - DNA, 40 bp, Homo sapiens
aagaataagtatttattaagacctgaatataaaactttac

SEQ ID NO: 22869 - DNA, 40 bp, Homo sapiens
gtaaagttttatattcaggtcttaataaatacttattctt

SEQ ID NO: 22870 - DNA, 40 bp, Homo sapiens
agaataagtatttattaagacctgaatataaaactttact

SEQ ID NO: 22871 - DNA, 40 bp, Homo sapiens
agtaaagttttatattcaggtcttaataaatacttattct

SEQ ID NO: 22872 - DNA, 40 bp, Homo sapiens
gaataagtatttattaagacctgaatataaaactttactg

SEQ ID NO: 22873 - DNA, 40 bp, Homo sapiens
cagtaaagttttatattcaggtcttaataaatacttattc

SEQ ID NO: 22874 - DNA, 40 bp, Homo sapiens
aataagtatttattaagacctgaatataaaactttactgg

SEQ ID NO: 22875 - DNA, 40 bp, Homo sapiens
ccagtaaagttttatattcaggtcttaataaatacttatt

SEQ ID NO: 22876 - DNA, 40 bp, Homo sapiens
ataagtatttattaagacctgaatataaaactttactggt

SEQ ID NO: 22877 - DNA, 40 bp, Homo sapiens
accagtaaagttttatattcaggtcttaataaatacttat

SEQ ID NO: 22878 - DNA, 40 bp, Homo sapiens
taagtatttattaagacctgaatataaaactttactggtc

SEQ ID NO: 22879 - DNA, 40 bp, Homo sapiens
gaccagtaaagttttatattcaggtcttaataaatactta

SEQ ID NO: 22880 - DNA, 40 bp, Homo sapiens
aagtatttattaagacctgaatataaaactttactggtca

SEQ ID NO: 22881 - DNA, 40 bp, Homo sapiens
tgaccagtaaagttttatattcaggtcttaataaatactt

SEQ ID NO: 22882 - DNA, 40 bp, Homo sapiens
agtatttattaagacctgaatataaaactttactggtcat

SEQ ID NO: 22883 - DNA, 40 bp, Homo sapiens
atgaccagtaaagttttatattcaggtcttaataaatact

SEQ ID NO: 22884 - DNA, 40 bp, Homo sapiens
gtatttattaagacctgaatataaaactttactggtcatg

SEQ ID NO: 22885 - DNA, 40 bp, Homo sapiens
catgaccagtaaagttttatattcaggtcttaataaatac

SEQ ID NO: 22886 - DNA, 40 bp, Homo sapiens
tatttattaagacctgaatataaaactttactggtcatgg

SEQ ID NO: 22887 - DNA, 40 bp, Homo sapiens
ccatgaccagtaaagttttatattcaggtcttaataaata

SEQ ID NO: 22888 - DNA, 40 bp, Homo sapiens
atttattaagacctgaatataaaactttactggtcatggt

SEQ ID NO: 22889 - DNA, 40 bp, Homo sapiens
accatgaccagtaaagttttatattcaggtcttaataaat

SEQ ID NO: 22890 - DNA, 40 bp, Homo sapiens
tttattaagacctgaatataaaactttactggtcatggtt

SEQ ID NO: 22891 - DNA, 40 bp, Homo sapiens
aaccatgaccagtaaagttttatattcaggtcttaataaa

SEQ ID NO: 22892 - DNA, 40 bp, Homo sapiens
ttattaagacctgaatataaaactttactggtcatggttt

SEQ ID NO: 22893 - DNA, 40 bp, Homo sapiens
aaaccatgaccagtaaagttttatattcaggtcttaataa

SEQ ID NO: 22894 - DNA, 40 bp, Homo sapiens
tattaagacctgaatataaaactttactggtcatggtttt

SEQ ID NO: 22895 - DNA, 40 bp, Homo sapiens
aaaaccatgaccagtaaagttttatattcaggtcttaata

SEQ ID NO: 22896 - DNA, 40 bp, Homo sapiens
attaagacctgaatataaaactttactggtcatggttttt

SEQ ID NO: 22897 - DNA, 40 bp, Homo sapiens
aaaaaccatgaccagtaaagttttatattcaggtcttaat

SEQ ID NO: 22898 - DNA, 40 bp, Homo sapiens
ttaagacctgaatataaaactttactggtcatggtttttt

SEQ ID NO: 22899 - DNA, 40 bp, Homo sapiens
aaaaaaccatgaccagtaaagttttatattcaggtcttaa

SEQ ID NO: 22900 - DNA, 40 bp, Homo sapiens
taagacctgaatataaaactttactggtcatggttttttt

SEQ ID NO: 22901 - DNA, 40 bp, Homo sapiens
aaaaaaaccatgaccagtaaagttttatattcaggtctta

SEQ ID NO: 22902 - DNA, 40 bp, Homo sapiens
aagacctgaatataaaactttactggtcatggtttttttc

SEQ ID NO: 22903 - DNA, 40 bp, Homo sapiens
gaaaaaaaccatgaccagtaaagttttatattcaggtctt

SEQ ID NO: 22904 - DNA, 40 bp, Homo sapiens
agacctgaatataaaactttactggtcatggtttttttct

SEQ ID NO: 22905 - DNA, 40 bp, Homo sapiens
agaaaaaaaccatgaccagtaaagttttatattcaggtct

SEQ ID NO: 22906 - DNA, 40 bp, Homo sapiens
gacctgaatataaaactttactggtcatggtttttttcta

SEQ ID NO: 22907 - DNA, 40 bp, Homo sapiens
tagaaaaaaaccatgaccagtaaagttttatattcaggtc

SEQ ID NO: 22908 - DNA, 40 bp, Homo sapiens
acctgaatataaaactttactggtcatggtttttttctac

SEQ ID NO: 22909 - DNA, 40 bp, Homo sapiens
gtagaaaaaaaccatgaccagtaaagttttatattcaggt

SEQ ID NO: 22910 - DNA, 40 bp, Homo sapiens
cctgaatataaaactttactggtcatggtttttttctacc

SEQ ID NO: 22911 - DNA, 40 bp, Homo sapiens
ggtagaaaaaaaccatgaccagtaaagttttatattcagg

SEQ ID NO: 22912 - DNA, 40 bp, Homo sapiens
ctgaatataaaactttactggtcatggtttttttctacct

SEQ ID NO: 22913 - DNA, 40 bp, Homo sapiens
aggtagaaaaaaaccatgaccagtaaagttttatattcag

SEQ ID NO: 22914 - DNA, 40 bp, Homo sapiens
tgaatataaaactttactggtcatggtttttttctacctt

SEQ ID NO: 22915 - DNA, 40 bp, Homo sapiens
aaggtagaaaaaaaccatgaccagtaaagttttatattca

SEQ ID NO: 22916 - DNA, 40 bp, Homo sapiens
gaatataaaactttactggtcatggtttttttctaccttg

SEQ ID NO: 22917 - DNA, 40 bp, Homo sapiens
caaggtagaaaaaaaccatgaccagtaaagttttatattc

SEQ ID NO: 22918 - DNA, 40 bp, Homo sapiens
aatataaaactttactggtcatggtttttttctaccttgg

SEQ ID NO: 22919 - DNA, 40 bp, Homo sapiens
ccaaggtagaaaaaaaccatgaccagtaaagttttatatt

SEQ ID NO: 22920 - DNA, 40 bp, Homo sapiens
atataaaactttactggtcatggtttttttctaccttggg

SEQ ID NO: 22921 - DNA, 40 bp, Homo sapiens
cccaaggtagaaaaaaaccatgaccagtaaagttttatat

SEQ ID NO: 22922 - DNA, 40 bp, Homo sapiens
tataaaactttactggtcatggtttttttctaccttgggt

SEQ ID NO: 22923 - DNA, 40 bp, Homo sapiens
acccaaggtagaaaaaaaccatgaccagtaaagttttata

SEQ ID NO: 22924 - DNA, 40 bp, Homo sapiens
ataaaactttactggtcatggtttttttctaccttgggtt

SEQ ID NO: 22925 - DNA, 40 bp, Homo sapiens
aacccaaggtagaaaaaaaccatgaccagtaaagttttat

SEQ ID NO: 22926 - DNA, 40 bp, Homo sapiens
taaaactttactggtcatggtttttttctaccttgggttt

SEQ ID NO: 22927 - DNA, 40 bp, Homo sapiens
aaacccaaggtagaaaaaaaccatgaccagtaaagtttta

SEQ ID NO: 22928 - DNA, 40 bp, Homo sapiens
aaaactttactggtcatggtttttttctaccttgggtttt

SEQ ID NO: 22929 - DNA, 40 bp, Homo sapiens
aaaacccaaggtagaaaaaaaccatgaccagtaaagtttt

SEQ ID NO: 22930 - DNA, 40 bp, Homo sapiens
aaactttactggtcatggtttttttctaccttgggttttt

SEQ ID NO: 22931 - DNA, 40 bp, Homo sapiens
aaaaacccaaggtagaaaaaaaccatgaccagtaaagttt

SEQ ID NO: 22932 - DNA, 40 bp, Homo sapiens
aactttactggtcatggtttttttctaccttgggttttta

SEQ ID NO: 22933 - DNA, 40 bp, Homo sapiens
taaaaacccaaggtagaaaaaaaccatgaccagtaaagtt

SEQ ID NO: 22934 - DNA, 40 bp, Homo sapiens
actttactggtcatggtttttttctaccttgggtttttat

SEQ ID NO: 22935 - DNA, 40 bp, Homo sapiens
ataaaaacccaaggtagaaaaaaaccatgaccagtaaagt

SEQ ID NO: 22936 - DNA, 40 bp, Homo sapiens
ctttactggtcatggtttttttctaccttgggtttttata

SEQ ID NO: 22937 - DNA, 40 bp, Homo sapiens
tataaaaacccaaggtagaaaaaaaccatgaccagtaaag

SEQ ID NO: 22938 - DNA, 40 bp, Homo sapiens
tttactggtcatggtttttttctaccttgggtttttataa

SEQ ID NO: 22939 - DNA, 40 bp, Homo sapiens
ttataaaaacccaaggtagaaaaaaaccatgaccagtaaa

SEQ ID NO: 22940 - DNA, 40 bp, Homo sapiens
ttactggtcatggtttttttctaccttgggtttttataaa

SEQ ID NO: 22941 - DNA, 40 bp, Homo sapiens
tttataaaaacccaaggtagaaaaaaaccatgaccagtaa

SEQ ID NO: 22942 - DNA, 40 bp, Homo sapiens
tactggtcatggtttttttctaccttgggtttttataaat

SEQ ID NO: 22943 - DNA, 40 bp, Homo sapiens
atttataaaaacccaaggtagaaaaaaaccatgaccagta

SEQ ID NO: 22944 - DNA, 40 bp, Homo sapiens
actggtcatggtttttttctaccttgggtttttataaatc

SEQ ID NO: 22945 - DNA, 40 bp, Homo sapiens
gatttataaaaacccaaggtagaaaaaaaccatgaccagt

SEQ ID NO: 22946 - DNA, 40 bp, Homo sapiens
ctggtcatggtttttttctaccttgggtttttataaatcc

SEQ ID NO: 22947 - DNA, 40 bp, Homo sapiens
ggatttataaaaacccaaggtagaaaaaaaccatgaccag

SEQ ID NO: 22948 - DNA, 40 bp, Homo sapiens
tggtcatggtttttttctaccttgggtttttataaatcca

SEQ ID NO: 22949 - DNA, 40 bp, Homo sapiens
tggatttataaaaacccaaggtagaaaaaaaccatgacca

SEQ ID NO: 22950 - DNA, 40 bp, Homo sapiens
ggtcatggtttttttctaccttgggtttttataaatccaa

SEQ ID NO: 22951 - DNA, 40 bp, Homo sapiens
ttggatttataaaaacccaaggtagaaaaaaaccatgacc

SEQ ID NO: 22952 - DNA, 40 bp, Homo sapiens
gtcatggtttttttctaccttgggtttttataaatccaaa

SEQ ID NO: 22953 - DNA, 40 bp, Homo sapiens
tttggatttataaaaacccaaggtagaaaaaaaccatgac

SEQ ID NO: 22954 - DNA, 40 bp, Homo sapiens
tcatggtttttttctaccttgggtttttataaatccaaag

SEQ ID NO: 22955 - DNA, 40 bp, Homo sapiens
ctttggatttataaaaacccaaggtagaaaaaaaccatga

SEQ ID NO: 22956 - DNA, 40 bp, Homo sapiens
catggtttttttctaccttgggtttttataaatccaaaga

SEQ ID NO: 22957 - DNA, 40 bp, Homo sapiens
tctttggatttataaaaacccaaggtagaaaaaaaccatg

SEQ ID NO: 22958 - DNA, 40 bp, Homo sapiens
atggtttttttctaccttgggtttttataaatccaaagat

SEQ ID NO: 22959 - DNA, 40 bp, Homo sapiens
atctttggatttataaaaacccaaggtagaaaaaaaccat

SEQ ID NO: 22960 - DNA, 40 bp, Homo sapiens
tggtttttttctaccttgggtttttataaatccaaagatt

SEQ ID NO: 22961 - DNA, 40 bp, Homo sapiens
aatctttggatttataaaaacccaaggtagaaaaaaacca

SEQ ID NO: 22962 - DNA, 40 bp, Homo sapiens
ggtttttttctaccttgggtttttataaatccaaagattt

SEQ ID NO: 22963 - DNA, 40 bp, Homo sapiens
aaatctttggatttataaaaacccaaggtagaaaaaaacc

SEQ ID NO: 22964 - DNA, 40 bp, Homo sapiens
gtttttttctaccttgggtttttataaatccaaagattta

SEQ ID NO: 22965 - DNA, 40 bp, Homo sapiens
taaatctttggatttataaaaacccaaggtagaaaaaaac

SEQ ID NO: 22966 - DNA, 40 bp, Homo sapiens
tttttttctaccttgggtttttataaatccaaagatttaa

SEQ ID NO: 22967 - DNA, 40 bp, Homo sapiens
ttaaatctttggatttataaaaacccaaggtagaaaaaaa

SEQ ID NO: 22968 - DNA, 40 bp, Homo sapiens
ttttttctaccttgggtttttataaatccaaagatttaaa

SEQ ID NO: 22969 - DNA, 40 bp, Homo sapiens
tttaaatctttggatttataaaaacccaaggtagaaaaaa

SEQ ID NO: 22970 - DNA, 40 bp, Homo sapiens
tttttctaccttgggtttttataaatccaaagatttaaaa

SEQ ID NO: 22971 - DNA, 40 bp, Homo sapiens
ttttaaatctttggatttataaaaacccaaggtagaaaaa

SEQ ID NO: 22972 - DNA, 40 bp, Homo sapiens
ttttctaccttgggtttttataaatccaaagatttaaaaa

SEQ ID NO: 22973 - DNA, 40 bp, Homo sapiens
tttttaaatctttggatttataaaaacccaaggtagaaaa

SEQ ID NO: 22974 - DNA, 40 bp, Homo sapiens
tttctaccttgggtttttataaatccaaagatttaaaaac

SEQ ID NO: 22975 - DNA, 40 bp, Homo sapiens
gtttttaaatctttggatttataaaaacccaaggtagaaa

SEQ ID NO: 22976 - DNA, 40 bp, Homo sapiens
ttctaccttgggtttttataaatccaaagatttaaaaaca

SEQ ID NO: 22977 - DNA, 40 bp, Homo sapiens
tgtttttaaatctttggatttataaaaacccaaggtagaa

SEQ ID NO: 22978 - DNA, 40 bp, Homo sapiens
tctaccttgggtttttataaatccaaagatttaaaaacat

SEQ ID NO: 22979 - DNA, 40 bp, Homo sapiens
atgtttttaaatctttggatttataaaaacccaaggtaga

SEQ ID NO: 22980 - DNA, 40 bp, Homo sapiens
ctaccttgggtttttataaatccaaagatttaaaaacata

SEQ ID NO: 22981 - DNA, 40 bp, Homo sapiens
tatgtttttaaatctttggatttataaaaacccaaggtag

SEQ ID NO: 22982 - DNA, 40 bp, Homo sapiens
taccttgggtttttataaatccaaagatttaaaaacatac

SEQ ID NO: 22983 - DNA, 40 bp, Homo sapiens
gtatgtttttaaatctttggatttataaaaacccaaggta

SEQ ID NO: 22984 - DNA, 40 bp, Homo sapiens
accttgggtttttataaatccaaagatttaaaaacataca

SEQ ID NO: 22985 - DNA, 40 bp, Homo sapiens
tgtatgtttttaaatctttggatttataaaaacccaaggt

SEQ ID NO: 22986 - DNA, 40 bp, Homo sapiens
ccttgggtttttataaatccaaagatttaaaaacatacaa

SEQ ID NO: 22987 - DNA, 40 bp, Homo sapiens
ttgtatgtttttaaatctttggatttataaaaacccaagg

SEQ ID NO: 22988 - DNA, 40 bp, Homo sapiens
cttgggtttttataaatccaaagatttaaaaacatacaaa

SEQ ID NO: 22989 - DNA, 40 bp, Homo sapiens
tttgtatgtttttaaatctttggatttataaaaacccaag

SEQ ID NO: 22990 - DNA, 40 bp, Homo sapiens
ttgggtttttataaatccaaagatttaaaaacatacaaat

SEQ ID NO: 22991 - DNA, 40 bp, Homo sapiens
atttgtatgtttttaaatctttggatttataaaaacccaa

SEQ ID NO: 22992 - DNA, 40 bp, Homo sapiens
tgggtttttataaatccaaagatttaaaaacatacaaatg

SEQ ID NO: 22993 - DNA, 40 bp, Homo sapiens
catttgtatgtttttaaatctttggatttataaaaaccca

SEQ ID NO: 22994 - DNA, 40 bp, Homo sapiens
gggtttttataaatccaaagatttaaaaacatacaaatgg

SEQ ID NO: 22995 - DNA, 40 bp, Homo sapiens
ccatttgtatgtttttaaatctttggatttataaaaaccc

SEQ ID NO: 22996 - DNA, 40 bp, Homo sapiens
ggtttttataaatccaaagatttaaaaacatacaaatgga

SEQ ID NO: 22997 - DNA, 40 bp, Homo sapiens
tccatttgtatgtttttaaatctttggatttataaaaacc

SEQ ID NO: 22998 - DNA, 40 bp, Homo sapiens
gtttttataaatccaaagatttaaaaacatacaaatggaa

SEQ ID NO: 22999 - DNA, 40 bp, Homo sapiens
ttccatttgtatgtttttaaatctttggatttataaaaac

SEQ ID NO: 23000 - DNA, 40 bp, Homo sapiens
tttttataaatccaaagatttaaaaacatacaaatggaag

SEQ ID NO: 23001 - DNA, 40 bp, Homo sapiens
cttccatttgtatgtttttaaatctttggatttataaaaa

SEQ ID NO: 23002 - DNA, 40 bp, Homo sapiens
ttttataaatccaaagatttaaaaacatacaaatggaagt

SEQ ID NO: 23003 - DNA, 40 bp, Homo sapiens
acttccatttgtatgtttttaaatctttggatttataaaa

SEQ ID NO: 23004 - DNA, 40 bp, Homo sapiens
tttataaatccaaagatttaaaaacatacaaatggaagtt

SEQ ID NO: 23005 - DNA, 40 bp, Homo sapiens
aacttccatttgtatgtttttaaatctttggatttataaa

SEQ ID NO: 23006 - DNA, 40 bp, Homo sapiens
ttataaatccaaagatttaaaaacatacaaatggaagttg

SEQ ID NO: 23007 - DNA, 40 bp, Homo sapiens
caacttccatttgtatgtttttaaatctttggatttataa

SEQ ID NO: 23008 - DNA, 40 bp, Homo sapiens
tataaatccaaagatttaaaaacatacaaatggaagttgg

SEQ ID NO: 23009 - DNA, 40 bp, Homo sapiens
ccaacttccatttgtatgtttttaaatctttggatttata

SEQ ID NO: 23010 - DNA, 40 bp, Homo sapiens
ataaatccaaagatttaaaaacatacaaatggaagttggt

SEQ ID NO: 23011 - DNA, 40 bp, Homo sapiens
accaacttccatttgtatgtttttaaatctttggatttat

SEQ ID NO: 23012 - DNA, 40 bp, Homo sapiens
taaatccaaagatttaaaaacatacaaatggaagttggta

SEQ ID NO: 23013 - DNA, 40 bp, Homo sapiens
taccaacttccatttgtatgtttttaaatctttggattta

SEQ ID NO: 23014 - DNA, 40 bp, Homo sapiens
aaatccaaagatttaaaaacatacaaatggaagttggtaa

SEQ ID NO: 23015 - DNA, 40 bp, Homo sapiens
ttaccaacttccatttgtatgtttttaaatctttggattt

SEQ ID NO: 23016 - DNA, 40 bp, Homo sapiens
aatccaaagatttaaaaacatacaaatggaagttggtaat

SEQ ID NO: 23017 - DNA, 40 bp, Homo sapiens
attaccaacttccatttgtatgtttttaaatctttggatt

SEQ ID NO: 23018 - DNA, 40 bp, Homo sapiens
atccaaagatttaaaaacatacaaatggaagttggtaatg

SEQ ID NO: 23019 - DNA, 40 bp, Homo sapiens
cattaccaacttccatttgtatgtttttaaatctttggat

SEQ ID NO: 23020 - DNA, 40 bp, Homo sapiens
tccaaagatttaaaaacatacaaatggaagttggtaatgg

SEQ ID NO: 23021 - DNA, 40 bp, Homo sapiens
ccattaccaacttccatttgtatgtttttaaatctttgga

SEQ ID NO: 23022 - DNA, 40 bp, Homo sapiens
ccaaagatttaaaaacatacaaatggaagttggtaatgga

SEQ ID NO: 23023 - DNA, 40 bp, Homo sapiens
tccattaccaacttccatttgtatgtttttaaatctttgg

SEQ ID NO: 23024 - DNA, 40 bp, Homo sapiens
caaagatttaaaaacatacaaatggaagttggtaatggaa

SEQ ID NO: 23025 - DNA, 40 bp, Homo sapiens
ttccattaccaacttccatttgtatgtttttaaatctttg

SEQ ID NO: 23026 - DNA, 40 bp, Homo sapiens
aaagatttaaaaacatacaaatggaagttggtaatggaat

SEQ ID NO: 23027 - DNA, 40 bp, Homo sapiens
attccattaccaacttccatttgtatgtttttaaatcttt

SEQ ID NO: 23028 - DNA, 40 bp, Homo sapiens
aagatttaaaaacatacaaatggaagttggtaatggaatt

SEQ ID NO: 23029 - DNA, 40 bp, Homo sapiens
aattccattaccaacttccatttgtatgtttttaaatctt

SEQ ID NO: 23030 - DNA, 40 bp, Homo sapiens
agatttaaaaacatacaaatggaagttggtaatggaatta

SEQ ID NO: 23031 - DNA, 40 bp, Homo sapiens
taattccattaccaacttccatttgtatgtttttaaatct

SEQ ID NO: 23032 - DNA, 40 bp, Homo sapiens
gatttaaaaacatacaaatggaagttggtaatggaattaa

SEQ ID NO: 23033 - DNA, 40 bp, Homo sapiens
ttaattccattaccaacttccatttgtatgtttttaaatc

SEQ ID NO: 23034 - DNA, 40 bp, Homo sapiens
atttaaaaacatacaaatggaagttggtaatggaattaag

SEQ ID NO: 23035 - DNA, 40 bp, Homo sapiens
cttaattccattaccaacttccatttgtatgtttttaaat

SEQ ID NO: 23036 - DNA, 40 bp, Homo sapiens
tttaaaaacatacaaatggaagttggtaatggaattaagt

SEQ ID NO: 23037 - DNA, 40 bp, Homo sapiens
acttaattccattaccaacttccatttgtatgtttttaaa

SEQ ID NO: 23038 - DNA, 40 bp, Homo sapiens
ttaaaaacatacaaatggaagttggtaatggaattaagtg

SEQ ID NO: 23039 - DNA, 40 bp, Homo sapiens
cacttaattccattaccaacttccatttgtatgtttttaa

SEQ ID NO: 23040 - DNA, 40 bp, Homo sapiens
taaaaacatacaaatggaagttggtaatggaattaagtga

SEQ ID NO: 23041 - DNA, 40 bp, Homo sapiens
tcacttaattccattaccaacttccatttgtatgttttta

SEQ ID NO: 23042 - DNA, 40 bp, Homo sapiens
aaaaacatacaaatggaagttggtaatggaattaagtgaa

SEQ ID NO: 23043 - DNA, 40 bp, Homo sapiens
ttcacttaattccattaccaacttccatttgtatgttttt

SEQ ID NO: 23044 - DNA, 40 bp, Homo sapiens
aaaacatacaaatggaagttggtaatggaattaagtgaaa

SEQ ID NO: 23045 - DNA, 40 bp, Homo sapiens
tttcacttaattccattaccaacttccatttgtatgtttt

SEQ ID NO: 23046 - DNA, 40 bp, Homo sapiens
aaacatacaaatggaagttggtaatggaattaagtgaaag

SEQ ID NO: 23047 - DNA, 40 bp, Homo sapiens
ctttcacttaattccattaccaacttccatttgtatgttt

SEQ ID NO: 23048 - DNA, 40 bp, Homo sapiens
aacatacaaatggaagttggtaatggaattaagtgaaagg

SEQ ID NO: 23049 - DNA, 40 bp, Homo sapiens
cctttcacttaattccattaccaacttccatttgtatgtt

SEQ ID NO: 23050 - DNA, 40 bp, Homo sapiens
acatacaaatggaagttggtaatggaattaagtgaaagga

SEQ ID NO: 23051 - DNA, 40 bp, Homo sapiens
tcctttcacttaattccattaccaacttccatttgtatgt

SEQ ID NO: 23052 - DNA, 40 bp, Homo sapiens
catacaaatggaagttggtaatggaattaagtgaaaggaa

SEQ ID NO: 23053 - DNA, 40 bp, Homo sapiens
ttcctttcacttaattccattaccaacttccatttgtatg

SEQ ID NO: 23054 - DNA, 40 bp, Homo sapiens
atacaaatggaagttggtaatggaattaagtgaaaggaaa

SEQ ID NO: 23055 - DNA, 40 bp, Homo sapiens
tttcctttcacttaattccattaccaacttccatttgtat

SEQ ID NO: 23056 - DNA, 40 bp, Homo sapiens
tacaaatggaagttggtaatggaattaagtgaaaggaaaa

SEQ ID NO: 23057 - DNA, 40 bp, Homo sapiens
ttttcctttcacttaattccattaccaacttccatttgta

SEQ ID NO: 23058 - DNA, 40 bp, Homo sapiens
acaaatggaagttggtaatggaattaagtgaaaggaaaaa

SEQ ID NO: 23059 - DNA, 40 bp, Homo sapiens
tttttcctttcacttaattccattaccaacttccatttgt

SEQ ID NO: 23060 - DNA, 40 bp, Homo sapiens
caaatggaagttggtaatggaattaagtgaaaggaaaaaa

SEQ ID NO: 23061 - DNA, 40 bp, Homo sapiens
ttttttcctttcacttaattccattaccaacttccatttg

SEQ ID NO: 23062 - DNA, 40 bp, Homo sapiens
aaatggaagttggtaatggaattaagtgaaaggaaaaaat

SEQ ID NO: 23063 - DNA, 40 bp, Homo sapiens
attttttcctttcacttaattccattaccaacttccattt

SEQ ID NO: 23064 - DNA, 40 bp, Homo sapiens
aatggaagttggtaatggaattaagtgaaaggaaaaaatg

SEQ ID NO: 23065 - DNA, 40 bp, Homo sapiens
cattttttcctttcacttaattccattaccaacttccatt

SEQ ID NO: 23066 - DNA, 40 bp, Homo sapiens
atggaagttggtaatggaattaagtgaaaggaaaaaatga

SEQ ID NO: 23067 - DNA, 40 bp, Homo sapiens
tcattttttcctttcacttaattccattaccaacttccat

SEQ ID NO: 23068 - DNA, 40 bp, Homo sapiens
tggaagttggtaatggaattaagtgaaaggaaaaaatgat

SEQ ID NO: 23069 - DNA, 40 bp, Homo sapiens
atcattttttcctttcacttaattccattaccaacttcca

SEQ ID NO: 23070 - DNA, 40 bp, Homo sapiens
ggaagttggtaatggaattaagtgaaaggaaaaaatgatt

SEQ ID NO: 23071 - DNA, 40 bp, Homo sapiens
aatcattttttcctttcacttaattccattaccaacttcc

SEQ ID NO: 23072 - DNA, 40 bp, Homo sapiens
gaagttggtaatggaattaagtgaaaggaaaaaatgattt

SEQ ID NO: 23073 - DNA, 40 bp, Homo sapiens
aaatcattttttcctttcacttaattccattaccaacttc

SEQ ID NO: 23074 - DNA, 40 bp, Homo sapiens
aagttggtaatggaattaagtgaaaggaaaaaatgatttt

SEQ ID NO: 23075 - DNA, 40 bp, Homo sapiens
aaaatcattttttcctttcacttaattccattaccaactt

SEQ ID NO: 23076 - DNA, 40 bp, Homo sapiens
agttggtaatggaattaagtgaaaggaaaaaatgatttta

SEQ ID NO: 23077 - DNA, 40 bp, Homo sapiens
taaaatcattttttcctttcacttaattccattaccaact

SEQ ID NO: 23078 - DNA, 40 bp, Homo sapiens
gttggtaatggaattaagtgaaaggaaaaaatgattttat

SEQ ID NO: 23079 - DNA, 40 bp, Homo sapiens
ataaaatcattttttcctttcacttaattccattaccaac

SEQ ID NO: 23080 - DNA, 40 bp, Homo sapiens
ttggtaatggaattaagtgaaaggaaaaaatgattttatg

SEQ ID NO: 23081 - DNA, 40 bp, Homo sapiens
cataaaatcattttttcctttcacttaattccattaccaa

SEQ ID NO: 23082 - DNA, 40 bp, Homo sapiens
tggtaatggaattaagtgaaaggaaaaaatgattttatgg

SEQ ID NO: 23083 - DNA, 40 bp, Homo sapiens
ccataaaatcattttttcctttcacttaattccattacca

SEQ ID NO: 23084 - DNA, 40 bp, Homo sapiens
ggtaatggaattaagtgaaaggaaaaaatgattttatggt

SEQ ID NO: 23085 - DNA, 40 bp, Homo sapiens
accataaaatcattttttcctttcacttaattccattacc

SEQ ID NO: 23086 - DNA, 40 bp, Homo sapiens
gtaatggaattaagtgaaaggaaaaaatgattttatggtt

SEQ ID NO: 23087 - DNA, 40 bp, Homo sapiens
aaccataaaatcattttttcctttcacttaattccattac

SEQ ID NO: 23088 - DNA, 40 bp, Homo sapiens
taatggaattaagtgaaaggaaaaaatgattttatggttt

SEQ ID NO: 23089 - DNA, 40 bp, Homo sapiens
aaaccataaaatcattttttcctttcacttaattccatta

SEQ ID NO: 23090 - DNA, 40 bp, Homo sapiens
aatggaattaagtgaaaggaaaaaatgattttatggtttg

SEQ ID NO: 23091 - DNA, 40 bp, Homo sapiens
caaaccataaaatcattttttcctttcacttaattccatt

SEQ ID NO: 23092 - DNA, 40 bp, Homo sapiens
atggaattaagtgaaaggaaaaaatgattttatggtttgg

SEQ ID NO: 23093 - DNA, 40 bp, Homo sapiens
ccaaaccataaaatcattttttcctttcacttaattccat

SEQ ID NO: 23094 - DNA, 40 bp, Homo sapiens
tggaattaagtgaaaggaaaaaatgattttatggtttgga

SEQ ID NO: 23095 - DNA, 40 bp, Homo sapiens
tccaaaccataaaatcattttttcctttcacttaattcca

SEQ ID NO: 23096 - DNA, 40 bp, Homo sapiens
ggaattaagtgaaaggaaaaaatgattttatggtttggaa

SEQ ID NO: 23097 - DNA, 40 bp, Homo sapiens
ttccaaaccataaaatcattttttcctttcacttaattcc

SEQ ID NO: 23098 - DNA, 40 bp, Homo sapiens
gaattaagtgaaaggaaaaaatgattttatggtttggaat

SEQ ID NO: 23099 - DNA, 40 bp, Homo sapiens
attccaaaccataaaatcattttttcctttcacttaattc

SEQ ID NO: 23100 - DNA, 40 bp, Homo sapiens
aattaagtgaaaggaaaaaatgattttatggtttggaatc

SEQ ID NO: 23101 - DNA, 40 bp, Homo sapiens
gattccaaaccataaaatcattttttcctttcacttaatt

SEQ ID NO: 23102 - DNA, 40 bp, Homo sapiens
attaagtgaaaggaaaaaatgattttatggtttggaatct

SEQ ID NO: 23103 - DNA, 40 bp, Homo sapiens
agattccaaaccataaaatcattttttcctttcacttaat

SEQ ID NO: 23104 - DNA, 40 bp, Homo sapiens
ttaagtgaaaggaaaaaatgattttatggtttggaatctc

SEQ ID NO: 23105 - DNA, 40 bp, Homo sapiens
gagattccaaaccataaaatcattttttcctttcacttaa

SEQ ID NO: 23106 - DNA, 40 bp, Homo sapiens
taagtgaaaggaaaaaatgattttatggtttggaatctcc

SEQ ID NO: 23107 - DNA, 40 bp, Homo sapiens
ggagattccaaaccataaaatcattttttcctttcactta

SEQ ID NO: 23108 - DNA, 40 bp, Homo sapiens
aagtgaaaggaaaaaatgattttatggtttggaatctcct

SEQ ID NO: 23109 - DNA, 40 bp, Homo sapiens
aggagattccaaaccataaaatcattttttcctttcactt

SEQ ID NO: 23110 - DNA, 40 bp, Homo sapiens
agtgaaaggaaaaaatgattttatggtttggaatctccta

SEQ ID NO: 23111 - DNA, 40 bp, Homo sapiens
taggagattccaaaccataaaatcattttttcctttcact

SEQ ID NO: 23112 - DNA, 40 bp, Homo sapiens
gtgaaaggaaaaaatgattttatggtttggaatctcctaa

SEQ ID NO: 23113 - DNA, 40 bp, Homo sapiens
ttaggagattccaaaccataaaatcattttttcctttcac

SEQ ID NO: 23114 - DNA, 40 bp, Homo sapiens
tgaaaggaaaaaatgattttatggtttggaatctcctaag

SEQ ID NO: 23115 - DNA, 40 bp, Homo sapiens
cttaggagattccaaaccataaaatcattttttcctttca

SEQ ID NO: 23116 - DNA, 40 bp, Homo sapiens
gaaaggaaaaaatgattttatggtttggaatctcctaaga

SEQ ID NO: 23117 - DNA, 40 bp, Homo sapiens
tcttaggagattccaaaccataaaatcattttttcctttc

SEQ ID NO: 23118 - DNA, 40 bp, Homo sapiens
aaaggaaaaaatgattttatggtttggaatctcctaagat

SEQ ID NO: 23119 - DNA, 40 bp, Homo sapiens
atcttaggagattccaaaccataaaatcattttttccttt

SEQ ID NO: 23120 - DNA, 40 bp, Homo sapiens
aaggaaaaaatgattttatggtttggaatctcctaagatt

SEQ ID NO: 23121 - DNA, 40 bp, Homo sapiens
aatcttaggagattccaaaccataaaatcattttttcctt

SEQ ID NO: 23122 - DNA, 40 bp, Homo sapiens
aggaaaaaatgattttatggtttggaatctcctaagattc

SEQ ID NO: 23123 - DNA, 40 bp, Homo sapiens
gaatcttaggagattccaaaccataaaatcattttttcct

SEQ ID NO: 23124 - DNA, 40 bp, Homo sapiens
ggaaaaaatgattttatggtttggaatctcctaagattct

SEQ ID NO: 23125 - DNA, 40 bp, Homo sapiens
agaatcttaggagattccaaaccataaaatcattttttcc

SEQ ID NO: 23126 - DNA, 40 bp, Homo sapiens
gaaaaaatgattttatggtttggaatctcctaagattctg

SEQ ID NO: 23127 - DNA, 40 bp, Homo sapiens
cagaatcttaggagattccaaaccataaaatcattttttc

SEQ ID NO: 23128 - DNA, 40 bp, Homo sapiens
aaaaaatgattttatggtttggaatctcctaagattctgg

SEQ ID NO: 23129 - DNA, 40 bp, Homo sapiens
ccagaatcttaggagattccaaaccataaaatcatttttt

SEQ ID NO: 23130 - DNA, 40 bp, Homo sapiens
aaaaatgattttatggtttggaatctcctaagattctggt

SEQ ID NO: 23131 - DNA, 40 bp, Homo sapiens
accagaatcttaggagattccaaaccataaaatcattttt

SEQ ID NO: 23132 - DNA, 40 bp, Homo sapiens
aaaatgattttatggtttggaatctcctaagattctggtt

SEQ ID NO: 23133 - DNA, 40 bp, Homo sapiens
aaccagaatcttaggagattccaaaccataaaatcatttt

SEQ ID NO: 23134 - DNA, 40 bp, Homo sapiens
aaatgattttatggtttggaatctcctaagattctggttt

SEQ ID NO: 23135 - DNA, 40 bp, Homo sapiens
aaaccagaatcttaggagattccaaaccataaaatcattt

SEQ ID NO: 23136 - DNA, 40 bp, Homo sapiens
aatgattttatggtttggaatctcctaagattctggtttt

SEQ ID NO: 23137 - DNA, 40 bp, Homo sapiens
aaaaccagaatcttaggagattccaaaccataaaatcatt

SEQ ID NO: 23138 - DNA, 40 bp, Homo sapiens
atgattttatggtttggaatctcctaagattctggtttta

SEQ ID NO: 23139 - DNA, 40 bp, Homo sapiens
taaaaccagaatcttaggagattccaaaccataaaatcat

SEQ ID NO: 23140 - DNA, 40 bp, Homo sapiens
tgattttatggtttggaatctcctaagattctggttttaa

SEQ ID NO: 23141 - DNA, 40 bp, Homo sapiens
ttaaaaccagaatcttaggagattccaaaccataaaatca

SEQ ID NO: 23142 - DNA, 40 bp, Homo sapiens
gattttatggtttggaatctcctaagattctggttttaac

SEQ ID NO: 23143 - DNA, 40 bp, Homo sapiens
gttaaaaccagaatcttaggagattccaaaccataaaatc

SEQ ID NO: 23144 - DNA, 40 bp, Homo sapiens
attttatggtttggaatctcctaagattctggttttaaca

SEQ ID NO: 23145 - DNA, 40 bp, Homo sapiens
tgttaaaaccagaatcttaggagattccaaaccataaaat

SEQ ID NO: 23146 - DNA, 40 bp, Homo sapiens
ttttatggtttggaatctcctaagattctggttttaacaa

SEQ ID NO: 23147 - DNA, 40 bp, Homo sapiens
ttgttaaaaccagaatcttaggagattccaaaccataaaa

SEQ ID NO: 23148 - DNA, 40 bp, Homo sapiens
tttatggtttggaatctcctaagattctggttttaacaat

SEQ ID NO: 23149 - DNA, 40 bp, Homo sapiens
attgttaaaaccagaatcttaggagattccaaaccataaa

SEQ ID NO: 23150 - DNA, 40 bp, Homo sapiens
ttatggtttggaatctcctaagattctggttttaacaata

SEQ ID NO: 23151 - DNA, 40 bp, Homo sapiens
tattgttaaaaccagaatcttaggagattccaaaccataa

SEQ ID NO: 23152 - DNA, 40 bp, Homo sapiens
tatggtttggaatctcctaagattctggttttaacaatac

SEQ ID NO: 23153 - DNA, 40 bp, Homo sapiens
gtattgttaaaaccagaatcttaggagattccaaaccata

SEQ ID NO: 23154 - DNA, 40 bp, Homo sapiens
atggtttggaatctcctaagattctggttttaacaataca

SEQ ID NO: 23155 - DNA, 40 bp, Homo sapiens
tgtattgttaaaaccagaatcttaggagattccaaaccat

SEQ ID NO: 23156 - DNA, 40 bp, Homo sapiens
tggtttggaatctcctaagattctggttttaacaatacaa

SEQ ID NO: 23157 - DNA, 40 bp, Homo sapiens
ttgtattgttaaaaccagaatcttaggagattccaaacca

SEQ ID NO: 23158 - DNA, 40 bp, Homo sapiens
ggtttggaatctcctaagattctggttttaacaatacaac

SEQ ID NO: 23159 - DNA, 40 bp, Homo sapiens
gttgtattgttaaaaccagaatcttaggagattccaaacc

SEQ ID NO: 23160 - DNA, 40 bp, Homo sapiens
gtttggaatctcctaagattctggttttaacaatacaact

SEQ ID NO: 23161 - DNA, 40 bp, Homo sapiens
agttgtattgttaaaaccagaatcttaggagattccaaac

SEQ ID NO: 23162 - DNA, 40 bp, Homo sapiens
tttggaatctcctaagattctggttttaacaatacaacta

SEQ ID NO: 23163 - DNA, 40 bp, Homo sapiens
tagttgtattgttaaaaccagaatcttaggagattccaaa

SEQ ID NO: 23164 - DNA, 40 bp, Homo sapiens
ttggaatctcctaagattctggttttaacaatacaactaa

SEQ ID NO: 23165 - DNA, 40 bp, Homo sapiens
ttagttgtattgttaaaaccagaatcttaggagattccaa

SEQ ID NO: 23166 - DNA, 40 bp, Homo sapiens
tggaatctcctaagattctggttttaacaatacaactaat

SEQ ID NO: 23167 - DNA, 40 bp, Homo sapiens
attagttgtattgttaaaaccagaatcttaggagattcca

SEQ ID NO: 23168 - DNA, 40 bp, Homo sapiens
ggaatctcctaagattctggttttaacaatacaactaatt

SEQ ID NO: 23169 - DNA, 40 bp, Homo sapiens
aattagttgtattgttaaaaccagaatcttaggagattcc

SEQ ID NO: 23170 - DNA, 40 bp, Homo sapiens
gaatctcctaagattctggttttaacaatacaactaattc

SEQ ID NO: 23171 - DNA, 40 bp, Homo sapiens
gaattagttgtattgttaaaaccagaatcttaggagattc

SEQ ID NO: 23172 - DNA, 40 bp, Homo sapiens
aatctcctaagattctggttttaacaatacaactaattcc

SEQ ID NO: 23173 - DNA, 40 bp, Homo sapiens
ggaattagttgtattgttaaaaccagaatcttaggagatt

SEQ ID NO: 23174 - DNA, 40 bp, Homo sapiens
atctcctaagattctggttttaacaatacaactaattcct

SEQ ID NO: 23175 - DNA, 40 bp, Homo sapiens
aggaattagttgtattgttaaaaccagaatcttaggagat

SEQ ID NO: 23176 - DNA, 40 bp, Homo sapiens
tctcctaagattctggttttaacaatacaactaattcctt

SEQ ID NO: 23177 - DNA, 40 bp, Homo sapiens
aaggaattagttgtattgttaaaaccagaatcttaggaga

SEQ ID NO: 23178 - DNA, 40 bp, Homo sapiens
ctcctaagattctggttttaacaatacaactaattcctta

SEQ ID NO: 23179 - DNA, 40 bp, Homo sapiens
taaggaattagttgtattgttaaaaccagaatcttaggag

SEQ ID NO: 23180 - DNA, 40 bp, Homo sapiens
tcctaagattctggttttaacaatacaactaattccttaa

SEQ ID NO: 23181 - DNA, 40 bp, Homo sapiens
ttaaggaattagttgtattgttaaaaccagaatcttagga

SEQ ID NO: 23182 - DNA, 40 bp, Homo sapiens
cctaagattctggttttaacaatacaactaattccttaat

SEQ ID NO: 23183 - DNA, 40 bp, Homo sapiens
attaaggaattagttgtattgttaaaaccagaatcttagg

SEQ ID NO: 23184 - DNA, 40 bp, Homo sapiens
ctaagattctggttttaacaatacaactaattccttaatc

SEQ ID NO: 23185 - DNA, 40 bp, Homo sapiens
gattaaggaattagttgtattgttaaaaccagaatcttag

SEQ ID NO: 23186 - DNA, 40 bp, Homo sapiens
taagattctggttttaacaatacaactaattccttaatcc

SEQ ID NO: 23187 - DNA, 40 bp, Homo sapiens
ggattaaggaattagttgtattgttaaaaccagaatctta

SEQ ID NO: 23188 - DNA, 40 bp, Homo sapiens
aagattctggttttaacaatacaactaattccttaatcct

SEQ ID NO: 23189 - DNA, 40 bp, Homo sapiens
aggattaaggaattagttgtattgttaaaaccagaatctt

SEQ ID NO: 23190 - DNA, 40 bp, Homo sapiens
agattctggttttaacaatacaactaattccttaatccta

SEQ ID NO: 23191 - DNA, 40 bp, Homo sapiens
taggattaaggaattagttgtattgttaaaaccagaatct

SEQ ID NO: 23192 - DNA, 40 bp, Homo sapiens
gattctggttttaacaatacaactaattccttaatcctag

SEQ ID NO: 23193 - DNA, 40 bp, Homo sapiens
ctaggattaaggaattagttgtattgttaaaaccagaatc

SEQ ID NO: 23194 - DNA, 40 bp, Homo sapiens
attctggttttaacaatacaactaattccttaatcctaga

SEQ ID NO: 23195 - DNA, 40 bp, Homo sapiens
tctaggattaaggaattagttgtattgttaaaaccagaat

SEQ ID NO: 23196 - DNA, 40 bp, Homo sapiens
ttctggttttaacaatacaactaattccttaatcctagaa

SEQ ID NO: 23197 - DNA, 40 bp, Homo sapiens
ttctaggattaaggaattagttgtattgttaaaaccagaa

SEQ ID NO: 23198 - DNA, 40 bp, Homo sapiens
tctggttttaacaatacaactaattccttaatcctagaaa

SEQ ID NO: 23199 - DNA, 40 bp, Homo sapiens
tttctaggattaaggaattagttgtattgttaaaaccaga

SEQ ID NO: 23200 - DNA, 40 bp, Homo sapiens
ctggttttaacaatacaactaattccttaatcctagaaat

SEQ ID NO: 23201 - DNA, 40 bp, Homo sapiens
atttctaggattaaggaattagttgtattgttaaaaccag

SEQ ID NO: 23202 - DNA, 40 bp, Homo sapiens
tggttttaacaatacaactaattccttaatcctagaaatg

SEQ ID NO: 23203 - DNA, 40 bp, Homo sapiens
catttctaggattaaggaattagttgtattgttaaaacca

SEQ ID NO: 23204 - DNA, 40 bp, Homo sapiens
ggttttaacaatacaactaattccttaatcctagaaatgt

SEQ ID NO: 23205 - DNA, 40 bp, Homo sapiens
acatttctaggattaaggaattagttgtattgttaaaacc

SEQ ID NO: 23206 - DNA, 40 bp, Homo sapiens
gttttaacaatacaactaattccttaatcctagaaatgtt

SEQ ID NO: 23207 - DNA, 40 bp, Homo sapiens
aacatttctaggattaaggaattagttgtattgttaaaac

SEQ ID NO: 23208 - DNA, 40 bp, Homo sapiens
ttttaacaatacaactaattccttaatcctagaaatgttc

SEQ ID NO: 23209 - DNA, 40 bp, Homo sapiens
gaacatttctaggattaaggaattagttgtattgttaaaa

SEQ ID NO: 23210 - DNA, 40 bp, Homo sapiens
tttaacaatacaactaattccttaatcctagaaatgttct

SEQ ID NO: 23211 - DNA, 40 bp, Homo sapiens
agaacatttctaggattaaggaattagttgtattgttaaa

SEQ ID NO: 23212 - DNA, 40 bp, Homo sapiens
ttaacaatacaactaattccttaatcctagaaatgttctt

SEQ ID NO: 23213 - DNA, 40 bp, Homo sapiens
aagaacatttctaggattaaggaattagttgtattgttaa

SEQ ID NO: 23214 - DNA, 40 bp, Homo sapiens
taacaatacaactaattccttaatcctagaaatgttcttc

SEQ ID NO: 23215 - DNA, 40 bp, Homo sapiens
gaagaacatttctaggattaaggaattagttgtattgtta

SEQ ID NO: 23216 - DNA, 40 bp, Homo sapiens
aacaatacaactaattccttaatcctagaaatgttcttca

SEQ ID NO: 23217 - DNA, 40 bp, Homo sapiens
tgaagaacatttctaggattaaggaattagttgtattgtt

SEQ ID NO: 23218 - DNA, 40 bp, Homo sapiens
acaatacaactaattccttaatcctagaaatgttcttcac

SEQ ID NO: 23219 - DNA, 40 bp, Homo sapiens
gtgaagaacatttctaggattaaggaattagttgtattgt

SEQ ID NO: 23220 - DNA, 40 bp, Homo sapiens
caatacaactaattccttaatcctagaaatgttcttcact

SEQ ID NO: 23221 - DNA, 40 bp, Homo sapiens
agtgaagaacatttctaggattaaggaattagttgtattg

SEQ ID NO: 23222 - DNA, 40 bp, Homo sapiens
aatacaactaattccttaatcctagaaatgttcttcactg

SEQ ID NO: 23223 - DNA, 40 bp, Homo sapiens
cagtgaagaacatttctaggattaaggaattagttgtatt

SEQ ID NO: 23224 - DNA, 40 bp, Homo sapiens
atacaactaattccttaatcctagaaatgttcttcactgc

SEQ ID NO: 23225 - DNA, 40 bp, Homo sapiens
gcagtgaagaacatttctaggattaaggaattagttgtat

SEQ ID NO: 23226 - DNA, 40 bp, Homo sapiens
tacaactaattccttaatcctagaaatgttcttcactgcc

SEQ ID NO: 23227 - DNA, 40 bp, Homo sapiens
ggcagtgaagaacatttctaggattaaggaattagttgta

SEQ ID NO: 23228 - DNA, 40 bp, Homo sapiens
acaactaattccttaatcctagaaatgttcttcactgccc

SEQ ID NO: 23229 - DNA, 40 bp, Homo sapiens
gggcagtgaagaacatttctaggattaaggaattagttgt

SEQ ID NO: 23230 - DNA, 40 bp, Homo sapiens
caactaattccttaatcctagaaatgttcttcactgccca

SEQ ID NO: 23231 - DNA, 40 bp, Homo sapiens
tgggcagtgaagaacatttctaggattaaggaattagttg

SEQ ID NO: 23232 - DNA, 40 bp, Homo sapiens
aactaattccttaatcctagaaatgttcttcactgcccac

SEQ ID NO: 23233 - DNA, 40 bp, Homo sapiens
gtgggcagtgaagaacatttctaggattaaggaattagtt

SEQ ID NO: 23234 - DNA, 40 bp, Homo sapiens
actaattccttaatcctagaaatgttcttcactgcccact

SEQ ID NO: 23235 - DNA, 40 bp, Homo sapiens
agtgggcagtgaagaacatttctaggattaaggaattagt

SEQ ID NO: 23236 - DNA, 40 bp, Homo sapiens
ctaattccttaatcctagaaatgttcttcactgcccactt

SEQ ID NO: 23237 - DNA, 40 bp, Homo sapiens
aagtgggcagtgaagaacatttctaggattaaggaattag

SEQ ID NO: 23238 - DNA, 40 bp, Homo sapiens
taattccttaatcctagaaatgttcttcactgcccacttt

SEQ ID NO: 23239 - DNA, 40 bp, Homo sapiens
aaagtgggcagtgaagaacatttctaggattaaggaatta

SEQ ID NO: 23240 - DNA, 40 bp, Homo sapiens
aattccttaatcctagaaatgttcttcactgcccactttg

SEQ ID NO: 23241 - DNA, 40 bp, Homo sapiens
caaagtgggcagtgaagaacatttctaggattaaggaatt

SEQ ID NO: 23242 - DNA, 40 bp, Homo sapiens
attccttaatcctagaaatgttcttcactgcccactttgt

SEQ ID NO: 23243 - DNA, 40 bp, Homo sapiens
acaaagtgggcagtgaagaacatttctaggattaaggaat

SEQ ID NO: 23244 - DNA, 40 bp, Homo sapiens
ttccttaatcctagaaatgttcttcactgcccactttgta

SEQ ID NO: 23245 - DNA, 40 bp, Homo sapiens
tacaaagtgggcagtgaagaacatttctaggattaaggaa

SEQ ID NO: 23246 - DNA, 40 bp, Homo sapiens
tccttaatcctagaaatgttcttcactgcccactttgtac

SEQ ID NO: 23247 - DNA, 40 bp, Homo sapiens
gtacaaagtgggcagtgaagaacatttctaggattaagga

SEQ ID NO: 23248 - DNA, 40 bp, Homo sapiens
ccttaatcctagaaatgttcttcactgcccactttgtacc

SEQ ID NO: 23249 - DNA, 40 bp, Homo sapiens
ggtacaaagtgggcagtgaagaacatttctaggattaagg

SEQ ID NO: 23250 - DNA, 40 bp, Homo sapiens
cttaatcctagaaatgttcttcactgcccactttgtacca

SEQ ID NO: 23251 - DNA, 40 bp, Homo sapiens
tggtacaaagtgggcagtgaagaacatttctaggattaag

SEQ ID NO: 23252 - DNA, 40 bp, Homo sapiens
ttaatcctagaaatgttcttcactgcccactttgtaccat

SEQ ID NO: 23253 - DNA, 40 bp, Homo sapiens
atggtacaaagtgggcagtgaagaacatttctaggattaa

SEQ ID NO: 23254 - DNA, 40 bp, Homo sapiens
taatcctagaaatgttcttcactgcccactttgtaccatg

SEQ ID NO: 23255 - DNA, 40 bp, Homo sapiens
catggtacaaagtgggcagtgaagaacatttctaggatta

SEQ ID NO: 23256 - DNA, 40 bp, Homo sapiens
aatcctagaaatgttcttcactgcccactttgtaccatgc

SEQ ID NO: 23257 - DNA, 40 bp, Homo sapiens
gcatggtacaaagtgggcagtgaagaacatttctaggatt

SEQ ID NO: 23258 - DNA, 40 bp, Homo sapiens
atcctagaaatgttcttcactgcccactttgtaccatgca

SEQ ID NO: 23259 - DNA, 40 bp, Homo sapiens
tgcatggtacaaagtgggcagtgaagaacatttctaggat

SEQ ID NO: 23260 - DNA, 40 bp, Homo sapiens
tcctagaaatgttcttcactgcccactttgtaccatgcag

SEQ ID NO: 23261 - DNA, 40 bp, Homo sapiens
ctgcatggtacaaagtgggcagtgaagaacatttctagga

SEQ ID NO: 23262 - DNA, 40 bp, Homo sapiens
cctagaaatgttcttcactgcccactttgtaccatgcagt

SEQ ID NO: 23263 - DNA, 40 bp, Homo sapiens
actgcatggtacaaagtgggcagtgaagaacatttctagg

SEQ ID NO: 23264 - DNA, 40 bp, Homo sapiens
ctagaaatgttcttcactgcccactttgtaccatgcagtc

SEQ ID NO: 23265 - DNA, 40 bp, Homo sapiens
gactgcatggtacaaagtgggcagtgaagaacatttctag

SEQ ID NO: 23266 - DNA, 40 bp, Homo sapiens
tagaaatgttcttcactgcccactttgtaccatgcagtct

SEQ ID NO: 23267 - DNA, 40 bp, Homo sapiens
agactgcatggtacaaagtgggcagtgaagaacatttcta

SEQ ID NO: 23268 - DNA, 40 bp, Homo sapiens
agaaatgttcttcactgcccactttgtaccatgcagtctt

SEQ ID NO: 23269 - DNA, 40 bp, Homo sapiens
aagactgcatggtacaaagtgggcagtgaagaacatttct

SEQ ID NO: 23270 - DNA, 40 bp, Homo sapiens
gaaatgttcttcactgcccactttgtaccatgcagtcttc

SEQ ID NO: 23271 - DNA, 40 bp, Homo sapiens
gaagactgcatggtacaaagtgggcagtgaagaacatttc

SEQ ID NO: 23272 - DNA, 40 bp, Homo sapiens
aaatgttcttcactgcccactttgtaccatgcagtcttcc

SEQ ID NO: 23273 - DNA, 40 bp, Homo sapiens
ggaagactgcatggtacaaagtgggcagtgaagaacattt

SEQ ID NO: 23274 - DNA, 40 bp, Homo sapiens
aatgttcttcactgcccactttgtaccatgcagtcttcct

SEQ ID NO: 23275 - DNA, 40 bp, Homo sapiens
aggaagactgcatggtacaaagtgggcagtgaagaacatt

SEQ ID NO: 23276 - DNA, 40 bp, Homo sapiens
atgttcttcactgcccactttgtaccatgcagtcttcctg

SEQ ID NO: 23277 - DNA, 40 bp, Homo sapiens
caggaagactgcatggtacaaagtgggcagtgaagaacat

SEQ ID NO: 23278 - DNA, 40 bp, Homo sapiens
tgttcttcactgcccactttgtaccatgcagtcttcctgt

SEQ ID NO: 23279 - DNA, 40 bp, Homo sapiens
acaggaagactgcatggtacaaagtgggcagtgaagaaca

SEQ ID NO: 23280 - DNA, 40 bp, Homo sapiens
gttcttcactgcccactttgtaccatgcagtcttcctgtg

SEQ ID NO: 23281 - DNA, 40 bp, Homo sapiens
cacaggaagactgcatggtacaaagtgggcagtgaagaac

SEQ ID NO: 23282 - DNA, 40 bp, Homo sapiens
ttcttcactgcccactttgtaccatgcagtcttcctgtgg

SEQ ID NO: 23283 - DNA, 40 bp, Homo sapiens
ccacaggaagactgcatggtacaaagtgggcagtgaagaa

SEQ ID NO: 23284 - DNA, 40 bp, Homo sapiens
tcttcactgcccactttgtaccatgcagtcttcctgtggg

SEQ ID NO: 23285 - DNA, 40 bp, Homo sapiens
cccacaggaagactgcatggtacaaagtgggcagtgaaga

SEQ ID NO: 23286 - DNA, 40 bp, Homo sapiens
cttcactgcccactttgtaccatgcagtcttcctgtgggc

SEQ ID NO: 23287 - DNA, 40 bp, Homo sapiens
gcccacaggaagactgcatggtacaaagtgggcagtgaag

SEQ ID NO: 23288 - DNA, 40 bp, Homo sapiens
ttcactgcccactttgtaccatgcagtcttcctgtgggct

SEQ ID NO: 23289 - DNA, 40 bp, Homo sapiens
agcccacaggaagactgcatggtacaaagtgggcagtgaa

SEQ ID NO: 23290 - DNA, 40 bp, Homo sapiens
tcactgcccactttgtaccatgcagtcttcctgtgggcta

SEQ ID NO: 23291 - DNA, 40 bp, Homo sapiens
tagcccacaggaagactgcatggtacaaagtgggcagtga

SEQ ID NO: 23292 - DNA, 40 bp, Homo sapiens
cactgcccactttgtaccatgcagtcttcctgtgggctag

SEQ ID NO: 23293 - DNA, 40 bp, Homo sapiens
ctagcccacaggaagactgcatggtacaaagtgggcagtg

SEQ ID NO: 23294 - DNA, 40 bp, Homo sapiens
actgcccactttgtaccatgcagtcttcctgtgggctaga

SEQ ID NO: 23295 - DNA, 40 bp, Homo sapiens
tctagcccacaggaagactgcatggtacaaagtgggcagt

SEQ ID NO: 23296 - DNA, 40 bp, Homo sapiens
ctgcccactttgtaccatgcagtcttcctgtgggctagag

SEQ ID NO: 23297 - DNA, 40 bp, Homo sapiens
ctctagcccacaggaagactgcatggtacaaagtgggcag

SEQ ID NO: 23298 - DNA, 40 bp, Homo sapiens
tgcccactttgtaccatgcagtcttcctgtgggctagaga

SEQ ID NO: 23299 - DNA, 40 bp, Homo sapiens
tctctagcccacaggaagactgcatggtacaaagtgggca

SEQ ID NO: 23300 - DNA, 40 bp, Homo sapiens
gcccactttgtaccatgcagtcttcctgtgggctagagat

SEQ ID NO: 23301 - DNA, 40 bp, Homo sapiens
atctctagcccacaggaagactgcatggtacaaagtgggc

SEQ ID NO: 23302 - DNA, 40 bp, Homo sapiens
cccactttgtaccatgcagtcttcctgtgggctagagata

SEQ ID NO: 23303 - DNA, 40 bp, Homo sapiens
tatctctagcccacaggaagactgcatggtacaaagtggg

SEQ ID NO: 23304 - DNA, 40 bp, Homo sapiens
ccactttgtaccatgcagtcttcctgtgggctagagatac

SEQ ID NO: 23305 - DNA, 40 bp, Homo sapiens
gtatctctagcccacaggaagactgcatggtacaaagtgg

SEQ ID NO: 23306 - DNA, 40 bp, Homo sapiens
cactttgtaccatgcagtcttcctgtgggctagagataca

SEQ ID NO: 23307 - DNA, 40 bp, Homo sapiens
tgtatctctagcccacaggaagactgcatggtacaaagtg

SEQ ID NO: 23308 - DNA, 40 bp, Homo sapiens
actttgtaccatgcagtcttcctgtgggctagagatacac

SEQ ID NO: 23309 - DNA, 40 bp, Homo sapiens
gtgtatctctagcccacaggaagactgcatggtacaaagt

SEQ ID NO: 23310 - DNA, 40 bp, Homo sapiens
ctttgtaccatgcagtcttcctgtgggctagagatacact

SEQ ID NO: 23311 - DNA, 40 bp, Homo sapiens
agtgtatctctagcccacaggaagactgcatggtacaaag

SEQ ID NO: 23312 - DNA, 40 bp, Homo sapiens
tttgtaccatgcagtcttcctgtgggctagagatacactg

SEQ ID NO: 23313 - DNA, 40 bp, Homo sapiens
cagtgtatctctagcccacaggaagactgcatggtacaaa

SEQ ID NO: 23314 - DNA, 40 bp, Homo sapiens
ttgtaccatgcagtcttcctgtgggctagagatacactga

SEQ ID NO: 23315 - DNA, 40 bp, Homo sapiens
tcagtgtatctctagcccacaggaagactgcatggtacaa

SEQ ID NO: 23316 - DNA, 40 bp, Homo sapiens
tgtaccatgcagtcttcctgtgggctagagatacactgag

SEQ ID NO: 23317 - DNA, 40 bp, Homo sapiens
ctcagtgtatctctagcccacaggaagactgcatggtaca

SEQ ID NO: 23318 - DNA, 40 bp, Homo sapiens
gtaccatgcagtcttcctgtgggctagagatacactgagg

SEQ ID NO: 23319 - DNA, 40 bp, Homo sapiens
cctcagtgtatctctagcccacaggaagactgcatggtac

SEQ ID NO: 23320 - DNA, 40 bp, Homo sapiens
taccatgcagtcttcctgtgggctagagatacactgaggc

SEQ ID NO: 23321 - DNA, 40 bp, Homo sapiens
gcctcagtgtatctctagcccacaggaagactgcatggta

SEQ ID NO: 23322 - DNA, 40 bp, Homo sapiens
accatgcagtcttcctgtgggctagagatacactgaggcg

SEQ ID NO: 23323 - DNA, 40 bp, Homo sapiens
cgcctcagtgtatctctagcccacaggaagactgcatggt

SEQ ID NO: 23324 - DNA, 40 bp, Homo sapiens
ccatgcagtcttcctgtgggctagagatacactgaggcgc

SEQ ID NO: 23325 - DNA, 40 bp, Homo sapiens
gcgcctcagtgtatctctagcccacaggaagactgcatgg

SEQ ID NO: 23326 - DNA, 40 bp, Homo sapiens
catgcagtcttcctgtgggctagagatacactgaggcgca

SEQ ID NO: 23327 - DNA, 40 bp, Homo sapiens
tgcgcctcagtgtatctctagcccacaggaagactgcatg

SEQ ID NO: 23328 - DNA, 40 bp, Homo sapiens
atgcagtcttcctgtgggctagagatacactgaggcgcaa

SEQ ID NO: 23329 - DNA, 40 bp, Homo sapiens
ttgcgcctcagtgtatctctagcccacaggaagactgcat

SEQ ID NO: 23330 - DNA, 40 bp, Homo sapiens
tgcagtcttcctgtgggctagagatacactgaggcgcaaa

SEQ ID NO: 23331 - DNA, 40 bp, Homo sapiens
tttgcgcctcagtgtatctctagcccacaggaagactgca

SEQ ID NO: 23332 - DNA, 40 bp, Homo sapiens
gcagtcttcctgtgggctagagatacactgaggcgcaaaa

SEQ ID NO: 23333 - DNA, 40 bp, Homo sapiens
ttttgcgcctcagtgtatctctagcccacaggaagactgc

SEQ ID NO: 23334 - DNA, 40 bp, Homo sapiens
cagtcttcctgtgggctagagatacactgaggcgcaaaac

SEQ ID NO: 23335 - DNA, 40 bp, Homo sapiens
gttttgcgcctcagtgtatctctagcccacaggaagactg

SEQ ID NO: 23336 - DNA, 40 bp, Homo sapiens
agtcttcctgtgggctagagatacactgaggcgcaaaaca

SEQ ID NO: 23337 - DNA, 40 bp, Homo sapiens
tgttttgcgcctcagtgtatctctagcccacaggaagact

SEQ ID NO: 23338 - DNA, 40 bp, Homo sapiens
gtcttcctgtgggctagagatacactgaggcgcaaaacag

SEQ ID NO: 23339 - DNA, 40 bp, Homo sapiens
ctgttttgcgcctcagtgtatctctagcccacaggaagac

SEQ ID NO: 23340 - DNA, 40 bp, Homo sapiens
tcttcctgtgggctagagatacactgaggcgcaaaacaga

SEQ ID NO: 23341 - DNA, 40 bp, Homo sapiens
tctgttttgcgcctcagtgtatctctagcccacaggaaga

SEQ ID NO: 23342 - DNA, 40 bp, Homo sapiens
cttcctgtgggctagagatacactgaggcgcaaaacagac

SEQ ID NO: 23343 - DNA, 40 bp, Homo sapiens
gtctgttttgcgcctcagtgtatctctagcccacaggaag

SEQ ID NO: 23344 - DNA, 40 bp, Homo sapiens
ttcctgtgggctagagatacactgaggcgcaaaacagacc

SEQ ID NO: 23345 - DNA, 40 bp, Homo sapiens
ggtctgttttgcgcctcagtgtatctctagcccacaggaa

SEQ ID NO: 23346 - DNA, 40 bp, Homo sapiens
tcctgtgggctagagatacactgaggcgcaaaacagacca

SEQ ID NO: 23347 - DNA, 40 bp, Homo sapiens
tggtctgttttgcgcctcagtgtatctctagcccacagga

SEQ ID NO: 23348 - DNA, 40 bp, Homo sapiens
cctgtgggctagagatacactgaggcgcaaaacagaccag

SEQ ID NO: 23349 - DNA, 40 bp, Homo sapiens
ctggtctgttttgcgcctcagtgtatctctagcccacagg

SEQ ID NO: 23350 - DNA, 40 bp, Homo sapiens
ctgtgggctagagatacactgaggcgcaaaacagaccaga

SEQ ID NO: 23351 - DNA, 40 bp, Homo sapiens
tctggtctgttttgcgcctcagtgtatctctagcccacag

SEQ ID NO: 23352 - DNA, 40 bp, Homo sapiens
tgtgggctagagatacactgaggcgcaaaacagaccagat

SEQ ID NO: 23353 - DNA, 40 bp, Homo sapiens
atctggtctgttttgcgcctcagtgtatctctagcccaca

SEQ ID NO: 23354 - DNA, 40 bp, Homo sapiens
gtgggctagagatacactgaggcgcaaaacagaccagatt

SEQ ID NO: 23355 - DNA, 40 bp, Homo sapiens
aatctggtctgttttgcgcctcagtgtatctctagcccac

SEQ ID NO: 23356 - DNA, 40 bp, Homo sapiens
tgggctagagatacactgaggcgcaaaacagaccagattc

SEQ ID NO: 23357 - DNA, 40 bp, Homo sapiens
gaatctggtctgttttgcgcctcagtgtatctctagccca

SEQ ID NO: 23358 - DNA, 40 bp, Homo sapiens
gggctagagatacactgaggcgcaaaacagaccagattcc

SEQ ID NO: 23359 - DNA, 40 bp, Homo sapiens
ggaatctggtctgttttgcgcctcagtgtatctctagccc

SEQ ID NO: 23360 - DNA, 40 bp, Homo sapiens
ggctagagatacactgaggcgcaaaacagaccagattcct

SEQ ID NO: 23361 - DNA, 40 bp, Homo sapiens
aggaatctggtctgttttgcgcctcagtgtatctctagcc

SEQ ID NO: 23362 - DNA, 40 bp, Homo sapiens
gctagagatacactgaggcgcaaaacagaccagattcctg

SEQ ID NO: 23363 - DNA, 40 bp, Homo sapiens
caggaatctggtctgttttgcgcctcagtgtatctctagc

SEQ ID NO: 23364 - DNA, 40 bp, Homo sapiens
ctagagatacactgaggcgcaaaacagaccagattcctgc

SEQ ID NO: 23365 - DNA, 40 bp, Homo sapiens
gcaggaatctggtctgttttgcgcctcagtgtatctctag

SEQ ID NO: 23366 - DNA, 40 bp, Homo sapiens
tagagatacactgaggcgcaaaacagaccagattcctgcc

SEQ ID NO: 23367 - DNA, 40 bp, Homo sapiens
ggcaggaatctggtctgttttgcgcctcagtgtatctcta

SEQ ID NO: 23368 - DNA, 40 bp, Homo sapiens
agagatacactgaggcgcaaaacagaccagattcctgcct

SEQ ID NO: 23369 - DNA, 40 bp, Homo sapiens
aggcaggaatctggtctgttttgcgcctcagtgtatctct

SEQ ID NO: 23370 - DNA, 40 bp, Homo sapiens
gagatacactgaggcgcaaaacagaccagattcctgcctt

SEQ ID NO: 23371 - DNA, 40 bp, Homo sapiens
aaggcaggaatctggtctgttttgcgcctcagtgtatctc

SEQ ID NO: 23372 - DNA, 40 bp, Homo sapiens
agatacactgaggcgcaaaacagaccagattcctgccttc

SEQ ID NO: 23373 - DNA, 40 bp, Homo sapiens
gaaggcaggaatctggtctgttttgcgcctcagtgtatct

SEQ ID NO: 23374 - DNA, 40 bp, Homo sapiens
gatacactgaggcgcaaaacagaccagattcctgccttca

SEQ ID NO: 23375 - DNA, 40 bp, Homo sapiens
tgaaggcaggaatctggtctgttttgcgcctcagtgtatc

SEQ ID NO: 23376 - DNA, 40 bp, Homo sapiens
atacactgaggcgcaaaacagaccagattcctgccttcat

SEQ ID NO: 23377 - DNA, 40 bp, Homo sapiens
atgaaggcaggaatctggtctgttttgcgcctcagtgtat

SEQ ID NO: 23378 - DNA, 40 bp, Homo sapiens
tacactgaggcgcaaaacagaccagattcctgccttcatg

SEQ ID NO: 23379 - DNA, 40 bp, Homo sapiens
catgaaggcaggaatctggtctgttttgcgcctcagtgta

SEQ ID NO: 23380 - DNA, 40 bp, Homo sapiens
acactgaggcgcaaaacagaccagattcctgccttcatgg

SEQ ID NO: 23381 - DNA, 40 bp, Homo sapiens
ccatgaaggcaggaatctggtctgttttgcgcctcagtgt

SEQ ID NO: 23382 - DNA, 40 bp, Homo sapiens
cactgaggcgcaaaacagaccagattcctgccttcatgga

SEQ ID NO: 23383 - DNA, 40 bp, Homo sapiens
tccatgaaggcaggaatctggtctgttttgcgcctcagtg

SEQ ID NO: 23384 - DNA, 40 bp, Homo sapiens
actgaggcgcaaaacagaccagattcctgccttcatggag

SEQ ID NO: 23385 - DNA, 40 bp, Homo sapiens
ctccatgaaggcaggaatctggtctgttttgcgcctcagt

SEQ ID NO: 23386 - DNA, 40 bp, Homo sapiens
ctgaggcgcaaaacagaccagattcctgccttcatggagc

SEQ ID NO: 23387 - DNA, 40 bp, Homo sapiens
gctccatgaaggcaggaatctggtctgttttgcgcctcag

SEQ ID NO: 23388 - DNA, 40 bp, Homo sapiens
tgaggcgcaaaacagaccagattcctgccttcatggagct

SEQ ID NO: 23389 - DNA, 40 bp, Homo sapiens
agctccatgaaggcaggaatctggtctgttttgcgcctca

SEQ ID NO: 23390 - DNA, 40 bp, Homo sapiens
gaggcgcaaaacagaccagattcctgccttcatggagctt

SEQ ID NO: 23391 - DNA, 40 bp, Homo sapiens
aagctccatgaaggcaggaatctggtctgttttgcgcctc

SEQ ID NO: 23392 - DNA, 40 bp, Homo sapiens
aggcgcaaaacagaccagattcctgccttcatggagctta

SEQ ID NO: 23393 - DNA, 40 bp, Homo sapiens
taagctccatgaaggcaggaatctggtctgttttgcgcct

SEQ ID NO: 23394 - DNA, 40 bp, Homo sapiens
ggcgcaaaacagaccagattcctgccttcatggagcttat

SEQ ID NO: 23395 - DNA, 40 bp, Homo sapiens
ataagctccatgaaggcaggaatctggtctgttttgcgcc

SEQ ID NO: 23396 - DNA, 40 bp, Homo sapiens
gcgcaaaacagaccagattcctgccttcatggagcttatt

SEQ ID NO: 23397 - DNA, 40 bp, Homo sapiens
aataagctccatgaaggcaggaatctggtctgttttgcgc

SEQ ID NO: 23398 - DNA, 40 bp, Homo sapiens
cgcaaaacagaccagattcctgccttcatggagcttatta

SEQ ID NO: 23399 - DNA, 40 bp, Homo sapiens
taataagctccatgaaggcaggaatctggtctgttttgcg

SEQ ID NO: 23400 - DNA, 40 bp, Homo sapiens
gcaaaacagaccagattcctgccttcatggagcttattag

SEQ ID NO: 23401 - DNA, 40 bp, Homo sapiens
ctaataagctccatgaaggcaggaatctggtctgttttgc

SEQ ID NO: 23402 - DNA, 40 bp, Homo sapiens
caaaacagaccagattcctgccttcatggagcttattagt

SEQ ID NO: 23403 - DNA, 40 bp, Homo sapiens
actaataagctccatgaaggcaggaatctggtctgttttg

SEQ ID NO: 23404 - DNA, 40 bp, Homo sapiens
aaaacagaccagattcctgccttcatggagcttattagtt

SEQ ID NO: 23405 - DNA, 40 bp, Homo sapiens
aactaataagctccatgaaggcaggaatctggtctgtttt

SEQ ID NO: 23406 - DNA, 40 bp, Homo sapiens
aaacagaccagattcctgccttcatggagcttattagttt

SEQ ID NO: 23407 - DNA, 40 bp, Homo sapiens
aaactaataagctccatgaaggcaggaatctggtctgttt

SEQ ID NO: 23408 - DNA, 40 bp, Homo sapiens
aacagaccagattcctgccttcatggagcttattagtttt

SEQ ID NO: 23409 - DNA, 40 bp, Homo sapiens
aaaactaataagctccatgaaggcaggaatctggtctgtt

SEQ ID NO: 23410 - DNA, 40 bp, Homo sapiens
acagaccagattcctgccttcatggagcttattagtttta

SEQ ID NO: 23411 - DNA, 40 bp, Homo sapiens
taaaactaataagctccatgaaggcaggaatctggtctgt

SEQ ID NO: 23412 - DNA, 40 bp, Homo sapiens
cagaccagattcctgccttcatggagcttattagttttag

SEQ ID NO: 23413 - DNA, 40 bp, Homo sapiens
ctaaaactaataagctccatgaaggcaggaatctggtctg

SEQ ID NO: 23414 - DNA, 40 bp, Homo sapiens
agaccagattcctgccttcatggagcttattagttttagg

SEQ ID NO: 23415 - DNA, 40 bp, Homo sapiens
cctaaaactaataagctccatgaaggcaggaatctggtct

SEQ ID NO: 23416 - DNA, 40 bp, Homo sapiens
gaccagattcctgccttcatggagcttattagttttaggt

SEQ ID NO: 23417 - DNA, 40 bp, Homo sapiens
acctaaaactaataagctccatgaaggcaggaatctggtc

SEQ ID NO: 23418 - DNA, 40 bp, Homo sapiens
accagattcctgccttcatggagcttattagttttaggta

SEQ ID NO: 23419 - DNA, 40 bp, Homo sapiens
tacctaaaactaataagctccatgaaggcaggaatctggt

SEQ ID NO: 23420 - DNA, 40 bp, Homo sapiens
ccagattcctgccttcatggagcttattagttttaggtat

SEQ ID NO: 23421 - DNA, 40 bp, Homo sapiens
atacctaaaactaataagctccatgaaggcaggaatctgg

SEQ ID NO: 23422 - DNA, 40 bp, Homo sapiens
cagattcctgccttcatggagcttattagttttaggtatc

SEQ ID NO: 23423 - DNA, 40 bp, Homo sapiens
gatacctaaaactaataagctccatgaaggcaggaatctg

SEQ ID NO: 23424 - DNA, 40 bp, Homo sapiens
agattcctgccttcatggagcttattagttttaggtatct

SEQ ID NO: 23425 - DNA, 40 bp, Homo sapiens
agatacctaaaactaataagctccatgaaggcaggaatct

SEQ ID NO: 23426 - DNA, 40 bp, Homo sapiens
gattcctgccttcatggagcttattagttttaggtatctc

SEQ ID NO: 23427 - DNA, 40 bp, Homo sapiens
gagatacctaaaactaataagctccatgaaggcaggaatc

SEQ ID NO: 23428 - DNA, 40 bp, Homo sapiens
attcctgccttcatggagcttattagttttaggtatctct

SEQ ID NO: 23429 - DNA, 40 bp, Homo sapiens
agagatacctaaaactaataagctccatgaaggcaggaat

SEQ ID NO: 23430 - DNA, 40 bp, Homo sapiens
ttcctgccttcatggagcttattagttttaggtatctcta

SEQ ID NO: 23431 - DNA, 40 bp, Homo sapiens
tagagatacctaaaactaataagctccatgaaggcaggaa

SEQ ID NO: 23432 - DNA, 40 bp, Homo sapiens
tcctgccttcatggagcttattagttttaggtatctctag

SEQ ID NO: 23433 - DNA, 40 bp, Homo sapiens
ctagagatacctaaaactaataagctccatgaaggcagga

SEQ ID NO: 23434 - DNA, 40 bp, Homo sapiens
cctgccttcatggagcttattagttttaggtatctctaga

SEQ ID NO: 23435 - DNA, 40 bp, Homo sapiens
tctagagatacctaaaactaataagctccatgaaggcagg

SEQ ID NO: 23436 - DNA, 40 bp, Homo sapiens
ctgccttcatggagcttattagttttaggtatctctagat

SEQ ID NO: 23437 - DNA, 40 bp, Homo sapiens
atctagagatacctaaaactaataagctccatgaaggcag

SEQ ID NO: 23438 - DNA, 40 bp, Homo sapiens
tgccttcatggagcttattagttttaggtatctctagatt

SEQ ID NO: 23439 - DNA, 40 bp, Homo sapiens
aatctagagatacctaaaactaataagctccatgaaggca

SEQ ID NO: 23440 - DNA, 40 bp, Homo sapiens
gccttcatggagcttattagttttaggtatctctagattt

SEQ ID NO: 23441 - DNA, 40 bp, Homo sapiens
aaatctagagatacctaaaactaataagctccatgaaggc

SEQ ID NO: 23442 - DNA, 40 bp, Homo sapiens
ccttcatggagcttattagttttaggtatctctagatttc

SEQ ID NO: 23443 - DNA, 40 bp, Homo sapiens
gaaatctagagatacctaaaactaataagctccatgaagg

SEQ ID NO: 23444 - DNA, 40 bp, Homo sapiens
cttcatggagcttattagttttaggtatctctagatttct

SEQ ID NO: 23445 - DNA, 40 bp, Homo sapiens
agaaatctagagatacctaaaactaataagctccatgaag

SEQ ID NO: 23446 - DNA, 40 bp, Homo sapiens
ttcatggagcttattagttttaggtatctctagatttctt

SEQ ID NO: 23447 - DNA, 40 bp, Homo sapiens
aagaaatctagagatacctaaaactaataagctccatgaa

SEQ ID NO: 23448 - DNA, 40 bp, Homo sapiens
tcatggagcttattagttttaggtatctctagatttcttg

SEQ ID NO: 23449 - DNA, 40 bp, Homo sapiens
caagaaatctagagatacctaaaactaataagctccatga

SEQ ID NO: 23450 - DNA, 40 bp, Homo sapiens
catggagcttattagttttaggtatctctagatttcttgt

SEQ ID NO: 23451 - DNA, 40 bp, Homo sapiens
acaagaaatctagagatacctaaaactaataagctccatg

SEQ ID NO: 23452 - DNA, 40 bp, Homo sapiens
atggagcttattagttttaggtatctctagatttcttgta

SEQ ID NO: 23453 - DNA, 40 bp, Homo sapiens
tacaagaaatctagagatacctaaaactaataagctccat

SEQ ID NO: 23454 - DNA, 40 bp, Homo sapiens
tggagcttattagttttaggtatctctagatttcttgtaa

SEQ ID NO: 23455 - DNA, 40 bp, Homo sapiens
ttacaagaaatctagagatacctaaaactaataagctcca

SEQ ID NO: 23456 - DNA, 40 bp, Homo sapiens
ggagcttattagttttaggtatctctagatttcttgtaat

SEQ ID NO: 23457 - DNA, 40 bp, Homo sapiens
attacaagaaatctagagatacctaaaactaataagctcc

SEQ ID NO: 23458 - DNA, 40 bp, Homo sapiens
gagcttattagttttaggtatctctagatttcttgtaata

SEQ ID NO: 23459 - DNA, 40 bp, Homo sapiens
tattacaagaaatctagagatacctaaaactaataagctc

SEQ ID NO: 23460 - DNA, 40 bp, Homo sapiens
agcttattagttttaggtatctctagatttcttgtaatac

SEQ ID NO: 23461 - DNA, 40 bp, Homo sapiens
gtattacaagaaatctagagatacctaaaactaataagct

SEQ ID NO: 23462 - DNA, 40 bp, Homo sapiens
gcttattagttttaggtatctctagatttcttgtaatacc

SEQ ID NO: 23463 - DNA, 40 bp, Homo sapiens
ggtattacaagaaatctagagatacctaaaactaataagc

SEQ ID NO: 23464 - DNA, 40 bp, Homo sapiens
cttattagttttaggtatctctagatttcttgtaatacct

SEQ ID NO: 23465 - DNA, 40 bp, Homo sapiens
aggtattacaagaaatctagagatacctaaaactaataag

SEQ ID NO: 23466 - DNA, 40 bp, Homo sapiens
ttattagttttaggtatctctagatttcttgtaataccta

SEQ ID NO: 23467 - DNA, 40 bp, Homo sapiens
taggtattacaagaaatctagagatacctaaaactaataa

SEQ ID NO: 23468 - DNA, 40 bp, Homo sapiens
tattagttttaggtatctctagatttcttgtaatacctat

SEQ ID NO: 23469 - DNA, 40 bp, Homo sapiens
ataggtattacaagaaatctagagatacctaaaactaata

SEQ ID NO: 23470 - DNA, 40 bp, Homo sapiens
attagttttaggtatctctagatttcttgtaatacctatt

SEQ ID NO: 23471 - DNA, 40 bp, Homo sapiens
aataggtattacaagaaatctagagatacctaaaactaat

SEQ ID NO: 23472 - DNA, 40 bp, Homo sapiens
ttagttttaggtatctctagatttcttgtaatacctatta

SEQ ID NO: 23473 - DNA, 40 bp, Homo sapiens
taataggtattacaagaaatctagagatacctaaaactaa

SEQ ID NO: 23474 - DNA, 40 bp, Homo sapiens
tagttttaggtatctctagatttcttgtaatacctattac

SEQ ID NO: 23475 - DNA, 40 bp, Homo sapiens
gtaataggtattacaagaaatctagagatacctaaaacta

SEQ ID NO: 23476 - DNA, 40 bp, Homo sapiens
agttttaggtatctctagatttcttgtaatacctattaca

SEQ ID NO: 23477 - DNA, 40 bp, Homo sapiens
tgtaataggtattacaagaaatctagagatacctaaaact

SEQ ID NO: 23478 - DNA, 40 bp, Homo sapiens
gttttaggtatctctagatttcttgtaatacctattacaa

SEQ ID NO: 23479 - DNA, 40 bp, Homo sapiens
ttgtaataggtattacaagaaatctagagatacctaaaac

SEQ ID NO: 23480 - DNA, 40 bp, Homo sapiens
ttttaggtatctctagatttcttgtaatacctattacaat

SEQ ID NO: 23481 - DNA, 40 bp, Homo sapiens
attgtaataggtattacaagaaatctagagatacctaaaa

SEQ ID NO: 23482 - DNA, 40 bp, Homo sapiens
tttaggtatctctagatttcttgtaatacctattacaatg

SEQ ID NO: 23483 - DNA, 40 bp, Homo sapiens
cattgtaataggtattacaagaaatctagagatacctaaa

SEQ ID NO: 23484 - DNA, 40 bp, Homo sapiens
ttaggtatctctagatttcttgtaatacctattacaatgc

SEQ ID NO: 23485 - DNA, 40 bp, Homo sapiens
gcattgtaataggtattacaagaaatctagagatacctaa

SEQ ID NO: 23486 - DNA, 40 bp, Homo sapiens
taggtatctctagatttcttgtaatacctattacaatgcc

SEQ ID NO: 23487 - DNA, 40 bp, Homo sapiens
ggcattgtaataggtattacaagaaatctagagataccta

SEQ ID NO: 23488 - DNA, 40 bp, Homo sapiens
aggtatctctagatttcttgtaatacctattacaatgcct

SEQ ID NO: 23489 - DNA, 40 bp, Homo sapiens
aggcattgtaataggtattacaagaaatctagagatacct

SEQ ID NO: 23490 - DNA, 40 bp, Homo sapiens
ggtatctctagatttcttgtaatacctattacaatgcctg

SEQ ID NO: 23491 - DNA, 40 bp, Homo sapiens
caggcattgtaataggtattacaagaaatctagagatacc

SEQ ID NO: 23492 - DNA, 40 bp, Homo sapiens
gtatctctagatttcttgtaatacctattacaatgcctgc

SEQ ID NO: 23493 - DNA, 40 bp, Homo sapiens
gcaggcattgtaataggtattacaagaaatctagagatac

SEQ ID NO: 23494 - DNA, 40 bp, Homo sapiens
tatctctagatttcttgtaatacctattacaatgcctgca

SEQ ID NO: 23495 - DNA, 40 bp, Homo sapiens
tgcaggcattgtaataggtattacaagaaatctagagata

SEQ ID NO: 23496 - DNA, 40 bp, Homo sapiens
atctctagatttcttgtaatacctattacaatgcctgcac

SEQ ID NO: 23497 - DNA, 40 bp, Homo sapiens
gtgcaggcattgtaataggtattacaagaaatctagagat

SEQ ID NO: 23498 - DNA, 40 bp, Homo sapiens
tctctagatttcttgtaatacctattacaatgcctgcaca

SEQ ID NO: 23499 - DNA, 40 bp, Homo sapiens
tgtgcaggcattgtaataggtattacaagaaatctagaga

SEQ ID NO: 23500 - DNA, 40 bp, Homo sapiens
ctctagatttcttgtaatacctattacaatgcctgcacat

SEQ ID NO: 23501 - DNA, 40 bp, Homo sapiens
atgtgcaggcattgtaataggtattacaagaaatctagag

SEQ ID NO: 23502 - DNA, 40 bp, Homo sapiens
tctagatttcttgtaatacctattacaatgcctgcacatc

SEQ ID NO: 23503 - DNA, 40 bp, Homo sapiens
gatgtgcaggcattgtaataggtattacaagaaatctaga

SEQ ID NO: 23504 - DNA, 40 bp, Homo sapiens
ctagatttcttgtaatacctattacaatgcctgcacatca

SEQ ID NO: 23505 - DNA, 40 bp, Homo sapiens
tgatgtgcaggcattgtaataggtattacaagaaatctag

SEQ ID NO: 23506 - DNA, 40 bp, Homo sapiens
tagatttcttgtaatacctattacaatgcctgcacatcag

SEQ ID NO: 23507 - DNA, 40 bp, Homo sapiens
ctgatgtgcaggcattgtaataggtattacaagaaatcta

SEQ ID NO: 23508 - DNA, 40 bp, Homo sapiens
agatttcttgtaatacctattacaatgcctgcacatcagt

SEQ ID NO: 23509 - DNA, 40 bp, Homo sapiens
actgatgtgcaggcattgtaataggtattacaagaaatct

SEQ ID NO: 23510 - DNA, 40 bp, Homo sapiens
gatttcttgtaatacctattacaatgcctgcacatcagtt

SEQ ID NO: 23511 - DNA, 40 bp, Homo sapiens
aactgatgtgcaggcattgtaataggtattacaagaaatc

SEQ ID NO: 23512 - DNA, 40 bp, Homo sapiens
atttcttgtaatacctattacaatgcctgcacatcagttc

SEQ ID NO: 23513 - DNA, 40 bp, Homo sapiens
gaactgatgtgcaggcattgtaataggtattacaagaaat

SEQ ID NO: 23514 - DNA, 40 bp, Homo sapiens
tttcttgtaatacctattacaatgcctgcacatcagttca

SEQ ID NO: 23515 - DNA, 40 bp, Homo sapiens
tgaactgatgtgcaggcattgtaataggtattacaagaaa

SEQ ID NO: 23516 - DNA, 40 bp, Homo sapiens
ttcttgtaatacctattacaatgcctgcacatcagttcat

SEQ ID NO: 23517 - DNA, 40 bp, Homo sapiens
atgaactgatgtgcaggcattgtaataggtattacaagaa

SEQ ID NO: 23518 - DNA, 40 bp, Homo sapiens
tcttgtaatacctattacaatgcctgcacatcagttcatt

SEQ ID NO: 23519 - DNA, 40 bp, Homo sapiens
aatgaactgatgtgcaggcattgtaataggtattacaaga

SEQ ID NO: 23520 - DNA, 40 bp, Homo sapiens
cttgtaatacctattacaatgcctgcacatcagttcattc

SEQ ID NO: 23521 - DNA, 40 bp, Homo sapiens
gaatgaactgatgtgcaggcattgtaataggtattacaag

SEQ ID NO: 23522 - DNA, 40 bp, Homo sapiens
ttgtaatacctattacaatgcctgcacatcagttcattca

SEQ ID NO: 23523 - DNA, 40 bp, Homo sapiens
tgaatgaactgatgtgcaggcattgtaataggtattacaa

SEQ ID NO: 23524 - DNA, 40 bp, Homo sapiens
tgtaatacctattacaatgcctgcacatcagttcattcat

SEQ ID NO: 23525 - DNA, 40 bp, Homo sapiens
atgaatgaactgatgtgcaggcattgtaataggtattaca

SEQ ID NO: 23526 - DNA, 40 bp, Homo sapiens
gtaatacctattacaatgcctgcacatcagttcattcatg

SEQ ID NO: 23527 - DNA, 40 bp, Homo sapiens
catgaatgaactgatgtgcaggcattgtaataggtattac

SEQ ID NO: 23528 - DNA, 40 bp, Homo sapiens
taatacctattacaatgcctgcacatcagttcattcatgt

SEQ ID NO: 23529 - DNA, 40 bp, Homo sapiens
acatgaatgaactgatgtgcaggcattgtaataggtatta

SEQ ID NO: 23530 - DNA, 40 bp, Homo sapiens
aatacctattacaatgcctgcacatcagttcattcatgtg

SEQ ID NO: 23531 - DNA, 40 bp, Homo sapiens
cacatgaatgaactgatgtgcaggcattgtaataggtatt

SEQ ID NO: 23532 - DNA, 40 bp, Homo sapiens
atacctattacaatgcctgcacatcagttcattcatgtgg

SEQ ID NO: 23533 - DNA, 40 bp, Homo sapiens
ccacatgaatgaactgatgtgcaggcattgtaataggtat

SEQ ID NO: 23534 - DNA, 40 bp, Homo sapiens
tacctattacaatgcctgcacatcagttcattcatgtggg

SEQ ID NO: 23535 - DNA, 40 bp, Homo sapiens
cccacatgaatgaactgatgtgcaggcattgtaataggta

SEQ ID NO: 23536 - DNA, 40 bp, Homo sapiens
acctattacaatgcctgcacatcagttcattcatgtgggt

SEQ ID NO: 23537 - DNA, 40 bp, Homo sapiens
acccacatgaatgaactgatgtgcaggcattgtaataggt

SEQ ID NO: 23538 - DNA, 40 bp, Homo sapiens
cctattacaatgcctgcacatcagttcattcatgtgggtt

SEQ ID NO: 23539 - DNA, 40 bp, Homo sapiens
aacccacatgaatgaactgatgtgcaggcattgtaatagg

SEQ ID NO: 23540 - DNA, 40 bp, Homo sapiens
ctattacaatgcctgcacatcagttcattcatgtgggttc

SEQ ID NO: 23541 - DNA, 40 bp, Homo sapiens
gaacccacatgaatgaactgatgtgcaggcattgtaatag

SEQ ID NO: 23542 - DNA, 40 bp, Homo sapiens
tattacaatgcctgcacatcagttcattcatgtgggttca

SEQ ID NO: 23543 - DNA, 40 bp, Homo sapiens
tgaacccacatgaatgaactgatgtgcaggcattgtaata

SEQ ID NO: 23544 - DNA, 40 bp, Homo sapiens
attacaatgcctgcacatcagttcattcatgtgggttcaa

SEQ ID NO: 23545 - DNA, 40 bp, Homo sapiens
ttgaacccacatgaatgaactgatgtgcaggcattgtaat

SEQ ID NO: 23546 - DNA, 40 bp, Homo sapiens
ttacaatgcctgcacatcagttcattcatgtgggttcaac

SEQ ID NO: 23547 - DNA, 40 bp, Homo sapiens
gttgaacccacatgaatgaactgatgtgcaggcattgtaa

SEQ ID NO: 23548 - DNA, 40 bp, Homo sapiens
tacaatgcctgcacatcagttcattcatgtgggttcaacg

SEQ ID NO: 23549 - DNA, 40 bp, Homo sapiens
cgttgaacccacatgaatgaactgatgtgcaggcattgta

SEQ ID NO: 23550 - DNA, 40 bp, Homo sapiens
acaatgcctgcacatcagttcattcatgtgggttcaacgt

SEQ ID NO: 23551 - DNA, 40 bp, Homo sapiens
acgttgaacccacatgaatgaactgatgtgcaggcattgt

SEQ ID NO: 23552 - DNA, 40 bp, Homo sapiens
caatgcctgcacatcagttcattcatgtgggttcaacgta

SEQ ID NO: 23553 - DNA, 40 bp, Homo sapiens
tacgttgaacccacatgaatgaactgatgtgcaggcattg

SEQ ID NO: 23554 - DNA, 40 bp, Homo sapiens
aatgcctgcacatcagttcattcatgtgggttcaacgtag

SEQ ID NO: 23555 - DNA, 40 bp, Homo sapiens
ctacgttgaacccacatgaatgaactgatgtgcaggcatt

SEQ ID NO: 23556 - DNA, 40 bp, Homo sapiens
atgcctgcacatcagttcattcatgtgggttcaacgtagt

SEQ ID NO: 23557 - DNA, 40 bp, Homo sapiens
actacgttgaacccacatgaatgaactgatgtgcaggcat

SEQ ID NO: 23558 - DNA, 40 bp, Homo sapiens
tgcctgcacatcagttcattcatgtgggttcaacgtagta

SEQ ID NO: 23559 - DNA, 40 bp, Homo sapiens
tactacgttgaacccacatgaatgaactgatgtgcaggca

SEQ ID NO: 23560 - DNA, 40 bp, Homo sapiens
gcctgcacatcagttcattcatgtgggttcaacgtagtac

SEQ ID NO: 23561 - DNA, 40 bp, Homo sapiens
gtactacgttgaacccacatgaatgaactgatgtgcaggc

SEQ ID NO: 23562 - DNA, 40 bp, Homo sapiens
cctgcacatcagttcattcatgtgggttcaacgtagtact

SEQ ID NO: 23563 - DNA, 40 bp, Homo sapiens
agtactacgttgaacccacatgaatgaactgatgtgcagg

SEQ ID NO: 23564 - DNA, 40 bp, Homo sapiens
ctgcacatcagttcattcatgtgggttcaacgtagtactc

SEQ ID NO: 23565 - DNA, 40 bp, Homo sapiens
gagtactacgttgaacccacatgaatgaactgatgtgcag

SEQ ID NO: 23566 - DNA, 40 bp, Homo sapiens
tgcacatcagttcattcatgtgggttcaacgtagtactca

SEQ ID NO: 23567 - DNA, 40 bp, Homo sapiens
tgagtactacgttgaacccacatgaatgaactgatgtgca

SEQ ID NO: 23568 - DNA, 40 bp, Homo sapiens
gcacatcagttcattcatgtgggttcaacgtagtactcag

SEQ ID NO: 23569 - DNA, 40 bp, Homo sapiens
ctgagtactacgttgaacccacatgaatgaactgatgtgc

SEQ ID NO: 23570 - DNA, 40 bp, Homo sapiens
cacatcagttcattcatgtgggttcaacgtagtactcagt

SEQ ID NO: 23571 - DNA, 40 bp, Homo sapiens
actgagtactacgttgaacccacatgaatgaactgatgtg

SEQ ID NO: 23572 - DNA, 40 bp, Homo sapiens
acatcagttcattcatgtgggttcaacgtagtactcagta

SEQ ID NO: 23573 - DNA, 40 bp, Homo sapiens
tactgagtactacgttgaacccacatgaatgaactgatgt

SEQ ID NO: 23574 - DNA, 40 bp, Homo sapiens
catcagttcattcatgtgggttcaacgtagtactcagtac

SEQ ID NO: 23575 - DNA, 40 bp, Homo sapiens
gtactgagtactacgttgaacccacatgaatgaactgatg

SEQ ID NO: 23576 - DNA, 40 bp, Homo sapiens
atcagttcattcatgtgggttcaacgtagtactcagtaca

SEQ ID NO: 23577 - DNA, 40 bp, Homo sapiens
tgtactgagtactacgttgaacccacatgaatgaactgat

SEQ ID NO: 23578 - DNA, 40 bp, Homo sapiens
tcagttcattcatgtgggttcaacgtagtactcagtacat

SEQ ID NO: 23579 - DNA, 40 bp, Homo sapiens
atgtactgagtactacgttgaacccacatgaatgaactga

SEQ ID NO: 23580 - DNA, 40 bp, Homo sapiens
cagttcattcatgtgggttcaacgtagtactcagtacatg

SEQ ID NO: 23581 - DNA, 40 bp, Homo sapiens
catgtactgagtactacgttgaacccacatgaatgaactg

SEQ ID NO: 23582 - DNA, 40 bp, Homo sapiens
agttcattcatgtgggttcaacgtagtactcagtacatgg

SEQ ID NO: 23583 - DNA, 40 bp, Homo sapiens
ccatgtactgagtactacgttgaacccacatgaatgaact

SEQ ID NO: 23584 - DNA, 40 bp, Homo sapiens
gttcattcatgtgggttcaacgtagtactcagtacatggc

SEQ ID NO: 23585 - DNA, 40 bp, Homo sapiens
gccatgtactgagtactacgttgaacccacatgaatgaac

SEQ ID NO: 23586 - DNA, 40 bp, Homo sapiens
ttcattcatgtgggttcaacgtagtactcagtacatggca

SEQ ID NO: 23587 - DNA, 40 bp, Homo sapiens
tgccatgtactgagtactacgttgaacccacatgaatgaa

SEQ ID NO: 23588 - DNA, 40 bp, Homo sapiens
tcattcatgtgggttcaacgtagtactcagtacatggcaa

SEQ ID NO: 23589 - DNA, 40 bp, Homo sapiens
ttgccatgtactgagtactacgttgaacccacatgaatga

SEQ ID NO: 23590 - DNA, 40 bp, Homo sapiens
cattcatgtgggttcaacgtagtactcagtacatggcaaa

SEQ ID NO: 23591 - DNA, 40 bp, Homo sapiens
tttgccatgtactgagtactacgttgaacccacatgaatg

SEQ ID NO: 23592 - DNA, 40 bp, Homo sapiens
attcatgtgggttcaacgtagtactcagtacatggcaaat

SEQ ID NO: 23593 - DNA, 40 bp, Homo sapiens
atttgccatgtactgagtactacgttgaacccacatgaat

SEQ ID NO: 23594 - DNA, 40 bp, Homo sapiens
ttcatgtgggttcaacgtagtactcagtacatggcaaatt

SEQ ID NO: 23595 - DNA, 40 bp, Homo sapiens
aatttgccatgtactgagtactacgttgaacccacatgaa

SEQ ID NO: 23596 - DNA, 40 bp, Homo sapiens
tcatgtgggttcaacgtagtactcagtacatggcaaattc

SEQ ID NO: 23597 - DNA, 40 bp, Homo sapiens
gaatttgccatgtactgagtactacgttgaacccacatga

SEQ ID NO: 23598 - DNA, 40 bp, Homo sapiens
catgtgggttcaacgtagtactcagtacatggcaaattca

SEQ ID NO: 23599 - DNA, 40 bp, Homo sapiens
tgaatttgccatgtactgagtactacgttgaacccacatg

SEQ ID NO: 23600 - DNA, 40 bp, Homo sapiens
atgtgggttcaacgtagtactcagtacatggcaaattcaa

SEQ ID NO: 23601 - DNA, 40 bp, Homo sapiens
ttgaatttgccatgtactgagtactacgttgaacccacat

SEQ ID NO: 23602 - DNA, 40 bp, Homo sapiens
tgtgggttcaacgtagtactcagtacatggcaaattcaag

SEQ ID NO: 23603 - DNA, 40 bp, Homo sapiens
cttgaatttgccatgtactgagtactacgttgaacccaca

SEQ ID NO: 23604 - DNA, 40 bp, Homo sapiens
gtgggttcaacgtagtactcagtacatggcaaattcaagt

SEQ ID NO: 23605 - DNA, 40 bp, Homo sapiens
acttgaatttgccatgtactgagtactacgttgaacccac

SEQ ID NO: 23606 - DNA, 40 bp, Homo sapiens
tgggttcaacgtagtactcagtacatggcaaattcaagtt

SEQ ID NO: 23607 - DNA, 40 bp, Homo sapiens
aacttgaatttgccatgtactgagtactacgttgaaccca

SEQ ID NO: 23608 - DNA, 40 bp, Homo sapiens
gggttcaacgtagtactcagtacatggcaaattcaagttt

SEQ ID NO: 23609 - DNA, 40 bp, Homo sapiens
aaacttgaatttgccatgtactgagtactacgttgaaccc

SEQ ID NO: 23610 - DNA, 40 bp, Homo sapiens
ggttcaacgtagtactcagtacatggcaaattcaagtttt

SEQ ID NO: 23611 - DNA, 40 bp, Homo sapiens
aaaacttgaatttgccatgtactgagtactacgttgaacc

SEQ ID NO: 23612 - DNA, 40 bp, Homo sapiens
gttcaacgtagtactcagtacatggcaaattcaagtttta

SEQ ID NO: 23613 - DNA, 40 bp, Homo sapiens
taaaacttgaatttgccatgtactgagtactacgttgaac

SEQ ID NO: 23614 - DNA, 40 bp, Homo sapiens
ttcaacgtagtactcagtacatggcaaattcaagttttac

SEQ ID NO: 23615 - DNA, 40 bp, Homo sapiens
gtaaaacttgaatttgccatgtactgagtactacgttgaa

SEQ ID NO: 23616 - DNA, 40 bp, Homo sapiens
tcaacgtagtactcagtacatggcaaattcaagttttact

SEQ ID NO: 23617 - DNA, 40 bp, Homo sapiens
agtaaaacttgaatttgccatgtactgagtactacgttga

SEQ ID NO: 23618 - DNA, 40 bp, Homo sapiens
caacgtagtactcagtacatggcaaattcaagttttactt

SEQ ID NO: 23619 - DNA, 40 bp, Homo sapiens
aagtaaaacttgaatttgccatgtactgagtactacgttg

SEQ ID NO: 23620 - DNA, 40 bp, Homo sapiens
aacgtagtactcagtacatggcaaattcaagttttacttt

SEQ ID NO: 23621 - DNA, 40 bp, Homo sapiens
aaagtaaaacttgaatttgccatgtactgagtactacgtt

SEQ ID NO: 23622 - DNA, 40 bp, Homo sapiens
acgtagtactcagtacatggcaaattcaagttttactttt

SEQ ID NO: 23623 - DNA, 40 bp, Homo sapiens
aaaagtaaaacttgaatttgccatgtactgagtactacgt

SEQ ID NO: 23624 - DNA, 40 bp, Homo sapiens
cgtagtactcagtacatggcaaattcaagttttacttttc

SEQ ID NO: 23625 - DNA, 40 bp, Homo sapiens
gaaaagtaaaacttgaatttgccatgtactgagtactacg

SEQ ID NO: 23626 - DNA, 40 bp, Homo sapiens
gtagtactcagtacatggcaaattcaagttttacttttcg

SEQ ID NO: 23627 - DNA, 40 bp, Homo sapiens
cgaaaagtaaaacttgaatttgccatgtactgagtactac

SEQ ID NO: 23628 - DNA, 40 bp, Homo sapiens
tagtactcagtacatggcaaattcaagttttacttttcgg

SEQ ID NO: 23629 - DNA, 40 bp, Homo sapiens
ccgaaaagtaaaacttgaatttgccatgtactgagtacta

SEQ ID NO: 23630 - DNA, 40 bp, Homo sapiens
agtactcagtacatggcaaattcaagttttacttttcgga

SEQ ID NO: 23631 - DNA, 40 bp, Homo sapiens
tccgaaaagtaaaacttgaatttgccatgtactgagtact

SEQ ID NO: 23632 - DNA, 40 bp, Homo sapiens
gtactcagtacatggcaaattcaagttttacttttcggaa

SEQ ID NO: 23633 - DNA, 40 bp, Homo sapiens
ttccgaaaagtaaaacttgaatttgccatgtactgagtac

SEQ ID NO: 23634 - DNA, 40 bp, Homo sapiens
tactcagtacatggcaaattcaagttttacttttcggaac

SEQ ID NO: 23635 - DNA, 40 bp, Homo sapiens
gttccgaaaagtaaaacttgaatttgccatgtactgagta

SEQ ID NO: 23636 - DNA, 40 bp, Homo sapiens
actcagtacatggcaaattcaagttttacttttcggaact

SEQ ID NO: 23637 - DNA, 40 bp, Homo sapiens
agttccgaaaagtaaaacttgaatttgccatgtactgagt

SEQ ID NO: 23638 - DNA, 40 bp, Homo sapiens
ctcagtacatggcaaattcaagttttacttttcggaactt

SEQ ID NO: 23639 - DNA, 40 bp, Homo sapiens
aagttccgaaaagtaaaacttgaatttgccatgtactgag

SEQ ID NO: 23640 - DNA, 40 bp, Homo sapiens
tcagtacatggcaaattcaagttttacttttcggaacttc

SEQ ID NO: 23641 - DNA, 40 bp, Homo sapiens
gaagttccgaaaagtaaaacttgaatttgccatgtactga

SEQ ID NO: 23642 - DNA, 40 bp, Homo sapiens
cagtacatggcaaattcaagttttacttttcggaacttca

SEQ ID NO: 23643 - DNA, 40 bp, Homo sapiens
tgaagttccgaaaagtaaaacttgaatttgccatgtactg

SEQ ID NO: 23644 - DNA, 40 bp, Homo sapiens
agtacatggcaaattcaagttttacttttcggaacttcat

SEQ ID NO: 23645 - DNA, 40 bp, Homo sapiens
atgaagttccgaaaagtaaaacttgaatttgccatgtact

SEQ ID NO: 23646 - DNA, 40 bp, Homo sapiens
gtacatggcaaattcaagttttacttttcggaacttcatg

SEQ ID NO: 23647 - DNA, 40 bp, Homo sapiens
catgaagttccgaaaagtaaaacttgaatttgccatgtac

SEQ ID NO: 23648 - DNA, 40 bp, Homo sapiens
tacatggcaaattcaagttttacttttcggaacttcatgg

SEQ ID NO: 23649 - DNA, 40 bp, Homo sapiens
ccatgaagttccgaaaagtaaaacttgaatttgccatgta

SEQ ID NO: 23650 - DNA, 40 bp, Homo sapiens
acatggcaaattcaagttttacttttcggaacttcatgga

SEQ ID NO: 23651 - DNA, 40 bp, Homo sapiens
tccatgaagttccgaaaagtaaaacttgaatttgccatgt

SEQ ID NO: 23652 - DNA, 40 bp, Homo sapiens
catggcaaattcaagttttacttttcggaacttcatggat

SEQ ID NO: 23653 - DNA, 40 bp, Homo sapiens
atccatgaagttccgaaaagtaaaacttgaatttgccatg

SEQ ID NO: 23654 - DNA, 40 bp, Homo sapiens
atggcaaattcaagttttacttttcggaacttcatggatt

SEQ ID NO: 23655 - DNA, 40 bp, Homo sapiens
aatccatgaagttccgaaaagtaaaacttgaatttgccat

SEQ ID NO: 23656 - DNA, 40 bp, Homo sapiens
tggcaaattcaagttttacttttcggaacttcatggattt

SEQ ID NO: 23657 - DNA, 40 bp, Homo sapiens
aaatccatgaagttccgaaaagtaaaacttgaatttgcca

SEQ ID NO: 23658 - DNA, 40 bp, Homo sapiens
ggcaaattcaagttttacttttcggaacttcatggatttt

SEQ ID NO: 23659 - DNA, 40 bp, Homo sapiens
aaaatccatgaagttccgaaaagtaaaacttgaatttgcc

SEQ ID NO: 23660 - DNA, 40 bp, Homo sapiens
gcaaattcaagttttacttttcggaacttcatggattttt

SEQ ID NO: 23661 - DNA, 40 bp, Homo sapiens
aaaaatccatgaagttccgaaaagtaaaacttgaatttgc

SEQ ID NO: 23662 - DNA, 40 bp, Homo sapiens
caaattcaagttttacttttcggaacttcatggatttttt

SEQ ID NO: 23663 - DNA, 40 bp, Homo sapiens
aaaaaatccatgaagttccgaaaagtaaaacttgaatttg

SEQ ID NO: 23664 - DNA, 40 bp, Homo sapiens
aaattcaagttttacttttcggaacttcatggattttttt

SEQ ID NO: 23665 - DNA, 40 bp, Homo sapiens
aaaaaaatccatgaagttccgaaaagtaaaacttgaattt

SEQ ID NO: 23666 - DNA, 40 bp, Homo sapiens
aattcaagttttacttttcggaacttcatggatttttttc

SEQ ID NO: 23667 - DNA, 40 bp, Homo sapiens
gaaaaaaatccatgaagttccgaaaagtaaaacttgaatt

SEQ ID NO: 23668 - DNA, 40 bp, Homo sapiens
attcaagttttacttttcggaacttcatggatttttttcc

SEQ ID NO: 23669 - DNA, 40 bp, Homo sapiens
ggaaaaaaatccatgaagttccgaaaagtaaaacttgaat

SEQ ID NO: 23670 - DNA, 40 bp, Homo sapiens
ttcaagttttacttttcggaacttcatggatttttttcct

SEQ ID NO: 23671 - DNA, 40 bp, Homo sapiens
aggaaaaaaatccatgaagttccgaaaagtaaaacttgaa

SEQ ID NO: 23672 - DNA, 40 bp, Homo sapiens
tcaagttttacttttcggaacttcatggatttttttcctc

SEQ ID NO: 23673 - DNA, 40 bp, Homo sapiens
gaggaaaaaaatccatgaagttccgaaaagtaaaacttga

SEQ ID NO: 23674 - DNA, 40 bp, Homo sapiens
caagttttacttttcggaacttcatggatttttttcctca

SEQ ID NO: 23675 - DNA, 40 bp, Homo sapiens
tgaggaaaaaaatccatgaagttccgaaaagtaaaacttg

SEQ ID NO: 23676 - DNA, 40 bp, Homo sapiens
aagttttacttttcggaacttcatggatttttttcctcag

SEQ ID NO: 23677 - DNA, 40 bp, Homo sapiens
ctgaggaaaaaaatccatgaagttccgaaaagtaaaactt

SEQ ID NO: 23678 - DNA, 40 bp, Homo sapiens
agttttacttttcggaacttcatggatttttttcctcaga

SEQ ID NO: 23679 - DNA, 40 bp, Homo sapiens
tctgaggaaaaaaatccatgaagttccgaaaagtaaaact

SEQ ID NO: 23680 - DNA, 40 bp, Homo sapiens
gttttacttttcggaacttcatggatttttttcctcagaa

SEQ ID NO: 23681 - DNA, 40 bp, Homo sapiens
ttctgaggaaaaaaatccatgaagttccgaaaagtaaaac

SEQ ID NO: 23682 - DNA, 40 bp, Homo sapiens
ttttacttttcggaacttcatggatttttttcctcagaat

SEQ ID NO: 23683 - DNA, 40 bp, Homo sapiens
attctgaggaaaaaaatccatgaagttccgaaaagtaaaa

SEQ ID NO: 23684 - DNA, 40 bp, Homo sapiens
tttacttttcggaacttcatggatttttttcctcagaata

SEQ ID NO: 23685 - DNA, 40 bp, Homo sapiens
tattctgaggaaaaaaatccatgaagttccgaaaagtaaa

SEQ ID NO: 23686 - DNA, 40 bp, Homo sapiens
ttacttttcggaacttcatggatttttttcctcagaatat

SEQ ID NO: 23687 - DNA, 40 bp, Homo sapiens
atattctgaggaaaaaaatccatgaagttccgaaaagtaa

SEQ ID NO: 23688 - DNA, 40 bp, Homo sapiens
tacttttcggaacttcatggatttttttcctcagaatatc

SEQ ID NO: 23689 - DNA, 40 bp, Homo sapiens
gatattctgaggaaaaaaatccatgaagttccgaaaagta

SEQ ID NO: 23690 - DNA, 40 bp, Homo sapiens
acttttcggaacttcatggatttttttcctcagaatatct

SEQ ID NO: 23691 - DNA, 40 bp, Homo sapiens
agatattctgaggaaaaaaatccatgaagttccgaaaagt

SEQ ID NO: 23692 - DNA, 40 bp, Homo sapiens
cttttcggaacttcatggatttttttcctcagaatatctt

SEQ ID NO: 23693 - DNA, 40 bp, Homo sapiens
aagatattctgaggaaaaaaatccatgaagttccgaaaag

SEQ ID NO: 23694 - DNA, 40 bp, Homo sapiens
ttttcggaacttcatggatttttttcctcagaatatcttt

SEQ ID NO: 23695 - DNA, 40 bp, Homo sapiens
aaagatattctgaggaaaaaaatccatgaagttccgaaaa

SEQ ID NO: 23696 - DNA, 40 bp, Homo sapiens
tttcggaacttcatggatttttttcctcagaatatctttt

SEQ ID NO: 23697 - DNA, 40 bp, Homo sapiens
aaaagatattctgaggaaaaaaatccatgaagttccgaaa

SEQ ID NO: 23698 - DNA, 40 bp, Homo sapiens
ttcggaacttcatggatttttttcctcagaatatctttta

SEQ ID NO: 23699 - DNA, 40 bp, Homo sapiens
taaaagatattctgaggaaaaaaatccatgaagttccgaa

SEQ ID NO: 23700 - DNA, 40 bp, Homo sapiens
tcggaacttcatggatttttttcctcagaatatcttttat

SEQ ID NO: 23701 - DNA, 40 bp, Homo sapiens
ataaaagatattctgaggaaaaaaatccatgaagttccga

SEQ ID NO: 23702 - DNA, 40 bp, Homo sapiens
cggaacttcatggatttttttcctcagaatatcttttatc

SEQ ID NO: 23703 - DNA, 40 bp, Homo sapiens
gataaaagatattctgaggaaaaaaatccatgaagttccg

SEQ ID NO: 23704 - DNA, 40 bp, Homo sapiens
ggaacttcatggatttttttcctcagaatatcttttatcc

SEQ ID NO: 23705 - DNA, 40 bp, Homo sapiens
ggataaaagatattctgaggaaaaaaatccatgaagttcc

SEQ ID NO: 23706 - DNA, 40 bp, Homo sapiens
gaacttcatggatttttttcctcagaatatcttttatcca

SEQ ID NO: 23707 - DNA, 40 bp, Homo sapiens
tggataaaagatattctgaggaaaaaaatccatgaagttc

SEQ ID NO: 23708 - DNA, 40 bp, Homo sapiens
aacttcatggatttttttcctcagaatatcttttatccat

SEQ ID NO: 23709 - DNA, 40 bp, Homo sapiens
atggataaaagatattctgaggaaaaaaatccatgaagtt

SEQ ID NO: 23710 - DNA, 40 bp, Homo sapiens
acttcatggatttttttcctcagaatatcttttatccata

SEQ ID NO: 23711 - DNA, 40 bp, Homo sapiens
tatggataaaagatattctgaggaaaaaaatccatgaagt

SEQ ID NO: 23712 - DNA, 40 bp, Homo sapiens
cttcatggatttttttcctcagaatatcttttatccataa

SEQ ID NO: 23713 - DNA, 40 bp, Homo sapiens
ttatggataaaagatattctgaggaaaaaaatccatgaag

SEQ ID NO: 23714 - DNA, 40 bp, Homo sapiens
ttcatggatttttttcctcagaatatcttttatccataat

SEQ ID NO: 23715 - DNA, 40 bp, Homo sapiens
attatggataaaagatattctgaggaaaaaaatccatgaa

SEQ ID NO: 23716 - DNA, 40 bp, Homo sapiens
tcatggatttttttcctcagaatatcttttatccataatt

SEQ ID NO: 23717 - DNA, 40 bp, Homo sapiens
aattatggataaaagatattctgaggaaaaaaatccatga

SEQ ID NO: 23718 - DNA, 40 bp, Homo sapiens
catggatttttttcctcagaatatcttttatccataattg

SEQ ID NO: 23719 - DNA, 40 bp, Homo sapiens
caattatggataaaagatattctgaggaaaaaaatccatg

SEQ ID NO: 23720 - DNA, 40 bp, Homo sapiens
atggatttttttcctcagaatatcttttatccataattgg

SEQ ID NO: 23721 - DNA, 40 bp, Homo sapiens
ccaattatggataaaagatattctgaggaaaaaaatccat

SEQ ID NO: 23722 - DNA, 40 bp, Homo sapiens
tggatttttttcctcagaatatcttttatccataattggt

SEQ ID NO: 23723 - DNA, 40 bp, Homo sapiens
accaattatggataaaagatattctgaggaaaaaaatcca

SEQ ID NO: 23724 - DNA, 40 bp, Homo sapiens
ggatttttttcctcagaatatcttttatccataattggtt

SEQ ID NO: 23725 - DNA, 40 bp, Homo sapiens
aaccaattatggataaaagatattctgaggaaaaaaatcc

SEQ ID NO: 23726 - DNA, 40 bp, Homo sapiens
gatttttttcctcagaatatcttttatccataattggttg

SEQ ID NO: 23727 - DNA, 40 bp, Homo sapiens
caaccaattatggataaaagatattctgaggaaaaaaatc

SEQ ID NO: 23728 - DNA, 40 bp, Homo sapiens
atttttttcctcagaatatcttttatccataattggttga

SEQ ID NO: 23729 - DNA, 40 bp, Homo sapiens
tcaaccaattatggataaaagatattctgaggaaaaaaat

SEQ ID NO: 23730 - DNA, 40 bp, Homo sapiens
tttttttcctcagaatatcttttatccataattggttgaa

SEQ ID NO: 23731 - DNA, 40 bp, Homo sapiens
ttcaaccaattatggataaaagatattctgaggaaaaaaa

SEQ ID NO: 23732 - DNA, 40 bp, Homo sapiens
ttttttcctcagaatatcttttatccataattggttgaat

SEQ ID NO: 23733 - DNA, 40 bp, Homo sapiens
attcaaccaattatggataaaagatattctgaggaaaaaa

SEQ ID NO: 23734 - DNA, 40 bp, Homo sapiens
tttttcctcagaatatcttttatccataattggttgaatc

SEQ ID NO: 23735 - DNA, 40 bp, Homo sapiens
gattcaaccaattatggataaaagatattctgaggaaaaa

SEQ ID NO: 23736 - DNA, 40 bp, Homo sapiens
ttttcctcagaatatcttttatccataattggttgaatct

SEQ ID NO: 23737 - DNA, 40 bp, Homo sapiens
agattcaaccaattatggataaaagatattctgaggaaaa

SEQ ID NO: 23738 - DNA, 40 bp, Homo sapiens
tttcctcagaatatcttttatccataattggttgaatctg

SEQ ID NO: 23739 - DNA, 40 bp, Homo sapiens
cagattcaaccaattatggataaaagatattctgaggaaa

SEQ ID NO: 23740 - DNA, 40 bp, Homo sapiens
ttcctcagaatatcttttatccataattggttgaatctgt

SEQ ID NO: 23741 - DNA, 40 bp, Homo sapiens
acagattcaaccaattatggataaaagatattctgaggaa

SEQ ID NO: 23742 - DNA, 40 bp, Homo sapiens
tcctcagaatatcttttatccataattggttgaatctgta

SEQ ID NO: 23743 - DNA, 40 bp, Homo sapiens
tacagattcaaccaattatggataaaagatattctgagga

SEQ ID NO: 23744 - DNA, 40 bp, Homo sapiens
cctcagaatatcttttatccataattggttgaatctgtag

SEQ ID NO: 23745 - DNA, 40 bp, Homo sapiens
ctacagattcaaccaattatggataaaagatattctgagg

SEQ ID NO: 23746 - DNA, 40 bp, Homo sapiens
ctcagaatatcttttatccataattggttgaatctgtaga

SEQ ID NO: 23747 - DNA, 40 bp, Homo sapiens
tctacagattcaaccaattatggataaaagatattctgag

SEQ ID NO: 23748 - DNA, 40 bp, Homo sapiens
tcagaatatcttttatccataattggttgaatctgtagat

SEQ ID NO: 23749 - DNA, 40 bp, Homo sapiens
atctacagattcaaccaattatggataaaagatattctga

SEQ ID NO: 23750 - DNA, 40 bp, Homo sapiens
cagaatatcttttatccataattggttgaatctgtagatg

SEQ ID NO: 23751 - DNA, 40 bp, Homo sapiens
catctacagattcaaccaattatggataaaagatattctg

SEQ ID NO: 23752 - DNA, 40 bp, Homo sapiens
agaatatcttttatccataattggttgaatctgtagatgc

SEQ ID NO: 23753 - DNA, 40 bp, Homo sapiens
gcatctacagattcaaccaattatggataaaagatattct

SEQ ID NO: 23754 - DNA, 40 bp, Homo sapiens
gaatatcttttatccataattggttgaatctgtagatgca

SEQ ID NO: 23755 - DNA, 40 bp, Homo sapiens
tgcatctacagattcaaccaattatggataaaagatattc

SEQ ID NO: 23756 - DNA, 40 bp, Homo sapiens
aatatcttttatccataattggttgaatctgtagatgcag

SEQ ID NO: 23757 - DNA, 40 bp, Homo sapiens
ctgcatctacagattcaaccaattatggataaaagatatt

SEQ ID NO: 23758 - DNA, 40 bp, Homo sapiens
atatcttttatccataattggttgaatctgtagatgcagt

SEQ ID NO: 23759 - DNA, 40 bp, Homo sapiens
actgcatctacagattcaaccaattatggataaaagatat

SEQ ID NO: 23760 - DNA, 40 bp, Homo sapiens
tatcttttatccataattggttgaatctgtagatgcagta

SEQ ID NO: 23761 - DNA, 40 bp, Homo sapiens
tactgcatctacagattcaaccaattatggataaaagata

SEQ ID NO: 23762 - DNA, 40 bp, Homo sapiens
atcttttatccataattggttgaatctgtagatgcagtac

SEQ ID NO: 23763 - DNA, 40 bp, Homo sapiens
gtactgcatctacagattcaaccaattatggataaaagat

SEQ ID NO: 23764 - DNA, 40 bp, Homo sapiens
tcttttatccataattggttgaatctgtagatgcagtacc

SEQ ID NO: 23765 - DNA, 40 bp, Homo sapiens
ggtactgcatctacagattcaaccaattatggataaaaga

SEQ ID NO: 23766 - DNA, 40 bp, Homo sapiens
cttttatccataattggttgaatctgtagatgcagtaccc

SEQ ID NO: 23767 - DNA, 40 bp, Homo sapiens
gggtactgcatctacagattcaaccaattatggataaaag

SEQ ID NO: 23768 - DNA, 40 bp, Homo sapiens
ttttatccataattggttgaatctgtagatgcagtaccca

SEQ ID NO: 23769 - DNA, 40 bp, Homo sapiens
tgggtactgcatctacagattcaaccaattatggataaaa

SEQ ID NO: 23770 - DNA, 40 bp, Homo sapiens
tttatccataattggttgaatctgtagatgcagtacccat

SEQ ID NO: 23771 - DNA, 40 bp, Homo sapiens
atgggtactgcatctacagattcaaccaattatggataaa

SEQ ID NO: 23772 - DNA, 40 bp, Homo sapiens
ttatccataattggttgaatctgtagatgcagtacccatg

SEQ ID NO: 23773 - DNA, 40 bp, Homo sapiens
catgggtactgcatctacagattcaaccaattatggataa

SEQ ID NO: 23774 - DNA, 40 bp, Homo sapiens
tatccataattggttgaatctgtagatgcagtacccatgg

SEQ ID NO: 23775 - DNA, 40 bp, Homo sapiens
ccatgggtactgcatctacagattcaaccaattatggata

SEQ ID NO: 23776 - DNA, 40 bp, Homo sapiens
atccataattggttgaatctgtagatgcagtacccatgga

SEQ ID NO: 23777 - DNA, 40 bp, Homo sapiens
tccatgggtactgcatctacagattcaaccaattatggat

SEQ ID NO: 23778 - DNA, 40 bp, Homo sapiens
tccataattggttgaatctgtagatgcagtacccatggat

SEQ ID NO: 23779 - DNA, 40 bp, Homo sapiens
atccatgggtactgcatctacagattcaaccaattatgga

SEQ ID NO: 23780 - DNA, 40 bp, Homo sapiens
ccataattggttgaatctgtagatgcagtacccatggata

SEQ ID NO: 23781 - DNA, 40 bp, Homo sapiens
tatccatgggtactgcatctacagattcaaccaattatgg

SEQ ID NO: 23782 - DNA, 40 bp, Homo sapiens
cataattggttgaatctgtagatgcagtacccatggatat

SEQ ID NO: 23783 - DNA, 40 bp, Homo sapiens
atatccatgggtactgcatctacagattcaaccaattatg

SEQ ID NO: 23784 - DNA, 40 bp, Homo sapiens
ataattggttgaatctgtagatgcagtacccatggatatg

SEQ ID NO: 23785 - DNA, 40 bp, Homo sapiens
catatccatgggtactgcatctacagattcaaccaattat

SEQ ID NO: 23786 - DNA, 40 bp, Homo sapiens
taattggttgaatctgtagatgcagtacccatggatatgg

SEQ ID NO: 23787 - DNA, 40 bp, Homo sapiens
ccatatccatgggtactgcatctacagattcaaccaatta

SEQ ID NO: 23788 - DNA, 40 bp, Homo sapiens
aattggttgaatctgtagatgcagtacccatggatatgga

SEQ ID NO: 23789 - DNA, 40 bp, Homo sapiens
tccatatccatgggtactgcatctacagattcaaccaatt

SEQ ID NO: 23790 - DNA, 40 bp, Homo sapiens
attggttgaatctgtagatgcagtacccatggatatggat

SEQ ID NO: 23791 - DNA, 40 bp, Homo sapiens
atccatatccatgggtactgcatctacagattcaaccaat

SEQ ID NO: 23792 - DNA, 40 bp, Homo sapiens
ttggttgaatctgtagatgcagtacccatggatatggatg

SEQ ID NO: 23793 - DNA, 40 bp, Homo sapiens
catccatatccatgggtactgcatctacagattcaaccaa

SEQ ID NO: 23794 - DNA, 40 bp, Homo sapiens
tggttgaatctgtagatgcagtacccatggatatggatgg

SEQ ID NO: 23795 - DNA, 40 bp, Homo sapiens
ccatccatatccatgggtactgcatctacagattcaacca

SEQ ID NO: 23796 - DNA, 40 bp, Homo sapiens
ggttgaatctgtagatgcagtacccatggatatggatggc

SEQ ID NO: 23797 - DNA, 40 bp, Homo sapiens
gccatccatatccatgggtactgcatctacagattcaacc

SEQ ID NO: 23798 - DNA, 40 bp, Homo sapiens
gttgaatctgtagatgcagtacccatggatatggatggcc

SEQ ID NO: 23799 - DNA, 40 bp, Homo sapiens
ggccatccatatccatgggtactgcatctacagattcaac

SEQ ID NO: 23800 - DNA, 40 bp, Homo sapiens
ttgaatctgtagatgcagtacccatggatatggatggccc

SEQ ID NO: 23801 - DNA, 40 bp, Homo sapiens
gggccatccatatccatgggtactgcatctacagattcaa

SEQ ID NO: 23802 - DNA, 40 bp, Homo sapiens
tgaatctgtagatgcagtacccatggatatggatggccca

SEQ ID NO: 23803 - DNA, 40 bp, Homo sapiens
tgggccatccatatccatgggtactgcatctacagattca

SEQ ID NO: 23804 - DNA, 40 bp, Homo sapiens
gaatctgtagatgcagtacccatggatatggatggcccac

SEQ ID NO: 23805 - DNA, 40 bp, Homo sapiens
gtgggccatccatatccatgggtactgcatctacagattc

SEQ ID NO: 23806 - DNA, 40 bp, Homo sapiens
aatctgtagatgcagtacccatggatatggatggcccact

SEQ ID NO: 23807 - DNA, 40 bp, Homo sapiens
agtgggccatccatatccatgggtactgcatctacagatt

SEQ ID NO: 23808 - DNA, 40 bp, Homo sapiens
atctgtagatgcagtacccatggatatggatggcccactt

SEQ ID NO: 23809 - DNA, 40 bp, Homo sapiens
aagtgggccatccatatccatgggtactgcatctacagat

SEQ ID NO: 23810 - DNA, 40 bp, Homo sapiens
tctgtagatgcagtacccatggatatggatggcccacttt

SEQ ID NO: 23811 - DNA, 40 bp, Homo sapiens
aaagtgggccatccatatccatgggtactgcatctacaga

SEQ ID NO: 23812 - DNA, 40 bp, Homo sapiens
ctgtagatgcagtacccatggatatggatggcccacttta

SEQ ID NO: 23813 - DNA, 40 bp, Homo sapiens
taaagtgggccatccatatccatgggtactgcatctacag

SEQ ID NO: 23814 - DNA, 40 bp, Homo sapiens
tgtagatgcagtacccatggatatggatggcccactttat

SEQ ID NO: 23815 - DNA, 40 bp, Homo sapiens
ataaagtgggccatccatatccatgggtactgcatctaca

SEQ ID NO: 23816 - DNA, 40 bp, Homo sapiens
gtagatgcagtacccatggatatggatggcccactttatt

SEQ ID NO: 23817 - DNA, 40 bp, Homo sapiens
aataaagtgggccatccatatccatgggtactgcatctac

SEQ ID NO: 23818 - DNA, 40 bp, Homo sapiens
tagatgcagtacccatggatatggatggcccactttattt

SEQ ID NO: 23819 - DNA, 40 bp, Homo sapiens
aaataaagtgggccatccatatccatgggtactgcatcta

SEQ ID NO: 23820 - DNA, 40 bp, Homo sapiens
agatgcagtacccatggatatggatggcccactttatttt

SEQ ID NO: 23821 - DNA, 40 bp, Homo sapiens
aaaataaagtgggccatccatatccatgggtactgcatct

SEQ ID NO: 23822 - DNA, 40 bp, Homo sapiens
gatgcagtacccatggatatggatggcccactttattttg

SEQ ID NO: 23823 - DNA, 40 bp, Homo sapiens
caaaataaagtgggccatccatatccatgggtactgcatc

SEQ ID NO: 23824 - DNA, 40 bp, Homo sapiens
atgcagtacccatggatatggatggcccactttattttga

SEQ ID NO: 23825 - DNA, 40 bp, Homo sapiens
tcaaaataaagtgggccatccatatccatgggtactgcat

SEQ ID NO: 23826 - DNA, 40 bp, Homo sapiens
tgcagtacccatggatatggatggcccactttattttgaa

SEQ ID NO: 23827 - DNA, 40 bp, Homo sapiens
ttcaaaataaagtgggccatccatatccatgggtactgca

SEQ ID NO: 23828 - DNA, 40 bp, Homo sapiens
gcagtacccatggatatggatggcccactttattttgaag

SEQ ID NO: 23829 - DNA, 40 bp, Homo sapiens
cttcaaaataaagtgggccatccatatccatgggtactgc

SEQ ID NO: 23830 - DNA, 40 bp, Homo sapiens
cagtacccatggatatggatggcccactttattttgaaga

SEQ ID NO: 23831 - DNA, 40 bp, Homo sapiens
tcttcaaaataaagtgggccatccatatccatgggtactg

SEQ ID NO: 23832 - DNA, 40 bp, Homo sapiens
agtacccatggatatggatggcccactttattttgaagag

SEQ ID NO: 23833 - DNA, 40 bp, Homo sapiens
ctcttcaaaataaagtgggccatccatatccatgggtact

SEQ ID NO: 23834 - DNA, 40 bp, Homo sapiens
gtacccatggatatggatggcccactttattttgaagagc

SEQ ID NO: 23835 - DNA, 40 bp, Homo sapiens
gctcttcaaaataaagtgggccatccatatccatgggtac

SEQ ID NO: 23836 - DNA, 40 bp, Homo sapiens
tacccatggatatggatggcccactttattttgaagagca

SEQ ID NO: 23837 - DNA, 40 bp, Homo sapiens
tgctcttcaaaataaagtgggccatccatatccatgggta

SEQ ID NO: 23838 - DNA, 40 bp, Homo sapiens
acccatggatatggatggcccactttattttgaagagcag

SEQ ID NO: 23839 - DNA, 40 bp, Homo sapiens
ctgctcttcaaaataaagtgggccatccatatccatgggt

SEQ ID NO: 23840 - DNA, 40 bp, Homo sapiens
cccatggatatggatggcccactttattttgaagagcagt

SEQ ID NO: 23841 - DNA, 40 bp, Homo sapiens
actgctcttcaaaataaagtgggccatccatatccatggg

SEQ ID NO: 23842 - DNA, 40 bp, Homo sapiens
ccatggatatggatggcccactttattttgaagagcagtg

SEQ ID NO: 23843 - DNA, 40 bp, Homo sapiens
cactgctcttcaaaataaagtgggccatccatatccatgg

SEQ ID NO: 23844 - DNA, 40 bp, Homo sapiens
catggatatggatggcccactttattttgaagagcagtgt

SEQ ID NO: 23845 - DNA, 40 bp, Homo sapiens
acactgctcttcaaaataaagtgggccatccatatccatg

SEQ ID NO: 23846 - DNA, 40 bp, Homo sapiens
atggatatggatggcccactttattttgaagagcagtgtt

SEQ ID NO: 23847 - DNA, 40 bp, Homo sapiens
aacactgctcttcaaaataaagtgggccatccatatccat

SEQ ID NO: 23848 - DNA, 40 bp, Homo sapiens
tggatatggatggcccactttattttgaagagcagtgttt

SEQ ID NO: 23849 - DNA, 40 bp, Homo sapiens
aaacactgctcttcaaaataaagtgggccatccatatcca

SEQ ID NO: 23850 - DNA, 40 bp, Homo sapiens
ggatatggatggcccactttattttgaagagcagtgtttc

SEQ ID NO: 23851 - DNA, 40 bp, Homo sapiens
gaaacactgctcttcaaaataaagtgggccatccatatcc

SEQ ID NO: 23852 - DNA, 40 bp, Homo sapiens
gatatggatggcccactttattttgaagagcagtgtttct

SEQ ID NO: 23853 - DNA, 40 bp, Homo sapiens
agaaacactgctcttcaaaataaagtgggccatccatatc

SEQ ID NO: 23854 - DNA, 40 bp, Homo sapiens
atatggatggcccactttattttgaagagcagtgtttcta

SEQ ID NO: 23855 - DNA, 40 bp, Homo sapiens
tagaaacactgctcttcaaaataaagtgggccatccatat

SEQ ID NO: 23856 - DNA, 40 bp, Homo sapiens
tatggatggcccactttattttgaagagcagtgtttctag

SEQ ID NO: 23857 - DNA, 40 bp, Homo sapiens
ctagaaacactgctcttcaaaataaagtgggccatccata

SEQ ID NO: 23858 - DNA, 40 bp, Homo sapiens
atggatggcccactttattttgaagagcagtgtttctagg

SEQ ID NO: 23859 - DNA, 40 bp, Homo sapiens
cctagaaacactgctcttcaaaataaagtgggccatccat

SEQ ID NO: 23860 - DNA, 40 bp, Homo sapiens
tggatggcccactttattttgaagagcagtgtttctaggc

SEQ ID NO: 23861 - DNA, 40 bp, Homo sapiens
gcctagaaacactgctcttcaaaataaagtgggccatcca

SEQ ID NO: 23862 - DNA, 40 bp, Homo sapiens
ggatggcccactttattttgaagagcagtgtttctaggca

SEQ ID NO: 23863 - DNA, 40 bp, Homo sapiens
tgcctagaaacactgctcttcaaaataaagtgggccatcc

SEQ ID NO: 23864 - DNA, 40 bp, Homo sapiens
gatggcccactttattttgaagagcagtgtttctaggcaa

SEQ ID NO: 23865 - DNA, 40 bp, Homo sapiens
ttgcctagaaacactgctcttcaaaataaagtgggccatc

SEQ ID NO: 23866 - DNA, 40 bp, Homo sapiens
atggcccactttattttgaagagcagtgtttctaggcaat

SEQ ID NO: 23867 - DNA, 40 bp, Homo sapiens
attgcctagaaacactgctcttcaaaataaagtgggccat

SEQ ID NO: 23868 - DNA, 40 bp, Homo sapiens
tggcccactttattttgaagagcagtgtttctaggcaatc

SEQ ID NO: 23869 - DNA, 40 bp, Homo sapiens
gattgcctagaaacactgctcttcaaaataaagtgggcca

SEQ ID NO: 23870 - DNA, 40 bp, Homo sapiens
ggcccactttattttgaagagcagtgtttctaggcaatca

SEQ ID NO: 23871 - DNA, 40 bp, Homo sapiens
tgattgcctagaaacactgctcttcaaaataaagtgggcc

SEQ ID NO: 23872 - DNA, 40 bp, Homo sapiens
gcccactttattttgaagagcagtgtttctaggcaatcat

SEQ ID NO: 23873 - DNA, 40 bp, Homo sapiens
atgattgcctagaaacactgctcttcaaaataaagtgggc

SEQ ID NO: 23874 - DNA, 40 bp, Homo sapiens
cccactttattttgaagagcagtgtttctaggcaatcatg

SEQ ID NO: 23875 - DNA, 40 bp, Homo sapiens
catgattgcctagaaacactgctcttcaaaataaagtggg

SEQ ID NO: 23876 - DNA, 40 bp, Homo sapiens
ccactttattttgaagagcagtgtttctaggcaatcatgc

SEQ ID NO: 23877 - DNA, 40 bp, Homo sapiens
gcatgattgcctagaaacactgctcttcaaaataaagtgg

SEQ ID NO: 23878 - DNA, 40 bp, Homo sapiens
cactttattttgaagagcagtgtttctaggcaatcatgct

SEQ ID NO: 23879 - DNA, 40 bp, Homo sapiens
agcatgattgcctagaaacactgctcttcaaaataaagtg

SEQ ID NO: 23880 - DNA, 40 bp, Homo sapiens
actttattttgaagagcagtgtttctaggcaatcatgcta

SEQ ID NO: 23881 - DNA, 40 bp, Homo sapiens
tagcatgattgcctagaaacactgctcttcaaaataaagt

SEQ ID NO: 23882 - DNA, 40 bp, Homo sapiens
ctttattttgaagagcagtgtttctaggcaatcatgctaa

SEQ ID NO: 23883 - DNA, 40 bp, Homo sapiens
ttagcatgattgcctagaaacactgctcttcaaaataaag

SEQ ID NO: 23884 - DNA, 40 bp, Homo sapiens
tttattttgaagagcagtgtttctaggcaatcatgctaat

SEQ ID NO: 23885 - DNA, 40 bp, Homo sapiens
attagcatgattgcctagaaacactgctcttcaaaataaa

SEQ ID NO: 23886 - DNA, 40 bp, Homo sapiens
ttattttgaagagcagtgtttctaggcaatcatgctaatt

SEQ ID NO: 23887 - DNA, 40 bp, Homo sapiens
aattagcatgattgcctagaaacactgctcttcaaaataa

SEQ ID NO: 23888 - DNA, 40 bp, Homo sapiens
tattttgaagagcagtgtttctaggcaatcatgctaatta

SEQ ID NO: 23889 - DNA, 40 bp, Homo sapiens
taattagcatgattgcctagaaacactgctcttcaaaata

SEQ ID NO: 23890 - DNA, 40 bp, Homo sapiens
attttgaagagcagtgtttctaggcaatcatgctaattat

SEQ ID NO: 23891 - DNA, 40 bp, Homo sapiens
ataattagcatgattgcctagaaacactgctcttcaaaat

SEQ ID NO: 23892 - DNA, 40 bp, Homo sapiens
ttttgaagagcagtgtttctaggcaatcatgctaattata

SEQ ID NO: 23893 - DNA, 40 bp, Homo sapiens
tataattagcatgattgcctagaaacactgctcttcaaaa

SEQ ID NO: 23894 - DNA, 40 bp, Homo sapiens
tttgaagagcagtgtttctaggcaatcatgctaattatat

SEQ ID NO: 23895 - DNA, 40 bp, Homo sapiens
atataattagcatgattgcctagaaacactgctcttcaaa

SEQ ID NO: 23896 - DNA, 40 bp, Homo sapiens
ttgaagagcagtgtttctaggcaatcatgctaattatata

SEQ ID NO: 23897 - DNA, 40 bp, Homo sapiens
tatataattagcatgattgcctagaaacactgctcttcaa

SEQ ID NO: 23898 - DNA, 40 bp, Homo sapiens
tgaagagcagtgtttctaggcaatcatgctaattatatat

SEQ ID NO: 23899 - DNA, 40 bp, Homo sapiens
atatataattagcatgattgcctagaaacactgctcttca

SEQ ID NO: 23900 - DNA, 40 bp, Homo sapiens
gaagagcagtgtttctaggcaatcatgctaattatatatg

SEQ ID NO: 23901 - DNA, 40 bp, Homo sapiens
catatataattagcatgattgcctagaaacactgctcttc

SEQ ID NO: 23902 - DNA, 40 bp, Homo sapiens
aagagcagtgtttctaggcaatcatgctaattatatatga

SEQ ID NO: 23903 - DNA, 40 bp, Homo sapiens
tcatatataattagcatgattgcctagaaacactgctctt

SEQ ID NO: 23904 - DNA, 40 bp, Homo sapiens
agagcagtgtttctaggcaatcatgctaattatatatgac

SEQ ID NO: 23905 - DNA, 40 bp, Homo sapiens
gtcatatataattagcatgattgcctagaaacactgctct

SEQ ID NO: 23906 - DNA, 40 bp, Homo sapiens
gagcagtgtttctaggcaatcatgctaattatatatgact

SEQ ID NO: 23907 - DNA, 40 bp, Homo sapiens
agtcatatataattagcatgattgcctagaaacactgctc

SEQ ID NO: 23908 - DNA, 40 bp, Homo sapiens
agcagtgtttctaggcaatcatgctaattatatatgactt

SEQ ID NO: 23909 - DNA, 40 bp, Homo sapiens
aagtcatatataattagcatgattgcctagaaacactgct

SEQ ID NO: 23910 - DNA, 40 bp, Homo sapiens
gcagtgtttctaggcaatcatgctaattatatatgactta

SEQ ID NO: 23911 - DNA, 40 bp, Homo sapiens
taagtcatatataattagcatgattgcctagaaacactgc

SEQ ID NO: 23912 - DNA, 40 bp, Homo sapiens
cagtgtttctaggcaatcatgctaattatatatgacttaa

SEQ ID NO: 23913 - DNA, 40 bp, Homo sapiens
ttaagtcatatataattagcatgattgcctagaaacactg

SEQ ID NO: 23914 - DNA, 40 bp, Homo sapiens
agtgtttctaggcaatcatgctaattatatatgacttaat

SEQ ID NO: 23915 - DNA, 40 bp, Homo sapiens
attaagtcatatataattagcatgattgcctagaaacact

SEQ ID NO: 23916 - DNA, 40 bp, Homo sapiens
gtgtttctaggcaatcatgctaattatatatgacttaatt

SEQ ID NO: 23917 - DNA, 40 bp, Homo sapiens
aattaagtcatatataattagcatgattgcctagaaacac

SEQ ID NO: 23918 - DNA, 40 bp, Homo sapiens
tgtttctaggcaatcatgctaattatatatgacttaattt

SEQ ID NO: 23919 - DNA, 40 bp, Homo sapiens
aaattaagtcatatataattagcatgattgcctagaaaca

SEQ ID NO: 23920 - DNA, 40 bp, Homo sapiens
gtttctaggcaatcatgctaattatatatgacttaattta

SEQ ID NO: 23921 - DNA, 40 bp, Homo sapiens
taaattaagtcatatataattagcatgattgcctagaaac

SEQ ID NO: 23922 - DNA, 40 bp, Homo sapiens
tttctaggcaatcatgctaattatatatgacttaatttag

SEQ ID NO: 23923 - DNA, 40 bp, Homo sapiens
ctaaattaagtcatatataattagcatgattgcctagaaa

SEQ ID NO: 23924 - DNA, 40 bp, Homo sapiens
ttctaggcaatcatgctaattatatatgacttaatttaga

SEQ ID NO: 23925 - DNA, 40 bp, Homo sapiens
tctaaattaagtcatatataattagcatgattgcctagaa

SEQ ID NO: 23926 - DNA, 40 bp, Homo sapiens
tctaggcaatcatgctaattatatatgacttaatttagag

SEQ ID NO: 23927 - DNA, 40 bp, Homo sapiens
ctctaaattaagtcatatataattagcatgattgcctaga

SEQ ID NO: 23928 - DNA, 40 bp, Homo sapiens
ctaggcaatcatgctaattatatatgacttaatttagagg

SEQ ID NO: 23929 - DNA, 40 bp, Homo sapiens
cctctaaattaagtcatatataattagcatgattgcctag

SEQ ID NO: 23930 - DNA, 40 bp, Homo sapiens
taggcaatcatgctaattatatatgacttaatttagaggc

SEQ ID NO: 23931 - DNA, 40 bp, Homo sapiens
gcctctaaattaagtcatatataattagcatgattgccta

SEQ ID NO: 23932 - DNA, 40 bp, Homo sapiens
aggcaatcatgctaattatatatgacttaatttagaggct

SEQ ID NO: 23933 - DNA, 40 bp, Homo sapiens
agcctctaaattaagtcatatataattagcatgattgcct

SEQ ID NO: 23934 - DNA, 40 bp, Homo sapiens
ggcaatcatgctaattatatatgacttaatttagaggctt

SEQ ID NO: 23935 - DNA, 40 bp, Homo sapiens
aagcctctaaattaagtcatatataattagcatgattgcc

SEQ ID NO: 23936 - DNA, 40 bp, Homo sapiens
gcaatcatgctaattatatatgacttaatttagaggcttt

SEQ ID NO: 23937 - DNA, 40 bp, Homo sapiens
aaagcctctaaattaagtcatatataattagcatgattgc

SEQ ID NO: 23938 - DNA, 40 bp, Homo sapiens
caatcatgctaattatatatgacttaatttagaggcttta

SEQ ID NO: 23939 - DNA, 40 bp, Homo sapiens
taaagcctctaaattaagtcatatataattagcatgattg

SEQ ID NO: 23940 - DNA, 40 bp, Homo sapiens
aatcatgctaattatatatgacttaatttagaggctttat

SEQ ID NO: 23941 - DNA, 40 bp, Homo sapiens
ataaagcctctaaattaagtcatatataattagcatgatt

SEQ ID NO: 23942 - DNA, 40 bp, Homo sapiens
atcatgctaattatatatgacttaatttagaggctttata

SEQ ID NO: 23943 - DNA, 40 bp, Homo sapiens
tataaagcctctaaattaagtcatatataattagcatgat

SEQ ID NO: 23944 - DNA, 40 bp, Homo sapiens
tcatgctaattatatatgacttaatttagaggctttatac

SEQ ID NO: 23945 - DNA, 40 bp, Homo sapiens
gtataaagcctctaaattaagtcatatataattagcatga

SEQ ID NO: 23946 - DNA, 40 bp, Homo sapiens
catgctaattatatatgacttaatttagaggctttatact

SEQ ID NO: 23947 - DNA, 40 bp, Homo sapiens
agtataaagcctctaaattaagtcatatataattagcatg

SEQ ID NO: 23948 - DNA, 40 bp, Homo sapiens
atgctaattatatatgacttaatttagaggctttatactt

SEQ ID NO: 23949 - DNA, 40 bp, Homo sapiens
aagtataaagcctctaaattaagtcatatataattagcat

SEQ ID NO: 23950 - DNA, 40 bp, Homo sapiens
tgctaattatatatgacttaatttagaggctttatactta

SEQ ID NO: 23951 - DNA, 40 bp, Homo sapiens
taagtataaagcctctaaattaagtcatatataattagca

SEQ ID NO: 23952 - DNA, 40 bp, Homo sapiens
gctaattatatatgacttaatttagaggctttatacttaa

SEQ ID NO: 23953 - DNA, 40 bp, Homo sapiens
ttaagtataaagcctctaaattaagtcatatataattagc

SEQ ID NO: 23954 - DNA, 40 bp, Homo sapiens
ctaattatatatgacttaatttagaggctttatacttaag

SEQ ID NO: 23955 - DNA, 40 bp, Homo sapiens
cttaagtataaagcctctaaattaagtcatatataattag

SEQ ID NO: 23956 - DNA, 40 bp, Homo sapiens
taattatatatgacttaatttagaggctttatacttaaga

SEQ ID NO: 23957 - DNA, 40 bp, Homo sapiens
tcttaagtataaagcctctaaattaagtcatatataatta

SEQ ID NO: 23958 - DNA, 40 bp, Homo sapiens
aattatatatgacttaatttagaggctttatacttaagag

SEQ ID NO: 23959 - DNA, 40 bp, Homo sapiens
ctcttaagtataaagcctctaaattaagtcatatataatt

SEQ ID NO: 23960 - DNA, 40 bp, Homo sapiens
attatatatgacttaatttagaggctttatacttaagagc

SEQ ID NO: 23961 - DNA, 40 bp, Homo sapiens
gctcttaagtataaagcctctaaattaagtcatatataat

SEQ ID NO: 23962 - DNA, 40 bp, Homo sapiens
ttatatatgacttaatttagaggctttatacttaagagca

SEQ ID NO: 23963 - DNA, 40 bp, Homo sapiens
tgctcttaagtataaagcctctaaattaagtcatatataa

SEQ ID NO: 23964 - DNA, 40 bp, Homo sapiens
tatatatgacttaatttagaggctttatacttaagagcat

SEQ ID NO: 23965 - DNA, 40 bp, Homo sapiens
atgctcttaagtataaagcctctaaattaagtcatatata

SEQ ID NO: 23966 - DNA, 40 bp, Homo sapiens
atatatgacttaatttagaggctttatacttaagagcatt

SEQ ID NO: 23967 - DNA, 40 bp, Homo sapiens
aatgctcttaagtataaagcctctaaattaagtcatatat

SEQ ID NO: 23968 - DNA, 40 bp, Homo sapiens
tatatgacttaatttagaggctttatacttaagagcatta

SEQ ID NO: 23969 - DNA, 40 bp, Homo sapiens
taatgctcttaagtataaagcctctaaattaagtcatata

SEQ ID NO: 23970 - DNA, 40 bp, Homo sapiens
atatgacttaatttagaggctttatacttaagagcattac

SEQ ID NO: 23971 - DNA, 40 bp, Homo sapiens
gtaatgctcttaagtataaagcctctaaattaagtcatat

SEQ ID NO: 23972 - DNA, 40 bp, Homo sapiens
tatgacttaatttagaggctttatacttaagagcattaca

SEQ ID NO: 23973 - DNA, 40 bp, Homo sapiens
tgtaatgctcttaagtataaagcctctaaattaagtcata

SEQ ID NO: 23974 - DNA, 40 bp, Homo sapiens
atgacttaatttagaggctttatacttaagagcattacat

SEQ ID NO: 23975 - DNA, 40 bp, Homo sapiens
atgtaatgctcttaagtataaagcctctaaattaagtcat

SEQ ID NO: 23976 - DNA, 40 bp, Homo sapiens
tgacttaatttagaggctttatacttaagagcattacatt

SEQ ID NO: 23977 - DNA, 40 bp, Homo sapiens
aatgtaatgctcttaagtataaagcctctaaattaagtca

SEQ ID NO: 23978 - DNA, 40 bp, Homo sapiens
gacttaatttagaggctttatacttaagagcattacattt

SEQ ID NO: 23979 - DNA, 40 bp, Homo sapiens
aaatgtaatgctcttaagtataaagcctctaaattaagtc

SEQ ID NO: 23980 - DNA, 40 bp, Homo sapiens
acttaatttagaggctttatacttaagagcattacatttc

SEQ ID NO: 23981 - DNA, 40 bp, Homo sapiens
gaaatgtaatgctcttaagtataaagcctctaaattaagt

SEQ ID NO: 23982 - DNA, 40 bp, Homo sapiens
cttaatttagaggctttatacttaagagcattacatttct

SEQ ID NO: 23983 - DNA, 40 bp, Homo sapiens
agaaatgtaatgctcttaagtataaagcctctaaattaag

SEQ ID NO: 23984 - DNA, 40 bp, Homo sapiens
ttaatttagaggctttatacttaagagcattacatttctg

SEQ ID NO: 23985 - DNA, 40 bp, Homo sapiens
cagaaatgtaatgctcttaagtataaagcctctaaattaa

SEQ ID NO: 23986 - DNA, 40 bp, Homo sapiens
taatttagaggctttatacttaagagcattacatttctgg

SEQ ID NO: 23987 - DNA, 40 bp, Homo sapiens
ccagaaatgtaatgctcttaagtataaagcctctaaatta

SEQ ID NO: 23988 - DNA, 40 bp, Homo sapiens
aatttagaggctttatacttaagagcattacatttctggc

SEQ ID NO: 23989 - DNA, 40 bp, Homo sapiens
gccagaaatgtaatgctcttaagtataaagcctctaaatt

SEQ ID NO: 23990 - DNA, 40 bp, Homo sapiens
atttagaggctttatacttaagagcattacatttctggcg

SEQ ID NO: 23991 - DNA, 40 bp, Homo sapiens
cgccagaaatgtaatgctcttaagtataaagcctctaaat

SEQ ID NO: 23992 - DNA, 40 bp, Homo sapiens
tttagaggctttatacttaagagcattacatttctggcgt

SEQ ID NO: 23993 - DNA, 40 bp, Homo sapiens
acgccagaaatgtaatgctcttaagtataaagcctctaaa

SEQ ID NO: 23994 - DNA, 40 bp, Homo sapiens
ttagaggctttatacttaagagcattacatttctggcgtc

SEQ ID NO: 23995 - DNA, 40 bp, Homo sapiens
gacgccagaaatgtaatgctcttaagtataaagcctctaa

SEQ ID NO: 23996 - DNA, 40 bp, Homo sapiens
tagaggctttatacttaagagcattacatttctggcgtct

SEQ ID NO: 23997 - DNA, 40 bp, Homo sapiens
agacgccagaaatgtaatgctcttaagtataaagcctcta

SEQ ID NO: 23998 - DNA, 40 bp, Homo sapiens
agaggctttatacttaagagcattacatttctggcgtctc

SEQ ID NO: 23999 - DNA, 40 bp, Homo sapiens
gagacgccagaaatgtaatgctcttaagtataaagcctct

SEQ ID NO: 24000 - DNA, 40 bp, Homo sapiens
gaggctttatacttaagagcattacatttctggcgtctct

SEQ ID NO: 24001 - DNA, 40 bp, Homo sapiens
agagacgccagaaatgtaatgctcttaagtataaagcctc

SEQ ID NO: 24002 - DNA, 40 bp, Homo sapiens
aggctttatacttaagagcattacatttctggcgtctctt

SEQ ID NO: 24003 - DNA, 40 bp, Homo sapiens
aagagacgccagaaatgtaatgctcttaagtataaagcct

SEQ ID NO: 24004 - DNA, 40 bp, Homo sapiens
ggctttatacttaagagcattacatttctggcgtctctta

SEQ ID NO: 24005 - DNA, 40 bp, Homo sapiens
taagagacgccagaaatgtaatgctcttaagtataaagcc

SEQ ID NO: 24006 - DNA, 40 bp, Homo sapiens
gctttatacttaagagcattacatttctggcgtctcttaa

SEQ ID NO: 24007 - DNA, 40 bp, Homo sapiens
ttaagagacgccagaaatgtaatgctcttaagtataaagc

SEQ ID NO: 24008 - DNA, 40 bp, Homo sapiens
ctttatacttaagagcattacatttctggcgtctcttaac

SEQ ID NO: 24009 - DNA, 40 bp, Homo sapiens
gttaagagacgccagaaatgtaatgctcttaagtataaag

SEQ ID NO: 24010 - DNA, 40 bp, Homo sapiens
tttatacttaagagcattacatttctggcgtctcttaacc

SEQ ID NO: 24011 - DNA, 40 bp, Homo sapiens
ggttaagagacgccagaaatgtaatgctcttaagtataaa

SEQ ID NO: 24012 - DNA, 40 bp, Homo sapiens
ttatacttaagagcattacatttctggcgtctcttaacca

SEQ ID NO: 24013 - DNA, 40 bp, Homo sapiens
tggttaagagacgccagaaatgtaatgctcttaagtataa

SEQ ID NO: 24014 - DNA, 40 bp, Homo sapiens
tatacttaagagcattacatttctggcgtctcttaaccat

SEQ ID NO: 24015 - DNA, 40 bp, Homo sapiens
atggttaagagacgccagaaatgtaatgctcttaagtata

SEQ ID NO: 24016 - DNA, 40 bp, Homo sapiens
atacttaagagcattacatttctggcgtctcttaaccatt

SEQ ID NO: 24017 - DNA, 40 bp, Homo sapiens
aatggttaagagacgccagaaatgtaatgctcttaagtat

SEQ ID NO: 24018 - DNA, 40 bp, Homo sapiens
tacttaagagcattacatttctggcgtctcttaaccatta

SEQ ID NO: 24019 - DNA, 40 bp, Homo sapiens
taatggttaagagacgccagaaatgtaatgctcttaagta

SEQ ID NO: 24020 - DNA, 40 bp, Homo sapiens
acttaagagcattacatttctggcgtctcttaaccattat

SEQ ID NO: 24021 - DNA, 40 bp, Homo sapiens
ataatggttaagagacgccagaaatgtaatgctcttaagt

SEQ ID NO: 24022 - DNA, 40 bp, Homo sapiens
cttaagagcattacatttctggcgtctcttaaccattatt

SEQ ID NO: 24023 - DNA, 40 bp, Homo sapiens
aataatggttaagagacgccagaaatgtaatgctcttaag

SEQ ID NO: 24024 - DNA, 40 bp, Homo sapiens
ttaagagcattacatttctggcgtctcttaaccattatta

SEQ ID NO: 24025 - DNA, 40 bp, Homo sapiens
taataatggttaagagacgccagaaatgtaatgctcttaa

SEQ ID NO: 24026 - DNA, 40 bp, Homo sapiens
taagagcattacatttctggcgtctcttaaccattattat

SEQ ID NO: 24027 - DNA, 40 bp, Homo sapiens
ataataatggttaagagacgccagaaatgtaatgctctta

SEQ ID NO: 24028 - DNA, 40 bp, Homo sapiens
aagagcattacatttctggcgtctcttaaccattattatt

SEQ ID NO: 24029 - DNA, 40 bp, Homo sapiens
aataataatggttaagagacgccagaaatgtaatgctctt

SEQ ID NO: 24030 - DNA, 40 bp, Homo sapiens
agagcattacatttctggcgtctcttaaccattattattt

SEQ ID NO: 24031 - DNA, 40 bp, Homo sapiens
aaataataatggttaagagacgccagaaatgtaatgctct

SEQ ID NO: 24032 - DNA, 40 bp, Homo sapiens
gagcattacatttctggcgtctcttaaccattattatttc

SEQ ID NO: 24033 - DNA, 40 bp, Homo sapiens
gaaataataatggttaagagacgccagaaatgtaatgctc

SEQ ID NO: 24034 - DNA, 40 bp, Homo sapiens
agcattacatttctggcgtctcttaaccattattatttca

SEQ ID NO: 24035 - DNA, 40 bp, Homo sapiens
tgaaataataatggttaagagacgccagaaatgtaatgct

SEQ ID NO: 24036 - DNA, 40 bp, Homo sapiens
gcattacatttctggcgtctcttaaccattattatttcat

SEQ ID NO: 24037 - DNA, 40 bp, Homo sapiens
atgaaataataatggttaagagacgccagaaatgtaatgc

SEQ ID NO: 24038 - DNA, 40 bp, Homo sapiens
cattacatttctggcgtctcttaaccattattatttcata

SEQ ID NO: 24039 - DNA, 40 bp, Homo sapiens
tatgaaataataatggttaagagacgccagaaatgtaatg

SEQ ID NO: 24040 - DNA, 40 bp, Homo sapiens
attacatttctggcgtctcttaaccattattatttcataa

SEQ ID NO: 24041 - DNA, 40 bp, Homo sapiens
ttatgaaataataatggttaagagacgccagaaatgtaat

SEQ ID NO: 24042 - DNA, 40 bp, Homo sapiens
ttacatttctggcgtctcttaaccattattatttcataat

SEQ ID NO: 24043 - DNA, 40 bp, Homo sapiens
attatgaaataataatggttaagagacgccagaaatgtaa

SEQ ID NO: 24044 - DNA, 40 bp, Homo sapiens
tacatttctggcgtctcttaaccattattatttcataatg

SEQ ID NO: 24045 - DNA, 40 bp, Homo sapiens
cattatgaaataataatggttaagagacgccagaaatgta

SEQ ID NO: 24046 - DNA, 40 bp, Homo sapiens
acatttctggcgtctcttaaccattattatttcataatgt

SEQ ID NO: 24047 - DNA, 40 bp, Homo sapiens
acattatgaaataataatggttaagagacgccagaaatgt

SEQ ID NO: 24048 - DNA, 40 bp, Homo sapiens
catttctggcgtctcttaaccattattatttcataatgtg

SEQ ID NO: 24049 - DNA, 40 bp, Homo sapiens
cacattatgaaataataatggttaagagacgccagaaatg

SEQ ID NO: 24050 - DNA, 40 bp, Homo sapiens
atttctggcgtctcttaaccattattatttcataatgtgt

SEQ ID NO: 24051 - DNA, 40 bp, Homo sapiens
acacattatgaaataataatggttaagagacgccagaaat

SEQ ID NO: 24052 - DNA, 40 bp, Homo sapiens
tttctggcgtctcttaaccattattatttcataatgtgta

SEQ ID NO: 24053 - DNA, 40 bp, Homo sapiens
tacacattatgaaataataatggttaagagacgccagaaa

SEQ ID NO: 24054 - DNA, 40 bp, Homo sapiens
ttctggcgtctcttaaccattattatttcataatgtgtag

SEQ ID NO: 24055 - DNA, 40 bp, Homo sapiens
ctacacattatgaaataataatggttaagagacgccagaa

SEQ ID NO: 24056 - DNA, 40 bp, Homo sapiens
tctggcgtctcttaaccattattatttcataatgtgtagg

SEQ ID NO: 24057 - DNA, 40 bp, Homo sapiens
cctacacattatgaaataataatggttaagagacgccaga

SEQ ID NO: 24058 - DNA, 40 bp, Homo sapiens
ctggcgtctcttaaccattattatttcataatgtgtaggt

SEQ ID NO: 24059 - DNA, 40 bp, Homo sapiens
acctacacattatgaaataataatggttaagagacgccag

SEQ ID NO: 24060 - DNA, 40 bp, Homo sapiens
tggcgtctcttaaccattattatttcataatgtgtaggtt

SEQ ID NO: 24061 - DNA, 40 bp, Homo sapiens
aacctacacattatgaaataataatggttaagagacgcca

SEQ ID NO: 24062 - DNA, 40 bp, Homo sapiens
ggcgtctcttaaccattattatttcataatgtgtaggtta

SEQ ID NO: 24063 - DNA, 40 bp, Homo sapiens
taacctacacattatgaaataataatggttaagagacgcc

SEQ ID NO: 24064 - DNA, 40 bp, Homo sapiens
gcgtctcttaaccattattatttcataatgtgtaggttat

SEQ ID NO: 24065 - DNA, 40 bp, Homo sapiens
ataacctacacattatgaaataataatggttaagagacgc

SEQ ID NO: 24066 - DNA, 40 bp, Homo sapiens
cgtctcttaaccattattatttcataatgtgtaggttatg

SEQ ID NO: 24067 - DNA, 40 bp, Homo sapiens
cataacctacacattatgaaataataatggttaagagacg

SEQ ID NO: 24068 - DNA, 40 bp, Homo sapiens
gtctcttaaccattattatttcataatgtgtaggttatgg

SEQ ID NO: 24069 - DNA, 40 bp, Homo sapiens
ccataacctacacattatgaaataataatggttaagagac

SEQ ID NO: 24070 - DNA, 40 bp, Homo sapiens
tctcttaaccattattatttcataatgtgtaggttatgga

SEQ ID NO: 24071 - DNA, 40 bp, Homo sapiens
tccataacctacacattatgaaataataatggttaagaga

SEQ ID NO: 24072 - DNA, 40 bp, Homo sapiens
ctcttaaccattattatttcataatgtgtaggttatggaa

SEQ ID NO: 24073 - DNA, 40 bp, Homo sapiens
ttccataacctacacattatgaaataataatggttaagag

SEQ ID NO: 24074 - DNA, 40 bp, Homo sapiens
tcttaaccattattatttcataatgtgtaggttatggaac

SEQ ID NO: 24075 - DNA, 40 bp, Homo sapiens
gttccataacctacacattatgaaataataatggttaaga

SEQ ID NO: 24076 - DNA, 40 bp, Homo sapiens
cttaaccattattatttcataatgtgtaggttatggaaca

SEQ ID NO: 24077 - DNA, 40 bp, Homo sapiens
tgttccataacctacacattatgaaataataatggttaag

SEQ ID NO: 24078 - DNA, 40 bp, Homo sapiens
ttaaccattattatttcataatgtgtaggttatggaacag

SEQ ID NO: 24079 - DNA, 40 bp, Homo sapiens
ctgttccataacctacacattatgaaataataatggttaa

SEQ ID NO: 24080 - DNA, 40 bp, Homo sapiens
taaccattattatttcataatgtgtaggttatggaacagt

SEQ ID NO: 24081 - DNA, 40 bp, Homo sapiens
actgttccataacctacacattatgaaataataatggtta

SEQ ID NO: 24082 - DNA, 40 bp, Homo sapiens
aaccattattatttcataatgtgtaggttatggaacagtt

SEQ ID NO: 24083 - DNA, 40 bp, Homo sapiens
aactgttccataacctacacattatgaaataataatggtt

SEQ ID NO: 24084 - DNA, 40 bp, Homo sapiens
accattattatttcataatgtgtaggttatggaacagtta

SEQ ID NO: 24085 - DNA, 40 bp, Homo sapiens
taactgttccataacctacacattatgaaataataatggt

SEQ ID NO: 24086 - DNA, 40 bp, Homo sapiens
ccattattatttcataatgtgtaggttatggaacagttaa

SEQ ID NO: 24087 - DNA, 40 bp, Homo sapiens
ttaactgttccataacctacacattatgaaataataatgg

SEQ ID NO: 24088 - DNA, 40 bp, Homo sapiens
cattattatttcataatgtgtaggttatggaacagttaaa

SEQ ID NO: 24089 - DNA, 40 bp, Homo sapiens
tttaactgttccataacctacacattatgaaataataatg

SEQ ID NO: 24090 - DNA, 40 bp, Homo sapiens
attattatttcataatgtgtaggttatggaacagttaaat

SEQ ID NO: 24091 - DNA, 40 bp, Homo sapiens
atttaactgttccataacctacacattatgaaataataat

SEQ ID NO: 24092 - DNA, 40 bp, Homo sapiens
ttattatttcataatgtgtaggttatggaacagttaaatt

SEQ ID NO: 24093 - DNA, 40 bp, Homo sapiens
aatttaactgttccataacctacacattatgaaataataa

SEQ ID NO: 24094 - DNA, 40 bp, Homo sapiens
tattatttcataatgtgtaggttatggaacagttaaatta

SEQ ID NO: 24095 - DNA, 40 bp, Homo sapiens
taatttaactgttccataacctacacattatgaaataata

SEQ ID NO: 24096 - DNA, 40 bp, Homo sapiens
attatttcataatgtgtaggttatggaacagttaaattat

SEQ ID NO: 24097 - DNA, 40 bp, Homo sapiens
ataatttaactgttccataacctacacattatgaaataat

SEQ ID NO: 24098 - DNA, 40 bp, Homo sapiens
ttatttcataatgtgtaggttatggaacagttaaattatt

SEQ ID NO: 24099 - DNA, 40 bp, Homo sapiens
aataatttaactgttccataacctacacattatgaaataa

SEQ ID NO: 24100 - DNA, 40 bp, Homo sapiens
tatttcataatgtgtaggttatggaacagttaaattattg

SEQ ID NO: 24101 - DNA, 40 bp, Homo sapiens
caataatttaactgttccataacctacacattatgaaata

SEQ ID NO: 24102 - DNA, 40 bp, Homo sapiens
atttcataatgtgtaggttatggaacagttaaattattgg

SEQ ID NO: 24103 - DNA, 40 bp, Homo sapiens
ccaataatttaactgttccataacctacacattatgaaat

SEQ ID NO: 24104 - DNA, 40 bp, Homo sapiens
tttcataatgtgtaggttatggaacagttaaattattggg

SEQ ID NO: 24105 - DNA, 40 bp, Homo sapiens
cccaataatttaactgttccataacctacacattatgaaa

SEQ ID NO: 24106 - DNA, 40 bp, Homo sapiens
ttcataatgtgtaggttatggaacagttaaattattggga

SEQ ID NO: 24107 - DNA, 40 bp, Homo sapiens
tcccaataatttaactgttccataacctacacattatgaa

SEQ ID NO: 24108 - DNA, 40 bp, Homo sapiens
tcataatgtgtaggttatggaacagttaaattattgggat

SEQ ID NO: 24109 - DNA, 40 bp, Homo sapiens
atcccaataatttaactgttccataacctacacattatga

SEQ ID NO: 24110 - DNA, 40 bp, Homo sapiens
cataatgtgtaggttatggaacagttaaattattgggatc

SEQ ID NO: 24111 - DNA, 40 bp, Homo sapiens
gatcccaataatttaactgttccataacctacacattatg

SEQ ID NO: 24112 - DNA, 40 bp, Homo sapiens
ataatgtgtaggttatggaacagttaaattattgggatct

SEQ ID NO: 24113 - DNA, 40 bp, Homo sapiens
agatcccaataatttaactgttccataacctacacattat

SEQ ID NO: 24114 - DNA, 40 bp, Homo sapiens
taatgtgtaggttatggaacagttaaattattgggatctt

SEQ ID NO: 24115 - DNA, 40 bp, Homo sapiens
aagatcccaataatttaactgttccataacctacacatta

SEQ ID NO: 24116 - DNA, 40 bp, Homo sapiens
aatgtgtaggttatggaacagttaaattattgggatctta

SEQ ID NO: 24117 - DNA, 40 bp, Homo sapiens
taagatcccaataatttaactgttccataacctacacatt

SEQ ID NO: 24118 - DNA, 40 bp, Homo sapiens
atgtgtaggttatggaacagttaaattattgggatcttaa

SEQ ID NO: 24119 - DNA, 40 bp, Homo sapiens
ttaagatcccaataatttaactgttccataacctacacat

SEQ ID NO: 24120 - DNA, 40 bp, Homo sapiens
tgtgtaggttatggaacagttaaattattgggatcttaat

SEQ ID NO: 24121 - DNA, 40 bp, Homo sapiens
attaagatcccaataatttaactgttccataacctacaca

SEQ ID NO: 24122 - DNA, 40 bp, Homo sapiens
gtgtaggttatggaacagttaaattattgggatcttaata

SEQ ID NO: 24123 - DNA, 40 bp, Homo sapiens
tattaagatcccaataatttaactgttccataacctacac

SEQ ID NO: 24124 - DNA, 40 bp, Homo sapiens
tgtaggttatggaacagttaaattattgggatcttaatat

SEQ ID NO: 24125 - DNA, 40 bp, Homo sapiens
atattaagatcccaataatttaactgttccataacctaca

SEQ ID NO: 24126 - DNA, 40 bp, Homo sapiens
gtaggttatggaacagttaaattattgggatcttaatata

SEQ ID NO: 24127 - DNA, 40 bp, Homo sapiens
tatattaagatcccaataatttaactgttccataacctac

SEQ ID NO: 24128 - DNA, 40 bp, Homo sapiens
taggttatggaacagttaaattattgggatcttaatatag

SEQ ID NO: 24129 - DNA, 40 bp, Homo sapiens
ctatattaagatcccaataatttaactgttccataaccta

SEQ ID NO: 24130 - DNA, 40 bp, Homo sapiens
aggttatggaacagttaaattattgggatcttaatataga

SEQ ID NO: 24131 - DNA, 40 bp, Homo sapiens
tctatattaagatcccaataatttaactgttccataacct

SEQ ID NO: 24132 - DNA, 40 bp, Homo sapiens
ggttatggaacagttaaattattgggatcttaatatagaa

SEQ ID NO: 24133 - DNA, 40 bp, Homo sapiens
ttctatattaagatcccaataatttaactgttccataacc

SEQ ID NO: 24134 - DNA, 40 bp, Homo sapiens
gttatggaacagttaaattattgggatcttaatatagaaa

SEQ ID NO: 24135 - DNA, 40 bp, Homo sapiens
tttctatattaagatcccaataatttaactgttccataac

SEQ ID NO: 24136 - DNA, 40 bp, Homo sapiens
ttatggaacagttaaattattgggatcttaatatagaaat

SEQ ID NO: 24137 - DNA, 40 bp, Homo sapiens
atttctatattaagatcccaataatttaactgttccataa

SEQ ID NO: 24138 - DNA, 40 bp, Homo sapiens
tatggaacagttaaattattgggatcttaatatagaaatt

SEQ ID NO: 24139 - DNA, 40 bp, Homo sapiens
aatttctatattaagatcccaataatttaactgttccata

SEQ ID NO: 24140 - DNA, 40 bp, Homo sapiens
atggaacagttaaattattgggatcttaatatagaaatta

SEQ ID NO: 24141 - DNA, 40 bp, Homo sapiens
taatttctatattaagatcccaataatttaactgttccat

SEQ ID NO: 24142 - DNA, 40 bp, Homo sapiens
tggaacagttaaattattgggatcttaatatagaaattag

SEQ ID NO: 24143 - DNA, 40 bp, Homo sapiens
ctaatttctatattaagatcccaataatttaactgttcca

SEQ ID NO: 24144 - DNA, 40 bp, Homo sapiens
ggaacagttaaattattgggatcttaatatagaaattagt

SEQ ID NO: 24145 - DNA, 40 bp, Homo sapiens
actaatttctatattaagatcccaataatttaactgttcc

SEQ ID NO: 24146 - DNA, 40 bp, Homo sapiens
gaacagttaaattattgggatcttaatatagaaattagta

SEQ ID NO: 24147 - DNA, 40 bp, Homo sapiens
tactaatttctatattaagatcccaataatttaactgttc

SEQ ID NO: 24148 - DNA, 40 bp, Homo sapiens
aacagttaaattattgggatcttaatatagaaattagtag

SEQ ID NO: 24149 - DNA, 40 bp, Homo sapiens
ctactaatttctatattaagatcccaataatttaactgtt

SEQ ID NO: 24150 - DNA, 40 bp, Homo sapiens
acagttaaattattgggatcttaatatagaaattagtaga

SEQ ID NO: 24151 - DNA, 40 bp, Homo sapiens
tctactaatttctatattaagatcccaataatttaactgt

SEQ ID NO: 24152 - DNA, 40 bp, Homo sapiens
cagttaaattattgggatcttaatatagaaattagtagaa

SEQ ID NO: 24153 - DNA, 40 bp, Homo sapiens
ttctactaatttctatattaagatcccaataatttaactg

SEQ ID NO: 24154 - DNA, 40 bp, Homo sapiens
agttaaattattgggatcttaatatagaaattagtagaaa

SEQ ID NO: 24155 - DNA, 40 bp, Homo sapiens
tttctactaatttctatattaagatcccaataatttaact

SEQ ID NO: 24156 - DNA, 40 bp, Homo sapiens
gttaaattattgggatcttaatatagaaattagtagaaat

SEQ ID NO: 24157 - DNA, 40 bp, Homo sapiens
atttctactaatttctatattaagatcccaataatttaac

SEQ ID NO: 24158 - DNA, 40 bp, Homo sapiens
ttaaattattgggatcttaatatagaaattagtagaaata

SEQ ID NO: 24159 - DNA, 40 bp, Homo sapiens
tatttctactaatttctatattaagatcccaataatttaa

SEQ ID NO: 24160 - DNA, 40 bp, Homo sapiens
taaattattgggatcttaatatagaaattagtagaaataa

SEQ ID NO: 24161 - DNA, 40 bp, Homo sapiens
ttatttctactaatttctatattaagatcccaataattta

SEQ ID NO: 24162 - DNA, 40 bp, Homo sapiens
aaattattgggatcttaatatagaaattagtagaaataag

SEQ ID NO: 24163 - DNA, 40 bp, Homo sapiens
cttatttctactaatttctatattaagatcccaataattt

SEQ ID NO: 24164 - DNA, 40 bp, Homo sapiens
aattattgggatcttaatatagaaattagtagaaataagc

SEQ ID NO: 24165 - DNA, 40 bp, Homo sapiens
gcttatttctactaatttctatattaagatcccaataatt

SEQ ID NO: 24166 - DNA, 40 bp, Homo sapiens
attattgggatcttaatatagaaattagtagaaataagcc

SEQ ID NO: 24167 - DNA, 40 bp, Homo sapiens
ggcttatttctactaatttctatattaagatcccaataat

SEQ ID NO: 24168 - DNA, 40 bp, Homo sapiens
ttattgggatcttaatatagaaattagtagaaataagcca

SEQ ID NO: 24169 - DNA, 40 bp, Homo sapiens
tggcttatttctactaatttctatattaagatcccaataa

SEQ ID NO: 24170 - DNA, 40 bp, Homo sapiens
tattgggatcttaatatagaaattagtagaaataagccag

SEQ ID NO: 24171 - DNA, 40 bp, Homo sapiens
ctggcttatttctactaatttctatattaagatcccaata

SEQ ID NO: 24172 - DNA, 40 bp, Homo sapiens
attgggatcttaatatagaaattagtagaaataagccaga

SEQ ID NO: 24173 - DNA, 40 bp, Homo sapiens
tctggcttatttctactaatttctatattaagatcccaat

SEQ ID NO: 24174 - DNA, 40 bp, Homo sapiens
ttgggatcttaatatagaaattagtagaaataagccagat

SEQ ID NO: 24175 - DNA, 40 bp, Homo sapiens
atctggcttatttctactaatttctatattaagatcccaa

SEQ ID NO: 24176 - DNA, 40 bp, Homo sapiens
tgggatcttaatatagaaattagtagaaataagccagata

SEQ ID NO: 24177 - DNA, 40 bp, Homo sapiens
tatctggcttatttctactaatttctatattaagatccca

SEQ ID NO: 24178 - DNA, 40 bp, Homo sapiens
gggatcttaatatagaaattagtagaaataagccagatat

SEQ ID NO: 24179 - DNA, 40 bp, Homo sapiens
atatctggcttatttctactaatttctatattaagatccc

SEQ ID NO: 24180 - DNA, 40 bp, Homo sapiens
ggatcttaatatagaaattagtagaaataagccagatatg

SEQ ID NO: 24181 - DNA, 40 bp, Homo sapiens
catatctggcttatttctactaatttctatattaagatcc

SEQ ID NO: 24182 - DNA, 40 bp, Homo sapiens
gatcttaatatagaaattagtagaaataagccagatatgg

SEQ ID NO: 24183 - DNA, 40 bp, Homo sapiens
ccatatctggcttatttctactaatttctatattaagatc

SEQ ID NO: 24184 - DNA, 40 bp, Homo sapiens
atcttaatatagaaattagtagaaataagccagatatggt

SEQ ID NO: 24185 - DNA, 40 bp, Homo sapiens
accatatctggcttatttctactaatttctatattaagat

SEQ ID NO: 24186 - DNA, 40 bp, Homo sapiens
tcttaatatagaaattagtagaaataagccagatatggtg

SEQ ID NO: 24187 - DNA, 40 bp, Homo sapiens
caccatatctggcttatttctactaatttctatattaaga

SEQ ID NO: 24188 - DNA, 40 bp, Homo sapiens
cttaatatagaaattagtagaaataagccagatatggtgg

SEQ ID NO: 24189 - DNA, 40 bp, Homo sapiens
ccaccatatctggcttatttctactaatttctatattaag

SEQ ID NO: 24190 - DNA, 40 bp, Homo sapiens
ttaatatagaaattagtagaaataagccagatatggtggc

SEQ ID NO: 24191 - DNA, 40 bp, Homo sapiens
gccaccatatctggcttatttctactaatttctatattaa

SEQ ID NO: 24192 - DNA, 40 bp, Homo sapiens
taatatagaaattagtagaaataagccagatatggtggct

SEQ ID NO: 24193 - DNA, 40 bp, Homo sapiens
agccaccatatctggcttatttctactaatttctatatta

SEQ ID NO: 24194 - DNA, 40 bp, Homo sapiens
aatatagaaattagtagaaataagccagatatggtggctc

SEQ ID NO: 24195 - DNA, 40 bp, Homo sapiens
gagccaccatatctggcttatttctactaatttctatatt

SEQ ID NO: 24196 - DNA, 40 bp, Homo sapiens
atatagaaattagtagaaataagccagatatggtggctca

SEQ ID NO: 24197 - DNA, 40 bp, Homo sapiens
tgagccaccatatctggcttatttctactaatttctatat

SEQ ID NO: 24198 - DNA, 40 bp, Homo sapiens
tatagaaattagtagaaataagccagatatggtggctcat

SEQ ID NO: 24199 - DNA, 40 bp, Homo sapiens
atgagccaccatatctggcttatttctactaatttctata

SEQ ID NO: 24200 - DNA, 40 bp, Homo sapiens
atagaaattagtagaaataagccagatatggtggctcatg

SEQ ID NO: 24201 - DNA, 40 bp, Homo sapiens
catgagccaccatatctggcttatttctactaatttctat

SEQ ID NO: 24202 - DNA, 40 bp, Homo sapiens
tagaaattagtagaaataagccagatatggtggctcatgc

SEQ ID NO: 24203 - DNA, 40 bp, Homo sapiens
gcatgagccaccatatctggcttatttctactaatttcta

SEQ ID NO: 24204 - DNA, 40 bp, Homo sapiens
agaaattagtagaaataagccagatatggtggctcatgcc

SEQ ID NO: 24205 - DNA, 40 bp, Homo sapiens
ggcatgagccaccatatctggcttatttctactaatttct

SEQ ID NO: 24206 - DNA, 40 bp, Homo sapiens
gaaattagtagaaataagccagatatggtggctcatgcct

SEQ ID NO: 24207 - DNA, 40 bp, Homo sapiens
aggcatgagccaccatatctggcttatttctactaatttc

SEQ ID NO: 24208 - DNA, 40 bp, Homo sapiens
aaattagtagaaataagccagatatggtggctcatgcctg

SEQ ID NO: 24209 - DNA, 40 bp, Homo sapiens
caggcatgagccaccatatctggcttatttctactaattt

SEQ ID NO: 24210 - DNA, 40 bp, Homo sapiens
aattagtagaaataagccagatatggtggctcatgcctgt

SEQ ID NO: 24211 - DNA, 40 bp, Homo sapiens
acaggcatgagccaccatatctggcttatttctactaatt

SEQ ID NO: 24212 - DNA, 40 bp, Homo sapiens
attagtagaaataagccagatatggtggctcatgcctgta

SEQ ID NO: 24213 - DNA, 40 bp, Homo sapiens
tacaggcatgagccaccatatctggcttatttctactaat

SEQ ID NO: 24214 - DNA, 40 bp, Homo sapiens
ttagtagaaataagccagatatggtggctcatgcctgtaa

SEQ ID NO: 24215 - DNA, 40 bp, Homo sapiens
ttacaggcatgagccaccatatctggcttatttctactaa

SEQ ID NO: 24216 - DNA, 40 bp, Homo sapiens
tagtagaaataagccagatatggtggctcatgcctgtaat

SEQ ID NO: 24217 - DNA, 40 bp, Homo sapiens
attacaggcatgagccaccatatctggcttatttctacta

SEQ ID NO: 24218 - DNA, 40 bp, Homo sapiens
agtagaaataagccagatatggtggctcatgcctgtaatc

SEQ ID NO: 24219 - DNA, 40 bp, Homo sapiens
gattacaggcatgagccaccatatctggcttatttctact

SEQ ID NO: 24220 - DNA, 40 bp, Homo sapiens
gtagaaataagccagatatggtggctcatgcctgtaatct

SEQ ID NO: 24221 - DNA, 40 bp, Homo sapiens
agattacaggcatgagccaccatatctggcttatttctac

SEQ ID NO: 24222 - DNA, 40 bp, Homo sapiens
tagaaataagccagatatggtggctcatgcctgtaatctt

SEQ ID NO: 24223 - DNA, 40 bp, Homo sapiens
aagattacaggcatgagccaccatatctggcttatttcta

SEQ ID NO: 24224 - DNA, 40 bp, Homo sapiens
agaaataagccagatatggtggctcatgcctgtaatctta

SEQ ID NO: 24225 - DNA, 40 bp, Homo sapiens
taagattacaggcatgagccaccatatctggcttatttct

SEQ ID NO: 24226 - DNA, 40 bp, Homo sapiens
gaaataagccagatatggtggctcatgcctgtaatcttag

SEQ ID NO: 24227 - DNA, 40 bp, Homo sapiens
ctaagattacaggcatgagccaccatatctggcttatttc

SEQ ID NO: 24228 - DNA, 40 bp, Homo sapiens
aaataagccagatatggtggctcatgcctgtaatcttagc

SEQ ID NO: 24229 - DNA, 40 bp, Homo sapiens
gctaagattacaggcatgagccaccatatctggcttattt

SEQ ID NO: 24230 - DNA, 40 bp, Homo sapiens
aataagccagatatggtggctcatgcctgtaatcttagca

SEQ ID NO: 24231 - DNA, 40 bp, Homo sapiens
tgctaagattacaggcatgagccaccatatctggcttatt

SEQ ID NO: 24232 - DNA, 40 bp, Homo sapiens
ataagccagatatggtggctcatgcctgtaatcttagcac

SEQ ID NO: 24233 - DNA, 40 bp, Homo sapiens
gtgctaagattacaggcatgagccaccatatctggcttat

SEQ ID NO: 24234 - DNA, 40 bp, Homo sapiens
taagccagatatggtggctcatgcctgtaatcttagcact

SEQ ID NO: 24235 - DNA, 40 bp, Homo sapiens
agtgctaagattacaggcatgagccaccatatctggctta

SEQ ID NO: 24236 - DNA, 40 bp, Homo sapiens
aagccagatatggtggctcatgcctgtaatcttagcactt

SEQ ID NO: 24237 - DNA, 40 bp, Homo sapiens
aagtgctaagattacaggcatgagccaccatatctggctt

SEQ ID NO: 24238 - DNA, 40 bp, Homo sapiens
agccagatatggtggctcatgcctgtaatcttagcacttt

SEQ ID NO: 24239 - DNA, 40 bp, Homo sapiens
aaagtgctaagattacaggcatgagccaccatatctggct

SEQ ID NO: 24240 - DNA, 40 bp, Homo sapiens
gccagatatggtggctcatgcctgtaatcttagcactttg

SEQ ID NO: 24241 - DNA, 40 bp, Homo sapiens
caaagtgctaagattacaggcatgagccaccatatctggc

SEQ ID NO: 24242 - DNA, 40 bp, Homo sapiens
ccagatatggtggctcatgcctgtaatcttagcactttgg

SEQ ID NO: 24243 - DNA, 40 bp, Homo sapiens
ccaaagtgctaagattacaggcatgagccaccatatctgg

SEQ ID NO: 24244 - DNA, 40 bp, Homo sapiens
cagatatggtggctcatgcctgtaatcttagcactttggg

SEQ ID NO: 24245 - DNA, 40 bp, Homo sapiens
cccaaagtgctaagattacaggcatgagccaccatatctg

SEQ ID NO: 24246 - DNA, 40 bp, Homo sapiens
agatatggtggctcatgcctgtaatcttagcactttggga

SEQ ID NO: 24247 - DNA, 40 bp, Homo sapiens
tcccaaagtgctaagattacaggcatgagccaccatatct

SEQ ID NO: 24248 - DNA, 40 bp, Homo sapiens
gatatggtggctcatgcctgtaatcttagcactttgggag

SEQ ID NO: 24249 - DNA, 40 bp, Homo sapiens
ctcccaaagtgctaagattacaggcatgagccaccatatc

SEQ ID NO: 24250 - DNA, 40 bp, Homo sapiens
atatggtggctcatgcctgtaatcttagcactttgggagg

SEQ ID NO: 24251 - DNA, 40 bp, Homo sapiens
cctcccaaagtgctaagattacaggcatgagccaccatat

SEQ ID NO: 24252 - DNA, 40 bp, Homo sapiens
tatggtggctcatgcctgtaatcttagcactttgggaggc

SEQ ID NO: 24253 - DNA, 40 bp, Homo sapiens
gcctcccaaagtgctaagattacaggcatgagccaccata

SEQ ID NO: 24254 - DNA, 40 bp, Homo sapiens
atggtggctcatgcctgtaatcttagcactttgggaggct

SEQ ID NO: 24255 - DNA, 40 bp, Homo sapiens
agcctcccaaagtgctaagattacaggcatgagccaccat

SEQ ID NO: 24256 - DNA, 40 bp, Homo sapiens
tggtggctcatgcctgtaatcttagcactttgggaggctg

SEQ ID NO: 24257 - DNA, 40 bp, Homo sapiens
cagcctcccaaagtgctaagattacaggcatgagccacca

SEQ ID NO: 24258 - DNA, 40 bp, Homo sapiens
ggtggctcatgcctgtaatcttagcactttgggaggctga

SEQ ID NO: 24259 - DNA, 40 bp, Homo sapiens
tcagcctcccaaagtgctaagattacaggcatgagccacc

SEQ ID NO: 24260 - DNA, 40 bp, Homo sapiens
gtggctcatgcctgtaatcttagcactttgggaggctgag

SEQ ID NO: 24261 - DNA, 40 bp, Homo sapiens
ctcagcctcccaaagtgctaagattacaggcatgagccac

SEQ ID NO: 24262 - DNA, 40 bp, Homo sapiens
tggctcatgcctgtaatcttagcactttgggaggctgagg

SEQ ID NO: 24263 - DNA, 40 bp, Homo sapiens
cctcagcctcccaaagtgctaagattacaggcatgagcca

SEQ ID NO: 24264 - DNA, 40 bp, Homo sapiens
ggctcatgcctgtaatcttagcactttgggaggctgaggc

SEQ ID NO: 24265 - DNA, 40 bp, Homo sapiens
gcctcagcctcccaaagtgctaagattacaggcatgagcc

SEQ ID NO: 24266 - DNA, 40 bp, Homo sapiens
gctcatgcctgtaatcttagcactttgggaggctgaggct

SEQ ID NO: 24267 - DNA, 40 bp, Homo sapiens
agcctcagcctcccaaagtgctaagattacaggcatgagc

SEQ ID NO: 24268 - DNA, 40 bp, Homo sapiens
ctcatgcctgtaatcttagcactttgggaggctgaggcta

SEQ ID NO: 24269 - DNA, 40 bp, Homo sapiens
tagcctcagcctcccaaagtgctaagattacaggcatgag

SEQ ID NO: 24270 - DNA, 40 bp, Homo sapiens
tcatgcctgtaatcttagcactttgggaggctgaggctat

SEQ ID NO: 24271 - DNA, 40 bp, Homo sapiens
atagcctcagcctcccaaagtgctaagattacaggcatga

SEQ ID NO: 24272 - DNA, 40 bp, Homo sapiens
catgcctgtaatcttagcactttgggaggctgaggctatt

SEQ ID NO: 24273 - DNA, 40 bp, Homo sapiens
aatagcctcagcctcccaaagtgctaagattacaggcatg

SEQ ID NO: 24274 - DNA, 40 bp, Homo sapiens
atgcctgtaatcttagcactttgggaggctgaggctattc

SEQ ID NO: 24275 - DNA, 40 bp, Homo sapiens
gaatagcctcagcctcccaaagtgctaagattacaggcat

SEQ ID NO: 24276 - DNA, 40 bp, Homo sapiens
tgcctgtaatcttagcactttgggaggctgaggctattcg

SEQ ID NO: 24277 - DNA, 40 bp, Homo sapiens
cgaatagcctcagcctcccaaagtgctaagattacaggca

SEQ ID NO: 24278 - DNA, 40 bp, Homo sapiens
gcctgtaatcttagcactttgggaggctgaggctattcgc

SEQ ID NO: 24279 - DNA, 40 bp, Homo sapiens
gcgaatagcctcagcctcccaaagtgctaagattacaggc

SEQ ID NO: 24280 - DNA, 40 bp, Homo sapiens
cctgtaatcttagcactttgggaggctgaggctattcgct

SEQ ID NO: 24281 - DNA, 40 bp, Homo sapiens
agcgaatagcctcagcctcccaaagtgctaagattacagg

SEQ ID NO: 24282 - DNA, 40 bp, Homo sapiens
ctgtaatcttagcactttgggaggctgaggctattcgctg

SEQ ID NO: 24283 - DNA, 40 bp, Homo sapiens
cagcgaatagcctcagcctcccaaagtgctaagattacag

SEQ ID NO: 24284 - DNA, 40 bp, Homo sapiens
tgtaatcttagcactttgggaggctgaggctattcgctgt

SEQ ID NO: 24285 - DNA, 40 bp, Homo sapiens
acagcgaatagcctcagcctcccaaagtgctaagattaca

SEQ ID NO: 24286 - DNA, 40 bp, Homo sapiens
gtaatcttagcactttgggaggctgaggctattcgctgta

SEQ ID NO: 24287 - DNA, 40 bp, Homo sapiens
tacagcgaatagcctcagcctcccaaagtgctaagattac

SEQ ID NO: 24288 - DNA, 40 bp, Homo sapiens
taatcttagcactttgggaggctgaggctattcgctgtac

SEQ ID NO: 24289 - DNA, 40 bp, Homo sapiens
gtacagcgaatagcctcagcctcccaaagtgctaagatta

SEQ ID NO: 24290 - DNA, 40 bp, Homo sapiens
aatcttagcactttgggaggctgaggctattcgctgtact

SEQ ID NO: 24291 - DNA, 40 bp, Homo sapiens
agtacagcgaatagcctcagcctcccaaagtgctaagatt

SEQ ID NO: 24292 - DNA, 40 bp, Homo sapiens
atcttagcactttgggaggctgaggctattcgctgtacta

SEQ ID NO: 24293 - DNA, 40 bp, Homo sapiens
tagtacagcgaatagcctcagcctcccaaagtgctaagat

SEQ ID NO: 24294 - DNA, 40 bp, Homo sapiens
tcttagcactttgggaggctgaggctattcgctgtactat

SEQ ID NO: 24295 - DNA, 40 bp, Homo sapiens
atagtacagcgaatagcctcagcctcccaaagtgctaaga

SEQ ID NO: 24296 - DNA, 40 bp, Homo sapiens
cttagcactttgggaggctgaggctattcgctgtactatt

SEQ ID NO: 24297 - DNA, 40 bp, Homo sapiens
aatagtacagcgaatagcctcagcctcccaaagtgctaag

SEQ ID NO: 24298 - DNA, 40 bp, Homo sapiens
ttagcactttgggaggctgaggctattcgctgtactattt

SEQ ID NO: 24299 - DNA, 40 bp, Homo sapiens
aaatagtacagcgaatagcctcagcctcccaaagtgctaa

SEQ ID NO: 24300 - DNA, 40 bp, Homo sapiens
tagcactttgggaggctgaggctattcgctgtactatttt

SEQ ID NO: 24301 - DNA, 40 bp, Homo sapiens
aaaatagtacagcgaatagcctcagcctcccaaagtgcta

SEQ ID NO: 24302 - DNA, 40 bp, Homo sapiens
agcactttgggaggctgaggctattcgctgtactattttt

SEQ ID NO: 24303 - DNA, 40 bp, Homo sapiens
aaaaatagtacagcgaatagcctcagcctcccaaagtgct

SEQ ID NO: 24304 - DNA, 40 bp, Homo sapiens
gcactttgggaggctgaggctattcgctgtactatttttt

SEQ ID NO: 24305 - DNA, 40 bp, Homo sapiens
aaaaaatagtacagcgaatagcctcagcctcccaaagtgc

SEQ ID NO: 24306 - DNA, 40 bp, Homo sapiens
cactttgggaggctgaggctattcgctgtactatttttta

SEQ ID NO: 24307 - DNA, 40 bp, Homo sapiens
taaaaaatagtacagcgaatagcctcagcctcccaaagtg

SEQ ID NO: 24308 - DNA, 40 bp, Homo sapiens
actttgggaggctgaggctattcgctgtactattttttac

SEQ ID NO: 24309 - DNA, 40 bp, Homo sapiens
gtaaaaaatagtacagcgaatagcctcagcctcccaaagt

SEQ ID NO: 24310 - DNA, 40 bp, Homo sapiens
ctttgggaggctgaggctattcgctgtactattttttact

SEQ ID NO: 24311 - DNA, 40 bp, Homo sapiens
agtaaaaaatagtacagcgaatagcctcagcctcccaaag

SEQ ID NO: 24312 - DNA, 40 bp, Homo sapiens
tttgggaggctgaggctattcgctgtactattttttacta

SEQ ID NO: 24313 - DNA, 40 bp, Homo sapiens
tagtaaaaaatagtacagcgaatagcctcagcctcccaaa

SEQ ID NO: 24314 - DNA, 40 bp, Homo sapiens
ttgggaggctgaggctattcgctgtactattttttactac

SEQ ID NO: 24315 - DNA, 40 bp, Homo sapiens
gtagtaaaaaatagtacagcgaatagcctcagcctcccaa

SEQ ID NO: 24316 - DNA, 40 bp, Homo sapiens
tgggaggctgaggctattcgctgtactattttttactact

SEQ ID NO: 24317 - DNA, 40 bp, Homo sapiens
agtagtaaaaaatagtacagcgaatagcctcagcctccca

SEQ ID NO: 24318 - DNA, 40 bp, Homo sapiens
gggaggctgaggctattcgctgtactattttttactactt

SEQ ID NO: 24319 - DNA, 40 bp, Homo sapiens
aagtagtaaaaaatagtacagcgaatagcctcagcctccc

SEQ ID NO: 24320 - DNA, 40 bp, Homo sapiens
ggaggctgaggctattcgctgtactattttttactacttt

SEQ ID NO: 24321 - DNA, 40 bp, Homo sapiens
aaagtagtaaaaaatagtacagcgaatagcctcagcctcc

SEQ ID NO: 24322 - DNA, 40 bp, Homo sapiens
gaggctgaggctattcgctgtactattttttactactttt

SEQ ID NO: 24323 - DNA, 40 bp, Homo sapiens
aaaagtagtaaaaaatagtacagcgaatagcctcagcctc

SEQ ID NO: 24324 - DNA, 40 bp, Homo sapiens
aggctgaggctattcgctgtactattttttactacttttc

SEQ ID NO: 24325 - DNA, 40 bp, Homo sapiens
gaaaagtagtaaaaaatagtacagcgaatagcctcagcct

SEQ ID NO: 24326 - DNA, 40 bp, Homo sapiens
ggctgaggctattcgctgtactattttttactacttttct

SEQ ID NO: 24327 - DNA, 40 bp, Homo sapiens
agaaaagtagtaaaaaatagtacagcgaatagcctcagcc

SEQ ID NO: 24328 - DNA, 40 bp, Homo sapiens
gctgaggctattcgctgtactattttttactacttttcta

SEQ ID NO: 24329 - DNA, 40 bp, Homo sapiens
tagaaaagtagtaaaaaatagtacagcgaatagcctcagc

SEQ ID NO: 24330 - DNA, 40 bp, Homo sapiens
ctgaggctattcgctgtactattttttactacttttctat

SEQ ID NO: 24331 - DNA, 40 bp, Homo sapiens
atagaaaagtagtaaaaaatagtacagcgaatagcctcag

SEQ ID NO: 24332 - DNA, 40 bp, Homo sapiens
tgaggctattcgctgtactattttttactacttttctata

SEQ ID NO: 24333 - DNA, 40 bp, Homo sapiens
tatagaaaagtagtaaaaaatagtacagcgaatagcctca

SEQ ID NO: 24334 - DNA, 40 bp, Homo sapiens
gaggctattcgctgtactattttttactacttttctatag

SEQ ID NO: 24335 - DNA, 40 bp, Homo sapiens
ctatagaaaagtagtaaaaaatagtacagcgaatagcctc

SEQ ID NO: 24336 - DNA, 40 bp, Homo sapiens
aggctattcgctgtactattttttactacttttctatagg

SEQ ID NO: 24337 - DNA, 40 bp, Homo sapiens
cctatagaaaagtagtaaaaaatagtacagcgaatagcct

SEQ ID NO: 24338 - DNA, 40 bp, Homo sapiens
ggctattcgctgtactattttttactacttttctataggt

SEQ ID NO: 24339 - DNA, 40 bp, Homo sapiens
acctatagaaaagtagtaaaaaatagtacagcgaatagcc

SEQ ID NO: 24340 - DNA, 40 bp, Homo sapiens
gctattcgctgtactattttttactacttttctataggtt

SEQ ID NO: 24341 - DNA, 40 bp, Homo sapiens
aacctatagaaaagtagtaaaaaatagtacagcgaatagc

SEQ ID NO: 24342 - DNA, 40 bp, Homo sapiens
ctattcgctgtactattttttactacttttctataggttt

SEQ ID NO: 24343 - DNA, 40 bp, Homo sapiens
aaacctatagaaaagtagtaaaaaatagtacagcgaatag

SEQ ID NO: 24344 - DNA, 40 bp, Homo sapiens
tattcgctgtactattttttactacttttctataggtttg

SEQ ID NO: 24345 - DNA, 40 bp, Homo sapiens
caaacctatagaaaagtagtaaaaaatagtacagcgaata

SEQ ID NO: 24346 - DNA, 40 bp, Homo sapiens
attcgctgtactattttttactacttttctataggtttga

SEQ ID NO: 24347 - DNA, 40 bp, Homo sapiens
tcaaacctatagaaaagtagtaaaaaatagtacagcgaat

SEQ ID NO: 24348 - DNA, 40 bp, Homo sapiens
ttcgctgtactattttttactacttttctataggtttgaa

SEQ ID NO: 24349 - DNA, 40 bp, Homo sapiens
ttcaaacctatagaaaagtagtaaaaaatagtacagcgaa

SEQ ID NO: 24350 - DNA, 40 bp, Homo sapiens
tcgctgtactattttttactacttttctataggtttgaaa

SEQ ID NO: 24351 - DNA, 40 bp, Homo sapiens
tttcaaacctatagaaaagtagtaaaaaatagtacagcga

SEQ ID NO: 24352 - DNA, 40 bp, Homo sapiens
cgctgtactattttttactacttttctataggtttgaaat

SEQ ID NO: 24353 - DNA, 40 bp, Homo sapiens
atttcaaacctatagaaaagtagtaaaaaatagtacagcg

SEQ ID NO: 24354 - DNA, 40 bp, Homo sapiens
gctgtactattttttactacttttctataggtttgaaatt

SEQ ID NO: 24355 - DNA, 40 bp, Homo sapiens
aatttcaaacctatagaaaagtagtaaaaaatagtacagc

SEQ ID NO: 24356 - DNA, 40 bp, Homo sapiens
ctgtactattttttactacttttctataggtttgaaattt

SEQ ID NO: 24357 - DNA, 40 bp, Homo sapiens
aaatttcaaacctatagaaaagtagtaaaaaatagtacag

SEQ ID NO: 24358 - DNA, 40 bp, Homo sapiens
tgtactattttttactacttttctataggtttgaaatttt

SEQ ID NO: 24359 - DNA, 40 bp, Homo sapiens
aaaatttcaaacctatagaaaagtagtaaaaaatagtaca

SEQ ID NO: 24360 - DNA, 40 bp, Homo sapiens
gtactattttttactacttttctataggtttgaaattttt

SEQ ID NO: 24361 - DNA, 40 bp, Homo sapiens
aaaaatttcaaacctatagaaaagtagtaaaaaatagtac

SEQ ID NO: 24362 - DNA, 40 bp, Homo sapiens
tactattttttactacttttctataggtttgaaatttttt

SEQ ID NO: 24363 - DNA, 40 bp, Homo sapiens
aaaaaatttcaaacctatagaaaagtagtaaaaaatagta

SEQ ID NO: 24364 - DNA, 40 bp, Homo sapiens
actattttttactacttttctataggtttgaaattttttc

SEQ ID NO: 24365 - DNA, 40 bp, Homo sapiens
gaaaaaatttcaaacctatagaaaagtagtaaaaaatagt

SEQ ID NO: 24366 - DNA, 40 bp, Homo sapiens
ctattttttactacttttctataggtttgaaattttttca

SEQ ID NO: 24367 - DNA, 40 bp, Homo sapiens
tgaaaaaatttcaaacctatagaaaagtagtaaaaaatag

SEQ ID NO: 24368 - DNA, 40 bp, Homo sapiens
tattttttactacttttctataggtttgaaattttttcaa

SEQ ID NO: 24369 - DNA, 40 bp, Homo sapiens
ttgaaaaaatttcaaacctatagaaaagtagtaaaaaata

SEQ ID NO: 24370 - DNA, 40 bp, Homo sapiens
attttttactacttttctataggtttgaaattttttcaaa

SEQ ID NO: 24371 - DNA, 40 bp, Homo sapiens
tttgaaaaaatttcaaacctatagaaaagtagtaaaaaat

SEQ ID NO: 24372 - DNA, 40 bp, Homo sapiens
ttttttactacttttctataggtttgaaattttttcaaaa

SEQ ID NO: 24373 - DNA, 40 bp, Homo sapiens
ttttgaaaaaatttcaaacctatagaaaagtagtaaaaaa

SEQ ID NO: 24374 - DNA, 40 bp, Homo sapiens
tttttactacttttctataggtttgaaattttttcaaaat

SEQ ID NO: 24375 - DNA, 40 bp, Homo sapiens
attttgaaaaaatttcaaacctatagaaaagtagtaaaaa

SEQ ID NO: 24376 - DNA, 40 bp, Homo sapiens
ttttactacttttctataggtttgaaattttttcaaaata

SEQ ID NO: 24377 - DNA, 40 bp, Homo sapiens
tattttgaaaaaatttcaaacctatagaaaagtagtaaaa

SEQ ID NO: 24378 - DNA, 40 bp, Homo sapiens
tttactacttttctataggtttgaaattttttcaaaataa

SEQ ID NO: 24379 - DNA, 40 bp, Homo sapiens
ttattttgaaaaaatttcaaacctatagaaaagtagtaaa

SEQ ID NO: 24380 - DNA, 40 bp, Homo sapiens
ttactacttttctataggtttgaaattttttcaaaataaa

SEQ ID NO: 24381 - DNA, 40 bp, Homo sapiens
tttattttgaaaaaatttcaaacctatagaaaagtagtaa

SEQ ID NO: 24382 - DNA, 40 bp, Homo sapiens
tactacttttctataggtttgaaattttttcaaaataaaa

SEQ ID NO: 24383 - DNA, 40 bp, Homo sapiens
ttttattttgaaaaaatttcaaacctatagaaaagtagta

SEQ ID NO: 24384 - DNA, 40 bp, Homo sapiens
actacttttctataggtttgaaattttttcaaaataaaac

SEQ ID NO: 24385 - DNA, 40 bp, Homo sapiens
gttttattttgaaaaaatttcaaacctatagaaaagtagt

SEQ ID NO: 24386 - DNA, 40 bp, Homo sapiens
ctacttttctataggtttgaaattttttcaaaataaaaca

SEQ ID NO: 24387 - DNA, 40 bp, Homo sapiens
tgttttattttgaaaaaatttcaaacctatagaaaagtag

SEQ ID NO: 24388 - DNA, 40 bp, Homo sapiens
tacttttctataggtttgaaattttttcaaaataaaacat

SEQ ID NO: 24389 - DNA, 40 bp, Homo sapiens
atgttttattttgaaaaaatttcaaacctatagaaaagta

SEQ ID NO: 24390 - DNA, 40 bp, Homo sapiens
acttttctataggtttgaaattttttcaaaataaaacatt

SEQ ID NO: 24391 - DNA, 40 bp, Homo sapiens
aatgttttattttgaaaaaatttcaaacctatagaaaagt

SEQ ID NO: 24392 - DNA, 40 bp, Homo sapiens
cttttctataggtttgaaattttttcaaaataaaacattg

SEQ ID NO: 24393 - DNA, 40 bp, Homo sapiens
caatgttttattttgaaaaaatttcaaacctatagaaaag

SEQ ID NO: 24394 - DNA, 40 bp, Homo sapiens
ttttctataggtttgaaattttttcaaaataaaacattga

SEQ ID NO: 24395 - DNA, 40 bp, Homo sapiens
tcaatgttttattttgaaaaaatttcaaacctatagaaaa

SEQ ID NO: 24396 - DNA, 40 bp, Homo sapiens
tttctataggtttgaaattttttcaaaataaaacattgaa

SEQ ID NO: 24397 - DNA, 40 bp, Homo sapiens
ttcaatgttttattttgaaaaaatttcaaacctatagaaa

SEQ ID NO: 24398 - DNA, 40 bp, Homo sapiens
ttctataggtttgaaattttttcaaaataaaacattgaaa

SEQ ID NO: 24399 - DNA, 40 bp, Homo sapiens
tttcaatgttttattttgaaaaaatttcaaacctatagaa

SEQ ID NO: 24400 - DNA, 40 bp, Homo sapiens
tctataggtttgaaattttttcaaaataaaacattgaaaa

SEQ ID NO: 24401 - DNA, 40 bp, Homo sapiens
ttttcaatgttttattttgaaaaaatttcaaacctataga

SEQ ID NO: 24402 - DNA, 40 bp, Homo sapiens
ctataggtttgaaattttttcaaaataaaacattgaaaaa

SEQ ID NO: 24403 - DNA, 40 bp, Homo sapiens
tttttcaatgttttattttgaaaaaatttcaaacctatag

SEQ ID NO: 24404 - DNA, 40 bp, Homo sapiens
tataggtttgaaattttttcaaaataaaacattgaaaaaa

SEQ ID NO: 24405 - DNA, 40 bp, Homo sapiens
ttttttcaatgttttattttgaaaaaatttcaaacctata

SEQ ID NO: 24406 - DNA, 40 bp, Homo sapiens
ataggtttgaaattttttcaaaataaaacattgaaaaaag

SEQ ID NO: 24407 - DNA, 40 bp, Homo sapiens
cttttttcaatgttttattttgaaaaaatttcaaacctat

SEQ ID NO: 24408 - DNA, 40 bp, Homo sapiens
taggtttgaaattttttcaaaataaaacattgaaaaaagt

SEQ ID NO: 24409 - DNA, 40 bp, Homo sapiens
acttttttcaatgttttattttgaaaaaatttcaaaccta

SEQ ID NO: 24410 - DNA, 40 bp, Homo sapiens
aggtttgaaattttttcaaaataaaacattgaaaaaagta

SEQ ID NO: 24411 - DNA, 40 bp, Homo sapiens
tacttttttcaatgttttattttgaaaaaatttcaaacct

SEQ ID NO: 24412 - DNA, 40 bp, Homo sapiens
ggtttgaaattttttcaaaataaaacattgaaaaaagtaa

SEQ ID NO: 24413 - DNA, 40 bp, Homo sapiens
ttacttttttcaatgttttattttgaaaaaatttcaaacc

SEQ ID NO: 24414 - DNA, 40 bp, Homo sapiens
gtttgaaattttttcaaaataaaacattgaaaaaagtaag

SEQ ID NO: 24415 - DNA, 40 bp, Homo sapiens
cttacttttttcaatgttttattttgaaaaaatttcaaac

SEQ ID NO: 24416 - DNA, 40 bp, Homo sapiens
tttgaaattttttcaaaataaaacattgaaaaaagtaagg

SEQ ID NO: 24417 - DNA, 40 bp, Homo sapiens
ccttacttttttcaatgttttattttgaaaaaatttcaaa

SEQ ID NO: 24418 - DNA, 40 bp, Homo sapiens
ttgaaattttttcaaaataaaacattgaaaaaagtaaggt

SEQ ID NO: 24419 - DNA, 40 bp, Homo sapiens
accttacttttttcaatgttttattttgaaaaaatttcaa

SEQ ID NO: 24420 - DNA, 40 bp, Homo sapiens
tgaaattttttcaaaataaaacattgaaaaaagtaaggta

SEQ ID NO: 24421 - DNA, 40 bp, Homo sapiens
taccttacttttttcaatgttttattttgaaaaaatttca

SEQ ID NO: 24422 - DNA, 40 bp, Homo sapiens
gaaattttttcaaaataaaacattgaaaaaagtaaggtag

SEQ ID NO: 24423 - DNA, 40 bp, Homo sapiens
ctaccttacttttttcaatgttttattttgaaaaaatttc

SEQ ID NO: 24424 - DNA, 40 bp, Homo sapiens
aaattttttcaaaataaaacattgaaaaaagtaaggtagg

SEQ ID NO: 24425 - DNA, 40 bp, Homo sapiens
cctaccttacttttttcaatgttttattttgaaaaaattt

SEQ ID NO: 24426 - DNA, 40 bp, Homo sapiens
aattttttcaaaataaaacattgaaaaaagtaaggtaggt

SEQ ID NO: 24427 - DNA, 40 bp, Homo sapiens
acctaccttacttttttcaatgttttattttgaaaaaatt

SEQ ID NO: 24428 - DNA, 40 bp, Homo sapiens
attttttcaaaataaaacattgaaaaaagtaaggtaggta

SEQ ID NO: 24429 - DNA, 40 bp, Homo sapiens
tacctaccttacttttttcaatgttttattttgaaaaaat

SEQ ID NO: 24430 - DNA, 40 bp, Homo sapiens
ttttttcaaaataaaacattgaaaaaagtaaggtaggtag

SEQ ID NO: 24431 - DNA, 40 bp, Homo sapiens
ctacctaccttacttttttcaatgttttattttgaaaaaa

SEQ ID NO: 24432 - DNA, 40 bp, Homo sapiens
tttttcaaaataaaacattgaaaaaagtaaggtaggtagt

SEQ ID NO: 24433 - DNA, 40 bp, Homo sapiens
actacctaccttacttttttcaatgttttattttgaaaaa

SEQ ID NO: 24434 - DNA, 40 bp, Homo sapiens
ttttcaaaataaaacattgaaaaaagtaaggtaggtagtg

SEQ ID NO: 24435 - DNA, 40 bp, Homo sapiens
cactacctaccttacttttttcaatgttttattttgaaaa

SEQ ID NO: 24436 - DNA, 40 bp, Homo sapiens
tttcaaaataaaacattgaaaaaagtaaggtaggtagtgt

SEQ ID NO: 24437 - DNA, 40 bp, Homo sapiens
acactacctaccttacttttttcaatgttttattttgaaa

SEQ ID NO: 24438 - DNA, 40 bp, Homo sapiens
ttcaaaataaaacattgaaaaaagtaaggtaggtagtgtg

SEQ ID NO: 24439 - DNA, 40 bp, Homo sapiens
cacactacctaccttacttttttcaatgttttattttgaa

SEQ ID NO: 24440 - DNA, 40 bp, Homo sapiens
tcaaaataaaacattgaaaaaagtaaggtaggtagtgtgt

SEQ ID NO: 24441 - DNA, 40 bp, Homo sapiens
acacactacctaccttacttttttcaatgttttattttga

SEQ ID NO: 24442 - DNA, 40 bp, Homo sapiens
caaaataaaacattgaaaaaagtaaggtaggtagtgtgtc

SEQ ID NO: 24443 - DNA, 40 bp, Homo sapiens
gacacactacctaccttacttttttcaatgttttattttg

SEQ ID NO: 24444 - DNA, 40 bp, Homo sapiens
aaaataaaacattgaaaaaagtaaggtaggtagtgtgtcc

SEQ ID NO: 24445 - DNA, 40 bp, Homo sapiens
ggacacactacctaccttacttttttcaatgttttatttt

SEQ ID NO: 24446 - DNA, 40 bp, Homo sapiens
aaataaaacattgaaaaaagtaaggtaggtagtgtgtccc

SEQ ID NO: 24447 - DNA, 40 bp, Homo sapiens
gggacacactacctaccttacttttttcaatgttttattt

SEQ ID NO: 24448 - DNA, 40 bp, Homo sapiens
aataaaacattgaaaaaagtaaggtaggtagtgtgtccct

SEQ ID NO: 24449 - DNA, 40 bp, Homo sapiens
agggacacactacctaccttacttttttcaatgttttatt

SEQ ID NO: 24450 - DNA, 40 bp, Homo sapiens
ataaaacattgaaaaaagtaaggtaggtagtgtgtccctc

SEQ ID NO: 24451 - DNA, 40 bp, Homo sapiens
gagggacacactacctaccttacttttttcaatgttttat

SEQ ID NO: 24452 - DNA, 40 bp, Homo sapiens
taaaacattgaaaaaagtaaggtaggtagtgtgtccctcc

SEQ ID NO: 24453 - DNA, 40 bp, Homo sapiens
ggagggacacactacctaccttacttttttcaatgtttta

SEQ ID NO: 24454 - DNA, 40 bp, Homo sapiens
aaaacattgaaaaaagtaaggtaggtagtgtgtccctcct

SEQ ID NO: 24455 - DNA, 40 bp, Homo sapiens
aggagggacacactacctaccttacttttttcaatgtttt

SEQ ID NO: 24456 - DNA, 40 bp, Homo sapiens
aaacattgaaaaaagtaaggtaggtagtgtgtccctcctt

SEQ ID NO: 24457 - DNA, 40 bp, Homo sapiens
aaggagggacacactacctaccttacttttttcaatgttt

SEQ ID NO: 24458 - DNA, 40 bp, Homo sapiens
aacattgaaaaaagtaaggtaggtagtgtgtccctcctta

SEQ ID NO: 24459 - DNA, 40 bp, Homo sapiens
taaggagggacacactacctaccttacttttttcaatgtt

SEQ ID NO: 24460 - DNA, 40 bp, Homo sapiens
acattgaaaaaagtaaggtaggtagtgtgtccctccttaa

SEQ ID NO: 24461 - DNA, 40 bp, Homo sapiens
ttaaggagggacacactacctaccttacttttttcaatgt

SEQ ID NO: 24462 - DNA, 40 bp, Homo sapiens
cattgaaaaaagtaaggtaggtagtgtgtccctccttaat

SEQ ID NO: 24463 - DNA, 40 bp, Homo sapiens
attaaggagggacacactacctaccttacttttttcaatg

SEQ ID NO: 24464 - DNA, 40 bp, Homo sapiens
attgaaaaaagtaaggtaggtagtgtgtccctccttaatc

SEQ ID NO: 24465 - DNA, 40 bp, Homo sapiens
gattaaggagggacacactacctaccttacttttttcaat

SEQ ID NO: 24466 - DNA, 40 bp, Homo sapiens
ttgaaaaaagtaaggtaggtagtgtgtccctccttaatcc

SEQ ID NO: 24467 - DNA, 40 bp, Homo sapiens
ggattaaggagggacacactacctaccttacttttttcaa

SEQ ID NO: 24468 - DNA, 40 bp, Homo sapiens
tgaaaaaagtaaggtaggtagtgtgtccctccttaatcct

SEQ ID NO: 24469 - DNA, 40 bp, Homo sapiens
aggattaaggagggacacactacctaccttacttttttca

SEQ ID NO: 24470 - DNA, 40 bp, Homo sapiens
gaaaaaagtaaggtaggtagtgtgtccctccttaatcctt

SEQ ID NO: 24471 - DNA, 40 bp, Homo sapiens
aaggattaaggagggacacactacctaccttacttttttc

SEQ ID NO: 24472 - DNA, 40 bp, Homo sapiens
aaaaaagtaaggtaggtagtgtgtccctccttaatccttt

SEQ ID NO: 24473 - DNA, 40 bp, Homo sapiens
aaaggattaaggagggacacactacctaccttactttttt

SEQ ID NO: 24474 - DNA, 40 bp, Homo sapiens
aaaaagtaaggtaggtagtgtgtccctccttaatcctttc

SEQ ID NO: 24475 - DNA, 40 bp, Homo sapiens
gaaaggattaaggagggacacactacctaccttacttttt

SEQ ID NO: 24476 - DNA, 40 bp, Homo sapiens
aaaagtaaggtaggtagtgtgtccctccttaatcctttca

SEQ ID NO: 24477 - DNA, 40 bp, Homo sapiens
tgaaaggattaaggagggacacactacctaccttactttt

SEQ ID NO: 24478 - DNA, 40 bp, Homo sapiens
aaagtaaggtaggtagtgtgtccctccttaatcctttcaa

SEQ ID NO: 24479 - DNA, 40 bp, Homo sapiens
ttgaaaggattaaggagggacacactacctaccttacttt

SEQ ID NO: 24480 - DNA, 40 bp, Homo sapiens
aagtaaggtaggtagtgtgtccctccttaatcctttcaaa

SEQ ID NO: 24481 - DNA, 40 bp, Homo sapiens
tttgaaaggattaaggagggacacactacctaccttactt

SEQ ID NO: 24482 - DNA, 40 bp, Homo sapiens
agtaaggtaggtagtgtgtccctccttaatcctttcaaat

SEQ ID NO: 24483 - DNA, 40 bp, Homo sapiens
atttgaaaggattaaggagggacacactacctaccttact

SEQ ID NO: 24484 - DNA, 40 bp, Homo sapiens
gtaaggtaggtagtgtgtccctccttaatcctttcaaata

SEQ ID NO: 24485 - DNA, 40 bp, Homo sapiens
tatttgaaaggattaaggagggacacactacctaccttac

SEQ ID NO: 24486 - DNA, 40 bp, Homo sapiens
taaggtaggtagtgtgtccctccttaatcctttcaaatat

SEQ ID NO: 24487 - DNA, 40 bp, Homo sapiens
atatttgaaaggattaaggagggacacactacctacctta

SEQ ID NO: 24488 - DNA, 40 bp, Homo sapiens
aaggtaggtagtgtgtccctccttaatcctttcaaatatt

SEQ ID NO: 24489 - DNA, 40 bp, Homo sapiens
aatatttgaaaggattaaggagggacacactacctacctt

SEQ ID NO: 24490 - DNA, 40 bp, Homo sapiens
aggtaggtagtgtgtccctccttaatcctttcaaatattt

SEQ ID NO: 24491 - DNA, 40 bp, Homo sapiens
aaatatttgaaaggattaaggagggacacactacctacct

SEQ ID NO: 24492 - DNA, 40 bp, Homo sapiens
ggtaggtagtgtgtccctccttaatcctttcaaatatttt

SEQ ID NO: 24493 - DNA, 40 bp, Homo sapiens
aaaatatttgaaaggattaaggagggacacactacctacc

SEQ ID NO: 24494 - DNA, 40 bp, Homo sapiens
gtaggtagtgtgtccctccttaatcctttcaaatatttta

SEQ ID NO: 24495 - DNA, 40 bp, Homo sapiens
taaaatatttgaaaggattaaggagggacacactacctac

SEQ ID NO: 24496 - DNA, 40 bp, Homo sapiens
taggtagtgtgtccctccttaatcctttcaaatattttat

SEQ ID NO: 24497 - DNA, 40 bp, Homo sapiens
ataaaatatttgaaaggattaaggagggacacactaccta

SEQ ID NO: 24498 - DNA, 40 bp, Homo sapiens
aggtagtgtgtccctccttaatcctttcaaatattttatt

SEQ ID NO: 24499 - DNA, 40 bp, Homo sapiens
aataaaatatttgaaaggattaaggagggacacactacct

SEQ ID NO: 24500 - DNA, 40 bp, Homo sapiens
ggtagtgtgtccctccttaatcctttcaaatattttattt

SEQ ID NO: 24501 - DNA, 40 bp, Homo sapiens
aaataaaatatttgaaaggattaaggagggacacactacc

SEQ ID NO: 24502 - DNA, 40 bp, Homo sapiens
gtagtgtgtccctccttaatcctttcaaatattttatttt

SEQ ID NO: 24503 - DNA, 40 bp, Homo sapiens
aaaataaaatatttgaaaggattaaggagggacacactac

SEQ ID NO: 24504 - DNA, 40 bp, Homo sapiens
tagtgtgtccctccttaatcctttcaaatattttattttc

SEQ ID NO: 24505 - DNA, 40 bp, Homo sapiens
gaaaataaaatatttgaaaggattaaggagggacacacta

SEQ ID NO: 24506 - DNA, 40 bp, Homo sapiens
agtgtgtccctccttaatcctttcaaatattttattttca

SEQ ID NO: 24507 - DNA, 40 bp, Homo sapiens
tgaaaataaaatatttgaaaggattaaggagggacacact

SEQ ID NO: 24508 - DNA, 40 bp, Homo sapiens
gtgtgtccctccttaatcctttcaaatattttattttcac

SEQ ID NO: 24509 - DNA, 40 bp, Homo sapiens
gtgaaaataaaatatttgaaaggattaaggagggacacac

SEQ ID NO: 24510 - DNA, 40 bp, Homo sapiens
tgtgtccctccttaatcctttcaaatattttattttcact

SEQ ID NO: 24511 - DNA, 40 bp, Homo sapiens
agtgaaaataaaatatttgaaaggattaaggagggacaca

SEQ ID NO: 24512 - DNA, 40 bp, Homo sapiens
gtgtccctccttaatcctttcaaatattttattttcacta

SEQ ID NO: 24513 - DNA, 40 bp, Homo sapiens
tagtgaaaataaaatatttgaaaggattaaggagggacac

SEQ ID NO: 24514 - DNA, 40 bp, Homo sapiens
tgtccctccttaatcctttcaaatattttattttcactat

SEQ ID NO: 24515 - DNA, 40 bp, Homo sapiens
atagtgaaaataaaatatttgaaaggattaaggagggaca

SEQ ID NO: 24516 - DNA, 40 bp, Homo sapiens
gtccctccttaatcctttcaaatattttattttcactatt

SEQ ID NO: 24517 - DNA, 40 bp, Homo sapiens
aatagtgaaaataaaatatttgaaaggattaaggagggac

SEQ ID NO: 24518 - DNA, 40 bp, Homo sapiens
tccctccttaatcctttcaaatattttattttcactattt

SEQ ID NO: 24519 - DNA, 40 bp, Homo sapiens
aaatagtgaaaataaaatatttgaaaggattaaggaggga

SEQ ID NO: 24520 - DNA, 40 bp, Homo sapiens
ccctccttaatcctttcaaatattttattttcactatttc

SEQ ID NO: 24521 - DNA, 40 bp, Homo sapiens
gaaatagtgaaaataaaatatttgaaaggattaaggaggg

SEQ ID NO: 24522 - DNA, 40 bp, Homo sapiens
cctccttaatcctttcaaatattttattttcactatttct

SEQ ID NO: 24523 - DNA, 40 bp, Homo sapiens
agaaatagtgaaaataaaatatttgaaaggattaaggagg

SEQ ID NO: 24524 - DNA, 40 bp, Homo sapiens
ctccttaatcctttcaaatattttattttcactatttcta

SEQ ID NO: 24525 - DNA, 40 bp, Homo sapiens
tagaaatagtgaaaataaaatatttgaaaggattaaggag

SEQ ID NO: 24526 - DNA, 40 bp, Homo sapiens
tccttaatcctttcaaatattttattttcactatttctat

SEQ ID NO: 24527 - DNA, 40 bp, Homo sapiens
atagaaatagtgaaaataaaatatttgaaaggattaagga

SEQ ID NO: 24528 - DNA, 40 bp, Homo sapiens
ccttaatcctttcaaatattttattttcactatttctatt

SEQ ID NO: 24529 - DNA, 40 bp, Homo sapiens
aatagaaatagtgaaaataaaatatttgaaaggattaagg

SEQ ID NO: 24530 - DNA, 40 bp, Homo sapiens
cttaatcctttcaaatattttattttcactatttctatta

SEQ ID NO: 24531 - DNA, 40 bp, Homo sapiens
taatagaaatagtgaaaataaaatatttgaaaggattaag

SEQ ID NO: 24532 - DNA, 40 bp, Homo sapiens
ttaatcctttcaaatattttattttcactatttctattaa

SEQ ID NO: 24533 - DNA, 40 bp, Homo sapiens
ttaatagaaatagtgaaaataaaatatttgaaaggattaa

SEQ ID NO: 24534 - DNA, 40 bp, Homo sapiens
taatcctttcaaatattttattttcactatttctattaat

SEQ ID NO: 24535 - DNA, 40 bp, Homo sapiens
attaatagaaatagtgaaaataaaatatttgaaaggatta

SEQ ID NO: 24536 - DNA, 40 bp, Homo sapiens
aatcctttcaaatattttattttcactatttctattaatt

SEQ ID NO: 24537 - DNA, 40 bp, Homo sapiens
aattaatagaaatagtgaaaataaaatatttgaaaggatt

SEQ ID NO: 24538 - DNA, 40 bp, Homo sapiens
atcctttcaaatattttattttcactatttctattaattt

SEQ ID NO: 24539 - DNA, 40 bp, Homo sapiens
aaattaatagaaatagtgaaaataaaatatttgaaaggat

SEQ ID NO: 24540 - DNA, 40 bp, Homo sapiens
tcctttcaaatattttattttcactatttctattaatttt

SEQ ID NO: 24541 - DNA, 40 bp, Homo sapiens
aaaattaatagaaatagtgaaaataaaatatttgaaagga

SEQ ID NO: 24542 - DNA, 40 bp, Homo sapiens
cctttcaaatattttattttcactatttctattaattttt

SEQ ID NO: 24543 - DNA, 40 bp, Homo sapiens
aaaaattaatagaaatagtgaaaataaaatatttgaaagg

SEQ ID NO: 24544 - DNA, 40 bp, Homo sapiens
ctttcaaatattttattttcactatttctattaatttttt

SEQ ID NO: 24545 - DNA, 40 bp, Homo sapiens
aaaaaattaatagaaatagtgaaaataaaatatttgaaag

SEQ ID NO: 24546 - DNA, 40 bp, Homo sapiens
tttcaaatattttattttcactatttctattaattttttt

SEQ ID NO: 24547 - DNA, 40 bp, Homo sapiens
aaaaaaattaatagaaatagtgaaaataaaatatttgaaa

SEQ ID NO: 24548 - DNA, 40 bp, Homo sapiens
ttcaaatattttattttcactatttctattaatttttttt

SEQ ID NO: 24549 - DNA, 40 bp, Homo sapiens
aaaaaaaattaatagaaatagtgaaaataaaatatttgaa

SEQ ID NO: 24550 - DNA, 40 bp, Homo sapiens
tcaaatattttattttcactatttctattaattttttttt

SEQ ID NO: 24551 - DNA, 40 bp, Homo sapiens
aaaaaaaaattaatagaaatagtgaaaataaaatatttga

SEQ ID NO: 24552 - DNA, 40 bp, Homo sapiens
caaatattttattttcactatttctattaatttttttttt

SEQ ID NO: 24553 - DNA, 40 bp, Homo sapiens
aaaaaaaaaattaatagaaatagtgaaaataaaatatttg

SEQ ID NO: 24554 - DNA, 40 bp, Homo sapiens
aaatattttattttcactatttctattaattttttttttt

SEQ ID NO: 24555 - DNA, 40 bp, Homo sapiens
aaaaaaaaaaattaatagaaatagtgaaaataaaatattt

SEQ ID NO: 24556 - DNA, 40 bp, Homo sapiens
aatattttattttcactatttctattaatttttttttttg

SEQ ID NO: 24557 - DNA, 40 bp, Homo sapiens
caaaaaaaaaaattaatagaaatagtgaaaataaaatatt

SEQ ID NO: 24558 - DNA, 40 bp, Homo sapiens
atattttattttcactatttctattaatttttttttttgt

SEQ ID NO: 24559 - DNA, 40 bp, Homo sapiens
acaaaaaaaaaaattaatagaaatagtgaaaataaaatat

SEQ ID NO: 24560 - DNA, 40 bp, Homo sapiens
tattttattttcactatttctattaatttttttttttgtt

SEQ ID NO: 24561 - DNA, 40 bp, Homo sapiens
aacaaaaaaaaaaattaatagaaatagtgaaaataaaata

SEQ ID NO: 24562 - DNA, 40 bp, Homo sapiens
attttattttcactatttctattaatttttttttttgttt

SEQ ID NO: 24563 - DNA, 40 bp, Homo sapiens
aaacaaaaaaaaaaattaatagaaatagtgaaaataaaat

SEQ ID NO: 24564 - DNA, 40 bp, Homo sapiens
ttttattttcactatttctattaatttttttttttgtttt

SEQ ID NO: 24565 - DNA, 40 bp, Homo sapiens
aaaacaaaaaaaaaaattaatagaaatagtgaaaataaaa

SEQ ID NO: 24566 - DNA, 40 bp, Homo sapiens
tttattttcactatttctattaatttttttttttgttttt

SEQ ID NO: 24567 - DNA, 40 bp, Homo sapiens
aaaaacaaaaaaaaaaattaatagaaatagtgaaaataaa

SEQ ID NO: 24568 - DNA, 40 bp, Homo sapiens
ttattttcactatttctattaatttttttttttgtttttg

SEQ ID NO: 24569 - DNA, 40 bp, Homo sapiens
caaaaacaaaaaaaaaaattaatagaaatagtgaaaataa

SEQ ID NO: 24570 - DNA, 40 bp, Homo sapiens
tattttcactatttctattaatttttttttttgtttttga

SEQ ID NO: 24571 - DNA, 40 bp, Homo sapiens
tcaaaaacaaaaaaaaaaattaatagaaatagtgaaaata

SEQ ID NO: 24572 - DNA, 40 bp, Homo sapiens
attttcactatttctattaatttttttttttgtttttgag

SEQ ID NO: 24573 - DNA, 40 bp, Homo sapiens
ctcaaaaacaaaaaaaaaaattaatagaaatagtgaaaat

SEQ ID NO: 24574 - DNA, 40 bp, Homo sapiens
ttttcactatttctattaatttttttttttgtttttgaga

SEQ ID NO: 24575 - DNA, 40 bp, Homo sapiens
tctcaaaaacaaaaaaaaaaattaatagaaatagtgaaaa

SEQ ID NO: 24576 - DNA, 40 bp, Homo sapiens
tttcactatttctattaatttttttttttgtttttgagat

SEQ ID NO: 24577 - DNA, 40 bp, Homo sapiens
atctcaaaaacaaaaaaaaaaattaatagaaatagtgaaa

SEQ ID NO: 24578 - DNA, 40 bp, Homo sapiens
ttcactatttctattaatttttttttttgtttttgagatg

SEQ ID NO: 24579 - DNA, 40 bp, Homo sapiens
catctcaaaaacaaaaaaaaaaattaatagaaatagtgaa

SEQ ID NO: 24580 - DNA, 40 bp, Homo sapiens
tcactatttctattaatttttttttttgtttttgagatgg

SEQ ID NO: 24581 - DNA, 40 bp, Homo sapiens
ccatctcaaaaacaaaaaaaaaaattaatagaaatagtga

SEQ ID NO: 24582 - DNA, 40 bp, Homo sapiens
cactatttctattaatttttttttttgtttttgagatgga

SEQ ID NO: 24583 - DNA, 40 bp, Homo sapiens
tccatctcaaaaacaaaaaaaaaaattaatagaaatagtg

SEQ ID NO: 24584 - DNA, 40 bp, Homo sapiens
actatttctattaatttttttttttgtttttgagatggag

SEQ ID NO: 24585 - DNA, 40 bp, Homo sapiens
ctccatctcaaaaacaaaaaaaaaaattaatagaaatagt

SEQ ID NO: 24586 - DNA, 40 bp, Homo sapiens
ctatttctattaatttttttttttgtttttgagatggagt

SEQ ID NO: 24587 - DNA, 40 bp, Homo sapiens
actccatctcaaaaacaaaaaaaaaaattaatagaaatag

SEQ ID NO: 24588 - DNA, 40 bp, Homo sapiens
tatttctattaatttttttttttgtttttgagatggagtc

SEQ ID NO: 24589 - DNA, 40 bp, Homo sapiens
gactccatctcaaaaacaaaaaaaaaaattaatagaaata

SEQ ID NO: 24590 - DNA, 40 bp, Homo sapiens
atttctattaatttttttttttgtttttgagatggagtct

SEQ ID NO: 24591 - DNA, 40 bp, Homo sapiens
agactccatctcaaaaacaaaaaaaaaaattaatagaaat

SEQ ID NO: 24592 - DNA, 40 bp, Homo sapiens
tttctattaatttttttttttgtttttgagatggagtctc

SEQ ID NO: 24593 - DNA, 40 bp, Homo sapiens
gagactccatctcaaaaacaaaaaaaaaaattaatagaaa

SEQ ID NO: 24594 - DNA, 40 bp, Homo sapiens
ttctattaatttttttttttgtttttgagatggagtctcg

SEQ ID NO: 24595 - DNA, 40 bp, Homo sapiens
cgagactccatctcaaaaacaaaaaaaaaaattaatagaa

SEQ ID NO: 24596 - DNA, 40 bp, Homo sapiens
tctattaatttttttttttgtttttgagatggagtctcgc

SEQ ID NO: 24597 - DNA, 40 bp, Homo sapiens
gcgagactccatctcaaaaacaaaaaaaaaaattaataga

SEQ ID NO: 24598 - DNA, 40 bp, Homo sapiens
ctattaatttttttttttgtttttgagatggagtctcgct

SEQ ID NO: 24599 - DNA, 40 bp, Homo sapiens
agcgagactccatctcaaaaacaaaaaaaaaaattaatag

SEQ ID NO: 24600 - DNA, 40 bp, Homo sapiens
tattaatttttttttttgtttttgagatggagtctcgctc

SEQ ID NO: 24601 - DNA, 40 bp, Homo sapiens
gagcgagactccatctcaaaaacaaaaaaaaaaattaata

SEQ ID NO: 24602 - DNA, 40 bp, Homo sapiens
attaatttttttttttgtttttgagatggagtctcgctct

SEQ ID NO: 24603 - DNA, 40 bp, Homo sapiens
agagcgagactccatctcaaaaacaaaaaaaaaaattaat

SEQ ID NO: 24604 - DNA, 40 bp, Homo sapiens
ttaatttttttttttgtttttgagatggagtctcgctctg

SEQ ID NO: 24605 - DNA, 40 bp, Homo sapiens
cagagcgagactccatctcaaaaacaaaaaaaaaaattaa

SEQ ID NO: 24606 - DNA, 40 bp, Homo sapiens
taatttttttttttgtttttgagatggagtctcgctctgt

SEQ ID NO: 24607 - DNA, 40 bp, Homo sapiens
acagagcgagactccatctcaaaaacaaaaaaaaaaatta

SEQ ID NO: 24608 - DNA, 40 bp, Homo sapiens
aatttttttttttgtttttgagatggagtctcgctctgtt

SEQ ID NO: 24609 - DNA, 40 bp, Homo sapiens
aacagagcgagactccatctcaaaaacaaaaaaaaaaatt

SEQ ID NO: 24610 - DNA, 40 bp, Homo sapiens
atttttttttttgtttttgagatggagtctcgctctgttg

SEQ ID NO: 24611 - DNA, 40 bp, Homo sapiens
caacagagcgagactccatctcaaaaacaaaaaaaaaaat

SEQ ID NO: 24612 - DNA, 40 bp, Homo sapiens
tttttttttttgtttttgagatggagtctcgctctgttgc

SEQ ID NO: 24613 - DNA, 40 bp, Homo sapiens
gcaacagagcgagactccatctcaaaaacaaaaaaaaaaa

SEQ ID NO: 24614 - DNA, 40 bp, Homo sapiens
ttttttttttgtttttgagatggagtctcgctctgttgcc

SEQ ID NO: 24615 - DNA, 40 bp, Homo sapiens
ggcaacagagcgagactccatctcaaaaacaaaaaaaaaa

SEQ ID NO: 24616 - DNA, 40 bp, Homo sapiens
tttttttttgtttttgagatggagtctcgctctgttgccc

SEQ ID NO: 24617 - DNA, 40 bp, Homo sapiens
gggcaacagagcgagactccatctcaaaaacaaaaaaaaa

SEQ ID NO: 24618 - DNA, 40 bp, Homo sapiens
ttttttttgtttttgagatggagtctcgctctgttgccca

SEQ ID NO: 24619 - DNA, 40 bp, Homo sapiens
tgggcaacagagcgagactccatctcaaaaacaaaaaaaa

SEQ ID NO: 24620 - DNA, 40 bp, Homo sapiens
tttttttgtttttgagatggagtctcgctctgttgcccag

SEQ ID NO: 24621 - DNA, 40 bp, Homo sapiens
ctgggcaacagagcgagactccatctcaaaaacaaaaaaa

SEQ ID NO: 24622 - DNA, 40 bp, Homo sapiens
ttttttgtttttgagatggagtctcgctctgttgcccagg

SEQ ID NO: 24623 - DNA, 40 bp, Homo sapiens
cctgggcaacagagcgagactccatctcaaaaacaaaaaa

SEQ ID NO: 24624 - DNA, 40 bp, Homo sapiens
tttttgtttttgagatggagtctcgctctgttgcccaggc

SEQ ID NO: 24625 - DNA, 40 bp, Homo sapiens
gcctgggcaacagagcgagactccatctcaaaaacaaaaa

SEQ ID NO: 24626 - DNA, 40 bp, Homo sapiens
ttttgtttttgagatggagtctcgctctgttgcccaggct

SEQ ID NO: 24627 - DNA, 40 bp, Homo sapiens
agcctgggcaacagagcgagactccatctcaaaaacaaaa

SEQ ID NO: 24628 - DNA, 40 bp, Homo sapiens
tttgtttttgagatggagtctcgctctgttgcccaggctg

SEQ ID NO: 24629 - DNA, 40 bp, Homo sapiens
cagcctgggcaacagagcgagactccatctcaaaaacaaa

SEQ ID NO: 24630 - DNA, 40 bp, Homo sapiens
ttgtttttgagatggagtctcgctctgttgcccaggctgg

SEQ ID NO: 24631 - DNA, 40 bp, Homo sapiens
ccagcctgggcaacagagcgagactccatctcaaaaacaa

SEQ ID NO: 24632 - DNA, 40 bp, Homo sapiens
tgtttttgagatggagtctcgctctgttgcccaggctgga

SEQ ID NO: 24633 - DNA, 40 bp, Homo sapiens
tccagcctgggcaacagagcgagactccatctcaaaaaca

SEQ ID NO: 24634 - DNA, 40 bp, Homo sapiens
gtttttgagatggagtctcgctctgttgcccaggctggag

SEQ ID NO: 24635 - DNA, 40 bp, Homo sapiens
ctccagcctgggcaacagagcgagactccatctcaaaaac

SEQ ID NO: 24636 - DNA, 40 bp, Homo sapiens
tttttgagatggagtctcgctctgttgcccaggctggagt

SEQ ID NO: 24637 - DNA, 40 bp, Homo sapiens
actccagcctgggcaacagagcgagactccatctcaaaaa

SEQ ID NO: 24638 - DNA, 40 bp, Homo sapiens
ttttgagatggagtctcgctctgttgcccaggctggagtg

SEQ ID NO: 24639 - DNA, 40 bp, Homo sapiens
cactccagcctgggcaacagagcgagactccatctcaaaa

SEQ ID NO: 24640 - DNA, 40 bp, Homo sapiens
tttgagatggagtctcgctctgttgcccaggctggagtgc

SEQ ID NO: 24641 - DNA, 40 bp, Homo sapiens
gcactccagcctgggcaacagagcgagactccatctcaaa

SEQ ID NO: 24642 - DNA, 40 bp, Homo sapiens
ttgagatggagtctcgctctgttgcccaggctggagtgca

SEQ ID NO: 24643 - DNA, 40 bp, Homo sapiens
tgcactccagcctgggcaacagagcgagactccatctcaa

SEQ ID NO: 24644 - DNA, 40 bp, Homo sapiens
tgagatggagtctcgctctgttgcccaggctggagtgcag

SEQ ID NO: 24645 - DNA, 40 bp, Homo sapiens
ctgcactccagcctgggcaacagagcgagactccatctca

SEQ ID NO: 24646 - DNA, 40 bp, Homo sapiens
gagatggagtctcgctctgttgcccaggctggagtgcagt

SEQ ID NO: 24647 - DNA, 40 bp, Homo sapiens
actgcactccagcctgggcaacagagcgagactccatctc

SEQ ID NO: 24648 - DNA, 40 bp, Homo sapiens
agatggagtctcgctctgttgcccaggctggagtgcagtg

SEQ ID NO: 24649 - DNA, 40 bp, Homo sapiens
cactgcactccagcctgggcaacagagcgagactccatct

SEQ ID NO: 24650 - DNA, 40 bp, Homo sapiens
gatggagtctcgctctgttgcccaggctggagtgcagtgg

SEQ ID NO: 24651 - DNA, 40 bp, Homo sapiens
ccactgcactccagcctgggcaacagagcgagactccatc

SEQ ID NO: 24652 - DNA, 40 bp, Homo sapiens
atggagtctcgctctgttgcccaggctggagtgcagtggc

SEQ ID NO: 24653 - DNA, 40 bp, Homo sapiens
gccactgcactccagcctgggcaacagagcgagactccat

SEQ ID NO: 24654 - DNA, 40 bp, Homo sapiens
tggagtctcgctctgttgcccaggctggagtgcagtggcg

SEQ ID NO: 24655 - DNA, 40 bp, Homo sapiens
cgccactgcactccagcctgggcaacagagcgagactcca

SEQ ID NO: 24656 - DNA, 40 bp, Homo sapiens
ggagtctcgctctgttgcccaggctggagtgcagtggcgc

SEQ ID NO: 24657 - DNA, 40 bp, Homo sapiens
gcgccactgcactccagcctgggcaacagagcgagactcc

SEQ ID NO: 24658 - DNA, 40 bp, Homo sapiens
gagtctcgctctgttgcccaggctggagtgcagtggcgcg

SEQ ID NO: 24659 - DNA, 40 bp, Homo sapiens
cgcgccactgcactccagcctgggcaacagagcgagactc

SEQ ID NO: 24660 - DNA, 40 bp, Homo sapiens
agtctcgctctgttgcccaggctggagtgcagtggcgcga

SEQ ID NO: 24661 - DNA, 40 bp, Homo sapiens
tcgcgccactgcactccagcctgggcaacagagcgagact

SEQ ID NO: 24662 - DNA, 40 bp, Homo sapiens
gtctcgctctgttgcccaggctggagtgcagtggcgcgat

SEQ ID NO: 24663 - DNA, 40 bp, Homo sapiens
atcgcgccactgcactccagcctgggcaacagagcgagac

SEQ ID NO: 24664 - DNA, 40 bp, Homo sapiens
tctcgctctgttgcccaggctggagtgcagtggcgcgatc

SEQ ID NO: 24665 - DNA, 40 bp, Homo sapiens
gatcgcgccactgcactccagcctgggcaacagagcgaga

SEQ ID NO: 24666 - DNA, 40 bp, Homo sapiens
ctcgctctgttgcccaggctggagtgcagtggcgcgatct

SEQ ID NO: 24667 - DNA, 40 bp, Homo sapiens
agatcgcgccactgcactccagcctgggcaacagagcgag

SEQ ID NO: 24668 - DNA, 40 bp, Homo sapiens
tcgctctgttgcccaggctggagtgcagtggcgcgatctt

SEQ ID NO: 24669 - DNA, 40 bp, Homo sapiens
aagatcgcgccactgcactccagcctgggcaacagagcga

SEQ ID NO: 24670 - DNA, 40 bp, Homo sapiens
cgctctgttgcccaggctggagtgcagtggcgcgatcttg

SEQ ID NO: 24671 - DNA, 40 bp, Homo sapiens
caagatcgcgccactgcactccagcctgggcaacagagcg

SEQ ID NO: 24672 - DNA, 40 bp, Homo sapiens
gctctgttgcccaggctggagtgcagtggcgcgatcttgg

SEQ ID NO: 24673 - DNA, 40 bp, Homo sapiens
ccaagatcgcgccactgcactccagcctgggcaacagagc

SEQ ID NO: 24674 - DNA, 40 bp, Homo sapiens
ctctgttgcccaggctggagtgcagtggcgcgatcttggc

SEQ ID NO: 24675 - DNA, 40 bp, Homo sapiens
gccaagatcgcgccactgcactccagcctgggcaacagag

SEQ ID NO: 24676 - DNA, 40 bp, Homo sapiens
tctgttgcccaggctggagtgcagtggcgcgatcttggct

SEQ ID NO: 24677 - DNA, 40 bp, Homo sapiens
agccaagatcgcgccactgcactccagcctgggcaacaga

SEQ ID NO: 24678 - DNA, 40 bp, Homo sapiens
ctgttgcccaggctggagtgcagtggcgcgatcttggctc

SEQ ID NO: 24679 - DNA, 40 bp, Homo sapiens
gagccaagatcgcgccactgcactccagcctgggcaacag

SEQ ID NO: 24680 - DNA, 40 bp, Homo sapiens
tgttgcccaggctggagtgcagtggcgcgatcttggctca

SEQ ID NO: 24681 - DNA, 40 bp, Homo sapiens
tgagccaagatcgcgccactgcactccagcctgggcaaca

SEQ ID NO: 24682 - DNA, 40 bp, Homo sapiens
gttgcccaggctggagtgcagtggcgcgatcttggctcac

SEQ ID NO: 24683 - DNA, 40 bp, Homo sapiens
gtgagccaagatcgcgccactgcactccagcctgggcaac

SEQ ID NO: 24684 - DNA, 40 bp, Homo sapiens
ttgcccaggctggagtgcagtggcgcgatcttggctcact

SEQ ID NO: 24685 - DNA, 40 bp, Homo sapiens
agtgagccaagatcgcgccactgcactccagcctgggcaa

SEQ ID NO: 24686 - DNA, 40 bp, Homo sapiens
tgcccaggctggagtgcagtggcgcgatcttggctcactg

SEQ ID NO: 24687 - DNA, 40 bp, Homo sapiens
cagtgagccaagatcgcgccactgcactccagcctgggca

SEQ ID NO: 24688 - DNA, 40 bp, Homo sapiens
gcccaggctggagtgcagtggcgcgatcttggctcactgc

SEQ ID NO: 24689 - DNA, 40 bp, Homo sapiens
gcagtgagccaagatcgcgccactgcactccagcctgggc

SEQ ID NO: 24690 - DNA, 40 bp, Homo sapiens
cccaggctggagtgcagtggcgcgatcttggctcactgca

SEQ ID NO: 24691 - DNA, 40 bp, Homo sapiens
tgcagtgagccaagatcgcgccactgcactccagcctggg

SEQ ID NO: 24692 - DNA, 40 bp, Homo sapiens
ccaggctggagtgcagtggcgcgatcttggctcactgcag

SEQ ID NO: 24693 - DNA, 40 bp, Homo sapiens
ctgcagtgagccaagatcgcgccactgcactccagcctgg

SEQ ID NO: 24694 - DNA, 40 bp, Homo sapiens
caggctggagtgcagtggcgcgatcttggctcactgcagc

SEQ ID NO: 24695 - DNA, 40 bp, Homo sapiens
gctgcagtgagccaagatcgcgccactgcactccagcctg

SEQ ID NO: 24696 - DNA, 40 bp, Homo sapiens
aggctggagtgcagtggcgcgatcttggctcactgcagcc

SEQ ID NO: 24697 - DNA, 40 bp, Homo sapiens
ggctgcagtgagccaagatcgcgccactgcactccagcct

SEQ ID NO: 24698 - DNA, 40 bp, Homo sapiens
ggctggagtgcagtggcgcgatcttggctcactgcagcct

SEQ ID NO: 24699 - DNA, 40 bp, Homo sapiens
aggctgcagtgagccaagatcgcgccactgcactccagcc

SEQ ID NO: 24700 - DNA, 40 bp, Homo sapiens
gctggagtgcagtggcgcgatcttggctcactgcagcctc

SEQ ID NO: 24701 - DNA, 40 bp, Homo sapiens
gaggctgcagtgagccaagatcgcgccactgcactccagc

SEQ ID NO: 24702 - DNA, 40 bp, Homo sapiens
ctggagtgcagtggcgcgatcttggctcactgcagcctcc

SEQ ID NO: 24703 - DNA, 40 bp, Homo sapiens
ggaggctgcagtgagccaagatcgcgccactgcactccag

SEQ ID NO: 24704 - DNA, 40 bp, Homo sapiens
tggagtgcagtggcgcgatcttggctcactgcagcctcca

SEQ ID NO: 24705 - DNA, 40 bp, Homo sapiens
tggaggctgcagtgagccaagatcgcgccactgcactcca

SEQ ID NO: 24706 - DNA, 40 bp, Homo sapiens
ggagtgcagtggcgcgatcttggctcactgcagcctccac

SEQ ID NO: 24707 - DNA, 40 bp, Homo sapiens
gtggaggctgcagtgagccaagatcgcgccactgcactcc

SEQ ID NO: 24708 - DNA, 40 bp, Homo sapiens
gagtgcagtggcgcgatcttggctcactgcagcctccacc

SEQ ID NO: 24709 - DNA, 40 bp, Homo sapiens
ggtggaggctgcagtgagccaagatcgcgccactgcactc

SEQ ID NO: 24710 - DNA, 40 bp, Homo sapiens
agtgcagtggcgcgatcttggctcactgcagcctccacct

SEQ ID NO: 24711 - DNA, 40 bp, Homo sapiens
aggtggaggctgcagtgagccaagatcgcgccactgcact

SEQ ID NO: 24712 - DNA, 40 bp, Homo sapiens
gtgcagtggcgcgatcttggctcactgcagcctccacctc

SEQ ID NO: 24713 - DNA, 40 bp, Homo sapiens
gaggtggaggctgcagtgagccaagatcgcgccactgcac

SEQ ID NO: 24714 - DNA, 40 bp, Homo sapiens
tgcagtggcgcgatcttggctcactgcagcctccacctcc

SEQ ID NO: 24715 - DNA, 40 bp, Homo sapiens
ggaggtggaggctgcagtgagccaagatcgcgccactgca

SEQ ID NO: 24716 - DNA, 40 bp, Homo sapiens
gcagtggcgcgatcttggctcactgcagcctccacctcct

SEQ ID NO: 24717 - DNA, 40 bp, Homo sapiens
aggaggtggaggctgcagtgagccaagatcgcgccactgc

SEQ ID NO: 24718 - DNA, 40 bp, Homo sapiens
cagtggcgcgatcttggctcactgcagcctccacctcctg

SEQ ID NO: 24719 - DNA, 40 bp, Homo sapiens
caggaggtggaggctgcagtgagccaagatcgcgccactg

SEQ ID NO: 24720 - DNA, 40 bp, Homo sapiens
agtggcgcgatcttggctcactgcagcctccacctcctgg

SEQ ID NO: 24721 - DNA, 40 bp, Homo sapiens
ccaggaggtggaggctgcagtgagccaagatcgcgccact

SEQ ID NO: 24722 - DNA, 40 bp, Homo sapiens
gtggcgcgatcttggctcactgcagcctccacctcctggg

SEQ ID NO: 24723 - DNA, 40 bp, Homo sapiens
cccaggaggtggaggctgcagtgagccaagatcgcgccac

SEQ ID NO: 24724 - DNA, 40 bp, Homo sapiens
tggcgcgatcttggctcactgcagcctccacctcctgggt

SEQ ID NO: 24725 - DNA, 40 bp, Homo sapiens
acccaggaggtggaggctgcagtgagccaagatcgcgcca

SEQ ID NO: 24726 - DNA, 40 bp, Homo sapiens
ggcgcgatcttggctcactgcagcctccacctcctgggtt

SEQ ID NO: 24727 - DNA, 40 bp, Homo sapiens
aacccaggaggtggaggctgcagtgagccaagatcgcgcc

SEQ ID NO: 24728 - DNA, 40 bp, Homo sapiens
gcgcgatcttggctcactgcagcctccacctcctgggttc

SEQ ID NO: 24729 - DNA, 40 bp, Homo sapiens
gaacccaggaggtggaggctgcagtgagccaagatcgcgc

SEQ ID NO: 24730 - DNA, 40 bp, Homo sapiens
cgcgatcttggctcactgcagcctccacctcctgggttcc

SEQ ID NO: 24731 - DNA, 40 bp, Homo sapiens
ggaacccaggaggtggaggctgcagtgagccaagatcgcg

SEQ ID NO: 24732 - DNA, 40 bp, Homo sapiens
gcgatcttggctcactgcagcctccacctcctgggttcca

SEQ ID NO: 24733 - DNA, 40 bp, Homo sapiens
tggaacccaggaggtggaggctgcagtgagccaagatcgc

SEQ ID NO: 24734 - DNA, 40 bp, Homo sapiens
cgatcttggctcactgcagcctccacctcctgggttccag

SEQ ID NO: 24735 - DNA, 40 bp, Homo sapiens
ctggaacccaggaggtggaggctgcagtgagccaagatcg

SEQ ID NO: 24736 - DNA, 40 bp, Homo sapiens
gatcttggctcactgcagcctccacctcctgggttccagc

SEQ ID NO: 24737 - DNA, 40 bp, Homo sapiens
gctggaacccaggaggtggaggctgcagtgagccaagatc

SEQ ID NO: 24738 - DNA, 40 bp, Homo sapiens
atcttggctcactgcagcctccacctcctgggttccagcc

SEQ ID NO: 24739 - DNA, 40 bp, Homo sapiens
ggctggaacccaggaggtggaggctgcagtgagccaagat

SEQ ID NO: 24740 - DNA, 40 bp, Homo sapiens
tcttggctcactgcagcctccacctcctgggttccagcca

SEQ ID NO: 24741 - DNA, 40 bp, Homo sapiens
tggctggaacccaggaggtggaggctgcagtgagccaaga

SEQ ID NO: 24742 - DNA, 40 bp, Homo sapiens
cttggctcactgcagcctccacctcctgggttccagccat

SEQ ID NO: 24743 - DNA, 40 bp, Homo sapiens
atggctggaacccaggaggtggaggctgcagtgagccaag

SEQ ID NO: 24744 - DNA, 40 bp, Homo sapiens
ttggctcactgcagcctccacctcctgggttccagccatt

SEQ ID NO: 24745 - DNA, 40 bp, Homo sapiens
aatggctggaacccaggaggtggaggctgcagtgagccaa

SEQ ID NO: 24746 - DNA, 40 bp, Homo sapiens
tggctcactgcagcctccacctcctgggttccagccattc

SEQ ID NO: 24747 - DNA, 40 bp, Homo sapiens
gaatggctggaacccaggaggtggaggctgcagtgagcca

SEQ ID NO: 24748 - DNA, 40 bp, Homo sapiens
ggctcactgcagcctccacctcctgggttccagccattct

SEQ ID NO: 24749 - DNA, 40 bp, Homo sapiens
agaatggctggaacccaggaggtggaggctgcagtgagcc

SEQ ID NO: 24750 - DNA, 40 bp, Homo sapiens
gctcactgcagcctccacctcctgggttccagccattctc

SEQ ID NO: 24751 - DNA, 40 bp, Homo sapiens
gagaatggctggaacccaggaggtggaggctgcagtgagc

SEQ ID NO: 24752 - DNA, 40 bp, Homo sapiens
ctcactgcagcctccacctcctgggttccagccattctcc

SEQ ID NO: 24753 - DNA, 40 bp, Homo sapiens
ggagaatggctggaacccaggaggtggaggctgcagtgag

SEQ ID NO: 24754 - DNA, 40 bp, Homo sapiens
tcactgcagcctccacctcctgggttccagccattctcct

SEQ ID NO: 24755 - DNA, 40 bp, Homo sapiens
aggagaatggctggaacccaggaggtggaggctgcagtga

SEQ ID NO: 24756 - DNA, 40 bp, Homo sapiens
cactgcagcctccacctcctgggttccagccattctcctg

SEQ ID NO: 24757 - DNA, 40 bp, Homo sapiens
caggagaatggctggaacccaggaggtggaggctgcagtg

SEQ ID NO: 24758 - DNA, 40 bp, Homo sapiens
actgcagcctccacctcctgggttccagccattctcctgc

SEQ ID NO: 24759 - DNA, 40 bp, Homo sapiens
gcaggagaatggctggaacccaggaggtggaggctgcagt

SEQ ID NO: 24760 - DNA, 40 bp, Homo sapiens
ctgcagcctccacctcctgggttccagccattctcctgcc

SEQ ID NO: 24761 - DNA, 40 bp, Homo sapiens
ggcaggagaatggctggaacccaggaggtggaggctgcag

SEQ ID NO: 24762 - DNA, 40 bp, Homo sapiens
tgcagcctccacctcctgggttccagccattctcctgcct

SEQ ID NO: 24763 - DNA, 40 bp, Homo sapiens
aggcaggagaatggctggaacccaggaggtggaggctgca

SEQ ID NO: 24764 - DNA, 40 bp, Homo sapiens
gcagcctccacctcctgggttccagccattctcctgcctc

SEQ ID NO: 24765 - DNA, 40 bp, Homo sapiens
gaggcaggagaatggctggaacccaggaggtggaggctgc

SEQ ID NO: 24766 - DNA, 40 bp, Homo sapiens
cagcctccacctcctgggttccagccattctcctgcctca

SEQ ID NO: 24767 - DNA, 40 bp, Homo sapiens
tgaggcaggagaatggctggaacccaggaggtggaggctg

SEQ ID NO: 24768 - DNA, 40 bp, Homo sapiens
agcctccacctcctgggttccagccattctcctgcctcag

SEQ ID NO: 24769 - DNA, 40 bp, Homo sapiens
ctgaggcaggagaatggctggaacccaggaggtggaggct

SEQ ID NO: 24770 - DNA, 40 bp, Homo sapiens
gcctccacctcctgggttccagccattctcctgcctcagc

SEQ ID NO: 24771 - DNA, 40 bp, Homo sapiens
gctgaggcaggagaatggctggaacccaggaggtggaggc

SEQ ID NO: 24772 - DNA, 40 bp, Homo sapiens
cctccacctcctgggttccagccattctcctgcctcagcc

SEQ ID NO: 24773 - DNA, 40 bp, Homo sapiens
ggctgaggcaggagaatggctggaacccaggaggtggagg

SEQ ID NO: 24774 - DNA, 40 bp, Homo sapiens
ctccacctcctgggttccagccattctcctgcctcagcct

SEQ ID NO: 24775 - DNA, 40 bp, Homo sapiens
aggctgaggcaggagaatggctggaacccaggaggtggag

SEQ ID NO: 24776 - DNA, 40 bp, Homo sapiens
tccacctcctgggttccagccattctcctgcctcagcctc

SEQ ID NO: 24777 - DNA, 40 bp, Homo sapiens
gaggctgaggcaggagaatggctggaacccaggaggtgga

SEQ ID NO: 24778 - DNA, 40 bp, Homo sapiens
ccacctcctgggttccagccattctcctgcctcagcctcc

SEQ ID NO: 24779 - DNA, 40 bp, Homo sapiens
ggaggctgaggcaggagaatggctggaacccaggaggtgg

SEQ ID NO: 24780 - DNA, 40 bp, Homo sapiens
cacctcctgggttccagccattctcctgcctcagcctcct

SEQ ID NO: 24781 - DNA, 40 bp, Homo sapiens
aggaggctgaggcaggagaatggctggaacccaggaggtg

SEQ ID NO: 24782 - DNA, 40 bp, Homo sapiens
acctcctgggttccagccattctcctgcctcagcctcctg

SEQ ID NO: 24783 - DNA, 40 bp, Homo sapiens
caggaggctgaggcaggagaatggctggaacccaggaggt

SEQ ID NO: 24784 - DNA, 40 bp, Homo sapiens
cctcctgggttccagccattctcctgcctcagcctcctgg

SEQ ID NO: 24785 - DNA, 40 bp, Homo sapiens
ccaggaggctgaggcaggagaatggctggaacccaggagg

SEQ ID NO: 24786 - DNA, 40 bp, Homo sapiens
ctcctgggttccagccattctcctgcctcagcctcctggg

SEQ ID NO: 24787 - DNA, 40 bp, Homo sapiens
cccaggaggctgaggcaggagaatggctggaacccaggag

SEQ ID NO: 24788 - DNA, 40 bp, Homo sapiens
tcctgggttccagccattctcctgcctcagcctcctgggt

SEQ ID NO: 24789 - DNA, 40 bp, Homo sapiens
acccaggaggctgaggcaggagaatggctggaacccagga

SEQ ID NO: 24790 - DNA, 40 bp, Homo sapiens
cctgggttccagccattctcctgcctcagcctcctgggta

SEQ ID NO: 24791 - DNA, 40 bp, Homo sapiens
tacccaggaggctgaggcaggagaatggctggaacccagg

SEQ ID NO: 24792 - DNA, 40 bp, Homo sapiens
ctgggttccagccattctcctgcctcagcctcctgggtag

SEQ ID NO: 24793 - DNA, 40 bp, Homo sapiens
ctacccaggaggctgaggcaggagaatggctggaacccag

SEQ ID NO: 24794 - DNA, 40 bp, Homo sapiens
tgggttccagccattctcctgcctcagcctcctgggtagc

SEQ ID NO: 24795 - DNA, 40 bp, Homo sapiens
gctacccaggaggctgaggcaggagaatggctggaaccca

SEQ ID NO: 24796 - DNA, 40 bp, Homo sapiens
gggttccagccattctcctgcctcagcctcctgggtagct

SEQ ID NO: 24797 - DNA, 40 bp, Homo sapiens
agctacccaggaggctgaggcaggagaatggctggaaccc

SEQ ID NO: 24798 - DNA, 40 bp, Homo sapiens
ggttccagccattctcctgcctcagcctcctgggtagctg

SEQ ID NO: 24799 - DNA, 40 bp, Homo sapiens
cagctacccaggaggctgaggcaggagaatggctggaacc

SEQ ID NO: 24800 - DNA, 40 bp, Homo sapiens
gttccagccattctcctgcctcagcctcctgggtagctgg

SEQ ID NO: 24801 - DNA, 40 bp, Homo sapiens
ccagctacccaggaggctgaggcaggagaatggctggaac

SEQ ID NO: 24802 - DNA, 40 bp, Homo sapiens
ttccagccattctcctgcctcagcctcctgggtagctggt

SEQ ID NO: 24803 - DNA, 40 bp, Homo sapiens
accagctacccaggaggctgaggcaggagaatggctggaa

SEQ ID NO: 24804 - DNA, 40 bp, Homo sapiens
tccagccattctcctgcctcagcctcctgggtagctggta

SEQ ID NO: 24805 - DNA, 40 bp, Homo sapiens
taccagctacccaggaggctgaggcaggagaatggctgga

SEQ ID NO: 24806 - DNA, 40 bp, Homo sapiens
ccagccattctcctgcctcagcctcctgggtagctggtat

SEQ ID NO: 24807 - DNA, 40 bp, Homo sapiens
ataccagctacccaggaggctgaggcaggagaatggctgg

SEQ ID NO: 24808 - DNA, 40 bp, Homo sapiens
cagccattctcctgcctcagcctcctgggtagctggtatt

SEQ ID NO: 24809 - DNA, 40 bp, Homo sapiens
aataccagctacccaggaggctgaggcaggagaatggctg

SEQ ID NO: 24810 - DNA, 40 bp, Homo sapiens
agccattctcctgcctcagcctcctgggtagctggtatta

SEQ ID NO: 24811 - DNA, 40 bp, Homo sapiens
taataccagctacccaggaggctgaggcaggagaatggct

SEQ ID NO: 24812 - DNA, 40 bp, Homo sapiens
gccattctcctgcctcagcctcctgggtagctggtattac

SEQ ID NO: 24813 - DNA, 40 bp, Homo sapiens
gtaataccagctacccaggaggctgaggcaggagaatggc

SEQ ID NO: 24814 - DNA, 40 bp, Homo sapiens
ccattctcctgcctcagcctcctgggtagctggtattaca

SEQ ID NO: 24815 - DNA, 40 bp, Homo sapiens
tgtaataccagctacccaggaggctgaggcaggagaatgg

SEQ ID NO: 24816 - DNA, 40 bp, Homo sapiens
cattctcctgcctcagcctcctgggtagctggtattacag

SEQ ID NO: 24817 - DNA, 40 bp, Homo sapiens
ctgtaataccagctacccaggaggctgaggcaggagaatg

SEQ ID NO: 24818 - DNA, 40 bp, Homo sapiens
attctcctgcctcagcctcctgggtagctggtattacagg

SEQ ID NO: 24819 - DNA, 40 bp, Homo sapiens
cctgtaataccagctacccaggaggctgaggcaggagaat

SEQ ID NO: 24820 - DNA, 40 bp, Homo sapiens
ttctcctgcctcagcctcctgggtagctggtattacaggc

SEQ ID NO: 24821 - DNA, 40 bp, Homo sapiens
gcctgtaataccagctacccaggaggctgaggcaggagaa

SEQ ID NO: 24822 - DNA, 40 bp, Homo sapiens
tctcctgcctcagcctcctgggtagctggtattacaggca

SEQ ID NO: 24823 - DNA, 40 bp, Homo sapiens
tgcctgtaataccagctacccaggaggctgaggcaggaga

SEQ ID NO: 24824 - DNA, 40 bp, Homo sapiens
ctcctgcctcagcctcctgggtagctggtattacaggcat

SEQ ID NO: 24825 - DNA, 40 bp, Homo sapiens
atgcctgtaataccagctacccaggaggctgaggcaggag

SEQ ID NO: 24826 - DNA, 40 bp, Homo sapiens
tcctgcctcagcctcctgggtagctggtattacaggcatg

SEQ ID NO: 24827 - DNA, 40 bp, Homo sapiens
catgcctgtaataccagctacccaggaggctgaggcagga

SEQ ID NO: 24828 - DNA, 40 bp, Homo sapiens
cctgcctcagcctcctgggtagctggtattacaggcatgc

SEQ ID NO: 24829 - DNA, 40 bp, Homo sapiens
gcatgcctgtaataccagctacccaggaggctgaggcagg

SEQ ID NO: 24830 - DNA, 40 bp, Homo sapiens
ctgcctcagcctcctgggtagctggtattacaggcatgca

SEQ ID NO: 24831 - DNA, 40 bp, Homo sapiens
tgcatgcctgtaataccagctacccaggaggctgaggcag

SEQ ID NO: 24832 - DNA, 40 bp, Homo sapiens
tgcctcagcctcctgggtagctggtattacaggcatgcac

SEQ ID NO: 24833 - DNA, 40 bp, Homo sapiens
gtgcatgcctgtaataccagctacccaggaggctgaggca

SEQ ID NO: 24834 - DNA, 40 bp, Homo sapiens
gcctcagcctcctgggtagctggtattacaggcatgcacc

SEQ ID NO: 24835 - DNA, 40 bp, Homo sapiens
ggtgcatgcctgtaataccagctacccaggaggctgaggc

SEQ ID NO: 24836 - DNA, 40 bp, Homo sapiens
cctcagcctcctgggtagctggtattacaggcatgcacca

SEQ ID NO: 24837 - DNA, 40 bp, Homo sapiens
tggtgcatgcctgtaataccagctacccaggaggctgagg

SEQ ID NO: 24838 - DNA, 40 bp, Homo sapiens
ctcagcctcctgggtagctggtattacaggcatgcaccac

SEQ ID NO: 24839 - DNA, 40 bp, Homo sapiens
gtggtgcatgcctgtaataccagctacccaggaggctgag

SEQ ID NO: 24840 - DNA, 40 bp, Homo sapiens
tcagcctcctgggtagctggtattacaggcatgcaccacc

SEQ ID NO: 24841 - DNA, 40 bp, Homo sapiens
ggtggtgcatgcctgtaataccagctacccaggaggctga

SEQ ID NO: 24842 - DNA, 40 bp, Homo sapiens
cagcctcctgggtagctggtattacaggcatgcaccacca

SEQ ID NO: 24843 - DNA, 40 bp, Homo sapiens
tggtggtgcatgcctgtaataccagctacccaggaggctg

SEQ ID NO: 24844 - DNA, 40 bp, Homo sapiens
agcctcctgggtagctggtattacaggcatgcaccaccac

SEQ ID NO: 24845 - DNA, 40 bp, Homo sapiens
gtggtggtgcatgcctgtaataccagctacccaggaggct

SEQ ID NO: 24846 - DNA, 40 bp, Homo sapiens
gcctcctgggtagctggtattacaggcatgcaccaccaca

SEQ ID NO: 24847 - DNA, 40 bp, Homo sapiens
tgtggtggtgcatgcctgtaataccagctacccaggaggc

SEQ ID NO: 24848 - DNA, 40 bp, Homo sapiens
cctcctgggtagctggtattacaggcatgcaccaccacac

SEQ ID NO: 24849 - DNA, 40 bp, Homo sapiens
gtgtggtggtgcatgcctgtaataccagctacccaggagg

SEQ ID NO: 24850 - DNA, 40 bp, Homo sapiens
ctcctgggtagctggtattacaggcatgcaccaccacacc

SEQ ID NO: 24851 - DNA, 40 bp, Homo sapiens
ggtgtggtggtgcatgcctgtaataccagctacccaggag

SEQ ID NO: 24852 - DNA, 40 bp, Homo sapiens
tcctgggtagctggtattacaggcatgcaccaccacaccc

SEQ ID NO: 24853 - DNA, 40 bp, Homo sapiens
gggtgtggtggtgcatgcctgtaataccagctacccagga

SEQ ID NO: 24854 - DNA, 40 bp, Homo sapiens
cctgggtagctggtattacaggcatgcaccaccacaccca

SEQ ID NO: 24855 - DNA, 40 bp, Homo sapiens
tgggtgtggtggtgcatgcctgtaataccagctacccagg

SEQ ID NO: 24856 - DNA, 40 bp, Homo sapiens
ctgggtagctggtattacaggcatgcaccaccacacccaa

SEQ ID NO: 24857 - DNA, 40 bp, Homo sapiens
ttgggtgtggtggtgcatgcctgtaataccagctacccag

SEQ ID NO: 24858 - DNA, 40 bp, Homo sapiens
tgggtagctggtattacaggcatgcaccaccacacccaat

SEQ ID NO: 24859 - DNA, 40 bp, Homo sapiens
attgggtgtggtggtgcatgcctgtaataccagctaccca

SEQ ID NO: 24860 - DNA, 40 bp, Homo sapiens
gggtagctggtattacaggcatgcaccaccacacccaatt

SEQ ID NO: 24861 - DNA, 40 bp, Homo sapiens
aattgggtgtggtggtgcatgcctgtaataccagctaccc

SEQ ID NO: 24862 - DNA, 40 bp, Homo sapiens
ggtagctggtattacaggcatgcaccaccacacccaatta

SEQ ID NO: 24863 - DNA, 40 bp, Homo sapiens
taattgggtgtggtggtgcatgcctgtaataccagctacc

SEQ ID NO: 24864 - DNA, 40 bp, Homo sapiens
gtagctggtattacaggcatgcaccaccacacccaattac

SEQ ID NO: 24865 - DNA, 40 bp, Homo sapiens
gtaattgggtgtggtggtgcatgcctgtaataccagctac

SEQ ID NO: 24866 - DNA, 40 bp, Homo sapiens
tagctggtattacaggcatgcaccaccacacccaattact

SEQ ID NO: 24867 - DNA, 40 bp, Homo sapiens
agtaattgggtgtggtggtgcatgcctgtaataccagcta

SEQ ID NO: 24868 - DNA, 40 bp, Homo sapiens
agctggtattacaggcatgcaccaccacacccaattactt

SEQ ID NO: 24869 - DNA, 40 bp, Homo sapiens
aagtaattgggtgtggtggtgcatgcctgtaataccagct

SEQ ID NO: 24870 - DNA, 40 bp, Homo sapiens
gctggtattacaggcatgcaccaccacacccaattacttt

SEQ ID NO: 24871 - DNA, 40 bp, Homo sapiens
aaagtaattgggtgtggtggtgcatgcctgtaataccagc

SEQ ID NO: 24872 - DNA, 40 bp, Homo sapiens
ctggtattacaggcatgcaccaccacacccaattactttt

SEQ ID NO: 24873 - DNA, 40 bp, Homo sapiens
aaaagtaattgggtgtggtggtgcatgcctgtaataccag

SEQ ID NO: 24874 - DNA, 40 bp, Homo sapiens
tggtattacaggcatgcaccaccacacccaattacttttt

SEQ ID NO: 24875 - DNA, 40 bp, Homo sapiens
aaaaagtaattgggtgtggtggtgcatgcctgtaatacca

SEQ ID NO: 24876 - DNA, 40 bp, Homo sapiens
ggtattacaggcatgcaccaccacacccaattactttttg

SEQ ID NO: 24877 - DNA, 40 bp, Homo sapiens
caaaaagtaattgggtgtggtggtgcatgcctgtaatacc

SEQ ID NO: 24878 - DNA, 40 bp, Homo sapiens
gtattacaggcatgcaccaccacacccaattactttttgt

SEQ ID NO: 24879 - DNA, 40 bp, Homo sapiens
acaaaaagtaattgggtgtggtggtgcatgcctgtaatac

SEQ ID NO: 24880 - DNA, 40 bp, Homo sapiens
tattacaggcatgcaccaccacacccaattactttttgta

SEQ ID NO: 24881 - DNA, 40 bp, Homo sapiens
tacaaaaagtaattgggtgtggtggtgcatgcctgtaata

SEQ ID NO: 24882 - DNA, 40 bp, Homo sapiens
attacaggcatgcaccaccacacccaattactttttgtat

SEQ ID NO: 24883 - DNA, 40 bp, Homo sapiens
atacaaaaagtaattgggtgtggtggtgcatgcctgtaat

SEQ ID NO: 24884 - DNA, 40 bp, Homo sapiens
ttacaggcatgcaccaccacacccaattactttttgtatt

SEQ ID NO: 24885 - DNA, 40 bp, Homo sapiens
aatacaaaaagtaattgggtgtggtggtgcatgcctgtaa

SEQ ID NO: 24886 - DNA, 40 bp, Homo sapiens
tacaggcatgcaccaccacacccaattactttttgtattt

SEQ ID NO: 24887 - DNA, 40 bp, Homo sapiens
aaatacaaaaagtaattgggtgtggtggtgcatgcctgta

SEQ ID NO: 24888 - DNA, 40 bp, Homo sapiens
acaggcatgcaccaccacacccaattactttttgtatttt

SEQ ID NO: 24889 - DNA, 40 bp, Homo sapiens
aaaatacaaaaagtaattgggtgtggtggtgcatgcctgt

SEQ ID NO: 24890 - DNA, 40 bp, Homo sapiens
caggcatgcaccaccacacccaattactttttgtattttt

SEQ ID NO: 24891 - DNA, 40 bp, Homo sapiens
aaaaatacaaaaagtaattgggtgtggtggtgcatgcctg

SEQ ID NO: 24892 - DNA, 40 bp, Homo sapiens
aggcatgcaccaccacacccaattactttttgtattttta

SEQ ID NO: 24893 - DNA, 40 bp, Homo sapiens
taaaaatacaaaaagtaattgggtgtggtggtgcatgcct

SEQ ID NO: 24894 - DNA, 40 bp, Homo sapiens
ggcatgcaccaccacacccaattactttttgtatttttag

SEQ ID NO: 24895 - DNA, 40 bp, Homo sapiens
ctaaaaatacaaaaagtaattgggtgtggtggtgcatgcc

SEQ ID NO: 24896 - DNA, 40 bp, Homo sapiens
gcatgcaccaccacacccaattactttttgtatttttagt

SEQ ID NO: 24897 - DNA, 40 bp, Homo sapiens
actaaaaatacaaaaagtaattgggtgtggtggtgcatgc

SEQ ID NO: 24898 - DNA, 40 bp, Homo sapiens
catgcaccaccacacccaattactttttgtatttttagta

SEQ ID NO: 24899 - DNA, 40 bp, Homo sapiens
tactaaaaatacaaaaagtaattgggtgtggtggtgcatg

SEQ ID NO: 24900 - DNA, 40 bp, Homo sapiens
atgcaccaccacacccaattactttttgtatttttagtag

SEQ ID NO: 24901 - DNA, 40 bp, Homo sapiens
ctactaaaaatacaaaaagtaattgggtgtggtggtgcat

SEQ ID NO: 24902 - DNA, 40 bp, Homo sapiens
tgcaccaccacacccaattactttttgtatttttagtaga

SEQ ID NO: 24903 - DNA, 40 bp, Homo sapiens
tctactaaaaatacaaaaagtaattgggtgtggtggtgca

SEQ ID NO: 24904 - DNA, 40 bp, Homo sapiens
gcaccaccacacccaattactttttgtatttttagtagag

SEQ ID NO: 24905 - DNA, 40 bp, Homo sapiens
ctctactaaaaatacaaaaagtaattgggtgtggtggtgc

SEQ ID NO: 24906 - DNA, 40 bp, Homo sapiens
caccaccacacccaattactttttgtatttttagtagaga

SEQ ID NO: 24907 - DNA, 40 bp, Homo sapiens
tctctactaaaaatacaaaaagtaattgggtgtggtggtg

SEQ ID NO: 24908 - DNA, 40 bp, Homo sapiens
accaccacacccaattactttttgtatttttagtagagac

SEQ ID NO: 24909 - DNA, 40 bp, Homo sapiens
gtctctactaaaaatacaaaaagtaattgggtgtggtggt

SEQ ID NO: 24910 - DNA, 40 bp, Homo sapiens
ccaccacacccaattactttttgtatttttagtagagacg

SEQ ID NO: 24911 - DNA, 40 bp, Homo sapiens
cgtctctactaaaaatacaaaaagtaattgggtgtggtgg

SEQ ID NO: 24912 - DNA, 40 bp, Homo sapiens
caccacacccaattactttttgtatttttagtagagacgg

SEQ ID NO: 24913 - DNA, 40 bp, Homo sapiens
ccgtctctactaaaaatacaaaaagtaattgggtgtggtg

SEQ ID NO: 24914 - DNA, 40 bp, Homo sapiens
accacacccaattactttttgtatttttagtagagacggg

SEQ ID NO: 24915 - DNA, 40 bp, Homo sapiens
cccgtctctactaaaaatacaaaaagtaattgggtgtggt

SEQ ID NO: 24916 - DNA, 40 bp, Homo sapiens
ccacacccaattactttttgtatttttagtagagacgggg

SEQ ID NO: 24917 - DNA, 40 bp, Homo sapiens
ccccgtctctactaaaaatacaaaaagtaattgggtgtgg

SEQ ID NO: 24918 - DNA, 40 bp, Homo sapiens
cacacccaattactttttgtatttttagtagagacggggt

SEQ ID NO: 24919 - DNA, 40 bp, Homo sapiens
accccgtctctactaaaaatacaaaaagtaattgggtgtg

SEQ ID NO: 24920 - DNA, 40 bp, Homo sapiens
acacccaattactttttgtatttttagtagagacggggtt

SEQ ID NO: 24921 - DNA, 40 bp, Homo sapiens
aaccccgtctctactaaaaatacaaaaagtaattgggtgt

SEQ ID NO: 24922 - DNA, 40 bp, Homo sapiens
cacccaattactttttgtatttttagtagagacggggttt

SEQ ID NO: 24923 - DNA, 40 bp, Homo sapiens
aaaccccgtctctactaaaaatacaaaaagtaattgggtg

SEQ ID NO: 24924 - DNA, 40 bp, Homo sapiens
acccaattactttttgtatttttagtagagacggggtttc

SEQ ID NO: 24925 - DNA, 40 bp, Homo sapiens
gaaaccccgtctctactaaaaatacaaaaagtaattgggt

SEQ ID NO: 24926 - DNA, 40 bp, Homo sapiens
cccaattactttttgtatttttagtagagacggggtttca

SEQ ID NO: 24927 - DNA, 40 bp, Homo sapiens
tgaaaccccgtctctactaaaaatacaaaaagtaattggg

SEQ ID NO: 24928 - DNA, 40 bp, Homo sapiens
ccaattactttttgtatttttagtagagacggggtttcac

SEQ ID NO: 24929 - DNA, 40 bp, Homo sapiens
gtgaaaccccgtctctactaaaaatacaaaaagtaattgg

SEQ ID NO: 24930 - DNA, 40 bp, Homo sapiens
caattactttttgtatttttagtagagacggggtttcacc

SEQ ID NO: 24931 - DNA, 40 bp, Homo sapiens
ggtgaaaccccgtctctactaaaaatacaaaaagtaattg

SEQ ID NO: 24932 - DNA, 40 bp, Homo sapiens
aattactttttgtatttttagtagagacggggtttcacca

SEQ ID NO: 24933 - DNA, 40 bp, Homo sapiens
tggtgaaaccccgtctctactaaaaatacaaaaagtaatt

SEQ ID NO: 24934 - DNA, 40 bp, Homo sapiens
attactttttgtatttttagtagagacggggtttcaccat

SEQ ID NO: 24935 - DNA, 40 bp, Homo sapiens
atggtgaaaccccgtctctactaaaaatacaaaaagtaat

SEQ ID NO: 24936 - DNA, 40 bp, Homo sapiens
ttactttttgtatttttagtagagacggggtttcaccatg

SEQ ID NO: 24937 - DNA, 40 bp, Homo sapiens
catggtgaaaccccgtctctactaaaaatacaaaaagtaa

SEQ ID NO: 24938 - DNA, 40 bp, Homo sapiens
tactttttgtatttttagtagagacggggtttcaccatgt

SEQ ID NO: 24939 - DNA, 40 bp, Homo sapiens
acatggtgaaaccccgtctctactaaaaatacaaaaagta

SEQ ID NO: 24940 - DNA, 40 bp, Homo sapiens
actttttgtatttttagtagagacggggtttcaccatgtt

SEQ ID NO: 24941 - DNA, 40 bp, Homo sapiens
aacatggtgaaaccccgtctctactaaaaatacaaaaagt

SEQ ID NO: 24942 - DNA, 40 bp, Homo sapiens
ctttttgtatttttagtagagacggggtttcaccatgttg

SEQ ID NO: 24943 - DNA, 40 bp, Homo sapiens
caacatggtgaaaccccgtctctactaaaaatacaaaaag

SEQ ID NO: 24944 - DNA, 40 bp, Homo sapiens
tttttgtatttttagtagagacggggtttcaccatgttgg

SEQ ID NO: 24945 - DNA, 40 bp, Homo sapiens
ccaacatggtgaaaccccgtctctactaaaaatacaaaaa

SEQ ID NO: 24946 - DNA, 40 bp, Homo sapiens
ttttgtatttttagtagagacggggtttcaccatgttggc

SEQ ID NO: 24947 - DNA, 40 bp, Homo sapiens
gccaacatggtgaaaccccgtctctactaaaaatacaaaa

SEQ ID NO: 24948 - DNA, 40 bp, Homo sapiens
tttgtatttttagtagagacggggtttcaccatgttggcc

SEQ ID NO: 24949 - DNA, 40 bp, Homo sapiens
ggccaacatggtgaaaccccgtctctactaaaaatacaaa

SEQ ID NO: 24950 - DNA, 40 bp, Homo sapiens
ttgtatttttagtagagacggggtttcaccatgttggcca

SEQ ID NO: 24951 - DNA, 40 bp, Homo sapiens
tggccaacatggtgaaaccccgtctctactaaaaatacaa

SEQ ID NO: 24952 - DNA, 40 bp, Homo sapiens
tgtatttttagtagagacggggtttcaccatgttggccag

SEQ ID NO: 24953 - DNA, 40 bp, Homo sapiens
ctggccaacatggtgaaaccccgtctctactaaaaataca

SEQ ID NO: 24954 - DNA, 40 bp, Homo sapiens
gtatttttagtagagacggggtttcaccatgttggccagg

SEQ ID NO: 24955 - DNA, 40 bp, Homo sapiens
cctggccaacatggtgaaaccccgtctctactaaaaatac

SEQ ID NO: 24956 - DNA, 40 bp, Homo sapiens
tatttttagtagagacggggtttcaccatgttggccaggc

SEQ ID NO: 24957 - DNA, 40 bp, Homo sapiens
gcctggccaacatggtgaaaccccgtctctactaaaaata

SEQ ID NO: 24958 - DNA, 40 bp, Homo sapiens
atttttagtagagacggggtttcaccatgttggccaggct

SEQ ID NO: 24959 - DNA, 40 bp, Homo sapiens
agcctggccaacatggtgaaaccccgtctctactaaaaat

SEQ ID NO: 24960 - DNA, 40 bp, Homo sapiens
tttttagtagagacggggtttcaccatgttggccaggcta

SEQ ID NO: 24961 - DNA, 40 bp, Homo sapiens
tagcctggccaacatggtgaaaccccgtctctactaaaaa

SEQ ID NO: 24962 - DNA, 40 bp, Homo sapiens
ttttagtagagacggggtttcaccatgttggccaggctag

SEQ ID NO: 24963 - DNA, 40 bp, Homo sapiens
ctagcctggccaacatggtgaaaccccgtctctactaaaa

SEQ ID NO: 24964 - DNA, 40 bp, Homo sapiens
tttagtagagacggggtttcaccatgttggccaggctagt

SEQ ID NO: 24965 - DNA, 40 bp, Homo sapiens
actagcctggccaacatggtgaaaccccgtctctactaaa

SEQ ID NO: 24966 - DNA, 40 bp, Homo sapiens
ttagtagagacggggtttcaccatgttggccaggctagtc

SEQ ID NO: 24967 - DNA, 40 bp, Homo sapiens
gactagcctggccaacatggtgaaaccccgtctctactaa

SEQ ID NO: 24968 - DNA, 40 bp, Homo sapiens
tagtagagacggggtttcaccatgttggccaggctagtct

SEQ ID NO: 24969 - DNA, 40 bp, Homo sapiens
agactagcctggccaacatggtgaaaccccgtctctacta

SEQ ID NO: 24970 - DNA, 40 bp, Homo sapiens
agtagagacggggtttcaccatgttggccaggctagtctc

SEQ ID NO: 24971 - DNA, 40 bp, Homo sapiens
gagactagcctggccaacatggtgaaaccccgtctctact

SEQ ID NO: 24972 - DNA, 40 bp, Homo sapiens
gtagagacggggtttcaccatgttggccaggctagtctcg

SEQ ID NO: 24973 - DNA, 40 bp, Homo sapiens
cgagactagcctggccaacatggtgaaaccccgtctctac

SEQ ID NO: 24974 - DNA, 40 bp, Homo sapiens
tagagacggggtttcaccatgttggccaggctagtctcga

SEQ ID NO: 24975 - DNA, 40 bp, Homo sapiens
tcgagactagcctggccaacatggtgaaaccccgtctcta

SEQ ID NO: 24976 - DNA, 40 bp, Homo sapiens
agagacggggtttcaccatgttggccaggctagtctcgaa

SEQ ID NO: 24977 - DNA, 40 bp, Homo sapiens
ttcgagactagcctggccaacatggtgaaaccccgtctct

SEQ ID NO: 24978 - DNA, 40 bp, Homo sapiens
gagacggggtttcaccatgttggccaggctagtctcgaac

SEQ ID NO: 24979 - DNA, 40 bp, Homo sapiens
gttcgagactagcctggccaacatggtgaaaccccgtctc

SEQ ID NO: 24980 - DNA, 40 bp, Homo sapiens
agacggggtttcaccatgttggccaggctagtctcgaact

SEQ ID NO: 24981 - DNA, 40 bp, Homo sapiens
agttcgagactagcctggccaacatggtgaaaccccgtct

SEQ ID NO: 24982 - DNA, 40 bp, Homo sapiens
gacggggtttcaccatgttggccaggctagtctcgaactc

SEQ ID NO: 24983 - DNA, 40 bp, Homo sapiens
gagttcgagactagcctggccaacatggtgaaaccccgtc

SEQ ID NO: 24984 - DNA, 40 bp, Homo sapiens
acggggtttcaccatgttggccaggctagtctcgaactcc

SEQ ID NO: 24985 - DNA, 40 bp, Homo sapiens
ggagttcgagactagcctggccaacatggtgaaaccccgt

SEQ ID NO: 24986 - DNA, 40 bp, Homo sapiens
cggggtttcaccatgttggccaggctagtctcgaactcct

SEQ ID NO: 24987 - DNA, 40 bp, Homo sapiens
aggagttcgagactagcctggccaacatggtgaaaccccg

SEQ ID NO: 24988 - DNA, 40 bp, Homo sapiens
ggggtttcaccatgttggccaggctagtctcgaactcctg

SEQ ID NO: 24989 - DNA, 40 bp, Homo sapiens
caggagttcgagactagcctggccaacatggtgaaacccc

SEQ ID NO: 24990 - DNA, 40 bp, Homo sapiens
gggtttcaccatgttggccaggctagtctcgaactcctga

SEQ ID NO: 24991 - DNA, 40 bp, Homo sapiens
tcaggagttcgagactagcctggccaacatggtgaaaccc

SEQ ID NO: 24992 - DNA, 40 bp, Homo sapiens
ggtttcaccatgttggccaggctagtctcgaactcctgac

SEQ ID NO: 24993 - DNA, 40 bp, Homo sapiens
gtcaggagttcgagactagcctggccaacatggtgaaacc

SEQ ID NO: 24994 - DNA, 40 bp, Homo sapiens
gtttcaccatgttggccaggctagtctcgaactcctgacc

SEQ ID NO: 24995 - DNA, 40 bp, Homo sapiens
ggtcaggagttcgagactagcctggccaacatggtgaaac

SEQ ID NO: 24996 - DNA, 40 bp, Homo sapiens
tttcaccatgttggccaggctagtctcgaactcctgacct

SEQ ID NO: 24997 - DNA, 40 bp, Homo sapiens
aggtcaggagttcgagactagcctggccaacatggtgaaa

SEQ ID NO: 24998 - DNA, 40 bp, Homo sapiens
ttcaccatgttggccaggctagtctcgaactcctgacctc

SEQ ID NO: 24999 - DNA, 40 bp, Homo sapiens
gaggtcaggagttcgagactagcctggccaacatggtgaa

SEQ ID NO: 25000 - DNA, 40 bp, Homo sapiens
tcaccatgttggccaggctagtctcgaactcctgacctcg

SEQ ID NO: 25001 - DNA, 40 bp, Homo sapiens
cgaggtcaggagttcgagactagcctggccaacatggtga

SEQ ID NO: 25002 - DNA, 40 bp, Homo sapiens
caccatgttggccaggctagtctcgaactcctgacctcgt

SEQ ID NO: 25003 - DNA, 40 bp, Homo sapiens
acgaggtcaggagttcgagactagcctggccaacatggtg

SEQ ID NO: 25004 - DNA, 40 bp, Homo sapiens
accatgttggccaggctagtctcgaactcctgacctcgtg

SEQ ID NO: 25005 - DNA, 40 bp, Homo sapiens
cacgaggtcaggagttcgagactagcctggccaacatggt

SEQ ID NO: 25006 - DNA, 40 bp, Homo sapiens
ccatgttggccaggctagtctcgaactcctgacctcgtga

SEQ ID NO: 25007 - DNA, 40 bp, Homo sapiens
tcacgaggtcaggagttcgagactagcctggccaacatgg

SEQ ID NO: 25008 - DNA, 40 bp, Homo sapiens
catgttggccaggctagtctcgaactcctgacctcgtgat

SEQ ID NO: 25009 - DNA, 40 bp, Homo sapiens
atcacgaggtcaggagttcgagactagcctggccaacatg

SEQ ID NO: 25010 - DNA, 40 bp, Homo sapiens
atgttggccaggctagtctcgaactcctgacctcgtgatc

SEQ ID NO: 25011 - DNA, 40 bp, Homo sapiens
gatcacgaggtcaggagttcgagactagcctggccaacat

SEQ ID NO: 25012 - DNA, 40 bp, Homo sapiens
tgttggccaggctagtctcgaactcctgacctcgtgatct

SEQ ID NO: 25013 - DNA, 40 bp, Homo sapiens
agatcacgaggtcaggagttcgagactagcctggccaaca

SEQ ID NO: 25014 - DNA, 40 bp, Homo sapiens
gttggccaggctagtctcgaactcctgacctcgtgatctg

SEQ ID NO: 25015 - DNA, 40 bp, Homo sapiens
cagatcacgaggtcaggagttcgagactagcctggccaac

SEQ ID NO: 25016 - DNA, 40 bp, Homo sapiens
ttggccaggctagtctcgaactcctgacctcgtgatctgc

SEQ ID NO: 25017 - DNA, 40 bp, Homo sapiens
gcagatcacgaggtcaggagttcgagactagcctggccaa

SEQ ID NO: 25018 - DNA, 40 bp, Homo sapiens
tggccaggctagtctcgaactcctgacctcgtgatctgcc

SEQ ID NO: 25019 - DNA, 40 bp, Homo sapiens
ggcagatcacgaggtcaggagttcgagactagcctggcca

SEQ ID NO: 25020 - DNA, 40 bp, Homo sapiens
ggccaggctagtctcgaactcctgacctcgtgatctgccc

SEQ ID NO: 25021 - DNA, 40 bp, Homo sapiens
gggcagatcacgaggtcaggagttcgagactagcctggcc

SEQ ID NO: 25022 - DNA, 40 bp, Homo sapiens
gccaggctagtctcgaactcctgacctcgtgatctgcccg

SEQ ID NO: 25023 - DNA, 40 bp, Homo sapiens
cgggcagatcacgaggtcaggagttcgagactagcctggc

SEQ ID NO: 25024 - DNA, 40 bp, Homo sapiens
ccaggctagtctcgaactcctgacctcgtgatctgcccgc

SEQ ID NO: 25025 - DNA, 40 bp, Homo sapiens
gcgggcagatcacgaggtcaggagttcgagactagcctgg

SEQ ID NO: 25026 - DNA, 40 bp, Homo sapiens
caggctagtctcgaactcctgacctcgtgatctgcccgcc

SEQ ID NO: 25027 - DNA, 40 bp, Homo sapiens
ggcgggcagatcacgaggtcaggagttcgagactagcctg

SEQ ID NO: 25028 - DNA, 40 bp, Homo sapiens
aggctagtctcgaactcctgacctcgtgatctgcccgcct

SEQ ID NO: 25029 - DNA, 40 bp, Homo sapiens
aggcgggcagatcacgaggtcaggagttcgagactagcct

SEQ ID NO: 25030 - DNA, 40 bp, Homo sapiens
ggctagtctcgaactcctgacctcgtgatctgcccgcctc

SEQ ID NO: 25031 - DNA, 40 bp, Homo sapiens
gaggcgggcagatcacgaggtcaggagttcgagactagcc

SEQ ID NO: 25032 - DNA, 40 bp, Homo sapiens
gctagtctcgaactcctgacctcgtgatctgcccgcctca

SEQ ID NO: 25033 - DNA, 40 bp, Homo sapiens
tgaggcgggcagatcacgaggtcaggagttcgagactagc

SEQ ID NO: 25034 - DNA, 40 bp, Homo sapiens
ctagtctcgaactcctgacctcgtgatctgcccgcctcag

SEQ ID NO: 25035 - DNA, 40 bp, Homo sapiens
ctgaggcgggcagatcacgaggtcaggagttcgagactag

SEQ ID NO: 25036 - DNA, 40 bp, Homo sapiens
tagtctcgaactcctgacctcgtgatctgcccgcctcagc

SEQ ID NO: 25037 - DNA, 40 bp, Homo sapiens
gctgaggcgggcagatcacgaggtcaggagttcgagacta

SEQ ID NO: 25038 - DNA, 40 bp, Homo sapiens
agtctcgaactcctgacctcgtgatctgcccgcctcagca

SEQ ID NO: 25039 - DNA, 40 bp, Homo sapiens
tgctgaggcgggcagatcacgaggtcaggagttcgagact

SEQ ID NO: 25040 - DNA, 40 bp, Homo sapiens
gtctcgaactcctgacctcgtgatctgcccgcctcagcag

SEQ ID NO: 25041 - DNA, 40 bp, Homo sapiens
ctgctgaggcgggcagatcacgaggtcaggagttcgagac

SEQ ID NO: 25042 - DNA, 40 bp, Homo sapiens
tctcgaactcctgacctcgtgatctgcccgcctcagcagt

SEQ ID NO: 25043 - DNA, 40 bp, Homo sapiens
actgctgaggcgggcagatcacgaggtcaggagttcgaga

SEQ ID NO: 25044 - DNA, 40 bp, Homo sapiens
ctcgaactcctgacctcgtgatctgcccgcctcagcagtg

SEQ ID NO: 25045 - DNA, 40 bp, Homo sapiens
cactgctgaggcgggcagatcacgaggtcaggagttcgag

SEQ ID NO: 25046 - DNA, 40 bp, Homo sapiens
tcgaactcctgacctcgtgatctgcccgcctcagcagtgt

SEQ ID NO: 25047 - DNA, 40 bp, Homo sapiens
acactgctgaggcgggcagatcacgaggtcaggagttcga

SEQ ID NO: 25048 - DNA, 40 bp, Homo sapiens
cgaactcctgacctcgtgatctgcccgcctcagcagtgtc

SEQ ID NO: 25049 - DNA, 40 bp, Homo sapiens
gacactgctgaggcgggcagatcacgaggtcaggagttcg

SEQ ID NO: 25050 - DNA, 40 bp, Homo sapiens
gaactcctgacctcgtgatctgcccgcctcagcagtgtca

SEQ ID NO: 25051 - DNA, 40 bp, Homo sapiens
tgacactgctgaggcgggcagatcacgaggtcaggagttc

SEQ ID NO: 25052 - DNA, 40 bp, Homo sapiens
aactcctgacctcgtgatctgcccgcctcagcagtgtcac

SEQ ID NO: 25053 - DNA, 40 bp, Homo sapiens
gtgacactgctgaggcgggcagatcacgaggtcaggagtt

SEQ ID NO: 25054 - DNA, 40 bp, Homo sapiens
actcctgacctcgtgatctgcccgcctcagcagtgtcact

SEQ ID NO: 25055 - DNA, 40 bp, Homo sapiens
agtgacactgctgaggcgggcagatcacgaggtcaggagt

SEQ ID NO: 25056 - DNA, 40 bp, Homo sapiens
ctcctgacctcgtgatctgcccgcctcagcagtgtcactg

SEQ ID NO: 25057 - DNA, 40 bp, Homo sapiens
cagtgacactgctgaggcgggcagatcacgaggtcaggag

SEQ ID NO: 25058 - DNA, 40 bp, Homo sapiens
tcctgacctcgtgatctgcccgcctcagcagtgtcactgc

SEQ ID NO: 25059 - DNA, 40 bp, Homo sapiens
gcagtgacactgctgaggcgggcagatcacgaggtcagga

SEQ ID NO: 25060 - DNA, 40 bp, Homo sapiens
cctgacctcgtgatctgcccgcctcagcagtgtcactgct

SEQ ID NO: 25061 - DNA, 40 bp, Homo sapiens
agcagtgacactgctgaggcgggcagatcacgaggtcagg

SEQ ID NO: 25062 - DNA, 40 bp, Homo sapiens
ctgacctcgtgatctgcccgcctcagcagtgtcactgctt

SEQ ID NO: 25063 - DNA, 40 bp, Homo sapiens
aagcagtgacactgctgaggcgggcagatcacgaggtcag

SEQ ID NO: 25064 - DNA, 40 bp, Homo sapiens
tgacctcgtgatctgcccgcctcagcagtgtcactgcttc

SEQ ID NO: 25065 - DNA, 40 bp, Homo sapiens
gaagcagtgacactgctgaggcgggcagatcacgaggtca

SEQ ID NO: 25066 - DNA, 40 bp, Homo sapiens
gacctcgtgatctgcccgcctcagcagtgtcactgcttct

SEQ ID NO: 25067 - DNA, 40 bp, Homo sapiens
agaagcagtgacactgctgaggcgggcagatcacgaggtc

SEQ ID NO: 25068 - DNA, 40 bp, Homo sapiens
acctcgtgatctgcccgcctcagcagtgtcactgcttcta

SEQ ID NO: 25069 - DNA, 40 bp, Homo sapiens
tagaagcagtgacactgctgaggcgggcagatcacgaggt

SEQ ID NO: 25070 - DNA, 40 bp, Homo sapiens
cctcgtgatctgcccgcctcagcagtgtcactgcttctag

SEQ ID NO: 25071 - DNA, 40 bp, Homo sapiens
ctagaagcagtgacactgctgaggcgggcagatcacgagg

SEQ ID NO: 25072 - DNA, 40 bp, Homo sapiens
ctcgtgatctgcccgcctcagcagtgtcactgcttctaga

SEQ ID NO: 25073 - DNA, 40 bp, Homo sapiens
tctagaagcagtgacactgctgaggcgggcagatcacgag

SEQ ID NO: 25074 - DNA, 40 bp, Homo sapiens
tcgtgatctgcccgcctcagcagtgtcactgcttctagac

SEQ ID NO: 25075 - DNA, 40 bp, Homo sapiens
gtctagaagcagtgacactgctgaggcgggcagatcacga

SEQ ID NO: 25076 - DNA, 40 bp, Homo sapiens
cgtgatctgcccgcctcagcagtgtcactgcttctagacc

SEQ ID NO: 25077 - DNA, 40 bp, Homo sapiens
ggtctagaagcagtgacactgctgaggcgggcagatcacg

SEQ ID NO: 25078 - DNA, 40 bp, Homo sapiens
gtgatctgcccgcctcagcagtgtcactgcttctagaccg

SEQ ID NO: 25079 - DNA, 40 bp, Homo sapiens
cggtctagaagcagtgacactgctgaggcgggcagatcac

SEQ ID NO: 25080 - DNA, 40 bp, Homo sapiens
tgatctgcccgcctcagcagtgtcactgcttctagaccgt

SEQ ID NO: 25081 - DNA, 40 bp, Homo sapiens
acggtctagaagcagtgacactgctgaggcgggcagatca

SEQ ID NO: 25082 - DNA, 40 bp, Homo sapiens
gatctgcccgcctcagcagtgtcactgcttctagaccgtt

SEQ ID NO: 25083 - DNA, 40 bp, Homo sapiens
aacggtctagaagcagtgacactgctgaggcgggcagatc

SEQ ID NO: 25084 - DNA, 40 bp, Homo sapiens
atctgcccgcctcagcagtgtcactgcttctagaccgttt

SEQ ID NO: 25085 - DNA, 40 bp, Homo sapiens
aaacggtctagaagcagtgacactgctgaggcgggcagat

SEQ ID NO: 25086 - DNA, 40 bp, Homo sapiens
tctgcccgcctcagcagtgtcactgcttctagaccgtttt

SEQ ID NO: 25087 - DNA, 40 bp, Homo sapiens
aaaacggtctagaagcagtgacactgctgaggcgggcaga

SEQ ID NO: 25088 - DNA, 40 bp, Homo sapiens
ctgcccgcctcagcagtgtcactgcttctagaccgttttc

SEQ ID NO: 25089 - DNA, 40 bp, Homo sapiens
gaaaacggtctagaagcagtgacactgctgaggcgggcag

SEQ ID NO: 25090 - DNA, 40 bp, Homo sapiens
tgcccgcctcagcagtgtcactgcttctagaccgttttca

SEQ ID NO: 25091 - DNA, 40 bp, Homo sapiens
tgaaaacggtctagaagcagtgacactgctgaggcgggca

SEQ ID NO: 25092 - DNA, 40 bp, Homo sapiens
gcccgcctcagcagtgtcactgcttctagaccgttttcaa

SEQ ID NO: 25093 - DNA, 40 bp, Homo sapiens
ttgaaaacggtctagaagcagtgacactgctgaggcgggc

SEQ ID NO: 25094 - DNA, 40 bp, Homo sapiens
cccgcctcagcagtgtcactgcttctagaccgttttcaag

SEQ ID NO: 25095 - DNA, 40 bp, Homo sapiens
cttgaaaacggtctagaagcagtgacactgctgaggcggg

SEQ ID NO: 25096 - DNA, 40 bp, Homo sapiens
ccgcctcagcagtgtcactgcttctagaccgttttcaagg

SEQ ID NO: 25097 - DNA, 40 bp, Homo sapiens
ccttgaaaacggtctagaagcagtgacactgctgaggcgg

SEQ ID NO: 25098 - DNA, 40 bp, Homo sapiens
cgcctcagcagtgtcactgcttctagaccgttttcaaggc

SEQ ID NO: 25099 - DNA, 40 bp, Homo sapiens
gccttgaaaacggtctagaagcagtgacactgctgaggcg

SEQ ID NO: 25100 - DNA, 40 bp, Homo sapiens
gcctcagcagtgtcactgcttctagaccgttttcaaggca

SEQ ID NO: 25101 - DNA, 40 bp, Homo sapiens
tgccttgaaaacggtctagaagcagtgacactgctgaggc

SEQ ID NO: 25102 - DNA, 40 bp, Homo sapiens
cctcagcagtgtcactgcttctagaccgttttcaaggcac

SEQ ID NO: 25103 - DNA, 40 bp, Homo sapiens
gtgccttgaaaacggtctagaagcagtgacactgctgagg

SEQ ID NO: 25104 - DNA, 40 bp, Homo sapiens
ctcagcagtgtcactgcttctagaccgttttcaaggcaca

SEQ ID NO: 25105 - DNA, 40 bp, Homo sapiens
tgtgccttgaaaacggtctagaagcagtgacactgctgag

SEQ ID NO: 25106 - DNA, 40 bp, Homo sapiens
tcagcagtgtcactgcttctagaccgttttcaaggcacag

SEQ ID NO: 25107 - DNA, 40 bp, Homo sapiens
ctgtgccttgaaaacggtctagaagcagtgacactgctga

SEQ ID NO: 25108 - DNA, 40 bp, Homo sapiens
cagcagtgtcactgcttctagaccgttttcaaggcacaga

SEQ ID NO: 25109 - DNA, 40 bp, Homo sapiens
tctgtgccttgaaaacggtctagaagcagtgacactgctg

SEQ ID NO: 25110 - DNA, 40 bp, Homo sapiens
agcagtgtcactgcttctagaccgttttcaaggcacagag

SEQ ID NO: 25111 - DNA, 40 bp, Homo sapiens
ctctgtgccttgaaaacggtctagaagcagtgacactgct

SEQ ID NO: 25112 - DNA, 40 bp, Homo sapiens
gcagtgtcactgcttctagaccgttttcaaggcacagagc

SEQ ID NO: 25113 - DNA, 40 bp, Homo sapiens
gctctgtgccttgaaaacggtctagaagcagtgacactgc

SEQ ID NO: 25114 - DNA, 40 bp, Homo sapiens
cagtgtcactgcttctagaccgttttcaaggcacagagct

SEQ ID NO: 25115 - DNA, 40 bp, Homo sapiens
agctctgtgccttgaaaacggtctagaagcagtgacactg

SEQ ID NO: 25116 - DNA, 40 bp, Homo sapiens
agtgtcactgcttctagaccgttttcaaggcacagagctt

SEQ ID NO: 25117 - DNA, 40 bp, Homo sapiens
aagctctgtgccttgaaaacggtctagaagcagtgacact

SEQ ID NO: 25118 - DNA, 40 bp, Homo sapiens
gtgtcactgcttctagaccgttttcaaggcacagagctta

SEQ ID NO: 25119 - DNA, 40 bp, Homo sapiens
taagctctgtgccttgaaaacggtctagaagcagtgacac

SEQ ID NO: 25120 - DNA, 40 bp, Homo sapiens
tgtcactgcttctagaccgttttcaaggcacagagcttag

SEQ ID NO: 25121 - DNA, 40 bp, Homo sapiens
ctaagctctgtgccttgaaaacggtctagaagcagtgaca

SEQ ID NO: 25122 - DNA, 40 bp, Homo sapiens
gtcactgcttctagaccgttttcaaggcacagagcttaga

SEQ ID NO: 25123 - DNA, 40 bp, Homo sapiens
tctaagctctgtgccttgaaaacggtctagaagcagtgac

SEQ ID NO: 25124 - DNA, 40 bp, Homo sapiens
tcactgcttctagaccgttttcaaggcacagagcttagaa

SEQ ID NO: 25125 - DNA, 40 bp, Homo sapiens
ttctaagctctgtgccttgaaaacggtctagaagcagtga

SEQ ID NO: 25126 - DNA, 40 bp, Homo sapiens
cactgcttctagaccgttttcaaggcacagagcttagaaa

SEQ ID NO: 25127 - DNA, 40 bp, Homo sapiens
tttctaagctctgtgccttgaaaacggtctagaagcagtg

SEQ ID NO: 25128 - DNA, 40 bp, Homo sapiens
actgcttctagaccgttttcaaggcacagagcttagaaat

SEQ ID NO: 25129 - DNA, 40 bp, Homo sapiens
atttctaagctctgtgccttgaaaacggtctagaagcagt

SEQ ID NO: 25130 - DNA, 40 bp, Homo sapiens
ctgcttctagaccgttttcaaggcacagagcttagaaatg

SEQ ID NO: 25131 - DNA, 40 bp, Homo sapiens
catttctaagctctgtgccttgaaaacggtctagaagcag

SEQ ID NO: 25132 - DNA, 40 bp, Homo sapiens
tgcttctagaccgttttcaaggcacagagcttagaaatgc

SEQ ID NO: 25133 - DNA, 40 bp, Homo sapiens
gcatttctaagctctgtgccttgaaaacggtctagaagca

SEQ ID NO: 25134 - DNA, 40 bp, Homo sapiens
gcttctagaccgttttcaaggcacagagcttagaaatgca

SEQ ID NO: 25135 - DNA, 40 bp, Homo sapiens
tgcatttctaagctctgtgccttgaaaacggtctagaagc

SEQ ID NO: 25136 - DNA, 40 bp, Homo sapiens
cttctagaccgttttcaaggcacagagcttagaaatgcat

SEQ ID NO: 25137 - DNA, 40 bp, Homo sapiens
atgcatttctaagctctgtgccttgaaaacggtctagaag

SEQ ID NO: 25138 - DNA, 40 bp, Homo sapiens
ttctagaccgttttcaaggcacagagcttagaaatgcatg

SEQ ID NO: 25139 - DNA, 40 bp, Homo sapiens
catgcatttctaagctctgtgccttgaaaacggtctagaa

SEQ ID NO: 25140 - DNA, 40 bp, Homo sapiens
tctagaccgttttcaaggcacagagcttagaaatgcatgt

SEQ ID NO: 25141 - DNA, 40 bp, Homo sapiens
acatgcatttctaagctctgtgccttgaaaacggtctaga

SEQ ID NO: 25142 - DNA, 40 bp, Homo sapiens
ctagaccgttttcaaggcacagagcttagaaatgcatgtt

SEQ ID NO: 25143 - DNA, 40 bp, Homo sapiens
aacatgcatttctaagctctgtgccttgaaaacggtctag

SEQ ID NO: 25144 - DNA, 40 bp, Homo sapiens
tagaccgttttcaaggcacagagcttagaaatgcatgtta

SEQ ID NO: 25145 - DNA, 40 bp, Homo sapiens
taacatgcatttctaagctctgtgccttgaaaacggtcta

SEQ ID NO: 25146 - DNA, 40 bp, Homo sapiens
agaccgttttcaaggcacagagcttagaaatgcatgttac

SEQ ID NO: 25147 - DNA, 40 bp, Homo sapiens
gtaacatgcatttctaagctctgtgccttgaaaacggtct

SEQ ID NO: 25148 - DNA, 40 bp, Homo sapiens
gaccgttttcaaggcacagagcttagaaatgcatgttact

SEQ ID NO: 25149 - DNA, 40 bp, Homo sapiens
agtaacatgcatttctaagctctgtgccttgaaaacggtc

SEQ ID NO: 25150 - DNA, 40 bp, Homo sapiens
accgttttcaaggcacagagcttagaaatgcatgttacta

SEQ ID NO: 25151 - DNA, 40 bp, Homo sapiens
tagtaacatgcatttctaagctctgtgccttgaaaacggt

SEQ ID NO: 25152 - DNA, 40 bp, Homo sapiens
ccgttttcaaggcacagagcttagaaatgcatgttactaa

SEQ ID NO: 25153 - DNA, 40 bp, Homo sapiens
ttagtaacatgcatttctaagctctgtgccttgaaaacgg

SEQ ID NO: 25154 - DNA, 40 bp, Homo sapiens
cgttttcaaggcacagagcttagaaatgcatgttactaag

SEQ ID NO: 25155 - DNA, 40 bp, Homo sapiens
cttagtaacatgcatttctaagctctgtgccttgaaaacg

SEQ ID NO: 25156 - DNA, 40 bp, Homo sapiens
gttttcaaggcacagagcttagaaatgcatgttactaaga

SEQ ID NO: 25157 - DNA, 40 bp, Homo sapiens
tcttagtaacatgcatttctaagctctgtgccttgaaaac

SEQ ID NO: 25158 - DNA, 40 bp, Homo sapiens
ttttcaaggcacagagcttagaaatgcatgttactaagaa

SEQ ID NO: 25159 - DNA, 40 bp, Homo sapiens
ttcttagtaacatgcatttctaagctctgtgccttgaaaa

SEQ ID NO: 25160 - DNA, 40 bp, Homo sapiens
tttcaaggcacagagcttagaaatgcatgttactaagaaa

SEQ ID NO: 25161 - DNA, 40 bp, Homo sapiens
tttcttagtaacatgcatttctaagctctgtgccttgaaa

SEQ ID NO: 25162 - DNA, 40 bp, Homo sapiens
ttcaaggcacagagcttagaaatgcatgttactaagaaat

SEQ ID NO: 25163 - DNA, 40 bp, Homo sapiens
atttcttagtaacatgcatttctaagctctgtgccttgaa

SEQ ID NO: 25164 - DNA, 40 bp, Homo sapiens
tcaaggcacagagcttagaaatgcatgttactaagaaatc

SEQ ID NO: 25165 - DNA, 40 bp, Homo sapiens
gatttcttagtaacatgcatttctaagctctgtgccttga

SEQ ID NO: 25166 - DNA, 40 bp, Homo sapiens
caaggcacagagcttagaaatgcatgttactaagaaatca

SEQ ID NO: 25167 - DNA, 40 bp, Homo sapiens
tgatttcttagtaacatgcatttctaagctctgtgccttg

SEQ ID NO: 25168 - DNA, 40 bp, Homo sapiens
aaggcacagagcttagaaatgcatgttactaagaaatcaa

SEQ ID NO: 25169 - DNA, 40 bp, Homo sapiens
ttgatttcttagtaacatgcatttctaagctctgtgcctt

SEQ ID NO: 25170 - DNA, 40 bp, Homo sapiens
aggcacagagcttagaaatgcatgttactaagaaatcaag

SEQ ID NO: 25171 - DNA, 40 bp, Homo sapiens
cttgatttcttagtaacatgcatttctaagctctgtgcct

SEQ ID NO: 25172 - DNA, 40 bp, Homo sapiens
ggcacagagcttagaaatgcatgttactaagaaatcaaga

SEQ ID NO: 25173 - DNA, 40 bp, Homo sapiens
tcttgatttcttagtaacatgcatttctaagctctgtgcc

SEQ ID NO: 25174 - DNA, 40 bp, Homo sapiens
gcacagagcttagaaatgcatgttactaagaaatcaagag

SEQ ID NO: 25175 - DNA, 40 bp, Homo sapiens
ctcttgatttcttagtaacatgcatttctaagctctgtgc

SEQ ID NO: 25176 - DNA, 40 bp, Homo sapiens
cacagagcttagaaatgcatgttactaagaaatcaagagt

SEQ ID NO: 25177 - DNA, 40 bp, Homo sapiens
actcttgatttcttagtaacatgcatttctaagctctgtg

SEQ ID NO: 25178 - DNA, 40 bp, Homo sapiens
acagagcttagaaatgcatgttactaagaaatcaagagtt

SEQ ID NO: 25179 - DNA, 40 bp, Homo sapiens
aactcttgatttcttagtaacatgcatttctaagctctgt

SEQ ID NO: 25180 - DNA, 40 bp, Homo sapiens
cagagcttagaaatgcatgttactaagaaatcaagagtta

SEQ ID NO: 25181 - DNA, 40 bp, Homo sapiens
taactcttgatttcttagtaacatgcatttctaagctctg

SEQ ID NO: 25182 - DNA, 40 bp, Homo sapiens
agagcttagaaatgcatgttactaagaaatcaagagttaa

SEQ ID NO: 25183 - DNA, 40 bp, Homo sapiens
ttaactcttgatttcttagtaacatgcatttctaagctct

SEQ ID NO: 25184 - DNA, 40 bp, Homo sapiens
gagcttagaaatgcatgttactaagaaatcaagagttaac

SEQ ID NO: 25185 - DNA, 40 bp, Homo sapiens
gttaactcttgatttcttagtaacatgcatttctaagctc

SEQ ID NO: 25186 - DNA, 40 bp, Homo sapiens
agcttagaaatgcatgttactaagaaatcaagagttaact

SEQ ID NO: 25187 - DNA, 40 bp, Homo sapiens
agttaactcttgatttcttagtaacatgcatttctaagct

SEQ ID NO: 25188 - DNA, 40 bp, Homo sapiens
gcttagaaatgcatgttactaagaaatcaagagttaacta

SEQ ID NO: 25189 - DNA, 40 bp, Homo sapiens
tagttaactcttgatttcttagtaacatgcatttctaagc

SEQ ID NO: 25190 - DNA, 40 bp, Homo sapiens
cttagaaatgcatgttactaagaaatcaagagttaactat

SEQ ID NO: 25191 - DNA, 40 bp, Homo sapiens
atagttaactcttgatttcttagtaacatgcatttctaag

SEQ ID NO: 25192 - DNA, 40 bp, Homo sapiens
ttagaaatgcatgttactaagaaatcaagagttaactatt

SEQ ID NO: 25193 - DNA, 40 bp, Homo sapiens
aatagttaactcttgatttcttagtaacatgcatttctaa

SEQ ID NO: 25194 - DNA, 40 bp, Homo sapiens
tagaaatgcatgttactaagaaatcaagagttaactattt

SEQ ID NO: 25195 - DNA, 40 bp, Homo sapiens
aaatagttaactcttgatttcttagtaacatgcatttcta

SEQ ID NO: 25196 - DNA, 40 bp, Homo sapiens
agaaatgcatgttactaagaaatcaagagttaactatttt

SEQ ID NO: 25197 - DNA, 40 bp, Homo sapiens
aaaatagttaactcttgatttcttagtaacatgcatttct

SEQ ID NO: 25198 - DNA, 40 bp, Homo sapiens
gaaatgcatgttactaagaaatcaagagttaactattttt

SEQ ID NO: 25199 - DNA, 40 bp, Homo sapiens
aaaaatagttaactcttgatttcttagtaacatgcatttc

SEQ ID NO: 25200 - DNA, 40 bp, Homo sapiens
aaatgcatgttactaagaaatcaagagttaactatttttc

SEQ ID NO: 25201 - DNA, 40 bp, Homo sapiens
gaaaaatagttaactcttgatttcttagtaacatgcattt

SEQ ID NO: 25202 - DNA, 40 bp, Homo sapiens
aatgcatgttactaagaaatcaagagttaactatttttca

SEQ ID NO: 25203 - DNA, 40 bp, Homo sapiens
tgaaaaatagttaactcttgatttcttagtaacatgcatt

SEQ ID NO: 25204 - DNA, 40 bp, Homo sapiens
atgcatgttactaagaaatcaagagttaactatttttcac

SEQ ID NO: 25205 - DNA, 40 bp, Homo sapiens
gtgaaaaatagttaactcttgatttcttagtaacatgcat

SEQ ID NO: 25206 - DNA, 40 bp, Homo sapiens
tgcatgttactaagaaatcaagagttaactatttttcacc

SEQ ID NO: 25207 - DNA, 40 bp, Homo sapiens
ggtgaaaaatagttaactcttgatttcttagtaacatgca

SEQ ID NO: 25208 - DNA, 40 bp, Homo sapiens
gcatgttactaagaaatcaagagttaactatttttcacct

SEQ ID NO: 25209 - DNA, 40 bp, Homo sapiens
aggtgaaaaatagttaactcttgatttcttagtaacatgc

SEQ ID NO: 25210 - DNA, 40 bp, Homo sapiens
catgttactaagaaatcaagagttaactatttttcacctt

SEQ ID NO: 25211 - DNA, 40 bp, Homo sapiens
aaggtgaaaaatagttaactcttgatttcttagtaacatg

SEQ ID NO: 25212 - DNA, 40 bp, Homo sapiens
atgttactaagaaatcaagagttaactatttttcaccttc

SEQ ID NO: 25213 - DNA, 40 bp, Homo sapiens
gaaggtgaaaaatagttaactcttgatttcttagtaacat

SEQ ID NO: 25214 - DNA, 40 bp, Homo sapiens
tgttactaagaaatcaagagttaactatttttcaccttct

SEQ ID NO: 25215 - DNA, 40 bp, Homo sapiens
agaaggtgaaaaatagttaactcttgatttcttagtaaca

SEQ ID NO: 25216 - DNA, 40 bp, Homo sapiens
gttactaagaaatcaagagttaactatttttcaccttctt

SEQ ID NO: 25217 - DNA, 40 bp, Homo sapiens
aagaaggtgaaaaatagttaactcttgatttcttagtaac

SEQ ID NO: 25218 - DNA, 40 bp, Homo sapiens
ttactaagaaatcaagagttaactatttttcaccttcttt

SEQ ID NO: 25219 - DNA, 40 bp, Homo sapiens
aaagaaggtgaaaaatagttaactcttgatttcttagtaa

SEQ ID NO: 25220 - DNA, 40 bp, Homo sapiens
tactaagaaatcaagagttaactatttttcaccttctttc

SEQ ID NO: 25221 - DNA, 40 bp, Homo sapiens
gaaagaaggtgaaaaatagttaactcttgatttcttagta

SEQ ID NO: 25222 - DNA, 40 bp, Homo sapiens
actaagaaatcaagagttaactatttttcaccttctttct

SEQ ID NO: 25223 - DNA, 40 bp, Homo sapiens
agaaagaaggtgaaaaatagttaactcttgatttcttagt

SEQ ID NO: 25224 - DNA, 40 bp, Homo sapiens
ctaagaaatcaagagttaactatttttcaccttctttctc

SEQ ID NO: 25225 - DNA, 40 bp, Homo sapiens
gagaaagaaggtgaaaaatagttaactcttgatttcttag

SEQ ID NO: 25226 - DNA, 40 bp, Homo sapiens
taagaaatcaagagttaactatttttcaccttctttctcc

SEQ ID NO: 25227 - DNA, 40 bp, Homo sapiens
ggagaaagaaggtgaaaaatagttaactcttgatttctta

SEQ ID NO: 25228 - DNA, 40 bp, Homo sapiens
aagaaatcaagagttaactatttttcaccttctttctccc

SEQ ID NO: 25229 - DNA, 40 bp, Homo sapiens
gggagaaagaaggtgaaaaatagttaactcttgatttctt

SEQ ID NO: 25230 - DNA, 40 bp, Homo sapiens
agaaatcaagagttaactatttttcaccttctttctcccg

SEQ ID NO: 25231 - DNA, 40 bp, Homo sapiens
cgggagaaagaaggtgaaaaatagttaactcttgatttct

SEQ ID NO: 25232 - DNA, 40 bp, Homo sapiens
gaaatcaagagttaactatttttcaccttctttctcccgc

SEQ ID NO: 25233 - DNA, 40 bp, Homo sapiens
gcgggagaaagaaggtgaaaaatagttaactcttgatttc

SEQ ID NO: 25234 - DNA, 40 bp, Homo sapiens
aaatcaagagttaactatttttcaccttctttctcccgca

SEQ ID NO: 25235 - DNA, 40 bp, Homo sapiens
tgcgggagaaagaaggtgaaaaatagttaactcttgattt

SEQ ID NO: 25236 - DNA, 40 bp, Homo sapiens
aatcaagagttaactatttttcaccttctttctcccgcag

SEQ ID NO: 25237 - DNA, 40 bp, Homo sapiens
ctgcgggagaaagaaggtgaaaaatagttaactcttgatt

SEQ ID NO: 25238 - DNA, 40 bp, Homo sapiens
atcaagagttaactatttttcaccttctttctcccgcagt

SEQ ID NO: 25239 - DNA, 40 bp, Homo sapiens
actgcgggagaaagaaggtgaaaaatagttaactcttgat

SEQ ID NO: 25240 - DNA, 40 bp, Homo sapiens
tcaagagttaactatttttcaccttctttctcccgcagtg

SEQ ID NO: 25241 - DNA, 40 bp, Homo sapiens
cactgcgggagaaagaaggtgaaaaatagttaactcttga

SEQ ID NO: 25242 - DNA, 40 bp, Homo sapiens
caagagttaactatttttcaccttctttctcccgcagtga

SEQ ID NO: 25243 - DNA, 40 bp, Homo sapiens
tcactgcgggagaaagaaggtgaaaaatagttaactcttg

SEQ ID NO: 25244 - DNA, 40 bp, Homo sapiens
aagagttaactatttttcaccttctttctcccgcagtgag

SEQ ID NO: 25245 - DNA, 40 bp, Homo sapiens
ctcactgcgggagaaagaaggtgaaaaatagttaactctt

SEQ ID NO: 25246 - DNA, 40 bp, Homo sapiens
agagttaactatttttcaccttctttctcccgcagtgaga

SEQ ID NO: 25247 - DNA, 40 bp, Homo sapiens
tctcactgcgggagaaagaaggtgaaaaatagttaactct

SEQ ID NO: 25248 - DNA, 40 bp, Homo sapiens
gagttaactatttttcaccttctttctcccgcagtgagaa

SEQ ID NO: 25249 - DNA, 40 bp, Homo sapiens
ttctcactgcgggagaaagaaggtgaaaaatagttaactc

SEQ ID NO: 25250 - DNA, 40 bp, Homo sapiens
agttaactatttttcaccttctttctcccgcagtgagaac

SEQ ID NO: 25251 - DNA, 40 bp, Homo sapiens
gttctcactgcgggagaaagaaggtgaaaaatagttaact

SEQ ID NO: 25252 - DNA, 40 bp, Homo sapiens
gttaactatttttcaccttctttctcccgcagtgagaacc

SEQ ID NO: 25253 - DNA, 40 bp, Homo sapiens
ggttctcactgcgggagaaagaaggtgaaaaatagttaac

SEQ ID NO: 25254 - DNA, 40 bp, Homo sapiens
ttaactatttttcaccttctttctcccgcagtgagaaccc

SEQ ID NO: 25255 - DNA, 40 bp, Homo sapiens
gggttctcactgcgggagaaagaaggtgaaaaatagttaa

SEQ ID NO: 25256 - DNA, 40 bp, Homo sapiens
taactatttttcaccttctttctcccgcagtgagaaccct

SEQ ID NO: 25257 - DNA, 40 bp, Homo sapiens
agggttctcactgcgggagaaagaaggtgaaaaatagtta

SEQ ID NO: 25258 - DNA, 40 bp, Homo sapiens
aactatttttcaccttctttctcccgcagtgagaaccctg

SEQ ID NO: 25259 - DNA, 40 bp, Homo sapiens
cagggttctcactgcgggagaaagaaggtgaaaaatagtt

SEQ ID NO: 25260 - DNA, 40 bp, Homo sapiens
actatttttcaccttctttctcccgcagtgagaaccctgg

SEQ ID NO: 25261 - DNA, 40 bp, Homo sapiens
ccagggttctcactgcgggagaaagaaggtgaaaaatagt

SEQ ID NO: 25262 - DNA, 40 bp, Homo sapiens
ctatttttcaccttctttctcccgcagtgagaaccctggt

SEQ ID NO: 25263 - DNA, 40 bp, Homo sapiens
accagggttctcactgcgggagaaagaaggtgaaaaatag

SEQ ID NO: 25264 - DNA, 40 bp, Homo sapiens
tatttttcaccttctttctcccgcagtgagaaccctggtt

SEQ ID NO: 25265 - DNA, 40 bp, Homo sapiens
aaccagggttctcactgcgggagaaagaaggtgaaaaata

SEQ ID NO: 25266 - DNA, 40 bp, Homo sapiens
atttttcaccttctttctcccgcagtgagaaccctggttc

SEQ ID NO: 25267 - DNA, 40 bp, Homo sapiens
gaaccagggttctcactgcgggagaaagaaggtgaaaaat

SEQ ID NO: 25268 - DNA, 40 bp, Homo sapiens
tttttcaccttctttctcccgcagtgagaaccctggttct

SEQ ID NO: 25269 - DNA, 40 bp, Homo sapiens
agaaccagggttctcactgcgggagaaagaaggtgaaaaa

SEQ ID NO: 25270 - DNA, 40 bp, Homo sapiens
ttttcaccttctttctcccgcagtgagaaccctggttcta

SEQ ID NO: 25271 - DNA, 40 bp, Homo sapiens
tagaaccagggttctcactgcgggagaaagaaggtgaaaa

SEQ ID NO: 25272 - DNA, 40 bp, Homo sapiens
tttcaccttctttctcccgcagtgagaaccctggttctac

SEQ ID NO: 25273 - DNA, 40 bp, Homo sapiens
gtagaaccagggttctcactgcgggagaaagaaggtgaaa

SEQ ID NO: 25274 - DNA, 40 bp, Homo sapiens
ttcaccttctttctcccgcagtgagaaccctggttctacc

SEQ ID NO: 25275 - DNA, 40 bp, Homo sapiens
ggtagaaccagggttctcactgcgggagaaagaaggtgaa

SEQ ID NO: 25276 - DNA, 40 bp, Homo sapiens
tcaccttctttctcccgcagtgagaaccctggttctaccc

SEQ ID NO: 25277 - DNA, 40 bp, Homo sapiens
gggtagaaccagggttctcactgcgggagaaagaaggtga

SEQ ID NO: 25278 - DNA, 40 bp, Homo sapiens
caccttctttctcccgcagtgagaaccctggttctaccct

SEQ ID NO: 25279 - DNA, 40 bp, Homo sapiens
agggtagaaccagggttctcactgcgggagaaagaaggtg

SEQ ID NO: 25280 - DNA, 40 bp, Homo sapiens
accttctttctcccgcagtgagaaccctggttctaccctg

SEQ ID NO: 25281 - DNA, 40 bp, Homo sapiens
cagggtagaaccagggttctcactgcgggagaaagaaggt

SEQ ID NO: 25282 - DNA, 40 bp, Homo sapiens
ccttctttctcccgcagtgagaaccctggttctaccctgt

SEQ ID NO: 25283 - DNA, 40 bp, Homo sapiens
acagggtagaaccagggttctcactgcgggagaaagaagg

SEQ ID NO: 25284 - DNA, 40 bp, Homo sapiens
cttctttctcccgcagtgagaaccctggttctaccctgtt

SEQ ID NO: 25285 - DNA, 40 bp, Homo sapiens
aacagggtagaaccagggttctcactgcgggagaaagaag

SEQ ID NO: 25286 - DNA, 40 bp, Homo sapiens
ttctttctcccgcagtgagaaccctggttctaccctgttt

SEQ ID NO: 25287 - DNA, 40 bp, Homo sapiens
aaacagggtagaaccagggttctcactgcgggagaaagaa

SEQ ID NO: 25288 - DNA, 40 bp, Homo sapiens
tctttctcccgcagtgagaaccctggttctaccctgtttc

SEQ ID NO: 25289 - DNA, 40 bp, Homo sapiens
gaaacagggtagaaccagggttctcactgcgggagaaaga

SEQ ID NO: 25290 - DNA, 40 bp, Homo sapiens
ctttctcccgcagtgagaaccctggttctaccctgtttct

SEQ ID NO: 25291 - DNA, 40 bp, Homo sapiens
agaaacagggtagaaccagggttctcactgcgggagaaag

SEQ ID NO: 25292 - DNA, 40 bp, Homo sapiens
tttctcccgcagtgagaaccctggttctaccctgtttctc

SEQ ID NO: 25293 - DNA, 40 bp, Homo sapiens
gagaaacagggtagaaccagggttctcactgcgggagaaa

SEQ ID NO: 25294 - DNA, 40 bp, Homo sapiens
ttctcccgcagtgagaaccctggttctaccctgtttctcc

SEQ ID NO: 25295 - DNA, 40 bp, Homo sapiens
ggagaaacagggtagaaccagggttctcactgcgggagaa

SEQ ID NO: 25296 - DNA, 40 bp, Homo sapiens
tctcccgcagtgagaaccctggttctaccctgtttctcct

SEQ ID NO: 25297 - DNA, 40 bp, Homo sapiens
aggagaaacagggtagaaccagggttctcactgcgggaga

SEQ ID NO: 25298 - DNA, 40 bp, Homo sapiens
ctcccgcagtgagaaccctggttctaccctgtttctcctt

SEQ ID NO: 25299 - DNA, 40 bp, Homo sapiens
aaggagaaacagggtagaaccagggttctcactgcgggag

SEQ ID NO: 25300 - DNA, 40 bp, Homo sapiens
tcccgcagtgagaaccctggttctaccctgtttctccttg

SEQ ID NO: 25301 - DNA, 40 bp, Homo sapiens
caaggagaaacagggtagaaccagggttctcactgcggga

SEQ ID NO: 25302 - DNA, 40 bp, Homo sapiens
cccgcagtgagaaccctggttctaccctgtttctccttgt

SEQ ID NO: 25303 - DNA, 40 bp, Homo sapiens
acaaggagaaacagggtagaaccagggttctcactgcggg

SEQ ID NO: 25304 - DNA, 40 bp, Homo sapiens
ccgcagtgagaaccctggttctaccctgtttctccttgtg

SEQ ID NO: 25305 - DNA, 40 bp, Homo sapiens
cacaaggagaaacagggtagaaccagggttctcactgcgg

SEQ ID NO: 25306 - DNA, 40 bp, Homo sapiens
cgcagtgagaaccctggttctaccctgtttctccttgtgt

SEQ ID NO: 25307 - DNA, 40 bp, Homo sapiens
acacaaggagaaacagggtagaaccagggttctcactgcg

SEQ ID NO: 25308 - DNA, 40 bp, Homo sapiens
gcagtgagaaccctggttctaccctgtttctccttgtgta

SEQ ID NO: 25309 - DNA, 40 bp, Homo sapiens
tacacaaggagaaacagggtagaaccagggttctcactgc

SEQ ID NO: 25310 - DNA, 40 bp, Homo sapiens
cagtgagaaccctggttctaccctgtttctccttgtgtaa

SEQ ID NO: 25311 - DNA, 40 bp, Homo sapiens
ttacacaaggagaaacagggtagaaccagggttctcactg

SEQ ID NO: 25312 - DNA, 40 bp, Homo sapiens
agtgagaaccctggttctaccctgtttctccttgtgtaaa

SEQ ID NO: 25313 - DNA, 40 bp, Homo sapiens
tttacacaaggagaaacagggtagaaccagggttctcact

SEQ ID NO: 25314 - DNA, 40 bp, Homo sapiens
gtgagaaccctggttctaccctgtttctccttgtgtaaat

SEQ ID NO: 25315 - DNA, 40 bp, Homo sapiens
atttacacaaggagaaacagggtagaaccagggttctcac

SEQ ID NO: 25316 - DNA, 40 bp, Homo sapiens
tgagaaccctggttctaccctgtttctccttgtgtaaatt

SEQ ID NO: 25317 - DNA, 40 bp, Homo sapiens
aatttacacaaggagaaacagggtagaaccagggttctca

SEQ ID NO: 25318 - DNA, 40 bp, Homo sapiens
gagaaccctggttctaccctgtttctccttgtgtaaattt

SEQ ID NO: 25319 - DNA, 40 bp, Homo sapiens
aaatttacacaaggagaaacagggtagaaccagggttctc

SEQ ID NO: 25320 - DNA, 40 bp, Homo sapiens
agaaccctggttctaccctgtttctccttgtgtaaatttt

SEQ ID NO: 25321 - DNA, 40 bp, Homo sapiens
aaaatttacacaaggagaaacagggtagaaccagggttct

SEQ ID NO: 25322 - DNA, 40 bp, Homo sapiens
gaaccctggttctaccctgtttctccttgtgtaaatttta

SEQ ID NO: 25323 - DNA, 40 bp, Homo sapiens
taaaatttacacaaggagaaacagggtagaaccagggttc

SEQ ID NO: 25324 - DNA, 40 bp, Homo sapiens
aaccctggttctaccctgtttctccttgtgtaaattttaa

SEQ ID NO: 25325 - DNA, 40 bp, Homo sapiens
ttaaaatttacacaaggagaaacagggtagaaccagggtt

SEQ ID NO: 25326 - DNA, 40 bp, Homo sapiens
accctggttctaccctgtttctccttgtgtaaattttaat

SEQ ID NO: 25327 - DNA, 40 bp, Homo sapiens
attaaaatttacacaaggagaaacagggtagaaccagggt

SEQ ID NO: 25328 - DNA, 40 bp, Homo sapiens
ccctggttctaccctgtttctccttgtgtaaattttaatg

SEQ ID NO: 25329 - DNA, 40 bp, Homo sapiens
cattaaaatttacacaaggagaaacagggtagaaccaggg

SEQ ID NO: 25330 - DNA, 40 bp, Homo sapiens
cctggttctaccctgtttctccttgtgtaaattttaatgc

SEQ ID NO: 25331 - DNA, 40 bp, Homo sapiens
gcattaaaatttacacaaggagaaacagggtagaaccagg

SEQ ID NO: 25332 - DNA, 40 bp, Homo sapiens
ctggttctaccctgtttctccttgtgtaaattttaatgct

SEQ ID NO: 25333 - DNA, 40 bp, Homo sapiens
agcattaaaatttacacaaggagaaacagggtagaaccag

SEQ ID NO: 25334 - DNA, 40 bp, Homo sapiens
tggttctaccctgtttctccttgtgtaaattttaatgcta

SEQ ID NO: 25335 - DNA, 40 bp, Homo sapiens
tagcattaaaatttacacaaggagaaacagggtagaacca

SEQ ID NO: 25336 - DNA, 40 bp, Homo sapiens
ggttctaccctgtttctccttgtgtaaattttaatgctaa

SEQ ID NO: 25337 - DNA, 40 bp, Homo sapiens
ttagcattaaaatttacacaaggagaaacagggtagaacc

SEQ ID NO: 25338 - DNA, 40 bp, Homo sapiens
gttctaccctgtttctccttgtgtaaattttaatgctaaa

SEQ ID NO: 25339 - DNA, 40 bp, Homo sapiens
tttagcattaaaatttacacaaggagaaacagggtagaac

SEQ ID NO: 25340 - DNA, 40 bp, Homo sapiens
ttctaccctgtttctccttgtgtaaattttaatgctaaac

SEQ ID NO: 25341 - DNA, 40 bp, Homo sapiens
gtttagcattaaaatttacacaaggagaaacagggtagaa

SEQ ID NO: 25342 - DNA, 40 bp, Homo sapiens
tctaccctgtttctccttgtgtaaattttaatgctaaact

SEQ ID NO: 25343 - DNA, 40 bp, Homo sapiens
agtttagcattaaaatttacacaaggagaaacagggtaga

SEQ ID NO: 25344 - DNA, 40 bp, Homo sapiens
ctaccctgtttctccttgtgtaaattttaatgctaaacta

SEQ ID NO: 25345 - DNA, 40 bp, Homo sapiens
tagtttagcattaaaatttacacaaggagaaacagggtag

SEQ ID NO: 25346 - DNA, 40 bp, Homo sapiens
taccctgtttctccttgtgtaaattttaatgctaaactat

SEQ ID NO: 25347 - DNA, 40 bp, Homo sapiens
atagtttagcattaaaatttacacaaggagaaacagggta

SEQ ID NO: 25348 - DNA, 40 bp, Homo sapiens
accctgtttctccttgtgtaaattttaatgctaaactata

SEQ ID NO: 25349 - DNA, 40 bp, Homo sapiens
tatagtttagcattaaaatttacacaaggagaaacagggt

SEQ ID NO: 25350 - DNA, 40 bp, Homo sapiens
ccctgtttctccttgtgtaaattttaatgctaaactatac

SEQ ID NO: 25351 - DNA, 40 bp, Homo sapiens
gtatagtttagcattaaaatttacacaaggagaaacaggg

SEQ ID NO: 25352 - DNA, 40 bp, Homo sapiens
cctgtttctccttgtgtaaattttaatgctaaactataca

SEQ ID NO: 25353 - DNA, 40 bp, Homo sapiens
tgtatagtttagcattaaaatttacacaaggagaaacagg

SEQ ID NO: 25354 - DNA, 40 bp, Homo sapiens
ctgtttctccttgtgtaaattttaatgctaaactatacac

SEQ ID NO: 25355 - DNA, 40 bp, Homo sapiens
gtgtatagtttagcattaaaatttacacaaggagaaacag

SEQ ID NO: 25356 - DNA, 40 bp, Homo sapiens
tgtttctccttgtgtaaattttaatgctaaactatacact

SEQ ID NO: 25357 - DNA, 40 bp, Homo sapiens
agtgtatagtttagcattaaaatttacacaaggagaaaca

SEQ ID NO: 25358 - DNA, 40 bp, Homo sapiens
gtttctccttgtgtaaattttaatgctaaactatacactt

SEQ ID NO: 25359 - DNA, 40 bp, Homo sapiens
aagtgtatagtttagcattaaaatttacacaaggagaaac

SEQ ID NO: 25360 - DNA, 40 bp, Homo sapiens
tttctccttgtgtaaattttaatgctaaactatacacttg

SEQ ID NO: 25361 - DNA, 40 bp, Homo sapiens
caagtgtatagtttagcattaaaatttacacaaggagaaa

SEQ ID NO: 25362 - DNA, 40 bp, Homo sapiens
ttctccttgtgtaaattttaatgctaaactatacacttgt

SEQ ID NO: 25363 - DNA, 40 bp, Homo sapiens
acaagtgtatagtttagcattaaaatttacacaaggagaa

SEQ ID NO: 25364 - DNA, 40 bp, Homo sapiens
tctccttgtgtaaattttaatgctaaactatacacttgtg

SEQ ID NO: 25365 - DNA, 40 bp, Homo sapiens
cacaagtgtatagtttagcattaaaatttacacaaggaga

SEQ ID NO: 25366 - DNA, 40 bp, Homo sapiens
ctccttgtgtaaattttaatgctaaactatacacttgtga

SEQ ID NO: 25367 - DNA, 40 bp, Homo sapiens
tcacaagtgtatagtttagcattaaaatttacacaaggag

SEQ ID NO: 25368 - DNA, 40 bp, Homo sapiens
tccttgtgtaaattttaatgctaaactatacacttgtgaa

SEQ ID NO: 25369 - DNA, 40 bp, Homo sapiens
ttcacaagtgtatagtttagcattaaaatttacacaagga

SEQ ID NO: 25370 - DNA, 40 bp, Homo sapiens
ccttgtgtaaattttaatgctaaactatacacttgtgaaa

SEQ ID NO: 25371 - DNA, 40 bp, Homo sapiens
tttcacaagtgtatagtttagcattaaaatttacacaagg

SEQ ID NO: 25372 - DNA, 40 bp, Homo sapiens
cttgtgtaaattttaatgctaaactatacacttgtgaaat

SEQ ID NO: 25373 - DNA, 40 bp, Homo sapiens
atttcacaagtgtatagtttagcattaaaatttacacaag

SEQ ID NO: 25374 - DNA, 40 bp, Homo sapiens
ttgtgtaaattttaatgctaaactatacacttgtgaaata

SEQ ID NO: 25375 - DNA, 40 bp, Homo sapiens
tatttcacaagtgtatagtttagcattaaaatttacacaa

SEQ ID NO: 25376 - DNA, 40 bp, Homo sapiens
tgtgtaaattttaatgctaaactatacacttgtgaaataa

SEQ ID NO: 25377 - DNA, 40 bp, Homo sapiens
ttatttcacaagtgtatagtttagcattaaaatttacaca

SEQ ID NO: 25378 - DNA, 40 bp, Homo sapiens
gtgtaaattttaatgctaaactatacacttgtgaaataaa

SEQ ID NO: 25379 - DNA, 40 bp, Homo sapiens
tttatttcacaagtgtatagtttagcattaaaatttacac

SEQ ID NO: 25380 - DNA, 40 bp, Homo sapiens
tgtaaattttaatgctaaactatacacttgtgaaataaaa

SEQ ID NO: 25381 - DNA, 40 bp, Homo sapiens
ttttatttcacaagtgtatagtttagcattaaaatttaca

SEQ ID NO: 25382 - DNA, 40 bp, Homo sapiens
gtaaattttaatgctaaactatacacttgtgaaataaaaa

SEQ ID NO: 25383 - DNA, 40 bp, Homo sapiens
tttttatttcacaagtgtatagtttagcattaaaatttac

SEQ ID NO: 25384 - DNA, 40 bp, Homo sapiens
taaattttaatgctaaactatacacttgtgaaataaaaat

SEQ ID NO: 25385 - DNA, 40 bp, Homo sapiens
atttttatttcacaagtgtatagtttagcattaaaattta

SEQ ID NO: 25386 - DNA, 40 bp, Homo sapiens
aaattttaatgctaaactatacacttgtgaaataaaaatg

SEQ ID NO: 25387 - DNA, 40 bp, Homo sapiens
catttttatttcacaagtgtatagtttagcattaaaattt

SEQ ID NO: 25388 - DNA, 40 bp, Homo sapiens
aattttaatgctaaactatacacttgtgaaataaaaatga

SEQ ID NO: 25389 - DNA, 40 bp, Homo sapiens
tcatttttatttcacaagtgtatagtttagcattaaaatt

SEQ ID NO: 25390 - DNA, 40 bp, Homo sapiens
attttaatgctaaactatacacttgtgaaataaaaatgat

SEQ ID NO: 25391 - DNA, 40 bp, Homo sapiens
atcatttttatttcacaagtgtatagtttagcattaaaat

SEQ ID NO: 25392 - DNA, 40 bp, Homo sapiens
ttttaatgctaaactatacacttgtgaaataaaaatgata

SEQ ID NO: 25393 - DNA, 40 bp, Homo sapiens
tatcatttttatttcacaagtgtatagtttagcattaaaa

SEQ ID NO: 25394 - DNA, 40 bp, Homo sapiens
tttaatgctaaactatacacttgtgaaataaaaatgataa

SEQ ID NO: 25395 - DNA, 40 bp, Homo sapiens
ttatcatttttatttcacaagtgtatagtttagcattaaa

SEQ ID NO: 25396 - DNA, 40 bp, Homo sapiens
ttaatgctaaactatacacttgtgaaataaaaatgataat

SEQ ID NO: 25397 - DNA, 40 bp, Homo sapiens
attatcatttttatttcacaagtgtatagtttagcattaa

SEQ ID NO: 25398 - DNA, 40 bp, Homo sapiens
taatgctaaactatacacttgtgaaataaaaatgataatg

SEQ ID NO: 25399 - DNA, 40 bp, Homo sapiens
cattatcatttttatttcacaagtgtatagtttagcatta

SEQ ID NO: 25400 - DNA, 40 bp, Homo sapiens
aatgctaaactatacacttgtgaaataaaaatgataatgt

SEQ ID NO: 25401 - DNA, 40 bp, Homo sapiens
acattatcatttttatttcacaagtgtatagtttagcatt

SEQ ID NO: 25402 - DNA, 40 bp, Homo sapiens
atgctaaactatacacttgtgaaataaaaatgataatgtc

SEQ ID NO: 25403 - DNA, 40 bp, Homo sapiens
gacattatcatttttatttcacaagtgtatagtttagcat

SEQ ID NO: 25404 - DNA, 40 bp, Homo sapiens
tgctaaactatacacttgtgaaataaaaatgataatgtca

SEQ ID NO: 25405 - DNA, 40 bp, Homo sapiens
tgacattatcatttttatttcacaagtgtatagtttagca

SEQ ID NO: 25406 - DNA, 40 bp, Homo sapiens
gctaaactatacacttgtgaaataaaaatgataatgtcat

SEQ ID NO: 25407 - DNA, 40 bp, Homo sapiens
atgacattatcatttttatttcacaagtgtatagtttagc

SEQ ID NO: 25408 - DNA, 40 bp, Homo sapiens
ctaaactatacacttgtgaaataaaaatgataatgtcatt

SEQ ID NO: 25409 - DNA, 40 bp, Homo sapiens
aatgacattatcatttttatttcacaagtgtatagtttag

SEQ ID NO: 25410 - DNA, 40 bp, Homo sapiens
taaactatacacttgtgaaataaaaatgataatgtcattc

SEQ ID NO: 25411 - DNA, 40 bp, Homo sapiens
gaatgacattatcatttttatttcacaagtgtatagttta

SEQ ID NO: 25412 - DNA, 40 bp, Homo sapiens
aaactatacacttgtgaaataaaaatgataatgtcattct

SEQ ID NO: 25413 - DNA, 40 bp, Homo sapiens
agaatgacattatcatttttatttcacaagtgtatagttt

SEQ ID NO: 25414 - DNA, 40 bp, Homo sapiens
aactatacacttgtgaaataaaaatgataatgtcattctt

SEQ ID NO: 25415 - DNA, 40 bp, Homo sapiens
aagaatgacattatcatttttatttcacaagtgtatagtt

SEQ ID NO: 25416 - DNA, 40 bp, Homo sapiens
actatacacttgtgaaataaaaatgataatgtcattctta

SEQ ID NO: 25417 - DNA, 40 bp, Homo sapiens
taagaatgacattatcatttttatttcacaagtgtatagt

SEQ ID NO: 25418 - DNA, 40 bp, Homo sapiens
ctatacacttgtgaaataaaaatgataatgtcattcttaa

SEQ ID NO: 25419 - DNA, 40 bp, Homo sapiens
ttaagaatgacattatcatttttatttcacaagtgtatag

SEQ ID NO: 25420 - DNA, 40 bp, Homo sapiens
tatacacttgtgaaataaaaatgataatgtcattcttaaa

SEQ ID NO: 25421 - DNA, 40 bp, Homo sapiens
tttaagaatgacattatcatttttatttcacaagtgtata

SEQ ID NO: 25422 - DNA, 40 bp, Homo sapiens
atacacttgtgaaataaaaatgataatgtcattcttaaat

SEQ ID NO: 25423 - DNA, 40 bp, Homo sapiens
atttaagaatgacattatcatttttatttcacaagtgtat

SEQ ID NO: 25424 - DNA, 40 bp, Homo sapiens
tacacttgtgaaataaaaatgataatgtcattcttaaatt

SEQ ID NO: 25425 - DNA, 40 bp, Homo sapiens
aatttaagaatgacattatcatttttatttcacaagtgta

SEQ ID NO: 25426 - DNA, 40 bp, Homo sapiens
acacttgtgaaataaaaatgataatgtcattcttaaatta

SEQ ID NO: 25427 - DNA, 40 bp, Homo sapiens
taatttaagaatgacattatcatttttatttcacaagtgt

SEQ ID NO: 25428 - DNA, 40 bp, Homo sapiens
cacttgtgaaataaaaatgataatgtcattcttaaattat

SEQ ID NO: 25429 - DNA, 40 bp, Homo sapiens
ataatttaagaatgacattatcatttttatttcacaagtg

SEQ ID NO: 25430 - DNA, 40 bp, Homo sapiens
acttgtgaaataaaaatgataatgtcattcttaaattatg

SEQ ID NO: 25431 - DNA, 40 bp, Homo sapiens
cataatttaagaatgacattatcatttttatttcacaagt

SEQ ID NO: 25432 - DNA, 40 bp, Homo sapiens
cttgtgaaataaaaatgataatgtcattcttaaattatgg

SEQ ID NO: 25433 - DNA, 40 bp, Homo sapiens
ccataatttaagaatgacattatcatttttatttcacaag

SEQ ID NO: 25434 - DNA, 40 bp, Homo sapiens
ttgtgaaataaaaatgataatgtcattcttaaattatgga

SEQ ID NO: 25435 - DNA, 40 bp, Homo sapiens
tccataatttaagaatgacattatcatttttatttcacaa

SEQ ID NO: 25436 - DNA, 40 bp, Homo sapiens
tgtgaaataaaaatgataatgtcattcttaaattatggat

SEQ ID NO: 25437 - DNA, 40 bp, Homo sapiens
atccataatttaagaatgacattatcatttttatttcaca

SEQ ID NO: 25438 - DNA, 40 bp, Homo sapiens
gtgaaataaaaatgataatgtcattcttaaattatggatc

SEQ ID NO: 25439 - DNA, 40 bp, Homo sapiens
gatccataatttaagaatgacattatcatttttatttcac

SEQ ID NO: 25440 - DNA, 40 bp, Homo sapiens
tgaaataaaaatgataatgtcattcttaaattatggatct

SEQ ID NO: 25441 - DNA, 40 bp, Homo sapiens
agatccataatttaagaatgacattatcatttttatttca

SEQ ID NO: 25442 - DNA, 40 bp, Homo sapiens
gaaataaaaatgataatgtcattcttaaattatggatctt

SEQ ID NO: 25443 - DNA, 40 bp, Homo sapiens
aagatccataatttaagaatgacattatcatttttatttc

SEQ ID NO: 25444 - DNA, 40 bp, Homo sapiens
aaataaaaatgataatgtcattcttaaattatggatcttg

SEQ ID NO: 25445 - DNA, 40 bp, Homo sapiens
caagatccataatttaagaatgacattatcatttttattt

SEQ ID NO: 25446 - DNA, 40 bp, Homo sapiens
aataaaaatgataatgtcattcttaaattatggatcttgc

SEQ ID NO: 25447 - DNA, 40 bp, Homo sapiens
gcaagatccataatttaagaatgacattatcatttttatt

SEQ ID NO: 25448 - DNA, 40 bp, Homo sapiens
ataaaaatgataatgtcattcttaaattatggatcttgca

SEQ ID NO: 25449 - DNA, 40 bp, Homo sapiens
tgcaagatccataatttaagaatgacattatcatttttat

SEQ ID NO: 25450 - DNA, 40 bp, Homo sapiens
taaaaatgataatgtcattcttaaattatggatcttgcag

SEQ ID NO: 25451 - DNA, 40 bp, Homo sapiens
ctgcaagatccataatttaagaatgacattatcattttta

SEQ ID NO: 25452 - DNA, 40 bp, Homo sapiens
aaaaatgataatgtcattcttaaattatggatcttgcagt

SEQ ID NO: 25453 - DNA, 40 bp, Homo sapiens
actgcaagatccataatttaagaatgacattatcattttt

SEQ ID NO: 25454 - DNA, 40 bp, Homo sapiens
aaaatgataatgtcattcttaaattatggatcttgcagtg

SEQ ID NO: 25455 - DNA, 40 bp, Homo sapiens
cactgcaagatccataatttaagaatgacattatcatttt

SEQ ID NO: 25456 - DNA, 40 bp, Homo sapiens
aaatgataatgtcattcttaaattatggatcttgcagtgt

SEQ ID NO: 25457 - DNA, 40 bp, Homo sapiens
acactgcaagatccataatttaagaatgacattatcattt

SEQ ID NO: 25458 - DNA, 40 bp, Homo sapiens
aatgataatgtcattcttaaattatggatcttgcagtgtt

SEQ ID NO: 25459 - DNA, 40 bp, Homo sapiens
aacactgcaagatccataatttaagaatgacattatcatt

SEQ ID NO: 25460 - DNA, 40 bp, Homo sapiens
atgataatgtcattcttaaattatggatcttgcagtgtta

SEQ ID NO: 25461 - DNA, 40 bp, Homo sapiens
taacactgcaagatccataatttaagaatgacattatcat

SEQ ID NO: 25462 - DNA, 40 bp, Homo sapiens
tgataatgtcattcttaaattatggatcttgcagtgttat

SEQ ID NO: 25463 - DNA, 40 bp, Homo sapiens
ataacactgcaagatccataatttaagaatgacattatca

SEQ ID NO: 25464 - DNA, 40 bp, Homo sapiens
gataatgtcattcttaaattatggatcttgcagtgttatc

SEQ ID NO: 25465 - DNA, 40 bp, Homo sapiens
gataacactgcaagatccataatttaagaatgacattatc

SEQ ID NO: 25466 - DNA, 40 bp, Homo sapiens
ataatgtcattcttaaattatggatcttgcagtgttatct

SEQ ID NO: 25467 - DNA, 40 bp, Homo sapiens
agataacactgcaagatccataatttaagaatgacattat

SEQ ID NO: 25468 - DNA, 40 bp, Homo sapiens
taatgtcattcttaaattatggatcttgcagtgttatcta

SEQ ID NO: 25469 - DNA, 40 bp, Homo sapiens
tagataacactgcaagatccataatttaagaatgacatta

SEQ ID NO: 25470 - DNA, 40 bp, Homo sapiens
aatgtcattcttaaattatggatcttgcagtgttatctaa

SEQ ID NO: 25471 - DNA, 40 bp, Homo sapiens
ttagataacactgcaagatccataatttaagaatgacatt

SEQ ID NO: 25472 - DNA, 40 bp, Homo sapiens
atgtcattcttaaattatggatcttgcagtgttatctaag

SEQ ID NO: 25473 - DNA, 40 bp, Homo sapiens
cttagataacactgcaagatccataatttaagaatgacat

SEQ ID NO: 25474 - DNA, 40 bp, Homo sapiens
tgtcattcttaaattatggatcttgcagtgttatctaagt

SEQ ID NO: 25475 - DNA, 40 bp, Homo sapiens
acttagataacactgcaagatccataatttaagaatgaca

SEQ ID NO: 25476 - DNA, 40 bp, Homo sapiens
gtcattcttaaattatggatcttgcagtgttatctaagta

SEQ ID NO: 25477 - DNA, 40 bp, Homo sapiens
tacttagataacactgcaagatccataatttaagaatgac

SEQ ID NO: 25478 - DNA, 40 bp, Homo sapiens
tcattcttaaattatggatcttgcagtgttatctaagtaa

SEQ ID NO: 25479 - DNA, 40 bp, Homo sapiens
ttacttagataacactgcaagatccataatttaagaatga

SEQ ID NO: 25480 - DNA, 40 bp, Homo sapiens
cattcttaaattatggatcttgcagtgttatctaagtaac

SEQ ID NO: 25481 - DNA, 40 bp, Homo sapiens
gttacttagataacactgcaagatccataatttaagaatg

SEQ ID NO: 25482 - DNA, 40 bp, Homo sapiens
attcttaaattatggatcttgcagtgttatctaagtaaca

SEQ ID NO: 25483 - DNA, 40 bp, Homo sapiens
tgttacttagataacactgcaagatccataatttaagaat

SEQ ID NO: 25484 - DNA, 40 bp, Homo sapiens
ttcttaaattatggatcttgcagtgttatctaagtaacat

SEQ ID NO: 25485 - DNA, 40 bp, Homo sapiens
atgttacttagataacactgcaagatccataatttaagaa

SEQ ID NO: 25486 - DNA, 40 bp, Homo sapiens
tcttaaattatggatcttgcagtgttatctaagtaacata

SEQ ID NO: 25487 - DNA, 40 bp, Homo sapiens
tatgttacttagataacactgcaagatccataatttaaga

SEQ ID NO: 25488 - DNA, 40 bp, Homo sapiens
cttaaattatggatcttgcagtgttatctaagtaacatag

SEQ ID NO: 25489 - DNA, 40 bp, Homo sapiens
ctatgttacttagataacactgcaagatccataatttaag

SEQ ID NO: 25490 - DNA, 40 bp, Homo sapiens
ttaaattatggatcttgcagtgttatctaagtaacataga

SEQ ID NO: 25491 - DNA, 40 bp, Homo sapiens
tctatgttacttagataacactgcaagatccataatttaa

SEQ ID NO: 25492 - DNA, 40 bp, Homo sapiens
taaattatggatcttgcagtgttatctaagtaacatagat

SEQ ID NO: 25493 - DNA, 40 bp, Homo sapiens
atctatgttacttagataacactgcaagatccataattta

SEQ ID NO: 25494 - DNA, 40 bp, Homo sapiens
aaattatggatcttgcagtgttatctaagtaacatagatt

SEQ ID NO: 25495 - DNA, 40 bp, Homo sapiens
aatctatgttacttagataacactgcaagatccataattt

SEQ ID NO: 25496 - DNA, 40 bp, Homo sapiens
aattatggatcttgcagtgttatctaagtaacatagattg

SEQ ID NO: 25497 - DNA, 40 bp, Homo sapiens
caatctatgttacttagataacactgcaagatccataatt

SEQ ID NO: 25498 - DNA, 40 bp, Homo sapiens
attatggatcttgcagtgttatctaagtaacatagattga

SEQ ID NO: 25499 - DNA, 40 bp, Homo sapiens
tcaatctatgttacttagataacactgcaagatccataat

SEQ ID NO: 25500 - DNA, 40 bp, Homo sapiens
ttatggatcttgcagtgttatctaagtaacatagattgag

SEQ ID NO: 25501 - DNA, 40 bp, Homo sapiens
ctcaatctatgttacttagataacactgcaagatccataa

SEQ ID NO: 25502 - DNA, 40 bp, Homo sapiens
tatggatcttgcagtgttatctaagtaacatagattgagt

SEQ ID NO: 25503 - DNA, 40 bp, Homo sapiens
actcaatctatgttacttagataacactgcaagatccata

SEQ ID NO: 25504 - DNA, 40 bp, Homo sapiens
atggatcttgcagtgttatctaagtaacatagattgagtg

SEQ ID NO: 25505 - DNA, 40 bp, Homo sapiens
cactcaatctatgttacttagataacactgcaagatccat

SEQ ID NO: 25506 - DNA, 40 bp, Homo sapiens
tggatcttgcagtgttatctaagtaacatagattgagtga

SEQ ID NO: 25507 - DNA, 40 bp, Homo sapiens
tcactcaatctatgttacttagataacactgcaagatcca

SEQ ID NO: 25508 - DNA, 40 bp, Homo sapiens
ggatcttgcagtgttatctaagtaacatagattgagtgat

SEQ ID NO: 25509 - DNA, 40 bp, Homo sapiens
atcactcaatctatgttacttagataacactgcaagatcc

SEQ ID NO: 25510 - DNA, 40 bp, Homo sapiens
gatcttgcagtgttatctaagtaacatagattgagtgatt

SEQ ID NO: 25511 - DNA, 40 bp, Homo sapiens
aatcactcaatctatgttacttagataacactgcaagatc

SEQ ID NO: 25512 - DNA, 40 bp, Homo sapiens
atcttgcagtgttatctaagtaacatagattgagtgattt

SEQ ID NO: 25513 - DNA, 40 bp, Homo sapiens
aaatcactcaatctatgttacttagataacactgcaagat

SEQ ID NO: 25514 - DNA, 40 bp, Homo sapiens
tcttgcagtgttatctaagtaacatagattgagtgattta

SEQ ID NO: 25515 - DNA, 40 bp, Homo sapiens
taaatcactcaatctatgttacttagataacactgcaaga

SEQ ID NO: 25516 - DNA, 40 bp, Homo sapiens
cttgcagtgttatctaagtaacatagattgagtgatttaa

SEQ ID NO: 25517 - DNA, 40 bp, Homo sapiens
ttaaatcactcaatctatgttacttagataacactgcaag

SEQ ID NO: 25518 - DNA, 40 bp, Homo sapiens
ttgcagtgttatctaagtaacatagattgagtgatttaac

SEQ ID NO: 25519 - DNA, 40 bp, Homo sapiens
gttaaatcactcaatctatgttacttagataacactgcaa

SEQ ID NO: 25520 - DNA, 40 bp, Homo sapiens
tgcagtgttatctaagtaacatagattgagtgatttaact

SEQ ID NO: 25521 - DNA, 40 bp, Homo sapiens
agttaaatcactcaatctatgttacttagataacactgca

SEQ ID NO: 25522 - DNA, 40 bp, Homo sapiens
gcagtgttatctaagtaacatagattgagtgatttaactt

SEQ ID NO: 25523 - DNA, 40 bp, Homo sapiens
aagttaaatcactcaatctatgttacttagataacactgc

SEQ ID NO: 25524 - DNA, 40 bp, Homo sapiens
cagtgttatctaagtaacatagattgagtgatttaacttt

SEQ ID NO: 25525 - DNA, 40 bp, Homo sapiens
aaagttaaatcactcaatctatgttacttagataacactg

SEQ ID NO: 25526 - DNA, 40 bp, Homo sapiens
agtgttatctaagtaacatagattgagtgatttaacttta

SEQ ID NO: 25527 - DNA, 40 bp, Homo sapiens
taaagttaaatcactcaatctatgttacttagataacact

SEQ ID NO: 25528 - DNA, 40 bp, Homo sapiens
gtgttatctaagtaacatagattgagtgatttaactttag

SEQ ID NO: 25529 - DNA, 40 bp, Homo sapiens
ctaaagttaaatcactcaatctatgttacttagataacac

SEQ ID NO: 25530 - DNA, 40 bp, Homo sapiens
tgttatctaagtaacatagattgagtgatttaactttagg

SEQ ID NO: 25531 - DNA, 40 bp, Homo sapiens
cctaaagttaaatcactcaatctatgttacttagataaca

SEQ ID NO: 25532 - DNA, 40 bp, Homo sapiens
gttatctaagtaacatagattgagtgatttaactttaggt

SEQ ID NO: 25533 - DNA, 40 bp, Homo sapiens
acctaaagttaaatcactcaatctatgttacttagataac

SEQ ID NO: 25534 - DNA, 40 bp, Homo sapiens
ttatctaagtaacatagattgagtgatttaactttaggtt

SEQ ID NO: 25535 - DNA, 40 bp, Homo sapiens
aacctaaagttaaatcactcaatctatgttacttagataa

SEQ ID NO: 25536 - DNA, 40 bp, Homo sapiens
tatctaagtaacatagattgagtgatttaactttaggttt

SEQ ID NO: 25537 - DNA, 40 bp, Homo sapiens
aaacctaaagttaaatcactcaatctatgttacttagata

SEQ ID NO: 25538 - DNA, 40 bp, Homo sapiens
atctaagtaacatagattgagtgatttaactttaggtttc

SEQ ID NO: 25539 - DNA, 40 bp, Homo sapiens
gaaacctaaagttaaatcactcaatctatgttacttagat

SEQ ID NO: 25540 - DNA, 40 bp, Homo sapiens
tctaagtaacatagattgagtgatttaactttaggtttcc

SEQ ID NO: 25541 - DNA, 40 bp, Homo sapiens
ggaaacctaaagttaaatcactcaatctatgttacttaga

SEQ ID NO: 25542 - DNA, 40 bp, Homo sapiens
ctaagtaacatagattgagtgatttaactttaggtttcct

SEQ ID NO: 25543 - DNA, 40 bp, Homo sapiens
aggaaacctaaagttaaatcactcaatctatgttacttag

SEQ ID NO: 25544 - DNA, 40 bp, Homo sapiens
taagtaacatagattgagtgatttaactttaggtttcctt

SEQ ID NO: 25545 - DNA, 40 bp, Homo sapiens
aaggaaacctaaagttaaatcactcaatctatgttactta

SEQ ID NO: 25546 - DNA, 40 bp, Homo sapiens
aagtaacatagattgagtgatttaactttaggtttcctta

SEQ ID NO: 25547 - DNA, 40 bp, Homo sapiens
taaggaaacctaaagttaaatcactcaatctatgttactt

SEQ ID NO: 25548 - DNA, 40 bp, Homo sapiens
agtaacatagattgagtgatttaactttaggtttccttat

SEQ ID NO: 25549 - DNA, 40 bp, Homo sapiens
ataaggaaacctaaagttaaatcactcaatctatgttact

SEQ ID NO: 25550 - DNA, 40 bp, Homo sapiens
gtaacatagattgagtgatttaactttaggtttccttatt

SEQ ID NO: 25551 - DNA, 40 bp, Homo sapiens
aataaggaaacctaaagttaaatcactcaatctatgttac

SEQ ID NO: 25552 - DNA, 40 bp, Homo sapiens
taacatagattgagtgatttaactttaggtttccttattt

SEQ ID NO: 25553 - DNA, 40 bp, Homo sapiens
aaataaggaaacctaaagttaaatcactcaatctatgtta

SEQ ID NO: 25554 - DNA, 40 bp, Homo sapiens
aacatagattgagtgatttaactttaggtttccttatttg

SEQ ID NO: 25555 - DNA, 40 bp, Homo sapiens
caaataaggaaacctaaagttaaatcactcaatctatgtt

SEQ ID NO: 25556 - DNA, 40 bp, Homo sapiens
acatagattgagtgatttaactttaggtttccttatttgt

SEQ ID NO: 25557 - DNA, 40 bp, Homo sapiens
acaaataaggaaacctaaagttaaatcactcaatctatgt

SEQ ID NO: 25558 - DNA, 40 bp, Homo sapiens
catagattgagtgatttaactttaggtttccttatttgtg

SEQ ID NO: 25559 - DNA, 40 bp, Homo sapiens
cacaaataaggaaacctaaagttaaatcactcaatctatg

SEQ ID NO: 25560 - DNA, 40 bp, Homo sapiens
atagattgagtgatttaactttaggtttccttatttgtgg

SEQ ID NO: 25561 - DNA, 40 bp, Homo sapiens
ccacaaataaggaaacctaaagttaaatcactcaatctat

SEQ ID NO: 25562 - DNA, 40 bp, Homo sapiens
tagattgagtgatttaactttaggtttccttatttgtgga

SEQ ID NO: 25563 - DNA, 40 bp, Homo sapiens
tccacaaataaggaaacctaaagttaaatcactcaatcta

SEQ ID NO: 25564 - DNA, 40 bp, Homo sapiens
agattgagtgatttaactttaggtttccttatttgtggaa

SEQ ID NO: 25565 - DNA, 40 bp, Homo sapiens
ttccacaaataaggaaacctaaagttaaatcactcaatct

SEQ ID NO: 25566 - DNA, 40 bp, Homo sapiens
gattgagtgatttaactttaggtttccttatttgtggaat

SEQ ID NO: 25567 - DNA, 40 bp, Homo sapiens
attccacaaataaggaaacctaaagttaaatcactcaatc

SEQ ID NO: 25568 - DNA, 40 bp, Homo sapiens
attgagtgatttaactttaggtttccttatttgtggaatt

SEQ ID NO: 25569 - DNA, 40 bp, Homo sapiens
aattccacaaataaggaaacctaaagttaaatcactcaat

SEQ ID NO: 25570 - DNA, 40 bp, Homo sapiens
ttgagtgatttaactttaggtttccttatttgtggaattt

SEQ ID NO: 25571 - DNA, 40 bp, Homo sapiens
aaattccacaaataaggaaacctaaagttaaatcactcaa

SEQ ID NO: 25572 - DNA, 40 bp, Homo sapiens
tgagtgatttaactttaggtttccttatttgtggaatttg

SEQ ID NO: 25573 - DNA, 40 bp, Homo sapiens
caaattccacaaataaggaaacctaaagttaaatcactca

SEQ ID NO: 25574 - DNA, 40 bp, Homo sapiens
gagtgatttaactttaggtttccttatttgtggaatttgg

SEQ ID NO: 25575 - DNA, 40 bp, Homo sapiens
ccaaattccacaaataaggaaacctaaagttaaatcactc

SEQ ID NO: 25576 - DNA, 40 bp, Homo sapiens
agtgatttaactttaggtttccttatttgtggaatttgga

SEQ ID NO: 25577 - DNA, 40 bp, Homo sapiens
tccaaattccacaaataaggaaacctaaagttaaatcact

SEQ ID NO: 25578 - DNA, 40 bp, Homo sapiens
gtgatttaactttaggtttccttatttgtggaatttggat

SEQ ID NO: 25579 - DNA, 40 bp, Homo sapiens
atccaaattccacaaataaggaaacctaaagttaaatcac

SEQ ID NO: 25580 - DNA, 40 bp, Homo sapiens
tgatttaactttaggtttccttatttgtggaatttggata

SEQ ID NO: 25581 - DNA, 40 bp, Homo sapiens
tatccaaattccacaaataaggaaacctaaagttaaatca

SEQ ID NO: 25582 - DNA, 40 bp, Homo sapiens
gatttaactttaggtttccttatttgtggaatttggataa

SEQ ID NO: 25583 - DNA, 40 bp, Homo sapiens
ttatccaaattccacaaataaggaaacctaaagttaaatc

SEQ ID NO: 25584 - DNA, 40 bp, Homo sapiens
atttaactttaggtttccttatttgtggaatttggataaa

SEQ ID NO: 25585 - DNA, 40 bp, Homo sapiens
tttatccaaattccacaaataaggaaacctaaagttaaat

SEQ ID NO: 25586 - DNA, 40 bp, Homo sapiens
tttaactttaggtttccttatttgtggaatttggataaat

SEQ ID NO: 25587 - DNA, 40 bp, Homo sapiens
atttatccaaattccacaaataaggaaacctaaagttaaa

SEQ ID NO: 25588 - DNA, 40 bp, Homo sapiens
ttaactttaggtttccttatttgtggaatttggataaata

SEQ ID NO: 25589 - DNA, 40 bp, Homo sapiens
tatttatccaaattccacaaataaggaaacctaaagttaa

SEQ ID NO: 25590 - DNA, 40 bp, Homo sapiens
taactttaggtttccttatttgtggaatttggataaatat

SEQ ID NO: 25591 - DNA, 40 bp, Homo sapiens
atatttatccaaattccacaaataaggaaacctaaagtta

SEQ ID NO: 25592 - DNA, 40 bp, Homo sapiens
aactttaggtttccttatttgtggaatttggataaatatt

SEQ ID NO: 25593 - DNA, 40 bp, Homo sapiens
aatatttatccaaattccacaaataaggaaacctaaagtt

SEQ ID NO: 25594 - DNA, 40 bp, Homo sapiens
actttaggtttccttatttgtggaatttggataaatattt

SEQ ID NO: 25595 - DNA, 40 bp, Homo sapiens
aaatatttatccaaattccacaaataaggaaacctaaagt

SEQ ID NO: 25596 - DNA, 40 bp, Homo sapiens
ctttaggtttccttatttgtggaatttggataaatatttt

SEQ ID NO: 25597 - DNA, 40 bp, Homo sapiens
aaaatatttatccaaattccacaaataaggaaacctaaag

SEQ ID NO: 25598 - DNA, 40 bp, Homo sapiens
tttaggtttccttatttgtggaatttggataaatattttt

SEQ ID NO: 25599 - DNA, 40 bp, Homo sapiens
aaaaatatttatccaaattccacaaataaggaaacctaaa

SEQ ID NO: 25600 - DNA, 40 bp, Homo sapiens
ttaggtttccttatttgtggaatttggataaatatttttc

SEQ ID NO: 25601 - DNA, 40 bp, Homo sapiens
gaaaaatatttatccaaattccacaaataaggaaacctaa

SEQ ID NO: 25602 - DNA, 40 bp, Homo sapiens
taggtttccttatttgtggaatttggataaatatttttca

SEQ ID NO: 25603 - DNA, 40 bp, Homo sapiens
tgaaaaatatttatccaaattccacaaataaggaaaccta

SEQ ID NO: 25604 - DNA, 40 bp, Homo sapiens
aggtttccttatttgtggaatttggataaatatttttcac

SEQ ID NO: 25605 - DNA, 40 bp, Homo sapiens
gtgaaaaatatttatccaaattccacaaataaggaaacct

SEQ ID NO: 25606 - DNA, 40 bp, Homo sapiens
ggtttccttatttgtggaatttggataaatatttttcacc

SEQ ID NO: 25607 - DNA, 40 bp, Homo sapiens
ggtgaaaaatatttatccaaattccacaaataaggaaacc

SEQ ID NO: 25608 - DNA, 40 bp, Homo sapiens
gtttccttatttgtggaatttggataaatatttttcaccc

SEQ ID NO: 25609 - DNA, 40 bp, Homo sapiens
gggtgaaaaatatttatccaaattccacaaataaggaaac

SEQ ID NO: 25610 - DNA, 40 bp, Homo sapiens
tttccttatttgtggaatttggataaatatttttcaccct

SEQ ID NO: 25611 - DNA, 40 bp, Homo sapiens
agggtgaaaaatatttatccaaattccacaaataaggaaa

SEQ ID NO: 25612 - DNA, 40 bp, Homo sapiens
ttccttatttgtggaatttggataaatatttttcaccctt

SEQ ID NO: 25613 - DNA, 40 bp, Homo sapiens
aagggtgaaaaatatttatccaaattccacaaataaggaa

SEQ ID NO: 25614 - DNA, 40 bp, Homo sapiens
tccttatttgtggaatttggataaatatttttcacccttg

SEQ ID NO: 25615 - DNA, 40 bp, Homo sapiens
caagggtgaaaaatatttatccaaattccacaaataagga

SEQ ID NO: 25616 - DNA, 40 bp, Homo sapiens
ccttatttgtggaatttggataaatatttttcacccttga

SEQ ID NO: 25617 - DNA, 40 bp, Homo sapiens
tcaagggtgaaaaatatttatccaaattccacaaataagg

SEQ ID NO: 25618 - DNA, 40 bp, Homo sapiens
cttatttgtggaatttggataaatatttttcacccttgag

SEQ ID NO: 25619 - DNA, 40 bp, Homo sapiens
ctcaagggtgaaaaatatttatccaaattccacaaataag

SEQ ID NO: 25620 - DNA, 40 bp, Homo sapiens
ttatttgtggaatttggataaatatttttcacccttgaga

SEQ ID NO: 25621 - DNA, 40 bp, Homo sapiens
tctcaagggtgaaaaatatttatccaaattccacaaataa

SEQ ID NO: 25622 - DNA, 40 bp, Homo sapiens
tatttgtggaatttggataaatatttttcacccttgagaa

SEQ ID NO: 25623 - DNA, 40 bp, Homo sapiens
ttctcaagggtgaaaaatatttatccaaattccacaaata

SEQ ID NO: 25624 - DNA, 40 bp, Homo sapiens
atttgtggaatttggataaatatttttcacccttgagaaa

SEQ ID NO: 25625 - DNA, 40 bp, Homo sapiens
tttctcaagggtgaaaaatatttatccaaattccacaaat

SEQ ID NO: 25626 - DNA, 40 bp, Homo sapiens
tttgtggaatttggataaatatttttcacccttgagaaaa

SEQ ID NO: 25627 - DNA, 40 bp, Homo sapiens
ttttctcaagggtgaaaaatatttatccaaattccacaaa

SEQ ID NO: 25628 - DNA, 40 bp, Homo sapiens
ttgtggaatttggataaatatttttcacccttgagaaaag

SEQ ID NO: 25629 - DNA, 40 bp, Homo sapiens
cttttctcaagggtgaaaaatatttatccaaattccacaa

SEQ ID NO: 25630 - DNA, 40 bp, Homo sapiens
tgtggaatttggataaatatttttcacccttgagaaaagt

SEQ ID NO: 25631 - DNA, 40 bp, Homo sapiens
acttttctcaagggtgaaaaatatttatccaaattccaca

SEQ ID NO: 25632 - DNA, 40 bp, Homo sapiens
gtggaatttggataaatatttttcacccttgagaaaagtg

SEQ ID NO: 25633 - DNA, 40 bp, Homo sapiens
cacttttctcaagggtgaaaaatatttatccaaattccac

SEQ ID NO: 25634 - DNA, 40 bp, Homo sapiens
tggaatttggataaatatttttcacccttgagaaaagtga

SEQ ID NO: 25635 - DNA, 40 bp, Homo sapiens
tcacttttctcaagggtgaaaaatatttatccaaattcca

SEQ ID NO: 25636 - DNA, 40 bp, Homo sapiens
ggaatttggataaatatttttcacccttgagaaaagtgag

SEQ ID NO: 25637 - DNA, 40 bp, Homo sapiens
ctcacttttctcaagggtgaaaaatatttatccaaattcc

SEQ ID NO: 25638 - DNA, 40 bp, Homo sapiens
gaatttggataaatatttttcacccttgagaaaagtgaga

SEQ ID NO: 25639 - DNA, 40 bp, Homo sapiens
tctcacttttctcaagggtgaaaaatatttatccaaattc

SEQ ID NO: 25640 - DNA, 40 bp, Homo sapiens
aatttggataaatatttttcacccttgagaaaagtgagac

SEQ ID NO: 25641 - DNA, 40 bp, Homo sapiens
gtctcacttttctcaagggtgaaaaatatttatccaaatt

SEQ ID NO: 25642 - DNA, 40 bp, Homo sapiens
atttggataaatatttttcacccttgagaaaagtgagact

SEQ ID NO: 25643 - DNA, 40 bp, Homo sapiens
agtctcacttttctcaagggtgaaaaatatttatccaaat

SEQ ID NO: 25644 - DNA, 40 bp, Homo sapiens
tttggataaatatttttcacccttgagaaaagtgagactc

SEQ ID NO: 25645 - DNA, 40 bp, Homo sapiens
gagtctcacttttctcaagggtgaaaaatatttatccaaa

SEQ ID NO: 25646 - DNA, 40 bp, Homo sapiens
ttggataaatatttttcacccttgagaaaagtgagactcc

SEQ ID NO: 25647 - DNA, 40 bp, Homo sapiens
ggagtctcacttttctcaagggtgaaaaatatttatccaa

SEQ ID NO: 25648 - DNA, 40 bp, Homo sapiens
tggataaatatttttcacccttgagaaaagtgagactcct

SEQ ID NO: 25649 - DNA, 40 bp, Homo sapiens
aggagtctcacttttctcaagggtgaaaaatatttatcca

SEQ ID NO: 25650 - DNA, 40 bp, Homo sapiens
ggataaatatttttcacccttgagaaaagtgagactcctt

SEQ ID NO: 25651 - DNA, 40 bp, Homo sapiens
aaggagtctcacttttctcaagggtgaaaaatatttatcc

SEQ ID NO: 25652 - DNA, 40 bp, Homo sapiens
gataaatatttttcacccttgagaaaagtgagactccttt

SEQ ID NO: 25653 - DNA, 40 bp, Homo sapiens
aaaggagtctcacttttctcaagggtgaaaaatatttatc

SEQ ID NO: 25654 - DNA, 40 bp, Homo sapiens
ataaatatttttcacccttgagaaaagtgagactcctttc

SEQ ID NO: 25655 - DNA, 40 bp, Homo sapiens
gaaaggagtctcacttttctcaagggtgaaaaatatttat

SEQ ID NO: 25656 - DNA, 40 bp, Homo sapiens
taaatatttttcacccttgagaaaagtgagactcctttct

SEQ ID NO: 25657 - DNA, 40 bp, Homo sapiens
agaaaggagtctcacttttctcaagggtgaaaaatattta

SEQ ID NO: 25658 - DNA, 40 bp, Homo sapiens
aaatatttttcacccttgagaaaagtgagactcctttctc

SEQ ID NO: 25659 - DNA, 40 bp, Homo sapiens
gagaaaggagtctcacttttctcaagggtgaaaaatattt

SEQ ID NO: 25660 - DNA, 40 bp, Homo sapiens
aatatttttcacccttgagaaaagtgagactcctttctca

SEQ ID NO: 25661 - DNA, 40 bp, Homo sapiens
tgagaaaggagtctcacttttctcaagggtgaaaaatatt

SEQ ID NO: 25662 - DNA, 40 bp, Homo sapiens
atatttttcacccttgagaaaagtgagactcctttctcat

SEQ ID NO: 25663 - DNA, 40 bp, Homo sapiens
atgagaaaggagtctcacttttctcaagggtgaaaaatat

SEQ ID NO: 25664 - DNA, 40 bp, Homo sapiens
tatttttcacccttgagaaaagtgagactcctttctcatc

SEQ ID NO: 25665 - DNA, 40 bp, Homo sapiens
gatgagaaaggagtctcacttttctcaagggtgaaaaata

SEQ ID NO: 25666 - DNA, 40 bp, Homo sapiens
atttttcacccttgagaaaagtgagactcctttctcatca

SEQ ID NO: 25667 - DNA, 40 bp, Homo sapiens
tgatgagaaaggagtctcacttttctcaagggtgaaaaat

SEQ ID NO: 25668 - DNA, 40 bp, Homo sapiens
tttttcacccttgagaaaagtgagactcctttctcatcat

SEQ ID NO: 25669 - DNA, 40 bp, Homo sapiens
atgatgagaaaggagtctcacttttctcaagggtgaaaaa

SEQ ID NO: 25670 - DNA, 40 bp, Homo sapiens
ttttcacccttgagaaaagtgagactcctttctcatcatc

SEQ ID NO: 25671 - DNA, 40 bp, Homo sapiens
gatgatgagaaaggagtctcacttttctcaagggtgaaaa

SEQ ID NO: 25672 - DNA, 40 bp, Homo sapiens
tttcacccttgagaaaagtgagactcctttctcatcatca

SEQ ID NO: 25673 - DNA, 40 bp, Homo sapiens
tgatgatgagaaaggagtctcacttttctcaagggtgaaa

SEQ ID NO: 25674 - DNA, 40 bp, Homo sapiens
ttcacccttgagaaaagtgagactcctttctcatcatcag

SEQ ID NO: 25675 - DNA, 40 bp, Homo sapiens
ctgatgatgagaaaggagtctcacttttctcaagggtgaa

SEQ ID NO: 25676 - DNA, 40 bp, Homo sapiens
tcacccttgagaaaagtgagactcctttctcatcatcaga

SEQ ID NO: 25677 - DNA, 40 bp, Homo sapiens
tctgatgatgagaaaggagtctcacttttctcaagggtga

SEQ ID NO: 25678 - DNA, 40 bp, Homo sapiens
cacccttgagaaaagtgagactcctttctcatcatcagag

SEQ ID NO: 25679 - DNA, 40 bp, Homo sapiens
ctctgatgatgagaaaggagtctcacttttctcaagggtg

SEQ ID NO: 25680 - DNA, 40 bp, Homo sapiens
acccttgagaaaagtgagactcctttctcatcatcagagt

SEQ ID NO: 25681 - DNA, 40 bp, Homo sapiens
actctgatgatgagaaaggagtctcacttttctcaagggt

SEQ ID NO: 25682 - DNA, 40 bp, Homo sapiens
cccttgagaaaagtgagactcctttctcatcatcagagta

SEQ ID NO: 25683 - DNA, 40 bp, Homo sapiens
tactctgatgatgagaaaggagtctcacttttctcaaggg

SEQ ID NO: 25684 - DNA, 40 bp, Homo sapiens
ccttgagaaaagtgagactcctttctcatcatcagagtat

SEQ ID NO: 25685 - DNA, 40 bp, Homo sapiens
atactctgatgatgagaaaggagtctcacttttctcaagg

SEQ ID NO: 25686 - DNA, 40 bp, Homo sapiens
cttgagaaaagtgagactcctttctcatcatcagagtatc

SEQ ID NO: 25687 - DNA, 40 bp, Homo sapiens
gatactctgatgatgagaaaggagtctcacttttctcaag

SEQ ID NO: 25688 - DNA, 40 bp, Homo sapiens
ttgagaaaagtgagactcctttctcatcatcagagtatcc

SEQ ID NO: 25689 - DNA, 40 bp, Homo sapiens
ggatactctgatgatgagaaaggagtctcacttttctcaa

SEQ ID NO: 25690 - DNA, 40 bp, Homo sapiens
tgagaaaagtgagactcctttctcatcatcagagtatcct

SEQ ID NO: 25691 - DNA, 40 bp, Homo sapiens
aggatactctgatgatgagaaaggagtctcacttttctca

SEQ ID NO: 25692 - DNA, 40 bp, Homo sapiens
gagaaaagtgagactcctttctcatcatcagagtatcctt

SEQ ID NO: 25693 - DNA, 40 bp, Homo sapiens
aaggatactctgatgatgagaaaggagtctcacttttctc

SEQ ID NO: 25694 - DNA, 40 bp, Homo sapiens
agaaaagtgagactcctttctcatcatcagagtatcctta

SEQ ID NO: 25695 - DNA, 40 bp, Homo sapiens
taaggatactctgatgatgagaaaggagtctcacttttct

SEQ ID NO: 25696 - DNA, 40 bp, Homo sapiens
gaaaagtgagactcctttctcatcatcagagtatccttaa

SEQ ID NO: 25697 - DNA, 40 bp, Homo sapiens
ttaaggatactctgatgatgagaaaggagtctcacttttc

SEQ ID NO: 25698 - DNA, 40 bp, Homo sapiens
aaaagtgagactcctttctcatcatcagagtatccttaaa

SEQ ID NO: 25699 - DNA, 40 bp, Homo sapiens
tttaaggatactctgatgatgagaaaggagtctcactttt

SEQ ID NO: 25700 - DNA, 40 bp, Homo sapiens
aaagtgagactcctttctcatcatcagagtatccttaaac

SEQ ID NO: 25701 - DNA, 40 bp, Homo sapiens
gtttaaggatactctgatgatgagaaaggagtctcacttt

SEQ ID NO: 25702 - DNA, 40 bp, Homo sapiens
aagtgagactcctttctcatcatcagagtatccttaaacc

SEQ ID NO: 25703 - DNA, 40 bp, Homo sapiens
ggtttaaggatactctgatgatgagaaaggagtctcactt

SEQ ID NO: 25704 - DNA, 40 bp, Homo sapiens
agtgagactcctttctcatcatcagagtatccttaaacca

SEQ ID NO: 25705 - DNA, 40 bp, Homo sapiens
tggtttaaggatactctgatgatgagaaaggagtctcact

SEQ ID NO: 25706 - DNA, 40 bp, Homo sapiens
gtgagactcctttctcatcatcagagtatccttaaaccat

SEQ ID NO: 25707 - DNA, 40 bp, Homo sapiens
atggtttaaggatactctgatgatgagaaaggagtctcac

SEQ ID NO: 25708 - DNA, 40 bp, Homo sapiens
tgagactcctttctcatcatcagagtatccttaaaccatt

SEQ ID NO: 25709 - DNA, 40 bp, Homo sapiens
aatggtttaaggatactctgatgatgagaaaggagtctca

SEQ ID NO: 25710 - DNA, 40 bp, Homo sapiens
gagactcctttctcatcatcagagtatccttaaaccatta

SEQ ID NO: 25711 - DNA, 40 bp, Homo sapiens
taatggtttaaggatactctgatgatgagaaaggagtctc

SEQ ID NO: 25712 - DNA, 40 bp, Homo sapiens
agactcctttctcatcatcagagtatccttaaaccattaa

SEQ ID NO: 25713 - DNA, 40 bp, Homo sapiens
ttaatggtttaaggatactctgatgatgagaaaggagtct

SEQ ID NO: 25714 - DNA, 40 bp, Homo sapiens
gactcctttctcatcatcagagtatccttaaaccattaag

SEQ ID NO: 25715 - DNA, 40 bp, Homo sapiens
cttaatggtttaaggatactctgatgatgagaaaggagtc

SEQ ID NO: 25716 - DNA, 40 bp, Homo sapiens
actcctttctcatcatcagagtatccttaaaccattaagg

SEQ ID NO: 25717 - DNA, 40 bp, Homo sapiens
ccttaatggtttaaggatactctgatgatgagaaaggagt

SEQ ID NO: 25718 - DNA, 40 bp, Homo sapiens
ctcctttctcatcatcagagtatccttaaaccattaaggc

SEQ ID NO: 25719 - DNA, 40 bp, Homo sapiens
gccttaatggtttaaggatactctgatgatgagaaaggag

SEQ ID NO: 25720 - DNA, 40 bp, Homo sapiens
tcctttctcatcatcagagtatccttaaaccattaaggca

SEQ ID NO: 25721 - DNA, 40 bp, Homo sapiens
tgccttaatggtttaaggatactctgatgatgagaaagga

SEQ ID NO: 25722 - DNA, 40 bp, Homo sapiens
cctttctcatcatcagagtatccttaaaccattaaggcaa

SEQ ID NO: 25723 - DNA, 40 bp, Homo sapiens
ttgccttaatggtttaaggatactctgatgatgagaaagg

SEQ ID NO: 25724 - DNA, 40 bp, Homo sapiens
ctttctcatcatcagagtatccttaaaccattaaggcaaa

SEQ ID NO: 25725 - DNA, 40 bp, Homo sapiens
tttgccttaatggtttaaggatactctgatgatgagaaag

SEQ ID NO: 25726 - DNA, 40 bp, Homo sapiens
tttctcatcatcagagtatccttaaaccattaaggcaaac

SEQ ID NO: 25727 - DNA, 40 bp, Homo sapiens
gtttgccttaatggtttaaggatactctgatgatgagaaa

SEQ ID NO: 25728 - DNA, 40 bp, Homo sapiens
ttctcatcatcagagtatccttaaaccattaaggcaaaca

SEQ ID NO: 25729 - DNA, 40 bp, Homo sapiens
tgtttgccttaatggtttaaggatactctgatgatgagaa

SEQ ID NO: 25730 - DNA, 40 bp, Homo sapiens
tctcatcatcagagtatccttaaaccattaaggcaaacat

SEQ ID NO: 25731 - DNA, 40 bp, Homo sapiens
atgtttgccttaatggtttaaggatactctgatgatgaga

SEQ ID NO: 25732 - DNA, 40 bp, Homo sapiens
ctcatcatcagagtatccttaaaccattaaggcaaacatt

SEQ ID NO: 25733 - DNA, 40 bp, Homo sapiens
aatgtttgccttaatggtttaaggatactctgatgatgag

SEQ ID NO: 25734 - DNA, 40 bp, Homo sapiens
tcatcatcagagtatccttaaaccattaaggcaaacattt

SEQ ID NO: 25735 - DNA, 40 bp, Homo sapiens
aaatgtttgccttaatggtttaaggatactctgatgatga

SEQ ID NO: 25736 - DNA, 40 bp, Homo sapiens
catcatcagagtatccttaaaccattaaggcaaacatttg

SEQ ID NO: 25737 - DNA, 40 bp, Homo sapiens
caaatgtttgccttaatggtttaaggatactctgatgatg

SEQ ID NO: 25738 - DNA, 40 bp, Homo sapiens
atcatcagagtatccttaaaccattaaggcaaacatttgg

SEQ ID NO: 25739 - DNA, 40 bp, Homo sapiens
ccaaatgtttgccttaatggtttaaggatactctgatgat

SEQ ID NO: 25740 - DNA, 40 bp, Homo sapiens
tcatcagagtatccttaaaccattaaggcaaacatttggg

SEQ ID NO: 25741 - DNA, 40 bp, Homo sapiens
cccaaatgtttgccttaatggtttaaggatactctgatga

SEQ ID NO: 25742 - DNA, 40 bp, Homo sapiens
catcagagtatccttaaaccattaaggcaaacatttggga

SEQ ID NO: 25743 - DNA, 40 bp, Homo sapiens
tcccaaatgtttgccttaatggtttaaggatactctgatg

SEQ ID NO: 25744 - DNA, 40 bp, Homo sapiens
atcagagtatccttaaaccattaaggcaaacatttgggaa

SEQ ID NO: 25745 - DNA, 40 bp, Homo sapiens
ttcccaaatgtttgccttaatggtttaaggatactctgat

SEQ ID NO: 25746 - DNA, 40 bp, Homo sapiens
tcagagtatccttaaaccattaaggcaaacatttgggaaa

SEQ ID NO: 25747 - DNA, 40 bp, Homo sapiens
tttcccaaatgtttgccttaatggtttaaggatactctga

SEQ ID NO: 25748 - DNA, 40 bp, Homo sapiens
cagagtatccttaaaccattaaggcaaacatttgggaaaa

SEQ ID NO: 25749 - DNA, 40 bp, Homo sapiens
ttttcccaaatgtttgccttaatggtttaaggatactctg

SEQ ID NO: 25750 - DNA, 40 bp, Homo sapiens
agagtatccttaaaccattaaggcaaacatttgggaaaaa

SEQ ID NO: 25751 - DNA, 40 bp, Homo sapiens
tttttcccaaatgtttgccttaatggtttaaggatactct

SEQ ID NO: 25752 - DNA, 40 bp, Homo sapiens
gagtatccttaaaccattaaggcaaacatttgggaaaaaa

SEQ ID NO: 25753 - DNA, 40 bp, Homo sapiens
ttttttcccaaatgtttgccttaatggtttaaggatactc

SEQ ID NO: 25754 - DNA, 40 bp, Homo sapiens
agtatccttaaaccattaaggcaaacatttgggaaaaaac

SEQ ID NO: 25755 - DNA, 40 bp, Homo sapiens
gttttttcccaaatgtttgccttaatggtttaaggatact

SEQ ID NO: 25756 - DNA, 40 bp, Homo sapiens
gtatccttaaaccattaaggcaaacatttgggaaaaaact

SEQ ID NO: 25757 - DNA, 40 bp, Homo sapiens
agttttttcccaaatgtttgccttaatggtttaaggatac

SEQ ID NO: 25758 - DNA, 40 bp, Homo sapiens
tatccttaaaccattaaggcaaacatttgggaaaaaactg

SEQ ID NO: 25759 - DNA, 40 bp, Homo sapiens
cagttttttcccaaatgtttgccttaatggtttaaggata

SEQ ID NO: 25760 - DNA, 40 bp, Homo sapiens
atccttaaaccattaaggcaaacatttgggaaaaaactga

SEQ ID NO: 25761 - DNA, 40 bp, Homo sapiens
tcagttttttcccaaatgtttgccttaatggtttaaggat

SEQ ID NO: 25762 - DNA, 40 bp, Homo sapiens
tccttaaaccattaaggcaaacatttgggaaaaaactgag

SEQ ID NO: 25763 - DNA, 40 bp, Homo sapiens
ctcagttttttcccaaatgtttgccttaatggtttaagga

SEQ ID NO: 25764 - DNA, 40 bp, Homo sapiens
ccttaaaccattaaggcaaacatttgggaaaaaactgagc

SEQ ID NO: 25765 - DNA, 40 bp, Homo sapiens
gctcagttttttcccaaatgtttgccttaatggtttaagg

SEQ ID NO: 25766 - DNA, 40 bp, Homo sapiens
cttaaaccattaaggcaaacatttgggaaaaaactgagct

SEQ ID NO: 25767 - DNA, 40 bp, Homo sapiens
agctcagttttttcccaaatgtttgccttaatggtttaag

SEQ ID NO: 25768 - DNA, 40 bp, Homo sapiens
ttaaaccattaaggcaaacatttgggaaaaaactgagcta

SEQ ID NO: 25769 - DNA, 40 bp, Homo sapiens
tagctcagttttttcccaaatgtttgccttaatggtttaa

SEQ ID NO: 25770 - DNA, 40 bp, Homo sapiens
taaaccattaaggcaaacatttgggaaaaaactgagctat

SEQ ID NO: 25771 - DNA, 40 bp, Homo sapiens
atagctcagttttttcccaaatgtttgccttaatggttta

SEQ ID NO: 25772 - DNA, 40 bp, Homo sapiens
aaaccattaaggcaaacatttgggaaaaaactgagctatc

SEQ ID NO: 25773 - DNA, 40 bp, Homo sapiens
gatagctcagttttttcccaaatgtttgccttaatggttt

SEQ ID NO: 25774 - DNA, 40 bp, Homo sapiens
aaccattaaggcaaacatttgggaaaaaactgagctatct

SEQ ID NO: 25775 - DNA, 40 bp, Homo sapiens
agatagctcagttttttcccaaatgtttgccttaatggtt

SEQ ID NO: 25776 - DNA, 40 bp, Homo sapiens
accattaaggcaaacatttgggaaaaaactgagctatctg

SEQ ID NO: 25777 - DNA, 40 bp, Homo sapiens
cagatagctcagttttttcccaaatgtttgccttaatggt

SEQ ID NO: 25778 - DNA, 40 bp, Homo sapiens
ccattaaggcaaacatttgggaaaaaactgagctatctgg

SEQ ID NO: 25779 - DNA, 40 bp, Homo sapiens
ccagatagctcagttttttcccaaatgtttgccttaatgg

SEQ ID NO: 25780 - DNA, 40 bp, Homo sapiens
cattaaggcaaacatttgggaaaaaactgagctatctggc

SEQ ID NO: 25781 - DNA, 40 bp, Homo sapiens
gccagatagctcagttttttcccaaatgtttgccttaatg

SEQ ID NO: 25782 - DNA, 40 bp, Homo sapiens
attaaggcaaacatttgggaaaaaactgagctatctggct

SEQ ID NO: 25783 - DNA, 40 bp, Homo sapiens
agccagatagctcagttttttcccaaatgtttgccttaat

SEQ ID NO: 25784 - DNA, 40 bp, Homo sapiens
ttaaggcaaacatttgggaaaaaactgagctatctggctg

SEQ ID NO: 25785 - DNA, 40 bp, Homo sapiens
cagccagatagctcagttttttcccaaatgtttgccttaa

SEQ ID NO: 25786 - DNA, 40 bp, Homo sapiens
taaggcaaacatttgggaaaaaactgagctatctggctgc

SEQ ID NO: 25787 - DNA, 40 bp, Homo sapiens
gcagccagatagctcagttttttcccaaatgtttgcctta

SEQ ID NO: 25788 - DNA, 40 bp, Homo sapiens
aaggcaaacatttgggaaaaaactgagctatctggctgca

SEQ ID NO: 25789 - DNA, 40 bp, Homo sapiens
tgcagccagatagctcagttttttcccaaatgtttgcctt

SEQ ID NO: 25790 - DNA, 40 bp, Homo sapiens
aggcaaacatttgggaaaaaactgagctatctggctgcat

SEQ ID NO: 25791 - DNA, 40 bp, Homo sapiens
atgcagccagatagctcagttttttcccaaatgtttgcct

SEQ ID NO: 25792 - DNA, 40 bp, Homo sapiens
ggcaaacatttgggaaaaaactgagctatctggctgcata

SEQ ID NO: 25793 - DNA, 40 bp, Homo sapiens
tatgcagccagatagctcagttttttcccaaatgtttgcc

SEQ ID NO: 25794 - DNA, 40 bp, Homo sapiens
gcaaacatttgggaaaaaactgagctatctggctgcataa

SEQ ID NO: 25795 - DNA, 40 bp, Homo sapiens
ttatgcagccagatagctcagttttttcccaaatgtttgc

SEQ ID NO: 25796 - DNA, 40 bp, Homo sapiens
caaacatttgggaaaaaactgagctatctggctgcataaa

SEQ ID NO: 25797 - DNA, 40 bp, Homo sapiens
tttatgcagccagatagctcagttttttcccaaatgtttg

SEQ ID NO: 25798 - DNA, 40 bp, Homo sapiens
aaacatttgggaaaaaactgagctatctggctgcataaaa

SEQ ID NO: 25799 - DNA, 40 bp, Homo sapiens
ttttatgcagccagatagctcagttttttcccaaatgttt

SEQ ID NO: 25800 - DNA, 40 bp, Homo sapiens
aacatttgggaaaaaactgagctatctggctgcataaaaa

SEQ ID NO: 25801 - DNA, 40 bp, Homo sapiens
tttttatgcagccagatagctcagttttttcccaaatgtt

SEQ ID NO: 25802 - DNA, 40 bp, Homo sapiens
acatttgggaaaaaactgagctatctggctgcataaaaat

SEQ ID NO: 25803 - DNA, 40 bp, Homo sapiens
atttttatgcagccagatagctcagttttttcccaaatgt

SEQ ID NO: 25804 - DNA, 40 bp, Homo sapiens
catttgggaaaaaactgagctatctggctgcataaaaatt

SEQ ID NO: 25805 - DNA, 40 bp, Homo sapiens
aatttttatgcagccagatagctcagttttttcccaaatg

SEQ ID NO: 25806 - DNA, 40 bp, Homo sapiens
atttgggaaaaaactgagctatctggctgcataaaaatta

SEQ ID NO: 25807 - DNA, 40 bp, Homo sapiens
taatttttatgcagccagatagctcagttttttcccaaat

SEQ ID NO: 25808 - DNA, 40 bp, Homo sapiens
tttgggaaaaaactgagctatctggctgcataaaaattaa

SEQ ID NO: 25809 - DNA, 40 bp, Homo sapiens
ttaatttttatgcagccagatagctcagttttttcccaaa

SEQ ID NO: 25810 - DNA, 40 bp, Homo sapiens
ttgggaaaaaactgagctatctggctgcataaaaattaag

SEQ ID NO: 25811 - DNA, 40 bp, Homo sapiens
cttaatttttatgcagccagatagctcagttttttcccaa

SEQ ID NO: 25812 - DNA, 40 bp, Homo sapiens
tgggaaaaaactgagctatctggctgcataaaaattaagt

SEQ ID NO: 25813 - DNA, 40 bp, Homo sapiens
acttaatttttatgcagccagatagctcagttttttccca

SEQ ID NO: 25814 - DNA, 40 bp, Homo sapiens
gggaaaaaactgagctatctggctgcataaaaattaagtt

SEQ ID NO: 25815 - DNA, 40 bp, Homo sapiens
aacttaatttttatgcagccagatagctcagttttttccc

SEQ ID NO: 25816 - DNA, 40 bp, Homo sapiens
ggaaaaaactgagctatctggctgcataaaaattaagttt

SEQ ID NO: 25817 - DNA, 40 bp, Homo sapiens
aaacttaatttttatgcagccagatagctcagttttttcc

SEQ ID NO: 25818 - DNA, 40 bp, Homo sapiens
gaaaaaactgagctatctggctgcataaaaattaagtttt

SEQ ID NO: 25819 - DNA, 40 bp, Homo sapiens
aaaacttaatttttatgcagccagatagctcagttttttc

SEQ ID NO: 25820 - DNA, 40 bp, Homo sapiens
aaaaaactgagctatctggctgcataaaaattaagttttc

SEQ ID NO: 25821 - DNA, 40 bp, Homo sapiens
gaaaacttaatttttatgcagccagatagctcagtttttt

SEQ ID NO: 25822 - DNA, 40 bp, Homo sapiens
aaaaactgagctatctggctgcataaaaattaagttttct

SEQ ID NO: 25823 - DNA, 40 bp, Homo sapiens
agaaaacttaatttttatgcagccagatagctcagttttt

SEQ ID NO: 25824 - DNA, 40 bp, Homo sapiens
aaaactgagctatctggctgcataaaaattaagttttctt

SEQ ID NO: 25825 - DNA, 40 bp, Homo sapiens
aagaaaacttaatttttatgcagccagatagctcagtttt

SEQ ID NO: 25826 - DNA, 40 bp, Homo sapiens
aaactgagctatctggctgcataaaaattaagttttcttt

SEQ ID NO: 25827 - DNA, 40 bp, Homo sapiens
aaagaaaacttaatttttatgcagccagatagctcagttt

SEQ ID NO: 25828 - DNA, 40 bp, Homo sapiens
aactgagctatctggctgcataaaaattaagttttcttta

SEQ ID NO: 25829 - DNA, 40 bp, Homo sapiens
taaagaaaacttaatttttatgcagccagatagctcagtt

SEQ ID NO: 25830 - DNA, 40 bp, Homo sapiens
actgagctatctggctgcataaaaattaagttttctttaa

SEQ ID NO: 25831 - DNA, 40 bp, Homo sapiens
ttaaagaaaacttaatttttatgcagccagatagctcagt

SEQ ID NO: 25832 - DNA, 40 bp, Homo sapiens
ctgagctatctggctgcataaaaattaagttttctttaac

SEQ ID NO: 25833 - DNA, 40 bp, Homo sapiens
gttaaagaaaacttaatttttatgcagccagatagctcag

SEQ ID NO: 25834 - DNA, 40 bp, Homo sapiens
tgagctatctggctgcataaaaattaagttttctttaaca

SEQ ID NO: 25835 - DNA, 40 bp, Homo sapiens
tgttaaagaaaacttaatttttatgcagccagatagctca

SEQ ID NO: 25836 - DNA, 40 bp, Homo sapiens
gagctatctggctgcataaaaattaagttttctttaacaa

SEQ ID NO: 25837 - DNA, 40 bp, Homo sapiens
ttgttaaagaaaacttaatttttatgcagccagatagctc

SEQ ID NO: 25838 - DNA, 40 bp, Homo sapiens
agctatctggctgcataaaaattaagttttctttaacaaa

SEQ ID NO: 25839 - DNA, 40 bp, Homo sapiens
tttgttaaagaaaacttaatttttatgcagccagatagct

SEQ ID NO: 25840 - DNA, 40 bp, Homo sapiens
gctatctggctgcataaaaattaagttttctttaacaaag

SEQ ID NO: 25841 - DNA, 40 bp, Homo sapiens
ctttgttaaagaaaacttaatttttatgcagccagatagc

SEQ ID NO: 25842 - DNA, 40 bp, Homo sapiens
ctatctggctgcataaaaattaagttttctttaacaaaga

SEQ ID NO: 25843 - DNA, 40 bp, Homo sapiens
tctttgttaaagaaaacttaatttttatgcagccagatag

SEQ ID NO: 25844 - DNA, 40 bp, Homo sapiens
tatctggctgcataaaaattaagttttctttaacaaagat

SEQ ID NO: 25845 - DNA, 40 bp, Homo sapiens
atctttgttaaagaaaacttaatttttatgcagccagata

SEQ ID NO: 25846 - DNA, 40 bp, Homo sapiens
atctggctgcataaaaattaagttttctttaacaaagata

SEQ ID NO: 25847 - DNA, 40 bp, Homo sapiens
tatctttgttaaagaaaacttaatttttatgcagccagat

SEQ ID NO: 25848 - DNA, 40 bp, Homo sapiens
tctggctgcataaaaattaagttttctttaacaaagatag

SEQ ID NO: 25849 - DNA, 40 bp, Homo sapiens
ctatctttgttaaagaaaacttaatttttatgcagccaga

SEQ ID NO: 25850 - DNA, 40 bp, Homo sapiens
ctggctgcataaaaattaagttttctttaacaaagataga

SEQ ID NO: 25851 - DNA, 40 bp, Homo sapiens
tctatctttgttaaagaaaacttaatttttatgcagccag

SEQ ID NO: 25852 - DNA, 40 bp, Homo sapiens
tggctgcataaaaattaagttttctttaacaaagatagaa

SEQ ID NO: 25853 - DNA, 40 bp, Homo sapiens
ttctatctttgttaaagaaaacttaatttttatgcagcca

SEQ ID NO: 25854 - DNA, 40 bp, Homo sapiens
ggctgcataaaaattaagttttctttaacaaagatagaag

SEQ ID NO: 25855 - DNA, 40 bp, Homo sapiens
cttctatctttgttaaagaaaacttaatttttatgcagcc

SEQ ID NO: 25856 - DNA, 40 bp, Homo sapiens
gctgcataaaaattaagttttctttaacaaagatagaaga

SEQ ID NO: 25857 - DNA, 40 bp, Homo sapiens
tcttctatctttgttaaagaaaacttaatttttatgcagc

SEQ ID NO: 25858 - DNA, 40 bp, Homo sapiens
ctgcataaaaattaagttttctttaacaaagatagaagac

SEQ ID NO: 25859 - DNA, 40 bp, Homo sapiens
gtcttctatctttgttaaagaaaacttaatttttatgcag

SEQ ID NO: 25860 - DNA, 40 bp, Homo sapiens
tgcataaaaattaagttttctttaacaaagatagaagaca

SEQ ID NO: 25861 - DNA, 40 bp, Homo sapiens
tgtcttctatctttgttaaagaaaacttaatttttatgca

SEQ ID NO: 25862 - DNA, 40 bp, Homo sapiens
gcataaaaattaagttttctttaacaaagatagaagacaa

SEQ ID NO: 25863 - DNA, 40 bp, Homo sapiens
ttgtcttctatctttgttaaagaaaacttaatttttatgc

SEQ ID NO: 25864 - DNA, 40 bp, Homo sapiens
cataaaaattaagttttctttaacaaagatagaagacaaa

SEQ ID NO: 25865 - DNA, 40 bp, Homo sapiens
tttgtcttctatctttgttaaagaaaacttaatttttatg

SEQ ID NO: 25866 - DNA, 40 bp, Homo sapiens
ataaaaattaagttttctttaacaaagatagaagacaaat

SEQ ID NO: 25867 - DNA, 40 bp, Homo sapiens
atttgtcttctatctttgttaaagaaaacttaatttttat

SEQ ID NO: 25868 - DNA, 40 bp, Homo sapiens
taaaaattaagttttctttaacaaagatagaagacaaatg

SEQ ID NO: 25869 - DNA, 40 bp, Homo sapiens
catttgtcttctatctttgttaaagaaaacttaattttta

SEQ ID NO: 25870 - DNA, 40 bp, Homo sapiens
aaaaattaagttttctttaacaaagatagaagacaaatga

SEQ ID NO: 25871 - DNA, 40 bp, Homo sapiens
tcatttgtcttctatctttgttaaagaaaacttaattttt

SEQ ID NO: 25872 - DNA, 40 bp, Homo sapiens
aaaattaagttttctttaacaaagatagaagacaaatgaa

SEQ ID NO: 25873 - DNA, 40 bp, Homo sapiens
ttcatttgtcttctatctttgttaaagaaaacttaatttt

SEQ ID NO: 25874 - DNA, 40 bp, Homo sapiens
aaattaagttttctttaacaaagatagaagacaaatgaaa

SEQ ID NO: 25875 - DNA, 40 bp, Homo sapiens
tttcatttgtcttctatctttgttaaagaaaacttaattt

SEQ ID NO: 25876 - DNA, 40 bp, Homo sapiens
aattaagttttctttaacaaagatagaagacaaatgaaaa

SEQ ID NO: 25877 - DNA, 40 bp, Homo sapiens
ttttcatttgtcttctatctttgttaaagaaaacttaatt

SEQ ID NO: 25878 - DNA, 40 bp, Homo sapiens
attaagttttctttaacaaagatagaagacaaatgaaaac

SEQ ID NO: 25879 - DNA, 40 bp, Homo sapiens
gttttcatttgtcttctatctttgttaaagaaaacttaat

SEQ ID NO: 25880 - DNA, 40 bp, Homo sapiens
ttaagttttctttaacaaagatagaagacaaatgaaaacc

SEQ ID NO: 25881 - DNA, 40 bp, Homo sapiens
ggttttcatttgtcttctatctttgttaaagaaaacttaa

SEQ ID NO: 25882 - DNA, 40 bp, Homo sapiens
taagttttctttaacaaagatagaagacaaatgaaaacct

SEQ ID NO: 25883 - DNA, 40 bp, Homo sapiens
aggttttcatttgtcttctatctttgttaaagaaaactta

SEQ ID NO: 25884 - DNA, 40 bp, Homo sapiens
aagttttctttaacaaagatagaagacaaatgaaaaccta

SEQ ID NO: 25885 - DNA, 40 bp, Homo sapiens
taggttttcatttgtcttctatctttgttaaagaaaactt

SEQ ID NO: 25886 - DNA, 40 bp, Homo sapiens
agttttctttaacaaagatagaagacaaatgaaaacctag

SEQ ID NO: 25887 - DNA, 40 bp, Homo sapiens
ctaggttttcatttgtcttctatctttgttaaagaaaact

SEQ ID NO: 25888 - DNA, 40 bp, Homo sapiens
gttttctttaacaaagatagaagacaaatgaaaacctaga

SEQ ID NO: 25889 - DNA, 40 bp, Homo sapiens
tctaggttttcatttgtcttctatctttgttaaagaaaac

SEQ ID NO: 25890 - DNA, 40 bp, Homo sapiens
ttttctttaacaaagatagaagacaaatgaaaacctagaa

SEQ ID NO: 25891 - DNA, 40 bp, Homo sapiens
ttctaggttttcatttgtcttctatctttgttaaagaaaa

SEQ ID NO: 25892 - DNA, 40 bp, Homo sapiens
tttctttaacaaagatagaagacaaatgaaaacctagaaa

SEQ ID NO: 25893 - DNA, 40 bp, Homo sapiens
tttctaggttttcatttgtcttctatctttgttaaagaaa

SEQ ID NO: 25894 - DNA, 40 bp, Homo sapiens
ttctttaacaaagatagaagacaaatgaaaacctagaaaa

SEQ ID NO: 25895 - DNA, 40 bp, Homo sapiens
ttttctaggttttcatttgtcttctatctttgttaaagaa

SEQ ID NO: 25896 - DNA, 40 bp, Homo sapiens
tctttaacaaagatagaagacaaatgaaaacctagaaaaa

SEQ ID NO: 25897 - DNA, 40 bp, Homo sapiens
tttttctaggttttcatttgtcttctatctttgttaaaga

SEQ ID NO: 25898 - DNA, 40 bp, Homo sapiens
ctttaacaaagatagaagacaaatgaaaacctagaaaaac

SEQ ID NO: 25899 - DNA, 40 bp, Homo sapiens
gtttttctaggttttcatttgtcttctatctttgttaaag

SEQ ID NO: 25900 - DNA, 40 bp, Homo sapiens
tttaacaaagatagaagacaaatgaaaacctagaaaaacc

SEQ ID NO: 25901 - DNA, 40 bp, Homo sapiens
ggtttttctaggttttcatttgtcttctatctttgttaaa

SEQ ID NO: 25902 - DNA, 40 bp, Homo sapiens
ttaacaaagatagaagacaaatgaaaacctagaaaaacca

SEQ ID NO: 25903 - DNA, 40 bp, Homo sapiens
tggtttttctaggttttcatttgtcttctatctttgttaa

SEQ ID NO: 25904 - DNA, 40 bp, Homo sapiens
taacaaagatagaagacaaatgaaaacctagaaaaaccat

SEQ ID NO: 25905 - DNA, 40 bp, Homo sapiens
atggtttttctaggttttcatttgtcttctatctttgtta

SEQ ID NO: 25906 - DNA, 40 bp, Homo sapiens
aacaaagatagaagacaaatgaaaacctagaaaaaccatt

SEQ ID NO: 25907 - DNA, 40 bp, Homo sapiens
aatggtttttctaggttttcatttgtcttctatctttgtt

SEQ ID NO: 25908 - DNA, 40 bp, Homo sapiens
acaaagatagaagacaaatgaaaacctagaaaaaccattt

SEQ ID NO: 25909 - DNA, 40 bp, Homo sapiens
aaatggtttttctaggttttcatttgtcttctatctttgt

SEQ ID NO: 25910 - DNA, 40 bp, Homo sapiens
caaagatagaagacaaatgaaaacctagaaaaaccatttg

SEQ ID NO: 25911 - DNA, 40 bp, Homo sapiens
caaatggtttttctaggttttcatttgtcttctatctttg

SEQ ID NO: 25912 - DNA, 40 bp, Homo sapiens
aaagatagaagacaaatgaaaacctagaaaaaccatttgg

SEQ ID NO: 25913 - DNA, 40 bp, Homo sapiens
ccaaatggtttttctaggttttcatttgtcttctatcttt

SEQ ID NO: 25914 - DNA, 40 bp, Homo sapiens
aagatagaagacaaatgaaaacctagaaaaaccatttggt

SEQ ID NO: 25915 - DNA, 40 bp, Homo sapiens
accaaatggtttttctaggttttcatttgtcttctatctt

SEQ ID NO: 25916 - DNA, 40 bp, Homo sapiens
agatagaagacaaatgaaaacctagaaaaaccatttggtt

SEQ ID NO: 25917 - DNA, 40 bp, Homo sapiens
aaccaaatggtttttctaggttttcatttgtcttctatct

SEQ ID NO: 25918 - DNA, 40 bp, Homo sapiens
gatagaagacaaatgaaaacctagaaaaaccatttggttc

SEQ ID NO: 25919 - DNA, 40 bp, Homo sapiens
gaaccaaatggtttttctaggttttcatttgtcttctatc

SEQ ID NO: 25920 - DNA, 40 bp, Homo sapiens
atagaagacaaatgaaaacctagaaaaaccatttggttca

SEQ ID NO: 25921 - DNA, 40 bp, Homo sapiens
tgaaccaaatggtttttctaggttttcatttgtcttctat

SEQ ID NO: 25922 - DNA, 40 bp, Homo sapiens
tagaagacaaatgaaaacctagaaaaaccatttggttcaa

SEQ ID NO: 25923 - DNA, 40 bp, Homo sapiens
ttgaaccaaatggtttttctaggttttcatttgtcttcta

SEQ ID NO: 25924 - DNA, 40 bp, Homo sapiens
agaagacaaatgaaaacctagaaaaaccatttggttcaag

SEQ ID NO: 25925 - DNA, 40 bp, Homo sapiens
cttgaaccaaatggtttttctaggttttcatttgtcttct

SEQ ID NO: 25926 - DNA, 40 bp, Homo sapiens
gaagacaaatgaaaacctagaaaaaccatttggttcaagt

SEQ ID NO: 25927 - DNA, 40 bp, Homo sapiens
acttgaaccaaatggtttttctaggttttcatttgtcttc

SEQ ID NO: 25928 - DNA, 40 bp, Homo sapiens
aagacaaatgaaaacctagaaaaaccatttggttcaagta

SEQ ID NO: 25929 - DNA, 40 bp, Homo sapiens
tacttgaaccaaatggtttttctaggttttcatttgtctt

SEQ ID NO: 25930 - DNA, 40 bp, Homo sapiens
agacaaatgaaaacctagaaaaaccatttggttcaagtaa

SEQ ID NO: 25931 - DNA, 40 bp, Homo sapiens
ttacttgaaccaaatggtttttctaggttttcatttgtct

SEQ ID NO: 25932 - DNA, 40 bp, Homo sapiens
gacaaatgaaaacctagaaaaaccatttggttcaagtaac

SEQ ID NO: 25933 - DNA, 40 bp, Homo sapiens
gttacttgaaccaaatggtttttctaggttttcatttgtc

SEQ ID NO: 25934 - DNA, 40 bp, Homo sapiens
acaaatgaaaacctagaaaaaccatttggttcaagtaaca

SEQ ID NO: 25935 - DNA, 40 bp, Homo sapiens
tgttacttgaaccaaatggtttttctaggttttcatttgt

SEQ ID NO: 25936 - DNA, 40 bp, Homo sapiens
caaatgaaaacctagaaaaaccatttggttcaagtaacag

SEQ ID NO: 25937 - DNA, 40 bp, Homo sapiens
ctgttacttgaaccaaatggtttttctaggttttcatttg

SEQ ID NO: 25938 - DNA, 40 bp, Homo sapiens
aaatgaaaacctagaaaaaccatttggttcaagtaacagg

SEQ ID NO: 25939 - DNA, 40 bp, Homo sapiens
cctgttacttgaaccaaatggtttttctaggttttcattt

SEQ ID NO: 25940 - DNA, 40 bp, Homo sapiens
aatgaaaacctagaaaaaccatttggttcaagtaacagga

SEQ ID NO: 25941 - DNA, 40 bp, Homo sapiens
tcctgttacttgaaccaaatggtttttctaggttttcatt

SEQ ID NO: 25942 - DNA, 40 bp, Homo sapiens
atgaaaacctagaaaaaccatttggttcaagtaacaggaa

SEQ ID NO: 25943 - DNA, 40 bp, Homo sapiens
ttcctgttacttgaaccaaatggtttttctaggttttcat

SEQ ID NO: 25944 - DNA, 40 bp, Homo sapiens
tgaaaacctagaaaaaccatttggttcaagtaacaggaag

SEQ ID NO: 25945 - DNA, 40 bp, Homo sapiens
cttcctgttacttgaaccaaatggtttttctaggttttca

SEQ ID NO: 25946 - DNA, 40 bp, Homo sapiens
gaaaacctagaaaaaccatttggttcaagtaacaggaagc

SEQ ID NO: 25947 - DNA, 40 bp, Homo sapiens
gcttcctgttacttgaaccaaatggtttttctaggttttc

SEQ ID NO: 25948 - DNA, 40 bp, Homo sapiens
aaaacctagaaaaaccatttggttcaagtaacaggaagct

SEQ ID NO: 25949 - DNA, 40 bp, Homo sapiens
agcttcctgttacttgaaccaaatggtttttctaggtttt

SEQ ID NO: 25950 - DNA, 40 bp, Homo sapiens
aaacctagaaaaaccatttggttcaagtaacaggaagcta

SEQ ID NO: 25951 - DNA, 40 bp, Homo sapiens
tagcttcctgttacttgaaccaaatggtttttctaggttt

SEQ ID NO: 25952 - DNA, 40 bp, Homo sapiens
aacctagaaaaaccatttggttcaagtaacaggaagctat

SEQ ID NO: 25953 - DNA, 40 bp, Homo sapiens
atagcttcctgttacttgaaccaaatggtttttctaggtt

SEQ ID NO: 25954 - DNA, 40 bp, Homo sapiens
acctagaaaaaccatttggttcaagtaacaggaagctatc

SEQ ID NO: 25955 - DNA, 40 bp, Homo sapiens
gatagcttcctgttacttgaaccaaatggtttttctaggt

SEQ ID NO: 25956 - DNA, 40 bp, Homo sapiens
cctagaaaaaccatttggttcaagtaacaggaagctatct

SEQ ID NO: 25957 - DNA, 40 bp, Homo sapiens
agatagcttcctgttacttgaaccaaatggtttttctagg

SEQ ID NO: 25958 - DNA, 40 bp, Homo sapiens
ctagaaaaaccatttggttcaagtaacaggaagctatctt

SEQ ID NO: 25959 - DNA, 40 bp, Homo sapiens
aagatagcttcctgttacttgaaccaaatggtttttctag

SEQ ID NO: 25960 - DNA, 40 bp, Homo sapiens
tagaaaaaccatttggttcaagtaacaggaagctatctta

SEQ ID NO: 25961 - DNA, 40 bp, Homo sapiens
taagatagcttcctgttacttgaaccaaatggtttttcta

SEQ ID NO: 25962 - DNA, 40 bp, Homo sapiens
agaaaaaccatttggttcaagtaacaggaagctatcttat

SEQ ID NO: 25963 - DNA, 40 bp, Homo sapiens
ataagatagcttcctgttacttgaaccaaatggtttttct

SEQ ID NO: 25964 - DNA, 40 bp, Homo sapiens
gaaaaaccatttggttcaagtaacaggaagctatcttata

SEQ ID NO: 25965 - DNA, 40 bp, Homo sapiens
tataagatagcttcctgttacttgaaccaaatggtttttc

SEQ ID NO: 25966 - DNA, 40 bp, Homo sapiens
aaaaaccatttggttcaagtaacaggaagctatcttatat

SEQ ID NO: 25967 - DNA, 40 bp, Homo sapiens
atataagatagcttcctgttacttgaaccaaatggttttt

SEQ ID NO: 25968 - DNA, 40 bp, Homo sapiens
aaaaccatttggttcaagtaacaggaagctatcttatata

SEQ ID NO: 25969 - DNA, 40 bp, Homo sapiens
tatataagatagcttcctgttacttgaaccaaatggtttt

SEQ ID NO: 25970 - DNA, 40 bp, Homo sapiens
aaaccatttggttcaagtaacaggaagctatcttatatat

SEQ ID NO: 25971 - DNA, 40 bp, Homo sapiens
atatataagatagcttcctgttacttgaaccaaatggttt

SEQ ID NO: 25972 - DNA, 40 bp, Homo sapiens
aaccatttggttcaagtaacaggaagctatcttatatatg

SEQ ID NO: 25973 - DNA, 40 bp, Homo sapiens
catatataagatagcttcctgttacttgaaccaaatggtt

SEQ ID NO: 25974 - DNA, 40 bp, Homo sapiens
accatttggttcaagtaacaggaagctatcttatatatga

SEQ ID NO: 25975 - DNA, 40 bp, Homo sapiens
tcatatataagatagcttcctgttacttgaaccaaatggt

SEQ ID NO: 25976 - DNA, 40 bp, Homo sapiens
ccatttggttcaagtaacaggaagctatcttatatatgaa

SEQ ID NO: 25977 - DNA, 40 bp, Homo sapiens
ttcatatataagatagcttcctgttacttgaaccaaatgg

SEQ ID NO: 25978 - DNA, 40 bp, Homo sapiens
catttggttcaagtaacaggaagctatcttatatatgaat

SEQ ID NO: 25979 - DNA, 40 bp, Homo sapiens
attcatatataagatagcttcctgttacttgaaccaaatg

SEQ ID NO: 25980 - DNA, 40 bp, Homo sapiens
atttggttcaagtaacaggaagctatcttatatatgaatt

SEQ ID NO: 25981 - DNA, 40 bp, Homo sapiens
aattcatatataagatagcttcctgttacttgaaccaaat

SEQ ID NO: 25982 - DNA, 40 bp, Homo sapiens
tttggttcaagtaacaggaagctatcttatatatgaatta

SEQ ID NO: 25983 - DNA, 40 bp, Homo sapiens
taattcatatataagatagcttcctgttacttgaaccaaa

SEQ ID NO: 25984 - DNA, 40 bp, Homo sapiens
ttggttcaagtaacaggaagctatcttatatatgaattag

SEQ ID NO: 25985 - DNA, 40 bp, Homo sapiens
ctaattcatatataagatagcttcctgttacttgaaccaa

SEQ ID NO: 25986 - DNA, 40 bp, Homo sapiens
tggttcaagtaacaggaagctatcttatatatgaattaga

SEQ ID NO: 25987 - DNA, 40 bp, Homo sapiens
tctaattcatatataagatagcttcctgttacttgaacca

SEQ ID NO: 25988 - DNA, 40 bp, Homo sapiens
ggttcaagtaacaggaagctatcttatatatgaattagag

SEQ ID NO: 25989 - DNA, 40 bp, Homo sapiens
ctctaattcatatataagatagcttcctgttacttgaacc

SEQ ID NO: 25990 - DNA, 40 bp, Homo sapiens
gttcaagtaacaggaagctatcttatatatgaattagaga

SEQ ID NO: 25991 - DNA, 40 bp, Homo sapiens
tctctaattcatatataagatagcttcctgttacttgaac

SEQ ID NO: 25992 - DNA, 40 bp, Homo sapiens
ttcaagtaacaggaagctatcttatatatgaattagagaa

SEQ ID NO: 25993 - DNA, 40 bp, Homo sapiens
ttctctaattcatatataagatagcttcctgttacttgaa

SEQ ID NO: 25994 - DNA, 40 bp, Homo sapiens
tcaagtaacaggaagctatcttatatatgaattagagaaa

SEQ ID NO: 25995 - DNA, 40 bp, Homo sapiens
tttctctaattcatatataagatagcttcctgttacttga

SEQ ID NO: 25996 - DNA, 40 bp, Homo sapiens
caagtaacaggaagctatcttatatatgaattagagaaaa

SEQ ID NO: 25997 - DNA, 40 bp, Homo sapiens
ttttctctaattcatatataagatagcttcctgttacttg

SEQ ID NO: 25998 - DNA, 40 bp, Homo sapiens
aagtaacaggaagctatcttatatatgaattagagaaaag

SEQ ID NO: 25999 - DNA, 40 bp, Homo sapiens
cttttctctaattcatatataagatagcttcctgttactt

SEQ ID NO: 26000 - DNA, 40 bp, Homo sapiens
agtaacaggaagctatcttatatatgaattagagaaaagc

SEQ ID NO: 26001 - DNA, 40 bp, Homo sapiens
gcttttctctaattcatatataagatagcttcctgttact

SEQ ID NO: 26002 - DNA, 40 bp, Homo sapiens
gtaacaggaagctatcttatatatgaattagagaaaagca

SEQ ID NO: 26003 - DNA, 40 bp, Homo sapiens
tgcttttctctaattcatatataagatagcttcctgttac

SEQ ID NO: 26004 - DNA, 40 bp, Homo sapiens
taacaggaagctatcttatatatgaattagagaaaagcaa

SEQ ID NO: 26005 - DNA, 40 bp, Homo sapiens
ttgcttttctctaattcatatataagatagcttcctgtta

SEQ ID NO: 26006 - DNA, 40 bp, Homo sapiens
aacaggaagctatcttatatatgaattagagaaaagcaaa

SEQ ID NO: 26007 - DNA, 40 bp, Homo sapiens
tttgcttttctctaattcatatataagatagcttcctgtt

SEQ ID NO: 26008 - DNA, 40 bp, Homo sapiens
acaggaagctatcttatatatgaattagagaaaagcaaac

SEQ ID NO: 26009 - DNA, 40 bp, Homo sapiens
gtttgcttttctctaattcatatataagatagcttcctgt

SEQ ID NO: 26010 - DNA, 40 bp, Homo sapiens
caggaagctatcttatatatgaattagagaaaagcaaaca

SEQ ID NO: 26011 - DNA, 40 bp, Homo sapiens
tgtttgcttttctctaattcatatataagatagcttcctg

SEQ ID NO: 26012 - DNA, 40 bp, Homo sapiens
aggaagctatcttatatatgaattagagaaaagcaaacac

SEQ ID NO: 26013 - DNA, 40 bp, Homo sapiens
gtgtttgcttttctctaattcatatataagatagcttcct

SEQ ID NO: 26014 - DNA, 40 bp, Homo sapiens
ggaagctatcttatatatgaattagagaaaagcaaacaca

SEQ ID NO: 26015 - DNA, 40 bp, Homo sapiens
tgtgtttgcttttctctaattcatatataagatagcttcc

SEQ ID NO: 26016 - DNA, 40 bp, Homo sapiens
gaagctatcttatatatgaattagagaaaagcaaacacac

SEQ ID NO: 26017 - DNA, 40 bp, Homo sapiens
gtgtgtttgcttttctctaattcatatataagatagcttc

SEQ ID NO: 26018 - DNA, 40 bp, Homo sapiens
aagctatcttatatatgaattagagaaaagcaaacacaca

SEQ ID NO: 26019 - DNA, 40 bp, Homo sapiens
tgtgtgtttgcttttctctaattcatatataagatagctt

SEQ ID NO: 26020 - DNA, 40 bp, Homo sapiens
agctatcttatatatgaattagagaaaagcaaacacacaa

SEQ ID NO: 26021 - DNA, 40 bp, Homo sapiens
ttgtgtgtttgcttttctctaattcatatataagatagct

SEQ ID NO: 26022 - DNA, 40 bp, Homo sapiens
gctatcttatatatgaattagagaaaagcaaacacacaaa

SEQ ID NO: 26023 - DNA, 40 bp, Homo sapiens
tttgtgtgtttgcttttctctaattcatatataagatagc

SEQ ID NO: 26024 - DNA, 40 bp, Homo sapiens
ctatcttatatatgaattagagaaaagcaaacacacaaat

SEQ ID NO: 26025 - DNA, 40 bp, Homo sapiens
atttgtgtgtttgcttttctctaattcatatataagatag

SEQ ID NO: 26026 - DNA, 40 bp, Homo sapiens
tatcttatatatgaattagagaaaagcaaacacacaaata

SEQ ID NO: 26027 - DNA, 40 bp, Homo sapiens
tatttgtgtgtttgcttttctctaattcatatataagata

SEQ ID NO: 26028 - DNA, 40 bp, Homo sapiens
atcttatatatgaattagagaaaagcaaacacacaaatag

SEQ ID NO: 26029 - DNA, 40 bp, Homo sapiens
ctatttgtgtgtttgcttttctctaattcatatataagat

SEQ ID NO: 26030 - DNA, 40 bp, Homo sapiens
tcttatatatgaattagagaaaagcaaacacacaaataga

SEQ ID NO: 26031 - DNA, 40 bp, Homo sapiens
tctatttgtgtgtttgcttttctctaattcatatataaga

SEQ ID NO: 26032 - DNA, 40 bp, Homo sapiens
cttatatatgaattagagaaaagcaaacacacaaatagaa

SEQ ID NO: 26033 - DNA, 40 bp, Homo sapiens
ttctatttgtgtgtttgcttttctctaattcatatataag

SEQ ID NO: 26034 - DNA, 40 bp, Homo sapiens
ttatatatgaattagagaaaagcaaacacacaaatagaaa

SEQ ID NO: 26035 - DNA, 40 bp, Homo sapiens
tttctatttgtgtgtttgcttttctctaattcatatataa

SEQ ID NO: 26036 - DNA, 40 bp, Homo sapiens
tatatatgaattagagaaaagcaaacacacaaatagaaaa

SEQ ID NO: 26037 - DNA, 40 bp, Homo sapiens
ttttctatttgtgtgtttgcttttctctaattcatatata

SEQ ID NO: 26038 - DNA, 40 bp, Homo sapiens
atatatgaattagagaaaagcaaacacacaaatagaaaaa

SEQ ID NO: 26039 - DNA, 40 bp, Homo sapiens
tttttctatttgtgtgtttgcttttctctaattcatatat

SEQ ID NO: 26040 - DNA, 40 bp, Homo sapiens
tatatgaattagagaaaagcaaacacacaaatagaaaaaa

SEQ ID NO: 26041 - DNA, 40 bp, Homo sapiens
ttttttctatttgtgtgtttgcttttctctaattcatata

SEQ ID NO: 26042 - DNA, 40 bp, Homo sapiens
atatgaattagagaaaagcaaacacacaaatagaaaaaaa

SEQ ID NO: 26043 - DNA, 40 bp, Homo sapiens
tttttttctatttgtgtgtttgcttttctctaattcatat

SEQ ID NO: 26044 - DNA, 40 bp, Homo sapiens
tatgaattagagaaaagcaaacacacaaatagaaaaaaag

SEQ ID NO: 26045 - DNA, 40 bp, Homo sapiens
ctttttttctatttgtgtgtttgcttttctctaattcata

SEQ ID NO: 26046 - DNA, 40 bp, Homo sapiens
atgaattagagaaaagcaaacacacaaatagaaaaaaagg

SEQ ID NO: 26047 - DNA, 40 bp, Homo sapiens
cctttttttctatttgtgtgtttgcttttctctaattcat

SEQ ID NO: 26048 - DNA, 40 bp, Homo sapiens
tgaattagagaaaagcaaacacacaaatagaaaaaaaggg

SEQ ID NO: 26049 - DNA, 40 bp, Homo sapiens
ccctttttttctatttgtgtgtttgcttttctctaattca

SEQ ID NO: 26050 - DNA, 40 bp, Homo sapiens
gaattagagaaaagcaaacacacaaatagaaaaaaaggga

SEQ ID NO: 26051 - DNA, 40 bp, Homo sapiens
tccctttttttctatttgtgtgtttgcttttctctaattc

SEQ ID NO: 26052 - DNA, 40 bp, Homo sapiens
aattagagaaaagcaaacacacaaatagaaaaaaagggat

SEQ ID NO: 26053 - DNA, 40 bp, Homo sapiens
atccctttttttctatttgtgtgtttgcttttctctaatt

SEQ ID NO: 26054 - DNA, 40 bp, Homo sapiens
attagagaaaagcaaacacacaaatagaaaaaaagggatg

SEQ ID NO: 26055 - DNA, 40 bp, Homo sapiens
catccctttttttctatttgtgtgtttgcttttctctaat

SEQ ID NO: 26056 - DNA, 40 bp, Homo sapiens
ttagagaaaagcaaacacacaaatagaaaaaaagggatgg

SEQ ID NO: 26057 - DNA, 40 bp, Homo sapiens
ccatccctttttttctatttgtgtgtttgcttttctctaa

SEQ ID NO: 26058 - DNA, 40 bp, Homo sapiens
tagagaaaagcaaacacacaaatagaaaaaaagggatggg

SEQ ID NO: 26059 - DNA, 40 bp, Homo sapiens
cccatccctttttttctatttgtgtgtttgcttttctcta

SEQ ID NO: 26060 - DNA, 40 bp, Homo sapiens
agagaaaagcaaacacacaaatagaaaaaaagggatgggg

SEQ ID NO: 26061 - DNA, 40 bp, Homo sapiens
ccccatccctttttttctatttgtgtgtttgcttttctct

SEQ ID NO: 26062 - DNA, 40 bp, Homo sapiens
gagaaaagcaaacacacaaatagaaaaaaagggatggggg

SEQ ID NO: 26063 - DNA, 40 bp, Homo sapiens
cccccatccctttttttctatttgtgtgtttgcttttctc

SEQ ID NO: 26064 - DNA, 40 bp, Homo sapiens
agaaaagcaaacacacaaatagaaaaaaagggatgggggg

SEQ ID NO: 26065 - DNA, 40 bp, Homo sapiens
ccccccatccctttttttctatttgtgtgtttgcttttct

SEQ ID NO: 26066 - DNA, 40 bp, Homo sapiens
gaaaagcaaacacacaaatagaaaaaaagggatggggggt

SEQ ID NO: 26067 - DNA, 40 bp, Homo sapiens
accccccatccctttttttctatttgtgtgtttgcttttc

SEQ ID NO: 26068 - DNA, 40 bp, Homo sapiens
aaaagcaaacacacaaatagaaaaaaagggatggggggta

SEQ ID NO: 26069 - DNA, 40 bp, Homo sapiens
taccccccatccctttttttctatttgtgtgtttgctttt

SEQ ID NO: 26070 - DNA, 40 bp, Homo sapiens
aaagcaaacacacaaatagaaaaaaagggatggggggtac

SEQ ID NO: 26071 - DNA, 40 bp, Homo sapiens
gtaccccccatccctttttttctatttgtgtgtttgcttt

SEQ ID NO: 26072 - DNA, 40 bp, Homo sapiens
aagcaaacacacaaatagaaaaaaagggatggggggtact

SEQ ID NO: 26073 - DNA, 40 bp, Homo sapiens
agtaccccccatccctttttttctatttgtgtgtttgctt

SEQ ID NO: 26074 - DNA, 40 bp, Homo sapiens
agcaaacacacaaatagaaaaaaagggatggggggtacta

SEQ ID NO: 26075 - DNA, 40 bp, Homo sapiens
tagtaccccccatccctttttttctatttgtgtgtttgct

SEQ ID NO: 26076 - DNA, 40 bp, Homo sapiens
gcaaacacacaaatagaaaaaaagggatggggggtactaa

SEQ ID NO: 26077 - DNA, 40 bp, Homo sapiens
ttagtaccccccatccctttttttctatttgtgtgtttgc

SEQ ID NO: 26078 - DNA, 40 bp, Homo sapiens
caaacacacaaatagaaaaaaagggatggggggtactaaa

SEQ ID NO: 26079 - DNA, 40 bp, Homo sapiens
tttagtaccccccatccctttttttctatttgtgtgtttg

SEQ ID NO: 26080 - DNA, 40 bp, Homo sapiens
aaacacacaaatagaaaaaaagggatggggggtactaaag

SEQ ID NO: 26081 - DNA, 40 bp, Homo sapiens
ctttagtaccccccatccctttttttctatttgtgtgttt

SEQ ID NO: 26082 - DNA, 40 bp, Homo sapiens
aacacacaaatagaaaaaaagggatggggggtactaaaga

SEQ ID NO: 26083 - DNA, 40 bp, Homo sapiens
tctttagtaccccccatccctttttttctatttgtgtgtt

SEQ ID NO: 26084 - DNA, 40 bp, Homo sapiens
acacacaaatagaaaaaaagggatggggggtactaaagat

SEQ ID NO: 26085 - DNA, 40 bp, Homo sapiens
atctttagtaccccccatccctttttttctatttgtgtgt

SEQ ID NO: 26086 - DNA, 40 bp, Homo sapiens
cacacaaatagaaaaaaagggatggggggtactaaagata

SEQ ID NO: 26087 - DNA, 40 bp, Homo sapiens
tatctttagtaccccccatccctttttttctatttgtgtg

SEQ ID NO: 26088 - DNA, 40 bp, Homo sapiens
acacaaatagaaaaaaagggatggggggtactaaagatat

SEQ ID NO: 26089 - DNA, 40 bp, Homo sapiens
atatctttagtaccccccatccctttttttctatttgtgt

SEQ ID NO: 26090 - DNA, 40 bp, Homo sapiens
cacaaatagaaaaaaagggatggggggtactaaagatata

SEQ ID NO: 26091 - DNA, 40 bp, Homo sapiens
tatatctttagtaccccccatccctttttttctatttgtg

SEQ ID NO: 26092 - DNA, 40 bp, Homo sapiens
acaaatagaaaaaaagggatggggggtactaaagatataa

SEQ ID NO: 26093 - DNA, 40 bp, Homo sapiens
ttatatctttagtaccccccatccctttttttctatttgt

SEQ ID NO: 26094 - DNA, 40 bp, Homo sapiens
caaatagaaaaaaagggatggggggtactaaagatataaa

SEQ ID NO: 26095 - DNA, 40 bp, Homo sapiens
tttatatctttagtaccccccatccctttttttctatttg

SEQ ID NO: 26096 - DNA, 40 bp, Homo sapiens
aaatagaaaaaaagggatggggggtactaaagatataaat

SEQ ID NO: 26097 - DNA, 40 bp, Homo sapiens
atttatatctttagtaccccccatccctttttttctattt

SEQ ID NO: 26098 - DNA, 40 bp, Homo sapiens
aatagaaaaaaagggatggggggtactaaagatataaata

SEQ ID NO: 26099 - DNA, 40 bp, Homo sapiens
tatttatatctttagtaccccccatccctttttttctatt

SEQ ID NO: 26100 - DNA, 40 bp, Homo sapiens
atagaaaaaaagggatggggggtactaaagatataaatag

SEQ ID NO: 26101 - DNA, 40 bp, Homo sapiens
ctatttatatctttagtaccccccatccctttttttctat

SEQ ID NO: 26102 - DNA, 40 bp, Homo sapiens
tagaaaaaaagggatggggggtactaaagatataaatagc

SEQ ID NO: 26103 - DNA, 40 bp, Homo sapiens
gctatttatatctttagtaccccccatccctttttttcta

SEQ ID NO: 26104 - DNA, 40 bp, Homo sapiens
agaaaaaaagggatggggggtactaaagatataaatagct

SEQ ID NO: 26105 - DNA, 40 bp, Homo sapiens
agctatttatatctttagtaccccccatccctttttttct

SEQ ID NO: 26106 - DNA, 40 bp, Homo sapiens
gaaaaaaagggatggggggtactaaagatataaatagctt

SEQ ID NO: 26107 - DNA, 40 bp, Homo sapiens
aagctatttatatctttagtaccccccatccctttttttc

SEQ ID NO: 26108 - DNA, 40 bp, Homo sapiens
aaaaaaagggatggggggtactaaagatataaatagcttg

SEQ ID NO: 26109 - DNA, 40 bp, Homo sapiens
caagctatttatatctttagtaccccccatcccttttttt

SEQ ID NO: 26110 - DNA, 40 bp, Homo sapiens
aaaaaagggatggggggtactaaagatataaatagcttgt

SEQ ID NO: 26111 - DNA, 40 bp, Homo sapiens
acaagctatttatatctttagtaccccccatccctttttt

SEQ ID NO: 26112 - DNA, 40 bp, Homo sapiens
aaaaagggatggggggtactaaagatataaatagcttgtc

SEQ ID NO: 26113 - DNA, 40 bp, Homo sapiens
gacaagctatttatatctttagtaccccccatcccttttt

SEQ ID NO: 26114 - DNA, 40 bp, Homo sapiens
aaaagggatggggggtactaaagatataaatagcttgtct

SEQ ID NO: 26115 - DNA, 40 bp, Homo sapiens
agacaagctatttatatctttagtaccccccatccctttt

SEQ ID NO: 26116 - DNA, 40 bp, Homo sapiens
aaagggatggggggtactaaagatataaatagcttgtcta

SEQ ID NO: 26117 - DNA, 40 bp, Homo sapiens
tagacaagctatttatatctttagtaccccccatcccttt

SEQ ID NO: 26118 - DNA, 40 bp, Homo sapiens
aagggatggggggtactaaagatataaatagcttgtctac

SEQ ID NO: 26119 - DNA, 40 bp, Homo sapiens
gtagacaagctatttatatctttagtaccccccatccctt

SEQ ID NO: 26120 - DNA, 40 bp, Homo sapiens
agggatggggggtactaaagatataaatagcttgtctacc

SEQ ID NO: 26121 - DNA, 40 bp, Homo sapiens
ggtagacaagctatttatatctttagtaccccccatccct

SEQ ID NO: 26122 - DNA, 40 bp, Homo sapiens
gggatggggggtactaaagatataaatagcttgtctacca

SEQ ID NO: 26123 - DNA, 40 bp, Homo sapiens
tggtagacaagctatttatatctttagtaccccccatccc

SEQ ID NO: 26124 - DNA, 40 bp, Homo sapiens
ggatggggggtactaaagatataaatagcttgtctaccaa

SEQ ID NO: 26125 - DNA, 40 bp, Homo sapiens
ttggtagacaagctatttatatctttagtaccccccatcc

SEQ ID NO: 26126 - DNA, 40 bp, Homo sapiens
gatggggggtactaaagatataaatagcttgtctaccaaa

SEQ ID NO: 26127 - DNA, 40 bp, Homo sapiens
tttggtagacaagctatttatatctttagtaccccccatc

SEQ ID NO: 26128 - DNA, 40 bp, Homo sapiens
atggggggtactaaagatataaatagcttgtctaccaaaa

SEQ ID NO: 26129 - DNA, 40 bp, Homo sapiens
ttttggtagacaagctatttatatctttagtaccccccat

SEQ ID NO: 26130 - DNA, 40 bp, Homo sapiens
tggggggtactaaagatataaatagcttgtctaccaaaaa

SEQ ID NO: 26131 - DNA, 40 bp, Homo sapiens
tttttggtagacaagctatttatatctttagtacccccca

SEQ ID NO: 26132 - DNA, 40 bp, Homo sapiens
ggggggtactaaagatataaatagcttgtctaccaaaaaa

SEQ ID NO: 26133 - DNA, 40 bp, Homo sapiens
ttttttggtagacaagctatttatatctttagtacccccc

SEQ ID NO: 26134 - DNA, 40 bp, Homo sapiens
gggggtactaaagatataaatagcttgtctaccaaaaaag

SEQ ID NO: 26135 - DNA, 40 bp, Homo sapiens
cttttttggtagacaagctatttatatctttagtaccccc

SEQ ID NO: 26136 - DNA, 40 bp, Homo sapiens
ggggtactaaagatataaatagcttgtctaccaaaaaaga

SEQ ID NO: 26137 - DNA, 40 bp, Homo sapiens
tcttttttggtagacaagctatttatatctttagtacccc

SEQ ID NO: 26138 - DNA, 40 bp, Homo sapiens
gggtactaaagatataaatagcttgtctaccaaaaaagaa

SEQ ID NO: 26139 - DNA, 40 bp, Homo sapiens
ttcttttttggtagacaagctatttatatctttagtaccc

SEQ ID NO: 26140 - DNA, 40 bp, Homo sapiens
ggtactaaagatataaatagcttgtctaccaaaaaagaaa

SEQ ID NO: 26141 - DNA, 40 bp, Homo sapiens
tttcttttttggtagacaagctatttatatctttagtacc

SEQ ID NO: 26142 - DNA, 40 bp, Homo sapiens
gtactaaagatataaatagcttgtctaccaaaaaagaaat

SEQ ID NO: 26143 - DNA, 40 bp, Homo sapiens
atttcttttttggtagacaagctatttatatctttagtac

SEQ ID NO: 26144 - DNA, 40 bp, Homo sapiens
tactaaagatataaatagcttgtctaccaaaaaagaaata

SEQ ID NO: 26145 - DNA, 40 bp, Homo sapiens
tatttcttttttggtagacaagctatttatatctttagta

SEQ ID NO: 26146 - DNA, 40 bp, Homo sapiens
actaaagatataaatagcttgtctaccaaaaaagaaataa

SEQ ID NO: 26147 - DNA, 40 bp, Homo sapiens
ttatttcttttttggtagacaagctatttatatctttagt

SEQ ID NO: 26148 - DNA, 40 bp, Homo sapiens
ctaaagatataaatagcttgtctaccaaaaaagaaataaa

SEQ ID NO: 26149 - DNA, 40 bp, Homo sapiens
tttatttcttttttggtagacaagctatttatatctttag

SEQ ID NO: 26150 - DNA, 40 bp, Homo sapiens
taaagatataaatagcttgtctaccaaaaaagaaataaaa

SEQ ID NO: 26151 - DNA, 40 bp, Homo sapiens
ttttatttcttttttggtagacaagctatttatatcttta

SEQ ID NO: 26152 - DNA, 40 bp, Homo sapiens
aaagatataaatagcttgtctaccaaaaaagaaataaaat

SEQ ID NO: 26153 - DNA, 40 bp, Homo sapiens
attttatttcttttttggtagacaagctatttatatcttt

SEQ ID NO: 26154 - DNA, 40 bp, Homo sapiens
aagatataaatagcttgtctaccaaaaaagaaataaaata

SEQ ID NO: 26155 - DNA, 40 bp, Homo sapiens
tattttatttcttttttggtagacaagctatttatatctt

SEQ ID NO: 26156 - DNA, 40 bp, Homo sapiens
agatataaatagcttgtctaccaaaaaagaaataaaataa

SEQ ID NO: 26157 - DNA, 40 bp, Homo sapiens
ttattttatttcttttttggtagacaagctatttatatct

SEQ ID NO: 26158 - DNA, 40 bp, Homo sapiens
gatataaatagcttgtctaccaaaaaagaaataaaataaa

SEQ ID NO: 26159 - DNA, 40 bp, Homo sapiens
tttattttatttcttttttggtagacaagctatttatatc

SEQ ID NO: 26160 - DNA, 40 bp, Homo sapiens
atataaatagcttgtctaccaaaaaagaaataaaataaat

SEQ ID NO: 26161 - DNA, 40 bp, Homo sapiens
atttattttatttcttttttggtagacaagctatttatat

SEQ ID NO: 26162 - DNA, 40 bp, Homo sapiens
tataaatagcttgtctaccaaaaaagaaataaaataaata

SEQ ID NO: 26163 - DNA, 40 bp, Homo sapiens
tatttattttatttcttttttggtagacaagctatttata

SEQ ID NO: 26164 - DNA, 40 bp, Homo sapiens
ataaatagcttgtctaccaaaaaagaaataaaataaataa

SEQ ID NO: 26165 - DNA, 40 bp, Homo sapiens
ttatttattttatttcttttttggtagacaagctatttat

SEQ ID NO: 26166 - DNA, 40 bp, Homo sapiens
taaatagcttgtctaccaaaaaagaaataaaataaataac

SEQ ID NO: 26167 - DNA, 40 bp, Homo sapiens
gttatttattttatttcttttttggtagacaagctattta

SEQ ID NO: 26168 - DNA, 40 bp, Homo sapiens
aaatagcttgtctaccaaaaaagaaataaaataaataaca

SEQ ID NO: 26169 - DNA, 40 bp, Homo sapiens
tgttatttattttatttcttttttggtagacaagctattt

SEQ ID NO: 26170 - DNA, 40 bp, Homo sapiens
aatagcttgtctaccaaaaaagaaataaaataaataacat

SEQ ID NO: 26171 - DNA, 40 bp, Homo sapiens
atgttatttattttatttcttttttggtagacaagctatt

SEQ ID NO: 26172 - DNA, 40 bp, Homo sapiens
atagcttgtctaccaaaaaagaaataaaataaataacatg

SEQ ID NO: 26173 - DNA, 40 bp, Homo sapiens
catgttatttattttatttcttttttggtagacaagctat

SEQ ID NO: 26174 - DNA, 40 bp, Homo sapiens
tagcttgtctaccaaaaaagaaataaaataaataacatga

SEQ ID NO: 26175 - DNA, 40 bp, Homo sapiens
tcatgttatttattttatttcttttttggtagacaagcta

SEQ ID NO: 26176 - DNA, 40 bp, Homo sapiens
agcttgtctaccaaaaaagaaataaaataaataacatgaa

SEQ ID NO: 26177 - DNA, 40 bp, Homo sapiens
ttcatgttatttattttatttcttttttggtagacaagct

SEQ ID NO: 26178 - DNA, 40 bp, Homo sapiens
gcttgtctaccaaaaaagaaataaaataaataacatgaac

SEQ ID NO: 26179 - DNA, 40 bp, Homo sapiens
gttcatgttatttattttatttcttttttggtagacaagc

SEQ ID NO: 26180 - DNA, 40 bp, Homo sapiens
cttgtctaccaaaaaagaaataaaataaataacatgaaca

SEQ ID NO: 26181 - DNA, 40 bp, Homo sapiens
tgttcatgttatttattttatttcttttttggtagacaag

SEQ ID NO: 26182 - DNA, 40 bp, Homo sapiens
ttgtctaccaaaaaagaaataaaataaataacatgaacat

SEQ ID NO: 26183 - DNA, 40 bp, Homo sapiens
atgttcatgttatttattttatttcttttttggtagacaa

SEQ ID NO: 26184 - DNA, 40 bp, Homo sapiens
tgtctaccaaaaaagaaataaaataaataacatgaacata

SEQ ID NO: 26185 - DNA, 40 bp, Homo sapiens
tatgttcatgttatttattttatttcttttttggtagaca

SEQ ID NO: 26186 - DNA, 40 bp, Homo sapiens
gtctaccaaaaaagaaataaaataaataacatgaacatat

SEQ ID NO: 26187 - DNA, 40 bp, Homo sapiens
atatgttcatgttatttattttatttcttttttggtagac

SEQ ID NO: 26188 - DNA, 40 bp, Homo sapiens
tctaccaaaaaagaaataaaataaataacatgaacatata

SEQ ID NO: 26189 - DNA, 40 bp, Homo sapiens
tatatgttcatgttatttattttatttcttttttggtaga

SEQ ID NO: 26190 - DNA, 40 bp, Homo sapiens
ctaccaaaaaagaaataaaataaataacatgaacatataa

SEQ ID NO: 26191 - DNA, 40 bp, Homo sapiens
ttatatgttcatgttatttattttatttcttttttggtag

SEQ ID NO: 26192 - DNA, 40 bp, Homo sapiens
taccaaaaaagaaataaaataaataacatgaacatataaa

SEQ ID NO: 26193 - DNA, 40 bp, Homo sapiens
tttatatgttcatgttatttattttatttcttttttggta

SEQ ID NO: 26194 - DNA, 40 bp, Homo sapiens
accaaaaaagaaataaaataaataacatgaacatataaaa

SEQ ID NO: 26195 - DNA, 40 bp, Homo sapiens
ttttatatgttcatgttatttattttatttcttttttggt

SEQ ID NO: 26196 - DNA, 40 bp, Homo sapiens
ccaaaaaagaaataaaataaataacatgaacatataaaaa

SEQ ID NO: 26197 - DNA, 40 bp, Homo sapiens
tttttatatgttcatgttatttattttatttcttttttgg

SEQ ID NO: 26198 - DNA, 40 bp, Homo sapiens
caaaaaagaaataaaataaataacatgaacatataaaaag

SEQ ID NO: 26199 - DNA, 40 bp, Homo sapiens
ctttttatatgttcatgttatttattttatttcttttttg

SEQ ID NO: 26200 - DNA, 40 bp, Homo sapiens
aaaaaagaaataaaataaataacatgaacatataaaaaga

SEQ ID NO: 26201 - DNA, 40 bp, Homo sapiens
tctttttatatgttcatgttatttattttatttctttttt

SEQ ID NO: 26202 - DNA, 40 bp, Homo sapiens
aaaaagaaataaaataaataacatgaacatataaaaagac

SEQ ID NO: 26203 - DNA, 40 bp, Homo sapiens
gtctttttatatgttcatgttatttattttatttcttttt

SEQ ID NO: 26204 - DNA, 40 bp, Homo sapiens
aaaagaaataaaataaataacatgaacatataaaaagaca

SEQ ID NO: 26205 - DNA, 40 bp, Homo sapiens
tgtctttttatatgttcatgttatttattttatttctttt

SEQ ID NO: 26206 - DNA, 40 bp, Homo sapiens
aaagaaataaaataaataacatgaacatataaaaagacac

SEQ ID NO: 26207 - DNA, 40 bp, Homo sapiens
gtgtctttttatatgttcatgttatttattttatttcttt

SEQ ID NO: 26208 - DNA, 40 bp, Homo sapiens
aagaaataaaataaataacatgaacatataaaaagacact

SEQ ID NO: 26209 - DNA, 40 bp, Homo sapiens
agtgtctttttatatgttcatgttatttattttatttctt

SEQ ID NO: 26210 - DNA, 40 bp, Homo sapiens
agaaataaaataaataacatgaacatataaaaagacactt

SEQ ID NO: 26211 - DNA, 40 bp, Homo sapiens
aagtgtctttttatatgttcatgttatttattttatttct

SEQ ID NO: 26212 - DNA, 40 bp, Homo sapiens
gaaataaaataaataacatgaacatataaaaagacactta

SEQ ID NO: 26213 - DNA, 40 bp, Homo sapiens
taagtgtctttttatatgttcatgttatttattttatttc

SEQ ID NO: 26214 - DNA, 40 bp, Homo sapiens
aaataaaataaataacatgaacatataaaaagacacttac

SEQ ID NO: 26215 - DNA, 40 bp, Homo sapiens
gtaagtgtctttttatatgttcatgttatttattttattt

SEQ ID NO: 26216 - DNA, 40 bp, Homo sapiens
aataaaataaataacatgaacatataaaaagacacttact

SEQ ID NO: 26217 - DNA, 40 bp, Homo sapiens
agtaagtgtctttttatatgttcatgttatttattttatt

SEQ ID NO: 26218 - DNA, 40 bp, Homo sapiens
ataaaataaataacatgaacatataaaaagacacttactt

SEQ ID NO: 26219 - DNA, 40 bp, Homo sapiens
aagtaagtgtctttttatatgttcatgttatttattttat

SEQ ID NO: 26220 - DNA, 40 bp, Homo sapiens
taaaataaataacatgaacatataaaaagacacttacttc

SEQ ID NO: 26221 - DNA, 40 bp, Homo sapiens
gaagtaagtgtctttttatatgttcatgttatttatttta

SEQ ID NO: 26222 - DNA, 40 bp, Homo sapiens
aaaataaataacatgaacatataaaaagacacttacttca

SEQ ID NO: 26223 - DNA, 40 bp, Homo sapiens
tgaagtaagtgtctttttatatgttcatgttatttatttt

SEQ ID NO: 26224 - DNA, 40 bp, Homo sapiens
aaataaataacatgaacatataaaaagacacttacttcat

SEQ ID NO: 26225 - DNA, 40 bp, Homo sapiens
atgaagtaagtgtctttttatatgttcatgttatttattt

SEQ ID NO: 26226 - DNA, 40 bp, Homo sapiens
aataaataacatgaacatataaaaagacacttacttcatg

SEQ ID NO: 26227 - DNA, 40 bp, Homo sapiens
catgaagtaagtgtctttttatatgttcatgttatttatt

SEQ ID NO: 26228 - DNA, 40 bp, Homo sapiens
ataaataacatgaacatataaaaagacacttacttcatga

SEQ ID NO: 26229 - DNA, 40 bp, Homo sapiens
tcatgaagtaagtgtctttttatatgttcatgttatttat

SEQ ID NO: 26230 - DNA, 40 bp, Homo sapiens
taaataacatgaacatataaaaagacacttacttcatgaa

SEQ ID NO: 26231 - DNA, 40 bp, Homo sapiens
ttcatgaagtaagtgtctttttatatgttcatgttattta

SEQ ID NO: 26232 - DNA, 40 bp, Homo sapiens
aaataacatgaacatataaaaagacacttacttcatgaat

SEQ ID NO: 26233 - DNA, 40 bp, Homo sapiens
attcatgaagtaagtgtctttttatatgttcatgttattt

SEQ ID NO: 26234 - DNA, 40 bp, Homo sapiens
aataacatgaacatataaaaagacacttacttcatgaatg

SEQ ID NO: 26235 - DNA, 40 bp, Homo sapiens
cattcatgaagtaagtgtctttttatatgttcatgttatt

SEQ ID NO: 26236 - DNA, 40 bp, Homo sapiens
ataacatgaacatataaaaagacacttacttcatgaatgt

SEQ ID NO: 26237 - DNA, 40 bp, Homo sapiens
acattcatgaagtaagtgtctttttatatgttcatgttat

SEQ ID NO: 26238 - DNA, 40 bp, Homo sapiens
taacatgaacatataaaaagacacttacttcatgaatgtg

SEQ ID NO: 26239 - DNA, 40 bp, Homo sapiens
cacattcatgaagtaagtgtctttttatatgttcatgtta

SEQ ID NO: 26240 - DNA, 40 bp, Homo sapiens
aacatgaacatataaaaagacacttacttcatgaatgtga

SEQ ID NO: 26241 - DNA, 40 bp, Homo sapiens
tcacattcatgaagtaagtgtctttttatatgttcatgtt

SEQ ID NO: 26242 - DNA, 40 bp, Homo sapiens
acatgaacatataaaaagacacttacttcatgaatgtgat

SEQ ID NO: 26243 - DNA, 40 bp, Homo sapiens
atcacattcatgaagtaagtgtctttttatatgttcatgt

SEQ ID NO: 26244 - DNA, 40 bp, Homo sapiens
catgaacatataaaaagacacttacttcatgaatgtgatg

SEQ ID NO: 26245 - DNA, 40 bp, Homo sapiens
catcacattcatgaagtaagtgtctttttatatgttcatg

SEQ ID NO: 26246 - DNA, 40 bp, Homo sapiens
atgaacatataaaaagacacttacttcatgaatgtgatgc

SEQ ID NO: 26247 - DNA, 40 bp, Homo sapiens
gcatcacattcatgaagtaagtgtctttttatatgttcat

SEQ ID NO: 26248 - DNA, 40 bp, Homo sapiens
tgaacatataaaaagacacttacttcatgaatgtgatgca

SEQ ID NO: 26249 - DNA, 40 bp, Homo sapiens
tgcatcacattcatgaagtaagtgtctttttatatgttca

SEQ ID NO: 26250 - DNA, 40 bp, Homo sapiens
gaacatataaaaagacacttacttcatgaatgtgatgcaa

SEQ ID NO: 26251 - DNA, 40 bp, Homo sapiens
ttgcatcacattcatgaagtaagtgtctttttatatgttc

SEQ ID NO: 26252 - DNA, 40 bp, Homo sapiens
aacatataaaaagacacttacttcatgaatgtgatgcaag

SEQ ID NO: 26253 - DNA, 40 bp, Homo sapiens
cttgcatcacattcatgaagtaagtgtctttttatatgtt

SEQ ID NO: 26254 - DNA, 40 bp, Homo sapiens
acatataaaaagacacttacttcatgaatgtgatgcaagt

SEQ ID NO: 26255 - DNA, 40 bp, Homo sapiens
acttgcatcacattcatgaagtaagtgtctttttatatgt

SEQ ID NO: 26256 - DNA, 40 bp, Homo sapiens
catataaaaagacacttacttcatgaatgtgatgcaagtt

SEQ ID NO: 26257 - DNA, 40 bp, Homo sapiens
aacttgcatcacattcatgaagtaagtgtctttttatatg

SEQ ID NO: 26258 - DNA, 40 bp, Homo sapiens
atataaaaagacacttacttcatgaatgtgatgcaagttc

SEQ ID NO: 26259 - DNA, 40 bp, Homo sapiens
gaacttgcatcacattcatgaagtaagtgtctttttatat

SEQ ID NO: 26260 - DNA, 40 bp, Homo sapiens
tataaaaagacacttacttcatgaatgtgatgcaagttca

SEQ ID NO: 26261 - DNA, 40 bp, Homo sapiens
tgaacttgcatcacattcatgaagtaagtgtctttttata

SEQ ID NO: 26262 - DNA, 40 bp, Homo sapiens
ataaaaagacacttacttcatgaatgtgatgcaagttcaa

SEQ ID NO: 26263 - DNA, 40 bp, Homo sapiens
ttgaacttgcatcacattcatgaagtaagtgtctttttat

SEQ ID NO: 26264 - DNA, 40 bp, Homo sapiens
taaaaagacacttacttcatgaatgtgatgcaagttcaaa

SEQ ID NO: 26265 - DNA, 40 bp, Homo sapiens
tttgaacttgcatcacattcatgaagtaagtgtcttttta

SEQ ID NO: 26266 - DNA, 40 bp, Homo sapiens
aaaaagacacttacttcatgaatgtgatgcaagttcaaac

SEQ ID NO: 26267 - DNA, 40 bp, Homo sapiens
gtttgaacttgcatcacattcatgaagtaagtgtcttttt

SEQ ID NO: 26268 - DNA, 40 bp, Homo sapiens
aaaagacacttacttcatgaatgtgatgcaagttcaaaca

SEQ ID NO: 26269 - DNA, 40 bp, Homo sapiens
tgtttgaacttgcatcacattcatgaagtaagtgtctttt

SEQ ID NO: 26270 - DNA, 40 bp, Homo sapiens
aaagacacttacttcatgaatgtgatgcaagttcaaacaa

SEQ ID NO: 26271 - DNA, 40 bp, Homo sapiens
ttgtttgaacttgcatcacattcatgaagtaagtgtcttt

SEQ ID NO: 26272 - DNA, 40 bp, Homo sapiens
aagacacttacttcatgaatgtgatgcaagttcaaacaat

SEQ ID NO: 26273 - DNA, 40 bp, Homo sapiens
attgtttgaacttgcatcacattcatgaagtaagtgtctt

SEQ ID NO: 26274 - DNA, 40 bp, Homo sapiens
agacacttacttcatgaatgtgatgcaagttcaaacaata

SEQ ID NO: 26275 - DNA, 40 bp, Homo sapiens
tattgtttgaacttgcatcacattcatgaagtaagtgtct

SEQ ID NO: 26276 - DNA, 40 bp, Homo sapiens
gacacttacttcatgaatgtgatgcaagttcaaacaataa

SEQ ID NO: 26277 - DNA, 40 bp, Homo sapiens
ttattgtttgaacttgcatcacattcatgaagtaagtgtc

SEQ ID NO: 26278 - DNA, 40 bp, Homo sapiens
acacttacttcatgaatgtgatgcaagttcaaacaataaa

SEQ ID NO: 26279 - DNA, 40 bp, Homo sapiens
tttattgtttgaacttgcatcacattcatgaagtaagtgt

SEQ ID NO: 26280 - DNA, 40 bp, Homo sapiens
cacttacttcatgaatgtgatgcaagttcaaacaataaat

SEQ ID NO: 26281 - DNA, 40 bp, Homo sapiens
atttattgtttgaacttgcatcacattcatgaagtaagtg

SEQ ID NO: 26282 - DNA, 40 bp, Homo sapiens
acttacttcatgaatgtgatgcaagttcaaacaataaata

SEQ ID NO: 26283 - DNA, 40 bp, Homo sapiens
tatttattgtttgaacttgcatcacattcatgaagtaagt

SEQ ID NO: 26284 - DNA, 40 bp, Homo sapiens
cttacttcatgaatgtgatgcaagttcaaacaataaataa

SEQ ID NO: 26285 - DNA, 40 bp, Homo sapiens
ttatttattgtttgaacttgcatcacattcatgaagtaag

SEQ ID NO: 26286 - DNA, 40 bp, Homo sapiens
ttacttcatgaatgtgatgcaagttcaaacaataaataac

SEQ ID NO: 26287 - DNA, 40 bp, Homo sapiens
gttatttattgtttgaacttgcatcacattcatgaagtaa

SEQ ID NO: 26288 - DNA, 40 bp, Homo sapiens
tacttcatgaatgtgatgcaagttcaaacaataaataaca

SEQ ID NO: 26289 - DNA, 40 bp, Homo sapiens
tgttatttattgtttgaacttgcatcacattcatgaagta

SEQ ID NO: 26290 - DNA, 40 bp, Homo sapiens
acttcatgaatgtgatgcaagttcaaacaataaataacat

SEQ ID NO: 26291 - DNA, 40 bp, Homo sapiens
atgttatttattgtttgaacttgcatcacattcatgaagt

SEQ ID NO: 26292 - DNA, 40 bp, Homo sapiens
cttcatgaatgtgatgcaagttcaaacaataaataacatt

SEQ ID NO: 26293 - DNA, 40 bp, Homo sapiens
aatgttatttattgtttgaacttgcatcacattcatgaag

SEQ ID NO: 26294 - DNA, 40 bp, Homo sapiens
ttcatgaatgtgatgcaagttcaaacaataaataacattt

SEQ ID NO: 26295 - DNA, 40 bp, Homo sapiens
aaatgttatttattgtttgaacttgcatcacattcatgaa

SEQ ID NO: 26296 - DNA, 40 bp, Homo sapiens
tcatgaatgtgatgcaagttcaaacaataaataacatttc

SEQ ID NO: 26297 - DNA, 40 bp, Homo sapiens
gaaatgttatttattgtttgaacttgcatcacattcatga

SEQ ID NO: 26298 - DNA, 40 bp, Homo sapiens
catgaatgtgatgcaagttcaaacaataaataacatttct

SEQ ID NO: 26299 - DNA, 40 bp, Homo sapiens
agaaatgttatttattgtttgaacttgcatcacattcatg

SEQ ID NO: 26300 - DNA, 40 bp, Homo sapiens
atgaatgtgatgcaagttcaaacaataaataacatttctg

SEQ ID NO: 26301 - DNA, 40 bp, Homo sapiens
cagaaatgttatttattgtttgaacttgcatcacattcat

SEQ ID NO: 26302 - DNA, 40 bp, Homo sapiens
tgaatgtgatgcaagttcaaacaataaataacatttctgt

SEQ ID NO: 26303 - DNA, 40 bp, Homo sapiens
acagaaatgttatttattgtttgaacttgcatcacattca

SEQ ID NO: 26304 - DNA, 40 bp, Homo sapiens
gaatgtgatgcaagttcaaacaataaataacatttctgta

SEQ ID NO: 26305 - DNA, 40 bp, Homo sapiens
tacagaaatgttatttattgtttgaacttgcatcacattc

SEQ ID NO: 26306 - DNA, 40 bp, Homo sapiens
aatgtgatgcaagttcaaacaataaataacatttctgtac

SEQ ID NO: 26307 - DNA, 40 bp, Homo sapiens
gtacagaaatgttatttattgtttgaacttgcatcacatt

SEQ ID NO: 26308 - DNA, 40 bp, Homo sapiens
atgtgatgcaagttcaaacaataaataacatttctgtact

SEQ ID NO: 26309 - DNA, 40 bp, Homo sapiens
agtacagaaatgttatttattgtttgaacttgcatcacat

SEQ ID NO: 26310 - DNA, 40 bp, Homo sapiens
tgtgatgcaagttcaaacaataaataacatttctgtactt

SEQ ID NO: 26311 - DNA, 40 bp, Homo sapiens
aagtacagaaatgttatttattgtttgaacttgcatcaca

SEQ ID NO: 26312 - DNA, 40 bp, Homo sapiens
gtgatgcaagttcaaacaataaataacatttctgtacttt

SEQ ID NO: 26313 - DNA, 40 bp, Homo sapiens
aaagtacagaaatgttatttattgtttgaacttgcatcac

SEQ ID NO: 26314 - DNA, 40 bp, Homo sapiens
tgatgcaagttcaaacaataaataacatttctgtactttc

SEQ ID NO: 26315 - DNA, 40 bp, Homo sapiens
gaaagtacagaaatgttatttattgtttgaacttgcatca

SEQ ID NO: 26316 - DNA, 40 bp, Homo sapiens
gatgcaagttcaaacaataaataacatttctgtactttca

SEQ ID NO: 26317 - DNA, 40 bp, Homo sapiens
tgaaagtacagaaatgttatttattgtttgaacttgcatc

SEQ ID NO: 26318 - DNA, 40 bp, Homo sapiens
atgcaagttcaaacaataaataacatttctgtactttcat

SEQ ID NO: 26319 - DNA, 40 bp, Homo sapiens
atgaaagtacagaaatgttatttattgtttgaacttgcat

SEQ ID NO: 26320 - DNA, 40 bp, Homo sapiens
tgcaagttcaaacaataaataacatttctgtactttcata

SEQ ID NO: 26321 - DNA, 40 bp, Homo sapiens
tatgaaagtacagaaatgttatttattgtttgaacttgca

SEQ ID NO: 26322 - DNA, 40 bp, Homo sapiens
gcaagttcaaacaataaataacatttctgtactttcatat

SEQ ID NO: 26323 - DNA, 40 bp, Homo sapiens
atatgaaagtacagaaatgttatttattgtttgaacttgc

SEQ ID NO: 26324 - DNA, 40 bp, Homo sapiens
caagttcaaacaataaataacatttctgtactttcatatt

SEQ ID NO: 26325 - DNA, 40 bp, Homo sapiens
aatatgaaagtacagaaatgttatttattgtttgaacttg

SEQ ID NO: 26326 - DNA, 40 bp, Homo sapiens
aagttcaaacaataaataacatttctgtactttcatattg

SEQ ID NO: 26327 - DNA, 40 bp, Homo sapiens
caatatgaaagtacagaaatgttatttattgtttgaactt

SEQ ID NO: 26328 - DNA, 40 bp, Homo sapiens
agttcaaacaataaataacatttctgtactttcatattgg

SEQ ID NO: 26329 - DNA, 40 bp, Homo sapiens
ccaatatgaaagtacagaaatgttatttattgtttgaact

SEQ ID NO: 26330 - DNA, 40 bp, Homo sapiens
gttcaaacaataaataacatttctgtactttcatattggc

SEQ ID NO: 26331 - DNA, 40 bp, Homo sapiens
gccaatatgaaagtacagaaatgttatttattgtttgaac

SEQ ID NO: 26332 - DNA, 40 bp, Homo sapiens
ttcaaacaataaataacatttctgtactttcatattggct

SEQ ID NO: 26333 - DNA, 40 bp, Homo sapiens
agccaatatgaaagtacagaaatgttatttattgtttgaa

SEQ ID NO: 26334 - DNA, 40 bp, Homo sapiens
tcaaacaataaataacatttctgtactttcatattggcta

SEQ ID NO: 26335 - DNA, 40 bp, Homo sapiens
tagccaatatgaaagtacagaaatgttatttattgtttga

SEQ ID NO: 26336 - DNA, 40 bp, Homo sapiens
caaacaataaataacatttctgtactttcatattggctaa

SEQ ID NO: 26337 - DNA, 40 bp, Homo sapiens
ttagccaatatgaaagtacagaaatgttatttattgtttg

SEQ ID NO: 26338 - DNA, 40 bp, Homo sapiens
aaacaataaataacatttctgtactttcatattggctaag

SEQ ID NO: 26339 - DNA, 40 bp, Homo sapiens
cttagccaatatgaaagtacagaaatgttatttattgttt

SEQ ID NO: 26340 - DNA, 40 bp, Homo sapiens
aacaataaataacatttctgtactttcatattggctaagg

SEQ ID NO: 26341 - DNA, 40 bp, Homo sapiens
ccttagccaatatgaaagtacagaaatgttatttattgtt

SEQ ID NO: 26342 - DNA, 40 bp, Homo sapiens
acaataaataacatttctgtactttcatattggctaaggt

SEQ ID NO: 26343 - DNA, 40 bp, Homo sapiens
accttagccaatatgaaagtacagaaatgttatttattgt

SEQ ID NO: 26344 - DNA, 40 bp, Homo sapiens
caataaataacatttctgtactttcatattggctaaggtt

SEQ ID NO: 26345 - DNA, 40 bp, Homo sapiens
aaccttagccaatatgaaagtacagaaatgttatttattg

SEQ ID NO: 26346 - DNA, 40 bp, Homo sapiens
aataaataacatttctgtactttcatattggctaaggtta

SEQ ID NO: 26347 - DNA, 40 bp, Homo sapiens
taaccttagccaatatgaaagtacagaaatgttatttatt

SEQ ID NO: 26348 - DNA, 40 bp, Homo sapiens
ataaataacatttctgtactttcatattggctaaggttaa

SEQ ID NO: 26349 - DNA, 40 bp, Homo sapiens
ttaaccttagccaatatgaaagtacagaaatgttatttat

SEQ ID NO: 26350 - DNA, 40 bp, Homo sapiens
taaataacatttctgtactttcatattggctaaggttaaa

SEQ ID NO: 26351 - DNA, 40 bp, Homo sapiens
tttaaccttagccaatatgaaagtacagaaatgttattta

SEQ ID NO: 26352 - DNA, 40 bp, Homo sapiens
aaataacatttctgtactttcatattggctaaggttaaaa

SEQ ID NO: 26353 - DNA, 40 bp, Homo sapiens
ttttaaccttagccaatatgaaagtacagaaatgttattt

SEQ ID NO: 26354 - DNA, 40 bp, Homo sapiens
aataacatttctgtactttcatattggctaaggttaaaat

SEQ ID NO: 26355 - DNA, 40 bp, Homo sapiens
attttaaccttagccaatatgaaagtacagaaatgttatt

SEQ ID NO: 26356 - DNA, 40 bp, Homo sapiens
ataacatttctgtactttcatattggctaaggttaaaatg

SEQ ID NO: 26357 - DNA, 40 bp, Homo sapiens
cattttaaccttagccaatatgaaagtacagaaatgttat

SEQ ID NO: 26358 - DNA, 40 bp, Homo sapiens
taacatttctgtactttcatattggctaaggttaaaatga

SEQ ID NO: 26359 - DNA, 40 bp, Homo sapiens
tcattttaaccttagccaatatgaaagtacagaaatgtta

SEQ ID NO: 26360 - DNA, 40 bp, Homo sapiens
aacatttctgtactttcatattggctaaggttaaaatgat

SEQ ID NO: 26361 - DNA, 40 bp, Homo sapiens
atcattttaaccttagccaatatgaaagtacagaaatgtt

SEQ ID NO: 26362 - DNA, 40 bp, Homo sapiens
acatttctgtactttcatattggctaaggttaaaatgata

SEQ ID NO: 26363 - DNA, 40 bp, Homo sapiens
tatcattttaaccttagccaatatgaaagtacagaaatgt

SEQ ID NO: 26364 - DNA, 40 bp, Homo sapiens
catttctgtactttcatattggctaaggttaaaatgataa

SEQ ID NO: 26365 - DNA, 40 bp, Homo sapiens
ttatcattttaaccttagccaatatgaaagtacagaaatg

SEQ ID NO: 26366 - DNA, 40 bp, Homo sapiens
atttctgtactttcatattggctaaggttaaaatgataac

SEQ ID NO: 26367 - DNA, 40 bp, Homo sapiens
gttatcattttaaccttagccaatatgaaagtacagaaat

SEQ ID NO: 26368 - DNA, 40 bp, Homo sapiens
tttctgtactttcatattggctaaggttaaaatgataact

SEQ ID NO: 26369 - DNA, 40 bp, Homo sapiens
agttatcattttaaccttagccaatatgaaagtacagaaa

SEQ ID NO: 26370 - DNA, 40 bp, Homo sapiens
ttctgtactttcatattggctaaggttaaaatgataactg

SEQ ID NO: 26371 - DNA, 40 bp, Homo sapiens
cagttatcattttaaccttagccaatatgaaagtacagaa

SEQ ID NO: 26372 - DNA, 40 bp, Homo sapiens
tctgtactttcatattggctaaggttaaaatgataactgc

SEQ ID NO: 26373 - DNA, 40 bp, Homo sapiens
gcagttatcattttaaccttagccaatatgaaagtacaga

SEQ ID NO: 26374 - DNA, 40 bp, Homo sapiens
ctgtactttcatattggctaaggttaaaatgataactgct

SEQ ID NO: 26375 - DNA, 40 bp, Homo sapiens
agcagttatcattttaaccttagccaatatgaaagtacag

SEQ ID NO: 26376 - DNA, 40 bp, Homo sapiens
tgtactttcatattggctaaggttaaaatgataactgcta

SEQ ID NO: 26377 - DNA, 40 bp, Homo sapiens
tagcagttatcattttaaccttagccaatatgaaagtaca

SEQ ID NO: 26378 - DNA, 40 bp, Homo sapiens
gtactttcatattggctaaggttaaaatgataactgctag

SEQ ID NO: 26379 - DNA, 40 bp, Homo sapiens
ctagcagttatcattttaaccttagccaatatgaaagtac

SEQ ID NO: 26380 - DNA, 40 bp, Homo sapiens
tactttcatattggctaaggttaaaatgataactgctagg

SEQ ID NO: 26381 - DNA, 40 bp, Homo sapiens
cctagcagttatcattttaaccttagccaatatgaaagta

SEQ ID NO: 26382 - DNA, 40 bp, Homo sapiens
actttcatattggctaaggttaaaatgataactgctagga

SEQ ID NO: 26383 - DNA, 40 bp, Homo sapiens
tcctagcagttatcattttaaccttagccaatatgaaagt

SEQ ID NO: 26384 - DNA, 40 bp, Homo sapiens
ctttcatattggctaaggttaaaatgataactgctaggaa

SEQ ID NO: 26385 - DNA, 40 bp, Homo sapiens
ttcctagcagttatcattttaaccttagccaatatgaaag

SEQ ID NO: 26386 - DNA, 40 bp, Homo sapiens
tttcatattggctaaggttaaaatgataactgctaggaag

SEQ ID NO: 26387 - DNA, 40 bp, Homo sapiens
cttcctagcagttatcattttaaccttagccaatatgaaa

SEQ ID NO: 26388 - DNA, 40 bp, Homo sapiens
ttcatattggctaaggttaaaatgataactgctaggaagg

SEQ ID NO: 26389 - DNA, 40 bp, Homo sapiens
ccttcctagcagttatcattttaaccttagccaatatgaa

SEQ ID NO: 26390 - DNA, 40 bp, Homo sapiens
tcatattggctaaggttaaaatgataactgctaggaaggg

SEQ ID NO: 26391 - DNA, 40 bp, Homo sapiens
cccttcctagcagttatcattttaaccttagccaatatga

SEQ ID NO: 26392 - DNA, 40 bp, Homo sapiens
catattggctaaggttaaaatgataactgctaggaagggt

SEQ ID NO: 26393 - DNA, 40 bp, Homo sapiens
acccttcctagcagttatcattttaaccttagccaatatg

SEQ ID NO: 26394 - DNA, 40 bp, Homo sapiens
atattggctaaggttaaaatgataactgctaggaagggta

SEQ ID NO: 26395 - DNA, 40 bp, Homo sapiens
tacccttcctagcagttatcattttaaccttagccaatat

SEQ ID NO: 26396 - DNA, 40 bp, Homo sapiens
tattggctaaggttaaaatgataactgctaggaagggtat

SEQ ID NO: 26397 - DNA, 40 bp, Homo sapiens
atacccttcctagcagttatcattttaaccttagccaata

SEQ ID NO: 26398 - DNA, 40 bp, Homo sapiens
attggctaaggttaaaatgataactgctaggaagggtatg

SEQ ID NO: 26399 - DNA, 40 bp, Homo sapiens
catacccttcctagcagttatcattttaaccttagccaat

SEQ ID NO: 26400 - DNA, 40 bp, Homo sapiens
ttggctaaggttaaaatgataactgctaggaagggtatgg

SEQ ID NO: 26401 - DNA, 40 bp, Homo sapiens
ccatacccttcctagcagttatcattttaaccttagccaa

SEQ ID NO: 26402 - DNA, 40 bp, Homo sapiens
tggctaaggttaaaatgataactgctaggaagggtatgga

SEQ ID NO: 26403 - DNA, 40 bp, Homo sapiens
tccatacccttcctagcagttatcattttaaccttagcca

SEQ ID NO: 26404 - DNA, 40 bp, Homo sapiens
ggctaaggttaaaatgataactgctaggaagggtatggag

SEQ ID NO: 26405 - DNA, 40 bp, Homo sapiens
ctccatacccttcctagcagttatcattttaaccttagcc

SEQ ID NO: 26406 - DNA, 40 bp, Homo sapiens
gctaaggttaaaatgataactgctaggaagggtatggaga

SEQ ID NO: 26407 - DNA, 40 bp, Homo sapiens
tctccatacccttcctagcagttatcattttaaccttagc

SEQ ID NO: 26408 - DNA, 40 bp, Homo sapiens
ctaaggttaaaatgataactgctaggaagggtatggagaa

SEQ ID NO: 26409 - DNA, 40 bp, Homo sapiens
ttctccatacccttcctagcagttatcattttaaccttag

SEQ ID NO: 26410 - DNA, 40 bp, Homo sapiens
taaggttaaaatgataactgctaggaagggtatggagaag

SEQ ID NO: 26411 - DNA, 40 bp, Homo sapiens
cttctccatacccttcctagcagttatcattttaacctta

SEQ ID NO: 26412 - DNA, 40 bp, Homo sapiens
aaggttaaaatgataactgctaggaagggtatggagaagt

SEQ ID NO: 26413 - DNA, 40 bp, Homo sapiens
acttctccatacccttcctagcagttatcattttaacctt

SEQ ID NO: 26414 - DNA, 40 bp, Homo sapiens
aggttaaaatgataactgctaggaagggtatggagaagtg

SEQ ID NO: 26415 - DNA, 40 bp, Homo sapiens
cacttctccatacccttcctagcagttatcattttaacct

SEQ ID NO: 26416 - DNA, 40 bp, Homo sapiens
ggttaaaatgataactgctaggaagggtatggagaagtgt

SEQ ID NO: 26417 - DNA, 40 bp, Homo sapiens
acacttctccatacccttcctagcagttatcattttaacc

SEQ ID NO: 26418 - DNA, 40 bp, Homo sapiens
gttaaaatgataactgctaggaagggtatggagaagtgtg

SEQ ID NO: 26419 - DNA, 40 bp, Homo sapiens
cacacttctccatacccttcctagcagttatcattttaac

SEQ ID NO: 26420 - DNA, 40 bp, Homo sapiens
ttaaaatgataactgctaggaagggtatggagaagtgtgc

SEQ ID NO: 26421 - DNA, 40 bp, Homo sapiens
gcacacttctccatacccttcctagcagttatcattttaa

SEQ ID NO: 26422 - DNA, 40 bp, Homo sapiens
taaaatgataactgctaggaagggtatggagaagtgtgcg

SEQ ID NO: 26423 - DNA, 40 bp, Homo sapiens
cgcacacttctccatacccttcctagcagttatcatttta

SEQ ID NO: 26424 - DNA, 40 bp, Homo sapiens
aaaatgataactgctaggaagggtatggagaagtgtgcgc

SEQ ID NO: 26425 - DNA, 40 bp, Homo sapiens
gcgcacacttctccatacccttcctagcagttatcatttt

SEQ ID NO: 26426 - DNA, 40 bp, Homo sapiens
aaatgataactgctaggaagggtatggagaagtgtgcgcc

SEQ ID NO: 26427 - DNA, 40 bp, Homo sapiens
ggcgcacacttctccatacccttcctagcagttatcattt

SEQ ID NO: 26428 - DNA, 40 bp, Homo sapiens
aatgataactgctaggaagggtatggagaagtgtgcgcct

SEQ ID NO: 26429 - DNA, 40 bp, Homo sapiens
aggcgcacacttctccatacccttcctagcagttatcatt

SEQ ID NO: 26430 - DNA, 40 bp, Homo sapiens
atgataactgctaggaagggtatggagaagtgtgcgcctt

SEQ ID NO: 26431 - DNA, 40 bp, Homo sapiens
aaggcgcacacttctccatacccttcctagcagttatcat

SEQ ID NO: 26432 - DNA, 40 bp, Homo sapiens
tgataactgctaggaagggtatggagaagtgtgcgccttg

SEQ ID NO: 26433 - DNA, 40 bp, Homo sapiens
caaggcgcacacttctccatacccttcctagcagttatca

SEQ ID NO: 26434 - DNA, 40 bp, Homo sapiens
gataactgctaggaagggtatggagaagtgtgcgccttgc

SEQ ID NO: 26435 - DNA, 40 bp, Homo sapiens
gcaaggcgcacacttctccatacccttcctagcagttatc

SEQ ID NO: 26436 - DNA, 40 bp, Homo sapiens
ataactgctaggaagggtatggagaagtgtgcgccttgca

SEQ ID NO: 26437 - DNA, 40 bp, Homo sapiens
tgcaaggcgcacacttctccatacccttcctagcagttat

SEQ ID NO: 26438 - DNA, 40 bp, Homo sapiens
taactgctaggaagggtatggagaagtgtgcgccttgcac

SEQ ID NO: 26439 - DNA, 40 bp, Homo sapiens
gtgcaaggcgcacacttctccatacccttcctagcagtta

SEQ ID NO: 26440 - DNA, 40 bp, Homo sapiens
aactgctaggaagggtatggagaagtgtgcgccttgcact

SEQ ID NO: 26441 - DNA, 40 bp, Homo sapiens
agtgcaaggcgcacacttctccatacccttcctagcagtt

SEQ ID NO: 26442 - DNA, 40 bp, Homo sapiens
actgctaggaagggtatggagaagtgtgcgccttgcactg

SEQ ID NO: 26443 - DNA, 40 bp, Homo sapiens
cagtgcaaggcgcacacttctccatacccttcctagcagt

SEQ ID NO: 26444 - DNA, 40 bp, Homo sapiens
ctgctaggaagggtatggagaagtgtgcgccttgcactgt

SEQ ID NO: 26445 - DNA, 40 bp, Homo sapiens
acagtgcaaggcgcacacttctccatacccttcctagcag

SEQ ID NO: 26446 - DNA, 40 bp, Homo sapiens
tgctaggaagggtatggagaagtgtgcgccttgcactgta

SEQ ID NO: 26447 - DNA, 40 bp, Homo sapiens
tacagtgcaaggcgcacacttctccatacccttcctagca

SEQ ID NO: 26448 - DNA, 40 bp, Homo sapiens
gctaggaagggtatggagaagtgtgcgccttgcactgtag

SEQ ID NO: 26449 - DNA, 40 bp, Homo sapiens
ctacagtgcaaggcgcacacttctccatacccttcctagc

SEQ ID NO: 26450 - DNA, 40 bp, Homo sapiens
ctaggaagggtatggagaagtgtgcgccttgcactgtagt

SEQ ID NO: 26451 - DNA, 40 bp, Homo sapiens
actacagtgcaaggcgcacacttctccatacccttcctag

SEQ ID NO: 26452 - DNA, 40 bp, Homo sapiens
taggaagggtatggagaagtgtgcgccttgcactgtagtg

SEQ ID NO: 26453 - DNA, 40 bp, Homo sapiens
cactacagtgcaaggcgcacacttctccatacccttccta

SEQ ID NO: 26454 - DNA, 40 bp, Homo sapiens
aggaagggtatggagaagtgtgcgccttgcactgtagtgg

SEQ ID NO: 26455 - DNA, 40 bp, Homo sapiens
ccactacagtgcaaggcgcacacttctccatacccttcct

SEQ ID NO: 26456 - DNA, 40 bp, Homo sapiens
ggaagggtatggagaagtgtgcgccttgcactgtagtggg

SEQ ID NO: 26457 - DNA, 40 bp, Homo sapiens
cccactacagtgcaaggcgcacacttctccatacccttcc

SEQ ID NO: 26458 - DNA, 40 bp, Homo sapiens
gaagggtatggagaagtgtgcgccttgcactgtagtggga

SEQ ID NO: 26459 - DNA, 40 bp, Homo sapiens
tcccactacagtgcaaggcgcacacttctccatacccttc

SEQ ID NO: 26460 - DNA, 40 bp, Homo sapiens
aagggtatggagaagtgtgcgccttgcactgtagtgggag

SEQ ID NO: 26461 - DNA, 40 bp, Homo sapiens
ctcccactacagtgcaaggcgcacacttctccataccctt

SEQ ID NO: 26462 - DNA, 40 bp, Homo sapiens
agggtatggagaagtgtgcgccttgcactgtagtgggagt

SEQ ID NO: 26463 - DNA, 40 bp, Homo sapiens
actcccactacagtgcaaggcgcacacttctccataccct

SEQ ID NO: 26464 - DNA, 40 bp, Homo sapiens
gggtatggagaagtgtgcgccttgcactgtagtgggagta

SEQ ID NO: 26465 - DNA, 40 bp, Homo sapiens
tactcccactacagtgcaaggcgcacacttctccataccc

SEQ ID NO: 26466 - DNA, 40 bp, Homo sapiens
ggtatggagaagtgtgcgccttgcactgtagtgggagtat

SEQ ID NO: 26467 - DNA, 40 bp, Homo sapiens
atactcccactacagtgcaaggcgcacacttctccatacc

SEQ ID NO: 26468 - DNA, 40 bp, Homo sapiens
gtatggagaagtgtgcgccttgcactgtagtgggagtata

SEQ ID NO: 26469 - DNA, 40 bp, Homo sapiens
tatactcccactacagtgcaaggcgcacacttctccatac

SEQ ID NO: 26470 - DNA, 40 bp, Homo sapiens
tatggagaagtgtgcgccttgcactgtagtgggagtatag

SEQ ID NO: 26471 - DNA, 40 bp, Homo sapiens
ctatactcccactacagtgcaaggcgcacacttctccata

SEQ ID NO: 26472 - DNA, 40 bp, Homo sapiens
atggagaagtgtgcgccttgcactgtagtgggagtataga

SEQ ID NO: 26473 - DNA, 40 bp, Homo sapiens
tctatactcccactacagtgcaaggcgcacacttctccat

SEQ ID NO: 26474 - DNA, 40 bp, Homo sapiens
tggagaagtgtgcgccttgcactgtagtgggagtatagac

SEQ ID NO: 26475 - DNA, 40 bp, Homo sapiens
gtctatactcccactacagtgcaaggcgcacacttctcca

SEQ ID NO: 26476 - DNA, 40 bp, Homo sapiens
ggagaagtgtgcgccttgcactgtagtgggagtatagacc

SEQ ID NO: 26477 - DNA, 40 bp, Homo sapiens
ggtctatactcccactacagtgcaaggcgcacacttctcc

SEQ ID NO: 26478 - DNA, 40 bp, Homo sapiens
gagaagtgtgcgccttgcactgtagtgggagtatagaccc

SEQ ID NO: 26479 - DNA, 40 bp, Homo sapiens
gggtctatactcccactacagtgcaaggcgcacacttctc

SEQ ID NO: 26480 - DNA, 40 bp, Homo sapiens
agaagtgtgcgccttgcactgtagtgggagtatagaccct

SEQ ID NO: 26481 - DNA, 40 bp, Homo sapiens
agggtctatactcccactacagtgcaaggcgcacacttct

SEQ ID NO: 26482 - DNA, 40 bp, Homo sapiens
gaagtgtgcgccttgcactgtagtgggagtatagaccctc

SEQ ID NO: 26483 - DNA, 40 bp, Homo sapiens
gagggtctatactcccactacagtgcaaggcgcacacttc

SEQ ID NO: 26484 - DNA, 40 bp, Homo sapiens
aagtgtgcgccttgcactgtagtgggagtatagaccctca

SEQ ID NO: 26485 - DNA, 40 bp, Homo sapiens
tgagggtctatactcccactacagtgcaaggcgcacactt

SEQ ID NO: 26486 - DNA, 40 bp, Homo sapiens
agtgtgcgccttgcactgtagtgggagtatagaccctcag

SEQ ID NO: 26487 - DNA, 40 bp, Homo sapiens
ctgagggtctatactcccactacagtgcaaggcgcacact

SEQ ID NO: 26488 - DNA, 40 bp, Homo sapiens
gtgtgcgccttgcactgtagtgggagtatagaccctcaga

SEQ ID NO: 26489 - DNA, 40 bp, Homo sapiens
tctgagggtctatactcccactacagtgcaaggcgcacac

SEQ ID NO: 26490 - DNA, 40 bp, Homo sapiens
tgtgcgccttgcactgtagtgggagtatagaccctcagac

SEQ ID NO: 26491 - DNA, 40 bp, Homo sapiens
gtctgagggtctatactcccactacagtgcaaggcgcaca

SEQ ID NO: 26492 - DNA, 40 bp, Homo sapiens
gtgcgccttgcactgtagtgggagtatagaccctcagact

SEQ ID NO: 26493 - DNA, 40 bp, Homo sapiens
agtctgagggtctatactcccactacagtgcaaggcgcac

SEQ ID NO: 26494 - DNA, 40 bp, Homo sapiens
tgcgccttgcactgtagtgggagtatagaccctcagactt

SEQ ID NO: 26495 - DNA, 40 bp, Homo sapiens
aagtctgagggtctatactcccactacagtgcaaggcgca

SEQ ID NO: 26496 - DNA, 40 bp, Homo sapiens
gcgccttgcactgtagtgggagtatagaccctcagacttt

SEQ ID NO: 26497 - DNA, 40 bp, Homo sapiens
aaagtctgagggtctatactcccactacagtgcaaggcgc

SEQ ID NO: 26498 - DNA, 40 bp, Homo sapiens
cgccttgcactgtagtgggagtatagaccctcagacttta

SEQ ID NO: 26499 - DNA, 40 bp, Homo sapiens
taaagtctgagggtctatactcccactacagtgcaaggcg

SEQ ID NO: 26500 - DNA, 40 bp, Homo sapiens
gccttgcactgtagtgggagtatagaccctcagactttat

SEQ ID NO: 26501 - DNA, 40 bp, Homo sapiens
ataaagtctgagggtctatactcccactacagtgcaaggc

SEQ ID NO: 26502 - DNA, 40 bp, Homo sapiens
ccttgcactgtagtgggagtatagaccctcagactttatg

SEQ ID NO: 26503 - DNA, 40 bp, Homo sapiens
cataaagtctgagggtctatactcccactacagtgcaagg

SEQ ID NO: 26504 - DNA, 40 bp, Homo sapiens
cttgcactgtagtgggagtatagaccctcagactttatgg

SEQ ID NO: 26505 - DNA, 40 bp, Homo sapiens
ccataaagtctgagggtctatactcccactacagtgcaag

SEQ ID NO: 26506 - DNA, 40 bp, Homo sapiens
ttgcactgtagtgggagtatagaccctcagactttatgga

SEQ ID NO: 26507 - DNA, 40 bp, Homo sapiens
tccataaagtctgagggtctatactcccactacagtgcaa

SEQ ID NO: 26508 - DNA, 40 bp, Homo sapiens
tgcactgtagtgggagtatagaccctcagactttatggag

SEQ ID NO: 26509 - DNA, 40 bp, Homo sapiens
ctccataaagtctgagggtctatactcccactacagtgca

SEQ ID NO: 26510 - DNA, 40 bp, Homo sapiens
gcactgtagtgggagtatagaccctcagactttatggagg

SEQ ID NO: 26511 - DNA, 40 bp, Homo sapiens
cctccataaagtctgagggtctatactcccactacagtgc

SEQ ID NO: 26512 - DNA, 40 bp, Homo sapiens
cactgtagtgggagtatagaccctcagactttatggaggt

SEQ ID NO: 26513 - DNA, 40 bp, Homo sapiens
acctccataaagtctgagggtctatactcccactacagtg

SEQ ID NO: 26514 - DNA, 40 bp, Homo sapiens
actgtagtgggagtatagaccctcagactttatggaggtc

SEQ ID NO: 26515 - DNA, 40 bp, Homo sapiens
gacctccataaagtctgagggtctatactcccactacagt

SEQ ID NO: 26516 - DNA, 40 bp, Homo sapiens
ctgtagtgggagtatagaccctcagactttatggaggtca

SEQ ID NO: 26517 - DNA, 40 bp, Homo sapiens
tgacctccataaagtctgagggtctatactcccactacag

SEQ ID NO: 26518 - DNA, 40 bp, Homo sapiens
tgtagtgggagtatagaccctcagactttatggaggtcag

SEQ ID NO: 26519 - DNA, 40 bp, Homo sapiens
ctgacctccataaagtctgagggtctatactcccactaca

SEQ ID NO: 26520 - DNA, 40 bp, Homo sapiens
gtagtgggagtatagaccctcagactttatggaggtcagt

SEQ ID NO: 26521 - DNA, 40 bp, Homo sapiens
actgacctccataaagtctgagggtctatactcccactac

SEQ ID NO: 26522 - DNA, 40 bp, Homo sapiens
tagtgggagtatagaccctcagactttatggaggtcagtc

SEQ ID NO: 26523 - DNA, 40 bp, Homo sapiens
gactgacctccataaagtctgagggtctatactcccacta

SEQ ID NO: 26524 - DNA, 40 bp, Homo sapiens
agtgggagtatagaccctcagactttatggaggtcagtct

SEQ ID NO: 26525 - DNA, 40 bp, Homo sapiens
agactgacctccataaagtctgagggtctatactcccact

SEQ ID NO: 26526 - DNA, 40 bp, Homo sapiens
gtgggagtatagaccctcagactttatggaggtcagtctg

SEQ ID NO: 26527 - DNA, 40 bp, Homo sapiens
cagactgacctccataaagtctgagggtctatactcccac

SEQ ID NO: 26528 - DNA, 40 bp, Homo sapiens
tgggagtatagaccctcagactttatggaggtcagtctgg

SEQ ID NO: 26529 - DNA, 40 bp, Homo sapiens
ccagactgacctccataaagtctgagggtctatactccca

SEQ ID NO: 26530 - DNA, 40 bp, Homo sapiens
gggagtatagaccctcagactttatggaggtcagtctgga

SEQ ID NO: 26531 - DNA, 40 bp, Homo sapiens
tccagactgacctccataaagtctgagggtctatactccc

SEQ ID NO: 26532 - DNA, 40 bp, Homo sapiens
ggagtatagaccctcagactttatggaggtcagtctggaa

SEQ ID NO: 26533 - DNA, 40 bp, Homo sapiens
ttccagactgacctccataaagtctgagggtctatactcc

SEQ ID NO: 26534 - DNA, 40 bp, Homo sapiens
gagtatagaccctcagactttatggaggtcagtctggaaa

SEQ ID NO: 26535 - DNA, 40 bp, Homo sapiens
tttccagactgacctccataaagtctgagggtctatactc

SEQ ID NO: 26536 - DNA, 40 bp, Homo sapiens
agtatagaccctcagactttatggaggtcagtctggaaat

SEQ ID NO: 26537 - DNA, 40 bp, Homo sapiens
atttccagactgacctccataaagtctgagggtctatact

SEQ ID NO: 26538 - DNA, 40 bp, Homo sapiens
gtatagaccctcagactttatggaggtcagtctggaaata

SEQ ID NO: 26539 - DNA, 40 bp, Homo sapiens
tatttccagactgacctccataaagtctgagggtctatac

SEQ ID NO: 26540 - DNA, 40 bp, Homo sapiens
tatagaccctcagactttatggaggtcagtctggaaatat

SEQ ID NO: 26541 - DNA, 40 bp, Homo sapiens
atatttccagactgacctccataaagtctgagggtctata

SEQ ID NO: 26542 - DNA, 40 bp, Homo sapiens
atagaccctcagactttatggaggtcagtctggaaatatg

SEQ ID NO: 26543 - DNA, 40 bp, Homo sapiens
catatttccagactgacctccataaagtctgagggtctat

SEQ ID NO: 26544 - DNA, 40 bp, Homo sapiens
tagaccctcagactttatggaggtcagtctggaaatatgt

SEQ ID NO: 26545 - DNA, 40 bp, Homo sapiens
acatatttccagactgacctccataaagtctgagggtcta

SEQ ID NO: 26546 - DNA, 40 bp, Homo sapiens
agaccctcagactttatggaggtcagtctggaaatatgtt

SEQ ID NO: 26547 - DNA, 40 bp, Homo sapiens
aacatatttccagactgacctccataaagtctgagggtct

SEQ ID NO: 26548 - DNA, 40 bp, Homo sapiens
gaccctcagactttatggaggtcagtctggaaatatgttt

SEQ ID NO: 26549 - DNA, 40 bp, Homo sapiens
aaacatatttccagactgacctccataaagtctgagggtc

SEQ ID NO: 26550 - DNA, 40 bp, Homo sapiens
accctcagactttatggaggtcagtctggaaatatgtttc

SEQ ID NO: 26551 - DNA, 40 bp, Homo sapiens
gaaacatatttccagactgacctccataaagtctgagggt

SEQ ID NO: 26552 - DNA, 40 bp, Homo sapiens
ccctcagactttatggaggtcagtctggaaatatgtttca

SEQ ID NO: 26553 - DNA, 40 bp, Homo sapiens
tgaaacatatttccagactgacctccataaagtctgaggg

SEQ ID NO: 26554 - DNA, 40 bp, Homo sapiens
cctcagactttatggaggtcagtctggaaatatgtttcaa

SEQ ID NO: 26555 - DNA, 40 bp, Homo sapiens
ttgaaacatatttccagactgacctccataaagtctgagg

SEQ ID NO: 26556 - DNA, 40 bp, Homo sapiens
ctcagactttatggaggtcagtctggaaatatgtttcaaa

SEQ ID NO: 26557 - DNA, 40 bp, Homo sapiens
tttgaaacatatttccagactgacctccataaagtctgag

SEQ ID NO: 26558 - DNA, 40 bp, Homo sapiens
tcagactttatggaggtcagtctggaaatatgtttcaaaa

SEQ ID NO: 26559 - DNA, 40 bp, Homo sapiens
ttttgaaacatatttccagactgacctccataaagtctga

SEQ ID NO: 26560 - DNA, 40 bp, Homo sapiens
cagactttatggaggtcagtctggaaatatgtttcaaaat

SEQ ID NO: 26561 - DNA, 40 bp, Homo sapiens
attttgaaacatatttccagactgacctccataaagtctg

SEQ ID NO: 26562 - DNA, 40 bp, Homo sapiens
agactttatggaggtcagtctggaaatatgtttcaaaatg

SEQ ID NO: 26563 - DNA, 40 bp, Homo sapiens
cattttgaaacatatttccagactgacctccataaagtct

SEQ ID NO: 26564 - DNA, 40 bp, Homo sapiens
gactttatggaggtcagtctggaaatatgtttcaaaatgt

SEQ ID NO: 26565 - DNA, 40 bp, Homo sapiens
acattttgaaacatatttccagactgacctccataaagtc

SEQ ID NO: 26566 - DNA, 40 bp, Homo sapiens
actttatggaggtcagtctggaaatatgtttcaaaatgta

SEQ ID NO: 26567 - DNA, 40 bp, Homo sapiens
tacattttgaaacatatttccagactgacctccataaagt

SEQ ID NO: 26568 - DNA, 40 bp, Homo sapiens
ctttatggaggtcagtctggaaatatgtttcaaaatgtaa

SEQ ID NO: 26569 - DNA, 40 bp, Homo sapiens
ttacattttgaaacatatttccagactgacctccataaag

SEQ ID NO: 26570 - DNA, 40 bp, Homo sapiens
tttatggaggtcagtctggaaatatgtttcaaaatgtaaa

SEQ ID NO: 26571 - DNA, 40 bp, Homo sapiens
tttacattttgaaacatatttccagactgacctccataaa

SEQ ID NO: 26572 - DNA, 40 bp, Homo sapiens
ttatggaggtcagtctggaaatatgtttcaaaatgtaaac

SEQ ID NO: 26573 - DNA, 40 bp, Homo sapiens
gtttacattttgaaacatatttccagactgacctccataa

SEQ ID NO: 26574 - DNA, 40 bp, Homo sapiens
tatggaggtcagtctggaaatatgtttcaaaatgtaaact

SEQ ID NO: 26575 - DNA, 40 bp, Homo sapiens
agtttacattttgaaacatatttccagactgacctccata

SEQ ID NO: 26576 - DNA, 40 bp, Homo sapiens
atggaggtcagtctggaaatatgtttcaaaatgtaaacta

SEQ ID NO: 26577 - DNA, 40 bp, Homo sapiens
tagtttacattttgaaacatatttccagactgacctccat

SEQ ID NO: 26578 - DNA, 40 bp, Homo sapiens
tggaggtcagtctggaaatatgtttcaaaatgtaaactac

SEQ ID NO: 26579 - DNA, 40 bp, Homo sapiens
gtagtttacattttgaaacatatttccagactgacctcca

SEQ ID NO: 26580 - DNA, 40 bp, Homo sapiens
ggaggtcagtctggaaatatgtttcaaaatgtaaactaca

SEQ ID NO: 26581 - DNA, 40 bp, Homo sapiens
tgtagtttacattttgaaacatatttccagactgacctcc

SEQ ID NO: 26582 - DNA, 40 bp, Homo sapiens
gaggtcagtctggaaatatgtttcaaaatgtaaactacat

SEQ ID NO: 26583 - DNA, 40 bp, Homo sapiens
atgtagtttacattttgaaacatatttccagactgacctc

SEQ ID NO: 26584 - DNA, 40 bp, Homo sapiens
aggtcagtctggaaatatgtttcaaaatgtaaactacatg

SEQ ID NO: 26585 - DNA, 40 bp, Homo sapiens
catgtagtttacattttgaaacatatttccagactgacct

SEQ ID NO: 26586 - DNA, 40 bp, Homo sapiens
ggtcagtctggaaatatgtttcaaaatgtaaactacatgt

SEQ ID NO: 26587 - DNA, 40 bp, Homo sapiens
acatgtagtttacattttgaaacatatttccagactgacc

SEQ ID NO: 26588 - DNA, 40 bp, Homo sapiens
gtcagtctggaaatatgtttcaaaatgtaaactacatgtc

SEQ ID NO: 26589 - DNA, 40 bp, Homo sapiens
gacatgtagtttacattttgaaacatatttccagactgac

SEQ ID NO: 26590 - DNA, 40 bp, Homo sapiens
tcagtctggaaatatgtttcaaaatgtaaactacatgtcc

SEQ ID NO: 26591 - DNA, 40 bp, Homo sapiens
ggacatgtagtttacattttgaaacatatttccagactga

SEQ ID NO: 26592 - DNA, 40 bp, Homo sapiens
cagtctggaaatatgtttcaaaatgtaaactacatgtcct

SEQ ID NO: 26593 - DNA, 40 bp, Homo sapiens
aggacatgtagtttacattttgaaacatatttccagactg

SEQ ID NO: 26594 - DNA, 40 bp, Homo sapiens
agtctggaaatatgtttcaaaatgtaaactacatgtcctt

SEQ ID NO: 26595 - DNA, 40 bp, Homo sapiens
aaggacatgtagtttacattttgaaacatatttccagact

SEQ ID NO: 26596 - DNA, 40 bp, Homo sapiens
gtctggaaatatgtttcaaaatgtaaactacatgtccttt

SEQ ID NO: 26597 - DNA, 40 bp, Homo sapiens
aaaggacatgtagtttacattttgaaacatatttccagac

SEQ ID NO: 26598 - DNA, 40 bp, Homo sapiens
tctggaaatatgtttcaaaatgtaaactacatgtcctttg

SEQ ID NO: 26599 - DNA, 40 bp, Homo sapiens
caaaggacatgtagtttacattttgaaacatatttccaga

SEQ ID NO: 26600 - DNA, 40 bp, Homo sapiens
ctggaaatatgtttcaaaatgtaaactacatgtcctttga

SEQ ID NO: 26601 - DNA, 40 bp, Homo sapiens
tcaaaggacatgtagtttacattttgaaacatatttccag

SEQ ID NO: 26602 - DNA, 40 bp, Homo sapiens
tggaaatatgtttcaaaatgtaaactacatgtcctttgac

SEQ ID NO: 26603 - DNA, 40 bp, Homo sapiens
gtcaaaggacatgtagtttacattttgaaacatatttcca

SEQ ID NO: 26604 - DNA, 40 bp, Homo sapiens
ggaaatatgtttcaaaatgtaaactacatgtcctttgacc

SEQ ID NO: 26605 - DNA, 40 bp, Homo sapiens
ggtcaaaggacatgtagtttacattttgaaacatatttcc

SEQ ID NO: 26606 - DNA, 40 bp, Homo sapiens
gaaatatgtttcaaaatgtaaactacatgtcctttgacca

SEQ ID NO: 26607 - DNA, 40 bp, Homo sapiens
tggtcaaaggacatgtagtttacattttgaaacatatttc

SEQ ID NO: 26608 - DNA, 40 bp, Homo sapiens
aaatatgtttcaaaatgtaaactacatgtcctttgaccag

SEQ ID NO: 26609 - DNA, 40 bp, Homo sapiens
ctggtcaaaggacatgtagtttacattttgaaacatattt

SEQ ID NO: 26610 - DNA, 40 bp, Homo sapiens
aatatgtttcaaaatgtaaactacatgtcctttgaccagg

SEQ ID NO: 26611 - DNA, 40 bp, Homo sapiens
cctggtcaaaggacatgtagtttacattttgaaacatatt

SEQ ID NO: 26612 - DNA, 40 bp, Homo sapiens
atatgtttcaaaatgtaaactacatgtcctttgaccaggt

SEQ ID NO: 26613 - DNA, 40 bp, Homo sapiens
acctggtcaaaggacatgtagtttacattttgaaacatat

SEQ ID NO: 26614 - DNA, 40 bp, Homo sapiens
tatgtttcaaaatgtaaactacatgtcctttgaccaggta

SEQ ID NO: 26615 - DNA, 40 bp, Homo sapiens
tacctggtcaaaggacatgtagtttacattttgaaacata

SEQ ID NO: 26616 - DNA, 40 bp, Homo sapiens
atgtttcaaaatgtaaactacatgtcctttgaccaggtaa

SEQ ID NO: 26617 - DNA, 40 bp, Homo sapiens
ttacctggtcaaaggacatgtagtttacattttgaaacat

SEQ ID NO: 26618 - DNA, 40 bp, Homo sapiens
tgtttcaaaatgtaaactacatgtcctttgaccaggtaat

SEQ ID NO: 26619 - DNA, 40 bp, Homo sapiens
attacctggtcaaaggacatgtagtttacattttgaaaca

SEQ ID NO: 26620 - DNA, 40 bp, Homo sapiens
gtttcaaaatgtaaactacatgtcctttgaccaggtaatt

SEQ ID NO: 26621 - DNA, 40 bp, Homo sapiens
aattacctggtcaaaggacatgtagtttacattttgaaac

SEQ ID NO: 26622 - DNA, 40 bp, Homo sapiens
tttcaaaatgtaaactacatgtcctttgaccaggtaattc

SEQ ID NO: 26623 - DNA, 40 bp, Homo sapiens
gaattacctggtcaaaggacatgtagtttacattttgaaa

SEQ ID NO: 26624 - DNA, 40 bp, Homo sapiens
ttcaaaatgtaaactacatgtcctttgaccaggtaattca

SEQ ID NO: 26625 - DNA, 40 bp, Homo sapiens
tgaattacctggtcaaaggacatgtagtttacattttgaa

SEQ ID NO: 26626 - DNA, 40 bp, Homo sapiens
tcaaaatgtaaactacatgtcctttgaccaggtaattcaa

SEQ ID NO: 26627 - DNA, 40 bp, Homo sapiens
ttgaattacctggtcaaaggacatgtagtttacattttga

SEQ ID NO: 26628 - DNA, 40 bp, Homo sapiens
caaaatgtaaactacatgtcctttgaccaggtaattcaac

SEQ ID NO: 26629 - DNA, 40 bp, Homo sapiens
gttgaattacctggtcaaaggacatgtagtttacattttg

SEQ ID NO: 26630 - DNA, 40 bp, Homo sapiens
aaaatgtaaactacatgtcctttgaccaggtaattcaact

SEQ ID NO: 26631 - DNA, 40 bp, Homo sapiens
agttgaattacctggtcaaaggacatgtagtttacatttt

SEQ ID NO: 26632 - DNA, 40 bp, Homo sapiens
aaatgtaaactacatgtcctttgaccaggtaattcaactt

SEQ ID NO: 26633 - DNA, 40 bp, Homo sapiens
aagttgaattacctggtcaaaggacatgtagtttacattt

SEQ ID NO: 26634 - DNA, 40 bp, Homo sapiens
aatgtaaactacatgtcctttgaccaggtaattcaacttc

SEQ ID NO: 26635 - DNA, 40 bp, Homo sapiens
gaagttgaattacctggtcaaaggacatgtagtttacatt

SEQ ID NO: 26636 - DNA, 40 bp, Homo sapiens
atgtaaactacatgtcctttgaccaggtaattcaacttct

SEQ ID NO: 26637 - DNA, 40 bp, Homo sapiens
agaagttgaattacctggtcaaaggacatgtagtttacat

SEQ ID NO: 26638 - DNA, 40 bp, Homo sapiens
tgtaaactacatgtcctttgaccaggtaattcaacttctt

SEQ ID NO: 26639 - DNA, 40 bp, Homo sapiens
aagaagttgaattacctggtcaaaggacatgtagtttaca

SEQ ID NO: 26640 - DNA, 40 bp, Homo sapiens
gtaaactacatgtcctttgaccaggtaattcaacttcttg

SEQ ID NO: 26641 - DNA, 40 bp, Homo sapiens
caagaagttgaattacctggtcaaaggacatgtagtttac

SEQ ID NO: 26642 - DNA, 40 bp, Homo sapiens
taaactacatgtcctttgaccaggtaattcaacttcttga

SEQ ID NO: 26643 - DNA, 40 bp, Homo sapiens
tcaagaagttgaattacctggtcaaaggacatgtagttta

SEQ ID NO: 26644 - DNA, 40 bp, Homo sapiens
aaactacatgtcctttgaccaggtaattcaacttcttgaa

SEQ ID NO: 26645 - DNA, 40 bp, Homo sapiens
ttcaagaagttgaattacctggtcaaaggacatgtagttt

SEQ ID NO: 26646 - DNA, 40 bp, Homo sapiens
aactacatgtcctttgaccaggtaattcaacttcttgaaa

SEQ ID NO: 26647 - DNA, 40 bp, Homo sapiens
tttcaagaagttgaattacctggtcaaaggacatgtagtt

SEQ ID NO: 26648 - DNA, 40 bp, Homo sapiens
actacatgtcctttgaccaggtaattcaacttcttgaaat

SEQ ID NO: 26649 - DNA, 40 bp, Homo sapiens
atttcaagaagttgaattacctggtcaaaggacatgtagt

SEQ ID NO: 26650 - DNA, 40 bp, Homo sapiens
ctacatgtcctttgaccaggtaattcaacttcttgaaatt

SEQ ID NO: 26651 - DNA, 40 bp, Homo sapiens
aatttcaagaagttgaattacctggtcaaaggacatgtag

SEQ ID NO: 26652 - DNA, 40 bp, Homo sapiens
tacatgtcctttgaccaggtaattcaacttcttgaaattt

SEQ ID NO: 26653 - DNA, 40 bp, Homo sapiens
aaatttcaagaagttgaattacctggtcaaaggacatgta

SEQ ID NO: 26654 - DNA, 40 bp, Homo sapiens
acatgtcctttgaccaggtaattcaacttcttgaaattta

SEQ ID NO: 26655 - DNA, 40 bp, Homo sapiens
taaatttcaagaagttgaattacctggtcaaaggacatgt

SEQ ID NO: 26656 - DNA, 40 bp, Homo sapiens
catgtcctttgaccaggtaattcaacttcttgaaatttat

SEQ ID NO: 26657 - DNA, 40 bp, Homo sapiens
ataaatttcaagaagttgaattacctggtcaaaggacatg

SEQ ID NO: 26658 - DNA, 40 bp, Homo sapiens
atgtcctttgaccaggtaattcaacttcttgaaatttatc

SEQ ID NO: 26659 - DNA, 40 bp, Homo sapiens
gataaatttcaagaagttgaattacctggtcaaaggacat

SEQ ID NO: 26660 - DNA, 40 bp, Homo sapiens
tgtcctttgaccaggtaattcaacttcttgaaatttatcc

SEQ ID NO: 26661 - DNA, 40 bp, Homo sapiens
ggataaatttcaagaagttgaattacctggtcaaaggaca

SEQ ID NO: 26662 - DNA, 40 bp, Homo sapiens
gtcctttgaccaggtaattcaacttcttgaaatttatcca

SEQ ID NO: 26663 - DNA, 40 bp, Homo sapiens
tggataaatttcaagaagttgaattacctggtcaaaggac

SEQ ID NO: 26664 - DNA, 40 bp, Homo sapiens
tcctttgaccaggtaattcaacttcttgaaatttatccaa

SEQ ID NO: 26665 - DNA, 40 bp, Homo sapiens
ttggataaatttcaagaagttgaattacctggtcaaagga

SEQ ID NO: 26666 - DNA, 40 bp, Homo sapiens
cctttgaccaggtaattcaacttcttgaaatttatccaag

SEQ ID NO: 26667 - DNA, 40 bp, Homo sapiens
cttggataaatttcaagaagttgaattacctggtcaaagg

SEQ ID NO: 26668 - DNA, 40 bp, Homo sapiens
ctttgaccaggtaattcaacttcttgaaatttatccaagg

SEQ ID NO: 26669 - DNA, 40 bp, Homo sapiens
ccttggataaatttcaagaagttgaattacctggtcaaag

SEQ ID NO: 26670 - DNA, 40 bp, Homo sapiens
tttgaccaggtaattcaacttcttgaaatttatccaagga

SEQ ID NO: 26671 - DNA, 40 bp, Homo sapiens
tccttggataaatttcaagaagttgaattacctggtcaaa

SEQ ID NO: 26672 - DNA, 40 bp, Homo sapiens
ttgaccaggtaattcaacttcttgaaatttatccaaggat

SEQ ID NO: 26673 - DNA, 40 bp, Homo sapiens
atccttggataaatttcaagaagttgaattacctggtcaa

SEQ ID NO: 26674 - DNA, 40 bp, Homo sapiens
tgaccaggtaattcaacttcttgaaatttatccaaggatt

SEQ ID NO: 26675 - DNA, 40 bp, Homo sapiens
aatccttggataaatttcaagaagttgaattacctggtca

SEQ ID NO: 26676 - DNA, 40 bp, Homo sapiens
gaccaggtaattcaacttcttgaaatttatccaaggattt

SEQ ID NO: 26677 - DNA, 40 bp, Homo sapiens
aaatccttggataaatttcaagaagttgaattacctggtc

SEQ ID NO: 26678 - DNA, 40 bp, Homo sapiens
accaggtaattcaacttcttgaaatttatccaaggattta

SEQ ID NO: 26679 - DNA, 40 bp, Homo sapiens
taaatccttggataaatttcaagaagttgaattacctggt

SEQ ID NO: 26680 - DNA, 40 bp, Homo sapiens
ccaggtaattcaacttcttgaaatttatccaaggatttaa

SEQ ID NO: 26681 - DNA, 40 bp, Homo sapiens
ttaaatccttggataaatttcaagaagttgaattacctgg

SEQ ID NO: 26682 - DNA, 40 bp, Homo sapiens
caggtaattcaacttcttgaaatttatccaaggatttaat

SEQ ID NO: 26683 - DNA, 40 bp, Homo sapiens
attaaatccttggataaatttcaagaagttgaattacctg

SEQ ID NO: 26684 - DNA, 40 bp, Homo sapiens
aggtaattcaacttcttgaaatttatccaaggatttaatt

SEQ ID NO: 26685 - DNA, 40 bp, Homo sapiens
aattaaatccttggataaatttcaagaagttgaattacct

SEQ ID NO: 26686 - DNA, 40 bp, Homo sapiens
ggtaattcaacttcttgaaatttatccaaggatttaattg

SEQ ID NO: 26687 - DNA, 40 bp, Homo sapiens
caattaaatccttggataaatttcaagaagttgaattacc

SEQ ID NO: 26688 - DNA, 40 bp, Homo sapiens
gtaattcaacttcttgaaatttatccaaggatttaattgg

SEQ ID NO: 26689 - DNA, 40 bp, Homo sapiens
ccaattaaatccttggataaatttcaagaagttgaattac

SEQ ID NO: 26690 - DNA, 40 bp, Homo sapiens
taattcaacttcttgaaatttatccaaggatttaattgga

SEQ ID NO: 26691 - DNA, 40 bp, Homo sapiens
tccaattaaatccttggataaatttcaagaagttgaatta

SEQ ID NO: 26692 - DNA, 40 bp, Homo sapiens
aattcaacttcttgaaatttatccaaggatttaattggat

SEQ ID NO: 26693 - DNA, 40 bp, Homo sapiens
atccaattaaatccttggataaatttcaagaagttgaatt

SEQ ID NO: 26694 - DNA, 40 bp, Homo sapiens
attcaacttcttgaaatttatccaaggatttaattggata

SEQ ID NO: 26695 - DNA, 40 bp, Homo sapiens
tatccaattaaatccttggataaatttcaagaagttgaat

SEQ ID NO: 26696 - DNA, 40 bp, Homo sapiens
ttcaacttcttgaaatttatccaaggatttaattggataa

SEQ ID NO: 26697 - DNA, 40 bp, Homo sapiens
ttatccaattaaatccttggataaatttcaagaagttgaa

SEQ ID NO: 26698 - DNA, 40 bp, Homo sapiens
tcaacttcttgaaatttatccaaggatttaattggataaa

SEQ ID NO: 26699 - DNA, 40 bp, Homo sapiens
tttatccaattaaatccttggataaatttcaagaagttga

SEQ ID NO: 26700 - DNA, 40 bp, Homo sapiens
caacttcttgaaatttatccaaggatttaattggataaat

SEQ ID NO: 26701 - DNA, 40 bp, Homo sapiens
atttatccaattaaatccttggataaatttcaagaagttg

SEQ ID NO: 26702 - DNA, 40 bp, Homo sapiens
aacttcttgaaatttatccaaggatttaattggataaatg

SEQ ID NO: 26703 - DNA, 40 bp, Homo sapiens
catttatccaattaaatccttggataaatttcaagaagtt

SEQ ID NO: 26704 - DNA, 40 bp, Homo sapiens
acttcttgaaatttatccaaggatttaattggataaatgt

SEQ ID NO: 26705 - DNA, 40 bp, Homo sapiens
acatttatccaattaaatccttggataaatttcaagaagt

SEQ ID NO: 26706 - DNA, 40 bp, Homo sapiens
cttcttgaaatttatccaaggatttaattggataaatgtt

SEQ ID NO: 26707 - DNA, 40 bp, Homo sapiens
aacatttatccaattaaatccttggataaatttcaagaag

SEQ ID NO: 26708 - DNA, 40 bp, Homo sapiens
ttcttgaaatttatccaaggatttaattggataaatgttt

SEQ ID NO: 26709 - DNA, 40 bp, Homo sapiens
aaacatttatccaattaaatccttggataaatttcaagaa

SEQ ID NO: 26710 - DNA, 40 bp, Homo sapiens
tcttgaaatttatccaaggatttaattggataaatgttta

SEQ ID NO: 26711 - DNA, 40 bp, Homo sapiens
taaacatttatccaattaaatccttggataaatttcaaga

SEQ ID NO: 26712 - DNA, 40 bp, Homo sapiens
cttgaaatttatccaaggatttaattggataaatgtttaa

SEQ ID NO: 26713 - DNA, 40 bp, Homo sapiens
ttaaacatttatccaattaaatccttggataaatttcaag

SEQ ID NO: 26714 - DNA, 40 bp, Homo sapiens
ttgaaatttatccaaggatttaattggataaatgtttaag

SEQ ID NO: 26715 - DNA, 40 bp, Homo sapiens
cttaaacatttatccaattaaatccttggataaatttcaa

SEQ ID NO: 26716 - DNA, 40 bp, Homo sapiens
tgaaatttatccaaggatttaattggataaatgtttaaga

SEQ ID NO: 26717 - DNA, 40 bp, Homo sapiens
tcttaaacatttatccaattaaatccttggataaatttca

SEQ ID NO: 26718 - DNA, 40 bp, Homo sapiens
gaaatttatccaaggatttaattggataaatgtttaagat

SEQ ID NO: 26719 - DNA, 40 bp, Homo sapiens
atcttaaacatttatccaattaaatccttggataaatttc

SEQ ID NO: 26720 - DNA, 40 bp, Homo sapiens
aaatttatccaaggatttaattggataaatgtttaagatg

SEQ ID NO: 26721 - DNA, 40 bp, Homo sapiens
catcttaaacatttatccaattaaatccttggataaattt

SEQ ID NO: 26722 - DNA, 40 bp, Homo sapiens
aatttatccaaggatttaattggataaatgtttaagatgt

SEQ ID NO: 26723 - DNA, 40 bp, Homo sapiens
acatcttaaacatttatccaattaaatccttggataaatt

SEQ ID NO: 26724 - DNA, 40 bp, Homo sapiens
atttatccaaggatttaattggataaatgtttaagatgta

SEQ ID NO: 26725 - DNA, 40 bp, Homo sapiens
tacatcttaaacatttatccaattaaatccttggataaat

SEQ ID NO: 26726 - DNA, 40 bp, Homo sapiens
tttatccaaggatttaattggataaatgtttaagatgtat

SEQ ID NO: 26727 - DNA, 40 bp, Homo sapiens
atacatcttaaacatttatccaattaaatccttggataaa

SEQ ID NO: 26728 - DNA, 40 bp, Homo sapiens
ttatccaaggatttaattggataaatgtttaagatgtata

SEQ ID NO: 26729 - DNA, 40 bp, Homo sapiens
tatacatcttaaacatttatccaattaaatccttggataa

SEQ ID NO: 26730 - DNA, 40 bp, Homo sapiens
tatccaaggatttaattggataaatgtttaagatgtatat

SEQ ID NO: 26731 - DNA, 40 bp, Homo sapiens
atatacatcttaaacatttatccaattaaatccttggata

SEQ ID NO: 26732 - DNA, 40 bp, Homo sapiens
atccaaggatttaattggataaatgtttaagatgtatata

SEQ ID NO: 26733 - DNA, 40 bp, Homo sapiens
tatatacatcttaaacatttatccaattaaatccttggat

SEQ ID NO: 26734 - DNA, 40 bp, Homo sapiens
tccaaggatttaattggataaatgtttaagatgtatatat

SEQ ID NO: 26735 - DNA, 40 bp, Homo sapiens
atatatacatcttaaacatttatccaattaaatccttgga

SEQ ID NO: 26736 - DNA, 40 bp, Homo sapiens
ccaaggatttaattggataaatgtttaagatgtatatata

SEQ ID NO: 26737 - DNA, 40 bp, Homo sapiens
tatatatacatcttaaacatttatccaattaaatccttgg

SEQ ID NO: 26738 - DNA, 40 bp, Homo sapiens
caaggatttaattggataaatgtttaagatgtatatataa

SEQ ID NO: 26739 - DNA, 40 bp, Homo sapiens
ttatatatacatcttaaacatttatccaattaaatccttg

SEQ ID NO: 26740 - DNA, 40 bp, Homo sapiens
aaggatttaattggataaatgtttaagatgtatatataag

SEQ ID NO: 26741 - DNA, 40 bp, Homo sapiens
cttatatatacatcttaaacatttatccaattaaatcctt

SEQ ID NO: 26742 - DNA, 40 bp, Homo sapiens
aggatttaattggataaatgtttaagatgtatatataaga

SEQ ID NO: 26743 - DNA, 40 bp, Homo sapiens
tcttatatatacatcttaaacatttatccaattaaatcct

SEQ ID NO: 26744 - DNA, 40 bp, Homo sapiens
ggatttaattggataaatgtttaagatgtatatataagaa

SEQ ID NO: 26745 - DNA, 40 bp, Homo sapiens
ttcttatatatacatcttaaacatttatccaattaaatcc

SEQ ID NO: 26746 - DNA, 40 bp, Homo sapiens
gatttaattggataaatgtttaagatgtatatataagaat

SEQ ID NO: 26747 - DNA, 40 bp, Homo sapiens
attcttatatatacatcttaaacatttatccaattaaatc

SEQ ID NO: 26748 - DNA, 40 bp, Homo sapiens
atttaattggataaatgtttaagatgtatatataagaatg

SEQ ID NO: 26749 - DNA, 40 bp, Homo sapiens
cattcttatatatacatcttaaacatttatccaattaaat

SEQ ID NO: 26750 - DNA, 40 bp, Homo sapiens
tttaattggataaatgtttaagatgtatatataagaatgt

SEQ ID NO: 26751 - DNA, 40 bp, Homo sapiens
acattcttatatatacatcttaaacatttatccaattaaa

SEQ ID NO: 26752 - DNA, 40 bp, Homo sapiens
ttaattggataaatgtttaagatgtatatataagaatgtt

SEQ ID NO: 26753 - DNA, 40 bp, Homo sapiens
aacattcttatatatacatcttaaacatttatccaattaa

SEQ ID NO: 26754 - DNA, 40 bp, Homo sapiens
taattggataaatgtttaagatgtatatataagaatgttt

SEQ ID NO: 26755 - DNA, 40 bp, Homo sapiens
aaacattcttatatatacatcttaaacatttatccaatta

SEQ ID NO: 26756 - DNA, 40 bp, Homo sapiens
aattggataaatgtttaagatgtatatataagaatgttta

SEQ ID NO: 26757 - DNA, 40 bp, Homo sapiens
taaacattcttatatatacatcttaaacatttatccaatt

SEQ ID NO: 26758 - DNA, 40 bp, Homo sapiens
attggataaatgtttaagatgtatatataagaatgtttac

SEQ ID NO: 26759 - DNA, 40 bp, Homo sapiens
gtaaacattcttatatatacatcttaaacatttatccaat

SEQ ID NO: 26760 - DNA, 40 bp, Homo sapiens
ttggataaatgtttaagatgtatatataagaatgtttact

SEQ ID NO: 26761 - DNA, 40 bp, Homo sapiens
agtaaacattcttatatatacatcttaaacatttatccaa

SEQ ID NO: 26762 - DNA, 40 bp, Homo sapiens
tggataaatgtttaagatgtatatataagaatgtttactg

SEQ ID NO: 26763 - DNA, 40 bp, Homo sapiens
cagtaaacattcttatatatacatcttaaacatttatcca

SEQ ID NO: 26764 - DNA, 40 bp, Homo sapiens
ggataaatgtttaagatgtatatataagaatgtttactgc

SEQ ID NO: 26765 - DNA, 40 bp, Homo sapiens
gcagtaaacattcttatatatacatcttaaacatttatcc

SEQ ID NO: 26766 - DNA, 40 bp, Homo sapiens
gataaatgtttaagatgtatatataagaatgtttactgca

SEQ ID NO: 26767 - DNA, 40 bp, Homo sapiens
tgcagtaaacattcttatatatacatcttaaacatttatc

SEQ ID NO: 26768 - DNA, 40 bp, Homo sapiens
ataaatgtttaagatgtatatataagaatgtttactgcag

SEQ ID NO: 26769 - DNA, 40 bp, Homo sapiens
ctgcagtaaacattcttatatatacatcttaaacatttat

SEQ ID NO: 26770 - DNA, 40 bp, Homo sapiens
taaatgtttaagatgtatatataagaatgtttactgcagt

SEQ ID NO: 26771 - DNA, 40 bp, Homo sapiens
actgcagtaaacattcttatatatacatcttaaacattta

SEQ ID NO: 26772 - DNA, 40 bp, Homo sapiens
aaatgtttaagatgtatatataagaatgtttactgcagtg

SEQ ID NO: 26773 - DNA, 40 bp, Homo sapiens
cactgcagtaaacattcttatatatacatcttaaacattt

SEQ ID NO: 26774 - DNA, 40 bp, Homo sapiens
aatgtttaagatgtatatataagaatgtttactgcagtgt

SEQ ID NO: 26775 - DNA, 40 bp, Homo sapiens
acactgcagtaaacattcttatatatacatcttaaacatt

SEQ ID NO: 26776 - DNA, 40 bp, Homo sapiens
atgtttaagatgtatatataagaatgtttactgcagtgtt

SEQ ID NO: 26777 - DNA, 40 bp, Homo sapiens
aacactgcagtaaacattcttatatatacatcttaaacat

SEQ ID NO: 26778 - DNA, 40 bp, Homo sapiens
tgtttaagatgtatatataagaatgtttactgcagtgttg

SEQ ID NO: 26779 - DNA, 40 bp, Homo sapiens
caacactgcagtaaacattcttatatatacatcttaaaca

SEQ ID NO: 26780 - DNA, 40 bp, Homo sapiens
gtttaagatgtatatataagaatgtttactgcagtgttgt

SEQ ID NO: 26781 - DNA, 40 bp, Homo sapiens
acaacactgcagtaaacattcttatatatacatcttaaac

SEQ ID NO: 26782 - DNA, 40 bp, Homo sapiens
tttaagatgtatatataagaatgtttactgcagtgttgtt

SEQ ID NO: 26783 - DNA, 40 bp, Homo sapiens
aacaacactgcagtaaacattcttatatatacatcttaaa

SEQ ID NO: 26784 - DNA, 40 bp, Homo sapiens
ttaagatgtatatataagaatgtttactgcagtgttgttt

SEQ ID NO: 26785 - DNA, 40 bp, Homo sapiens
aaacaacactgcagtaaacattcttatatatacatcttaa

SEQ ID NO: 26786 - DNA, 40 bp, Homo sapiens
taagatgtatatataagaatgtttactgcagtgttgttta

SEQ ID NO: 26787 - DNA, 40 bp, Homo sapiens
taaacaacactgcagtaaacattcttatatatacatctta

SEQ ID NO: 26788 - DNA, 40 bp, Homo sapiens
aagatgtatatataagaatgtttactgcagtgttgtttat

SEQ ID NO: 26789 - DNA, 40 bp, Homo sapiens
ataaacaacactgcagtaaacattcttatatatacatctt

SEQ ID NO: 26790 - DNA, 40 bp, Homo sapiens
agatgtatatataagaatgtttactgcagtgttgtttatg

SEQ ID NO: 26791 - DNA, 40 bp, Homo sapiens
cataaacaacactgcagtaaacattcttatatatacatct

SEQ ID NO: 26792 - DNA, 40 bp, Homo sapiens
gatgtatatataagaatgtttactgcagtgttgtttatga

SEQ ID NO: 26793 - DNA, 40 bp, Homo sapiens
tcataaacaacactgcagtaaacattcttatatatacatc

SEQ ID NO: 26794 - DNA, 40 bp, Homo sapiens
atgtatatataagaatgtttactgcagtgttgtttatgat

SEQ ID NO: 26795 - DNA, 40 bp, Homo sapiens
atcataaacaacactgcagtaaacattcttatatatacat

SEQ ID NO: 26796 - DNA, 40 bp, Homo sapiens
tgtatatataagaatgtttactgcagtgttgtttatgatt

SEQ ID NO: 26797 - DNA, 40 bp, Homo sapiens
aatcataaacaacactgcagtaaacattcttatatataca

SEQ ID NO: 26798 - DNA, 40 bp, Homo sapiens
gtatatataagaatgtttactgcagtgttgtttatgattt

SEQ ID NO: 26799 - DNA, 40 bp, Homo sapiens
aaatcataaacaacactgcagtaaacattcttatatatac

SEQ ID NO: 26800 - DNA, 40 bp, Homo sapiens
tatatataagaatgtttactgcagtgttgtttatgatttt

SEQ ID NO: 26801 - DNA, 40 bp, Homo sapiens
aaaatcataaacaacactgcagtaaacattcttatatata

SEQ ID NO: 26802 - DNA, 40 bp, Homo sapiens
atatataagaatgtttactgcagtgttgtttatgatttta

SEQ ID NO: 26803 - DNA, 40 bp, Homo sapiens
taaaatcataaacaacactgcagtaaacattcttatatat

SEQ ID NO: 26804 - DNA, 40 bp, Homo sapiens
tatataagaatgtttactgcagtgttgtttatgattttaa

SEQ ID NO: 26805 - DNA, 40 bp, Homo sapiens
ttaaaatcataaacaacactgcagtaaacattcttatata

SEQ ID NO: 26806 - DNA, 40 bp, Homo sapiens
atataagaatgtttactgcagtgttgtttatgattttaaa

SEQ ID NO: 26807 - DNA, 40 bp, Homo sapiens
tttaaaatcataaacaacactgcagtaaacattcttatat

SEQ ID NO: 26808 - DNA, 40 bp, Homo sapiens
tataagaatgtttactgcagtgttgtttatgattttaaaa

SEQ ID NO: 26809 - DNA, 40 bp, Homo sapiens
ttttaaaatcataaacaacactgcagtaaacattcttata

SEQ ID NO: 26810 - DNA, 40 bp, Homo sapiens
ataagaatgtttactgcagtgttgtttatgattttaaaaa

SEQ ID NO: 26811 - DNA, 40 bp, Homo sapiens
tttttaaaatcataaacaacactgcagtaaacattcttat

SEQ ID NO: 26812 - DNA, 40 bp, Homo sapiens
taagaatgtttactgcagtgttgtttatgattttaaaaaa

SEQ ID NO: 26813 - DNA, 40 bp, Homo sapiens
ttttttaaaatcataaacaacactgcagtaaacattctta

SEQ ID NO: 26814 - DNA, 40 bp, Homo sapiens
aagaatgtttactgcagtgttgtttatgattttaaaaaaa

SEQ ID NO: 26815 - DNA, 40 bp, Homo sapiens
tttttttaaaatcataaacaacactgcagtaaacattctt

SEQ ID NO: 26816 - DNA, 40 bp, Homo sapiens
agaatgtttactgcagtgttgtttatgattttaaaaaaat

SEQ ID NO: 26817 - DNA, 40 bp, Homo sapiens
atttttttaaaatcataaacaacactgcagtaaacattct

SEQ ID NO: 26818 - DNA, 40 bp, Homo sapiens
gaatgtttactgcagtgttgtttatgattttaaaaaaatg

SEQ ID NO: 26819 - DNA, 40 bp, Homo sapiens
catttttttaaaatcataaacaacactgcagtaaacattc

SEQ ID NO: 26820 - DNA, 40 bp, Homo sapiens
aatgtttactgcagtgttgtttatgattttaaaaaaatgg

SEQ ID NO: 26821 - DNA, 40 bp, Homo sapiens
ccatttttttaaaatcataaacaacactgcagtaaacatt

SEQ ID NO: 26822 - DNA, 40 bp, Homo sapiens
atgtttactgcagtgttgtttatgattttaaaaaaatgga

SEQ ID NO: 26823 - DNA, 40 bp, Homo sapiens
tccatttttttaaaatcataaacaacactgcagtaaacat

SEQ ID NO: 26824 - DNA, 40 bp, Homo sapiens
tgtttactgcagtgttgtttatgattttaaaaaaatggaa

SEQ ID NO: 26825 - DNA, 40 bp, Homo sapiens
ttccatttttttaaaatcataaacaacactgcagtaaaca

SEQ ID NO: 26826 - DNA, 40 bp, Homo sapiens
gtttactgcagtgttgtttatgattttaaaaaaatggaaa

SEQ ID NO: 26827 - DNA, 40 bp, Homo sapiens
tttccatttttttaaaatcataaacaacactgcagtaaac

SEQ ID NO: 26828 - DNA, 40 bp, Homo sapiens
tttactgcagtgttgtttatgattttaaaaaaatggaaat

SEQ ID NO: 26829 - DNA, 40 bp, Homo sapiens
atttccatttttttaaaatcataaacaacactgcagtaaa

SEQ ID NO: 26830 - DNA, 40 bp, Homo sapiens
ttactgcagtgttgtttatgattttaaaaaaatggaaatc

SEQ ID NO: 26831 - DNA, 40 bp, Homo sapiens
gatttccatttttttaaaatcataaacaacactgcagtaa

SEQ ID NO: 26832 - DNA, 40 bp, Homo sapiens
tactgcagtgttgtttatgattttaaaaaaatggaaatca

SEQ ID NO: 26833 - DNA, 40 bp, Homo sapiens
tgatttccatttttttaaaatcataaacaacactgcagta

SEQ ID NO: 26834 - DNA, 40 bp, Homo sapiens
actgcagtgttgtttatgattttaaaaaaatggaaatcat

SEQ ID NO: 26835 - DNA, 40 bp, Homo sapiens
atgatttccatttttttaaaatcataaacaacactgcagt

SEQ ID NO: 26836 - DNA, 40 bp, Homo sapiens
ctgcagtgttgtttatgattttaaaaaaatggaaatcatc

SEQ ID NO: 26837 - DNA, 40 bp, Homo sapiens
gatgatttccatttttttaaaatcataaacaacactgcag

SEQ ID NO: 26838 - DNA, 40 bp, Homo sapiens
tgcagtgttgtttatgattttaaaaaaatggaaatcatct

SEQ ID NO: 26839 - DNA, 40 bp, Homo sapiens
agatgatttccatttttttaaaatcataaacaacactgca

SEQ ID NO: 26840 - DNA, 40 bp, Homo sapiens
gcagtgttgtttatgattttaaaaaaatggaaatcatctt

SEQ ID NO: 26841 - DNA, 40 bp, Homo sapiens
aagatgatttccatttttttaaaatcataaacaacactgc

SEQ ID NO: 26842 - DNA, 40 bp, Homo sapiens
cagtgttgtttatgattttaaaaaaatggaaatcatcttc

SEQ ID NO: 26843 - DNA, 40 bp, Homo sapiens
gaagatgatttccatttttttaaaatcataaacaacactg

SEQ ID NO: 26844 - DNA, 40 bp, Homo sapiens
agtgttgtttatgattttaaaaaaatggaaatcatcttca

SEQ ID NO: 26845 - DNA, 40 bp, Homo sapiens
tgaagatgatttccatttttttaaaatcataaacaacact

SEQ ID NO: 26846 - DNA, 40 bp, Homo sapiens
gtgttgtttatgattttaaaaaaatggaaatcatcttcat

SEQ ID NO: 26847 - DNA, 40 bp, Homo sapiens
atgaagatgatttccatttttttaaaatcataaacaacac

SEQ ID NO: 26848 - DNA, 40 bp, Homo sapiens
tgttgtttatgattttaaaaaaatggaaatcatcttcatg

SEQ ID NO: 26849 - DNA, 40 bp, Homo sapiens
catgaagatgatttccatttttttaaaatcataaacaaca

SEQ ID NO: 26850 - DNA, 40 bp, Homo sapiens
gttgtttatgattttaaaaaaatggaaatcatcttcatgt

SEQ ID NO: 26851 - DNA, 40 bp, Homo sapiens
acatgaagatgatttccatttttttaaaatcataaacaac

SEQ ID NO: 26852 - DNA, 40 bp, Homo sapiens
ttgtttatgattttaaaaaaatggaaatcatcttcatgtc

SEQ ID NO: 26853 - DNA, 40 bp, Homo sapiens
gacatgaagatgatttccatttttttaaaatcataaacaa

SEQ ID NO: 26854 - DNA, 40 bp, Homo sapiens
tgtttatgattttaaaaaaatggaaatcatcttcatgtct

SEQ ID NO: 26855 - DNA, 40 bp, Homo sapiens
agacatgaagatgatttccatttttttaaaatcataaaca

SEQ ID NO: 26856 - DNA, 40 bp, Homo sapiens
gtttatgattttaaaaaaatggaaatcatcttcatgtcta

SEQ ID NO: 26857 - DNA, 40 bp, Homo sapiens
tagacatgaagatgatttccatttttttaaaatcataaac

SEQ ID NO: 26858 - DNA, 40 bp, Homo sapiens
tttatgattttaaaaaaatggaaatcatcttcatgtctac

SEQ ID NO: 26859 - DNA, 40 bp, Homo sapiens
gtagacatgaagatgatttccatttttttaaaatcataaa

SEQ ID NO: 26860 - DNA, 40 bp, Homo sapiens
ttatgattttaaaaaaatggaaatcatcttcatgtctacc

SEQ ID NO: 26861 - DNA, 40 bp, Homo sapiens
ggtagacatgaagatgatttccatttttttaaaatcataa

SEQ ID NO: 26862 - DNA, 40 bp, Homo sapiens
tatgattttaaaaaaatggaaatcatcttcatgtctacca

SEQ ID NO: 26863 - DNA, 40 bp, Homo sapiens
tggtagacatgaagatgatttccatttttttaaaatcata

SEQ ID NO: 26864 - DNA, 40 bp, Homo sapiens
atgattttaaaaaaatggaaatcatcttcatgtctaccaa

SEQ ID NO: 26865 - DNA, 40 bp, Homo sapiens
ttggtagacatgaagatgatttccatttttttaaaatcat

SEQ ID NO: 26866 - DNA, 40 bp, Homo sapiens
tgattttaaaaaaatggaaatcatcttcatgtctaccaat

SEQ ID NO: 26867 - DNA, 40 bp, Homo sapiens
attggtagacatgaagatgatttccatttttttaaaatca

SEQ ID NO: 26868 - DNA, 40 bp, Homo sapiens
gattttaaaaaaatggaaatcatcttcatgtctaccaata

SEQ ID NO: 26869 - DNA, 40 bp, Homo sapiens
tattggtagacatgaagatgatttccatttttttaaaatc

SEQ ID NO: 26870 - DNA, 40 bp, Homo sapiens
attttaaaaaaatggaaatcatcttcatgtctaccaatag

SEQ ID NO: 26871 - DNA, 40 bp, Homo sapiens
ctattggtagacatgaagatgatttccatttttttaaaat

SEQ ID NO: 26872 - DNA, 40 bp, Homo sapiens
ttttaaaaaaatggaaatcatcttcatgtctaccaataga

SEQ ID NO: 26873 - DNA, 40 bp, Homo sapiens
tctattggtagacatgaagatgatttccatttttttaaaa

SEQ ID NO: 26874 - DNA, 40 bp, Homo sapiens
tttaaaaaaatggaaatcatcttcatgtctaccaatagag

SEQ ID NO: 26875 - DNA, 40 bp, Homo sapiens
ctctattggtagacatgaagatgatttccatttttttaaa

SEQ ID NO: 26876 - DNA, 40 bp, Homo sapiens
ttaaaaaaatggaaatcatcttcatgtctaccaatagaga

SEQ ID NO: 26877 - DNA, 40 bp, Homo sapiens
tctctattggtagacatgaagatgatttccatttttttaa

SEQ ID NO: 26878 - DNA, 40 bp, Homo sapiens
taaaaaaatggaaatcatcttcatgtctaccaatagagaa

SEQ ID NO: 26879 - DNA, 40 bp, Homo sapiens
ttctctattggtagacatgaagatgatttccattttttta

SEQ ID NO: 26880 - DNA, 40 bp, Homo sapiens
aaaaaaatggaaatcatcttcatgtctaccaatagagaat

SEQ ID NO: 26881 - DNA, 40 bp, Homo sapiens
attctctattggtagacatgaagatgatttccattttttt

SEQ ID NO: 26882 - DNA, 40 bp, Homo sapiens
aaaaaatggaaatcatcttcatgtctaccaatagagaatg

SEQ ID NO: 26883 - DNA, 40 bp, Homo sapiens
cattctctattggtagacatgaagatgatttccatttttt

SEQ ID NO: 26884 - DNA, 40 bp, Homo sapiens
aaaaatggaaatcatcttcatgtctaccaatagagaatgg

SEQ ID NO: 26885 - DNA, 40 bp, Homo sapiens
ccattctctattggtagacatgaagatgatttccattttt

SEQ ID NO: 26886 - DNA, 40 bp, Homo sapiens
aaaatggaaatcatcttcatgtctaccaatagagaatggg

SEQ ID NO: 26887 - DNA, 40 bp, Homo sapiens
cccattctctattggtagacatgaagatgatttccatttt

SEQ ID NO: 26888 - DNA, 40 bp, Homo sapiens
aaatggaaatcatcttcatgtctaccaatagagaatgggt

SEQ ID NO: 26889 - DNA, 40 bp, Homo sapiens
acccattctctattggtagacatgaagatgatttccattt

SEQ ID NO: 26890 - DNA, 40 bp, Homo sapiens
aatggaaatcatcttcatgtctaccaatagagaatgggtg

SEQ ID NO: 26891 - DNA, 40 bp, Homo sapiens
cacccattctctattggtagacatgaagatgatttccatt

SEQ ID NO: 26892 - DNA, 40 bp, Homo sapiens
atggaaatcatcttcatgtctaccaatagagaatgggtga

SEQ ID NO: 26893 - DNA, 40 bp, Homo sapiens
tcacccattctctattggtagacatgaagatgatttccat

SEQ ID NO: 26894 - DNA, 40 bp, Homo sapiens
tggaaatcatcttcatgtctaccaatagagaatgggtgaa

SEQ ID NO: 26895 - DNA, 40 bp, Homo sapiens
ttcacccattctctattggtagacatgaagatgatttcca

SEQ ID NO: 26896 - DNA, 40 bp, Homo sapiens
ggaaatcatcttcatgtctaccaatagagaatgggtgaat

SEQ ID NO: 26897 - DNA, 40 bp, Homo sapiens
attcacccattctctattggtagacatgaagatgatttcc

SEQ ID NO: 26898 - DNA, 40 bp, Homo sapiens
gaaatcatcttcatgtctaccaatagagaatgggtgaata

SEQ ID NO: 26899 - DNA, 40 bp, Homo sapiens
tattcacccattctctattggtagacatgaagatgatttc

SEQ ID NO: 26900 - DNA, 40 bp, Homo sapiens
aaatcatcttcatgtctaccaatagagaatgggtgaataa

SEQ ID NO: 26901 - DNA, 40 bp, Homo sapiens
ttattcacccattctctattggtagacatgaagatgattt

SEQ ID NO: 26902 - DNA, 40 bp, Homo sapiens
aatcatcttcatgtctaccaatagagaatgggtgaataaa

SEQ ID NO: 26903 - DNA, 40 bp, Homo sapiens
tttattcacccattctctattggtagacatgaagatgatt

SEQ ID NO: 26904 - DNA, 40 bp, Homo sapiens
atcatcttcatgtctaccaatagagaatgggtgaataaat

SEQ ID NO: 26905 - DNA, 40 bp, Homo sapiens
atttattcacccattctctattggtagacatgaagatgat

SEQ ID NO: 26906 - DNA, 40 bp, Homo sapiens
tcatcttcatgtctaccaatagagaatgggtgaataaatt

SEQ ID NO: 26907 - DNA, 40 bp, Homo sapiens
aatttattcacccattctctattggtagacatgaagatga

SEQ ID NO: 26908 - DNA, 40 bp, Homo sapiens
catcttcatgtctaccaatagagaatgggtgaataaatta

SEQ ID NO: 26909 - DNA, 40 bp, Homo sapiens
taatttattcacccattctctattggtagacatgaagatg

SEQ ID NO: 26910 - DNA, 40 bp, Homo sapiens
atcttcatgtctaccaatagagaatgggtgaataaattat

SEQ ID NO: 26911 - DNA, 40 bp, Homo sapiens
ataatttattcacccattctctattggtagacatgaagat

SEQ ID NO: 26912 - DNA, 40 bp, Homo sapiens
tcttcatgtctaccaatagagaatgggtgaataaattatg

SEQ ID NO: 26913 - DNA, 40 bp, Homo sapiens
cataatttattcacccattctctattggtagacatgaaga

SEQ ID NO: 26914 - DNA, 40 bp, Homo sapiens
cttcatgtctaccaatagagaatgggtgaataaattatgg

SEQ ID NO: 26915 - DNA, 40 bp, Homo sapiens
ccataatttattcacccattctctattggtagacatgaag

SEQ ID NO: 26916 - DNA, 40 bp, Homo sapiens
ttcatgtctaccaatagagaatgggtgaataaattatggt

SEQ ID NO: 26917 - DNA, 40 bp, Homo sapiens
accataatttattcacccattctctattggtagacatgaa

SEQ ID NO: 26918 - DNA, 40 bp, Homo sapiens
tcatgtctaccaatagagaatgggtgaataaattatggta

SEQ ID NO: 26919 - DNA, 40 bp, Homo sapiens
taccataatttattcacccattctctattggtagacatga

SEQ ID NO: 26920 - DNA, 40 bp, Homo sapiens
catgtctaccaatagagaatgggtgaataaattatggtat

SEQ ID NO: 26921 - DNA, 40 bp, Homo sapiens
ataccataatttattcacccattctctattggtagacatg

SEQ ID NO: 26922 - DNA, 40 bp, Homo sapiens
atgtctaccaatagagaatgggtgaataaattatggtatg

SEQ ID NO: 26923 - DNA, 40 bp, Homo sapiens
cataccataatttattcacccattctctattggtagacat

SEQ ID NO: 26924 - DNA, 40 bp, Homo sapiens
tgtctaccaatagagaatgggtgaataaattatggtatgt

SEQ ID NO: 26925 - DNA, 40 bp, Homo sapiens
acataccataatttattcacccattctctattggtagaca

SEQ ID NO: 26926 - DNA, 40 bp, Homo sapiens
gtctaccaatagagaatgggtgaataaattatggtatgtc

SEQ ID NO: 26927 - DNA, 40 bp, Homo sapiens
gacataccataatttattcacccattctctattggtagac

SEQ ID NO: 26928 - DNA, 40 bp, Homo sapiens
tctaccaatagagaatgggtgaataaattatggtatgtcc

SEQ ID NO: 26929 - DNA, 40 bp, Homo sapiens
ggacataccataatttattcacccattctctattggtaga

SEQ ID NO: 26930 - DNA, 40 bp, Homo sapiens
ctaccaatagagaatgggtgaataaattatggtatgtcca

SEQ ID NO: 26931 - DNA, 40 bp, Homo sapiens
tggacataccataatttattcacccattctctattggtag

SEQ ID NO: 26932 - DNA, 40 bp, Homo sapiens
taccaatagagaatgggtgaataaattatggtatgtccat

SEQ ID NO: 26933 - DNA, 40 bp, Homo sapiens
atggacataccataatttattcacccattctctattggta

SEQ ID NO: 26934 - DNA, 40 bp, Homo sapiens
accaatagagaatgggtgaataaattatggtatgtccata

SEQ ID NO: 26935 - DNA, 40 bp, Homo sapiens
tatggacataccataatttattcacccattctctattggt

SEQ ID NO: 26936 - DNA, 40 bp, Homo sapiens
ccaatagagaatgggtgaataaattatggtatgtccatat

SEQ ID NO: 26937 - DNA, 40 bp, Homo sapiens
atatggacataccataatttattcacccattctctattgg

SEQ ID NO: 26938 - DNA, 40 bp, Homo sapiens
caatagagaatgggtgaataaattatggtatgtccatata

SEQ ID NO: 26939 - DNA, 40 bp, Homo sapiens
tatatggacataccataatttattcacccattctctattg

SEQ ID NO: 26940 - DNA, 40 bp, Homo sapiens
aatagagaatgggtgaataaattatggtatgtccatatat

SEQ ID NO: 26941 - DNA, 40 bp, Homo sapiens
atatatggacataccataatttattcacccattctctatt

SEQ ID NO: 26942 - DNA, 40 bp, Homo sapiens
atagagaatgggtgaataaattatggtatgtccatatata

SEQ ID NO: 26943 - DNA, 40 bp, Homo sapiens
tatatatggacataccataatttattcacccattctctat

SEQ ID NO: 26944 - DNA, 40 bp, Homo sapiens
tagagaatgggtgaataaattatggtatgtccatatatac

SEQ ID NO: 26945 - DNA, 40 bp, Homo sapiens
gtatatatggacataccataatttattcacccattctcta

SEQ ID NO: 26946 - DNA, 40 bp, Homo sapiens
agagaatgggtgaataaattatggtatgtccatatataca

SEQ ID NO: 26947 - DNA, 40 bp, Homo sapiens
tgtatatatggacataccataatttattcacccattctct

SEQ ID NO: 26948 - DNA, 40 bp, Homo sapiens
gagaatgggtgaataaattatggtatgtccatatatacaa

SEQ ID NO: 26949 - DNA, 40 bp, Homo sapiens
ttgtatatatggacataccataatttattcacccattctc

SEQ ID NO: 26950 - DNA, 40 bp, Homo sapiens
agaatgggtgaataaattatggtatgtccatatatacaaa

SEQ ID NO: 26951 - DNA, 40 bp, Homo sapiens
tttgtatatatggacataccataatttattcacccattct

SEQ ID NO: 26952 - DNA, 40 bp, Homo sapiens
gaatgggtgaataaattatggtatgtccatatatacaaat

SEQ ID NO: 26953 - DNA, 40 bp, Homo sapiens
atttgtatatatggacataccataatttattcacccattc

SEQ ID NO: 26954 - DNA, 40 bp, Homo sapiens
aatgggtgaataaattatggtatgtccatatatacaaatt

SEQ ID NO: 26955 - DNA, 40 bp, Homo sapiens
aatttgtatatatggacataccataatttattcacccatt

SEQ ID NO: 26956 - DNA, 40 bp, Homo sapiens
atgggtgaataaattatggtatgtccatatatacaaatta

SEQ ID NO: 26957 - DNA, 40 bp, Homo sapiens
taatttgtatatatggacataccataatttattcacccat

SEQ ID NO: 26958 - DNA, 40 bp, Homo sapiens
tgggtgaataaattatggtatgtccatatatacaaattac

SEQ ID NO: 26959 - DNA, 40 bp, Homo sapiens
gtaatttgtatatatggacataccataatttattcaccca

SEQ ID NO: 26960 - DNA, 40 bp, Homo sapiens
gggtgaataaattatggtatgtccatatatacaaattaca

SEQ ID NO: 26961 - DNA, 40 bp, Homo sapiens
tgtaatttgtatatatggacataccataatttattcaccc

SEQ ID NO: 26962 - DNA, 40 bp, Homo sapiens
ggtgaataaattatggtatgtccatatatacaaattacat

SEQ ID NO: 26963 - DNA, 40 bp, Homo sapiens
atgtaatttgtatatatggacataccataatttattcacc

SEQ ID NO: 26964 - DNA, 40 bp, Homo sapiens
gtgaataaattatggtatgtccatatatacaaattacata

SEQ ID NO: 26965 - DNA, 40 bp, Homo sapiens
tatgtaatttgtatatatggacataccataatttattcac

SEQ ID NO: 26966 - DNA, 40 bp, Homo sapiens
tgaataaattatggtatgtccatatatacaaattacatag

SEQ ID NO: 26967 - DNA, 40 bp, Homo sapiens
ctatgtaatttgtatatatggacataccataatttattca

SEQ ID NO: 26968 - DNA, 40 bp, Homo sapiens
gaataaattatggtatgtccatatatacaaattacatagt

SEQ ID NO: 26969 - DNA, 40 bp, Homo sapiens
actatgtaatttgtatatatggacataccataatttattc

SEQ ID NO: 26970 - DNA, 40 bp, Homo sapiens
aataaattatggtatgtccatatatacaaattacatagtt

SEQ ID NO: 26971 - DNA, 40 bp, Homo sapiens
aactatgtaatttgtatatatggacataccataatttatt

SEQ ID NO: 26972 - DNA, 40 bp, Homo sapiens
ataaattatggtatgtccatatatacaaattacatagttg

SEQ ID NO: 26973 - DNA, 40 bp, Homo sapiens
caactatgtaatttgtatatatggacataccataatttat

SEQ ID NO: 26974 - DNA, 40 bp, Homo sapiens
taaattatggtatgtccatatatacaaattacatagttgt

SEQ ID NO: 26975 - DNA, 40 bp, Homo sapiens
acaactatgtaatttgtatatatggacataccataattta

SEQ ID NO: 26976 - DNA, 40 bp, Homo sapiens
aaattatggtatgtccatatatacaaattacatagttgtt

SEQ ID NO: 26977 - DNA, 40 bp, Homo sapiens
aacaactatgtaatttgtatatatggacataccataattt

SEQ ID NO: 26978 - DNA, 40 bp, Homo sapiens
aattatggtatgtccatatatacaaattacatagttgttg

SEQ ID NO: 26979 - DNA, 40 bp, Homo sapiens
caacaactatgtaatttgtatatatggacataccataatt

SEQ ID NO: 26980 - DNA, 40 bp, Homo sapiens
attatggtatgtccatatatacaaattacatagttgttgg

SEQ ID NO: 26981 - DNA, 40 bp, Homo sapiens
ccaacaactatgtaatttgtatatatggacataccataat

SEQ ID NO: 26982 - DNA, 40 bp, Homo sapiens
ttatggtatgtccatatatacaaattacatagttgttgga

SEQ ID NO: 26983 - DNA, 40 bp, Homo sapiens
tccaacaactatgtaatttgtatatatggacataccataa

SEQ ID NO: 26984 - DNA, 40 bp, Homo sapiens
tatggtatgtccatatatacaaattacatagttgttggaa

SEQ ID NO: 26985 - DNA, 40 bp, Homo sapiens
ttccaacaactatgtaatttgtatatatggacataccata

SEQ ID NO: 26986 - DNA, 40 bp, Homo sapiens
atggtatgtccatatatacaaattacatagttgttggaaa

SEQ ID NO: 26987 - DNA, 40 bp, Homo sapiens
tttccaacaactatgtaatttgtatatatggacataccat

SEQ ID NO: 26988 - DNA, 40 bp, Homo sapiens
tggtatgtccatatatacaaattacatagttgttggaaat

SEQ ID NO: 26989 - DNA, 40 bp, Homo sapiens
atttccaacaactatgtaatttgtatatatggacatacca

SEQ ID NO: 26990 - DNA, 40 bp, Homo sapiens
ggtatgtccatatatacaaattacatagttgttggaaata

SEQ ID NO: 26991 - DNA, 40 bp, Homo sapiens
tatttccaacaactatgtaatttgtatatatggacatacc

SEQ ID NO: 26992 - DNA, 40 bp, Homo sapiens
gtatgtccatatatacaaattacatagttgttggaaatat

SEQ ID NO: 26993 - DNA, 40 bp, Homo sapiens
atatttccaacaactatgtaatttgtatatatggacatac

SEQ ID NO: 26994 - DNA, 40 bp, Homo sapiens
tatgtccatatatacaaattacatagttgttggaaatatt

SEQ ID NO: 26995 - DNA, 40 bp, Homo sapiens
aatatttccaacaactatgtaatttgtatatatggacata

SEQ ID NO: 26996 - DNA, 40 bp, Homo sapiens
atgtccatatatacaaattacatagttgttggaaatatta

SEQ ID NO: 26997 - DNA, 40 bp, Homo sapiens
taatatttccaacaactatgtaatttgtatatatggacat

SEQ ID NO: 26998 - DNA, 40 bp, Homo sapiens
tgtccatatatacaaattacatagttgttggaaatattag

SEQ ID NO: 26999 - DNA, 40 bp, Homo sapiens
ctaatatttccaacaactatgtaatttgtatatatggaca

SEQ ID NO: 27000 - DNA, 40 bp, Homo sapiens
gtccatatatacaaattacatagttgttggaaatattagg

SEQ ID NO: 27001 - DNA, 40 bp, Homo sapiens
cctaatatttccaacaactatgtaatttgtatatatggac

SEQ ID NO: 27002 - DNA, 40 bp, Homo sapiens
tccatatatacaaattacatagttgttggaaatattaggt

SEQ ID NO: 27003 - DNA, 40 bp, Homo sapiens
acctaatatttccaacaactatgtaatttgtatatatgga

SEQ ID NO: 27004 - DNA, 40 bp, Homo sapiens
ccatatatacaaattacatagttgttggaaatattaggta

SEQ ID NO: 27005 - DNA, 40 bp, Homo sapiens
tacctaatatttccaacaactatgtaatttgtatatatgg

SEQ ID NO: 27006 - DNA, 40 bp, Homo sapiens
catatatacaaattacatagttgttggaaatattaggtag

SEQ ID NO: 27007 - DNA, 40 bp, Homo sapiens
ctacctaatatttccaacaactatgtaatttgtatatatg

SEQ ID NO: 27008 - DNA, 40 bp, Homo sapiens
atatatacaaattacatagttgttggaaatattaggtaga

SEQ ID NO: 27009 - DNA, 40 bp, Homo sapiens
tctacctaatatttccaacaactatgtaatttgtatatat

SEQ ID NO: 27010 - DNA, 40 bp, Homo sapiens
tatatacaaattacatagttgttggaaatattaggtagat

SEQ ID NO: 27011 - DNA, 40 bp, Homo sapiens
atctacctaatatttccaacaactatgtaatttgtatata

SEQ ID NO: 27012 - DNA, 40 bp, Homo sapiens
atatacaaattacatagttgttggaaatattaggtagatt

SEQ ID NO: 27013 - DNA, 40 bp, Homo sapiens
aatctacctaatatttccaacaactatgtaatttgtatat

SEQ ID NO: 27014 - DNA, 40 bp, Homo sapiens
tatacaaattacatagttgttggaaatattaggtagattt

SEQ ID NO: 27015 - DNA, 40 bp, Homo sapiens
aaatctacctaatatttccaacaactatgtaatttgtata

SEQ ID NO: 27016 - DNA, 40 bp, Homo sapiens
atacaaattacatagttgttggaaatattaggtagattta

SEQ ID NO: 27017 - DNA, 40 bp, Homo sapiens
taaatctacctaatatttccaacaactatgtaatttgtat

SEQ ID NO: 27018 - DNA, 40 bp, Homo sapiens
tacaaattacatagttgttggaaatattaggtagatttag

SEQ ID NO: 27019 - DNA, 40 bp, Homo sapiens
ctaaatctacctaatatttccaacaactatgtaatttgta

SEQ ID NO: 27020 - DNA, 40 bp, Homo sapiens
acaaattacatagttgttggaaatattaggtagatttaga

SEQ ID NO: 27021 - DNA, 40 bp, Homo sapiens
tctaaatctacctaatatttccaacaactatgtaatttgt

SEQ ID NO: 27022 - DNA, 40 bp, Homo sapiens
caaattacatagttgttggaaatattaggtagatttagat

SEQ ID NO: 27023 - DNA, 40 bp, Homo sapiens
atctaaatctacctaatatttccaacaactatgtaatttg

SEQ ID NO: 27024 - DNA, 40 bp, Homo sapiens
aaattacatagttgttggaaatattaggtagatttagata

SEQ ID NO: 27025 - DNA, 40 bp, Homo sapiens
tatctaaatctacctaatatttccaacaactatgtaattt

SEQ ID NO: 27026 - DNA, 40 bp, Homo sapiens
aattacatagttgttggaaatattaggtagatttagatat

SEQ ID NO: 27027 - DNA, 40 bp, Homo sapiens
atatctaaatctacctaatatttccaacaactatgtaatt

SEQ ID NO: 27028 - DNA, 40 bp, Homo sapiens
attacatagttgttggaaatattaggtagatttagatata

SEQ ID NO: 27029 - DNA, 40 bp, Homo sapiens
tatatctaaatctacctaatatttccaacaactatgtaat

SEQ ID NO: 27030 - DNA, 40 bp, Homo sapiens
ttacatagttgttggaaatattaggtagatttagatatac

SEQ ID NO: 27031 - DNA, 40 bp, Homo sapiens
gtatatctaaatctacctaatatttccaacaactatgtaa

SEQ ID NO: 27032 - DNA, 40 bp, Homo sapiens
tacatagttgttggaaatattaggtagatttagatatact

SEQ ID NO: 27033 - DNA, 40 bp, Homo sapiens
agtatatctaaatctacctaatatttccaacaactatgta

SEQ ID NO: 27034 - DNA, 40 bp, Homo sapiens
acatagttgttggaaatattaggtagatttagatatactg

SEQ ID NO: 27035 - DNA, 40 bp, Homo sapiens
cagtatatctaaatctacctaatatttccaacaactatgt

SEQ ID NO: 27036 - DNA, 40 bp, Homo sapiens
catagttgttggaaatattaggtagatttagatatactga

SEQ ID NO: 27037 - DNA, 40 bp, Homo sapiens
tcagtatatctaaatctacctaatatttccaacaactatg

SEQ ID NO: 27038 - DNA, 40 bp, Homo sapiens
atagttgttggaaatattaggtagatttagatatactgat

SEQ ID NO: 27039 - DNA, 40 bp, Homo sapiens
atcagtatatctaaatctacctaatatttccaacaactat

SEQ ID NO: 27040 - DNA, 40 bp, Homo sapiens
tagttgttggaaatattaggtagatttagatatactgatg

SEQ ID NO: 27041 - DNA, 40 bp, Homo sapiens
catcagtatatctaaatctacctaatatttccaacaacta

SEQ ID NO: 27042 - DNA, 40 bp, Homo sapiens
agttgttggaaatattaggtagatttagatatactgatgt

SEQ ID NO: 27043 - DNA, 40 bp, Homo sapiens
acatcagtatatctaaatctacctaatatttccaacaact

SEQ ID NO: 27044 - DNA, 40 bp, Homo sapiens
gttgttggaaatattaggtagatttagatatactgatgtt

SEQ ID NO: 27045 - DNA, 40 bp, Homo sapiens
aacatcagtatatctaaatctacctaatatttccaacaac

SEQ ID NO: 27046 - DNA, 40 bp, Homo sapiens
ttgttggaaatattaggtagatttagatatactgatgttc

SEQ ID NO: 27047 - DNA, 40 bp, Homo sapiens
gaacatcagtatatctaaatctacctaatatttccaacaa

SEQ ID NO: 27048 - DNA, 40 bp, Homo sapiens
tgttggaaatattaggtagatttagatatactgatgttca

SEQ ID NO: 27049 - DNA, 40 bp, Homo sapiens
tgaacatcagtatatctaaatctacctaatatttccaaca

SEQ ID NO: 27050 - DNA, 40 bp, Homo sapiens
gttggaaatattaggtagatttagatatactgatgttcaa

SEQ ID NO: 27051 - DNA, 40 bp, Homo sapiens
ttgaacatcagtatatctaaatctacctaatatttccaac

SEQ ID NO: 27052 - DNA, 40 bp, Homo sapiens
ttggaaatattaggtagatttagatatactgatgttcaaa

SEQ ID NO: 27053 - DNA, 40 bp, Homo sapiens
tttgaacatcagtatatctaaatctacctaatatttccaa

SEQ ID NO: 27054 - DNA, 40 bp, Homo sapiens
tggaaatattaggtagatttagatatactgatgttcaaaa

SEQ ID NO: 27055 - DNA, 40 bp, Homo sapiens
ttttgaacatcagtatatctaaatctacctaatatttcca

SEQ ID NO: 27056 - DNA, 40 bp, Homo sapiens
ggaaatattaggtagatttagatatactgatgttcaaaaa

SEQ ID NO: 27057 - DNA, 40 bp, Homo sapiens
tttttgaacatcagtatatctaaatctacctaatatttcc

SEQ ID NO: 27058 - DNA, 40 bp, Homo sapiens
gaaatattaggtagatttagatatactgatgttcaaaaat

SEQ ID NO: 27059 - DNA, 40 bp, Homo sapiens
atttttgaacatcagtatatctaaatctacctaatatttc

SEQ ID NO: 27060 - DNA, 40 bp, Homo sapiens
aaatattaggtagatttagatatactgatgttcaaaaatg

SEQ ID NO: 27061 - DNA, 40 bp, Homo sapiens
catttttgaacatcagtatatctaaatctacctaatattt

SEQ ID NO: 27062 - DNA, 40 bp, Homo sapiens
aatattaggtagatttagatatactgatgttcaaaaatgt

SEQ ID NO: 27063 - DNA, 40 bp, Homo sapiens
acatttttgaacatcagtatatctaaatctacctaatatt

SEQ ID NO: 27064 - DNA, 40 bp, Homo sapiens
atattaggtagatttagatatactgatgttcaaaaatgtc

SEQ ID NO: 27065 - DNA, 40 bp, Homo sapiens
gacatttttgaacatcagtatatctaaatctacctaatat

SEQ ID NO: 27066 - DNA, 40 bp, Homo sapiens
tattaggtagatttagatatactgatgttcaaaaatgtcc

SEQ ID NO: 27067 - DNA, 40 bp, Homo sapiens
ggacatttttgaacatcagtatatctaaatctacctaata

SEQ ID NO: 27068 - DNA, 40 bp, Homo sapiens
attaggtagatttagatatactgatgttcaaaaatgtcca

SEQ ID NO: 27069 - DNA, 40 bp, Homo sapiens
tggacatttttgaacatcagtatatctaaatctacctaat

SEQ ID NO: 27070 - DNA, 40 bp, Homo sapiens
ttaggtagatttagatatactgatgttcaaaaatgtccat

SEQ ID NO: 27071 - DNA, 40 bp, Homo sapiens
atggacatttttgaacatcagtatatctaaatctacctaa

SEQ ID NO: 27072 - DNA, 40 bp, Homo sapiens
taggtagatttagatatactgatgttcaaaaatgtccatt

SEQ ID NO: 27073 - DNA, 40 bp, Homo sapiens
aatggacatttttgaacatcagtatatctaaatctaccta

SEQ ID NO: 27074 - DNA, 40 bp, Homo sapiens
aggtagatttagatatactgatgttcaaaaatgtccatta

SEQ ID NO: 27075 - DNA, 40 bp, Homo sapiens
taatggacatttttgaacatcagtatatctaaatctacct

SEQ ID NO: 27076 - DNA, 40 bp, Homo sapiens
ggtagatttagatatactgatgttcaaaaatgtccattat

SEQ ID NO: 27077 - DNA, 40 bp, Homo sapiens
ataatggacatttttgaacatcagtatatctaaatctacc

SEQ ID NO: 27078 - DNA, 40 bp, Homo sapiens
gtagatttagatatactgatgttcaaaaatgtccattatg

SEQ ID NO: 27079 - DNA, 40 bp, Homo sapiens
cataatggacatttttgaacatcagtatatctaaatctac

SEQ ID NO: 27080 - DNA, 40 bp, Homo sapiens
tagatttagatatactgatgttcaaaaatgtccattatgt

SEQ ID NO: 27081 - DNA, 40 bp, Homo sapiens
acataatggacatttttgaacatcagtatatctaaatcta

SEQ ID NO: 27082 - DNA, 40 bp, Homo sapiens
agatttagatatactgatgttcaaaaatgtccattatgta

SEQ ID NO: 27083 - DNA, 40 bp, Homo sapiens
tacataatggacatttttgaacatcagtatatctaaatct

SEQ ID NO: 27084 - DNA, 40 bp, Homo sapiens
gatttagatatactgatgttcaaaaatgtccattatgtaa

SEQ ID NO: 27085 - DNA, 40 bp, Homo sapiens
ttacataatggacatttttgaacatcagtatatctaaatc

SEQ ID NO: 27086 - DNA, 40 bp, Homo sapiens
atttagatatactgatgttcaaaaatgtccattatgtaag

SEQ ID NO: 27087 - DNA, 40 bp, Homo sapiens
cttacataatggacatttttgaacatcagtatatctaaat

SEQ ID NO: 27088 - DNA, 40 bp, Homo sapiens
tttagatatactgatgttcaaaaatgtccattatgtaagt

SEQ ID NO: 27089 - DNA, 40 bp, Homo sapiens
acttacataatggacatttttgaacatcagtatatctaaa

SEQ ID NO: 27090 - DNA, 40 bp, Homo sapiens
ttagatatactgatgttcaaaaatgtccattatgtaagtg

SEQ ID NO: 27091 - DNA, 40 bp, Homo sapiens
cacttacataatggacatttttgaacatcagtatatctaa

SEQ ID NO: 27092 - DNA, 40 bp, Homo sapiens
tagatatactgatgttcaaaaatgtccattatgtaagtga

SEQ ID NO: 27093 - DNA, 40 bp, Homo sapiens
tcacttacataatggacatttttgaacatcagtatatcta

SEQ ID NO: 27094 - DNA, 40 bp, Homo sapiens
agatatactgatgttcaaaaatgtccattatgtaagtgaa

SEQ ID NO: 27095 - DNA, 40 bp, Homo sapiens
ttcacttacataatggacatttttgaacatcagtatatct

SEQ ID NO: 27096 - DNA, 40 bp, Homo sapiens
gatatactgatgttcaaaaatgtccattatgtaagtgaag

SEQ ID NO: 27097 - DNA, 40 bp, Homo sapiens
cttcacttacataatggacatttttgaacatcagtatatc

SEQ ID NO: 27098 - DNA, 40 bp, Homo sapiens
atatactgatgttcaaaaatgtccattatgtaagtgaagc

SEQ ID NO: 27099 - DNA, 40 bp, Homo sapiens
gcttcacttacataatggacatttttgaacatcagtatat

SEQ ID NO: 27100 - DNA, 40 bp, Homo sapiens
tatactgatgttcaaaaatgtccattatgtaagtgaagct

SEQ ID NO: 27101 - DNA, 40 bp, Homo sapiens
agcttcacttacataatggacatttttgaacatcagtata

SEQ ID NO: 27102 - DNA, 40 bp, Homo sapiens
atactgatgttcaaaaatgtccattatgtaagtgaagctg

SEQ ID NO: 27103 - DNA, 40 bp, Homo sapiens
cagcttcacttacataatggacatttttgaacatcagtat

SEQ ID NO: 27104 - DNA, 40 bp, Homo sapiens
tactgatgttcaaaaatgtccattatgtaagtgaagctgg

SEQ ID NO: 27105 - DNA, 40 bp, Homo sapiens
ccagcttcacttacataatggacatttttgaacatcagta

SEQ ID NO: 27106 - DNA, 40 bp, Homo sapiens
actgatgttcaaaaatgtccattatgtaagtgaagctggg

SEQ ID NO: 27107 - DNA, 40 bp, Homo sapiens
cccagcttcacttacataatggacatttttgaacatcagt

SEQ ID NO: 27108 - DNA, 40 bp, Homo sapiens
ctgatgttcaaaaatgtccattatgtaagtgaagctgggt

SEQ ID NO: 27109 - DNA, 40 bp, Homo sapiens
acccagcttcacttacataatggacatttttgaacatcag

SEQ ID NO: 27110 - DNA, 40 bp, Homo sapiens
tgatgttcaaaaatgtccattatgtaagtgaagctgggtc

SEQ ID NO: 27111 - DNA, 40 bp, Homo sapiens
gacccagcttcacttacataatggacatttttgaacatca

SEQ ID NO: 27112 - DNA, 40 bp, Homo sapiens
gatgttcaaaaatgtccattatgtaagtgaagctgggtca

SEQ ID NO: 27113 - DNA, 40 bp, Homo sapiens
tgacccagcttcacttacataatggacatttttgaacatc

SEQ ID NO: 27114 - DNA, 40 bp, Homo sapiens
atgttcaaaaatgtccattatgtaagtgaagctgggtcac

SEQ ID NO: 27115 - DNA, 40 bp, Homo sapiens
gtgacccagcttcacttacataatggacatttttgaacat

SEQ ID NO: 27116 - DNA, 40 bp, Homo sapiens
tgttcaaaaatgtccattatgtaagtgaagctgggtcaca

SEQ ID NO: 27117 - DNA, 40 bp, Homo sapiens
tgtgacccagcttcacttacataatggacatttttgaaca

SEQ ID NO: 27118 - DNA, 40 bp, Homo sapiens
gttcaaaaatgtccattatgtaagtgaagctgggtcacag

SEQ ID NO: 27119 - DNA, 40 bp, Homo sapiens
ctgtgacccagcttcacttacataatggacatttttgaac

SEQ ID NO: 27120 - DNA, 40 bp, Homo sapiens
ttcaaaaatgtccattatgtaagtgaagctgggtcacagc

SEQ ID NO: 27121 - DNA, 40 bp, Homo sapiens
gctgtgacccagcttcacttacataatggacatttttgaa

SEQ ID NO: 27122 - DNA, 40 bp, Homo sapiens
tcaaaaatgtccattatgtaagtgaagctgggtcacagca

SEQ ID NO: 27123 - DNA, 40 bp, Homo sapiens
tgctgtgacccagcttcacttacataatggacatttttga

SEQ ID NO: 27124 - DNA, 40 bp, Homo sapiens
caaaaatgtccattatgtaagtgaagctgggtcacagcac

SEQ ID NO: 27125 - DNA, 40 bp, Homo sapiens
gtgctgtgacccagcttcacttacataatggacatttttg

SEQ ID NO: 27126 - DNA, 40 bp, Homo sapiens
aaaaatgtccattatgtaagtgaagctgggtcacagcacc

SEQ ID NO: 27127 - DNA, 40 bp, Homo sapiens
ggtgctgtgacccagcttcacttacataatggacattttt

SEQ ID NO: 27128 - DNA, 40 bp, Homo sapiens
aaaatgtccattatgtaagtgaagctgggtcacagcacct

SEQ ID NO: 27129 - DNA, 40 bp, Homo sapiens
aggtgctgtgacccagcttcacttacataatggacatttt

SEQ ID NO: 27130 - DNA, 40 bp, Homo sapiens
aaatgtccattatgtaagtgaagctgggtcacagcacctt

SEQ ID NO: 27131 - DNA, 40 bp, Homo sapiens
aaggtgctgtgacccagcttcacttacataatggacattt

SEQ ID NO: 27132 - DNA, 40 bp, Homo sapiens
aatgtccattatgtaagtgaagctgggtcacagcaccttg

SEQ ID NO: 27133 - DNA, 40 bp, Homo sapiens
caaggtgctgtgacccagcttcacttacataatggacatt

SEQ ID NO: 27134 - DNA, 40 bp, Homo sapiens
atgtccattatgtaagtgaagctgggtcacagcaccttgt

SEQ ID NO: 27135 - DNA, 40 bp, Homo sapiens
acaaggtgctgtgacccagcttcacttacataatggacat

SEQ ID NO: 27136 - DNA, 40 bp, Homo sapiens
tgtccattatgtaagtgaagctgggtcacagcaccttgtg

SEQ ID NO: 27137 - DNA, 40 bp, Homo sapiens
cacaaggtgctgtgacccagcttcacttacataatggaca

SEQ ID NO: 27138 - DNA, 40 bp, Homo sapiens
gtccattatgtaagtgaagctgggtcacagcaccttgtgt

SEQ ID NO: 27139 - DNA, 40 bp, Homo sapiens
acacaaggtgctgtgacccagcttcacttacataatggac

SEQ ID NO: 27140 - DNA, 40 bp, Homo sapiens
tccattatgtaagtgaagctgggtcacagcaccttgtgtt

SEQ ID NO: 27141 - DNA, 40 bp, Homo sapiens
aacacaaggtgctgtgacccagcttcacttacataatgga

SEQ ID NO: 27142 - DNA, 40 bp, Homo sapiens
ccattatgtaagtgaagctgggtcacagcaccttgtgttg

SEQ ID NO: 27143 - DNA, 40 bp, Homo sapiens
caacacaaggtgctgtgacccagcttcacttacataatgg

SEQ ID NO: 27144 - DNA, 40 bp, Homo sapiens
cattatgtaagtgaagctgggtcacagcaccttgtgttga

SEQ ID NO: 27145 - DNA, 40 bp, Homo sapiens
tcaacacaaggtgctgtgacccagcttcacttacataatg

SEQ ID NO: 27146 - DNA, 40 bp, Homo sapiens
attatgtaagtgaagctgggtcacagcaccttgtgttgag

SEQ ID NO: 27147 - DNA, 40 bp, Homo sapiens
ctcaacacaaggtgctgtgacccagcttcacttacataat

SEQ ID NO: 27148 - DNA, 40 bp, Homo sapiens
ttatgtaagtgaagctgggtcacagcaccttgtgttgagt

SEQ ID NO: 27149 - DNA, 40 bp, Homo sapiens
actcaacacaaggtgctgtgacccagcttcacttacataa

SEQ ID NO: 27150 - DNA, 40 bp, Homo sapiens
tatgtaagtgaagctgggtcacagcaccttgtgttgagta

SEQ ID NO: 27151 - DNA, 40 bp, Homo sapiens
tactcaacacaaggtgctgtgacccagcttcacttacata

SEQ ID NO: 27152 - DNA, 40 bp, Homo sapiens
atgtaagtgaagctgggtcacagcaccttgtgttgagtat

SEQ ID NO: 27153 - DNA, 40 bp, Homo sapiens
atactcaacacaaggtgctgtgacccagcttcacttacat

SEQ ID NO: 27154 - DNA, 40 bp, Homo sapiens
tgtaagtgaagctgggtcacagcaccttgtgttgagtatg

SEQ ID NO: 27155 - DNA, 40 bp, Homo sapiens
catactcaacacaaggtgctgtgacccagcttcacttaca

SEQ ID NO: 27156 - DNA, 40 bp, Homo sapiens
gtaagtgaagctgggtcacagcaccttgtgttgagtatga

SEQ ID NO: 27157 - DNA, 40 bp, Homo sapiens
tcatactcaacacaaggtgctgtgacccagcttcacttac

SEQ ID NO: 27158 - DNA, 40 bp, Homo sapiens
taagtgaagctgggtcacagcaccttgtgttgagtatgat

SEQ ID NO: 27159 - DNA, 40 bp, Homo sapiens
atcatactcaacacaaggtgctgtgacccagcttcactta

SEQ ID NO: 27160 - DNA, 40 bp, Homo sapiens
aagtgaagctgggtcacagcaccttgtgttgagtatgatt

SEQ ID NO: 27161 - DNA, 40 bp, Homo sapiens
aatcatactcaacacaaggtgctgtgacccagcttcactt

SEQ ID NO: 27162 - DNA, 40 bp, Homo sapiens
agtgaagctgggtcacagcaccttgtgttgagtatgattt

SEQ ID NO: 27163 - DNA, 40 bp, Homo sapiens
aaatcatactcaacacaaggtgctgtgacccagcttcact

SEQ ID NO: 27164 - DNA, 40 bp, Homo sapiens
gtgaagctgggtcacagcaccttgtgttgagtatgatttc

SEQ ID NO: 27165 - DNA, 40 bp, Homo sapiens
gaaatcatactcaacacaaggtgctgtgacccagcttcac

SEQ ID NO: 27166 - DNA, 40 bp, Homo sapiens
tgaagctgggtcacagcaccttgtgttgagtatgatttca

SEQ ID NO: 27167 - DNA, 40 bp, Homo sapiens
tgaaatcatactcaacacaaggtgctgtgacccagcttca

SEQ ID NO: 27168 - DNA, 40 bp, Homo sapiens
gaagctgggtcacagcaccttgtgttgagtatgatttcat

SEQ ID NO: 27169 - DNA, 40 bp, Homo sapiens
atgaaatcatactcaacacaaggtgctgtgacccagcttc

SEQ ID NO: 27170 - DNA, 40 bp, Homo sapiens
aagctgggtcacagcaccttgtgttgagtatgatttcatc

SEQ ID NO: 27171 - DNA, 40 bp, Homo sapiens
gatgaaatcatactcaacacaaggtgctgtgacccagctt

SEQ ID NO: 27172 - DNA, 40 bp, Homo sapiens
agctgggtcacagcaccttgtgttgagtatgatttcatct

SEQ ID NO: 27173 - DNA, 40 bp, Homo sapiens
agatgaaatcatactcaacacaaggtgctgtgacccagct

SEQ ID NO: 27174 - DNA, 40 bp, Homo sapiens
gctgggtcacagcaccttgtgttgagtatgatttcatcta

SEQ ID NO: 27175 - DNA, 40 bp, Homo sapiens
tagatgaaatcatactcaacacaaggtgctgtgacccagc

SEQ ID NO: 27176 - DNA, 40 bp, Homo sapiens
ctgggtcacagcaccttgtgttgagtatgatttcatctag

SEQ ID NO: 27177 - DNA, 40 bp, Homo sapiens
ctagatgaaatcatactcaacacaaggtgctgtgacccag

SEQ ID NO: 27178 - DNA, 40 bp, Homo sapiens
tgggtcacagcaccttgtgttgagtatgatttcatctaga

SEQ ID NO: 27179 - DNA, 40 bp, Homo sapiens
tctagatgaaatcatactcaacacaaggtgctgtgaccca

SEQ ID NO: 27180 - DNA, 40 bp, Homo sapiens
gggtcacagcaccttgtgttgagtatgatttcatctagaa

SEQ ID NO: 27181 - DNA, 40 bp, Homo sapiens
ttctagatgaaatcatactcaacacaaggtgctgtgaccc

SEQ ID NO: 27182 - DNA, 40 bp, Homo sapiens
ggtcacagcaccttgtgttgagtatgatttcatctagaaa

SEQ ID NO: 27183 - DNA, 40 bp, Homo sapiens
tttctagatgaaatcatactcaacacaaggtgctgtgacc

SEQ ID NO: 27184 - DNA, 40 bp, Homo sapiens
gtcacagcaccttgtgttgagtatgatttcatctagaaac

SEQ ID NO: 27185 - DNA, 40 bp, Homo sapiens
gtttctagatgaaatcatactcaacacaaggtgctgtgac

SEQ ID NO: 27186 - DNA, 40 bp, Homo sapiens
tcacagcaccttgtgttgagtatgatttcatctagaaaca

SEQ ID NO: 27187 - DNA, 40 bp, Homo sapiens
tgtttctagatgaaatcatactcaacacaaggtgctgtga

SEQ ID NO: 27188 - DNA, 40 bp, Homo sapiens
cacagcaccttgtgttgagtatgatttcatctagaaacaa

SEQ ID NO: 27189 - DNA, 40 bp, Homo sapiens
ttgtttctagatgaaatcatactcaacacaaggtgctgtg

SEQ ID NO: 27190 - DNA, 40 bp, Homo sapiens
acagcaccttgtgttgagtatgatttcatctagaaacaaa

SEQ ID NO: 27191 - DNA, 40 bp, Homo sapiens
tttgtttctagatgaaatcatactcaacacaaggtgctgt

SEQ ID NO: 27192 - DNA, 40 bp, Homo sapiens
cagcaccttgtgttgagtatgatttcatctagaaacaaaa

SEQ ID NO: 27193 - DNA, 40 bp, Homo sapiens
ttttgtttctagatgaaatcatactcaacacaaggtgctg

SEQ ID NO: 27194 - DNA, 40 bp, Homo sapiens
agcaccttgtgttgagtatgatttcatctagaaacaaaat

SEQ ID NO: 27195 - DNA, 40 bp, Homo sapiens
attttgtttctagatgaaatcatactcaacacaaggtgct

SEQ ID NO: 27196 - DNA, 40 bp, Homo sapiens
gcaccttgtgttgagtatgatttcatctagaaacaaaatt

SEQ ID NO: 27197 - DNA, 40 bp, Homo sapiens
aattttgtttctagatgaaatcatactcaacacaaggtgc

SEQ ID NO: 27198 - DNA, 40 bp, Homo sapiens
caccttgtgttgagtatgatttcatctagaaacaaaatta

SEQ ID NO: 27199 - DNA, 40 bp, Homo sapiens
taattttgtttctagatgaaatcatactcaacacaaggtg

SEQ ID NO: 27200 - DNA, 40 bp, Homo sapiens
accttgtgttgagtatgatttcatctagaaacaaaattac

SEQ ID NO: 27201 - DNA, 40 bp, Homo sapiens
gtaattttgtttctagatgaaatcatactcaacacaaggt

SEQ ID NO: 27202 - DNA, 40 bp, Homo sapiens
ccttgtgttgagtatgatttcatctagaaacaaaattact

SEQ ID NO: 27203 - DNA, 40 bp, Homo sapiens
agtaattttgtttctagatgaaatcatactcaacacaagg

SEQ ID NO: 27204 - DNA, 40 bp, Homo sapiens
cttgtgttgagtatgatttcatctagaaacaaaattactc

SEQ ID NO: 27205 - DNA, 40 bp, Homo sapiens
gagtaattttgtttctagatgaaatcatactcaacacaag

SEQ ID NO: 27206 - DNA, 40 bp, Homo sapiens
ttgtgttgagtatgatttcatctagaaacaaaattactcc

SEQ ID NO: 27207 - DNA, 40 bp, Homo sapiens
ggagtaattttgtttctagatgaaatcatactcaacacaa

SEQ ID NO: 27208 - DNA, 40 bp, Homo sapiens
tgtgttgagtatgatttcatctagaaacaaaattactccc

SEQ ID NO: 27209 - DNA, 40 bp, Homo sapiens
gggagtaattttgtttctagatgaaatcatactcaacaca

SEQ ID NO: 27210 - DNA, 40 bp, Homo sapiens
gtgttgagtatgatttcatctagaaacaaaattactccct

SEQ ID NO: 27211 - DNA, 40 bp, Homo sapiens
agggagtaattttgtttctagatgaaatcatactcaacac

SEQ ID NO: 27212 - DNA, 40 bp, Homo sapiens
tgttgagtatgatttcatctagaaacaaaattactccctc

SEQ ID NO: 27213 - DNA, 40 bp, Homo sapiens
gagggagtaattttgtttctagatgaaatcatactcaaca

SEQ ID NO: 27214 - DNA, 40 bp, Homo sapiens
gttgagtatgatttcatctagaaacaaaattactccctca

SEQ ID NO: 27215 - DNA, 40 bp, Homo sapiens
tgagggagtaattttgtttctagatgaaatcatactcaac

SEQ ID NO: 27216 - DNA, 40 bp, Homo sapiens
ttgagtatgatttcatctagaaacaaaattactccctcat

SEQ ID NO: 27217 - DNA, 40 bp, Homo sapiens
atgagggagtaattttgtttctagatgaaatcatactcaa

SEQ ID NO: 27218 - DNA, 40 bp, Homo sapiens
tgagtatgatttcatctagaaacaaaattactccctcatc

SEQ ID NO: 27219 - DNA, 40 bp, Homo sapiens
gatgagggagtaattttgtttctagatgaaatcatactca

SEQ ID NO: 27220 - DNA, 40 bp, Homo sapiens
gagtatgatttcatctagaaacaaaattactccctcatcc

SEQ ID NO: 27221 - DNA, 40 bp, Homo sapiens
ggatgagggagtaattttgtttctagatgaaatcatactc

SEQ ID NO: 27222 - DNA, 40 bp, Homo sapiens
agtatgatttcatctagaaacaaaattactccctcatcct

SEQ ID NO: 27223 - DNA, 40 bp, Homo sapiens
aggatgagggagtaattttgtttctagatgaaatcatact

SEQ ID NO: 27224 - DNA, 40 bp, Homo sapiens
gtatgatttcatctagaaacaaaattactccctcatcctt

SEQ ID NO: 27225 - DNA, 40 bp, Homo sapiens
aaggatgagggagtaattttgtttctagatgaaatcatac

SEQ ID NO: 27226 - DNA, 40 bp, Homo sapiens
tatgatttcatctagaaacaaaattactccctcatccttt

SEQ ID NO: 27227 - DNA, 40 bp, Homo sapiens
aaaggatgagggagtaattttgtttctagatgaaatcata

SEQ ID NO: 27228 - DNA, 40 bp, Homo sapiens
atgatttcatctagaaacaaaattactccctcatcctttg

SEQ ID NO: 27229 - DNA, 40 bp, Homo sapiens
caaaggatgagggagtaattttgtttctagatgaaatcat

SEQ ID NO: 27230 - DNA, 40 bp, Homo sapiens
tgatttcatctagaaacaaaattactccctcatcctttgt

SEQ ID NO: 27231 - DNA, 40 bp, Homo sapiens
acaaaggatgagggagtaattttgtttctagatgaaatca

SEQ ID NO: 27232 - DNA, 40 bp, Homo sapiens
gatttcatctagaaacaaaattactccctcatcctttgtt

SEQ ID NO: 27233 - DNA, 40 bp, Homo sapiens
aacaaaggatgagggagtaattttgtttctagatgaaatc

SEQ ID NO: 27234 - DNA, 40 bp, Homo sapiens
atttcatctagaaacaaaattactccctcatcctttgttg

SEQ ID NO: 27235 - DNA, 40 bp, Homo sapiens
caacaaaggatgagggagtaattttgtttctagatgaaat

SEQ ID NO: 27236 - DNA, 40 bp, Homo sapiens
tttcatctagaaacaaaattactccctcatcctttgttgt

SEQ ID NO: 27237 - DNA, 40 bp, Homo sapiens
acaacaaaggatgagggagtaattttgtttctagatgaaa

SEQ ID NO: 27238 - DNA, 40 bp, Homo sapiens
ttcatctagaaacaaaattactccctcatcctttgttgtg

SEQ ID NO: 27239 - DNA, 40 bp, Homo sapiens
cacaacaaaggatgagggagtaattttgtttctagatgaa

SEQ ID NO: 27240 - DNA, 40 bp, Homo sapiens
tcatctagaaacaaaattactccctcatcctttgttgtgt

SEQ ID NO: 27241 - DNA, 40 bp, Homo sapiens
acacaacaaaggatgagggagtaattttgtttctagatga

SEQ ID NO: 27242 - DNA, 40 bp, Homo sapiens
catctagaaacaaaattactccctcatcctttgttgtgtt

SEQ ID NO: 27243 - DNA, 40 bp, Homo sapiens
aacacaacaaaggatgagggagtaattttgtttctagatg

SEQ ID NO: 27244 - DNA, 40 bp, Homo sapiens
atctagaaacaaaattactccctcatcctttgttgtgttt

SEQ ID NO: 27245 - DNA, 40 bp, Homo sapiens
aaacacaacaaaggatgagggagtaattttgtttctagat

SEQ ID NO: 27246 - DNA, 40 bp, Homo sapiens
tctagaaacaaaattactccctcatcctttgttgtgtttt

SEQ ID NO: 27247 - DNA, 40 bp, Homo sapiens
aaaacacaacaaaggatgagggagtaattttgtttctaga

SEQ ID NO: 27248 - DNA, 40 bp, Homo sapiens
ctagaaacaaaattactccctcatcctttgttgtgtttta

SEQ ID NO: 27249 - DNA, 40 bp, Homo sapiens
taaaacacaacaaaggatgagggagtaattttgtttctag

SEQ ID NO: 27250 - DNA, 40 bp, Homo sapiens
tagaaacaaaattactccctcatcctttgttgtgttttag

SEQ ID NO: 27251 - DNA, 40 bp, Homo sapiens
ctaaaacacaacaaaggatgagggagtaattttgtttcta

SEQ ID NO: 27252 - DNA, 40 bp, Homo sapiens
agaaacaaaattactccctcatcctttgttgtgttttagt

SEQ ID NO: 27253 - DNA, 40 bp, Homo sapiens
actaaaacacaacaaaggatgagggagtaattttgtttct

SEQ ID NO: 27254 - DNA, 40 bp, Homo sapiens
gaaacaaaattactccctcatcctttgttgtgttttagtt

SEQ ID NO: 27255 - DNA, 40 bp, Homo sapiens
aactaaaacacaacaaaggatgagggagtaattttgtttc

SEQ ID NO: 27256 - DNA, 40 bp, Homo sapiens
aaacaaaattactccctcatcctttgttgtgttttagttt

SEQ ID NO: 27257 - DNA, 40 bp, Homo sapiens
aaactaaaacacaacaaaggatgagggagtaattttgttt

SEQ ID NO: 27258 - DNA, 40 bp, Homo sapiens
aacaaaattactccctcatcctttgttgtgttttagtttt

SEQ ID NO: 27259 - DNA, 40 bp, Homo sapiens
aaaactaaaacacaacaaaggatgagggagtaattttgtt

SEQ ID NO: 27260 - DNA, 40 bp, Homo sapiens
acaaaattactccctcatcctttgttgtgttttagttttt

SEQ ID NO: 27261 - DNA, 40 bp, Homo sapiens
aaaaactaaaacacaacaaaggatgagggagtaattttgt

SEQ ID NO: 27262 - DNA, 40 bp, Homo sapiens
caaaattactccctcatcctttgttgtgttttagtttttt

SEQ ID NO: 27263 - DNA, 40 bp, Homo sapiens
aaaaaactaaaacacaacaaaggatgagggagtaattttg

SEQ ID NO: 27264 - DNA, 40 bp, Homo sapiens
aaaattactccctcatcctttgttgtgttttagtttttta

SEQ ID NO: 27265 - DNA, 40 bp, Homo sapiens
taaaaaactaaaacacaacaaaggatgagggagtaatttt

SEQ ID NO: 27266 - DNA, 40 bp, Homo sapiens
aaattactccctcatcctttgttgtgttttagttttttaa

SEQ ID NO: 27267 - DNA, 40 bp, Homo sapiens
ttaaaaaactaaaacacaacaaaggatgagggagtaattt

SEQ ID NO: 27268 - DNA, 40 bp, Homo sapiens
aattactccctcatcctttgttgtgttttagttttttaaa

SEQ ID NO: 27269 - DNA, 40 bp, Homo sapiens
tttaaaaaactaaaacacaacaaaggatgagggagtaatt

SEQ ID NO: 27270 - DNA, 40 bp, Homo sapiens
attactccctcatcctttgttgtgttttagttttttaaaa

SEQ ID NO: 27271 - DNA, 40 bp, Homo sapiens
ttttaaaaaactaaaacacaacaaaggatgagggagtaat

SEQ ID NO: 27272 - DNA, 40 bp, Homo sapiens
ttactccctcatcctttgttgtgttttagttttttaaaat

SEQ ID NO: 27273 - DNA, 40 bp, Homo sapiens
attttaaaaaactaaaacacaacaaaggatgagggagtaa

SEQ ID NO: 27274 - DNA, 40 bp, Homo sapiens
tactccctcatcctttgttgtgttttagttttttaaaata

SEQ ID NO: 27275 - DNA, 40 bp, Homo sapiens
tattttaaaaaactaaaacacaacaaaggatgagggagta

SEQ ID NO: 27276 - DNA, 40 bp, Homo sapiens
actccctcatcctttgttgtgttttagttttttaaaataa

SEQ ID NO: 27277 - DNA, 40 bp, Homo sapiens
ttattttaaaaaactaaaacacaacaaaggatgagggagt

SEQ ID NO: 27278 - DNA, 40 bp, Homo sapiens
ctccctcatcctttgttgtgttttagttttttaaaataag

SEQ ID NO: 27279 - DNA, 40 bp, Homo sapiens
cttattttaaaaaactaaaacacaacaaaggatgagggag

SEQ ID NO: 27280 - DNA, 40 bp, Homo sapiens
tccctcatcctttgttgtgttttagttttttaaaataagc

SEQ ID NO: 27281 - DNA, 40 bp, Homo sapiens
gcttattttaaaaaactaaaacacaacaaaggatgaggga

SEQ ID NO: 27282 - DNA, 40 bp, Homo sapiens
ccctcatcctttgttgtgttttagttttttaaaataagct

SEQ ID NO: 27283 - DNA, 40 bp, Homo sapiens
agcttattttaaaaaactaaaacacaacaaaggatgaggg

SEQ ID NO: 27284 - DNA, 40 bp, Homo sapiens
cctcatcctttgttgtgttttagttttttaaaataagctt

SEQ ID NO: 27285 - DNA, 40 bp, Homo sapiens
aagcttattttaaaaaactaaaacacaacaaaggatgagg

SEQ ID NO: 27286 - DNA, 40 bp, Homo sapiens
ctcatcctttgttgtgttttagttttttaaaataagctta

SEQ ID NO: 27287 - DNA, 40 bp, Homo sapiens
taagcttattttaaaaaactaaaacacaacaaaggatgag

SEQ ID NO: 27288 - DNA, 40 bp, Homo sapiens
tcatcctttgttgtgttttagttttttaaaataagcttat

SEQ ID NO: 27289 - DNA, 40 bp, Homo sapiens
ataagcttattttaaaaaactaaaacacaacaaaggatga

SEQ ID NO: 27290 - DNA, 40 bp, Homo sapiens
catcctttgttgtgttttagttttttaaaataagcttata

SEQ ID NO: 27291 - DNA, 40 bp, Homo sapiens
tataagcttattttaaaaaactaaaacacaacaaaggatg

SEQ ID NO: 27292 - DNA, 40 bp, Homo sapiens
atcctttgttgtgttttagttttttaaaataagcttatac

SEQ ID NO: 27293 - DNA, 40 bp, Homo sapiens
gtataagcttattttaaaaaactaaaacacaacaaaggat

SEQ ID NO: 27294 - DNA, 40 bp, Homo sapiens
tcctttgttgtgttttagttttttaaaataagcttatacc

SEQ ID NO: 27295 - DNA, 40 bp, Homo sapiens
ggtataagcttattttaaaaaactaaaacacaacaaagga

SEQ ID NO: 27296 - DNA, 40 bp, Homo sapiens
cctttgttgtgttttagttttttaaaataagcttatacca

SEQ ID NO: 27297 - DNA, 40 bp, Homo sapiens
tggtataagcttattttaaaaaactaaaacacaacaaagg

SEQ ID NO: 27298 - DNA, 40 bp, Homo sapiens
ctttgttgtgttttagttttttaaaataagcttataccat

SEQ ID NO: 27299 - DNA, 40 bp, Homo sapiens
atggtataagcttattttaaaaaactaaaacacaacaaag

SEQ ID NO: 27300 - DNA, 40 bp, Homo sapiens
tttgttgtgttttagttttttaaaataagcttataccatt

SEQ ID NO: 27301 - DNA, 40 bp, Homo sapiens
aatggtataagcttattttaaaaaactaaaacacaacaaa

SEQ ID NO: 27302 - DNA, 40 bp, Homo sapiens
ttgttgtgttttagttttttaaaataagcttataccattg

SEQ ID NO: 27303 - DNA, 40 bp, Homo sapiens
caatggtataagcttattttaaaaaactaaaacacaacaa

SEQ ID NO: 27304 - DNA, 40 bp, Homo sapiens
tgttgtgttttagttttttaaaataagcttataccattgg

SEQ ID NO: 27305 - DNA, 40 bp, Homo sapiens
ccaatggtataagcttattttaaaaaactaaaacacaaca

SEQ ID NO: 27306 - DNA, 40 bp, Homo sapiens
gttgtgttttagttttttaaaataagcttataccattggg

SEQ ID NO: 27307 - DNA, 40 bp, Homo sapiens
cccaatggtataagcttattttaaaaaactaaaacacaac

SEQ ID NO: 27308 - DNA, 40 bp, Homo sapiens
ttgtgttttagttttttaaaataagcttataccattgggc

SEQ ID NO: 27309 - DNA, 40 bp, Homo sapiens
gcccaatggtataagcttattttaaaaaactaaaacacaa

SEQ ID NO: 27310 - DNA, 40 bp, Homo sapiens
tgtgttttagttttttaaaataagcttataccattgggct

SEQ ID NO: 27311 - DNA, 40 bp, Homo sapiens
agcccaatggtataagcttattttaaaaaactaaaacaca

SEQ ID NO: 27312 - DNA, 40 bp, Homo sapiens
gtgttttagttttttaaaataagcttataccattgggctg

SEQ ID NO: 27313 - DNA, 40 bp, Homo sapiens
cagcccaatggtataagcttattttaaaaaactaaaacac

SEQ ID NO: 27314 - DNA, 40 bp, Homo sapiens
tgttttagttttttaaaataagcttataccattgggctgg

SEQ ID NO: 27315 - DNA, 40 bp, Homo sapiens
ccagcccaatggtataagcttattttaaaaaactaaaaca

SEQ ID NO: 27316 - DNA, 40 bp, Homo sapiens
gttttagttttttaaaataagcttataccattgggctggg

SEQ ID NO: 27317 - DNA, 40 bp, Homo sapiens
cccagcccaatggtataagcttattttaaaaaactaaaac

SEQ ID NO: 27318 - DNA, 40 bp, Homo sapiens
ttttagttttttaaaataagcttataccattgggctgggg

SEQ ID NO: 27319 - DNA, 40 bp, Homo sapiens
ccccagcccaatggtataagcttattttaaaaaactaaaa

SEQ ID NO: 27320 - DNA, 40 bp, Homo sapiens
tttagttttttaaaataagcttataccattgggctggggg

SEQ ID NO: 27321 - DNA, 40 bp, Homo sapiens
cccccagcccaatggtataagcttattttaaaaaactaaa

SEQ ID NO: 27322 - DNA, 40 bp, Homo sapiens
ttagttttttaaaataagcttataccattgggctggggga

SEQ ID NO: 27323 - DNA, 40 bp, Homo sapiens
tcccccagcccaatggtataagcttattttaaaaaactaa

SEQ ID NO: 27324 - DNA, 40 bp, Homo sapiens
tagttttttaaaataagcttataccattgggctgggggaa

SEQ ID NO: 27325 - DNA, 40 bp, Homo sapiens
ttcccccagcccaatggtataagcttattttaaaaaacta

SEQ ID NO: 27326 - DNA, 40 bp, Homo sapiens
agttttttaaaataagcttataccattgggctgggggaaa

SEQ ID NO: 27327 - DNA, 40 bp, Homo sapiens
tttcccccagcccaatggtataagcttattttaaaaaact

SEQ ID NO: 27328 - DNA, 40 bp, Homo sapiens
gttttttaaaataagcttataccattgggctgggggaaaa

SEQ ID NO: 27329 - DNA, 40 bp, Homo sapiens
ttttcccccagcccaatggtataagcttattttaaaaaac

SEQ ID NO: 27330 - DNA, 40 bp, Homo sapiens
ttttttaaaataagcttataccattgggctgggggaaaag

SEQ ID NO: 27331 - DNA, 40 bp, Homo sapiens
cttttcccccagcccaatggtataagcttattttaaaaaa

SEQ ID NO: 27332 - DNA, 40 bp, Homo sapiens
tttttaaaataagcttataccattgggctgggggaaaagt

SEQ ID NO: 27333 - DNA, 40 bp, Homo sapiens
acttttcccccagcccaatggtataagcttattttaaaaa

SEQ ID NO: 27334 - DNA, 40 bp, Homo sapiens
ttttaaaataagcttataccattgggctgggggaaaagta

SEQ ID NO: 27335 - DNA, 40 bp, Homo sapiens
tacttttcccccagcccaatggtataagcttattttaaaa

SEQ ID NO: 27336 - DNA, 40 bp, Homo sapiens
tttaaaataagcttataccattgggctgggggaaaagtaa

SEQ ID NO: 27337 - DNA, 40 bp, Homo sapiens
ttacttttcccccagcccaatggtataagcttattttaaa

SEQ ID NO: 27338 - DNA, 40 bp, Homo sapiens
ttaaaataagcttataccattgggctgggggaaaagtaaa

SEQ ID NO: 27339 - DNA, 40 bp, Homo sapiens
tttacttttcccccagcccaatggtataagcttattttaa

SEQ ID NO: 27340 - DNA, 40 bp, Homo sapiens
taaaataagcttataccattgggctgggggaaaagtaaat

SEQ ID NO: 27341 - DNA, 40 bp, Homo sapiens
atttacttttcccccagcccaatggtataagcttatttta

SEQ ID NO: 27342 - DNA, 40 bp, Homo sapiens
aaaataagcttataccattgggctgggggaaaagtaaata

SEQ ID NO: 27343 - DNA, 40 bp, Homo sapiens
tatttacttttcccccagcccaatggtataagcttatttt

SEQ ID NO: 27344 - DNA, 40 bp, Homo sapiens
aaataagcttataccattgggctgggggaaaagtaaatac

SEQ ID NO: 27345 - DNA, 40 bp, Homo sapiens
gtatttacttttcccccagcccaatggtataagcttattt

SEQ ID NO: 27346 - DNA, 40 bp, Homo sapiens
aataagcttataccattgggctgggggaaaagtaaatact

SEQ ID NO: 27347 - DNA, 40 bp, Homo sapiens
agtatttacttttcccccagcccaatggtataagcttatt

SEQ ID NO: 27348 - DNA, 40 bp, Homo sapiens
ataagcttataccattgggctgggggaaaagtaaatactc

SEQ ID NO: 27349 - DNA, 40 bp, Homo sapiens
gagtatttacttttcccccagcccaatggtataagcttat

SEQ ID NO: 27350 - DNA, 40 bp, Homo sapiens
taagcttataccattgggctgggggaaaagtaaatactcg

SEQ ID NO: 27351 - DNA, 40 bp, Homo sapiens
cgagtatttacttttcccccagcccaatggtataagctta

SEQ ID NO: 27352 - DNA, 40 bp, Homo sapiens
aagcttataccattgggctgggggaaaagtaaatactcgt

SEQ ID NO: 27353 - DNA, 40 bp, Homo sapiens
acgagtatttacttttcccccagcccaatggtataagctt

SEQ ID NO: 27354 - DNA, 40 bp, Homo sapiens
agcttataccattgggctgggggaaaagtaaatactcgtt

SEQ ID NO: 27355 - DNA, 40 bp, Homo sapiens
aacgagtatttacttttcccccagcccaatggtataagct

SEQ ID NO: 27356 - DNA, 40 bp, Homo sapiens
gcttataccattgggctgggggaaaagtaaatactcgttt

SEQ ID NO: 27357 - DNA, 40 bp, Homo sapiens
aaacgagtatttacttttcccccagcccaatggtataagc

SEQ ID NO: 27358 - DNA, 40 bp, Homo sapiens
cttataccattgggctgggggaaaagtaaatactcgtttt

SEQ ID NO: 27359 - DNA, 40 bp, Homo sapiens
aaaacgagtatttacttttcccccagcccaatggtataag

SEQ ID NO: 27360 - DNA, 40 bp, Homo sapiens
ttataccattgggctgggggaaaagtaaatactcgttttg

SEQ ID NO: 27361 - DNA, 40 bp, Homo sapiens
caaaacgagtatttacttttcccccagcccaatggtataa

SEQ ID NO: 27362 - DNA, 40 bp, Homo sapiens
tataccattgggctgggggaaaagtaaatactcgttttgg

SEQ ID NO: 27363 - DNA, 40 bp, Homo sapiens
ccaaaacgagtatttacttttcccccagcccaatggtata

SEQ ID NO: 27364 - DNA, 40 bp, Homo sapiens
ataccattgggctgggggaaaagtaaatactcgttttgga

SEQ ID NO: 27365 - DNA, 40 bp, Homo sapiens
tccaaaacgagtatttacttttcccccagcccaatggtat

SEQ ID NO: 27366 - DNA, 40 bp, Homo sapiens
taccattgggctgggggaaaagtaaatactcgttttggag

SEQ ID NO: 27367 - DNA, 40 bp, Homo sapiens
ctccaaaacgagtatttacttttcccccagcccaatggta

SEQ ID NO: 27368 - DNA, 40 bp, Homo sapiens
accattgggctgggggaaaagtaaatactcgttttggaga

SEQ ID NO: 27369 - DNA, 40 bp, Homo sapiens
tctccaaaacgagtatttacttttcccccagcccaatggt

SEQ ID NO: 27370 - DNA, 40 bp, Homo sapiens
ccattgggctgggggaaaagtaaatactcgttttggagag

SEQ ID NO: 27371 - DNA, 40 bp, Homo sapiens
ctctccaaaacgagtatttacttttcccccagcccaatgg

SEQ ID NO: 27372 - DNA, 40 bp, Homo sapiens
cattgggctgggggaaaagtaaatactcgttttggagaga

SEQ ID NO: 27373 - DNA, 40 bp, Homo sapiens
tctctccaaaacgagtatttacttttcccccagcccaatg

SEQ ID NO: 27374 - DNA, 40 bp, Homo sapiens
attgggctgggggaaaagtaaatactcgttttggagagag

SEQ ID NO: 27375 - DNA, 40 bp, Homo sapiens
ctctctccaaaacgagtatttacttttcccccagcccaat

SEQ ID NO: 27376 - DNA, 40 bp, Homo sapiens
ttgggctgggggaaaagtaaatactcgttttggagagaga

SEQ ID NO: 27377 - DNA, 40 bp, Homo sapiens
tctctctccaaaacgagtatttacttttcccccagcccaa

SEQ ID NO: 27378 - DNA, 40 bp, Homo sapiens
tgggctgggggaaaagtaaatactcgttttggagagagaa

SEQ ID NO: 27379 - DNA, 40 bp, Homo sapiens
ttctctctccaaaacgagtatttacttttcccccagccca

SEQ ID NO: 27380 - DNA, 40 bp, Homo sapiens
gggctgggggaaaagtaaatactcgttttggagagagaaa

SEQ ID NO: 27381 - DNA, 40 bp, Homo sapiens
tttctctctccaaaacgagtatttacttttcccccagccc

SEQ ID NO: 27382 - DNA, 40 bp, Homo sapiens
ggctgggggaaaagtaaatactcgttttggagagagaaaa

SEQ ID NO: 27383 - DNA, 40 bp, Homo sapiens
ttttctctctccaaaacgagtatttacttttcccccagcc

SEQ ID NO: 27384 - DNA, 40 bp, Homo sapiens
gctgggggaaaagtaaatactcgttttggagagagaaaag

SEQ ID NO: 27385 - DNA, 40 bp, Homo sapiens
cttttctctctccaaaacgagtatttacttttcccccagc

SEQ ID NO: 27386 - DNA, 40 bp, Homo sapiens
ctgggggaaaagtaaatactcgttttggagagagaaaagg

SEQ ID NO: 27387 - DNA, 40 bp, Homo sapiens
ccttttctctctccaaaacgagtatttacttttcccccag

SEQ ID NO: 27388 - DNA, 40 bp, Homo sapiens
tgggggaaaagtaaatactcgttttggagagagaaaaggg

SEQ ID NO: 27389 - DNA, 40 bp, Homo sapiens
cccttttctctctccaaaacgagtatttacttttccccca

SEQ ID NO: 27390 - DNA, 40 bp, Homo sapiens
gggggaaaagtaaatactcgttttggagagagaaaagggc

SEQ ID NO: 27391 - DNA, 40 bp, Homo sapiens
gcccttttctctctccaaaacgagtatttacttttccccc

SEQ ID NO: 27392 - DNA, 40 bp, Homo sapiens
ggggaaaagtaaatactcgttttggagagagaaaagggca

SEQ ID NO: 27393 - DNA, 40 bp, Homo sapiens
tgcccttttctctctccaaaacgagtatttacttttcccc

SEQ ID NO: 27394 - DNA, 40 bp, Homo sapiens
gggaaaagtaaatactcgttttggagagagaaaagggcac

SEQ ID NO: 27395 - DNA, 40 bp, Homo sapiens
gtgcccttttctctctccaaaacgagtatttacttttccc

SEQ ID NO: 27396 - DNA, 40 bp, Homo sapiens
ggaaaagtaaatactcgttttggagagagaaaagggcact

SEQ ID NO: 27397 - DNA, 40 bp, Homo sapiens
agtgcccttttctctctccaaaacgagtatttacttttcc

SEQ ID NO: 27398 - DNA, 40 bp, Homo sapiens
gaaaagtaaatactcgttttggagagagaaaagggcacta

SEQ ID NO: 27399 - DNA, 40 bp, Homo sapiens
tagtgcccttttctctctccaaaacgagtatttacttttc

SEQ ID NO: 27400 - DNA, 40 bp, Homo sapiens
aaaagtaaatactcgttttggagagagaaaagggcactaa

SEQ ID NO: 27401 - DNA, 40 bp, Homo sapiens
ttagtgcccttttctctctccaaaacgagtatttactttt

SEQ ID NO: 27402 - DNA, 40 bp, Homo sapiens
aaagtaaatactcgttttggagagagaaaagggcactaaa

SEQ ID NO: 27403 - DNA, 40 bp, Homo sapiens
tttagtgcccttttctctctccaaaacgagtatttacttt

SEQ ID NO: 27404 - DNA, 40 bp, Homo sapiens
aagtaaatactcgttttggagagagaaaagggcactaaag

SEQ ID NO: 27405 - DNA, 40 bp, Homo sapiens
ctttagtgcccttttctctctccaaaacgagtatttactt

SEQ ID NO: 27406 - DNA, 40 bp, Homo sapiens
agtaaatactcgttttggagagagaaaagggcactaaagt

SEQ ID NO: 27407 - DNA, 40 bp, Homo sapiens
actttagtgcccttttctctctccaaaacgagtatttact

SEQ ID NO: 27408 - DNA, 40 bp, Homo sapiens
gtaaatactcgttttggagagagaaaagggcactaaagtt

SEQ ID NO: 27409 - DNA, 40 bp, Homo sapiens
aactttagtgcccttttctctctccaaaacgagtatttac

SEQ ID NO: 27410 - DNA, 40 bp, Homo sapiens
taaatactcgttttggagagagaaaagggcactaaagttt

SEQ ID NO: 27411 - DNA, 40 bp, Homo sapiens
aaactttagtgcccttttctctctccaaaacgagtattta

SEQ ID NO: 27412 - DNA, 40 bp, Homo sapiens
aaatactcgttttggagagagaaaagggcactaaagtttc

SEQ ID NO: 27413 - DNA, 40 bp, Homo sapiens
gaaactttagtgcccttttctctctccaaaacgagtattt

SEQ ID NO: 27414 - DNA, 40 bp, Homo sapiens
aatactcgttttggagagagaaaagggcactaaagtttca

SEQ ID NO: 27415 - DNA, 40 bp, Homo sapiens
tgaaactttagtgcccttttctctctccaaaacgagtatt

SEQ ID NO: 27416 - DNA, 40 bp, Homo sapiens
atactcgttttggagagagaaaagggcactaaagtttcag

SEQ ID NO: 27417 - DNA, 40 bp, Homo sapiens
ctgaaactttagtgcccttttctctctccaaaacgagtat

SEQ ID NO: 27418 - DNA, 40 bp, Homo sapiens
tactcgttttggagagagaaaagggcactaaagtttcaga

SEQ ID NO: 27419 - DNA, 40 bp, Homo sapiens
tctgaaactttagtgcccttttctctctccaaaacgagta

SEQ ID NO: 27420 - DNA, 40 bp, Homo sapiens
actcgttttggagagagaaaagggcactaaagtttcagat

SEQ ID NO: 27421 - DNA, 40 bp, Homo sapiens
atctgaaactttagtgcccttttctctctccaaaacgagt

SEQ ID NO: 27422 - DNA, 40 bp, Homo sapiens
ctcgttttggagagagaaaagggcactaaagtttcagata

SEQ ID NO: 27423 - DNA, 40 bp, Homo sapiens
tatctgaaactttagtgcccttttctctctccaaaacgag

SEQ ID NO: 27424 - DNA, 40 bp, Homo sapiens
tcgttttggagagagaaaagggcactaaagtttcagatac

SEQ ID NO: 27425 - DNA, 40 bp, Homo sapiens
gtatctgaaactttagtgcccttttctctctccaaaacga

SEQ ID NO: 27426 - DNA, 40 bp, Homo sapiens
cgttttggagagagaaaagggcactaaagtttcagatacc

SEQ ID NO: 27427 - DNA, 40 bp, Homo sapiens
ggtatctgaaactttagtgcccttttctctctccaaaacg

SEQ ID NO: 27428 - DNA, 40 bp, Homo sapiens
gttttggagagagaaaagggcactaaagtttcagataccg

SEQ ID NO: 27429 - DNA, 40 bp, Homo sapiens
cggtatctgaaactttagtgcccttttctctctccaaaac

SEQ ID NO: 27430 - DNA, 40 bp, Homo sapiens
ttttggagagagaaaagggcactaaagtttcagataccgt

SEQ ID NO: 27431 - DNA, 40 bp, Homo sapiens
acggtatctgaaactttagtgcccttttctctctccaaaa

SEQ ID NO: 27432 - DNA, 40 bp, Homo sapiens
tttggagagagaaaagggcactaaagtttcagataccgtt

SEQ ID NO: 27433 - DNA, 40 bp, Homo sapiens
aacggtatctgaaactttagtgcccttttctctctccaaa

SEQ ID NO: 27434 - DNA, 40 bp, Homo sapiens
ttggagagagaaaagggcactaaagtttcagataccgtta

SEQ ID NO: 27435 - DNA, 40 bp, Homo sapiens
taacggtatctgaaactttagtgcccttttctctctccaa

SEQ ID NO: 27436 - DNA, 40 bp, Homo sapiens
tggagagagaaaagggcactaaagtttcagataccgttag

SEQ ID NO: 27437 - DNA, 40 bp, Homo sapiens
ctaacggtatctgaaactttagtgcccttttctctctcca

SEQ ID NO: 27438 - DNA, 40 bp, Homo sapiens
ggagagagaaaagggcactaaagtttcagataccgttaga

SEQ ID NO: 27439 - DNA, 40 bp, Homo sapiens
tctaacggtatctgaaactttagtgcccttttctctctcc

SEQ ID NO: 27440 - DNA, 40 bp, Homo sapiens
gagagagaaaagggcactaaagtttcagataccgttagat

SEQ ID NO: 27441 - DNA, 40 bp, Homo sapiens
atctaacggtatctgaaactttagtgcccttttctctctc

SEQ ID NO: 27442 - DNA, 40 bp, Homo sapiens
agagagaaaagggcactaaagtttcagataccgttagatt

SEQ ID NO: 27443 - DNA, 40 bp, Homo sapiens
aatctaacggtatctgaaactttagtgcccttttctctct

SEQ ID NO: 27444 - DNA, 40 bp, Homo sapiens
gagagaaaagggcactaaagtttcagataccgttagatta

SEQ ID NO: 27445 - DNA, 40 bp, Homo sapiens
taatctaacggtatctgaaactttagtgcccttttctctc

SEQ ID NO: 27446 - DNA, 40 bp, Homo sapiens
agagaaaagggcactaaagtttcagataccgttagattat

SEQ ID NO: 27447 - DNA, 40 bp, Homo sapiens
ataatctaacggtatctgaaactttagtgcccttttctct

SEQ ID NO: 27448 - DNA, 40 bp, Homo sapiens
gagaaaagggcactaaagtttcagataccgttagattatt

SEQ ID NO: 27449 - DNA, 40 bp, Homo sapiens
aataatctaacggtatctgaaactttagtgcccttttctc

SEQ ID NO: 27450 - DNA, 40 bp, Homo sapiens
agaaaagggcactaaagtttcagataccgttagattattt

SEQ ID NO: 27451 - DNA, 40 bp, Homo sapiens
aaataatctaacggtatctgaaactttagtgcccttttct

SEQ ID NO: 27452 - DNA, 40 bp, Homo sapiens
gaaaagggcactaaagtttcagataccgttagattatttc

SEQ ID NO: 27453 - DNA, 40 bp, Homo sapiens
gaaataatctaacggtatctgaaactttagtgcccttttc

SEQ ID NO: 27454 - DNA, 40 bp, Homo sapiens
aaaagggcactaaagtttcagataccgttagattatttca

SEQ ID NO: 27455 - DNA, 40 bp, Homo sapiens
tgaaataatctaacggtatctgaaactttagtgccctttt

SEQ ID NO: 27456 - DNA, 40 bp, Homo sapiens
aaagggcactaaagtttcagataccgttagattatttcat

SEQ ID NO: 27457 - DNA, 40 bp, Homo sapiens
atgaaataatctaacggtatctgaaactttagtgcccttt

SEQ ID NO: 27458 - DNA, 40 bp, Homo sapiens
aagggcactaaagtttcagataccgttagattatttcatg

SEQ ID NO: 27459 - DNA, 40 bp, Homo sapiens
catgaaataatctaacggtatctgaaactttagtgccctt

SEQ ID NO: 27460 - DNA, 40 bp, Homo sapiens
agggcactaaagtttcagataccgttagattatttcatgc

SEQ ID NO: 27461 - DNA, 40 bp, Homo sapiens
gcatgaaataatctaacggtatctgaaactttagtgccct

SEQ ID NO: 27462 - DNA, 40 bp, Homo sapiens
gggcactaaagtttcagataccgttagattatttcatgct

SEQ ID NO: 27463 - DNA, 40 bp, Homo sapiens
agcatgaaataatctaacggtatctgaaactttagtgccc

SEQ ID NO: 27464 - DNA, 40 bp, Homo sapiens
ggcactaaagtttcagataccgttagattatttcatgctt

SEQ ID NO: 27465 - DNA, 40 bp, Homo sapiens
aagcatgaaataatctaacggtatctgaaactttagtgcc

SEQ ID NO: 27466 - DNA, 40 bp, Homo sapiens
gcactaaagtttcagataccgttagattatttcatgctta

SEQ ID NO: 27467 - DNA, 40 bp, Homo sapiens
taagcatgaaataatctaacggtatctgaaactttagtgc

SEQ ID NO: 27468 - DNA, 40 bp, Homo sapiens
cactaaagtttcagataccgttagattatttcatgcttat

SEQ ID NO: 27469 - DNA, 40 bp, Homo sapiens
ataagcatgaaataatctaacggtatctgaaactttagtg

SEQ ID NO: 27470 - DNA, 40 bp, Homo sapiens
actaaagtttcagataccgttagattatttcatgcttatt

SEQ ID NO: 27471 - DNA, 40 bp, Homo sapiens
aataagcatgaaataatctaacggtatctgaaactttagt

SEQ ID NO: 27472 - DNA, 40 bp, Homo sapiens
ctaaagtttcagataccgttagattatttcatgcttattt

SEQ ID NO: 27473 - DNA, 40 bp, Homo sapiens
aaataagcatgaaataatctaacggtatctgaaactttag

SEQ ID NO: 27474 - DNA, 40 bp, Homo sapiens
taaagtttcagataccgttagattatttcatgcttatttt

SEQ ID NO: 27475 - DNA, 40 bp, Homo sapiens
aaaataagcatgaaataatctaacggtatctgaaacttta

SEQ ID NO: 27476 - DNA, 40 bp, Homo sapiens
aaagtttcagataccgttagattatttcatgcttattttt

SEQ ID NO: 27477 - DNA, 40 bp, Homo sapiens
aaaaataagcatgaaataatctaacggtatctgaaacttt

SEQ ID NO: 27478 - DNA, 40 bp, Homo sapiens
aagtttcagataccgttagattatttcatgcttatttttc

SEQ ID NO: 27479 - DNA, 40 bp, Homo sapiens
gaaaaataagcatgaaataatctaacggtatctgaaactt

SEQ ID NO: 27480 - DNA, 40 bp, Homo sapiens
agtttcagataccgttagattatttcatgcttatttttca

SEQ ID NO: 27481 - DNA, 40 bp, Homo sapiens
tgaaaaataagcatgaaataatctaacggtatctgaaact

SEQ ID NO: 27482 - DNA, 40 bp, Homo sapiens
gtttcagataccgttagattatttcatgcttatttttcaa

SEQ ID NO: 27483 - DNA, 40 bp, Homo sapiens
ttgaaaaataagcatgaaataatctaacggtatctgaaac

SEQ ID NO: 27484 - DNA, 40 bp, Homo sapiens
tttcagataccgttagattatttcatgcttatttttcaag

SEQ ID NO: 27485 - DNA, 40 bp, Homo sapiens
cttgaaaaataagcatgaaataatctaacggtatctgaaa

SEQ ID NO: 27486 - DNA, 40 bp, Homo sapiens
ttcagataccgttagattatttcatgcttatttttcaagc

SEQ ID NO: 27487 - DNA, 40 bp, Homo sapiens
gcttgaaaaataagcatgaaataatctaacggtatctgaa

SEQ ID NO: 27488 - DNA, 40 bp, Homo sapiens
tcagataccgttagattatttcatgcttatttttcaagcc

SEQ ID NO: 27489 - DNA, 40 bp, Homo sapiens
ggcttgaaaaataagcatgaaataatctaacggtatctga

SEQ ID NO: 27490 - DNA, 40 bp, Homo sapiens
cagataccgttagattatttcatgcttatttttcaagcct

SEQ ID NO: 27491 - DNA, 40 bp, Homo sapiens
aggcttgaaaaataagcatgaaataatctaacggtatctg

SEQ ID NO: 27492 - DNA, 40 bp, Homo sapiens
agataccgttagattatttcatgcttatttttcaagcctc

SEQ ID NO: 27493 - DNA, 40 bp, Homo sapiens
gaggcttgaaaaataagcatgaaataatctaacggtatct

SEQ ID NO: 27494 - DNA, 40 bp, Homo sapiens
gataccgttagattatttcatgcttatttttcaagcctca

SEQ ID NO: 27495 - DNA, 40 bp, Homo sapiens
tgaggcttgaaaaataagcatgaaataatctaacggtatc

SEQ ID NO: 27496 - DNA, 40 bp, Homo sapiens
ataccgttagattatttcatgcttatttttcaagcctcaa

SEQ ID NO: 27497 - DNA, 40 bp, Homo sapiens
ttgaggcttgaaaaataagcatgaaataatctaacggtat

SEQ ID NO: 27498 - DNA, 40 bp, Homo sapiens
taccgttagattatttcatgcttatttttcaagcctcaat

SEQ ID NO: 27499 - DNA, 40 bp, Homo sapiens
attgaggcttgaaaaataagcatgaaataatctaacggta

SEQ ID NO: 27500 - DNA, 40 bp, Homo sapiens
accgttagattatttcatgcttatttttcaagcctcaata

SEQ ID NO: 27501 - DNA, 40 bp, Homo sapiens
tattgaggcttgaaaaataagcatgaaataatctaacggt

SEQ ID NO: 27502 - DNA, 40 bp, Homo sapiens
ccgttagattatttcatgcttatttttcaagcctcaataa

SEQ ID NO: 27503 - DNA, 40 bp, Homo sapiens
ttattgaggcttgaaaaataagcatgaaataatctaacgg

SEQ ID NO: 27504 - DNA, 40 bp, Homo sapiens
cgttagattatttcatgcttatttttcaagcctcaataaa

SEQ ID NO: 27505 - DNA, 40 bp, Homo sapiens
tttattgaggcttgaaaaataagcatgaaataatctaacg

SEQ ID NO: 27506 - DNA, 40 bp, Homo sapiens
gttagattatttcatgcttatttttcaagcctcaataaat

SEQ ID NO: 27507 - DNA, 40 bp, Homo sapiens
atttattgaggcttgaaaaataagcatgaaataatctaac

SEQ ID NO: 27508 - DNA, 40 bp, Homo sapiens
ttagattatttcatgcttatttttcaagcctcaataaatt

SEQ ID NO: 27509 - DNA, 40 bp, Homo sapiens
aatttattgaggcttgaaaaataagcatgaaataatctaa

SEQ ID NO: 27510 - DNA, 40 bp, Homo sapiens
tagattatttcatgcttatttttcaagcctcaataaatta

SEQ ID NO: 27511 - DNA, 40 bp, Homo sapiens
taatttattgaggcttgaaaaataagcatgaaataatcta

SEQ ID NO: 27512 - DNA, 40 bp, Homo sapiens
agattatttcatgcttatttttcaagcctcaataaattac

SEQ ID NO: 27513 - DNA, 40 bp, Homo sapiens
gtaatttattgaggcttgaaaaataagcatgaaataatct

SEQ ID NO: 27514 - DNA, 40 bp, Homo sapiens
gattatttcatgcttatttttcaagcctcaataaattaca

SEQ ID NO: 27515 - DNA, 40 bp, Homo sapiens
tgtaatttattgaggcttgaaaaataagcatgaaataatc

SEQ ID NO: 27516 - DNA, 40 bp, Homo sapiens
attatttcatgcttatttttcaagcctcaataaattacat

SEQ ID NO: 27517 - DNA, 40 bp, Homo sapiens
atgtaatttattgaggcttgaaaaataagcatgaaataat

SEQ ID NO: 27518 - DNA, 40 bp, Homo sapiens
ttatttcatgcttatttttcaagcctcaataaattacata

SEQ ID NO: 27519 - DNA, 40 bp, Homo sapiens
tatgtaatttattgaggcttgaaaaataagcatgaaataa

SEQ ID NO: 27520 - DNA, 40 bp, Homo sapiens
tatttcatgcttatttttcaagcctcaataaattacataa

SEQ ID NO: 27521 - DNA, 40 bp, Homo sapiens
ttatgtaatttattgaggcttgaaaaataagcatgaaata

SEQ ID NO: 27522 - DNA, 40 bp, Homo sapiens
atttcatgcttatttttcaagcctcaataaattacataat

SEQ ID NO: 27523 - DNA, 40 bp, Homo sapiens
attatgtaatttattgaggcttgaaaaataagcatgaaat

SEQ ID NO: 27524 - DNA, 40 bp, Homo sapiens
tttcatgcttatttttcaagcctcaataaattacataatt

SEQ ID NO: 27525 - DNA, 40 bp, Homo sapiens
aattatgtaatttattgaggcttgaaaaataagcatgaaa

SEQ ID NO: 27526 - DNA, 40 bp, Homo sapiens
ttcatgcttatttttcaagcctcaataaattacataattc

SEQ ID NO: 27527 - DNA, 40 bp, Homo sapiens
gaattatgtaatttattgaggcttgaaaaataagcatgaa

SEQ ID NO: 27528 - DNA, 40 bp, Homo sapiens
tcatgcttatttttcaagcctcaataaattacataattca

SEQ ID NO: 27529 - DNA, 40 bp, Homo sapiens
tgaattatgtaatttattgaggcttgaaaaataagcatga

SEQ ID NO: 27530 - DNA, 40 bp, Homo sapiens
catgcttatttttcaagcctcaataaattacataattcac

SEQ ID NO: 27531 - DNA, 40 bp, Homo sapiens
gtgaattatgtaatttattgaggcttgaaaaataagcatg

SEQ ID NO: 27532 - DNA, 40 bp, Homo sapiens
atgcttatttttcaagcctcaataaattacataattcaca

SEQ ID NO: 27533 - DNA, 40 bp, Homo sapiens
tgtgaattatgtaatttattgaggcttgaaaaataagcat

SEQ ID NO: 27534 - DNA, 40 bp, Homo sapiens
tgcttatttttcaagcctcaataaattacataattcacat

SEQ ID NO: 27535 - DNA, 40 bp, Homo sapiens
atgtgaattatgtaatttattgaggcttgaaaaataagca

SEQ ID NO: 27536 - DNA, 40 bp, Homo sapiens
gcttatttttcaagcctcaataaattacataattcacatg

SEQ ID NO: 27537 - DNA, 40 bp, Homo sapiens
catgtgaattatgtaatttattgaggcttgaaaaataagc

SEQ ID NO: 27538 - DNA, 40 bp, Homo sapiens
cttatttttcaagcctcaataaattacataattcacatgt

SEQ ID NO: 27539 - DNA, 40 bp, Homo sapiens
acatgtgaattatgtaatttattgaggcttgaaaaataag

SEQ ID NO: 27540 - DNA, 40 bp, Homo sapiens
ttatttttcaagcctcaataaattacataattcacatgta

SEQ ID NO: 27541 - DNA, 40 bp, Homo sapiens
tacatgtgaattatgtaatttattgaggcttgaaaaataa

SEQ ID NO: 27542 - DNA, 40 bp, Homo sapiens
tatttttcaagcctcaataaattacataattcacatgtag

SEQ ID NO: 27543 - DNA, 40 bp, Homo sapiens
ctacatgtgaattatgtaatttattgaggcttgaaaaata

SEQ ID NO: 27544 - DNA, 40 bp, Homo sapiens
atttttcaagcctcaataaattacataattcacatgtagt

SEQ ID NO: 27545 - DNA, 40 bp, Homo sapiens
actacatgtgaattatgtaatttattgaggcttgaaaaat

SEQ ID NO: 27546 - DNA, 40 bp, Homo sapiens
tttttcaagcctcaataaattacataattcacatgtagtc

SEQ ID NO: 27547 - DNA, 40 bp, Homo sapiens
gactacatgtgaattatgtaatttattgaggcttgaaaaa

SEQ ID NO: 27548 - DNA, 40 bp, Homo sapiens
ttttcaagcctcaataaattacataattcacatgtagtct

SEQ ID NO: 27549 - DNA, 40 bp, Homo sapiens
agactacatgtgaattatgtaatttattgaggcttgaaaa

SEQ ID NO: 27550 - DNA, 40 bp, Homo sapiens
tttcaagcctcaataaattacataattcacatgtagtctt

SEQ ID NO: 27551 - DNA, 40 bp, Homo sapiens
aagactacatgtgaattatgtaatttattgaggcttgaaa

SEQ ID NO: 27552 - DNA, 40 bp, Homo sapiens
ttcaagcctcaataaattacataattcacatgtagtcttg

SEQ ID NO: 27553 - DNA, 40 bp, Homo sapiens
caagactacatgtgaattatgtaatttattgaggcttgaa

SEQ ID NO: 27554 - DNA, 40 bp, Homo sapiens
tcaagcctcaataaattacataattcacatgtagtcttgg

SEQ ID NO: 27555 - DNA, 40 bp, Homo sapiens
ccaagactacatgtgaattatgtaatttattgaggcttga

SEQ ID NO: 27556 - DNA, 40 bp, Homo sapiens
caagcctcaataaattacataattcacatgtagtcttgga

SEQ ID NO: 27557 - DNA, 40 bp, Homo sapiens
tccaagactacatgtgaattatgtaatttattgaggcttg

SEQ ID NO: 27558 - DNA, 40 bp, Homo sapiens
aagcctcaataaattacataattcacatgtagtcttggat

SEQ ID NO: 27559 - DNA, 40 bp, Homo sapiens
atccaagactacatgtgaattatgtaatttattgaggctt

SEQ ID NO: 27560 - DNA, 40 bp, Homo sapiens
agcctcaataaattacataattcacatgtagtcttggatt

SEQ ID NO: 27561 - DNA, 40 bp, Homo sapiens
aatccaagactacatgtgaattatgtaatttattgaggct

SEQ ID NO: 27562 - DNA, 40 bp, Homo sapiens
gcctcaataaattacataattcacatgtagtcttggatta

SEQ ID NO: 27563 - DNA, 40 bp, Homo sapiens
taatccaagactacatgtgaattatgtaatttattgaggc

SEQ ID NO: 27564 - DNA, 40 bp, Homo sapiens
cctcaataaattacataattcacatgtagtcttggattaa

SEQ ID NO: 27565 - DNA, 40 bp, Homo sapiens
ttaatccaagactacatgtgaattatgtaatttattgagg

SEQ ID NO: 27566 - DNA, 40 bp, Homo sapiens
ctcaataaattacataattcacatgtagtcttggattaag

SEQ ID NO: 27567 - DNA, 40 bp, Homo sapiens
cttaatccaagactacatgtgaattatgtaatttattgag

SEQ ID NO: 27568 - DNA, 40 bp, Homo sapiens
tcaataaattacataattcacatgtagtcttggattaagg

SEQ ID NO: 27569 - DNA, 40 bp, Homo sapiens
ccttaatccaagactacatgtgaattatgtaatttattga

SEQ ID NO: 27570 - DNA, 40 bp, Homo sapiens
caataaattacataattcacatgtagtcttggattaagga

SEQ ID NO: 27571 - DNA, 40 bp, Homo sapiens
tccttaatccaagactacatgtgaattatgtaatttattg

SEQ ID NO: 27572 - DNA, 40 bp, Homo sapiens
aataaattacataattcacatgtagtcttggattaaggaa

SEQ ID NO: 27573 - DNA, 40 bp, Homo sapiens
ttccttaatccaagactacatgtgaattatgtaatttatt

SEQ ID NO: 27574 - DNA, 40 bp, Homo sapiens
ataaattacataattcacatgtagtcttggattaaggaaa

SEQ ID NO: 27575 - DNA, 40 bp, Homo sapiens
tttccttaatccaagactacatgtgaattatgtaatttat

SEQ ID NO: 27576 - DNA, 40 bp, Homo sapiens
taaattacataattcacatgtagtcttggattaaggaaat

SEQ ID NO: 27577 - DNA, 40 bp, Homo sapiens
atttccttaatccaagactacatgtgaattatgtaattta

SEQ ID NO: 27578 - DNA, 40 bp, Homo sapiens
aaattacataattcacatgtagtcttggattaaggaaatt

SEQ ID NO: 27579 - DNA, 40 bp, Homo sapiens
aatttccttaatccaagactacatgtgaattatgtaattt

SEQ ID NO: 27580 - DNA, 40 bp, Homo sapiens
aattacataattcacatgtagtcttggattaaggaaattg

SEQ ID NO: 27581 - DNA, 40 bp, Homo sapiens
caatttccttaatccaagactacatgtgaattatgtaatt

SEQ ID NO: 27582 - DNA, 40 bp, Homo sapiens
attacataattcacatgtagtcttggattaaggaaattgc

SEQ ID NO: 27583 - DNA, 40 bp, Homo sapiens
gcaatttccttaatccaagactacatgtgaattatgtaat

SEQ ID NO: 27584 - DNA, 40 bp, Homo sapiens
ttacataattcacatgtagtcttggattaaggaaattgct

SEQ ID NO: 27585 - DNA, 40 bp, Homo sapiens
agcaatttccttaatccaagactacatgtgaattatgtaa

SEQ ID NO: 27586 - DNA, 40 bp, Homo sapiens
tacataattcacatgtagtcttggattaaggaaattgcta

SEQ ID NO: 27587 - DNA, 40 bp, Homo sapiens
tagcaatttccttaatccaagactacatgtgaattatgta

SEQ ID NO: 27588 - DNA, 40 bp, Homo sapiens
acataattcacatgtagtcttggattaaggaaattgctat

SEQ ID NO: 27589 - DNA, 40 bp, Homo sapiens
atagcaatttccttaatccaagactacatgtgaattatgt

SEQ ID NO: 27590 - DNA, 40 bp, Homo sapiens
cataattcacatgtagtcttggattaaggaaattgctatt

SEQ ID NO: 27591 - DNA, 40 bp, Homo sapiens
aatagcaatttccttaatccaagactacatgtgaattatg

SEQ ID NO: 27592 - DNA, 40 bp, Homo sapiens
ataattcacatgtagtcttggattaaggaaattgctatta

SEQ ID NO: 27593 - DNA, 40 bp, Homo sapiens
taatagcaatttccttaatccaagactacatgtgaattat

SEQ ID NO: 27594 - DNA, 40 bp, Homo sapiens
taattcacatgtagtcttggattaaggaaattgctattaa

SEQ ID NO: 27595 - DNA, 40 bp, Homo sapiens
ttaatagcaatttccttaatccaagactacatgtgaatta

SEQ ID NO: 27596 - DNA, 40 bp, Homo sapiens
aattcacatgtagtcttggattaaggaaattgctattaag

SEQ ID NO: 27597 - DNA, 40 bp, Homo sapiens
cttaatagcaatttccttaatccaagactacatgtgaatt

SEQ ID NO: 27598 - DNA, 40 bp, Homo sapiens
attcacatgtagtcttggattaaggaaattgctattaagg

SEQ ID NO: 27599 - DNA, 40 bp, Homo sapiens
ccttaatagcaatttccttaatccaagactacatgtgaat

SEQ ID NO: 27600 - DNA, 40 bp, Homo sapiens
ttcacatgtagtcttggattaaggaaattgctattaaggc

SEQ ID NO: 27601 - DNA, 40 bp, Homo sapiens
gccttaatagcaatttccttaatccaagactacatgtgaa

SEQ ID NO: 27602 - DNA, 40 bp, Homo sapiens
tcacatgtagtcttggattaaggaaattgctattaaggct

SEQ ID NO: 27603 - DNA, 40 bp, Homo sapiens
agccttaatagcaatttccttaatccaagactacatgtga

SEQ ID NO: 27604 - DNA, 40 bp, Homo sapiens
cacatgtagtcttggattaaggaaattgctattaaggcta

SEQ ID NO: 27605 - DNA, 40 bp, Homo sapiens
tagccttaatagcaatttccttaatccaagactacatgtg

SEQ ID NO: 27606 - DNA, 40 bp, Homo sapiens
acatgtagtcttggattaaggaaattgctattaaggctaa

SEQ ID NO: 27607 - DNA, 40 bp, Homo sapiens
ttagccttaatagcaatttccttaatccaagactacatgt

SEQ ID NO: 27608 - DNA, 40 bp, Homo sapiens
catgtagtcttggattaaggaaattgctattaaggctaaa

SEQ ID NO: 27609 - DNA, 40 bp, Homo sapiens
tttagccttaatagcaatttccttaatccaagactacatg

SEQ ID NO: 27610 - DNA, 40 bp, Homo sapiens
atgtagtcttggattaaggaaattgctattaaggctaaat

SEQ ID NO: 27611 - DNA, 40 bp, Homo sapiens
atttagccttaatagcaatttccttaatccaagactacat

SEQ ID NO: 27612 - DNA, 40 bp, Homo sapiens
tgtagtcttggattaaggaaattgctattaaggctaaata

SEQ ID NO: 27613 - DNA, 40 bp, Homo sapiens
tatttagccttaatagcaatttccttaatccaagactaca

SEQ ID NO: 27614 - DNA, 40 bp, Homo sapiens
gtagtcttggattaaggaaattgctattaaggctaaataa

SEQ ID NO: 27615 - DNA, 40 bp, Homo sapiens
ttatttagccttaatagcaatttccttaatccaagactac

SEQ ID NO: 27616 - DNA, 40 bp, Homo sapiens
tagtcttggattaaggaaattgctattaaggctaaataaa

SEQ ID NO: 27617 - DNA, 40 bp, Homo sapiens
tttatttagccttaatagcaatttccttaatccaagacta

SEQ ID NO: 27618 - DNA, 40 bp, Homo sapiens
agtcttggattaaggaaattgctattaaggctaaataaat

SEQ ID NO: 27619 - DNA, 40 bp, Homo sapiens
atttatttagccttaatagcaatttccttaatccaagact

SEQ ID NO: 27620 - DNA, 40 bp, Homo sapiens
gtcttggattaaggaaattgctattaaggctaaataaata

SEQ ID NO: 27621 - DNA, 40 bp, Homo sapiens
tatttatttagccttaatagcaatttccttaatccaagac

SEQ ID NO: 27622 - DNA, 40 bp, Homo sapiens
tcttggattaaggaaattgctattaaggctaaataaataa

SEQ ID NO: 27623 - DNA, 40 bp, Homo sapiens
ttatttatttagccttaatagcaatttccttaatccaaga

SEQ ID NO: 27624 - DNA, 40 bp, Homo sapiens
cttggattaaggaaattgctattaaggctaaataaataat

SEQ ID NO: 27625 - DNA, 40 bp, Homo sapiens
attatttatttagccttaatagcaatttccttaatccaag

SEQ ID NO: 27626 - DNA, 40 bp, Homo sapiens
ttggattaaggaaattgctattaaggctaaataaataata

SEQ ID NO: 27627 - DNA, 40 bp, Homo sapiens
tattatttatttagccttaatagcaatttccttaatccaa

SEQ ID NO: 27628 - DNA, 40 bp, Homo sapiens
tggattaaggaaattgctattaaggctaaataaataatat

SEQ ID NO: 27629 - DNA, 40 bp, Homo sapiens
atattatttatttagccttaatagcaatttccttaatcca

SEQ ID NO: 27630 - DNA, 40 bp, Homo sapiens
ggattaaggaaattgctattaaggctaaataaataatatg

SEQ ID NO: 27631 - DNA, 40 bp, Homo sapiens
catattatttatttagccttaatagcaatttccttaatcc

SEQ ID NO: 27632 - DNA, 40 bp, Homo sapiens
gattaaggaaattgctattaaggctaaataaataatatga

SEQ ID NO: 27633 - DNA, 40 bp, Homo sapiens
tcatattatttatttagccttaatagcaatttccttaatc

SEQ ID NO: 27634 - DNA, 40 bp, Homo sapiens
attaaggaaattgctattaaggctaaataaataatatgag

SEQ ID NO: 27635 - DNA, 40 bp, Homo sapiens
ctcatattatttatttagccttaatagcaatttccttaat

SEQ ID NO: 27636 - DNA, 40 bp, Homo sapiens
ttaaggaaattgctattaaggctaaataaataatatgaga

SEQ ID NO: 27637 - DNA, 40 bp, Homo sapiens
tctcatattatttatttagccttaatagcaatttccttaa

SEQ ID NO: 27638 - DNA, 40 bp, Homo sapiens
taaggaaattgctattaaggctaaataaataatatgagag

SEQ ID NO: 27639 - DNA, 40 bp, Homo sapiens
ctctcatattatttatttagccttaatagcaatttcctta

SEQ ID NO: 27640 - DNA, 40 bp, Homo sapiens
aaggaaattgctattaaggctaaataaataatatgagagg

SEQ ID NO: 27641 - DNA, 40 bp, Homo sapiens
cctctcatattatttatttagccttaatagcaatttcctt

SEQ ID NO: 27642 - DNA, 40 bp, Homo sapiens
aggaaattgctattaaggctaaataaataatatgagaggt

SEQ ID NO: 27643 - DNA, 40 bp, Homo sapiens
acctctcatattatttatttagccttaatagcaatttcct

SEQ ID NO: 27644 - DNA, 40 bp, Homo sapiens
ggaaattgctattaaggctaaataaataatatgagaggta

SEQ ID NO: 27645 - DNA, 40 bp, Homo sapiens
tacctctcatattatttatttagccttaatagcaatttcc

SEQ ID NO: 27646 - DNA, 40 bp, Homo sapiens
gaaattgctattaaggctaaataaataatatgagaggtat

SEQ ID NO: 27647 - DNA, 40 bp, Homo sapiens
atacctctcatattatttatttagccttaatagcaatttc

SEQ ID NO: 27648 - DNA, 40 bp, Homo sapiens
aaattgctattaaggctaaataaataatatgagaggtata

SEQ ID NO: 27649 - DNA, 40 bp, Homo sapiens
tatacctctcatattatttatttagccttaatagcaattt

SEQ ID NO: 27650 - DNA, 40 bp, Homo sapiens
aattgctattaaggctaaataaataatatgagaggtatat

SEQ ID NO: 27651 - DNA, 40 bp, Homo sapiens
atatacctctcatattatttatttagccttaatagcaatt

SEQ ID NO: 27652 - DNA, 40 bp, Homo sapiens
attgctattaaggctaaataaataatatgagaggtatata

SEQ ID NO: 27653 - DNA, 40 bp, Homo sapiens
tatatacctctcatattatttatttagccttaatagcaat

SEQ ID NO: 27654 - DNA, 40 bp, Homo sapiens
ttgctattaaggctaaataaataatatgagaggtatataa

SEQ ID NO: 27655 - DNA, 40 bp, Homo sapiens
ttatatacctctcatattatttatttagccttaatagcaa

SEQ ID NO: 27656 - DNA, 40 bp, Homo sapiens
tgctattaaggctaaataaataatatgagaggtatataat

SEQ ID NO: 27657 - DNA, 40 bp, Homo sapiens
attatatacctctcatattatttatttagccttaatagca

SEQ ID NO: 27658 - DNA, 40 bp, Homo sapiens
gctattaaggctaaataaataatatgagaggtatataata

SEQ ID NO: 27659 - DNA, 40 bp, Homo sapiens
tattatatacctctcatattatttatttagccttaatagc

SEQ ID NO: 27660 - DNA, 40 bp, Homo sapiens
ctattaaggctaaataaataatatgagaggtatataatat

SEQ ID NO: 27661 - DNA, 40 bp, Homo sapiens
atattatatacctctcatattatttatttagccttaatag

SEQ ID NO: 27662 - DNA, 40 bp, Homo sapiens
tattaaggctaaataaataatatgagaggtatataatata

SEQ ID NO: 27663 - DNA, 40 bp, Homo sapiens
tatattatatacctctcatattatttatttagccttaata

SEQ ID NO: 27664 - DNA, 40 bp, Homo sapiens
attaaggctaaataaataatatgagaggtatataatataa

SEQ ID NO: 27665 - DNA, 40 bp, Homo sapiens
ttatattatatacctctcatattatttatttagccttaat

SEQ ID NO: 27666 - DNA, 40 bp, Homo sapiens
ttaaggctaaataaataatatgagaggtatataatataaa

SEQ ID NO: 27667 - DNA, 40 bp, Homo sapiens
tttatattatatacctctcatattatttatttagccttaa

SEQ ID NO: 27668 - DNA, 40 bp, Homo sapiens
taaggctaaataaataatatgagaggtatataatataaaa

SEQ ID NO: 27669 - DNA, 40 bp, Homo sapiens
ttttatattatatacctctcatattatttatttagcctta

SEQ ID NO: 27670 - DNA, 40 bp, Homo sapiens
aaggctaaataaataatatgagaggtatataatataaaat

SEQ ID NO: 27671 - DNA, 40 bp, Homo sapiens
attttatattatatacctctcatattatttatttagcctt

SEQ ID NO: 27672 - DNA, 40 bp, Homo sapiens
aggctaaataaataatatgagaggtatataatataaaata

SEQ ID NO: 27673 - DNA, 40 bp, Homo sapiens
tattttatattatatacctctcatattatttatttagcct

SEQ ID NO: 27674 - DNA, 40 bp, Homo sapiens
ggctaaataaataatatgagaggtatataatataaaatat

SEQ ID NO: 27675 - DNA, 40 bp, Homo sapiens
atattttatattatatacctctcatattatttatttagcc

SEQ ID NO: 27676 - DNA, 40 bp, Homo sapiens
gctaaataaataatatgagaggtatataatataaaatatg

SEQ ID NO: 27677 - DNA, 40 bp, Homo sapiens
catattttatattatatacctctcatattatttatttagc

SEQ ID NO: 27678 - DNA, 40 bp, Homo sapiens
ctaaataaataatatgagaggtatataatataaaatatga

SEQ ID NO: 27679 - DNA, 40 bp, Homo sapiens
tcatattttatattatatacctctcatattatttatttag

SEQ ID NO: 27680 - DNA, 40 bp, Homo sapiens
taaataaataatatgagaggtatataatataaaatatgaa

SEQ ID NO: 27681 - DNA, 40 bp, Homo sapiens
ttcatattttatattatatacctctcatattatttattta

SEQ ID NO: 27682 - DNA, 40 bp, Homo sapiens
aaataaataatatgagaggtatataatataaaatatgaac

SEQ ID NO: 27683 - DNA, 40 bp, Homo sapiens
gttcatattttatattatatacctctcatattatttattt

SEQ ID NO: 27684 - DNA, 40 bp, Homo sapiens
aataaataatatgagaggtatataatataaaatatgaaca

SEQ ID NO: 27685 - DNA, 40 bp, Homo sapiens
tgttcatattttatattatatacctctcatattatttatt

SEQ ID NO: 27686 - DNA, 40 bp, Homo sapiens
ataaataatatgagaggtatataatataaaatatgaacat

SEQ ID NO: 27687 - DNA, 40 bp, Homo sapiens
atgttcatattttatattatatacctctcatattatttat

SEQ ID NO: 27688 - DNA, 40 bp, Homo sapiens
taaataatatgagaggtatataatataaaatatgaacatt

SEQ ID NO: 27689 - DNA, 40 bp, Homo sapiens
aatgttcatattttatattatatacctctcatattattta

SEQ ID NO: 27690 - DNA, 40 bp, Homo sapiens
aaataatatgagaggtatataatataaaatatgaacatta

SEQ ID NO: 27691 - DNA, 40 bp, Homo sapiens
taatgttcatattttatattatatacctctcatattattt

SEQ ID NO: 27692 - DNA, 40 bp, Homo sapiens
aataatatgagaggtatataatataaaatatgaacattat

SEQ ID NO: 27693 - DNA, 40 bp, Homo sapiens
ataatgttcatattttatattatatacctctcatattatt

SEQ ID NO: 27694 - DNA, 40 bp, Homo sapiens
ataatatgagaggtatataatataaaatatgaacattata

SEQ ID NO: 27695 - DNA, 40 bp, Homo sapiens
tataatgttcatattttatattatatacctctcatattat

SEQ ID NO: 27696 - DNA, 40 bp, Homo sapiens
taatatgagaggtatataatataaaatatgaacattatat

SEQ ID NO: 27697 - DNA, 40 bp, Homo sapiens
atataatgttcatattttatattatatacctctcatatta

SEQ ID NO: 27698 - DNA, 40 bp, Homo sapiens
aatatgagaggtatataatataaaatatgaacattatatt

SEQ ID NO: 27699 - DNA, 40 bp, Homo sapiens
aatataatgttcatattttatattatatacctctcatatt

SEQ ID NO: 27700 - DNA, 40 bp, Homo sapiens
atatgagaggtatataatataaaatatgaacattatattg

SEQ ID NO: 27701 - DNA, 40 bp, Homo sapiens
caatataatgttcatattttatattatatacctctcatat

SEQ ID NO: 27702 - DNA, 40 bp, Homo sapiens
tatgagaggtatataatataaaatatgaacattatattgg

SEQ ID NO: 27703 - DNA, 40 bp, Homo sapiens
ccaatataatgttcatattttatattatatacctctcata

SEQ ID NO: 27704 - DNA, 40 bp, Homo sapiens
atgagaggtatataatataaaatatgaacattatattggc

SEQ ID NO: 27705 - DNA, 40 bp, Homo sapiens
gccaatataatgttcatattttatattatatacctctcat

SEQ ID NO: 27706 - DNA, 40 bp, Homo sapiens
tgagaggtatataatataaaatatgaacattatattggca

SEQ ID NO: 27707 - DNA, 40 bp, Homo sapiens
tgccaatataatgttcatattttatattatatacctctca

SEQ ID NO: 27708 - DNA, 40 bp, Homo sapiens
gagaggtatataatataaaatatgaacattatattggcat

SEQ ID NO: 27709 - DNA, 40 bp, Homo sapiens
atgccaatataatgttcatattttatattatatacctctc

SEQ ID NO: 27710 - DNA, 40 bp, Homo sapiens
agaggtatataatataaaatatgaacattatattggcatt

SEQ ID NO: 27711 - DNA, 40 bp, Homo sapiens
aatgccaatataatgttcatattttatattatatacctct

SEQ ID NO: 27712 - DNA, 40 bp, Homo sapiens
gaggtatataatataaaatatgaacattatattggcatta

SEQ ID NO: 27713 - DNA, 40 bp, Homo sapiens
taatgccaatataatgttcatattttatattatatacctc

SEQ ID NO: 27714 - DNA, 40 bp, Homo sapiens
aggtatataatataaaatatgaacattatattggcattaa

SEQ ID NO: 27715 - DNA, 40 bp, Homo sapiens
ttaatgccaatataatgttcatattttatattatatacct

SEQ ID NO: 27716 - DNA, 40 bp, Homo sapiens
ggtatataatataaaatatgaacattatattggcattaag

SEQ ID NO: 27717 - DNA, 40 bp, Homo sapiens
cttaatgccaatataatgttcatattttatattatatacc

SEQ ID NO: 27718 - DNA, 40 bp, Homo sapiens
gtatataatataaaatatgaacattatattggcattaaga

SEQ ID NO: 27719 - DNA, 40 bp, Homo sapiens
tcttaatgccaatataatgttcatattttatattatatac

SEQ ID NO: 27720 - DNA, 40 bp, Homo sapiens
tatataatataaaatatgaacattatattggcattaagat

SEQ ID NO: 27721 - DNA, 40 bp, Homo sapiens
atcttaatgccaatataatgttcatattttatattatata

SEQ ID NO: 27722 - DNA, 40 bp, Homo sapiens
atataatataaaatatgaacattatattggcattaagatt

SEQ ID NO: 27723 - DNA, 40 bp, Homo sapiens
aatcttaatgccaatataatgttcatattttatattatat

SEQ ID NO: 27724 - DNA, 40 bp, Homo sapiens
tataatataaaatatgaacattatattggcattaagattg

SEQ ID NO: 27725 - DNA, 40 bp, Homo sapiens
caatcttaatgccaatataatgttcatattttatattata

SEQ ID NO: 27726 - DNA, 40 bp, Homo sapiens
ataatataaaatatgaacattatattggcattaagattgg

SEQ ID NO: 27727 - DNA, 40 bp, Homo sapiens
ccaatcttaatgccaatataatgttcatattttatattat

SEQ ID NO: 27728 - DNA, 40 bp, Homo sapiens
taatataaaatatgaacattatattggcattaagattgga

SEQ ID NO: 27729 - DNA, 40 bp, Homo sapiens
tccaatcttaatgccaatataatgttcatattttatatta

SEQ ID NO: 27730 - DNA, 40 bp, Homo sapiens
aatataaaatatgaacattatattggcattaagattggat

SEQ ID NO: 27731 - DNA, 40 bp, Homo sapiens
atccaatcttaatgccaatataatgttcatattttatatt

SEQ ID NO: 27732 - DNA, 40 bp, Homo sapiens
atataaaatatgaacattatattggcattaagattggatc

SEQ ID NO: 27733 - DNA, 40 bp, Homo sapiens
gatccaatcttaatgccaatataatgttcatattttatat

SEQ ID NO: 27734 - DNA, 40 bp, Homo sapiens
tataaaatatgaacattatattggcattaagattggatcc

SEQ ID NO: 27735 - DNA, 40 bp, Homo sapiens
ggatccaatcttaatgccaatataatgttcatattttata

SEQ ID NO: 27736 - DNA, 40 bp, Homo sapiens
ataaaatatgaacattatattggcattaagattggatcca

SEQ ID NO: 27737 - DNA, 40 bp, Homo sapiens
tggatccaatcttaatgccaatataatgttcatattttat

SEQ ID NO: 27738 - DNA, 40 bp, Homo sapiens
taaaatatgaacattatattggcattaagattggatccac

SEQ ID NO: 27739 - DNA, 40 bp, Homo sapiens
gtggatccaatcttaatgccaatataatgttcatatttta

SEQ ID NO: 27740 - DNA, 40 bp, Homo sapiens
aaaatatgaacattatattggcattaagattggatccacg

SEQ ID NO: 27741 - DNA, 40 bp, Homo sapiens
cgtggatccaatcttaatgccaatataatgttcatatttt

SEQ ID NO: 27742 - DNA, 40 bp, Homo sapiens
aaatatgaacattatattggcattaagattggatccacgg

SEQ ID NO: 27743 - DNA, 40 bp, Homo sapiens
ccgtggatccaatcttaatgccaatataatgttcatattt

SEQ ID NO: 27744 - DNA, 40 bp, Homo sapiens
aatatgaacattatattggcattaagattggatccacggt

SEQ ID NO: 27745 - DNA, 40 bp, Homo sapiens
accgtggatccaatcttaatgccaatataatgttcatatt

SEQ ID NO: 27746 - DNA, 40 bp, Homo sapiens
atatgaacattatattggcattaagattggatccacggtc

SEQ ID NO: 27747 - DNA, 40 bp, Homo sapiens
gaccgtggatccaatcttaatgccaatataatgttcatat

SEQ ID NO: 27748 - DNA, 40 bp, Homo sapiens
tatgaacattatattggcattaagattggatccacggtca

SEQ ID NO: 27749 - DNA, 40 bp, Homo sapiens
tgaccgtggatccaatcttaatgccaatataatgttcata

SEQ ID NO: 27750 - DNA, 40 bp, Homo sapiens
atgaacattatattggcattaagattggatccacggtcat

SEQ ID NO: 27751 - DNA, 40 bp, Homo sapiens
atgaccgtggatccaatcttaatgccaatataatgttcat

SEQ ID NO: 27752 - DNA, 40 bp, Homo sapiens
tgaacattatattggcattaagattggatccacggtcatt

SEQ ID NO: 27753 - DNA, 40 bp, Homo sapiens
aatgaccgtggatccaatcttaatgccaatataatgttca

SEQ ID NO: 27754 - DNA, 40 bp, Homo sapiens
gaacattatattggcattaagattggatccacggtcattc

SEQ ID NO: 27755 - DNA, 40 bp, Homo sapiens
gaatgaccgtggatccaatcttaatgccaatataatgttc

SEQ ID NO: 27756 - DNA, 40 bp, Homo sapiens
aacattatattggcattaagattggatccacggtcattcc

SEQ ID NO: 27757 - DNA, 40 bp, Homo sapiens
ggaatgaccgtggatccaatcttaatgccaatataatgtt

SEQ ID NO: 27758 - DNA, 40 bp, Homo sapiens
acattatattggcattaagattggatccacggtcattcca

SEQ ID NO: 27759 - DNA, 40 bp, Homo sapiens
tggaatgaccgtggatccaatcttaatgccaatataatgt

SEQ ID NO: 27760 - DNA, 40 bp, Homo sapiens
cattatattggcattaagattggatccacggtcattccag

SEQ ID NO: 27761 - DNA, 40 bp, Homo sapiens
ctggaatgaccgtggatccaatcttaatgccaatataatg

SEQ ID NO: 27762 - DNA, 40 bp, Homo sapiens
attatattggcattaagattggatccacggtcattccagc

SEQ ID NO: 27763 - DNA, 40 bp, Homo sapiens
gctggaatgaccgtggatccaatcttaatgccaatataat

SEQ ID NO: 27764 - DNA, 40 bp, Homo sapiens
ttatattggcattaagattggatccacggtcattccagcc

SEQ ID NO: 27765 - DNA, 40 bp, Homo sapiens
ggctggaatgaccgtggatccaatcttaatgccaatataa

SEQ ID NO: 27766 - DNA, 40 bp, Homo sapiens
tatattggcattaagattggatccacggtcattccagcct

SEQ ID NO: 27767 - DNA, 40 bp, Homo sapiens
aggctggaatgaccgtggatccaatcttaatgccaatata

SEQ ID NO: 27768 - DNA, 40 bp, Homo sapiens
atattggcattaagattggatccacggtcattccagcctc

SEQ ID NO: 27769 - DNA, 40 bp, Homo sapiens
gaggctggaatgaccgtggatccaatcttaatgccaatat

SEQ ID NO: 27770 - DNA, 40 bp, Homo sapiens
tattggcattaagattggatccacggtcattccagcctct

SEQ ID NO: 27771 - DNA, 40 bp, Homo sapiens
agaggctggaatgaccgtggatccaatcttaatgccaata

SEQ ID NO: 27772 - DNA, 40 bp, Homo sapiens
attggcattaagattggatccacggtcattccagcctctc

SEQ ID NO: 27773 - DNA, 40 bp, Homo sapiens
gagaggctggaatgaccgtggatccaatcttaatgccaat

SEQ ID NO: 27774 - DNA, 40 bp, Homo sapiens
ttggcattaagattggatccacggtcattccagcctctca

SEQ ID NO: 27775 - DNA, 40 bp, Homo sapiens
tgagaggctggaatgaccgtggatccaatcttaatgccaa

SEQ ID NO: 27776 - DNA, 40 bp, Homo sapiens
tggcattaagattggatccacggtcattccagcctctcat

SEQ ID NO: 27777 - DNA, 40 bp, Homo sapiens
atgagaggctggaatgaccgtggatccaatcttaatgcca

SEQ ID NO: 27778 - DNA, 40 bp, Homo sapiens
ggcattaagattggatccacggtcattccagcctctcatt

SEQ ID NO: 27779 - DNA, 40 bp, Homo sapiens
aatgagaggctggaatgaccgtggatccaatcttaatgcc

SEQ ID NO: 27780 - DNA, 40 bp, Homo sapiens
gcattaagattggatccacggtcattccagcctctcattc

SEQ ID NO: 27781 - DNA, 40 bp, Homo sapiens
gaatgagaggctggaatgaccgtggatccaatcttaatgc

SEQ ID NO: 27782 - DNA, 40 bp, Homo sapiens
cattaagattggatccacggtcattccagcctctcattct

SEQ ID NO: 27783 - DNA, 40 bp, Homo sapiens
agaatgagaggctggaatgaccgtggatccaatcttaatg

SEQ ID NO: 27784 - DNA, 40 bp, Homo sapiens
attaagattggatccacggtcattccagcctctcattctt

SEQ ID NO: 27785 - DNA, 40 bp, Homo sapiens
aagaatgagaggctggaatgaccgtggatccaatcttaat

SEQ ID NO: 27786 - DNA, 40 bp, Homo sapiens
ttaagattggatccacggtcattccagcctctcattctta

SEQ ID NO: 27787 - DNA, 40 bp, Homo sapiens
taagaatgagaggctggaatgaccgtggatccaatcttaa

SEQ ID NO: 27788 - DNA, 40 bp, Homo sapiens
taagattggatccacggtcattccagcctctcattcttac

SEQ ID NO: 27789 - DNA, 40 bp, Homo sapiens
gtaagaatgagaggctggaatgaccgtggatccaatctta

SEQ ID NO: 27790 - DNA, 40 bp, Homo sapiens
aagattggatccacggtcattccagcctctcattcttacc

SEQ ID NO: 27791 - DNA, 40 bp, Homo sapiens
ggtaagaatgagaggctggaatgaccgtggatccaatctt

SEQ ID NO: 27792 - DNA, 40 bp, Homo sapiens
agattggatccacggtcattccagcctctcattcttacct

SEQ ID NO: 27793 - DNA, 40 bp, Homo sapiens
aggtaagaatgagaggctggaatgaccgtggatccaatct

SEQ ID NO: 27794 - DNA, 40 bp, Homo sapiens
gattggatccacggtcattccagcctctcattcttacctg

SEQ ID NO: 27795 - DNA, 40 bp, Homo sapiens
caggtaagaatgagaggctggaatgaccgtggatccaatc

SEQ ID NO: 27796 - DNA, 40 bp, Homo sapiens
attggatccacggtcattccagcctctcattcttacctgg

SEQ ID NO: 27797 - DNA, 40 bp, Homo sapiens
ccaggtaagaatgagaggctggaatgaccgtggatccaat

SEQ ID NO: 27798 - DNA, 40 bp, Homo sapiens
ttggatccacggtcattccagcctctcattcttacctgga

SEQ ID NO: 27799 - DNA, 40 bp, Homo sapiens
tccaggtaagaatgagaggctggaatgaccgtggatccaa

SEQ ID NO: 27800 - DNA, 40 bp, Homo sapiens
tggatccacggtcattccagcctctcattcttacctggac

SEQ ID NO: 27801 - DNA, 40 bp, Homo sapiens
gtccaggtaagaatgagaggctggaatgaccgtggatcca

SEQ ID NO: 27802 - DNA, 40 bp, Homo sapiens
ggatccacggtcattccagcctctcattcttacctggact

SEQ ID NO: 27803 - DNA, 40 bp, Homo sapiens
agtccaggtaagaatgagaggctggaatgaccgtggatcc

SEQ ID NO: 27804 - DNA, 40 bp, Homo sapiens
gatccacggtcattccagcctctcattcttacctggactt

SEQ ID NO: 27805 - DNA, 40 bp, Homo sapiens
aagtccaggtaagaatgagaggctggaatgaccgtggatc

SEQ ID NO: 27806 - DNA, 40 bp, Homo sapiens
atccacggtcattccagcctctcattcttacctggacttc

SEQ ID NO: 27807 - DNA, 40 bp, Homo sapiens
gaagtccaggtaagaatgagaggctggaatgaccgtggat

SEQ ID NO: 27808 - DNA, 40 bp, Homo sapiens
tccacggtcattccagcctctcattcttacctggacttca

SEQ ID NO: 27809 - DNA, 40 bp, Homo sapiens
tgaagtccaggtaagaatgagaggctggaatgaccgtgga

SEQ ID NO: 27810 - DNA, 40 bp, Homo sapiens
ccacggtcattccagcctctcattcttacctggacttcaa

SEQ ID NO: 27811 - DNA, 40 bp, Homo sapiens
ttgaagtccaggtaagaatgagaggctggaatgaccgtgg

SEQ ID NO: 27812 - DNA, 40 bp, Homo sapiens
cacggtcattccagcctctcattcttacctggacttcaag

SEQ ID NO: 27813 - DNA, 40 bp, Homo sapiens
cttgaagtccaggtaagaatgagaggctggaatgaccgtg

SEQ ID NO: 27814 - DNA, 40 bp, Homo sapiens
acggtcattccagcctctcattcttacctggacttcaagt

SEQ ID NO: 27815 - DNA, 40 bp, Homo sapiens
acttgaagtccaggtaagaatgagaggctggaatgaccgt

SEQ ID NO: 27816 - DNA, 40 bp, Homo sapiens
cggtcattccagcctctcattcttacctggacttcaagtg

SEQ ID NO: 27817 - DNA, 40 bp, Homo sapiens
cacttgaagtccaggtaagaatgagaggctggaatgaccg

SEQ ID NO: 27818 - DNA, 40 bp, Homo sapiens
ggtcattccagcctctcattcttacctggacttcaagtga

SEQ ID NO: 27819 - DNA, 40 bp, Homo sapiens
tcacttgaagtccaggtaagaatgagaggctggaatgacc

SEQ ID NO: 27820 - DNA, 40 bp, Homo sapiens
gtcattccagcctctcattcttacctggacttcaagtgat

SEQ ID NO: 27821 - DNA, 40 bp, Homo sapiens
atcacttgaagtccaggtaagaatgagaggctggaatgac

SEQ ID NO: 27822 - DNA, 40 bp, Homo sapiens
tcattccagcctctcattcttacctggacttcaagtgatc

SEQ ID NO: 27823 - DNA, 40 bp, Homo sapiens
gatcacttgaagtccaggtaagaatgagaggctggaatga

SEQ ID NO: 27824 - DNA, 40 bp, Homo sapiens
cattccagcctctcattcttacctggacttcaagtgatca

SEQ ID NO: 27825 - DNA, 40 bp, Homo sapiens
tgatcacttgaagtccaggtaagaatgagaggctggaatg

SEQ ID NO: 27826 - DNA, 40 bp, Homo sapiens
attccagcctctcattcttacctggacttcaagtgatcac

SEQ ID NO: 27827 - DNA, 40 bp, Homo sapiens
gtgatcacttgaagtccaggtaagaatgagaggctggaat

SEQ ID NO: 27828 - DNA, 40 bp, Homo sapiens
ttccagcctctcattcttacctggacttcaagtgatcact

SEQ ID NO: 27829 - DNA, 40 bp, Homo sapiens
agtgatcacttgaagtccaggtaagaatgagaggctggaa

SEQ ID NO: 27830 - DNA, 40 bp, Homo sapiens
tccagcctctcattcttacctggacttcaagtgatcactt

SEQ ID NO: 27831 - DNA, 40 bp, Homo sapiens
aagtgatcacttgaagtccaggtaagaatgagaggctgga

SEQ ID NO: 27832 - DNA, 40 bp, Homo sapiens
ccagcctctcattcttacctggacttcaagtgatcacttg

SEQ ID NO: 27833 - DNA, 40 bp, Homo sapiens
caagtgatcacttgaagtccaggtaagaatgagaggctgg

SEQ ID NO: 27834 - DNA, 40 bp, Homo sapiens
cagcctctcattcttacctggacttcaagtgatcacttgt

SEQ ID NO: 27835 - DNA, 40 bp, Homo sapiens
acaagtgatcacttgaagtccaggtaagaatgagaggctg

SEQ ID NO: 27836 - DNA, 40 bp, Homo sapiens
agcctctcattcttacctggacttcaagtgatcacttgtg

SEQ ID NO: 27837 - DNA, 40 bp, Homo sapiens
cacaagtgatcacttgaagtccaggtaagaatgagaggct

SEQ ID NO: 27838 - DNA, 40 bp, Homo sapiens
gcctctcattcttacctggacttcaagtgatcacttgtgg

SEQ ID NO: 27839 - DNA, 40 bp, Homo sapiens
ccacaagtgatcacttgaagtccaggtaagaatgagaggc

SEQ ID NO: 27840 - DNA, 40 bp, Homo sapiens
cctctcattcttacctggacttcaagtgatcacttgtggg

SEQ ID NO: 27841 - DNA, 40 bp, Homo sapiens
cccacaagtgatcacttgaagtccaggtaagaatgagagg

SEQ ID NO: 27842 - DNA, 40 bp, Homo sapiens
ctctcattcttacctggacttcaagtgatcacttgtgggc

SEQ ID NO: 27843 - DNA, 40 bp, Homo sapiens
gcccacaagtgatcacttgaagtccaggtaagaatgagag

SEQ ID NO: 27844 - DNA, 40 bp, Homo sapiens
tctcattcttacctggacttcaagtgatcacttgtgggca

SEQ ID NO: 27845 - DNA, 40 bp, Homo sapiens
tgcccacaagtgatcacttgaagtccaggtaagaatgaga

SEQ ID NO: 27846 - DNA, 40 bp, Homo sapiens
ctcattcttacctggacttcaagtgatcacttgtgggcaa

SEQ ID NO: 27847 - DNA, 40 bp, Homo sapiens
ttgcccacaagtgatcacttgaagtccaggtaagaatgag

SEQ ID NO: 27848 - DNA, 40 bp, Homo sapiens
tcattcttacctggacttcaagtgatcacttgtgggcaaa

SEQ ID NO: 27849 - DNA, 40 bp, Homo sapiens
tttgcccacaagtgatcacttgaagtccaggtaagaatga

SEQ ID NO: 27850 - DNA, 40 bp, Homo sapiens
cattcttacctggacttcaagtgatcacttgtgggcaaat

SEQ ID NO: 27851 - DNA, 40 bp, Homo sapiens
atttgcccacaagtgatcacttgaagtccaggtaagaatg

SEQ ID NO: 27852 - DNA, 40 bp, Homo sapiens
attcttacctggacttcaagtgatcacttgtgggcaaatg

SEQ ID NO: 27853 - DNA, 40 bp, Homo sapiens
catttgcccacaagtgatcacttgaagtccaggtaagaat

SEQ ID NO: 27854 - DNA, 40 bp, Homo sapiens
ttcttacctggacttcaagtgatcacttgtgggcaaatgc

SEQ ID NO: 27855 - DNA, 40 bp, Homo sapiens
gcatttgcccacaagtgatcacttgaagtccaggtaagaa

SEQ ID NO: 27856 - DNA, 40 bp, Homo sapiens
tcttacctggacttcaagtgatcacttgtgggcaaatgcc

SEQ ID NO: 27857 - DNA, 40 bp, Homo sapiens
ggcatttgcccacaagtgatcacttgaagtccaggtaaga

SEQ ID NO: 27858 - DNA, 40 bp, Homo sapiens
cttacctggacttcaagtgatcacttgtgggcaaatgcca

SEQ ID NO: 27859 - DNA, 40 bp, Homo sapiens
tggcatttgcccacaagtgatcacttgaagtccaggtaag

SEQ ID NO: 27860 - DNA, 40 bp, Homo sapiens
ttacctggacttcaagtgatcacttgtgggcaaatgccat

SEQ ID NO: 27861 - DNA, 40 bp, Homo sapiens
atggcatttgcccacaagtgatcacttgaagtccaggtaa

SEQ ID NO: 27862 - DNA, 40 bp, Homo sapiens
tacctggacttcaagtgatcacttgtgggcaaatgccatc

SEQ ID NO: 27863 - DNA, 40 bp, Homo sapiens
gatggcatttgcccacaagtgatcacttgaagtccaggta

SEQ ID NO: 27864 - DNA, 40 bp, Homo sapiens
acctggacttcaagtgatcacttgtgggcaaatgccatct

SEQ ID NO: 27865 - DNA, 40 bp, Homo sapiens
agatggcatttgcccacaagtgatcacttgaagtccaggt

SEQ ID NO: 27866 - DNA, 40 bp, Homo sapiens
cctggacttcaagtgatcacttgtgggcaaatgccatctg

SEQ ID NO: 27867 - DNA, 40 bp, Homo sapiens
cagatggcatttgcccacaagtgatcacttgaagtccagg

SEQ ID NO: 27868 - DNA, 40 bp, Homo sapiens
ctggacttcaagtgatcacttgtgggcaaatgccatctga

SEQ ID NO: 27869 - DNA, 40 bp, Homo sapiens
tcagatggcatttgcccacaagtgatcacttgaagtccag

SEQ ID NO: 27870 - DNA, 40 bp, Homo sapiens
tggacttcaagtgatcacttgtgggcaaatgccatctgac

SEQ ID NO: 27871 - DNA, 40 bp, Homo sapiens
gtcagatggcatttgcccacaagtgatcacttgaagtcca

SEQ ID NO: 27872 - DNA, 40 bp, Homo sapiens
ggacttcaagtgatcacttgtgggcaaatgccatctgact

SEQ ID NO: 27873 - DNA, 40 bp, Homo sapiens
agtcagatggcatttgcccacaagtgatcacttgaagtcc

SEQ ID NO: 27874 - DNA, 40 bp, Homo sapiens
gacttcaagtgatcacttgtgggcaaatgccatctgactt

SEQ ID NO: 27875 - DNA, 40 bp, Homo sapiens
aagtcagatggcatttgcccacaagtgatcacttgaagtc

SEQ ID NO: 27876 - DNA, 40 bp, Homo sapiens
acttcaagtgatcacttgtgggcaaatgccatctgacttg

SEQ ID NO: 27877 - DNA, 40 bp, Homo sapiens
caagtcagatggcatttgcccacaagtgatcacttgaagt

SEQ ID NO: 27878 - DNA, 40 bp, Homo sapiens
cttcaagtgatcacttgtgggcaaatgccatctgacttga

SEQ ID NO: 27879 - DNA, 40 bp, Homo sapiens
tcaagtcagatggcatttgcccacaagtgatcacttgaag

SEQ ID NO: 27880 - DNA, 40 bp, Homo sapiens
ttcaagtgatcacttgtgggcaaatgccatctgacttgaa

SEQ ID NO: 27881 - DNA, 40 bp, Homo sapiens
ttcaagtcagatggcatttgcccacaagtgatcacttgaa

SEQ ID NO: 27882 - DNA, 40 bp, Homo sapiens
tcaagtgatcacttgtgggcaaatgccatctgacttgaac

SEQ ID NO: 27883 - DNA, 40 bp, Homo sapiens
gttcaagtcagatggcatttgcccacaagtgatcacttga

SEQ ID NO: 27884 - DNA, 40 bp, Homo sapiens
caagtgatcacttgtgggcaaatgccatctgacttgaaca

SEQ ID NO: 27885 - DNA, 40 bp, Homo sapiens
tgttcaagtcagatggcatttgcccacaagtgatcacttg

SEQ ID NO: 27886 - DNA, 40 bp, Homo sapiens
aagtgatcacttgtgggcaaatgccatctgacttgaacag

SEQ ID NO: 27887 - DNA, 40 bp, Homo sapiens
ctgttcaagtcagatggcatttgcccacaagtgatcactt

SEQ ID NO: 27888 - DNA, 40 bp, Homo sapiens
agtgatcacttgtgggcaaatgccatctgacttgaacagg

SEQ ID NO: 27889 - DNA, 40 bp, Homo sapiens
cctgttcaagtcagatggcatttgcccacaagtgatcact

SEQ ID NO: 27890 - DNA, 40 bp, Homo sapiens
gtgatcacttgtgggcaaatgccatctgacttgaacaggt

SEQ ID NO: 27891 - DNA, 40 bp, Homo sapiens
acctgttcaagtcagatggcatttgcccacaagtgatcac

SEQ ID NO: 27892 - DNA, 40 bp, Homo sapiens
tgatcacttgtgggcaaatgccatctgacttgaacaggtt

SEQ ID NO: 27893 - DNA, 40 bp, Homo sapiens
aacctgttcaagtcagatggcatttgcccacaagtgatca

SEQ ID NO: 27894 - DNA, 40 bp, Homo sapiens
gatcacttgtgggcaaatgccatctgacttgaacaggtta

SEQ ID NO: 27895 - DNA, 40 bp, Homo sapiens
taacctgttcaagtcagatggcatttgcccacaagtgatc

SEQ ID NO: 27896 - DNA, 40 bp, Homo sapiens
atcacttgtgggcaaatgccatctgacttgaacaggttac

SEQ ID NO: 27897 - DNA, 40 bp, Homo sapiens
gtaacctgttcaagtcagatggcatttgcccacaagtgat

SEQ ID NO: 27898 - DNA, 40 bp, Homo sapiens
tcacttgtgggcaaatgccatctgacttgaacaggttaca

SEQ ID NO: 27899 - DNA, 40 bp, Homo sapiens
tgtaacctgttcaagtcagatggcatttgcccacaagtga

SEQ ID NO: 27900 - DNA, 40 bp, Homo sapiens
cacttgtgggcaaatgccatctgacttgaacaggttacac

SEQ ID NO: 27901 - DNA, 40 bp, Homo sapiens
gtgtaacctgttcaagtcagatggcatttgcccacaagtg

SEQ ID NO: 27902 - DNA, 40 bp, Homo sapiens
acttgtgggcaaatgccatctgacttgaacaggttacaca

SEQ ID NO: 27903 - DNA, 40 bp, Homo sapiens
tgtgtaacctgttcaagtcagatggcatttgcccacaagt

SEQ ID NO: 27904 - DNA, 40 bp, Homo sapiens
cttgtgggcaaatgccatctgacttgaacaggttacacat

SEQ ID NO: 27905 - DNA, 40 bp, Homo sapiens
atgtgtaacctgttcaagtcagatggcatttgcccacaag

SEQ ID NO: 27906 - DNA, 40 bp, Homo sapiens
ttgtgggcaaatgccatctgacttgaacaggttacacatg

SEQ ID NO: 27907 - DNA, 40 bp, Homo sapiens
catgtgtaacctgttcaagtcagatggcatttgcccacaa

SEQ ID NO: 27908 - DNA, 40 bp, Homo sapiens
tgtgggcaaatgccatctgacttgaacaggttacacatgt

SEQ ID NO: 27909 - DNA, 40 bp, Homo sapiens
acatgtgtaacctgttcaagtcagatggcatttgcccaca

SEQ ID NO: 27910 - DNA, 40 bp, Homo sapiens
gtgggcaaatgccatctgacttgaacaggttacacatgta

SEQ ID NO: 27911 - DNA, 40 bp, Homo sapiens
tacatgtgtaacctgttcaagtcagatggcatttgcccac

SEQ ID NO: 27912 - DNA, 40 bp, Homo sapiens
tgggcaaatgccatctgacttgaacaggttacacatgtat

SEQ ID NO: 27913 - DNA, 40 bp, Homo sapiens
atacatgtgtaacctgttcaagtcagatggcatttgccca

SEQ ID NO: 27914 - DNA, 40 bp, Homo sapiens
gggcaaatgccatctgacttgaacaggttacacatgtatg

SEQ ID NO: 27915 - DNA, 40 bp, Homo sapiens
catacatgtgtaacctgttcaagtcagatggcatttgccc

SEQ ID NO: 27916 - DNA, 40 bp, Homo sapiens
ggcaaatgccatctgacttgaacaggttacacatgtatgc

SEQ ID NO: 27917 - DNA, 40 bp, Homo sapiens
gcatacatgtgtaacctgttcaagtcagatggcatttgcc

SEQ ID NO: 27918 - DNA, 40 bp, Homo sapiens
gcaaatgccatctgacttgaacaggttacacatgtatgct

SEQ ID NO: 27919 - DNA, 40 bp, Homo sapiens
agcatacatgtgtaacctgttcaagtcagatggcatttgc

SEQ ID NO: 27920 - DNA, 40 bp, Homo sapiens
caaatgccatctgacttgaacaggttacacatgtatgctc

SEQ ID NO: 27921 - DNA, 40 bp, Homo sapiens
gagcatacatgtgtaacctgttcaagtcagatggcatttg

SEQ ID NO: 27922 - DNA, 40 bp, Homo sapiens
aaatgccatctgacttgaacaggttacacatgtatgctca

SEQ ID NO: 27923 - DNA, 40 bp, Homo sapiens
tgagcatacatgtgtaacctgttcaagtcagatggcattt

SEQ ID NO: 27924 - DNA, 40 bp, Homo sapiens
aatgccatctgacttgaacaggttacacatgtatgctcat

SEQ ID NO: 27925 - DNA, 40 bp, Homo sapiens
atgagcatacatgtgtaacctgttcaagtcagatggcatt

SEQ ID NO: 27926 - DNA, 40 bp, Homo sapiens
atgccatctgacttgaacaggttacacatgtatgctcatt

SEQ ID NO: 27927 - DNA, 40 bp, Homo sapiens
aatgagcatacatgtgtaacctgttcaagtcagatggcat

SEQ ID NO: 27928 - DNA, 40 bp, Homo sapiens
tgccatctgacttgaacaggttacacatgtatgctcatta

SEQ ID NO: 27929 - DNA, 40 bp, Homo sapiens
taatgagcatacatgtgtaacctgttcaagtcagatggca

SEQ ID NO: 27930 - DNA, 40 bp, Homo sapiens
gccatctgacttgaacaggttacacatgtatgctcattat

SEQ ID NO: 27931 - DNA, 40 bp, Homo sapiens
ataatgagcatacatgtgtaacctgttcaagtcagatggc

SEQ ID NO: 27932 - DNA, 40 bp, Homo sapiens
ccatctgacttgaacaggttacacatgtatgctcattata

SEQ ID NO: 27933 - DNA, 40 bp, Homo sapiens
tataatgagcatacatgtgtaacctgttcaagtcagatgg

SEQ ID NO: 27934 - DNA, 40 bp, Homo sapiens
catctgacttgaacaggttacacatgtatgctcattatat

SEQ ID NO: 27935 - DNA, 40 bp, Homo sapiens
atataatgagcatacatgtgtaacctgttcaagtcagatg

SEQ ID NO: 27936 - DNA, 40 bp, Homo sapiens
atctgacttgaacaggttacacatgtatgctcattatatc

SEQ ID NO: 27937 - DNA, 40 bp, Homo sapiens
gatataatgagcatacatgtgtaacctgttcaagtcagat

SEQ ID NO: 27938 - DNA, 40 bp, Homo sapiens
tctgacttgaacaggttacacatgtatgctcattatatcg

SEQ ID NO: 27939 - DNA, 40 bp, Homo sapiens
cgatataatgagcatacatgtgtaacctgttcaagtcaga

SEQ ID NO: 27940 - DNA, 40 bp, Homo sapiens
ctgacttgaacaggttacacatgtatgctcattatatcgt

SEQ ID NO: 27941 - DNA, 40 bp, Homo sapiens
acgatataatgagcatacatgtgtaacctgttcaagtcag

SEQ ID NO: 27942 - DNA, 40 bp, Homo sapiens
tgacttgaacaggttacacatgtatgctcattatatcgtt

SEQ ID NO: 27943 - DNA, 40 bp, Homo sapiens
aacgatataatgagcatacatgtgtaacctgttcaagtca

SEQ ID NO: 27944 - DNA, 40 bp, Homo sapiens
gacttgaacaggttacacatgtatgctcattatatcgtta

SEQ ID NO: 27945 - DNA, 40 bp, Homo sapiens
taacgatataatgagcatacatgtgtaacctgttcaagtc

SEQ ID NO: 27946 - DNA, 40 bp, Homo sapiens
acttgaacaggttacacatgtatgctcattatatcgttat

SEQ ID NO: 27947 - DNA, 40 bp, Homo sapiens
ataacgatataatgagcatacatgtgtaacctgttcaagt

SEQ ID NO: 27948 - DNA, 40 bp, Homo sapiens
cttgaacaggttacacatgtatgctcattatatcgttatt

SEQ ID NO: 27949 - DNA, 40 bp, Homo sapiens
aataacgatataatgagcatacatgtgtaacctgttcaag

SEQ ID NO: 27950 - DNA, 40 bp, Homo sapiens
ttgaacaggttacacatgtatgctcattatatcgttattt

SEQ ID NO: 27951 - DNA, 40 bp, Homo sapiens
aaataacgatataatgagcatacatgtgtaacctgttcaa

SEQ ID NO: 27952 - DNA, 40 bp, Homo sapiens
tgaacaggttacacatgtatgctcattatatcgttatttt

SEQ ID NO: 27953 - DNA, 40 bp, Homo sapiens
aaaataacgatataatgagcatacatgtgtaacctgttca

SEQ ID NO: 27954 - DNA, 40 bp, Homo sapiens
gaacaggttacacatgtatgctcattatatcgttattttc

SEQ ID NO: 27955 - DNA, 40 bp, Homo sapiens
gaaaataacgatataatgagcatacatgtgtaacctgttc

SEQ ID NO: 27956 - DNA, 40 bp, Homo sapiens
aacaggttacacatgtatgctcattatatcgttattttca

SEQ ID NO: 27957 - DNA, 40 bp, Homo sapiens
tgaaaataacgatataatgagcatacatgtgtaacctgtt

SEQ ID NO: 27958 - DNA, 40 bp, Homo sapiens
acaggttacacatgtatgctcattatatcgttattttcaa

SEQ ID NO: 27959 - DNA, 40 bp, Homo sapiens
ttgaaaataacgatataatgagcatacatgtgtaacctgt

SEQ ID NO: 27960 - DNA, 40 bp, Homo sapiens
caggttacacatgtatgctcattatatcgttattttcaaa

SEQ ID NO: 27961 - DNA, 40 bp, Homo sapiens
tttgaaaataacgatataatgagcatacatgtgtaacctg

SEQ ID NO: 27962 - DNA, 40 bp, Homo sapiens
aggttacacatgtatgctcattatatcgttattttcaaaa

SEQ ID NO: 27963 - DNA, 40 bp, Homo sapiens
ttttgaaaataacgatataatgagcatacatgtgtaacct

SEQ ID NO: 27964 - DNA, 40 bp, Homo sapiens
ggttacacatgtatgctcattatatcgttattttcaaaat

SEQ ID NO: 27965 - DNA, 40 bp, Homo sapiens
attttgaaaataacgatataatgagcatacatgtgtaacc

SEQ ID NO: 27966 - DNA, 40 bp, Homo sapiens
gttacacatgtatgctcattatatcgttattttcaaaatt

SEQ ID NO: 27967 - DNA, 40 bp, Homo sapiens
aattttgaaaataacgatataatgagcatacatgtgtaac

SEQ ID NO: 27968 - DNA, 40 bp, Homo sapiens
ttacacatgtatgctcattatatcgttattttcaaaattt

SEQ ID NO: 27969 - DNA, 40 bp, Homo sapiens
aaattttgaaaataacgatataatgagcatacatgtgtaa

SEQ ID NO: 27970 - DNA, 40 bp, Homo sapiens
tacacatgtatgctcattatatcgttattttcaaaatttg

SEQ ID NO: 27971 - DNA, 40 bp, Homo sapiens
caaattttgaaaataacgatataatgagcatacatgtgta

SEQ ID NO: 27972 - DNA, 40 bp, Homo sapiens
acacatgtatgctcattatatcgttattttcaaaatttgt

SEQ ID NO: 27973 - DNA, 40 bp, Homo sapiens
acaaattttgaaaataacgatataatgagcatacatgtgt

SEQ ID NO: 27974 - DNA, 40 bp, Homo sapiens
cacatgtatgctcattatatcgttattttcaaaatttgtc

SEQ ID NO: 27975 - DNA, 40 bp, Homo sapiens
gacaaattttgaaaataacgatataatgagcatacatgtg

SEQ ID NO: 27976 - DNA, 40 bp, Homo sapiens
acatgtatgctcattatatcgttattttcaaaatttgtca

SEQ ID NO: 27977 - DNA, 40 bp, Homo sapiens
tgacaaattttgaaaataacgatataatgagcatacatgt

SEQ ID NO: 27978 - DNA, 40 bp, Homo sapiens
catgtatgctcattatatcgttattttcaaaatttgtcat

SEQ ID NO: 27979 - DNA, 40 bp, Homo sapiens
atgacaaattttgaaaataacgatataatgagcatacatg

SEQ ID NO: 27980 - DNA, 40 bp, Homo sapiens
atgtatgctcattatatcgttattttcaaaatttgtcata

SEQ ID NO: 27981 - DNA, 40 bp, Homo sapiens
tatgacaaattttgaaaataacgatataatgagcatacat

SEQ ID NO: 27982 - DNA, 40 bp, Homo sapiens
tgtatgctcattatatcgttattttcaaaatttgtcatat

SEQ ID NO: 27983 - DNA, 40 bp, Homo sapiens
atatgacaaattttgaaaataacgatataatgagcataca

SEQ ID NO: 27984 - DNA, 40 bp, Homo sapiens
gtatgctcattatatcgttattttcaaaatttgtcatata

SEQ ID NO: 27985 - DNA, 40 bp, Homo sapiens
tatatgacaaattttgaaaataacgatataatgagcatac

SEQ ID NO: 27986 - DNA, 40 bp, Homo sapiens
tatgctcattatatcgttattttcaaaatttgtcatataa

SEQ ID NO: 27987 - DNA, 40 bp, Homo sapiens
ttatatgacaaattttgaaaataacgatataatgagcata

SEQ ID NO: 27988 - DNA, 40 bp, Homo sapiens
atgctcattatatcgttattttcaaaatttgtcatataaa

SEQ ID NO: 27989 - DNA, 40 bp, Homo sapiens
tttatatgacaaattttgaaaataacgatataatgagcat

SEQ ID NO: 27990 - DNA, 40 bp, Homo sapiens
tgctcattatatcgttattttcaaaatttgtcatataaat

SEQ ID NO: 27991 - DNA, 40 bp, Homo sapiens
atttatatgacaaattttgaaaataacgatataatgagca

SEQ ID NO: 27992 - DNA, 40 bp, Homo sapiens
gctcattatatcgttattttcaaaatttgtcatataaatt

SEQ ID NO: 27993 - DNA, 40 bp, Homo sapiens
aatttatatgacaaattttgaaaataacgatataatgagc

SEQ ID NO: 27994 - DNA, 40 bp, Homo sapiens
ctcattatatcgttattttcaaaatttgtcatataaattt

SEQ ID NO: 27995 - DNA, 40 bp, Homo sapiens
aaatttatatgacaaattttgaaaataacgatataatgag

SEQ ID NO: 27996 - DNA, 40 bp, Homo sapiens
tcattatatcgttattttcaaaatttgtcatataaatttt

SEQ ID NO: 27997 - DNA, 40 bp, Homo sapiens
aaaatttatatgacaaattttgaaaataacgatataatga

SEQ ID NO: 27998 - DNA, 40 bp, Homo sapiens
cattatatcgttattttcaaaatttgtcatataaattttc

SEQ ID NO: 27999 - DNA, 40 bp, Homo sapiens
gaaaatttatatgacaaattttgaaaataacgatataatg

SEQ ID NO: 28000 - DNA, 40 bp, Homo sapiens
attatatcgttattttcaaaatttgtcatataaattttcc

SEQ ID NO: 28001 - DNA, 40 bp, Homo sapiens
ggaaaatttatatgacaaattttgaaaataacgatataat

SEQ ID NO: 28002 - DNA, 40 bp, Homo sapiens
ttatatcgttattttcaaaatttgtcatataaattttcct

SEQ ID NO: 28003 - DNA, 40 bp, Homo sapiens
aggaaaatttatatgacaaattttgaaaataacgatataa

SEQ ID NO: 28004 - DNA, 40 bp, Homo sapiens
tatatcgttattttcaaaatttgtcatataaattttcctt

SEQ ID NO: 28005 - DNA, 40 bp, Homo sapiens
aaggaaaatttatatgacaaattttgaaaataacgatata

SEQ ID NO: 28006 - DNA, 40 bp, Homo sapiens
atatcgttattttcaaaatttgtcatataaattttccttg

SEQ ID NO: 28007 - DNA, 40 bp, Homo sapiens
caaggaaaatttatatgacaaattttgaaaataacgatat

SEQ ID NO: 28008 - DNA, 40 bp, Homo sapiens
tatcgttattttcaaaatttgtcatataaattttccttga

SEQ ID NO: 28009 - DNA, 40 bp, Homo sapiens
tcaaggaaaatttatatgacaaattttgaaaataacgata

SEQ ID NO: 28010 - DNA, 40 bp, Homo sapiens
atcgttattttcaaaatttgtcatataaattttccttgag

SEQ ID NO: 28011 - DNA, 40 bp, Homo sapiens
ctcaaggaaaatttatatgacaaattttgaaaataacgat

SEQ ID NO: 28012 - DNA, 40 bp, Homo sapiens
tcgttattttcaaaatttgtcatataaattttccttgagt

SEQ ID NO: 28013 - DNA, 40 bp, Homo sapiens
actcaaggaaaatttatatgacaaattttgaaaataacga

SEQ ID NO: 28014 - DNA, 40 bp, Homo sapiens
cgttattttcaaaatttgtcatataaattttccttgagtt

SEQ ID NO: 28015 - DNA, 40 bp, Homo sapiens
aactcaaggaaaatttatatgacaaattttgaaaataacg

SEQ ID NO: 28016 - DNA, 40 bp, Homo sapiens
gttattttcaaaatttgtcatataaattttccttgagttc

SEQ ID NO: 28017 - DNA, 40 bp, Homo sapiens
gaactcaaggaaaatttatatgacaaattttgaaaataac

SEQ ID NO: 28018 - DNA, 40 bp, Homo sapiens
ttattttcaaaatttgtcatataaattttccttgagttca

SEQ ID NO: 28019 - DNA, 40 bp, Homo sapiens
tgaactcaaggaaaatttatatgacaaattttgaaaataa

SEQ ID NO: 28020 - DNA, 40 bp, Homo sapiens
tattttcaaaatttgtcatataaattttccttgagttcat

SEQ ID NO: 28021 - DNA, 40 bp, Homo sapiens
atgaactcaaggaaaatttatatgacaaattttgaaaata

SEQ ID NO: 28022 - DNA, 40 bp, Homo sapiens
attttcaaaatttgtcatataaattttccttgagttcatt

SEQ ID NO: 28023 - DNA, 40 bp, Homo sapiens
aatgaactcaaggaaaatttatatgacaaattttgaaaat

SEQ ID NO: 28024 - DNA, 40 bp, Homo sapiens
ttttcaaaatttgtcatataaattttccttgagttcattc

SEQ ID NO: 28025 - DNA, 40 bp, Homo sapiens
gaatgaactcaaggaaaatttatatgacaaattttgaaaa

SEQ ID NO: 28026 - DNA, 40 bp, Homo sapiens
tttcaaaatttgtcatataaattttccttgagttcattca

SEQ ID NO: 28027 - DNA, 40 bp, Homo sapiens
tgaatgaactcaaggaaaatttatatgacaaattttgaaa

SEQ ID NO: 28028 - DNA, 40 bp, Homo sapiens
ttcaaaatttgtcatataaattttccttgagttcattcag

SEQ ID NO: 28029 - DNA, 40 bp, Homo sapiens
ctgaatgaactcaaggaaaatttatatgacaaattttgaa

SEQ ID NO: 28030 - DNA, 40 bp, Homo sapiens
tcaaaatttgtcatataaattttccttgagttcattcaga

SEQ ID NO: 28031 - DNA, 40 bp, Homo sapiens
tctgaatgaactcaaggaaaatttatatgacaaattttga

SEQ ID NO: 28032 - DNA, 40 bp, Homo sapiens
caaaatttgtcatataaattttccttgagttcattcagat

SEQ ID NO: 28033 - DNA, 40 bp, Homo sapiens
atctgaatgaactcaaggaaaatttatatgacaaattttg

SEQ ID NO: 28034 - DNA, 40 bp, Homo sapiens
aaaatttgtcatataaattttccttgagttcattcagatt

SEQ ID NO: 28035 - DNA, 40 bp, Homo sapiens
aatctgaatgaactcaaggaaaatttatatgacaaatttt

SEQ ID NO: 28036 - DNA, 40 bp, Homo sapiens
aaatttgtcatataaattttccttgagttcattcagattt

SEQ ID NO: 28037 - DNA, 40 bp, Homo sapiens
aaatctgaatgaactcaaggaaaatttatatgacaaattt

SEQ ID NO: 28038 - DNA, 40 bp, Homo sapiens
aatttgtcatataaattttccttgagttcattcagatttt

SEQ ID NO: 28039 - DNA, 40 bp, Homo sapiens
aaaatctgaatgaactcaaggaaaatttatatgacaaatt

SEQ ID NO: 28040 - DNA, 40 bp, Homo sapiens
atttgtcatataaattttccttgagttcattcagattttt

SEQ ID NO: 28041 - DNA, 40 bp, Homo sapiens
aaaaatctgaatgaactcaaggaaaatttatatgacaaat

SEQ ID NO: 28042 - DNA, 40 bp, Homo sapiens
tttgtcatataaattttccttgagttcattcagatttttg

SEQ ID NO: 28043 - DNA, 40 bp, Homo sapiens
caaaaatctgaatgaactcaaggaaaatttatatgacaaa

SEQ ID NO: 28044 - DNA, 40 bp, Homo sapiens
ttgtcatataaattttccttgagttcattcagatttttga

SEQ ID NO: 28045 - DNA, 40 bp, Homo sapiens
tcaaaaatctgaatgaactcaaggaaaatttatatgacaa

SEQ ID NO: 28046 - DNA, 40 bp, Homo sapiens
tgtcatataaattttccttgagttcattcagatttttgaa

SEQ ID NO: 28047 - DNA, 40 bp, Homo sapiens
ttcaaaaatctgaatgaactcaaggaaaatttatatgaca

SEQ ID NO: 28048 - DNA, 40 bp, Homo sapiens
gtcatataaattttccttgagttcattcagatttttgaac

SEQ ID NO: 28049 - DNA, 40 bp, Homo sapiens
gttcaaaaatctgaatgaactcaaggaaaatttatatgac

SEQ ID NO: 28050 - DNA, 40 bp, Homo sapiens
tcatataaattttccttgagttcattcagatttttgaact

SEQ ID NO: 28051 - DNA, 40 bp, Homo sapiens
agttcaaaaatctgaatgaactcaaggaaaatttatatga

SEQ ID NO: 28052 - DNA, 40 bp, Homo sapiens
catataaattttccttgagttcattcagatttttgaacta

SEQ ID NO: 28053 - DNA, 40 bp, Homo sapiens
tagttcaaaaatctgaatgaactcaaggaaaatttatatg

SEQ ID NO: 28054 - DNA, 40 bp, Homo sapiens
atataaattttccttgagttcattcagatttttgaactag

SEQ ID NO: 28055 - DNA, 40 bp, Homo sapiens
ctagttcaaaaatctgaatgaactcaaggaaaatttatat

SEQ ID NO: 28056 - DNA, 40 bp, Homo sapiens
tataaattttccttgagttcattcagatttttgaactagt

SEQ ID NO: 28057 - DNA, 40 bp, Homo sapiens
actagttcaaaaatctgaatgaactcaaggaaaatttata

SEQ ID NO: 28058 - DNA, 40 bp, Homo sapiens
ataaattttccttgagttcattcagatttttgaactagtt

SEQ ID NO: 28059 - DNA, 40 bp, Homo sapiens
aactagttcaaaaatctgaatgaactcaaggaaaatttat

SEQ ID NO: 28060 - DNA, 40 bp, Homo sapiens
taaattttccttgagttcattcagatttttgaactagttt

SEQ ID NO: 28061 - DNA, 40 bp, Homo sapiens
aaactagttcaaaaatctgaatgaactcaaggaaaattta

SEQ ID NO: 28062 - DNA, 40 bp, Homo sapiens
aaattttccttgagttcattcagatttttgaactagtttt

SEQ ID NO: 28063 - DNA, 40 bp, Homo sapiens
aaaactagttcaaaaatctgaatgaactcaaggaaaattt

SEQ ID NO: 28064 - DNA, 40 bp, Homo sapiens
aattttccttgagttcattcagatttttgaactagttttt

SEQ ID NO: 28065 - DNA, 40 bp, Homo sapiens
aaaaactagttcaaaaatctgaatgaactcaaggaaaatt

SEQ ID NO: 28066 - DNA, 40 bp, Homo sapiens
attttccttgagttcattcagatttttgaactagtttttt

SEQ ID NO: 28067 - DNA, 40 bp, Homo sapiens
aaaaaactagttcaaaaatctgaatgaactcaaggaaaat

SEQ ID NO: 28068 - DNA, 40 bp, Homo sapiens
ttttccttgagttcattcagatttttgaactagttttttc

SEQ ID NO: 28069 - DNA, 40 bp, Homo sapiens
gaaaaaactagttcaaaaatctgaatgaactcaaggaaaa

SEQ ID NO: 28070 - DNA, 40 bp, Homo sapiens
tttccttgagttcattcagatttttgaactagttttttct

SEQ ID NO: 28071 - DNA, 40 bp, Homo sapiens
agaaaaaactagttcaaaaatctgaatgaactcaaggaaa

SEQ ID NO: 28072 - DNA, 40 bp, Homo sapiens
ttccttgagttcattcagatttttgaactagttttttctc

SEQ ID NO: 28073 - DNA, 40 bp, Homo sapiens
gagaaaaaactagttcaaaaatctgaatgaactcaaggaa

SEQ ID NO: 28074 - DNA, 40 bp, Homo sapiens
tccttgagttcattcagatttttgaactagttttttctct

SEQ ID NO: 28075 - DNA, 40 bp, Homo sapiens
agagaaaaaactagttcaaaaatctgaatgaactcaagga

SEQ ID NO: 28076 - DNA, 40 bp, Homo sapiens
ccttgagttcattcagatttttgaactagttttttctctt

SEQ ID NO: 28077 - DNA, 40 bp, Homo sapiens
aagagaaaaaactagttcaaaaatctgaatgaactcaagg

SEQ ID NO: 28078 - DNA, 40 bp, Homo sapiens
cttgagttcattcagatttttgaactagttttttctcttg

SEQ ID NO: 28079 - DNA, 40 bp, Homo sapiens
caagagaaaaaactagttcaaaaatctgaatgaactcaag

SEQ ID NO: 28080 - DNA, 40 bp, Homo sapiens
ttgagttcattcagatttttgaactagttttttctcttgg

SEQ ID NO: 28081 - DNA, 40 bp, Homo sapiens
ccaagagaaaaaactagttcaaaaatctgaatgaactcaa

SEQ ID NO: 28082 - DNA, 40 bp, Homo sapiens
tgagttcattcagatttttgaactagttttttctcttggg

SEQ ID NO: 28083 - DNA, 40 bp, Homo sapiens
cccaagagaaaaaactagttcaaaaatctgaatgaactca

SEQ ID NO: 28084 - DNA, 40 bp, Homo sapiens
gagttcattcagatttttgaactagttttttctcttggga

SEQ ID NO: 28085 - DNA, 40 bp, Homo sapiens
tcccaagagaaaaaactagttcaaaaatctgaatgaactc

SEQ ID NO: 28086 - DNA, 40 bp, Homo sapiens
agttcattcagatttttgaactagttttttctcttgggag

SEQ ID NO: 28087 - DNA, 40 bp, Homo sapiens
ctcccaagagaaaaaactagttcaaaaatctgaatgaact

SEQ ID NO: 28088 - DNA, 40 bp, Homo sapiens
gttcattcagatttttgaactagttttttctcttgggagt

SEQ ID NO: 28089 - DNA, 40 bp, Homo sapiens
actcccaagagaaaaaactagttcaaaaatctgaatgaac

SEQ ID NO: 28090 - DNA, 40 bp, Homo sapiens
ttcattcagatttttgaactagttttttctcttgggagta

SEQ ID NO: 28091 - DNA, 40 bp, Homo sapiens
tactcccaagagaaaaaactagttcaaaaatctgaatgaa

SEQ ID NO: 28092 - DNA, 40 bp, Homo sapiens
tcattcagatttttgaactagttttttctcttgggagtag

SEQ ID NO: 28093 - DNA, 40 bp, Homo sapiens
ctactcccaagagaaaaaactagttcaaaaatctgaatga

SEQ ID NO: 28094 - DNA, 40 bp, Homo sapiens
cattcagatttttgaactagttttttctcttgggagtagt

SEQ ID NO: 28095 - DNA, 40 bp, Homo sapiens
actactcccaagagaaaaaactagttcaaaaatctgaatg

SEQ ID NO: 28096 - DNA, 40 bp, Homo sapiens
attcagatttttgaactagttttttctcttgggagtagta

SEQ ID NO: 28097 - DNA, 40 bp, Homo sapiens
tactactcccaagagaaaaaactagttcaaaaatctgaat

SEQ ID NO: 28098 - DNA, 40 bp, Homo sapiens
ttcagatttttgaactagttttttctcttgggagtagtac

SEQ ID NO: 28099 - DNA, 40 bp, Homo sapiens
gtactactcccaagagaaaaaactagttcaaaaatctgaa

SEQ ID NO: 28100 - DNA, 40 bp, Homo sapiens
tcagatttttgaactagttttttctcttgggagtagtaca

SEQ ID NO: 28101 - DNA, 40 bp, Homo sapiens
tgtactactcccaagagaaaaaactagttcaaaaatctga

SEQ ID NO: 28102 - DNA, 40 bp, Homo sapiens
cagatttttgaactagttttttctcttgggagtagtacac

SEQ ID NO: 28103 - DNA, 40 bp, Homo sapiens
gtgtactactcccaagagaaaaaactagttcaaaaatctg

SEQ ID NO: 28104 - DNA, 40 bp, Homo sapiens
agatttttgaactagttttttctcttgggagtagtacaca

SEQ ID NO: 28105 - DNA, 40 bp, Homo sapiens
tgtgtactactcccaagagaaaaaactagttcaaaaatct

SEQ ID NO: 28106 - DNA, 40 bp, Homo sapiens
gatttttgaactagttttttctcttgggagtagtacacac

SEQ ID NO: 28107 - DNA, 40 bp, Homo sapiens
gtgtgtactactcccaagagaaaaaactagttcaaaaatc

SEQ ID NO: 28108 - DNA, 40 bp, Homo sapiens
atttttgaactagttttttctcttgggagtagtacacact

SEQ ID NO: 28109 - DNA, 40 bp, Homo sapiens
agtgtgtactactcccaagagaaaaaactagttcaaaaat

SEQ ID NO: 28110 - DNA, 40 bp, Homo sapiens
tttttgaactagttttttctcttgggagtagtacacactt

SEQ ID NO: 28111 - DNA, 40 bp, Homo sapiens
aagtgtgtactactcccaagagaaaaaactagttcaaaaa

SEQ ID NO: 28112 - DNA, 40 bp, Homo sapiens
ttttgaactagttttttctcttgggagtagtacacactta

SEQ ID NO: 28113 - DNA, 40 bp, Homo sapiens
taagtgtgtactactcccaagagaaaaaactagttcaaaa

SEQ ID NO: 28114 - DNA, 40 bp, Homo sapiens
tttgaactagttttttctcttgggagtagtacacacttaa

SEQ ID NO: 28115 - DNA, 40 bp, Homo sapiens
ttaagtgtgtactactcccaagagaaaaaactagttcaaa

SEQ ID NO: 28116 - DNA, 40 bp, Homo sapiens
ttgaactagttttttctcttgggagtagtacacacttaat

SEQ ID NO: 28117 - DNA, 40 bp, Homo sapiens
attaagtgtgtactactcccaagagaaaaaactagttcaa

SEQ ID NO: 28118 - DNA, 40 bp, Homo sapiens
tgaactagttttttctcttgggagtagtacacacttaatt

SEQ ID NO: 28119 - DNA, 40 bp, Homo sapiens
aattaagtgtgtactactcccaagagaaaaaactagttca

SEQ ID NO: 28120 - DNA, 40 bp, Homo sapiens
gaactagttttttctcttgggagtagtacacacttaattc

SEQ ID NO: 28121 - DNA, 40 bp, Homo sapiens
gaattaagtgtgtactactcccaagagaaaaaactagttc

SEQ ID NO: 28122 - DNA, 40 bp, Homo sapiens
aactagttttttctcttgggagtagtacacacttaattct

SEQ ID NO: 28123 - DNA, 40 bp, Homo sapiens
agaattaagtgtgtactactcccaagagaaaaaactagtt

SEQ ID NO: 28124 - DNA, 40 bp, Homo sapiens
actagttttttctcttgggagtagtacacacttaattctc

SEQ ID NO: 28125 - DNA, 40 bp, Homo sapiens
gagaattaagtgtgtactactcccaagagaaaaaactagt

SEQ ID NO: 28126 - DNA, 40 bp, Homo sapiens
ctagttttttctcttgggagtagtacacacttaattctct

SEQ ID NO: 28127 - DNA, 40 bp, Homo sapiens
agagaattaagtgtgtactactcccaagagaaaaaactag

SEQ ID NO: 28128 - DNA, 40 bp, Homo sapiens
tagttttttctcttgggagtagtacacacttaattctctc

SEQ ID NO: 28129 - DNA, 40 bp, Homo sapiens
gagagaattaagtgtgtactactcccaagagaaaaaacta

SEQ ID NO: 28130 - DNA, 40 bp, Homo sapiens
agttttttctcttgggagtagtacacacttaattctctct

SEQ ID NO: 28131 - DNA, 40 bp, Homo sapiens
agagagaattaagtgtgtactactcccaagagaaaaaact

SEQ ID NO: 28132 - DNA, 40 bp, Homo sapiens
gttttttctcttgggagtagtacacacttaattctctcta

SEQ ID NO: 28133 - DNA, 40 bp, Homo sapiens
tagagagaattaagtgtgtactactcccaagagaaaaaac

SEQ ID NO: 28134 - DNA, 40 bp, Homo sapiens
ttttttctcttgggagtagtacacacttaattctctctag

SEQ ID NO: 28135 - DNA, 40 bp, Homo sapiens
ctagagagaattaagtgtgtactactcccaagagaaaaaa

SEQ ID NO: 28136 - DNA, 40 bp, Homo sapiens
tttttctcttgggagtagtacacacttaattctctctagt

SEQ ID NO: 28137 - DNA, 40 bp, Homo sapiens
actagagagaattaagtgtgtactactcccaagagaaaaa

SEQ ID NO: 28138 - DNA, 40 bp, Homo sapiens
ttttctcttgggagtagtacacacttaattctctctagta

SEQ ID NO: 28139 - DNA, 40 bp, Homo sapiens
tactagagagaattaagtgtgtactactcccaagagaaaa

SEQ ID NO: 28140 - DNA, 40 bp, Homo sapiens
tttctcttgggagtagtacacacttaattctctctagtac

SEQ ID NO: 28141 - DNA, 40 bp, Homo sapiens
gtactagagagaattaagtgtgtactactcccaagagaaa

SEQ ID NO: 28142 - DNA, 40 bp, Homo sapiens
ttctcttgggagtagtacacacttaattctctctagtact

SEQ ID NO: 28143 - DNA, 40 bp, Homo sapiens
agtactagagagaattaagtgtgtactactcccaagagaa

SEQ ID NO: 28144 - DNA, 40 bp, Homo sapiens
tctcttgggagtagtacacacttaattctctctagtacta

SEQ ID NO: 28145 - DNA, 40 bp, Homo sapiens
tagtactagagagaattaagtgtgtactactcccaagaga

SEQ ID NO: 28146 - DNA, 40 bp, Homo sapiens
ctcttgggagtagtacacacttaattctctctagtactaa

SEQ ID NO: 28147 - DNA, 40 bp, Homo sapiens
ttagtactagagagaattaagtgtgtactactcccaagag

SEQ ID NO: 28148 - DNA, 40 bp, Homo sapiens
tcttgggagtagtacacacttaattctctctagtactaag

SEQ ID NO: 28149 - DNA, 40 bp, Homo sapiens
cttagtactagagagaattaagtgtgtactactcccaaga

SEQ ID NO: 28150 - DNA, 40 bp, Homo sapiens
cttgggagtagtacacacttaattctctctagtactaagc

SEQ ID NO: 28151 - DNA, 40 bp, Homo sapiens
gcttagtactagagagaattaagtgtgtactactcccaag

SEQ ID NO: 28152 - DNA, 40 bp, Homo sapiens
ttgggagtagtacacacttaattctctctagtactaagct

SEQ ID NO: 28153 - DNA, 40 bp, Homo sapiens
agcttagtactagagagaattaagtgtgtactactcccaa

SEQ ID NO: 28154 - DNA, 40 bp, Homo sapiens
tgggagtagtacacacttaattctctctagtactaagcta

SEQ ID NO: 28155 - DNA, 40 bp, Homo sapiens
tagcttagtactagagagaattaagtgtgtactactccca

SEQ ID NO: 28156 - DNA, 40 bp, Homo sapiens
gggagtagtacacacttaattctctctagtactaagctaa

SEQ ID NO: 28157 - DNA, 40 bp, Homo sapiens
ttagcttagtactagagagaattaagtgtgtactactccc

SEQ ID NO: 28158 - DNA, 40 bp, Homo sapiens
ggagtagtacacacttaattctctctagtactaagctaat

SEQ ID NO: 28159 - DNA, 40 bp, Homo sapiens
attagcttagtactagagagaattaagtgtgtactactcc

SEQ ID NO: 28160 - DNA, 40 bp, Homo sapiens
gagtagtacacacttaattctctctagtactaagctaatg

SEQ ID NO: 28161 - DNA, 40 bp, Homo sapiens
cattagcttagtactagagagaattaagtgtgtactactc

SEQ ID NO: 28162 - DNA, 40 bp, Homo sapiens
agtagtacacacttaattctctctagtactaagctaatgt

SEQ ID NO: 28163 - DNA, 40 bp, Homo sapiens
acattagcttagtactagagagaattaagtgtgtactact

SEQ ID NO: 28164 - DNA, 40 bp, Homo sapiens
gtagtacacacttaattctctctagtactaagctaatgtt

SEQ ID NO: 28165 - DNA, 40 bp, Homo sapiens
aacattagcttagtactagagagaattaagtgtgtactac

SEQ ID NO: 28166 - DNA, 40 bp, Homo sapiens
tagtacacacttaattctctctagtactaagctaatgttc

SEQ ID NO: 28167 - DNA, 40 bp, Homo sapiens
gaacattagcttagtactagagagaattaagtgtgtacta

SEQ ID NO: 28168 - DNA, 40 bp, Homo sapiens
agtacacacttaattctctctagtactaagctaatgttca

SEQ ID NO: 28169 - DNA, 40 bp, Homo sapiens
tgaacattagcttagtactagagagaattaagtgtgtact

SEQ ID NO: 28170 - DNA, 40 bp, Homo sapiens
gtacacacttaattctctctagtactaagctaatgttcac

SEQ ID NO: 28171 - DNA, 40 bp, Homo sapiens
gtgaacattagcttagtactagagagaattaagtgtgtac

SEQ ID NO: 28172 - DNA, 40 bp, Homo sapiens
tacacacttaattctctctagtactaagctaatgttcacc

SEQ ID NO: 28173 - DNA, 40 bp, Homo sapiens
ggtgaacattagcttagtactagagagaattaagtgtgta

SEQ ID NO: 28174 - DNA, 40 bp, Homo sapiens
acacacttaattctctctagtactaagctaatgttcacca

SEQ ID NO: 28175 - DNA, 40 bp, Homo sapiens
tggtgaacattagcttagtactagagagaattaagtgtgt

SEQ ID NO: 28176 - DNA, 40 bp, Homo sapiens
cacacttaattctctctagtactaagctaatgttcaccat

SEQ ID NO: 28177 - DNA, 40 bp, Homo sapiens
atggtgaacattagcttagtactagagagaattaagtgtg

SEQ ID NO: 28178 - DNA, 40 bp, Homo sapiens
acacttaattctctctagtactaagctaatgttcaccatt

SEQ ID NO: 28179 - DNA, 40 bp, Homo sapiens
aatggtgaacattagcttagtactagagagaattaagtgt

SEQ ID NO: 28180 - DNA, 40 bp, Homo sapiens
cacttaattctctctagtactaagctaatgttcaccattc

SEQ ID NO: 28181 - DNA, 40 bp, Homo sapiens
gaatggtgaacattagcttagtactagagagaattaagtg

SEQ ID NO: 28182 - DNA, 40 bp, Homo sapiens
acttaattctctctagtactaagctaatgttcaccattct

SEQ ID NO: 28183 - DNA, 40 bp, Homo sapiens
agaatggtgaacattagcttagtactagagagaattaagt

SEQ ID NO: 28184 - DNA, 40 bp, Homo sapiens
cttaattctctctagtactaagctaatgttcaccattctt

SEQ ID NO: 28185 - DNA, 40 bp, Homo sapiens
aagaatggtgaacattagcttagtactagagagaattaag

SEQ ID NO: 28186 - DNA, 40 bp, Homo sapiens
ttaattctctctagtactaagctaatgttcaccattctta

SEQ ID NO: 28187 - DNA, 40 bp, Homo sapiens
taagaatggtgaacattagcttagtactagagagaattaa

SEQ ID NO: 28188 - DNA, 40 bp, Homo sapiens
taattctctctagtactaagctaatgttcaccattcttat

SEQ ID NO: 28189 - DNA, 40 bp, Homo sapiens
ataagaatggtgaacattagcttagtactagagagaatta

SEQ ID NO: 28190 - DNA, 40 bp, Homo sapiens
aattctctctagtactaagctaatgttcaccattcttata

SEQ ID NO: 28191 - DNA, 40 bp, Homo sapiens
tataagaatggtgaacattagcttagtactagagagaatt

SEQ ID NO: 28192 - DNA, 40 bp, Homo sapiens
attctctctagtactaagctaatgttcaccattcttataa

SEQ ID NO: 28193 - DNA, 40 bp, Homo sapiens
ttataagaatggtgaacattagcttagtactagagagaat

SEQ ID NO: 28194 - DNA, 40 bp, Homo sapiens
ttctctctagtactaagctaatgttcaccattcttataat

SEQ ID NO: 28195 - DNA, 40 bp, Homo sapiens
attataagaatggtgaacattagcttagtactagagagaa

SEQ ID NO: 28196 - DNA, 40 bp, Homo sapiens
tctctctagtactaagctaatgttcaccattcttataatt

SEQ ID NO: 28197 - DNA, 40 bp, Homo sapiens
aattataagaatggtgaacattagcttagtactagagaga

SEQ ID NO: 28198 - DNA, 40 bp, Homo sapiens
ctctctagtactaagctaatgttcaccattcttataattt

SEQ ID NO: 28199 - DNA, 40 bp, Homo sapiens
aaattataagaatggtgaacattagcttagtactagagag

SEQ ID NO: 28200 - DNA, 40 bp, Homo sapiens
tctctagtactaagctaatgttcaccattcttataatttt

SEQ ID NO: 28201 - DNA, 40 bp, Homo sapiens
aaaattataagaatggtgaacattagcttagtactagaga

SEQ ID NO: 28202 - DNA, 40 bp, Homo sapiens
ctctagtactaagctaatgttcaccattcttataatttta

SEQ ID NO: 28203 - DNA, 40 bp, Homo sapiens
taaaattataagaatggtgaacattagcttagtactagag

SEQ ID NO: 28204 - DNA, 40 bp, Homo sapiens
tctagtactaagctaatgttcaccattcttataattttaa

SEQ ID NO: 28205 - DNA, 40 bp, Homo sapiens
ttaaaattataagaatggtgaacattagcttagtactaga

SEQ ID NO: 28206 - DNA, 40 bp, Homo sapiens
ctagtactaagctaatgttcaccattcttataattttaag

SEQ ID NO: 28207 - DNA, 40 bp, Homo sapiens
cttaaaattataagaatggtgaacattagcttagtactag

SEQ ID NO: 28208 - DNA, 40 bp, Homo sapiens
tagtactaagctaatgttcaccattcttataattttaagt

SEQ ID NO: 28209 - DNA, 40 bp, Homo sapiens
acttaaaattataagaatggtgaacattagcttagtacta

SEQ ID NO: 28210 - DNA, 40 bp, Homo sapiens
agtactaagctaatgttcaccattcttataattttaagta

SEQ ID NO: 28211 - DNA, 40 bp, Homo sapiens
tacttaaaattataagaatggtgaacattagcttagtact

SEQ ID NO: 28212 - DNA, 40 bp, Homo sapiens
gtactaagctaatgttcaccattcttataattttaagtat

SEQ ID NO: 28213 - DNA, 40 bp, Homo sapiens
atacttaaaattataagaatggtgaacattagcttagtac

SEQ ID NO: 28214 - DNA, 40 bp, Homo sapiens
tactaagctaatgttcaccattcttataattttaagtatc

SEQ ID NO: 28215 - DNA, 40 bp, Homo sapiens
gatacttaaaattataagaatggtgaacattagcttagta

SEQ ID NO: 28216 - DNA, 40 bp, Homo sapiens
actaagctaatgttcaccattcttataattttaagtatcc

SEQ ID NO: 28217 - DNA, 40 bp, Homo sapiens
ggatacttaaaattataagaatggtgaacattagcttagt

SEQ ID NO: 28218 - DNA, 40 bp, Homo sapiens
ctaagctaatgttcaccattcttataattttaagtatcca

SEQ ID NO: 28219 - DNA, 40 bp, Homo sapiens
tggatacttaaaattataagaatggtgaacattagcttag

SEQ ID NO: 28220 - DNA, 40 bp, Homo sapiens
taagctaatgttcaccattcttataattttaagtatccag

SEQ ID NO: 28221 - DNA, 40 bp, Homo sapiens
ctggatacttaaaattataagaatggtgaacattagctta

SEQ ID NO: 28222 - DNA, 40 bp, Homo sapiens
aagctaatgttcaccattcttataattttaagtatccagc

SEQ ID NO: 28223 - DNA, 40 bp, Homo sapiens
gctggatacttaaaattataagaatggtgaacattagctt

SEQ ID NO: 28224 - DNA, 40 bp, Homo sapiens
agctaatgttcaccattcttataattttaagtatccagca

SEQ ID NO: 28225 - DNA, 40 bp, Homo sapiens
tgctggatacttaaaattataagaatggtgaacattagct

SEQ ID NO: 28226 - DNA, 40 bp, Homo sapiens
gctaatgttcaccattcttataattttaagtatccagcat

SEQ ID NO: 28227 - DNA, 40 bp, Homo sapiens
atgctggatacttaaaattataagaatggtgaacattagc

SEQ ID NO: 28228 - DNA, 40 bp, Homo sapiens
ctaatgttcaccattcttataattttaagtatccagcatt

SEQ ID NO: 28229 - DNA, 40 bp, Homo sapiens
aatgctggatacttaaaattataagaatggtgaacattag

SEQ ID NO: 28230 - DNA, 40 bp, Homo sapiens
taatgttcaccattcttataattttaagtatccagcattt

SEQ ID NO: 28231 - DNA, 40 bp, Homo sapiens
aaatgctggatacttaaaattataagaatggtgaacatta

SEQ ID NO: 28232 - DNA, 40 bp, Homo sapiens
aatgttcaccattcttataattttaagtatccagcattta

SEQ ID NO: 28233 - DNA, 40 bp, Homo sapiens
taaatgctggatacttaaaattataagaatggtgaacatt

SEQ ID NO: 28234 - DNA, 40 bp, Homo sapiens
atgttcaccattcttataattttaagtatccagcatttag

SEQ ID NO: 28235 - DNA, 40 bp, Homo sapiens
ctaaatgctggatacttaaaattataagaatggtgaacat

SEQ ID NO: 28236 - DNA, 40 bp, Homo sapiens
tgttcaccattcttataattttaagtatccagcatttagt

SEQ ID NO: 28237 - DNA, 40 bp, Homo sapiens
actaaatgctggatacttaaaattataagaatggtgaaca

SEQ ID NO: 28238 - DNA, 40 bp, Homo sapiens
gttcaccattcttataattttaagtatccagcatttagta

SEQ ID NO: 28239 - DNA, 40 bp, Homo sapiens
tactaaatgctggatacttaaaattataagaatggtgaac

SEQ ID NO: 28240 - DNA, 40 bp, Homo sapiens
ttcaccattcttataattttaagtatccagcatttagtaa

SEQ ID NO: 28241 - DNA, 40 bp, Homo sapiens
ttactaaatgctggatacttaaaattataagaatggtgaa

SEQ ID NO: 28242 - DNA, 40 bp, Homo sapiens
tcaccattcttataattttaagtatccagcatttagtaaa

SEQ ID NO: 28243 - DNA, 40 bp, Homo sapiens
tttactaaatgctggatacttaaaattataagaatggtga

SEQ ID NO: 28244 - DNA, 40 bp, Homo sapiens
caccattcttataattttaagtatccagcatttagtaaag

SEQ ID NO: 28245 - DNA, 40 bp, Homo sapiens
ctttactaaatgctggatacttaaaattataagaatggtg

SEQ ID NO: 28246 - DNA, 40 bp, Homo sapiens
accattcttataattttaagtatccagcatttagtaaaga

SEQ ID NO: 28247 - DNA, 40 bp, Homo sapiens
tctttactaaatgctggatacttaaaattataagaatggt

SEQ ID NO: 28248 - DNA, 40 bp, Homo sapiens
ccattcttataattttaagtatccagcatttagtaaagaa

SEQ ID NO: 28249 - DNA, 40 bp, Homo sapiens
ttctttactaaatgctggatacttaaaattataagaatgg

SEQ ID NO: 28250 - DNA, 40 bp, Homo sapiens
cattcttataattttaagtatccagcatttagtaaagaag

SEQ ID NO: 28251 - DNA, 40 bp, Homo sapiens
cttctttactaaatgctggatacttaaaattataagaatg

SEQ ID NO: 28252 - DNA, 40 bp, Homo sapiens
attcttataattttaagtatccagcatttagtaaagaagt

SEQ ID NO: 28253 - DNA, 40 bp, Homo sapiens
acttctttactaaatgctggatacttaaaattataagaat

SEQ ID NO: 28254 - DNA, 40 bp, Homo sapiens
ttcttataattttaagtatccagcatttagtaaagaagtc

SEQ ID NO: 28255 - DNA, 40 bp, Homo sapiens
gacttctttactaaatgctggatacttaaaattataagaa

SEQ ID NO: 28256 - DNA, 40 bp, Homo sapiens
tcttataattttaagtatccagcatttagtaaagaagtct

SEQ ID NO: 28257 - DNA, 40 bp, Homo sapiens
agacttctttactaaatgctggatacttaaaattataaga

SEQ ID NO: 28258 - DNA, 40 bp, Homo sapiens
cttataattttaagtatccagcatttagtaaagaagtctt

SEQ ID NO: 28259 - DNA, 40 bp, Homo sapiens
aagacttctttactaaatgctggatacttaaaattataag

SEQ ID NO: 28260 - DNA, 40 bp, Homo sapiens
ttataattttaagtatccagcatttagtaaagaagtcttt

SEQ ID NO: 28261 - DNA, 40 bp, Homo sapiens
aaagacttctttactaaatgctggatacttaaaattataa

SEQ ID NO: 28262 - DNA, 40 bp, Homo sapiens
tataattttaagtatccagcatttagtaaagaagtctttg

SEQ ID NO: 28263 - DNA, 40 bp, Homo sapiens
caaagacttctttactaaatgctggatacttaaaattata

SEQ ID NO: 28264 - DNA, 40 bp, Homo sapiens
ataattttaagtatccagcatttagtaaagaagtctttgt

SEQ ID NO: 28265 - DNA, 40 bp, Homo sapiens
acaaagacttctttactaaatgctggatacttaaaattat

SEQ ID NO: 28266 - DNA, 40 bp, Homo sapiens
taattttaagtatccagcatttagtaaagaagtctttgtt

SEQ ID NO: 28267 - DNA, 40 bp, Homo sapiens
aacaaagacttctttactaaatgctggatacttaaaatta

SEQ ID NO: 28268 - DNA, 40 bp, Homo sapiens
aattttaagtatccagcatttagtaaagaagtctttgttt

SEQ ID NO: 28269 - DNA, 40 bp, Homo sapiens
aaacaaagacttctttactaaatgctggatacttaaaatt

SEQ ID NO: 28270 - DNA, 40 bp, Homo sapiens
attttaagtatccagcatttagtaaagaagtctttgtttt

SEQ ID NO: 28271 - DNA, 40 bp, Homo sapiens
aaaacaaagacttctttactaaatgctggatacttaaaat

SEQ ID NO: 28272 - DNA, 40 bp, Homo sapiens
ttttaagtatccagcatttagtaaagaagtctttgttttc

SEQ ID NO: 28273 - DNA, 40 bp, Homo sapiens
gaaaacaaagacttctttactaaatgctggatacttaaaa

SEQ ID NO: 28274 - DNA, 40 bp, Homo sapiens
tttaagtatccagcatttagtaaagaagtctttgttttct

SEQ ID NO: 28275 - DNA, 40 bp, Homo sapiens
agaaaacaaagacttctttactaaatgctggatacttaaa

SEQ ID NO: 28276 - DNA, 40 bp, Homo sapiens
ttaagtatccagcatttagtaaagaagtctttgttttctt

SEQ ID NO: 28277 - DNA, 40 bp, Homo sapiens
aagaaaacaaagacttctttactaaatgctggatacttaa

SEQ ID NO: 28278 - DNA, 40 bp, Homo sapiens
taagtatccagcatttagtaaagaagtctttgttttcttt

SEQ ID NO: 28279 - DNA, 40 bp, Homo sapiens
aaagaaaacaaagacttctttactaaatgctggatactta

SEQ ID NO: 28280 - DNA, 40 bp, Homo sapiens
aagtatccagcatttagtaaagaagtctttgttttcttta

SEQ ID NO: 28281 - DNA, 40 bp, Homo sapiens
taaagaaaacaaagacttctttactaaatgctggatactt

SEQ ID NO: 28282 - DNA, 40 bp, Homo sapiens
agtatccagcatttagtaaagaagtctttgttttctttat

SEQ ID NO: 28283 - DNA, 40 bp, Homo sapiens
ataaagaaaacaaagacttctttactaaatgctggatact

SEQ ID NO: 28284 - DNA, 40 bp, Homo sapiens
gtatccagcatttagtaaagaagtctttgttttctttatc

SEQ ID NO: 28285 - DNA, 40 bp, Homo sapiens
gataaagaaaacaaagacttctttactaaatgctggatac

SEQ ID NO: 28286 - DNA, 40 bp, Homo sapiens
tatccagcatttagtaaagaagtctttgttttctttatcc

SEQ ID NO: 28287 - DNA, 40 bp, Homo sapiens
ggataaagaaaacaaagacttctttactaaatgctggata

SEQ ID NO: 28288 - DNA, 40 bp, Homo sapiens
atccagcatttagtaaagaagtctttgttttctttatcct

SEQ ID NO: 28289 - DNA, 40 bp, Homo sapiens
aggataaagaaaacaaagacttctttactaaatgctggat

SEQ ID NO: 28290 - DNA, 40 bp, Homo sapiens
tccagcatttagtaaagaagtctttgttttctttatcctt

SEQ ID NO: 28291 - DNA, 40 bp, Homo sapiens
aaggataaagaaaacaaagacttctttactaaatgctgga

SEQ ID NO: 28292 - DNA, 40 bp, Homo sapiens
ccagcatttagtaaagaagtctttgttttctttatcctta

SEQ ID NO: 28293 - DNA, 40 bp, Homo sapiens
taaggataaagaaaacaaagacttctttactaaatgctgg

SEQ ID NO: 28294 - DNA, 40 bp, Homo sapiens
cagcatttagtaaagaagtctttgttttctttatccttac

SEQ ID NO: 28295 - DNA, 40 bp, Homo sapiens
gtaaggataaagaaaacaaagacttctttactaaatgctg

SEQ ID NO: 28296 - DNA, 40 bp, Homo sapiens
agcatttagtaaagaagtctttgttttctttatccttact

SEQ ID NO: 28297 - DNA, 40 bp, Homo sapiens
agtaaggataaagaaaacaaagacttctttactaaatgct

SEQ ID NO: 28298 - DNA, 40 bp, Homo sapiens
gcatttagtaaagaagtctttgttttctttatccttactt

SEQ ID NO: 28299 - DNA, 40 bp, Homo sapiens
aagtaaggataaagaaaacaaagacttctttactaaatgc

SEQ ID NO: 28300 - DNA, 40 bp, Homo sapiens
catttagtaaagaagtctttgttttctttatccttacttt

SEQ ID NO: 28301 - DNA, 40 bp, Homo sapiens
aaagtaaggataaagaaaacaaagacttctttactaaatg

SEQ ID NO: 28302 - DNA, 40 bp, Homo sapiens
atttagtaaagaagtctttgttttctttatccttactttt

SEQ ID NO: 28303 - DNA, 40 bp, Homo sapiens
aaaagtaaggataaagaaaacaaagacttctttactaaat

SEQ ID NO: 28304 - DNA, 40 bp, Homo sapiens
tttagtaaagaagtctttgttttctttatccttactttta

SEQ ID NO: 28305 - DNA, 40 bp, Homo sapiens
taaaagtaaggataaagaaaacaaagacttctttactaaa

SEQ ID NO: 28306 - DNA, 40 bp, Homo sapiens
ttagtaaagaagtctttgttttctttatccttacttttag

SEQ ID NO: 28307 - DNA, 40 bp, Homo sapiens
ctaaaagtaaggataaagaaaacaaagacttctttactaa

SEQ ID NO: 28308 - DNA, 40 bp, Homo sapiens
tagtaaagaagtctttgttttctttatccttacttttagt

SEQ ID NO: 28309 - DNA, 40 bp, Homo sapiens
actaaaagtaaggataaagaaaacaaagacttctttacta

SEQ ID NO: 28310 - DNA, 40 bp, Homo sapiens
agtaaagaagtctttgttttctttatccttacttttagtg

SEQ ID NO: 28311 - DNA, 40 bp, Homo sapiens
cactaaaagtaaggataaagaaaacaaagacttctttact

SEQ ID NO: 28312 - DNA, 40 bp, Homo sapiens
gtaaagaagtctttgttttctttatccttacttttagtga

SEQ ID NO: 28313 - DNA, 40 bp, Homo sapiens
tcactaaaagtaaggataaagaaaacaaagacttctttac

SEQ ID NO: 28314 - DNA, 40 bp, Homo sapiens
taaagaagtctttgttttctttatccttacttttagtgaa

SEQ ID NO: 28315 - DNA, 40 bp, Homo sapiens
ttcactaaaagtaaggataaagaaaacaaagacttcttta

SEQ ID NO: 28316 - DNA, 40 bp, Homo sapiens
aaagaagtctttgttttctttatccttacttttagtgaat

SEQ ID NO: 28317 - DNA, 40 bp, Homo sapiens
attcactaaaagtaaggataaagaaaacaaagacttcttt

SEQ ID NO: 28318 - DNA, 40 bp, Homo sapiens
aagaagtctttgttttctttatccttacttttagtgaatg

SEQ ID NO: 28319 - DNA, 40 bp, Homo sapiens
cattcactaaaagtaaggataaagaaaacaaagacttctt

SEQ ID NO: 28320 - DNA, 40 bp, Homo sapiens
agaagtctttgttttctttatccttacttttagtgaatgt

SEQ ID NO: 28321 - DNA, 40 bp, Homo sapiens
acattcactaaaagtaaggataaagaaaacaaagacttct

SEQ ID NO: 28322 - DNA, 40 bp, Homo sapiens
gaagtctttgttttctttatccttacttttagtgaatgtc

SEQ ID NO: 28323 - DNA, 40 bp, Homo sapiens
gacattcactaaaagtaaggataaagaaaacaaagacttc

SEQ ID NO: 28324 - DNA, 40 bp, Homo sapiens
aagtctttgttttctttatccttacttttagtgaatgtct

SEQ ID NO: 28325 - DNA, 40 bp, Homo sapiens
agacattcactaaaagtaaggataaagaaaacaaagactt

SEQ ID NO: 28326 - DNA, 40 bp, Homo sapiens
agtctttgttttctttatccttacttttagtgaatgtctt

SEQ ID NO: 28327 - DNA, 40 bp, Homo sapiens
aagacattcactaaaagtaaggataaagaaaacaaagact

SEQ ID NO: 28328 - DNA, 40 bp, Homo sapiens
gtctttgttttctttatccttacttttagtgaatgtctta

SEQ ID NO: 28329 - DNA, 40 bp, Homo sapiens
taagacattcactaaaagtaaggataaagaaaacaaagac

SEQ ID NO: 28330 - DNA, 40 bp, Homo sapiens
tctttgttttctttatccttacttttagtgaatgtcttag

SEQ ID NO: 28331 - DNA, 40 bp, Homo sapiens
ctaagacattcactaaaagtaaggataaagaaaacaaaga

SEQ ID NO: 28332 - DNA, 40 bp, Homo sapiens
ctttgttttctttatccttacttttagtgaatgtcttagt

SEQ ID NO: 28333 - DNA, 40 bp, Homo sapiens
actaagacattcactaaaagtaaggataaagaaaacaaag

SEQ ID NO: 28334 - DNA, 40 bp, Homo sapiens
tttgttttctttatccttacttttagtgaatgtcttagtt

SEQ ID NO: 28335 - DNA, 40 bp, Homo sapiens
aactaagacattcactaaaagtaaggataaagaaaacaaa

SEQ ID NO: 28336 - DNA, 40 bp, Homo sapiens
ttgttttctttatccttacttttagtgaatgtcttagttt

SEQ ID NO: 28337 - DNA, 40 bp, Homo sapiens
aaactaagacattcactaaaagtaaggataaagaaaacaa

SEQ ID NO: 28338 - DNA, 40 bp, Homo sapiens
tgttttctttatccttacttttagtgaatgtcttagtttt

SEQ ID NO: 28339 - DNA, 40 bp, Homo sapiens
aaaactaagacattcactaaaagtaaggataaagaaaaca

SEQ ID NO: 28340 - DNA, 40 bp, Homo sapiens
gttttctttatccttacttttagtgaatgtcttagttttt

SEQ ID NO: 28341 - DNA, 40 bp, Homo sapiens
aaaaactaagacattcactaaaagtaaggataaagaaaac

SEQ ID NO: 28342 - DNA, 40 bp, Homo sapiens
ttttctttatccttacttttagtgaatgtcttagttttta

SEQ ID NO: 28343 - DNA, 40 bp, Homo sapiens
taaaaactaagacattcactaaaagtaaggataaagaaaa

SEQ ID NO: 28344 - DNA, 40 bp, Homo sapiens
tttctttatccttacttttagtgaatgtcttagtttttaa

SEQ ID NO: 28345 - DNA, 40 bp, Homo sapiens
ttaaaaactaagacattcactaaaagtaaggataaagaaa

SEQ ID NO: 28346 - DNA, 40 bp, Homo sapiens
ttctttatccttacttttagtgaatgtcttagtttttaat

SEQ ID NO: 28347 - DNA, 40 bp, Homo sapiens
attaaaaactaagacattcactaaaagtaaggataaagaa

SEQ ID NO: 28348 - DNA, 40 bp, Homo sapiens
tctttatccttacttttagtgaatgtcttagtttttaatt

SEQ ID NO: 28349 - DNA, 40 bp, Homo sapiens
aattaaaaactaagacattcactaaaagtaaggataaaga

SEQ ID NO: 28350 - DNA, 40 bp, Homo sapiens
ctttatccttacttttagtgaatgtcttagtttttaattg

SEQ ID NO: 28351 - DNA, 40 bp, Homo sapiens
caattaaaaactaagacattcactaaaagtaaggataaag

SEQ ID NO: 28352 - DNA, 40 bp, Homo sapiens
tttatccttacttttagtgaatgtcttagtttttaattga

SEQ ID NO: 28353 - DNA, 40 bp, Homo sapiens
tcaattaaaaactaagacattcactaaaagtaaggataaa

SEQ ID NO: 28354 - DNA, 40 bp, Homo sapiens
ttatccttacttttagtgaatgtcttagtttttaattgaa

SEQ ID NO: 28355 - DNA, 40 bp, Homo sapiens
ttcaattaaaaactaagacattcactaaaagtaaggataa

SEQ ID NO: 28356 - DNA, 40 bp, Homo sapiens
tatccttacttttagtgaatgtcttagtttttaattgaaa

SEQ ID NO: 28357 - DNA, 40 bp, Homo sapiens
tttcaattaaaaactaagacattcactaaaagtaaggata

SEQ ID NO: 28358 - DNA, 40 bp, Homo sapiens
atccttacttttagtgaatgtcttagtttttaattgaaaa

SEQ ID NO: 28359 - DNA, 40 bp, Homo sapiens
ttttcaattaaaaactaagacattcactaaaagtaaggat

SEQ ID NO: 28360 - DNA, 40 bp, Homo sapiens
tccttacttttagtgaatgtcttagtttttaattgaaaat

SEQ ID NO: 28361 - DNA, 40 bp, Homo sapiens
attttcaattaaaaactaagacattcactaaaagtaagga

SEQ ID NO: 28362 - DNA, 40 bp, Homo sapiens
ccttacttttagtgaatgtcttagtttttaattgaaaatt

SEQ ID NO: 28363 - DNA, 40 bp, Homo sapiens
aattttcaattaaaaactaagacattcactaaaagtaagg

SEQ ID NO: 28364 - DNA, 40 bp, Homo sapiens
cttacttttagtgaatgtcttagtttttaattgaaaattc

SEQ ID NO: 28365 - DNA, 40 bp, Homo sapiens
gaattttcaattaaaaactaagacattcactaaaagtaag

SEQ ID NO: 28366 - DNA, 40 bp, Homo sapiens
ttacttttagtgaatgtcttagtttttaattgaaaattct

SEQ ID NO: 28367 - DNA, 40 bp, Homo sapiens
agaattttcaattaaaaactaagacattcactaaaagtaa

SEQ ID NO: 28368 - DNA, 40 bp, Homo sapiens
tacttttagtgaatgtcttagtttttaattgaaaattctg

SEQ ID NO: 28369 - DNA, 40 bp, Homo sapiens
cagaattttcaattaaaaactaagacattcactaaaagta

SEQ ID NO: 28370 - DNA, 40 bp, Homo sapiens
acttttagtgaatgtcttagtttttaattgaaaattctgc

SEQ ID NO: 28371 - DNA, 40 bp, Homo sapiens
gcagaattttcaattaaaaactaagacattcactaaaagt

SEQ ID NO: 28372 - DNA, 40 bp, Homo sapiens
cttttagtgaatgtcttagtttttaattgaaaattctgcc

SEQ ID NO: 28373 - DNA, 40 bp, Homo sapiens
ggcagaattttcaattaaaaactaagacattcactaaaag

SEQ ID NO: 28374 - DNA, 40 bp, Homo sapiens
ttttagtgaatgtcttagtttttaattgaaaattctgcca

SEQ ID NO: 28375 - DNA, 40 bp, Homo sapiens
tggcagaattttcaattaaaaactaagacattcactaaaa

SEQ ID NO: 28376 - DNA, 40 bp, Homo sapiens
tttagtgaatgtcttagtttttaattgaaaattctgccat

SEQ ID NO: 28377 - DNA, 40 bp, Homo sapiens
atggcagaattttcaattaaaaactaagacattcactaaa

SEQ ID NO: 28378 - DNA, 40 bp, Homo sapiens
ttagtgaatgtcttagtttttaattgaaaattctgccatg

SEQ ID NO: 28379 - DNA, 40 bp, Homo sapiens
catggcagaattttcaattaaaaactaagacattcactaa

SEQ ID NO: 28380 - DNA, 40 bp, Homo sapiens
tagtgaatgtcttagtttttaattgaaaattctgccatga

SEQ ID NO: 28381 - DNA, 40 bp, Homo sapiens
tcatggcagaattttcaattaaaaactaagacattcacta

SEQ ID NO: 28382 - DNA, 40 bp, Homo sapiens
agtgaatgtcttagtttttaattgaaaattctgccatgaa

SEQ ID NO: 28383 - DNA, 40 bp, Homo sapiens
ttcatggcagaattttcaattaaaaactaagacattcact

SEQ ID NO: 28384 - DNA, 40 bp, Homo sapiens
gtgaatgtcttagtttttaattgaaaattctgccatgaaa

SEQ ID NO: 28385 - DNA, 40 bp, Homo sapiens
tttcatggcagaattttcaattaaaaactaagacattcac

SEQ ID NO: 28386 - DNA, 40 bp, Homo sapiens
tgaatgtcttagtttttaattgaaaattctgccatgaaaa

SEQ ID NO: 28387 - DNA, 40 bp, Homo sapiens
ttttcatggcagaattttcaattaaaaactaagacattca

SEQ ID NO: 28388 - DNA, 40 bp, Homo sapiens
gaatgtcttagtttttaattgaaaattctgccatgaaaat

SEQ ID NO: 28389 - DNA, 40 bp, Homo sapiens
attttcatggcagaattttcaattaaaaactaagacattc

SEQ ID NO: 28390 - DNA, 40 bp, Homo sapiens
aatgtcttagtttttaattgaaaattctgccatgaaaata

SEQ ID NO: 28391 - DNA, 40 bp, Homo sapiens
tattttcatggcagaattttcaattaaaaactaagacatt

SEQ ID NO: 28392 - DNA, 40 bp, Homo sapiens
atgtcttagtttttaattgaaaattctgccatgaaaataa

SEQ ID NO: 28393 - DNA, 40 bp, Homo sapiens
ttattttcatggcagaattttcaattaaaaactaagacat

SEQ ID NO: 28394 - DNA, 40 bp, Homo sapiens
tgtcttagtttttaattgaaaattctgccatgaaaataag

SEQ ID NO: 28395 - DNA, 40 bp, Homo sapiens
cttattttcatggcagaattttcaattaaaaactaagaca

SEQ ID NO: 28396 - DNA, 40 bp, Homo sapiens
gtcttagtttttaattgaaaattctgccatgaaaataagc

SEQ ID NO: 28397 - DNA, 40 bp, Homo sapiens
gcttattttcatggcagaattttcaattaaaaactaagac

SEQ ID NO: 28398 - DNA, 40 bp, Homo sapiens
tcttagtttttaattgaaaattctgccatgaaaataagct

SEQ ID NO: 28399 - DNA, 40 bp, Homo sapiens
agcttattttcatggcagaattttcaattaaaaactaaga

SEQ ID NO: 28400 - DNA, 40 bp, Homo sapiens
cttagtttttaattgaaaattctgccatgaaaataagctc

SEQ ID NO: 28401 - DNA, 40 bp, Homo sapiens
gagcttattttcatggcagaattttcaattaaaaactaag

SEQ ID NO: 28402 - DNA, 40 bp, Homo sapiens
ttagtttttaattgaaaattctgccatgaaaataagctct

SEQ ID NO: 28403 - DNA, 40 bp, Homo sapiens
agagcttattttcatggcagaattttcaattaaaaactaa

SEQ ID NO: 28404 - DNA, 40 bp, Homo sapiens
tagtttttaattgaaaattctgccatgaaaataagctctt

SEQ ID NO: 28405 - DNA, 40 bp, Homo sapiens
aagagcttattttcatggcagaattttcaattaaaaacta

SEQ ID NO: 28406 - DNA, 40 bp, Homo sapiens
agtttttaattgaaaattctgccatgaaaataagctcttt

SEQ ID NO: 28407 - DNA, 40 bp, Homo sapiens
aaagagcttattttcatggcagaattttcaattaaaaact

SEQ ID NO: 28408 - DNA, 40 bp, Homo sapiens
gtttttaattgaaaattctgccatgaaaataagctcttta

SEQ ID NO: 28409 - DNA, 40 bp, Homo sapiens
taaagagcttattttcatggcagaattttcaattaaaaac

SEQ ID NO: 28410 - DNA, 40 bp, Homo sapiens
tttttaattgaaaattctgccatgaaaataagctctttaa

SEQ ID NO: 28411 - DNA, 40 bp, Homo sapiens
ttaaagagcttattttcatggcagaattttcaattaaaaa

SEQ ID NO: 28412 - DNA, 40 bp, Homo sapiens
ttttaattgaaaattctgccatgaaaataagctctttaac

SEQ ID NO: 28413 - DNA, 40 bp, Homo sapiens
gttaaagagcttattttcatggcagaattttcaattaaaa

SEQ ID NO: 28414 - DNA, 40 bp, Homo sapiens
tttaattgaaaattctgccatgaaaataagctctttaaca

SEQ ID NO: 28415 - DNA, 40 bp, Homo sapiens
tgttaaagagcttattttcatggcagaattttcaattaaa

SEQ ID NO: 28416 - DNA, 40 bp, Homo sapiens
ttaattgaaaattctgccatgaaaataagctctttaacat

SEQ ID NO: 28417 - DNA, 40 bp, Homo sapiens
atgttaaagagcttattttcatggcagaattttcaattaa

SEQ ID NO: 28418 - DNA, 40 bp, Homo sapiens
taattgaaaattctgccatgaaaataagctctttaacatc

SEQ ID NO: 28419 - DNA, 40 bp, Homo sapiens
gatgttaaagagcttattttcatggcagaattttcaatta

SEQ ID NO: 28420 - DNA, 40 bp, Homo sapiens
aattgaaaattctgccatgaaaataagctctttaacatct

SEQ ID NO: 28421 - DNA, 40 bp, Homo sapiens
agatgttaaagagcttattttcatggcagaattttcaatt

SEQ ID NO: 28422 - DNA, 40 bp, Homo sapiens
attgaaaattctgccatgaaaataagctctttaacatctt

SEQ ID NO: 28423 - DNA, 40 bp, Homo sapiens
aagatgttaaagagcttattttcatggcagaattttcaat

SEQ ID NO: 28424 - DNA, 40 bp, Homo sapiens
ttgaaaattctgccatgaaaataagctctttaacatcttc

SEQ ID NO: 28425 - DNA, 40 bp, Homo sapiens
gaagatgttaaagagcttattttcatggcagaattttcaa

SEQ ID NO: 28426 - DNA, 40 bp, Homo sapiens
tgaaaattctgccatgaaaataagctctttaacatcttca

SEQ ID NO: 28427 - DNA, 40 bp, Homo sapiens
tgaagatgttaaagagcttattttcatggcagaattttca

SEQ ID NO: 28428 - DNA, 40 bp, Homo sapiens
gaaaattctgccatgaaaataagctctttaacatcttcac

SEQ ID NO: 28429 - DNA, 40 bp, Homo sapiens
gtgaagatgttaaagagcttattttcatggcagaattttc

SEQ ID NO: 28430 - DNA, 40 bp, Homo sapiens
aaaattctgccatgaaaataagctctttaacatcttcact

SEQ ID NO: 28431 - DNA, 40 bp, Homo sapiens
agtgaagatgttaaagagcttattttcatggcagaatttt

SEQ ID NO: 28432 - DNA, 40 bp, Homo sapiens
aaattctgccatgaaaataagctctttaacatcttcactc

SEQ ID NO: 28433 - DNA, 40 bp, Homo sapiens
gagtgaagatgttaaagagcttattttcatggcagaattt

SEQ ID NO: 28434 - DNA, 40 bp, Homo sapiens
aattctgccatgaaaataagctctttaacatcttcactcc

SEQ ID NO: 28435 - DNA, 40 bp, Homo sapiens
ggagtgaagatgttaaagagcttattttcatggcagaatt

SEQ ID NO: 28436 - DNA, 40 bp, Homo sapiens
attctgccatgaaaataagctctttaacatcttcactccc

SEQ ID NO: 28437 - DNA, 40 bp, Homo sapiens
gggagtgaagatgttaaagagcttattttcatggcagaat

SEQ ID NO: 28438 - DNA, 40 bp, Homo sapiens
ttctgccatgaaaataagctctttaacatcttcactccct

SEQ ID NO: 28439 - DNA, 40 bp, Homo sapiens
agggagtgaagatgttaaagagcttattttcatggcagaa

SEQ ID NO: 28440 - DNA, 40 bp, Homo sapiens
tctgccatgaaaataagctctttaacatcttcactcccta

SEQ ID NO: 28441 - DNA, 40 bp, Homo sapiens
tagggagtgaagatgttaaagagcttattttcatggcaga

SEQ ID NO: 28442 - DNA, 40 bp, Homo sapiens
ctgccatgaaaataagctctttaacatcttcactccctaa

SEQ ID NO: 28443 - DNA, 40 bp, Homo sapiens
ttagggagtgaagatgttaaagagcttattttcatggcag

SEQ ID NO: 28444 - DNA, 40 bp, Homo sapiens
tgccatgaaaataagctctttaacatcttcactccctaat

SEQ ID NO: 28445 - DNA, 40 bp, Homo sapiens
attagggagtgaagatgttaaagagcttattttcatggca

SEQ ID NO: 28446 - DNA, 40 bp, Homo sapiens
gccatgaaaataagctctttaacatcttcactccctaatc

SEQ ID NO: 28447 - DNA, 40 bp, Homo sapiens
gattagggagtgaagatgttaaagagcttattttcatggc

SEQ ID NO: 28448 - DNA, 40 bp, Homo sapiens
ccatgaaaataagctctttaacatcttcactccctaatca

SEQ ID NO: 28449 - DNA, 40 bp, Homo sapiens
tgattagggagtgaagatgttaaagagcttattttcatgg

SEQ ID NO: 28450 - DNA, 40 bp, Homo sapiens
catgaaaataagctctttaacatcttcactccctaatcaa

SEQ ID NO: 28451 - DNA, 40 bp, Homo sapiens
ttgattagggagtgaagatgttaaagagcttattttcatg

SEQ ID NO: 28452 - DNA, 40 bp, Homo sapiens
atgaaaataagctctttaacatcttcactccctaatcaaa

SEQ ID NO: 28453 - DNA, 40 bp, Homo sapiens
tttgattagggagtgaagatgttaaagagcttattttcat

SEQ ID NO: 28454 - DNA, 40 bp, Homo sapiens
tgaaaataagctctttaacatcttcactccctaatcaaaa

SEQ ID NO: 28455 - DNA, 40 bp, Homo sapiens
ttttgattagggagtgaagatgttaaagagcttattttca

SEQ ID NO: 28456 - DNA, 40 bp, Homo sapiens
gaaaataagctctttaacatcttcactccctaatcaaaac

SEQ ID NO: 28457 - DNA, 40 bp, Homo sapiens
gttttgattagggagtgaagatgttaaagagcttattttc

SEQ ID NO: 28458 - DNA, 40 bp, Homo sapiens
aaaataagctctttaacatcttcactccctaatcaaaaca

SEQ ID NO: 28459 - DNA, 40 bp, Homo sapiens
tgttttgattagggagtgaagatgttaaagagcttatttt

SEQ ID NO: 28460 - DNA, 40 bp, Homo sapiens
aaataagctctttaacatcttcactccctaatcaaaacag

SEQ ID NO: 28461 - DNA, 40 bp, Homo sapiens
ctgttttgattagggagtgaagatgttaaagagcttattt

SEQ ID NO: 28462 - DNA, 40 bp, Homo sapiens
aataagctctttaacatcttcactccctaatcaaaacaga

SEQ ID NO: 28463 - DNA, 40 bp, Homo sapiens
tctgttttgattagggagtgaagatgttaaagagcttatt

SEQ ID NO: 28464 - DNA, 40 bp, Homo sapiens
ataagctctttaacatcttcactccctaatcaaaacagaa

SEQ ID NO: 28465 - DNA, 40 bp, Homo sapiens
ttctgttttgattagggagtgaagatgttaaagagcttat

SEQ ID NO: 28466 - DNA, 40 bp, Homo sapiens
taagctctttaacatcttcactccctaatcaaaacagaaa

SEQ ID NO: 28467 - DNA, 40 bp, Homo sapiens
tttctgttttgattagggagtgaagatgttaaagagctta

SEQ ID NO: 28468 - DNA, 40 bp, Homo sapiens
aagctctttaacatcttcactccctaatcaaaacagaaat

SEQ ID NO: 28469 - DNA, 40 bp, Homo sapiens
atttctgttttgattagggagtgaagatgttaaagagctt

SEQ ID NO: 28470 - DNA, 40 bp, Homo sapiens
agctctttaacatcttcactccctaatcaaaacagaaatc

SEQ ID NO: 28471 - DNA, 40 bp, Homo sapiens
gatttctgttttgattagggagtgaagatgttaaagagct

SEQ ID NO: 28472 - DNA, 40 bp, Homo sapiens
gctctttaacatcttcactccctaatcaaaacagaaatcc

SEQ ID NO: 28473 - DNA, 40 bp, Homo sapiens
ggatttctgttttgattagggagtgaagatgttaaagagc

SEQ ID NO: 28474 - DNA, 40 bp, Homo sapiens
ctctttaacatcttcactccctaatcaaaacagaaatcct

SEQ ID NO: 28475 - DNA, 40 bp, Homo sapiens
aggatttctgttttgattagggagtgaagatgttaaagag

SEQ ID NO: 28476 - DNA, 40 bp, Homo sapiens
tctttaacatcttcactccctaatcaaaacagaaatcctt

SEQ ID NO: 28477 - DNA, 40 bp, Homo sapiens
aaggatttctgttttgattagggagtgaagatgttaaaga

SEQ ID NO: 28478 - DNA, 40 bp, Homo sapiens
ctttaacatcttcactccctaatcaaaacagaaatccttc

SEQ ID NO: 28479 - DNA, 40 bp, Homo sapiens
gaaggatttctgttttgattagggagtgaagatgttaaag

SEQ ID NO: 28480 - DNA, 40 bp, Homo sapiens
tttaacatcttcactccctaatcaaaacagaaatccttca

SEQ ID NO: 28481 - DNA, 40 bp, Homo sapiens
tgaaggatttctgttttgattagggagtgaagatgttaaa

SEQ ID NO: 28482 - DNA, 40 bp, Homo sapiens
ttaacatcttcactccctaatcaaaacagaaatccttcat

SEQ ID NO: 28483 - DNA, 40 bp, Homo sapiens
atgaaggatttctgttttgattagggagtgaagatgttaa

SEQ ID NO: 28484 - DNA, 40 bp, Homo sapiens
taacatcttcactccctaatcaaaacagaaatccttcata

SEQ ID NO: 28485 - DNA, 40 bp, Homo sapiens
tatgaaggatttctgttttgattagggagtgaagatgtta

SEQ ID NO: 28486 - DNA, 40 bp, Homo sapiens
aacatcttcactccctaatcaaaacagaaatccttcatag

SEQ ID NO: 28487 - DNA, 40 bp, Homo sapiens
ctatgaaggatttctgttttgattagggagtgaagatgtt

SEQ ID NO: 28488 - DNA, 40 bp, Homo sapiens
acatcttcactccctaatcaaaacagaaatccttcatagc

SEQ ID NO: 28489 - DNA, 40 bp, Homo sapiens
gctatgaaggatttctgttttgattagggagtgaagatgt

SEQ ID NO: 28490 - DNA, 40 bp, Homo sapiens
catcttcactccctaatcaaaacagaaatccttcatagcc

SEQ ID NO: 28491 - DNA, 40 bp, Homo sapiens
ggctatgaaggatttctgttttgattagggagtgaagatg

SEQ ID NO: 28492 - DNA, 40 bp, Homo sapiens
atcttcactccctaatcaaaacagaaatccttcatagcct

SEQ ID NO: 28493 - DNA, 40 bp, Homo sapiens
aggctatgaaggatttctgttttgattagggagtgaagat

SEQ ID NO: 28494 - DNA, 40 bp, Homo sapiens
tcttcactccctaatcaaaacagaaatccttcatagcctt

SEQ ID NO: 28495 - DNA, 40 bp, Homo sapiens
aaggctatgaaggatttctgttttgattagggagtgaaga

SEQ ID NO: 28496 - DNA, 40 bp, Homo sapiens
cttcactccctaatcaaaacagaaatccttcatagccttc

SEQ ID NO: 28497 - DNA, 40 bp, Homo sapiens
gaaggctatgaaggatttctgttttgattagggagtgaag

SEQ ID NO: 28498 - DNA, 40 bp, Homo sapiens
ttcactccctaatcaaaacagaaatccttcatagccttca

SEQ ID NO: 28499 - DNA, 40 bp, Homo sapiens
tgaaggctatgaaggatttctgttttgattagggagtgaa

SEQ ID NO: 28500 - DNA, 40 bp, Homo sapiens
tcactccctaatcaaaacagaaatccttcatagccttcag

SEQ ID NO: 28501 - DNA, 40 bp, Homo sapiens
ctgaaggctatgaaggatttctgttttgattagggagtga

SEQ ID NO: 28502 - DNA, 40 bp, Homo sapiens
cactccctaatcaaaacagaaatccttcatagccttcagt

SEQ ID NO: 28503 - DNA, 40 bp, Homo sapiens
actgaaggctatgaaggatttctgttttgattagggagtg

SEQ ID NO: 28504 - DNA, 40 bp, Homo sapiens
actccctaatcaaaacagaaatccttcatagccttcagtt

SEQ ID NO: 28505 - DNA, 40 bp, Homo sapiens
aactgaaggctatgaaggatttctgttttgattagggagt

SEQ ID NO: 28506 - DNA, 40 bp, Homo sapiens
ctccctaatcaaaacagaaatccttcatagccttcagttg

SEQ ID NO: 28507 - DNA, 40 bp, Homo sapiens
caactgaaggctatgaaggatttctgttttgattagggag

SEQ ID NO: 28508 - DNA, 40 bp, Homo sapiens
tccctaatcaaaacagaaatccttcatagccttcagttgt

SEQ ID NO: 28509 - DNA, 40 bp, Homo sapiens
acaactgaaggctatgaaggatttctgttttgattaggga

SEQ ID NO: 28510 - DNA, 40 bp, Homo sapiens
ccctaatcaaaacagaaatccttcatagccttcagttgta

SEQ ID NO: 28511 - DNA, 40 bp, Homo sapiens
tacaactgaaggctatgaaggatttctgttttgattaggg

SEQ ID NO: 28512 - DNA, 40 bp, Homo sapiens
cctaatcaaaacagaaatccttcatagccttcagttgtag

SEQ ID NO: 28513 - DNA, 40 bp, Homo sapiens
ctacaactgaaggctatgaaggatttctgttttgattagg

SEQ ID NO: 28514 - DNA, 40 bp, Homo sapiens
ctaatcaaaacagaaatccttcatagccttcagttgtagc

SEQ ID NO: 28515 - DNA, 40 bp, Homo sapiens
gctacaactgaaggctatgaaggatttctgttttgattag

SEQ ID NO: 28516 - DNA, 40 bp, Homo sapiens
taatcaaaacagaaatccttcatagccttcagttgtagct

SEQ ID NO: 28517 - DNA, 40 bp, Homo sapiens
agctacaactgaaggctatgaaggatttctgttttgatta

SEQ ID NO: 28518 - DNA, 40 bp, Homo sapiens
aatcaaaacagaaatccttcatagccttcagttgtagcta

SEQ ID NO: 28519 - DNA, 40 bp, Homo sapiens
tagctacaactgaaggctatgaaggatttctgttttgatt

SEQ ID NO: 28520 - DNA, 40 bp, Homo sapiens
atcaaaacagaaatccttcatagccttcagttgtagctat

SEQ ID NO: 28521 - DNA, 40 bp, Homo sapiens
atagctacaactgaaggctatgaaggatttctgttttgat

SEQ ID NO: 28522 - DNA, 40 bp, Homo sapiens
tcaaaacagaaatccttcatagccttcagttgtagctatc

SEQ ID NO: 28523 - DNA, 40 bp, Homo sapiens
gatagctacaactgaaggctatgaaggatttctgttttga

SEQ ID NO: 28524 - DNA, 40 bp, Homo sapiens
caaaacagaaatccttcatagccttcagttgtagctatcc

SEQ ID NO: 28525 - DNA, 40 bp, Homo sapiens
ggatagctacaactgaaggctatgaaggatttctgttttg

SEQ ID NO: 28526 - DNA, 40 bp, Homo sapiens
aaaacagaaatccttcatagccttcagttgtagctatcct

SEQ ID NO: 28527 - DNA, 40 bp, Homo sapiens
aggatagctacaactgaaggctatgaaggatttctgtttt

SEQ ID NO: 28528 - DNA, 40 bp, Homo sapiens
aaacagaaatccttcatagccttcagttgtagctatcctt

SEQ ID NO: 28529 - DNA, 40 bp, Homo sapiens
aaggatagctacaactgaaggctatgaaggatttctgttt

SEQ ID NO: 28530 - DNA, 40 bp, Homo sapiens
aacagaaatccttcatagccttcagttgtagctatccttc

SEQ ID NO: 28531 - DNA, 40 bp, Homo sapiens
gaaggatagctacaactgaaggctatgaaggatttctgtt

SEQ ID NO: 28532 - DNA, 40 bp, Homo sapiens
acagaaatccttcatagccttcagttgtagctatccttcc

SEQ ID NO: 28533 - DNA, 40 bp, Homo sapiens
ggaaggatagctacaactgaaggctatgaaggatttctgt

SEQ ID NO: 28534 - DNA, 40 bp, Homo sapiens
cagaaatccttcatagccttcagttgtagctatccttccc

SEQ ID NO: 28535 - DNA, 40 bp, Homo sapiens
gggaaggatagctacaactgaaggctatgaaggatttctg

SEQ ID NO: 28536 - DNA, 40 bp, Homo sapiens
agaaatccttcatagccttcagttgtagctatccttccct

SEQ ID NO: 28537 - DNA, 40 bp, Homo sapiens
agggaaggatagctacaactgaaggctatgaaggatttct

SEQ ID NO: 28538 - DNA, 40 bp, Homo sapiens
gaaatccttcatagccttcagttgtagctatccttccctg

SEQ ID NO: 28539 - DNA, 40 bp, Homo sapiens
cagggaaggatagctacaactgaaggctatgaaggatttc

SEQ ID NO: 28540 - DNA, 40 bp, Homo sapiens
aaatccttcatagccttcagttgtagctatccttccctgt

SEQ ID NO: 28541 - DNA, 40 bp, Homo sapiens
acagggaaggatagctacaactgaaggctatgaaggattt

SEQ ID NO: 28542 - DNA, 40 bp, Homo sapiens
aatccttcatagccttcagttgtagctatccttccctgtg

SEQ ID NO: 28543 - DNA, 40 bp, Homo sapiens
cacagggaaggatagctacaactgaaggctatgaaggatt

SEQ ID NO: 28544 - DNA, 40 bp, Homo sapiens
atccttcatagccttcagttgtagctatccttccctgtga

SEQ ID NO: 28545 - DNA, 40 bp, Homo sapiens
tcacagggaaggatagctacaactgaaggctatgaaggat

SEQ ID NO: 28546 - DNA, 40 bp, Homo sapiens
tccttcatagccttcagttgtagctatccttccctgtgat

SEQ ID NO: 28547 - DNA, 40 bp, Homo sapiens
atcacagggaaggatagctacaactgaaggctatgaagga

SEQ ID NO: 28548 - DNA, 40 bp, Homo sapiens
ccttcatagccttcagttgtagctatccttccctgtgatt

SEQ ID NO: 28549 - DNA, 40 bp, Homo sapiens
aatcacagggaaggatagctacaactgaaggctatgaagg

SEQ ID NO: 28550 - DNA, 40 bp, Homo sapiens
cttcatagccttcagttgtagctatccttccctgtgattt

SEQ ID NO: 28551 - DNA, 40 bp, Homo sapiens
aaatcacagggaaggatagctacaactgaaggctatgaag

SEQ ID NO: 28552 - DNA, 40 bp, Homo sapiens
ttcatagccttcagttgtagctatccttccctgtgatttg

SEQ ID NO: 28553 - DNA, 40 bp, Homo sapiens
caaatcacagggaaggatagctacaactgaaggctatgaa

SEQ ID NO: 28554 - DNA, 40 bp, Homo sapiens
tcatagccttcagttgtagctatccttccctgtgatttgt

SEQ ID NO: 28555 - DNA, 40 bp, Homo sapiens
acaaatcacagggaaggatagctacaactgaaggctatga

SEQ ID NO: 28556 - DNA, 40 bp, Homo sapiens
catagccttcagttgtagctatccttccctgtgatttgtc

SEQ ID NO: 28557 - DNA, 40 bp, Homo sapiens
gacaaatcacagggaaggatagctacaactgaaggctatg

SEQ ID NO: 28558 - DNA, 40 bp, Homo sapiens
atagccttcagttgtagctatccttccctgtgatttgtcc

SEQ ID NO: 28559 - DNA, 40 bp, Homo sapiens
ggacaaatcacagggaaggatagctacaactgaaggctat

SEQ ID NO: 28560 - DNA, 40 bp, Homo sapiens
tagccttcagttgtagctatccttccctgtgatttgtcca

SEQ ID NO: 28561 - DNA, 40 bp, Homo sapiens
tggacaaatcacagggaaggatagctacaactgaaggcta

SEQ ID NO: 28562 - DNA, 40 bp, Homo sapiens
agccttcagttgtagctatccttccctgtgatttgtccag

SEQ ID NO: 28563 - DNA, 40 bp, Homo sapiens
ctggacaaatcacagggaaggatagctacaactgaaggct

SEQ ID NO: 28564 - DNA, 40 bp, Homo sapiens
gccttcagttgtagctatccttccctgtgatttgtccagc

SEQ ID NO: 28565 - DNA, 40 bp, Homo sapiens
gctggacaaatcacagggaaggatagctacaactgaaggc

SEQ ID NO: 28566 - DNA, 40 bp, Homo sapiens
ccttcagttgtagctatccttccctgtgatttgtccagct

SEQ ID NO: 28567 - DNA, 40 bp, Homo sapiens
agctggacaaatcacagggaaggatagctacaactgaagg

SEQ ID NO: 28568 - DNA, 40 bp, Homo sapiens
cttcagttgtagctatccttccctgtgatttgtccagctc

SEQ ID NO: 28569 - DNA, 40 bp, Homo sapiens
gagctggacaaatcacagggaaggatagctacaactgaag

SEQ ID NO: 28570 - DNA, 40 bp, Homo sapiens
ttcagttgtagctatccttccctgtgatttgtccagctcc

SEQ ID NO: 28571 - DNA, 40 bp, Homo sapiens
ggagctggacaaatcacagggaaggatagctacaactgaa

SEQ ID NO: 28572 - DNA, 40 bp, Homo sapiens
tcagttgtagctatccttccctgtgatttgtccagctcca

SEQ ID NO: 28573 - DNA, 40 bp, Homo sapiens
tggagctggacaaatcacagggaaggatagctacaactga

SEQ ID NO: 28574 - DNA, 40 bp, Homo sapiens
cagttgtagctatccttccctgtgatttgtccagctccat

SEQ ID NO: 28575 - DNA, 40 bp, Homo sapiens
atggagctggacaaatcacagggaaggatagctacaactg

SEQ ID NO: 28576 - DNA, 40 bp, Homo sapiens
agttgtagctatccttccctgtgatttgtccagctccatt

SEQ ID NO: 28577 - DNA, 40 bp, Homo sapiens
aatggagctggacaaatcacagggaaggatagctacaact

SEQ ID NO: 28578 - DNA, 40 bp, Homo sapiens
gttgtagctatccttccctgtgatttgtccagctccatta

SEQ ID NO: 28579 - DNA, 40 bp, Homo sapiens
taatggagctggacaaatcacagggaaggatagctacaac

SEQ ID NO: 28580 - DNA, 40 bp, Homo sapiens
ttgtagctatccttccctgtgatttgtccagctccattat

SEQ ID NO: 28581 - DNA, 40 bp, Homo sapiens
ataatggagctggacaaatcacagggaaggatagctacaa

SEQ ID NO: 28582 - DNA, 40 bp, Homo sapiens
tgtagctatccttccctgtgatttgtccagctccattata

SEQ ID NO: 28583 - DNA, 40 bp, Homo sapiens
tataatggagctggacaaatcacagggaaggatagctaca

SEQ ID NO: 28584 - DNA, 40 bp, Homo sapiens
gtagctatccttccctgtgatttgtccagctccattatat

SEQ ID NO: 28585 - DNA, 40 bp, Homo sapiens
atataatggagctggacaaatcacagggaaggatagctac

SEQ ID NO: 28586 - DNA, 40 bp, Homo sapiens
tagctatccttccctgtgatttgtccagctccattatatt

SEQ ID NO: 28587 - DNA, 40 bp, Homo sapiens
aatataatggagctggacaaatcacagggaaggatagcta

SEQ ID NO: 28588 - DNA, 40 bp, Homo sapiens
agctatccttccctgtgatttgtccagctccattatattt

SEQ ID NO: 28589 - DNA, 40 bp, Homo sapiens
aaatataatggagctggacaaatcacagggaaggatagct

SEQ ID NO: 28590 - DNA, 40 bp, Homo sapiens
gctatccttccctgtgatttgtccagctccattatattta

SEQ ID NO: 28591 - DNA, 40 bp, Homo sapiens
taaatataatggagctggacaaatcacagggaaggatagc

SEQ ID NO: 28592 - DNA, 40 bp, Homo sapiens
ctatccttccctgtgatttgtccagctccattatatttat

SEQ ID NO: 28593 - DNA, 40 bp, Homo sapiens
ataaatataatggagctggacaaatcacagggaaggatag

SEQ ID NO: 28594 - DNA, 40 bp, Homo sapiens
tatccttccctgtgatttgtccagctccattatatttatt

SEQ ID NO: 28595 - DNA, 40 bp, Homo sapiens
aataaatataatggagctggacaaatcacagggaaggata

SEQ ID NO: 28596 - DNA, 40 bp, Homo sapiens
atccttccctgtgatttgtccagctccattatatttattt

SEQ ID NO: 28597 - DNA, 40 bp, Homo sapiens
aaataaatataatggagctggacaaatcacagggaaggat

SEQ ID NO: 28598 - DNA, 40 bp, Homo sapiens
tccttccctgtgatttgtccagctccattatatttatttt

SEQ ID NO: 28599 - DNA, 40 bp, Homo sapiens
aaaataaatataatggagctggacaaatcacagggaagga

SEQ ID NO: 28600 - DNA, 40 bp, Homo sapiens
ccttccctgtgatttgtccagctccattatatttattttg

SEQ ID NO: 28601 - DNA, 40 bp, Homo sapiens
caaaataaatataatggagctggacaaatcacagggaagg

SEQ ID NO: 28602 - DNA, 40 bp, Homo sapiens
cttccctgtgatttgtccagctccattatatttattttga

SEQ ID NO: 28603 - DNA, 40 bp, Homo sapiens
tcaaaataaatataatggagctggacaaatcacagggaag

SEQ ID NO: 28604 - DNA, 40 bp, Homo sapiens
ttccctgtgatttgtccagctccattatatttattttgaa

SEQ ID NO: 28605 - DNA, 40 bp, Homo sapiens
ttcaaaataaatataatggagctggacaaatcacagggaa

SEQ ID NO: 28606 - DNA, 40 bp, Homo sapiens
tccctgtgatttgtccagctccattatatttattttgaaa

SEQ ID NO: 28607 - DNA, 40 bp, Homo sapiens
tttcaaaataaatataatggagctggacaaatcacaggga

SEQ ID NO: 28608 - DNA, 40 bp, Homo sapiens
ccctgtgatttgtccagctccattatatttattttgaaat

SEQ ID NO: 28609 - DNA, 40 bp, Homo sapiens
atttcaaaataaatataatggagctggacaaatcacaggg

SEQ ID NO: 28610 - DNA, 40 bp, Homo sapiens
cctgtgatttgtccagctccattatatttattttgaaata

SEQ ID NO: 28611 - DNA, 40 bp, Homo sapiens
tatttcaaaataaatataatggagctggacaaatcacagg

SEQ ID NO: 28612 - DNA, 40 bp, Homo sapiens
ctgtgatttgtccagctccattatatttattttgaaatat

SEQ ID NO: 28613 - DNA, 40 bp, Homo sapiens
atatttcaaaataaatataatggagctggacaaatcacag

SEQ ID NO: 28614 - DNA, 40 bp, Homo sapiens
tgtgatttgtccagctccattatatttattttgaaatatg

SEQ ID NO: 28615 - DNA, 40 bp, Homo sapiens
catatttcaaaataaatataatggagctggacaaatcaca

SEQ ID NO: 28616 - DNA, 40 bp, Homo sapiens
gtgatttgtccagctccattatatttattttgaaatatgg

SEQ ID NO: 28617 - DNA, 40 bp, Homo sapiens
ccatatttcaaaataaatataatggagctggacaaatcac

SEQ ID NO: 28618 - DNA, 40 bp, Homo sapiens
tgatttgtccagctccattatatttattttgaaatatggt

SEQ ID NO: 28619 - DNA, 40 bp, Homo sapiens
accatatttcaaaataaatataatggagctggacaaatca

SEQ ID NO: 28620 - DNA, 40 bp, Homo sapiens
gatttgtccagctccattatatttattttgaaatatggtg

SEQ ID NO: 28621 - DNA, 40 bp, Homo sapiens
caccatatttcaaaataaatataatggagctggacaaatc

SEQ ID NO: 28622 - DNA, 40 bp, Homo sapiens
atttgtccagctccattatatttattttgaaatatggtga

SEQ ID NO: 28623 - DNA, 40 bp, Homo sapiens
tcaccatatttcaaaataaatataatggagctggacaaat

SEQ ID NO: 28624 - DNA, 40 bp, Homo sapiens
tttgtccagctccattatatttattttgaaatatggtgac

SEQ ID NO: 28625 - DNA, 40 bp, Homo sapiens
gtcaccatatttcaaaataaatataatggagctggacaaa

SEQ ID NO: 28626 - DNA, 40 bp, Homo sapiens
ttgtccagctccattatatttattttgaaatatggtgacc

SEQ ID NO: 28627 - DNA, 40 bp, Homo sapiens
ggtcaccatatttcaaaataaatataatggagctggacaa

SEQ ID NO: 28628 - DNA, 40 bp, Homo sapiens
tgtccagctccattatatttattttgaaatatggtgacca

SEQ ID NO: 28629 - DNA, 40 bp, Homo sapiens
tggtcaccatatttcaaaataaatataatggagctggaca

SEQ ID NO: 28630 - DNA, 40 bp, Homo sapiens
gtccagctccattatatttattttgaaatatggtgaccag

SEQ ID NO: 28631 - DNA, 40 bp, Homo sapiens
ctggtcaccatatttcaaaataaatataatggagctggac

SEQ ID NO: 28632 - DNA, 40 bp, Homo sapiens
tccagctccattatatttattttgaaatatggtgaccagt

SEQ ID NO: 28633 - DNA, 40 bp, Homo sapiens
actggtcaccatatttcaaaataaatataatggagctgga

SEQ ID NO: 28634 - DNA, 40 bp, Homo sapiens
ccagctccattatatttattttgaaatatggtgaccagtt

SEQ ID NO: 28635 - DNA, 40 bp, Homo sapiens
aactggtcaccatatttcaaaataaatataatggagctgg

SEQ ID NO: 28636 - DNA, 40 bp, Homo sapiens
cagctccattatatttattttgaaatatggtgaccagttt

SEQ ID NO: 28637 - DNA, 40 bp, Homo sapiens
aaactggtcaccatatttcaaaataaatataatggagctg

SEQ ID NO: 28638 - DNA, 40 bp, Homo sapiens
agctccattatatttattttgaaatatggtgaccagtttt

SEQ ID NO: 28639 - DNA, 40 bp, Homo sapiens
aaaactggtcaccatatttcaaaataaatataatggagct

SEQ ID NO: 28640 - DNA, 40 bp, Homo sapiens
gctccattatatttattttgaaatatggtgaccagttttg

SEQ ID NO: 28641 - DNA, 40 bp, Homo sapiens
caaaactggtcaccatatttcaaaataaatataatggagc

SEQ ID NO: 28642 - DNA, 40 bp, Homo sapiens
ctccattatatttattttgaaatatggtgaccagttttgc

SEQ ID NO: 28643 - DNA, 40 bp, Homo sapiens
gcaaaactggtcaccatatttcaaaataaatataatggag

SEQ ID NO: 28644 - DNA, 40 bp, Homo sapiens
tccattatatttattttgaaatatggtgaccagttttgca

SEQ ID NO: 28645 - DNA, 40 bp, Homo sapiens
tgcaaaactggtcaccatatttcaaaataaatataatgga

SEQ ID NO: 28646 - DNA, 40 bp, Homo sapiens
ccattatatttattttgaaatatggtgaccagttttgcaa

SEQ ID NO: 28647 - DNA, 40 bp, Homo sapiens
ttgcaaaactggtcaccatatttcaaaataaatataatgg

SEQ ID NO: 28648 - DNA, 40 bp, Homo sapiens
cattatatttattttgaaatatggtgaccagttttgcaaa

SEQ ID NO: 28649 - DNA, 40 bp, Homo sapiens
tttgcaaaactggtcaccatatttcaaaataaatataatg

SEQ ID NO: 28650 - DNA, 40 bp, Homo sapiens
attatatttattttgaaatatggtgaccagttttgcaaaa

SEQ ID NO: 28651 - DNA, 40 bp, Homo sapiens
ttttgcaaaactggtcaccatatttcaaaataaatataat

SEQ ID NO: 28652 - DNA, 40 bp, Homo sapiens
ttatatttattttgaaatatggtgaccagttttgcaaaat

SEQ ID NO: 28653 - DNA, 40 bp, Homo sapiens
attttgcaaaactggtcaccatatttcaaaataaatataa

SEQ ID NO: 28654 - DNA, 40 bp, Homo sapiens
tatatttattttgaaatatggtgaccagttttgcaaaatt

SEQ ID NO: 28655 - DNA, 40 bp, Homo sapiens
aattttgcaaaactggtcaccatatttcaaaataaatata

SEQ ID NO: 28656 - DNA, 40 bp, Homo sapiens
atatttattttgaaatatggtgaccagttttgcaaaatta

SEQ ID NO: 28657 - DNA, 40 bp, Homo sapiens
taattttgcaaaactggtcaccatatttcaaaataaatat

SEQ ID NO: 28658 - DNA, 40 bp, Homo sapiens
tatttattttgaaatatggtgaccagttttgcaaaattat

SEQ ID NO: 28659 - DNA, 40 bp, Homo sapiens
ataattttgcaaaactggtcaccatatttcaaaataaata

SEQ ID NO: 28660 - DNA, 40 bp, Homo sapiens
atttattttgaaatatggtgaccagttttgcaaaattatt

SEQ ID NO: 28661 - DNA, 40 bp, Homo sapiens
aataattttgcaaaactggtcaccatatttcaaaataaat

SEQ ID NO: 28662 - DNA, 40 bp, Homo sapiens
tttattttgaaatatggtgaccagttttgcaaaattattt

SEQ ID NO: 28663 - DNA, 40 bp, Homo sapiens
aaataattttgcaaaactggtcaccatatttcaaaataaa

SEQ ID NO: 28664 - DNA, 40 bp, Homo sapiens
ttattttgaaatatggtgaccagttttgcaaaattatttc

SEQ ID NO: 28665 - DNA, 40 bp, Homo sapiens
gaaataattttgcaaaactggtcaccatatttcaaaataa

SEQ ID NO: 28666 - DNA, 40 bp, Homo sapiens
tattttgaaatatggtgaccagttttgcaaaattatttca

SEQ ID NO: 28667 - DNA, 40 bp, Homo sapiens
tgaaataattttgcaaaactggtcaccatatttcaaaata

SEQ ID NO: 28668 - DNA, 40 bp, Homo sapiens
attttgaaatatggtgaccagttttgcaaaattatttcaa

SEQ ID NO: 28669 - DNA, 40 bp, Homo sapiens
ttgaaataattttgcaaaactggtcaccatatttcaaaat

SEQ ID NO: 28670 - DNA, 40 bp, Homo sapiens
ttttgaaatatggtgaccagttttgcaaaattatttcaac

SEQ ID NO: 28671 - DNA, 40 bp, Homo sapiens
gttgaaataattttgcaaaactggtcaccatatttcaaaa

SEQ ID NO: 28672 - DNA, 40 bp, Homo sapiens
tttgaaatatggtgaccagttttgcaaaattatttcaact

SEQ ID NO: 28673 - DNA, 40 bp, Homo sapiens
agttgaaataattttgcaaaactggtcaccatatttcaaa

SEQ ID NO: 28674 - DNA, 40 bp, Homo sapiens
ttgaaatatggtgaccagttttgcaaaattatttcaactg

SEQ ID NO: 28675 - DNA, 40 bp, Homo sapiens
cagttgaaataattttgcaaaactggtcaccatatttcaa

SEQ ID NO: 28676 - DNA, 40 bp, Homo sapiens
tgaaatatggtgaccagttttgcaaaattatttcaactgt

SEQ ID NO: 28677 - DNA, 40 bp, Homo sapiens
acagttgaaataattttgcaaaactggtcaccatatttca

SEQ ID NO: 28678 - DNA, 40 bp, Homo sapiens
gaaatatggtgaccagttttgcaaaattatttcaactgta

SEQ ID NO: 28679 - DNA, 40 bp, Homo sapiens
tacagttgaaataattttgcaaaactggtcaccatatttc

SEQ ID NO: 28680 - DNA, 40 bp, Homo sapiens
aaatatggtgaccagttttgcaaaattatttcaactgtag

SEQ ID NO: 28681 - DNA, 40 bp, Homo sapiens
ctacagttgaaataattttgcaaaactggtcaccatattt

SEQ ID NO: 28682 - DNA, 40 bp, Homo sapiens
aatatggtgaccagttttgcaaaattatttcaactgtagg

SEQ ID NO: 28683 - DNA, 40 bp, Homo sapiens
cctacagttgaaataattttgcaaaactggtcaccatatt

SEQ ID NO: 28684 - DNA, 40 bp, Homo sapiens
atatggtgaccagttttgcaaaattatttcaactgtaggt

SEQ ID NO: 28685 - DNA, 40 bp, Homo sapiens
acctacagttgaaataattttgcaaaactggtcaccatat

SEQ ID NO: 28686 - DNA, 40 bp, Homo sapiens
tatggtgaccagttttgcaaaattatttcaactgtaggtg

SEQ ID NO: 28687 - DNA, 40 bp, Homo sapiens
cacctacagttgaaataattttgcaaaactggtcaccata

SEQ ID NO: 28688 - DNA, 40 bp, Homo sapiens
atggtgaccagttttgcaaaattatttcaactgtaggtgc

SEQ ID NO: 28689 - DNA, 40 bp, Homo sapiens
gcacctacagttgaaataattttgcaaaactggtcaccat

SEQ ID NO: 28690 - DNA, 40 bp, Homo sapiens
tggtgaccagttttgcaaaattatttcaactgtaggtgcc

SEQ ID NO: 28691 - DNA, 40 bp, Homo sapiens
ggcacctacagttgaaataattttgcaaaactggtcacca

SEQ ID NO: 28692 - DNA, 40 bp, Homo sapiens
ggtgaccagttttgcaaaattatttcaactgtaggtgccc

SEQ ID NO: 28693 - DNA, 40 bp, Homo sapiens
gggcacctacagttgaaataattttgcaaaactggtcacc

SEQ ID NO: 28694 - DNA, 40 bp, Homo sapiens
gtgaccagttttgcaaaattatttcaactgtaggtgccca

SEQ ID NO: 28695 - DNA, 40 bp, Homo sapiens
tgggcacctacagttgaaataattttgcaaaactggtcac

SEQ ID NO: 28696 - DNA, 40 bp, Homo sapiens
tgaccagttttgcaaaattatttcaactgtaggtgcccag

SEQ ID NO: 28697 - DNA, 40 bp, Homo sapiens
ctgggcacctacagttgaaataattttgcaaaactggtca

SEQ ID NO: 28698 - DNA, 40 bp, Homo sapiens
gaccagttttgcaaaattatttcaactgtaggtgcccagt

SEQ ID NO: 28699 - DNA, 40 bp, Homo sapiens
actgggcacctacagttgaaataattttgcaaaactggtc

SEQ ID NO: 28700 - DNA, 40 bp, Homo sapiens
accagttttgcaaaattatttcaactgtaggtgcccagtg

SEQ ID NO: 28701 - DNA, 40 bp, Homo sapiens
cactgggcacctacagttgaaataattttgcaaaactggt

SEQ ID NO: 28702 - DNA, 40 bp, Homo sapiens
ccagttttgcaaaattatttcaactgtaggtgcccagtga

SEQ ID NO: 28703 - DNA, 40 bp, Homo sapiens
tcactgggcacctacagttgaaataattttgcaaaactgg

SEQ ID NO: 28704 - DNA, 40 bp, Homo sapiens
cagttttgcaaaattatttcaactgtaggtgcccagtgat

SEQ ID NO: 28705 - DNA, 40 bp, Homo sapiens
atcactgggcacctacagttgaaataattttgcaaaactg

SEQ ID NO: 28706 - DNA, 40 bp, Homo sapiens
agttttgcaaaattatttcaactgtaggtgcccagtgatt

SEQ ID NO: 28707 - DNA, 40 bp, Homo sapiens
aatcactgggcacctacagttgaaataattttgcaaaact

SEQ ID NO: 28708 - DNA, 40 bp, Homo sapiens
gttttgcaaaattatttcaactgtaggtgcccagtgattt

SEQ ID NO: 28709 - DNA, 40 bp, Homo sapiens
aaatcactgggcacctacagttgaaataattttgcaaaac

SEQ ID NO: 28710 - DNA, 40 bp, Homo sapiens
ttttgcaaaattatttcaactgtaggtgcccagtgatttt

SEQ ID NO: 28711 - DNA, 40 bp, Homo sapiens
aaaatcactgggcacctacagttgaaataattttgcaaaa

SEQ ID NO: 28712 - DNA, 40 bp, Homo sapiens
tttgcaaaattatttcaactgtaggtgcccagtgattttg

SEQ ID NO: 28713 - DNA, 40 bp, Homo sapiens
caaaatcactgggcacctacagttgaaataattttgcaaa

SEQ ID NO: 28714 - DNA, 40 bp, Homo sapiens
ttgcaaaattatttcaactgtaggtgcccagtgattttgt

SEQ ID NO: 28715 - DNA, 40 bp, Homo sapiens
acaaaatcactgggcacctacagttgaaataattttgcaa

SEQ ID NO: 28716 - DNA, 40 bp, Homo sapiens
tgcaaaattatttcaactgtaggtgcccagtgattttgta

SEQ ID NO: 28717 - DNA, 40 bp, Homo sapiens
tacaaaatcactgggcacctacagttgaaataattttgca

SEQ ID NO: 28718 - DNA, 40 bp, Homo sapiens
gcaaaattatttcaactgtaggtgcccagtgattttgtaa

SEQ ID NO: 28719 - DNA, 40 bp, Homo sapiens
ttacaaaatcactgggcacctacagttgaaataattttgc

SEQ ID NO: 28720 - DNA, 40 bp, Homo sapiens
caaaattatttcaactgtaggtgcccagtgattttgtaag

SEQ ID NO: 28721 - DNA, 40 bp, Homo sapiens
cttacaaaatcactgggcacctacagttgaaataattttg

SEQ ID NO: 28722 - DNA, 40 bp, Homo sapiens
aaaattatttcaactgtaggtgcccagtgattttgtaagg

SEQ ID NO: 28723 - DNA, 40 bp, Homo sapiens
ccttacaaaatcactgggcacctacagttgaaataatttt

SEQ ID NO: 28724 - DNA, 40 bp, Homo sapiens
aaattatttcaactgtaggtgcccagtgattttgtaagga

SEQ ID NO: 28725 - DNA, 40 bp, Homo sapiens
tccttacaaaatcactgggcacctacagttgaaataattt

SEQ ID NO: 28726 - DNA, 40 bp, Homo sapiens
aattatttcaactgtaggtgcccagtgattttgtaaggag

SEQ ID NO: 28727 - DNA, 40 bp, Homo sapiens
ctccttacaaaatcactgggcacctacagttgaaataatt

SEQ ID NO: 28728 - DNA, 40 bp, Homo sapiens
attatttcaactgtaggtgcccagtgattttgtaaggaga

SEQ ID NO: 28729 - DNA, 40 bp, Homo sapiens
tctccttacaaaatcactgggcacctacagttgaaataat

SEQ ID NO: 28730 - DNA, 40 bp, Homo sapiens
ttatttcaactgtaggtgcccagtgattttgtaaggagaa

SEQ ID NO: 28731 - DNA, 40 bp, Homo sapiens
ttctccttacaaaatcactgggcacctacagttgaaataa

SEQ ID NO: 28732 - DNA, 40 bp, Homo sapiens
tatttcaactgtaggtgcccagtgattttgtaaggagaag

SEQ ID NO: 28733 - DNA, 40 bp, Homo sapiens
cttctccttacaaaatcactgggcacctacagttgaaata

SEQ ID NO: 28734 - DNA, 40 bp, Homo sapiens
atttcaactgtaggtgcccagtgattttgtaaggagaaga

SEQ ID NO: 28735 - DNA, 40 bp, Homo sapiens
tcttctccttacaaaatcactgggcacctacagttgaaat

SEQ ID NO: 28736 - DNA, 40 bp, Homo sapiens
tttcaactgtaggtgcccagtgattttgtaaggagaagat

SEQ ID NO: 28737 - DNA, 40 bp, Homo sapiens
atcttctccttacaaaatcactgggcacctacagttgaaa

SEQ ID NO: 28738 - DNA, 40 bp, Homo sapiens
ttcaactgtaggtgcccagtgattttgtaaggagaagata

SEQ ID NO: 28739 - DNA, 40 bp, Homo sapiens
tatcttctccttacaaaatcactgggcacctacagttgaa

SEQ ID NO: 28740 - DNA, 40 bp, Homo sapiens
tcaactgtaggtgcccagtgattttgtaaggagaagatac

SEQ ID NO: 28741 - DNA, 40 bp, Homo sapiens
gtatcttctccttacaaaatcactgggcacctacagttga

SEQ ID NO: 28742 - DNA, 40 bp, Homo sapiens
caactgtaggtgcccagtgattttgtaaggagaagatact

SEQ ID NO: 28743 - DNA, 40 bp, Homo sapiens
agtatcttctccttacaaaatcactgggcacctacagttg

SEQ ID NO: 28744 - DNA, 40 bp, Homo sapiens
aactgtaggtgcccagtgattttgtaaggagaagatactg

SEQ ID NO: 28745 - DNA, 40 bp, Homo sapiens
cagtatcttctccttacaaaatcactgggcacctacagtt

SEQ ID NO: 28746 - DNA, 40 bp, Homo sapiens
actgtaggtgcccagtgattttgtaaggagaagatactgt

SEQ ID NO: 28747 - DNA, 40 bp, Homo sapiens
acagtatcttctccttacaaaatcactgggcacctacagt

SEQ ID NO: 28748 - DNA, 40 bp, Homo sapiens
ctgtaggtgcccagtgattttgtaaggagaagatactgtt

SEQ ID NO: 28749 - DNA, 40 bp, Homo sapiens
aacagtatcttctccttacaaaatcactgggcacctacag

SEQ ID NO: 28750 - DNA, 40 bp, Homo sapiens
tgtaggtgcccagtgattttgtaaggagaagatactgttt

SEQ ID NO: 28751 - DNA, 40 bp, Homo sapiens
aaacagtatcttctccttacaaaatcactgggcacctaca

SEQ ID NO: 28752 - DNA, 40 bp, Homo sapiens
gtaggtgcccagtgattttgtaaggagaagatactgtttc

SEQ ID NO: 28753 - DNA, 40 bp, Homo sapiens
gaaacagtatcttctccttacaaaatcactgggcacctac

SEQ ID NO: 28754 - DNA, 40 bp, Homo sapiens
taggtgcccagtgattttgtaaggagaagatactgtttct

SEQ ID NO: 28755 - DNA, 40 bp, Homo sapiens
agaaacagtatcttctccttacaaaatcactgggcaccta

SEQ ID NO: 28756 - DNA, 40 bp, Homo sapiens
aggtgcccagtgattttgtaaggagaagatactgtttctg

SEQ ID NO: 28757 - DNA, 40 bp, Homo sapiens
cagaaacagtatcttctccttacaaaatcactgggcacct

SEQ ID NO: 28758 - DNA, 40 bp, Homo sapiens
ggtgcccagtgattttgtaaggagaagatactgtttctga

SEQ ID NO: 28759 - DNA, 40 bp, Homo sapiens
tcagaaacagtatcttctccttacaaaatcactgggcacc

SEQ ID NO: 28760 - DNA, 40 bp, Homo sapiens
gtgcccagtgattttgtaaggagaagatactgtttctgaa

SEQ ID NO: 28761 - DNA, 40 bp, Homo sapiens
ttcagaaacagtatcttctccttacaaaatcactgggcac

SEQ ID NO: 28762 - DNA, 40 bp, Homo sapiens
tgcccagtgattttgtaaggagaagatactgtttctgaac

SEQ ID NO: 28763 - DNA, 40 bp, Homo sapiens
gttcagaaacagtatcttctccttacaaaatcactgggca

SEQ ID NO: 28764 - DNA, 40 bp, Homo sapiens
gcccagtgattttgtaaggagaagatactgtttctgaaca

SEQ ID NO: 28765 - DNA, 40 bp, Homo sapiens
tgttcagaaacagtatcttctccttacaaaatcactgggc

SEQ ID NO: 28766 - DNA, 40 bp, Homo sapiens
cccagtgattttgtaaggagaagatactgtttctgaacag

SEQ ID NO: 28767 - DNA, 40 bp, Homo sapiens
ctgttcagaaacagtatcttctccttacaaaatcactggg

SEQ ID NO: 28768 - DNA, 40 bp, Homo sapiens
ccagtgattttgtaaggagaagatactgtttctgaacagt

SEQ ID NO: 28769 - DNA, 40 bp, Homo sapiens
actgttcagaaacagtatcttctccttacaaaatcactgg

SEQ ID NO: 28770 - DNA, 40 bp, Homo sapiens
cagtgattttgtaaggagaagatactgtttctgaacagtt

SEQ ID NO: 28771 - DNA, 40 bp, Homo sapiens
aactgttcagaaacagtatcttctccttacaaaatcactg

SEQ ID NO: 28772 - DNA, 40 bp, Homo sapiens
agtgattttgtaaggagaagatactgtttctgaacagttc

SEQ ID NO: 28773 - DNA, 40 bp, Homo sapiens
gaactgttcagaaacagtatcttctccttacaaaatcact

SEQ ID NO: 28774 - DNA, 40 bp, Homo sapiens
gtgattttgtaaggagaagatactgtttctgaacagttct

SEQ ID NO: 28775 - DNA, 40 bp, Homo sapiens
agaactgttcagaaacagtatcttctccttacaaaatcac

SEQ ID NO: 28776 - DNA, 40 bp, Homo sapiens
tgattttgtaaggagaagatactgtttctgaacagttctc

SEQ ID NO: 28777 - DNA, 40 bp, Homo sapiens
gagaactgttcagaaacagtatcttctccttacaaaatca

SEQ ID NO: 28778 - DNA, 40 bp, Homo sapiens
gattttgtaaggagaagatactgtttctgaacagttctca

SEQ ID NO: 28779 - DNA, 40 bp, Homo sapiens
tgagaactgttcagaaacagtatcttctccttacaaaatc

SEQ ID NO: 28780 - DNA, 40 bp, Homo sapiens
attttgtaaggagaagatactgtttctgaacagttctcag

SEQ ID NO: 28781 - DNA, 40 bp, Homo sapiens
ctgagaactgttcagaaacagtatcttctccttacaaaat

SEQ ID NO: 28782 - DNA, 40 bp, Homo sapiens
ttttgtaaggagaagatactgtttctgaacagttctcagt

SEQ ID NO: 28783 - DNA, 40 bp, Homo sapiens
actgagaactgttcagaaacagtatcttctccttacaaaa

SEQ ID NO: 28784 - DNA, 40 bp, Homo sapiens
tttgtaaggagaagatactgtttctgaacagttctcagta

SEQ ID NO: 28785 - DNA, 40 bp, Homo sapiens
tactgagaactgttcagaaacagtatcttctccttacaaa

SEQ ID NO: 28786 - DNA, 40 bp, Homo sapiens
ttgtaaggagaagatactgtttctgaacagttctcagtag

SEQ ID NO: 28787 - DNA, 40 bp, Homo sapiens
ctactgagaactgttcagaaacagtatcttctccttacaa

SEQ ID NO: 28788 - DNA, 40 bp, Homo sapiens
tgtaaggagaagatactgtttctgaacagttctcagtagc

SEQ ID NO: 28789 - DNA, 40 bp, Homo sapiens
gctactgagaactgttcagaaacagtatcttctccttaca

SEQ ID NO: 28790 - DNA, 40 bp, Homo sapiens
gtaaggagaagatactgtttctgaacagttctcagtagcc

SEQ ID NO: 28791 - DNA, 40 bp, Homo sapiens
ggctactgagaactgttcagaaacagtatcttctccttac

SEQ ID NO: 28792 - DNA, 40 bp, Homo sapiens
taaggagaagatactgtttctgaacagttctcagtagcca

SEQ ID NO: 28793 - DNA, 40 bp, Homo sapiens
tggctactgagaactgttcagaaacagtatcttctcctta

SEQ ID NO: 28794 - DNA, 40 bp, Homo sapiens
aaggagaagatactgtttctgaacagttctcagtagccag

SEQ ID NO: 28795 - DNA, 40 bp, Homo sapiens
ctggctactgagaactgttcagaaacagtatcttctcctt

SEQ ID NO: 28796 - DNA, 40 bp, Homo sapiens
aggagaagatactgtttctgaacagttctcagtagccagt

SEQ ID NO: 28797 - DNA, 40 bp, Homo sapiens
actggctactgagaactgttcagaaacagtatcttctcct

SEQ ID NO: 28798 - DNA, 40 bp, Homo sapiens
ggagaagatactgtttctgaacagttctcagtagccagtg

SEQ ID NO: 28799 - DNA, 40 bp, Homo sapiens
cactggctactgagaactgttcagaaacagtatcttctcc

SEQ ID NO: 28800 - DNA, 40 bp, Homo sapiens
gagaagatactgtttctgaacagttctcagtagccagtgg

SEQ ID NO: 28801 - DNA, 40 bp, Homo sapiens
ccactggctactgagaactgttcagaaacagtatcttctc

SEQ ID NO: 28802 - DNA, 40 bp, Homo sapiens
agaagatactgtttctgaacagttctcagtagccagtggc

SEQ ID NO: 28803 - DNA, 40 bp, Homo sapiens
gccactggctactgagaactgttcagaaacagtatcttct

SEQ ID NO: 28804 - DNA, 40 bp, Homo sapiens
gaagatactgtttctgaacagttctcagtagccagtggcc

SEQ ID NO: 28805 - DNA, 40 bp, Homo sapiens
ggccactggctactgagaactgttcagaaacagtatcttc

SEQ ID NO: 28806 - DNA, 40 bp, Homo sapiens
aagatactgtttctgaacagttctcagtagccagtggcct

SEQ ID NO: 28807 - DNA, 40 bp, Homo sapiens
aggccactggctactgagaactgttcagaaacagtatctt

SEQ ID NO: 28808 - DNA, 40 bp, Homo sapiens
agatactgtttctgaacagttctcagtagccagtggcctg

SEQ ID NO: 28809 - DNA, 40 bp, Homo sapiens
caggccactggctactgagaactgttcagaaacagtatct

SEQ ID NO: 28810 - DNA, 40 bp, Homo sapiens
gatactgtttctgaacagttctcagtagccagtggcctgc

SEQ ID NO: 28811 - DNA, 40 bp, Homo sapiens
gcaggccactggctactgagaactgttcagaaacagtatc

SEQ ID NO: 28812 - DNA, 40 bp, Homo sapiens
atactgtttctgaacagttctcagtagccagtggcctgcc

SEQ ID NO: 28813 - DNA, 40 bp, Homo sapiens
ggcaggccactggctactgagaactgttcagaaacagtat

SEQ ID NO: 28814 - DNA, 40 bp, Homo sapiens
tactgtttctgaacagttctcagtagccagtggcctgccc

SEQ ID NO: 28815 - DNA, 40 bp, Homo sapiens
gggcaggccactggctactgagaactgttcagaaacagta

SEQ ID NO: 28816 - DNA, 40 bp, Homo sapiens
actgtttctgaacagttctcagtagccagtggcctgcccc

SEQ ID NO: 28817 - DNA, 40 bp, Homo sapiens
ggggcaggccactggctactgagaactgttcagaaacagt

SEQ ID NO: 28818 - DNA, 40 bp, Homo sapiens
ctgtttctgaacagttctcagtagccagtggcctgcccct

SEQ ID NO: 28819 - DNA, 40 bp, Homo sapiens
aggggcaggccactggctactgagaactgttcagaaacag

SEQ ID NO: 28820 - DNA, 40 bp, Homo sapiens
tgtttctgaacagttctcagtagccagtggcctgccccta

SEQ ID NO: 28821 - DNA, 40 bp, Homo sapiens
taggggcaggccactggctactgagaactgttcagaaaca

SEQ ID NO: 28822 - DNA, 40 bp, Homo sapiens
gtttctgaacagttctcagtagccagtggcctgcccctac

SEQ ID NO: 28823 - DNA, 40 bp, Homo sapiens
gtaggggcaggccactggctactgagaactgttcagaaac

SEQ ID NO: 28824 - DNA, 40 bp, Homo sapiens
tttctgaacagttctcagtagccagtggcctgcccctact

SEQ ID NO: 28825 - DNA, 40 bp, Homo sapiens
agtaggggcaggccactggctactgagaactgttcagaaa

SEQ ID NO: 28826 - DNA, 40 bp, Homo sapiens
ttctgaacagttctcagtagccagtggcctgcccctactt

SEQ ID NO: 28827 - DNA, 40 bp, Homo sapiens
aagtaggggcaggccactggctactgagaactgttcagaa

SEQ ID NO: 28828 - DNA, 40 bp, Homo sapiens
tctgaacagttctcagtagccagtggcctgcccctacttt

SEQ ID NO: 28829 - DNA, 40 bp, Homo sapiens
aaagtaggggcaggccactggctactgagaactgttcaga

SEQ ID NO: 28830 - DNA, 40 bp, Homo sapiens
ctgaacagttctcagtagccagtggcctgcccctactttt

SEQ ID NO: 28831 - DNA, 40 bp, Homo sapiens
aaaagtaggggcaggccactggctactgagaactgttcag

SEQ ID NO: 28832 - DNA, 40 bp, Homo sapiens
tgaacagttctcagtagccagtggcctgcccctacttttt

SEQ ID NO: 28833 - DNA, 40 bp, Homo sapiens
aaaaagtaggggcaggccactggctactgagaactgttca

SEQ ID NO: 28834 - DNA, 40 bp, Homo sapiens
gaacagttctcagtagccagtggcctgcccctactttttg

SEQ ID NO: 28835 - DNA, 40 bp, Homo sapiens
caaaaagtaggggcaggccactggctactgagaactgttc

SEQ ID NO: 28836 - DNA, 40 bp, Homo sapiens
aacagttctcagtagccagtggcctgcccctactttttgg

SEQ ID NO: 28837 - DNA, 40 bp, Homo sapiens
ccaaaaagtaggggcaggccactggctactgagaactgtt

SEQ ID NO: 28838 - DNA, 40 bp, Homo sapiens
acagttctcagtagccagtggcctgcccctactttttggc

SEQ ID NO: 28839 - DNA, 40 bp, Homo sapiens
gccaaaaagtaggggcaggccactggctactgagaactgt

SEQ ID NO: 28840 - DNA, 40 bp, Homo sapiens
cagttctcagtagccagtggcctgcccctactttttggcc

SEQ ID NO: 28841 - DNA, 40 bp, Homo sapiens
ggccaaaaagtaggggcaggccactggctactgagaactg

SEQ ID NO: 28842 - DNA, 40 bp, Homo sapiens
agttctcagtagccagtggcctgcccctactttttggcct

SEQ ID NO: 28843 - DNA, 40 bp, Homo sapiens
aggccaaaaagtaggggcaggccactggctactgagaact

SEQ ID NO: 28844 - DNA, 40 bp, Homo sapiens
gttctcagtagccagtggcctgcccctactttttggcctg

SEQ ID NO: 28845 - DNA, 40 bp, Homo sapiens
caggccaaaaagtaggggcaggccactggctactgagaac

SEQ ID NO: 28846 - DNA, 40 bp, Homo sapiens
ttctcagtagccagtggcctgcccctactttttggcctgc

SEQ ID NO: 28847 - DNA, 40 bp, Homo sapiens
gcaggccaaaaagtaggggcaggccactggctactgagaa

SEQ ID NO: 28848 - DNA, 40 bp, Homo sapiens
tctcagtagccagtggcctgcccctactttttggcctgcg

SEQ ID NO: 28849 - DNA, 40 bp, Homo sapiens
cgcaggccaaaaagtaggggcaggccactggctactgaga

SEQ ID NO: 28850 - DNA, 40 bp, Homo sapiens
ctcagtagccagtggcctgcccctactttttggcctgcgt

SEQ ID NO: 28851 - DNA, 40 bp, Homo sapiens
acgcaggccaaaaagtaggggcaggccactggctactgag

SEQ ID NO: 28852 - DNA, 40 bp, Homo sapiens
tcagtagccagtggcctgcccctactttttggcctgcgtg

SEQ ID NO: 28853 - DNA, 40 bp, Homo sapiens
cacgcaggccaaaaagtaggggcaggccactggctactga

SEQ ID NO: 28854 - DNA, 40 bp, Homo sapiens
cagtagccagtggcctgcccctactttttggcctgcgtgt

SEQ ID NO: 28855 - DNA, 40 bp, Homo sapiens
acacgcaggccaaaaagtaggggcaggccactggctactg

SEQ ID NO: 28856 - DNA, 40 bp, Homo sapiens
agtagccagtggcctgcccctactttttggcctgcgtgta

SEQ ID NO: 28857 - DNA, 40 bp, Homo sapiens
tacacgcaggccaaaaagtaggggcaggccactggctact

SEQ ID NO: 28858 - DNA, 40 bp, Homo sapiens
gtagccagtggcctgcccctactttttggcctgcgtgtag

SEQ ID NO: 28859 - DNA, 40 bp, Homo sapiens
ctacacgcaggccaaaaagtaggggcaggccactggctac

SEQ ID NO: 28860 - DNA, 40 bp, Homo sapiens
tagccagtggcctgcccctactttttggcctgcgtgtagt

SEQ ID NO: 28861 - DNA, 40 bp, Homo sapiens
actacacgcaggccaaaaagtaggggcaggccactggcta

SEQ ID NO: 28862 - DNA, 40 bp, Homo sapiens
agccagtggcctgcccctactttttggcctgcgtgtagta

SEQ ID NO: 28863 - DNA, 40 bp, Homo sapiens
tactacacgcaggccaaaaagtaggggcaggccactggct

SEQ ID NO: 28864 - DNA, 40 bp, Homo sapiens
gccagtggcctgcccctactttttggcctgcgtgtagtat

SEQ ID NO: 28865 - DNA, 40 bp, Homo sapiens
atactacacgcaggccaaaaagtaggggcaggccactggc

SEQ ID NO: 28866 - DNA, 40 bp, Homo sapiens
ccagtggcctgcccctactttttggcctgcgtgtagtata

SEQ ID NO: 28867 - DNA, 40 bp, Homo sapiens
tatactacacgcaggccaaaaagtaggggcaggccactgg

SEQ ID NO: 28868 - DNA, 40 bp, Homo sapiens
cagtggcctgcccctactttttggcctgcgtgtagtatat

SEQ ID NO: 28869 - DNA, 40 bp, Homo sapiens
atatactacacgcaggccaaaaagtaggggcaggccactg

SEQ ID NO: 28870 - DNA, 40 bp, Homo sapiens
agtggcctgcccctactttttggcctgcgtgtagtatata

SEQ ID NO: 28871 - DNA, 40 bp, Homo sapiens
tatatactacacgcaggccaaaaagtaggggcaggccact

SEQ ID NO: 28872 - DNA, 40 bp, Homo sapiens
gtggcctgcccctactttttggcctgcgtgtagtatataa

SEQ ID NO: 28873 - DNA, 40 bp, Homo sapiens
ttatatactacacgcaggccaaaaagtaggggcaggccac

SEQ ID NO: 28874 - DNA, 40 bp, Homo sapiens
tggcctgcccctactttttggcctgcgtgtagtatataaa

SEQ ID NO: 28875 - DNA, 40 bp, Homo sapiens
tttatatactacacgcaggccaaaaagtaggggcaggcca

SEQ ID NO: 28876 - DNA, 40 bp, Homo sapiens
ggcctgcccctactttttggcctgcgtgtagtatataaaa

SEQ ID NO: 28877 - DNA, 40 bp, Homo sapiens
ttttatatactacacgcaggccaaaaagtaggggcaggcc

SEQ ID NO: 28878 - DNA, 40 bp, Homo sapiens
gcctgcccctactttttggcctgcgtgtagtatataaaat

SEQ ID NO: 28879 - DNA, 40 bp, Homo sapiens
attttatatactacacgcaggccaaaaagtaggggcaggc

SEQ ID NO: 28880 - DNA, 40 bp, Homo sapiens
cctgcccctactttttggcctgcgtgtagtatataaaata

SEQ ID NO: 28881 - DNA, 40 bp, Homo sapiens
tattttatatactacacgcaggccaaaaagtaggggcagg

SEQ ID NO: 28882 - DNA, 40 bp, Homo sapiens
ctgcccctactttttggcctgcgtgtagtatataaaataa

SEQ ID NO: 28883 - DNA, 40 bp, Homo sapiens
ttattttatatactacacgcaggccaaaaagtaggggcag

SEQ ID NO: 28884 - DNA, 40 bp, Homo sapiens
tgcccctactttttggcctgcgtgtagtatataaaataat

SEQ ID NO: 28885 - DNA, 40 bp, Homo sapiens
attattttatatactacacgcaggccaaaaagtaggggca

SEQ ID NO: 28886 - DNA, 40 bp, Homo sapiens
gcccctactttttggcctgcgtgtagtatataaaataatg

SEQ ID NO: 28887 - DNA, 40 bp, Homo sapiens
cattattttatatactacacgcaggccaaaaagtaggggc

SEQ ID NO: 28888 - DNA, 40 bp, Homo sapiens
cccctactttttggcctgcgtgtagtatataaaataatgc

SEQ ID NO: 28889 - DNA, 40 bp, Homo sapiens
gcattattttatatactacacgcaggccaaaaagtagggg

SEQ ID NO: 28890 - DNA, 40 bp, Homo sapiens
ccctactttttggcctgcgtgtagtatataaaataatgca

SEQ ID NO: 28891 - DNA, 40 bp, Homo sapiens
tgcattattttatatactacacgcaggccaaaaagtaggg

SEQ ID NO: 28892 - DNA, 40 bp, Homo sapiens
cctactttttggcctgcgtgtagtatataaaataatgcag

SEQ ID NO: 28893 - DNA, 40 bp, Homo sapiens
ctgcattattttatatactacacgcaggccaaaaagtagg

SEQ ID NO: 28894 - DNA, 40 bp, Homo sapiens
ctactttttggcctgcgtgtagtatataaaataatgcagt

SEQ ID NO: 28895 - DNA, 40 bp, Homo sapiens
actgcattattttatatactacacgcaggccaaaaagtag

SEQ ID NO: 28896 - DNA, 40 bp, Homo sapiens
tactttttggcctgcgtgtagtatataaaataatgcagtt

SEQ ID NO: 28897 - DNA, 40 bp, Homo sapiens
aactgcattattttatatactacacgcaggccaaaaagta

SEQ ID NO: 28898 - DNA, 40 bp, Homo sapiens
actttttggcctgcgtgtagtatataaaataatgcagtta

SEQ ID NO: 28899 - DNA, 40 bp, Homo sapiens
taactgcattattttatatactacacgcaggccaaaaagt

SEQ ID NO: 28900 - DNA, 40 bp, Homo sapiens
ctttttggcctgcgtgtagtatataaaataatgcagttaa

SEQ ID NO: 28901 - DNA, 40 bp, Homo sapiens
ttaactgcattattttatatactacacgcaggccaaaaag

SEQ ID NO: 28902 - DNA, 40 bp, Homo sapiens
tttttggcctgcgtgtagtatataaaataatgcagttaac

SEQ ID NO: 28903 - DNA, 40 bp, Homo sapiens
gttaactgcattattttatatactacacgcaggccaaaaa

SEQ ID NO: 28904 - DNA, 40 bp, Homo sapiens
ttttggcctgcgtgtagtatataaaataatgcagttaact

SEQ ID NO: 28905 - DNA, 40 bp, Homo sapiens
agttaactgcattattttatatactacacgcaggccaaaa

SEQ ID NO: 28906 - DNA, 40 bp, Homo sapiens
tttggcctgcgtgtagtatataaaataatgcagttaactt

SEQ ID NO: 28907 - DNA, 40 bp, Homo sapiens
aagttaactgcattattttatatactacacgcaggccaaa

SEQ ID NO: 28908 - DNA, 40 bp, Homo sapiens
ttggcctgcgtgtagtatataaaataatgcagttaacttt

SEQ ID NO: 28909 - DNA, 40 bp, Homo sapiens
aaagttaactgcattattttatatactacacgcaggccaa

SEQ ID NO: 28910 - DNA, 40 bp, Homo sapiens
tggcctgcgtgtagtatataaaataatgcagttaactttt

SEQ ID NO: 28911 - DNA, 40 bp, Homo sapiens
aaaagttaactgcattattttatatactacacgcaggcca

SEQ ID NO: 28912 - DNA, 40 bp, Homo sapiens
ggcctgcgtgtagtatataaaataatgcagttaacttttt

SEQ ID NO: 28913 - DNA, 40 bp, Homo sapiens
aaaaagttaactgcattattttatatactacacgcaggcc

SEQ ID NO: 28914 - DNA, 40 bp, Homo sapiens
gcctgcgtgtagtatataaaataatgcagttaacttttta

SEQ ID NO: 28915 - DNA, 40 bp, Homo sapiens
taaaaagttaactgcattattttatatactacacgcaggc

SEQ ID NO: 28916 - DNA, 40 bp, Homo sapiens
cctgcgtgtagtatataaaataatgcagttaactttttat

SEQ ID NO: 28917 - DNA, 40 bp, Homo sapiens
ataaaaagttaactgcattattttatatactacacgcagg

SEQ ID NO: 28918 - DNA, 40 bp, Homo sapiens
ctgcgtgtagtatataaaataatgcagttaactttttata

SEQ ID NO: 28919 - DNA, 40 bp, Homo sapiens
tataaaaagttaactgcattattttatatactacacgcag

SEQ ID NO: 28920 - DNA, 40 bp, Homo sapiens
tgcgtgtagtatataaaataatgcagttaactttttatag

SEQ ID NO: 28921 - DNA, 40 bp, Homo sapiens
ctataaaaagttaactgcattattttatatactacacgca

SEQ ID NO: 28922 - DNA, 40 bp, Homo sapiens
gcgtgtagtatataaaataatgcagttaactttttatagc

SEQ ID NO: 28923 - DNA, 40 bp, Homo sapiens
gctataaaaagttaactgcattattttatatactacacgc

SEQ ID NO: 28924 - DNA, 40 bp, Homo sapiens
cgtgtagtatataaaataatgcagttaactttttatagca

SEQ ID NO: 28925 - DNA, 40 bp, Homo sapiens
tgctataaaaagttaactgcattattttatatactacacg

SEQ ID NO: 28926 - DNA, 40 bp, Homo sapiens
gtgtagtatataaaataatgcagttaactttttatagcac

SEQ ID NO: 28927 - DNA, 40 bp, Homo sapiens
gtgctataaaaagttaactgcattattttatatactacac

SEQ ID NO: 28928 - DNA, 40 bp, Homo sapiens
tgtagtatataaaataatgcagttaactttttatagcact

SEQ ID NO: 28929 - DNA, 40 bp, Homo sapiens
agtgctataaaaagttaactgcattattttatatactaca

SEQ ID NO: 28930 - DNA, 40 bp, Homo sapiens
gtagtatataaaataatgcagttaactttttatagcactt

SEQ ID NO: 28931 - DNA, 40 bp, Homo sapiens
aagtgctataaaaagttaactgcattattttatatactac

SEQ ID NO: 28932 - DNA, 40 bp, Homo sapiens
tagtatataaaataatgcagttaactttttatagcacttt

SEQ ID NO: 28933 - DNA, 40 bp, Homo sapiens
aaagtgctataaaaagttaactgcattattttatatacta

SEQ ID NO: 28934 - DNA, 40 bp, Homo sapiens
agtatataaaataatgcagttaactttttatagcactttt

SEQ ID NO: 28935 - DNA, 40 bp, Homo sapiens
aaaagtgctataaaaagttaactgcattattttatatact

SEQ ID NO: 28936 - DNA, 40 bp, Homo sapiens
gtatataaaataatgcagttaactttttatagcacttttc

SEQ ID NO: 28937 - DNA, 40 bp, Homo sapiens
gaaaagtgctataaaaagttaactgcattattttatatac

SEQ ID NO: 28938 - DNA, 40 bp, Homo sapiens
tatataaaataatgcagttaactttttatagcacttttca

SEQ ID NO: 28939 - DNA, 40 bp, Homo sapiens
tgaaaagtgctataaaaagttaactgcattattttatata

SEQ ID NO: 28940 - DNA, 40 bp, Homo sapiens
atataaaataatgcagttaactttttatagcacttttcat

SEQ ID NO: 28941 - DNA, 40 bp, Homo sapiens
atgaaaagtgctataaaaagttaactgcattattttatat

SEQ ID NO: 28942 - DNA, 40 bp, Homo sapiens
tataaaataatgcagttaactttttatagcacttttcatt

SEQ ID NO: 28943 - DNA, 40 bp, Homo sapiens
aatgaaaagtgctataaaaagttaactgcattattttata

SEQ ID NO: 28944 - DNA, 40 bp, Homo sapiens
ataaaataatgcagttaactttttatagcacttttcattt

SEQ ID NO: 28945 - DNA, 40 bp, Homo sapiens
aaatgaaaagtgctataaaaagttaactgcattattttat

SEQ ID NO: 28946 - DNA, 40 bp, Homo sapiens
taaaataatgcagttaactttttatagcacttttcatttt

SEQ ID NO: 28947 - DNA, 40 bp, Homo sapiens
aaaatgaaaagtgctataaaaagttaactgcattatttta

SEQ ID NO: 28948 - DNA, 40 bp, Homo sapiens
aaaataatgcagttaactttttatagcacttttcatttta

SEQ ID NO: 28949 - DNA, 40 bp, Homo sapiens
taaaatgaaaagtgctataaaaagttaactgcattatttt

SEQ ID NO: 28950 - DNA, 40 bp, Homo sapiens
aaataatgcagttaactttttatagcacttttcattttat

SEQ ID NO: 28951 - DNA, 40 bp, Homo sapiens
ataaaatgaaaagtgctataaaaagttaactgcattattt

SEQ ID NO: 28952 - DNA, 40 bp, Homo sapiens
aataatgcagttaactttttatagcacttttcattttata

SEQ ID NO: 28953 - DNA, 40 bp, Homo sapiens
tataaaatgaaaagtgctataaaaagttaactgcattatt

SEQ ID NO: 28954 - DNA, 40 bp, Homo sapiens
ataatgcagttaactttttatagcacttttcattttataa

SEQ ID NO: 28955 - DNA, 40 bp, Homo sapiens
ttataaaatgaaaagtgctataaaaagttaactgcattat

SEQ ID NO: 28956 - DNA, 40 bp, Homo sapiens
taatgcagttaactttttatagcacttttcattttataaa

SEQ ID NO: 28957 - DNA, 40 bp, Homo sapiens
tttataaaatgaaaagtgctataaaaagttaactgcatta

SEQ ID NO: 28958 - DNA, 40 bp, Homo sapiens
aatgcagttaactttttatagcacttttcattttataaag

SEQ ID NO: 28959 - DNA, 40 bp, Homo sapiens
ctttataaaatgaaaagtgctataaaaagttaactgcatt

SEQ ID NO: 28960 - DNA, 40 bp, Homo sapiens
atgcagttaactttttatagcacttttcattttataaaga

SEQ ID NO: 28961 - DNA, 40 bp, Homo sapiens
tctttataaaatgaaaagtgctataaaaagttaactgcat

SEQ ID NO: 28962 - DNA, 40 bp, Homo sapiens
tgcagttaactttttatagcacttttcattttataaagag

SEQ ID NO: 28963 - DNA, 40 bp, Homo sapiens
ctctttataaaatgaaaagtgctataaaaagttaactgca

SEQ ID NO: 28964 - DNA, 40 bp, Homo sapiens
gcagttaactttttatagcacttttcattttataaagaga

SEQ ID NO: 28965 - DNA, 40 bp, Homo sapiens
tctctttataaaatgaaaagtgctataaaaagttaactgc

SEQ ID NO: 28966 - DNA, 40 bp, Homo sapiens
cagttaactttttatagcacttttcattttataaagagat

SEQ ID NO: 28967 - DNA, 40 bp, Homo sapiens
atctctttataaaatgaaaagtgctataaaaagttaactg

SEQ ID NO: 28968 - DNA, 40 bp, Homo sapiens
agttaactttttatagcacttttcattttataaagagatt

SEQ ID NO: 28969 - DNA, 40 bp, Homo sapiens
aatctctttataaaatgaaaagtgctataaaaagttaact

SEQ ID NO: 28970 - DNA, 40 bp, Homo sapiens
gttaactttttatagcacttttcattttataaagagattt

SEQ ID NO: 28971 - DNA, 40 bp, Homo sapiens
aaatctctttataaaatgaaaagtgctataaaaagttaac

SEQ ID NO: 28972 - DNA, 40 bp, Homo sapiens
ttaactttttatagcacttttcattttataaagagatttt

SEQ ID NO: 28973 - DNA, 40 bp, Homo sapiens
aaaatctctttataaaatgaaaagtgctataaaaagttaa

SEQ ID NO: 28974 - DNA, 40 bp, Homo sapiens
taactttttatagcacttttcattttataaagagattttc

SEQ ID NO: 28975 - DNA, 40 bp, Homo sapiens
gaaaatctctttataaaatgaaaagtgctataaaaagtta

SEQ ID NO: 28976 - DNA, 40 bp, Homo sapiens
aactttttatagcacttttcattttataaagagattttca

SEQ ID NO: 28977 - DNA, 40 bp, Homo sapiens
tgaaaatctctttataaaatgaaaagtgctataaaaagtt

SEQ ID NO: 28978 - DNA, 40 bp, Homo sapiens
actttttatagcacttttcattttataaagagattttcat

SEQ ID NO: 28979 - DNA, 40 bp, Homo sapiens
atgaaaatctctttataaaatgaaaagtgctataaaaagt

SEQ ID NO: 28980 - DNA, 40 bp, Homo sapiens
ctttttatagcacttttcattttataaagagattttcatg

SEQ ID NO: 28981 - DNA, 40 bp, Homo sapiens
catgaaaatctctttataaaatgaaaagtgctataaaaag

SEQ ID NO: 28982 - DNA, 40 bp, Homo sapiens
tttttatagcacttttcattttataaagagattttcatgg

SEQ ID NO: 28983 - DNA, 40 bp, Homo sapiens
ccatgaaaatctctttataaaatgaaaagtgctataaaaa

SEQ ID NO: 28984 - DNA, 40 bp, Homo sapiens
ttttatagcacttttcattttataaagagattttcatggt

SEQ ID NO: 28985 - DNA, 40 bp, Homo sapiens
accatgaaaatctctttataaaatgaaaagtgctataaaa

SEQ ID NO: 28986 - DNA, 40 bp, Homo sapiens
tttatagcacttttcattttataaagagattttcatggtc

SEQ ID NO: 28987 - DNA, 40 bp, Homo sapiens
gaccatgaaaatctctttataaaatgaaaagtgctataaa

SEQ ID NO: 28988 - DNA, 40 bp, Homo sapiens
ttatagcacttttcattttataaagagattttcatggtct

SEQ ID NO: 28989 - DNA, 40 bp, Homo sapiens
agaccatgaaaatctctttataaaatgaaaagtgctataa

SEQ ID NO: 28990 - DNA, 40 bp, Homo sapiens
tatagcacttttcattttataaagagattttcatggtctt

SEQ ID NO: 28991 - DNA, 40 bp, Homo sapiens
aagaccatgaaaatctctttataaaatgaaaagtgctata

SEQ ID NO: 28992 - DNA, 40 bp, Homo sapiens
atagcacttttcattttataaagagattttcatggtcttt

SEQ ID NO: 28993 - DNA, 40 bp, Homo sapiens
aaagaccatgaaaatctctttataaaatgaaaagtgctat

SEQ ID NO: 28994 - DNA, 40 bp, Homo sapiens
tagcacttttcattttataaagagattttcatggtcttta

SEQ ID NO: 28995 - DNA, 40 bp, Homo sapiens
taaagaccatgaaaatctctttataaaatgaaaagtgcta

SEQ ID NO: 28996 - DNA, 40 bp, Homo sapiens
agcacttttcattttataaagagattttcatggtctttaa

SEQ ID NO: 28997 - DNA, 40 bp, Homo sapiens
ttaaagaccatgaaaatctctttataaaatgaaaagtgct

SEQ ID NO: 28998 - DNA, 40 bp, Homo sapiens
gcacttttcattttataaagagattttcatggtctttaat

SEQ ID NO: 28999 - DNA, 40 bp, Homo sapiens
attaaagaccatgaaaatctctttataaaatgaaaagtgc

SEQ ID NO: 29000 - DNA, 40 bp, Homo sapiens
cacttttcattttataaagagattttcatggtctttaata

SEQ ID NO: 29001 - DNA, 40 bp, Homo sapiens
tattaaagaccatgaaaatctctttataaaatgaaaagtg

SEQ ID NO: 29002 - DNA, 40 bp, Homo sapiens
acttttcattttataaagagattttcatggtctttaatat

SEQ ID NO: 29003 - DNA, 40 bp, Homo sapiens
atattaaagaccatgaaaatctctttataaaatgaaaagt

SEQ ID NO: 29004 - DNA, 40 bp, Homo sapiens
cttttcattttataaagagattttcatggtctttaatatt

SEQ ID NO: 29005 - DNA, 40 bp, Homo sapiens
aatattaaagaccatgaaaatctctttataaaatgaaaag

SEQ ID NO: 29006 - DNA, 40 bp, Homo sapiens
ttttcattttataaagagattttcatggtctttaatatta

SEQ ID NO: 29007 - DNA, 40 bp, Homo sapiens
taatattaaagaccatgaaaatctctttataaaatgaaaa

SEQ ID NO: 29008 - DNA, 40 bp, Homo sapiens
tttcattttataaagagattttcatggtctttaatattaa

SEQ ID NO: 29009 - DNA, 40 bp, Homo sapiens
ttaatattaaagaccatgaaaatctctttataaaatgaaa

SEQ ID NO: 29010 - DNA, 40 bp, Homo sapiens
ttcattttataaagagattttcatggtctttaatattaat

SEQ ID NO: 29011 - DNA, 40 bp, Homo sapiens
attaatattaaagaccatgaaaatctctttataaaatgaa

SEQ ID NO: 29012 - DNA, 40 bp, Homo sapiens
tcattttataaagagattttcatggtctttaatattaatc

SEQ ID NO: 29013 - DNA, 40 bp, Homo sapiens
gattaatattaaagaccatgaaaatctctttataaaatga

SEQ ID NO: 29014 - DNA, 40 bp, Homo sapiens
cattttataaagagattttcatggtctttaatattaatct

SEQ ID NO: 29015 - DNA, 40 bp, Homo sapiens
agattaatattaaagaccatgaaaatctctttataaaatg

SEQ ID NO: 29016 - DNA, 40 bp, Homo sapiens
attttataaagagattttcatggtctttaatattaatcta

SEQ ID NO: 29017 - DNA, 40 bp, Homo sapiens
tagattaatattaaagaccatgaaaatctctttataaaat

SEQ ID NO: 29018 - DNA, 40 bp, Homo sapiens
ttttataaagagattttcatggtctttaatattaatctat

SEQ ID NO: 29019 - DNA, 40 bp, Homo sapiens
atagattaatattaaagaccatgaaaatctctttataaaa

SEQ ID NO: 29020 - DNA, 40 bp, Homo sapiens
tttataaagagattttcatggtctttaatattaatctatg

SEQ ID NO: 29021 - DNA, 40 bp, Homo sapiens
catagattaatattaaagaccatgaaaatctctttataaa

SEQ ID NO: 29022 - DNA, 40 bp, Homo sapiens
ttataaagagattttcatggtctttaatattaatctatgt

SEQ ID NO: 29023 - DNA, 40 bp, Homo sapiens
acatagattaatattaaagaccatgaaaatctctttataa

SEQ ID NO: 29024 - DNA, 40 bp, Homo sapiens
tataaagagattttcatggtctttaatattaatctatgta

SEQ ID NO: 29025 - DNA, 40 bp, Homo sapiens
tacatagattaatattaaagaccatgaaaatctctttata

SEQ ID NO: 29026 - DNA, 40 bp, Homo sapiens
ataaagagattttcatggtctttaatattaatctatgtat

SEQ ID NO: 29027 - DNA, 40 bp, Homo sapiens
atacatagattaatattaaagaccatgaaaatctctttat

SEQ ID NO: 29028 - DNA, 40 bp, Homo sapiens
taaagagattttcatggtctttaatattaatctatgtata

SEQ ID NO: 29029 - DNA, 40 bp, Homo sapiens
tatacatagattaatattaaagaccatgaaaatctcttta

SEQ ID NO: 29030 - DNA, 40 bp, Homo sapiens
aaagagattttcatggtctttaatattaatctatgtataa

SEQ ID NO: 29031 - DNA, 40 bp, Homo sapiens
ttatacatagattaatattaaagaccatgaaaatctcttt

SEQ ID NO: 29032 - DNA, 40 bp, Homo sapiens
aagagattttcatggtctttaatattaatctatgtataaa

SEQ ID NO: 29033 - DNA, 40 bp, Homo sapiens
tttatacatagattaatattaaagaccatgaaaatctctt

SEQ ID NO: 29034 - DNA, 40 bp, Homo sapiens
agagattttcatggtctttaatattaatctatgtataaag

SEQ ID NO: 29035 - DNA, 40 bp, Homo sapiens
ctttatacatagattaatattaaagaccatgaaaatctct

SEQ ID NO: 29036 - DNA, 40 bp, Homo sapiens
gagattttcatggtctttaatattaatctatgtataaagt

SEQ ID NO: 29037 - DNA, 40 bp, Homo sapiens
actttatacatagattaatattaaagaccatgaaaatctc

SEQ ID NO: 29038 - DNA, 40 bp, Homo sapiens
agattttcatggtctttaatattaatctatgtataaagtc

SEQ ID NO: 29039 - DNA, 40 bp, Homo sapiens
gactttatacatagattaatattaaagaccatgaaaatct

SEQ ID NO: 29040 - DNA, 40 bp, Homo sapiens
gattttcatggtctttaatattaatctatgtataaagtcc

SEQ ID NO: 29041 - DNA, 40 bp, Homo sapiens
ggactttatacatagattaatattaaagaccatgaaaatc

SEQ ID NO: 29042 - DNA, 40 bp, Homo sapiens
attttcatggtctttaatattaatctatgtataaagtcct

SEQ ID NO: 29043 - DNA, 40 bp, Homo sapiens
aggactttatacatagattaatattaaagaccatgaaaat

SEQ ID NO: 29044 - DNA, 40 bp, Homo sapiens
ttttcatggtctttaatattaatctatgtataaagtcctg

SEQ ID NO: 29045 - DNA, 40 bp, Homo sapiens
caggactttatacatagattaatattaaagaccatgaaaa

SEQ ID NO: 29046 - DNA, 40 bp, Homo sapiens
tttcatggtctttaatattaatctatgtataaagtcctgt

SEQ ID NO: 29047 - DNA, 40 bp, Homo sapiens
acaggactttatacatagattaatattaaagaccatgaaa

SEQ ID NO: 29048 - DNA, 40 bp, Homo sapiens
ttcatggtctttaatattaatctatgtataaagtcctgta

SEQ ID NO: 29049 - DNA, 40 bp, Homo sapiens
tacaggactttatacatagattaatattaaagaccatgaa

SEQ ID NO: 29050 - DNA, 40 bp, Homo sapiens
tcatggtctttaatattaatctatgtataaagtcctgtat

SEQ ID NO: 29051 - DNA, 40 bp, Homo sapiens
atacaggactttatacatagattaatattaaagaccatga

SEQ ID NO: 29052 - DNA, 40 bp, Homo sapiens
catggtctttaatattaatctatgtataaagtcctgtatg

SEQ ID NO: 29053 - DNA, 40 bp, Homo sapiens
catacaggactttatacatagattaatattaaagaccatg

SEQ ID NO: 29054 - DNA, 40 bp, Homo sapiens
atggtctttaatattaatctatgtataaagtcctgtatgc

SEQ ID NO: 29055 - DNA, 40 bp, Homo sapiens
gcatacaggactttatacatagattaatattaaagaccat

SEQ ID NO: 29056 - DNA, 40 bp, Homo sapiens
tggtctttaatattaatctatgtataaagtcctgtatgca

SEQ ID NO: 29057 - DNA, 40 bp, Homo sapiens
tgcatacaggactttatacatagattaatattaaagacca

SEQ ID NO: 29058 - DNA, 40 bp, Homo sapiens
ggtctttaatattaatctatgtataaagtcctgtatgcag

SEQ ID NO: 29059 - DNA, 40 bp, Homo sapiens
ctgcatacaggactttatacatagattaatattaaagacc

SEQ ID NO: 29060 - DNA, 40 bp, Homo sapiens
gtctttaatattaatctatgtataaagtcctgtatgcagt

SEQ ID NO: 29061 - DNA, 40 bp, Homo sapiens
actgcatacaggactttatacatagattaatattaaagac

SEQ ID NO: 29062 - DNA, 40 bp, Homo sapiens
tctttaatattaatctatgtataaagtcctgtatgcagtt

SEQ ID NO: 29063 - DNA, 40 bp, Homo sapiens
aactgcatacaggactttatacatagattaatattaaaga

SEQ ID NO: 29064 - DNA, 40 bp, Homo sapiens
ctttaatattaatctatgtataaagtcctgtatgcagttt

SEQ ID NO: 29065 - DNA, 40 bp, Homo sapiens
aaactgcatacaggactttatacatagattaatattaaag

SEQ ID NO: 29066 - DNA, 40 bp, Homo sapiens
tttaatattaatctatgtataaagtcctgtatgcagtttt

SEQ ID NO: 29067 - DNA, 40 bp, Homo sapiens
aaaactgcatacaggactttatacatagattaatattaaa

SEQ ID NO: 29068 - DNA, 40 bp, Homo sapiens
ttaatattaatctatgtataaagtcctgtatgcagtttta

SEQ ID NO: 29069 - DNA, 40 bp, Homo sapiens
taaaactgcatacaggactttatacatagattaatattaa

SEQ ID NO: 29070 - DNA, 40 bp, Homo sapiens
taatattaatctatgtataaagtcctgtatgcagttttac

SEQ ID NO: 29071 - DNA, 40 bp, Homo sapiens
gtaaaactgcatacaggactttatacatagattaatatta

SEQ ID NO: 29072 - DNA, 40 bp, Homo sapiens
aatattaatctatgtataaagtcctgtatgcagttttacc

SEQ ID NO: 29073 - DNA, 40 bp, Homo sapiens
ggtaaaactgcatacaggactttatacatagattaatatt

SEQ ID NO: 29074 - DNA, 40 bp, Homo sapiens
atattaatctatgtataaagtcctgtatgcagttttacct

SEQ ID NO: 29075 - DNA, 40 bp, Homo sapiens
aggtaaaactgcatacaggactttatacatagattaatat

SEQ ID NO: 29076 - DNA, 40 bp, Homo sapiens
tattaatctatgtataaagtcctgtatgcagttttaccta

SEQ ID NO: 29077 - DNA, 40 bp, Homo sapiens
taggtaaaactgcatacaggactttatacatagattaata

SEQ ID NO: 29078 - DNA, 40 bp, Homo sapiens
attaatctatgtataaagtcctgtatgcagttttacctac

SEQ ID NO: 29079 - DNA, 40 bp, Homo sapiens
gtaggtaaaactgcatacaggactttatacatagattaat

SEQ ID NO: 29080 - DNA, 40 bp, Homo sapiens
ttaatctatgtataaagtcctgtatgcagttttacctact

SEQ ID NO: 29081 - DNA, 40 bp, Homo sapiens
agtaggtaaaactgcatacaggactttatacatagattaa

SEQ ID NO: 29082 - DNA, 40 bp, Homo sapiens
taatctatgtataaagtcctgtatgcagttttacctactt

SEQ ID NO: 29083 - DNA, 40 bp, Homo sapiens
aagtaggtaaaactgcatacaggactttatacatagatta

SEQ ID NO: 29084 - DNA, 40 bp, Homo sapiens
aatctatgtataaagtcctgtatgcagttttacctacttt

SEQ ID NO: 29085 - DNA, 40 bp, Homo sapiens
aaagtaggtaaaactgcatacaggactttatacatagatt

SEQ ID NO: 29086 - DNA, 40 bp, Homo sapiens
atctatgtataaagtcctgtatgcagttttacctactttc

SEQ ID NO: 29087 - DNA, 40 bp, Homo sapiens
gaaagtaggtaaaactgcatacaggactttatacatagat

SEQ ID NO: 29088 - DNA, 40 bp, Homo sapiens
tctatgtataaagtcctgtatgcagttttacctactttca

SEQ ID NO: 29089 - DNA, 40 bp, Homo sapiens
tgaaagtaggtaaaactgcatacaggactttatacataga

SEQ ID NO: 29090 - DNA, 40 bp, Homo sapiens
ctatgtataaagtcctgtatgcagttttacctactttcac

SEQ ID NO: 29091 - DNA, 40 bp, Homo sapiens
gtgaaagtaggtaaaactgcatacaggactttatacatag

SEQ ID NO: 29092 - DNA, 40 bp, Homo sapiens
tatgtataaagtcctgtatgcagttttacctactttcaca

SEQ ID NO: 29093 - DNA, 40 bp, Homo sapiens
tgtgaaagtaggtaaaactgcatacaggactttatacata

SEQ ID NO: 29094 - DNA, 40 bp, Homo sapiens
atgtataaagtcctgtatgcagttttacctactttcacag

SEQ ID NO: 29095 - DNA, 40 bp, Homo sapiens
ctgtgaaagtaggtaaaactgcatacaggactttatacat

SEQ ID NO: 29096 - DNA, 40 bp, Homo sapiens
tgtataaagtcctgtatgcagttttacctactttcacagc

SEQ ID NO: 29097 - DNA, 40 bp, Homo sapiens
gctgtgaaagtaggtaaaactgcatacaggactttataca

SEQ ID NO: 29098 - DNA, 40 bp, Homo sapiens
gtataaagtcctgtatgcagttttacctactttcacagct

SEQ ID NO: 29099 - DNA, 40 bp, Homo sapiens
agctgtgaaagtaggtaaaactgcatacaggactttatac

SEQ ID NO: 29100 - DNA, 40 bp, Homo sapiens
tataaagtcctgtatgcagttttacctactttcacagctg

SEQ ID NO: 29101 - DNA, 40 bp, Homo sapiens
cagctgtgaaagtaggtaaaactgcatacaggactttata

SEQ ID NO: 29102 - DNA, 40 bp, Homo sapiens
ataaagtcctgtatgcagttttacctactttcacagctga

SEQ ID NO: 29103 - DNA, 40 bp, Homo sapiens
tcagctgtgaaagtaggtaaaactgcatacaggactttat

SEQ ID NO: 29104 - DNA, 40 bp, Homo sapiens
taaagtcctgtatgcagttttacctactttcacagctgaa

SEQ ID NO: 29105 - DNA, 40 bp, Homo sapiens
ttcagctgtgaaagtaggtaaaactgcatacaggacttta

SEQ ID NO: 29106 - DNA, 40 bp, Homo sapiens
aaagtcctgtatgcagttttacctactttcacagctgaag

SEQ ID NO: 29107 - DNA, 40 bp, Homo sapiens
cttcagctgtgaaagtaggtaaaactgcatacaggacttt

SEQ ID NO: 29108 - DNA, 40 bp, Homo sapiens
aagtcctgtatgcagttttacctactttcacagctgaagg

SEQ ID NO: 29109 - DNA, 40 bp, Homo sapiens
ccttcagctgtgaaagtaggtaaaactgcatacaggactt

(The sequence listing continues in the following parts.)
